United States Patent Application Publication US 2024/0000970 A1 - sequence listing, part 2

SEQ ID NO: 28978 - RNA, 21 nt, Artificial Sequence
  LRRK2 RNA guide
uaccaagacaaugaggauaaa

SEQ ID NO: 28979 - RNA, 21 nt, Artificial Sequence
  LRRK2 RNA guide
uauccucauugucuugguagg

SEQ ID NO: 28980 - RNA, 21 nt, Artificial Sequence
  LRRK2 RNA guide
uauuuauccucauugucuugg

SEQ ID NO: 28981 - RNA, 21 nt, Artificial Sequence
  LRRK2 RNA guide
ucauugucuugguaggagcug

SEQ ID NO: 28982 - RNA, 21 nt, Artificial Sequence
  LRRK2 RNA guide
uccacagcuccuaccaagaca

SEQ ID NO: 28983 - RNA, 21 nt, Artificial Sequence
  LRRK2 RNA guide
uccuaccaagacaaugaggau

SEQ ID NO: 28984 - RNA, 21 nt, Artificial Sequence
  LRRK2 RNA guide
uccucauugucuugguaggag

SEQ ID NO: 28985 - RNA, 21 nt, Artificial Sequence
  LRRK2 RNA guide
uuauccucauugucuugguag

SEQ ID NO: 28986 - RNA, 21 nt, Artificial Sequence
  LRRK2 RNA guide
uuccacagcuccuaccaagac

SEQ ID NO: 28987 - RNA, 21 nt, Artificial Sequence
  LRRK2 RNA guide
uugucuugguaggagcugugg

SEQ ID NO: 28988 - RNA, 21 nt, Artificial Sequence
  LRRK2 RNA guide
uuuauccucauugucuuggua

SEQ ID NO: 28989 - RNA, 22 nt, Artificial Sequence
  LRRK2 RNA guide
aauuccacagcuccuaccaaga

SEQ ID NO: 28990 - RNA, 22 nt, Artificial Sequence
  LRRK2 RNA guide
acagcuccuaccaagacaauga

SEQ ID NO: 28991 - RNA, 22 nt, Artificial Sequence
  LRRK2 RNA guide
accaagacaaugaggauaaaua

SEQ ID NO: 28992 - RNA, 22 nt, Artificial Sequence
  LRRK2 RNA guide
agaauuccacagcuccuaccaa

SEQ ID NO: 28993 - RNA, 22 nt, Artificial Sequence
  LRRK2 RNA guide
agcuccuaccaagacaaugagg

SEQ ID NO: 28994 - RNA, 22 nt, Artificial Sequence
  LRRK2 RNA guide
auauuuauccucauugucuugg

SEQ ID NO: 28995 - RNA, 22 nt, Artificial Sequence
  LRRK2 RNA guide
auccucauugucuugguaggag

SEQ ID NO: 28996 - RNA, 22 nt, Artificial Sequence
  LRRK2 RNA guide
auuccacagcuccuaccaagac

SEQ ID NO: 28997 - RNA, 22 nt, Artificial Sequence
  LRRK2 RNA guide
auugucuugguaggagcugugg

SEQ ID NO: 28998 - RNA, 22 nt, Artificial Sequence
  LRRK2 RNA guide
auuuauccucauugucuuggua

SEQ ID NO: 28999 - RNA, 22 nt, Artificial Sequence
  LRRK2 RNA guide
caagacaaugaggauaaauauc

SEQ ID NO: 29000 - RNA, 22 nt, Artificial Sequence
  LRRK2 RNA guide
cacagcuccuaccaagacaaug

SEQ ID NO: 29001 - RNA, 22 nt, Artificial Sequence
  LRRK2 RNA guide
cagcuccuaccaagacaaugag

SEQ ID NO: 29002 - RNA, 22 nt, Artificial Sequence
  LRRK2 RNA guide
cauugucuugguaggagcugug

SEQ ID NO: 29003 - RNA, 22 nt, Artificial Sequence
  LRRK2 RNA guide
ccaagacaaugaggauaaauau

SEQ ID NO: 29004 - RNA, 22 nt, Artificial Sequence
  LRRK2 RNA guide
ccacagcuccuaccaagacaau

SEQ ID NO: 29005 - RNA, 22 nt, Artificial Sequence
  LRRK2 RNA guide
ccuaccaagacaaugaggauaa

SEQ ID NO: 29006 - RNA, 22 nt, Artificial Sequence
  LRRK2 RNA guide
ccucauugucuugguaggagcu

SEQ ID NO: 29007 - RNA, 22 nt, Artificial Sequence
  LRRK2 RNA guide
cuaccaagacaaugaggauaaa

SEQ ID NO: 29008 - RNA, 22 nt, Artificial Sequence
  LRRK2 RNA guide
cucauugucuugguaggagcug

SEQ ID NO: 29009 - RNA, 22 nt, Artificial Sequence
  LRRK2 RNA guide
cuccuaccaagacaaugaggau

SEQ ID NO: 29010 - RNA, 22 nt, Artificial Sequence
  LRRK2 RNA guide
gaauuccacagcuccuaccaag

SEQ ID NO: 29011 - RNA, 22 nt, Artificial Sequence
  LRRK2 RNA guide
gauauuuauccucauugucuug

SEQ ID NO: 29012 - RNA, 22 nt, Artificial Sequence
  LRRK2 RNA guide
gcuccuaccaagacaaugagga

SEQ ID NO: 29013 - RNA, 22 nt, Artificial Sequence
  LRRK2 RNA guide
uaccaagacaaugaggauaaau

SEQ ID NO: 29014 - RNA, 22 nt, Artificial Sequence
  LRRK2 RNA guide
uagaauuccacagcuccuacca

SEQ ID NO: 29015 - RNA, 22 nt, Artificial Sequence
  LRRK2 RNA guide
uauccucauugucuugguagga

SEQ ID NO: 29016 - RNA, 22 nt, Artificial Sequence
  LRRK2 RNA guide
uauuuauccucauugucuuggu

SEQ ID NO: 29017 - RNA, 22 nt, Artificial Sequence
  LRRK2 RNA guide
ucauugucuugguaggagcugu

SEQ ID NO: 29018 - RNA, 22 nt, Artificial Sequence
  LRRK2 RNA guide
uccacagcuccuaccaagacaa

SEQ ID NO: 29019 - RNA, 22 nt, Artificial Sequence
  LRRK2 RNA guide
uccuaccaagacaaugaggaua

SEQ ID NO: 29020 - RNA, 22 nt, Artificial Sequence
  LRRK2 RNA guide
uccucauugucuugguaggagc

SEQ ID NO: 29021 - RNA, 22 nt, Artificial Sequence
  LRRK2 RNA guide
uuauccucauugucuugguagg

SEQ ID NO: 29022 - RNA, 22 nt, Artificial Sequence
  LRRK2 RNA guide
uuccacagcuccuaccaagaca

SEQ ID NO: 29023 - RNA, 22 nt, Artificial Sequence
  LRRK2 RNA guide
uugucuugguaggagcugugga

SEQ ID NO: 29024 - RNA, 22 nt, Artificial Sequence
  LRRK2 RNA guide
uuuauccucauugucuugguag

SEQ ID NO: 29025 - RNA, 20 nt, Artificial Sequence
  LRRK2 RNA guide
aaagauccuuucuccuucag

SEQ ID NO: 29026 - RNA, 20 nt, Artificial Sequence
  LRRK2 RNA guide
aacuaaagauccuuucuccu

SEQ ID NO: 29027 - RNA, 20 nt, Artificial Sequence
  LRRK2 RNA guide
aagauccuuucuccuucagc

SEQ ID NO: 29028 - RNA, 20 nt, Artificial Sequence
  LRRK2 RNA guide
aaggagaaaggaucuuuagu

SEQ ID NO: 29029 - RNA, 20 nt, Artificial Sequence
  LRRK2 RNA guide
aaggaucuuuaguuaugaug

SEQ ID NO: 29030 - RNA, 20 nt, Artificial Sequence
  LRRK2 RNA guide
acuaaagauccuuucuccuu

SEQ ID NO: 29031 - RNA, 20 nt, Artificial Sequence
  LRRK2 RNA guide
agaaaggaucuuuaguuaug

SEQ ID NO: 29032 - RNA, 20 nt, Artificial Sequence
  LRRK2 RNA guide
agauccuuucuccuucagca

SEQ ID NO: 29033 - RNA, 20 nt, Artificial Sequence
  LRRK2 RNA guide
aggagaaaggaucuuuaguu

SEQ ID NO: 29034 - RNA, 20 nt, Artificial Sequence
  LRRK2 RNA guide
aggaucuuuaguuaugaugg

SEQ ID NO: 29035 - RNA, 20 nt, Artificial Sequence
  LRRK2 RNA guide
aguugcugaaggagaaagga

SEQ ID NO: 29036 - RNA, 20 nt, Artificial Sequence
  LRRK2 RNA guide
auaacuaaagauccuuucuc

SEQ ID NO: 29037 - RNA, 20 nt, Artificial Sequence
  LRRK2 RNA guide
auccaucauaacuaaagauc

SEQ ID NO: 29038 - RNA, 20 nt, Artificial Sequence
  LRRK2 RNA guide
caguugcugaaggagaaagg

SEQ ID NO: 29039 - RNA, 20 nt, Artificial Sequence
  LRRK2 RNA guide
cauaacuaaagauccuuucu

SEQ ID NO: 29040 - RNA, 20 nt, Artificial Sequence
  LRRK2 RNA guide
caucauaacuaaagauccuu

SEQ ID NO: 29041 - RNA, 20 nt, Artificial Sequence
  LRRK2 RNA guide
ccaucauaacuaaagauccu

SEQ ID NO: 29042 - RNA, 20 nt, Artificial Sequence
  LRRK2 RNA guide
cuaaagauccuuucuccuuc

SEQ ID NO: 29043 - RNA, 20 nt, Artificial Sequence
  LRRK2 RNA guide
cugaaggagaaaggaucuuu

SEQ ID NO: 29044 - RNA, 20 nt, Artificial Sequence
  LRRK2 RNA guide
gaaaggaucuuuaguuauga

SEQ ID NO: 29045 - RNA, 20 nt, Artificial Sequence
  LRRK2 RNA guide
gaaggagaaaggaucuuuag

SEQ ID NO: 29046 - RNA, 20 nt, Artificial Sequence
  LRRK2 RNA guide
gagaaaggaucuuuaguuau

SEQ ID NO: 29047 - RNA, 20 nt, Artificial Sequence
  LRRK2 RNA guide
gauccuuucuccuucagcaa

SEQ ID NO: 29048 - RNA, 20 nt, Artificial Sequence
  LRRK2 RNA guide
gaucuuuaguuaugauggau

SEQ ID NO: 29049 - RNA, 20 nt, Artificial Sequence
  LRRK2 RNA guide
gcugaaggagaaaggaucuu

SEQ ID NO: 29050 - RNA, 20 nt, Artificial Sequence
  LRRK2 RNA guide
ggagaaaggaucuuuaguua

SEQ ID NO: 29051 - RNA, 20 nt, Artificial Sequence
  LRRK2 RNA guide
ggaucuuuaguuaugaugga

SEQ ID NO: 29052 - RNA, 20 nt, Artificial Sequence
  LRRK2 RNA guide
guugcugaaggagaaaggau

SEQ ID NO: 29053 - RNA, 20 nt, Artificial Sequence
  LRRK2 RNA guide
uaaagauccuuucuccuuca

SEQ ID NO: 29054 - RNA, 20 nt, Artificial Sequence
  LRRK2 RNA guide
uaacuaaagauccuuucucc

SEQ ID NO: 29055 - RNA, 20 nt, Artificial Sequence
  LRRK2 RNA guide
ucaguugcugaaggagaaag

SEQ ID NO: 29056 - RNA, 20 nt, Artificial Sequence
  LRRK2 RNA guide
ucauaacuaaagauccuuuc

SEQ ID NO: 29057 - RNA, 20 nt, Artificial Sequence
  LRRK2 RNA guide
uccaucauaacuaaagaucc

SEQ ID NO: 29058 - RNA, 20 nt, Artificial Sequence
  LRRK2 RNA guide
ugaaggagaaaggaucuuua

SEQ ID NO: 29059 - RNA, 20 nt, Artificial Sequence
  LRRK2 RNA guide
ugcugaaggagaaaggaucu

SEQ ID NO: 29060 - RNA, 20 nt, Artificial Sequence
  LRRK2 RNA guide
uucaguugcugaaggagaaa

SEQ ID NO: 29061 - RNA, 20 nt, Artificial Sequence
  LRRK2 RNA guide
uugcugaaggagaaaggauc

SEQ ID NO: 29062 - RNA, 20 nt, Artificial Sequence
  LRRK2 RNA guide
uuucaguugcugaaggagaa

SEQ ID NO: 29063 - RNA, 21 nt, Artificial Sequence
  LRRK2 RNA guide
aaagauccuuucuccuucagc

SEQ ID NO: 29064 - RNA, 21 nt, Artificial Sequence
  LRRK2 RNA guide
aacuaaagauccuuucuccuu

SEQ ID NO: 29065 - RNA, 21 nt, Artificial Sequence
  LRRK2 RNA guide
aagauccuuucuccuucagca

SEQ ID NO: 29066 - RNA, 21 nt, Artificial Sequence
  LRRK2 RNA guide
aaggagaaaggaucuuuaguu

SEQ ID NO: 29067 - RNA, 21 nt, Artificial Sequence
  LRRK2 RNA guide
aaggaucuuuaguuaugaugg

SEQ ID NO: 29068 - RNA, 21 nt, Artificial Sequence
  LRRK2 RNA guide
acuaaagauccuuucuccuuc

SEQ ID NO: 29069 - RNA, 21 nt, Artificial Sequence
  LRRK2 RNA guide
agauccuuucuccuucagcaa

SEQ ID NO: 29070 - RNA, 21 nt, Artificial Sequence
  LRRK2 RNA guide
aggagaaaggaucuuuaguua

SEQ ID NO: 29071 - RNA, 21 nt, Artificial Sequence
  LRRK2 RNA guide
aggaucuuuaguuaugaugga

SEQ ID NO: 29072 - RNA, 21 nt, Artificial Sequence
  LRRK2 RNA guide
aguugcugaaggagaaaggau

SEQ ID NO: 29073 - RNA, 21 nt, Artificial Sequence
  LRRK2 RNA guide
auaacuaaagauccuuucucc

SEQ ID NO: 29074 - RNA, 21 nt, Artificial Sequence
  LRRK2 RNA guide
auccaucauaacuaaagaucc

SEQ ID NO: 29075 - RNA, 21 nt, Artificial Sequence
  LRRK2 RNA guide
caguugcugaaggagaaagga

SEQ ID NO: 29076 - RNA, 21 nt, Artificial Sequence
  LRRK2 RNA guide
cauaacuaaagauccuuucuc

SEQ ID NO: 29077 - RNA, 21 nt, Artificial Sequence
  LRRK2 RNA guide
ccaucauaacuaaagauccuu

SEQ ID NO: 29078 - RNA, 21 nt, Artificial Sequence
  LRRK2 RNA guide
cuaaagauccuuucuccuuca

SEQ ID NO: 29079 - RNA, 21 nt, Artificial Sequence
  LRRK2 RNA guide
cugaaggagaaaggaucuuua

SEQ ID NO: 29080 - RNA, 21 nt, Artificial Sequence
  LRRK2 RNA guide
gaaggagaaaggaucuuuagu

SEQ ID NO: 29081 - RNA, 21 nt, Artificial Sequence
  LRRK2 RNA guide
gagaaaggaucuuuaguuaug

SEQ ID NO: 29082 - RNA, 21 nt, Artificial Sequence
  LRRK2 RNA guide
gauccuuucuccuucagcaac

SEQ ID NO: 29083 - RNA, 21 nt, Artificial Sequence
  LRRK2 RNA guide
gcugaaggagaaaggaucuuu

SEQ ID NO: 29084 - RNA, 21 nt, Artificial Sequence
  LRRK2 RNA guide
ggagaaaggaucuuuaguuau

SEQ ID NO: 29085 - RNA, 21 nt, Artificial Sequence
  LRRK2 RNA guide
ggaucuuuaguuaugauggau

SEQ ID NO: 29086 - RNA, 21 nt, Artificial Sequence
  LRRK2 RNA guide
guugcugaaggagaaaggauc

SEQ ID NO: 29087 - RNA, 21 nt, Artificial Sequence
  LRRK2 RNA guide
uaaagauccuuucuccuucag

SEQ ID NO: 29088 - RNA, 21 nt, Artificial Sequence
  LRRK2 RNA guide
uaacuaaagauccuuucuccu

SEQ ID NO: 29089 - RNA, 21 nt, Artificial Sequence
  LRRK2 RNA guide
ucaguugcugaaggagaaagg

SEQ ID NO: 29090 - RNA, 21 nt, Artificial Sequence
  LRRK2 RNA guide
uccaucauaacuaaagauccu

SEQ ID NO: 29091 - RNA, 21 nt, Artificial Sequence
  LRRK2 RNA guide
ugaaggagaaaggaucuuuag

SEQ ID NO: 29092 - RNA, 21 nt, Artificial Sequence
  LRRK2 RNA guide
ugcugaaggagaaaggaucuu

SEQ ID NO: 29093 - RNA, 21 nt, Artificial Sequence
  LRRK2 RNA guide
uucaguugcugaaggagaaag

SEQ ID NO: 29094 - RNA, 21 nt, Artificial Sequence
  LRRK2 RNA guide
uugcugaaggagaaaggaucu

SEQ ID NO: 29095 - RNA, 21 nt, Artificial Sequence
  LRRK2 RNA guide
uuucaguugcugaaggagaaa

SEQ ID NO: 29096 - RNA, 21 nt, Artificial Sequence
  LRRK2 RNA guide
uuuucaguugcugaaggagaa

SEQ ID NO: 29097 - RNA, 22 nt, Artificial Sequence
  LRRK2 RNA guide
aaagauccuuucuccuucagca

SEQ ID NO: 29098 - RNA, 22 nt, Artificial Sequence
  LRRK2 RNA guide
aaaggaucuuuaguuaugaugg

SEQ ID NO: 29099 - RNA, 22 nt, Artificial Sequence
  LRRK2 RNA guide
aacuaaagauccuuucuccuuc

SEQ ID NO: 29100 - RNA, 22 nt, Artificial Sequence
  LRRK2 RNA guide
aagauccuuucuccuucagcaa

SEQ ID NO: 29101 - RNA, 22 nt, Artificial Sequence
  LRRK2 RNA guide
aaggagaaaggaucuuuaguua

SEQ ID NO: 29102 - RNA, 22 nt, Artificial Sequence
  LRRK2 RNA guide
aaggaucuuuaguuaugaugga

SEQ ID NO: 29103 - RNA, 22 nt, Artificial Sequence
  LRRK2 RNA guide
acuaaagauccuuucuccuuca

SEQ ID NO: 29104 - RNA, 22 nt, Artificial Sequence
  LRRK2 RNA guide
agauccuuucuccuucagcaac

SEQ ID NO: 29105 - RNA, 22 nt, Artificial Sequence
  LRRK2 RNA guide
aggagaaaggaucuuuaguuau

SEQ ID NO: 29106 - RNA, 22 nt, Artificial Sequence
  LRRK2 RNA guide
aggaucuuuaguuaugauggau

SEQ ID NO: 29107 - RNA, 22 nt, Artificial Sequence
  LRRK2 RNA guide
aguugcugaaggagaaaggauc

SEQ ID NO: 29108 - RNA, 22 nt, Artificial Sequence
  LRRK2 RNA guide
auaacuaaagauccuuucuccu

SEQ ID NO: 29109 - RNA, 22 nt, Artificial Sequence
  LRRK2 RNA guide
auccaucauaacuaaagauccu

SEQ ID NO: 29110 - RNA, 22 nt, Artificial Sequence
  LRRK2 RNA guide
caguugcugaaggagaaaggau

SEQ ID NO: 29111 - RNA, 22 nt, Artificial Sequence
  LRRK2 RNA guide
cauaacuaaagauccuuucucc

SEQ ID NO: 29112 - RNA, 22 nt, Artificial Sequence
  LRRK2 RNA guide
caucauaacuaaagauccuuuc

SEQ ID NO: 29113 - RNA, 22 nt, Artificial Sequence
  LRRK2 RNA guide
ccaucauaacuaaagauccuuu

SEQ ID NO: 29114 - RNA, 22 nt, Artificial Sequence
  LRRK2 RNA guide
cuaaagauccuuucuccuucag

SEQ ID NO: 29115 - RNA, 22 nt, Artificial Sequence
  LRRK2 RNA guide
cugaaggagaaaggaucuuuag

SEQ ID NO: 29116 - RNA, 22 nt, Artificial Sequence
  LRRK2 RNA guide
cuuuucaguugcugaaggagaa

SEQ ID NO: 29117 - RNA, 22 nt, Artificial Sequence
  LRRK2 RNA guide
gaaaggaucuuuaguuaugaug

SEQ ID NO: 29118 - RNA, 22 nt, Artificial Sequence
  LRRK2 RNA guide
gaaggagaaaggaucuuuaguu

SEQ ID NO: 29119 - RNA, 22 nt, Artificial Sequence
  LRRK2 RNA guide
gagaaaggaucuuuaguuauga

SEQ ID NO: 29120 - RNA, 22 nt, Artificial Sequence
  LRRK2 RNA guide
gauccuuucuccuucagcaacu

SEQ ID NO: 29121 - RNA, 22 nt, Artificial Sequence
  LRRK2 RNA guide
gcugaaggagaaaggaucuuua

SEQ ID NO: 29122 - RNA, 22 nt, Artificial Sequence
  LRRK2 RNA guide
ggagaaaggaucuuuaguuaug

SEQ ID NO: 29123 - RNA, 22 nt, Artificial Sequence
  LRRK2 RNA guide
ggaucuuuaguuaugauggaua

SEQ ID NO: 29124 - RNA, 22 nt, Artificial Sequence
  LRRK2 RNA guide
guugcugaaggagaaaggaucu

SEQ ID NO: 29125 - RNA, 22 nt, Artificial Sequence
  LRRK2 RNA guide
uaaagauccuuucuccuucagc

SEQ ID NO: 29126 - RNA, 22 nt, Artificial Sequence
  LRRK2 RNA guide
uaacuaaagauccuuucuccuu

SEQ ID NO: 29127 - RNA, 22 nt, Artificial Sequence
  LRRK2 RNA guide
uauccaucauaacuaaagaucc

SEQ ID NO: 29128 - RNA, 22 nt, Artificial Sequence
  LRRK2 RNA guide
ucaguugcugaaggagaaagga

SEQ ID NO: 29129 - RNA, 22 nt, Artificial Sequence
  LRRK2 RNA guide
ucauaacuaaagauccuuucuc

SEQ ID NO: 29130 - RNA, 22 nt, Artificial Sequence
  LRRK2 RNA guide
uccaucauaacuaaagauccuu

SEQ ID NO: 29131 - RNA, 22 nt, Artificial Sequence
  LRRK2 RNA guide
ugaaggagaaaggaucuuuagu

SEQ ID NO: 29132 - RNA, 22 nt, Artificial Sequence
  LRRK2 RNA guide
ugcugaaggagaaaggaucuuu

SEQ ID NO: 29133 - RNA, 22 nt, Artificial Sequence
  LRRK2 RNA guide
uucaguugcugaaggagaaagg

SEQ ID NO: 29134 - RNA, 22 nt, Artificial Sequence
  LRRK2 RNA guide
uugcugaaggagaaaggaucuu

SEQ ID NO: 29135 - RNA, 22 nt, Artificial Sequence
  LRRK2 RNA guide
uuucaguugcugaaggagaaag

SEQ ID NO: 29136 - RNA, 22 nt, Artificial Sequence
  LRRK2 RNA guide
uuuucaguugcugaaggagaaa

SEQ ID NO: 29137 - RNA, 20 nt, Artificial Sequence
  LRRK2 RNA guide
aaaggagcuuuaguuaugau

SEQ ID NO: 29138 - RNA, 20 nt, Artificial Sequence
  LRRK2 RNA guide
aagccuaggguggcagauau

SEQ ID NO: 29139 - RNA, 20 nt, Artificial Sequence
  LRRK2 RNA guide
aaggagcuuuaguuaugaug

SEQ ID NO: 29140 - RNA, 20 nt, Artificial Sequence
  LRRK2 RNA guide
acaaaaauaucugccacccu

SEQ ID NO: 29141 - RNA, 20 nt, Artificial Sequence
  LRRK2 RNA guide
agccuaggguggcagauauu

SEQ ID NO: 29142 - RNA, 20 nt, Artificial Sequence
  LRRK2 RNA guide
agcuuuaguuaugauggaca

SEQ ID NO: 29143 - RNA, 20 nt, Artificial Sequence
  LRRK2 RNA guide
aggagcuuuaguuaugaugg

SEQ ID NO: 29144 - RNA, 20 nt, Artificial Sequence
  LRRK2 RNA guide
aggguggcagauauuuuugu

SEQ ID NO: 29145 - RNA, 20 nt, Artificial Sequence
  LRRK2 RNA guide
augauggacaaaaauaucug

SEQ ID NO: 29146 - RNA, 20 nt, Artificial Sequence
  LRRK2 RNA guide
auggacaaaaauaucugcca

SEQ ID NO: 29147 - RNA, 20 nt, Artificial Sequence
  LRRK2 RNA guide
cagauauuuuuguccaucau

SEQ ID NO: 29148 - RNA, 20 nt, Artificial Sequence
  LRRK2 RNA guide
ccuaggguggcagauauuuu

SEQ ID NO: 29149 - RNA, 20 nt, Artificial Sequence
  LRRK2 RNA guide
cuuuaguuaugauggacaaa

SEQ ID NO: 29150 - RNA, 20 nt, Artificial Sequence
  LRRK2 RNA guide
gaaaggagcuuuaguuauga

SEQ ID NO: 29151 - RNA, 20 nt, Artificial Sequence
  LRRK2 RNA guide
gacaaaaauaucugccaccc

SEQ ID NO: 29152 - RNA, 20 nt, Artificial Sequence
  LRRK2 RNA guide
gagcuuuaguuaugauggac

SEQ ID NO: 29153 - RNA, 20 nt, Artificial Sequence
  LRRK2 RNA guide
gauggacaaaaauaucugcc

SEQ ID NO: 29154 - RNA, 20 nt, Artificial Sequence
  LRRK2 RNA guide
gcagauauuuuuguccauca

SEQ ID NO: 29155 - RNA, 20 nt, Artificial Sequence
  LRRK2 RNA guide
gccuaggguggcagauauuu

SEQ ID NO: 29156 - RNA, 20 nt, Artificial Sequence
  LRRK2 RNA guide
gcuuuaguuaugauggacaa

SEQ ID NO: 29157 - RNA, 20 nt, Artificial Sequence
  LRRK2 RNA guide
ggacaaaaauaucugccacc

SEQ ID NO: 29158 - RNA, 20 nt, Artificial Sequence
  LRRK2 RNA guide
ggagcuuuaguuaugaugga

SEQ ID NO: 29159 - RNA, 20 nt, Artificial Sequence
  LRRK2 RNA guide
ggcagauauuuuuguccauc

SEQ ID NO: 29160 - RNA, 20 nt, Artificial Sequence
  LRRK2 RNA guide
ggguggcagauauuuuuguc

SEQ ID NO: 29161 - RNA, 20 nt, Artificial Sequence
  LRRK2 RNA guide
gguggcagauauuuuugucc

SEQ ID NO: 29162 - RNA, 20 nt, Artificial Sequence
  LRRK2 RNA guide
guggcagauauuuuugucca

SEQ ID NO: 29163 - RNA, 20 nt, Artificial Sequence
  LRRK2 RNA guide
uaggguggcagauauuuuug

SEQ ID NO: 29164 - RNA, 20 nt, Artificial Sequence
  LRRK2 RNA guide
ugauggacaaaaauaucugc

SEQ ID NO: 29165 - RNA, 20 nt, Artificial Sequence
  LRRK2 RNA guide
uggacaaaaauaucugccac

SEQ ID NO: 29166 - RNA, 20 nt, Artificial Sequence
  LRRK2 RNA guide
uggcagauauuuuuguccau

SEQ ID NO: 29167 - RNA, 20 nt, Artificial Sequence
  LRRK2 RNA guide
uguccaucauaacuaaagcu

SEQ ID NO: 29168 - RNA, 20 nt, Artificial Sequence
  LRRK2 RNA guide
uuguccaucauaacuaaagc

SEQ ID NO: 29169 - RNA, 20 nt, Artificial Sequence
  LRRK2 RNA guide
uuuguccaucauaacuaaag

SEQ ID NO: 29170 - RNA, 21 nt, Artificial Sequence
  LRRK2 RNA guide
aaaggagcuuuaguuaugaug

SEQ ID NO: 29171 - RNA, 21 nt, Artificial Sequence
  LRRK2 RNA guide
aagccuaggguggcagauauu

SEQ ID NO: 29172 - RNA, 21 nt, Artificial Sequence
  LRRK2 RNA guide
aaggagcuuuaguuaugaugg

SEQ ID NO: 29173 - RNA, 21 nt, Artificial Sequence
  LRRK2 RNA guide
acaaaaauaucugccacccua

SEQ ID NO: 29174 - RNA, 21 nt, Artificial Sequence
  LRRK2 RNA guide
agaaaggagcuuuaguuauga

SEQ ID NO: 29175 - RNA, 21 nt, Artificial Sequence
  LRRK2 RNA guide
agccuaggguggcagauauuu

SEQ ID NO: 29176 - RNA, 21 nt, Artificial Sequence
  LRRK2 RNA guide
agcuuuaguuaugauggacaa

SEQ ID NO: 29177 - RNA, 21 nt, Artificial Sequence
  LRRK2 RNA guide
aggagcuuuaguuaugaugga

SEQ ID NO: 29178 - RNA, 21 nt, Artificial Sequence
  LRRK2 RNA guide
aggguggcagauauuuuuguc

SEQ ID NO: 29179 - RNA, 21 nt, Artificial Sequence
  LRRK2 RNA guide
augauggacaaaaauaucugc

SEQ ID NO: 29180 - RNA, 21 nt, Artificial Sequence
  LRRK2 RNA guide
auggacaaaaauaucugccac

SEQ ID NO: 29181 - RNA, 21 nt, Artificial Sequence
  LRRK2 RNA guide
ccuaggguggcagauauuuuu

SEQ ID NO: 29182 - RNA, 21 nt, Artificial Sequence
  LRRK2 RNA guide
cuaggguggcagauauuuuug

SEQ ID NO: 29183 - RNA, 21 nt, Artificial Sequence
  LRRK2 RNA guide
gaaaggagcuuuaguuaugau

SEQ ID NO: 29184 - RNA, 21 nt, Artificial Sequence
  LRRK2 RNA guide
gaagccuaggguggcagauau

SEQ ID NO: 29185 - RNA, 21 nt, Artificial Sequence
  LRRK2 RNA guide
gacaaaaauaucugccacccu

SEQ ID NO: 29186 - RNA, 21 nt, Artificial Sequence
  LRRK2 RNA guide
gagcuuuaguuaugauggaca

SEQ ID NO: 29187 - RNA, 21 nt, Artificial Sequence
  LRRK2 RNA guide
gauggacaaaaauaucugcca

SEQ ID NO: 29188 - RNA, 21 nt, Artificial Sequence
  LRRK2 RNA guide
gcagauauuuuuguccaucau

SEQ ID NO: 29189 - RNA, 21 nt, Artificial Sequence
  LRRK2 RNA guide
gccuaggguggcagauauuuu

SEQ ID NO: 29190 - RNA, 21 nt, Artificial Sequence
  LRRK2 RNA guide
gcuuuaguuaugauggacaaa

SEQ ID NO: 29191 - RNA, 21 nt, Artificial Sequence
  LRRK2 RNA guide
ggacaaaaauaucugccaccc

SEQ ID NO: 29192 - RNA, 21 nt, Artificial Sequence
  LRRK2 RNA guide
ggagcuuuaguuaugauggac

SEQ ID NO: 29193 - RNA, 21 nt, Artificial Sequence
  LRRK2 RNA guide
ggcagauauuuuuguccauca

SEQ ID NO: 29194 - RNA, 21 nt, Artificial Sequence
  LRRK2 RNA guide
ggguggcagauauuuuugucc

SEQ ID NO: 29195 - RNA, 21 nt, Artificial Sequence
  LRRK2 RNA guide
gguggcagauauuuuugucca

SEQ ID NO: 29196 - RNA, 21 nt, Artificial Sequence
  LRRK2 RNA guide
guggcagauauuuuuguccau

SEQ ID NO: 29197 - RNA, 21 nt, Artificial Sequence
  LRRK2 RNA guide
uaggguggcagauauuuuugu

SEQ ID NO: 29198 - RNA, 21 nt, Artificial Sequence
  LRRK2 RNA guide
ugauggacaaaaauaucugcc

SEQ ID NO: 29199 - RNA, 21 nt, Artificial Sequence
  LRRK2 RNA guide
uggacaaaaauaucugccacc

SEQ ID NO: 29200 - RNA, 21 nt, Artificial Sequence
  LRRK2 RNA guide
uggcagauauuuuuguccauc

SEQ ID NO: 29201 - RNA, 21 nt, Artificial Sequence
  LRRK2 RNA guide
uguccaucauaacuaaagcuc

SEQ ID NO: 29202 - RNA, 21 nt, Artificial Sequence
  LRRK2 RNA guide
uuguccaucauaacuaaagcu

SEQ ID NO: 29203 - RNA, 21 nt, Artificial Sequence
  LRRK2 RNA guide
uuuguccaucauaacuaaagc

SEQ ID NO: 29204 - RNA, 22 nt, Artificial Sequence
  LRRK2 RNA guide
aaaggagcuuuaguuaugaugg

SEQ ID NO: 29205 - RNA, 22 nt, Artificial Sequence
  LRRK2 RNA guide
aagccuaggguggcagauauuu

SEQ ID NO: 29206 - RNA, 22 nt, Artificial Sequence
  LRRK2 RNA guide
aaggagcuuuaguuaugaugga

SEQ ID NO: 29207 - RNA, 22 nt, Artificial Sequence
  LRRK2 RNA guide
acaaaaauaucugccacccuag

SEQ ID NO: 29208 - RNA, 22 nt, Artificial Sequence
  LRRK2 RNA guide
agaaaggagcuuuaguuaugau

SEQ ID NO: 29209 - RNA, 22 nt, Artificial Sequence
  LRRK2 RNA guide
agccuaggguggcagauauuuu

SEQ ID NO: 29210 - RNA, 22 nt, Artificial Sequence
  LRRK2 RNA guide
agcuuuaguuaugauggacaaa

SEQ ID NO: 29211 - RNA, 22 nt, Artificial Sequence
  LRRK2 RNA guide
aggagcuuuaguuaugauggac

SEQ ID NO: 29212 - RNA, 22 nt, Artificial Sequence
  LRRK2 RNA guide
aggguggcagauauuuuugucc

SEQ ID NO: 29213 - RNA, 22 nt, Artificial Sequence
  LRRK2 RNA guide
augauggacaaaaauaucugcc

SEQ ID NO: 29214 - RNA, 22 nt, Artificial Sequence
  LRRK2 RNA guide
auggacaaaaauaucugccacc

SEQ ID NO: 29215 - RNA, 22 nt, Artificial Sequence
  LRRK2 RNA guide
ccuaggguggcagauauuuuug

SEQ ID NO: 29216 - RNA, 22 nt, Artificial Sequence
  LRRK2 RNA guide
cuaggguggcagauauuuuugu

SEQ ID NO: 29217 - RNA, 22 nt, Artificial Sequence
  LRRK2 RNA guide
gaaaggagcuuuaguuaugaug

SEQ ID NO: 29218 - RNA, 22 nt, Artificial Sequence
  LRRK2 RNA guide
gaagccuaggguggcagauauu

SEQ ID NO: 29219 - RNA, 22 nt, Artificial Sequence
  LRRK2 RNA guide
gacaaaaauaucugccacccua

SEQ ID NO: 29220 - RNA, 22 nt, Artificial Sequence
  LRRK2 RNA guide
gagaaaggagcuuuaguuauga

SEQ ID NO: 29221 - RNA, 22 nt, Artificial Sequence
  LRRK2 RNA guide
gagcuuuaguuaugauggacaa

SEQ ID NO: 29222 - RNA, 22 nt, Artificial Sequence
  LRRK2 RNA guide
gauggacaaaaauaucugccac

SEQ ID NO: 29223 - RNA, 22 nt, Artificial Sequence
  LRRK2 RNA guide
gcagauauuuuuguccaucaua

SEQ ID NO: 29224 - RNA, 22 nt, Artificial Sequence
  LRRK2 RNA guide
gccuaggguggcagauauuuuu

SEQ ID NO: 29225 - RNA, 22 nt, Artificial Sequence
  LRRK2 RNA guide
gcuuuaguuaugauggacaaaa

SEQ ID NO: 29226 - RNA, 22 nt, Artificial Sequence
  LRRK2 RNA guide
ggaagccuaggguggcagauau

SEQ ID NO: 29227 - RNA, 22 nt, Artificial Sequence
  LRRK2 RNA guide
ggacaaaaauaucugccacccu

SEQ ID NO: 29228 - RNA, 22 nt, Artificial Sequence
  LRRK2 RNA guide
ggagcuuuaguuaugauggaca

SEQ ID NO: 29229 - RNA, 22 nt, Artificial Sequence
  LRRK2 RNA guide
ggcagauauuuuuguccaucau

SEQ ID NO: 29230 - RNA, 22 nt, Artificial Sequence
  LRRK2 RNA guide
ggguggcagauauuuuugucca

SEQ ID NO: 29231 - RNA, 22 nt, Artificial Sequence
  LRRK2 RNA guide
gguggcagauauuuuuguccau

SEQ ID NO: 29232 - RNA, 22 nt, Artificial Sequence
  LRRK2 RNA guide
guggcagauauuuuuguccauc

SEQ ID NO: 29233 - RNA, 22 nt, Artificial Sequence
  LRRK2 RNA guide
uaggguggcagauauuuuuguc

SEQ ID NO: 29234 - RNA, 22 nt, Artificial Sequence
  LRRK2 RNA guide
uaugauggacaaaaauaucugc

SEQ ID NO: 29235 - RNA, 22 nt, Artificial Sequence
  LRRK2 RNA guide
ugauggacaaaaauaucugcca

SEQ ID NO: 29236 - RNA, 22 nt, Artificial Sequence
  LRRK2 RNA guide
uggacaaaaauaucugccaccc

SEQ ID NO: 29237 - RNA, 22 nt, Artificial Sequence
  LRRK2 RNA guide
uggcagauauuuuuguccauca

SEQ ID NO: 29238 - RNA, 22 nt, Artificial Sequence
  LRRK2 RNA guide
uguccaucauaacuaaagcucc

SEQ ID NO: 29239 - RNA, 22 nt, Artificial Sequence
  LRRK2 RNA guide
uuguccaucauaacuaaagcuc

SEQ ID NO: 29240 - RNA, 22 nt, Artificial Sequence
  LRRK2 RNA guide
uuuguccaucauaacuaaagcu

SEQ ID NO: 29241 - RNA, 22 nt, Artificial Sequence
  LRRK2 RNA guide
uuuuguccaucauaacuaaagc

SEQ ID NO: 29242 - RNA, 20 nt, Artificial Sequence
  LRRK2 RNA guide
aaaaaugucugccacccuag

SEQ ID NO: 29243 - RNA, 20 nt, Artificial Sequence
  LRRK2 RNA guide
aaaaugucugccacccuagg

SEQ ID NO: 29244 - RNA, 20 nt, Artificial Sequence
  LRRK2 RNA guide
aaaugucugccacccuaggc

SEQ ID NO: 29245 - RNA, 20 nt, Artificial Sequence
  LRRK2 RNA guide
aagccuaggguggcagacau

SEQ ID NO: 29246 - RNA, 20 nt, Artificial Sequence
  LRRK2 RNA guide
aaugucugccacccuaggcu

SEQ ID NO: 29247 - RNA, 20 nt, Artificial Sequence
  LRRK2 RNA guide
aauuuggaagccuagggugg

SEQ ID NO: 29248 - RNA, 20 nt, Artificial Sequence
  LRRK2 RNA guide
agccuaggguggcagacauu

SEQ ID NO: 29249 - RNA, 20 nt, Artificial Sequence
  LRRK2 RNA guide
aggguggcagacauuuuuau

SEQ ID NO: 29250 - RNA, 20 nt, Artificial Sequence
  LRRK2 RNA guide
auaaaaaugucugccacccu

SEQ ID NO: 29251 - RNA, 20 nt, Artificial Sequence
  LRRK2 RNA guide
augauggauaaaaaugucug

SEQ ID NO: 29252 - RNA, 20 nt, Artificial Sequence
  LRRK2 RNA guide
auggauaaaaaugucugcca

SEQ ID NO: 29253 - RNA, 20 nt, Artificial Sequence
  LRRK2 RNA guide
augucugccacccuaggcuu

SEQ ID NO: 29254 - RNA, 20 nt, Artificial Sequence
  LRRK2 RNA guide
auuuggaagccuaggguggc

SEQ ID NO: 29255 - RNA, 20 nt, Artificial Sequence
  LRRK2 RNA guide
cagacauuuuuauccaucau

SEQ ID NO: 29256 - RNA, 20 nt, Artificial Sequence
  LRRK2 RNA guide
ccuaggguggcagacauuuu

SEQ ID NO: 29257 - RNA, 20 nt, Artificial Sequence
  LRRK2 RNA guide
cuaggguggcagacauuuuu

SEQ ID NO: 29258 - RNA, 20 nt, Artificial Sequence
  LRRK2 RNA guide
gaagccuaggguggcagaca

SEQ ID NO: 29259 - RNA, 20 nt, Artificial Sequence
  LRRK2 RNA guide
gauaaaaaugucugccaccc

SEQ ID NO: 29260 - RNA, 20 nt, Artificial Sequence
  LRRK2 RNA guide
gauggauaaaaaugucugcc

SEQ ID NO: 29261 - RNA, 20 nt, Artificial Sequence
  LRRK2 RNA guide
gcagacauuuuuauccauca

SEQ ID NO: 29262 - RNA, 20 nt, Artificial Sequence
  LRRK2 RNA guide
gccuaggguggcagacauuu

SEQ ID NO: 29263 - RNA, 20 nt, Artificial Sequence
  LRRK2 RNA guide
gcuuuaguuaugauggauaa

SEQ ID NO: 29264 - RNA, 20 nt, Artificial Sequence
  LRRK2 RNA guide
ggaagccuaggguggcagac

SEQ ID NO: 29265 - RNA, 20 nt, Artificial Sequence
  LRRK2 RNA guide
ggauaaaaaugucugccacc

SEQ ID NO: 29266 - RNA, 20 nt, Artificial Sequence
  LRRK2 RNA guide
ggcagacauuuuuauccauc

SEQ ID NO: 29267 - RNA, 20 nt, Artificial Sequence
  LRRK2 RNA guide
ggguggcagacauuuuuauc

SEQ ID NO: 29268 - RNA, 20 nt, Artificial Sequence
  LRRK2 RNA guide
gguggcagacauuuuuaucc

SEQ ID NO: 29269 - RNA, 20 nt, Artificial Sequence
  LRRK2 RNA guide
guggcagacauuuuuaucca

SEQ ID NO: 29270 - RNA, 20 nt, Artificial Sequence
  LRRK2 RNA guide
uaaaaaugucugccacccua

SEQ ID NO: 29271 - RNA, 20 nt, Artificial Sequence
  LRRK2 RNA guide
uaggguggcagacauuuuua

SEQ ID NO: 29272 - RNA, 20 nt, Artificial Sequence
  LRRK2 RNA guide
ugauggauaaaaaugucugc

SEQ ID NO: 29273 - RNA, 20 nt, Artificial Sequence
  LRRK2 RNA guide
uggauaaaaaugucugccac

SEQ ID NO: 29274 - RNA, 20 nt, Artificial Sequence
  LRRK2 RNA guide
uggcagacauuuuuauccau

SEQ ID NO: 29275 - RNA, 20 nt, Artificial Sequence
  LRRK2 RNA guide
ugucugccacccuaggcuuc

SEQ ID NO: 29276 - RNA, 20 nt, Artificial Sequence
  LRRK2 RNA guide
uuggaagccuaggguggcag

SEQ ID NO: 29277 - RNA, 21 nt, Artificial Sequence
  LRRK2 RNA guide
aaaaaugucugccacccuagg

SEQ ID NO: 29278 - RNA, 21 nt, Artificial Sequence
  LRRK2 RNA guide
aaaaugucugccacccuaggc

SEQ ID NO: 29279 - RNA, 21 nt, Artificial Sequence
  LRRK2 RNA guide
aaaugucugccacccuaggcu

SEQ ID NO: 29280 - RNA, 21 nt, Artificial Sequence
  LRRK2 RNA guide
aagccuaggguggcagacauu

SEQ ID NO: 29281 - RNA, 21 nt, Artificial Sequence
  LRRK2 RNA guide
aaugucugccacccuaggcuu

SEQ ID NO: 29282 - RNA, 21 nt, Artificial Sequence
  LRRK2 RNA guide
aauuuggaagccuaggguggc

SEQ ID NO: 29283 - RNA, 21 nt, Artificial Sequence
  LRRK2 RNA guide
agccuaggguggcagacauuu

SEQ ID NO: 29284 - RNA, 21 nt, Artificial Sequence
  LRRK2 RNA guide
aggguggcagacauuuuuauc

SEQ ID NO: 29285 - RNA, 21 nt, Artificial Sequence
  LRRK2 RNA guide
auaaaaaugucugccacccua

SEQ ID NO: 29286 - RNA, 21 nt, Artificial Sequence
  LRRK2 RNA guide
augauggauaaaaaugucugc

SEQ ID NO: 29287 - RNA, 21 nt, Artificial Sequence
  LRRK2 RNA guide
auggauaaaaaugucugccac

SEQ ID NO: 29288 - RNA, 21 nt, Artificial Sequence
  LRRK2 RNA guide
augucugccacccuaggcuuc

SEQ ID NO: 29289 - RNA, 21 nt, Artificial Sequence
  LRRK2 RNA guide
auuuggaagccuaggguggca

SEQ ID NO: 29290 - RNA, 21 nt, Artificial Sequence
  LRRK2 RNA guide
ccuaggguggcagacauuuuu

SEQ ID NO: 29291 - RNA, 21 nt, Artificial Sequence
  LRRK2 RNA guide
cuaggguggcagacauuuuua

SEQ ID NO: 29292 - RNA, 21 nt, Artificial Sequence
  LRRK2 RNA guide
gaagccuaggguggcagacau

SEQ ID NO: 29293 - RNA, 21 nt, Artificial Sequence
  LRRK2 RNA guide
gauaaaaaugucugccacccu

SEQ ID NO: 29294 - RNA, 21 nt, Artificial Sequence
  LRRK2 RNA guide
gauggauaaaaaugucugcca

SEQ ID NO: 29295 - RNA, 21 nt, Artificial Sequence
  LRRK2 RNA guide
gcagacauuuuuauccaucau

SEQ ID NO: 29296 - RNA, 21 nt, Artificial Sequence
  LRRK2 RNA guide
gccuaggguggcagacauuuu

SEQ ID NO: 29297 - RNA, 21 nt, Artificial Sequence
  LRRK2 RNA guide
ggaagccuaggguggcagaca

SEQ ID NO: 29298 - RNA, 21 nt, Artificial Sequence
  LRRK2 RNA guide
ggauaaaaaugucugccaccc

SEQ ID NO: 29299 - RNA, 21 nt, Artificial Sequence
  LRRK2 RNA guide
ggcagacauuuuuauccauca

SEQ ID NO: 29300 - RNA, 21 nt, Artificial Sequence
  LRRK2 RNA guide
ggguggcagacauuuuuaucc

SEQ ID NO: 29301 - RNA, 21 nt, Artificial Sequence
  LRRK2 RNA guide
gguggcagacauuuuuaucca

SEQ ID NO: 29302 - RNA, 21 nt, Artificial Sequence
  LRRK2 RNA guide
guggcagacauuuuuauccau

SEQ ID NO: 29303 - RNA, 21 nt, Artificial Sequence
  LRRK2 RNA guide
uaaaaaugucugccacccuag

SEQ ID NO: 29304 - RNA, 21 nt, Artificial Sequence
  LRRK2 RNA guide
uaauuuggaagccuagggugg

SEQ ID NO: 29305 - RNA, 21 nt, Artificial Sequence
  LRRK2 RNA guide
uaggguggcagacauuuuuau

SEQ ID NO: 29306 - RNA, 21 nt, Artificial Sequence
  LRRK2 RNA guide
ugauggauaaaaaugucugcc

SEQ ID NO: 29307 - RNA, 21 nt, Artificial Sequence
  LRRK2 RNA guide
uggaagccuaggguggcagac

SEQ ID NO: 29308 - RNA, 21 nt, Artificial Sequence
  LRRK2 RNA guide
uggauaaaaaugucugccacc

SEQ ID NO: 29309 - RNA, 21 nt, Artificial Sequence
  LRRK2 RNA guide
uggcagacauuuuuauccauc

SEQ ID NO: 29310 - RNA, 21 nt, Artificial Sequence
  LRRK2 RNA guide
ugucugccacccuaggcuucc

SEQ ID NO: 29311 - RNA, 21 nt, Artificial Sequence
  LRRK2 RNA guide
uuuggaagccuaggguggcag

SEQ ID NO: 29312 - RNA, 22 nt, Artificial Sequence
  LRRK2 RNA guide
aaaaaugucugccacccuaggc

SEQ ID NO: 29313 - RNA, 22 nt, Artificial Sequence
  LRRK2 RNA guide
aaaaugucugccacccuaggcu

SEQ ID NO: 29314 - RNA, 22 nt, Artificial Sequence
  LRRK2 RNA guide
aaaugucugccacccuaggcuu

SEQ ID NO: 29315 - RNA, 22 nt, Artificial Sequence
  LRRK2 RNA guide
aagccuaggguggcagacauuu

SEQ ID NO: 29316 - RNA, 22 nt, Artificial Sequence
  LRRK2 RNA guide
aaugucugccacccuaggcuuc

SEQ ID NO: 29317 - RNA, 22 nt, Artificial Sequence
  LRRK2 RNA guide
aauuuggaagccuaggguggca

SEQ ID NO: 29318 - RNA, 22 nt, Artificial Sequence
  LRRK2 RNA guide
agccuaggguggcagacauuuu

SEQ ID NO: 29319 - RNA, 22 nt, Artificial Sequence
  LRRK2 RNA guide
aggguggcagacauuuuuaucc

SEQ ID NO: 29320 - RNA, 22 nt, Artificial Sequence
  LRRK2 RNA guide
auaaaaaugucugccacccuag

SEQ ID NO: 29321 - RNA, 22 nt, Artificial Sequence
  LRRK2 RNA guide
auaauuuggaagccuagggugg

SEQ ID NO: 29322 - RNA, 22 nt, Artificial Sequence
  LRRK2 RNA guide
augauggauaaaaaugucugcc

SEQ ID NO: 29323 - RNA, 22 nt, Artificial Sequence
  LRRK2 RNA guide
auggauaaaaaugucugccacc

SEQ ID NO: 29324 - RNA, 22 nt, Artificial Sequence
  LRRK2 RNA guide
augucugccacccuaggcuucc

SEQ ID NO: 29325 - RNA, 22 nt, Artificial Sequence
  LRRK2 RNA guide
auuuggaagccuaggguggcag

SEQ ID NO: 29326 - RNA, 22 nt, Artificial Sequence
  LRRK2 RNA guide
ccuaggguggcagacauuuuua

SEQ ID NO: 29327 - RNA, 22 nt, Artificial Sequence
  LRRK2 RNA guide
cuaggguggcagacauuuuuau

SEQ ID NO: 29328 - RNA, 22 nt, Artificial Sequence
  LRRK2 RNA guide
gaagccuaggguggcagacauu

SEQ ID NO: 29329 - RNA, 22 nt, Artificial Sequence
  LRRK2 RNA guide
gagcuuuaguuaugauggauaa

SEQ ID NO: 29330 - RNA, 22 nt, Artificial Sequence
  LRRK2 RNA guide
gauaaaaaugucugccacccua

SEQ ID NO: 29331 - RNA, 22 nt, Artificial Sequence
  LRRK2 RNA guide
gauggauaaaaaugucugccac

SEQ ID NO: 29332 - RNA, 22 nt, Artificial Sequence
  LRRK2 RNA guide
gcagacauuuuuauccaucaua

SEQ ID NO: 29333 - RNA, 22 nt, Artificial Sequence
  LRRK2 RNA guide
gccuaggguggcagacauuuuu

SEQ ID NO: 29334 - RNA, 22 nt, Artificial Sequence
  LRRK2 RNA guide
ggaagccuaggguggcagacau

SEQ ID NO: 29335 - RNA, 22 nt, Artificial Sequence
  LRRK2 RNA guide
ggauaaaaaugucugccacccu

SEQ ID NO: 29336 - RNA, 22 nt, Artificial Sequence
  LRRK2 RNA guide
ggcagacauuuuuauccaucau

SEQ ID NO: 29337 - RNA, 22 nt, Artificial Sequence
  LRRK2 RNA guide
ggguggcagacauuuuuaucca

SEQ ID NO: 29338 - RNA, 22 nt, Artificial Sequence
  LRRK2 RNA guide
gguggcagacauuuuuauccau

SEQ ID NO: 29339 - RNA, 22 nt, Artificial Sequence
  LRRK2 RNA guide
guggcagacauuuuuauccauc

SEQ ID NO: 29340 - RNA, 22 nt, Artificial Sequence
  LRRK2 RNA guide
uaaaaaugucugccacccuagg

SEQ ID NO: 29341 - RNA, 22 nt, Artificial Sequence
  LRRK2 RNA guide
uaauuuggaagccuaggguggc

SEQ ID NO: 29342 - RNA, 22 nt, Artificial Sequence
  LRRK2 RNA guide
uaggguggcagacauuuuuauc

SEQ ID NO: 29343 - RNA, 22 nt, Artificial Sequence
  LRRK2 RNA guide
uaugauggauaaaaaugucugc

SEQ ID NO: 29344 - RNA, 22 nt, Artificial Sequence
  LRRK2 RNA guide
ugauggauaaaaaugucugcca

SEQ ID NO: 29345 - RNA, 22 nt, Artificial Sequence
  LRRK2 RNA guide
uggaagccuaggguggcagaca

SEQ ID NO: 29346 - RNA, 22 nt, Artificial Sequence
  LRRK2 RNA guide
uggauaaaaaugucugccaccc

SEQ ID NO: 29347 - RNA, 22 nt, Artificial Sequence
  LRRK2 RNA guide
uggcagacauuuuuauccauca

SEQ ID NO: 29348 - RNA, 22 nt, Artificial Sequence
  LRRK2 RNA guide
ugucugccacccuaggcuucca

SEQ ID NO: 29349 - RNA, 22 nt, Artificial Sequence
  LRRK2 RNA guide
uuggaagccuaggguggcagac

SEQ ID NO: 29350 - RNA, 22 nt, Artificial Sequence
  LRRK2 RNA guide
uuuggaagccuaggguggcaga

SEQ ID NO: 29351 - RNA, 20 nt, Artificial Sequence
  LRRK2 RNA guide
aagcauaauuuggaagccua

SEQ ID NO: 29352 - RNA, 20 nt, Artificial Sequence
  LRRK2 RNA guide
acccuaggcuuccaaauuau

SEQ ID NO: 29353 - RNA, 20 nt, Artificial Sequence
  LRRK2 RNA guide
agcauaauuuggaagccuag

SEQ ID NO: 29354 - RNA, 20 nt, Artificial Sequence
  LRRK2 RNA guide
aggcuuccaaauuaugcuua

SEQ ID NO: 29355 - RNA, 20 nt, Artificial Sequence
  LRRK2 RNA guide
cacccuaggcuuccaaauua

SEQ ID NO: 29356 - RNA, 20 nt, Artificial Sequence
  LRRK2 RNA guide
ccacccuaggcuuccaaauu

SEQ ID NO: 29357 - RNA, 20 nt, Artificial Sequence
  LRRK2 RNA guide
cccuaggcuuccaaauuaug

SEQ ID NO: 29358 - RNA, 20 nt, Artificial Sequence
  LRRK2 RNA guide
ccuaggcuuccaaauuaugc

SEQ ID NO: 29359 - RNA, 20 nt, Artificial Sequence
  LRRK2 RNA guide
cuaggcuuccaaauuaugcu

SEQ ID NO: 29360 - RNA, 20 nt, Artificial Sequence
  LRRK2 RNA guide
gcauaauuuggaagccuagg

SEQ ID NO: 29361 - RNA, 20 nt, Artificial Sequence
  LRRK2 RNA guide
gcuauguaaacaauuuaagc

SEQ ID NO: 29362 - RNA, 20 nt, Artificial Sequence
  LRRK2 RNA guide
gcuuccaaauuaugcuuaaa

SEQ ID NO: 29363 - RNA, 20 nt, Artificial Sequence
  LRRK2 RNA guide
ggcuuccaaauuaugcuuaa

SEQ ID NO: 29364 - RNA, 20 nt, Artificial Sequence
  LRRK2 RNA guide
uaagcauaauuuggaagccu

SEQ ID NO: 29365 - RNA, 20 nt, Artificial Sequence
  LRRK2 RNA guide
uaggcuuccaaauuaugcuu

SEQ ID NO: 29366 - RNA, 20 nt, Artificial Sequence
  LRRK2 RNA guide
ugccacccuaggcuuccaaa

SEQ ID NO: 29367 - RNA, 20 nt, Artificial Sequence
  LRRK2 RNA guide
uuaagcauaauuuggaagcc

SEQ ID NO: 29368 - RNA, 20 nt, Artificial Sequence
  LRRK2 RNA guide
uuuaagcauaauuuggaagc

SEQ ID NO: 29369 - RNA, 21 nt, Artificial Sequence
  LRRK2 RNA guide
aagcauaauuuggaagccuag

SEQ ID NO: 29370 - RNA, 21 nt, Artificial Sequence
  LRRK2 RNA guide
acccuaggcuuccaaauuaug

SEQ ID NO: 29371 - RNA, 21 nt, Artificial Sequence
  LRRK2 RNA guide
agcauaauuuggaagccuagg

SEQ ID NO: 29372 - RNA, 21 nt, Artificial Sequence
  LRRK2 RNA guide
aggcuuccaaauuaugcuuaa

SEQ ID NO: 29373 - RNA, 21 nt, Artificial Sequence
  LRRK2 RNA guide
cacccuaggcuuccaaauuau

SEQ ID NO: 29374 - RNA, 21 nt, Artificial Sequence
  LRRK2 RNA guide
ccacccuaggcuuccaaauua

SEQ ID NO: 29375 - RNA, 21 nt, Artificial Sequence
  LRRK2 RNA guide
cccuaggcuuccaaauuaugc

SEQ ID NO: 29376 - RNA, 21 nt, Artificial Sequence
  LRRK2 RNA guide
ccuaggcuuccaaauuaugcu

SEQ ID NO: 29377 - RNA, 21 nt, Artificial Sequence
  LRRK2 RNA guide
cuaggcuuccaaauuaugcuu

SEQ ID NO: 29378 - RNA, 21 nt, Artificial Sequence
  LRRK2 RNA guide
cugccacccuaggcuuccaaa

SEQ ID NO: 29379 - RNA, 21 nt, Artificial Sequence
  LRRK2 RNA guide
gcauaauuuggaagccuaggg

SEQ ID NO: 29380 - RNA, 21 nt, Artificial Sequence
  LRRK2 RNA guide
gccacccuaggcuuccaaauu

SEQ ID NO: 29381 - RNA, 21 nt, Artificial Sequence
  LRRK2 RNA guide
ggcuuccaaauuaugcuuaaa

SEQ ID NO: 29382 - RNA, 21 nt, Artificial Sequence
  LRRK2 RNA guide
uaagcauaauuuggaagccua

SEQ ID NO: 29383 - RNA, 21 nt, Artificial Sequence
  LRRK2 RNA guide
uaggcuuccaaauuaugcuua

SEQ ID NO: 29384 - RNA, 21 nt, Artificial Sequence
  LRRK2 RNA guide
ugccacccuaggcuuccaaau

SEQ ID NO: 29385 - RNA, 21 nt, Artificial Sequence
  LRRK2 RNA guide
uuaagcauaauuuggaagccu

SEQ ID NO: 29386 - RNA, 21 nt, Artificial Sequence
  LRRK2 RNA guide
uuuaagcauaauuuggaagcc

SEQ ID NO: 29387 - RNA, 22 nt, Artificial Sequence
  LRRK2 RNA guide
aagcauaauuuggaagccuagg

SEQ ID NO: 29388 - RNA, 22 nt, Artificial Sequence
  LRRK2 RNA guide
acccuaggcuuccaaauuaugc

SEQ ID NO: 29389 - RNA, 22 nt, Artificial Sequence
  LRRK2 RNA guide
agcauaauuuggaagccuaggg

SEQ ID NO: 29390 - RNA, 22 nt, Artificial Sequence
  LRRK2 RNA guide
aggcuuccaaauuaugcuuaaa

SEQ ID NO: 29391 - RNA, 22 nt, Artificial Sequence
  LRRK2 RNA guide
auuuaagcauaauuuggaagcc

SEQ ID NO: 29392 - RNA, 22 nt, Artificial Sequence
  LRRK2 RNA guide
cacccuaggcuuccaaauuaug

SEQ ID NO: 29393 - RNA, 22 nt, Artificial Sequence
  LRRK2 RNA guide
ccacccuaggcuuccaaauuau

SEQ ID NO: 29394 - RNA, 22 nt, Artificial Sequence
  LRRK2 RNA guide
cccuaggcuuccaaauuaugcu

SEQ ID NO: 29395 - RNA, 22 nt, Artificial Sequence
  LRRK2 RNA guide
ccuaggcuuccaaauuaugcuu

SEQ ID NO: 29396 - RNA, 22 nt, Artificial Sequence
  LRRK2 RNA guide
cuaggcuuccaaauuaugcuua

SEQ ID NO: 29397 - RNA, 22 nt, Artificial Sequence
  LRRK2 RNA guide
cugccacccuaggcuuccaaau

SEQ ID NO: 29398 - RNA, 22 nt, Artificial Sequence
  LRRK2 RNA guide
gcauaauuuggaagccuagggu

SEQ ID NO: 29399 - RNA, 22 nt, Artificial Sequence
  LRRK2 RNA guide
gccacccuaggcuuccaaauua

SEQ ID NO: 29400 - RNA, 22 nt, Artificial Sequence
  LRRK2 RNA guide
ggcuuccaaauuaugcuuaaau

SEQ ID NO: 29401 - RNA, 22 nt, Artificial Sequence
  LRRK2 RNA guide
gugguaagcuauguaaacaauu

SEQ ID NO: 29402 - RNA, 22 nt, Artificial Sequence
  LRRK2 RNA guide
uaagcauaauuuggaagccuag

SEQ ID NO: 29403 - RNA, 22 nt, Artificial Sequence
  LRRK2 RNA guide
uaggcuuccaaauuaugcuuaa

SEQ ID NO: 29404 - RNA, 22 nt, Artificial Sequence
  LRRK2 RNA guide
ucugccacccuaggcuuccaaa

SEQ ID NO: 29405 - RNA, 22 nt, Artificial Sequence
  LRRK2 RNA guide
ugccacccuaggcuuccaaauu

SEQ ID NO: 29406 - RNA, 22 nt, Artificial Sequence
  LRRK2 RNA guide
uuaagcauaauuuggaagccua

SEQ ID NO: 29407 - RNA, 22 nt, Artificial Sequence
  LRRK2 RNA guide
uuuaagcauaauuuggaagccu

SEQ ID NO: 29408 - RNA, 20 nt, Artificial Sequence
  LRRK2 RNA guide
aauuguuuacauagcuuacc

SEQ ID NO: 29409 - RNA, 20 nt, Artificial Sequence
  LRRK2 RNA guide
acauagcuuaccauaauagg

SEQ ID NO: 29410 - RNA, 20 nt, Artificial Sequence
  LRRK2 RNA guide
accauaauaggaguaucagg

SEQ ID NO: 29411 - RNA, 20 nt, Artificial Sequence
  LRRK2 RNA guide
acuccuauuaugguaagcua

SEQ ID NO: 29412 - RNA, 20 nt, Artificial Sequence
  LRRK2 RNA guide
agcuuaccauaauaggagua

SEQ ID NO: 29413 - RNA, 20 nt, Artificial Sequence
  LRRK2 RNA guide
auaauaggaguaucagggcc

SEQ ID NO: 29414 - RNA, 20 nt, Artificial Sequence
  LRRK2 RNA guide
auacuccuauuaugguaagc

SEQ ID NO: 29415 - RNA, 20 nt, Artificial Sequence
  LRRK2 RNA guide
auagcuuaccauaauaggag

SEQ ID NO: 29416 - RNA, 20 nt, Artificial Sequence
  LRRK2 RNA guide
auuguuuacauagcuuacca

SEQ ID NO: 29417 - RNA, 20 nt, Artificial Sequence
  LRRK2 RNA guide
cauaauaggaguaucagggc

SEQ ID NO: 29418 - RNA, 20 nt, Artificial Sequence
  LRRK2 RNA guide
cauagcuuaccauaauagga

SEQ ID NO: 29419 - RNA, 20 nt, Artificial Sequence
  LRRK2 RNA guide
ccauaauaggaguaucaggg

SEQ ID NO: 29420 - RNA, 20 nt, Artificial Sequence
  LRRK2 RNA guide
cccugauacuccuauuaugg

SEQ ID NO: 29421 - RNA, 20 nt, Artificial Sequence
  LRRK2 RNA guide
ccuauuaugguaagcuaugu

SEQ ID NO: 29422 - RNA, 20 nt, Artificial Sequence
  LRRK2 RNA guide
ccugauacuccuauuauggu

SEQ ID NO: 29423 - RNA, 20 nt, Artificial Sequence
  LRRK2 RNA guide
cuauuaugguaagcuaugua

SEQ ID NO: 29424 - RNA, 20 nt, Artificial Sequence
  LRRK2 RNA guide
cuccuauuaugguaagcuau

SEQ ID NO: 29425 - RNA, 20 nt, Artificial Sequence
  LRRK2 RNA guide
cugauacuccuauuauggua

SEQ ID NO: 29426 - RNA, 20 nt, Artificial Sequence
  LRRK2 RNA guide
cuuaccauaauaggaguauc

SEQ ID NO: 29427 - RNA, 20 nt, Artificial Sequence
  LRRK2 RNA guide
gauacuccuauuaugguaag

SEQ ID NO: 29428 - RNA, 20 nt, Artificial Sequence
  LRRK2 RNA guide
gcccugauacuccuauuaug

SEQ ID NO: 29429 - RNA, 20 nt, Artificial Sequence
  LRRK2 RNA guide
gcuuaccauaauaggaguau

SEQ ID NO: 29430 - RNA, 20 nt, Artificial Sequence
  LRRK2 RNA guide
ggcccugauacuccuauuau

SEQ ID NO: 29431 - RNA, 20 nt, Artificial Sequence
  LRRK2 RNA guide
guauuuggcccugauacucc

SEQ ID NO: 29432 - RNA, 20 nt, Artificial Sequence
  LRRK2 RNA guide
guuuacauagcuuaccauaa

SEQ ID NO: 29433 - RNA, 20 nt, Artificial Sequence
  LRRK2 RNA guide
uacauagcuuaccauaauag

SEQ ID NO: 29434 - RNA, 20 nt, Artificial Sequence
  LRRK2 RNA guide
uaccauaauaggaguaucag

SEQ ID NO: 29435 - RNA, 20 nt, Artificial Sequence
  LRRK2 RNA guide
uacuccuauuaugguaagcu

SEQ ID NO: 29436 - RNA, 20 nt, Artificial Sequence
  LRRK2 RNA guide
uagcuuaccauaauaggagu

SEQ ID NO: 29437 - RNA, 20 nt, Artificial Sequence
  LRRK2 RNA guide
uaugguaagcuauguaaaca

SEQ ID NO: 29438 - RNA, 20 nt, Artificial Sequence
  LRRK2 RNA guide
uauuuggcccugauacuccu

SEQ ID NO: 29439 - RNA, 20 nt, Artificial Sequence
  LRRK2 RNA guide
uccuauuaugguaagcuaug

SEQ ID NO: 29440 - RNA, 20 nt, Artificial Sequence
  LRRK2 RNA guide
ugauacuccuauuaugguaa

SEQ ID NO: 29441 - RNA, 20 nt, Artificial Sequence
  LRRK2 RNA guide
uggcccugauacuccuauua

SEQ ID NO: 29442 - RNA, 20 nt, Artificial Sequence
  LRRK2 RNA guide
uguuuacauagcuuaccaua

SEQ ID NO: 29443 - RNA, 20 nt, Artificial Sequence
  LRRK2 RNA guide
uuaccauaauaggaguauca

SEQ ID NO: 29444 - RNA, 20 nt, Artificial Sequence
  LRRK2 RNA guide
uuaugguaagcuauguaaac

SEQ ID NO: 29445 - RNA, 20 nt, Artificial Sequence
  LRRK2 RNA guide
uuggcccugauacuccuauu

SEQ ID NO: 29446 - RNA, 20 nt, Artificial Sequence
  LRRK2 RNA guide
uuguuuacauagcuuaccau

SEQ ID NO: 29447 - RNA, 20 nt, Artificial Sequence
  LRRK2 RNA guide
uuuggcccugauacuccuau

SEQ ID NO: 29448 - RNA, 21 nt, Artificial Sequence
  LRRK2 RNA guide
acauagcuuaccauaauagga

SEQ ID NO: 29449 - RNA, 21 nt, Artificial Sequence
  LRRK2 RNA guide
accauaauaggaguaucaggg

SEQ ID NO: 29450 - RNA, 21 nt, Artificial Sequence
  LRRK2 RNA guide
acuccuauuaugguaagcuau

SEQ ID NO: 29451 - RNA, 21 nt, Artificial Sequence
  LRRK2 RNA guide
agcuuaccauaauaggaguau

SEQ ID NO: 29452 - RNA, 21 nt, Artificial Sequence
  LRRK2 RNA guide
auaauaggaguaucagggcca

SEQ ID NO: 29453 - RNA, 21 nt, Artificial Sequence
  LRRK2 RNA guide
auacuccuauuaugguaagcu

SEQ ID NO: 29454 - RNA, 21 nt, Artificial Sequence
  LRRK2 RNA guide
auagcuuaccauaauaggagu

SEQ ID NO: 29455 - RNA, 21 nt, Artificial Sequence
  LRRK2 RNA guide
auuuggcccugauacuccuau

SEQ ID NO: 29456 - RNA, 21 nt, Artificial Sequence
  LRRK2 RNA guide
cauaauaggaguaucagggcc

SEQ ID NO: 29457 - RNA, 21 nt, Artificial Sequence
  LRRK2 RNA guide
cauagcuuaccauaauaggag

SEQ ID NO: 29458 - RNA, 21 nt, Artificial Sequence
  LRRK2 RNA guide
ccauaauaggaguaucagggc

SEQ ID NO: 29459 - RNA, 21 nt, Artificial Sequence
  LRRK2 RNA guide
cccugauacuccuauuauggu

SEQ ID NO: 29460 - RNA, 21 nt, Artificial Sequence
  LRRK2 RNA guide
ccuauuaugguaagcuaugua

SEQ ID NO: 29461 - RNA, 21 nt, Artificial Sequence
  LRRK2 RNA guide
ccugauacuccuauuauggua

SEQ ID NO: 29462 - RNA, 21 nt, Artificial Sequence
  LRRK2 RNA guide
cuccuauuaugguaagcuaug

SEQ ID NO: 29463 - RNA, 21 nt, Artificial Sequence
  LRRK2 RNA guide
cugauacuccuauuaugguaa

SEQ ID NO: 29464 - RNA, 21 nt, Artificial Sequence
  LRRK2 RNA guide
cuuaccauaauaggaguauca

SEQ ID NO: 29465 - RNA, 21 nt, Artificial Sequence
  LRRK2 RNA guide
gauacuccuauuaugguaagc

SEQ ID NO: 29466 - RNA, 21 nt, Artificial Sequence
  LRRK2 RNA guide
gcccugauacuccuauuaugg

SEQ ID NO: 29467 - RNA, 21 nt, Artificial Sequence
  LRRK2 RNA guide
gcuuaccauaauaggaguauc

SEQ ID NO: 29468 - RNA, 21 nt, Artificial Sequence
  LRRK2 RNA guide
ggcccugauacuccuauuaug

SEQ ID NO: 29469 - RNA, 21 nt, Artificial Sequence
  LRRK2 RNA guide
gguauuuggcccugauacucc

SEQ ID NO: 29470 - RNA, 21 nt, Artificial Sequence
  LRRK2 RNA guide
guauuuggcccugauacuccu

SEQ ID NO: 29471 - RNA, 21 nt, Artificial Sequence
  LRRK2 RNA guide
uacauagcuuaccauaauagg

SEQ ID NO: 29472 - RNA, 21 nt, Artificial Sequence
  LRRK2 RNA guide
uaccauaauaggaguaucagg

SEQ ID NO: 29473 - RNA, 21 nt, Artificial Sequence
  LRRK2 RNA guide
uacuccuauuaugguaagcua

SEQ ID NO: 29474 - RNA, 21 nt, Artificial Sequence
  LRRK2 RNA guide
uagcuuaccauaauaggagua

SEQ ID NO: 29475 - RNA, 21 nt, Artificial Sequence
  LRRK2 RNA guide
uauuuggcccugauacuccua

SEQ ID NO: 29476 - RNA, 21 nt, Artificial Sequence
  LRRK2 RNA guide
uccuauuaugguaagcuaugu

SEQ ID NO: 29477 - RNA, 21 nt, Artificial Sequence
  LRRK2 RNA guide
ugauacuccuauuaugguaag

SEQ ID NO: 29478 - RNA, 21 nt, Artificial Sequence
  LRRK2 RNA guide
uggcccugauacuccuauuau

SEQ ID NO: 29479 - RNA, 21 nt, Artificial Sequence
  LRRK2 RNA guide
uuaccauaauaggaguaucag

SEQ ID NO: 29480 - RNA, 21 nt, Artificial Sequence
  LRRK2 RNA guide
uuggcccugauacuccuauua

SEQ ID NO: 29481 - RNA, 21 nt, Artificial Sequence
  LRRK2 RNA guide
uuuggcccugauacuccuauu

SEQ ID NO: 29482 - RNA, 22 nt, Artificial Sequence
  LRRK2 RNA guide
acauagcuuaccauaauaggag

SEQ ID NO: 29483 - RNA, 22 nt, Artificial Sequence
  LRRK2 RNA guide
accauaauaggaguaucagggc

SEQ ID NO: 29484 - RNA, 22 nt, Artificial Sequence
  LRRK2 RNA guide
acuccuauuaugguaagcuaug

SEQ ID NO: 29485 - RNA, 22 nt, Artificial Sequence
  LRRK2 RNA guide
agcuuaccauaauaggaguauc

SEQ ID NO: 29486 - RNA, 22 nt, Artificial Sequence
  LRRK2 RNA guide
agguauuuggcccugauacucc

SEQ ID NO: 29487 - RNA, 22 nt, Artificial Sequence
  LRRK2 RNA guide
auaauaggaguaucagggccaa

SEQ ID NO: 29488 - RNA, 22 nt, Artificial Sequence
  LRRK2 RNA guide
auacuccuauuaugguaagcua

SEQ ID NO: 29489 - RNA, 22 nt, Artificial Sequence
  LRRK2 RNA guide
auagcuuaccauaauaggagua

SEQ ID NO: 29490 - RNA, 22 nt, Artificial Sequence
  LRRK2 RNA guide
auuuggcccugauacuccuauu

SEQ ID NO: 29491 - RNA, 22 nt, Artificial Sequence
  LRRK2 RNA guide
cauaauaggaguaucagggcca

SEQ ID NO: 29492 - RNA, 22 nt, Artificial Sequence
  LRRK2 RNA guide
cauagcuuaccauaauaggagu

SEQ ID NO: 29493 - RNA, 22 nt, Artificial Sequence
  LRRK2 RNA guide
ccauaauaggaguaucagggcc

SEQ ID NO: 29494 - RNA, 22 nt, Artificial Sequence
  LRRK2 RNA guide
cccugauacuccuauuauggua

SEQ ID NO: 29495 - RNA, 22 nt, Artificial Sequence
  LRRK2 RNA guide
ccuauuaugguaagcuauguaa

SEQ ID NO: 29496 - RNA, 22 nt, Artificial Sequence
  LRRK2 RNA guide
ccugauacuccuauuaugguaa

SEQ ID NO: 29497 - RNA, 22 nt, Artificial Sequence
  LRRK2 RNA guide
cuccuauuaugguaagcuaugu

SEQ ID NO: 29498 - RNA, 22 nt, Artificial Sequence
  LRRK2 RNA guide
cugauacuccuauuaugguaag

SEQ ID NO: 29499 - RNA, 22 nt, Artificial Sequence
  LRRK2 RNA guide
cuuaccauaauaggaguaucag

SEQ ID NO: 29500 - RNA, 22 nt, Artificial Sequence
  LRRK2 RNA guide
gauacuccuauuaugguaagcu

SEQ ID NO: 29501 - RNA, 22 nt, Artificial Sequence
  LRRK2 RNA guide
gcccugauacuccuauuauggu

SEQ ID NO: 29502 - RNA, 22 nt, Artificial Sequence
  LRRK2 RNA guide
gcuuaccauaauaggaguauca

SEQ ID NO: 29503 - RNA, 22 nt, Artificial Sequence
  LRRK2 RNA guide
ggcccugauacuccuauuaugg

SEQ ID NO: 29504 - RNA, 22 nt, Artificial Sequence
  LRRK2 RNA guide
gguauuuggcccugauacuccu

SEQ ID NO: 29505 - RNA, 22 nt, Artificial Sequence
  LRRK2 RNA guide
guauuuggcccugauacuccua

SEQ ID NO: 29506 - RNA, 22 nt, Artificial Sequence
  LRRK2 RNA guide
uacauagcuuaccauaauagga

SEQ ID NO: 29507 - RNA, 22 nt, Artificial Sequence
  LRRK2 RNA guide
uaccauaauaggaguaucaggg

SEQ ID NO: 29508 - RNA, 22 nt, Artificial Sequence
  LRRK2 RNA guide
uacuccuauuaugguaagcuau

SEQ ID NO: 29509 - RNA, 22 nt, Artificial Sequence
  LRRK2 RNA guide
uagcuuaccauaauaggaguau

SEQ ID NO: 29510 - RNA, 22 nt, Artificial Sequence
  LRRK2 RNA guide
uauuuggcccugauacuccuau

SEQ ID NO: 29511 - RNA, 22 nt, Artificial Sequence
  LRRK2 RNA guide
uccuauuaugguaagcuaugua

SEQ ID NO: 29512 - RNA, 22 nt, Artificial Sequence
  LRRK2 RNA guide
ugauacuccuauuaugguaagc

SEQ ID NO: 29513 - RNA, 22 nt, Artificial Sequence
  LRRK2 RNA guide
uggcccugauacuccuauuaug

SEQ ID NO: 29514 - RNA, 22 nt, Artificial Sequence
  LRRK2 RNA guide
uuacauagcuuaccauaauagg

SEQ ID NO: 29515 - RNA, 22 nt, Artificial Sequence
  LRRK2 RNA guide
uuaccauaauaggaguaucagg

SEQ ID NO: 29516 - RNA, 22 nt, Artificial Sequence
  LRRK2 RNA guide
uuggcccugauacuccuauuau

SEQ ID NO: 29517 - RNA, 22 nt, Artificial Sequence
  LRRK2 RNA guide
uuuggcccugauacuccuauua

SEQ ID NO: 29518 - RNA, 20 nt, Artificial Sequence
  LRRK2 RNA guide
aaagcagaaaagaccucaaa

SEQ ID NO: 29519 - RNA, 20 nt, Artificial Sequence
  LRRK2 RNA guide
aaaguacuuuuccuaaagca

SEQ ID NO: 29520 - RNA, 20 nt, Artificial Sequence
  LRRK2 RNA guide
aagcagaaaagaccucaaau

SEQ ID NO: 29521 - RNA, 20 nt, Artificial Sequence
  LRRK2 RNA guide
aaguacuuuuccuaaagcag

SEQ ID NO: 29522 - RNA, 20 nt, Artificial Sequence
  LRRK2 RNA guide
aauuugaggucuuuucugcu

SEQ ID NO: 29523 - RNA, 20 nt, Artificial Sequence
  LRRK2 RNA guide
accuauguaauaauuugagg

SEQ ID NO: 29524 - RNA, 20 nt, Artificial Sequence
  LRRK2 RNA guide
acuuuuccuaaagcagaaaa

SEQ ID NO: 29525 - RNA, 20 nt, Artificial Sequence
  LRRK2 RNA guide
agcagaaaagaccucaaauu

SEQ ID NO: 29526 - RNA, 20 nt, Artificial Sequence
  LRRK2 RNA guide
aggucuuuucugcuuuagga

SEQ ID NO: 29527 - RNA, 20 nt, Artificial Sequence
  LRRK2 RNA guide
aguacuuuuccuaaagcaga

SEQ ID NO: 29528 - RNA, 20 nt, Artificial Sequence
  LRRK2 RNA guide
auaauuugaggucuuuucug

SEQ ID NO: 29529 - RNA, 20 nt, Artificial Sequence
  LRRK2 RNA guide
auuugaggucuuuucugcuu

SEQ ID NO: 29530 - RNA, 20 nt, Artificial Sequence
  LRRK2 RNA guide
cagaaaagaccucaaauuau

SEQ ID NO: 29531 - RNA, 20 nt, Artificial Sequence
  LRRK2 RNA guide
ccuaaagcagaaaagaccuc

SEQ ID NO: 29532 - RNA, 20 nt, Artificial Sequence
  LRRK2 RNA guide
ccuauguaauaauuugaggu

SEQ ID NO: 29533 - RNA, 20 nt, Artificial Sequence
  LRRK2 RNA guide
cuaaagcagaaaagaccuca

SEQ ID NO: 29534 - RNA, 20 nt, Artificial Sequence
  LRRK2 RNA guide
cuauguaauaauuugagguc

SEQ ID NO: 29535 - RNA, 20 nt, Artificial Sequence
  LRRK2 RNA guide
cuuuuccuaaagcagaaaag

SEQ ID NO: 29536 - RNA, 20 nt, Artificial Sequence
  LRRK2 RNA guide
cuuuucugcuuuaggaaaag

SEQ ID NO: 29537 - RNA, 20 nt, Artificial Sequence
  LRRK2 RNA guide
gaggucuuuucugcuuuagg

SEQ ID NO: 29538 - RNA, 20 nt, Artificial Sequence
  LRRK2 RNA guide
gcagaaaagaccucaaauua

SEQ ID NO: 29539 - RNA, 20 nt, Artificial Sequence
  LRRK2 RNA guide
ggucuuuucugcuuuaggaa

SEQ ID NO: 29540 - RNA, 20 nt, Artificial Sequence
  LRRK2 RNA guide
gucuuuucugcuuuaggaaa

SEQ ID NO: 29541 - RNA, 20 nt, Artificial Sequence
  LRRK2 RNA guide
uaaagcagaaaagaccucaa

SEQ ID NO: 29542 - RNA, 20 nt, Artificial Sequence
  LRRK2 RNA guide
uaauuugaggucuuuucugc

SEQ ID NO: 29543 - RNA, 20 nt, Artificial Sequence
  LRRK2 RNA guide
uacuuuuccuaaagcagaaa

SEQ ID NO: 29544 - RNA, 20 nt, Artificial Sequence
  LRRK2 RNA guide
uccuaaagcagaaaagaccu

SEQ ID NO: 29545 - RNA, 20 nt, Artificial Sequence
  LRRK2 RNA guide
ucuuuucugcuuuaggaaaa

SEQ ID NO: 29546 - RNA, 20 nt, Artificial Sequence
  LRRK2 RNA guide
ugaggucuuuucugcuuuag

SEQ ID NO: 29547 - RNA, 20 nt, Artificial Sequence
  LRRK2 RNA guide
uuccuaaagcagaaaagacc

SEQ ID NO: 29548 - RNA, 20 nt, Artificial Sequence
  LRRK2 RNA guide
uugaggucuuuucugcuuua

SEQ ID NO: 29549 - RNA, 20 nt, Artificial Sequence
  LRRK2 RNA guide
uuuccuaaagcagaaaagac

SEQ ID NO: 29550 - RNA, 20 nt, Artificial Sequence
  LRRK2 RNA guide
uuugaggucuuuucugcuuu

SEQ ID NO: 29551 - RNA, 20 nt, Artificial Sequence
  LRRK2 RNA guide
uuuuccuaaagcagaaaaga

SEQ ID NO: 29552 - RNA, 21 nt, Artificial Sequence
  LRRK2 RNA guide
aaagcagaaaagaccucaaau

SEQ ID NO: 29553 - RNA, 21 nt, Artificial Sequence
  LRRK2 RNA guide
aaaguacuuuuccuaaagcag

SEQ ID NO: 29554 - RNA, 21 nt, Artificial Sequence
  LRRK2 RNA guide
aagcagaaaagaccucaaauu

SEQ ID NO: 29555 - RNA, 21 nt, Artificial Sequence
  LRRK2 RNA guide
aaguacuuuuccuaaagcaga

SEQ ID NO: 29556 - RNA, 21 nt, Artificial Sequence
  LRRK2 RNA guide
aauuugaggucuuuucugcuu

SEQ ID NO: 29557 - RNA, 21 nt, Artificial Sequence
  LRRK2 RNA guide
acuuuuccuaaagcagaaaag

SEQ ID NO: 29558 - RNA, 21 nt, Artificial Sequence
  LRRK2 RNA guide
agcagaaaagaccucaaauua

SEQ ID NO: 29559 - RNA, 21 nt, Artificial Sequence
  LRRK2 RNA guide
aggucuuuucugcuuuaggaa

SEQ ID NO: 29560 - RNA, 21 nt, Artificial Sequence
  LRRK2 RNA guide
aguacuuuuccuaaagcagaa

SEQ ID NO: 29561 - RNA, 21 nt, Artificial Sequence
  LRRK2 RNA guide
auaauuugaggucuuuucugc

SEQ ID NO: 29562 - RNA, 21 nt, Artificial Sequence
  LRRK2 RNA guide
auuugaggucuuuucugcuuu

SEQ ID NO: 29563 - RNA, 21 nt, Artificial Sequence
  LRRK2 RNA guide
ccuaaagcagaaaagaccuca

SEQ ID NO: 29564 - RNA, 21 nt, Artificial Sequence
  LRRK2 RNA guide
ccuauguaauaauuugagguc

SEQ ID NO: 29565 - RNA, 21 nt, Artificial Sequence
  LRRK2 RNA guide
cuaaagcagaaaagaccucaa

SEQ ID NO: 29566 - RNA, 21 nt, Artificial Sequence
  LRRK2 RNA guide
cuuuuccuaaagcagaaaaga

SEQ ID NO: 29567 - RNA, 21 nt, Artificial Sequence
  LRRK2 RNA guide
cuuuucugcuuuaggaaaagu

SEQ ID NO: 29568 - RNA, 21 nt, Artificial Sequence
  LRRK2 RNA guide
gaaaguacuuuuccuaaagca

SEQ ID NO: 29569 - RNA, 21 nt, Artificial Sequence
  LRRK2 RNA guide
gaggucuuuucugcuuuagga

SEQ ID NO: 29570 - RNA, 21 nt, Artificial Sequence
  LRRK2 RNA guide
gcagaaaagaccucaaauuau

SEQ ID NO: 29571 - RNA, 21 nt, Artificial Sequence
  LRRK2 RNA guide
ggucuuuucugcuuuaggaaa

SEQ ID NO: 29572 - RNA, 21 nt, Artificial Sequence
  LRRK2 RNA guide
guacuuuuccuaaagcagaaa

SEQ ID NO: 29573 - RNA, 21 nt, Artificial Sequence
  LRRK2 RNA guide
gucuuuucugcuuuaggaaaa

SEQ ID NO: 29574 - RNA, 21 nt, Artificial Sequence
  LRRK2 RNA guide
uaaagcagaaaagaccucaaa

SEQ ID NO: 29575 - RNA, 21 nt, Artificial Sequence
  LRRK2 RNA guide
uaauuugaggucuuuucugcu

SEQ ID NO: 29576 - RNA, 21 nt, Artificial Sequence
  LRRK2 RNA guide
uccuaaagcagaaaagaccuc

SEQ ID NO: 29577 - RNA, 21 nt, Artificial Sequence
  LRRK2 RNA guide
ucuuuucugcuuuaggaaaag

SEQ ID NO: 29578 - RNA, 21 nt, Artificial Sequence
  LRRK2 RNA guide
ugaggucuuuucugcuuuagg

SEQ ID NO: 29579 - RNA, 21 nt, Artificial Sequence
  LRRK2 RNA guide
uuccuaaagcagaaaagaccu

SEQ ID NO: 29580 - RNA, 21 nt, Artificial Sequence
  LRRK2 RNA guide
uugaggucuuuucugcuuuag

SEQ ID NO: 29581 - RNA, 21 nt, Artificial Sequence
  LRRK2 RNA guide
uuuccuaaagcagaaaagacc

SEQ ID NO: 29582 - RNA, 21 nt, Artificial Sequence
  LRRK2 RNA guide
uuugaggucuuuucugcuuua

SEQ ID NO: 29583 - RNA, 21 nt, Artificial Sequence
  LRRK2 RNA guide
uuuuccuaaagcagaaaagac

SEQ ID NO: 29584 - RNA, 22 nt, Artificial Sequence
  LRRK2 RNA guide
aaagcagaaaagaccucaaauu

SEQ ID NO: 29585 - RNA, 22 nt, Artificial Sequence
  LRRK2 RNA guide
aaaguacuuuuccuaaagcaga

SEQ ID NO: 29586 - RNA, 22 nt, Artificial Sequence
  LRRK2 RNA guide
aagcagaaaagaccucaaauua

SEQ ID NO: 29587 - RNA, 22 nt, Artificial Sequence
  LRRK2 RNA guide
aaguacuuuuccuaaagcagaa

SEQ ID NO: 29588 - RNA, 22 nt, Artificial Sequence
  LRRK2 RNA guide
aauaauuugaggucuuuucugc

SEQ ID NO: 29589 - RNA, 22 nt, Artificial Sequence
  LRRK2 RNA guide
aauuugaggucuuuucugcuuu

SEQ ID NO: 29590 - RNA, 22 nt, Artificial Sequence
  LRRK2 RNA guide
accuauguaauaauuugagguc

SEQ ID NO: 29591 - RNA, 22 nt, Artificial Sequence
  LRRK2 RNA guide
acuuuuccuaaagcagaaaaga

SEQ ID NO: 29592 - RNA, 22 nt, Artificial Sequence
  LRRK2 RNA guide
agcagaaaagaccucaaauuau

SEQ ID NO: 29593 - RNA, 22 nt, Artificial Sequence
  LRRK2 RNA guide
aggucuuuucugcuuuaggaaa

SEQ ID NO: 29594 - RNA, 22 nt, Artificial Sequence
  LRRK2 RNA guide
aguacuuuuccuaaagcagaaa

SEQ ID NO: 29595 - RNA, 22 nt, Artificial Sequence
  LRRK2 RNA guide
auaauuugaggucuuuucugcu

SEQ ID NO: 29596 - RNA, 22 nt, Artificial Sequence
  LRRK2 RNA guide
auuugaggucuuuucugcuuua

SEQ ID NO: 29597 - RNA, 22 nt, Artificial Sequence
  LRRK2 RNA guide
ccuaaagcagaaaagaccucaa

SEQ ID NO: 29598 - RNA, 22 nt, Artificial Sequence
  LRRK2 RNA guide
ccuauguaauaauuugaggucu

SEQ ID NO: 29599 - RNA, 22 nt, Artificial Sequence
  LRRK2 RNA guide
cgaaaguacuuuuccuaaagca

SEQ ID NO: 29600 - RNA, 22 nt, Artificial Sequence
  LRRK2 RNA guide
cuaaagcagaaaagaccucaaa

SEQ ID NO: 29601 - RNA, 22 nt, Artificial Sequence
  LRRK2 RNA guide
cuuuuccuaaagcagaaaagac

SEQ ID NO: 29602 - RNA, 22 nt, Artificial Sequence
  LRRK2 RNA guide
cuuuucugcuuuaggaaaagua

SEQ ID NO: 29603 - RNA, 22 nt, Artificial Sequence
  LRRK2 RNA guide
gaaaguacuuuuccuaaagcag

SEQ ID NO: 29604 - RNA, 22 nt, Artificial Sequence
  LRRK2 RNA guide
gaggucuuuucugcuuuaggaa

SEQ ID NO: 29605 - RNA, 22 nt, Artificial Sequence
  LRRK2 RNA guide
gcagaaaagaccucaaauuauu

SEQ ID NO: 29606 - RNA, 22 nt, Artificial Sequence
  LRRK2 RNA guide
ggucuuuucugcuuuaggaaaa

SEQ ID NO: 29607 - RNA, 22 nt, Artificial Sequence
  LRRK2 RNA guide
guacuuuuccuaaagcagaaaa

SEQ ID NO: 29608 - RNA, 22 nt, Artificial Sequence
  LRRK2 RNA guide
gucuuuucugcuuuaggaaaag

SEQ ID NO: 29609 - RNA, 22 nt, Artificial Sequence
  LRRK2 RNA guide
uaaagcagaaaagaccucaaau

SEQ ID NO: 29610 - RNA, 22 nt, Artificial Sequence
  LRRK2 RNA guide
uaauuugaggucuuuucugcuu

SEQ ID NO: 29611 - RNA, 22 nt, Artificial Sequence
  LRRK2 RNA guide
uacuuuuccuaaagcagaaaag

SEQ ID NO: 29612 - RNA, 22 nt, Artificial Sequence
  LRRK2 RNA guide
uccuaaagcagaaaagaccuca

SEQ ID NO: 29613 - RNA, 22 nt, Artificial Sequence
  LRRK2 RNA guide
ucuuuucugcuuuaggaaaagu

SEQ ID NO: 29614 - RNA, 22 nt, Artificial Sequence
  LRRK2 RNA guide
ugaggucuuuucugcuuuagga

SEQ ID NO: 29615 - RNA, 22 nt, Artificial Sequence
  LRRK2 RNA guide
uuccuaaagcagaaaagaccuc

SEQ ID NO: 29616 - RNA, 22 nt, Artificial Sequence
  LRRK2 RNA guide
uugaggucuuuucugcuuuagg

SEQ ID NO: 29617 - RNA, 22 nt, Artificial Sequence
  LRRK2 RNA guide
uuuccuaaagcagaaaagaccu

SEQ ID NO: 29618 - RNA, 22 nt, Artificial Sequence
  LRRK2 RNA guide
uuugaggucuuuucugcuuuag

SEQ ID NO: 29619 - RNA, 22 nt, Artificial Sequence
  LRRK2 RNA guide
uuuuccuaaagcagaaaagacc

SEQ ID NO: 29620 - RNA, 20 nt, Artificial Sequence
  LRRK2 RNA guide
accaaaaguacuuuuccuaa

SEQ ID NO: 29621 - RNA, 20 nt, Artificial Sequence
  LRRK2 RNA guide
acuuuugguaaauucuuugg

SEQ ID NO: 29622 - RNA, 20 nt, Artificial Sequence
  LRRK2 RNA guide
aggaaaaguacuuuugguaa

SEQ ID NO: 29623 - RNA, 20 nt, Artificial Sequence
  LRRK2 RNA guide
agggccaaagaauuuaccaa

SEQ ID NO: 29624 - RNA, 20 nt, Artificial Sequence
  LRRK2 RNA guide
caaaaguacuuuuccuaaag

SEQ ID NO: 29625 - RNA, 20 nt, Artificial Sequence
  LRRK2 RNA guide
cagggccaaagaauuuacca

SEQ ID NO: 29626 - RNA, 20 nt, Artificial Sequence
  LRRK2 RNA guide
ccaaaaguacuuuuccuaaa

SEQ ID NO: 29627 - RNA, 20 nt, Artificial Sequence
  LRRK2 RNA guide
ccaaagaauuuaccaaaagu

SEQ ID NO: 29628 - RNA, 20 nt, Artificial Sequence
  LRRK2 RNA guide
cugcuuuaggaaaaguacuu

SEQ ID NO: 29629 - RNA, 20 nt, Artificial Sequence
  LRRK2 RNA guide
cuggucagggccaaagaauu

SEQ ID NO: 29630 - RNA, 20 nt, Artificial Sequence
  LRRK2 RNA guide
cuuuaggaaaaguacuuuug

SEQ ID NO: 29631 - RNA, 20 nt, Artificial Sequence
  LRRK2 RNA guide
cuuuugguaaauucuuuggc

SEQ ID NO: 29632 - RNA, 20 nt, Artificial Sequence
  LRRK2 RNA guide
gccaaagaauuuaccaaaag

SEQ ID NO: 29633 - RNA, 20 nt, Artificial Sequence
  LRRK2 RNA guide
gcuuuaggaaaaguacuuuu

SEQ ID NO: 29634 - RNA, 20 nt, Artificial Sequence
  LRRK2 RNA guide
ggaaaaguacuuuugguaaa

SEQ ID NO: 29635 - RNA, 20 nt, Artificial Sequence
  LRRK2 RNA guide
ggccaaagaauuuaccaaaa

SEQ ID NO: 29636 - RNA, 20 nt, Artificial Sequence
  LRRK2 RNA guide
gggccaaagaauuuaccaaa

SEQ ID NO: 29637 - RNA, 20 nt, Artificial Sequence
  LRRK2 RNA guide
gucagggccaaagaauuuac

SEQ ID NO: 29638 - RNA, 20 nt, Artificial Sequence
  LRRK2 RNA guide
uaccaaaaguacuuuuccua

SEQ ID NO: 29639 - RNA, 20 nt, Artificial Sequence
  LRRK2 RNA guide
uaggaaaaguacuuuuggua

SEQ ID NO: 29640 - RNA, 20 nt, Artificial Sequence
  LRRK2 RNA guide
ucagggccaaagaauuuacc

SEQ ID NO: 29641 - RNA, 20 nt, Artificial Sequence
  LRRK2 RNA guide
ucugcuuuaggaaaaguacu

SEQ ID NO: 29642 - RNA, 20 nt, Artificial Sequence
  LRRK2 RNA guide
ugcuuuaggaaaaguacuuu

SEQ ID NO: 29643 - RNA, 20 nt, Artificial Sequence
  LRRK2 RNA guide
uggucagggccaaagaauuu

SEQ ID NO: 29644 - RNA, 20 nt, Artificial Sequence
  LRRK2 RNA guide
uuaccaaaaguacuuuuccu

SEQ ID NO: 29645 - RNA, 20 nt, Artificial Sequence
  LRRK2 RNA guide
uuaggaaaaguacuuuuggu

SEQ ID NO: 29646 - RNA, 20 nt, Artificial Sequence
  LRRK2 RNA guide
uucugcuuuaggaaaaguac

SEQ ID NO: 29647 - RNA, 20 nt, Artificial Sequence
  LRRK2 RNA guide
uugguaaauucuuuggcccu

SEQ ID NO: 29648 - RNA, 20 nt, Artificial Sequence
  LRRK2 RNA guide
uuuaccaaaaguacuuuucc

SEQ ID NO: 29649 - RNA, 20 nt, Artificial Sequence
  LRRK2 RNA guide
uuuaggaaaaguacuuuugg

SEQ ID NO: 29650 - RNA, 20 nt, Artificial Sequence
  LRRK2 RNA guide
uuucugcuuuaggaaaagua

SEQ ID NO: 29651 - RNA, 20 nt, Artificial Sequence
  LRRK2 RNA guide
uuugguaaauucuuuggccc

SEQ ID NO: 29652 - RNA, 20 nt, Artificial Sequence
  LRRK2 RNA guide
uuuugguaaauucuuuggcc

SEQ ID NO: 29653 - RNA, 21 nt, Artificial Sequence
  LRRK2 RNA guide
acuggucagggccaaagaauu

SEQ ID NO: 29654 - RNA, 21 nt, Artificial Sequence
  LRRK2 RNA guide
acuuuugguaaauucuuuggc

SEQ ID NO: 29655 - RNA, 21 nt, Artificial Sequence
  LRRK2 RNA guide
agggccaaagaauuuaccaaa

SEQ ID NO: 29656 - RNA, 21 nt, Artificial Sequence
  LRRK2 RNA guide
caaaaguacuuuuccuaaagc

SEQ ID NO: 29657 - RNA, 21 nt, Artificial Sequence
  LRRK2 RNA guide
cagggccaaagaauuuaccaa

SEQ ID NO: 29658 - RNA, 21 nt, Artificial Sequence
  LRRK2 RNA guide
ccaaaaguacuuuuccuaaag

SEQ ID NO: 29659 - RNA, 21 nt, Artificial Sequence
  LRRK2 RNA guide
cugcuuuaggaaaaguacuuu

SEQ ID NO: 29660 - RNA, 21 nt, Artificial Sequence
  LRRK2 RNA guide
cuggucagggccaaagaauuu

SEQ ID NO: 29661 - RNA, 21 nt, Artificial Sequence
  LRRK2 RNA guide
cuuuaggaaaaguacuuuugg

SEQ ID NO: 29662 - RNA, 21 nt, Artificial Sequence
  LRRK2 RNA guide
cuuuugguaaauucuuuggcc

SEQ ID NO: 29663 - RNA, 21 nt, Artificial Sequence
  LRRK2 RNA guide
gccaaagaauuuaccaaaagu

SEQ ID NO: 29664 - RNA, 21 nt, Artificial Sequence
  LRRK2 RNA guide
gcuuuaggaaaaguacuuuug

SEQ ID NO: 29665 - RNA, 21 nt, Artificial Sequence
  LRRK2 RNA guide
ggccaaagaauuuaccaaaag

SEQ ID NO: 29666 - RNA, 21 nt, Artificial Sequence
  LRRK2 RNA guide
gggccaaagaauuuaccaaaa

SEQ ID NO: 29667 - RNA, 21 nt, Artificial Sequence
  LRRK2 RNA guide
ggucagggccaaagaauuuac

SEQ ID NO: 29668 - RNA, 21 nt, Artificial Sequence
  LRRK2 RNA guide
gucagggccaaagaauuuacc

SEQ ID NO: 29669 - RNA, 21 nt, Artificial Sequence
  LRRK2 RNA guide
ucagggccaaagaauuuacca

SEQ ID NO: 29670 - RNA, 21 nt, Artificial Sequence
  LRRK2 RNA guide
ucugcuuuaggaaaaguacuu

SEQ ID NO: 29671 - RNA, 21 nt, Artificial Sequence
  LRRK2 RNA guide
uggucagggccaaagaauuua

SEQ ID NO: 29672 - RNA, 21 nt, Artificial Sequence
  LRRK2 RNA guide
uucugcuuuaggaaaaguacu

SEQ ID NO: 29673 - RNA, 21 nt, Artificial Sequence
  LRRK2 RNA guide
uugguaaauucuuuggcccug

SEQ ID NO: 29674 - RNA, 21 nt, Artificial Sequence
  LRRK2 RNA guide
uuucugcuuuaggaaaaguac

SEQ ID NO: 29675 - RNA, 21 nt, Artificial Sequence
  LRRK2 RNA guide
uuugguaaauucuuuggcccu

SEQ ID NO: 29676 - RNA, 21 nt, Artificial Sequence
  LRRK2 RNA guide
uuuugguaaauucuuuggccc

SEQ ID NO: 29677 - RNA, 22 nt, Artificial Sequence
  LRRK2 RNA guide
accaaaaguacuuuuccuaaag

SEQ ID NO: 29678 - RNA, 22 nt, Artificial Sequence
  LRRK2 RNA guide
acuggucagggccaaagaauuu

SEQ ID NO: 29679 - RNA, 22 nt, Artificial Sequence
  LRRK2 RNA guide
acuuuugguaaauucuuuggcc

SEQ ID NO: 29680 - RNA, 22 nt, Artificial Sequence
  LRRK2 RNA guide
agggccaaagaauuuaccaaaa

SEQ ID NO: 29681 - RNA, 22 nt, Artificial Sequence
  LRRK2 RNA guide
auuucugcuuuaggaaaaguac

SEQ ID NO: 29682 - RNA, 22 nt, Artificial Sequence
  LRRK2 RNA guide
caaaaguacuuuuccuaaagca

SEQ ID NO: 29683 - RNA, 22 nt, Artificial Sequence
  LRRK2 RNA guide
cagggccaaagaauuuaccaaa

SEQ ID NO: 29684 - RNA, 22 nt, Artificial Sequence
  LRRK2 RNA guide
cauuucugcuuuaggaaaagua

SEQ ID NO: 29685 - RNA, 22 nt, Artificial Sequence
  LRRK2 RNA guide
ccaaaaguacuuuuccuaaagc

SEQ ID NO: 29686 - RNA, 22 nt, Artificial Sequence
  LRRK2 RNA guide
ccaaagaauuuaccaaaaguac

SEQ ID NO: 29687 - RNA, 22 nt, Artificial Sequence
  LRRK2 RNA guide
cugcuuuaggaaaaguacuuuu

SEQ ID NO: 29688 - RNA, 22 nt, Artificial Sequence
  LRRK2 RNA guide
cuggucagggccaaagaauuua

SEQ ID NO: 29689 - RNA, 22 nt, Artificial Sequence
  LRRK2 RNA guide
cuuuaggaaaaguacuuuuggu

SEQ ID NO: 29690 - RNA, 22 nt, Artificial Sequence
  LRRK2 RNA guide
cuuuugguaaauucuuuggccc

SEQ ID NO: 29691 - RNA, 22 nt, Artificial Sequence
  LRRK2 RNA guide
gccaaagaauuuaccaaaagua

SEQ ID NO: 29692 - RNA, 22 nt, Artificial Sequence
  LRRK2 RNA guide
gcuuuaggaaaaguacuuuugg

SEQ ID NO: 29693 - RNA, 22 nt, Artificial Sequence
  LRRK2 RNA guide
ggccaaagaauuuaccaaaagu

SEQ ID NO: 29694 - RNA, 22 nt, Artificial Sequence
  LRRK2 RNA guide
gggccaaagaauuuaccaaaag

SEQ ID NO: 29695 - RNA, 22 nt, Artificial Sequence
  LRRK2 RNA guide
ggucagggccaaagaauuuacc

SEQ ID NO: 29696 - RNA, 22 nt, Artificial Sequence
  LRRK2 RNA guide
guacuuuugguaaauucuuugg

SEQ ID NO: 29697 - RNA, 22 nt, Artificial Sequence
  LRRK2 RNA guide
gucagggccaaagaauuuacca

SEQ ID NO: 29698 - RNA, 22 nt, Artificial Sequence
  LRRK2 RNA guide
uacuggucagggccaaagaauu

SEQ ID NO: 29699 - RNA, 22 nt, Artificial Sequence
  LRRK2 RNA guide
uacuuuugguaaauucuuuggc

SEQ ID NO: 29700 - RNA, 22 nt, Artificial Sequence
  LRRK2 RNA guide
ucagggccaaagaauuuaccaa

SEQ ID NO: 29701 - RNA, 22 nt, Artificial Sequence
  LRRK2 RNA guide
ucugcuuuaggaaaaguacuuu

SEQ ID NO: 29702 - RNA, 22 nt, Artificial Sequence
  LRRK2 RNA guide
ugcuuuaggaaaaguacuuuug

SEQ ID NO: 29703 - RNA, 22 nt, Artificial Sequence
  LRRK2 RNA guide
uggucagggccaaagaauuuac

SEQ ID NO: 29704 - RNA, 22 nt, Artificial Sequence
  LRRK2 RNA guide
uucugcuuuaggaaaaguacuu

SEQ ID NO: 29705 - RNA, 22 nt, Artificial Sequence
  LRRK2 RNA guide
uugguaaauucuuuggcccuga

SEQ ID NO: 29706 - RNA, 22 nt, Artificial Sequence
  LRRK2 RNA guide
uuucugcuuuaggaaaaguacu

SEQ ID NO: 29707 - RNA, 22 nt, Artificial Sequence
  LRRK2 RNA guide
uuugguaaauucuuuggcccug

SEQ ID NO: 29708 - RNA, 22 nt, Artificial Sequence
  LRRK2 RNA guide
uuuugguaaauucuuuggcccu

SEQ ID NO: 29709 - RNA, 20 nt, Artificial Sequence
  LRRK2 RNA guide
aaauucuuuggccuugacca

SEQ ID NO: 29710 - RNA, 20 nt, Artificial Sequence
  LRRK2 RNA guide
aaggccaaagaauuuaccga

SEQ ID NO: 29711 - RNA, 20 nt, Artificial Sequence
  LRRK2 RNA guide
aauaaugaauacuggucaag

SEQ ID NO: 29712 - RNA, 20 nt, Artificial Sequence
  LRRK2 RNA guide
aauacuggucaaggccaaag

SEQ ID NO: 29713 - RNA, 20 nt, Artificial Sequence
  LRRK2 RNA guide
aaugaauacuggucaaggcc

SEQ ID NO: 29714 - RNA, 20 nt, Artificial Sequence
  LRRK2 RNA guide
aauucuuuggccuugaccag

SEQ ID NO: 29715 - RNA, 20 nt, Artificial Sequence
  LRRK2 RNA guide
acuggucaaggccaaagaau

SEQ ID NO: 29716 - RNA, 20 nt, Artificial Sequence
  LRRK2 RNA guide
acuuucgguaaauucuuugg

SEQ ID NO: 29717 - RNA, 20 nt, Artificial Sequence
  LRRK2 RNA guide
auaaugaauacuggucaagg

SEQ ID NO: 29718 - RNA, 20 nt, Artificial Sequence
  LRRK2 RNA guide
auacuggucaaggccaaaga

SEQ ID NO: 29719 - RNA, 20 nt, Artificial Sequence
  LRRK2 RNA guide
augaauacuggucaaggcca

SEQ ID NO: 29720 - RNA, 20 nt, Artificial Sequence
  LRRK2 RNA guide
auucuuuggccuugaccagu

SEQ ID NO: 29721 - RNA, 20 nt, Artificial Sequence
  LRRK2 RNA guide
caaggccaaagaauuuaccg

SEQ ID NO: 29722 - RNA, 20 nt, Artificial Sequence
  LRRK2 RNA guide
ccuugaccaguauucauuau

SEQ ID NO: 29723 - RNA, 20 nt, Artificial Sequence
  LRRK2 RNA guide
cgguaaauucuuuggccuug

SEQ ID NO: 29724 - RNA, 20 nt, Artificial Sequence
  LRRK2 RNA guide
cugaaauaaugaauacuggu

SEQ ID NO: 29725 - RNA, 20 nt, Artificial Sequence
  LRRK2 RNA guide
cuggucaaggccaaagaauu

SEQ ID NO: 29726 - RNA, 20 nt, Artificial Sequence
  LRRK2 RNA guide
cuugaccaguauucauuauu

SEQ ID NO: 29727 - RNA, 20 nt, Artificial Sequence
  LRRK2 RNA guide
cuuucgguaaauucuuuggc

SEQ ID NO: 29728 - RNA, 20 nt, Artificial Sequence
  LRRK2 RNA guide
cuuuggccuugaccaguauu

SEQ ID NO: 29729 - RNA, 20 nt, Artificial Sequence
  LRRK2 RNA guide
gaaauaaugaauacugguca

SEQ ID NO: 29730 - RNA, 20 nt, Artificial Sequence
  LRRK2 RNA guide
gaauacuggucaaggccaaa

SEQ ID NO: 29731 - RNA, 20 nt, Artificial Sequence
  LRRK2 RNA guide
gccuugaccaguauucauua

SEQ ID NO: 29732 - RNA, 20 nt, Artificial Sequence
  LRRK2 RNA guide
ggccuugaccaguauucauu

SEQ ID NO: 29733 - RNA, 20 nt, Artificial Sequence
  LRRK2 RNA guide
gguaaauucuuuggccuuga

SEQ ID NO: 29734 - RNA, 20 nt, Artificial Sequence
  LRRK2 RNA guide
ggucaaggccaaagaauuua

SEQ ID NO: 29735 - RNA, 20 nt, Artificial Sequence
  LRRK2 RNA guide
guaaauucuuuggccuugac

SEQ ID NO: 29736 - RNA, 20 nt, Artificial Sequence
  LRRK2 RNA guide
guacuuucgguaaauucuuu

SEQ ID NO: 29737 - RNA, 20 nt, Artificial Sequence
  LRRK2 RNA guide
gucaaggccaaagaauuuac

SEQ ID NO: 29738 - RNA, 20 nt, Artificial Sequence
  LRRK2 RNA guide
uaaauucuuuggccuugacc

SEQ ID NO: 29739 - RNA, 20 nt, Artificial Sequence
  LRRK2 RNA guide
uaaugaauacuggucaaggc

SEQ ID NO: 29740 - RNA, 20 nt, Artificial Sequence
  LRRK2 RNA guide
uacuggucaaggccaaagaa

SEQ ID NO: 29741 - RNA, 20 nt, Artificial Sequence
  LRRK2 RNA guide
uacuuucgguaaauucuuug

SEQ ID NO: 29742 - RNA, 20 nt, Artificial Sequence
  LRRK2 RNA guide
ucaaggccaaagaauuuacc

SEQ ID NO: 29743 - RNA, 20 nt, Artificial Sequence
  LRRK2 RNA guide
ucgguaaauucuuuggccuu

SEQ ID NO: 29744 - RNA, 20 nt, Artificial Sequence
  LRRK2 RNA guide
ucuuuggccuugaccaguau

SEQ ID NO: 29745 - RNA, 20 nt, Artificial Sequence
  LRRK2 RNA guide
ugaaauaaugaauacugguc

SEQ ID NO: 29746 - RNA, 20 nt, Artificial Sequence
  LRRK2 RNA guide
ugaauacuggucaaggccaa

SEQ ID NO: 29747 - RNA, 20 nt, Artificial Sequence
  LRRK2 RNA guide
uggccuugaccaguauucau

SEQ ID NO: 29748 - RNA, 20 nt, Artificial Sequence
  LRRK2 RNA guide
uggucaaggccaaagaauuu

SEQ ID NO: 29749 - RNA, 20 nt, Artificial Sequence
  LRRK2 RNA guide
uucgguaaauucuuuggccu

SEQ ID NO: 29750 - RNA, 20 nt, Artificial Sequence
  LRRK2 RNA guide
uucuuuggccuugaccagua

SEQ ID NO: 29751 - RNA, 20 nt, Artificial Sequence
  LRRK2 RNA guide
uuggccuugaccaguauuca

SEQ ID NO: 29752 - RNA, 20 nt, Artificial Sequence
  LRRK2 RNA guide
uuucgguaaauucuuuggcc

SEQ ID NO: 29753 - RNA, 20 nt, Artificial Sequence
  LRRK2 RNA guide
uuuggccuugaccaguauuc

SEQ ID NO: 29754 - RNA, 21 nt, Artificial Sequence
  LRRK2 RNA guide
aaauucuuuggccuugaccag

SEQ ID NO: 29755 - RNA, 21 nt, Artificial Sequence
  LRRK2 RNA guide
aaggccaaagaauuuaccgaa

SEQ ID NO: 29756 - RNA, 21 nt, Artificial Sequence
  LRRK2 RNA guide
aauaaugaauacuggucaagg

SEQ ID NO: 29757 - RNA, 21 nt, Artificial Sequence
  LRRK2 RNA guide
aauacuggucaaggccaaaga

SEQ ID NO: 29758 - RNA, 21 nt, Artificial Sequence
  LRRK2 RNA guide
aaugaauacuggucaaggcca

SEQ ID NO: 29759 - RNA, 21 nt, Artificial Sequence
  LRRK2 RNA guide
aauucuuuggccuugaccagu

SEQ ID NO: 29760 - RNA, 21 nt, Artificial Sequence
  LRRK2 RNA guide
acuggucaaggccaaagaauu

SEQ ID NO: 29761 - RNA, 21 nt, Artificial Sequence
  LRRK2 RNA guide
acuuucgguaaauucuuuggc

SEQ ID NO: 29762 - RNA, 21 nt, Artificial Sequence
  LRRK2 RNA guide
auaaugaauacuggucaaggc

SEQ ID NO: 29763 - RNA, 21 nt, Artificial Sequence
  LRRK2 RNA guide
auacuggucaaggccaaagaa

SEQ ID NO: 29764 - RNA, 21 nt, Artificial Sequence
  LRRK2 RNA guide
augaauacuggucaaggccaa

SEQ ID NO: 29765 - RNA, 21 nt, Artificial Sequence
  LRRK2 RNA guide
auucuuuggccuugaccagua

SEQ ID NO: 29766 - RNA, 21 nt, Artificial Sequence
  LRRK2 RNA guide
caaggccaaagaauuuaccga

SEQ ID NO: 29767 - RNA, 21 nt, Artificial Sequence
  LRRK2 RNA guide
ccuugaccaguauucauuauu

SEQ ID NO: 29768 - RNA, 21 nt, Artificial Sequence
  LRRK2 RNA guide
cgguaaauucuuuggccuuga

SEQ ID NO: 29769 - RNA, 21 nt, Artificial Sequence
  LRRK2 RNA guide
cugaaauaaugaauacugguc

SEQ ID NO: 29770 - RNA, 21 nt, Artificial Sequence
  LRRK2 RNA guide
cuggucaaggccaaagaauuu

SEQ ID NO: 29771 - RNA, 21 nt, Artificial Sequence
  LRRK2 RNA guide
cuuucgguaaauucuuuggcc

SEQ ID NO: 29772 - RNA, 21 nt, Artificial Sequence
  LRRK2 RNA guide
cuuuggccuugaccaguauuc

SEQ ID NO: 29773 - RNA, 21 nt, Artificial Sequence
  LRRK2 RNA guide
gaauacuggucaaggccaaag

SEQ ID NO: 29774 - RNA, 21 nt, Artificial Sequence
  LRRK2 RNA guide
gccuugaccaguauucauuau

SEQ ID NO: 29775 - RNA, 21 nt, Artificial Sequence
  LRRK2 RNA guide
ggccuugaccaguauucauua

SEQ ID NO: 29776 - RNA, 21 nt, Artificial Sequence
  LRRK2 RNA guide
gguaaauucuuuggccuugac

SEQ ID NO: 29777 - RNA, 21 nt, Artificial Sequence
  LRRK2 RNA guide
ggucaaggccaaagaauuuac

SEQ ID NO: 29778 - RNA, 21 nt, Artificial Sequence
  LRRK2 RNA guide
guaaauucuuuggccuugacc

SEQ ID NO: 29779 - RNA, 21 nt, Artificial Sequence
  LRRK2 RNA guide
guacuuucgguaaauucuuug

SEQ ID NO: 29780 - RNA, 21 nt, Artificial Sequence
  LRRK2 RNA guide
gucaaggccaaagaauuuacc

SEQ ID NO: 29781 - RNA, 21 nt, Artificial Sequence
  LRRK2 RNA guide
uaaauucuuuggccuugacca

SEQ ID NO: 29782 - RNA, 21 nt, Artificial Sequence
  LRRK2 RNA guide
uaaugaauacuggucaaggcc

SEQ ID NO: 29783 - RNA, 21 nt, Artificial Sequence
  LRRK2 RNA guide
uacuggucaaggccaaagaau

SEQ ID NO: 29784 - RNA, 21 nt, Artificial Sequence
  LRRK2 RNA guide
uacuuucgguaaauucuuugg

SEQ ID NO: 29785 - RNA, 21 nt, Artificial Sequence
  LRRK2 RNA guide
ucaaggccaaagaauuuaccg

SEQ ID NO: 29786 - RNA, 21 nt, Artificial Sequence
  LRRK2 RNA guide
ucgguaaauucuuuggccuug

SEQ ID NO: 29787 - RNA, 21 nt, Artificial Sequence
  LRRK2 RNA guide
ucuuuggccuugaccaguauu

SEQ ID NO: 29788 - RNA, 21 nt, Artificial Sequence
  LRRK2 RNA guide
ugaauacuggucaaggccaaa

SEQ ID NO: 29789 - RNA, 21 nt, Artificial Sequence
  LRRK2 RNA guide
uggccuugaccaguauucauu

SEQ ID NO: 29790 - RNA, 21 nt, Artificial Sequence
  LRRK2 RNA guide
uggucaaggccaaagaauuua

SEQ ID NO: 29791 - RNA, 21 nt, Artificial Sequence
  LRRK2 RNA guide
uucgguaaauucuuuggccuu

SEQ ID NO: 29792 - RNA, 21 nt, Artificial Sequence
  LRRK2 RNA guide
uucuuuggccuugaccaguau

SEQ ID NO: 29793 - RNA, 21 nt, Artificial Sequence
  LRRK2 RNA guide
uuggccuugaccaguauucau

SEQ ID NO: 29794 - RNA, 21 nt, Artificial Sequence
  LRRK2 RNA guide
uuucgguaaauucuuuggccu

SEQ ID NO: 29795 - RNA, 21 nt, Artificial Sequence
  LRRK2 RNA guide
uuuggccuugaccaguauuca

SEQ ID NO: 29796 - RNA, 22 nt, Artificial Sequence
  LRRK2 RNA guide
aaauaaugaauacuggucaagg

SEQ ID NO: 29797 - RNA, 22 nt, Artificial Sequence
  LRRK2 RNA guide
aaauucuuuggccuugaccagu

SEQ ID NO: 29798 - RNA, 22 nt, Artificial Sequence
  LRRK2 RNA guide
aaggccaaagaauuuaccgaaa

SEQ ID NO: 29799 - RNA, 22 nt, Artificial Sequence
  LRRK2 RNA guide
aauaaugaauacuggucaaggc

SEQ ID NO: 29800 - RNA, 22 nt, Artificial Sequence
  LRRK2 RNA guide
aauacuggucaaggccaaagaa

SEQ ID NO: 29801 - RNA, 22 nt, Artificial Sequence
  LRRK2 RNA guide
aaugaauacuggucaaggccaa

SEQ ID NO: 29802 - RNA, 22 nt, Artificial Sequence
  LRRK2 RNA guide
aauucuuuggccuugaccagua

SEQ ID NO: 29803 - RNA, 22 nt, Artificial Sequence
  LRRK2 RNA guide
acuggucaaggccaaagaauuu

SEQ ID NO: 29804 - RNA, 22 nt, Artificial Sequence
  LRRK2 RNA guide
acuuucgguaaauucuuuggcc

SEQ ID NO: 29805 - RNA, 22 nt, Artificial Sequence
  LRRK2 RNA guide
aguacuuucgguaaauucuuug

SEQ ID NO: 29806 - RNA, 22 nt, Artificial Sequence
  LRRK2 RNA guide
auaaugaauacuggucaaggcc

SEQ ID NO: 29807 - RNA, 22 nt, Artificial Sequence
  LRRK2 RNA guide
auacuggucaaggccaaagaau

SEQ ID NO: 29808 - RNA, 22 nt, Artificial Sequence
  LRRK2 RNA guide
augaauacuggucaaggccaaa

SEQ ID NO: 29809 - RNA, 22 nt, Artificial Sequence
  LRRK2 RNA guide
auucuuuggccuugaccaguau

SEQ ID NO: 29810 - RNA, 22 nt, Artificial Sequence
  LRRK2 RNA guide
caaggccaaagaauuuaccgaa

SEQ ID NO: 29811 - RNA, 22 nt, Artificial Sequence
  LRRK2 RNA guide
ccuugaccaguauucauuauuu

SEQ ID NO: 29812 - RNA, 22 nt, Artificial Sequence
  LRRK2 RNA guide
cgguaaauucuuuggccuugac

SEQ ID NO: 29813 - RNA, 22 nt, Artificial Sequence
  LRRK2 RNA guide
cugaaauaaugaauacugguca

SEQ ID NO: 29814 - RNA, 22 nt, Artificial Sequence
  LRRK2 RNA guide
cuggucaaggccaaagaauuua

SEQ ID NO: 29815 - RNA, 22 nt, Artificial Sequence
  LRRK2 RNA guide
cuugaccaguauucauuauuuc

SEQ ID NO: 29816 - RNA, 22 nt, Artificial Sequence
  LRRK2 RNA guide
cuuucgguaaauucuuuggccu

SEQ ID NO: 29817 - RNA, 22 nt, Artificial Sequence
  LRRK2 RNA guide
cuuuggccuugaccaguauuca

SEQ ID NO: 29818 - RNA, 22 nt, Artificial Sequence
  LRRK2 RNA guide
gaaauaaugaauacuggucaag

SEQ ID NO: 29819 - RNA, 22 nt, Artificial Sequence
  LRRK2 RNA guide
gaauacuggucaaggccaaaga

SEQ ID NO: 29820 - RNA, 22 nt, Artificial Sequence
  LRRK2 RNA guide
gccuugaccaguauucauuauu

SEQ ID NO: 29821 - RNA, 22 nt, Artificial Sequence
  LRRK2 RNA guide
ggccuugaccaguauucauuau

SEQ ID NO: 29822 - RNA, 22 nt, Artificial Sequence
  LRRK2 RNA guide
gguaaauucuuuggccuugacc

SEQ ID NO: 29823 - RNA, 22 nt, Artificial Sequence
  LRRK2 RNA guide
ggucaaggccaaagaauuuacc

SEQ ID NO: 29824 - RNA, 22 nt, Artificial Sequence
  LRRK2 RNA guide
guaaauucuuuggccuugacca

SEQ ID NO: 29825 - RNA, 22 nt, Artificial Sequence
  LRRK2 RNA guide
guacuuucgguaaauucuuugg

SEQ ID NO: 29826 - RNA, 22 nt, Artificial Sequence
  LRRK2 RNA guide
gucaaggccaaagaauuuaccg

SEQ ID NO: 29827 - RNA, 22 nt, Artificial Sequence
  LRRK2 RNA guide
uaaauucuuuggccuugaccag

SEQ ID NO: 29828 - RNA, 22 nt, Artificial Sequence
  LRRK2 RNA guide
uaaugaauacuggucaaggcca

SEQ ID NO: 29829 - RNA, 22 nt, Artificial Sequence
  LRRK2 RNA guide
uacuggucaaggccaaagaauu

SEQ ID NO: 29830 - RNA, 22 nt, Artificial Sequence
  LRRK2 RNA guide
uacuuucgguaaauucuuuggc

SEQ ID NO: 29831 - RNA, 22 nt, Artificial Sequence
  LRRK2 RNA guide
ucaaggccaaagaauuuaccga

SEQ ID NO: 29832 - RNA, 22 nt, Artificial Sequence
  LRRK2 RNA guide
ucgguaaauucuuuggccuuga

SEQ ID NO: 29833 - RNA, 22 nt, Artificial Sequence
  LRRK2 RNA guide
ucugaaauaaugaauacugguc

SEQ ID NO: 29834 - RNA, 22 nt, Artificial Sequence
  LRRK2 RNA guide
ucuuuggccuugaccaguauuc

SEQ ID NO: 29835 - RNA, 22 nt, Artificial Sequence
  LRRK2 RNA guide
ugaauacuggucaaggccaaag

SEQ ID NO: 29836 - RNA, 22 nt, Artificial Sequence
  LRRK2 RNA guide
uggccuugaccaguauucauua

SEQ ID NO: 29837 - RNA, 22 nt, Artificial Sequence
  LRRK2 RNA guide
uggucaaggccaaagaauuuac

SEQ ID NO: 29838 - RNA, 22 nt, Artificial Sequence
  LRRK2 RNA guide
uucgguaaauucuuuggccuug

SEQ ID NO: 29839 - RNA, 22 nt, Artificial Sequence
  LRRK2 RNA guide
uucuuuggccuugaccaguauu

SEQ ID NO: 29840 - RNA, 22 nt, Artificial Sequence
  LRRK2 RNA guide
uuggccuugaccaguauucauu

SEQ ID NO: 29841 - RNA, 22 nt, Artificial Sequence
  LRRK2 RNA guide
uuucgguaaauucuuuggccuu

SEQ ID NO: 29842 - RNA, 22 nt, Artificial Sequence
  LRRK2 RNA guide
uuuggccuugaccaguauucau

SEQ ID NO: 29843 - RNA, 20 nt, Artificial Sequence
  LRRK2 RNA guide
aaauucuuuggcccugauca

SEQ ID NO: 29844 - RNA, 20 nt, Artificial Sequence
  LRRK2 RNA guide
aauaaugaauacugaucagg

SEQ ID NO: 29845 - RNA, 20 nt, Artificial Sequence
  LRRK2 RNA guide
aauacugaucagggccaaag

SEQ ID NO: 29846 - RNA, 20 nt, Artificial Sequence
  LRRK2 RNA guide
aaugaauacugaucagggcc

SEQ ID NO: 29847 - RNA, 20 nt, Artificial Sequence
  LRRK2 RNA guide
aauucuuuggcccugaucag

SEQ ID NO: 29848 - RNA, 20 nt, Artificial Sequence
  LRRK2 RNA guide
acugaucagggccaaagaau

SEQ ID NO: 29849 - RNA, 20 nt, Artificial Sequence
  LRRK2 RNA guide
auaaugaauacugaucaggg

SEQ ID NO: 29850 - RNA, 20 nt, Artificial Sequence
  LRRK2 RNA guide
auacugaucagggccaaaga

SEQ ID NO: 29851 - RNA, 20 nt, Artificial Sequence
  LRRK2 RNA guide
augaauacugaucagggcca

SEQ ID NO: 29852 - RNA, 20 nt, Artificial Sequence
  LRRK2 RNA guide
auucuuuggcccugaucagu

SEQ ID NO: 29853 - RNA, 20 nt, Artificial Sequence
  LRRK2 RNA guide
cccugaucaguauucauuau

SEQ ID NO: 29854 - RNA, 20 nt, Artificial Sequence
  LRRK2 RNA guide
ccugaucaguauucauuauu

SEQ ID NO: 29855 - RNA, 20 nt, Artificial Sequence
  LRRK2 RNA guide
cgguaaauucuuuggcccug

SEQ ID NO: 29856 - RNA, 20 nt, Artificial Sequence
  LRRK2 RNA guide
cugaucagggccaaagaauu

SEQ ID NO: 29857 - RNA, 20 nt, Artificial Sequence
  LRRK2 RNA guide
cuuuggcccugaucaguauu

SEQ ID NO: 29858 - RNA, 20 nt, Artificial Sequence
  LRRK2 RNA guide
gaauacugaucagggccaaa

SEQ ID NO: 29859 - RNA, 20 nt, Artificial Sequence
  LRRK2 RNA guide
gaucagggccaaagaauuua

SEQ ID NO: 29860 - RNA, 20 nt, Artificial Sequence
  LRRK2 RNA guide
gcccugaucaguauucauua

SEQ ID NO: 29861 - RNA, 20 nt, Artificial Sequence
  LRRK2 RNA guide
ggcccugaucaguauucauu

SEQ ID NO: 29862 - RNA, 20 nt, Artificial Sequence
  LRRK2 RNA guide
gguaaauucuuuggcccuga

SEQ ID NO: 29863 - RNA, 20 nt, Artificial Sequence
  LRRK2 RNA guide
guaaauucuuuggcccugau

SEQ ID NO: 29864 - RNA, 20 nt, Artificial Sequence
  LRRK2 RNA guide
uaaauucuuuggcccugauc

SEQ ID NO: 29865 - RNA, 20 nt, Artificial Sequence
  LRRK2 RNA guide
uaaugaauacugaucagggc

SEQ ID NO: 29866 - RNA, 20 nt, Artificial Sequence
  LRRK2 RNA guide
uacugaucagggccaaagaa

SEQ ID NO: 29867 - RNA, 20 nt, Artificial Sequence
  LRRK2 RNA guide
ucgguaaauucuuuggcccu

SEQ ID NO: 29868 - RNA, 20 nt, Artificial Sequence
  LRRK2 RNA guide
ucuuuggcccugaucaguau

SEQ ID NO: 29869 - RNA, 20 nt, Artificial Sequence
  LRRK2 RNA guide
ugaauacugaucagggccaa

SEQ ID NO: 29870 - RNA, 20 nt, Artificial Sequence
  LRRK2 RNA guide
ugaucagggccaaagaauuu

SEQ ID NO: 29871 - RNA, 20 nt, Artificial Sequence
  LRRK2 RNA guide
uggcccugaucaguauucau

SEQ ID NO: 29872 - RNA, 20 nt, Artificial Sequence
  LRRK2 RNA guide
uucgguaaauucuuuggccc

SEQ ID NO: 29873 - RNA, 20 nt, Artificial Sequence
  LRRK2 RNA guide
uucuuuggcccugaucagua

SEQ ID NO: 29874 - RNA, 20 nt, Artificial Sequence
  LRRK2 RNA guide
uuggcccugaucaguauuca

SEQ ID NO: 29875 - RNA, 20 nt, Artificial Sequence
  LRRK2 RNA guide
uuuggcccugaucaguauuc

SEQ ID NO: 29876 - RNA, 21 nt, Artificial Sequence
  LRRK2 RNA guide
aaauucuuuggcccugaucag

SEQ ID NO: 29877 - RNA, 21 nt, Artificial Sequence
  LRRK2 RNA guide
aauaaugaauacugaucaggg

SEQ ID NO: 29878 - RNA, 21 nt, Artificial Sequence
  LRRK2 RNA guide
aauacugaucagggccaaaga

SEQ ID NO: 29879 - RNA, 21 nt, Artificial Sequence
  LRRK2 RNA guide
aaugaauacugaucagggcca

SEQ ID NO: 29880 - RNA, 21 nt, Artificial Sequence
  LRRK2 RNA guide
aauucuuuggcccugaucagu

SEQ ID NO: 29881 - RNA, 21 nt, Artificial Sequence
  LRRK2 RNA guide
acugaucagggccaaagaauu

SEQ ID NO: 29882 - RNA, 21 nt, Artificial Sequence
  LRRK2 RNA guide
auaaugaauacugaucagggc

SEQ ID NO: 29883 - RNA, 21 nt, Artificial Sequence
  LRRK2 RNA guide
auacugaucagggccaaagaa

SEQ ID NO: 29884 - RNA, 21 nt, Artificial Sequence
  LRRK2 RNA guide
augaauacugaucagggccaa

SEQ ID NO: 29885 - RNA, 21 nt, Artificial Sequence
  LRRK2 RNA guide
auucuuuggcccugaucagua

SEQ ID NO: 29886 - RNA, 21 nt, Artificial Sequence
  LRRK2 RNA guide
cccugaucaguauucauuauu

SEQ ID NO: 29887 - RNA, 21 nt, Artificial Sequence
  LRRK2 RNA guide
cgguaaauucuuuggcccuga

SEQ ID NO: 29888 - RNA, 21 nt, Artificial Sequence
  LRRK2 RNA guide
cugaucagggccaaagaauuu

SEQ ID NO: 29889 - RNA, 21 nt, Artificial Sequence
  LRRK2 RNA guide
cuuuggcccugaucaguauuc

SEQ ID NO: 29890 - RNA, 21 nt, Artificial Sequence
  LRRK2 RNA guide
gaauacugaucagggccaaag

SEQ ID NO: 29891 - RNA, 21 nt, Artificial Sequence
  LRRK2 RNA guide
gaucagggccaaagaauuuac

SEQ ID NO: 29892 - RNA, 21 nt, Artificial Sequence
  LRRK2 RNA guide
gcccugaucaguauucauuau

SEQ ID NO: 29893 - RNA, 21 nt, Artificial Sequence
  LRRK2 RNA guide
ggcccugaucaguauucauua

SEQ ID NO: 29894 - RNA, 21 nt, Artificial Sequence
  LRRK2 RNA guide
gguaaauucuuuggcccugau

SEQ ID NO: 29895 - RNA, 21 nt, Artificial Sequence
  LRRK2 RNA guide
guaaauucuuuggcccugauc

SEQ ID NO: 29896 - RNA, 21 nt, Artificial Sequence
  LRRK2 RNA guide
uaaauucuuuggcccugauca

SEQ ID NO: 29897 - RNA, 21 nt, Artificial Sequence
  LRRK2 RNA guide
uaaugaauacugaucagggcc

SEQ ID NO: 29898 - RNA, 21 nt, Artificial Sequence
  LRRK2 RNA guide
uacugaucagggccaaagaau

SEQ ID NO: 29899 - RNA, 21 nt, Artificial Sequence
  LRRK2 RNA guide
ucgguaaauucuuuggcccug

SEQ ID NO: 29900 - RNA, 21 nt, Artificial Sequence
  LRRK2 RNA guide
ucuuuggcccugaucaguauu

SEQ ID NO: 29901 - RNA, 21 nt, Artificial Sequence
  LRRK2 RNA guide
ugaauacugaucagggccaaa

SEQ ID NO: 29902 - RNA, 21 nt, Artificial Sequence
  LRRK2 RNA guide
ugaucagggccaaagaauuua

SEQ ID NO: 29903 - RNA, 21 nt, Artificial Sequence
  LRRK2 RNA guide
uggcccugaucaguauucauu

SEQ ID NO: 29904 - RNA, 21 nt, Artificial Sequence
  LRRK2 RNA guide
uucgguaaauucuuuggcccu

SEQ ID NO: 29905 - RNA, 21 nt, Artificial Sequence
  LRRK2 RNA guide
uucuuuggcccugaucaguau

SEQ ID NO: 29906 - RNA, 21 nt, Artificial Sequence
  LRRK2 RNA guide
uuggcccugaucaguauucau

SEQ ID NO: 29907 - RNA, 21 nt, Artificial Sequence
  LRRK2 RNA guide
uuucgguaaauucuuuggccc

SEQ ID NO: 29908 - RNA, 21 nt, Artificial Sequence
  LRRK2 RNA guide
uuuggcccugaucaguauuca

SEQ ID NO: 29909 - RNA, 22 nt, Artificial Sequence
  LRRK2 RNA guide
aaauaaugaauacugaucaggg

SEQ ID NO: 29910 - RNA, 22 nt, Artificial Sequence
  LRRK2 RNA guide
aaauucuuuggcccugaucagu

SEQ ID NO: 29911 - RNA, 22 nt, Artificial Sequence
  LRRK2 RNA guide
aauaaugaauacugaucagggc

SEQ ID NO: 29912 - RNA, 22 nt, Artificial Sequence
  LRRK2 RNA guide
aauacugaucagggccaaagaa

SEQ ID NO: 29913 - RNA, 22 nt, Artificial Sequence
  LRRK2 RNA guide
aaugaauacugaucagggccaa

SEQ ID NO: 29914 - RNA, 22 nt, Artificial Sequence
  LRRK2 RNA guide
aauucuuuggcccugaucagua

SEQ ID NO: 29915 - RNA, 22 nt, Artificial Sequence
  LRRK2 RNA guide
acugaucagggccaaagaauuu

SEQ ID NO: 29916 - RNA, 22 nt, Artificial Sequence
  LRRK2 RNA guide
auaaugaauacugaucagggcc

SEQ ID NO: 29917 - RNA, 22 nt, Artificial Sequence
  LRRK2 RNA guide
auacugaucagggccaaagaau

SEQ ID NO: 29918 - RNA, 22 nt, Artificial Sequence
  LRRK2 RNA guide
augaauacugaucagggccaaa

SEQ ID NO: 29919 - RNA, 22 nt, Artificial Sequence
  LRRK2 RNA guide
auucuuuggcccugaucaguau

SEQ ID NO: 29920 - RNA, 22 nt, Artificial Sequence
  LRRK2 RNA guide
cccugaucaguauucauuauuu

SEQ ID NO: 29921 - RNA, 22 nt, Artificial Sequence
  LRRK2 RNA guide
ccugaucaguauucauuauuuc

SEQ ID NO: 29922 - RNA, 22 nt, Artificial Sequence
  LRRK2 RNA guide
cgguaaauucuuuggcccugau

SEQ ID NO: 29923 - RNA, 22 nt, Artificial Sequence
  LRRK2 RNA guide
cugaucagggccaaagaauuua

SEQ ID NO: 29924 - RNA, 22 nt, Artificial Sequence
  LRRK2 RNA guide
cuuucgguaaauucuuuggccc

SEQ ID NO: 29925 - RNA, 22 nt, Artificial Sequence
  LRRK2 RNA guide
cuuuggcccugaucaguauuca

SEQ ID NO: 29926 - RNA, 22 nt, Artificial Sequence
  LRRK2 RNA guide
gaaauaaugaauacugaucagg

SEQ ID NO: 29927 - RNA, 22 nt, Artificial Sequence
  LRRK2 RNA guide
gaauacugaucagggccaaaga

SEQ ID NO: 29928 - RNA, 22 nt, Artificial Sequence
  LRRK2 RNA guide
gaucagggccaaagaauuuacc

SEQ ID NO: 29929 - RNA, 22 nt, Artificial Sequence
  LRRK2 RNA guide
gcccugaucaguauucauuauu

SEQ ID NO: 29930 - RNA, 22 nt, Artificial Sequence
  LRRK2 RNA guide
ggcccugaucaguauucauuau

SEQ ID NO: 29931 - RNA, 22 nt, Artificial Sequence
  LRRK2 RNA guide
gguaaauucuuuggcccugauc

SEQ ID NO: 29932 - RNA, 22 nt, Artificial Sequence
  LRRK2 RNA guide
guaaauucuuuggcccugauca

SEQ ID NO: 29933 - RNA, 22 nt, Artificial Sequence
  LRRK2 RNA guide
uaaauucuuuggcccugaucag

SEQ ID NO: 29934 - RNA, 22 nt, Artificial Sequence
  LRRK2 RNA guide
uaaugaauacugaucagggcca

SEQ ID NO: 29935 - RNA, 22 nt, Artificial Sequence
  LRRK2 RNA guide
uacugaucagggccaaagaauu

SEQ ID NO: 29936 - RNA, 22 nt, Artificial Sequence
  LRRK2 RNA guide
ucgguaaauucuuuggcccuga

SEQ ID NO: 29937 - RNA, 22 nt, Artificial Sequence
  LRRK2 RNA guide
ucuuuggcccugaucaguauuc

SEQ ID NO: 29938 - RNA, 22 nt, Artificial Sequence
  LRRK2 RNA guide
ugaauacugaucagggccaaag

SEQ ID NO: 29939 - RNA, 22 nt, Artificial Sequence
  LRRK2 RNA guide
ugaucagggccaaagaauuuac

SEQ ID NO: 29940 - RNA, 22 nt, Artificial Sequence
  LRRK2 RNA guide
uggcccugaucaguauucauua

SEQ ID NO: 29941 - RNA, 22 nt, Artificial Sequence
  LRRK2 RNA guide
uucgguaaauucuuuggcccug

SEQ ID NO: 29942 - RNA, 22 nt, Artificial Sequence
  LRRK2 RNA guide
uucuuuggcccugaucaguauu

SEQ ID NO: 29943 - RNA, 22 nt, Artificial Sequence
  LRRK2 RNA guide
uuggcccugaucaguauucauu

SEQ ID NO: 29944 - RNA, 22 nt, Artificial Sequence
  LRRK2 RNA guide
uuucgguaaauucuuuggcccu

SEQ ID NO: 29945 - RNA, 22 nt, Artificial Sequence
  LRRK2 RNA guide
uuuggcccugaucaguauucau

SEQ ID NO: 29946 - RNA, 20 nt, Artificial Sequence
  LRRK2 RNA guide
gcauuuuacuaugugaaaac

SEQ ID NO: 29947 - RNA, 20 nt, Artificial Sequence
  LRRK2 RNA guide
ggcauuuuacuaugugaaaa

SEQ ID NO: 29948 - RNA, 20 nt, Artificial Sequence
  LRRK2 RNA guide
uggcauuuuacuaugugaaa

SEQ ID NO: 29949 - RNA, 21 nt, Artificial Sequence
  LRRK2 RNA guide
ggcauuuuacuaugugaaaac

SEQ ID NO: 29950 - RNA, 22 nt, Artificial Sequence
  LRRK2 RNA guide
ggcauuuuacuaugugaaaacu

SEQ ID NO: 29951 - RNA, 22 nt, Artificial Sequence
  LRRK2 RNA guide
uggcauuuuacuaugugaaaac

SEQ ID NO: 29952 - RNA, 20 nt, Artificial Sequence
  LRRK2 RNA guide
aaagagcucuauuguauaug

SEQ ID NO: 29953 - RNA, 20 nt, Artificial Sequence
  LRRK2 RNA guide
aacaaagagcucuauuguau

SEQ ID NO: 29954 - RNA, 20 nt, Artificial Sequence
  LRRK2 RNA guide
aacacuggaacaaagagcuc

SEQ ID NO: 29955 - RNA, 20 nt, Artificial Sequence
  LRRK2 RNA guide
aagagcucuauuguauauga

SEQ ID NO: 29956 - RNA, 20 nt, Artificial Sequence
  LRRK2 RNA guide
aaucauauacaauagagcuc

SEQ ID NO: 29957 - RNA, 20 nt, Artificial Sequence
  LRRK2 RNA guide
acaaagagcucuauuguaua

SEQ ID NO: 29958 - RNA, 20 nt, Artificial Sequence
  LRRK2 RNA guide
acaauagagcucuuuguucc

SEQ ID NO: 29959 - RNA, 20 nt, Artificial Sequence
  LRRK2 RNA guide
acacuggaacaaagagcucu

SEQ ID NO: 29960 - RNA, 20 nt, Artificial Sequence
  LRRK2 RNA guide
acuggaacaaagagcucuau

SEQ ID NO: 29961 - RNA, 20 nt, Artificial Sequence
  LRRK2 RNA guide
agagcucuauuguauaugau

SEQ ID NO: 29962 - RNA, 20 nt, Artificial Sequence
  LRRK2 RNA guide
auacaauagagcucuuuguu

SEQ ID NO: 29963 - RNA, 20 nt, Artificial Sequence
  LRRK2 RNA guide
auauacaauagagcucuuug

SEQ ID NO: 29964 - RNA, 20 nt, Artificial Sequence
  LRRK2 RNA guide
aucauauacaauagagcucu

SEQ ID NO: 29965 - RNA, 20 nt, Artificial Sequence
  LRRK2 RNA guide
caaagagcucuauuguauau

SEQ ID NO: 29966 - RNA, 20 nt, Artificial Sequence
  LRRK2 RNA guide
cacuggaacaaagagcucua

SEQ ID NO: 29967 - RNA, 20 nt, Artificial Sequence
  LRRK2 RNA guide
cauauacaauagagcucuuu

SEQ ID NO: 29968 - RNA, 20 nt, Artificial Sequence
  LRRK2 RNA guide
gaacaaagagcucuauugua

SEQ ID NO: 29969 - RNA, 20 nt, Artificial Sequence
  LRRK2 RNA guide
gagcucuauuguauaugauu

SEQ ID NO: 29970 - RNA, 20 nt, Artificial Sequence
  LRRK2 RNA guide
ggaacaaagagcucuauugu

SEQ ID NO: 29971 - RNA, 20 nt, Artificial Sequence
  LRRK2 RNA guide
uacaauagagcucuuuguuc

SEQ ID NO: 29972 - RNA, 20 nt, Artificial Sequence
  LRRK2 RNA guide
uauacaauagagcucuuugu

SEQ ID NO: 29973 - RNA, 20 nt, Artificial Sequence
  LRRK2 RNA guide
ucauauacaauagagcucuu

SEQ ID NO: 29974 - RNA, 20 nt, Artificial Sequence
  LRRK2 RNA guide
uggaacaaagagcucuauug

SEQ ID NO: 29975 - RNA, 21 nt, Artificial Sequence
  LRRK2 RNA guide
aacacuggaacaaagagcucu

SEQ ID NO: 29976 - RNA, 21 nt, Artificial Sequence
  LRRK2 RNA guide
acaauagagcucuuuguucca

SEQ ID NO: 29977 - RNA, 21 nt, Artificial Sequence
  LRRK2 RNA guide
acacuggaacaaagagcucua

SEQ ID NO: 29978 - RNA, 21 nt, Artificial Sequence
  LRRK2 RNA guide
acuggaacaaagagcucuauu

SEQ ID NO: 29979 - RNA, 21 nt, Artificial Sequence
  LRRK2 RNA guide
auacaauagagcucuuuguuc

SEQ ID NO: 29980 - RNA, 21 nt, Artificial Sequence
  LRRK2 RNA guide
caaagagcucuauuguauaug

SEQ ID NO: 29981 - RNA, 21 nt, Artificial Sequence
  LRRK2 RNA guide
cacuggaacaaagagcucuau

SEQ ID NO: 29982 - RNA, 21 nt, Artificial Sequence
  LRRK2 RNA guide
cauauacaauagagcucuuug

SEQ ID NO: 29983 - RNA, 21 nt, Artificial Sequence
  LRRK2 RNA guide
cuggaacaaagagcucuauug

SEQ ID NO: 29984 - RNA, 21 nt, Artificial Sequence
  LRRK2 RNA guide
gaacaaagagcucuauuguau

SEQ ID NO: 29985 - RNA, 21 nt, Artificial Sequence
  LRRK2 RNA guide
ggaacaaagagcucuauugua

SEQ ID NO: 29986 - RNA, 21 nt, Artificial Sequence
  LRRK2 RNA guide
uaacacuggaacaaagagcuc

SEQ ID NO: 29987 - RNA, 21 nt, Artificial Sequence
  LRRK2 RNA guide
uacaauagagcucuuuguucc

SEQ ID NO: 29988 - RNA, 21 nt, Artificial Sequence
  LRRK2 RNA guide
uggaacaaagagcucuauugu

SEQ ID NO: 29989 - RNA, 22 nt, Artificial Sequence
  LRRK2 RNA guide
aacacuggaacaaagagcucua

SEQ ID NO: 29990 - RNA, 22 nt, Artificial Sequence
  LRRK2 RNA guide
acaaagagcucuauuguauaug

SEQ ID NO: 29991 - RNA, 22 nt, Artificial Sequence
  LRRK2 RNA guide
acaauagagcucuuuguuccag

SEQ ID NO: 29992 - RNA, 22 nt, Artificial Sequence
  LRRK2 RNA guide
acacuggaacaaagagcucuau

SEQ ID NO: 29993 - RNA, 22 nt, Artificial Sequence
  LRRK2 RNA guide
acuggaacaaagagcucuauug

SEQ ID NO: 29994 - RNA, 22 nt, Artificial Sequence
  LRRK2 RNA guide
auaacacuggaacaaagagcuc

SEQ ID NO: 29995 - RNA, 22 nt, Artificial Sequence
  LRRK2 RNA guide
auacaauagagcucuuuguucc

SEQ ID NO: 29996 - RNA, 22 nt, Artificial Sequence
  LRRK2 RNA guide
caaagagcucuauuguauauga

SEQ ID NO: 29997 - RNA, 22 nt, Artificial Sequence
  LRRK2 RNA guide
cacuggaacaaagagcucuauu

SEQ ID NO: 29998 - RNA, 22 nt, Artificial Sequence
  LRRK2 RNA guide
cauauacaauagagcucuuugu

SEQ ID NO: 29999 - RNA, 22 nt, Artificial Sequence
  LRRK2 RNA guide
cuggaacaaagagcucuauugu

SEQ ID NO: 30000 - RNA, 22 nt, Artificial Sequence
  LRRK2 RNA guide
gaacaaagagcucuauuguaua

SEQ ID NO: 30001 - RNA, 22 nt, Artificial Sequence
  LRRK2 RNA guide
ggaacaaagagcucuauuguau

SEQ ID NO: 30002 - RNA, 22 nt, Artificial Sequence
  LRRK2 RNA guide
uaacacuggaacaaagagcucu

SEQ ID NO: 30003 - RNA, 22 nt, Artificial Sequence
  LRRK2 RNA guide
uacaauagagcucuuuguucca

SEQ ID NO: 30004 - RNA, 22 nt, Artificial Sequence
  LRRK2 RNA guide
uauacaauagagcucuuuguuc

SEQ ID NO: 30005 - RNA, 22 nt, Artificial Sequence
  LRRK2 RNA guide
ucauauacaauagagcucuuug

SEQ ID NO: 30006 - RNA, 22 nt, Artificial Sequence
  LRRK2 RNA guide
uggaacaaagagcucuauugua

SEQ ID NO: 30007 - RNA, 20 nt, Artificial Sequence
  LRRK2 RNA guide
aaagagauaacacuggaaaa

SEQ ID NO: 30008 - RNA, 20 nt, Artificial Sequence
  LRRK2 RNA guide
aacacuggaaaaaagagcuc

SEQ ID NO: 30009 - RNA, 20 nt, Artificial Sequence
  LRRK2 RNA guide
aagagauaacacuggaaaaa

SEQ ID NO: 30010 - RNA, 20 nt, Artificial Sequence
  LRRK2 RNA guide
aauagagcucuuuuuuccag

SEQ ID NO: 30011 - RNA, 20 nt, Artificial Sequence
  LRRK2 RNA guide
aaugaaagagauaacacugg

SEQ ID NO: 30012 - RNA, 20 nt, Artificial Sequence
  LRRK2 RNA guide
acacuggaaaaaagagcucu

SEQ ID NO: 30013 - RNA, 20 nt, Artificial Sequence
  LRRK2 RNA guide
acuggaaaaaagagcucuau

SEQ ID NO: 30014 - RNA, 20 nt, Artificial Sequence
  LRRK2 RNA guide
agagauaacacuggaaaaaa

SEQ ID NO: 30015 - RNA, 20 nt, Artificial Sequence
  LRRK2 RNA guide
agagcucuuuuuuccagugu

SEQ ID NO: 30016 - RNA, 20 nt, Artificial Sequence
  LRRK2 RNA guide
agauaacacuggaaaaaaga

SEQ ID NO: 30017 - RNA, 20 nt, Artificial Sequence
  LRRK2 RNA guide
agcucuuuuuuccaguguua

SEQ ID NO: 30018 - RNA, 20 nt, Artificial Sequence
  LRRK2 RNA guide
auaacacuggaaaaaagagc

SEQ ID NO: 30019 - RNA, 20 nt, Artificial Sequence
  LRRK2 RNA guide
auaauagagcucuuuuuucc

SEQ ID NO: 30020 - RNA, 20 nt, Artificial Sequence
  LRRK2 RNA guide
auagagcucuuuuuuccagu

SEQ ID NO: 30021 - RNA, 20 nt, Artificial Sequence
  LRRK2 RNA guide
augaaagagauaacacugga

SEQ ID NO: 30022 - RNA, 20 nt, Artificial Sequence
  LRRK2 RNA guide
caaugaaagagauaacacug

SEQ ID NO: 30023 - RNA, 20 nt, Artificial Sequence
  LRRK2 RNA guide
cacuggaaaaaagagcucua

SEQ ID NO: 30024 - RNA, 20 nt, Artificial Sequence
  LRRK2 RNA guide
cucuuuuuuccaguguuauc

SEQ ID NO: 30025 - RNA, 20 nt, Artificial Sequence
  LRRK2 RNA guide
cuggaaaaaagagcucuauu

SEQ ID NO: 30026 - RNA, 20 nt, Artificial Sequence
  LRRK2 RNA guide
cuuuuuuccaguguuaucuc

SEQ ID NO: 30027 - RNA, 20 nt, Artificial Sequence
  LRRK2 RNA guide
gaaagagauaacacuggaaa

SEQ ID NO: 30028 - RNA, 20 nt, Artificial Sequence
  LRRK2 RNA guide
gagauaacacuggaaaaaag

SEQ ID NO: 30029 - RNA, 20 nt, Artificial Sequence
  LRRK2 RNA guide
gagcucuuuuuuccaguguu

SEQ ID NO: 30030 - RNA, 20 nt, Artificial Sequence
  LRRK2 RNA guide
gauaacacuggaaaaaagag

SEQ ID NO: 30031 - RNA, 20 nt, Artificial Sequence
  LRRK2 RNA guide
gcucuuuuuuccaguguuau

SEQ ID NO: 30032 - RNA, 20 nt, Artificial Sequence
  LRRK2 RNA guide
ggaaaaaagagcucuauuau

SEQ ID NO: 30033 - RNA, 20 nt, Artificial Sequence
  LRRK2 RNA guide
uaacacuggaaaaaagagcu

SEQ ID NO: 30034 - RNA, 20 nt, Artificial Sequence
  LRRK2 RNA guide
uaauagagcucuuuuuucca

SEQ ID NO: 30035 - RNA, 20 nt, Artificial Sequence
  LRRK2 RNA guide
uagagcucuuuuuuccagug

SEQ ID NO: 30036 - RNA, 20 nt, Artificial Sequence
  LRRK2 RNA guide
ucuuuuuuccaguguuaucu

SEQ ID NO: 30037 - RNA, 20 nt, Artificial Sequence
  LRRK2 RNA guide
ugaaagagauaacacuggaa

SEQ ID NO: 30038 - RNA, 20 nt, Artificial Sequence
  LRRK2 RNA guide
uggaaaaaagagcucuauua

SEQ ID NO: 30039 - RNA, 20 nt, Artificial Sequence
  LRRK2 RNA guide
uuuuccaguguuaucucuuu

SEQ ID NO: 30040 - RNA, 20 nt, Artificial Sequence
  LRRK2 RNA guide
uuuuuccaguguuaucucuu

SEQ ID NO: 30041 - RNA, 20 nt, Artificial Sequence
  LRRK2 RNA guide
uuuuuuccaguguuaucucu

SEQ ID NO: 30042 - RNA, 21 nt, Artificial Sequence
  LRRK2 RNA guide
aacacuggaaaaaagagcucu

SEQ ID NO: 30043 - RNA, 21 nt, Artificial Sequence
  LRRK2 RNA guide
aauagagcucuuuuuuccagu

SEQ ID NO: 30044 - RNA, 21 nt, Artificial Sequence
  LRRK2 RNA guide
aaugaaagagauaacacugga

SEQ ID NO: 30045 - RNA, 21 nt, Artificial Sequence
  LRRK2 RNA guide
acaaugaaagagauaacacug

SEQ ID NO: 30046 - RNA, 21 nt, Artificial Sequence
  LRRK2 RNA guide
acacuggaaaaaagagcucua

SEQ ID NO: 30047 - RNA, 21 nt, Artificial Sequence
  LRRK2 RNA guide
acuggaaaaaagagcucuauu

SEQ ID NO: 30048 - RNA, 21 nt, Artificial Sequence
  LRRK2 RNA guide
agagauaacacuggaaaaaag

SEQ ID NO: 30049 - RNA, 21 nt, Artificial Sequence
  LRRK2 RNA guide
agagcucuuuuuuccaguguu

SEQ ID NO: 30050 - RNA, 21 nt, Artificial Sequence
  LRRK2 RNA guide
agauaacacuggaaaaaagag

SEQ ID NO: 30051 - RNA, 21 nt, Artificial Sequence
  LRRK2 RNA guide
agcucuuuuuuccaguguuau

SEQ ID NO: 30052 - RNA, 21 nt, Artificial Sequence
  LRRK2 RNA guide
auaacacuggaaaaaagagcu

SEQ ID NO: 30053 - RNA, 21 nt, Artificial Sequence
  LRRK2 RNA guide
auagagcucuuuuuuccagug

SEQ ID NO: 30054 - RNA, 21 nt, Artificial Sequence
  LRRK2 RNA guide
augaaagagauaacacuggaa

SEQ ID NO: 30055 - RNA, 21 nt, Artificial Sequence
  LRRK2 RNA guide
caaugaaagagauaacacugg

SEQ ID NO: 30056 - RNA, 21 nt, Artificial Sequence
  LRRK2 RNA guide
cacuggaaaaaagagcucuau

SEQ ID NO: 30057 - RNA, 21 nt, Artificial Sequence
  LRRK2 RNA guide
cucuuuuuuccaguguuaucu

SEQ ID NO: 30058 - RNA, 21 nt, Artificial Sequence
  LRRK2 RNA guide
cuggaaaaaagagcucuauua

SEQ ID NO: 30059 - RNA, 21 nt, Artificial Sequence
  LRRK2 RNA guide
cuuuuuuccaguguuaucucu

SEQ ID NO: 30060 - RNA, 21 nt, Artificial Sequence
  LRRK2 RNA guide
gaaagagauaacacuggaaaa

SEQ ID NO: 30061 - RNA, 21 nt, Artificial Sequence
  LRRK2 RNA guide
gagauaacacuggaaaaaaga

SEQ ID NO: 30062 - RNA, 21 nt, Artificial Sequence
  LRRK2 RNA guide
gagcucuuuuuuccaguguua

SEQ ID NO: 30063 - RNA, 21 nt, Artificial Sequence
  LRRK2 RNA guide
gauaacacuggaaaaaagagc

SEQ ID NO: 30064 - RNA, 21 nt, Artificial Sequence
  LRRK2 RNA guide
gcucuuuuuuccaguguuauc

SEQ ID NO: 30065 - RNA, 21 nt, Artificial Sequence
  LRRK2 RNA guide
uaacacuggaaaaaagagcuc

SEQ ID NO: 30066 - RNA, 21 nt, Artificial Sequence
  LRRK2 RNA guide
uaauagagcucuuuuuuccag

SEQ ID NO: 30067 - RNA, 21 nt, Artificial Sequence
  LRRK2 RNA guide
uagagcucuuuuuuccagugu

SEQ ID NO: 30068 - RNA, 21 nt, Artificial Sequence
  LRRK2 RNA guide
ucuuuuuuccaguguuaucuc

SEQ ID NO: 30069 - RNA, 21 nt, Artificial Sequence
  LRRK2 RNA guide
ugaaagagauaacacuggaaa

SEQ ID NO: 30070 - RNA, 21 nt, Artificial Sequence
  LRRK2 RNA guide
uuuuccaguguuaucucuuuc

SEQ ID NO: 30071 - RNA, 22 nt, Artificial Sequence
  LRRK2 RNA guide
aacaaugaaagagauaacacug

SEQ ID NO: 30072 - RNA, 22 nt, Artificial Sequence
  LRRK2 RNA guide
aacacuggaaaaaagagcucua

SEQ ID NO: 30073 - RNA, 22 nt, Artificial Sequence
  LRRK2 RNA guide
aagagauaacacuggaaaaaag

SEQ ID NO: 30074 - RNA, 22 nt, Artificial Sequence
  LRRK2 RNA guide
aauagagcucuuuuuuccagug

SEQ ID NO: 30075 - RNA, 22 nt, Artificial Sequence
  LRRK2 RNA guide
aaugaaagagauaacacuggaa

SEQ ID NO: 30076 - RNA, 22 nt, Artificial Sequence
  LRRK2 RNA guide
acaaugaaagagauaacacugg

SEQ ID NO: 30077 - RNA, 22 nt, Artificial Sequence
  LRRK2 RNA guide
acacuggaaaaaagagcucuau

SEQ ID NO: 30078 - RNA, 22 nt, Artificial Sequence
  LRRK2 RNA guide
acuggaaaaaagagcucuauua

SEQ ID NO: 30079 - RNA, 22 nt, Artificial Sequence
  LRRK2 RNA guide
agagauaacacuggaaaaaaga

SEQ ID NO: 30080 - RNA, 22 nt, Artificial Sequence
  LRRK2 RNA guide
agagcucuuuuuuccaguguua

SEQ ID NO: 30081 - RNA, 22 nt, Artificial Sequence
  LRRK2 RNA guide
agauaacacuggaaaaaagagc

SEQ ID NO: 30082 - RNA, 22 nt, Artificial Sequence
  LRRK2 RNA guide
agcucuuuuuuccaguguuauc

SEQ ID NO: 30083 - RNA, 22 nt, Artificial Sequence
  LRRK2 RNA guide
auaacacuggaaaaaagagcuc

SEQ ID NO: 30084 - RNA, 22 nt, Artificial Sequence
  LRRK2 RNA guide
auaauagagcucuuuuuuccag

SEQ ID NO: 30085 - RNA, 22 nt, Artificial Sequence
  LRRK2 RNA guide
auagagcucuuuuuuccagugu

SEQ ID NO: 30086 - RNA, 22 nt, Artificial Sequence
  LRRK2 RNA guide
augaaagagauaacacuggaaa

SEQ ID NO: 30087 - RNA, 22 nt, Artificial Sequence
  LRRK2 RNA guide
caaugaaagagauaacacugga

SEQ ID NO: 30088 - RNA, 22 nt, Artificial Sequence
  LRRK2 RNA guide
cacuggaaaaaagagcucuauu

SEQ ID NO: 30089 - RNA, 22 nt, Artificial Sequence
  LRRK2 RNA guide
cucuuuuuuccaguguuaucuc

SEQ ID NO: 30090 - RNA, 22 nt, Artificial Sequence
  LRRK2 RNA guide
cuggaaaaaagagcucuauuau

SEQ ID NO: 30091 - RNA, 22 nt, Artificial Sequence
  LRRK2 RNA guide
cuuuuuuccaguguuaucucuu

SEQ ID NO: 30092 - RNA, 22 nt, Artificial Sequence
  LRRK2 RNA guide
gaaagagauaacacuggaaaaa

SEQ ID NO: 30093 - RNA, 22 nt, Artificial Sequence
  LRRK2 RNA guide
gagauaacacuggaaaaaagag

SEQ ID NO: 30094 - RNA, 22 nt, Artificial Sequence
  LRRK2 RNA guide
gagcucuuuuuuccaguguuau

SEQ ID NO: 30095 - RNA, 22 nt, Artificial Sequence
  LRRK2 RNA guide
gauaacacuggaaaaaagagcu

SEQ ID NO: 30096 - RNA, 22 nt, Artificial Sequence
  LRRK2 RNA guide
gcucuuuuuuccaguguuaucu

SEQ ID NO: 30097 - RNA, 22 nt, Artificial Sequence
  LRRK2 RNA guide
uaacacuggaaaaaagagcucu

SEQ ID NO: 30098 - RNA, 22 nt, Artificial Sequence
  LRRK2 RNA guide
uaauagagcucuuuuuuccagu

SEQ ID NO: 30099 - RNA, 22 nt, Artificial Sequence
  LRRK2 RNA guide
uagagcucuuuuuuccaguguu

SEQ ID NO: 30100 - RNA, 22 nt, Artificial Sequence
  LRRK2 RNA guide
ucuuuuuuccaguguuaucucu

SEQ ID NO: 30101 - RNA, 22 nt, Artificial Sequence
  LRRK2 RNA guide
ugaaagagauaacacuggaaaa

SEQ ID NO: 30102 - RNA, 22 nt, Artificial Sequence
  LRRK2 RNA guide
uuuuccaguguuaucucuuuca

SEQ ID NO: 30103 - RNA, 22 nt, Artificial Sequence
  LRRK2 RNA guide
uuuuuccaguguuaucucuuuc

SEQ ID NO: 30104 - RNA, 20 nt, Artificial Sequence
  LRRK2 RNA guide
cauuuugaaugaccaauaag

SEQ ID NO: 30105 - RNA, 20 nt, Artificial Sequence
  LRRK2 RNA guide
cuuauuggucauucaaaaug

SEQ ID NO: 30106 - RNA, 20 nt, Artificial Sequence
  LRRK2 RNA guide
gaaauucauuuugaaugacc

SEQ ID NO: 30107 - RNA, 20 nt, Artificial Sequence
  LRRK2 RNA guide
ggaaauucauuuugaaugac

SEQ ID NO: 30108 - RNA, 21 nt, Artificial Sequence
  LRRK2 RNA guide
ggaaauucauuuugaaugacc

SEQ ID NO: 30109 - RNA, 22 nt, Artificial Sequence
  LRRK2 RNA guide
aggaaauucauuuugaaugacc

SEQ ID NO: 30110 - RNA, 22 nt, Artificial Sequence
  LRRK2 RNA guide
ggaaauucauuuugaaugacca

SEQ ID NO: 30111 - RNA, 22 nt, Artificial Sequence
  LRRK2 RNA guide
uggucauucaaaaugaauuucc

SEQ ID NO: 30112 - RNA, 20 nt, Artificial Sequence
  LRRK2 RNA guide
aaaaagaaaucacauaaggg

SEQ ID NO: 30113 - RNA, 20 nt, Artificial Sequence
  LRRK2 RNA guide
aaaagaaaucacauaagggu

SEQ ID NO: 30114 - RNA, 20 nt, Artificial Sequence
  LRRK2 RNA guide
aaagaaaucacauaagggua

SEQ ID NO: 30115 - RNA, 20 nt, Artificial Sequence
  LRRK2 RNA guide
aaaucacauaaggguaguau

SEQ ID NO: 30116 - RNA, 20 nt, Artificial Sequence
  LRRK2 RNA guide
aagaaaucacauaaggguag

SEQ ID NO: 30117 - RNA, 20 nt, Artificial Sequence
  LRRK2 RNA guide
aaucacauaaggguaguaua

SEQ ID NO: 30118 - RNA, 20 nt, Artificial Sequence
  LRRK2 RNA guide
acauaaggguaguauaugug

SEQ ID NO: 30119 - RNA, 20 nt, Artificial Sequence
  LRRK2 RNA guide
acauauacuacccuuaugug

SEQ ID NO: 30120 - RNA, 20 nt, Artificial Sequence
  LRRK2 RNA guide
acccuuaugugauuucuuuu

SEQ ID NO: 30121 - RNA, 20 nt, Artificial Sequence
  LRRK2 RNA guide
acuacccuuaugugauuucu

SEQ ID NO: 30122 - RNA, 20 nt, Artificial Sequence
  LRRK2 RNA guide
agaaaucacauaaggguagu

SEQ ID NO: 30123 - RNA, 20 nt, Artificial Sequence
  LRRK2 RNA guide
agucacauauacuacccuua

SEQ ID NO: 30124 - RNA, 20 nt, Artificial Sequence
  LRRK2 RNA guide
auaaggguaguauaugugac

SEQ ID NO: 30125 - RNA, 20 nt, Artificial Sequence
  LRRK2 RNA guide
auacuacccuuaugugauuu

SEQ ID NO: 30126 - RNA, 20 nt, Artificial Sequence
  LRRK2 RNA guide
auauacuacccuuaugugau

SEQ ID NO: 30127 - RNA, 20 nt, Artificial Sequence
  LRRK2 RNA guide
aucacauaaggguaguauau

SEQ ID NO: 30128 - RNA, 20 nt, Artificial Sequence
  LRRK2 RNA guide
auggagucacauauacuacc

SEQ ID NO: 30129 - RNA, 20 nt, Artificial Sequence
  LRRK2 RNA guide
cacauaaggguaguauaugu

SEQ ID NO: 30130 - RNA, 20 nt, Artificial Sequence
  LRRK2 RNA guide
cacauauacuacccuuaugu

SEQ ID NO: 30131 - RNA, 20 nt, Artificial Sequence
  LRRK2 RNA guide
cauaaggguaguauauguga

SEQ ID NO: 30132 - RNA, 20 nt, Artificial Sequence
  LRRK2 RNA guide
cauauacuacccuuauguga

SEQ ID NO: 30133 - RNA, 20 nt, Artificial Sequence
  LRRK2 RNA guide
cccuuaugugauuucuuuuu

SEQ ID NO: 30134 - RNA, 20 nt, Artificial Sequence
  LRRK2 RNA guide
cuacccuuaugugauuucuu

SEQ ID NO: 30135 - RNA, 20 nt, Artificial Sequence
  LRRK2 RNA guide
gaaaucacauaaggguagua

SEQ ID NO: 30136 - RNA, 20 nt, Artificial Sequence
  LRRK2 RNA guide
gagucacauauacuacccuu

SEQ ID NO: 30137 - RNA, 20 nt, Artificial Sequence
  LRRK2 RNA guide
gauggagucacauauacuac

SEQ ID NO: 30138 - RNA, 20 nt, Artificial Sequence
  LRRK2 RNA guide
ggagucacauauacuacccu

SEQ ID NO: 30139 - RNA, 20 nt, Artificial Sequence
  LRRK2 RNA guide
gucacauauacuacccuuau

SEQ ID NO: 30140 - RNA, 20 nt, Artificial Sequence
  LRRK2 RNA guide
uacccuuaugugauuucuuu

SEQ ID NO: 30141 - RNA, 20 nt, Artificial Sequence
  LRRK2 RNA guide
uacuacccuuaugugauuuc

SEQ ID NO: 30142 - RNA, 20 nt, Artificial Sequence
  LRRK2 RNA guide
uauacuacccuuaugugauu

SEQ ID NO: 30143 - RNA, 20 nt, Artificial Sequence
  LRRK2 RNA guide
ucacauaaggguaguauaug

SEQ ID NO: 30144 - RNA, 20 nt, Artificial Sequence
  LRRK2 RNA guide
ucacauauacuacccuuaug

SEQ ID NO: 30145 - RNA, 20 nt, Artificial Sequence
  LRRK2 RNA guide
uggagucacauauacuaccc

SEQ ID NO: 30146 - RNA, 21 nt, Artificial Sequence
  LRRK2 RNA guide
aaagaaaucacauaaggguag

SEQ ID NO: 30147 - RNA, 21 nt, Artificial Sequence
  LRRK2 RNA guide
aagaaaucacauaaggguagu

SEQ ID NO: 30148 - RNA, 21 nt, Artificial Sequence
  LRRK2 RNA guide
acauaaggguaguauauguga

SEQ ID NO: 30149 - RNA, 21 nt, Artificial Sequence
  LRRK2 RNA guide
acauauacuacccuuauguga

SEQ ID NO: 30150 - RNA, 21 nt, Artificial Sequence
  LRRK2 RNA guide
acuacccuuaugugauuucuu

SEQ ID NO: 30151 - RNA, 21 nt, Artificial Sequence
  LRRK2 RNA guide
agaaaucacauaaggguagua

SEQ ID NO: 30152 - RNA, 21 nt, Artificial Sequence
  LRRK2 RNA guide
agucacauauacuacccuuau

SEQ ID NO: 30153 - RNA, 21 nt, Artificial Sequence
  LRRK2 RNA guide
auaaggguaguauaugugacu

SEQ ID NO: 30154 - RNA, 21 nt, Artificial Sequence
  LRRK2 RNA guide
auacuacccuuaugugauuuc

SEQ ID NO: 30155 - RNA, 21 nt, Artificial Sequence
  LRRK2 RNA guide
aucacauaaggguaguauaug

SEQ ID NO: 30156 - RNA, 21 nt, Artificial Sequence
  LRRK2 RNA guide
auggagucacauauacuaccc

SEQ ID NO: 30157 - RNA, 21 nt, Artificial Sequence
  LRRK2 RNA guide
cacauaaggguaguauaugug

SEQ ID NO: 30158 - RNA, 21 nt, Artificial Sequence
  LRRK2 RNA guide
cacauauacuacccuuaugug

SEQ ID NO: 30159 - RNA, 21 nt, Artificial Sequence
  LRRK2 RNA guide
cauaaggguaguauaugugac

SEQ ID NO: 30160 - RNA, 21 nt, Artificial Sequence
  LRRK2 RNA guide
cauauacuacccuuaugugau

SEQ ID NO: 30161 - RNA, 21 nt, Artificial Sequence
  LRRK2 RNA guide
cuacccuuaugugauuucuuu

SEQ ID NO: 30162 - RNA, 21 nt, Artificial Sequence
  LRRK2 RNA guide
gaaaucacauaaggguaguau

SEQ ID NO: 30163 - RNA, 21 nt, Artificial Sequence
  LRRK2 RNA guide
gagucacauauacuacccuua

SEQ ID NO: 30164 - RNA, 21 nt, Artificial Sequence
  LRRK2 RNA guide
gauggagucacauauacuacc

SEQ ID NO: 30165 - RNA, 21 nt, Artificial Sequence
  LRRK2 RNA guide
ggagucacauauacuacccuu

SEQ ID NO: 30166 - RNA, 21 nt, Artificial Sequence
  LRRK2 RNA guide
gucacauauacuacccuuaug

SEQ ID NO: 30167 - RNA, 21 nt, Artificial Sequence
  LRRK2 RNA guide
uacuacccuuaugugauuucu

SEQ ID NO: 30168 - RNA, 21 nt, Artificial Sequence
  LRRK2 RNA guide
ucacauaaggguaguauaugu

SEQ ID NO: 30169 - RNA, 21 nt, Artificial Sequence
  LRRK2 RNA guide
ucacauauacuacccuuaugu

SEQ ID NO: 30170 - RNA, 21 nt, Artificial Sequence
  LRRK2 RNA guide
ugauggagucacauauacuac

SEQ ID NO: 30171 - RNA, 21 nt, Artificial Sequence
  LRRK2 RNA guide
uggagucacauauacuacccu

SEQ ID NO: 30172 - RNA, 22 nt, Artificial Sequence
  LRRK2 RNA guide
aaaagaaaucacauaaggguag

SEQ ID NO: 30173 - RNA, 22 nt, Artificial Sequence
  LRRK2 RNA guide
aaagaaaucacauaaggguagu

SEQ ID NO: 30174 - RNA, 22 nt, Artificial Sequence
  LRRK2 RNA guide
aagaaaucacauaaggguagua

SEQ ID NO: 30175 - RNA, 22 nt, Artificial Sequence
  LRRK2 RNA guide
aaucacauaaggguaguauaug

SEQ ID NO: 30176 - RNA, 22 nt, Artificial Sequence
  LRRK2 RNA guide
acauaaggguaguauaugugac

SEQ ID NO: 30177 - RNA, 22 nt, Artificial Sequence
  LRRK2 RNA guide
acauauacuacccuuaugugau

SEQ ID NO: 30178 - RNA, 22 nt, Artificial Sequence
  LRRK2 RNA guide
acuacccuuaugugauuucuuu

SEQ ID NO: 30179 - RNA, 22 nt, Artificial Sequence
  LRRK2 RNA guide
agaaaucacauaaggguaguau

SEQ ID NO: 30180 - RNA, 22 nt, Artificial Sequence
  LRRK2 RNA guide
agucacauauacuacccuuaug

SEQ ID NO: 30181 - RNA, 22 nt, Artificial Sequence
  LRRK2 RNA guide
auaaggguaguauaugugacuc

SEQ ID NO: 30182 - RNA, 22 nt, Artificial Sequence
  LRRK2 RNA guide
auacuacccuuaugugauuucu

SEQ ID NO: 30183 - RNA, 22 nt, Artificial Sequence
  LRRK2 RNA guide
aucacauaaggguaguauaugu

SEQ ID NO: 30184 - RNA, 22 nt, Artificial Sequence
  LRRK2 RNA guide
auggagucacauauacuacccu

SEQ ID NO: 30185 - RNA, 22 nt, Artificial Sequence
  LRRK2 RNA guide
caaaaaagaaaucacauaaggg

SEQ ID NO: 30186 - RNA, 22 nt, Artificial Sequence
  LRRK2 RNA guide
cacauaaggguaguauauguga

SEQ ID NO: 30187 - RNA, 22 nt, Artificial Sequence
  LRRK2 RNA guide
cacauauacuacccuuauguga

SEQ ID NO: 30188 - RNA, 22 nt, Artificial Sequence
  LRRK2 RNA guide
cauaaggguaguauaugugacu

SEQ ID NO: 30189 - RNA, 22 nt, Artificial Sequence
  LRRK2 RNA guide
cauauacuacccuuaugugauu

SEQ ID NO: 30190 - RNA, 22 nt, Artificial Sequence
  LRRK2 RNA guide
cccuuaugugauuucuuuuuug

SEQ ID NO: 30191 - RNA, 22 nt, Artificial Sequence
  LRRK2 RNA guide
cuacccuuaugugauuucuuuu

SEQ ID NO: 30192 - RNA, 22 nt, Artificial Sequence
  LRRK2 RNA guide
gaaaucacauaaggguaguaua

SEQ ID NO: 30193 - RNA, 22 nt, Artificial Sequence
  LRRK2 RNA guide
gagucacauauacuacccuuau

SEQ ID NO: 30194 - RNA, 22 nt, Artificial Sequence
  LRRK2 RNA guide
gauggagucacauauacuaccc

SEQ ID NO: 30195 - RNA, 22 nt, Artificial Sequence
  LRRK2 RNA guide
ggagucacauauacuacccuua

SEQ ID NO: 30196 - RNA, 22 nt, Artificial Sequence
  LRRK2 RNA guide
gucacauauacuacccuuaugu

SEQ ID NO: 30197 - RNA, 22 nt, Artificial Sequence
  LRRK2 RNA guide
uacuacccuuaugugauuucuu

SEQ ID NO: 30198 - RNA, 22 nt, Artificial Sequence
  LRRK2 RNA guide
uauacuacccuuaugugauuuc

SEQ ID NO: 30199 - RNA, 22 nt, Artificial Sequence
  LRRK2 RNA guide
ucacauaaggguaguauaugug

SEQ ID NO: 30200 - RNA, 22 nt, Artificial Sequence
  LRRK2 RNA guide
ucacauauacuacccuuaugug

SEQ ID NO: 30201 - RNA, 22 nt, Artificial Sequence
  LRRK2 RNA guide
ugauggagucacauauacuacc

SEQ ID NO: 30202 - RNA, 22 nt, Artificial Sequence
  LRRK2 RNA guide
uggagucacauauacuacccuu

SEQ ID NO: 30203 - RNA, 22 nt, Artificial Sequence
  LRRK2 RNA guide
uugauggagucacauauacuac

SEQ ID NO: 30204 - RNA, 20 nt, Artificial Sequence
  LRRK2 RNA guide
aaaaaagaaaucacacaagg

SEQ ID NO: 30205 - RNA, 20 nt, Artificial Sequence
  LRRK2 RNA guide
aaaaagaaaucacacaaggg

SEQ ID NO: 30206 - RNA, 20 nt, Artificial Sequence
  LRRK2 RNA guide
aaaagaaaucacacaagggu

SEQ ID NO: 30207 - RNA, 20 nt, Artificial Sequence
  LRRK2 RNA guide
aaagaaaucacacaagggua

SEQ ID NO: 30208 - RNA, 20 nt, Artificial Sequence
  LRRK2 RNA guide
aaaucacacaaggguaguau

SEQ ID NO: 30209 - RNA, 20 nt, Artificial Sequence
  LRRK2 RNA guide
aagaaaucacacaaggguag

SEQ ID NO: 30210 - RNA, 20 nt, Artificial Sequence
  LRRK2 RNA guide
aaucacacaaggguaguaua

SEQ ID NO: 30211 - RNA, 20 nt, Artificial Sequence
  LRRK2 RNA guide
acaaggguaguauaugugac

SEQ ID NO: 30212 - RNA, 20 nt, Artificial Sequence
  LRRK2 RNA guide
acacaaggguaguauaugug

SEQ ID NO: 30213 - RNA, 20 nt, Artificial Sequence
  LRRK2 RNA guide
acauauacuacccuugugug

SEQ ID NO: 30214 - RNA, 20 nt, Artificial Sequence
  LRRK2 RNA guide
acccuugugugauuucuuuu

SEQ ID NO: 30215 - RNA, 20 nt, Artificial Sequence
  LRRK2 RNA guide
acuacccuugugugauuucu

SEQ ID NO: 30216 - RNA, 20 nt, Artificial Sequence
  LRRK2 RNA guide
agaaaucacacaaggguagu

SEQ ID NO: 30217 - RNA, 20 nt, Artificial Sequence
  LRRK2 RNA guide
agucacauauacuacccuug

SEQ ID NO: 30218 - RNA, 20 nt, Artificial Sequence
  LRRK2 RNA guide
auacuacccuugugugauuu

SEQ ID NO: 30219 - RNA, 20 nt, Artificial Sequence
  LRRK2 RNA guide
auauacuacccuugugugau

SEQ ID NO: 30220 - RNA, 20 nt, Artificial Sequence
  LRRK2 RNA guide
aucacacaaggguaguauau

SEQ ID NO: 30221 - RNA, 20 nt, Artificial Sequence
  LRRK2 RNA guide
caaaaaagaaaucacacaag

SEQ ID NO: 30222 - RNA, 20 nt, Artificial Sequence
  LRRK2 RNA guide
cacaaggguaguauauguga

SEQ ID NO: 30223 - RNA, 20 nt, Artificial Sequence
  LRRK2 RNA guide
cacacaaggguaguauaugu

SEQ ID NO: 30224 - RNA, 20 nt, Artificial Sequence
  LRRK2 RNA guide
cacauauacuacccuugugu

SEQ ID NO: 30225 - RNA, 20 nt, Artificial Sequence
  LRRK2 RNA guide
cauauacuacccuuguguga

SEQ ID NO: 30226 - RNA, 20 nt, Artificial Sequence
  LRRK2 RNA guide
cccuugugugauuucuuuuu

SEQ ID NO: 30227 - RNA, 20 nt, Artificial Sequence
  LRRK2 RNA guide
ccuugugugauuucuuuuuu

SEQ ID NO: 30228 - RNA, 20 nt, Artificial Sequence
  LRRK2 RNA guide
cuacccuugugugauuucuu

SEQ ID NO: 30229 - RNA, 20 nt, Artificial Sequence
  LRRK2 RNA guide
cuugugugauuucuuuuuug

SEQ ID NO: 30230 - RNA, 20 nt, Artificial Sequence
  LRRK2 RNA guide
gaaaucacacaaggguagua

SEQ ID NO: 30231 - RNA, 20 nt, Artificial Sequence
  LRRK2 RNA guide
gucacauauacuacccuugu

SEQ ID NO: 30232 - RNA, 20 nt, Artificial Sequence
  LRRK2 RNA guide
uacccuugugugauuucuuu

SEQ ID NO: 30233 - RNA, 20 nt, Artificial Sequence
  LRRK2 RNA guide
uacuacccuugugugauuuc

SEQ ID NO: 30234 - RNA, 20 nt, Artificial Sequence
  LRRK2 RNA guide
uauacuacccuugugugauu

SEQ ID NO: 30235 - RNA, 20 nt, Artificial Sequence
  LRRK2 RNA guide
ucacacaaggguaguauaug

SEQ ID NO: 30236 - RNA, 20 nt, Artificial Sequence
  LRRK2 RNA guide
ucacauauacuacccuugug

SEQ ID NO: 30237 - RNA, 21 nt, Artificial Sequence
  LRRK2 RNA guide
aaaaaagaaaucacacaaggg

SEQ ID NO: 30238 - RNA, 21 nt, Artificial Sequence
  LRRK2 RNA guide
aaaaagaaaucacacaagggu

SEQ ID NO: 30239 - RNA, 21 nt, Artificial Sequence
  LRRK2 RNA guide
aaaagaaaucacacaagggua

SEQ ID NO: 30240 - RNA, 21 nt, Artificial Sequence
  LRRK2 RNA guide
aaagaaaucacacaaggguag

SEQ ID NO: 30241 - RNA, 21 nt, Artificial Sequence
  LRRK2 RNA guide
aaaucacacaaggguaguaua

SEQ ID NO: 30242 - RNA, 21 nt, Artificial Sequence
  LRRK2 RNA guide
aagaaaucacacaaggguagu

SEQ ID NO: 30243 - RNA, 21 nt, Artificial Sequence
  LRRK2 RNA guide
aaucacacaaggguaguauau

SEQ ID NO: 30244 - RNA, 21 nt, Artificial Sequence
  LRRK2 RNA guide
acaaggguaguauaugugacu

SEQ ID NO: 30245 - RNA, 21 nt, Artificial Sequence
  LRRK2 RNA guide
acacaaggguaguauauguga

SEQ ID NO: 30246 - RNA, 21 nt, Artificial Sequence
  LRRK2 RNA guide
acauauacuacccuuguguga

SEQ ID NO: 30247 - RNA, 21 nt, Artificial Sequence
  LRRK2 RNA guide
acccuugugugauuucuuuuu

SEQ ID NO: 30248 - RNA, 21 nt, Artificial Sequence
  LRRK2 RNA guide
acuacccuugugugauuucuu

SEQ ID NO: 30249 - RNA, 21 nt, Artificial Sequence
  LRRK2 RNA guide
agaaaucacacaaggguagua

SEQ ID NO: 30250 - RNA, 21 nt, Artificial Sequence
  LRRK2 RNA guide
agucacauauacuacccuugu

SEQ ID NO: 30251 - RNA, 21 nt, Artificial Sequence
  LRRK2 RNA guide
auacuacccuugugugauuuc

SEQ ID NO: 30252 - RNA, 21 nt, Artificial Sequence
  LRRK2 RNA guide
auauacuacccuugugugauu

SEQ ID NO: 30253 - RNA, 21 nt, Artificial Sequence
  LRRK2 RNA guide
aucacacaaggguaguauaug

SEQ ID NO: 30254 - RNA, 21 nt, Artificial Sequence
  LRRK2 RNA guide
caaaaaagaaaucacacaagg

SEQ ID NO: 30255 - RNA, 21 nt, Artificial Sequence
  LRRK2 RNA guide
cacaaggguaguauaugugac

SEQ ID NO: 30256 - RNA, 21 nt, Artificial Sequence
  LRRK2 RNA guide
cacacaaggguaguauaugug

SEQ ID NO: 30257 - RNA, 21 nt, Artificial Sequence
  LRRK2 RNA guide
cacauauacuacccuugugug

SEQ ID NO: 30258 - RNA, 21 nt, Artificial Sequence
  LRRK2 RNA guide
cauauacuacccuugugugau

SEQ ID NO: 30259 - RNA, 21 nt, Artificial Sequence
  LRRK2 RNA guide
cccuugugugauuucuuuuuu

SEQ ID NO: 30260 - RNA, 21 nt, Artificial Sequence
  LRRK2 RNA guide
ccuugugugauuucuuuuuug

SEQ ID NO: 30261 - RNA, 21 nt, Artificial Sequence
  LRRK2 RNA guide
cuacccuugugugauuucuuu

SEQ ID NO: 30262 - RNA, 21 nt, Artificial Sequence
  LRRK2 RNA guide
gaaaucacacaaggguaguau

SEQ ID NO: 30263 - RNA, 21 nt, Artificial Sequence
  LRRK2 RNA guide
gagucacauauacuacccuug

SEQ ID NO: 30264 - RNA, 21 nt, Artificial Sequence
  LRRK2 RNA guide
gucacauauacuacccuugug

SEQ ID NO: 30265 - RNA, 21 nt, Artificial Sequence
  LRRK2 RNA guide
uacccuugugugauuucuuuu

SEQ ID NO: 30266 - RNA, 21 nt, Artificial Sequence
  LRRK2 RNA guide
uacuacccuugugugauuucu

SEQ ID NO: 30267 - RNA, 21 nt, Artificial Sequence
  LRRK2 RNA guide
uauacuacccuugugugauuu

SEQ ID NO: 30268 - RNA, 21 nt, Artificial Sequence
  LRRK2 RNA guide
ucacacaaggguaguauaugu

SEQ ID NO: 30269 - RNA, 21 nt, Artificial Sequence
  LRRK2 RNA guide
ucacauauacuacccuugugu

SEQ ID NO: 30270 - RNA, 22 nt, Artificial Sequence
  LRRK2 RNA guide
aaaaaagaaaucacacaagggu

SEQ ID NO: 30271 - RNA, 22 nt, Artificial Sequence
  LRRK2 RNA guide
aaaaagaaaucacacaagggua

SEQ ID NO: 30272 - RNA, 22 nt, Artificial Sequence
  LRRK2 RNA guide
aaaagaaaucacacaaggguag

SEQ ID NO: 30273 - RNA, 22 nt, Artificial Sequence
  LRRK2 RNA guide
aaagaaaucacacaaggguagu

SEQ ID NO: 30274 - RNA, 22 nt, Artificial Sequence
  LRRK2 RNA guide
aaaucacacaaggguaguauau

SEQ ID NO: 30275 - RNA, 22 nt, Artificial Sequence
  LRRK2 RNA guide
aagaaaucacacaaggguagua

SEQ ID NO: 30276 - RNA, 22 nt, Artificial Sequence
  LRRK2 RNA guide
aaucacacaaggguaguauaug

SEQ ID NO: 30277 - RNA, 22 nt, Artificial Sequence
  LRRK2 RNA guide
acaaaaaagaaaucacacaagg

SEQ ID NO: 30278 - RNA, 22 nt, Artificial Sequence
  LRRK2 RNA guide
acaaggguaguauaugugacuc

SEQ ID NO: 30279 - RNA, 22 nt, Artificial Sequence
  LRRK2 RNA guide
acacaaggguaguauaugugac

SEQ ID NO: 30280 - RNA, 22 nt, Artificial Sequence
  LRRK2 RNA guide
acauauacuacccuugugugau

SEQ ID NO: 30281 - RNA, 22 nt, Artificial Sequence
  LRRK2 RNA guide
acccuugugugauuucuuuuuu

SEQ ID NO: 30282 - RNA, 22 nt, Artificial Sequence
  LRRK2 RNA guide
acuacccuugugugauuucuuu

SEQ ID NO: 30283 - RNA, 22 nt, Artificial Sequence
  LRRK2 RNA guide
agaaaucacacaaggguaguau

SEQ ID NO: 30284 - RNA, 22 nt, Artificial Sequence
  LRRK2 RNA guide
agucacauauacuacccuugug

SEQ ID NO: 30285 - RNA, 22 nt, Artificial Sequence
  LRRK2 RNA guide
auacuacccuugugugauuucu

SEQ ID NO: 30286 - RNA, 22 nt, Artificial Sequence
  LRRK2 RNA guide
auauacuacccuugugugauuu

SEQ ID NO: 30287 - RNA, 22 nt, Artificial Sequence
  LRRK2 RNA guide
aucacacaaggguaguauaugu

SEQ ID NO: 30288 - RNA, 22 nt, Artificial Sequence
  LRRK2 RNA guide
caaaaaagaaaucacacaaggg

SEQ ID NO: 30289 - RNA, 22 nt, Artificial Sequence
  LRRK2 RNA guide
cacaaggguaguauaugugacu

SEQ ID NO: 30290 - RNA, 22 nt, Artificial Sequence
  LRRK2 RNA guide
cacacaaggguaguauauguga

SEQ ID NO: 30291 - RNA, 22 nt, Artificial Sequence
  LRRK2 RNA guide
cacauauacuacccuuguguga

SEQ ID NO: 30292 - RNA, 22 nt, Artificial Sequence
  LRRK2 RNA guide
cauauacuacccuugugugauu

SEQ ID NO: 30293 - RNA, 22 nt, Artificial Sequence
  LRRK2 RNA guide
cccuugugugauuucuuuuuug

SEQ ID NO: 30294 - RNA, 22 nt, Artificial Sequence
  LRRK2 RNA guide
ccuugugugauuucuuuuuugu

SEQ ID NO: 30295 - RNA, 22 nt, Artificial Sequence
  LRRK2 RNA guide
cuacccuugugugauuucuuuu

SEQ ID NO: 30296 - RNA, 22 nt, Artificial Sequence
  LRRK2 RNA guide
gaaaucacacaaggguaguaua

SEQ ID NO: 30297 - RNA, 22 nt, Artificial Sequence
  LRRK2 RNA guide
gagucacauauacuacccuugu

SEQ ID NO: 30298 - RNA, 22 nt, Artificial Sequence
  LRRK2 RNA guide
ggagucacauauacuacccuug

SEQ ID NO: 30299 - RNA, 22 nt, Artificial Sequence
  LRRK2 RNA guide
gucacauauacuacccuugugu

SEQ ID NO: 30300 - RNA, 22 nt, Artificial Sequence
  LRRK2 RNA guide
uacccuugugugauuucuuuuu

SEQ ID NO: 30301 - RNA, 22 nt, Artificial Sequence
  LRRK2 RNA guide
uacuacccuugugugauuucuu

SEQ ID NO: 30302 - RNA, 22 nt, Artificial Sequence
  LRRK2 RNA guide
uauacuacccuugugugauuuc

SEQ ID NO: 30303 - RNA, 22 nt, Artificial Sequence
  LRRK2 RNA guide
ucacacaaggguaguauaugug

SEQ ID NO: 30304 - RNA, 22 nt, Artificial Sequence
  LRRK2 RNA guide
ucacauauacuacccuugugug

SEQ ID NO: 30305 - RNA, 20 nt, Artificial Sequence
  LRRK2 RNA guide
cgauaacaacuuuugaauug

SEQ ID NO: 30306 - RNA, 22 nt, Artificial Sequence
  LRRK2 RNA guide
ccaucucauauuaucuucaaca

SEQ ID NO: 30307 - RNA, 20 nt, Artificial Sequence
  LRRK2 RNA guide
cuucaacaauuaccaauuca

SEQ ID NO: 30308 - RNA, 20 nt, Artificial Sequence
  LRRK2 RNA guide
gaauugguaauuguugaaga

SEQ ID NO: 30309 - RNA, 20 nt, Artificial Sequence
  LRRK2 RNA guide
gauaacaacuuuugaauugg

SEQ ID NO: 30310 - RNA, 20 nt, Artificial Sequence
  LRRK2 RNA guide
ucuucaacaauuaccaauuc

SEQ ID NO: 30311 - RNA, 20 nt, Artificial Sequence
  LRRK2 RNA guide
ugaauugguaauuguugaag

SEQ ID NO: 30312 - RNA, 21 nt, Artificial Sequence
  LRRK2 RNA guide
cgauaacaacuuuugaauugg

SEQ ID NO: 30313 - RNA, 22 nt, Artificial Sequence
  LRRK2 RNA guide
accaauucaaaaguuguuaucg

SEQ ID NO: 30314 - RNA, 22 nt, Artificial Sequence
  LRRK2 RNA guide
acgauaacaacuuuugaauugg

SEQ ID NO: 30315 - RNA, 22 nt, Artificial Sequence
  LRRK2 RNA guide
cgauaacaacuuuugaauuggu

SEQ ID NO: 30316 - RNA, 20 nt, Artificial Sequence
  LRRK2 RNA guide
aagaucacuuacaaagaaga

SEQ ID NO: 30317 - RNA, 20 nt, Artificial Sequence
  LRRK2 RNA guide
aauccucuucuuuguaagug

SEQ ID NO: 30318 - RNA, 20 nt, Artificial Sequence
  LRRK2 RNA guide
acaaagaagaggauuggacu

SEQ ID NO: 30319 - RNA, 20 nt, Artificial Sequence
  LRRK2 RNA guide
acuuacaaagaagaggauug

SEQ ID NO: 30320 - RNA, 20 nt, Artificial Sequence
  LRRK2 RNA guide
acuuccaguccaauccucuu

SEQ ID NO: 30321 - RNA, 20 nt, Artificial Sequence
  LRRK2 RNA guide
agaucacuuacaaagaagag

SEQ ID NO: 30322 - RNA, 20 nt, Artificial Sequence
  LRRK2 RNA guide
aguccaauccucuucuuugu

SEQ ID NO: 30323 - RNA, 20 nt, Artificial Sequence
  LRRK2 RNA guide
aucacuuacaaagaagagga

SEQ ID NO: 30324 - RNA, 20 nt, Artificial Sequence
  LRRK2 RNA guide
auccucuucuuuguaaguga

SEQ ID NO: 30325 - RNA, 20 nt, Artificial Sequence
  LRRK2 RNA guide
caagaucacuuacaaagaag

SEQ ID NO: 30326 - RNA, 20 nt, Artificial Sequence
  LRRK2 RNA guide
caauccucuucuuuguaagu

SEQ ID NO: 30327 - RNA, 20 nt, Artificial Sequence
  LRRK2 RNA guide
cacuuacaaagaagaggauu

SEQ ID NO: 30328 - RNA, 20 nt, Artificial Sequence
  LRRK2 RNA guide
caguccaauccucuucuuug

SEQ ID NO: 30329 - RNA, 20 nt, Artificial Sequence
  LRRK2 RNA guide
ccaauccucuucuuuguaag

SEQ ID NO: 30330 - RNA, 20 nt, Artificial Sequence
  LRRK2 RNA guide
ccaguccaauccucuucuuu

SEQ ID NO: 30331 - RNA, 20 nt, Artificial Sequence
  LRRK2 RNA guide
ccucaagaucacuuacaaag

SEQ ID NO: 30332 - RNA, 20 nt, Artificial Sequence
  LRRK2 RNA guide
ccucuucuuuguaagugauc

SEQ ID NO: 30333 - RNA, 20 nt, Artificial Sequence
  LRRK2 RNA guide
cucaagaucacuuacaaaga

SEQ ID NO: 30334 - RNA, 20 nt, Artificial Sequence
  LRRK2 RNA guide
cucuucuuuguaagugaucu

SEQ ID NO: 30335 - RNA, 20 nt, Artificial Sequence
  LRRK2 RNA guide
cuguccucaagaucacuuac

SEQ ID NO: 30336 - RNA, 20 nt, Artificial Sequence
  LRRK2 RNA guide
cuuacaaagaagaggauugg

SEQ ID NO: 30337 - RNA, 20 nt, Artificial Sequence
  LRRK2 RNA guide
cuuccaguccaauccucuuc

SEQ ID NO: 30338 - RNA, 20 nt, Artificial Sequence
  LRRK2 RNA guide
cuucuuuguaagugaucuug

SEQ ID NO: 30339 - RNA, 20 nt, Artificial Sequence
  LRRK2 RNA guide
cuuuguaagugaucuugagg

SEQ ID NO: 30340 - RNA, 20 nt, Artificial Sequence
  LRRK2 RNA guide
gaucacuuacaaagaagagg

SEQ ID NO: 30341 - RNA, 20 nt, Artificial Sequence
  LRRK2 RNA guide
guccaauccucuucuuugua

SEQ ID NO: 30342 - RNA, 20 nt, Artificial Sequence
  LRRK2 RNA guide
guccucaagaucacuuacaa

SEQ ID NO: 30343 - RNA, 20 nt, Artificial Sequence
  LRRK2 RNA guide
gucuguccucaagaucacuu

SEQ ID NO: 30344 - RNA, 20 nt, Artificial Sequence
  LRRK2 RNA guide
gugucuguccucaagaucac

SEQ ID NO: 30345 - RNA, 20 nt, Artificial Sequence
  LRRK2 RNA guide
uacaaagaagaggauuggac

SEQ ID NO: 30346 - RNA, 20 nt, Artificial Sequence
  LRRK2 RNA guide
ucaagaucacuuacaaagaa

SEQ ID NO: 30347 - RNA, 20 nt, Artificial Sequence
  LRRK2 RNA guide
ucacuuacaaagaagaggau

SEQ ID NO: 30348 - RNA, 20 nt, Artificial Sequence
  LRRK2 RNA guide
uccaauccucuucuuuguaa

SEQ ID NO: 30349 - RNA, 20 nt, Artificial Sequence
  LRRK2 RNA guide
uccaguccaauccucuucuu

SEQ ID NO: 30350 - RNA, 20 nt, Artificial Sequence
  LRRK2 RNA guide
uccucaagaucacuuacaaa

SEQ ID NO: 30351 - RNA, 20 nt, Artificial Sequence
  LRRK2 RNA guide
uccucuucuuuguaagugau

SEQ ID NO: 30352 - RNA, 20 nt, Artificial Sequence
  LRRK2 RNA guide
ucuguccucaagaucacuua

SEQ ID NO: 30353 - RNA, 20 nt, Artificial Sequence
  LRRK2 RNA guide
ucuucuuuguaagugaucuu

SEQ ID NO: 30354 - RNA, 20 nt, Artificial Sequence
  LRRK2 RNA guide
ucuuuguaagugaucuugag

SEQ ID NO: 30355 - RNA, 20 nt, Artificial Sequence
  LRRK2 RNA guide
uguaagugaucuugaggaca

SEQ ID NO: 30356 - RNA, 20 nt, Artificial Sequence
  LRRK2 RNA guide
uguccucaagaucacuuaca

SEQ ID NO: 30357 - RNA, 20 nt, Artificial Sequence
  LRRK2 RNA guide
ugucuguccucaagaucacu

SEQ ID NO: 30358 - RNA, 20 nt, Artificial Sequence
  LRRK2 RNA guide
ugugucuguccucaagauca

SEQ ID NO: 30359 - RNA, 20 nt, Artificial Sequence
  LRRK2 RNA guide
uuacaaagaagaggauugga

SEQ ID NO: 30360 - RNA, 20 nt, Artificial Sequence
  LRRK2 RNA guide
uuccaguccaauccucuucu

SEQ ID NO: 30361 - RNA, 20 nt, Artificial Sequence
  LRRK2 RNA guide
uucuuuguaagugaucuuga

SEQ ID NO: 30362 - RNA, 20 nt, Artificial Sequence
  LRRK2 RNA guide
uuguaagugaucuugaggac

SEQ ID NO: 30363 - RNA, 20 nt, Artificial Sequence
  LRRK2 RNA guide
uuuguaagugaucuugagga

SEQ ID NO: 30364 - RNA, 21 nt, Artificial Sequence
  LRRK2 RNA guide
aacuuccaguccaauccucuu

SEQ ID NO: 30365 - RNA, 21 nt, Artificial Sequence
  LRRK2 RNA guide
aagaucacuuacaaagaagag

SEQ ID NO: 30366 - RNA, 21 nt, Artificial Sequence
  LRRK2 RNA guide
aauccucuucuuuguaaguga

SEQ ID NO: 30367 - RNA, 21 nt, Artificial Sequence
  LRRK2 RNA guide
acaaagaagaggauuggacug

SEQ ID NO: 30368 - RNA, 21 nt, Artificial Sequence
  LRRK2 RNA guide
acuuacaaagaagaggauugg

SEQ ID NO: 30369 - RNA, 21 nt, Artificial Sequence
  LRRK2 RNA guide
acuuccaguccaauccucuuc

SEQ ID NO: 30370 - RNA, 21 nt, Artificial Sequence
  LRRK2 RNA guide
agaucacuuacaaagaagagg

SEQ ID NO: 30371 - RNA, 21 nt, Artificial Sequence
  LRRK2 RNA guide
aguccaauccucuucuuugua

SEQ ID NO: 30372 - RNA, 21 nt, Artificial Sequence
  LRRK2 RNA guide
aucacuuacaaagaagaggau

SEQ ID NO: 30373 - RNA, 21 nt, Artificial Sequence
  LRRK2 RNA guide
auccucuucuuuguaagugau

SEQ ID NO: 30374 - RNA, 21 nt, Artificial Sequence
  LRRK2 RNA guide
augugucuguccucaagauca

SEQ ID NO: 30375 - RNA, 21 nt, Artificial Sequence
  LRRK2 RNA guide
caagaucacuuacaaagaaga

SEQ ID NO: 30376 - RNA, 21 nt, Artificial Sequence
  LRRK2 RNA guide
caauccucuucuuuguaagug

SEQ ID NO: 30377 - RNA, 21 nt, Artificial Sequence
  LRRK2 RNA guide
cacuuacaaagaagaggauug

SEQ ID NO: 30378 - RNA, 21 nt, Artificial Sequence
  LRRK2 RNA guide
caguccaauccucuucuuugu

SEQ ID NO: 30379 - RNA, 21 nt, Artificial Sequence
  LRRK2 RNA guide
ccaauccucuucuuuguaagu

SEQ ID NO: 30380 - RNA, 21 nt, Artificial Sequence
  LRRK2 RNA guide
ccaguccaauccucuucuuug

SEQ ID NO: 30381 - RNA, 21 nt, Artificial Sequence
  LRRK2 RNA guide
ccucaagaucacuuacaaaga

SEQ ID NO: 30382 - RNA, 21 nt, Artificial Sequence
  LRRK2 RNA guide
ccucuucuuuguaagugaucu

SEQ ID NO: 30383 - RNA, 21 nt, Artificial Sequence
  LRRK2 RNA guide
cucaagaucacuuacaaagaa

SEQ ID NO: 30384 - RNA, 21 nt, Artificial Sequence
  LRRK2 RNA guide
cucuucuuuguaagugaucuu

SEQ ID NO: 30385 - RNA, 21 nt, Artificial Sequence
  LRRK2 RNA guide
cuguccucaagaucacuuaca

SEQ ID NO: 30386 - RNA, 21 nt, Artificial Sequence
  LRRK2 RNA guide
cuuacaaagaagaggauugga

SEQ ID NO: 30387 - RNA, 21 nt, Artificial Sequence
  LRRK2 RNA guide
cuuccaguccaauccucuucu

SEQ ID NO: 30388 - RNA, 21 nt, Artificial Sequence
  LRRK2 RNA guide
cuucuuuguaagugaucuuga

SEQ ID NO: 30389 - RNA, 21 nt, Artificial Sequence
  LRRK2 RNA guide
cuuuguaagugaucuugagga

SEQ ID NO: 30390 - RNA, 21 nt, Artificial Sequence
  LRRK2 RNA guide
gaucacuuacaaagaagagga

SEQ ID NO: 30391 - RNA, 21 nt, Artificial Sequence
  LRRK2 RNA guide
guccaauccucuucuuuguaa

SEQ ID NO: 30392 - RNA, 21 nt, Artificial Sequence
  LRRK2 RNA guide
guccucaagaucacuuacaaa

SEQ ID NO: 30393 - RNA, 21 nt, Artificial Sequence
  LRRK2 RNA guide
gucuguccucaagaucacuua

SEQ ID NO: 30394 - RNA, 21 nt, Artificial Sequence
  LRRK2 RNA guide
gugucuguccucaagaucacu

SEQ ID NO: 30395 - RNA, 21 nt, Artificial Sequence
  LRRK2 RNA guide
uacaaagaagaggauuggacu

SEQ ID NO: 30396 - RNA, 21 nt, Artificial Sequence
  LRRK2 RNA guide
ucaagaucacuuacaaagaag

SEQ ID NO: 30397 - RNA, 21 nt, Artificial Sequence
  LRRK2 RNA guide
ucacuuacaaagaagaggauu

SEQ ID NO: 30398 - RNA, 21 nt, Artificial Sequence
  LRRK2 RNA guide
uccaauccucuucuuuguaag

SEQ ID NO: 30399 - RNA, 21 nt, Artificial Sequence
  LRRK2 RNA guide
uccaguccaauccucuucuuu

SEQ ID NO: 30400 - RNA, 21 nt, Artificial Sequence
  LRRK2 RNA guide
uccucaagaucacuuacaaag

SEQ ID NO: 30401 - RNA, 21 nt, Artificial Sequence
  LRRK2 RNA guide
uccucuucuuuguaagugauc

SEQ ID NO: 30402 - RNA, 21 nt, Artificial Sequence
  LRRK2 RNA guide
ucuguccucaagaucacuuac

SEQ ID NO: 30403 - RNA, 21 nt, Artificial Sequence
  LRRK2 RNA guide
ucuucuuuguaagugaucuug

SEQ ID NO: 30404 - RNA, 21 nt, Artificial Sequence
  LRRK2 RNA guide
ucuuuguaagugaucuugagg

SEQ ID NO: 30405 - RNA, 21 nt, Artificial Sequence
  LRRK2 RNA guide
uguaagugaucuugaggacag

SEQ ID NO: 30406 - RNA, 21 nt, Artificial Sequence
  LRRK2 RNA guide
uguccucaagaucacuuacaa

SEQ ID NO: 30407 - RNA, 21 nt, Artificial Sequence
  LRRK2 RNA guide
ugucuguccucaagaucacuu

SEQ ID NO: 30408 - RNA, 21 nt, Artificial Sequence
  LRRK2 RNA guide
ugugucuguccucaagaucac

SEQ ID NO: 30409 - RNA, 21 nt, Artificial Sequence
  LRRK2 RNA guide
uuacaaagaagaggauuggac

SEQ ID NO: 30410 - RNA, 21 nt, Artificial Sequence
  LRRK2 RNA guide
uuccaguccaauccucuucuu

SEQ ID NO: 30411 - RNA, 21 nt, Artificial Sequence
  LRRK2 RNA guide
uucuuuguaagugaucuugag

SEQ ID NO: 30412 - RNA, 21 nt, Artificial Sequence
  LRRK2 RNA guide
uuguaagugaucuugaggaca

SEQ ID NO: 30413 - RNA, 21 nt, Artificial Sequence
  LRRK2 RNA guide
uuuguaagugaucuugaggac

SEQ ID NO: 30414 - RNA, 22 nt, Artificial Sequence
  LRRK2 RNA guide
aacuuccaguccaauccucuuc

SEQ ID NO: 30415 - RNA, 22 nt, Artificial Sequence
  LRRK2 RNA guide
aagaucacuuacaaagaagagg

SEQ ID NO: 30416 - RNA, 22 nt, Artificial Sequence
  LRRK2 RNA guide
aauccucuucuuuguaagugau

SEQ ID NO: 30417 - RNA, 22 nt, Artificial Sequence
  LRRK2 RNA guide
acaaagaagaggauuggacugg

SEQ ID NO: 30418 - RNA, 22 nt, Artificial Sequence
  LRRK2 RNA guide
acuuacaaagaagaggauugga

SEQ ID NO: 30419 - RNA, 22 nt, Artificial Sequence
  LRRK2 RNA guide
acuuccaguccaauccucuucu

SEQ ID NO: 30420 - RNA, 22 nt, Artificial Sequence
  LRRK2 RNA guide
agaucacuuacaaagaagagga

SEQ ID NO: 30421 - RNA, 22 nt, Artificial Sequence
  LRRK2 RNA guide
aguccaauccucuucuuuguaa

SEQ ID NO: 30422 - RNA, 22 nt, Artificial Sequence
  LRRK2 RNA guide
aucacuuacaaagaagaggauu

SEQ ID NO: 30423 - RNA, 22 nt, Artificial Sequence
  LRRK2 RNA guide
auccucuucuuuguaagugauc

SEQ ID NO: 30424 - RNA, 22 nt, Artificial Sequence
  LRRK2 RNA guide
augugucuguccucaagaucac

SEQ ID NO: 30425 - RNA, 22 nt, Artificial Sequence
  LRRK2 RNA guide
caagaucacuuacaaagaagag

SEQ ID NO: 30426 - RNA, 22 nt, Artificial Sequence
  LRRK2 RNA guide
caauccucuucuuuguaaguga

SEQ ID NO: 30427 - RNA, 22 nt, Artificial Sequence
  LRRK2 RNA guide
cacuuacaaagaagaggauugg

SEQ ID NO: 30428 - RNA, 22 nt, Artificial Sequence
  LRRK2 RNA guide
caguccaauccucuucuuugua

SEQ ID NO: 30429 - RNA, 22 nt, Artificial Sequence
  LRRK2 RNA guide
ccaauccucuucuuuguaagug

SEQ ID NO: 30430 - RNA, 22 nt, Artificial Sequence
  LRRK2 RNA guide
ccaguccaauccucuucuuugu

SEQ ID NO: 30431 - RNA, 22 nt, Artificial Sequence
  LRRK2 RNA guide
ccucaagaucacuuacaaagaa

SEQ ID NO: 30432 - RNA, 22 nt, Artificial Sequence
  LRRK2 RNA guide
ccucuucuuuguaagugaucuu

SEQ ID NO: 30433 - RNA, 22 nt, Artificial Sequence
  LRRK2 RNA guide
cucaagaucacuuacaaagaag

SEQ ID NO: 30434 - RNA, 22 nt, Artificial Sequence
  LRRK2 RNA guide
cucuucuuuguaagugaucuug

SEQ ID NO: 30435 - RNA, 22 nt, Artificial Sequence
  LRRK2 RNA guide
cuguccucaagaucacuuacaa

SEQ ID NO: 30436 - RNA, 22 nt, Artificial Sequence
  LRRK2 RNA guide
cuuacaaagaagaggauuggac

SEQ ID NO: 30437 - RNA, 22 nt, Artificial Sequence
  LRRK2 RNA guide
cuuccaguccaauccucuucuu

SEQ ID NO: 30438 - RNA, 22 nt, Artificial Sequence
  LRRK2 RNA guide
cuucuuuguaagugaucuugag

SEQ ID NO: 30439 - RNA, 22 nt, Artificial Sequence
  LRRK2 RNA guide
cuuuguaagugaucuugaggac

SEQ ID NO: 30440 - RNA, 22 nt, Artificial Sequence
  LRRK2 RNA guide
gaucacuuacaaagaagaggau

SEQ ID NO: 30441 - RNA, 22 nt, Artificial Sequence
  LRRK2 RNA guide
gaugugucuguccucaagauca

SEQ ID NO: 30442 - RNA, 22 nt, Artificial Sequence
  LRRK2 RNA guide
guccaauccucuucuuuguaag

SEQ ID NO: 30443 - RNA, 22 nt, Artificial Sequence
  LRRK2 RNA guide
guccucaagaucacuuacaaag

SEQ ID NO: 30444 - RNA, 22 nt, Artificial Sequence
  LRRK2 RNA guide
gucuguccucaagaucacuuac

SEQ ID NO: 30445 - RNA, 22 nt, Artificial Sequence
  LRRK2 RNA guide
gugucuguccucaagaucacuu

SEQ ID NO: 30446 - RNA, 22 nt, Artificial Sequence
  LRRK2 RNA guide
uaacuuccaguccaauccucuu

SEQ ID NO: 30447 - RNA, 22 nt, Artificial Sequence
  LRRK2 RNA guide
uacaaagaagaggauuggacug

SEQ ID NO: 30448 - RNA, 22 nt, Artificial Sequence
  LRRK2 RNA guide
ucaagaucacuuacaaagaaga

SEQ ID NO: 30449 - RNA, 22 nt, Artificial Sequence
  LRRK2 RNA guide
ucacuuacaaagaagaggauug

SEQ ID NO: 30450 - RNA, 22 nt, Artificial Sequence
  LRRK2 RNA guide
uccaauccucuucuuuguaagu

SEQ ID NO: 30451 - RNA, 22 nt, Artificial Sequence
  LRRK2 RNA guide
uccaguccaauccucuucuuug

SEQ ID NO: 30452 - RNA, 22 nt, Artificial Sequence
  LRRK2 RNA guide
uccucaagaucacuuacaaaga

SEQ ID NO: 30453 - RNA, 22 nt, Artificial Sequence
  LRRK2 RNA guide
uccucuucuuuguaagugaucu

SEQ ID NO: 30454 - RNA, 22 nt, Artificial Sequence
  LRRK2 RNA guide
ucuguccucaagaucacuuaca

SEQ ID NO: 30455 - RNA, 22 nt, Artificial Sequence
  LRRK2 RNA guide
ucuucuuuguaagugaucuuga

SEQ ID NO: 30456 - RNA, 22 nt, Artificial Sequence
  LRRK2 RNA guide
ucuuuguaagugaucuugagga

SEQ ID NO: 30457 - RNA, 22 nt, Artificial Sequence
  LRRK2 RNA guide
uguaagugaucuugaggacaga

SEQ ID NO: 30458 - RNA, 22 nt, Artificial Sequence
  LRRK2 RNA guide
uguccucaagaucacuuacaaa

SEQ ID NO: 30459 - RNA, 22 nt, Artificial Sequence
  LRRK2 RNA guide
ugucuguccucaagaucacuua

SEQ ID NO: 30460 - RNA, 22 nt, Artificial Sequence
  LRRK2 RNA guide
ugugucuguccucaagaucacu

SEQ ID NO: 30461 - RNA, 22 nt, Artificial Sequence
  LRRK2 RNA guide
uuacaaagaagaggauuggacu

SEQ ID NO: 30462 - RNA, 22 nt, Artificial Sequence
  LRRK2 RNA guide
uuccaguccaauccucuucuuu

SEQ ID NO: 30463 - RNA, 22 nt, Artificial Sequence
  LRRK2 RNA guide
uucuuuguaagugaucuugagg

SEQ ID NO: 30464 - RNA, 22 nt, Artificial Sequence
  LRRK2 RNA guide
uuguaagugaucuugaggacag

SEQ ID NO: 30465 - RNA, 22 nt, Artificial Sequence
  LRRK2 RNA guide
uuuguaagugaucuugaggaca

SEQ ID NO: 30466 - RNA, 20 nt, Artificial Sequence
  LRRK2 RNA guide
aagaucacuuagaaagaaga

SEQ ID NO: 30467 - RNA, 20 nt, Artificial Sequence
  LRRK2 RNA guide
aauccucuucuuucuaagug

SEQ ID NO: 30468 - RNA, 20 nt, Artificial Sequence
  LRRK2 RNA guide
acuuagaaagaagaggauug

SEQ ID NO: 30469 - RNA, 20 nt, Artificial Sequence
  LRRK2 RNA guide
agaaagaagaggauuggacu

SEQ ID NO: 30470 - RNA, 20 nt, Artificial Sequence
  LRRK2 RNA guide
agaucacuuagaaagaagag

SEQ ID NO: 30471 - RNA, 20 nt, Artificial Sequence
  LRRK2 RNA guide
aguccaauccucuucuuucu

SEQ ID NO: 30472 - RNA, 20 nt, Artificial Sequence
  LRRK2 RNA guide
aucacuuagaaagaagagga

SEQ ID NO: 30473 - RNA, 20 nt, Artificial Sequence
  LRRK2 RNA guide
auccucuucuuucuaaguga

SEQ ID NO: 30474 - RNA, 20 nt, Artificial Sequence
  LRRK2 RNA guide
caagaucacuuagaaagaag

SEQ ID NO: 30475 - RNA, 20 nt, Artificial Sequence
  LRRK2 RNA guide
caauccucuucuuucuaagu

SEQ ID NO: 30476 - RNA, 20 nt, Artificial Sequence
  LRRK2 RNA guide
cacuuagaaagaagaggauu

SEQ ID NO: 30477 - RNA, 20 nt, Artificial Sequence
  LRRK2 RNA guide
caguccaauccucuucuuuc

SEQ ID NO: 30478 - RNA, 20 nt, Artificial Sequence
  LRRK2 RNA guide
ccaauccucuucuuucuaag

SEQ ID NO: 30479 - RNA, 20 nt, Artificial Sequence
  LRRK2 RNA guide
ccucaagaucacuuagaaag

SEQ ID NO: 30480 - RNA, 20 nt, Artificial Sequence
  LRRK2 RNA guide
ccucuucuuucuaagugauc

SEQ ID NO: 30481 - RNA, 20 nt, Artificial Sequence
  LRRK2 RNA guide
cucaagaucacuuagaaaga

SEQ ID NO: 30482 - RNA, 20 nt, Artificial Sequence
  LRRK2 RNA guide
cucuucuuucuaagugaucu

SEQ ID NO: 30483 - RNA, 20 nt, Artificial Sequence
  LRRK2 RNA guide
cuguccucaagaucacuuag

SEQ ID NO: 30484 - RNA, 20 nt, Artificial Sequence
  LRRK2 RNA guide
cuuagaaagaagaggauugg

SEQ ID NO: 30485 - RNA, 20 nt, Artificial Sequence
  LRRK2 RNA guide
cuucuuucuaagugaucuug

SEQ ID NO: 30486 - RNA, 20 nt, Artificial Sequence
  LRRK2 RNA guide
cuuucuaagugaucuugagg

SEQ ID NO: 30487 - RNA, 20 nt, Artificial Sequence
  LRRK2 RNA guide
gaucacuuagaaagaagagg

SEQ ID NO: 30488 - RNA, 20 nt, Artificial Sequence
  LRRK2 RNA guide
guccaauccucuucuuucua

SEQ ID NO: 30489 - RNA, 20 nt, Artificial Sequence
  LRRK2 RNA guide
guccucaagaucacuuagaa

SEQ ID NO: 30490 - RNA, 20 nt, Artificial Sequence
  LRRK2 RNA guide
uagaaagaagaggauuggac

SEQ ID NO: 30491 - RNA, 20 nt, Artificial Sequence
  LRRK2 RNA guide
ucaagaucacuuagaaagaa

SEQ ID NO: 30492 - RNA, 20 nt, Artificial Sequence
  LRRK2 RNA guide
ucacuuagaaagaagaggau

SEQ ID NO: 30493 - RNA, 20 nt, Artificial Sequence
  LRRK2 RNA guide
uccaauccucuucuuucuaa

SEQ ID NO: 30494 - RNA, 20 nt, Artificial Sequence
  LRRK2 RNA guide
uccucaagaucacuuagaaa

SEQ ID NO: 30495 - RNA, 20 nt, Artificial Sequence
  LRRK2 RNA guide
uccucuucuuucuaagugau

SEQ ID NO: 30496 - RNA, 20 nt, Artificial Sequence
  LRRK2 RNA guide
ucuaagugaucuugaggaca

SEQ ID NO: 30497 - RNA, 20 nt, Artificial Sequence
  LRRK2 RNA guide
ucuucuuucuaagugaucuu

SEQ ID NO: 30498 - RNA, 20 nt, Artificial Sequence
  LRRK2 RNA guide
ucuuucuaagugaucuugag

SEQ ID NO: 30499 - RNA, 20 nt, Artificial Sequence
  LRRK2 RNA guide
uguccucaagaucacuuaga

SEQ ID NO: 30500 - RNA, 20 nt, Artificial Sequence
  LRRK2 RNA guide
uuagaaagaagaggauugga

SEQ ID NO: 30501 - RNA, 20 nt, Artificial Sequence
  LRRK2 RNA guide
uucuaagugaucuugaggac

SEQ ID NO: 30502 - RNA, 20 nt, Artificial Sequence
  LRRK2 RNA guide
uucuuucuaagugaucuuga

SEQ ID NO: 30503 - RNA, 20 nt, Artificial Sequence
  LRRK2 RNA guide
uuucuaagugaucuugagga

SEQ ID NO: 30504 - RNA, 21 nt, Artificial Sequence
  LRRK2 RNA guide
aagaucacuuagaaagaagag

SEQ ID NO: 30505 - RNA, 21 nt, Artificial Sequence
  LRRK2 RNA guide
aauccucuucuuucuaaguga

SEQ ID NO: 30506 - RNA, 21 nt, Artificial Sequence
  LRRK2 RNA guide
acuuagaaagaagaggauugg

SEQ ID NO: 30507 - RNA, 21 nt, Artificial Sequence
  LRRK2 RNA guide
agaaagaagaggauuggacug

SEQ ID NO: 30508 - RNA, 21 nt, Artificial Sequence
  LRRK2 RNA guide
agaucacuuagaaagaagagg

SEQ ID NO: 30509 - RNA, 21 nt, Artificial Sequence
  LRRK2 RNA guide
aguccaauccucuucuuucua

SEQ ID NO: 30510 - RNA, 21 nt, Artificial Sequence
  LRRK2 RNA guide
aucacuuagaaagaagaggau

SEQ ID NO: 30511 - RNA, 21 nt, Artificial Sequence
  LRRK2 RNA guide
auccucuucuuucuaagugau

SEQ ID NO: 30512 - RNA, 21 nt, Artificial Sequence
  LRRK2 RNA guide
caagaucacuuagaaagaaga

SEQ ID NO: 30513 - RNA, 21 nt, Artificial Sequence
  LRRK2 RNA guide
caauccucuucuuucuaagug

SEQ ID NO: 30514 - RNA, 21 nt, Artificial Sequence
  LRRK2 RNA guide
cacuuagaaagaagaggauug

SEQ ID NO: 30515 - RNA, 21 nt, Artificial Sequence
  LRRK2 RNA guide
caguccaauccucuucuuucu

SEQ ID NO: 30516 - RNA, 21 nt, Artificial Sequence
  LRRK2 RNA guide
ccaauccucuucuuucuaagu

SEQ ID NO: 30517 - RNA, 21 nt, Artificial Sequence
  LRRK2 RNA guide
ccaguccaauccucuucuuuc

SEQ ID NO: 30518 - RNA, 21 nt, Artificial Sequence
  LRRK2 RNA guide
ccucaagaucacuuagaaaga

SEQ ID NO: 30519 - RNA, 21 nt, Artificial Sequence
  LRRK2 RNA guide
ccucuucuuucuaagugaucu

SEQ ID NO: 30520 - RNA, 21 nt, Artificial Sequence
  LRRK2 RNA guide
cucaagaucacuuagaaagaa

SEQ ID NO: 30521 - RNA, 21 nt, Artificial Sequence
  LRRK2 RNA guide
cucuucuuucuaagugaucuu

SEQ ID NO: 30522 - RNA, 21 nt, Artificial Sequence
  LRRK2 RNA guide
cuguccucaagaucacuuaga

SEQ ID NO: 30523 - RNA, 21 nt, Artificial Sequence
  LRRK2 RNA guide
cuuagaaagaagaggauugga

SEQ ID NO: 30524 - RNA, 21 nt, Artificial Sequence
  LRRK2 RNA guide
cuucuuucuaagugaucuuga

SEQ ID NO: 30525 - RNA, 21 nt, Artificial Sequence
  LRRK2 RNA guide
cuuucuaagugaucuugagga

SEQ ID NO: 30526 - RNA, 21 nt, Artificial Sequence
  LRRK2 RNA guide
gaucacuuagaaagaagagga

SEQ ID NO: 30527 - RNA, 21 nt, Artificial Sequence
  LRRK2 RNA guide
guccaauccucuucuuucuaa

SEQ ID NO: 30528 - RNA, 21 nt, Artificial Sequence
  LRRK2 RNA guide
guccucaagaucacuuagaaa

SEQ ID NO: 30529 - RNA, 21 nt, Artificial Sequence
  LRRK2 RNA guide
uagaaagaagaggauuggacu

SEQ ID NO: 30530 - RNA, 21 nt, Artificial Sequence
  LRRK2 RNA guide
ucaagaucacuuagaaagaag

SEQ ID NO: 30531 - RNA, 21 nt, Artificial Sequence
  LRRK2 RNA guide
ucacuuagaaagaagaggauu

SEQ ID NO: 30532 - RNA, 21 nt, Artificial Sequence
  LRRK2 RNA guide
uccaauccucuucuuucuaag

SEQ ID NO: 30533 - RNA, 21 nt, Artificial Sequence
  LRRK2 RNA guide
uccucaagaucacuuagaaag

SEQ ID NO: 30534 - RNA, 21 nt, Artificial Sequence
  LRRK2 RNA guide
uccucuucuuucuaagugauc

SEQ ID NO: 30535 - RNA, 21 nt, Artificial Sequence
  LRRK2 RNA guide
ucuaagugaucuugaggacag

SEQ ID NO: 30536 - RNA, 21 nt, Artificial Sequence
  LRRK2 RNA guide
ucuguccucaagaucacuuag

SEQ ID NO: 30537 - RNA, 21 nt, Artificial Sequence
  LRRK2 RNA guide
ucuucuuucuaagugaucuug

SEQ ID NO: 30538 - RNA, 21 nt, Artificial Sequence
  LRRK2 RNA guide
ucuuucuaagugaucuugagg

SEQ ID NO: 30539 - RNA, 21 nt, Artificial Sequence
  LRRK2 RNA guide
uguccucaagaucacuuagaa

SEQ ID NO: 30540 - RNA, 21 nt, Artificial Sequence
  LRRK2 RNA guide
uuagaaagaagaggauuggac

SEQ ID NO: 30541 - RNA, 21 nt, Artificial Sequence
  LRRK2 RNA guide
uucuaagugaucuugaggaca

SEQ ID NO: 30542 - RNA, 21 nt, Artificial Sequence
  LRRK2 RNA guide
uucuuucuaagugaucuugag

SEQ ID NO: 30543 - RNA, 21 nt, Artificial Sequence
  LRRK2 RNA guide
uuucuaagugaucuugaggac

SEQ ID NO: 30544 - RNA, 22 nt, Artificial Sequence
  LRRK2 RNA guide
aagaucacuuagaaagaagagg

SEQ ID NO: 30545 - RNA, 22 nt, Artificial Sequence
  LRRK2 RNA guide
aauccucuucuuucuaagugau

SEQ ID NO: 30546 - RNA, 22 nt, Artificial Sequence
  LRRK2 RNA guide
acuuagaaagaagaggauugga

SEQ ID NO: 30547 - RNA, 22 nt, Artificial Sequence
  LRRK2 RNA guide
agaaagaagaggauuggacugg

SEQ ID NO: 30548 - RNA, 22 nt, Artificial Sequence
  LRRK2 RNA guide
agaucacuuagaaagaagagga

SEQ ID NO: 30549 - RNA, 22 nt, Artificial Sequence
  LRRK2 RNA guide
aguccaauccucuucuuucuaa

SEQ ID NO: 30550 - RNA, 22 nt, Artificial Sequence
  LRRK2 RNA guide
aucacuuagaaagaagaggauu

SEQ ID NO: 30551 - RNA, 22 nt, Artificial Sequence
  LRRK2 RNA guide
auccucuucuuucuaagugauc

SEQ ID NO: 30552 - RNA, 22 nt, Artificial Sequence
  LRRK2 RNA guide
caagaucacuuagaaagaagag

SEQ ID NO: 30553 - RNA, 22 nt, Artificial Sequence
  LRRK2 RNA guide
caauccucuucuuucuaaguga

SEQ ID NO: 30554 - RNA, 22 nt, Artificial Sequence
  LRRK2 RNA guide
cacuuagaaagaagaggauugg

SEQ ID NO: 30555 - RNA, 22 nt, Artificial Sequence
  LRRK2 RNA guide
caguccaauccucuucuuucua

SEQ ID NO: 30556 - RNA, 22 nt, Artificial Sequence
  LRRK2 RNA guide
ccaauccucuucuuucuaagug

SEQ ID NO: 30557 - RNA, 22 nt, Artificial Sequence
  LRRK2 RNA guide
ccaguccaauccucuucuuucu

SEQ ID NO: 30558 - RNA, 22 nt, Artificial Sequence
  LRRK2 RNA guide
ccucaagaucacuuagaaagaa

SEQ ID NO: 30559 - RNA, 22 nt, Artificial Sequence
  LRRK2 RNA guide
ccucuucuuucuaagugaucuu

SEQ ID NO: 30560 - RNA, 22 nt, Artificial Sequence
  LRRK2 RNA guide
cucaagaucacuuagaaagaag

SEQ ID NO: 30561 - RNA, 22 nt, Artificial Sequence
  LRRK2 RNA guide
cucuucuuucuaagugaucuug

SEQ ID NO: 30562 - RNA, 22 nt, Artificial Sequence
  LRRK2 RNA guide
cuguccucaagaucacuuagaa

SEQ ID NO: 30563 - RNA, 22 nt, Artificial Sequence
  LRRK2 RNA guide
cuuagaaagaagaggauuggac

SEQ ID NO: 30564 - RNA, 22 nt, Artificial Sequence
  LRRK2 RNA guide
cuucuuucuaagugaucuugag

SEQ ID NO: 30565 - RNA, 22 nt, Artificial Sequence
  LRRK2 RNA guide
cuuucuaagugaucuugaggac

SEQ ID NO: 30566 - RNA, 22 nt, Artificial Sequence
  LRRK2 RNA guide
gaucacuuagaaagaagaggau

SEQ ID NO: 30567 - RNA, 22 nt, Artificial Sequence
  LRRK2 RNA guide
guccaauccucuucuuucuaag

SEQ ID NO: 30568 - RNA, 22 nt, Artificial Sequence
  LRRK2 RNA guide
guccucaagaucacuuagaaag

SEQ ID NO: 30569 - RNA, 22 nt, Artificial Sequence
  LRRK2 RNA guide
gucuguccucaagaucacuuag

SEQ ID NO: 30570 - RNA, 22 nt, Artificial Sequence
  LRRK2 RNA guide
uagaaagaagaggauuggacug

SEQ ID NO: 30571 - RNA, 22 nt, Artificial Sequence
  LRRK2 RNA guide
ucaagaucacuuagaaagaaga

SEQ ID NO: 30572 - RNA, 22 nt, Artificial Sequence
  LRRK2 RNA guide
ucacuuagaaagaagaggauug

SEQ ID NO: 30573 - RNA, 22 nt, Artificial Sequence
  LRRK2 RNA guide
uccaauccucuucuuucuaagu

SEQ ID NO: 30574 - RNA, 22 nt, Artificial Sequence
  LRRK2 RNA guide
uccaguccaauccucuucuuuc

SEQ ID NO: 30575 - RNA, 22 nt, Artificial Sequence
  LRRK2 RNA guide
uccucaagaucacuuagaaaga

SEQ ID NO: 30576 - RNA, 22 nt, Artificial Sequence
  LRRK2 RNA guide
uccucuucuuucuaagugaucu

SEQ ID NO: 30577 - RNA, 22 nt, Artificial Sequence
  LRRK2 RNA guide
ucuaagugaucuugaggacaga

SEQ ID NO: 30578 - RNA, 22 nt, Artificial Sequence
  LRRK2 RNA guide
ucuguccucaagaucacuuaga

SEQ ID NO: 30579 - RNA, 22 nt, Artificial Sequence
  LRRK2 RNA guide
ucuucuuucuaagugaucuuga

SEQ ID NO: 30580 - RNA, 22 nt, Artificial Sequence
  LRRK2 RNA guide
ucuuucuaagugaucuugagga

SEQ ID NO: 30581 - RNA, 22 nt, Artificial Sequence
  LRRK2 RNA guide
uguccucaagaucacuuagaaa

SEQ ID NO: 30582 - RNA, 22 nt, Artificial Sequence
  LRRK2 RNA guide
uuagaaagaagaggauuggacu

SEQ ID NO: 30583 - RNA, 22 nt, Artificial Sequence
  LRRK2 RNA guide
uucuaagugaucuugaggacag

SEQ ID NO: 30584 - RNA, 22 nt, Artificial Sequence
  LRRK2 RNA guide
uucuuucuaagugaucuugagg

SEQ ID NO: 30585 - RNA, 22 nt, Artificial Sequence
  LRRK2 RNA guide
uuucuaagugaucuugaggaca

SEQ ID NO: 30586 - RNA, 20 nt, Artificial Sequence
  LRRK2 RNA guide
aaauguccucauaucaaaga

SEQ ID NO: 30587 - RNA, 20 nt, Artificial Sequence
  LRRK2 RNA guide
aauguccucauaucaaagaa

SEQ ID NO: 30588 - RNA, 20 nt, Artificial Sequence
  LRRK2 RNA guide
acauuuacaucuggaagaaa

SEQ ID NO: 30589 - RNA, 20 nt, Artificial Sequence
  LRRK2 RNA guide
agauguaaauguccucauau

SEQ ID NO: 30590 - RNA, 20 nt, Artificial Sequence
  LRRK2 RNA guide
agcuucuuugauaugaggac

SEQ ID NO: 30591 - RNA, 20 nt, Artificial Sequence
  LRRK2 RNA guide
aggacauuuacaucuggaag

SEQ ID NO: 30592 - RNA, 20 nt, Artificial Sequence
  LRRK2 RNA guide
auaugaggacauuuacaucu

SEQ ID NO: 30593 - RNA, 20 nt, Artificial Sequence
  LRRK2 RNA guide
aucuagcuucuuugauauga

SEQ ID NO: 30594 - RNA, 20 nt, Artificial Sequence
  LRRK2 RNA guide
augaggacauuuacaucugg

SEQ ID NO: 30595 - RNA, 20 nt, Artificial Sequence
  LRRK2 RNA guide
auguaaauguccucauauca

SEQ ID NO: 30596 - RNA, 20 nt, Artificial Sequence
  LRRK2 RNA guide
auguccucauaucaaagaag

SEQ ID NO: 30597 - RNA, 20 nt, Artificial Sequence
  LRRK2 RNA guide
auuucuuccagauguaaaug

SEQ ID NO: 30598 - RNA, 20 nt, Artificial Sequence
  LRRK2 RNA guide
cagauguaaauguccucaua

SEQ ID NO: 30599 - RNA, 20 nt, Artificial Sequence
  LRRK2 RNA guide
cauuuacaucuggaagaaau

SEQ ID NO: 30600 - RNA, 20 nt, Artificial Sequence
  LRRK2 RNA guide
ccagauguaaauguccucau

SEQ ID NO: 30601 - RNA, 20 nt, Artificial Sequence
  LRRK2 RNA guide
cuagcuucuuugauaugagg

SEQ ID NO: 30602 - RNA, 20 nt, Artificial Sequence
  LRRK2 RNA guide
cuuccagauguaaauguccu

SEQ ID NO: 30603 - RNA, 20 nt, Artificial Sequence
  LRRK2 RNA guide
cuucuuugauaugaggacau

SEQ ID NO: 30604 - RNA, 20 nt, Artificial Sequence
  LRRK2 RNA guide
cuuugauaugaggacauuua

SEQ ID NO: 30605 - RNA, 20 nt, Artificial Sequence
  LRRK2 RNA guide
gacauuuacaucuggaagaa

SEQ ID NO: 30606 - RNA, 20 nt, Artificial Sequence
  LRRK2 RNA guide
gaggacauuuacaucuggaa

SEQ ID NO: 30607 - RNA, 20 nt, Artificial Sequence
  LRRK2 RNA guide
gauaugaggacauuuacauc

SEQ ID NO: 30608 - RNA, 20 nt, Artificial Sequence
  LRRK2 RNA guide
gauguaaauguccucauauc

SEQ ID NO: 30609 - RNA, 20 nt, Artificial Sequence
  LRRK2 RNA guide
gcuucuuugauaugaggaca

SEQ ID NO: 30610 - RNA, 20 nt, Artificial Sequence
  LRRK2 RNA guide
ggacauuuacaucuggaaga

SEQ ID NO: 30611 - RNA, 20 nt, Artificial Sequence
  LRRK2 RNA guide
guaaauguccucauaucaaa

SEQ ID NO: 30612 - RNA, 20 nt, Artificial Sequence
  LRRK2 RNA guide
uaaauguccucauaucaaag

SEQ ID NO: 30613 - RNA, 20 nt, Artificial Sequence
  LRRK2 RNA guide
uagcuucuuugauaugagga

SEQ ID NO: 30614 - RNA, 20 nt, Artificial Sequence
  LRRK2 RNA guide
uaugaggacauuuacaucug

SEQ ID NO: 30615 - RNA, 20 nt, Artificial Sequence
  LRRK2 RNA guide
uccagauguaaauguccuca

SEQ ID NO: 30616 - RNA, 20 nt, Artificial Sequence
  LRRK2 RNA guide
ucuagcuucuuugauaugag

SEQ ID NO: 30617 - RNA, 20 nt, Artificial Sequence
  LRRK2 RNA guide
ucuuccagauguaaaugucc

SEQ ID NO: 30618 - RNA, 20 nt, Artificial Sequence
  LRRK2 RNA guide
ucuuugauaugaggacauuu

SEQ ID NO: 30619 - RNA, 20 nt, Artificial Sequence
  LRRK2 RNA guide
ugaggacauuuacaucugga

SEQ ID NO: 30620 - RNA, 20 nt, Artificial Sequence
  LRRK2 RNA guide
ugauaugaggacauuuacau

SEQ ID NO: 30621 - RNA, 20 nt, Artificial Sequence
  LRRK2 RNA guide
uguaaauguccucauaucaa

SEQ ID NO: 30622 - RNA, 20 nt, Artificial Sequence
  LRRK2 RNA guide
uuccagauguaaauguccuc

SEQ ID NO: 30623 - RNA, 20 nt, Artificial Sequence
  LRRK2 RNA guide
uucuuccagauguaaauguc

SEQ ID NO: 30624 - RNA, 20 nt, Artificial Sequence
  LRRK2 RNA guide
uucuuugauaugaggacauu

SEQ ID NO: 30625 - RNA, 20 nt, Artificial Sequence
  LRRK2 RNA guide
uugauaugaggacauuuaca

SEQ ID NO: 30626 - RNA, 20 nt, Artificial Sequence
  LRRK2 RNA guide
uuucuuccagauguaaaugu

SEQ ID NO: 30627 - RNA, 20 nt, Artificial Sequence
  LRRK2 RNA guide
uuugauaugaggacauuuac

SEQ ID NO: 30628 - RNA, 21 nt, Artificial Sequence
  LRRK2 RNA guide
aauguccucauaucaaagaag

SEQ ID NO: 30629 - RNA, 21 nt, Artificial Sequence
  LRRK2 RNA guide
agauguaaauguccucauauc

SEQ ID NO: 30630 - RNA, 21 nt, Artificial Sequence
  LRRK2 RNA guide
agcuucuuugauaugaggaca

SEQ ID NO: 30631 - RNA, 21 nt, Artificial Sequence
  LRRK2 RNA guide
aggacauuuacaucuggaaga

SEQ ID NO: 30632 - RNA, 21 nt, Artificial Sequence
  LRRK2 RNA guide
auaugaggacauuuacaucug

SEQ ID NO: 30633 - RNA, 21 nt, Artificial Sequence
  LRRK2 RNA guide
aucuagcuucuuugauaugag

SEQ ID NO: 30634 - RNA, 21 nt, Artificial Sequence
  LRRK2 RNA guide
augaggacauuuacaucugga

SEQ ID NO: 30635 - RNA, 21 nt, Artificial Sequence
  LRRK2 RNA guide
auguccucauaucaaagaagc

SEQ ID NO: 30636 - RNA, 21 nt, Artificial Sequence
  LRRK2 RNA guide
cagauguaaauguccucauau

SEQ ID NO: 30637 - RNA, 21 nt, Artificial Sequence
  LRRK2 RNA guide
caucuagcuucuuugauauga

SEQ ID NO: 30638 - RNA, 21 nt, Artificial Sequence
  LRRK2 RNA guide
ccagauguaaauguccucaua

SEQ ID NO: 30639 - RNA, 21 nt, Artificial Sequence
  LRRK2 RNA guide
cuagcuucuuugauaugagga

SEQ ID NO: 30640 - RNA, 21 nt, Artificial Sequence
  LRRK2 RNA guide
cuuccagauguaaauguccuc

SEQ ID NO: 30641 - RNA, 21 nt, Artificial Sequence
  LRRK2 RNA guide
cuucuuugauaugaggacauu

SEQ ID NO: 30642 - RNA, 21 nt, Artificial Sequence
  LRRK2 RNA guide
cuuugauaugaggacauuuac

SEQ ID NO: 30643 - RNA, 21 nt, Artificial Sequence
  LRRK2 RNA guide
gacauuuacaucuggaagaaa

SEQ ID NO: 30644 - RNA, 21 nt, Artificial Sequence
  LRRK2 RNA guide
gaggacauuuacaucuggaag

SEQ ID NO: 30645 - RNA, 21 nt, Artificial Sequence
  LRRK2 RNA guide
gauaugaggacauuuacaucu

SEQ ID NO: 30646 - RNA, 21 nt, Artificial Sequence
  LRRK2 RNA guide
gauguaaauguccucauauca

SEQ ID NO: 30647 - RNA, 21 nt, Artificial Sequence
  LRRK2 RNA guide
gcuucuuugauaugaggacau

SEQ ID NO: 30648 - RNA, 21 nt, Artificial Sequence
  LRRK2 RNA guide
ggacauuuacaucuggaagaa

SEQ ID NO: 30649 - RNA, 21 nt, Artificial Sequence
  LRRK2 RNA guide
guaaauguccucauaucaaag

SEQ ID NO: 30650 - RNA, 21 nt, Artificial Sequence
  LRRK2 RNA guide
uagcuucuuugauaugaggac

SEQ ID NO: 30651 - RNA, 21 nt, Artificial Sequence
  LRRK2 RNA guide
uaugaggacauuuacaucugg

SEQ ID NO: 30652 - RNA, 21 nt, Artificial Sequence
  LRRK2 RNA guide
uccagauguaaauguccucau

SEQ ID NO: 30653 - RNA, 21 nt, Artificial Sequence
  LRRK2 RNA guide
ucuagcuucuuugauaugagg

SEQ ID NO: 30654 - RNA, 21 nt, Artificial Sequence
  LRRK2 RNA guide
ucuuccagauguaaauguccu

SEQ ID NO: 30655 - RNA, 21 nt, Artificial Sequence
  LRRK2 RNA guide
ugaggacauuuacaucuggaa

SEQ ID NO: 30656 - RNA, 21 nt, Artificial Sequence
  LRRK2 RNA guide
ugauaugaggacauuuacauc

SEQ ID NO: 30657 - RNA, 21 nt, Artificial Sequence
  LRRK2 RNA guide
uuccagauguaaauguccuca

SEQ ID NO: 30658 - RNA, 21 nt, Artificial Sequence
  LRRK2 RNA guide
uucuuccagauguaaaugucc

SEQ ID NO: 30659 - RNA, 21 nt, Artificial Sequence
  LRRK2 RNA guide
uuucuuccagauguaaauguc

SEQ ID NO: 30660 - RNA, 22 nt, Artificial Sequence
  LRRK2 RNA guide
aaauguccucauaucaaagaag

SEQ ID NO: 30661 - RNA, 22 nt, Artificial Sequence
  LRRK2 RNA guide
aauguccucauaucaaagaagc

SEQ ID NO: 30662 - RNA, 22 nt, Artificial Sequence
  LRRK2 RNA guide
agauguaaauguccucauauca

SEQ ID NO: 30663 - RNA, 22 nt, Artificial Sequence
  LRRK2 RNA guide
agcuucuuugauaugaggacau

SEQ ID NO: 30664 - RNA, 22 nt, Artificial Sequence
  LRRK2 RNA guide
aggacauuuacaucuggaagaa

SEQ ID NO: 30665 - RNA, 22 nt, Artificial Sequence
  LRRK2 RNA guide
auaugaggacauuuacaucugg

SEQ ID NO: 30666 - RNA, 22 nt, Artificial Sequence
  LRRK2 RNA guide
aucuagcuucuuugauaugagg

SEQ ID NO: 30667 - RNA, 22 nt, Artificial Sequence
  LRRK2 RNA guide
augaggacauuuacaucuggaa

SEQ ID NO: 30668 - RNA, 22 nt, Artificial Sequence
  LRRK2 RNA guide
auguccucauaucaaagaagcu

SEQ ID NO: 30669 - RNA, 22 nt, Artificial Sequence
  LRRK2 RNA guide
auuucuuccagauguaaauguc

SEQ ID NO: 30670 - RNA, 22 nt, Artificial Sequence
  LRRK2 RNA guide
cagauguaaauguccucauauc

SEQ ID NO: 30671 - RNA, 22 nt, Artificial Sequence
  LRRK2 RNA guide
caucuagcuucuuugauaugag

SEQ ID NO: 30672 - RNA, 22 nt, Artificial Sequence
  LRRK2 RNA guide
ccagauguaaauguccucauau

SEQ ID NO: 30673 - RNA, 22 nt, Artificial Sequence
  LRRK2 RNA guide
ccaucuagcuucuuugauauga

SEQ ID NO: 30674 - RNA, 22 nt, Artificial Sequence
  LRRK2 RNA guide
cuagcuucuuugauaugaggac

SEQ ID NO: 30675 - RNA, 22 nt, Artificial Sequence
  LRRK2 RNA guide
cuuccagauguaaauguccuca

SEQ ID NO: 30676 - RNA, 22 nt, Artificial Sequence
  LRRK2 RNA guide
cuucuuugauaugaggacauuu

SEQ ID NO: 30677 - RNA, 22 nt, Artificial Sequence
  LRRK2 RNA guide
cuuugauaugaggacauuuaca

SEQ ID NO: 30678 - RNA, 22 nt, Artificial Sequence
  LRRK2 RNA guide
gacauuuacaucuggaagaaau

SEQ ID NO: 30679 - RNA, 22 nt, Artificial Sequence
  LRRK2 RNA guide
gaggacauuuacaucuggaaga

SEQ ID NO: 30680 - RNA, 22 nt, Artificial Sequence
  LRRK2 RNA guide
gauaugaggacauuuacaucug

SEQ ID NO: 30681 - RNA, 22 nt, Artificial Sequence
  LRRK2 RNA guide
gauguaaauguccucauaucaa

SEQ ID NO: 30682 - RNA, 22 nt, Artificial Sequence
  LRRK2 RNA guide
gcuucuuugauaugaggacauu

SEQ ID NO: 30683 - RNA, 22 nt, Artificial Sequence
  LRRK2 RNA guide
ggacauuuacaucuggaagaaa

SEQ ID NO: 30684 - RNA, 22 nt, Artificial Sequence
  LRRK2 RNA guide
guaaauguccucauaucaaaga

SEQ ID NO: 30685 - RNA, 22 nt, Artificial Sequence
  LRRK2 RNA guide
uagcuucuuugauaugaggaca

SEQ ID NO: 30686 - RNA, 22 nt, Artificial Sequence
  LRRK2 RNA guide
uaugaggacauuuacaucugga

SEQ ID NO: 30687 - RNA, 22 nt, Artificial Sequence
  LRRK2 RNA guide
uccagauguaaauguccucaua

SEQ ID NO: 30688 - RNA, 22 nt, Artificial Sequence
  LRRK2 RNA guide
ucuagcuucuuugauaugagga

SEQ ID NO: 30689 - RNA, 22 nt, Artificial Sequence
  LRRK2 RNA guide
ucuuccagauguaaauguccuc

SEQ ID NO: 30690 - RNA, 22 nt, Artificial Sequence
  LRRK2 RNA guide
ucuuugauaugaggacauuuac

SEQ ID NO: 30691 - RNA, 22 nt, Artificial Sequence
  LRRK2 RNA guide
ugaggacauuuacaucuggaag

SEQ ID NO: 30692 - RNA, 22 nt, Artificial Sequence
  LRRK2 RNA guide
ugauaugaggacauuuacaucu

SEQ ID NO: 30693 - RNA, 22 nt, Artificial Sequence
  LRRK2 RNA guide
uguaaauguccucauaucaaag

SEQ ID NO: 30694 - RNA, 22 nt, Artificial Sequence
  LRRK2 RNA guide
uuccagauguaaauguccucau

SEQ ID NO: 30695 - RNA, 22 nt, Artificial Sequence
  LRRK2 RNA guide
uucuuccagauguaaauguccu

SEQ ID NO: 30696 - RNA, 22 nt, Artificial Sequence
  LRRK2 RNA guide
uugauaugaggacauuuacauc

SEQ ID NO: 30697 - RNA, 22 nt, Artificial Sequence
  LRRK2 RNA guide
uuucuuccagauguaaaugucc

SEQ ID NO: 30698 - RNA, 20 nt, Artificial Sequence
  LRRK2 RNA guide
aaaaguccucauaucaaaga

SEQ ID NO: 30699 - RNA, 20 nt, Artificial Sequence
  LRRK2 RNA guide
aaaguccucauaucaaagaa

SEQ ID NO: 30700 - RNA, 20 nt, Artificial Sequence
  LRRK2 RNA guide
aaguccucauaucaaagaag

SEQ ID NO: 30701 - RNA, 20 nt, Artificial Sequence
  LRRK2 RNA guide
acuuuuacaucuggaagaaa

SEQ ID NO: 30702 - RNA, 20 nt, Artificial Sequence
  LRRK2 RNA guide
agauguaaaaguccucauau

SEQ ID NO: 30703 - RNA, 20 nt, Artificial Sequence
  LRRK2 RNA guide
aggacuuuuacaucuggaag

SEQ ID NO: 30704 - RNA, 20 nt, Artificial Sequence
  LRRK2 RNA guide
auaugaggacuuuuacaucu

SEQ ID NO: 30705 - RNA, 20 nt, Artificial Sequence
  LRRK2 RNA guide
augaggacuuuuacaucugg

SEQ ID NO: 30706 - RNA, 20 nt, Artificial Sequence
  LRRK2 RNA guide
auguaaaaguccucauauca

SEQ ID NO: 30707 - RNA, 20 nt, Artificial Sequence
  LRRK2 RNA guide
auuucuuccagauguaaaag

SEQ ID NO: 30708 - RNA, 20 nt, Artificial Sequence
  LRRK2 RNA guide
cagauguaaaaguccucaua

SEQ ID NO: 30709 - RNA, 20 nt, Artificial Sequence
  LRRK2 RNA guide
ccagauguaaaaguccucau

SEQ ID NO: 30710 - RNA, 20 nt, Artificial Sequence
  LRRK2 RNA guide
cuuccagauguaaaaguccu

SEQ ID NO: 30711 - RNA, 20 nt, Artificial Sequence
  LRRK2 RNA guide
cuucuuugauaugaggacuu

SEQ ID NO: 30712 - RNA, 20 nt, Artificial Sequence
  LRRK2 RNA guide
cuuugauaugaggacuuuua

SEQ ID NO: 30713 - RNA, 20 nt, Artificial Sequence
  LRRK2 RNA guide
cuuuuacaucuggaagaaau

SEQ ID NO: 30714 - RNA, 20 nt, Artificial Sequence
  LRRK2 RNA guide
gacuuuuacaucuggaagaa

SEQ ID NO: 30715 - RNA, 20 nt, Artificial Sequence
  LRRK2 RNA guide
gaggacuuuuacaucuggaa

SEQ ID NO: 30716 - RNA, 20 nt, Artificial Sequence
  LRRK2 RNA guide
gauaugaggacuuuuacauc

SEQ ID NO: 30717 - RNA, 20 nt, Artificial Sequence
  LRRK2 RNA guide
gauguaaaaguccucauauc

SEQ ID NO: 30718 - RNA, 20 nt, Artificial Sequence
  LRRK2 RNA guide
gcuucuuugauaugaggacu

SEQ ID NO: 30719 - RNA, 20 nt, Artificial Sequence
  LRRK2 RNA guide
ggacuuuuacaucuggaaga

SEQ ID NO: 30720 - RNA, 20 nt, Artificial Sequence
  LRRK2 RNA guide
guaaaaguccucauaucaaa

SEQ ID NO: 30721 - RNA, 20 nt, Artificial Sequence
  LRRK2 RNA guide
uaaaaguccucauaucaaag

SEQ ID NO: 30722 - RNA, 20 nt, Artificial Sequence
  LRRK2 RNA guide
uaugaggacuuuuacaucug

SEQ ID NO: 30723 - RNA, 20 nt, Artificial Sequence
  LRRK2 RNA guide
uccagauguaaaaguccuca

SEQ ID NO: 30724 - RNA, 20 nt, Artificial Sequence
  LRRK2 RNA guide
ucuuccagauguaaaagucc

SEQ ID NO: 30725 - RNA, 20 nt, Artificial Sequence
  LRRK2 RNA guide
ucuuugauaugaggacuuuu

SEQ ID NO: 30726 - RNA, 20 nt, Artificial Sequence
  LRRK2 RNA guide
ugaggacuuuuacaucugga

SEQ ID NO: 30727 - RNA, 20 nt, Artificial Sequence
  LRRK2 RNA guide
ugauaugaggacuuuuacau

SEQ ID NO: 30728 - RNA, 20 nt, Artificial Sequence
  LRRK2 RNA guide
uguaaaaguccucauaucaa

SEQ ID NO: 30729 - RNA, 20 nt, Artificial Sequence
  LRRK2 RNA guide
uuccagauguaaaaguccuc

SEQ ID NO: 30730 - RNA, 20 nt, Artificial Sequence
  LRRK2 RNA guide
uucuuccagauguaaaaguc

SEQ ID NO: 30731 - RNA, 20 nt, Artificial Sequence
  LRRK2 RNA guide
uucuuugauaugaggacuuu

SEQ ID NO: 30732 - RNA, 20 nt, Artificial Sequence
  LRRK2 RNA guide
uugauaugaggacuuuuaca

SEQ ID NO: 30733 - RNA, 20 nt, Artificial Sequence
  LRRK2 RNA guide
uuucuuccagauguaaaagu

SEQ ID NO: 30734 - RNA, 20 nt, Artificial Sequence
  LRRK2 RNA guide
uuugauaugaggacuuuuac

SEQ ID NO: 30735 - RNA, 21 nt, Artificial Sequence
  LRRK2 RNA guide
aaaguccucauaucaaagaag

SEQ ID NO: 30736 - RNA, 21 nt, Artificial Sequence
  LRRK2 RNA guide
aaguccucauaucaaagaagc

SEQ ID NO: 30737 - RNA, 21 nt, Artificial Sequence
  LRRK2 RNA guide
agauguaaaaguccucauauc

SEQ ID NO: 30738 - RNA, 21 nt, Artificial Sequence
  LRRK2 RNA guide
agcuucuuugauaugaggacu

SEQ ID NO: 30739 - RNA, 21 nt, Artificial Sequence
  LRRK2 RNA guide
aggacuuuuacaucuggaaga

SEQ ID NO: 30740 - RNA, 21 nt, Artificial Sequence
  LRRK2 RNA guide
auaugaggacuuuuacaucug

SEQ ID NO: 30741 - RNA, 21 nt, Artificial Sequence
  LRRK2 RNA guide
augaggacuuuuacaucugga

SEQ ID NO: 30742 - RNA, 21 nt, Artificial Sequence
  LRRK2 RNA guide
cagauguaaaaguccucauau

SEQ ID NO: 30743 - RNA, 21 nt, Artificial Sequence
  LRRK2 RNA guide
ccagauguaaaaguccucaua

SEQ ID NO: 30744 - RNA, 21 nt, Artificial Sequence
  LRRK2 RNA guide
cuuccagauguaaaaguccuc

SEQ ID NO: 30745 - RNA, 21 nt, Artificial Sequence
  LRRK2 RNA guide
cuucuuugauaugaggacuuu

SEQ ID NO: 30746 - RNA, 21 nt, Artificial Sequence
  LRRK2 RNA guide
cuuugauaugaggacuuuuac

SEQ ID NO: 30747 - RNA, 21 nt, Artificial Sequence
  LRRK2 RNA guide
gacuuuuacaucuggaagaaa

SEQ ID NO: 30748 - RNA, 21 nt, Artificial Sequence
  LRRK2 RNA guide
gaggacuuuuacaucuggaag

SEQ ID NO: 30749 - RNA, 21 nt, Artificial Sequence
  LRRK2 RNA guide
gauaugaggacuuuuacaucu

SEQ ID NO: 30750 - RNA, 21 nt, Artificial Sequence
  LRRK2 RNA guide
gauguaaaaguccucauauca

SEQ ID NO: 30751 - RNA, 21 nt, Artificial Sequence
  LRRK2 RNA guide
gcuucuuugauaugaggacuu

SEQ ID NO: 30752 - RNA, 21 nt, Artificial Sequence
  LRRK2 RNA guide
ggacuuuuacaucuggaagaa

SEQ ID NO: 30753 - RNA, 21 nt, Artificial Sequence
  LRRK2 RNA guide
guaaaaguccucauaucaaag

SEQ ID NO: 30754 - RNA, 21 nt, Artificial Sequence
  LRRK2 RNA guide
uaugaggacuuuuacaucugg

SEQ ID NO: 30755 - RNA, 21 nt, Artificial Sequence
  LRRK2 RNA guide
uccagauguaaaaguccucau

SEQ ID NO: 30756 - RNA, 21 nt, Artificial Sequence
  LRRK2 RNA guide
ucuuccagauguaaaaguccu

SEQ ID NO: 30757 - RNA, 21 nt, Artificial Sequence
  LRRK2 RNA guide
ugaggacuuuuacaucuggaa

SEQ ID NO: 30758 - RNA, 21 nt, Artificial Sequence
  LRRK2 RNA guide
ugauaugaggacuuuuacauc

SEQ ID NO: 30759 - RNA, 21 nt, Artificial Sequence
  LRRK2 RNA guide
uuccagauguaaaaguccuca

SEQ ID NO: 30760 - RNA, 21 nt, Artificial Sequence
  LRRK2 RNA guide
uucuuccagauguaaaagucc

SEQ ID NO: 30761 - RNA, 21 nt, Artificial Sequence
  LRRK2 RNA guide
uuucuuccagauguaaaaguc

SEQ ID NO: 30762 - RNA, 22 nt, Artificial Sequence
  LRRK2 RNA guide
aaaaguccucauaucaaagaag

SEQ ID NO: 30763 - RNA, 22 nt, Artificial Sequence
  LRRK2 RNA guide
aaaguccucauaucaaagaagc

SEQ ID NO: 30764 - RNA, 22 nt, Artificial Sequence
  LRRK2 RNA guide
aaguccucauaucaaagaagcu

SEQ ID NO: 30765 - RNA, 22 nt, Artificial Sequence
  LRRK2 RNA guide
agauguaaaaguccucauauca

SEQ ID NO: 30766 - RNA, 22 nt, Artificial Sequence
  LRRK2 RNA guide
agcuucuuugauaugaggacuu

SEQ ID NO: 30767 - RNA, 22 nt, Artificial Sequence
  LRRK2 RNA guide
aggacuuuuacaucuggaagaa

SEQ ID NO: 30768 - RNA, 22 nt, Artificial Sequence
  LRRK2 RNA guide
auaugaggacuuuuacaucugg

SEQ ID NO: 30769 - RNA, 22 nt, Artificial Sequence
  LRRK2 RNA guide
augaggacuuuuacaucuggaa

SEQ ID NO: 30770 - RNA, 22 nt, Artificial Sequence
  LRRK2 RNA guide
auuucuuccagauguaaaaguc

SEQ ID NO: 30771 - RNA, 22 nt, Artificial Sequence
  LRRK2 RNA guide
cagauguaaaaguccucauauc

SEQ ID NO: 30772 - RNA, 22 nt, Artificial Sequence
  LRRK2 RNA guide
ccagauguaaaaguccucauau

SEQ ID NO: 30773 - RNA, 22 nt, Artificial Sequence
  LRRK2 RNA guide
cuuccagauguaaaaguccuca

SEQ ID NO: 30774 - RNA, 22 nt, Artificial Sequence
  LRRK2 RNA guide
cuucuuugauaugaggacuuuu

SEQ ID NO: 30775 - RNA, 22 nt, Artificial Sequence
  LRRK2 RNA guide
cuuugauaugaggacuuuuaca

SEQ ID NO: 30776 - RNA, 22 nt, Artificial Sequence
  LRRK2 RNA guide
gacuuuuacaucuggaagaaau

SEQ ID NO: 30777 - RNA, 22 nt, Artificial Sequence
  LRRK2 RNA guide
gaggacuuuuacaucuggaaga

SEQ ID NO: 30778 - RNA, 22 nt, Artificial Sequence
  LRRK2 RNA guide
gauaugaggacuuuuacaucug

SEQ ID NO: 30779 - RNA, 22 nt, Artificial Sequence
  LRRK2 RNA guide
gauguaaaaguccucauaucaa

SEQ ID NO: 30780 - RNA, 22 nt, Artificial Sequence
  LRRK2 RNA guide
gcuucuuugauaugaggacuuu

SEQ ID NO: 30781 - RNA, 22 nt, Artificial Sequence
  LRRK2 RNA guide
ggacuuuuacaucuggaagaaa

SEQ ID NO: 30782 - RNA, 22 nt, Artificial Sequence
  LRRK2 RNA guide
guaaaaguccucauaucaaaga

SEQ ID NO: 30783 - RNA, 22 nt, Artificial Sequence
  LRRK2 RNA guide
uagcuucuuugauaugaggacu

SEQ ID NO: 30784 - RNA, 22 nt, Artificial Sequence
  LRRK2 RNA guide
uaugaggacuuuuacaucugga

SEQ ID NO: 30785 - RNA, 22 nt, Artificial Sequence
  LRRK2 RNA guide
uccagauguaaaaguccucaua

SEQ ID NO: 30786 - RNA, 22 nt, Artificial Sequence
  LRRK2 RNA guide
ucuuccagauguaaaaguccuc

SEQ ID NO: 30787 - RNA, 22 nt, Artificial Sequence
  LRRK2 RNA guide
ucuuugauaugaggacuuuuac

SEQ ID NO: 30788 - RNA, 22 nt, Artificial Sequence
  LRRK2 RNA guide
ugaggacuuuuacaucuggaag

SEQ ID NO: 30789 - RNA, 22 nt, Artificial Sequence
  LRRK2 RNA guide
ugauaugaggacuuuuacaucu

SEQ ID NO: 30790 - RNA, 22 nt, Artificial Sequence
  LRRK2 RNA guide
uguaaaaguccucauaucaaag

SEQ ID NO: 30791 - RNA, 22 nt, Artificial Sequence
  LRRK2 RNA guide
uuccagauguaaaaguccucau

SEQ ID NO: 30792 - RNA, 22 nt, Artificial Sequence
  LRRK2 RNA guide
uucuuccagauguaaaaguccu

SEQ ID NO: 30793 - RNA, 22 nt, Artificial Sequence
  LRRK2 RNA guide
uugauaugaggacuuuuacauc

SEQ ID NO: 30794 - RNA, 22 nt, Artificial Sequence
  LRRK2 RNA guide
uuucuuccagauguaaaagucc

SEQ ID NO: 30795 - RNA, 20 nt, Artificial Sequence
  LRRK2 RNA guide
aaggcagugcuauacuugac

SEQ ID NO: 30796 - RNA, 20 nt, Artificial Sequence
  LRRK2 RNA guide
acaacccaggggagccugga

SEQ ID NO: 30797 - RNA, 20 nt, Artificial Sequence
  LRRK2 RNA guide
acuugacaacccaggggagc

SEQ ID NO: 30798 - RNA, 20 nt, Artificial Sequence
  LRRK2 RNA guide
agauaaggcagugcuauacu

SEQ ID NO: 30799 - RNA, 20 nt, Artificial Sequence
  LRRK2 RNA guide
aggcagugcuauacuugaca

SEQ ID NO: 30800 - RNA, 20 nt, Artificial Sequence
  LRRK2 RNA guide
aggcuccccuggguugucaa

SEQ ID NO: 30801 - RNA, 20 nt, Artificial Sequence
  LRRK2 RNA guide
agugcuauacuugacaaccc

SEQ ID NO: 30802 - RNA, 20 nt, Artificial Sequence
  LRRK2 RNA guide
auaaggcagugcuauacuug

SEQ ID NO: 30803 - RNA, 20 nt, Artificial Sequence
  LRRK2 RNA guide
auacuugacaacccagggga

SEQ ID NO: 30804 - RNA, 20 nt, Artificial Sequence
  LRRK2 RNA guide
auguuccaggcuccccuggg

SEQ ID NO: 30805 - RNA, 20 nt, Artificial Sequence
  LRRK2 RNA guide
caggcuccccuggguuguca

SEQ ID NO: 30806 - RNA, 20 nt, Artificial Sequence
  LRRK2 RNA guide
cagugcuauacuugacaacc

SEQ ID NO: 30807 - RNA, 20 nt, Artificial Sequence
  LRRK2 RNA guide
ccaggcuccccuggguuguc

SEQ ID NO: 30808 - RNA, 20 nt, Artificial Sequence
  LRRK2 RNA guide
ccccuggguugucaaguaua

SEQ ID NO: 30809 - RNA, 20 nt, Artificial Sequence
  LRRK2 RNA guide
cccuggguugucaaguauag

SEQ ID NO: 30810 - RNA, 20 nt, Artificial Sequence
  LRRK2 RNA guide
ccuggguugucaaguauagc

SEQ ID NO: 30811 - RNA, 20 nt, Artificial Sequence
  LRRK2 RNA guide
cuauacuugacaacccaggg

SEQ ID NO: 30812 - RNA, 20 nt, Artificial Sequence
  LRRK2 RNA guide
cuccccuggguugucaagua

SEQ ID NO: 30813 - RNA, 20 nt, Artificial Sequence
  LRRK2 RNA guide
cuugacaacccaggggagcc

SEQ ID NO: 30814 - RNA, 20 nt, Artificial Sequence
  LRRK2 RNA guide
gacaacccaggggagccugg

SEQ ID NO: 30815 - RNA, 20 nt, Artificial Sequence
  LRRK2 RNA guide
gauaaggcagugcuauacuu

SEQ ID NO: 30816 - RNA, 20 nt, Artificial Sequence
  LRRK2 RNA guide
gcagugcuauacuugacaac

SEQ ID NO: 30817 - RNA, 20 nt, Artificial Sequence
  LRRK2 RNA guide
gcuauacuugacaacccagg

SEQ ID NO: 30818 - RNA, 20 nt, Artificial Sequence
  LRRK2 RNA guide
gcuccccuggguugucaagu

SEQ ID NO: 30819 - RNA, 20 nt, Artificial Sequence
  LRRK2 RNA guide
ggcagugcuauacuugacaa

SEQ ID NO: 30820 - RNA, 20 nt, Artificial Sequence
  LRRK2 RNA guide
ggcuccccuggguugucaag

SEQ ID NO: 30821 - RNA, 20 nt, Artificial Sequence
  LRRK2 RNA guide
ggguugucaaguauagcacu

SEQ ID NO: 30822 - RNA, 20 nt, Artificial Sequence
  LRRK2 RNA guide
gguugucaaguauagcacug

SEQ ID NO: 30823 - RNA, 20 nt, Artificial Sequence
  LRRK2 RNA guide
guauguuccaggcuccccug

SEQ ID NO: 30824 - RNA, 20 nt, Artificial Sequence
  LRRK2 RNA guide
gugcuauacuugacaaccca

SEQ ID NO: 30825 - RNA, 20 nt, Artificial Sequence
  LRRK2 RNA guide
guuccaggcuccccuggguu

SEQ ID NO: 30826 - RNA, 20 nt, Artificial Sequence
  LRRK2 RNA guide
guugucaaguauagcacugc

SEQ ID NO: 30827 - RNA, 20 nt, Artificial Sequence
  LRRK2 RNA guide
uaaggcagugcuauacuuga

SEQ ID NO: 30828 - RNA, 20 nt, Artificial Sequence
  LRRK2 RNA guide
uacuugacaacccaggggag

SEQ ID NO: 30829 - RNA, 20 nt, Artificial Sequence
  LRRK2 RNA guide
uagauaaggcagugcuauac

SEQ ID NO: 30830 - RNA, 20 nt, Artificial Sequence
  LRRK2 RNA guide
uauacuugacaacccagggg

SEQ ID NO: 30831 - RNA, 20 nt, Artificial Sequence
  LRRK2 RNA guide
uauguuccaggcuccccugg

SEQ ID NO: 30832 - RNA, 20 nt, Artificial Sequence
  LRRK2 RNA guide
uccaggcuccccuggguugu

SEQ ID NO: 30833 - RNA, 20 nt, Artificial Sequence
  LRRK2 RNA guide
uccccuggguugucaaguau

SEQ ID NO: 30834 - RNA, 20 nt, Artificial Sequence
  LRRK2 RNA guide
ugacaacccaggggagccug

SEQ ID NO: 30835 - RNA, 20 nt, Artificial Sequence
  LRRK2 RNA guide
ugcuauacuugacaacccag

SEQ ID NO: 30836 - RNA, 20 nt, Artificial Sequence
  LRRK2 RNA guide
uggguugucaaguauagcac

SEQ ID NO: 30837 - RNA, 20 nt, Artificial Sequence
  LRRK2 RNA guide
ugucaaguauagcacugccu

SEQ ID NO: 30838 - RNA, 20 nt, Artificial Sequence
  LRRK2 RNA guide
uguuccaggcuccccugggu

SEQ ID NO: 30839 - RNA, 20 nt, Artificial Sequence
  LRRK2 RNA guide
uuccaggcuccccuggguug

SEQ ID NO: 30840 - RNA, 20 nt, Artificial Sequence
  LRRK2 RNA guide
uugacaacccaggggagccu

SEQ ID NO: 30841 - RNA, 20 nt, Artificial Sequence
  LRRK2 RNA guide
uugucaaguauagcacugcc

SEQ ID NO: 30842 - RNA, 21 nt, Artificial Sequence
  LRRK2 RNA guide
aaggcagugcuauacuugaca

SEQ ID NO: 30843 - RNA, 21 nt, Artificial Sequence
  LRRK2 RNA guide
acaacccaggggagccuggaa

SEQ ID NO: 30844 - RNA, 21 nt, Artificial Sequence
  LRRK2 RNA guide
acuugacaacccaggggagcc

SEQ ID NO: 30845 - RNA, 21 nt, Artificial Sequence
  LRRK2 RNA guide
agauaaggcagugcuauacuu

SEQ ID NO: 30846 - RNA, 21 nt, Artificial Sequence
  LRRK2 RNA guide
aggcagugcuauacuugacaa

SEQ ID NO: 30847 - RNA, 21 nt, Artificial Sequence
  LRRK2 RNA guide
aggcuccccuggguugucaag

SEQ ID NO: 30848 - RNA, 21 nt, Artificial Sequence
  LRRK2 RNA guide
aguauguuccaggcuccccug

SEQ ID NO: 30849 - RNA, 21 nt, Artificial Sequence
  LRRK2 RNA guide
agugcuauacuugacaaccca

SEQ ID NO: 30850 - RNA, 21 nt, Artificial Sequence
  LRRK2 RNA guide
auaaggcagugcuauacuuga

SEQ ID NO: 30851 - RNA, 21 nt, Artificial Sequence
  LRRK2 RNA guide
auacuugacaacccaggggag

SEQ ID NO: 30852 - RNA, 21 nt, Artificial Sequence
  LRRK2 RNA guide
auguuccaggcuccccugggu

SEQ ID NO: 30853 - RNA, 21 nt, Artificial Sequence
  LRRK2 RNA guide
caggcuccccuggguugucaa

SEQ ID NO: 30854 - RNA, 21 nt, Artificial Sequence
  LRRK2 RNA guide
cagugcuauacuugacaaccc

SEQ ID NO: 30855 - RNA, 21 nt, Artificial Sequence
  LRRK2 RNA guide
ccaggcuccccuggguuguca

SEQ ID NO: 30856 - RNA, 21 nt, Artificial Sequence
  LRRK2 RNA guide
ccccuggguugucaaguauag

SEQ ID NO: 30857 - RNA, 21 nt, Artificial Sequence
  LRRK2 RNA guide
cccuggguugucaaguauagc

SEQ ID NO: 30858 - RNA, 21 nt, Artificial Sequence
  LRRK2 RNA guide
ccuggguugucaaguauagca

SEQ ID NO: 30859 - RNA, 21 nt, Artificial Sequence
  LRRK2 RNA guide
cuagauaaggcagugcuauac

SEQ ID NO: 30860 - RNA, 21 nt, Artificial Sequence
  LRRK2 RNA guide
cuauacuugacaacccagggg

SEQ ID NO: 30861 - RNA, 21 nt, Artificial Sequence
  LRRK2 RNA guide
cuccccuggguugucaaguau

SEQ ID NO: 30862 - RNA, 21 nt, Artificial Sequence
  LRRK2 RNA guide
cuggguugucaaguauagcac

SEQ ID NO: 30863 - RNA, 21 nt, Artificial Sequence
  LRRK2 RNA guide
cuugacaacccaggggagccu

SEQ ID NO: 30864 - RNA, 21 nt, Artificial Sequence
  LRRK2 RNA guide
gacaacccaggggagccugga

SEQ ID NO: 30865 - RNA, 21 nt, Artificial Sequence
  LRRK2 RNA guide
gauaaggcagugcuauacuug

SEQ ID NO: 30866 - RNA, 21 nt, Artificial Sequence
  LRRK2 RNA guide
gcagugcuauacuugacaacc

SEQ ID NO: 30867 - RNA, 21 nt, Artificial Sequence
  LRRK2 RNA guide
gcuauacuugacaacccaggg

SEQ ID NO: 30868 - RNA, 21 nt, Artificial Sequence
  LRRK2 RNA guide
gcuccccuggguugucaagua

SEQ ID NO: 30869 - RNA, 21 nt, Artificial Sequence
  LRRK2 RNA guide
ggcagugcuauacuugacaac

SEQ ID NO: 30870 - RNA, 21 nt, Artificial Sequence
  LRRK2 RNA guide
ggcuccccuggguugucaagu

SEQ ID NO: 30871 - RNA, 21 nt, Artificial Sequence
  LRRK2 RNA guide
ggguugucaaguauagcacug

SEQ ID NO: 30872 - RNA, 21 nt, Artificial Sequence
  LRRK2 RNA guide
gguugucaaguauagcacugc

SEQ ID NO: 30873 - RNA, 21 nt, Artificial Sequence
  LRRK2 RNA guide
guauguuccaggcuccccugg

SEQ ID NO: 30874 - RNA, 21 nt, Artificial Sequence
  LRRK2 RNA guide
gugcuauacuugacaacccag

SEQ ID NO: 30875 - RNA, 21 nt, Artificial Sequence
  LRRK2 RNA guide
guuccaggcuccccuggguug

SEQ ID NO: 30876 - RNA, 21 nt, Artificial Sequence
  LRRK2 RNA guide
guugucaaguauagcacugcc

SEQ ID NO: 30877 - RNA, 21 nt, Artificial Sequence
  LRRK2 RNA guide
uaaggcagugcuauacuugac

SEQ ID NO: 30878 - RNA, 21 nt, Artificial Sequence
  LRRK2 RNA guide
uacuugacaacccaggggagc

SEQ ID NO: 30879 - RNA, 21 nt, Artificial Sequence
  LRRK2 RNA guide
uagauaaggcagugcuauacu

SEQ ID NO: 30880 - RNA, 21 nt, Artificial Sequence
  LRRK2 RNA guide
uauacuugacaacccagggga

SEQ ID NO: 30881 - RNA, 21 nt, Artificial Sequence
  LRRK2 RNA guide
uauguuccaggcuccccuggg

SEQ ID NO: 30882 - RNA, 21 nt, Artificial Sequence
  LRRK2 RNA guide
uccaggcuccccuggguuguc

SEQ ID NO: 30883 - RNA, 21 nt, Artificial Sequence
  LRRK2 RNA guide
uccccuggguugucaaguaua

SEQ ID NO: 30884 - RNA, 21 nt, Artificial Sequence
  LRRK2 RNA guide
ugacaacccaggggagccugg

SEQ ID NO: 30885 - RNA, 21 nt, Artificial Sequence
  LRRK2 RNA guide
ugcuauacuugacaacccagg

SEQ ID NO: 30886 - RNA, 21 nt, Artificial Sequence
  LRRK2 RNA guide
uggguugucaaguauagcacu

SEQ ID NO: 30887 - RNA, 21 nt, Artificial Sequence
  LRRK2 RNA guide
ugucaaguauagcacugccuu

SEQ ID NO: 30888 - RNA, 21 nt, Artificial Sequence
  LRRK2 RNA guide
uguuccaggcuccccuggguu

SEQ ID NO: 30889 - RNA, 21 nt, Artificial Sequence
  LRRK2 RNA guide
uuccaggcuccccuggguugu

SEQ ID NO: 30890 - RNA, 21 nt, Artificial Sequence
  LRRK2 RNA guide
uugacaacccaggggagccug

SEQ ID NO: 30891 - RNA, 21 nt, Artificial Sequence
  LRRK2 RNA guide
uugucaaguauagcacugccu

SEQ ID NO: 30892 - RNA, 22 nt, Artificial Sequence
  LRRK2 RNA guide
aaggcagugcuauacuugacaa

SEQ ID NO: 30893 - RNA, 22 nt, Artificial Sequence
  LRRK2 RNA guide
aaguauguuccaggcuccccug

SEQ ID NO: 30894 - RNA, 22 nt, Artificial Sequence
  LRRK2 RNA guide
acaacccaggggagccuggaac

SEQ ID NO: 30895 - RNA, 22 nt, Artificial Sequence
  LRRK2 RNA guide
acuugacaacccaggggagccu

SEQ ID NO: 30896 - RNA, 22 nt, Artificial Sequence
  LRRK2 RNA guide
agauaaggcagugcuauacuug

SEQ ID NO: 30897 - RNA, 22 nt, Artificial Sequence
  LRRK2 RNA guide
aggcagugcuauacuugacaac

SEQ ID NO: 30898 - RNA, 22 nt, Artificial Sequence
  LRRK2 RNA guide
aggcuccccuggguugucaagu

SEQ ID NO: 30899 - RNA, 22 nt, Artificial Sequence
  LRRK2 RNA guide
aguauguuccaggcuccccugg

SEQ ID NO: 30900 - RNA, 22 nt, Artificial Sequence
  LRRK2 RNA guide
agugcuauacuugacaacccag

SEQ ID NO: 30901 - RNA, 22 nt, Artificial Sequence
  LRRK2 RNA guide
auaaggcagugcuauacuugac

SEQ ID NO: 30902 - RNA, 22 nt, Artificial Sequence
  LRRK2 RNA guide
auacuugacaacccaggggagc

SEQ ID NO: 30903 - RNA, 22 nt, Artificial Sequence
  LRRK2 RNA guide
auguuccaggcuccccuggguu

SEQ ID NO: 30904 - RNA, 22 nt, Artificial Sequence
  LRRK2 RNA guide
caggcuccccuggguugucaag

SEQ ID NO: 30905 - RNA, 22 nt, Artificial Sequence
  LRRK2 RNA guide
cagugcuauacuugacaaccca

SEQ ID NO: 30906 - RNA, 22 nt, Artificial Sequence
  LRRK2 RNA guide
ccaggcuccccuggguugucaa

SEQ ID NO: 30907 - RNA, 22 nt, Artificial Sequence
  LRRK2 RNA guide
ccccuggguugucaaguauagc

SEQ ID NO: 30908 - RNA, 22 nt, Artificial Sequence
  LRRK2 RNA guide
cccuggguugucaaguauagca

SEQ ID NO: 30909 - RNA, 22 nt, Artificial Sequence
  LRRK2 RNA guide
ccuggguugucaaguauagcac

SEQ ID NO: 30910 - RNA, 22 nt, Artificial Sequence
  LRRK2 RNA guide
cuagauaaggcagugcuauacu

SEQ ID NO: 30911 - RNA, 22 nt, Artificial Sequence
  LRRK2 RNA guide
cuauacuugacaacccagggga

SEQ ID NO: 30912 - RNA, 22 nt, Artificial Sequence
  LRRK2 RNA guide
cuccccuggguugucaaguaua

SEQ ID NO: 30913 - RNA, 22 nt, Artificial Sequence
  LRRK2 RNA guide
cuggguugucaaguauagcacu

SEQ ID NO: 30914 - RNA, 22 nt, Artificial Sequence
  LRRK2 RNA guide
cuugacaacccaggggagccug

SEQ ID NO: 30915 - RNA, 22 nt, Artificial Sequence
  LRRK2 RNA guide
gacaacccaggggagccuggaa

SEQ ID NO: 30916 - RNA, 22 nt, Artificial Sequence
  LRRK2 RNA guide
gauaaggcagugcuauacuuga

SEQ ID NO: 30917 - RNA, 22 nt, Artificial Sequence
  LRRK2 RNA guide
gcagugcuauacuugacaaccc

SEQ ID NO: 30918 - RNA, 22 nt, Artificial Sequence
  LRRK2 RNA guide
gcuauacuugacaacccagggg

SEQ ID NO: 30919 - RNA, 22 nt, Artificial Sequence
  LRRK2 RNA guide
gcuccccuggguugucaaguau

SEQ ID NO: 30920 - RNA, 22 nt, Artificial Sequence
  LRRK2 RNA guide
ggcagugcuauacuugacaacc

SEQ ID NO: 30921 - RNA, 22 nt, Artificial Sequence
  LRRK2 RNA guide
ggcuccccuggguugucaagua

SEQ ID NO: 30922 - RNA, 22 nt, Artificial Sequence
  LRRK2 RNA guide
ggguugucaaguauagcacugc

SEQ ID NO: 30923 - RNA, 22 nt, Artificial Sequence
  LRRK2 RNA guide
gguugucaaguauagcacugcc

SEQ ID NO: 30924 - RNA, 22 nt, Artificial Sequence
  LRRK2 RNA guide
guauguuccaggcuccccuggg

SEQ ID NO: 30925 - RNA, 22 nt, Artificial Sequence
  LRRK2 RNA guide
gugcuauacuugacaacccagg

SEQ ID NO: 30926 - RNA, 22 nt, Artificial Sequence
  LRRK2 RNA guide
guuccaggcuccccuggguugu

SEQ ID NO: 30927 - RNA, 22 nt, Artificial Sequence
  LRRK2 RNA guide
guugucaaguauagcacugccu

SEQ ID NO: 30928 - RNA, 22 nt, Artificial Sequence
  LRRK2 RNA guide
uaaggcagugcuauacuugaca

SEQ ID NO: 30929 - RNA, 22 nt, Artificial Sequence
  LRRK2 RNA guide
uacuugacaacccaggggagcc

SEQ ID NO: 30930 - RNA, 22 nt, Artificial Sequence
  LRRK2 RNA guide
uagauaaggcagugcuauacuu

SEQ ID NO: 30931 - RNA, 22 nt, Artificial Sequence
  LRRK2 RNA guide
uauacuugacaacccaggggag

SEQ ID NO: 30932 - RNA, 22 nt, Artificial Sequence
  LRRK2 RNA guide
uauguuccaggcuccccugggu

SEQ ID NO: 30933 - RNA, 22 nt, Artificial Sequence
  LRRK2 RNA guide
uccaggcuccccuggguuguca

SEQ ID NO: 30934 - RNA, 22 nt, Artificial Sequence
  LRRK2 RNA guide
uccccuggguugucaaguauag

SEQ ID NO: 30935 - RNA, 22 nt, Artificial Sequence
  LRRK2 RNA guide
ucuagauaaggcagugcuauac

SEQ ID NO: 30936 - RNA, 22 nt, Artificial Sequence
  LRRK2 RNA guide
ugacaacccaggggagccugga

SEQ ID NO: 30937 - RNA, 22 nt, Artificial Sequence
  LRRK2 RNA guide
ugcuauacuugacaacccaggg

SEQ ID NO: 30938 - RNA, 22 nt, Artificial Sequence
  LRRK2 RNA guide
uggguugucaaguauagcacug

SEQ ID NO: 30939 - RNA, 22 nt, Artificial Sequence
  LRRK2 RNA guide
ugucaaguauagcacugccuua

SEQ ID NO: 30940 - RNA, 22 nt, Artificial Sequence
  LRRK2 RNA guide
uguuccaggcuccccuggguug

SEQ ID NO: 30941 - RNA, 22 nt, Artificial Sequence
  LRRK2 RNA guide
uuccaggcuccccuggguuguc

SEQ ID NO: 30942 - RNA, 22 nt, Artificial Sequence
  LRRK2 RNA guide
uugacaacccaggggagccugg

SEQ ID NO: 30943 - RNA, 22 nt, Artificial Sequence
  LRRK2 RNA guide
uugucaaguauagcacugccuu

SEQ ID NO: 30944 - RNA, 20 nt, Artificial Sequence
  LRRK2 RNA guide
aaggcagugcuauacuugag

SEQ ID NO: 30945 - RNA, 20 nt, Artificial Sequence
  LRRK2 RNA guide
acuugagaacccaggggagc

SEQ ID NO: 30946 - RNA, 20 nt, Artificial Sequence
  LRRK2 RNA guide
agaacccaggggagccugga

SEQ ID NO: 30947 - RNA, 20 nt, Artificial Sequence
  LRRK2 RNA guide
aggcagugcuauacuugaga

SEQ ID NO: 30948 - RNA, 20 nt, Artificial Sequence
  LRRK2 RNA guide
aggcuccccuggguucucaa

SEQ ID NO: 30949 - RNA, 20 nt, Artificial Sequence
  LRRK2 RNA guide
agugcuauacuugagaaccc

SEQ ID NO: 30950 - RNA, 20 nt, Artificial Sequence
  LRRK2 RNA guide
auacuugagaacccagggga

SEQ ID NO: 30951 - RNA, 20 nt, Artificial Sequence
  LRRK2 RNA guide
caggcuccccuggguucuca

SEQ ID NO: 30952 - RNA, 20 nt, Artificial Sequence
  LRRK2 RNA guide
cagugcuauacuugagaacc

SEQ ID NO: 30953 - RNA, 20 nt, Artificial Sequence
  LRRK2 RNA guide
ccaggcuccccuggguucuc

SEQ ID NO: 30954 - RNA, 20 nt, Artificial Sequence
  LRRK2 RNA guide
ccccuggguucucaaguaua

SEQ ID NO: 30955 - RNA, 20 nt, Artificial Sequence
  LRRK2 RNA guide
cccuggguucucaaguauag

SEQ ID NO: 30956 - RNA, 20 nt, Artificial Sequence
  LRRK2 RNA guide
ccuggguucucaaguauagc

SEQ ID NO: 30957 - RNA, 20 nt, Artificial Sequence
  LRRK2 RNA guide
cuauacuugagaacccaggg

SEQ ID NO: 30958 - RNA, 20 nt, Artificial Sequence
  LRRK2 RNA guide
cuccccuggguucucaagua

SEQ ID NO: 30959 - RNA, 20 nt, Artificial Sequence
  LRRK2 RNA guide
cuggguucucaaguauagca

SEQ ID NO: 30960 - RNA, 20 nt, Artificial Sequence
  LRRK2 RNA guide
cuugagaacccaggggagcc

SEQ ID NO: 30961 - RNA, 20 nt, Artificial Sequence
  LRRK2 RNA guide
gagaacccaggggagccugg

SEQ ID NO: 30962 - RNA, 20 nt, Artificial Sequence
  LRRK2 RNA guide
gcagugcuauacuugagaac

SEQ ID NO: 30963 - RNA, 20 nt, Artificial Sequence
  LRRK2 RNA guide
gcuauacuugagaacccagg

SEQ ID NO: 30964 - RNA, 20 nt, Artificial Sequence
  LRRK2 RNA guide
gcuccccuggguucucaagu

SEQ ID NO: 30965 - RNA, 20 nt, Artificial Sequence
  LRRK2 RNA guide
ggcagugcuauacuugagaa

SEQ ID NO: 30966 - RNA, 20 nt, Artificial Sequence
  LRRK2 RNA guide
ggcuccccuggguucucaag

SEQ ID NO: 30967 - RNA, 20 nt, Artificial Sequence
  LRRK2 RNA guide
ggguucucaaguauagcacu

SEQ ID NO: 30968 - RNA, 20 nt, Artificial Sequence
  LRRK2 RNA guide
gguucucaaguauagcacug

SEQ ID NO: 30969 - RNA, 20 nt, Artificial Sequence
  LRRK2 RNA guide
gugcuauacuugagaaccca

SEQ ID NO: 30970 - RNA, 20 nt, Artificial Sequence
  LRRK2 RNA guide
guucucaaguauagcacugc

SEQ ID NO: 30971 - RNA, 20 nt, Artificial Sequence
  LRRK2 RNA guide
uacuugagaacccaggggag

SEQ ID NO: 30972 - RNA, 20 nt, Artificial Sequence
  LRRK2 RNA guide
uauacuugagaacccagggg

SEQ ID NO: 30973 - RNA, 20 nt, Artificial Sequence
  LRRK2 RNA guide
uccaggcuccccuggguucu

SEQ ID NO: 30974 - RNA, 20 nt, Artificial Sequence
  LRRK2 RNA guide
uccccuggguucucaaguau

SEQ ID NO: 30975 - RNA, 20 nt, Artificial Sequence
  LRRK2 RNA guide
ucucaaguauagcacugccu

SEQ ID NO: 30976 - RNA, 20 nt, Artificial Sequence
  LRRK2 RNA guide
ugagaacccaggggagccug

SEQ ID NO: 30977 - RNA, 20 nt, Artificial Sequence
  LRRK2 RNA guide
ugcuauacuugagaacccag

SEQ ID NO: 30978 - RNA, 20 nt, Artificial Sequence
  LRRK2 RNA guide
uggguucucaaguauagcac

SEQ ID NO: 30979 - RNA, 20 nt, Artificial Sequence
  LRRK2 RNA guide
uuccaggcuccccuggguuc

SEQ ID NO: 30980 - RNA, 20 nt, Artificial Sequence
  LRRK2 RNA guide
uucucaaguauagcacugcc

SEQ ID NO: 30981 - RNA, 20 nt, Artificial Sequence
  LRRK2 RNA guide
uugagaacccaggggagccu

SEQ ID NO: 30982 - RNA, 21 nt, Artificial Sequence
  LRRK2 RNA guide
aaggcagugcuauacuugaga

SEQ ID NO: 30983 - RNA, 21 nt, Artificial Sequence
  LRRK2 RNA guide
acuugagaacccaggggagcc

SEQ ID NO: 30984 - RNA, 21 nt, Artificial Sequence
  LRRK2 RNA guide
agaacccaggggagccuggaa

SEQ ID NO: 30985 - RNA, 21 nt, Artificial Sequence
  LRRK2 RNA guide
aggcagugcuauacuugagaa

SEQ ID NO: 30986 - RNA, 21 nt, Artificial Sequence
  LRRK2 RNA guide
aggcuccccuggguucucaag

SEQ ID NO: 30987 - RNA, 21 nt, Artificial Sequence
  LRRK2 RNA guide
agugcuauacuugagaaccca

SEQ ID NO: 30988 - RNA, 21 nt, Artificial Sequence
  LRRK2 RNA guide
auacuugagaacccaggggag

SEQ ID NO: 30989 - RNA, 21 nt, Artificial Sequence
  LRRK2 RNA guide
caggcuccccuggguucucaa

SEQ ID NO: 30990 - RNA, 21 nt, Artificial Sequence
  LRRK2 RNA guide
cagugcuauacuugagaaccc

SEQ ID NO: 30991 - RNA, 21 nt, Artificial Sequence
  LRRK2 RNA guide
ccaggcuccccuggguucuca

SEQ ID NO: 30992 - RNA, 21 nt, Artificial Sequence
  LRRK2 RNA guide
ccccuggguucucaaguauag

SEQ ID NO: 30993 - RNA, 21 nt, Artificial Sequence
  LRRK2 RNA guide
cccuggguucucaaguauagc

SEQ ID NO: 30994 - RNA, 21 nt, Artificial Sequence
  LRRK2 RNA guide
ccuggguucucaaguauagca

SEQ ID NO: 30995 - RNA, 21 nt, Artificial Sequence
  LRRK2 RNA guide
cuauacuugagaacccagggg

SEQ ID NO: 30996 - RNA, 21 nt, Artificial Sequence
  LRRK2 RNA guide
cuccccuggguucucaaguau

SEQ ID NO: 30997 - RNA, 21 nt, Artificial Sequence
  LRRK2 RNA guide
cuggguucucaaguauagcac

SEQ ID NO: 30998 - RNA, 21 nt, Artificial Sequence
  LRRK2 RNA guide
cuugagaacccaggggagccu

SEQ ID NO: 30999 - RNA, 21 nt, Artificial Sequence
  LRRK2 RNA guide
gagaacccaggggagccugga

SEQ ID NO: 31000 - RNA, 21 nt, Artificial Sequence
  LRRK2 RNA guide
gcagugcuauacuugagaacc

SEQ ID NO: 31001 - RNA, 21 nt, Artificial Sequence
  LRRK2 RNA guide
gcuauacuugagaacccaggg

SEQ ID NO: 31002 - RNA, 21 nt, Artificial Sequence
  LRRK2 RNA guide
gcuccccuggguucucaagua

SEQ ID NO: 31003 - RNA, 21 nt, Artificial Sequence
  LRRK2 RNA guide
ggcagugcuauacuugagaac

SEQ ID NO: 31004 - RNA, 21 nt, Artificial Sequence
  LRRK2 RNA guide
ggcuccccuggguucucaagu

SEQ ID NO: 31005 - RNA, 21 nt, Artificial Sequence
  LRRK2 RNA guide
ggguucucaaguauagcacug

SEQ ID NO: 31006 - RNA, 21 nt, Artificial Sequence
  LRRK2 RNA guide
gguucucaaguauagcacugc

SEQ ID NO: 31007 - RNA, 21 nt, Artificial Sequence
  LRRK2 RNA guide
gugcuauacuugagaacccag

SEQ ID NO: 31008 - RNA, 21 nt, Artificial Sequence
  LRRK2 RNA guide
guuccaggcuccccuggguuc

SEQ ID NO: 31009 - RNA, 21 nt, Artificial Sequence
  LRRK2 RNA guide
guucucaaguauagcacugcc

SEQ ID NO: 31010 - RNA, 21 nt, Artificial Sequence
  LRRK2 RNA guide
uaaggcagugcuauacuugag

SEQ ID NO: 31011 - RNA, 21 nt, Artificial Sequence
  LRRK2 RNA guide
uacuugagaacccaggggagc

SEQ ID NO: 31012 - RNA, 21 nt, Artificial Sequence
  LRRK2 RNA guide
uauacuugagaacccagggga

SEQ ID NO: 31013 - RNA, 21 nt, Artificial Sequence
  LRRK2 RNA guide
uccaggcuccccuggguucuc

SEQ ID NO: 31014 - RNA, 21 nt, Artificial Sequence
  LRRK2 RNA guide
uccccuggguucucaaguaua

SEQ ID NO: 31015 - RNA, 21 nt, Artificial Sequence
  LRRK2 RNA guide
ucucaaguauagcacugccuu

SEQ ID NO: 31016 - RNA, 21 nt, Artificial Sequence
  LRRK2 RNA guide
ugagaacccaggggagccugg

SEQ ID NO: 31017 - RNA, 21 nt, Artificial Sequence
  LRRK2 RNA guide
ugcuauacuugagaacccagg

SEQ ID NO: 31018 - RNA, 21 nt, Artificial Sequence
  LRRK2 RNA guide
uggguucucaaguauagcacu

SEQ ID NO: 31019 - RNA, 21 nt, Artificial Sequence
  LRRK2 RNA guide
uuccaggcuccccuggguucu

SEQ ID NO: 31020 - RNA, 21 nt, Artificial Sequence
  LRRK2 RNA guide
uucucaaguauagcacugccu

SEQ ID NO: 31021 - RNA, 21 nt, Artificial Sequence
  LRRK2 RNA guide
uugagaacccaggggagccug

SEQ ID NO: 31022 - RNA, 22 nt, Artificial Sequence
  LRRK2 RNA guide
aaggcagugcuauacuugagaa

SEQ ID NO: 31023 - RNA, 22 nt, Artificial Sequence
  LRRK2 RNA guide
acuugagaacccaggggagccu

SEQ ID NO: 31024 - RNA, 22 nt, Artificial Sequence
  LRRK2 RNA guide
agaacccaggggagccuggaac

SEQ ID NO: 31025 - RNA, 22 nt, Artificial Sequence
  LRRK2 RNA guide
aggcagugcuauacuugagaac

SEQ ID NO: 31026 - RNA, 22 nt, Artificial Sequence
  LRRK2 RNA guide
aggcuccccuggguucucaagu

SEQ ID NO: 31027 - RNA, 22 nt, Artificial Sequence
  LRRK2 RNA guide
agugcuauacuugagaacccag

SEQ ID NO: 31028 - RNA, 22 nt, Artificial Sequence
  LRRK2 RNA guide
auaaggcagugcuauacuugag

SEQ ID NO: 31029 - RNA, 22 nt, Artificial Sequence
  LRRK2 RNA guide
auacuugagaacccaggggagc

SEQ ID NO: 31030 - RNA, 22 nt, Artificial Sequence
  LRRK2 RNA guide
caggcuccccuggguucucaag

SEQ ID NO: 31031 - RNA, 22 nt, Artificial Sequence
  LRRK2 RNA guide
cagugcuauacuugagaaccca

SEQ ID NO: 31032 - RNA, 22 nt, Artificial Sequence
  LRRK2 RNA guide
ccaggcuccccuggguucucaa

SEQ ID NO: 31033 - RNA, 22 nt, Artificial Sequence
  LRRK2 RNA guide
ccccuggguucucaaguauagc

SEQ ID NO: 31034 - RNA, 22 nt, Artificial Sequence
  LRRK2 RNA guide
cccuggguucucaaguauagca

SEQ ID NO: 31035 - RNA, 22 nt, Artificial Sequence
  LRRK2 RNA guide
ccuggguucucaaguauagcac

SEQ ID NO: 31036 - RNA, 22 nt, Artificial Sequence
  LRRK2 RNA guide
cuauacuugagaacccagggga

SEQ ID NO: 31037 - RNA, 22 nt, Artificial Sequence
  LRRK2 RNA guide
cuccccuggguucucaaguaua

SEQ ID NO: 31038 - RNA, 22 nt, Artificial Sequence
  LRRK2 RNA guide
cuggguucucaaguauagcacu

SEQ ID NO: 31039 - RNA, 22 nt, Artificial Sequence
  LRRK2 RNA guide
cuugagaacccaggggagccug

SEQ ID NO: 31040 - RNA, 22 nt, Artificial Sequence
  LRRK2 RNA guide
gagaacccaggggagccuggaa

SEQ ID NO: 31041 - RNA, 22 nt, Artificial Sequence
  LRRK2 RNA guide
gcagugcuauacuugagaaccc

SEQ ID NO: 31042 - RNA, 22 nt, Artificial Sequence
  LRRK2 RNA guide
gcuauacuugagaacccagggg

SEQ ID NO: 31043 - RNA, 22 nt, Artificial Sequence
  LRRK2 RNA guide
gcuccccuggguucucaaguau

SEQ ID NO: 31044 - RNA, 22 nt, Artificial Sequence
  LRRK2 RNA guide
ggcagugcuauacuugagaacc

SEQ ID NO: 31045 - RNA, 22 nt, Artificial Sequence
  LRRK2 RNA guide
ggcuccccuggguucucaagua

SEQ ID NO: 31046 - RNA, 22 nt, Artificial Sequence
  LRRK2 RNA guide
ggguucucaaguauagcacugc

SEQ ID NO: 31047 - RNA, 22 nt, Artificial Sequence
  LRRK2 RNA guide
gguucucaaguauagcacugcc

SEQ ID NO: 31048 - RNA, 22 nt, Artificial Sequence
  LRRK2 RNA guide
gugcuauacuugagaacccagg

SEQ ID NO: 31049 - RNA, 22 nt, Artificial Sequence
  LRRK2 RNA guide
guuccaggcuccccuggguucu

SEQ ID NO: 31050 - RNA, 22 nt, Artificial Sequence
  LRRK2 RNA guide
guucucaaguauagcacugccu

SEQ ID NO: 31051 - RNA, 22 nt, Artificial Sequence
  LRRK2 RNA guide
uaaggcagugcuauacuugaga

SEQ ID NO: 31052 - RNA, 22 nt, Artificial Sequence
  LRRK2 RNA guide
uacuugagaacccaggggagcc

SEQ ID NO: 31053 - RNA, 22 nt, Artificial Sequence
  LRRK2 RNA guide
uauacuugagaacccaggggag

SEQ ID NO: 31054 - RNA, 22 nt, Artificial Sequence
  LRRK2 RNA guide
uccaggcuccccuggguucuca

SEQ ID NO: 31055 - RNA, 22 nt, Artificial Sequence
  LRRK2 RNA guide
uccccuggguucucaaguauag

SEQ ID NO: 31056 - RNA, 22 nt, Artificial Sequence
  LRRK2 RNA guide
ucucaaguauagcacugccuua

SEQ ID NO: 31057 - RNA, 22 nt, Artificial Sequence
  LRRK2 RNA guide
ugagaacccaggggagccugga

SEQ ID NO: 31058 - RNA, 22 nt, Artificial Sequence
  LRRK2 RNA guide
ugcuauacuugagaacccaggg

SEQ ID NO: 31059 - RNA, 22 nt, Artificial Sequence
  LRRK2 RNA guide
uggguucucaaguauagcacug

SEQ ID NO: 31060 - RNA, 22 nt, Artificial Sequence
  LRRK2 RNA guide
uguuccaggcuccccuggguuc

SEQ ID NO: 31061 - RNA, 22 nt, Artificial Sequence
  LRRK2 RNA guide
uuccaggcuccccuggguucuc

SEQ ID NO: 31062 - RNA, 22 nt, Artificial Sequence
  LRRK2 RNA guide
uucucaaguauagcacugccuu

SEQ ID NO: 31063 - RNA, 22 nt, Artificial Sequence
  LRRK2 RNA guide
uugagaacccaggggagccugg

SEQ ID NO: 31064 - RNA, 20 nt, Artificial Sequence
  LRRK2 RNA guide
aacccaggggagccuggaac

SEQ ID NO: 31065 - RNA, 20 nt, Artificial Sequence
  LRRK2 RNA guide
aaguauguuccaggcucccc

SEQ ID NO: 31066 - RNA, 20 nt, Artificial Sequence
  LRRK2 RNA guide
acccaggggagccuggaaca

SEQ ID NO: 31067 - RNA, 20 nt, Artificial Sequence
  LRRK2 RNA guide
aggaaguauguuccaggcuc

SEQ ID NO: 31068 - RNA, 20 nt, Artificial Sequence
  LRRK2 RNA guide
aggggagccuggaacauacu

SEQ ID NO: 31069 - RNA, 20 nt, Artificial Sequence
  LRRK2 RNA guide
aguauguuccaggcuccccu

SEQ ID NO: 31070 - RNA, 20 nt, Artificial Sequence
  LRRK2 RNA guide
caacccaggggagccuggaa

SEQ ID NO: 31071 - RNA, 20 nt, Artificial Sequence
  LRRK2 RNA guide
caggggagccuggaacauac

SEQ ID NO: 31072 - RNA, 20 nt, Artificial Sequence
  LRRK2 RNA guide
ccaggggagccuggaacaua

SEQ ID NO: 31073 - RNA, 20 nt, Artificial Sequence
  LRRK2 RNA guide
cccaggggagccuggaacau

SEQ ID NO: 31074 - RNA, 20 nt, Artificial Sequence
  LRRK2 RNA guide
gaaguauguuccaggcuccc

SEQ ID NO: 31075 - RNA, 20 nt, Artificial Sequence
  LRRK2 RNA guide
ggaaguauguuccaggcucc

SEQ ID NO: 31076 - RNA, 20 nt, Artificial Sequence
  LRRK2 RNA guide
uaggaaguauguuccaggcu

SEQ ID NO: 31077 - RNA, 20 nt, Artificial Sequence
  LRRK2 RNA guide
uuaggaaguauguuccaggc

SEQ ID NO: 31078 - RNA, 21 nt, Artificial Sequence
  LRRK2 RNA guide
aacccaggggagccuggaaca

SEQ ID NO: 31079 - RNA, 21 nt, Artificial Sequence
  LRRK2 RNA guide
aaguauguuccaggcuccccu

SEQ ID NO: 31080 - RNA, 21 nt, Artificial Sequence
  LRRK2 RNA guide
acccaggggagccuggaacau

SEQ ID NO: 31081 - RNA, 21 nt, Artificial Sequence
  LRRK2 RNA guide
aggaaguauguuccaggcucc

SEQ ID NO: 31082 - RNA, 21 nt, Artificial Sequence
  LRRK2 RNA guide
aggggagccuggaacauacuu

SEQ ID NO: 31083 - RNA, 21 nt, Artificial Sequence
  LRRK2 RNA guide
auuaggaaguauguuccaggc

SEQ ID NO: 31084 - RNA, 21 nt, Artificial Sequence
  LRRK2 RNA guide
caacccaggggagccuggaac

SEQ ID NO: 31085 - RNA, 21 nt, Artificial Sequence
  LRRK2 RNA guide
caggggagccuggaacauacu

SEQ ID NO: 31086 - RNA, 21 nt, Artificial Sequence
  LRRK2 RNA guide
ccaggggagccuggaacauac

SEQ ID NO: 31087 - RNA, 21 nt, Artificial Sequence
  LRRK2 RNA guide
cccaggggagccuggaacaua

SEQ ID NO: 31088 - RNA, 21 nt, Artificial Sequence
  LRRK2 RNA guide
gaaguauguuccaggcucccc

SEQ ID NO: 31089 - RNA, 21 nt, Artificial Sequence
  LRRK2 RNA guide
ggaaguauguuccaggcuccc

SEQ ID NO: 31090 - RNA, 21 nt, Artificial Sequence
  LRRK2 RNA guide
uaggaaguauguuccaggcuc

SEQ ID NO: 31091 - RNA, 21 nt, Artificial Sequence
  LRRK2 RNA guide
uuaggaaguauguuccaggcu

SEQ ID NO: 31092 - RNA, 22 nt, Artificial Sequence
  LRRK2 RNA guide
aacccaggggagccuggaacau

SEQ ID NO: 31093 - RNA, 22 nt, Artificial Sequence
  LRRK2 RNA guide
aauuaggaaguauguuccaggc

SEQ ID NO: 31094 - RNA, 22 nt, Artificial Sequence
  LRRK2 RNA guide
acccaggggagccuggaacaua

SEQ ID NO: 31095 - RNA, 22 nt, Artificial Sequence
  LRRK2 RNA guide
aggaaguauguuccaggcuccc

SEQ ID NO: 31096 - RNA, 22 nt, Artificial Sequence
  LRRK2 RNA guide
aggggagccuggaacauacuuc

SEQ ID NO: 31097 - RNA, 22 nt, Artificial Sequence
  LRRK2 RNA guide
auuaggaaguauguuccaggcu

SEQ ID NO: 31098 - RNA, 22 nt, Artificial Sequence
  LRRK2 RNA guide
caacccaggggagccuggaaca

SEQ ID NO: 31099 - RNA, 22 nt, Artificial Sequence
  LRRK2 RNA guide
caggggagccuggaacauacuu

SEQ ID NO: 31100 - RNA, 22 nt, Artificial Sequence
  LRRK2 RNA guide
ccaggggagccuggaacauacu

SEQ ID NO: 31101 - RNA, 22 nt, Artificial Sequence
  LRRK2 RNA guide
cccaggggagccuggaacauac

SEQ ID NO: 31102 - RNA, 22 nt, Artificial Sequence
  LRRK2 RNA guide
gaaguauguuccaggcuccccu

SEQ ID NO: 31103 - RNA, 22 nt, Artificial Sequence
  LRRK2 RNA guide
ggaaguauguuccaggcucccc

SEQ ID NO: 31104 - RNA, 22 nt, Artificial Sequence
  LRRK2 RNA guide
uaggaaguauguuccaggcucc

SEQ ID NO: 31105 - RNA, 22 nt, Artificial Sequence
  LRRK2 RNA guide
uuaggaaguauguuccaggcuc

SEQ ID NO: 31106 - RNA, 20 nt, Artificial Sequence
  LRRK2 RNA guide
aacccaagggagccuggaac

SEQ ID NO: 31107 - RNA, 20 nt, Artificial Sequence
  LRRK2 RNA guide
aagggagccuggaacauacu

SEQ ID NO: 31108 - RNA, 20 nt, Artificial Sequence
  LRRK2 RNA guide
aaguauguuccaggcucccu

SEQ ID NO: 31109 - RNA, 20 nt, Artificial Sequence
  LRRK2 RNA guide
acaacccaagggagccugga

SEQ ID NO: 31110 - RNA, 20 nt, Artificial Sequence
  LRRK2 RNA guide
acccaagggagccuggaaca

SEQ ID NO: 31111 - RNA, 20 nt, Artificial Sequence
  LRRK2 RNA guide
acuugacaacccaagggagc

SEQ ID NO: 31112 - RNA, 20 nt, Artificial Sequence
  LRRK2 RNA guide
aggcucccuuggguugucaa

SEQ ID NO: 31113 - RNA, 20 nt, Artificial Sequence
  LRRK2 RNA guide
aguauguuccaggcucccuu

SEQ ID NO: 31114 - RNA, 20 nt, Artificial Sequence
  LRRK2 RNA guide
auacuugacaacccaaggga

SEQ ID NO: 31115 - RNA, 20 nt, Artificial Sequence
  LRRK2 RNA guide
auguuccaggcucccuuggg

SEQ ID NO: 31116 - RNA, 20 nt, Artificial Sequence
  LRRK2 RNA guide
caacccaagggagccuggaa

SEQ ID NO: 31117 - RNA, 20 nt, Artificial Sequence
  LRRK2 RNA guide
caagggagccuggaacauac

SEQ ID NO: 31118 - RNA, 20 nt, Artificial Sequence
  LRRK2 RNA guide
caggcucccuuggguuguca

SEQ ID NO: 31119 - RNA, 20 nt, Artificial Sequence
  LRRK2 RNA guide
ccaagggagccuggaacaua

SEQ ID NO: 31120 - RNA, 20 nt, Artificial Sequence
  LRRK2 RNA guide
ccaggcucccuuggguuguc

SEQ ID NO: 31121 - RNA, 20 nt, Artificial Sequence
  LRRK2 RNA guide
cccaagggagccuggaacau

SEQ ID NO: 31122 - RNA, 20 nt, Artificial Sequence
  LRRK2 RNA guide
cccuuggguugucaaguaua

SEQ ID NO: 31123 - RNA, 20 nt, Artificial Sequence
  LRRK2 RNA guide
ccuuggguugucaaguauag

SEQ ID NO: 31124 - RNA, 20 nt, Artificial Sequence
  LRRK2 RNA guide
cuauacuugacaacccaagg

SEQ ID NO: 31125 - RNA, 20 nt, Artificial Sequence
  LRRK2 RNA guide
cucccuuggguugucaagua

SEQ ID NO: 31126 - RNA, 20 nt, Artificial Sequence
  LRRK2 RNA guide
cuugacaacccaagggagcc

SEQ ID NO: 31127 - RNA, 20 nt, Artificial Sequence
  LRRK2 RNA guide
cuuggguugucaaguauagc

SEQ ID NO: 31128 - RNA, 20 nt, Artificial Sequence
  LRRK2 RNA guide
gacaacccaagggagccugg

SEQ ID NO: 31129 - RNA, 20 nt, Artificial Sequence
  LRRK2 RNA guide
gcuauacuugacaacccaag

SEQ ID NO: 31130 - RNA, 20 nt, Artificial Sequence
  LRRK2 RNA guide
gcucccuuggguugucaagu

SEQ ID NO: 31131 - RNA, 20 nt, Artificial Sequence
  LRRK2 RNA guide
ggcucccuuggguugucaag

SEQ ID NO: 31132 - RNA, 20 nt, Artificial Sequence
  LRRK2 RNA guide
guauguuccaggcucccuug

SEQ ID NO: 31133 - RNA, 20 nt, Artificial Sequence
  LRRK2 RNA guide
guuccaggcucccuuggguu

SEQ ID NO: 31134 - RNA, 20 nt, Artificial Sequence
  LRRK2 RNA guide
uacuugacaacccaagggag

SEQ ID NO: 31135 - RNA, 20 nt, Artificial Sequence
  LRRK2 RNA guide
uauacuugacaacccaaggg

SEQ ID NO: 31136 - RNA, 20 nt, Artificial Sequence
  LRRK2 RNA guide
uauguuccaggcucccuugg

SEQ ID NO: 31137 - RNA, 20 nt, Artificial Sequence
  LRRK2 RNA guide
uccaggcucccuuggguugu

SEQ ID NO: 31138 - RNA, 20 nt, Artificial Sequence
  LRRK2 RNA guide
ucccuuggguugucaaguau

SEQ ID NO: 31139 - RNA, 20 nt, Artificial Sequence
  LRRK2 RNA guide
ugacaacccaagggagccug

SEQ ID NO: 31140 - RNA, 20 nt, Artificial Sequence
  LRRK2 RNA guide
ugcuauacuugacaacccaa

SEQ ID NO: 31141 - RNA, 20 nt, Artificial Sequence
  LRRK2 RNA guide
uguuccaggcucccuugggu

SEQ ID NO: 31142 - RNA, 20 nt, Artificial Sequence
  LRRK2 RNA guide
uuccaggcucccuuggguug

SEQ ID NO: 31143 - RNA, 20 nt, Artificial Sequence
  LRRK2 RNA guide
uugacaacccaagggagccu

SEQ ID NO: 31144 - RNA, 21 nt, Artificial Sequence
  LRRK2 RNA guide
aacccaagggagccuggaaca

SEQ ID NO: 31145 - RNA, 21 nt, Artificial Sequence
  LRRK2 RNA guide
aagggagccuggaacauacuu

SEQ ID NO: 31146 - RNA, 21 nt, Artificial Sequence
  LRRK2 RNA guide
aaguauguuccaggcucccuu

SEQ ID NO: 31147 - RNA, 21 nt, Artificial Sequence
  LRRK2 RNA guide
acaacccaagggagccuggaa

SEQ ID NO: 31148 - RNA, 21 nt, Artificial Sequence
  LRRK2 RNA guide
acccaagggagccuggaacau

SEQ ID NO: 31149 - RNA, 21 nt, Artificial Sequence
  LRRK2 RNA guide
acuugacaacccaagggagcc

SEQ ID NO: 31150 - RNA, 21 nt, Artificial Sequence
  LRRK2 RNA guide
aggcucccuuggguugucaag

SEQ ID NO: 31151 - RNA, 21 nt, Artificial Sequence
  LRRK2 RNA guide
aguauguuccaggcucccuug

SEQ ID NO: 31152 - RNA, 21 nt, Artificial Sequence
  LRRK2 RNA guide
auacuugacaacccaagggag

SEQ ID NO: 31153 - RNA, 21 nt, Artificial Sequence
  LRRK2 RNA guide
auguuccaggcucccuugggu

SEQ ID NO: 31154 - RNA, 21 nt, Artificial Sequence
  LRRK2 RNA guide
caacccaagggagccuggaac

SEQ ID NO: 31155 - RNA, 21 nt, Artificial Sequence
  LRRK2 RNA guide
caagggagccuggaacauacu

SEQ ID NO: 31156 - RNA, 21 nt, Artificial Sequence
  LRRK2 RNA guide
caggcucccuuggguugucaa

SEQ ID NO: 31157 - RNA, 21 nt, Artificial Sequence
  LRRK2 RNA guide
ccaagggagccuggaacauac

SEQ ID NO: 31158 - RNA, 21 nt, Artificial Sequence
  LRRK2 RNA guide
ccaggcucccuuggguuguca

SEQ ID NO: 31159 - RNA, 21 nt, Artificial Sequence
  LRRK2 RNA guide
cccaagggagccuggaacaua

SEQ ID NO: 31160 - RNA, 21 nt, Artificial Sequence
  LRRK2 RNA guide
cccuuggguugucaaguauag

SEQ ID NO: 31161 - RNA, 21 nt, Artificial Sequence
  LRRK2 RNA guide
ccuuggguugucaaguauagc

SEQ ID NO: 31162 - RNA, 21 nt, Artificial Sequence
  LRRK2 RNA guide
cuauacuugacaacccaaggg

SEQ ID NO: 31163 - RNA, 21 nt, Artificial Sequence
  LRRK2 RNA guide
cucccuuggguugucaaguau

SEQ ID NO: 31164 - RNA, 21 nt, Artificial Sequence
  LRRK2 RNA guide
cuugacaacccaagggagccu

SEQ ID NO: 31165 - RNA, 21 nt, Artificial Sequence
  LRRK2 RNA guide
cuuggguugucaaguauagca

SEQ ID NO: 31166 - RNA, 21 nt, Artificial Sequence
  LRRK2 RNA guide
gaaguauguuccaggcucccu

SEQ ID NO: 31167 - RNA, 21 nt, Artificial Sequence
  LRRK2 RNA guide
gacaacccaagggagccugga

SEQ ID NO: 31168 - RNA, 21 nt, Artificial Sequence
  LRRK2 RNA guide
gcuauacuugacaacccaagg

SEQ ID NO: 31169 - RNA, 21 nt, Artificial Sequence
  LRRK2 RNA guide
gcucccuuggguugucaagua

SEQ ID NO: 31170 - RNA, 21 nt, Artificial Sequence
  LRRK2 RNA guide
ggcucccuuggguugucaagu

SEQ ID NO: 31171 - RNA, 21 nt, Artificial Sequence
  LRRK2 RNA guide
guauguuccaggcucccuugg

SEQ ID NO: 31172 - RNA, 21 nt, Artificial Sequence
  LRRK2 RNA guide
gugcuauacuugacaacccaa

SEQ ID NO: 31173 - RNA, 21 nt, Artificial Sequence
  LRRK2 RNA guide
guuccaggcucccuuggguug

SEQ ID NO: 31174 - RNA, 21 nt, Artificial Sequence
  LRRK2 RNA guide
uacuugacaacccaagggagc

SEQ ID NO: 31175 - RNA, 21 nt, Artificial Sequence
  LRRK2 RNA guide
uauacuugacaacccaaggga

SEQ ID NO: 31176 - RNA, 21 nt, Artificial Sequence
  LRRK2 RNA guide
uauguuccaggcucccuuggg

SEQ ID NO: 31177 - RNA, 21 nt, Artificial Sequence
  LRRK2 RNA guide
uccaggcucccuuggguuguc

SEQ ID NO: 31178 - RNA, 21 nt, Artificial Sequence
  LRRK2 RNA guide
ucccuuggguugucaaguaua

SEQ ID NO: 31179 - RNA, 21 nt, Artificial Sequence
  LRRK2 RNA guide
ugacaacccaagggagccugg

SEQ ID NO: 31180 - RNA, 21 nt, Artificial Sequence
  LRRK2 RNA guide
ugcuauacuugacaacccaag

SEQ ID NO: 31181 - RNA, 21 nt, Artificial Sequence
  LRRK2 RNA guide
uguuccaggcucccuuggguu

SEQ ID NO: 31182 - RNA, 21 nt, Artificial Sequence
  LRRK2 RNA guide
uuccaggcucccuuggguugu

SEQ ID NO: 31183 - RNA, 21 nt, Artificial Sequence
  LRRK2 RNA guide
uugacaacccaagggagccug

SEQ ID NO: 31184 - RNA, 22 nt, Artificial Sequence
  LRRK2 RNA guide
aacccaagggagccuggaacau

SEQ ID NO: 31185 - RNA, 22 nt, Artificial Sequence
  LRRK2 RNA guide
aagggagccuggaacauacuuc

SEQ ID NO: 31186 - RNA, 22 nt, Artificial Sequence
  LRRK2 RNA guide
aaguauguuccaggcucccuug

SEQ ID NO: 31187 - RNA, 22 nt, Artificial Sequence
  LRRK2 RNA guide
acaacccaagggagccuggaac

SEQ ID NO: 31188 - RNA, 22 nt, Artificial Sequence
  LRRK2 RNA guide
acccaagggagccuggaacaua

SEQ ID NO: 31189 - RNA, 22 nt, Artificial Sequence
  LRRK2 RNA guide
acuugacaacccaagggagccu

SEQ ID NO: 31190 - RNA, 22 nt, Artificial Sequence
  LRRK2 RNA guide
aggcucccuuggguugucaagu

SEQ ID NO: 31191 - RNA, 22 nt, Artificial Sequence
  LRRK2 RNA guide
aguauguuccaggcucccuugg

SEQ ID NO: 31192 - RNA, 22 nt, Artificial Sequence
  LRRK2 RNA guide
agugcuauacuugacaacccaa

SEQ ID NO: 31193 - RNA, 22 nt, Artificial Sequence
  LRRK2 RNA guide
auacuugacaacccaagggagc

SEQ ID NO: 31194 - RNA, 22 nt, Artificial Sequence
  LRRK2 RNA guide
auguuccaggcucccuuggguu

SEQ ID NO: 31195 - RNA, 22 nt, Artificial Sequence
  LRRK2 RNA guide
caacccaagggagccuggaaca

SEQ ID NO: 31196 - RNA, 22 nt, Artificial Sequence
  LRRK2 RNA guide
caagggagccuggaacauacuu

SEQ ID NO: 31197 - RNA, 22 nt, Artificial Sequence
  LRRK2 RNA guide
caggcucccuuggguugucaag

SEQ ID NO: 31198 - RNA, 22 nt, Artificial Sequence
  LRRK2 RNA guide
ccaagggagccuggaacauacu

SEQ ID NO: 31199 - RNA, 22 nt, Artificial Sequence
  LRRK2 RNA guide
ccaggcucccuuggguugucaa

SEQ ID NO: 31200 - RNA, 22 nt, Artificial Sequence
  LRRK2 RNA guide
cccaagggagccuggaacauac

SEQ ID NO: 31201 - RNA, 22 nt, Artificial Sequence
  LRRK2 RNA guide
cccuuggguugucaaguauagc

SEQ ID NO: 31202 - RNA, 22 nt, Artificial Sequence
  LRRK2 RNA guide
ccuuggguugucaaguauagca

SEQ ID NO: 31203 - RNA, 22 nt, Artificial Sequence
  LRRK2 RNA guide
cuauacuugacaacccaaggga

SEQ ID NO: 31204 - RNA, 22 nt, Artificial Sequence
  LRRK2 RNA guide
cucccuuggguugucaaguaua

SEQ ID NO: 31205 - RNA, 22 nt, Artificial Sequence
  LRRK2 RNA guide
cuugacaacccaagggagccug

SEQ ID NO: 31206 - RNA, 22 nt, Artificial Sequence
  LRRK2 RNA guide
cuuggguugucaaguauagcac

SEQ ID NO: 31207 - RNA, 22 nt, Artificial Sequence
  LRRK2 RNA guide
gaaguauguuccaggcucccuu

SEQ ID NO: 31208 - RNA, 22 nt, Artificial Sequence
  LRRK2 RNA guide
gacaacccaagggagccuggaa

SEQ ID NO: 31209 - RNA, 22 nt, Artificial Sequence
  LRRK2 RNA guide
gcuauacuugacaacccaaggg

SEQ ID NO: 31210 - RNA, 22 nt, Artificial Sequence
  LRRK2 RNA guide
gcucccuuggguugucaaguau

SEQ ID NO: 31211 - RNA, 22 nt, Artificial Sequence
  LRRK2 RNA guide
ggaaguauguuccaggcucccu

SEQ ID NO: 31212 - RNA, 22 nt, Artificial Sequence
  LRRK2 RNA guide
ggcucccuuggguugucaagua

SEQ ID NO: 31213 - RNA, 22 nt, Artificial Sequence
  LRRK2 RNA guide
guauguuccaggcucccuuggg

SEQ ID NO: 31214 - RNA, 22 nt, Artificial Sequence
  LRRK2 RNA guide
gugcuauacuugacaacccaag

SEQ ID NO: 31215 - RNA, 22 nt, Artificial Sequence
  LRRK2 RNA guide
guuccaggcucccuuggguugu

SEQ ID NO: 31216 - RNA, 22 nt, Artificial Sequence
  LRRK2 RNA guide
uacuugacaacccaagggagcc

SEQ ID NO: 31217 - RNA, 22 nt, Artificial Sequence
  LRRK2 RNA guide
uauacuugacaacccaagggag

SEQ ID NO: 31218 - RNA, 22 nt, Artificial Sequence
  LRRK2 RNA guide
uauguuccaggcucccuugggu

SEQ ID NO: 31219 - RNA, 22 nt, Artificial Sequence
  LRRK2 RNA guide
uccaggcucccuuggguuguca

SEQ ID NO: 31220 - RNA, 22 nt, Artificial Sequence
  LRRK2 RNA guide
ucccuuggguugucaaguauag

SEQ ID NO: 31221 - RNA, 22 nt, Artificial Sequence
  LRRK2 RNA guide
ugacaacccaagggagccugga

SEQ ID NO: 31222 - RNA, 22 nt, Artificial Sequence
  LRRK2 RNA guide
ugcuauacuugacaacccaagg

SEQ ID NO: 31223 - RNA, 22 nt, Artificial Sequence
  LRRK2 RNA guide
uguuccaggcucccuuggguug

SEQ ID NO: 31224 - RNA, 22 nt, Artificial Sequence
  LRRK2 RNA guide
uuccaggcucccuuggguuguc

SEQ ID NO: 31225 - RNA, 22 nt, Artificial Sequence
  LRRK2 RNA guide
uugacaacccaagggagccugg

SEQ ID NO: 31226 - RNA, 20 nt, Artificial Sequence
  LRRK2 RNA guide
aaucucaucgcuggguauau

SEQ ID NO: 31227 - RNA, 20 nt, Artificial Sequence
  LRRK2 RNA guide
aguaaucucaucgcugggua

SEQ ID NO: 31228 - RNA, 20 nt, Artificial Sequence
  LRRK2 RNA guide
aucgcuggguauauauccaa

SEQ ID NO: 31229 - RNA, 20 nt, Artificial Sequence
  LRRK2 RNA guide
aucucaucgcuggguauaua

SEQ ID NO: 31230 - RNA, 20 nt, Artificial Sequence
  LRRK2 RNA guide
caucgcuggguauauaucca

SEQ ID NO: 31231 - RNA, 20 nt, Artificial Sequence
  LRRK2 RNA guide
cgcuggguauauauccaaaa

SEQ ID NO: 31232 - RNA, 20 nt, Artificial Sequence
  LRRK2 RNA guide
cucaucgcuggguauauauc

SEQ ID NO: 31233 - RNA, 20 nt, Artificial Sequence
  LRRK2 RNA guide
cuggguauauauccaaaaaa

SEQ ID NO: 31234 - RNA, 20 nt, Artificial Sequence
  LRRK2 RNA guide
gauauauacccagcgaugag

SEQ ID NO: 31235 - RNA, 20 nt, Artificial Sequence
  LRRK2 RNA guide
gcuggguauauauccaaaaa

SEQ ID NO: 31236 - RNA, 20 nt, Artificial Sequence
  LRRK2 RNA guide
ggauauauacccagcgauga

SEQ ID NO: 31237 - RNA, 20 nt, Artificial Sequence
  LRRK2 RNA guide
guaaucucaucgcuggguau

SEQ ID NO: 31238 - RNA, 20 nt, Artificial Sequence
  LRRK2 RNA guide
uaaucucaucgcuggguaua

SEQ ID NO: 31239 - RNA, 20 nt, Artificial Sequence
  LRRK2 RNA guide
ucaucgcuggguauauaucc

SEQ ID NO: 31240 - RNA, 20 nt, Artificial Sequence
  LRRK2 RNA guide
ucgcuggguauauauccaaa

SEQ ID NO: 31241 - RNA, 20 nt, Artificial Sequence
  LRRK2 RNA guide
ucucaucgcuggguauauau

SEQ ID NO: 31242 - RNA, 20 nt, Artificial Sequence
  LRRK2 RNA guide
uggauauauacccagcgaug

SEQ ID NO: 31243 - RNA, 20 nt, Artificial Sequence
  LRRK2 RNA guide
uuggauauauacccagcgau

SEQ ID NO: 31244 - RNA, 20 nt, Artificial Sequence
  LRRK2 RNA guide
uuuggauauauacccagcga

SEQ ID NO: 31245 - RNA, 20 nt, Artificial Sequence
  LRRK2 RNA guide
uuuuggauauauacccagcg

SEQ ID NO: 31246 - RNA, 20 nt, Artificial Sequence
  LRRK2 RNA guide
uuuuuggauauauacccagc

SEQ ID NO: 31247 - RNA, 20 nt, Artificial Sequence
  LRRK2 RNA guide
uuuuuuggauauauacccag

SEQ ID NO: 31248 - RNA, 21 nt, Artificial Sequence
  LRRK2 RNA guide
aaucucaucgcuggguauaua

SEQ ID NO: 31249 - RNA, 21 nt, Artificial Sequence
  LRRK2 RNA guide
aguaaucucaucgcuggguau

SEQ ID NO: 31250 - RNA, 21 nt, Artificial Sequence
  LRRK2 RNA guide
aucgcuggguauauauccaaa

SEQ ID NO: 31251 - RNA, 21 nt, Artificial Sequence
  LRRK2 RNA guide
aucucaucgcuggguauauau

SEQ ID NO: 31252 - RNA, 21 nt, Artificial Sequence
  LRRK2 RNA guide
caguaaucucaucgcugggua

SEQ ID NO: 31253 - RNA, 21 nt, Artificial Sequence
  LRRK2 RNA guide
caucgcuggguauauauccaa

SEQ ID NO: 31254 - RNA, 21 nt, Artificial Sequence
  LRRK2 RNA guide
cgcuggguauauauccaaaaa

SEQ ID NO: 31255 - RNA, 21 nt, Artificial Sequence
  LRRK2 RNA guide
cucaucgcuggguauauaucc

SEQ ID NO: 31256 - RNA, 21 nt, Artificial Sequence
  LRRK2 RNA guide
gauauauacccagcgaugaga

SEQ ID NO: 31257 - RNA, 21 nt, Artificial Sequence
  LRRK2 RNA guide
gcuggguauauauccaaaaaa

SEQ ID NO: 31258 - RNA, 21 nt, Artificial Sequence
  LRRK2 RNA guide
ggauauauacccagcgaugag

SEQ ID NO: 31259 - RNA, 21 nt, Artificial Sequence
  LRRK2 RNA guide
guaaucucaucgcuggguaua

SEQ ID NO: 31260 - RNA, 21 nt, Artificial Sequence
  LRRK2 RNA guide
uaaucucaucgcuggguauau

SEQ ID NO: 31261 - RNA, 21 nt, Artificial Sequence
  LRRK2 RNA guide
ucaucgcuggguauauaucca

SEQ ID NO: 31262 - RNA, 21 nt, Artificial Sequence
  LRRK2 RNA guide
ucgcuggguauauauccaaaa

SEQ ID NO: 31263 - RNA, 21 nt, Artificial Sequence
  LRRK2 RNA guide
ucucaucgcuggguauauauc

SEQ ID NO: 31264 - RNA, 21 nt, Artificial Sequence
  LRRK2 RNA guide
uggauauauacccagcgauga

SEQ ID NO: 31265 - RNA, 21 nt, Artificial Sequence
  LRRK2 RNA guide
uuggauauauacccagcgaug

SEQ ID NO: 31266 - RNA, 21 nt, Artificial Sequence
  LRRK2 RNA guide
uuuggauauauacccagcgau

SEQ ID NO: 31267 - RNA, 21 nt, Artificial Sequence
  LRRK2 RNA guide
uuuuggauauauacccagcga

SEQ ID NO: 31268 - RNA, 21 nt, Artificial Sequence
  LRRK2 RNA guide
uuuuuggauauauacccagcg

SEQ ID NO: 31269 - RNA, 21 nt, Artificial Sequence
  LRRK2 RNA guide
uuuuuuggauauauacccagc

SEQ ID NO: 31270 - RNA, 22 nt, Artificial Sequence
  LRRK2 RNA guide
aaucucaucgcuggguauauau

SEQ ID NO: 31271 - RNA, 22 nt, Artificial Sequence
  LRRK2 RNA guide
aguaaucucaucgcuggguaua

SEQ ID NO: 31272 - RNA, 22 nt, Artificial Sequence
  LRRK2 RNA guide
aucgcuggguauauauccaaaa

SEQ ID NO: 31273 - RNA, 22 nt, Artificial Sequence
  LRRK2 RNA guide
aucucaucgcuggguauauauc

SEQ ID NO: 31274 - RNA, 22 nt, Artificial Sequence
  LRRK2 RNA guide
caguaaucucaucgcuggguau

SEQ ID NO: 31275 - RNA, 22 nt, Artificial Sequence
  LRRK2 RNA guide
caucgcuggguauauauccaaa

SEQ ID NO: 31276 - RNA, 22 nt, Artificial Sequence
  LRRK2 RNA guide
ccaguaaucucaucgcugggua

SEQ ID NO: 31277 - RNA, 22 nt, Artificial Sequence
  LRRK2 RNA guide
cgcuggguauauauccaaaaaa

SEQ ID NO: 31278 - RNA, 22 nt, Artificial Sequence
  LRRK2 RNA guide
cucaucgcuggguauauaucca

SEQ ID NO: 31279 - RNA, 22 nt, Artificial Sequence
  LRRK2 RNA guide
gauauauacccagcgaugagau

SEQ ID NO: 31280 - RNA, 22 nt, Artificial Sequence
  LRRK2 RNA guide
ggauauauacccagcgaugaga

SEQ ID NO: 31281 - RNA, 22 nt, Artificial Sequence
  LRRK2 RNA guide
guaaucucaucgcuggguauau

SEQ ID NO: 31282 - RNA, 22 nt, Artificial Sequence
  LRRK2 RNA guide
uaaucucaucgcuggguauaua

SEQ ID NO: 31283 - RNA, 22 nt, Artificial Sequence
  LRRK2 RNA guide
ucaucgcuggguauauauccaa

SEQ ID NO: 31284 - RNA, 22 nt, Artificial Sequence
  LRRK2 RNA guide
ucgcuggguauauauccaaaaa

SEQ ID NO: 31285 - RNA, 22 nt, Artificial Sequence
  LRRK2 RNA guide
ucucaucgcuggguauauaucc

SEQ ID NO: 31286 - RNA, 22 nt, Artificial Sequence
  LRRK2 RNA guide
uggauauauacccagcgaugag

SEQ ID NO: 31287 - RNA, 22 nt, Artificial Sequence
  LRRK2 RNA guide
uuggauauauacccagcgauga

SEQ ID NO: 31288 - RNA, 22 nt, Artificial Sequence
  LRRK2 RNA guide
uuuggauauauacccagcgaug

SEQ ID NO: 31289 - RNA, 22 nt, Artificial Sequence
  LRRK2 RNA guide
uuuuggauauauacccagcgau

SEQ ID NO: 31290 - RNA, 22 nt, Artificial Sequence
  LRRK2 RNA guide
uuuuuggauauauacccagcga

SEQ ID NO: 31291 - RNA, 22 nt, Artificial Sequence
  LRRK2 RNA guide
uuuuuuggauauauacccagcg

SEQ ID NO: 31292 - RNA, 20 nt, Artificial Sequence
  LRRK2 RNA guide
aucgcuggguauauacccaa

SEQ ID NO: 31293 - RNA, 20 nt, Artificial Sequence
  LRRK2 RNA guide
caucgcuggguauauaccca

SEQ ID NO: 31294 - RNA, 20 nt, Artificial Sequence
  LRRK2 RNA guide
cgcuggguauauacccaaaa

SEQ ID NO: 31295 - RNA, 20 nt, Artificial Sequence
  LRRK2 RNA guide
cucaucgcuggguauauacc

SEQ ID NO: 31296 - RNA, 20 nt, Artificial Sequence
  LRRK2 RNA guide
cuggguauauacccaaaaaa

SEQ ID NO: 31297 - RNA, 20 nt, Artificial Sequence
  LRRK2 RNA guide
ggguauauacccagcgauga

SEQ ID NO: 31298 - RNA, 20 nt, Artificial Sequence
  LRRK2 RNA guide
gguauauacccagcgaugag

SEQ ID NO: 31299 - RNA, 20 nt, Artificial Sequence
  LRRK2 RNA guide
ucaucgcuggguauauaccc

SEQ ID NO: 31300 - RNA, 20 nt, Artificial Sequence
  LRRK2 RNA guide
ucgcuggguauauacccaaa

SEQ ID NO: 31301 - RNA, 20 nt, Artificial Sequence
  LRRK2 RNA guide
ucucaucgcuggguauauac

SEQ ID NO: 31302 - RNA, 20 nt, Artificial Sequence
  LRRK2 RNA guide
uggguauauacccagcgaug

SEQ ID NO: 31303 - RNA, 20 nt, Artificial Sequence
  LRRK2 RNA guide
uuggguauauacccagcgau

SEQ ID NO: 31304 - RNA, 20 nt, Artificial Sequence
  LRRK2 RNA guide
uuuggguauauacccagcga

SEQ ID NO: 31305 - RNA, 20 nt, Artificial Sequence
  LRRK2 RNA guide
uuuuggguauauacccagcg

SEQ ID NO: 31306 - RNA, 20 nt, Artificial Sequence
  LRRK2 RNA guide
uuuuuggguauauacccagc

SEQ ID NO: 31307 - RNA, 20 nt, Artificial Sequence
  LRRK2 RNA guide
uuuuuuggguauauacccag

SEQ ID NO: 31308 - RNA, 21 nt, Artificial Sequence
  LRRK2 RNA guide
aucgcuggguauauacccaaa

SEQ ID NO: 31309 - RNA, 21 nt, Artificial Sequence
  LRRK2 RNA guide
aucucaucgcuggguauauac

SEQ ID NO: 31310 - RNA, 21 nt, Artificial Sequence
  LRRK2 RNA guide
caucgcuggguauauacccaa

SEQ ID NO: 31311 - RNA, 21 nt, Artificial Sequence
  LRRK2 RNA guide
cgcuggguauauacccaaaaa

SEQ ID NO: 31312 - RNA, 21 nt, Artificial Sequence
  LRRK2 RNA guide
cucaucgcuggguauauaccc

SEQ ID NO: 31313 - RNA, 21 nt, Artificial Sequence
  LRRK2 RNA guide
gcuggguauauacccaaaaaa

SEQ ID NO: 31314 - RNA, 21 nt, Artificial Sequence
  LRRK2 RNA guide
ggguauauacccagcgaugag

SEQ ID NO: 31315 - RNA, 21 nt, Artificial Sequence
  LRRK2 RNA guide
gguauauacccagcgaugaga

SEQ ID NO: 31316 - RNA, 21 nt, Artificial Sequence
  LRRK2 RNA guide
ucaucgcuggguauauaccca

SEQ ID NO: 31317 - RNA, 21 nt, Artificial Sequence
  LRRK2 RNA guide
ucgcuggguauauacccaaaa

SEQ ID NO: 31318 - RNA, 21 nt, Artificial Sequence
  LRRK2 RNA guide
ucucaucgcuggguauauacc

SEQ ID NO: 31319 - RNA, 21 nt, Artificial Sequence
  LRRK2 RNA guide
uggguauauacccagcgauga

SEQ ID NO: 31320 - RNA, 21 nt, Artificial Sequence
  LRRK2 RNA guide
uuggguauauacccagcgaug

SEQ ID NO: 31321 - RNA, 21 nt, Artificial Sequence
  LRRK2 RNA guide
uuuggguauauacccagcgau

SEQ ID NO: 31322 - RNA, 21 nt, Artificial Sequence
  LRRK2 RNA guide
uuuuggguauauacccagcga

SEQ ID NO: 31323 - RNA, 21 nt, Artificial Sequence
  LRRK2 RNA guide
uuuuuggguauauacccagcg

SEQ ID NO: 31324 - RNA, 21 nt, Artificial Sequence
  LRRK2 RNA guide
uuuuuuggguauauacccagc

SEQ ID NO: 31325 - RNA, 22 nt, Artificial Sequence
  LRRK2 RNA guide
aaucucaucgcuggguauauac

SEQ ID NO: 31326 - RNA, 22 nt, Artificial Sequence
  LRRK2 RNA guide
aucgcuggguauauacccaaaa

SEQ ID NO: 31327 - RNA, 22 nt, Artificial Sequence
  LRRK2 RNA guide
aucucaucgcuggguauauacc

SEQ ID NO: 31328 - RNA, 22 nt, Artificial Sequence
  LRRK2 RNA guide
caucgcuggguauauacccaaa

SEQ ID NO: 31329 - RNA, 22 nt, Artificial Sequence
  LRRK2 RNA guide
cgcuggguauauacccaaaaaa

SEQ ID NO: 31330 - RNA, 22 nt, Artificial Sequence
  LRRK2 RNA guide
cucaucgcuggguauauaccca

SEQ ID NO: 31331 - RNA, 22 nt, Artificial Sequence
  LRRK2 RNA guide
ggguauauacccagcgaugaga

SEQ ID NO: 31332 - RNA, 22 nt, Artificial Sequence
  LRRK2 RNA guide
gguauauacccagcgaugagau

SEQ ID NO: 31333 - RNA, 22 nt, Artificial Sequence
  LRRK2 RNA guide
ucaucgcuggguauauacccaa

SEQ ID NO: 31334 - RNA, 22 nt, Artificial Sequence
  LRRK2 RNA guide
ucgcuggguauauacccaaaaa

SEQ ID NO: 31335 - RNA, 22 nt, Artificial Sequence
  LRRK2 RNA guide
ucucaucgcuggguauauaccc

SEQ ID NO: 31336 - RNA, 22 nt, Artificial Sequence
  LRRK2 RNA guide
uggguauauacccagcgaugag

SEQ ID NO: 31337 - RNA, 22 nt, Artificial Sequence
  LRRK2 RNA guide
uuggguauauacccagcgauga

SEQ ID NO: 31338 - RNA, 22 nt, Artificial Sequence
  LRRK2 RNA guide
uuuggguauauacccagcgaug

SEQ ID NO: 31339 - RNA, 22 nt, Artificial Sequence
  LRRK2 RNA guide
uuuuggguauauacccagcgau

SEQ ID NO: 31340 - RNA, 22 nt, Artificial Sequence
  LRRK2 RNA guide
uuuuuggguauauacccagcga

SEQ ID NO: 31341 - RNA, 22 nt, Artificial Sequence
  LRRK2 RNA guide
uuuuuuggguauauacccagcg

SEQ ID NO: 31342 - RNA, 20 nt, Artificial Sequence
  LRRK2 RNA guide
acccagcgaugagauuacug

SEQ ID NO: 31343 - RNA, 20 nt, Artificial Sequence
  LRRK2 RNA guide
agcgaugagauuacuggauc

SEQ ID NO: 31344 - RNA, 20 nt, Artificial Sequence
  LRRK2 RNA guide
auacccagcgaugagauuac

SEQ ID NO: 31345 - RNA, 20 nt, Artificial Sequence
  LRRK2 RNA guide
auauacccagcgaugagauu

SEQ ID NO: 31346 - RNA, 20 nt, Artificial Sequence
  LRRK2 RNA guide
auauauacccagcgaugaga

SEQ ID NO: 31347 - RNA, 20 nt, Artificial Sequence
  LRRK2 RNA guide
auaugauccaguaaucucau

SEQ ID NO: 31348 - RNA, 20 nt, Artificial Sequence
  LRRK2 RNA guide
augauccaguaaucucaucg

SEQ ID NO: 31349 - RNA, 20 nt, Artificial Sequence
  LRRK2 RNA guide
cagcgaugagauuacuggau

SEQ ID NO: 31350 - RNA, 20 nt, Artificial Sequence
  LRRK2 RNA guide
caguaaucucaucgcugggu

SEQ ID NO: 31351 - RNA, 20 nt, Artificial Sequence
  LRRK2 RNA guide
cauaugauccaguaaucuca

SEQ ID NO: 31352 - RNA, 20 nt, Artificial Sequence
  LRRK2 RNA guide
ccagcgaugagauuacugga

SEQ ID NO: 31353 - RNA, 20 nt, Artificial Sequence
  LRRK2 RNA guide
ccaguaaucucaucgcuggg

SEQ ID NO: 31354 - RNA, 20 nt, Artificial Sequence
  LRRK2 RNA guide
cccagcgaugagauuacugg

SEQ ID NO: 31355 - RNA, 20 nt, Artificial Sequence
  LRRK2 RNA guide
gauccaguaaucucaucgcu

SEQ ID NO: 31356 - RNA, 20 nt, Artificial Sequence
  LRRK2 RNA guide
gcgaugagauuacuggauca

SEQ ID NO: 31357 - RNA, 20 nt, Artificial Sequence
  LRRK2 RNA guide
uacccagcgaugagauuacu

SEQ ID NO: 31358 - RNA, 20 nt, Artificial Sequence
  LRRK2 RNA guide
uauacccagcgaugagauua

SEQ ID NO: 31359 - RNA, 20 nt, Artificial Sequence
  LRRK2 RNA guide
uauauacccagcgaugagau

SEQ ID NO: 31360 - RNA, 20 nt, Artificial Sequence
  LRRK2 RNA guide
uaugauccaguaaucucauc

SEQ ID NO: 31361 - RNA, 20 nt, Artificial Sequence
  LRRK2 RNA guide
ucauaugauccaguaaucuc

SEQ ID NO: 31362 - RNA, 20 nt, Artificial Sequence
  LRRK2 RNA guide
uccaguaaucucaucgcugg

SEQ ID NO: 31363 - RNA, 20 nt, Artificial Sequence
  LRRK2 RNA guide
ugauccaguaaucucaucgc

SEQ ID NO: 31364 - RNA, 20 nt, Artificial Sequence
  LRRK2 RNA guide
uucauaugauccaguaaucu

SEQ ID NO: 31365 - RNA, 21 nt, Artificial Sequence
  LRRK2 RNA guide
acccagcgaugagauuacugg

SEQ ID NO: 31366 - RNA, 21 nt, Artificial Sequence
  LRRK2 RNA guide
agcgaugagauuacuggauca

SEQ ID NO: 31367 - RNA, 21 nt, Artificial Sequence
  LRRK2 RNA guide
auacccagcgaugagauuacu

SEQ ID NO: 31368 - RNA, 21 nt, Artificial Sequence
  LRRK2 RNA guide
auauacccagcgaugagauua

SEQ ID NO: 31369 - RNA, 21 nt, Artificial Sequence
  LRRK2 RNA guide
auauauacccagcgaugagau

SEQ ID NO: 31370 - RNA, 21 nt, Artificial Sequence
  LRRK2 RNA guide
auaugauccaguaaucucauc

SEQ ID NO: 31371 - RNA, 21 nt, Artificial Sequence
  LRRK2 RNA guide
auccaguaaucucaucgcugg

SEQ ID NO: 31372 - RNA, 21 nt, Artificial Sequence
  LRRK2 RNA guide
augauccaguaaucucaucgc

SEQ ID NO: 31373 - RNA, 21 nt, Artificial Sequence
  LRRK2 RNA guide
cagcgaugagauuacuggauc

SEQ ID NO: 31374 - RNA, 21 nt, Artificial Sequence
  LRRK2 RNA guide
cauaugauccaguaaucucau

SEQ ID NO: 31375 - RNA, 21 nt, Artificial Sequence
  LRRK2 RNA guide
ccagcgaugagauuacuggau

SEQ ID NO: 31376 - RNA, 21 nt, Artificial Sequence
  LRRK2 RNA guide
ccaguaaucucaucgcugggu

SEQ ID NO: 31377 - RNA, 21 nt, Artificial Sequence
  LRRK2 RNA guide
cccagcgaugagauuacugga

SEQ ID NO: 31378 - RNA, 21 nt, Artificial Sequence
  LRRK2 RNA guide
gauccaguaaucucaucgcug

SEQ ID NO: 31379 - RNA, 21 nt, Artificial Sequence
  LRRK2 RNA guide
gcgaugagauuacuggaucau

SEQ ID NO: 31380 - RNA, 21 nt, Artificial Sequence
  LRRK2 RNA guide
uacccagcgaugagauuacug

SEQ ID NO: 31381 - RNA, 21 nt, Artificial Sequence
  LRRK2 RNA guide
uauacccagcgaugagauuac

SEQ ID NO: 31382 - RNA, 21 nt, Artificial Sequence
  LRRK2 RNA guide
uauauacccagcgaugagauu

SEQ ID NO: 31383 - RNA, 21 nt, Artificial Sequence
  LRRK2 RNA guide
uaugauccaguaaucucaucg

SEQ ID NO: 31384 - RNA, 21 nt, Artificial Sequence
  LRRK2 RNA guide
ucauaugauccaguaaucuca

SEQ ID NO: 31385 - RNA, 21 nt, Artificial Sequence
  LRRK2 RNA guide
uccaguaaucucaucgcuggg

SEQ ID NO: 31386 - RNA, 21 nt, Artificial Sequence
  LRRK2 RNA guide
ugauccaguaaucucaucgcu

SEQ ID NO: 31387 - RNA, 21 nt, Artificial Sequence
  LRRK2 RNA guide
uucauaugauccaguaaucuc

SEQ ID NO: 31388 - RNA, 22 nt, Artificial Sequence
  LRRK2 RNA guide
acccagcgaugagauuacugga

SEQ ID NO: 31389 - RNA, 22 nt, Artificial Sequence
  LRRK2 RNA guide
agcgaugagauuacuggaucau

SEQ ID NO: 31390 - RNA, 22 nt, Artificial Sequence
  LRRK2 RNA guide
auacccagcgaugagauuacug

SEQ ID NO: 31391 - RNA, 22 nt, Artificial Sequence
  LRRK2 RNA guide
auauacccagcgaugagauuac

SEQ ID NO: 31392 - RNA, 22 nt, Artificial Sequence
  LRRK2 RNA guide
auauauacccagcgaugagauu

SEQ ID NO: 31393 - RNA, 22 nt, Artificial Sequence
  LRRK2 RNA guide
auaugauccaguaaucucaucg

SEQ ID NO: 31394 - RNA, 22 nt, Artificial Sequence
  LRRK2 RNA guide
auccaguaaucucaucgcuggg

SEQ ID NO: 31395 - RNA, 22 nt, Artificial Sequence
  LRRK2 RNA guide
augauccaguaaucucaucgcu

SEQ ID NO: 31396 - RNA, 22 nt, Artificial Sequence
  LRRK2 RNA guide
cagcgaugagauuacuggauca

SEQ ID NO: 31397 - RNA, 22 nt, Artificial Sequence
  LRRK2 RNA guide
cauaugauccaguaaucucauc

SEQ ID NO: 31398 - RNA, 22 nt, Artificial Sequence
  LRRK2 RNA guide
ccagcgaugagauuacuggauc

SEQ ID NO: 31399 - RNA, 22 nt, Artificial Sequence
  LRRK2 RNA guide
cccagcgaugagauuacuggau

SEQ ID NO: 31400 - RNA, 22 nt, Artificial Sequence
  LRRK2 RNA guide
gauccaguaaucucaucgcugg

SEQ ID NO: 31401 - RNA, 22 nt, Artificial Sequence
  LRRK2 RNA guide
gcgaugagauuacuggaucaua

SEQ ID NO: 31402 - RNA, 22 nt, Artificial Sequence
  LRRK2 RNA guide
uacccagcgaugagauuacugg

SEQ ID NO: 31403 - RNA, 22 nt, Artificial Sequence
  LRRK2 RNA guide
uauacccagcgaugagauuacu

SEQ ID NO: 31404 - RNA, 22 nt, Artificial Sequence
  LRRK2 RNA guide
uauauacccagcgaugagauua

SEQ ID NO: 31405 - RNA, 22 nt, Artificial Sequence
  LRRK2 RNA guide
uaugauccaguaaucucaucgc

SEQ ID NO: 31406 - RNA, 22 nt, Artificial Sequence
  LRRK2 RNA guide
ucauaugauccaguaaucucau

SEQ ID NO: 31407 - RNA, 22 nt, Artificial Sequence
  LRRK2 RNA guide
uccaguaaucucaucgcugggu

SEQ ID NO: 31408 - RNA, 22 nt, Artificial Sequence
  LRRK2 RNA guide
ugauccaguaaucucaucgcug

SEQ ID NO: 31409 - RNA, 22 nt, Artificial Sequence
  LRRK2 RNA guide
uucauaugauccaguaaucuca

SEQ ID NO: 31410 - RNA, 22 nt, Artificial Sequence
  LRRK2 RNA guide
uuucauaugauccaguaaucuc

SEQ ID NO: 31411 - RNA, 20 nt, Artificial Sequence
  LRRK2 RNA guide
acccagugaugagauuacug

SEQ ID NO: 31412 - RNA, 20 nt, Artificial Sequence
  LRRK2 RNA guide
aguaaucucaucacugggua

SEQ ID NO: 31413 - RNA, 20 nt, Artificial Sequence
  LRRK2 RNA guide
agugaugagauuacuggauc

SEQ ID NO: 31414 - RNA, 20 nt, Artificial Sequence
  LRRK2 RNA guide
auacccagugaugagauuac

SEQ ID NO: 31415 - RNA, 20 nt, Artificial Sequence
  LRRK2 RNA guide
auauacccagugaugagauu

SEQ ID NO: 31416 - RNA, 20 nt, Artificial Sequence
  LRRK2 RNA guide
auauauacccagugaugaga

SEQ ID NO: 31417 - RNA, 20 nt, Artificial Sequence
  LRRK2 RNA guide
aucacuggguauauauccaa

SEQ ID NO: 31418 - RNA, 20 nt, Artificial Sequence
  LRRK2 RNA guide
auccaguaaucucaucacug

SEQ ID NO: 31419 - RNA, 20 nt, Artificial Sequence
  LRRK2 RNA guide
augauccaguaaucucauca

SEQ ID NO: 31420 - RNA, 20 nt, Artificial Sequence
  LRRK2 RNA guide
cacuggguauauauccaaaa

SEQ ID NO: 31421 - RNA, 20 nt, Artificial Sequence
  LRRK2 RNA guide
caguaaucucaucacugggu

SEQ ID NO: 31422 - RNA, 20 nt, Artificial Sequence
  LRRK2 RNA guide
cagugaugagauuacuggau

SEQ ID NO: 31423 - RNA, 20 nt, Artificial Sequence
  LRRK2 RNA guide
caucacuggguauauaucca

SEQ ID NO: 31424 - RNA, 20 nt, Artificial Sequence
  LRRK2 RNA guide
ccaguaaucucaucacuggg

SEQ ID NO: 31425 - RNA, 20 nt, Artificial Sequence
  LRRK2 RNA guide
ccagugaugagauuacugga

SEQ ID NO: 31426 - RNA, 20 nt, Artificial Sequence
  LRRK2 RNA guide
cccagugaugagauuacugg

SEQ ID NO: 31427 - RNA, 20 nt, Artificial Sequence
  LRRK2 RNA guide
gauauauacccagugaugag

SEQ ID NO: 31428 - RNA, 20 nt, Artificial Sequence
  LRRK2 RNA guide
gauccaguaaucucaucacu

SEQ ID NO: 31429 - RNA, 20 nt, Artificial Sequence
  LRRK2 RNA guide
ggauauauacccagugauga

SEQ ID NO: 31430 - RNA, 20 nt, Artificial Sequence
  LRRK2 RNA guide
guaaucucaucacuggguau

SEQ ID NO: 31431 - RNA, 20 nt, Artificial Sequence
  LRRK2 RNA guide
gugaugagauuacuggauca

SEQ ID NO: 31432 - RNA, 20 nt, Artificial Sequence
  LRRK2 RNA guide
uaaucucaucacuggguaua

SEQ ID NO: 31433 - RNA, 20 nt, Artificial Sequence
  LRRK2 RNA guide
uacccagugaugagauuacu

SEQ ID NO: 31434 - RNA, 20 nt, Artificial Sequence
  LRRK2 RNA guide
uauacccagugaugagauua

SEQ ID NO: 31435 - RNA, 20 nt, Artificial Sequence
  LRRK2 RNA guide
uauauacccagugaugagau

SEQ ID NO: 31436 - RNA, 20 nt, Artificial Sequence
  LRRK2 RNA guide
ucacuggguauauauccaaa

SEQ ID NO: 31437 - RNA, 20 nt, Artificial Sequence
  LRRK2 RNA guide
ucaucacuggguauauaucc

SEQ ID NO: 31438 - RNA, 20 nt, Artificial Sequence
  LRRK2 RNA guide
uccaguaaucucaucacugg

SEQ ID NO: 31439 - RNA, 20 nt, Artificial Sequence
  LRRK2 RNA guide
ugauccaguaaucucaucac

SEQ ID NO: 31440 - RNA, 20 nt, Artificial Sequence
  LRRK2 RNA guide
uuuuuggauauauacccagu

SEQ ID NO: 31441 - RNA, 21 nt, Artificial Sequence
  LRRK2 RNA guide
acccagugaugagauuacugg

SEQ ID NO: 31442 - RNA, 21 nt, Artificial Sequence
  LRRK2 RNA guide
aguaaucucaucacuggguau

SEQ ID NO: 31443 - RNA, 21 nt, Artificial Sequence
  LRRK2 RNA guide
agugaugagauuacuggauca

SEQ ID NO: 31444 - RNA, 21 nt, Artificial Sequence
  LRRK2 RNA guide
auacccagugaugagauuacu

SEQ ID NO: 31445 - RNA, 21 nt, Artificial Sequence
  LRRK2 RNA guide
auauacccagugaugagauua

SEQ ID NO: 31446 - RNA, 21 nt, Artificial Sequence
  LRRK2 RNA guide
auauauacccagugaugagau

SEQ ID NO: 31447 - RNA, 21 nt, Artificial Sequence
  LRRK2 RNA guide
aucacuggguauauauccaaa

SEQ ID NO: 31448 - RNA, 21 nt, Artificial Sequence
  LRRK2 RNA guide
auccaguaaucucaucacugg

SEQ ID NO: 31449 - RNA, 21 nt, Artificial Sequence
  LRRK2 RNA guide
augauccaguaaucucaucac

SEQ ID NO: 31450 - RNA, 21 nt, Artificial Sequence
  LRRK2 RNA guide
cacuggguauauauccaaaaa

SEQ ID NO: 31451 - RNA, 21 nt, Artificial Sequence
  LRRK2 RNA guide
caguaaucucaucacugggua

SEQ ID NO: 31452 - RNA, 21 nt, Artificial Sequence
  LRRK2 RNA guide
cagugaugagauuacuggauc

SEQ ID NO: 31453 - RNA, 21 nt, Artificial Sequence
  LRRK2 RNA guide
caucacuggguauauauccaa

SEQ ID NO: 31454 - RNA, 21 nt, Artificial Sequence
  LRRK2 RNA guide
ccaguaaucucaucacugggu

SEQ ID NO: 31455 - RNA, 21 nt, Artificial Sequence
  LRRK2 RNA guide
ccagugaugagauuacuggau

SEQ ID NO: 31456 - RNA, 21 nt, Artificial Sequence
  LRRK2 RNA guide
cccagugaugagauuacugga

SEQ ID NO: 31457 - RNA, 21 nt, Artificial Sequence
  LRRK2 RNA guide
cucaucacuggguauauaucc

SEQ ID NO: 31458 - RNA, 21 nt, Artificial Sequence
  LRRK2 RNA guide
gauauauacccagugaugaga

SEQ ID NO: 31459 - RNA, 21 nt, Artificial Sequence
  LRRK2 RNA guide
gauccaguaaucucaucacug

SEQ ID NO: 31460 - RNA, 21 nt, Artificial Sequence
  LRRK2 RNA guide
ggauauauacccagugaugag

SEQ ID NO: 31461 - RNA, 21 nt, Artificial Sequence
  LRRK2 RNA guide
guaaucucaucacuggguaua

SEQ ID NO: 31462 - RNA, 21 nt, Artificial Sequence
  LRRK2 RNA guide
gugaugagauuacuggaucau

SEQ ID NO: 31463 - RNA, 21 nt, Artificial Sequence
  LRRK2 RNA guide
uaaucucaucacuggguauau

SEQ ID NO: 31464 - RNA, 21 nt, Artificial Sequence
  LRRK2 RNA guide
uacccagugaugagauuacug

SEQ ID NO: 31465 - RNA, 21 nt, Artificial Sequence
  LRRK2 RNA guide
uauacccagugaugagauuac

SEQ ID NO: 31466 - RNA, 21 nt, Artificial Sequence
  LRRK2 RNA guide
uauauacccagugaugagauu

SEQ ID NO: 31467 - RNA, 21 nt, Artificial Sequence
  LRRK2 RNA guide
uaugauccaguaaucucauca

SEQ ID NO: 31468 - RNA, 21 nt, Artificial Sequence
  LRRK2 RNA guide
ucacuggguauauauccaaaa

SEQ ID NO: 31469 - RNA, 21 nt, Artificial Sequence
  LRRK2 RNA guide
ucaucacuggguauauaucca

SEQ ID NO: 31470 - RNA, 21 nt, Artificial Sequence
  LRRK2 RNA guide
uccaguaaucucaucacuggg

SEQ ID NO: 31471 - RNA, 21 nt, Artificial Sequence
  LRRK2 RNA guide
ugauccaguaaucucaucacu

SEQ ID NO: 31472 - RNA, 21 nt, Artificial Sequence
  LRRK2 RNA guide
uggauauauacccagugauga

SEQ ID NO: 31473 - RNA, 21 nt, Artificial Sequence
  LRRK2 RNA guide
uuuuuggauauauacccagug

SEQ ID NO: 31474 - RNA, 22 nt, Artificial Sequence
  LRRK2 RNA guide
acccagugaugagauuacugga

SEQ ID NO: 31475 - RNA, 22 nt, Artificial Sequence
  LRRK2 RNA guide
aguaaucucaucacuggguaua

SEQ ID NO: 31476 - RNA, 22 nt, Artificial Sequence
  LRRK2 RNA guide
agugaugagauuacuggaucau

SEQ ID NO: 31477 - RNA, 22 nt, Artificial Sequence
  LRRK2 RNA guide
auacccagugaugagauuacug

SEQ ID NO: 31478 - RNA, 22 nt, Artificial Sequence
  LRRK2 RNA guide
auauacccagugaugagauuac

SEQ ID NO: 31479 - RNA, 22 nt, Artificial Sequence
  LRRK2 RNA guide
auauauacccagugaugagauu

SEQ ID NO: 31480 - RNA, 22 nt, Artificial Sequence
  LRRK2 RNA guide
auaugauccaguaaucucauca

SEQ ID NO: 31481 - RNA, 22 nt, Artificial Sequence
  LRRK2 RNA guide
aucacuggguauauauccaaaa

SEQ ID NO: 31482 - RNA, 22 nt, Artificial Sequence
  LRRK2 RNA guide
auccaguaaucucaucacuggg

SEQ ID NO: 31483 - RNA, 22 nt, Artificial Sequence
  LRRK2 RNA guide
augauccaguaaucucaucacu

SEQ ID NO: 31484 - RNA, 22 nt, Artificial Sequence
  LRRK2 RNA guide
cacuggguauauauccaaaaaa

SEQ ID NO: 31485 - RNA, 22 nt, Artificial Sequence
  LRRK2 RNA guide
caguaaucucaucacuggguau

SEQ ID NO: 31486 - RNA, 22 nt, Artificial Sequence
  LRRK2 RNA guide
cagugaugagauuacuggauca

SEQ ID NO: 31487 - RNA, 22 nt, Artificial Sequence
  LRRK2 RNA guide
caucacuggguauauauccaaa

SEQ ID NO: 31488 - RNA, 22 nt, Artificial Sequence
  LRRK2 RNA guide
ccaguaaucucaucacugggua

SEQ ID NO: 31489 - RNA, 22 nt, Artificial Sequence
  LRRK2 RNA guide
ccagugaugagauuacuggauc

SEQ ID NO: 31490 - RNA, 22 nt, Artificial Sequence
  LRRK2 RNA guide
cccagugaugagauuacuggau

SEQ ID NO: 31491 - RNA, 22 nt, Artificial Sequence
  LRRK2 RNA guide
cucaucacuggguauauaucca

SEQ ID NO: 31492 - RNA, 22 nt, Artificial Sequence
  LRRK2 RNA guide
gauauauacccagugaugagau

SEQ ID NO: 31493 - RNA, 22 nt, Artificial Sequence
  LRRK2 RNA guide
gauccaguaaucucaucacugg

SEQ ID NO: 31494 - RNA, 22 nt, Artificial Sequence
  LRRK2 RNA guide
ggauauauacccagugaugaga

SEQ ID NO: 31495 - RNA, 22 nt, Artificial Sequence
  LRRK2 RNA guide
guaaucucaucacuggguauau

SEQ ID NO: 31496 - RNA, 22 nt, Artificial Sequence
  LRRK2 RNA guide
gugaugagauuacuggaucaua

SEQ ID NO: 31497 - RNA, 22 nt, Artificial Sequence
  LRRK2 RNA guide
uaaucucaucacuggguauaua

SEQ ID NO: 31498 - RNA, 22 nt, Artificial Sequence
  LRRK2 RNA guide
uacccagugaugagauuacugg

SEQ ID NO: 31499 - RNA, 22 nt, Artificial Sequence
  LRRK2 RNA guide
uauacccagugaugagauuacu

SEQ ID NO: 31500 - RNA, 22 nt, Artificial Sequence
  LRRK2 RNA guide
uauauacccagugaugagauua

SEQ ID NO: 31501 - RNA, 22 nt, Artificial Sequence
  LRRK2 RNA guide
uaugauccaguaaucucaucac

SEQ ID NO: 31502 - RNA, 22 nt, Artificial Sequence
  LRRK2 RNA guide
ucacuggguauauauccaaaaa

SEQ ID NO: 31503 - RNA, 22 nt, Artificial Sequence
  LRRK2 RNA guide
ucaucacuggguauauauccaa

SEQ ID NO: 31504 - RNA, 22 nt, Artificial Sequence
  LRRK2 RNA guide
uccaguaaucucaucacugggu

SEQ ID NO: 31505 - RNA, 22 nt, Artificial Sequence
  LRRK2 RNA guide
ucucaucacuggguauauaucc

SEQ ID NO: 31506 - RNA, 22 nt, Artificial Sequence
  LRRK2 RNA guide
ugauccaguaaucucaucacug

SEQ ID NO: 31507 - RNA, 22 nt, Artificial Sequence
  LRRK2 RNA guide
uggauauauacccagugaugag

SEQ ID NO: 31508 - RNA, 22 nt, Artificial Sequence
  LRRK2 RNA guide
uuggauauauacccagugauga

SEQ ID NO: 31509 - RNA, 22 nt, Artificial Sequence
  LRRK2 RNA guide
uuuuuggauauauacccaguga

SEQ ID NO: 31510 - RNA, 22 nt, Artificial Sequence
  LRRK2 RNA guide
uuuuuuggauauauacccagug

SEQ ID NO: 31511 - RNA, 20 nt, Artificial Sequence
  LRRK2 RNA guide
aaaagcuugcgaauucagca

SEQ ID NO: 31512 - RNA, 20 nt, Artificial Sequence
  LRRK2 RNA guide
aaagcuugcgaauucagcag

SEQ ID NO: 31513 - RNA, 20 nt, Artificial Sequence
  LRRK2 RNA guide
aagcuugcgaauucagcagc

SEQ ID NO: 31514 - RNA, 20 nt, Artificial Sequence
  LRRK2 RNA guide
aaucuacuagcugcugaauu

SEQ ID NO: 31515 - RNA, 20 nt, Artificial Sequence
  LRRK2 RNA guide
aaucucuuuccaucauacaa

SEQ ID NO: 31516 - RNA, 20 nt, Artificial Sequence
  LRRK2 RNA guide
aauucagcagcuaguagauu

SEQ ID NO: 31517 - RNA, 20 nt, Artificial Sequence
  LRRK2 RNA guide
acaaucuacuagcugcugaa

SEQ ID NO: 31518 - RNA, 20 nt, Artificial Sequence
  LRRK2 RNA guide
acuagcugcugaauucgcaa

SEQ ID NO: 31519 - RNA, 20 nt, Artificial Sequence
  LRRK2 RNA guide
agcagcuaguagauuguaug

SEQ ID NO: 31520 - RNA, 20 nt, Artificial Sequence
  LRRK2 RNA guide
agcuaguagauuguaugaug

SEQ ID NO: 31521 - RNA, 20 nt, Artificial Sequence
  LRRK2 RNA guide
agcuugcgaauucagcagcu

SEQ ID NO: 31522 - RNA, 20 nt, Artificial Sequence
  LRRK2 RNA guide
aguagauuguaugauggaaa

SEQ ID NO: 31523 - RNA, 20 nt, Artificial Sequence
  LRRK2 RNA guide
auacaaucuacuagcugcug

SEQ ID NO: 31524 - RNA, 20 nt, Artificial Sequence
  LRRK2 RNA guide
aucauacaaucuacuagcug

SEQ ID NO: 31525 - RNA, 20 nt, Artificial Sequence
  LRRK2 RNA guide
aucuacuagcugcugaauuc

SEQ ID NO: 31526 - RNA, 20 nt, Artificial Sequence
  LRRK2 RNA guide
aucucuuuccaucauacaau

SEQ ID NO: 31527 - RNA, 20 nt, Artificial Sequence
  LRRK2 RNA guide
auucagcagcuaguagauug

SEQ ID NO: 31528 - RNA, 20 nt, Artificial Sequence
  LRRK2 RNA guide
caaucuacuagcugcugaau

SEQ ID NO: 31529 - RNA, 20 nt, Artificial Sequence
  LRRK2 RNA guide
cagcagcuaguagauuguau

SEQ ID NO: 31530 - RNA, 20 nt, Artificial Sequence
  LRRK2 RNA guide
cagcuaguagauuguaugau

SEQ ID NO: 31531 - RNA, 20 nt, Artificial Sequence
  LRRK2 RNA guide
cauacaaucuacuagcugcu

SEQ ID NO: 31532 - RNA, 20 nt, Artificial Sequence
  LRRK2 RNA guide
caucauacaaucuacuagcu

SEQ ID NO: 31533 - RNA, 20 nt, Artificial Sequence
  LRRK2 RNA guide
ccaucauacaaucuacuagc

SEQ ID NO: 31534 - RNA, 20 nt, Artificial Sequence
  LRRK2 RNA guide
cgaauucagcagcuaguaga

SEQ ID NO: 31535 - RNA, 20 nt, Artificial Sequence
  LRRK2 RNA guide
cuacuagcugcugaauucgc

SEQ ID NO: 31536 - RNA, 20 nt, Artificial Sequence
  LRRK2 RNA guide
cuaguagauuguaugaugga

SEQ ID NO: 31537 - RNA, 20 nt, Artificial Sequence
  LRRK2 RNA guide
cucuuuccaucauacaaucu

SEQ ID NO: 31538 - RNA, 20 nt, Artificial Sequence
  LRRK2 RNA guide
cuugcgaauucagcagcuag

SEQ ID NO: 31539 - RNA, 20 nt, Artificial Sequence
  LRRK2 RNA guide
cuuuccaucauacaaucuac

SEQ ID NO: 31540 - RNA, 20 nt, Artificial Sequence
  LRRK2 RNA guide
gaauucagcagcuaguagau

SEQ ID NO: 31541 - RNA, 20 nt, Artificial Sequence
  LRRK2 RNA guide
gcagcuaguagauuguauga

SEQ ID NO: 31542 - RNA, 20 nt, Artificial Sequence
  LRRK2 RNA guide
gcgaauucagcagcuaguag

SEQ ID NO: 31543 - RNA, 20 nt, Artificial Sequence
  LRRK2 RNA guide
gcuaguagauuguaugaugg

SEQ ID NO: 31544 - RNA, 20 nt, Artificial Sequence
  LRRK2 RNA guide
gcuugcgaauucagcagcua

SEQ ID NO: 31545 - RNA, 20 nt, Artificial Sequence
  LRRK2 RNA guide
uacaaucuacuagcugcuga

SEQ ID NO: 31546 - RNA, 20 nt, Artificial Sequence
  LRRK2 RNA guide
uacuagcugcugaauucgca

SEQ ID NO: 31547 - RNA, 20 nt, Artificial Sequence
  LRRK2 RNA guide
uaguagauuguaugauggaa

SEQ ID NO: 31548 - RNA, 20 nt, Artificial Sequence
  LRRK2 RNA guide
ucagcagcuaguagauugua

SEQ ID NO: 31549 - RNA, 20 nt, Artificial Sequence
  LRRK2 RNA guide
ucauacaaucuacuagcugc

SEQ ID NO: 31550 - RNA, 20 nt, Artificial Sequence
  LRRK2 RNA guide
uccaucauacaaucuacuag

SEQ ID NO: 31551 - RNA, 20 nt, Artificial Sequence
  LRRK2 RNA guide
ucuacuagcugcugaauucg

SEQ ID NO: 31552 - RNA, 20 nt, Artificial Sequence
  LRRK2 RNA guide
ucucuuuccaucauacaauc

SEQ ID NO: 31553 - RNA, 20 nt, Artificial Sequence
  LRRK2 RNA guide
ucuuuccaucauacaaucua

SEQ ID NO: 31554 - RNA, 20 nt, Artificial Sequence
  LRRK2 RNA guide
ugcgaauucagcagcuagua

SEQ ID NO: 31555 - RNA, 20 nt, Artificial Sequence
  LRRK2 RNA guide
uucagcagcuaguagauugu

SEQ ID NO: 31556 - RNA, 20 nt, Artificial Sequence
  LRRK2 RNA guide
uuccaucauacaaucuacua

SEQ ID NO: 31557 - RNA, 20 nt, Artificial Sequence
  LRRK2 RNA guide
uugcgaauucagcagcuagu

SEQ ID NO: 31558 - RNA, 20 nt, Artificial Sequence
  LRRK2 RNA guide
uuuccaucauacaaucuacu

SEQ ID NO: 31559 - RNA, 21 nt, Artificial Sequence
  LRRK2 RNA guide
aaaaagcuugcgaauucagca

SEQ ID NO: 31560 - RNA, 21 nt, Artificial Sequence
  LRRK2 RNA guide
aaaagcuugcgaauucagcag

SEQ ID NO: 31561 - RNA, 21 nt, Artificial Sequence
  LRRK2 RNA guide
aaagcuugcgaauucagcagc

SEQ ID NO: 31562 - RNA, 21 nt, Artificial Sequence
  LRRK2 RNA guide
aagcuugcgaauucagcagcu

SEQ ID NO: 31563 - RNA, 21 nt, Artificial Sequence
  LRRK2 RNA guide
aaucuacuagcugcugaauuc

SEQ ID NO: 31564 - RNA, 21 nt, Artificial Sequence
  LRRK2 RNA guide
aauucagcagcuaguagauug

SEQ ID NO: 31565 - RNA, 21 nt, Artificial Sequence
  LRRK2 RNA guide
acaaucuacuagcugcugaau

SEQ ID NO: 31566 - RNA, 21 nt, Artificial Sequence
  LRRK2 RNA guide
acuagcugcugaauucgcaag

SEQ ID NO: 31567 - RNA, 21 nt, Artificial Sequence
  LRRK2 RNA guide
agcagcuaguagauuguauga

SEQ ID NO: 31568 - RNA, 21 nt, Artificial Sequence
  LRRK2 RNA guide
agcuaguagauuguaugaugg

SEQ ID NO: 31569 - RNA, 21 nt, Artificial Sequence
  LRRK2 RNA guide
agcuugcgaauucagcagcua

SEQ ID NO: 31570 - RNA, 21 nt, Artificial Sequence
  LRRK2 RNA guide
aguagauuguaugauggaaag

SEQ ID NO: 31571 - RNA, 21 nt, Artificial Sequence
  LRRK2 RNA guide
auacaaucuacuagcugcuga

SEQ ID NO: 31572 - RNA, 21 nt, Artificial Sequence
  LRRK2 RNA guide
aucauacaaucuacuagcugc

SEQ ID NO: 31573 - RNA, 21 nt, Artificial Sequence
  LRRK2 RNA guide
aucuacuagcugcugaauucg

SEQ ID NO: 31574 - RNA, 21 nt, Artificial Sequence
  LRRK2 RNA guide
aucucuuuccaucauacaauc

SEQ ID NO: 31575 - RNA, 21 nt, Artificial Sequence
  LRRK2 RNA guide
auucagcagcuaguagauugu

SEQ ID NO: 31576 - RNA, 21 nt, Artificial Sequence
  LRRK2 RNA guide
caaucuacuagcugcugaauu

SEQ ID NO: 31577 - RNA, 21 nt, Artificial Sequence
  LRRK2 RNA guide
cagcagcuaguagauuguaug

SEQ ID NO: 31578 - RNA, 21 nt, Artificial Sequence
  LRRK2 RNA guide
cagcuaguagauuguaugaug

SEQ ID NO: 31579 - RNA, 21 nt, Artificial Sequence
  LRRK2 RNA guide
cauacaaucuacuagcugcug

SEQ ID NO: 31580 - RNA, 21 nt, Artificial Sequence
  LRRK2 RNA guide
caucauacaaucuacuagcug

SEQ ID NO: 31581 - RNA, 21 nt, Artificial Sequence
  LRRK2 RNA guide
ccaucauacaaucuacuagcu

SEQ ID NO: 31582 - RNA, 21 nt, Artificial Sequence
  LRRK2 RNA guide
cgaauucagcagcuaguagau

SEQ ID NO: 31583 - RNA, 21 nt, Artificial Sequence
  LRRK2 RNA guide
cuacuagcugcugaauucgca

SEQ ID NO: 31584 - RNA, 21 nt, Artificial Sequence
  LRRK2 RNA guide
cuaguagauuguaugauggaa

SEQ ID NO: 31585 - RNA, 21 nt, Artificial Sequence
  LRRK2 RNA guide
cucuuuccaucauacaaucua

SEQ ID NO: 31586 - RNA, 21 nt, Artificial Sequence
  LRRK2 RNA guide
cuugcgaauucagcagcuagu

SEQ ID NO: 31587 - RNA, 21 nt, Artificial Sequence
  LRRK2 RNA guide
cuuuccaucauacaaucuacu

SEQ ID NO: 31588 - RNA, 21 nt, Artificial Sequence
  LRRK2 RNA guide
gaauucagcagcuaguagauu

SEQ ID NO: 31589 - RNA, 21 nt, Artificial Sequence
  LRRK2 RNA guide
gcagcuaguagauuguaugau

SEQ ID NO: 31590 - RNA, 21 nt, Artificial Sequence
  LRRK2 RNA guide
gcgaauucagcagcuaguaga

SEQ ID NO: 31591 - RNA, 21 nt, Artificial Sequence
  LRRK2 RNA guide
gcuaguagauuguaugaugga

SEQ ID NO: 31592 - RNA, 21 nt, Artificial Sequence
  LRRK2 RNA guide
gcuugcgaauucagcagcuag

SEQ ID NO: 31593 - RNA, 21 nt, Artificial Sequence
  LRRK2 RNA guide
uacaaucuacuagcugcugaa

SEQ ID NO: 31594 - RNA, 21 nt, Artificial Sequence
  LRRK2 RNA guide
uacuagcugcugaauucgcaa

SEQ ID NO: 31595 - RNA, 21 nt, Artificial Sequence
  LRRK2 RNA guide
ucagcagcuaguagauuguau

SEQ ID NO: 31596 - RNA, 21 nt, Artificial Sequence
  LRRK2 RNA guide
ucauacaaucuacuagcugcu

SEQ ID NO: 31597 - RNA, 21 nt, Artificial Sequence
  LRRK2 RNA guide
uccaucauacaaucuacuagc

SEQ ID NO: 31598 - RNA, 21 nt, Artificial Sequence
  LRRK2 RNA guide
ucuacuagcugcugaauucgc

SEQ ID NO: 31599 - RNA, 21 nt, Artificial Sequence
  LRRK2 RNA guide
ucucuuuccaucauacaaucu

SEQ ID NO: 31600 - RNA, 21 nt, Artificial Sequence
  LRRK2 RNA guide
ucuuuccaucauacaaucuac

SEQ ID NO: 31601 - RNA, 21 nt, Artificial Sequence
  LRRK2 RNA guide
ugcgaauucagcagcuaguag

SEQ ID NO: 31602 - RNA, 21 nt, Artificial Sequence
  LRRK2 RNA guide
uucagcagcuaguagauugua

SEQ ID NO: 31603 - RNA, 21 nt, Artificial Sequence
  LRRK2 RNA guide
uuccaucauacaaucuacuag

SEQ ID NO: 31604 - RNA, 21 nt, Artificial Sequence
  LRRK2 RNA guide
uugcgaauucagcagcuagua

SEQ ID NO: 31605 - RNA, 22 nt, Artificial Sequence
  LRRK2 RNA guide
aaaaagcuugcgaauucagcag

SEQ ID NO: 31606 - RNA, 22 nt, Artificial Sequence
  LRRK2 RNA guide
aaaagcuugcgaauucagcagc

SEQ ID NO: 31607 - RNA, 22 nt, Artificial Sequence
  LRRK2 RNA guide
aaagcuugcgaauucagcagcu

SEQ ID NO: 31608 - RNA, 22 nt, Artificial Sequence
  LRRK2 RNA guide
aagcuugcgaauucagcagcua

SEQ ID NO: 31609 - RNA, 22 nt, Artificial Sequence
  LRRK2 RNA guide
aaucuacuagcugcugaauucg

SEQ ID NO: 31610 - RNA, 22 nt, Artificial Sequence
  LRRK2 RNA guide
aaucucuuuccaucauacaauc

SEQ ID NO: 31611 - RNA, 22 nt, Artificial Sequence
  LRRK2 RNA guide
aauucagcagcuaguagauugu

SEQ ID NO: 31612 - RNA, 22 nt, Artificial Sequence
  LRRK2 RNA guide
acaaucuacuagcugcugaauu

SEQ ID NO: 31613 - RNA, 22 nt, Artificial Sequence
  LRRK2 RNA guide
acuagcugcugaauucgcaagc

SEQ ID NO: 31614 - RNA, 22 nt, Artificial Sequence
  LRRK2 RNA guide
agcagcuaguagauuguaugau

SEQ ID NO: 31615 - RNA, 22 nt, Artificial Sequence
  LRRK2 RNA guide
agcuaguagauuguaugaugga

SEQ ID NO: 31616 - RNA, 22 nt, Artificial Sequence
  LRRK2 RNA guide
agcuugcgaauucagcagcuag

SEQ ID NO: 31617 - RNA, 22 nt, Artificial Sequence
  LRRK2 RNA guide
aguagauuguaugauggaaaga

SEQ ID NO: 31618 - RNA, 22 nt, Artificial Sequence
  LRRK2 RNA guide
auacaaucuacuagcugcugaa

SEQ ID NO: 31619 - RNA, 22 nt, Artificial Sequence
  LRRK2 RNA guide
aucauacaaucuacuagcugcu

SEQ ID NO: 31620 - RNA, 22 nt, Artificial Sequence
  LRRK2 RNA guide
aucuacuagcugcugaauucgc

SEQ ID NO: 31621 - RNA, 22 nt, Artificial Sequence
  LRRK2 RNA guide
aucucuuuccaucauacaaucu

SEQ ID NO: 31622 - RNA, 22 nt, Artificial Sequence
  LRRK2 RNA guide
auucagcagcuaguagauugua

SEQ ID NO: 31623 - RNA, 22 nt, Artificial Sequence
  LRRK2 RNA guide
caaaaagcuugcgaauucagca

SEQ ID NO: 31624 - RNA, 22 nt, Artificial Sequence
  LRRK2 RNA guide
caaucuacuagcugcugaauuc

SEQ ID NO: 31625 - RNA, 22 nt, Artificial Sequence
  LRRK2 RNA guide
cagcagcuaguagauuguauga

SEQ ID NO: 31626 - RNA, 22 nt, Artificial Sequence
  LRRK2 RNA guide
cagcuaguagauuguaugaugg

SEQ ID NO: 31627 - RNA, 22 nt, Artificial Sequence
  LRRK2 RNA guide
cauacaaucuacuagcugcuga

SEQ ID NO: 31628 - RNA, 22 nt, Artificial Sequence
  LRRK2 RNA guide
caucauacaaucuacuagcugc

SEQ ID NO: 31629 - RNA, 22 nt, Artificial Sequence
  LRRK2 RNA guide
ccaucauacaaucuacuagcug

SEQ ID NO: 31630 - RNA, 22 nt, Artificial Sequence
  LRRK2 RNA guide
cgaauucagcagcuaguagauu

SEQ ID NO: 31631 - RNA, 22 nt, Artificial Sequence
  LRRK2 RNA guide
cuacuagcugcugaauucgcaa

SEQ ID NO: 31632 - RNA, 22 nt, Artificial Sequence
  LRRK2 RNA guide
cuaguagauuguaugauggaaa

SEQ ID NO: 31633 - RNA, 22 nt, Artificial Sequence
  LRRK2 RNA guide
cucuuuccaucauacaaucuac

SEQ ID NO: 31634 - RNA, 22 nt, Artificial Sequence
  LRRK2 RNA guide
cuugcgaauucagcagcuagua

SEQ ID NO: 31635 - RNA, 22 nt, Artificial Sequence
  LRRK2 RNA guide
cuuuccaucauacaaucuacua

SEQ ID NO: 31636 - RNA, 22 nt, Artificial Sequence
  LRRK2 RNA guide
gaauucagcagcuaguagauug

SEQ ID NO: 31637 - RNA, 22 nt, Artificial Sequence
  LRRK2 RNA guide
gcagcuaguagauuguaugaug

SEQ ID NO: 31638 - RNA, 22 nt, Artificial Sequence
  LRRK2 RNA guide
gcgaauucagcagcuaguagau

SEQ ID NO: 31639 - RNA, 22 nt, Artificial Sequence
  LRRK2 RNA guide
gcuaguagauuguaugauggaa

SEQ ID NO: 31640 - RNA, 22 nt, Artificial Sequence
  LRRK2 RNA guide
gcuugcgaauucagcagcuagu

SEQ ID NO: 31641 - RNA, 22 nt, Artificial Sequence
  LRRK2 RNA guide
uacaaucuacuagcugcugaau

SEQ ID NO: 31642 - RNA, 22 nt, Artificial Sequence
  LRRK2 RNA guide
uacuagcugcugaauucgcaag

SEQ ID NO: 31643 - RNA, 22 nt, Artificial Sequence
  LRRK2 RNA guide
uaguagauuguaugauggaaag

SEQ ID NO: 31644 - RNA, 22 nt, Artificial Sequence
  LRRK2 RNA guide
ucagcagcuaguagauuguaug

SEQ ID NO: 31645 - RNA, 22 nt, Artificial Sequence
  LRRK2 RNA guide
ucauacaaucuacuagcugcug

SEQ ID NO: 31646 - RNA, 22 nt, Artificial Sequence
  LRRK2 RNA guide
uccaucauacaaucuacuagcu

SEQ ID NO: 31647 - RNA, 22 nt, Artificial Sequence
  LRRK2 RNA guide
ucuacuagcugcugaauucgca

SEQ ID NO: 31648 - RNA, 22 nt, Artificial Sequence
  LRRK2 RNA guide
ucucuuuccaucauacaaucua

SEQ ID NO: 31649 - RNA, 22 nt, Artificial Sequence
  LRRK2 RNA guide
ucuuuccaucauacaaucuacu

SEQ ID NO: 31650 - RNA, 22 nt, Artificial Sequence
  LRRK2 RNA guide
ugcgaauucagcagcuaguaga

SEQ ID NO: 31651 - RNA, 22 nt, Artificial Sequence
  LRRK2 RNA guide
uucagcagcuaguagauuguau

SEQ ID NO: 31652 - RNA, 22 nt, Artificial Sequence
  LRRK2 RNA guide
uuccaucauacaaucuacuagc

SEQ ID NO: 31653 - RNA, 22 nt, Artificial Sequence
  LRRK2 RNA guide
uugcgaauucagcagcuaguag

SEQ ID NO: 31654 - RNA, 22 nt, Artificial Sequence
  LRRK2 RNA guide
uuuccaucauacaaucuacuag

SEQ ID NO: 31655 - RNA, 20 nt, Artificial Sequence
  LRRK2 RNA guide
aaucuauuagcugcugaauu

SEQ ID NO: 31656 - RNA, 20 nt, Artificial Sequence
  LRRK2 RNA guide
aauucagcagcuaauagauu

SEQ ID NO: 31657 - RNA, 20 nt, Artificial Sequence
  LRRK2 RNA guide
acaaucuauuagcugcugaa

SEQ ID NO: 31658 - RNA, 20 nt, Artificial Sequence
  LRRK2 RNA guide
agcagcuaauagauuguaug

SEQ ID NO: 31659 - RNA, 20 nt, Artificial Sequence
  LRRK2 RNA guide
agcuaauagauuguaugaug

SEQ ID NO: 31660 - RNA, 20 nt, Artificial Sequence
  LRRK2 RNA guide
auacaaucuauuagcugcug

SEQ ID NO: 31661 - RNA, 20 nt, Artificial Sequence
  LRRK2 RNA guide
aucauacaaucuauuagcug

SEQ ID NO: 31662 - RNA, 20 nt, Artificial Sequence
  LRRK2 RNA guide
aucuauuagcugcugaauuc

SEQ ID NO: 31663 - RNA, 20 nt, Artificial Sequence
  LRRK2 RNA guide
auuagcugcugaauucgcaa

SEQ ID NO: 31664 - RNA, 20 nt, Artificial Sequence
  LRRK2 RNA guide
auucagcagcuaauagauug

SEQ ID NO: 31665 - RNA, 20 nt, Artificial Sequence
  LRRK2 RNA guide
caaucuauuagcugcugaau

SEQ ID NO: 31666 - RNA, 20 nt, Artificial Sequence
  LRRK2 RNA guide
cagcagcuaauagauuguau

SEQ ID NO: 31667 - RNA, 20 nt, Artificial Sequence
  LRRK2 RNA guide
cagcuaauagauuguaugau

SEQ ID NO: 31668 - RNA, 20 nt, Artificial Sequence
  LRRK2 RNA guide
cauacaaucuauuagcugcu

SEQ ID NO: 31669 - RNA, 20 nt, Artificial Sequence
  LRRK2 RNA guide
caucauacaaucuauuagcu

SEQ ID NO: 31670 - RNA, 20 nt, Artificial Sequence
  LRRK2 RNA guide
ccaucauacaaucuauuagc

SEQ ID NO: 31671 - RNA, 20 nt, Artificial Sequence
  LRRK2 RNA guide
cgaauucagcagcuaauaga

SEQ ID NO: 31672 - RNA, 20 nt, Artificial Sequence
  LRRK2 RNA guide
cuaauagauuguaugaugga

SEQ ID NO: 31673 - RNA, 20 nt, Artificial Sequence
  LRRK2 RNA guide
cuauuagcugcugaauucgc

SEQ ID NO: 31674 - RNA, 20 nt, Artificial Sequence
  LRRK2 RNA guide
cuugcgaauucagcagcuaa

SEQ ID NO: 31675 - RNA, 20 nt, Artificial Sequence
  LRRK2 RNA guide
cuuuccaucauacaaucuau

SEQ ID NO: 31676 - RNA, 20 nt, Artificial Sequence
  LRRK2 RNA guide
gaauucagcagcuaauagau

SEQ ID NO: 31677 - RNA, 20 nt, Artificial Sequence
  LRRK2 RNA guide
gcagcuaauagauuguauga

SEQ ID NO: 31678 - RNA, 20 nt, Artificial Sequence
  LRRK2 RNA guide
gcgaauucagcagcuaauag

SEQ ID NO: 31679 - RNA, 20 nt, Artificial Sequence
  LRRK2 RNA guide
gcuaauagauuguaugaugg

SEQ ID NO: 31680 - RNA, 20 nt, Artificial Sequence
  LRRK2 RNA guide
uacaaucuauuagcugcuga

SEQ ID NO: 31681 - RNA, 20 nt, Artificial Sequence
  LRRK2 RNA guide
uauuagcugcugaauucgca

SEQ ID NO: 31682 - RNA, 20 nt, Artificial Sequence
  LRRK2 RNA guide
ucagcagcuaauagauugua

SEQ ID NO: 31683 - RNA, 20 nt, Artificial Sequence
  LRRK2 RNA guide
ucauacaaucuauuagcugc

SEQ ID NO: 31684 - RNA, 20 nt, Artificial Sequence
  LRRK2 RNA guide
uccaucauacaaucuauuag

SEQ ID NO: 31685 - RNA, 20 nt, Artificial Sequence
  LRRK2 RNA guide
ucuauuagcugcugaauucg

SEQ ID NO: 31686 - RNA, 20 nt, Artificial Sequence
  LRRK2 RNA guide
ugcgaauucagcagcuaaua

SEQ ID NO: 31687 - RNA, 20 nt, Artificial Sequence
  LRRK2 RNA guide
uucagcagcuaauagauugu

SEQ ID NO: 31688 - RNA, 20 nt, Artificial Sequence
  LRRK2 RNA guide
uugcgaauucagcagcuaau

SEQ ID NO: 31689 - RNA, 21 nt, Artificial Sequence
  LRRK2 RNA guide
aaucuauuagcugcugaauuc

SEQ ID NO: 31690 - RNA, 21 nt, Artificial Sequence
  LRRK2 RNA guide
aauucagcagcuaauagauug

SEQ ID NO: 31691 - RNA, 21 nt, Artificial Sequence
  LRRK2 RNA guide
acaaucuauuagcugcugaau

SEQ ID NO: 31692 - RNA, 21 nt, Artificial Sequence
  LRRK2 RNA guide
agcagcuaauagauuguauga

SEQ ID NO: 31693 - RNA, 21 nt, Artificial Sequence
  LRRK2 RNA guide
agcuaauagauuguaugaugg

SEQ ID NO: 31694 - RNA, 21 nt, Artificial Sequence
  LRRK2 RNA guide
auacaaucuauuagcugcuga

SEQ ID NO: 31695 - RNA, 21 nt, Artificial Sequence
  LRRK2 RNA guide
aucauacaaucuauuagcugc

SEQ ID NO: 31696 - RNA, 21 nt, Artificial Sequence
  LRRK2 RNA guide
aucuauuagcugcugaauucg

SEQ ID NO: 31697 - RNA, 21 nt, Artificial Sequence
  LRRK2 RNA guide
auuagcugcugaauucgcaag

SEQ ID NO: 31698 - RNA, 21 nt, Artificial Sequence
  LRRK2 RNA guide
auucagcagcuaauagauugu

SEQ ID NO: 31699 - RNA, 21 nt, Artificial Sequence
  LRRK2 RNA guide
caaucuauuagcugcugaauu

SEQ ID NO: 31700 - RNA, 21 nt, Artificial Sequence
  LRRK2 RNA guide
cagcagcuaauagauuguaug

SEQ ID NO: 31701 - RNA, 21 nt, Artificial Sequence
  LRRK2 RNA guide
cagcuaauagauuguaugaug

SEQ ID NO: 31702 - RNA, 21 nt, Artificial Sequence
  LRRK2 RNA guide
cauacaaucuauuagcugcug

SEQ ID NO: 31703 - RNA, 21 nt, Artificial Sequence
  LRRK2 RNA guide
caucauacaaucuauuagcug

SEQ ID NO: 31704 - RNA, 21 nt, Artificial Sequence
  LRRK2 RNA guide
ccaucauacaaucuauuagcu

SEQ ID NO: 31705 - RNA, 21 nt, Artificial Sequence
  LRRK2 RNA guide
cgaauucagcagcuaauagau

SEQ ID NO: 31706 - RNA, 21 nt, Artificial Sequence
  LRRK2 RNA guide
cuauuagcugcugaauucgca

SEQ ID NO: 31707 - RNA, 21 nt, Artificial Sequence
  LRRK2 RNA guide
cuugcgaauucagcagcuaau

SEQ ID NO: 31708 - RNA, 21 nt, Artificial Sequence
  LRRK2 RNA guide
gaauucagcagcuaauagauu

SEQ ID NO: 31709 - RNA, 21 nt, Artificial Sequence
  LRRK2 RNA guide
gcagcuaauagauuguaugau

SEQ ID NO: 31710 - RNA, 21 nt, Artificial Sequence
  LRRK2 RNA guide
gcgaauucagcagcuaauaga

SEQ ID NO: 31711 - RNA, 21 nt, Artificial Sequence
  LRRK2 RNA guide
gcuaauagauuguaugaugga

SEQ ID NO: 31712 - RNA, 21 nt, Artificial Sequence
  LRRK2 RNA guide
gcuugcgaauucagcagcuaa

SEQ ID NO: 31713 - RNA, 21 nt, Artificial Sequence
  LRRK2 RNA guide
uacaaucuauuagcugcugaa

SEQ ID NO: 31714 - RNA, 21 nt, Artificial Sequence
  LRRK2 RNA guide
uauuagcugcugaauucgcaa

SEQ ID NO: 31715 - RNA, 21 nt, Artificial Sequence
  LRRK2 RNA guide
ucagcagcuaauagauuguau

SEQ ID NO: 31716 - RNA, 21 nt, Artificial Sequence
  LRRK2 RNA guide
ucauacaaucuauuagcugcu

SEQ ID NO: 31717 - RNA, 21 nt, Artificial Sequence
  LRRK2 RNA guide
uccaucauacaaucuauuagc

SEQ ID NO: 31718 - RNA, 21 nt, Artificial Sequence
  LRRK2 RNA guide
ucuauuagcugcugaauucgc

SEQ ID NO: 31719 - RNA, 21 nt, Artificial Sequence
  LRRK2 RNA guide
ugcgaauucagcagcuaauag

SEQ ID NO: 31720 - RNA, 21 nt, Artificial Sequence
  LRRK2 RNA guide
uucagcagcuaauagauugua

SEQ ID NO: 31721 - RNA, 21 nt, Artificial Sequence
  LRRK2 RNA guide
uugcgaauucagcagcuaaua

SEQ ID NO: 31722 - RNA, 22 nt, Artificial Sequence
  LRRK2 RNA guide
aaucuauuagcugcugaauucg

SEQ ID NO: 31723 - RNA, 22 nt, Artificial Sequence
  LRRK2 RNA guide
aauucagcagcuaauagauugu

SEQ ID NO: 31724 - RNA, 22 nt, Artificial Sequence
  LRRK2 RNA guide
acaaucuauuagcugcugaauu

SEQ ID NO: 31725 - RNA, 22 nt, Artificial Sequence
  LRRK2 RNA guide
agcagcuaauagauuguaugau

SEQ ID NO: 31726 - RNA, 22 nt, Artificial Sequence
  LRRK2 RNA guide
agcuaauagauuguaugaugga

SEQ ID NO: 31727 - RNA, 22 nt, Artificial Sequence
  LRRK2 RNA guide
agcuugcgaauucagcagcuaa

SEQ ID NO: 31728 - RNA, 22 nt, Artificial Sequence
  LRRK2 RNA guide
auacaaucuauuagcugcugaa

SEQ ID NO: 31729 - RNA, 22 nt, Artificial Sequence
  LRRK2 RNA guide
aucauacaaucuauuagcugcu

SEQ ID NO: 31730 - RNA, 22 nt, Artificial Sequence
  LRRK2 RNA guide
aucuauuagcugcugaauucgc

SEQ ID NO: 31731 - RNA, 22 nt, Artificial Sequence
  LRRK2 RNA guide
auuagcugcugaauucgcaagc

SEQ ID NO: 31732 - RNA, 22 nt, Artificial Sequence
  LRRK2 RNA guide
auucagcagcuaauagauugua

SEQ ID NO: 31733 - RNA, 22 nt, Artificial Sequence
  LRRK2 RNA guide
caaucuauuagcugcugaauuc

SEQ ID NO: 31734 - RNA, 22 nt, Artificial Sequence
  LRRK2 RNA guide
cagcagcuaauagauuguauga

SEQ ID NO: 31735 - RNA, 22 nt, Artificial Sequence
  LRRK2 RNA guide
cagcuaauagauuguaugaugg

SEQ ID NO: 31736 - RNA, 22 nt, Artificial Sequence
  LRRK2 RNA guide
cauacaaucuauuagcugcuga

SEQ ID NO: 31737 - RNA, 22 nt, Artificial Sequence
  LRRK2 RNA guide
caucauacaaucuauuagcugc

SEQ ID NO: 31738 - RNA, 22 nt, Artificial Sequence
  LRRK2 RNA guide
ccaucauacaaucuauuagcug

SEQ ID NO: 31739 - RNA, 22 nt, Artificial Sequence
  LRRK2 RNA guide
cgaauucagcagcuaauagauu

SEQ ID NO: 31740 - RNA, 22 nt, Artificial Sequence
  LRRK2 RNA guide
cuauuagcugcugaauucgcaa

SEQ ID NO: 31741 - RNA, 22 nt, Artificial Sequence
  LRRK2 RNA guide
cucuuuccaucauacaaucuau

SEQ ID NO: 31742 - RNA, 22 nt, Artificial Sequence
  LRRK2 RNA guide
cuugcgaauucagcagcuaaua

SEQ ID NO: 31743 - RNA, 22 nt, Artificial Sequence
  LRRK2 RNA guide
gaauucagcagcuaauagauug

SEQ ID NO: 31744 - RNA, 22 nt, Artificial Sequence
  LRRK2 RNA guide
gcagcuaauagauuguaugaug

SEQ ID NO: 31745 - RNA, 22 nt, Artificial Sequence
  LRRK2 RNA guide
gcgaauucagcagcuaauagau

SEQ ID NO: 31746 - RNA, 22 nt, Artificial Sequence
  LRRK2 RNA guide
gcuaauagauuguaugauggaa

SEQ ID NO: 31747 - RNA, 22 nt, Artificial Sequence
  LRRK2 RNA guide
gcuugcgaauucagcagcuaau

SEQ ID NO: 31748 - RNA, 22 nt, Artificial Sequence
  LRRK2 RNA guide
uacaaucuauuagcugcugaau

SEQ ID NO: 31749 - RNA, 22 nt, Artificial Sequence
  LRRK2 RNA guide
uauuagcugcugaauucgcaag

SEQ ID NO: 31750 - RNA, 22 nt, Artificial Sequence
  LRRK2 RNA guide
ucagcagcuaauagauuguaug

SEQ ID NO: 31751 - RNA, 22 nt, Artificial Sequence
  LRRK2 RNA guide
ucauacaaucuauuagcugcug

SEQ ID NO: 31752 - RNA, 22 nt, Artificial Sequence
  LRRK2 RNA guide
uccaucauacaaucuauuagcu

SEQ ID NO: 31753 - RNA, 22 nt, Artificial Sequence
  LRRK2 RNA guide
ucuauuagcugcugaauucgca

SEQ ID NO: 31754 - RNA, 22 nt, Artificial Sequence
  LRRK2 RNA guide
ugcgaauucagcagcuaauaga

SEQ ID NO: 31755 - RNA, 22 nt, Artificial Sequence
  LRRK2 RNA guide
uucagcagcuaauagauuguau

SEQ ID NO: 31756 - RNA, 22 nt, Artificial Sequence
  LRRK2 RNA guide
uuccaucauacaaucuauuagc

SEQ ID NO: 31757 - RNA, 22 nt, Artificial Sequence
  LRRK2 RNA guide
uugcgaauucagcagcuaauag

SEQ ID NO: 31758 - RNA, 20 nt, Artificial Sequence
  LRRK2 RNA guide
aaacucaucucuguaccuac

SEQ ID NO: 31759 - RNA, 20 nt, Artificial Sequence
  LRRK2 RNA guide
aacucaucucuguaccuaca

SEQ ID NO: 31760 - RNA, 20 nt, Artificial Sequence
  LRRK2 RNA guide
accuacaaagcugacucaag

SEQ ID NO: 31761 - RNA, 20 nt, Artificial Sequence
  LRRK2 RNA guide
acucaucucuguaccuacaa

SEQ ID NO: 31762 - RNA, 20 nt, Artificial Sequence
  LRRK2 RNA guide
agcuuuguagguacagagau

SEQ ID NO: 31763 - RNA, 20 nt, Artificial Sequence
  LRRK2 RNA guide
aggaugccaaacucaucucu

SEQ ID NO: 31764 - RNA, 20 nt, Artificial Sequence
  LRRK2 RNA guide
agguacagagaugaguuugg

SEQ ID NO: 31765 - RNA, 20 nt, Artificial Sequence
  LRRK2 RNA guide
agucagcuuuguagguacag

SEQ ID NO: 31766 - RNA, 20 nt, Artificial Sequence
  LRRK2 RNA guide
aucucuguaccuacaaagcu

SEQ ID NO: 31767 - RNA, 20 nt, Artificial Sequence
  LRRK2 RNA guide
augccaaacucaucucugua

SEQ ID NO: 31768 - RNA, 20 nt, Artificial Sequence
  LRRK2 RNA guide
caaacucaucucuguaccua

SEQ ID NO: 31769 - RNA, 20 nt, Artificial Sequence
  LRRK2 RNA guide
cagcuuuguagguacagaga

SEQ ID NO: 31770 - RNA, 20 nt, Artificial Sequence
  LRRK2 RNA guide
caucucuguaccuacaaagc

SEQ ID NO: 31771 - RNA, 20 nt, Artificial Sequence
  LRRK2 RNA guide
ccaaacucaucucuguaccu

SEQ ID NO: 31772 - RNA, 20 nt, Artificial Sequence
  LRRK2 RNA guide
ccuugagucagcuuuguagg

SEQ ID NO: 31773 - RNA, 20 nt, Artificial Sequence
  LRRK2 RNA guide
cucaucucuguaccuacaaa

SEQ ID NO: 31774 - RNA, 20 nt, Artificial Sequence
  LRRK2 RNA guide
cucuguaccuacaaagcuga

SEQ ID NO: 31775 - RNA, 20 nt, Artificial Sequence
  LRRK2 RNA guide
cuguaccuacaaagcugacu

SEQ ID NO: 31776 - RNA, 20 nt, Artificial Sequence
  LRRK2 RNA guide
cuugagucagcuuuguaggu

SEQ ID NO: 31777 - RNA, 20 nt, Artificial Sequence
  LRRK2 RNA guide
cuuuguagguacagagauga

SEQ ID NO: 31778 - RNA, 20 nt, Artificial Sequence
  LRRK2 RNA guide
gagucagcuuuguagguaca

SEQ ID NO: 31779 - RNA, 20 nt, Artificial Sequence
  LRRK2 RNA guide
gaugccaaacucaucucugu

SEQ ID NO: 31780 - RNA, 20 nt, Artificial Sequence
  LRRK2 RNA guide
gccaaacucaucucuguacc

SEQ ID NO: 31781 - RNA, 20 nt, Artificial Sequence
  LRRK2 RNA guide
gcuuuguagguacagagaug

SEQ ID NO: 31782 - RNA, 20 nt, Artificial Sequence
  LRRK2 RNA guide
ggaugccaaacucaucucug

SEQ ID NO: 31783 - RNA, 20 nt, Artificial Sequence
  LRRK2 RNA guide
gguacagagaugaguuuggc

SEQ ID NO: 31784 - RNA, 20 nt, Artificial Sequence
  LRRK2 RNA guide
guaccuacaaagcugacuca

SEQ ID NO: 31785 - RNA, 20 nt, Artificial Sequence
  LRRK2 RNA guide
guagguacagagaugaguuu

SEQ ID NO: 31786 - RNA, 20 nt, Artificial Sequence
  LRRK2 RNA guide
gucagcuuuguagguacaga

SEQ ID NO: 31787 - RNA, 20 nt, Artificial Sequence
  LRRK2 RNA guide
uaccuacaaagcugacucaa

SEQ ID NO: 31788 - RNA, 20 nt, Artificial Sequence
  LRRK2 RNA guide
uaggaugccaaacucaucuc

SEQ ID NO: 31789 - RNA, 20 nt, Artificial Sequence
  LRRK2 RNA guide
uagguacagagaugaguuug

SEQ ID NO: 31790 - RNA, 20 nt, Artificial Sequence
  LRRK2 RNA guide
ucagcuuuguagguacagag

SEQ ID NO: 31791 - RNA, 20 nt, Artificial Sequence
  LRRK2 RNA guide
ucaucucuguaccuacaaag

SEQ ID NO: 31792 - RNA, 20 nt, Artificial Sequence
  LRRK2 RNA guide
uccuugagucagcuuuguag

SEQ ID NO: 31793 - RNA, 20 nt, Artificial Sequence
  LRRK2 RNA guide
ucucuguaccuacaaagcug

SEQ ID NO: 31794 - RNA, 20 nt, Artificial Sequence
  LRRK2 RNA guide
ucuguaccuacaaagcugac

SEQ ID NO: 31795 - RNA, 20 nt, Artificial Sequence
  LRRK2 RNA guide
ugagucagcuuuguagguac

SEQ ID NO: 31796 - RNA, 20 nt, Artificial Sequence
  LRRK2 RNA guide
uguaccuacaaagcugacuc

SEQ ID NO: 31797 - RNA, 20 nt, Artificial Sequence
  LRRK2 RNA guide
uguagguacagagaugaguu

SEQ ID NO: 31798 - RNA, 20 nt, Artificial Sequence
  LRRK2 RNA guide
uuccuugagucagcuuugua

SEQ ID NO: 31799 - RNA, 20 nt, Artificial Sequence
  LRRK2 RNA guide
uugagucagcuuuguaggua

SEQ ID NO: 31800 - RNA, 20 nt, Artificial Sequence
  LRRK2 RNA guide
uuguagguacagagaugagu

SEQ ID NO: 31801 - RNA, 20 nt, Artificial Sequence
  LRRK2 RNA guide
uuuccuugagucagcuuugu

SEQ ID NO: 31802 - RNA, 20 nt, Artificial Sequence
  LRRK2 RNA guide
uuuguagguacagagaugag

SEQ ID NO: 31803 - RNA, 20 nt, Artificial Sequence
  LRRK2 RNA guide
uuuuccuugagucagcuuug

SEQ ID NO: 31804 - RNA, 20 nt, Artificial Sequence
  LRRK2 RNA guide
uuuuuccuugagucagcuuu

SEQ ID NO: 31805 - RNA, 21 nt, Artificial Sequence
  LRRK2 RNA guide
aaacucaucucuguaccuaca

SEQ ID NO: 31806 - RNA, 21 nt, Artificial Sequence
  LRRK2 RNA guide
aacucaucucuguaccuacaa

SEQ ID NO: 31807 - RNA, 21 nt, Artificial Sequence
  LRRK2 RNA guide
accuacaaagcugacucaagg

SEQ ID NO: 31808 - RNA, 21 nt, Artificial Sequence
  LRRK2 RNA guide
acucaucucuguaccuacaaa

SEQ ID NO: 31809 - RNA, 21 nt, Artificial Sequence
  LRRK2 RNA guide
agcuuuguagguacagagaug

SEQ ID NO: 31810 - RNA, 21 nt, Artificial Sequence
  LRRK2 RNA guide
aggaugccaaacucaucucug

SEQ ID NO: 31811 - RNA, 21 nt, Artificial Sequence
  LRRK2 RNA guide
agguacagagaugaguuuggc

SEQ ID NO: 31812 - RNA, 21 nt, Artificial Sequence
  LRRK2 RNA guide
agucagcuuuguagguacaga

SEQ ID NO: 31813 - RNA, 21 nt, Artificial Sequence
  LRRK2 RNA guide
auaggaugccaaacucaucuc

SEQ ID NO: 31814 - RNA, 21 nt, Artificial Sequence
  LRRK2 RNA guide
aucucuguaccuacaaagcug

SEQ ID NO: 31815 - RNA, 21 nt, Artificial Sequence
  LRRK2 RNA guide
augccaaacucaucucuguac

SEQ ID NO: 31816 - RNA, 21 nt, Artificial Sequence
  LRRK2 RNA guide
caaacucaucucuguaccuac

SEQ ID NO: 31817 - RNA, 21 nt, Artificial Sequence
  LRRK2 RNA guide
cagcuuuguagguacagagau

SEQ ID NO: 31818 - RNA, 21 nt, Artificial Sequence
  LRRK2 RNA guide
caucucuguaccuacaaagcu

SEQ ID NO: 31819 - RNA, 21 nt, Artificial Sequence
  LRRK2 RNA guide
ccaaacucaucucuguaccua

SEQ ID NO: 31820 - RNA, 21 nt, Artificial Sequence
  LRRK2 RNA guide
ccuugagucagcuuuguaggu

SEQ ID NO: 31821 - RNA, 21 nt, Artificial Sequence
  LRRK2 RNA guide
cucaucucuguaccuacaaag

SEQ ID NO: 31822 - RNA, 21 nt, Artificial Sequence
  LRRK2 RNA guide
cucuguaccuacaaagcugac

SEQ ID NO: 31823 - RNA, 21 nt, Artificial Sequence
  LRRK2 RNA guide
cuguaccuacaaagcugacuc

SEQ ID NO: 31824 - RNA, 21 nt, Artificial Sequence
  LRRK2 RNA guide
cuugagucagcuuuguaggua

SEQ ID NO: 31825 - RNA, 21 nt, Artificial Sequence
  LRRK2 RNA guide
cuuuguagguacagagaugag

SEQ ID NO: 31826 - RNA, 21 nt, Artificial Sequence
  LRRK2 RNA guide
gagucagcuuuguagguacag

SEQ ID NO: 31827 - RNA, 21 nt, Artificial Sequence
  LRRK2 RNA guide
gaugccaaacucaucucugua

SEQ ID NO: 31828 - RNA, 21 nt, Artificial Sequence
  LRRK2 RNA guide
gccaaacucaucucuguaccu

SEQ ID NO: 31829 - RNA, 21 nt, Artificial Sequence
  LRRK2 RNA guide
gcuuuguagguacagagauga

SEQ ID NO: 31830 - RNA, 21 nt, Artificial Sequence
  LRRK2 RNA guide
ggaugccaaacucaucucugu

SEQ ID NO: 31831 - RNA, 21 nt, Artificial Sequence
  LRRK2 RNA guide
gguacagagaugaguuuggca

SEQ ID NO: 31832 - RNA, 21 nt, Artificial Sequence
  LRRK2 RNA guide
guaccuacaaagcugacucaa

SEQ ID NO: 31833 - RNA, 21 nt, Artificial Sequence
  LRRK2 RNA guide
guagguacagagaugaguuug

SEQ ID NO: 31834 - RNA, 21 nt, Artificial Sequence
  LRRK2 RNA guide
gucagcuuuguagguacagag

SEQ ID NO: 31835 - RNA, 21 nt, Artificial Sequence
  LRRK2 RNA guide
uaccuacaaagcugacucaag

SEQ ID NO: 31836 - RNA, 21 nt, Artificial Sequence
  LRRK2 RNA guide
uaggaugccaaacucaucucu

SEQ ID NO: 31837 - RNA, 21 nt, Artificial Sequence
  LRRK2 RNA guide
uagguacagagaugaguuugg

SEQ ID NO: 31838 - RNA, 21 nt, Artificial Sequence
  LRRK2 RNA guide
ucagcuuuguagguacagaga

SEQ ID NO: 31839 - RNA, 21 nt, Artificial Sequence
  LRRK2 RNA guide
ucaucucuguaccuacaaagc

SEQ ID NO: 31840 - RNA, 21 nt, Artificial Sequence
  LRRK2 RNA guide
uccuugagucagcuuuguagg

SEQ ID NO: 31841 - RNA, 21 nt, Artificial Sequence
  LRRK2 RNA guide
ucucuguaccuacaaagcuga

SEQ ID NO: 31842 - RNA, 21 nt, Artificial Sequence
  LRRK2 RNA guide
ucuguaccuacaaagcugacu

SEQ ID NO: 31843 - RNA, 21 nt, Artificial Sequence
  LRRK2 RNA guide
ugagucagcuuuguagguaca

SEQ ID NO: 31844 - RNA, 21 nt, Artificial Sequence
  LRRK2 RNA guide
ugccaaacucaucucuguacc

SEQ ID NO: 31845 - RNA, 21 nt, Artificial Sequence
  LRRK2 RNA guide
uguaccuacaaagcugacuca

SEQ ID NO: 31846 - RNA, 21 nt, Artificial Sequence
  LRRK2 RNA guide
uguagguacagagaugaguuu

SEQ ID NO: 31847 - RNA, 21 nt, Artificial Sequence
  LRRK2 RNA guide
uuccuugagucagcuuuguag

SEQ ID NO: 31848 - RNA, 21 nt, Artificial Sequence
  LRRK2 RNA guide
uugagucagcuuuguagguac

SEQ ID NO: 31849 - RNA, 21 nt, Artificial Sequence
  LRRK2 RNA guide
uuguagguacagagaugaguu

SEQ ID NO: 31850 - RNA, 21 nt, Artificial Sequence
  LRRK2 RNA guide
uuuccuugagucagcuuugua

SEQ ID NO: 31851 - RNA, 21 nt, Artificial Sequence
  LRRK2 RNA guide
uuuguagguacagagaugagu

SEQ ID NO: 31852 - RNA, 21 nt, Artificial Sequence
  LRRK2 RNA guide
uuuuccuugagucagcuuugu

SEQ ID NO: 31853 - RNA, 21 nt, Artificial Sequence
  LRRK2 RNA guide
uuuuuccuugagucagcuuug

SEQ ID NO: 31854 - RNA, 21 nt, Artificial Sequence
  LRRK2 RNA guide
uuuuuuccuugagucagcuuu

SEQ ID NO: 31855 - RNA, 22 nt, Artificial Sequence
  LRRK2 RNA guide
aaacucaucucuguaccuacaa

SEQ ID NO: 31856 - RNA, 22 nt, Artificial Sequence
  LRRK2 RNA guide
aacucaucucuguaccuacaaa

SEQ ID NO: 31857 - RNA, 22 nt, Artificial Sequence
  LRRK2 RNA guide
accuacaaagcugacucaagga

SEQ ID NO: 31858 - RNA, 22 nt, Artificial Sequence
  LRRK2 RNA guide
acucaucucuguaccuacaaag

SEQ ID NO: 31859 - RNA, 22 nt, Artificial Sequence
  LRRK2 RNA guide
agcuuuguagguacagagauga

SEQ ID NO: 31860 - RNA, 22 nt, Artificial Sequence
  LRRK2 RNA guide
aggaugccaaacucaucucugu

SEQ ID NO: 31861 - RNA, 22 nt, Artificial Sequence
  LRRK2 RNA guide
agguacagagaugaguuuggca

SEQ ID NO: 31862 - RNA, 22 nt, Artificial Sequence
  LRRK2 RNA guide
agucagcuuuguagguacagag

SEQ ID NO: 31863 - RNA, 22 nt, Artificial Sequence
  LRRK2 RNA guide
auaggaugccaaacucaucucu

SEQ ID NO: 31864 - RNA, 22 nt, Artificial Sequence
  LRRK2 RNA guide
aucucuguaccuacaaagcuga

SEQ ID NO: 31865 - RNA, 22 nt, Artificial Sequence
  LRRK2 RNA guide
augccaaacucaucucuguacc

SEQ ID NO: 31866 - RNA, 22 nt, Artificial Sequence
  LRRK2 RNA guide
caaacucaucucuguaccuaca

SEQ ID NO: 31867 - RNA, 22 nt, Artificial Sequence
  LRRK2 RNA guide
cagcuuuguagguacagagaug

SEQ ID NO: 31868 - RNA, 22 nt, Artificial Sequence
  LRRK2 RNA guide
cauaggaugccaaacucaucuc

SEQ ID NO: 31869 - RNA, 22 nt, Artificial Sequence
  LRRK2 RNA guide
caucucuguaccuacaaagcug

SEQ ID NO: 31870 - RNA, 22 nt, Artificial Sequence
  LRRK2 RNA guide
ccaaacucaucucuguaccuac

SEQ ID NO: 31871 - RNA, 22 nt, Artificial Sequence
  LRRK2 RNA guide
ccuugagucagcuuuguaggua

SEQ ID NO: 31872 - RNA, 22 nt, Artificial Sequence
  LRRK2 RNA guide
cucaucucuguaccuacaaagc

SEQ ID NO: 31873 - RNA, 22 nt, Artificial Sequence
  LRRK2 RNA guide
cucuguaccuacaaagcugacu

SEQ ID NO: 31874 - RNA, 22 nt, Artificial Sequence
  LRRK2 RNA guide
cuguaccuacaaagcugacuca

SEQ ID NO: 31875 - RNA, 22 nt, Artificial Sequence
  LRRK2 RNA guide
cuugagucagcuuuguagguac

SEQ ID NO: 31876 - RNA, 22 nt, Artificial Sequence
  LRRK2 RNA guide
cuuuguagguacagagaugagu

SEQ ID NO: 31877 - RNA, 22 nt, Artificial Sequence
  LRRK2 RNA guide
gagucagcuuuguagguacaga

SEQ ID NO: 31878 - RNA, 22 nt, Artificial Sequence
  LRRK2 RNA guide
gaugccaaacucaucucuguac

SEQ ID NO: 31879 - RNA, 22 nt, Artificial Sequence
  LRRK2 RNA guide
gccaaacucaucucuguaccua

SEQ ID NO: 31880 - RNA, 22 nt, Artificial Sequence
  LRRK2 RNA guide
gcuuuguagguacagagaugag

SEQ ID NO: 31881 - RNA, 22 nt, Artificial Sequence
  LRRK2 RNA guide
ggaugccaaacucaucucugua

SEQ ID NO: 31882 - RNA, 22 nt, Artificial Sequence
  LRRK2 RNA guide
gguacagagaugaguuuggcau

SEQ ID NO: 31883 - RNA, 22 nt, Artificial Sequence
  LRRK2 RNA guide
guaccuacaaagcugacucaag

SEQ ID NO: 31884 - RNA, 22 nt, Artificial Sequence
  LRRK2 RNA guide
guagguacagagaugaguuugg

SEQ ID NO: 31885 - RNA, 22 nt, Artificial Sequence
  LRRK2 RNA guide
gucagcuuuguagguacagaga

SEQ ID NO: 31886 - RNA, 22 nt, Artificial Sequence
  LRRK2 RNA guide
guuuuuuccuugagucagcuuu

SEQ ID NO: 31887 - RNA, 22 nt, Artificial Sequence
  LRRK2 RNA guide
uaccuacaaagcugacucaagg

SEQ ID NO: 31888 - RNA, 22 nt, Artificial Sequence
  LRRK2 RNA guide
uaggaugccaaacucaucucug

SEQ ID NO: 31889 - RNA, 22 nt, Artificial Sequence
  LRRK2 RNA guide
uagguacagagaugaguuuggc

SEQ ID NO: 31890 - RNA, 22 nt, Artificial Sequence
  LRRK2 RNA guide
ucagcuuuguagguacagagau

SEQ ID NO: 31891 - RNA, 22 nt, Artificial Sequence
  LRRK2 RNA guide
ucaucucuguaccuacaaagcu

SEQ ID NO: 31892 - RNA, 22 nt, Artificial Sequence
  LRRK2 RNA guide
uccuugagucagcuuuguaggu

SEQ ID NO: 31893 - RNA, 22 nt, Artificial Sequence
  LRRK2 RNA guide
ucucuguaccuacaaagcugac

SEQ ID NO: 31894 - RNA, 22 nt, Artificial Sequence
  LRRK2 RNA guide
ucuguaccuacaaagcugacuc

SEQ ID NO: 31895 - RNA, 22 nt, Artificial Sequence
  LRRK2 RNA guide
ugagucagcuuuguagguacag

SEQ ID NO: 31896 - RNA, 22 nt, Artificial Sequence
  LRRK2 RNA guide
ugccaaacucaucucuguaccu

SEQ ID NO: 31897 - RNA, 22 nt, Artificial Sequence
  LRRK2 RNA guide
uguaccuacaaagcugacucaa

SEQ ID NO: 31898 - RNA, 22 nt, Artificial Sequence
  LRRK2 RNA guide
uguagguacagagaugaguuug

SEQ ID NO: 31899 - RNA, 22 nt, Artificial Sequence
  LRRK2 RNA guide
uuccuugagucagcuuuguagg

SEQ ID NO: 31900 - RNA, 22 nt, Artificial Sequence
  LRRK2 RNA guide
uugagucagcuuuguagguaca

SEQ ID NO: 31901 - RNA, 22 nt, Artificial Sequence
  LRRK2 RNA guide
uuguagguacagagaugaguuu

SEQ ID NO: 31902 - RNA, 22 nt, Artificial Sequence
  LRRK2 RNA guide
uuuccuugagucagcuuuguag

SEQ ID NO: 31903 - RNA, 22 nt, Artificial Sequence
  LRRK2 RNA guide
uuuguagguacagagaugaguu

SEQ ID NO: 31904 - RNA, 22 nt, Artificial Sequence
  LRRK2 RNA guide
uuuuccuugagucagcuuugua

SEQ ID NO: 31905 - RNA, 22 nt, Artificial Sequence
  LRRK2 RNA guide
uuuuuccuugagucagcuuugu

SEQ ID NO: 31906 - RNA, 22 nt, Artificial Sequence
  LRRK2 RNA guide
uuuuuuccuugagucagcuuug

SEQ ID NO: 31907 - RNA, 20 nt, Artificial Sequence
  LRRK2 RNA guide
aaacucaucucuguaucuac

SEQ ID NO: 31908 - RNA, 20 nt, Artificial Sequence
  LRRK2 RNA guide
aacucaucucuguaucuaca

SEQ ID NO: 31909 - RNA, 20 nt, Artificial Sequence
  LRRK2 RNA guide
acucaucucuguaucuacaa

SEQ ID NO: 31910 - RNA, 20 nt, Artificial Sequence
  LRRK2 RNA guide
agauacagagaugaguuugg

SEQ ID NO: 31911 - RNA, 20 nt, Artificial Sequence
  LRRK2 RNA guide
agcuuuguagauacagagau

SEQ ID NO: 31912 - RNA, 20 nt, Artificial Sequence
  LRRK2 RNA guide
agucagcuuuguagauacag

SEQ ID NO: 31913 - RNA, 20 nt, Artificial Sequence
  LRRK2 RNA guide
aucuacaaagcugacucaag

SEQ ID NO: 31914 - RNA, 20 nt, Artificial Sequence
  LRRK2 RNA guide
aucucuguaucuacaaagcu

SEQ ID NO: 31915 - RNA, 20 nt, Artificial Sequence
  LRRK2 RNA guide
caaacucaucucuguaucua

SEQ ID NO: 31916 - RNA, 20 nt, Artificial Sequence
  LRRK2 RNA guide
cagcuuuguagauacagaga

SEQ ID NO: 31917 - RNA, 20 nt, Artificial Sequence
  LRRK2 RNA guide
caucucuguaucuacaaagc

SEQ ID NO: 31918 - RNA, 20 nt, Artificial Sequence
  LRRK2 RNA guide
ccaaacucaucucuguaucu

SEQ ID NO: 31919 - RNA, 20 nt, Artificial Sequence
  LRRK2 RNA guide
ccuugagucagcuuuguaga

SEQ ID NO: 31920 - RNA, 20 nt, Artificial Sequence
  LRRK2 RNA guide
cucaucucuguaucuacaaa

SEQ ID NO: 31921 - RNA, 20 nt, Artificial Sequence
  LRRK2 RNA guide
cucuguaucuacaaagcuga

SEQ ID NO: 31922 - RNA, 20 nt, Artificial Sequence
  LRRK2 RNA guide
cuguaucuacaaagcugacu

SEQ ID NO: 31923 - RNA, 20 nt, Artificial Sequence
  LRRK2 RNA guide
cuugagucagcuuuguagau

SEQ ID NO: 31924 - RNA, 20 nt, Artificial Sequence
  LRRK2 RNA guide
cuuuguagauacagagauga

SEQ ID NO: 31925 - RNA, 20 nt, Artificial Sequence
  LRRK2 RNA guide
gagucagcuuuguagauaca

SEQ ID NO: 31926 - RNA, 20 nt, Artificial Sequence
  LRRK2 RNA guide
gauacagagaugaguuuggc

SEQ ID NO: 31927 - RNA, 20 nt, Artificial Sequence
  LRRK2 RNA guide
gccaaacucaucucuguauc

SEQ ID NO: 31928 - RNA, 20 nt, Artificial Sequence
  LRRK2 RNA guide
gcuuuguagauacagagaug

SEQ ID NO: 31929 - RNA, 20 nt, Artificial Sequence
  LRRK2 RNA guide
guagauacagagaugaguuu

SEQ ID NO: 31930 - RNA, 20 nt, Artificial Sequence
  LRRK2 RNA guide
guaucuacaaagcugacuca

SEQ ID NO: 31931 - RNA, 20 nt, Artificial Sequence
  LRRK2 RNA guide
gucagcuuuguagauacaga

SEQ ID NO: 31932 - RNA, 20 nt, Artificial Sequence
  LRRK2 RNA guide
uagauacagagaugaguuug

SEQ ID NO: 31933 - RNA, 20 nt, Artificial Sequence
  LRRK2 RNA guide
uaucuacaaagcugacucaa

SEQ ID NO: 31934 - RNA, 20 nt, Artificial Sequence
  LRRK2 RNA guide
ucagcuuuguagauacagag

SEQ ID NO: 31935 - RNA, 20 nt, Artificial Sequence
  LRRK2 RNA guide
ucaucucuguaucuacaaag

SEQ ID NO: 31936 - RNA, 20 nt, Artificial Sequence
  LRRK2 RNA guide
ucucuguaucuacaaagcug

SEQ ID NO: 31937 - RNA, 20 nt, Artificial Sequence
  LRRK2 RNA guide
ucuguaucuacaaagcugac

SEQ ID NO: 31938 - RNA, 20 nt, Artificial Sequence
  LRRK2 RNA guide
ugagucagcuuuguagauac

SEQ ID NO: 31939 - RNA, 20 nt, Artificial Sequence
  LRRK2 RNA guide
ugccaaacucaucucuguau

SEQ ID NO: 31940 - RNA, 20 nt, Artificial Sequence
  LRRK2 RNA guide
uguagauacagagaugaguu

SEQ ID NO: 31941 - RNA, 20 nt, Artificial Sequence
  LRRK2 RNA guide
uguaucuacaaagcugacuc

SEQ ID NO: 31942 - RNA, 20 nt, Artificial Sequence
  LRRK2 RNA guide
uugagucagcuuuguagaua

SEQ ID NO: 31943 - RNA, 20 nt, Artificial Sequence
  LRRK2 RNA guide
uuguagauacagagaugagu

SEQ ID NO: 31944 - RNA, 20 nt, Artificial Sequence
  LRRK2 RNA guide
uuuguagauacagagaugag

SEQ ID NO: 31945 - RNA, 21 nt, Artificial Sequence
  LRRK2 RNA guide
aaacucaucucuguaucuaca

SEQ ID NO: 31946 - RNA, 21 nt, Artificial Sequence
  LRRK2 RNA guide
aacucaucucuguaucuacaa

SEQ ID NO: 31947 - RNA, 21 nt, Artificial Sequence
  LRRK2 RNA guide
acucaucucuguaucuacaaa

SEQ ID NO: 31948 - RNA, 21 nt, Artificial Sequence
  LRRK2 RNA guide
agauacagagaugaguuuggc

SEQ ID NO: 31949 - RNA, 21 nt, Artificial Sequence
  LRRK2 RNA guide
agcuuuguagauacagagaug

SEQ ID NO: 31950 - RNA, 21 nt, Artificial Sequence
  LRRK2 RNA guide
agucagcuuuguagauacaga

SEQ ID NO: 31951 - RNA, 21 nt, Artificial Sequence
  LRRK2 RNA guide
aucuacaaagcugacucaagg

SEQ ID NO: 31952 - RNA, 21 nt, Artificial Sequence
  LRRK2 RNA guide
aucucuguaucuacaaagcug

SEQ ID NO: 31953 - RNA, 21 nt, Artificial Sequence
  LRRK2 RNA guide
augccaaacucaucucuguau

SEQ ID NO: 31954 - RNA, 21 nt, Artificial Sequence
  LRRK2 RNA guide
caaacucaucucuguaucuac

SEQ ID NO: 31955 - RNA, 21 nt, Artificial Sequence
  LRRK2 RNA guide
cagcuuuguagauacagagau

SEQ ID NO: 31956 - RNA, 21 nt, Artificial Sequence
  LRRK2 RNA guide
caucucuguaucuacaaagcu

SEQ ID NO: 31957 - RNA, 21 nt, Artificial Sequence
  LRRK2 RNA guide
ccaaacucaucucuguaucua

SEQ ID NO: 31958 - RNA, 21 nt, Artificial Sequence
  LRRK2 RNA guide
ccuugagucagcuuuguagau

SEQ ID NO: 31959 - RNA, 21 nt, Artificial Sequence
  LRRK2 RNA guide
cucaucucuguaucuacaaag

SEQ ID NO: 31960 - RNA, 21 nt, Artificial Sequence
  LRRK2 RNA guide
cucuguaucuacaaagcugac

SEQ ID NO: 31961 - RNA, 21 nt, Artificial Sequence
  LRRK2 RNA guide
cuguaucuacaaagcugacuc

SEQ ID NO: 31962 - RNA, 21 nt, Artificial Sequence
  LRRK2 RNA guide
cuugagucagcuuuguagaua

SEQ ID NO: 31963 - RNA, 21 nt, Artificial Sequence
  LRRK2 RNA guide
cuuuguagauacagagaugag

SEQ ID NO: 31964 - RNA, 21 nt, Artificial Sequence
  LRRK2 RNA guide
gagucagcuuuguagauacag

SEQ ID NO: 31965 - RNA, 21 nt, Artificial Sequence
  LRRK2 RNA guide
gauacagagaugaguuuggca

SEQ ID NO: 31966 - RNA, 21 nt, Artificial Sequence
  LRRK2 RNA guide
gccaaacucaucucuguaucu

SEQ ID NO: 31967 - RNA, 21 nt, Artificial Sequence
  LRRK2 RNA guide
gcuuuguagauacagagauga

SEQ ID NO: 31968 - RNA, 21 nt, Artificial Sequence
  LRRK2 RNA guide
guagauacagagaugaguuug

SEQ ID NO: 31969 - RNA, 21 nt, Artificial Sequence
  LRRK2 RNA guide
guaucuacaaagcugacucaa

SEQ ID NO: 31970 - RNA, 21 nt, Artificial Sequence
  LRRK2 RNA guide
gucagcuuuguagauacagag

SEQ ID NO: 31971 - RNA, 21 nt, Artificial Sequence
  LRRK2 RNA guide
uagauacagagaugaguuugg

SEQ ID NO: 31972 - RNA, 21 nt, Artificial Sequence
  LRRK2 RNA guide
uaucuacaaagcugacucaag

SEQ ID NO: 31973 - RNA, 21 nt, Artificial Sequence
  LRRK2 RNA guide
ucagcuuuguagauacagaga

SEQ ID NO: 31974 - RNA, 21 nt, Artificial Sequence
  LRRK2 RNA guide
ucaucucuguaucuacaaagc

SEQ ID NO: 31975 - RNA, 21 nt, Artificial Sequence
  LRRK2 RNA guide
uccuugagucagcuuuguaga

SEQ ID NO: 31976 - RNA, 21 nt, Artificial Sequence
  LRRK2 RNA guide
ucucuguaucuacaaagcuga

SEQ ID NO: 31977 - RNA, 21 nt, Artificial Sequence
  LRRK2 RNA guide
ucuguaucuacaaagcugacu

SEQ ID NO: 31978 - RNA, 21 nt, Artificial Sequence
  LRRK2 RNA guide
ugagucagcuuuguagauaca

SEQ ID NO: 31979 - RNA, 21 nt, Artificial Sequence
  LRRK2 RNA guide
ugccaaacucaucucuguauc

SEQ ID NO: 31980 - RNA, 21 nt, Artificial Sequence
  LRRK2 RNA guide
uguagauacagagaugaguuu

SEQ ID NO: 31981 - RNA, 21 nt, Artificial Sequence
  LRRK2 RNA guide
uguaucuacaaagcugacuca

SEQ ID NO: 31982 - RNA, 21 nt, Artificial Sequence
  LRRK2 RNA guide
uugagucagcuuuguagauac

SEQ ID NO: 31983 - RNA, 21 nt, Artificial Sequence
  LRRK2 RNA guide
uuguagauacagagaugaguu

SEQ ID NO: 31984 - RNA, 21 nt, Artificial Sequence
  LRRK2 RNA guide
uuuguagauacagagaugagu

SEQ ID NO: 31985 - RNA, 22 nt, Artificial Sequence
  LRRK2 RNA guide
aaacucaucucuguaucuacaa

SEQ ID NO: 31986 - RNA, 22 nt, Artificial Sequence
  LRRK2 RNA guide
aacucaucucuguaucuacaaa

SEQ ID NO: 31987 - RNA, 22 nt, Artificial Sequence
  LRRK2 RNA guide
acucaucucuguaucuacaaag

SEQ ID NO: 31988 - RNA, 22 nt, Artificial Sequence
  LRRK2 RNA guide
agauacagagaugaguuuggca

SEQ ID NO: 31989 - RNA, 22 nt, Artificial Sequence
  LRRK2 RNA guide
agcuuuguagauacagagauga

SEQ ID NO: 31990 - RNA, 22 nt, Artificial Sequence
  LRRK2 RNA guide
agucagcuuuguagauacagag

SEQ ID NO: 31991 - RNA, 22 nt, Artificial Sequence
  LRRK2 RNA guide
aucuacaaagcugacucaagga

SEQ ID NO: 31992 - RNA, 22 nt, Artificial Sequence
  LRRK2 RNA guide
aucucuguaucuacaaagcuga

SEQ ID NO: 31993 - RNA, 22 nt, Artificial Sequence
  LRRK2 RNA guide
augccaaacucaucucuguauc

SEQ ID NO: 31994 - RNA, 22 nt, Artificial Sequence
  LRRK2 RNA guide
caaacucaucucuguaucuaca

SEQ ID NO: 31995 - RNA, 22 nt, Artificial Sequence
  LRRK2 RNA guide
cagcuuuguagauacagagaug

SEQ ID NO: 31996 - RNA, 22 nt, Artificial Sequence
  LRRK2 RNA guide
caucucuguaucuacaaagcug

SEQ ID NO: 31997 - RNA, 22 nt, Artificial Sequence
  LRRK2 RNA guide
ccaaacucaucucuguaucuac

SEQ ID NO: 31998 - RNA, 22 nt, Artificial Sequence
  LRRK2 RNA guide
ccuugagucagcuuuguagaua

SEQ ID NO: 31999 - RNA, 22 nt, Artificial Sequence
  LRRK2 RNA guide
cucaucucuguaucuacaaagc

SEQ ID NO: 32000 - RNA, 22 nt, Artificial Sequence
  LRRK2 RNA guide
cucuguaucuacaaagcugacu

SEQ ID NO: 32001 - RNA, 22 nt, Artificial Sequence
  LRRK2 RNA guide
cuguaucuacaaagcugacuca

SEQ ID NO: 32002 - RNA, 22 nt, Artificial Sequence
  LRRK2 RNA guide
cuugagucagcuuuguagauac

SEQ ID NO: 32003 - RNA, 22 nt, Artificial Sequence
  LRRK2 RNA guide
cuuuguagauacagagaugagu

SEQ ID NO: 32004 - RNA, 22 nt, Artificial Sequence
  LRRK2 RNA guide
gagucagcuuuguagauacaga

SEQ ID NO: 32005 - RNA, 22 nt, Artificial Sequence
  LRRK2 RNA guide
gauacagagaugaguuuggcau

SEQ ID NO: 32006 - RNA, 22 nt, Artificial Sequence
  LRRK2 RNA guide
gaugccaaacucaucucuguau

SEQ ID NO: 32007 - RNA, 22 nt, Artificial Sequence
  LRRK2 RNA guide
gccaaacucaucucuguaucua

SEQ ID NO: 32008 - RNA, 22 nt, Artificial Sequence
  LRRK2 RNA guide
gcuuuguagauacagagaugag

SEQ ID NO: 32009 - RNA, 22 nt, Artificial Sequence
  LRRK2 RNA guide
guagauacagagaugaguuugg

SEQ ID NO: 32010 - RNA, 22 nt, Artificial Sequence
  LRRK2 RNA guide
guaucuacaaagcugacucaag

SEQ ID NO: 32011 - RNA, 22 nt, Artificial Sequence
  LRRK2 RNA guide
gucagcuuuguagauacagaga

SEQ ID NO: 32012 - RNA, 22 nt, Artificial Sequence
  LRRK2 RNA guide
uagauacagagaugaguuuggc

SEQ ID NO: 32013 - RNA, 22 nt, Artificial Sequence
  LRRK2 RNA guide
uaucuacaaagcugacucaagg

SEQ ID NO: 32014 - RNA, 22 nt, Artificial Sequence
  LRRK2 RNA guide
ucagcuuuguagauacagagau

SEQ ID NO: 32015 - RNA, 22 nt, Artificial Sequence
  LRRK2 RNA guide
ucaucucuguaucuacaaagcu

SEQ ID NO: 32016 - RNA, 22 nt, Artificial Sequence
  LRRK2 RNA guide
uccuugagucagcuuuguagau

SEQ ID NO: 32017 - RNA, 22 nt, Artificial Sequence
  LRRK2 RNA guide
ucucuguaucuacaaagcugac

SEQ ID NO: 32018 - RNA, 22 nt, Artificial Sequence
  LRRK2 RNA guide
ucuguaucuacaaagcugacuc

SEQ ID NO: 32019 - RNA, 22 nt, Artificial Sequence
  LRRK2 RNA guide
ugagucagcuuuguagauacag

SEQ ID NO: 32020 - RNA, 22 nt, Artificial Sequence
  LRRK2 RNA guide
ugccaaacucaucucuguaucu

SEQ ID NO: 32021 - RNA, 22 nt, Artificial Sequence
  LRRK2 RNA guide
uguagauacagagaugaguuug

SEQ ID NO: 32022 - RNA, 22 nt, Artificial Sequence
  LRRK2 RNA guide
uguaucuacaaagcugacucaa

SEQ ID NO: 32023 - RNA, 22 nt, Artificial Sequence
  LRRK2 RNA guide
uuccuugagucagcuuuguaga

SEQ ID NO: 32024 - RNA, 22 nt, Artificial Sequence
  LRRK2 RNA guide
uugagucagcuuuguagauaca

SEQ ID NO: 32025 - RNA, 22 nt, Artificial Sequence
  LRRK2 RNA guide
uuguagauacagagaugaguuu

SEQ ID NO: 32026 - RNA, 22 nt, Artificial Sequence
  LRRK2 RNA guide
uuuguagauacagagaugaguu

SEQ ID NO: 32027 - RNA, 20 nt, Artificial Sequence
  LRRK2 RNA guide
aaaaaagucacauaggaugc

SEQ ID NO: 32028 - RNA, 20 nt, Artificial Sequence
  LRRK2 RNA guide
aaaaagucacauaggaugcc

SEQ ID NO: 32029 - RNA, 20 nt, Artificial Sequence
  LRRK2 RNA guide
aaaagucacauaggaugcca

SEQ ID NO: 32030 - RNA, 20 nt, Artificial Sequence
  LRRK2 RNA guide
aaagucacauaggaugccaa

SEQ ID NO: 32031 - RNA, 20 nt, Artificial Sequence
  LRRK2 RNA guide
aagucacauaggaugccaaa

SEQ ID NO: 32032 - RNA, 20 nt, Artificial Sequence
  LRRK2 RNA guide
agagaugaguuuggcauccu

SEQ ID NO: 32033 - RNA, 20 nt, Artificial Sequence
  LRRK2 RNA guide
agaugaguuuggcauccuau

SEQ ID NO: 32034 - RNA, 20 nt, Artificial Sequence
  LRRK2 RNA guide
agucacauaggaugccaaac

SEQ ID NO: 32035 - RNA, 20 nt, Artificial Sequence
  LRRK2 RNA guide
aguuuggcauccuaugugac

SEQ ID NO: 32036 - RNA, 20 nt, Artificial Sequence
  LRRK2 RNA guide
augaguuuggcauccuaugu

SEQ ID NO: 32037 - RNA, 20 nt, Artificial Sequence
  LRRK2 RNA guide
gagaugaguuuggcauccua

SEQ ID NO: 32038 - RNA, 20 nt, Artificial Sequence
  LRRK2 RNA guide
gaguuuggcauccuauguga

SEQ ID NO: 32039 - RNA, 20 nt, Artificial Sequence
  LRRK2 RNA guide
gaugaguuuggcauccuaug

SEQ ID NO: 32040 - RNA, 20 nt, Artificial Sequence
  LRRK2 RNA guide
gcauccuaugugacuuuuuu

SEQ ID NO: 32041 - RNA, 20 nt, Artificial Sequence
  LRRK2 RNA guide
ggcauccuaugugacuuuuu

SEQ ID NO: 32042 - RNA, 20 nt, Artificial Sequence
  LRRK2 RNA guide
gucacauaggaugccaaacu

SEQ ID NO: 32043 - RNA, 20 nt, Artificial Sequence
  LRRK2 RNA guide
guuuggcauccuaugugacu

SEQ ID NO: 32044 - RNA, 20 nt, Artificial Sequence
  LRRK2 RNA guide
ucacauaggaugccaaacuc

SEQ ID NO: 32045 - RNA, 20 nt, Artificial Sequence
  LRRK2 RNA guide
ugaguuuggcauccuaugug

SEQ ID NO: 32046 - RNA, 20 nt, Artificial Sequence
  LRRK2 RNA guide
uggcauccuaugugacuuuu

SEQ ID NO: 32047 - RNA, 20 nt, Artificial Sequence
  LRRK2 RNA guide
uuggcauccuaugugacuuu

SEQ ID NO: 32048 - RNA, 20 nt, Artificial Sequence
  LRRK2 RNA guide
uuuggcauccuaugugacuu

SEQ ID NO: 32049 - RNA, 21 nt, Artificial Sequence
  LRRK2 RNA guide
aaaaaagucacauaggaugcc

SEQ ID NO: 32050 - RNA, 21 nt, Artificial Sequence
  LRRK2 RNA guide
aaaaagucacauaggaugcca

SEQ ID NO: 32051 - RNA, 21 nt, Artificial Sequence
  LRRK2 RNA guide
aaaagucacauaggaugccaa

SEQ ID NO: 32052 - RNA, 21 nt, Artificial Sequence
  LRRK2 RNA guide
aaagucacauaggaugccaaa

SEQ ID NO: 32053 - RNA, 21 nt, Artificial Sequence
  LRRK2 RNA guide
aagucacauaggaugccaaac

SEQ ID NO: 32054 - RNA, 21 nt, Artificial Sequence
  LRRK2 RNA guide
agagaugaguuuggcauccua

SEQ ID NO: 32055 - RNA, 21 nt, Artificial Sequence
  LRRK2 RNA guide
agaugaguuuggcauccuaug

SEQ ID NO: 32056 - RNA, 21 nt, Artificial Sequence
  LRRK2 RNA guide
agucacauaggaugccaaacu

SEQ ID NO: 32057 - RNA, 21 nt, Artificial Sequence
  LRRK2 RNA guide
aguuuggcauccuaugugacu

SEQ ID NO: 32058 - RNA, 21 nt, Artificial Sequence
  LRRK2 RNA guide
augaguuuggcauccuaugug

SEQ ID NO: 32059 - RNA, 21 nt, Artificial Sequence
  LRRK2 RNA guide
cagagaugaguuuggcauccu

SEQ ID NO: 32060 - RNA, 21 nt, Artificial Sequence
  LRRK2 RNA guide
gagaugaguuuggcauccuau

SEQ ID NO: 32061 - RNA, 21 nt, Artificial Sequence
  LRRK2 RNA guide
gaguuuggcauccuaugugac

SEQ ID NO: 32062 - RNA, 21 nt, Artificial Sequence
  LRRK2 RNA guide
gaugaguuuggcauccuaugu

SEQ ID NO: 32063 - RNA, 21 nt, Artificial Sequence
  LRRK2 RNA guide
ggcauccuaugugacuuuuuu

SEQ ID NO: 32064 - RNA, 21 nt, Artificial Sequence
  LRRK2 RNA guide
gucacauaggaugccaaacuc

SEQ ID NO: 32065 - RNA, 21 nt, Artificial Sequence
  LRRK2 RNA guide
guuuggcauccuaugugacuu

SEQ ID NO: 32066 - RNA, 21 nt, Artificial Sequence
  LRRK2 RNA guide
ucacauaggaugccaaacuca

SEQ ID NO: 32067 - RNA, 21 nt, Artificial Sequence
  LRRK2 RNA guide
ugaguuuggcauccuauguga

SEQ ID NO: 32068 - RNA, 21 nt, Artificial Sequence
  LRRK2 RNA guide
uggcauccuaugugacuuuuu

SEQ ID NO: 32069 - RNA, 21 nt, Artificial Sequence
  LRRK2 RNA guide
uuggcauccuaugugacuuuu

SEQ ID NO: 32070 - RNA, 21 nt, Artificial Sequence
  LRRK2 RNA guide
uuuggcauccuaugugacuuu

SEQ ID NO: 32071 - RNA, 22 nt, Artificial Sequence
  LRRK2 RNA guide
aaaaaagucacauaggaugcca

SEQ ID NO: 32072 - RNA, 22 nt, Artificial Sequence
  LRRK2 RNA guide
aaaaagucacauaggaugccaa

SEQ ID NO: 32073 - RNA, 22 nt, Artificial Sequence
  LRRK2 RNA guide
aaaagucacauaggaugccaaa

SEQ ID NO: 32074 - RNA, 22 nt, Artificial Sequence
  LRRK2 RNA guide
aaagucacauaggaugccaaac

SEQ ID NO: 32075 - RNA, 22 nt, Artificial Sequence
  LRRK2 RNA guide
aagucacauaggaugccaaacu

SEQ ID NO: 32076 - RNA, 22 nt, Artificial Sequence
  LRRK2 RNA guide
acagagaugaguuuggcauccu

SEQ ID NO: 32077 - RNA, 22 nt, Artificial Sequence
  LRRK2 RNA guide
agagaugaguuuggcauccuau

SEQ ID NO: 32078 - RNA, 22 nt, Artificial Sequence
  LRRK2 RNA guide
agaugaguuuggcauccuaugu

SEQ ID NO: 32079 - RNA, 22 nt, Artificial Sequence
  LRRK2 RNA guide
agucacauaggaugccaaacuc

SEQ ID NO: 32080 - RNA, 22 nt, Artificial Sequence
  LRRK2 RNA guide
aguuuggcauccuaugugacuu

SEQ ID NO: 32081 - RNA, 22 nt, Artificial Sequence
  LRRK2 RNA guide
augaguuuggcauccuauguga

SEQ ID NO: 32082 - RNA, 22 nt, Artificial Sequence
  LRRK2 RNA guide
cagagaugaguuuggcauccua

SEQ ID NO: 32083 - RNA, 22 nt, Artificial Sequence
  LRRK2 RNA guide
gagaugaguuuggcauccuaug

SEQ ID NO: 32084 - RNA, 22 nt, Artificial Sequence
  LRRK2 RNA guide
gaguuuggcauccuaugugacu

SEQ ID NO: 32085 - RNA, 22 nt, Artificial Sequence
  LRRK2 RNA guide
gaugaguuuggcauccuaugug

SEQ ID NO: 32086 - RNA, 22 nt, Artificial Sequence
  LRRK2 RNA guide
gucacauaggaugccaaacuca

SEQ ID NO: 32087 - RNA, 22 nt, Artificial Sequence
  LRRK2 RNA guide
guuuggcauccuaugugacuuu

SEQ ID NO: 32088 - RNA, 22 nt, Artificial Sequence
  LRRK2 RNA guide
ucacauaggaugccaaacucau

SEQ ID NO: 32089 - RNA, 22 nt, Artificial Sequence
  LRRK2 RNA guide
ugaguuuggcauccuaugugac

SEQ ID NO: 32090 - RNA, 22 nt, Artificial Sequence
  LRRK2 RNA guide
uggcauccuaugugacuuuuuu

SEQ ID NO: 32091 - RNA, 22 nt, Artificial Sequence
  LRRK2 RNA guide
uuggcauccuaugugacuuuuu

SEQ ID NO: 32092 - RNA, 22 nt, Artificial Sequence
  LRRK2 RNA guide
uuuggcauccuaugugacuuuu

SEQ ID NO: 32093 - RNA, 20 nt, Artificial Sequence
  LRRK2 RNA guide
aaaaaaguuacauaggaugc

SEQ ID NO: 32094 - RNA, 20 nt, Artificial Sequence
  LRRK2 RNA guide
aaaaaguuacauaggaugcc

SEQ ID NO: 32095 - RNA, 20 nt, Artificial Sequence
  LRRK2 RNA guide
aaaaguuacauaggaugcca

SEQ ID NO: 32096 - RNA, 20 nt, Artificial Sequence
  LRRK2 RNA guide
aaaguuacauaggaugccaa

SEQ ID NO: 32097 - RNA, 20 nt, Artificial Sequence
  LRRK2 RNA guide
aaguuacauaggaugccaaa

SEQ ID NO: 32098 - RNA, 20 nt, Artificial Sequence
  LRRK2 RNA guide
aguuacauaggaugccaaac

SEQ ID NO: 32099 - RNA, 20 nt, Artificial Sequence
  LRRK2 RNA guide
aguuuggcauccuauguaac

SEQ ID NO: 32100 - RNA, 20 nt, Artificial Sequence
  LRRK2 RNA guide
gaguuuggcauccuauguaa

SEQ ID NO: 32101 - RNA, 20 nt, Artificial Sequence
  LRRK2 RNA guide
gcauccuauguaacuuuuuu

SEQ ID NO: 32102 - RNA, 20 nt, Artificial Sequence
  LRRK2 RNA guide
ggcauccuauguaacuuuuu

SEQ ID NO: 32103 - RNA, 20 nt, Artificial Sequence
  LRRK2 RNA guide
guuacauaggaugccaaacu

SEQ ID NO: 32104 - RNA, 20 nt, Artificial Sequence
  LRRK2 RNA guide
guuuggcauccuauguaacu

SEQ ID NO: 32105 - RNA, 20 nt, Artificial Sequence
  LRRK2 RNA guide
ugaguuuggcauccuaugua

SEQ ID NO: 32106 - RNA, 20 nt, Artificial Sequence
  LRRK2 RNA guide
uggcauccuauguaacuuuu

SEQ ID NO: 32107 - RNA, 20 nt, Artificial Sequence
  LRRK2 RNA guide
uuacauaggaugccaaacuc

SEQ ID NO: 32108 - RNA, 20 nt, Artificial Sequence
  LRRK2 RNA guide
uuggcauccuauguaacuuu

SEQ ID NO: 32109 - RNA, 20 nt, Artificial Sequence
  LRRK2 RNA guide
uuuggcauccuauguaacuu

SEQ ID NO: 32110 - RNA, 21 nt, Artificial Sequence
  LRRK2 RNA guide
aaaaaaguuacauaggaugcc

SEQ ID NO: 32111 - RNA, 21 nt, Artificial Sequence
  LRRK2 RNA guide
aaaaaguuacauaggaugcca

SEQ ID NO: 32112 - RNA, 21 nt, Artificial Sequence
  LRRK2 RNA guide
aaaaguuacauaggaugccaa

SEQ ID NO: 32113 - RNA, 21 nt, Artificial Sequence
  LRRK2 RNA guide
aaaguuacauaggaugccaaa

SEQ ID NO: 32114 - RNA, 21 nt, Artificial Sequence
  LRRK2 RNA guide
aaguuacauaggaugccaaac

SEQ ID NO: 32115 - RNA, 21 nt, Artificial Sequence
  LRRK2 RNA guide
aguuacauaggaugccaaacu

SEQ ID NO: 32116 - RNA, 21 nt, Artificial Sequence
  LRRK2 RNA guide
aguuuggcauccuauguaacu

SEQ ID NO: 32117 - RNA, 21 nt, Artificial Sequence
  LRRK2 RNA guide
augaguuuggcauccuaugua

SEQ ID NO: 32118 - RNA, 21 nt, Artificial Sequence
  LRRK2 RNA guide
gaguuuggcauccuauguaac

SEQ ID NO: 32119 - RNA, 21 nt, Artificial Sequence
  LRRK2 RNA guide
ggcauccuauguaacuuuuuu

SEQ ID NO: 32120 - RNA, 21 nt, Artificial Sequence
  LRRK2 RNA guide
guuacauaggaugccaaacuc

SEQ ID NO: 32121 - RNA, 21 nt, Artificial Sequence
  LRRK2 RNA guide
guuuggcauccuauguaacuu

SEQ ID NO: 32122 - RNA, 21 nt, Artificial Sequence
  LRRK2 RNA guide
ugaguuuggcauccuauguaa

SEQ ID NO: 32123 - RNA, 21 nt, Artificial Sequence
  LRRK2 RNA guide
uggcauccuauguaacuuuuu

SEQ ID NO: 32124 - RNA, 21 nt, Artificial Sequence
  LRRK2 RNA guide
uuacauaggaugccaaacuca

SEQ ID NO: 32125 - RNA, 21 nt, Artificial Sequence
  LRRK2 RNA guide
uuggcauccuauguaacuuuu

SEQ ID NO: 32126 - RNA, 21 nt, Artificial Sequence
  LRRK2 RNA guide
uuuggcauccuauguaacuuu

SEQ ID NO: 32127 - RNA, 22 nt, Artificial Sequence
  LRRK2 RNA guide
aaaaaaguuacauaggaugcca

SEQ ID NO: 32128 - RNA, 22 nt, Artificial Sequence
  LRRK2 RNA guide
aaaaaguuacauaggaugccaa

SEQ ID NO: 32129 - RNA, 22 nt, Artificial Sequence
  LRRK2 RNA guide
aaaaguuacauaggaugccaaa

SEQ ID NO: 32130 - RNA, 22 nt, Artificial Sequence
  LRRK2 RNA guide
aaaguuacauaggaugccaaac

SEQ ID NO: 32131 - RNA, 22 nt, Artificial Sequence
  LRRK2 RNA guide
aaguuacauaggaugccaaacu

SEQ ID NO: 32132 - RNA, 22 nt, Artificial Sequence
  LRRK2 RNA guide
aguuacauaggaugccaaacuc

SEQ ID NO: 32133 - RNA, 22 nt, Artificial Sequence
  LRRK2 RNA guide
aguuuggcauccuauguaacuu

SEQ ID NO: 32134 - RNA, 22 nt, Artificial Sequence
  LRRK2 RNA guide
augaguuuggcauccuauguaa

SEQ ID NO: 32135 - RNA, 22 nt, Artificial Sequence
  LRRK2 RNA guide
gaguuuggcauccuauguaacu

SEQ ID NO: 32136 - RNA, 22 nt, Artificial Sequence
  LRRK2 RNA guide
gaugaguuuggcauccuaugua

SEQ ID NO: 32137 - RNA, 22 nt, Artificial Sequence
  LRRK2 RNA guide
guuacauaggaugccaaacuca

SEQ ID NO: 32138 - RNA, 22 nt, Artificial Sequence
  LRRK2 RNA guide
guuuggcauccuauguaacuuu

SEQ ID NO: 32139 - RNA, 22 nt, Artificial Sequence
  LRRK2 RNA guide
ugaguuuggcauccuauguaac

SEQ ID NO: 32140 - RNA, 22 nt, Artificial Sequence
  LRRK2 RNA guide
uggcauccuauguaacuuuuuu

SEQ ID NO: 32141 - RNA, 22 nt, Artificial Sequence
  LRRK2 RNA guide
uuacauaggaugccaaacucau

SEQ ID NO: 32142 - RNA, 22 nt, Artificial Sequence
  LRRK2 RNA guide
uuggcauccuauguaacuuuuu

SEQ ID NO: 32143 - RNA, 22 nt, Artificial Sequence
  LRRK2 RNA guide
uuuggcauccuauguaacuuuu

SEQ ID NO: 32144 - RNA, 20 nt, Artificial Sequence
  LRRK2 RNA guide
aagagguagagcuuaagcca

SEQ ID NO: 32145 - RNA, 20 nt, Artificial Sequence
  LRRK2 RNA guide
aagccagauuguauaagaac

SEQ ID NO: 32146 - RNA, 20 nt, Artificial Sequence
  LRRK2 RNA guide
aaucuggcuuaagcucuacc

SEQ ID NO: 32147 - RNA, 20 nt, Artificial Sequence
  LRRK2 RNA guide
acaaucuggcuuaagcucua

SEQ ID NO: 32148 - RNA, 20 nt, Artificial Sequence
  LRRK2 RNA guide
accgcucauccguucuuaua

SEQ ID NO: 32149 - RNA, 20 nt, Artificial Sequence
  LRRK2 RNA guide
agagcuuaagccagauugua

SEQ ID NO: 32150 - RNA, 20 nt, Artificial Sequence
  LRRK2 RNA guide
agagguagagcuuaagccag

SEQ ID NO: 32151 - RNA, 20 nt, Artificial Sequence
  LRRK2 RNA guide
agauuguauaagaacggaug

SEQ ID NO: 32152 - RNA, 20 nt, Artificial Sequence
  LRRK2 RNA guide
agccagauuguauaagaacg

SEQ ID NO: 32153 - RNA, 20 nt, Artificial Sequence
  LRRK2 RNA guide
agcuuaagccagauuguaua

SEQ ID NO: 32154 - RNA, 20 nt, Artificial Sequence
  LRRK2 RNA guide
agguagagcuuaagccagau

SEQ ID NO: 32155 - RNA, 20 nt, Artificial Sequence
  LRRK2 RNA guide
auacaaucuggcuuaagcuc

SEQ ID NO: 32156 - RNA, 20 nt, Artificial Sequence
  LRRK2 RNA guide
auccguucuuauacaaucug

SEQ ID NO: 32157 - RNA, 20 nt, Artificial Sequence
  LRRK2 RNA guide
auuguauaagaacggaugag

SEQ ID NO: 32158 - RNA, 20 nt, Artificial Sequence
  LRRK2 RNA guide
caaucuggcuuaagcucuac

SEQ ID NO: 32159 - RNA, 20 nt, Artificial Sequence
  LRRK2 RNA guide
caccgcucauccguucuuau

SEQ ID NO: 32160 - RNA, 20 nt, Artificial Sequence
  LRRK2 RNA guide
cagauuguauaagaacggau

SEQ ID NO: 32161 - RNA, 20 nt, Artificial Sequence
  LRRK2 RNA guide
cauccguucuuauacaaucu

SEQ ID NO: 32162 - RNA, 20 nt, Artificial Sequence
  LRRK2 RNA guide
ccagauuguauaagaacgga

SEQ ID NO: 32163 - RNA, 20 nt, Artificial Sequence
  LRRK2 RNA guide
ccgcucauccguucuuauac

SEQ ID NO: 32164 - RNA, 20 nt, Artificial Sequence
  LRRK2 RNA guide
ccguucuuauacaaucuggc

SEQ ID NO: 32165 - RNA, 20 nt, Artificial Sequence
  LRRK2 RNA guide
cgcucauccguucuuauaca

SEQ ID NO: 32166 - RNA, 20 nt, Artificial Sequence
  LRRK2 RNA guide
cguucuuauacaaucuggcu

SEQ ID NO: 32167 - RNA, 20 nt, Artificial Sequence
  LRRK2 RNA guide
cucauccguucuuauacaau

SEQ ID NO: 32168 - RNA, 20 nt, Artificial Sequence
  LRRK2 RNA guide
cuuaagccagauuguauaag

SEQ ID NO: 32169 - RNA, 20 nt, Artificial Sequence
  LRRK2 RNA guide
cuuauacaaucuggcuuaag

SEQ ID NO: 32170 - RNA, 20 nt, Artificial Sequence
  LRRK2 RNA guide
gaagagguagagcuuaagcc

SEQ ID NO: 32171 - RNA, 20 nt, Artificial Sequence
  LRRK2 RNA guide
gagcuuaagccagauuguau

SEQ ID NO: 32172 - RNA, 20 nt, Artificial Sequence
  LRRK2 RNA guide
gagguagagcuuaagccaga

SEQ ID NO: 32173 - RNA, 20 nt, Artificial Sequence
  LRRK2 RNA guide
gauuguauaagaacggauga

SEQ ID NO: 32174 - RNA, 20 nt, Artificial Sequence
  LRRK2 RNA guide
gccagauuguauaagaacgg

SEQ ID NO: 32175 - RNA, 20 nt, Artificial Sequence
  LRRK2 RNA guide
gcucauccguucuuauacaa

SEQ ID NO: 32176 - RNA, 20 nt, Artificial Sequence
  LRRK2 RNA guide
gcuuaagccagauuguauaa

SEQ ID NO: 32177 - RNA, 20 nt, Artificial Sequence
  LRRK2 RNA guide
gguagagcuuaagccagauu

SEQ ID NO: 32178 - RNA, 20 nt, Artificial Sequence
  LRRK2 RNA guide
guagagcuuaagccagauug

SEQ ID NO: 32179 - RNA, 20 nt, Artificial Sequence
  LRRK2 RNA guide
guucuuauacaaucuggcuu

SEQ ID NO: 32180 - RNA, 20 nt, Artificial Sequence
  LRRK2 RNA guide
uacaaucuggcuuaagcucu

SEQ ID NO: 32181 - RNA, 20 nt, Artificial Sequence
  LRRK2 RNA guide
uagagcuuaagccagauugu

SEQ ID NO: 32182 - RNA, 20 nt, Artificial Sequence
  LRRK2 RNA guide
uauacaaucuggcuuaagcu

SEQ ID NO: 32183 - RNA, 20 nt, Artificial Sequence
  LRRK2 RNA guide
ucaccgcucauccguucuua

SEQ ID NO: 32184 - RNA, 20 nt, Artificial Sequence
  LRRK2 RNA guide
ucauccguucuuauacaauc

SEQ ID NO: 32185 - RNA, 20 nt, Artificial Sequence
  LRRK2 RNA guide
uccguucuuauacaaucugg

SEQ ID NO: 32186 - RNA, 20 nt, Artificial Sequence
  LRRK2 RNA guide
ucuuauacaaucuggcuuaa

SEQ ID NO: 32187 - RNA, 20 nt, Artificial Sequence
  LRRK2 RNA guide
ugaagagguagagcuuaagc

SEQ ID NO: 32188 - RNA, 20 nt, Artificial Sequence
  LRRK2 RNA guide
uuaagccagauuguauaaga

SEQ ID NO: 32189 - RNA, 20 nt, Artificial Sequence
  LRRK2 RNA guide
uuauacaaucuggcuuaagc

SEQ ID NO: 32190 - RNA, 20 nt, Artificial Sequence
  LRRK2 RNA guide
uucuuauacaaucuggcuua

SEQ ID NO: 32191 - RNA, 21 nt, Artificial Sequence
  LRRK2 RNA guide
aagagguagagcuuaagccag

SEQ ID NO: 32192 - RNA, 21 nt, Artificial Sequence
  LRRK2 RNA guide
aagccagauuguauaagaacg

SEQ ID NO: 32193 - RNA, 21 nt, Artificial Sequence
  LRRK2 RNA guide
aaucuggcuuaagcucuaccu

SEQ ID NO: 32194 - RNA, 21 nt, Artificial Sequence
  LRRK2 RNA guide
acaaucuggcuuaagcucuac

SEQ ID NO: 32195 - RNA, 21 nt, Artificial Sequence
  LRRK2 RNA guide
accgcucauccguucuuauac

SEQ ID NO: 32196 - RNA, 21 nt, Artificial Sequence
  LRRK2 RNA guide
agagcuuaagccagauuguau

SEQ ID NO: 32197 - RNA, 21 nt, Artificial Sequence
  LRRK2 RNA guide
agagguagagcuuaagccaga

SEQ ID NO: 32198 - RNA, 21 nt, Artificial Sequence
  LRRK2 RNA guide
agauuguauaagaacggauga

SEQ ID NO: 32199 - RNA, 21 nt, Artificial Sequence
  LRRK2 RNA guide
agccagauuguauaagaacgg

SEQ ID NO: 32200 - RNA, 21 nt, Artificial Sequence
  LRRK2 RNA guide
agcuuaagccagauuguauaa

SEQ ID NO: 32201 - RNA, 21 nt, Artificial Sequence
  LRRK2 RNA guide
agguagagcuuaagccagauu

SEQ ID NO: 32202 - RNA, 21 nt, Artificial Sequence
  LRRK2 RNA guide
auacaaucuggcuuaagcucu

SEQ ID NO: 32203 - RNA, 21 nt, Artificial Sequence
  LRRK2 RNA guide
auccguucuuauacaaucugg

SEQ ID NO: 32204 - RNA, 21 nt, Artificial Sequence
  LRRK2 RNA guide
augaagagguagagcuuaagc

SEQ ID NO: 32205 - RNA, 21 nt, Artificial Sequence
  LRRK2 RNA guide
auuguauaagaacggaugagc

SEQ ID NO: 32206 - RNA, 21 nt, Artificial Sequence
  LRRK2 RNA guide
caaucuggcuuaagcucuacc

SEQ ID NO: 32207 - RNA, 21 nt, Artificial Sequence
  LRRK2 RNA guide
caccgcucauccguucuuaua

SEQ ID NO: 32208 - RNA, 21 nt, Artificial Sequence
  LRRK2 RNA guide
cagauuguauaagaacggaug

SEQ ID NO: 32209 - RNA, 21 nt, Artificial Sequence
  LRRK2 RNA guide
cauccguucuuauacaaucug

SEQ ID NO: 32210 - RNA, 21 nt, Artificial Sequence
  LRRK2 RNA guide
ccagauuguauaagaacggau

SEQ ID NO: 32211 - RNA, 21 nt, Artificial Sequence
  LRRK2 RNA guide
ccgcucauccguucuuauaca

SEQ ID NO: 32212 - RNA, 21 nt, Artificial Sequence
  LRRK2 RNA guide
ccguucuuauacaaucuggcu

SEQ ID NO: 32213 - RNA, 21 nt, Artificial Sequence
  LRRK2 RNA guide
cgcucauccguucuuauacaa

SEQ ID NO: 32214 - RNA, 21 nt, Artificial Sequence
  LRRK2 RNA guide
cguucuuauacaaucuggcuu

SEQ ID NO: 32215 - RNA, 21 nt, Artificial Sequence
  LRRK2 RNA guide
cucaccgcucauccguucuua

SEQ ID NO: 32216 - RNA, 21 nt, Artificial Sequence
  LRRK2 RNA guide
cucauccguucuuauacaauc

SEQ ID NO: 32217 - RNA, 21 nt, Artificial Sequence
  LRRK2 RNA guide
cuuaagccagauuguauaaga

SEQ ID NO: 32218 - RNA, 21 nt, Artificial Sequence
  LRRK2 RNA guide
cuuauacaaucuggcuuaagc

SEQ ID NO: 32219 - RNA, 21 nt, Artificial Sequence
  LRRK2 RNA guide
gaagagguagagcuuaagcca

SEQ ID NO: 32220 - RNA, 21 nt, Artificial Sequence
  LRRK2 RNA guide
gagcuuaagccagauuguaua

SEQ ID NO: 32221 - RNA, 21 nt, Artificial Sequence
  LRRK2 RNA guide
gagguagagcuuaagccagau

SEQ ID NO: 32222 - RNA, 21 nt, Artificial Sequence
  LRRK2 RNA guide
gauuguauaagaacggaugag

SEQ ID NO: 32223 - RNA, 21 nt, Artificial Sequence
  LRRK2 RNA guide
gccagauuguauaagaacgga

SEQ ID NO: 32224 - RNA, 21 nt, Artificial Sequence
  LRRK2 RNA guide
gcucauccguucuuauacaau

SEQ ID NO: 32225 - RNA, 21 nt, Artificial Sequence
  LRRK2 RNA guide
gcuuaagccagauuguauaag

SEQ ID NO: 32226 - RNA, 21 nt, Artificial Sequence
  LRRK2 RNA guide
gguagagcuuaagccagauug

SEQ ID NO: 32227 - RNA, 21 nt, Artificial Sequence
  LRRK2 RNA guide
guagagcuuaagccagauugu

SEQ ID NO: 32228 - RNA, 21 nt, Artificial Sequence
  LRRK2 RNA guide
guucuuauacaaucuggcuua

SEQ ID NO: 32229 - RNA, 21 nt, Artificial Sequence
  LRRK2 RNA guide
uaagccagauuguauaagaac

SEQ ID NO: 32230 - RNA, 21 nt, Artificial Sequence
  LRRK2 RNA guide
uacaaucuggcuuaagcucua

SEQ ID NO: 32231 - RNA, 21 nt, Artificial Sequence
  LRRK2 RNA guide
uagagcuuaagccagauugua

SEQ ID NO: 32232 - RNA, 21 nt, Artificial Sequence
  LRRK2 RNA guide
uauacaaucuggcuuaagcuc

SEQ ID NO: 32233 - RNA, 21 nt, Artificial Sequence
  LRRK2 RNA guide
ucaccgcucauccguucuuau

SEQ ID NO: 32234 - RNA, 21 nt, Artificial Sequence
  LRRK2 RNA guide
ucauccguucuuauacaaucu

SEQ ID NO: 32235 - RNA, 21 nt, Artificial Sequence
  LRRK2 RNA guide
uccguucuuauacaaucuggc

SEQ ID NO: 32236 - RNA, 21 nt, Artificial Sequence
  LRRK2 RNA guide
ucuuauacaaucuggcuuaag

SEQ ID NO: 32237 - RNA, 21 nt, Artificial Sequence
  LRRK2 RNA guide
ugaagagguagagcuuaagcc

SEQ ID NO: 32238 - RNA, 21 nt, Artificial Sequence
  LRRK2 RNA guide
uuauacaaucuggcuuaagcu

SEQ ID NO: 32239 - RNA, 22 nt, Artificial Sequence
  LRRK2 RNA guide
aagagguagagcuuaagccaga

SEQ ID NO: 32240 - RNA, 22 nt, Artificial Sequence
  LRRK2 RNA guide
aagccagauuguauaagaacgg

SEQ ID NO: 32241 - RNA, 22 nt, Artificial Sequence
  LRRK2 RNA guide
aaucuggcuuaagcucuaccuc

SEQ ID NO: 32242 - RNA, 22 nt, Artificial Sequence
  LRRK2 RNA guide
acaaucuggcuuaagcucuacc

SEQ ID NO: 32243 - RNA, 22 nt, Artificial Sequence
  LRRK2 RNA guide
accgcucauccguucuuauaca

SEQ ID NO: 32244 - RNA, 22 nt, Artificial Sequence
  LRRK2 RNA guide
agagcuuaagccagauuguaua

SEQ ID NO: 32245 - RNA, 22 nt, Artificial Sequence
  LRRK2 RNA guide
agagguagagcuuaagccagau

SEQ ID NO: 32246 - RNA, 22 nt, Artificial Sequence
  LRRK2 RNA guide
agauuguauaagaacggaugag

SEQ ID NO: 32247 - RNA, 22 nt, Artificial Sequence
  LRRK2 RNA guide
agccagauuguauaagaacgga

SEQ ID NO: 32248 - RNA, 22 nt, Artificial Sequence
  LRRK2 RNA guide
agcuuaagccagauuguauaag

SEQ ID NO: 32249 - RNA, 22 nt, Artificial Sequence
  LRRK2 RNA guide
agguagagcuuaagccagauug

SEQ ID NO: 32250 - RNA, 22 nt, Artificial Sequence
  LRRK2 RNA guide
auacaaucuggcuuaagcucua

SEQ ID NO: 32251 - RNA, 22 nt, Artificial Sequence
  LRRK2 RNA guide
auccguucuuauacaaucuggc

SEQ ID NO: 32252 - RNA, 22 nt, Artificial Sequence
  LRRK2 RNA guide
augaagagguagagcuuaagcc

SEQ ID NO: 32253 - RNA, 22 nt, Artificial Sequence
  LRRK2 RNA guide
auuguauaagaacggaugagcg

SEQ ID NO: 32254 - RNA, 22 nt, Artificial Sequence
  LRRK2 RNA guide
caaucuggcuuaagcucuaccu

SEQ ID NO: 32255 - RNA, 22 nt, Artificial Sequence
  LRRK2 RNA guide
caccgcucauccguucuuauac

SEQ ID NO: 32256 - RNA, 22 nt, Artificial Sequence
  LRRK2 RNA guide
cagauuguauaagaacggauga

SEQ ID NO: 32257 - RNA, 22 nt, Artificial Sequence
  LRRK2 RNA guide
cauccguucuuauacaaucugg

SEQ ID NO: 32258 - RNA, 22 nt, Artificial Sequence
  LRRK2 RNA guide
ccagauuguauaagaacggaug

SEQ ID NO: 32259 - RNA, 22 nt, Artificial Sequence
  LRRK2 RNA guide
ccgcucauccguucuuauacaa

SEQ ID NO: 32260 - RNA, 22 nt, Artificial Sequence
  LRRK2 RNA guide
ccguucuuauacaaucuggcuu

SEQ ID NO: 32261 - RNA, 22 nt, Artificial Sequence
  LRRK2 RNA guide
ccucaccgcucauccguucuua

SEQ ID NO: 32262 - RNA, 22 nt, Artificial Sequence
  LRRK2 RNA guide
cgcucauccguucuuauacaau

SEQ ID NO: 32263 - RNA, 22 nt, Artificial Sequence
  LRRK2 RNA guide
cguucuuauacaaucuggcuua

SEQ ID NO: 32264 - RNA, 22 nt, Artificial Sequence
  LRRK2 RNA guide
cucaccgcucauccguucuuau

SEQ ID NO: 32265 - RNA, 22 nt, Artificial Sequence
  LRRK2 RNA guide
cucauccguucuuauacaaucu

SEQ ID NO: 32266 - RNA, 22 nt, Artificial Sequence
  LRRK2 RNA guide
cuuaagccagauuguauaagaa

SEQ ID NO: 32267 - RNA, 22 nt, Artificial Sequence
  LRRK2 RNA guide
cuuauacaaucuggcuuaagcu

SEQ ID NO: 32268 - RNA, 22 nt, Artificial Sequence
  LRRK2 RNA guide
gaagagguagagcuuaagccag

SEQ ID NO: 32269 - RNA, 22 nt, Artificial Sequence
  LRRK2 RNA guide
gagcuuaagccagauuguauaa

SEQ ID NO: 32270 - RNA, 22 nt, Artificial Sequence
  LRRK2 RNA guide
gagguagagcuuaagccagauu

SEQ ID NO: 32271 - RNA, 22 nt, Artificial Sequence
  LRRK2 RNA guide
gauuguauaagaacggaugagc

SEQ ID NO: 32272 - RNA, 22 nt, Artificial Sequence
  LRRK2 RNA guide
gccagauuguauaagaacggau

SEQ ID NO: 32273 - RNA, 22 nt, Artificial Sequence
  LRRK2 RNA guide
gcucauccguucuuauacaauc

SEQ ID NO: 32274 - RNA, 22 nt, Artificial Sequence
  LRRK2 RNA guide
gcuuaagccagauuguauaaga

SEQ ID NO: 32275 - RNA, 22 nt, Artificial Sequence
  LRRK2 RNA guide
gguagagcuuaagccagauugu

SEQ ID NO: 32276 - RNA, 22 nt, Artificial Sequence
  LRRK2 RNA guide
guagagcuuaagccagauugua

SEQ ID NO: 32277 - RNA, 22 nt, Artificial Sequence
  LRRK2 RNA guide
guucuuauacaaucuggcuuaa

SEQ ID NO: 32278 - RNA, 22 nt, Artificial Sequence
  LRRK2 RNA guide
uaagccagauuguauaagaacg

SEQ ID NO: 32279 - RNA, 22 nt, Artificial Sequence
  LRRK2 RNA guide
uacaaucuggcuuaagcucuac

SEQ ID NO: 32280 - RNA, 22 nt, Artificial Sequence
  LRRK2 RNA guide
uagagcuuaagccagauuguau

SEQ ID NO: 32281 - RNA, 22 nt, Artificial Sequence
  LRRK2 RNA guide
uauacaaucuggcuuaagcucu

SEQ ID NO: 32282 - RNA, 22 nt, Artificial Sequence
  LRRK2 RNA guide
uaugaagagguagagcuuaagc

SEQ ID NO: 32283 - RNA, 22 nt, Artificial Sequence
  LRRK2 RNA guide
ucaccgcucauccguucuuaua

SEQ ID NO: 32284 - RNA, 22 nt, Artificial Sequence
  LRRK2 RNA guide
ucauccguucuuauacaaucug

SEQ ID NO: 32285 - RNA, 22 nt, Artificial Sequence
  LRRK2 RNA guide
uccguucuuauacaaucuggcu

SEQ ID NO: 32286 - RNA, 22 nt, Artificial Sequence
  LRRK2 RNA guide
ucuuauacaaucuggcuuaagc

SEQ ID NO: 32287 - RNA, 22 nt, Artificial Sequence
  LRRK2 RNA guide
ugaagagguagagcuuaagcca

SEQ ID NO: 32288 - RNA, 22 nt, Artificial Sequence
  LRRK2 RNA guide
uuaagccagauuguauaagaac

SEQ ID NO: 32289 - RNA, 22 nt, Artificial Sequence
  LRRK2 RNA guide
uuauacaaucuggcuuaagcuc

SEQ ID NO: 32290 - RNA, 22 nt, Artificial Sequence
  LRRK2 RNA guide
uucuuauacaaucuggcuuaag

SEQ ID NO: 32291 - RNA, 20 nt, Artificial Sequence
  LRRK2 RNA guide
aagccagacuguauaagaac

SEQ ID NO: 32292 - RNA, 20 nt, Artificial Sequence
  LRRK2 RNA guide
acagucuggcuuaagcucua

SEQ ID NO: 32293 - RNA, 20 nt, Artificial Sequence
  LRRK2 RNA guide
acuguauaagaacggaugag

SEQ ID NO: 32294 - RNA, 20 nt, Artificial Sequence
  LRRK2 RNA guide
agacuguauaagaacggaug

SEQ ID NO: 32295 - RNA, 20 nt, Artificial Sequence
  LRRK2 RNA guide
agagcuuaagccagacugua

SEQ ID NO: 32296 - RNA, 20 nt, Artificial Sequence
  LRRK2 RNA guide
agccagacuguauaagaacg

SEQ ID NO: 32297 - RNA, 20 nt, Artificial Sequence
  LRRK2 RNA guide
agcuuaagccagacuguaua

SEQ ID NO: 32298 - RNA, 20 nt, Artificial Sequence
  LRRK2 RNA guide
agguagagcuuaagccagac

SEQ ID NO: 32299 - RNA, 20 nt, Artificial Sequence
  LRRK2 RNA guide
agucuggcuuaagcucuacc

SEQ ID NO: 32300 - RNA, 20 nt, Artificial Sequence
  LRRK2 RNA guide
auacagucuggcuuaagcuc

SEQ ID NO: 32301 - RNA, 20 nt, Artificial Sequence
  LRRK2 RNA guide
auccguucuuauacagucug

SEQ ID NO: 32302 - RNA, 20 nt, Artificial Sequence
  LRRK2 RNA guide
cagacuguauaagaacggau

SEQ ID NO: 32303 - RNA, 20 nt, Artificial Sequence
  LRRK2 RNA guide
cagucuggcuuaagcucuac

SEQ ID NO: 32304 - RNA, 20 nt, Artificial Sequence
  LRRK2 RNA guide
cauccguucuuauacagucu

SEQ ID NO: 32305 - RNA, 20 nt, Artificial Sequence
  LRRK2 RNA guide
ccagacuguauaagaacgga

SEQ ID NO: 32306 - RNA, 20 nt, Artificial Sequence
  LRRK2 RNA guide
ccguucuuauacagucuggc

SEQ ID NO: 32307 - RNA, 20 nt, Artificial Sequence
  LRRK2 RNA guide
cguucuuauacagucuggcu

SEQ ID NO: 32308 - RNA, 20 nt, Artificial Sequence
  LRRK2 RNA guide
cucauccguucuuauacagu

SEQ ID NO: 32309 - RNA, 20 nt, Artificial Sequence
  LRRK2 RNA guide
cuuaagccagacuguauaag

SEQ ID NO: 32310 - RNA, 20 nt, Artificial Sequence
  LRRK2 RNA guide
cuuauacagucuggcuuaag

SEQ ID NO: 32311 - RNA, 20 nt, Artificial Sequence
  LRRK2 RNA guide
gacuguauaagaacggauga

SEQ ID NO: 32312 - RNA, 20 nt, Artificial Sequence
  LRRK2 RNA guide
gagcuuaagccagacuguau

SEQ ID NO: 32313 - RNA, 20 nt, Artificial Sequence
  LRRK2 RNA guide
gccagacuguauaagaacgg

SEQ ID NO: 32314 - RNA, 20 nt, Artificial Sequence
  LRRK2 RNA guide
gcucauccguucuuauacag

SEQ ID NO: 32315 - RNA, 20 nt, Artificial Sequence
  LRRK2 RNA guide
gcuuaagccagacuguauaa

SEQ ID NO: 32316 - RNA, 20 nt, Artificial Sequence
  LRRK2 RNA guide
gguagagcuuaagccagacu

SEQ ID NO: 32317 - RNA, 20 nt, Artificial Sequence
  LRRK2 RNA guide
guagagcuuaagccagacug

SEQ ID NO: 32318 - RNA, 20 nt, Artificial Sequence
  LRRK2 RNA guide
guucuuauacagucuggcuu

SEQ ID NO: 32319 - RNA, 20 nt, Artificial Sequence
  LRRK2 RNA guide
uaagccagacuguauaagaa

SEQ ID NO: 32320 - RNA, 20 nt, Artificial Sequence
  LRRK2 RNA guide
uacagucuggcuuaagcucu

SEQ ID NO: 32321 - RNA, 20 nt, Artificial Sequence
  LRRK2 RNA guide
uagagcuuaagccagacugu

SEQ ID NO: 32322 - RNA, 20 nt, Artificial Sequence
  LRRK2 RNA guide
uauacagucuggcuuaagcu

SEQ ID NO: 32323 - RNA, 20 nt, Artificial Sequence
  LRRK2 RNA guide
ucauccguucuuauacaguc

SEQ ID NO: 32324 - RNA, 20 nt, Artificial Sequence
  LRRK2 RNA guide
uccguucuuauacagucugg

SEQ ID NO: 32325 - RNA, 20 nt, Artificial Sequence
  LRRK2 RNA guide
ucuuauacagucuggcuuaa

SEQ ID NO: 32326 - RNA, 20 nt, Artificial Sequence
  LRRK2 RNA guide
uuaagccagacuguauaaga

SEQ ID NO: 32327 - RNA, 20 nt, Artificial Sequence
  LRRK2 RNA guide
uuauacagucuggcuuaagc

SEQ ID NO: 32328 - RNA, 20 nt, Artificial Sequence
  LRRK2 RNA guide
uucuuauacagucuggcuua

SEQ ID NO: 32329 - RNA, 21 nt, Artificial Sequence
  LRRK2 RNA guide
aagccagacuguauaagaacg

SEQ ID NO: 32330 - RNA, 21 nt, Artificial Sequence
  LRRK2 RNA guide
acagucuggcuuaagcucuac

SEQ ID NO: 32331 - RNA, 21 nt, Artificial Sequence
  LRRK2 RNA guide
acuguauaagaacggaugagc

SEQ ID NO: 32332 - RNA, 21 nt, Artificial Sequence
  LRRK2 RNA guide
agacuguauaagaacggauga

SEQ ID NO: 32333 - RNA, 21 nt, Artificial Sequence
  LRRK2 RNA guide
agagcuuaagccagacuguau

SEQ ID NO: 32334 - RNA, 21 nt, Artificial Sequence
  LRRK2 RNA guide
agccagacuguauaagaacgg

SEQ ID NO: 32335 - RNA, 21 nt, Artificial Sequence
  LRRK2 RNA guide
agcuuaagccagacuguauaa

SEQ ID NO: 32336 - RNA, 21 nt, Artificial Sequence
  LRRK2 RNA guide
agguagagcuuaagccagacu

SEQ ID NO: 32337 - RNA, 21 nt, Artificial Sequence
  LRRK2 RNA guide
agucuggcuuaagcucuaccu

SEQ ID NO: 32338 - RNA, 21 nt, Artificial Sequence
  LRRK2 RNA guide
auacagucuggcuuaagcucu

SEQ ID NO: 32339 - RNA, 21 nt, Artificial Sequence
  LRRK2 RNA guide
auccguucuuauacagucugg

SEQ ID NO: 32340 - RNA, 21 nt, Artificial Sequence
  LRRK2 RNA guide
cagacuguauaagaacggaug

SEQ ID NO: 32341 - RNA, 21 nt, Artificial Sequence
  LRRK2 RNA guide
cagucuggcuuaagcucuacc

SEQ ID NO: 32342 - RNA, 21 nt, Artificial Sequence
  LRRK2 RNA guide
cauccguucuuauacagucug

SEQ ID NO: 32343 - RNA, 21 nt, Artificial Sequence
  LRRK2 RNA guide
ccagacuguauaagaacggau

SEQ ID NO: 32344 - RNA, 21 nt, Artificial Sequence
  LRRK2 RNA guide
ccguucuuauacagucuggcu

SEQ ID NO: 32345 - RNA, 21 nt, Artificial Sequence
  LRRK2 RNA guide
cgcucauccguucuuauacag

SEQ ID NO: 32346 - RNA, 21 nt, Artificial Sequence
  LRRK2 RNA guide
cguucuuauacagucuggcuu

SEQ ID NO: 32347 - RNA, 21 nt, Artificial Sequence
  LRRK2 RNA guide
cucauccguucuuauacaguc

SEQ ID NO: 32348 - RNA, 21 nt, Artificial Sequence
  LRRK2 RNA guide
cuuaagccagacuguauaaga

SEQ ID NO: 32349 - RNA, 21 nt, Artificial Sequence
  LRRK2 RNA guide
cuuauacagucuggcuuaagc

SEQ ID NO: 32350 - RNA, 21 nt, Artificial Sequence
  LRRK2 RNA guide
gacuguauaagaacggaugag

SEQ ID NO: 32351 - RNA, 21 nt, Artificial Sequence
  LRRK2 RNA guide
gagcuuaagccagacuguaua

SEQ ID NO: 32352 - RNA, 21 nt, Artificial Sequence
  LRRK2 RNA guide
gagguagagcuuaagccagac

SEQ ID NO: 32353 - RNA, 21 nt, Artificial Sequence
  LRRK2 RNA guide
gccagacuguauaagaacgga

SEQ ID NO: 32354 - RNA, 21 nt, Artificial Sequence
  LRRK2 RNA guide
gcucauccguucuuauacagu

SEQ ID NO: 32355 - RNA, 21 nt, Artificial Sequence
  LRRK2 RNA guide
gcuuaagccagacuguauaag

SEQ ID NO: 32356 - RNA, 21 nt, Artificial Sequence
  LRRK2 RNA guide
gguagagcuuaagccagacug

SEQ ID NO: 32357 - RNA, 21 nt, Artificial Sequence
  LRRK2 RNA guide
guagagcuuaagccagacugu

SEQ ID NO: 32358 - RNA, 21 nt, Artificial Sequence
  LRRK2 RNA guide
guucuuauacagucuggcuua

SEQ ID NO: 32359 - RNA, 21 nt, Artificial Sequence
  LRRK2 RNA guide
uaagccagacuguauaagaac

SEQ ID NO: 32360 - RNA, 21 nt, Artificial Sequence
  LRRK2 RNA guide
uacagucuggcuuaagcucua

SEQ ID NO: 32361 - RNA, 21 nt, Artificial Sequence
  LRRK2 RNA guide
uagagcuuaagccagacugua

SEQ ID NO: 32362 - RNA, 21 nt, Artificial Sequence
  LRRK2 RNA guide
uauacagucuggcuuaagcuc

SEQ ID NO: 32363 - RNA, 21 nt, Artificial Sequence
  LRRK2 RNA guide
ucauccguucuuauacagucu

SEQ ID NO: 32364 - RNA, 21 nt, Artificial Sequence
  LRRK2 RNA guide
uccguucuuauacagucuggc

SEQ ID NO: 32365 - RNA, 21 nt, Artificial Sequence
  LRRK2 RNA guide
ucuuauacagucuggcuuaag

SEQ ID NO: 32366 - RNA, 21 nt, Artificial Sequence
  LRRK2 RNA guide
uuaagccagacuguauaagaa

SEQ ID NO: 32367 - RNA, 21 nt, Artificial Sequence
  LRRK2 RNA guide
uuauacagucuggcuuaagcu

SEQ ID NO: 32368 - RNA, 21 nt, Artificial Sequence
  LRRK2 RNA guide
uucuuauacagucuggcuuaa

SEQ ID NO: 32369 - RNA, 22 nt, Artificial Sequence
  LRRK2 RNA guide
aagccagacuguauaagaacgg

SEQ ID NO: 32370 - RNA, 22 nt, Artificial Sequence
  LRRK2 RNA guide
acagucuggcuuaagcucuacc

SEQ ID NO: 32371 - RNA, 22 nt, Artificial Sequence
  LRRK2 RNA guide
acuguauaagaacggaugagcg

SEQ ID NO: 32372 - RNA, 22 nt, Artificial Sequence
  LRRK2 RNA guide
agacuguauaagaacggaugag

SEQ ID NO: 32373 - RNA, 22 nt, Artificial Sequence
  LRRK2 RNA guide
agagcuuaagccagacuguaua

SEQ ID NO: 32374 - RNA, 22 nt, Artificial Sequence
  LRRK2 RNA guide
agagguagagcuuaagccagac

SEQ ID NO: 32375 - RNA, 22 nt, Artificial Sequence
  LRRK2 RNA guide
agccagacuguauaagaacgga

SEQ ID NO: 32376 - RNA, 22 nt, Artificial Sequence
  LRRK2 RNA guide
agcuuaagccagacuguauaag

SEQ ID NO: 32377 - RNA, 22 nt, Artificial Sequence
  LRRK2 RNA guide
agguagagcuuaagccagacug

SEQ ID NO: 32378 - RNA, 22 nt, Artificial Sequence
  LRRK2 RNA guide
agucuggcuuaagcucuaccuc

SEQ ID NO: 32379 - RNA, 22 nt, Artificial Sequence
  LRRK2 RNA guide
auacagucuggcuuaagcucua

SEQ ID NO: 32380 - RNA, 22 nt, Artificial Sequence
  LRRK2 RNA guide
auccguucuuauacagucuggc

SEQ ID NO: 32381 - RNA, 22 nt, Artificial Sequence
  LRRK2 RNA guide
cagacuguauaagaacggauga

SEQ ID NO: 32382 - RNA, 22 nt, Artificial Sequence
  LRRK2 RNA guide
cagucuggcuuaagcucuaccu

SEQ ID NO: 32383 - RNA, 22 nt, Artificial Sequence
  LRRK2 RNA guide
cauccguucuuauacagucugg

SEQ ID NO: 32384 - RNA, 22 nt, Artificial Sequence
  LRRK2 RNA guide
ccagacuguauaagaacggaug

SEQ ID NO: 32385 - RNA, 22 nt, Artificial Sequence
  LRRK2 RNA guide
ccgcucauccguucuuauacag

SEQ ID NO: 32386 - RNA, 22 nt, Artificial Sequence
  LRRK2 RNA guide
ccguucuuauacagucuggcuu

SEQ ID NO: 32387 - RNA, 22 nt, Artificial Sequence
  LRRK2 RNA guide
cgcucauccguucuuauacagu

SEQ ID NO: 32388 - RNA, 22 nt, Artificial Sequence
  LRRK2 RNA guide
cguucuuauacagucuggcuua

SEQ ID NO: 32389 - RNA, 22 nt, Artificial Sequence
  LRRK2 RNA guide
cucauccguucuuauacagucu

SEQ ID NO: 32390 - RNA, 22 nt, Artificial Sequence
  LRRK2 RNA guide
cuuaagccagacuguauaagaa

SEQ ID NO: 32391 - RNA, 22 nt, Artificial Sequence
  LRRK2 RNA guide
cuuauacagucuggcuuaagcu

SEQ ID NO: 32392 - RNA, 22 nt, Artificial Sequence
  LRRK2 RNA guide
gacuguauaagaacggaugagc

SEQ ID NO: 32393 - RNA, 22 nt, Artificial Sequence
  LRRK2 RNA guide
gagcuuaagccagacuguauaa

SEQ ID NO: 32394 - RNA, 22 nt, Artificial Sequence
  LRRK2 RNA guide
gagguagagcuuaagccagacu

SEQ ID NO: 32395 - RNA, 22 nt, Artificial Sequence
  LRRK2 RNA guide
gccagacuguauaagaacggau

SEQ ID NO: 32396 - RNA, 22 nt, Artificial Sequence
  LRRK2 RNA guide
gcucauccguucuuauacaguc

SEQ ID NO: 32397 - RNA, 22 nt, Artificial Sequence
  LRRK2 RNA guide
gcuuaagccagacuguauaaga

SEQ ID NO: 32398 - RNA, 22 nt, Artificial Sequence
  LRRK2 RNA guide
gguagagcuuaagccagacugu

SEQ ID NO: 32399 - RNA, 22 nt, Artificial Sequence
  LRRK2 RNA guide
guagagcuuaagccagacugua

SEQ ID NO: 32400 - RNA, 22 nt, Artificial Sequence
  LRRK2 RNA guide
guucuuauacagucuggcuuaa

SEQ ID NO: 32401 - RNA, 22 nt, Artificial Sequence
  LRRK2 RNA guide
uaagccagacuguauaagaacg

SEQ ID NO: 32402 - RNA, 22 nt, Artificial Sequence
  LRRK2 RNA guide
uacagucuggcuuaagcucuac

SEQ ID NO: 32403 - RNA, 22 nt, Artificial Sequence
  LRRK2 RNA guide
uagagcuuaagccagacuguau

SEQ ID NO: 32404 - RNA, 22 nt, Artificial Sequence
  LRRK2 RNA guide
uauacagucuggcuuaagcucu

SEQ ID NO: 32405 - RNA, 22 nt, Artificial Sequence
  LRRK2 RNA guide
ucauccguucuuauacagucug

SEQ ID NO: 32406 - RNA, 22 nt, Artificial Sequence
  LRRK2 RNA guide
uccguucuuauacagucuggcu

SEQ ID NO: 32407 - RNA, 22 nt, Artificial Sequence
  LRRK2 RNA guide
ucuuauacagucuggcuuaagc

SEQ ID NO: 32408 - RNA, 22 nt, Artificial Sequence
  LRRK2 RNA guide
uuaagccagacuguauaagaac

SEQ ID NO: 32409 - RNA, 22 nt, Artificial Sequence
  LRRK2 RNA guide
uuauacagucuggcuuaagcuc

SEQ ID NO: 32410 - RNA, 22 nt, Artificial Sequence
  LRRK2 RNA guide
uucuuauacagucuggcuuaag

SEQ ID NO: 32411 - RNA, 20 nt, Artificial Sequence
  LRRK2 RNA guide
aaagagaaagugcauauaug

SEQ ID NO: 32412 - RNA, 20 nt, Artificial Sequence
  LRRK2 RNA guide
aagagaaagugcauauaugu

SEQ ID NO: 32413 - RNA, 20 nt, Artificial Sequence
  LRRK2 RNA guide
acauauaugcacuuucucuu

SEQ ID NO: 32414 - RNA, 20 nt, Artificial Sequence
  LRRK2 RNA guide
agagaaagugcauauaugua

SEQ ID NO: 32415 - RNA, 20 nt, Artificial Sequence
  LRRK2 RNA guide
agaggguacauauaugcacu

SEQ ID NO: 32416 - RNA, 20 nt, Artificial Sequence
  LRRK2 RNA guide
aggguacauauaugcacuuu

SEQ ID NO: 32417 - RNA, 20 nt, Artificial Sequence
  LRRK2 RNA guide
cauauaugcacuuucucuuu

SEQ ID NO: 32418 - RNA, 20 nt, Artificial Sequence
  LRRK2 RNA guide
gaggguacauauaugcacuu

SEQ ID NO: 32419 - RNA, 20 nt, Artificial Sequence
  LRRK2 RNA guide
ggguacauauaugcacuuuc

SEQ ID NO: 32420 - RNA, 20 nt, Artificial Sequence
  LRRK2 RNA guide
gguacauauaugcacuuucu

SEQ ID NO: 32421 - RNA, 20 nt, Artificial Sequence
  LRRK2 RNA guide
guacauauaugcacuuucuc

SEQ ID NO: 32422 - RNA, 20 nt, Artificial Sequence
  LRRK2 RNA guide
uacauauaugcacuuucucu

SEQ ID NO: 32423 - RNA, 21 nt, Artificial Sequence
  LRRK2 RNA guide
agagaaagugcauauauguac

SEQ ID NO: 32424 - RNA, 21 nt, Artificial Sequence
  LRRK2 RNA guide
agaggguacauauaugcacuu

SEQ ID NO: 32425 - RNA, 21 nt, Artificial Sequence
  LRRK2 RNA guide
aggguacauauaugcacuuuc

SEQ ID NO: 32426 - RNA, 21 nt, Artificial Sequence
  LRRK2 RNA guide
gaggguacauauaugcacuuu

SEQ ID NO: 32427 - RNA, 21 nt, Artificial Sequence
  LRRK2 RNA guide
ggguacauauaugcacuuucu

SEQ ID NO: 32428 - RNA, 21 nt, Artificial Sequence
  LRRK2 RNA guide
gguacauauaugcacuuucuc

SEQ ID NO: 32429 - RNA, 21 nt, Artificial Sequence
  LRRK2 RNA guide
guacauauaugcacuuucucu

SEQ ID NO: 32430 - RNA, 21 nt, Artificial Sequence
  LRRK2 RNA guide
uagaggguacauauaugcacu

SEQ ID NO: 32431 - RNA, 22 nt, Artificial Sequence
  LRRK2 RNA guide
aagagaaagugcauauauguac

SEQ ID NO: 32432 - RNA, 22 nt, Artificial Sequence
  LRRK2 RNA guide
agagaaagugcauauauguacc

SEQ ID NO: 32433 - RNA, 22 nt, Artificial Sequence
  LRRK2 RNA guide
agaggguacauauaugcacuuu

SEQ ID NO: 32434 - RNA, 22 nt, Artificial Sequence
  LRRK2 RNA guide
aggguacauauaugcacuuucu

SEQ ID NO: 32435 - RNA, 22 nt, Artificial Sequence
  LRRK2 RNA guide
cuagaggguacauauaugcacu

SEQ ID NO: 32436 - RNA, 22 nt, Artificial Sequence
  LRRK2 RNA guide
gaggguacauauaugcacuuuc

SEQ ID NO: 32437 - RNA, 22 nt, Artificial Sequence
  LRRK2 RNA guide
ggguacauauaugcacuuucuc

SEQ ID NO: 32438 - RNA, 22 nt, Artificial Sequence
  LRRK2 RNA guide
gguacauauaugcacuuucucu

SEQ ID NO: 32439 - RNA, 22 nt, Artificial Sequence
  LRRK2 RNA guide
guacauauaugcacuuucucuu

SEQ ID NO: 32440 - RNA, 22 nt, Artificial Sequence
  LRRK2 RNA guide
uagaggguacauauaugcacuu

SEQ ID NO: 32441 - RNA, 20 nt, Artificial Sequence
  LRRK2 RNA guide
aaaaccuacuaagggccagg

SEQ ID NO: 32442 - RNA, 20 nt, Artificial Sequence
  LRRK2 RNA guide
aaaccuacuaagggccaggu

SEQ ID NO: 32443 - RNA, 20 nt, Artificial Sequence
  LRRK2 RNA guide
aaccuacuaagggccaggug

SEQ ID NO: 32444 - RNA, 20 nt, Artificial Sequence
  LRRK2 RNA guide
accuacuaagggccaggugc

SEQ ID NO: 32445 - RNA, 20 nt, Artificial Sequence
  LRRK2 RNA guide
acuaagggccaggugcagag

SEQ ID NO: 32446 - RNA, 20 nt, Artificial Sequence
  LRRK2 RNA guide
agccucugcaccuggcccuu

SEQ ID NO: 32447 - RNA, 20 nt, Artificial Sequence
  LRRK2 RNA guide
ccuacuaagggccaggugca

SEQ ID NO: 32448 - RNA, 20 nt, Artificial Sequence
  LRRK2 RNA guide
ccucugcaccuggcccuuag

SEQ ID NO: 32449 - RNA, 20 nt, Artificial Sequence
  LRRK2 RNA guide
cuaagggccaggugcagagg

SEQ ID NO: 32450 - RNA, 20 nt, Artificial Sequence
  LRRK2 RNA guide
cuacuaagggccaggugcag

SEQ ID NO: 32451 - RNA, 20 nt, Artificial Sequence
  LRRK2 RNA guide
cucugcaccuggcccuuagu

SEQ ID NO: 32452 - RNA, 20 nt, Artificial Sequence
  LRRK2 RNA guide
cugcaccuggcccuuaguag

SEQ ID NO: 32453 - RNA, 20 nt, Artificial Sequence
  LRRK2 RNA guide
cuuaaaaccuacuaagggcc

SEQ ID NO: 32454 - RNA, 20 nt, Artificial Sequence
  LRRK2 RNA guide
gagccucugcaccuggcccu

SEQ ID NO: 32455 - RNA, 20 nt, Artificial Sequence
  LRRK2 RNA guide
gcaccuggcccuuaguaggu

SEQ ID NO: 32456 - RNA, 20 nt, Artificial Sequence
  LRRK2 RNA guide
gccucugcaccuggcccuua

SEQ ID NO: 32457 - RNA, 20 nt, Artificial Sequence
  LRRK2 RNA guide
gugagccucugcaccuggcc

SEQ ID NO: 32458 - RNA, 20 nt, Artificial Sequence
  LRRK2 RNA guide
uaaaaccuacuaagggccag

SEQ ID NO: 32459 - RNA, 20 nt, Artificial Sequence
  LRRK2 RNA guide
uacuaagggccaggugcaga

SEQ ID NO: 32460 - RNA, 20 nt, Artificial Sequence
  LRRK2 RNA guide
ucugcaccuggcccuuagua

SEQ ID NO: 32461 - RNA, 20 nt, Artificial Sequence
  LRRK2 RNA guide
ugagccucugcaccuggccc

SEQ ID NO: 32462 - RNA, 20 nt, Artificial Sequence
  LRRK2 RNA guide
ugcaccuggcccuuaguagg

SEQ ID NO: 32463 - RNA, 20 nt, Artificial Sequence
  LRRK2 RNA guide
uuaaaaccuacuaagggcca

SEQ ID NO: 32464 - RNA, 21 nt, Artificial Sequence
  LRRK2 RNA guide
aaaaccuacuaagggccaggu

SEQ ID NO: 32465 - RNA, 21 nt, Artificial Sequence
  LRRK2 RNA guide
aaaccuacuaagggccaggug

SEQ ID NO: 32466 - RNA, 21 nt, Artificial Sequence
  LRRK2 RNA guide
aaccuacuaagggccaggugc

SEQ ID NO: 32467 - RNA, 21 nt, Artificial Sequence
  LRRK2 RNA guide
accuacuaagggccaggugca

SEQ ID NO: 32468 - RNA, 21 nt, Artificial Sequence
  LRRK2 RNA guide
acuaagggccaggugcagagg

SEQ ID NO: 32469 - RNA, 21 nt, Artificial Sequence
  LRRK2 RNA guide
acuuaaaaccuacuaagggcc

SEQ ID NO: 32470 - RNA, 21 nt, Artificial Sequence
  LRRK2 RNA guide
agccucugcaccuggcccuua

SEQ ID NO: 32471 - RNA, 21 nt, Artificial Sequence
  LRRK2 RNA guide
ccuacuaagggccaggugcag

SEQ ID NO: 32472 - RNA, 21 nt, Artificial Sequence
  LRRK2 RNA guide
ccucugcaccuggcccuuagu

SEQ ID NO: 32473 - RNA, 21 nt, Artificial Sequence
  LRRK2 RNA guide
cgugagccucugcaccuggcc

SEQ ID NO: 32474 - RNA, 21 nt, Artificial Sequence
  LRRK2 RNA guide
cuaagggccaggugcagaggc

SEQ ID NO: 32475 - RNA, 21 nt, Artificial Sequence
  LRRK2 RNA guide
cuacuaagggccaggugcaga

SEQ ID NO: 32476 - RNA, 21 nt, Artificial Sequence
  LRRK2 RNA guide
cucugcaccuggcccuuagua

SEQ ID NO: 32477 - RNA, 21 nt, Artificial Sequence
  LRRK2 RNA guide
cugcaccuggcccuuaguagg

SEQ ID NO: 32478 - RNA, 21 nt, Artificial Sequence
  LRRK2 RNA guide
cuuaaaaccuacuaagggcca

SEQ ID NO: 32479 - RNA, 21 nt, Artificial Sequence
  LRRK2 RNA guide
gagccucugcaccuggcccuu

SEQ ID NO: 32480 - RNA, 21 nt, Artificial Sequence
  LRRK2 RNA guide
gcaccuggcccuuaguagguu

SEQ ID NO: 32481 - RNA, 21 nt, Artificial Sequence
  LRRK2 RNA guide
gccucugcaccuggcccuuag

SEQ ID NO: 32482 - RNA, 21 nt, Artificial Sequence
  LRRK2 RNA guide
gugagccucugcaccuggccc

SEQ ID NO: 32483 - RNA, 21 nt, Artificial Sequence
  LRRK2 RNA guide
uaaaaccuacuaagggccagg

SEQ ID NO: 32484 - RNA, 21 nt, Artificial Sequence
  LRRK2 RNA guide
uacuaagggccaggugcagag

SEQ ID NO: 32485 - RNA, 21 nt, Artificial Sequence
  LRRK2 RNA guide
ucugcaccuggcccuuaguag

SEQ ID NO: 32486 - RNA, 21 nt, Artificial Sequence
  LRRK2 RNA guide
ugagccucugcaccuggcccu

SEQ ID NO: 32487 - RNA, 21 nt, Artificial Sequence
  LRRK2 RNA guide
ugcaccuggcccuuaguaggu

SEQ ID NO: 32488 - RNA, 21 nt, Artificial Sequence
  LRRK2 RNA guide
uuaaaaccuacuaagggccag

SEQ ID NO: 32489 - RNA, 22 nt, Artificial Sequence
  LRRK2 RNA guide
aaaaccuacuaagggccaggug

SEQ ID NO: 32490 - RNA, 22 nt, Artificial Sequence
  LRRK2 RNA guide
aaaccuacuaagggccaggugc

SEQ ID NO: 32491 - RNA, 22 nt, Artificial Sequence
  LRRK2 RNA guide
aaccuacuaagggccaggugca

SEQ ID NO: 32492 - RNA, 22 nt, Artificial Sequence
  LRRK2 RNA guide
accuacuaagggccaggugcag

SEQ ID NO: 32493 - RNA, 22 nt, Artificial Sequence
  LRRK2 RNA guide
acuaagggccaggugcagaggc

SEQ ID NO: 32494 - RNA, 22 nt, Artificial Sequence
  LRRK2 RNA guide
acuuaaaaccuacuaagggcca

SEQ ID NO: 32495 - RNA, 22 nt, Artificial Sequence
  LRRK2 RNA guide
agccucugcaccuggcccuuag

SEQ ID NO: 32496 - RNA, 22 nt, Artificial Sequence
  LRRK2 RNA guide
ccuacuaagggccaggugcaga

SEQ ID NO: 32497 - RNA, 22 nt, Artificial Sequence
  LRRK2 RNA guide
ccucugcaccuggcccuuagua

SEQ ID NO: 32498 - RNA, 22 nt, Artificial Sequence
  LRRK2 RNA guide
cgugagccucugcaccuggccc

SEQ ID NO: 32499 - RNA, 22 nt, Artificial Sequence
  LRRK2 RNA guide
cuaagggccaggugcagaggcu

SEQ ID NO: 32500 - RNA, 22 nt, Artificial Sequence
  LRRK2 RNA guide
cuacuaagggccaggugcagag

SEQ ID NO: 32501 - RNA, 22 nt, Artificial Sequence
  LRRK2 RNA guide
cucugcaccuggcccuuaguag

SEQ ID NO: 32502 - RNA, 22 nt, Artificial Sequence
  LRRK2 RNA guide
cugcaccuggcccuuaguaggu

SEQ ID NO: 32503 - RNA, 22 nt, Artificial Sequence
  LRRK2 RNA guide
cuuaaaaccuacuaagggccag

SEQ ID NO: 32504 - RNA, 22 nt, Artificial Sequence
  LRRK2 RNA guide
gacuuaaaaccuacuaagggcc

SEQ ID NO: 32505 - RNA, 22 nt, Artificial Sequence
  LRRK2 RNA guide
gagccucugcaccuggcccuua

SEQ ID NO: 32506 - RNA, 22 nt, Artificial Sequence
  LRRK2 RNA guide
gcaccuggcccuuaguagguuu

SEQ ID NO: 32507 - RNA, 22 nt, Artificial Sequence
  LRRK2 RNA guide
gccucugcaccuggcccuuagu

SEQ ID NO: 32508 - RNA, 22 nt, Artificial Sequence
  LRRK2 RNA guide
gcgugagccucugcaccuggcc

SEQ ID NO: 32509 - RNA, 22 nt, Artificial Sequence
  LRRK2 RNA guide
gugagccucugcaccuggcccu

SEQ ID NO: 32510 - RNA, 22 nt, Artificial Sequence
  LRRK2 RNA guide
uaaaaccuacuaagggccaggu

SEQ ID NO: 32511 - RNA, 22 nt, Artificial Sequence
  LRRK2 RNA guide
uacuaagggccaggugcagagg

SEQ ID NO: 32512 - RNA, 22 nt, Artificial Sequence
  LRRK2 RNA guide
ucugcaccuggcccuuaguagg

SEQ ID NO: 32513 - RNA, 22 nt, Artificial Sequence
  LRRK2 RNA guide
ugagccucugcaccuggcccuu

SEQ ID NO: 32514 - RNA, 22 nt, Artificial Sequence
  LRRK2 RNA guide
ugcaccuggcccuuaguagguu

SEQ ID NO: 32515 - RNA, 22 nt, Artificial Sequence
  LRRK2 RNA guide
uuaaaaccuacuaagggccagg

SEQ ID NO: 32516 - RNA, 20 nt, Artificial Sequence
  LRRK2 RNA guide
aaccuacuaagggccaggua

SEQ ID NO: 32517 - RNA, 20 nt, Artificial Sequence
  LRRK2 RNA guide
aagggccagguacagaggcu

SEQ ID NO: 32518 - RNA, 20 nt, Artificial Sequence
  LRRK2 RNA guide
accuacuaagggccagguac

SEQ ID NO: 32519 - RNA, 20 nt, Artificial Sequence
  LRRK2 RNA guide
acuaagggccagguacagag

SEQ ID NO: 32520 - RNA, 20 nt, Artificial Sequence
  LRRK2 RNA guide
agccucuguaccuggcccuu

SEQ ID NO: 32521 - RNA, 20 nt, Artificial Sequence
  LRRK2 RNA guide
agggccagguacagaggcuc

SEQ ID NO: 32522 - RNA, 20 nt, Artificial Sequence
  LRRK2 RNA guide
ccuacuaagggccagguaca

SEQ ID NO: 32523 - RNA, 20 nt, Artificial Sequence
  LRRK2 RNA guide
ccucuguaccuggcccuuag

SEQ ID NO: 32524 - RNA, 20 nt, Artificial Sequence
  LRRK2 RNA guide
cgugagccucuguaccuggc

SEQ ID NO: 32525 - RNA, 20 nt, Artificial Sequence
  LRRK2 RNA guide
cuaagggccagguacagagg

SEQ ID NO: 32526 - RNA, 20 nt, Artificial Sequence
  LRRK2 RNA guide
cuacuaagggccagguacag

SEQ ID NO: 32527 - RNA, 20 nt, Artificial Sequence
  LRRK2 RNA guide
cucuguaccuggcccuuagu

SEQ ID NO: 32528 - RNA, 20 nt, Artificial Sequence
  LRRK2 RNA guide
cuguaccuggcccuuaguag

SEQ ID NO: 32529 - RNA, 20 nt, Artificial Sequence
  LRRK2 RNA guide
gagccucuguaccuggcccu

SEQ ID NO: 32530 - RNA, 20 nt, Artificial Sequence
  LRRK2 RNA guide
gccucuguaccuggcccuua

SEQ ID NO: 32531 - RNA, 20 nt, Artificial Sequence
  LRRK2 RNA guide
gcgugagccucuguaccugg

SEQ ID NO: 32532 - RNA, 20 nt, Artificial Sequence
  LRRK2 RNA guide
ggcgugagccucuguaccug

SEQ ID NO: 32533 - RNA, 20 nt, Artificial Sequence
  LRRK2 RNA guide
guaccuggcccuuaguaggu

SEQ ID NO: 32534 - RNA, 20 nt, Artificial Sequence
  LRRK2 RNA guide
gugagccucuguaccuggcc

SEQ ID NO: 32535 - RNA, 20 nt, Artificial Sequence
  LRRK2 RNA guide
uaagggccagguacagaggc

SEQ ID NO: 32536 - RNA, 20 nt, Artificial Sequence
  LRRK2 RNA guide
uacuaagggccagguacaga

SEQ ID NO: 32537 - RNA, 20 nt, Artificial Sequence
  LRRK2 RNA guide
ucuguaccuggcccuuagua

SEQ ID NO: 32538 - RNA, 20 nt, Artificial Sequence
  LRRK2 RNA guide
ugagccucuguaccuggccc

SEQ ID NO: 32539 - RNA, 20 nt, Artificial Sequence
  LRRK2 RNA guide
uguaccuggcccuuaguagg

SEQ ID NO: 32540 - RNA, 21 nt, Artificial Sequence
  LRRK2 RNA guide
aaaccuacuaagggccaggua

SEQ ID NO: 32541 - RNA, 21 nt, Artificial Sequence
  LRRK2 RNA guide
aaccuacuaagggccagguac

SEQ ID NO: 32542 - RNA, 21 nt, Artificial Sequence
  LRRK2 RNA guide
aagggccagguacagaggcuc

SEQ ID NO: 32543 - RNA, 21 nt, Artificial Sequence
  LRRK2 RNA guide
accuacuaagggccagguaca

SEQ ID NO: 32544 - RNA, 21 nt, Artificial Sequence
  LRRK2 RNA guide
acuaagggccagguacagagg

SEQ ID NO: 32545 - RNA, 21 nt, Artificial Sequence
  LRRK2 RNA guide
agccucuguaccuggcccuua

SEQ ID NO: 32546 - RNA, 21 nt, Artificial Sequence
  LRRK2 RNA guide
aggcgugagccucuguaccug

SEQ ID NO: 32547 - RNA, 21 nt, Artificial Sequence
  LRRK2 RNA guide
agggccagguacagaggcuca

SEQ ID NO: 32548 - RNA, 21 nt, Artificial Sequence
  LRRK2 RNA guide
ccuacuaagggccagguacag

SEQ ID NO: 32549 - RNA, 21 nt, Artificial Sequence
  LRRK2 RNA guide
ccucuguaccuggcccuuagu

SEQ ID NO: 32550 - RNA, 21 nt, Artificial Sequence
  LRRK2 RNA guide
cgugagccucuguaccuggcc

SEQ ID NO: 32551 - RNA, 21 nt, Artificial Sequence
  LRRK2 RNA guide
cuaagggccagguacagaggc

SEQ ID NO: 32552 - RNA, 21 nt, Artificial Sequence
  LRRK2 RNA guide
cuacuaagggccagguacaga

SEQ ID NO: 32553 - RNA, 21 nt, Artificial Sequence
  LRRK2 RNA guide
cucuguaccuggcccuuagua

SEQ ID NO: 32554 - RNA, 21 nt, Artificial Sequence
  LRRK2 RNA guide
cuguaccuggcccuuaguagg

SEQ ID NO: 32555 - RNA, 21 nt, Artificial Sequence
  LRRK2 RNA guide
gagccucuguaccuggcccuu

SEQ ID NO: 32556 - RNA, 21 nt, Artificial Sequence
  LRRK2 RNA guide
gccucuguaccuggcccuuag

SEQ ID NO: 32557 - RNA, 21 nt, Artificial Sequence
  LRRK2 RNA guide
gcgugagccucuguaccuggc

SEQ ID NO: 32558 - RNA, 21 nt, Artificial Sequence
  LRRK2 RNA guide
ggcgugagccucuguaccugg

SEQ ID NO: 32559 - RNA, 21 nt, Artificial Sequence
  LRRK2 RNA guide
guaccuggcccuuaguagguu

SEQ ID NO: 32560 - RNA, 21 nt, Artificial Sequence
  LRRK2 RNA guide
gugagccucuguaccuggccc

SEQ ID NO: 32561 - RNA, 21 nt, Artificial Sequence
  LRRK2 RNA guide
uaagggccagguacagaggcu

SEQ ID NO: 32562 - RNA, 21 nt, Artificial Sequence
  LRRK2 RNA guide
uacuaagggccagguacagag

SEQ ID NO: 32563 - RNA, 21 nt, Artificial Sequence
  LRRK2 RNA guide
ucuguaccuggcccuuaguag

SEQ ID NO: 32564 - RNA, 21 nt, Artificial Sequence
  LRRK2 RNA guide
ugagccucuguaccuggcccu

SEQ ID NO: 32565 - RNA, 21 nt, Artificial Sequence
  LRRK2 RNA guide
uguaccuggcccuuaguaggu

SEQ ID NO: 32566 - RNA, 22 nt, Artificial Sequence
  LRRK2 RNA guide
aaaaccuacuaagggccaggua

SEQ ID NO: 32567 - RNA, 22 nt, Artificial Sequence
  LRRK2 RNA guide
aaaccuacuaagggccagguac

SEQ ID NO: 32568 - RNA, 22 nt, Artificial Sequence
  LRRK2 RNA guide
aaccuacuaagggccagguaca

SEQ ID NO: 32569 - RNA, 22 nt, Artificial Sequence
  LRRK2 RNA guide
aagggccagguacagaggcuca

SEQ ID NO: 32570 - RNA, 22 nt, Artificial Sequence
  LRRK2 RNA guide
accuacuaagggccagguacag

SEQ ID NO: 32571 - RNA, 22 nt, Artificial Sequence
  LRRK2 RNA guide
acuaagggccagguacagaggc

SEQ ID NO: 32572 - RNA, 22 nt, Artificial Sequence
  LRRK2 RNA guide
agccucuguaccuggcccuuag

SEQ ID NO: 32573 - RNA, 22 nt, Artificial Sequence
  LRRK2 RNA guide
aggcgugagccucuguaccugg

SEQ ID NO: 32574 - RNA, 22 nt, Artificial Sequence
  LRRK2 RNA guide
agggccagguacagaggcucac

SEQ ID NO: 32575 - RNA, 22 nt, Artificial Sequence
  LRRK2 RNA guide
caggcgugagccucuguaccug

SEQ ID NO: 32576 - RNA, 22 nt, Artificial Sequence
  LRRK2 RNA guide
ccuacuaagggccagguacaga

SEQ ID NO: 32577 - RNA, 22 nt, Artificial Sequence
  LRRK2 RNA guide
ccucuguaccuggcccuuagua

SEQ ID NO: 32578 - RNA, 22 nt, Artificial Sequence
  LRRK2 RNA guide
cgugagccucuguaccuggccc

SEQ ID NO: 32579 - RNA, 22 nt, Artificial Sequence
  LRRK2 RNA guide
cuaagggccagguacagaggcu

SEQ ID NO: 32580 - RNA, 22 nt, Artificial Sequence
  LRRK2 RNA guide
cuacuaagggccagguacagag

SEQ ID NO: 32581 - RNA, 22 nt, Artificial Sequence
  LRRK2 RNA guide
cucuguaccuggcccuuaguag

SEQ ID NO: 32582 - RNA, 22 nt, Artificial Sequence
  LRRK2 RNA guide
cuguaccuggcccuuaguaggu

SEQ ID NO: 32583 - RNA, 22 nt, Artificial Sequence
  LRRK2 RNA guide
gagccucuguaccuggcccuua

SEQ ID NO: 32584 - RNA, 22 nt, Artificial Sequence
  LRRK2 RNA guide
gccucuguaccuggcccuuagu

SEQ ID NO: 32585 - RNA, 22 nt, Artificial Sequence
  LRRK2 RNA guide
gcgugagccucuguaccuggcc

SEQ ID NO: 32586 - RNA, 22 nt, Artificial Sequence
  LRRK2 RNA guide
ggcgugagccucuguaccuggc

SEQ ID NO: 32587 - RNA, 22 nt, Artificial Sequence
  LRRK2 RNA guide
guaccuggcccuuaguagguuu

SEQ ID NO: 32588 - RNA, 22 nt, Artificial Sequence
  LRRK2 RNA guide
gugagccucuguaccuggcccu

SEQ ID NO: 32589 - RNA, 22 nt, Artificial Sequence
  LRRK2 RNA guide
uaagggccagguacagaggcuc

SEQ ID NO: 32590 - RNA, 22 nt, Artificial Sequence
  LRRK2 RNA guide
uacuaagggccagguacagagg

SEQ ID NO: 32591 - RNA, 22 nt, Artificial Sequence
  LRRK2 RNA guide
ucuguaccuggcccuuaguagg

SEQ ID NO: 32592 - RNA, 22 nt, Artificial Sequence
  LRRK2 RNA guide
ugagccucuguaccuggcccuu

SEQ ID NO: 32593 - RNA, 22 nt, Artificial Sequence
  LRRK2 RNA guide
uguaccuggcccuuaguagguu

SEQ ID NO: 32594 - RNA, 20 nt, Artificial Sequence
  LRRK2 RNA guide
aagacaggggucucgcucug

SEQ ID NO: 32595 - RNA, 20 nt, Artificial Sequence
  LRRK2 RNA guide
gaagacaggggucucgcucu

SEQ ID NO: 32596 - RNA, 20 nt, Artificial Sequence
  LRRK2 RNA guide
gcaacagagcgagaccccug

SEQ ID NO: 32597 - RNA, 20 nt, Artificial Sequence
  LRRK2 RNA guide
ggcaacagagcgagaccccu

SEQ ID NO: 32598 - RNA, 20 nt, Artificial Sequence
  LRRK2 RNA guide
ugaagacaggggucucgcuc

SEQ ID NO: 32599 - RNA, 21 nt, Artificial Sequence
  LRRK2 RNA guide
aagacaggggucucgcucugu

SEQ ID NO: 32600 - RNA, 21 nt, Artificial Sequence
  LRRK2 RNA guide
gaagacaggggucucgcucug

SEQ ID NO: 32601 - RNA, 21 nt, Artificial Sequence
  LRRK2 RNA guide
gcaacagagcgagaccccugu

SEQ ID NO: 32602 - RNA, 21 nt, Artificial Sequence
  LRRK2 RNA guide
ggcaacagagcgagaccccug

SEQ ID NO: 32603 - RNA, 21 nt, Artificial Sequence
  LRRK2 RNA guide
gggcaacagagcgagaccccu

SEQ ID NO: 32604 - RNA, 21 nt, Artificial Sequence
  LRRK2 RNA guide
gugaagacaggggucucgcuc

SEQ ID NO: 32605 - RNA, 21 nt, Artificial Sequence
  LRRK2 RNA guide
ugaagacaggggucucgcucu

SEQ ID NO: 32606 - RNA, 22 nt, Artificial Sequence
  LRRK2 RNA guide
aagacaggggucucgcucuguu

SEQ ID NO: 32607 - RNA, 22 nt, Artificial Sequence
  LRRK2 RNA guide
cgcucuguugcccaggcugguc

SEQ ID NO: 32608 - RNA, 22 nt, Artificial Sequence
  LRRK2 RNA guide
cuugagaccagccugggcaaca

SEQ ID NO: 32609 - RNA, 22 nt, Artificial Sequence
  LRRK2 RNA guide
gaagacaggggucucgcucugu

SEQ ID NO: 32610 - RNA, 22 nt, Artificial Sequence
  LRRK2 RNA guide
gcaacagagcgagaccccuguc

SEQ ID NO: 32611 - RNA, 22 nt, Artificial Sequence
  LRRK2 RNA guide
ggcaacagagcgagaccccugu

SEQ ID NO: 32612 - RNA, 22 nt, Artificial Sequence
  LRRK2 RNA guide
gggcaacagagcgagaccccug

SEQ ID NO: 32613 - RNA, 22 nt, Artificial Sequence
  LRRK2 RNA guide
gugaagacaggggucucgcucu

SEQ ID NO: 32614 - RNA, 22 nt, Artificial Sequence
  LRRK2 RNA guide
ugaagacaggggucucgcucug

SEQ ID NO: 32615 - RNA, 22 nt, Artificial Sequence
  LRRK2 RNA guide
ugggcaacagagcgagaccccu

SEQ ID NO: 32616 - RNA, 22 nt, Artificial Sequence
  LRRK2 RNA guide
ugugaagacaggggucucgcuc

SEQ ID NO: 32617 - RNA, 20 nt, Artificial Sequence
  LRRK2 RNA guide
acaggggucucgcucuguuu

SEQ ID NO: 32618 - RNA, 20 nt, Artificial Sequence
  LRRK2 RNA guide
agacaggggucucgcucugu

SEQ ID NO: 32619 - RNA, 20 nt, Artificial Sequence
  LRRK2 RNA guide
aggggucucgcucuguuucc

SEQ ID NO: 32620 - RNA, 20 nt, Artificial Sequence
  LRRK2 RNA guide
caggggucucgcucuguuuc

SEQ ID NO: 32621 - RNA, 20 nt, Artificial Sequence
  LRRK2 RNA guide
ccugggaaacagagcgagac

SEQ ID NO: 32622 - RNA, 20 nt, Artificial Sequence
  LRRK2 RNA guide
cgcucuguuucccaggcugg

SEQ ID NO: 32623 - RNA, 20 nt, Artificial Sequence
  LRRK2 RNA guide
cucuguuucccaggcugguc

SEQ ID NO: 32624 - RNA, 20 nt, Artificial Sequence
  LRRK2 RNA guide
cugggaaacagagcgagacc

SEQ ID NO: 32625 - RNA, 20 nt, Artificial Sequence
  LRRK2 RNA guide
cuugagaccagccugggaaa

SEQ ID NO: 32626 - RNA, 20 nt, Artificial Sequence
  LRRK2 RNA guide
gaaacagagcgagaccccug

SEQ ID NO: 32627 - RNA, 20 nt, Artificial Sequence
  LRRK2 RNA guide
gacaggggucucgcucuguu

SEQ ID NO: 32628 - RNA, 20 nt, Artificial Sequence
  LRRK2 RNA guide
gccugggaaacagagcgaga

SEQ ID NO: 32629 - RNA, 20 nt, Artificial Sequence
  LRRK2 RNA guide
gcuugagaccagccugggaa

SEQ ID NO: 32630 - RNA, 20 nt, Artificial Sequence
  LRRK2 RNA guide
ggaaacagagcgagaccccu

SEQ ID NO: 32631 - RNA, 20 nt, Artificial Sequence
  LRRK2 RNA guide
gggaaacagagcgagacccc

SEQ ID NO: 32632 - RNA, 20 nt, Artificial Sequence
  LRRK2 RNA guide
ucuguuucccaggcuggucu

SEQ ID NO: 32633 - RNA, 20 nt, Artificial Sequence
  LRRK2 RNA guide
ugggaaacagagcgagaccc

SEQ ID NO: 32634 - RNA, 21 nt, Artificial Sequence
  LRRK2 RNA guide
acaggggucucgcucuguuuc

SEQ ID NO: 32635 - RNA, 21 nt, Artificial Sequence
  LRRK2 RNA guide
agacaggggucucgcucuguu

SEQ ID NO: 32636 - RNA, 21 nt, Artificial Sequence
  LRRK2 RNA guide
agccugggaaacagagcgaga

SEQ ID NO: 32637 - RNA, 21 nt, Artificial Sequence
  LRRK2 RNA guide
agcuugagaccagccugggaa

SEQ ID NO: 32638 - RNA, 21 nt, Artificial Sequence
  LRRK2 RNA guide
aggggucucgcucuguuuccc

SEQ ID NO: 32639 - RNA, 21 nt, Artificial Sequence
  LRRK2 RNA guide
caggggucucgcucuguuucc

SEQ ID NO: 32640 - RNA, 21 nt, Artificial Sequence
  LRRK2 RNA guide
ccugggaaacagagcgagacc

SEQ ID NO: 32641 - RNA, 21 nt, Artificial Sequence
  LRRK2 RNA guide
cgcucuguuucccaggcuggu

SEQ ID NO: 32642 - RNA, 21 nt, Artificial Sequence
  LRRK2 RNA guide
cucuguuucccaggcuggucu

SEQ ID NO: 32643 - RNA, 21 nt, Artificial Sequence
  LRRK2 RNA guide
cugggaaacagagcgagaccc

SEQ ID NO: 32644 - RNA, 21 nt, Artificial Sequence
  LRRK2 RNA guide
cuugagaccagccugggaaac

SEQ ID NO: 32645 - RNA, 21 nt, Artificial Sequence
  LRRK2 RNA guide
gaaacagagcgagaccccugu

SEQ ID NO: 32646 - RNA, 21 nt, Artificial Sequence
  LRRK2 RNA guide
gacaggggucucgcucuguuu

SEQ ID NO: 32647 - RNA, 21 nt, Artificial Sequence
  LRRK2 RNA guide
gccugggaaacagagcgagac

SEQ ID NO: 32648 - RNA, 21 nt, Artificial Sequence
  LRRK2 RNA guide
gcucuguuucccaggcugguc

SEQ ID NO: 32649 - RNA, 21 nt, Artificial Sequence
  LRRK2 RNA guide
gcuugagaccagccugggaaa

SEQ ID NO: 32650 - RNA, 21 nt, Artificial Sequence
  LRRK2 RNA guide
ggaaacagagcgagaccccug

SEQ ID NO: 32651 - RNA, 21 nt, Artificial Sequence
  LRRK2 RNA guide
gggaaacagagcgagaccccu

SEQ ID NO: 32652 - RNA, 21 nt, Artificial Sequence
  LRRK2 RNA guide
ucgcucuguuucccaggcugg

SEQ ID NO: 32653 - RNA, 21 nt, Artificial Sequence
  LRRK2 RNA guide
ucuguuucccaggcuggucuc

SEQ ID NO: 32654 - RNA, 21 nt, Artificial Sequence
  LRRK2 RNA guide
ugagaccagccugggaaacag

SEQ ID NO: 32655 - RNA, 21 nt, Artificial Sequence
  LRRK2 RNA guide
ugggaaacagagcgagacccc

SEQ ID NO: 32656 - RNA, 21 nt, Artificial Sequence
  LRRK2 RNA guide
uugagaccagccugggaaaca

SEQ ID NO: 32657 - RNA, 22 nt, Artificial Sequence
  LRRK2 RNA guide
acaggggucucgcucuguuucc

SEQ ID NO: 32658 - RNA, 22 nt, Artificial Sequence
  LRRK2 RNA guide
agacaggggucucgcucuguuu

SEQ ID NO: 32659 - RNA, 22 nt, Artificial Sequence
  LRRK2 RNA guide
agccugggaaacagagcgagac

SEQ ID NO: 32660 - RNA, 22 nt, Artificial Sequence
  LRRK2 RNA guide
agcuugagaccagccugggaaa

SEQ ID NO: 32661 - RNA, 22 nt, Artificial Sequence
  LRRK2 RNA guide
aggggucucgcucuguuuccca

SEQ ID NO: 32662 - RNA, 22 nt, Artificial Sequence
  LRRK2 RNA guide
cagccugggaaacagagcgaga

SEQ ID NO: 32663 - RNA, 22 nt, Artificial Sequence
  LRRK2 RNA guide
caggggucucgcucuguuuccc

SEQ ID NO: 32664 - RNA, 22 nt, Artificial Sequence
  LRRK2 RNA guide
ccugggaaacagagcgagaccc

SEQ ID NO: 32665 - RNA, 22 nt, Artificial Sequence
  LRRK2 RNA guide
cgcucuguuucccaggcugguc

SEQ ID NO: 32666 - RNA, 22 nt, Artificial Sequence
  LRRK2 RNA guide
cucgcucuguuucccaggcugg

SEQ ID NO: 32667 - RNA, 22 nt, Artificial Sequence
  LRRK2 RNA guide
cucuguuucccaggcuggucuc

SEQ ID NO: 32668 - RNA, 22 nt, Artificial Sequence
  LRRK2 RNA guide
cugggaaacagagcgagacccc

SEQ ID NO: 32669 - RNA, 22 nt, Artificial Sequence
  LRRK2 RNA guide
cuugagaccagccugggaaaca

SEQ ID NO: 32670 - RNA, 22 nt, Artificial Sequence
  LRRK2 RNA guide
gaaacagagcgagaccccuguc

SEQ ID NO: 32671 - RNA, 22 nt, Artificial Sequence
  LRRK2 RNA guide
gacaggggucucgcucuguuuc

SEQ ID NO: 32672 - RNA, 22 nt, Artificial Sequence
  LRRK2 RNA guide
gagcuugagaccagccugggaa

SEQ ID NO: 32673 - RNA, 22 nt, Artificial Sequence
  LRRK2 RNA guide
gccugggaaacagagcgagacc

SEQ ID NO: 32674 - RNA, 22 nt, Artificial Sequence
  LRRK2 RNA guide
gcucuguuucccaggcuggucu

SEQ ID NO: 32675 - RNA, 22 nt, Artificial Sequence
  LRRK2 RNA guide
gcuugagaccagccugggaaac

SEQ ID NO: 32676 - RNA, 22 nt, Artificial Sequence
  LRRK2 RNA guide
ggaaacagagcgagaccccugu

SEQ ID NO: 32677 - RNA, 22 nt, Artificial Sequence
  LRRK2 RNA guide
gggaaacagagcgagaccccug

SEQ ID NO: 32678 - RNA, 22 nt, Artificial Sequence
  LRRK2 RNA guide
ucgcucuguuucccaggcuggu

SEQ ID NO: 32679 - RNA, 22 nt, Artificial Sequence
  LRRK2 RNA guide
ucuguuucccaggcuggucuca

SEQ ID NO: 32680 - RNA, 22 nt, Artificial Sequence
  LRRK2 RNA guide
ugagaccagccugggaaacaga

SEQ ID NO: 32681 - RNA, 22 nt, Artificial Sequence
  LRRK2 RNA guide
ugggaaacagagcgagaccccu

SEQ ID NO: 32682 - RNA, 22 nt, Artificial Sequence
  LRRK2 RNA guide
uugagaccagccugggaaacag

SEQ ID NO: 32683 - RNA, 20 nt, Artificial Sequence
  LRRK2 RNA guide
aacagagcgagaccccuguc

SEQ ID NO: 32684 - RNA, 20 nt, Artificial Sequence
  LRRK2 RNA guide
acagagcgagaccccugucu

SEQ ID NO: 32685 - RNA, 20 nt, Artificial Sequence
  LRRK2 RNA guide
agagcgagaccccugucuuc

SEQ ID NO: 32686 - RNA, 20 nt, Artificial Sequence
  LRRK2 RNA guide
agcgagaccccugucuucac

SEQ ID NO: 32687 - RNA, 20 nt, Artificial Sequence
  LRRK2 RNA guide
cagagcgagaccccugucuu

SEQ ID NO: 32688 - RNA, 20 nt, Artificial Sequence
  LRRK2 RNA guide
cgagaccccugucuucacaa

SEQ ID NO: 32689 - RNA, 20 nt, Artificial Sequence
  LRRK2 RNA guide
gagaccccugucuucacaaa

SEQ ID NO: 32690 - RNA, 20 nt, Artificial Sequence
  LRRK2 RNA guide
gagcgagaccccugucuuca

SEQ ID NO: 32691 - RNA, 20 nt, Artificial Sequence
  LRRK2 RNA guide
gcgagaccccugucuucaca

SEQ ID NO: 32692 - RNA, 20 nt, Artificial Sequence
  LRRK2 RNA guide
ugugaagacaggggucucgc

SEQ ID NO: 32693 - RNA, 20 nt, Artificial Sequence
  LRRK2 RNA guide
uugugaagacaggggucucg

SEQ ID NO: 32694 - RNA, 20 nt, Artificial Sequence
  LRRK2 RNA guide
uuugugaagacaggggucuc

SEQ ID NO: 32695 - RNA, 20 nt, Artificial Sequence
  LRRK2 RNA guide
uuuugugaagacaggggucu

SEQ ID NO: 32696 - RNA, 20 nt, Artificial Sequence
  LRRK2 RNA guide
uuuuugugaagacagggguc

SEQ ID NO: 32697 - RNA, 20 nt, Artificial Sequence
  LRRK2 RNA guide
uuuuuugugaagacaggggu

SEQ ID NO: 32698 - RNA, 21 nt, Artificial Sequence
  LRRK2 RNA guide
aacagagcgagaccccugucu

SEQ ID NO: 32699 - RNA, 21 nt, Artificial Sequence
  LRRK2 RNA guide
acagagcgagaccccugucuu

SEQ ID NO: 32700 - RNA, 21 nt, Artificial Sequence
  LRRK2 RNA guide
agagcgagaccccugucuuca

SEQ ID NO: 32701 - RNA, 21 nt, Artificial Sequence
  LRRK2 RNA guide
agcgagaccccugucuucaca

SEQ ID NO: 32702 - RNA, 21 nt, Artificial Sequence
  LRRK2 RNA guide
caacagagcgagaccccuguc

SEQ ID NO: 32703 - RNA, 21 nt, Artificial Sequence
  LRRK2 RNA guide
cagagcgagaccccugucuuc

SEQ ID NO: 32704 - RNA, 21 nt, Artificial Sequence
  LRRK2 RNA guide
cgagaccccugucuucacaaa

SEQ ID NO: 32705 - RNA, 21 nt, Artificial Sequence
  LRRK2 RNA guide
gagaccccugucuucacaaaa

SEQ ID NO: 32706 - RNA, 21 nt, Artificial Sequence
  LRRK2 RNA guide
gagcgagaccccugucuucac

SEQ ID NO: 32707 - RNA, 21 nt, Artificial Sequence
  LRRK2 RNA guide
gcgagaccccugucuucacaa

SEQ ID NO: 32708 - RNA, 21 nt, Artificial Sequence
  LRRK2 RNA guide
ugugaagacaggggucucgcu

SEQ ID NO: 32709 - RNA, 21 nt, Artificial Sequence
  LRRK2 RNA guide
uugugaagacaggggucucgc

SEQ ID NO: 32710 - RNA, 21 nt, Artificial Sequence
  LRRK2 RNA guide
uuugugaagacaggggucucg

SEQ ID NO: 32711 - RNA, 21 nt, Artificial Sequence
  LRRK2 RNA guide
uuuugugaagacaggggucuc

SEQ ID NO: 32712 - RNA, 21 nt, Artificial Sequence
  LRRK2 RNA guide
uuuuugugaagacaggggucu

SEQ ID NO: 32713 - RNA, 21 nt, Artificial Sequence
  LRRK2 RNA guide
uuuuuugugaagacagggguc

SEQ ID NO: 32714 - RNA, 22 nt, Artificial Sequence
  LRRK2 RNA guide
aacagagcgagaccccugucuu

SEQ ID NO: 32715 - RNA, 22 nt, Artificial Sequence
  LRRK2 RNA guide
acagagcgagaccccugucuuc

SEQ ID NO: 32716 - RNA, 22 nt, Artificial Sequence
  LRRK2 RNA guide
agagcgagaccccugucuucac

SEQ ID NO: 32717 - RNA, 22 nt, Artificial Sequence
  LRRK2 RNA guide
agcgagaccccugucuucacaa

SEQ ID NO: 32718 - RNA, 22 nt, Artificial Sequence
  LRRK2 RNA guide
caacagagcgagaccccugucu

SEQ ID NO: 32719 - RNA, 22 nt, Artificial Sequence
  LRRK2 RNA guide
cagagcgagaccccugucuuca

SEQ ID NO: 32720 - RNA, 22 nt, Artificial Sequence
  LRRK2 RNA guide
cgagaccccugucuucacaaaa

SEQ ID NO: 32721 - RNA, 22 nt, Artificial Sequence
  LRRK2 RNA guide
gagaccccugucuucacaaaaa

SEQ ID NO: 32722 - RNA, 22 nt, Artificial Sequence
  LRRK2 RNA guide
gagcgagaccccugucuucaca

SEQ ID NO: 32723 - RNA, 22 nt, Artificial Sequence
  LRRK2 RNA guide
gcgagaccccugucuucacaaa

SEQ ID NO: 32724 - RNA, 22 nt, Artificial Sequence
  LRRK2 RNA guide
uugugaagacaggggucucgcu

SEQ ID NO: 32725 - RNA, 22 nt, Artificial Sequence
  LRRK2 RNA guide
uuugugaagacaggggucucgc

SEQ ID NO: 32726 - RNA, 22 nt, Artificial Sequence
  LRRK2 RNA guide
uuuugugaagacaggggucucg

SEQ ID NO: 32727 - RNA, 22 nt, Artificial Sequence
  LRRK2 RNA guide
uuuuugugaagacaggggucuc

SEQ ID NO: 32728 - RNA, 22 nt, Artificial Sequence
  LRRK2 RNA guide
uuuuuugugaagacaggggucu

SEQ ID NO: 32729 - RNA, 20 nt, Artificial Sequence
  LRRK2 RNA guide
acccuaucucaaaaacaaaa

SEQ ID NO: 32730 - RNA, 20 nt, Artificial Sequence
  LRRK2 RNA guide
agacccuaucucaaaaacaa

SEQ ID NO: 32731 - RNA, 20 nt, Artificial Sequence
  LRRK2 RNA guide
cccuaucucaaaaacaaaaa

SEQ ID NO: 32732 - RNA, 20 nt, Artificial Sequence
  LRRK2 RNA guide
gacccuaucucaaaaacaaa

SEQ ID NO: 32733 - RNA, 20 nt, Artificial Sequence
  LRRK2 RNA guide
gagacccuaucucaaaaaca

SEQ ID NO: 32734 - RNA, 21 nt, Artificial Sequence
  LRRK2 RNA guide
agacccuaucucaaaaacaaa

SEQ ID NO: 32735 - RNA, 21 nt, Artificial Sequence
  LRRK2 RNA guide
gacccuaucucaaaaacaaaa

SEQ ID NO: 32736 - RNA, 21 nt, Artificial Sequence
  LRRK2 RNA guide
gagacccuaucucaaaaacaa

SEQ ID NO: 32737 - RNA, 21 nt, Artificial Sequence
  LRRK2 RNA guide
ugagacccuaucucaaaaaca

SEQ ID NO: 32738 - RNA, 22 nt, Artificial Sequence
  LRRK2 RNA guide
agacccuaucucaaaaacaaaa

SEQ ID NO: 32739 - RNA, 22 nt, Artificial Sequence
  LRRK2 RNA guide
gacccuaucucaaaaacaaaaa

SEQ ID NO: 32740 - RNA, 22 nt, Artificial Sequence
  LRRK2 RNA guide
gagacccuaucucaaaaacaaa

SEQ ID NO: 32741 - RNA, 22 nt, Artificial Sequence
  LRRK2 RNA guide
gugagacccuaucucaaaaaca

SEQ ID NO: 32742 - RNA, 22 nt, Artificial Sequence
  LRRK2 RNA guide
ugagacccuaucucaaaaacaa

SEQ ID NO: 32743 - RNA, 20 nt, Artificial Sequence
  LRRK2 RNA guide
accucaugauccccccgccu

SEQ ID NO: 32744 - RNA, 20 nt, Artificial Sequence
  LRRK2 RNA guide
acgccgaggcggggggauca

SEQ ID NO: 32745 - RNA, 20 nt, Artificial Sequence
  LRRK2 RNA guide
acuuugggacgccgaggcgg

SEQ ID NO: 32746 - RNA, 20 nt, Artificial Sequence
  LRRK2 RNA guide
agcacuuugggacgccgagg

SEQ ID NO: 32747 - RNA, 20 nt, Artificial Sequence
  LRRK2 RNA guide
auccccccgccucggcgucc

SEQ ID NO: 32748 - RNA, 20 nt, Artificial Sequence
  LRRK2 RNA guide
augauccccccgccucggcg

SEQ ID NO: 32749 - RNA, 20 nt, Artificial Sequence
  LRRK2 RNA guide
cacuuugggacgccgaggcg

SEQ ID NO: 32750 - RNA, 20 nt, Artificial Sequence
  LRRK2 RNA guide
caugauccccccgccucggc

SEQ ID NO: 32751 - RNA, 20 nt, Artificial Sequence
  LRRK2 RNA guide
cccccgccucggcgucccaa

SEQ ID NO: 32752 - RNA, 20 nt, Artificial Sequence
  LRRK2 RNA guide
ccccgccucggcgucccaaa

SEQ ID NO: 32753 - RNA, 20 nt, Artificial Sequence
  LRRK2 RNA guide
ccucaugauccccccgccuc

SEQ ID NO: 32754 - RNA, 20 nt, Artificial Sequence
  LRRK2 RNA guide
cgccgaggcggggggaucau

SEQ ID NO: 32755 - RNA, 20 nt, Artificial Sequence
  LRRK2 RNA guide
cucaugauccccccgccucg

SEQ ID NO: 32756 - RNA, 20 nt, Artificial Sequence
  LRRK2 RNA guide
cuuugggacgccgaggcggg

SEQ ID NO: 32757 - RNA, 20 nt, Artificial Sequence
  LRRK2 RNA guide
gacgccgaggcggggggauc

SEQ ID NO: 32758 - RNA, 20 nt, Artificial Sequence
  LRRK2 RNA guide
gauccccccgccucggcguc

SEQ ID NO: 32759 - RNA, 20 nt, Artificial Sequence
  LRRK2 RNA guide
gcacuuugggacgccgaggc

SEQ ID NO: 32760 - RNA, 20 nt, Artificial Sequence
  LRRK2 RNA guide
ggacgccgaggcggggggau

SEQ ID NO: 32761 - RNA, 20 nt, Artificial Sequence
  LRRK2 RNA guide
ucaugauccccccgccucgg

SEQ ID NO: 32762 - RNA, 20 nt, Artificial Sequence
  LRRK2 RNA guide
ugauccccccgccucggcgu

SEQ ID NO: 32763 - RNA, 20 nt, Artificial Sequence
  LRRK2 RNA guide
uugggacgccgaggcggggg

SEQ ID NO: 32764 - RNA, 20 nt, Artificial Sequence
  LRRK2 RNA guide
uuugggacgccgaggcgggg

SEQ ID NO: 32765 - RNA, 21 nt, Artificial Sequence
  LRRK2 RNA guide
accucaugauccccccgccuc

SEQ ID NO: 32766 - RNA, 21 nt, Artificial Sequence
  LRRK2 RNA guide
acgccgaggcggggggaucau

SEQ ID NO: 32767 - RNA, 21 nt, Artificial Sequence
  LRRK2 RNA guide
acuuugggacgccgaggcggg

SEQ ID NO: 32768 - RNA, 21 nt, Artificial Sequence
  LRRK2 RNA guide
agcacuuugggacgccgaggc

SEQ ID NO: 32769 - RNA, 21 nt, Artificial Sequence
  LRRK2 RNA guide
augauccccccgccucggcgu

SEQ ID NO: 32770 - RNA, 21 nt, Artificial Sequence
  LRRK2 RNA guide
cacuuugggacgccgaggcgg

SEQ ID NO: 32771 - RNA, 21 nt, Artificial Sequence
  LRRK2 RNA guide
cagcacuuugggacgccgagg

SEQ ID NO: 32772 - RNA, 21 nt, Artificial Sequence
  LRRK2 RNA guide
caugauccccccgccucggcg

SEQ ID NO: 32773 - RNA, 21 nt, Artificial Sequence
  LRRK2 RNA guide
cccccgccucggcgucccaaa

SEQ ID NO: 32774 - RNA, 21 nt, Artificial Sequence
  LRRK2 RNA guide
ccccgccucggcgucccaaag

SEQ ID NO: 32775 - RNA, 21 nt, Artificial Sequence
  LRRK2 RNA guide
ccucaugauccccccgccucg

SEQ ID NO: 32776 - RNA, 21 nt, Artificial Sequence
  LRRK2 RNA guide
cgccgaggcggggggaucaug

SEQ ID NO: 32777 - RNA, 21 nt, Artificial Sequence
  LRRK2 RNA guide
cucaugauccccccgccucgg

SEQ ID NO: 32778 - RNA, 21 nt, Artificial Sequence
  LRRK2 RNA guide
cuuugggacgccgaggcgggg

SEQ ID NO: 32779 - RNA, 21 nt, Artificial Sequence
  LRRK2 RNA guide
gaccucaugauccccccgccu

SEQ ID NO: 32780 - RNA, 21 nt, Artificial Sequence
  LRRK2 RNA guide
gacgccgaggcggggggauca

SEQ ID NO: 32781 - RNA, 21 nt, Artificial Sequence
  LRRK2 RNA guide
gcacuuugggacgccgaggcg

SEQ ID NO: 32782 - RNA, 21 nt, Artificial Sequence
  LRRK2 RNA guide
ucaugauccccccgccucggc

SEQ ID NO: 32783 - RNA, 21 nt, Artificial Sequence
  LRRK2 RNA guide
ugauccccccgccucggcguc

SEQ ID NO: 32784 - RNA, 21 nt, Artificial Sequence
  LRRK2 RNA guide
uuugggacgccgaggcggggg

SEQ ID NO: 32785 - RNA, 22 nt, Artificial Sequence
  LRRK2 RNA guide
accucaugauccccccgccucg

SEQ ID NO: 32786 - RNA, 22 nt, Artificial Sequence
  LRRK2 RNA guide
acgccgaggcggggggaucaug

SEQ ID NO: 32787 - RNA, 22 nt, Artificial Sequence
  LRRK2 RNA guide
acuuugggacgccgaggcgggg

SEQ ID NO: 32788 - RNA, 22 nt, Artificial Sequence
  LRRK2 RNA guide
agcacuuugggacgccgaggcg

SEQ ID NO: 32789 - RNA, 22 nt, Artificial Sequence
  LRRK2 RNA guide
auccccccgccucggcguccca

SEQ ID NO: 32790 - RNA, 22 nt, Artificial Sequence
  LRRK2 RNA guide
augauccccccgccucggcguc

SEQ ID NO: 32791 - RNA, 22 nt, Artificial Sequence
  LRRK2 RNA guide
cacuuugggacgccgaggcggg

SEQ ID NO: 32792 - RNA, 22 nt, Artificial Sequence
  LRRK2 RNA guide
cagcacuuugggacgccgaggc

SEQ ID NO: 32793 - RNA, 22 nt, Artificial Sequence
  LRRK2 RNA guide
caugauccccccgccucggcgu

SEQ ID NO: 32794 - RNA, 22 nt, Artificial Sequence
  LRRK2 RNA guide
ccccccgccucggcgucccaaa

SEQ ID NO: 32795 - RNA, 22 nt, Artificial Sequence
  LRRK2 RNA guide
cccccgccucggcgucccaaag

SEQ ID NO: 32796 - RNA, 22 nt, Artificial Sequence
  LRRK2 RNA guide
ccccgccucggcgucccaaagu

SEQ ID NO: 32797 - RNA, 22 nt, Artificial Sequence
  LRRK2 RNA guide
ccucaugauccccccgccucgg

SEQ ID NO: 32798 - RNA, 22 nt, Artificial Sequence
  LRRK2 RNA guide
cgccgaggcggggggaucauga

SEQ ID NO: 32799 - RNA, 22 nt, Artificial Sequence
  LRRK2 RNA guide
cucaugauccccccgccucggc

SEQ ID NO: 32800 - RNA, 22 nt, Artificial Sequence
  LRRK2 RNA guide
cuuugggacgccgaggcggggg

SEQ ID NO: 32801 - RNA, 22 nt, Artificial Sequence
  LRRK2 RNA guide
gaccucaugauccccccgccuc

SEQ ID NO: 32802 - RNA, 22 nt, Artificial Sequence
  LRRK2 RNA guide
gacgccgaggcggggggaucau

SEQ ID NO: 32803 - RNA, 22 nt, Artificial Sequence
  LRRK2 RNA guide
gcacuuugggacgccgaggcgg

SEQ ID NO: 32804 - RNA, 22 nt, Artificial Sequence
  LRRK2 RNA guide
ggacgccgaggcggggggauca

SEQ ID NO: 32805 - RNA, 22 nt, Artificial Sequence
  LRRK2 RNA guide
ucagcacuuugggacgccgagg

SEQ ID NO: 32806 - RNA, 22 nt, Artificial Sequence
  LRRK2 RNA guide
ucaugauccccccgccucggcg

SEQ ID NO: 32807 - RNA, 22 nt, Artificial Sequence
  LRRK2 RNA guide
uccccccgccucggcgucccaa

SEQ ID NO: 32808 - RNA, 22 nt, Artificial Sequence
  LRRK2 RNA guide
ugaccucaugauccccccgccu

SEQ ID NO: 32809 - RNA, 22 nt, Artificial Sequence
  LRRK2 RNA guide
ugauccccccgccucggcgucc

SEQ ID NO: 32810 - RNA, 22 nt, Artificial Sequence
  LRRK2 RNA guide
ugggacgccgaggcggggggau

SEQ ID NO: 32811 - RNA, 22 nt, Artificial Sequence
  LRRK2 RNA guide
uugggacgccgaggcgggggga

SEQ ID NO: 32812 - RNA, 22 nt, Artificial Sequence
  LRRK2 RNA guide
uuugggacgccgaggcgggggg

SEQ ID NO: 32813 - RNA, 20 nt, Artificial Sequence
  LRRK2 RNA guide
acaccgaggcggggggauca

SEQ ID NO: 32814 - RNA, 20 nt, Artificial Sequence
  LRRK2 RNA guide
acuuugggacaccgaggcgg

SEQ ID NO: 32815 - RNA, 20 nt, Artificial Sequence
  LRRK2 RNA guide
agcacuuugggacaccgagg

SEQ ID NO: 32816 - RNA, 20 nt, Artificial Sequence
  LRRK2 RNA guide
auccccccgccucggugucc

SEQ ID NO: 32817 - RNA, 20 nt, Artificial Sequence
  LRRK2 RNA guide
augauccccccgccucggug

SEQ ID NO: 32818 - RNA, 20 nt, Artificial Sequence
  LRRK2 RNA guide
caccgaggcggggggaucau

SEQ ID NO: 32819 - RNA, 20 nt, Artificial Sequence
  LRRK2 RNA guide
cacuuugggacaccgaggcg

SEQ ID NO: 32820 - RNA, 20 nt, Artificial Sequence
  LRRK2 RNA guide
caugauccccccgccucggu

SEQ ID NO: 32821 - RNA, 20 nt, Artificial Sequence
  LRRK2 RNA guide
ccccccgccucgguguccca

SEQ ID NO: 32822 - RNA, 20 nt, Artificial Sequence
  LRRK2 RNA guide
cccccgccucggugucccaa

SEQ ID NO: 32823 - RNA, 20 nt, Artificial Sequence
  LRRK2 RNA guide
ccccgccucggugucccaaa

SEQ ID NO: 32824 - RNA, 20 nt, Artificial Sequence
  LRRK2 RNA guide
cuuugggacaccgaggcggg

SEQ ID NO: 32825 - RNA, 20 nt, Artificial Sequence
  LRRK2 RNA guide
gacaccgaggcggggggauc

SEQ ID NO: 32826 - RNA, 20 nt, Artificial Sequence
  LRRK2 RNA guide
gauccccccgccucgguguc

SEQ ID NO: 32827 - RNA, 20 nt, Artificial Sequence
  LRRK2 RNA guide
gcacuuugggacaccgaggc

SEQ ID NO: 32828 - RNA, 20 nt, Artificial Sequence
  LRRK2 RNA guide
ggacaccgaggcggggggau

SEQ ID NO: 32829 - RNA, 20 nt, Artificial Sequence
  LRRK2 RNA guide
gggacaccgaggcgggggga

SEQ ID NO: 32830 - RNA, 20 nt, Artificial Sequence
  LRRK2 RNA guide
uccccccgccucgguguccc

SEQ ID NO: 32831 - RNA, 20 nt, Artificial Sequence
  LRRK2 RNA guide
ugauccccccgccucggugu

SEQ ID NO: 32832 - RNA, 20 nt, Artificial Sequence
  LRRK2 RNA guide
ugggacaccgaggcgggggg

SEQ ID NO: 32833 - RNA, 20 nt, Artificial Sequence
  LRRK2 RNA guide
uugggacaccgaggcggggg

SEQ ID NO: 32834 - RNA, 20 nt, Artificial Sequence
  LRRK2 RNA guide
uuugggacaccgaggcgggg

SEQ ID NO: 32835 - RNA, 21 nt, Artificial Sequence
  LRRK2 RNA guide
acaccgaggcggggggaucau

SEQ ID NO: 32836 - RNA, 21 nt, Artificial Sequence
  LRRK2 RNA guide
acuuugggacaccgaggcggg

SEQ ID NO: 32837 - RNA, 21 nt, Artificial Sequence
  LRRK2 RNA guide
agcacuuugggacaccgaggc

SEQ ID NO: 32838 - RNA, 21 nt, Artificial Sequence
  LRRK2 RNA guide
auccccccgccucgguguccc

SEQ ID NO: 32839 - RNA, 21 nt, Artificial Sequence
  LRRK2 RNA guide
augauccccccgccucggugu

SEQ ID NO: 32840 - RNA, 21 nt, Artificial Sequence
  LRRK2 RNA guide
caccgaggcggggggaucaug

SEQ ID NO: 32841 - RNA, 21 nt, Artificial Sequence
  LRRK2 RNA guide
cacuuugggacaccgaggcgg

SEQ ID NO: 32842 - RNA, 21 nt, Artificial Sequence
  LRRK2 RNA guide
cagcacuuugggacaccgagg

SEQ ID NO: 32843 - RNA, 21 nt, Artificial Sequence
  LRRK2 RNA guide
caugauccccccgccucggug

SEQ ID NO: 32844 - RNA, 21 nt, Artificial Sequence
  LRRK2 RNA guide
ccccccgccucggugucccaa

SEQ ID NO: 32845 - RNA, 21 nt, Artificial Sequence
  LRRK2 RNA guide
cccccgccucggugucccaaa

SEQ ID NO: 32846 - RNA, 21 nt, Artificial Sequence
  LRRK2 RNA guide
ccccgccucggugucccaaag

SEQ ID NO: 32847 - RNA, 21 nt, Artificial Sequence
  LRRK2 RNA guide
cuuugggacaccgaggcgggg

SEQ ID NO: 32848 - RNA, 21 nt, Artificial Sequence
  LRRK2 RNA guide
gacaccgaggcggggggauca

SEQ ID NO: 32849 - RNA, 21 nt, Artificial Sequence
  LRRK2 RNA guide
gauccccccgccucggugucc

SEQ ID NO: 32850 - RNA, 21 nt, Artificial Sequence
  LRRK2 RNA guide
gcacuuugggacaccgaggcg

SEQ ID NO: 32851 - RNA, 21 nt, Artificial Sequence
  LRRK2 RNA guide
ggacaccgaggcggggggauc

SEQ ID NO: 32852 - RNA, 21 nt, Artificial Sequence
  LRRK2 RNA guide
gggacaccgaggcggggggau

SEQ ID NO: 32853 - RNA, 21 nt, Artificial Sequence
  LRRK2 RNA guide
ucaugauccccccgccucggu

SEQ ID NO: 32854 - RNA, 21 nt, Artificial Sequence
  LRRK2 RNA guide
uccccccgccucgguguccca

SEQ ID NO: 32855 - RNA, 21 nt, Artificial Sequence
  LRRK2 RNA guide
ugauccccccgccucgguguc

SEQ ID NO: 32856 - RNA, 21 nt, Artificial Sequence
  LRRK2 RNA guide
ugggacaccgaggcgggggga

SEQ ID NO: 32857 - RNA, 21 nt, Artificial Sequence
  LRRK2 RNA guide
uugggacaccgaggcgggggg

SEQ ID NO: 32858 - RNA, 21 nt, Artificial Sequence
  LRRK2 RNA guide
uuugggacaccgaggcggggg

SEQ ID NO: 32859 - RNA, 22 nt, Artificial Sequence
  LRRK2 RNA guide
acaccgaggcggggggaucaug

SEQ ID NO: 32860 - RNA, 22 nt, Artificial Sequence
  LRRK2 RNA guide
acuuugggacaccgaggcgggg

SEQ ID NO: 32861 - RNA, 22 nt, Artificial Sequence
  LRRK2 RNA guide
agcacuuugggacaccgaggcg

SEQ ID NO: 32862 - RNA, 22 nt, Artificial Sequence
  LRRK2 RNA guide
auccccccgccucgguguccca

SEQ ID NO: 32863 - RNA, 22 nt, Artificial Sequence
  LRRK2 RNA guide
augauccccccgccucgguguc

SEQ ID NO: 32864 - RNA, 22 nt, Artificial Sequence
  LRRK2 RNA guide
caccgaggcggggggaucauga

SEQ ID NO: 32865 - RNA, 22 nt, Artificial Sequence
  LRRK2 RNA guide
cacuuugggacaccgaggcggg

SEQ ID NO: 32866 - RNA, 22 nt, Artificial Sequence
  LRRK2 RNA guide
cagcacuuugggacaccgaggc

SEQ ID NO: 32867 - RNA, 22 nt, Artificial Sequence
  LRRK2 RNA guide
caugauccccccgccucggugu

SEQ ID NO: 32868 - RNA, 22 nt, Artificial Sequence
  LRRK2 RNA guide
ccccccgccucggugucccaaa

SEQ ID NO: 32869 - RNA, 22 nt, Artificial Sequence
  LRRK2 RNA guide
cccccgccucggugucccaaag

SEQ ID NO: 32870 - RNA, 22 nt, Artificial Sequence
  LRRK2 RNA guide
ccccgccucggugucccaaagu

SEQ ID NO: 32871 - RNA, 22 nt, Artificial Sequence
  LRRK2 RNA guide
cucaugauccccccgccucggu

SEQ ID NO: 32872 - RNA, 22 nt, Artificial Sequence
  LRRK2 RNA guide
cuuugggacaccgaggcggggg

SEQ ID NO: 32873 - RNA, 22 nt, Artificial Sequence
  LRRK2 RNA guide
gacaccgaggcggggggaucau

SEQ ID NO: 32874 - RNA, 22 nt, Artificial Sequence
  LRRK2 RNA guide
gauccccccgccucgguguccc

SEQ ID NO: 32875 - RNA, 22 nt, Artificial Sequence
  LRRK2 RNA guide
gcacuuugggacaccgaggcgg

SEQ ID NO: 32876 - RNA, 22 nt, Artificial Sequence
  LRRK2 RNA guide
ggacaccgaggcggggggauca

SEQ ID NO: 32877 - RNA, 22 nt, Artificial Sequence
  LRRK2 RNA guide
gggacaccgaggcggggggauc

SEQ ID NO: 32878 - RNA, 22 nt, Artificial Sequence
  LRRK2 RNA guide
ucagcacuuugggacaccgagg

SEQ ID NO: 32879 - RNA, 22 nt, Artificial Sequence
  LRRK2 RNA guide
ucaugauccccccgccucggug

SEQ ID NO: 32880 - RNA, 22 nt, Artificial Sequence
  LRRK2 RNA guide
uccccccgccucggugucccaa

SEQ ID NO: 32881 - RNA, 22 nt, Artificial Sequence
  LRRK2 RNA guide
ugauccccccgccucggugucc

SEQ ID NO: 32882 - RNA, 22 nt, Artificial Sequence
  LRRK2 RNA guide
ugggacaccgaggcggggggau

SEQ ID NO: 32883 - RNA, 22 nt, Artificial Sequence
  LRRK2 RNA guide
uugaccucaugauccccccgcc

SEQ ID NO: 32884 - RNA, 22 nt, Artificial Sequence
  LRRK2 RNA guide
uugggacaccgaggcgggggga

SEQ ID NO: 32885 - RNA, 22 nt, Artificial Sequence
  LRRK2 RNA guide
uuugggacaccgaggcgggggg

SEQ ID NO: 32886 - RNA, 20 nt, Artificial Sequence
  LRRK2 RNA guide
auuaaguaaaugugugugug

SEQ ID NO: 32887 - RNA, 20 nt, Artificial Sequence
  LRRK2 RNA guide
cauuaaguaaaugugugugu

SEQ ID NO: 32888 - RNA, 20 nt, Artificial Sequence
  LRRK2 RNA guide
uuaaguaaaugugugugugu

SEQ ID NO: 32889 - RNA, 21 nt, Artificial Sequence
  LRRK2 RNA guide
cauuaaguaaaugugugugug

SEQ ID NO: 32890 - RNA, 21 nt, Artificial Sequence
  LRRK2 RNA guide
ccauuaaguaaaugugugugu

SEQ ID NO: 32891 - RNA, 22 nt, Artificial Sequence
  LRRK2 RNA guide
accauuaaguaaaugugugugu

SEQ ID NO: 32892 - RNA, 22 nt, Artificial Sequence
  LRRK2 RNA guide
cauuaaguaaaugugugugugu

SEQ ID NO: 32893 - RNA, 22 nt, Artificial Sequence
  LRRK2 RNA guide
ccauuaaguaaaugugugugug

SEQ ID NO: 32894 - RNA, 20 nt, Artificial Sequence
  LRRK2 RNA guide
aagcuacccuaauccugauc

SEQ ID NO: 32895 - RNA, 20 nt, Artificial Sequence
  LRRK2 RNA guide
acccuaauccugaucuucaa

SEQ ID NO: 32896 - RNA, 20 nt, Artificial Sequence
  LRRK2 RNA guide
agcuacccuaauccugaucu

SEQ ID NO: 32897 - RNA, 20 nt, Artificial Sequence
  LRRK2 RNA guide
caagcuacccuaauccugau

SEQ ID NO: 32898 - RNA, 20 nt, Artificial Sequence
  LRRK2 RNA guide
cccuaauccugaucuucaaa

SEQ ID NO: 32899 - RNA, 20 nt, Artificial Sequence
  LRRK2 RNA guide
ccuaauccugaucuucaaaa

SEQ ID NO: 32900 - RNA, 20 nt, Artificial Sequence
  LRRK2 RNA guide
cuaauccugaucuucaaaaa

SEQ ID NO: 32901 - RNA, 20 nt, Artificial Sequence
  LRRK2 RNA guide
cuacccuaauccugaucuuc

SEQ ID NO: 32902 - RNA, 20 nt, Artificial Sequence
  LRRK2 RNA guide
gcuacccuaauccugaucuu

SEQ ID NO: 32903 - RNA, 20 nt, Artificial Sequence
  LRRK2 RNA guide
uacccuaauccugaucuuca

SEQ ID NO: 32904 - RNA, 20 nt, Artificial Sequence
  LRRK2 RNA guide
ucaagcuacccuaauccuga

SEQ ID NO: 32905 - RNA, 20 nt, Artificial Sequence
  LRRK2 RNA guide
ugaagaucaggauuagggua

SEQ ID NO: 32906 - RNA, 20 nt, Artificial Sequence
  LRRK2 RNA guide
uugaagaucaggauuagggu

SEQ ID NO: 32907 - RNA, 20 nt, Artificial Sequence
  LRRK2 RNA guide
uuugaagaucaggauuaggg

SEQ ID NO: 32908 - RNA, 20 nt, Artificial Sequence
  LRRK2 RNA guide
uuuugaagaucaggauuagg

SEQ ID NO: 32909 - RNA, 20 nt, Artificial Sequence
  LRRK2 RNA guide
uuuuugaagaucaggauuag

SEQ ID NO: 32910 - RNA, 21 nt, Artificial Sequence
  LRRK2 RNA guide
aagcuacccuaauccugaucu

SEQ ID NO: 32911 - RNA, 21 nt, Artificial Sequence
  LRRK2 RNA guide
acccuaauccugaucuucaaa

SEQ ID NO: 32912 - RNA, 21 nt, Artificial Sequence
  LRRK2 RNA guide
agcuacccuaauccugaucuu

SEQ ID NO: 32913 - RNA, 21 nt, Artificial Sequence
  LRRK2 RNA guide
aucaagcuacccuaauccuga

SEQ ID NO: 32914 - RNA, 21 nt, Artificial Sequence
  LRRK2 RNA guide
caagcuacccuaauccugauc

SEQ ID NO: 32915 - RNA, 21 nt, Artificial Sequence
  LRRK2 RNA guide
cccuaauccugaucuucaaaa

SEQ ID NO: 32916 - RNA, 21 nt, Artificial Sequence
  LRRK2 RNA guide
ccuaauccugaucuucaaaaa

SEQ ID NO: 32917 - RNA, 21 nt, Artificial Sequence
  LRRK2 RNA guide
cuacccuaauccugaucuuca

SEQ ID NO: 32918 - RNA, 21 nt, Artificial Sequence
  LRRK2 RNA guide
gcuacccuaauccugaucuuc

SEQ ID NO: 32919 - RNA, 21 nt, Artificial Sequence
  LRRK2 RNA guide
uacccuaauccugaucuucaa

SEQ ID NO: 32920 - RNA, 21 nt, Artificial Sequence
  LRRK2 RNA guide
ucaagcuacccuaauccugau

SEQ ID NO: 32921 - RNA, 21 nt, Artificial Sequence
  LRRK2 RNA guide
ugaagaucaggauuaggguag

SEQ ID NO: 32922 - RNA, 21 nt, Artificial Sequence
  LRRK2 RNA guide
uugaagaucaggauuagggua

SEQ ID NO: 32923 - RNA, 21 nt, Artificial Sequence
  LRRK2 RNA guide
uuugaagaucaggauuagggu

SEQ ID NO: 32924 - RNA, 21 nt, Artificial Sequence
  LRRK2 RNA guide
uuuugaagaucaggauuaggg

SEQ ID NO: 32925 - RNA, 21 nt, Artificial Sequence
  LRRK2 RNA guide
uuuuugaagaucaggauuagg

SEQ ID NO: 32926 - RNA, 22 nt, Artificial Sequence
  LRRK2 RNA guide
aagcuacccuaauccugaucuu

SEQ ID NO: 32927 - RNA, 22 nt, Artificial Sequence
  LRRK2 RNA guide
aaucaagcuacccuaauccuga

SEQ ID NO: 32928 - RNA, 22 nt, Artificial Sequence
  LRRK2 RNA guide
acccuaauccugaucuucaaaa

SEQ ID NO: 32929 - RNA, 22 nt, Artificial Sequence
  LRRK2 RNA guide
agcuacccuaauccugaucuuc

SEQ ID NO: 32930 - RNA, 22 nt, Artificial Sequence
  LRRK2 RNA guide
aucaagcuacccuaauccugau

SEQ ID NO: 32931 - RNA, 22 nt, Artificial Sequence
  LRRK2 RNA guide
caagcuacccuaauccugaucu

SEQ ID NO: 32932 - RNA, 22 nt, Artificial Sequence
  LRRK2 RNA guide
cccuaauccugaucuucaaaaa

SEQ ID NO: 32933 - RNA, 22 nt, Artificial Sequence
  LRRK2 RNA guide
ccuaauccugaucuucaaaaaa

SEQ ID NO: 32934 - RNA, 22 nt, Artificial Sequence
  LRRK2 RNA guide
cuacccuaauccugaucuucaa

SEQ ID NO: 32935 - RNA, 22 nt, Artificial Sequence
  LRRK2 RNA guide
gcuacccuaauccugaucuuca

SEQ ID NO: 32936 - RNA, 22 nt, Artificial Sequence
  LRRK2 RNA guide
uacccuaauccugaucuucaaa

SEQ ID NO: 32937 - RNA, 22 nt, Artificial Sequence
  LRRK2 RNA guide
ucaagcuacccuaauccugauc

SEQ ID NO: 32938 - RNA, 22 nt, Artificial Sequence
  LRRK2 RNA guide
ugaagaucaggauuaggguagc

SEQ ID NO: 32939 - RNA, 22 nt, Artificial Sequence
  LRRK2 RNA guide
uugaagaucaggauuaggguag

SEQ ID NO: 32940 - RNA, 22 nt, Artificial Sequence
  LRRK2 RNA guide
uuugaagaucaggauuagggua

SEQ ID NO: 32941 - RNA, 22 nt, Artificial Sequence
  LRRK2 RNA guide
uuuugaagaucaggauuagggu

SEQ ID NO: 32942 - RNA, 22 nt, Artificial Sequence
  LRRK2 RNA guide
uuuuugaagaucaggauuaggg

SEQ ID NO: 32943 - RNA, 22 nt, Artificial Sequence
  LRRK2 RNA guide
uuuuuugaagaucaggauuagg

SEQ ID NO: 32944 - RNA, 20 nt, Artificial Sequence
  LRRK2 RNA guide
acccuaauccugaucuuaaa

SEQ ID NO: 32945 - RNA, 20 nt, Artificial Sequence
  LRRK2 RNA guide
cccuaauccugaucuuaaaa

SEQ ID NO: 32946 - RNA, 20 nt, Artificial Sequence
  LRRK2 RNA guide
ccuaauccugaucuuaaaaa

SEQ ID NO: 32947 - RNA, 20 nt, Artificial Sequence
  LRRK2 RNA guide
cuacccuaauccugaucuua

SEQ ID NO: 32948 - RNA, 20 nt, Artificial Sequence
  LRRK2 RNA guide
uacccuaauccugaucuuaa

SEQ ID NO: 32949 - RNA, 20 nt, Artificial Sequence
  LRRK2 RNA guide
uuaagaucaggauuagggua

SEQ ID NO: 32950 - RNA, 20 nt, Artificial Sequence
  LRRK2 RNA guide
uuuaagaucaggauuagggu

SEQ ID NO: 32951 - RNA, 20 nt, Artificial Sequence
  LRRK2 RNA guide
uuuuaagaucaggauuaggg

SEQ ID NO: 32952 - RNA, 20 nt, Artificial Sequence
  LRRK2 RNA guide
uuuuuaagaucaggauuagg

SEQ ID NO: 32953 - RNA, 21 nt, Artificial Sequence
  LRRK2 RNA guide
acccuaauccugaucuuaaaa

SEQ ID NO: 32954 - RNA, 21 nt, Artificial Sequence
  LRRK2 RNA guide
cccuaauccugaucuuaaaaa

SEQ ID NO: 32955 - RNA, 21 nt, Artificial Sequence
  LRRK2 RNA guide
cuacccuaauccugaucuuaa

SEQ ID NO: 32956 - RNA, 21 nt, Artificial Sequence
  LRRK2 RNA guide
gcuacccuaauccugaucuua

SEQ ID NO: 32957 - RNA, 21 nt, Artificial Sequence
  LRRK2 RNA guide
uacccuaauccugaucuuaaa

SEQ ID NO: 32958 - RNA, 21 nt, Artificial Sequence
  LRRK2 RNA guide
uuaagaucaggauuaggguag

SEQ ID NO: 32959 - RNA, 21 nt, Artificial Sequence
  LRRK2 RNA guide
uuuaagaucaggauuagggua

SEQ ID NO: 32960 - RNA, 21 nt, Artificial Sequence
  LRRK2 RNA guide
uuuuaagaucaggauuagggu

SEQ ID NO: 32961 - RNA, 21 nt, Artificial Sequence
  LRRK2 RNA guide
uuuuuaagaucaggauuaggg

SEQ ID NO: 32962 - RNA, 22 nt, Artificial Sequence
  LRRK2 RNA guide
acccuaauccugaucuuaaaaa

SEQ ID NO: 32963 - RNA, 22 nt, Artificial Sequence
  LRRK2 RNA guide
agcuacccuaauccugaucuua

SEQ ID NO: 32964 - RNA, 22 nt, Artificial Sequence
  LRRK2 RNA guide
cccuaauccugaucuuaaaaaa

SEQ ID NO: 32965 - RNA, 22 nt, Artificial Sequence
  LRRK2 RNA guide
cuacccuaauccugaucuuaaa

SEQ ID NO: 32966 - RNA, 22 nt, Artificial Sequence
  LRRK2 RNA guide
gcuacccuaauccugaucuuaa

SEQ ID NO: 32967 - RNA, 22 nt, Artificial Sequence
  LRRK2 RNA guide
uacccuaauccugaucuuaaaa

SEQ ID NO: 32968 - RNA, 22 nt, Artificial Sequence
  LRRK2 RNA guide
uuaagaucaggauuaggguagc

SEQ ID NO: 32969 - RNA, 22 nt, Artificial Sequence
  LRRK2 RNA guide
uuuaagaucaggauuaggguag

SEQ ID NO: 32970 - RNA, 22 nt, Artificial Sequence
  LRRK2 RNA guide
uuuuaagaucaggauuagggua

SEQ ID NO: 32971 - RNA, 22 nt, Artificial Sequence
  LRRK2 RNA guide
uuuuuaagaucaggauuagggu

SEQ ID NO: 32972 - RNA, 22 nt, Artificial Sequence
  LRRK2 RNA guide
uuuuuuaagaucaggauuaggg

SEQ ID NO: 32973 - RNA, 20 nt, Artificial Sequence
  LRRK2 RNA guide
aaacuccuaagucaucuucc

SEQ ID NO: 32974 - RNA, 20 nt, Artificial Sequence
  LRRK2 RNA guide
aacuccuaagucaucuuccu

SEQ ID NO: 32975 - RNA, 20 nt, Artificial Sequence
  LRRK2 RNA guide
aagaaggaagaugacuuagg

SEQ ID NO: 32976 - RNA, 20 nt, Artificial Sequence
  LRRK2 RNA guide
aagagaaacuccuaagucau

SEQ ID NO: 32977 - RNA, 20 nt, Artificial Sequence
  LRRK2 RNA guide
aagaugacuuaggaguuucu

SEQ ID NO: 32978 - RNA, 20 nt, Artificial Sequence
  LRRK2 RNA guide
aaggaagaugacuuaggagu

SEQ ID NO: 32979 - RNA, 20 nt, Artificial Sequence
  LRRK2 RNA guide
acccaagagaaacuccuaag

SEQ ID NO: 32980 - RNA, 20 nt, Artificial Sequence
  LRRK2 RNA guide
acuagcuacccaagagaaac

SEQ ID NO: 32981 - RNA, 20 nt, Artificial Sequence
  LRRK2 RNA guide
acuccuaagucaucuuccuu

SEQ ID NO: 32982 - RNA, 20 nt, Artificial Sequence
  LRRK2 RNA guide
acuuaggaguuucucuuggg

SEQ ID NO: 32983 - RNA, 20 nt, Artificial Sequence
  LRRK2 RNA guide
agaaacuccuaagucaucuu

SEQ ID NO: 32984 - RNA, 20 nt, Artificial Sequence
  LRRK2 RNA guide
agaaggaagaugacuuagga

SEQ ID NO: 32985 - RNA, 20 nt, Artificial Sequence
  LRRK2 RNA guide
agagaaacuccuaagucauc

SEQ ID NO: 32986 - RNA, 20 nt, Artificial Sequence
  LRRK2 RNA guide
agaugacuuaggaguuucuc

SEQ ID NO: 32987 - RNA, 20 nt, Artificial Sequence
  LRRK2 RNA guide
agcuacccaagagaaacucc

SEQ ID NO: 32988 - RNA, 20 nt, Artificial Sequence
  LRRK2 RNA guide
aggaagaugacuuaggaguu

SEQ ID NO: 32989 - RNA, 20 nt, Artificial Sequence
  LRRK2 RNA guide
aggguggaagaaggaagaug

SEQ ID NO: 32990 - RNA, 20 nt, Artificial Sequence
  LRRK2 RNA guide
augacuuaggaguuucucuu

SEQ ID NO: 32991 - RNA, 20 nt, Artificial Sequence
  LRRK2 RNA guide
caagagaaacuccuaaguca

SEQ ID NO: 32992 - RNA, 20 nt, Artificial Sequence
  LRRK2 RNA guide
ccaagagaaacuccuaaguc

SEQ ID NO: 32993 - RNA, 20 nt, Artificial Sequence
  LRRK2 RNA guide
cccaagagaaacuccuaagu

SEQ ID NO: 32994 - RNA, 20 nt, Artificial Sequence
  LRRK2 RNA guide
ccuaagucaucuuccuucuu

SEQ ID NO: 32995 - RNA, 20 nt, Artificial Sequence
  LRRK2 RNA guide
cuaagucaucuuccuucuuc

SEQ ID NO: 32996 - RNA, 20 nt, Artificial Sequence
  LRRK2 RNA guide
cuacccaagagaaacuccua

SEQ ID NO: 32997 - RNA, 20 nt, Artificial Sequence
  LRRK2 RNA guide
cuagcuacccaagagaaacu

SEQ ID NO: 32998 - RNA, 20 nt, Artificial Sequence
  LRRK2 RNA guide
cuccuaagucaucuuccuuc

SEQ ID NO: 32999 - RNA, 20 nt, Artificial Sequence
  LRRK2 RNA guide
cuuaggaguuucucuugggu

SEQ ID NO: 33000 - RNA, 20 nt, Artificial Sequence
  LRRK2 RNA guide
gaaacuccuaagucaucuuc

SEQ ID NO: 33001 - RNA, 20 nt, Artificial Sequence
  LRRK2 RNA guide
gaagaaggaagaugacuuag

SEQ ID NO: 33002 - RNA, 20 nt, Artificial Sequence
  LRRK2 RNA guide
gaagaugacuuaggaguuuc

SEQ ID NO: 33003 - RNA, 20 nt, Artificial Sequence
  LRRK2 RNA guide
gaaggaagaugacuuaggag

SEQ ID NO: 33004 - RNA, 20 nt, Artificial Sequence
  LRRK2 RNA guide
gacuuaggaguuucucuugg

SEQ ID NO: 33005 - RNA, 20 nt, Artificial Sequence
  LRRK2 RNA guide
gagaaacuccuaagucaucu

SEQ ID NO: 33006 - RNA, 20 nt, Artificial Sequence
  LRRK2 RNA guide
gaggguggaagaaggaagau

SEQ ID NO: 33007 - RNA, 20 nt, Artificial Sequence
  LRRK2 RNA guide
gaugacuuaggaguuucucu

SEQ ID NO: 33008 - RNA, 20 nt, Artificial Sequence
  LRRK2 RNA guide
gcuacccaagagaaacuccu

SEQ ID NO: 33009 - RNA, 20 nt, Artificial Sequence
  LRRK2 RNA guide
ggaagaaggaagaugacuua

SEQ ID NO: 33010 - RNA, 20 nt, Artificial Sequence
  LRRK2 RNA guide
ggaagaugacuuaggaguuu

SEQ ID NO: 33011 - RNA, 20 nt, Artificial Sequence
  LRRK2 RNA guide
ggguggaagaaggaagauga

SEQ ID NO: 33012 - RNA, 20 nt, Artificial Sequence
  LRRK2 RNA guide
gguggaagaaggaagaugac

SEQ ID NO: 33013 - RNA, 20 nt, Artificial Sequence
  LRRK2 RNA guide
guggaagaaggaagaugacu

SEQ ID NO: 33014 - RNA, 20 nt, Artificial Sequence
  LRRK2 RNA guide
uaagucaucuuccuucuucc

SEQ ID NO: 33015 - RNA, 20 nt, Artificial Sequence
  LRRK2 RNA guide
uacccaagagaaacuccuaa

SEQ ID NO: 33016 - RNA, 20 nt, Artificial Sequence
  LRRK2 RNA guide
uagcuacccaagagaaacuc

SEQ ID NO: 33017 - RNA, 20 nt, Artificial Sequence
  LRRK2 RNA guide
uccuaagucaucuuccuucu

SEQ ID NO: 33018 - RNA, 20 nt, Artificial Sequence
  LRRK2 RNA guide
ugacuuaggaguuucucuug

SEQ ID NO: 33019 - RNA, 20 nt, Artificial Sequence
  LRRK2 RNA guide
uggaagaaggaagaugacuu

SEQ ID NO: 33020 - RNA, 20 nt, Artificial Sequence
  LRRK2 RNA guide
uuaggaguuucucuugggua

SEQ ID NO: 33021 - RNA, 21 nt, Artificial Sequence
  LRRK2 RNA guide
aaacuccuaagucaucuuccu

SEQ ID NO: 33022 - RNA, 21 nt, Artificial Sequence
  LRRK2 RNA guide
aacuccuaagucaucuuccuu

SEQ ID NO: 33023 - RNA, 21 nt, Artificial Sequence
  LRRK2 RNA guide
aagaaggaagaugacuuagga

SEQ ID NO: 33024 - RNA, 21 nt, Artificial Sequence
  LRRK2 RNA guide
aagagaaacuccuaagucauc

SEQ ID NO: 33025 - RNA, 21 nt, Artificial Sequence
  LRRK2 RNA guide
aagaugacuuaggaguuucuc

SEQ ID NO: 33026 - RNA, 21 nt, Artificial Sequence
  LRRK2 RNA guide
aaggaagaugacuuaggaguu

SEQ ID NO: 33027 - RNA, 21 nt, Artificial Sequence
  LRRK2 RNA guide
acccaagagaaacuccuaagu

SEQ ID NO: 33028 - RNA, 21 nt, Artificial Sequence
  LRRK2 RNA guide
acuagcuacccaagagaaacu

SEQ ID NO: 33029 - RNA, 21 nt, Artificial Sequence
  LRRK2 RNA guide
acuccuaagucaucuuccuuc

SEQ ID NO: 33030 - RNA, 21 nt, Artificial Sequence
  LRRK2 RNA guide
acuuaggaguuucucuugggu

SEQ ID NO: 33031 - RNA, 21 nt, Artificial Sequence
  LRRK2 RNA guide
agaaacuccuaagucaucuuc

SEQ ID NO: 33032 - RNA, 21 nt, Artificial Sequence
  LRRK2 RNA guide
agaaggaagaugacuuaggag

SEQ ID NO: 33033 - RNA, 21 nt, Artificial Sequence
  LRRK2 RNA guide
agagaaacuccuaagucaucu

SEQ ID NO: 33034 - RNA, 21 nt, Artificial Sequence
  LRRK2 RNA guide
agaugacuuaggaguuucucu

SEQ ID NO: 33035 - RNA, 21 nt, Artificial Sequence
  LRRK2 RNA guide
agcuacccaagagaaacuccu

SEQ ID NO: 33036 - RNA, 21 nt, Artificial Sequence
  LRRK2 RNA guide
aggaagaugacuuaggaguuu

SEQ ID NO: 33037 - RNA, 21 nt, Artificial Sequence
  LRRK2 RNA guide
aggguggaagaaggaagauga

SEQ ID NO: 33038 - RNA, 21 nt, Artificial Sequence
  LRRK2 RNA guide
augacuuaggaguuucucuug

SEQ ID NO: 33039 - RNA, 21 nt, Artificial Sequence
  LRRK2 RNA guide
caagagaaacuccuaagucau

SEQ ID NO: 33040 - RNA, 21 nt, Artificial Sequence
  LRRK2 RNA guide
cacuagcuacccaagagaaac

SEQ ID NO: 33041 - RNA, 21 nt, Artificial Sequence
  LRRK2 RNA guide
ccaagagaaacuccuaaguca

SEQ ID NO: 33042 - RNA, 21 nt, Artificial Sequence
  LRRK2 RNA guide
cccaagagaaacuccuaaguc

SEQ ID NO: 33043 - RNA, 21 nt, Artificial Sequence
  LRRK2 RNA guide
ccuaagucaucuuccuucuuc

SEQ ID NO: 33044 - RNA, 21 nt, Artificial Sequence
  LRRK2 RNA guide
cuaagucaucuuccuucuucc

SEQ ID NO: 33045 - RNA, 21 nt, Artificial Sequence
  LRRK2 RNA guide
cuacccaagagaaacuccuaa

SEQ ID NO: 33046 - RNA, 21 nt, Artificial Sequence
  LRRK2 RNA guide
cuagcuacccaagagaaacuc

SEQ ID NO: 33047 - RNA, 21 nt, Artificial Sequence
  LRRK2 RNA guide
cuccuaagucaucuuccuucu

SEQ ID NO: 33048 - RNA, 21 nt, Artificial Sequence
  LRRK2 RNA guide
cuuaggaguuucucuugggua

SEQ ID NO: 33049 - RNA, 21 nt, Artificial Sequence
  LRRK2 RNA guide
gaaacuccuaagucaucuucc

SEQ ID NO: 33050 - RNA, 21 nt, Artificial Sequence
  LRRK2 RNA guide
gaagaaggaagaugacuuagg

SEQ ID NO: 33051 - RNA, 21 nt, Artificial Sequence
  LRRK2 RNA guide
gaagaugacuuaggaguuucu

SEQ ID NO: 33052 - RNA, 21 nt, Artificial Sequence
  LRRK2 RNA guide
gaaggaagaugacuuaggagu

SEQ ID NO: 33053 - RNA, 21 nt, Artificial Sequence
  LRRK2 RNA guide
gacuuaggaguuucucuuggg

SEQ ID NO: 33054 - RNA, 21 nt, Artificial Sequence
  LRRK2 RNA guide
gagaaacuccuaagucaucuu

SEQ ID NO: 33055 - RNA, 21 nt, Artificial Sequence
  LRRK2 RNA guide
gaggguggaagaaggaagaug

SEQ ID NO: 33056 - RNA, 21 nt, Artificial Sequence
  LRRK2 RNA guide
gaugacuuaggaguuucucuu

SEQ ID NO: 33057 - RNA, 21 nt, Artificial Sequence
  LRRK2 RNA guide
gcuacccaagagaaacuccua

SEQ ID NO: 33058 - RNA, 21 nt, Artificial Sequence
  LRRK2 RNA guide
ggaagaaggaagaugacuuag

SEQ ID NO: 33059 - RNA, 21 nt, Artificial Sequence
  LRRK2 RNA guide
ggaagaugacuuaggaguuuc

SEQ ID NO: 33060 - RNA, 21 nt, Artificial Sequence
  LRRK2 RNA guide
ggaggguggaagaaggaagau

SEQ ID NO: 33061 - RNA, 21 nt, Artificial Sequence
  LRRK2 RNA guide
ggguggaagaaggaagaugac

SEQ ID NO: 33062 - RNA, 21 nt, Artificial Sequence
  LRRK2 RNA guide
gguggaagaaggaagaugacu

SEQ ID NO: 33063 - RNA, 21 nt, Artificial Sequence
  LRRK2 RNA guide
guggaagaaggaagaugacuu

SEQ ID NO: 33064 - RNA, 21 nt, Artificial Sequence
  LRRK2 RNA guide
uaagucaucuuccuucuucca

SEQ ID NO: 33065 - RNA, 21 nt, Artificial Sequence
  LRRK2 RNA guide
uacccaagagaaacuccuaag

SEQ ID NO: 33066 - RNA, 21 nt, Artificial Sequence
  LRRK2 RNA guide
uagcuacccaagagaaacucc

SEQ ID NO: 33067 - RNA, 21 nt, Artificial Sequence
  LRRK2 RNA guide
uccuaagucaucuuccuucuu

SEQ ID NO: 33068 - RNA, 21 nt, Artificial Sequence
  LRRK2 RNA guide
ugacuuaggaguuucucuugg

SEQ ID NO: 33069 - RNA, 21 nt, Artificial Sequence
  LRRK2 RNA guide
uggaagaaggaagaugacuua

SEQ ID NO: 33070 - RNA, 21 nt, Artificial Sequence
  LRRK2 RNA guide
uuaggaguuucucuuggguag

SEQ ID NO: 33071 - RNA, 22 nt, Artificial Sequence
  LRRK2 RNA guide
aaacuccuaagucaucuuccuu

SEQ ID NO: 33072 - RNA, 22 nt, Artificial Sequence
  LRRK2 RNA guide
aacuccuaagucaucuuccuuc

SEQ ID NO: 33073 - RNA, 22 nt, Artificial Sequence
  LRRK2 RNA guide
aagaaggaagaugacuuaggag

SEQ ID NO: 33074 - RNA, 22 nt, Artificial Sequence
  LRRK2 RNA guide
aagagaaacuccuaagucaucu

SEQ ID NO: 33075 - RNA, 22 nt, Artificial Sequence
  LRRK2 RNA guide
aagaugacuuaggaguuucucu

SEQ ID NO: 33076 - RNA, 22 nt, Artificial Sequence
  LRRK2 RNA guide
aaggaagaugacuuaggaguuu

SEQ ID NO: 33077 - RNA, 22 nt, Artificial Sequence
  LRRK2 RNA guide
acccaagagaaacuccuaaguc

SEQ ID NO: 33078 - RNA, 22 nt, Artificial Sequence
  LRRK2 RNA guide
acuagcuacccaagagaaacuc

SEQ ID NO: 33079 - RNA, 22 nt, Artificial Sequence
  LRRK2 RNA guide
acuccuaagucaucuuccuucu

SEQ ID NO: 33080 - RNA, 22 nt, Artificial Sequence
  LRRK2 RNA guide
acuuaggaguuucucuugggua

SEQ ID NO: 33081 - RNA, 22 nt, Artificial Sequence
  LRRK2 RNA guide
agaaacuccuaagucaucuucc

SEQ ID NO: 33082 - RNA, 22 nt, Artificial Sequence
  LRRK2 RNA guide
agaaggaagaugacuuaggagu

SEQ ID NO: 33083 - RNA, 22 nt, Artificial Sequence
  LRRK2 RNA guide
agagaaacuccuaagucaucuu

SEQ ID NO: 33084 - RNA, 22 nt, Artificial Sequence
  LRRK2 RNA guide
agaugacuuaggaguuucucuu

SEQ ID NO: 33085 - RNA, 22 nt, Artificial Sequence
  LRRK2 RNA guide
agcuacccaagagaaacuccua

SEQ ID NO: 33086 - RNA, 22 nt, Artificial Sequence
  LRRK2 RNA guide
aggaagaugacuuaggaguuuc

SEQ ID NO: 33087 - RNA, 22 nt, Artificial Sequence
  LRRK2 RNA guide
aggaggguggaagaaggaagau

SEQ ID NO: 33088 - RNA, 22 nt, Artificial Sequence
  LRRK2 RNA guide
aggguggaagaaggaagaugac

SEQ ID NO: 33089 - RNA, 22 nt, Artificial Sequence
  LRRK2 RNA guide
augacuuaggaguuucucuugg

SEQ ID NO: 33090 - RNA, 22 nt, Artificial Sequence
  LRRK2 RNA guide
caagagaaacuccuaagucauc

SEQ ID NO: 33091 - RNA, 22 nt, Artificial Sequence
  LRRK2 RNA guide
cacuagcuacccaagagaaacu

SEQ ID NO: 33092 - RNA, 22 nt, Artificial Sequence
  LRRK2 RNA guide
ccaagagaaacuccuaagucau

SEQ ID NO: 33093 - RNA, 22 nt, Artificial Sequence
  LRRK2 RNA guide
ccacuagcuacccaagagaaac

SEQ ID NO: 33094 - RNA, 22 nt, Artificial Sequence
  LRRK2 RNA guide
cccaagagaaacuccuaaguca

SEQ ID NO: 33095 - RNA, 22 nt, Artificial Sequence
  LRRK2 RNA guide
ccuaagucaucuuccuucuucc

SEQ ID NO: 33096 - RNA, 22 nt, Artificial Sequence
  LRRK2 RNA guide
cuaagucaucuuccuucuucca

SEQ ID NO: 33097 - RNA, 22 nt, Artificial Sequence
  LRRK2 RNA guide
cuacccaagagaaacuccuaag

SEQ ID NO: 33098 - RNA, 22 nt, Artificial Sequence
  LRRK2 RNA guide
cuagcuacccaagagaaacucc

SEQ ID NO: 33099 - RNA, 22 nt, Artificial Sequence
  LRRK2 RNA guide
cuccuaagucaucuuccuucuu

SEQ ID NO: 33100 - RNA, 22 nt, Artificial Sequence
  LRRK2 RNA guide
cuuaggaguuucucuuggguag

SEQ ID NO: 33101 - RNA, 22 nt, Artificial Sequence
  LRRK2 RNA guide
gaaacuccuaagucaucuuccu

SEQ ID NO: 33102 - RNA, 22 nt, Artificial Sequence
  LRRK2 RNA guide
gaagaaggaagaugacuuagga

SEQ ID NO: 33103 - RNA, 22 nt, Artificial Sequence
  LRRK2 RNA guide
gaagaugacuuaggaguuucuc

SEQ ID NO: 33104 - RNA, 22 nt, Artificial Sequence
  LRRK2 RNA guide
gaaggaagaugacuuaggaguu

SEQ ID NO: 33105 - RNA, 22 nt, Artificial Sequence
  LRRK2 RNA guide
gacuuaggaguuucucuugggu

SEQ ID NO: 33106 - RNA, 22 nt, Artificial Sequence
  LRRK2 RNA guide
gagaaacuccuaagucaucuuc

SEQ ID NO: 33107 - RNA, 22 nt, Artificial Sequence
  LRRK2 RNA guide
gaggguggaagaaggaagauga

SEQ ID NO: 33108 - RNA, 22 nt, Artificial Sequence
  LRRK2 RNA guide
gaugacuuaggaguuucucuug

SEQ ID NO: 33109 - RNA, 22 nt, Artificial Sequence
  LRRK2 RNA guide
gcuacccaagagaaacuccuaa

SEQ ID NO: 33110 - RNA, 22 nt, Artificial Sequence
  LRRK2 RNA guide
ggaagaaggaagaugacuuagg

SEQ ID NO: 33111 - RNA, 22 nt, Artificial Sequence
  LRRK2 RNA guide
ggaagaugacuuaggaguuucu

SEQ ID NO: 33112 - RNA, 22 nt, Artificial Sequence
  LRRK2 RNA guide
ggaggguggaagaaggaagaug

SEQ ID NO: 33113 - RNA, 22 nt, Artificial Sequence
  LRRK2 RNA guide
ggguggaagaaggaagaugacu

SEQ ID NO: 33114 - RNA, 22 nt, Artificial Sequence
  LRRK2 RNA guide
gguggaagaaggaagaugacuu

SEQ ID NO: 33115 - RNA, 22 nt, Artificial Sequence
  LRRK2 RNA guide
guggaagaaggaagaugacuua

SEQ ID NO: 33116 - RNA, 22 nt, Artificial Sequence
  LRRK2 RNA guide
uaagucaucuuccuucuuccac

SEQ ID NO: 33117 - RNA, 22 nt, Artificial Sequence
  LRRK2 RNA guide
uacccaagagaaacuccuaagu

SEQ ID NO: 33118 - RNA, 22 nt, Artificial Sequence
  LRRK2 RNA guide
uagcuacccaagagaaacuccu

SEQ ID NO: 33119 - RNA, 22 nt, Artificial Sequence
  LRRK2 RNA guide
uccuaagucaucuuccuucuuc

SEQ ID NO: 33120 - RNA, 22 nt, Artificial Sequence
  LRRK2 RNA guide
ugacuuaggaguuucucuuggg

SEQ ID NO: 33121 - RNA, 22 nt, Artificial Sequence
  LRRK2 RNA guide
uggaagaaggaagaugacuuag

SEQ ID NO: 33122 - RNA, 22 nt, Artificial Sequence
  LRRK2 RNA guide
uuaggaguuucucuuggguagc

SEQ ID NO: 33123 - RNA, 20 nt, Artificial Sequence
  LRRK2 RNA guide
aaacuccugagucaucuucc

SEQ ID NO: 33124 - RNA, 20 nt, Artificial Sequence
  LRRK2 RNA guide
aacuccugagucaucuuccu

SEQ ID NO: 33125 - RNA, 20 nt, Artificial Sequence
  LRRK2 RNA guide
aagaaggaagaugacucagg

SEQ ID NO: 33126 - RNA, 20 nt, Artificial Sequence
  LRRK2 RNA guide
aagagaaacuccugagucau

SEQ ID NO: 33127 - RNA, 20 nt, Artificial Sequence
  LRRK2 RNA guide
aagaugacucaggaguuucu

SEQ ID NO: 33128 - RNA, 20 nt, Artificial Sequence
  LRRK2 RNA guide
aaggaagaugacucaggagu

SEQ ID NO: 33129 - RNA, 20 nt, Artificial Sequence
  LRRK2 RNA guide
acccaagagaaacuccugag

SEQ ID NO: 33130 - RNA, 20 nt, Artificial Sequence
  LRRK2 RNA guide
acucaggaguuucucuuggg

SEQ ID NO: 33131 - RNA, 20 nt, Artificial Sequence
  LRRK2 RNA guide
acuccugagucaucuuccuu

SEQ ID NO: 33132 - RNA, 20 nt, Artificial Sequence
  LRRK2 RNA guide
agaaacuccugagucaucuu

SEQ ID NO: 33133 - RNA, 20 nt, Artificial Sequence
  LRRK2 RNA guide
agaaggaagaugacucagga

SEQ ID NO: 33134 - RNA, 20 nt, Artificial Sequence
  LRRK2 RNA guide
agagaaacuccugagucauc

SEQ ID NO: 33135 - RNA, 20 nt, Artificial Sequence
  LRRK2 RNA guide
agaugacucaggaguuucuc

SEQ ID NO: 33136 - RNA, 20 nt, Artificial Sequence
  LRRK2 RNA guide
aggaagaugacucaggaguu

SEQ ID NO: 33137 - RNA, 20 nt, Artificial Sequence
  LRRK2 RNA guide
augacucaggaguuucucuu

SEQ ID NO: 33138 - RNA, 20 nt, Artificial Sequence
  LRRK2 RNA guide
caagagaaacuccugaguca

SEQ ID NO: 33139 - RNA, 20 nt, Artificial Sequence
  LRRK2 RNA guide
ccaagagaaacuccugaguc

SEQ ID NO: 33140 - RNA, 20 nt, Artificial Sequence
  LRRK2 RNA guide
cccaagagaaacuccugagu

SEQ ID NO: 33141 - RNA, 20 nt, Artificial Sequence
  LRRK2 RNA guide
ccugagucaucuuccuucuu

SEQ ID NO: 33142 - RNA, 20 nt, Artificial Sequence
  LRRK2 RNA guide
cuacccaagagaaacuccug

SEQ ID NO: 33143 - RNA, 20 nt, Artificial Sequence
  LRRK2 RNA guide
cucaggaguuucucuugggu

SEQ ID NO: 33144 - RNA, 20 nt, Artificial Sequence
  LRRK2 RNA guide
cuccugagucaucuuccuuc

SEQ ID NO: 33145 - RNA, 20 nt, Artificial Sequence
  LRRK2 RNA guide
cugagucaucuuccuucuuc

SEQ ID NO: 33146 - RNA, 20 nt, Artificial Sequence
  LRRK2 RNA guide
gaaacuccugagucaucuuc

SEQ ID NO: 33147 - RNA, 20 nt, Artificial Sequence
  LRRK2 RNA guide
gaagaaggaagaugacucag

SEQ ID NO: 33148 - RNA, 20 nt, Artificial Sequence
  LRRK2 RNA guide
gaagaugacucaggaguuuc

SEQ ID NO: 33149 - RNA, 20 nt, Artificial Sequence
  LRRK2 RNA guide
gaaggaagaugacucaggag

SEQ ID NO: 33150 - RNA, 20 nt, Artificial Sequence
  LRRK2 RNA guide
gacucaggaguuucucuugg

SEQ ID NO: 33151 - RNA, 20 nt, Artificial Sequence
  LRRK2 RNA guide
gagaaacuccugagucaucu

SEQ ID NO: 33152 - RNA, 20 nt, Artificial Sequence
  LRRK2 RNA guide
gaugacucaggaguuucucu

SEQ ID NO: 33153 - RNA, 20 nt, Artificial Sequence
  LRRK2 RNA guide
ggaagaaggaagaugacuca

SEQ ID NO: 33154 - RNA, 20 nt, Artificial Sequence
  LRRK2 RNA guide
ggaagaugacucaggaguuu

SEQ ID NO: 33155 - RNA, 20 nt, Artificial Sequence
  LRRK2 RNA guide
uacccaagagaaacuccuga

SEQ ID NO: 33156 - RNA, 20 nt, Artificial Sequence
  LRRK2 RNA guide
ucaggaguuucucuugggua

SEQ ID NO: 33157 - RNA, 20 nt, Artificial Sequence
  LRRK2 RNA guide
uccugagucaucuuccuucu

SEQ ID NO: 33158 - RNA, 20 nt, Artificial Sequence
  LRRK2 RNA guide
ugacucaggaguuucucuug

SEQ ID NO: 33159 - RNA, 20 nt, Artificial Sequence
  LRRK2 RNA guide
ugagucaucuuccuucuucc

SEQ ID NO: 33160 - RNA, 20 nt, Artificial Sequence
  LRRK2 RNA guide
uggaagaaggaagaugacuc

SEQ ID NO: 33161 - RNA, 21 nt, Artificial Sequence
  LRRK2 RNA guide
aaacuccugagucaucuuccu

SEQ ID NO: 33162 - RNA, 21 nt, Artificial Sequence
  LRRK2 RNA guide
aacuccugagucaucuuccuu

SEQ ID NO: 33163 - RNA, 21 nt, Artificial Sequence
  LRRK2 RNA guide
aagaaggaagaugacucagga

SEQ ID NO: 33164 - RNA, 21 nt, Artificial Sequence
  LRRK2 RNA guide
aagagaaacuccugagucauc

SEQ ID NO: 33165 - RNA, 21 nt, Artificial Sequence
  LRRK2 RNA guide
aagaugacucaggaguuucuc

SEQ ID NO: 33166 - RNA, 21 nt, Artificial Sequence
  LRRK2 RNA guide
aaggaagaugacucaggaguu

SEQ ID NO: 33167 - RNA, 21 nt, Artificial Sequence
  LRRK2 RNA guide
acccaagagaaacuccugagu

SEQ ID NO: 33168 - RNA, 21 nt, Artificial Sequence
  LRRK2 RNA guide
acucaggaguuucucuugggu

SEQ ID NO: 33169 - RNA, 21 nt, Artificial Sequence
  LRRK2 RNA guide
acuccugagucaucuuccuuc

SEQ ID NO: 33170 - RNA, 21 nt, Artificial Sequence
  LRRK2 RNA guide
agaaacuccugagucaucuuc

SEQ ID NO: 33171 - RNA, 21 nt, Artificial Sequence
  LRRK2 RNA guide
agaaggaagaugacucaggag

SEQ ID NO: 33172 - RNA, 21 nt, Artificial Sequence
  LRRK2 RNA guide
agagaaacuccugagucaucu

SEQ ID NO: 33173 - RNA, 21 nt, Artificial Sequence
  LRRK2 RNA guide
agaugacucaggaguuucucu

SEQ ID NO: 33174 - RNA, 21 nt, Artificial Sequence
  LRRK2 RNA guide
aggaagaugacucaggaguuu

SEQ ID NO: 33175 - RNA, 21 nt, Artificial Sequence
  LRRK2 RNA guide
augacucaggaguuucucuug

SEQ ID NO: 33176 - RNA, 21 nt, Artificial Sequence
  LRRK2 RNA guide
caagagaaacuccugagucau

SEQ ID NO: 33177 - RNA, 21 nt, Artificial Sequence
  LRRK2 RNA guide
ccaagagaaacuccugaguca

SEQ ID NO: 33178 - RNA, 21 nt, Artificial Sequence
  LRRK2 RNA guide
cccaagagaaacuccugaguc

SEQ ID NO: 33179 - RNA, 21 nt, Artificial Sequence
  LRRK2 RNA guide
ccugagucaucuuccuucuuc

SEQ ID NO: 33180 - RNA, 21 nt, Artificial Sequence
  LRRK2 RNA guide
cuacccaagagaaacuccuga

SEQ ID NO: 33181 - RNA, 21 nt, Artificial Sequence
  LRRK2 RNA guide
cucaggaguuucucuugggua

SEQ ID NO: 33182 - RNA, 21 nt, Artificial Sequence
  LRRK2 RNA guide
cuccugagucaucuuccuucu

SEQ ID NO: 33183 - RNA, 21 nt, Artificial Sequence
  LRRK2 RNA guide
cugagucaucuuccuucuucc

SEQ ID NO: 33184 - RNA, 21 nt, Artificial Sequence
  LRRK2 RNA guide
gaaacuccugagucaucuucc

SEQ ID NO: 33185 - RNA, 21 nt, Artificial Sequence
  LRRK2 RNA guide
gaagaaggaagaugacucagg

SEQ ID NO: 33186 - RNA, 21 nt, Artificial Sequence
  LRRK2 RNA guide
gaagaugacucaggaguuucu

SEQ ID NO: 33187 - RNA, 21 nt, Artificial Sequence
  LRRK2 RNA guide
gaaggaagaugacucaggagu

SEQ ID NO: 33188 - RNA, 21 nt, Artificial Sequence
  LRRK2 RNA guide
gacucaggaguuucucuuggg

SEQ ID NO: 33189 - RNA, 21 nt, Artificial Sequence
  LRRK2 RNA guide
gagaaacuccugagucaucuu

SEQ ID NO: 33190 - RNA, 21 nt, Artificial Sequence
  LRRK2 RNA guide
gaugacucaggaguuucucuu

SEQ ID NO: 33191 - RNA, 21 nt, Artificial Sequence
  LRRK2 RNA guide
gcuacccaagagaaacuccug

SEQ ID NO: 33192 - RNA, 21 nt, Artificial Sequence
  LRRK2 RNA guide
ggaagaaggaagaugacucag

SEQ ID NO: 33193 - RNA, 21 nt, Artificial Sequence
  LRRK2 RNA guide
ggaagaugacucaggaguuuc

SEQ ID NO: 33194 - RNA, 21 nt, Artificial Sequence
  LRRK2 RNA guide
guggaagaaggaagaugacuc

SEQ ID NO: 33195 - RNA, 21 nt, Artificial Sequence
  LRRK2 RNA guide
uacccaagagaaacuccugag

SEQ ID NO: 33196 - RNA, 21 nt, Artificial Sequence
  LRRK2 RNA guide
ucaggaguuucucuuggguag

SEQ ID NO: 33197 - RNA, 21 nt, Artificial Sequence
  LRRK2 RNA guide
uccugagucaucuuccuucuu

SEQ ID NO: 33198 - RNA, 21 nt, Artificial Sequence
  LRRK2 RNA guide
ugacucaggaguuucucuugg

SEQ ID NO: 33199 - RNA, 21 nt, Artificial Sequence
  LRRK2 RNA guide
ugagucaucuuccuucuucca

SEQ ID NO: 33200 - RNA, 21 nt, Artificial Sequence
  LRRK2 RNA guide
uggaagaaggaagaugacuca

SEQ ID NO: 33201 - RNA, 22 nt, Artificial Sequence
  LRRK2 RNA guide
aaacuccugagucaucuuccuu

SEQ ID NO: 33202 - RNA, 22 nt, Artificial Sequence
  LRRK2 RNA guide
aacuccugagucaucuuccuuc

SEQ ID NO: 33203 - RNA, 22 nt, Artificial Sequence
  LRRK2 RNA guide
aagaaggaagaugacucaggag

SEQ ID NO: 33204 - RNA, 22 nt, Artificial Sequence
  LRRK2 RNA guide
aagagaaacuccugagucaucu

SEQ ID NO: 33205 - RNA, 22 nt, Artificial Sequence
  LRRK2 RNA guide
aagaugacucaggaguuucucu

SEQ ID NO: 33206 - RNA, 22 nt, Artificial Sequence
  LRRK2 RNA guide
aaggaagaugacucaggaguuu

SEQ ID NO: 33207 - RNA, 22 nt, Artificial Sequence
  LRRK2 RNA guide
acccaagagaaacuccugaguc

SEQ ID NO: 33208 - RNA, 22 nt, Artificial Sequence
  LRRK2 RNA guide
acucaggaguuucucuugggua

SEQ ID NO: 33209 - RNA, 22 nt, Artificial Sequence
  LRRK2 RNA guide
acuccugagucaucuuccuucu

SEQ ID NO: 33210 - RNA, 22 nt, Artificial Sequence
  LRRK2 RNA guide
agaaacuccugagucaucuucc

SEQ ID NO: 33211 - RNA, 22 nt, Artificial Sequence
  LRRK2 RNA guide
agaaggaagaugacucaggagu

SEQ ID NO: 33212 - RNA, 22 nt, Artificial Sequence
  LRRK2 RNA guide
agagaaacuccugagucaucuu

SEQ ID NO: 33213 - RNA, 22 nt, Artificial Sequence
  LRRK2 RNA guide
agaugacucaggaguuucucuu

SEQ ID NO: 33214 - RNA, 22 nt, Artificial Sequence
  LRRK2 RNA guide
agcuacccaagagaaacuccug

SEQ ID NO: 33215 - RNA, 22 nt, Artificial Sequence
  LRRK2 RNA guide
aggaagaugacucaggaguuuc

SEQ ID NO: 33216 - RNA, 22 nt, Artificial Sequence
  LRRK2 RNA guide
augacucaggaguuucucuugg

SEQ ID NO: 33217 - RNA, 22 nt, Artificial Sequence
  LRRK2 RNA guide
caagagaaacuccugagucauc

SEQ ID NO: 33218 - RNA, 22 nt, Artificial Sequence
  LRRK2 RNA guide
ccaagagaaacuccugagucau

SEQ ID NO: 33219 - RNA, 22 nt, Artificial Sequence
  LRRK2 RNA guide
cccaagagaaacuccugaguca

SEQ ID NO: 33220 - RNA, 22 nt, Artificial Sequence
  LRRK2 RNA guide
ccugagucaucuuccuucuucc

SEQ ID NO: 33221 - RNA, 22 nt, Artificial Sequence
  LRRK2 RNA guide
cuacccaagagaaacuccugag

SEQ ID NO: 33222 - RNA, 22 nt, Artificial Sequence
  LRRK2 RNA guide
cucaggaguuucucuuggguag

SEQ ID NO: 33223 - RNA, 22 nt, Artificial Sequence
  LRRK2 RNA guide
cuccugagucaucuuccuucuu

SEQ ID NO: 33224 - RNA, 22 nt, Artificial Sequence
  LRRK2 RNA guide
cugagucaucuuccuucuucca

SEQ ID NO: 33225 - RNA, 22 nt, Artificial Sequence
  LRRK2 RNA guide
gaaacuccugagucaucuuccu

SEQ ID NO: 33226 - RNA, 22 nt, Artificial Sequence
  LRRK2 RNA guide
gaagaaggaagaugacucagga

SEQ ID NO: 33227 - RNA, 22 nt, Artificial Sequence
  LRRK2 RNA guide
gaagaugacucaggaguuucuc

SEQ ID NO: 33228 - RNA, 22 nt, Artificial Sequence
  LRRK2 RNA guide
gaaggaagaugacucaggaguu

SEQ ID NO: 33229 - RNA, 22 nt, Artificial Sequence
  LRRK2 RNA guide
gacucaggaguuucucuugggu

SEQ ID NO: 33230 - RNA, 22 nt, Artificial Sequence
  LRRK2 RNA guide
gagaaacuccugagucaucuuc

SEQ ID NO: 33231 - RNA, 22 nt, Artificial Sequence
  LRRK2 RNA guide
gaugacucaggaguuucucuug

SEQ ID NO: 33232 - RNA, 22 nt, Artificial Sequence
  LRRK2 RNA guide
gcuacccaagagaaacuccuga

SEQ ID NO: 33233 - RNA, 22 nt, Artificial Sequence
  LRRK2 RNA guide
ggaagaaggaagaugacucagg

SEQ ID NO: 33234 - RNA, 22 nt, Artificial Sequence
  LRRK2 RNA guide
ggaagaugacucaggaguuucu

SEQ ID NO: 33235 - RNA, 22 nt, Artificial Sequence
  LRRK2 RNA guide
gguggaagaaggaagaugacuc

SEQ ID NO: 33236 - RNA, 22 nt, Artificial Sequence
  LRRK2 RNA guide
guggaagaaggaagaugacuca

SEQ ID NO: 33237 - RNA, 22 nt, Artificial Sequence
  LRRK2 RNA guide
uacccaagagaaacuccugagu

SEQ ID NO: 33238 - RNA, 22 nt, Artificial Sequence
  LRRK2 RNA guide
ucaggaguuucucuuggguagc

SEQ ID NO: 33239 - RNA, 22 nt, Artificial Sequence
  LRRK2 RNA guide
uccugagucaucuuccuucuuc

SEQ ID NO: 33240 - RNA, 22 nt, Artificial Sequence
  LRRK2 RNA guide
ugacucaggaguuucucuuggg

SEQ ID NO: 33241 - RNA, 22 nt, Artificial Sequence
  LRRK2 RNA guide
ugagucaucuuccuucuuccac

SEQ ID NO: 33242 - RNA, 22 nt, Artificial Sequence
  LRRK2 RNA guide
uggaagaaggaagaugacucag

SEQ ID NO: 33243 - RNA, 20 nt, Artificial Sequence
  LRRK2 RNA guide
aaacuacuuaacugcccuag

SEQ ID NO: 33244 - RNA, 20 nt, Artificial Sequence
  LRRK2 RNA guide
aacaucuagggcaguuaagu

SEQ ID NO: 33245 - RNA, 20 nt, Artificial Sequence
  LRRK2 RNA guide
aacuacuuaacugcccuaga

SEQ ID NO: 33246 - RNA, 20 nt, Artificial Sequence
  LRRK2 RNA guide
aacugcccuagauguuagac

SEQ ID NO: 33247 - RNA, 20 nt, Artificial Sequence
  LRRK2 RNA guide
aagucuaacaucuagggcag

SEQ ID NO: 33248 - RNA, 20 nt, Artificial Sequence
  LRRK2 RNA guide
acaucuagggcaguuaagua

SEQ ID NO: 33249 - RNA, 20 nt, Artificial Sequence
  LRRK2 RNA guide
acuacuuaacugcccuagau

SEQ ID NO: 33250 - RNA, 20 nt, Artificial Sequence
  LRRK2 RNA guide
acugcccuagauguuagacu

SEQ ID NO: 33251 - RNA, 20 nt, Artificial Sequence
  LRRK2 RNA guide
acuuaacugcccuagauguu

SEQ ID NO: 33252 - RNA, 20 nt, Artificial Sequence
  LRRK2 RNA guide
agcuugauaagucuaacauc

SEQ ID NO: 33253 - RNA, 20 nt, Artificial Sequence
  LRRK2 RNA guide
agggcaguuaaguaguuuau

SEQ ID NO: 33254 - RNA, 20 nt, Artificial Sequence
  LRRK2 RNA guide
agucuaacaucuagggcagu

SEQ ID NO: 33255 - RNA, 20 nt, Artificial Sequence
  LRRK2 RNA guide
auaaacuacuuaacugcccu

SEQ ID NO: 33256 - RNA, 20 nt, Artificial Sequence
  LRRK2 RNA guide
auaagucuaacaucuagggc

SEQ ID NO: 33257 - RNA, 20 nt, Artificial Sequence
  LRRK2 RNA guide
aucuagggcaguuaaguagu

SEQ ID NO: 33258 - RNA, 20 nt, Artificial Sequence
  LRRK2 RNA guide
caucuagggcaguuaaguag

SEQ ID NO: 33259 - RNA, 20 nt, Artificial Sequence
  LRRK2 RNA guide
cuaacaucuagggcaguuaa

SEQ ID NO: 33260 - RNA, 20 nt, Artificial Sequence
  LRRK2 RNA guide
cuacuuaacugcccuagaug

SEQ ID NO: 33261 - RNA, 20 nt, Artificial Sequence
  LRRK2 RNA guide
cuagggcaguuaaguaguuu

SEQ ID NO: 33262 - RNA, 20 nt, Artificial Sequence
  LRRK2 RNA guide
cugcccuagauguuagacuu

SEQ ID NO: 33263 - RNA, 20 nt, Artificial Sequence
  LRRK2 RNA guide
cuuaacugcccuagauguua

SEQ ID NO: 33264 - RNA, 20 nt, Artificial Sequence
  LRRK2 RNA guide
cuugauaagucuaacaucua

SEQ ID NO: 33265 - RNA, 20 nt, Artificial Sequence
  LRRK2 RNA guide
gauaaacuacuuaacugccc

SEQ ID NO: 33266 - RNA, 20 nt, Artificial Sequence
  LRRK2 RNA guide
gauaagucuaacaucuaggg

SEQ ID NO: 33267 - RNA, 20 nt, Artificial Sequence
  LRRK2 RNA guide
gcccuagauguuagacuuau

SEQ ID NO: 33268 - RNA, 20 nt, Artificial Sequence
  LRRK2 RNA guide
gcuugauaagucuaacaucu

SEQ ID NO: 33269 - RNA, 20 nt, Artificial Sequence
  LRRK2 RNA guide
ggcaguuaaguaguuuauca

SEQ ID NO: 33270 - RNA, 20 nt, Artificial Sequence
  LRRK2 RNA guide
gggcaguuaaguaguuuauc

SEQ ID NO: 33271 - RNA, 20 nt, Artificial Sequence
  LRRK2 RNA guide
gucuaacaucuagggcaguu

SEQ ID NO: 33272 - RNA, 20 nt, Artificial Sequence
  LRRK2 RNA guide
guugauaaacuacuuaacug

SEQ ID NO: 33273 - RNA, 20 nt, Artificial Sequence
  LRRK2 RNA guide
uaaacuacuuaacugcccua

SEQ ID NO: 33274 - RNA, 20 nt, Artificial Sequence
  LRRK2 RNA guide
uaacaucuagggcaguuaag

SEQ ID NO: 33275 - RNA, 20 nt, Artificial Sequence
  LRRK2 RNA guide
uaacugcccuagauguuaga

SEQ ID NO: 33276 - RNA, 20 nt, Artificial Sequence
  LRRK2 RNA guide
uaagucuaacaucuagggca

SEQ ID NO: 33277 - RNA, 20 nt, Artificial Sequence
  LRRK2 RNA guide
uacuuaacugcccuagaugu

SEQ ID NO: 33278 - RNA, 20 nt, Artificial Sequence
  LRRK2 RNA guide
uagggcaguuaaguaguuua

SEQ ID NO: 33279 - RNA, 20 nt, Artificial Sequence
  LRRK2 RNA guide
ucuaacaucuagggcaguua

SEQ ID NO: 33280 - RNA, 20 nt, Artificial Sequence
  LRRK2 RNA guide
ucuagggcaguuaaguaguu

SEQ ID NO: 33281 - RNA, 20 nt, Artificial Sequence
  LRRK2 RNA guide
ugauaaacuacuuaacugcc

SEQ ID NO: 33282 - RNA, 20 nt, Artificial Sequence
  LRRK2 RNA guide
ugauaagucuaacaucuagg

SEQ ID NO: 33283 - RNA, 20 nt, Artificial Sequence
  LRRK2 RNA guide
ugcccuagauguuagacuua

SEQ ID NO: 33284 - RNA, 20 nt, Artificial Sequence
  LRRK2 RNA guide
uuaacugcccuagauguuag

SEQ ID NO: 33285 - RNA, 20 nt, Artificial Sequence
  LRRK2 RNA guide
uugauaaacuacuuaacugc

SEQ ID NO: 33286 - RNA, 20 nt, Artificial Sequence
  LRRK2 RNA guide
uugauaagucuaacaucuag

SEQ ID NO: 33287 - RNA, 21 nt, Artificial Sequence
  LRRK2 RNA guide
aaacuacuuaacugcccuaga

SEQ ID NO: 33288 - RNA, 21 nt, Artificial Sequence
  LRRK2 RNA guide
aacaucuagggcaguuaagua

SEQ ID NO: 33289 - RNA, 21 nt, Artificial Sequence
  LRRK2 RNA guide
aacuacuuaacugcccuagau

SEQ ID NO: 33290 - RNA, 21 nt, Artificial Sequence
  LRRK2 RNA guide
aacugcccuagauguuagacu

SEQ ID NO: 33291 - RNA, 21 nt, Artificial Sequence
  LRRK2 RNA guide
aagucuaacaucuagggcagu

SEQ ID NO: 33292 - RNA, 21 nt, Artificial Sequence
  LRRK2 RNA guide
acaucuagggcaguuaaguag

SEQ ID NO: 33293 - RNA, 21 nt, Artificial Sequence
  LRRK2 RNA guide
acuacuuaacugcccuagaug

SEQ ID NO: 33294 - RNA, 21 nt, Artificial Sequence
  LRRK2 RNA guide
acugcccuagauguuagacuu

SEQ ID NO: 33295 - RNA, 21 nt, Artificial Sequence
  LRRK2 RNA guide
acuuaacugcccuagauguua

SEQ ID NO: 33296 - RNA, 21 nt, Artificial Sequence
  LRRK2 RNA guide
agcuugauaagucuaacaucu

SEQ ID NO: 33297 - RNA, 21 nt, Artificial Sequence
  LRRK2 RNA guide
agggcaguuaaguaguuuauc

SEQ ID NO: 33298 - RNA, 21 nt, Artificial Sequence
  LRRK2 RNA guide
agucuaacaucuagggcaguu

SEQ ID NO: 33299 - RNA, 21 nt, Artificial Sequence
  LRRK2 RNA guide
auaaacuacuuaacugcccua

SEQ ID NO: 33300 - RNA, 21 nt, Artificial Sequence
  LRRK2 RNA guide
auaagucuaacaucuagggca

SEQ ID NO: 33301 - RNA, 21 nt, Artificial Sequence
  LRRK2 RNA guide
aucuagggcaguuaaguaguu

SEQ ID NO: 33302 - RNA, 21 nt, Artificial Sequence
  LRRK2 RNA guide
caucuagggcaguuaaguagu

SEQ ID NO: 33303 - RNA, 21 nt, Artificial Sequence
  LRRK2 RNA guide
cuaacaucuagggcaguuaag

SEQ ID NO: 33304 - RNA, 21 nt, Artificial Sequence
  LRRK2 RNA guide
cuacuuaacugcccuagaugu

SEQ ID NO: 33305 - RNA, 21 nt, Artificial Sequence
  LRRK2 RNA guide
cuagggcaguuaaguaguuua

SEQ ID NO: 33306 - RNA, 21 nt, Artificial Sequence
  LRRK2 RNA guide
cugcccuagauguuagacuua

SEQ ID NO: 33307 - RNA, 21 nt, Artificial Sequence
  LRRK2 RNA guide
cuuaacugcccuagauguuag

SEQ ID NO: 33308 - RNA, 21 nt, Artificial Sequence
  LRRK2 RNA guide
cuugauaagucuaacaucuag

SEQ ID NO: 33309 - RNA, 21 nt, Artificial Sequence
  LRRK2 RNA guide
gagcuugauaagucuaacauc

SEQ ID NO: 33310 - RNA, 21 nt, Artificial Sequence
  LRRK2 RNA guide
gauaaacuacuuaacugcccu

SEQ ID NO: 33311 - RNA, 21 nt, Artificial Sequence
  LRRK2 RNA guide
gauaagucuaacaucuagggc

SEQ ID NO: 33312 - RNA, 21 nt, Artificial Sequence
  LRRK2 RNA guide
gcccuagauguuagacuuauc

SEQ ID NO: 33313 - RNA, 21 nt, Artificial Sequence
  LRRK2 RNA guide
gcuugauaagucuaacaucua

SEQ ID NO: 33314 - RNA, 21 nt, Artificial Sequence
  LRRK2 RNA guide
ggcaguuaaguaguuuaucaa

SEQ ID NO: 33315 - RNA, 21 nt, Artificial Sequence
  LRRK2 RNA guide
gggcaguuaaguaguuuauca

SEQ ID NO: 33316 - RNA, 21 nt, Artificial Sequence
  LRRK2 RNA guide
gucuaacaucuagggcaguua

SEQ ID NO: 33317 - RNA, 21 nt, Artificial Sequence
  LRRK2 RNA guide
guugauaaacuacuuaacugc

SEQ ID NO: 33318 - RNA, 21 nt, Artificial Sequence
  LRRK2 RNA guide
uaaacuacuuaacugcccuag

SEQ ID NO: 33319 - RNA, 21 nt, Artificial Sequence
  LRRK2 RNA guide
uaacaucuagggcaguuaagu

SEQ ID NO: 33320 - RNA, 21 nt, Artificial Sequence
  LRRK2 RNA guide
uaacugcccuagauguuagac

SEQ ID NO: 33321 - RNA, 21 nt, Artificial Sequence
  LRRK2 RNA guide
uaagucuaacaucuagggcag

SEQ ID NO: 33322 - RNA, 21 nt, Artificial Sequence
  LRRK2 RNA guide
uacuuaacugcccuagauguu

SEQ ID NO: 33323 - RNA, 21 nt, Artificial Sequence
  LRRK2 RNA guide
uagggcaguuaaguaguuuau

SEQ ID NO: 33324 - RNA, 21 nt, Artificial Sequence
  LRRK2 RNA guide
ucuaacaucuagggcaguuaa

SEQ ID NO: 33325 - RNA, 21 nt, Artificial Sequence
  LRRK2 RNA guide
ucuagggcaguuaaguaguuu

SEQ ID NO: 33326 - RNA, 21 nt, Artificial Sequence
  LRRK2 RNA guide
ugauaaacuacuuaacugccc

SEQ ID NO: 33327 - RNA, 21 nt, Artificial Sequence
  LRRK2 RNA guide
ugauaagucuaacaucuaggg

SEQ ID NO: 33328 - RNA, 21 nt, Artificial Sequence
  LRRK2 RNA guide
ugcccuagauguuagacuuau

SEQ ID NO: 33329 - RNA, 21 nt, Artificial Sequence
  LRRK2 RNA guide
uuaacugcccuagauguuaga

SEQ ID NO: 33330 - RNA, 21 nt, Artificial Sequence
  LRRK2 RNA guide
uugauaaacuacuuaacugcc

SEQ ID NO: 33331 - RNA, 21 nt, Artificial Sequence
  LRRK2 RNA guide
uugauaagucuaacaucuagg

SEQ ID NO: 33332 - RNA, 22 nt, Artificial Sequence
  LRRK2 RNA guide
aaacuacuuaacugcccuagau

SEQ ID NO: 33333 - RNA, 22 nt, Artificial Sequence
  LRRK2 RNA guide
aacaucuagggcaguuaaguag

SEQ ID NO: 33334 - RNA, 22 nt, Artificial Sequence
  LRRK2 RNA guide
aacuacuuaacugcccuagaug

SEQ ID NO: 33335 - RNA, 22 nt, Artificial Sequence
  LRRK2 RNA guide
aacugcccuagauguuagacuu

SEQ ID NO: 33336 - RNA, 22 nt, Artificial Sequence
  LRRK2 RNA guide
aagucuaacaucuagggcaguu

SEQ ID NO: 33337 - RNA, 22 nt, Artificial Sequence
  LRRK2 RNA guide
acaucuagggcaguuaaguagu

SEQ ID NO: 33338 - RNA, 22 nt, Artificial Sequence
  LRRK2 RNA guide
acuacuuaacugcccuagaugu

SEQ ID NO: 33339 - RNA, 22 nt, Artificial Sequence
  LRRK2 RNA guide
acugcccuagauguuagacuua

SEQ ID NO: 33340 - RNA, 22 nt, Artificial Sequence
  LRRK2 RNA guide
acuuaacugcccuagauguuag

SEQ ID NO: 33341 - RNA, 22 nt, Artificial Sequence
  LRRK2 RNA guide
agagcuugauaagucuaacauc

SEQ ID NO: 33342 - RNA, 22 nt, Artificial Sequence
  LRRK2 RNA guide
agcuugauaagucuaacaucua

SEQ ID NO: 33343 - RNA, 22 nt, Artificial Sequence
  LRRK2 RNA guide
agggcaguuaaguaguuuauca

SEQ ID NO: 33344 - RNA, 22 nt, Artificial Sequence
  LRRK2 RNA guide
agucuaacaucuagggcaguua

SEQ ID NO: 33345 - RNA, 22 nt, Artificial Sequence
  LRRK2 RNA guide
auaaacuacuuaacugcccuag

SEQ ID NO: 33346 - RNA, 22 nt, Artificial Sequence
  LRRK2 RNA guide
auaagucuaacaucuagggcag

SEQ ID NO: 33347 - RNA, 22 nt, Artificial Sequence
  LRRK2 RNA guide
aucuagggcaguuaaguaguuu

SEQ ID NO: 33348 - RNA, 22 nt, Artificial Sequence
  LRRK2 RNA guide
caucuagggcaguuaaguaguu

SEQ ID NO: 33349 - RNA, 22 nt, Artificial Sequence
  LRRK2 RNA guide
cuaacaucuagggcaguuaagu

SEQ ID NO: 33350 - RNA, 22 nt, Artificial Sequence
  LRRK2 RNA guide
cuacuuaacugcccuagauguu

SEQ ID NO: 33351 - RNA, 22 nt, Artificial Sequence
  LRRK2 RNA guide
cuagggcaguuaaguaguuuau

SEQ ID NO: 33352 - RNA, 22 nt, Artificial Sequence
  LRRK2 RNA guide
cugcccuagauguuagacuuau

SEQ ID NO: 33353 - RNA, 22 nt, Artificial Sequence
  LRRK2 RNA guide
cuuaacugcccuagauguuaga

SEQ ID NO: 33354 - RNA, 22 nt, Artificial Sequence
  LRRK2 RNA guide
cuugauaagucuaacaucuagg

SEQ ID NO: 33355 - RNA, 22 nt, Artificial Sequence
  LRRK2 RNA guide
gagcuugauaagucuaacaucu

SEQ ID NO: 33356 - RNA, 22 nt, Artificial Sequence
  LRRK2 RNA guide
gauaaacuacuuaacugcccua

SEQ ID NO: 33357 - RNA, 22 nt, Artificial Sequence
  LRRK2 RNA guide
gauaagucuaacaucuagggca

SEQ ID NO: 33358 - RNA, 22 nt, Artificial Sequence
  LRRK2 RNA guide
gcccuagauguuagacuuauca

SEQ ID NO: 33359 - RNA, 22 nt, Artificial Sequence
  LRRK2 RNA guide
gcuugauaagucuaacaucuag

SEQ ID NO: 33360 - RNA, 22 nt, Artificial Sequence
  LRRK2 RNA guide
ggcaguuaaguaguuuaucaac

SEQ ID NO: 33361 - RNA, 22 nt, Artificial Sequence
  LRRK2 RNA guide
gggcaguuaaguaguuuaucaa

SEQ ID NO: 33362 - RNA, 22 nt, Artificial Sequence
  LRRK2 RNA guide
gucuaacaucuagggcaguuaa

SEQ ID NO: 33363 - RNA, 22 nt, Artificial Sequence
  LRRK2 RNA guide
guugauaaacuacuuaacugcc

SEQ ID NO: 33364 - RNA, 22 nt, Artificial Sequence
  LRRK2 RNA guide
uaaacuacuuaacugcccuaga

SEQ ID NO: 33365 - RNA, 22 nt, Artificial Sequence
  LRRK2 RNA guide
uaacaucuagggcaguuaagua

SEQ ID NO: 33366 - RNA, 22 nt, Artificial Sequence
  LRRK2 RNA guide
uaacugcccuagauguuagacu

SEQ ID NO: 33367 - RNA, 22 nt, Artificial Sequence
  LRRK2 RNA guide
uaagucuaacaucuagggcagu

SEQ ID NO: 33368 - RNA, 22 nt, Artificial Sequence
  LRRK2 RNA guide
uacuuaacugcccuagauguua

SEQ ID NO: 33369 - RNA, 22 nt, Artificial Sequence
  LRRK2 RNA guide
uagggcaguuaaguaguuuauc

SEQ ID NO: 33370 - RNA, 22 nt, Artificial Sequence
  LRRK2 RNA guide
ucuaacaucuagggcaguuaag

SEQ ID NO: 33371 - RNA, 22 nt, Artificial Sequence
  LRRK2 RNA guide
ucuagggcaguuaaguaguuua

SEQ ID NO: 33372 - RNA, 22 nt, Artificial Sequence
  LRRK2 RNA guide
ugauaaacuacuuaacugcccu

SEQ ID NO: 33373 - RNA, 22 nt, Artificial Sequence
  LRRK2 RNA guide
ugauaagucuaacaucuagggc

SEQ ID NO: 33374 - RNA, 22 nt, Artificial Sequence
  LRRK2 RNA guide
ugcccuagauguuagacuuauc

SEQ ID NO: 33375 - RNA, 22 nt, Artificial Sequence
  LRRK2 RNA guide
uguugauaaacuacuuaacugc

SEQ ID NO: 33376 - RNA, 22 nt, Artificial Sequence
  LRRK2 RNA guide
uuaacugcccuagauguuagac

SEQ ID NO: 33377 - RNA, 22 nt, Artificial Sequence
  LRRK2 RNA guide
uugauaaacuacuuaacugccc

SEQ ID NO: 33378 - RNA, 22 nt, Artificial Sequence
  LRRK2 RNA guide
uugauaagucuaacaucuaggg

SEQ ID NO: 33379 - RNA, 20 nt, Artificial Sequence
  LRRK2 RNA guide
aaacuacuuaacuguccuag

SEQ ID NO: 33380 - RNA, 20 nt, Artificial Sequence
  LRRK2 RNA guide
aacaucuaggacaguuaagu

SEQ ID NO: 33381 - RNA, 20 nt, Artificial Sequence
  LRRK2 RNA guide
aacuacuuaacuguccuaga

SEQ ID NO: 33382 - RNA, 20 nt, Artificial Sequence
  LRRK2 RNA guide
aacuguccuagauguuagac

SEQ ID NO: 33383 - RNA, 20 nt, Artificial Sequence
  LRRK2 RNA guide
aagucuaacaucuaggacag

SEQ ID NO: 33384 - RNA, 20 nt, Artificial Sequence
  LRRK2 RNA guide
acaucuaggacaguuaagua

SEQ ID NO: 33385 - RNA, 20 nt, Artificial Sequence
  LRRK2 RNA guide
acuacuuaacuguccuagau

SEQ ID NO: 33386 - RNA, 20 nt, Artificial Sequence
  LRRK2 RNA guide
acuguccuagauguuagacu

SEQ ID NO: 33387 - RNA, 20 nt, Artificial Sequence
  LRRK2 RNA guide
acuuaacuguccuagauguu

SEQ ID NO: 33388 - RNA, 20 nt, Artificial Sequence
  LRRK2 RNA guide
aggacaguuaaguaguuuau

SEQ ID NO: 33389 - RNA, 20 nt, Artificial Sequence
  LRRK2 RNA guide
agucuaacaucuaggacagu

SEQ ID NO: 33390 - RNA, 20 nt, Artificial Sequence
  LRRK2 RNA guide
auaaacuacuuaacuguccu

SEQ ID NO: 33391 - RNA, 20 nt, Artificial Sequence
  LRRK2 RNA guide
auaagucuaacaucuaggac

SEQ ID NO: 33392 - RNA, 20 nt, Artificial Sequence
  LRRK2 RNA guide
aucuaggacaguuaaguagu

SEQ ID NO: 33393 - RNA, 20 nt, Artificial Sequence
  LRRK2 RNA guide
caucuaggacaguuaaguag

SEQ ID NO: 33394 - RNA, 20 nt, Artificial Sequence
  LRRK2 RNA guide
cuaacaucuaggacaguuaa

SEQ ID NO: 33395 - RNA, 20 nt, Artificial Sequence
  LRRK2 RNA guide
cuacuuaacuguccuagaug

SEQ ID NO: 33396 - RNA, 20 nt, Artificial Sequence
  LRRK2 RNA guide
cuaggacaguuaaguaguuu

SEQ ID NO: 33397 - RNA, 20 nt, Artificial Sequence
  LRRK2 RNA guide
cuguccuagauguuagacuu

SEQ ID NO: 33398 - RNA, 20 nt, Artificial Sequence
  LRRK2 RNA guide
cuuaacuguccuagauguua

SEQ ID NO: 33399 - RNA, 20 nt, Artificial Sequence
  LRRK2 RNA guide
gacaguuaaguaguuuauca

SEQ ID NO: 33400 - RNA, 20 nt, Artificial Sequence
  LRRK2 RNA guide
gauaaacuacuuaacugucc

SEQ ID NO: 33401 - RNA, 20 nt, Artificial Sequence
  LRRK2 RNA guide
gauaagucuaacaucuagga

SEQ ID NO: 33402 - RNA, 20 nt, Artificial Sequence
  LRRK2 RNA guide
ggacaguuaaguaguuuauc

SEQ ID NO: 33403 - RNA, 20 nt, Artificial Sequence
  LRRK2 RNA guide
guccuagauguuagacuuau

SEQ ID NO: 33404 - RNA, 20 nt, Artificial Sequence
  LRRK2 RNA guide
gucuaacaucuaggacaguu

SEQ ID NO: 33405 - RNA, 20 nt, Artificial Sequence
  LRRK2 RNA guide
uaaacuacuuaacuguccua

SEQ ID NO: 33406 - RNA, 20 nt, Artificial Sequence
  LRRK2 RNA guide
uaacaucuaggacaguuaag

SEQ ID NO: 33407 - RNA, 20 nt, Artificial Sequence
  LRRK2 RNA guide
uaacuguccuagauguuaga

SEQ ID NO: 33408 - RNA, 20 nt, Artificial Sequence
  LRRK2 RNA guide
uaagucuaacaucuaggaca

SEQ ID NO: 33409 - RNA, 20 nt, Artificial Sequence
  LRRK2 RNA guide
uacuuaacuguccuagaugu

SEQ ID NO: 33410 - RNA, 20 nt, Artificial Sequence
  LRRK2 RNA guide
uaggacaguuaaguaguuua

SEQ ID NO: 33411 - RNA, 20 nt, Artificial Sequence
  LRRK2 RNA guide
ucuaacaucuaggacaguua

SEQ ID NO: 33412 - RNA, 20 nt, Artificial Sequence
  LRRK2 RNA guide
ucuaggacaguuaaguaguu

SEQ ID NO: 33413 - RNA, 20 nt, Artificial Sequence
  LRRK2 RNA guide
ugauaaacuacuuaacuguc

SEQ ID NO: 33414 - RNA, 20 nt, Artificial Sequence
  LRRK2 RNA guide
uguccuagauguuagacuua

SEQ ID NO: 33415 - RNA, 20 nt, Artificial Sequence
  LRRK2 RNA guide
uuaacuguccuagauguuag

SEQ ID NO: 33416 - RNA, 21 nt, Artificial Sequence
  LRRK2 RNA guide
aaacuacuuaacuguccuaga

SEQ ID NO: 33417 - RNA, 21 nt, Artificial Sequence
  LRRK2 RNA guide
aacaucuaggacaguuaagua

SEQ ID NO: 33418 - RNA, 21 nt, Artificial Sequence
  LRRK2 RNA guide
aacuacuuaacuguccuagau

SEQ ID NO: 33419 - RNA, 21 nt, Artificial Sequence
  LRRK2 RNA guide
aacuguccuagauguuagacu

SEQ ID NO: 33420 - RNA, 21 nt, Artificial Sequence
  LRRK2 RNA guide
aagucuaacaucuaggacagu

SEQ ID NO: 33421 - RNA, 21 nt, Artificial Sequence
  LRRK2 RNA guide
acaucuaggacaguuaaguag

SEQ ID NO: 33422 - RNA, 21 nt, Artificial Sequence
  LRRK2 RNA guide
acuacuuaacuguccuagaug

SEQ ID NO: 33423 - RNA, 21 nt, Artificial Sequence
  LRRK2 RNA guide
acuguccuagauguuagacuu

SEQ ID NO: 33424 - RNA, 21 nt, Artificial Sequence
  LRRK2 RNA guide
acuuaacuguccuagauguua

SEQ ID NO: 33425 - RNA, 21 nt, Artificial Sequence
  LRRK2 RNA guide
aggacaguuaaguaguuuauc

SEQ ID NO: 33426 - RNA, 21 nt, Artificial Sequence
  LRRK2 RNA guide
agucuaacaucuaggacaguu

SEQ ID NO: 33427 - RNA, 21 nt, Artificial Sequence
  LRRK2 RNA guide
auaagucuaacaucuaggaca

SEQ ID NO: 33428 - RNA, 21 nt, Artificial Sequence
  LRRK2 RNA guide
aucuaggacaguuaaguaguu

SEQ ID NO: 33429 - RNA, 21 nt, Artificial Sequence
  LRRK2 RNA guide
caucuaggacaguuaaguagu

SEQ ID NO: 33430 - RNA, 21 nt, Artificial Sequence
  LRRK2 RNA guide
cuaacaucuaggacaguuaag

SEQ ID NO: 33431 - RNA, 21 nt, Artificial Sequence
  LRRK2 RNA guide
cuacuuaacuguccuagaugu

SEQ ID NO: 33432 - RNA, 21 nt, Artificial Sequence
  LRRK2 RNA guide
cuaggacaguuaaguaguuua

SEQ ID NO: 33433 - RNA, 21 nt, Artificial Sequence
  LRRK2 RNA guide
cuguccuagauguuagacuua

SEQ ID NO: 33434 - RNA, 21 nt, Artificial Sequence
  LRRK2 RNA guide
cuuaacuguccuagauguuag

SEQ ID NO: 33435 - RNA, 21 nt, Artificial Sequence
  LRRK2 RNA guide
gauaaacuacuuaacuguccu

SEQ ID NO: 33436 - RNA, 21 nt, Artificial Sequence
  LRRK2 RNA guide
gauaagucuaacaucuaggac

SEQ ID NO: 33437 - RNA, 21 nt, Artificial Sequence
  LRRK2 RNA guide
ggacaguuaaguaguuuauca

SEQ ID NO: 33438 - RNA, 21 nt, Artificial Sequence
  LRRK2 RNA guide
guccuagauguuagacuuauc

SEQ ID NO: 33439 - RNA, 21 nt, Artificial Sequence
  LRRK2 RNA guide
gucuaacaucuaggacaguua

SEQ ID NO: 33440 - RNA, 21 nt, Artificial Sequence
  LRRK2 RNA guide
uaaacuacuuaacuguccuag

SEQ ID NO: 33441 - RNA, 21 nt, Artificial Sequence
  LRRK2 RNA guide
uaacaucuaggacaguuaagu

SEQ ID NO: 33442 - RNA, 21 nt, Artificial Sequence
  LRRK2 RNA guide
uaacuguccuagauguuagac

SEQ ID NO: 33443 - RNA, 21 nt, Artificial Sequence
  LRRK2 RNA guide
uaagucuaacaucuaggacag

SEQ ID NO: 33444 - RNA, 21 nt, Artificial Sequence
  LRRK2 RNA guide
uacuuaacuguccuagauguu

SEQ ID NO: 33445 - RNA, 21 nt, Artificial Sequence
  LRRK2 RNA guide
ucuaacaucuaggacaguuaa

SEQ ID NO: 33446 - RNA, 21 nt, Artificial Sequence
  LRRK2 RNA guide
ucuaggacaguuaaguaguuu

SEQ ID NO: 33447 - RNA, 21 nt, Artificial Sequence
  LRRK2 RNA guide
ugauaaacuacuuaacugucc

SEQ ID NO: 33448 - RNA, 21 nt, Artificial Sequence
  LRRK2 RNA guide
ugauaagucuaacaucuagga

SEQ ID NO: 33449 - RNA, 21 nt, Artificial Sequence
  LRRK2 RNA guide
uguccuagauguuagacuuau

SEQ ID NO: 33450 - RNA, 21 nt, Artificial Sequence
  LRRK2 RNA guide
uuaacuguccuagauguuaga

SEQ ID NO: 33451 - RNA, 22 nt, Artificial Sequence
  LRRK2 RNA guide
aaacuacuuaacuguccuagau

SEQ ID NO: 33452 - RNA, 22 nt, Artificial Sequence
  LRRK2 RNA guide
aacaucuaggacaguuaaguag

SEQ ID NO: 33453 - RNA, 22 nt, Artificial Sequence
  LRRK2 RNA guide
aacuacuuaacuguccuagaug

SEQ ID NO: 33454 - RNA, 22 nt, Artificial Sequence
  LRRK2 RNA guide
aacuguccuagauguuagacuu

SEQ ID NO: 33455 - RNA, 22 nt, Artificial Sequence
  LRRK2 RNA guide
aagucuaacaucuaggacaguu

SEQ ID NO: 33456 - RNA, 22 nt, Artificial Sequence
  LRRK2 RNA guide
acaucuaggacaguuaaguagu

SEQ ID NO: 33457 - RNA, 22 nt, Artificial Sequence
  LRRK2 RNA guide
acuacuuaacuguccuagaugu

SEQ ID NO: 33458 - RNA, 22 nt, Artificial Sequence
  LRRK2 RNA guide
acuguccuagauguuagacuua

SEQ ID NO: 33459 - RNA, 22 nt, Artificial Sequence
  LRRK2 RNA guide
acuuaacuguccuagauguuag

SEQ ID NO: 33460 - RNA, 22 nt, Artificial Sequence
  LRRK2 RNA guide
aggacaguuaaguaguuuauca

SEQ ID NO: 33461 - RNA, 22 nt, Artificial Sequence
  LRRK2 RNA guide
agucuaacaucuaggacaguua

SEQ ID NO: 33462 - RNA, 22 nt, Artificial Sequence
  LRRK2 RNA guide
auaaacuacuuaacuguccuag

SEQ ID NO: 33463 - RNA, 22 nt, Artificial Sequence
  LRRK2 RNA guide
auaagucuaacaucuaggacag

SEQ ID NO: 33464 - RNA, 22 nt, Artificial Sequence
  LRRK2 RNA guide
aucuaggacaguuaaguaguuu

SEQ ID NO: 33465 - RNA, 22 nt, Artificial Sequence
  LRRK2 RNA guide
caucuaggacaguuaaguaguu

SEQ ID NO: 33466 - RNA, 22 nt, Artificial Sequence
  LRRK2 RNA guide
cuaacaucuaggacaguuaagu

SEQ ID NO: 33467 - RNA, 22 nt, Artificial Sequence
  LRRK2 RNA guide
cuacuuaacuguccuagauguu

SEQ ID NO: 33468 - RNA, 22 nt, Artificial Sequence
  LRRK2 RNA guide
cuaggacaguuaaguaguuuau

SEQ ID NO: 33469 - RNA, 22 nt, Artificial Sequence
  LRRK2 RNA guide
cuguccuagauguuagacuuau

SEQ ID NO: 33470 - RNA, 22 nt, Artificial Sequence
  LRRK2 RNA guide
cuuaacuguccuagauguuaga

SEQ ID NO: 33471 - RNA, 22 nt, Artificial Sequence
  LRRK2 RNA guide
gacaguuaaguaguuuaucaac

SEQ ID NO: 33472 - RNA, 22 nt, Artificial Sequence
  LRRK2 RNA guide
gauaaacuacuuaacuguccua

SEQ ID NO: 33473 - RNA, 22 nt, Artificial Sequence
  LRRK2 RNA guide
gauaagucuaacaucuaggaca

SEQ ID NO: 33474 - RNA, 22 nt, Artificial Sequence
  LRRK2 RNA guide
ggacaguuaaguaguuuaucaa

SEQ ID NO: 33475 - RNA, 22 nt, Artificial Sequence
  LRRK2 RNA guide
guccuagauguuagacuuauca

SEQ ID NO: 33476 - RNA, 22 nt, Artificial Sequence
  LRRK2 RNA guide
gucuaacaucuaggacaguuaa

SEQ ID NO: 33477 - RNA, 22 nt, Artificial Sequence
  LRRK2 RNA guide
guugauaaacuacuuaacuguc

SEQ ID NO: 33478 - RNA, 22 nt, Artificial Sequence
  LRRK2 RNA guide
uaaacuacuuaacuguccuaga

SEQ ID NO: 33479 - RNA, 22 nt, Artificial Sequence
  LRRK2 RNA guide
uaacaucuaggacaguuaagua

SEQ ID NO: 33480 - RNA, 22 nt, Artificial Sequence
  LRRK2 RNA guide
uaacuguccuagauguuagacu

SEQ ID NO: 33481 - RNA, 22 nt, Artificial Sequence
  LRRK2 RNA guide
uaagucuaacaucuaggacagu

SEQ ID NO: 33482 - RNA, 22 nt, Artificial Sequence
  LRRK2 RNA guide
uacuuaacuguccuagauguua

SEQ ID NO: 33483 - RNA, 22 nt, Artificial Sequence
  LRRK2 RNA guide
uaggacaguuaaguaguuuauc

SEQ ID NO: 33484 - RNA, 22 nt, Artificial Sequence
  LRRK2 RNA guide
ucuaacaucuaggacaguuaag

SEQ ID NO: 33485 - RNA, 22 nt, Artificial Sequence
  LRRK2 RNA guide
ucuaggacaguuaaguaguuua

SEQ ID NO: 33486 - RNA, 22 nt, Artificial Sequence
  LRRK2 RNA guide
ugauaaacuacuuaacuguccu

SEQ ID NO: 33487 - RNA, 22 nt, Artificial Sequence
  LRRK2 RNA guide
ugauaagucuaacaucuaggac

SEQ ID NO: 33488 - RNA, 22 nt, Artificial Sequence
  LRRK2 RNA guide
uguccuagauguuagacuuauc

SEQ ID NO: 33489 - RNA, 22 nt, Artificial Sequence
  LRRK2 RNA guide
uuaacuguccuagauguuagac

SEQ ID NO: 33490 - RNA, 22 nt, Artificial Sequence
  LRRK2 RNA guide
uugauaaacuacuuaacugucc

SEQ ID NO: 33491 - RNA, 22 nt, Artificial Sequence
  LRRK2 RNA guide
uugauaagucuaacaucuagga

SEQ ID NO: 33492 - RNA, 20 nt, Artificial Sequence
  LRRK2 RNA guide
caguuaaguaguuuaucaac

SEQ ID NO: 33493 - RNA, 20 nt, Artificial Sequence
  LRRK2 RNA guide
gcaguuaaguaguuuaucaa

SEQ ID NO: 33494 - RNA, 20 nt, Artificial Sequence
  LRRK2 RNA guide
guuuguuuguuuguuuguug

SEQ ID NO: 33495 - RNA, 21 nt, Artificial Sequence
  LRRK2 RNA guide
gcaguuaaguaguuuaucaac

SEQ ID NO: 33496 - RNA, 22 nt, Artificial Sequence
  LRRK2 RNA guide
gcaguuaaguaguuuaucaaca

SEQ ID NO: 33497 - RNA, 20 nt, Artificial Sequence
  LRRK2 RNA guide
cuuguuuguuuguuuguuug

SEQ ID NO: 33498 - RNA, 20 nt, Artificial Sequence
  LRRK2 RNA guide
aaaaucaccuugcugauauu

SEQ ID NO: 33499 - RNA, 20 nt, Artificial Sequence
  LRRK2 RNA guide
aaauaucacuuucuucaucc

SEQ ID NO: 33500 - RNA, 20 nt, Artificial Sequence
  LRRK2 RNA guide
aaaucaccuugcugauauug

SEQ ID NO: 33501 - RNA, 20 nt, Artificial Sequence
  LRRK2 RNA guide
aauaucacuuucuucaucca

SEQ ID NO: 33502 - RNA, 20 nt, Artificial Sequence
  LRRK2 RNA guide
aauaucagcaaggugauuuu

SEQ ID NO: 33503 - RNA, 20 nt, Artificial Sequence
  LRRK2 RNA guide
aaucaccuugcugauauugg

SEQ ID NO: 33504 - RNA, 20 nt, Artificial Sequence
  LRRK2 RNA guide
accuugcugauauuggauga

SEQ ID NO: 33505 - RNA, 20 nt, Artificial Sequence
  LRRK2 RNA guide
acuuucuucauccaauauca

SEQ ID NO: 33506 - RNA, 20 nt, Artificial Sequence
  LRRK2 RNA guide
agguaaaaucaccuugcuga

SEQ ID NO: 33507 - RNA, 20 nt, Artificial Sequence
  LRRK2 RNA guide
auagguaaaaucaccuugcu

SEQ ID NO: 33508 - RNA, 20 nt, Artificial Sequence
  LRRK2 RNA guide
auaucacuuucuucauccaa

SEQ ID NO: 33509 - RNA, 20 nt, Artificial Sequence
  LRRK2 RNA guide
auauuggaugaagaaaguga

SEQ ID NO: 33510 - RNA, 20 nt, Artificial Sequence
  LRRK2 RNA guide
aucaccuugcugauauugga

SEQ ID NO: 33511 - RNA, 20 nt, Artificial Sequence
  LRRK2 RNA guide
aucacuuucuucauccaaua

SEQ ID NO: 33512 - RNA, 20 nt, Artificial Sequence
  LRRK2 RNA guide
auccaauaucagcaagguga

SEQ ID NO: 33513 - RNA, 20 nt, Artificial Sequence
  LRRK2 RNA guide
auuggaugaagaaagugaua

SEQ ID NO: 33514 - RNA, 20 nt, Artificial Sequence
  LRRK2 RNA guide
caauaucagcaaggugauuu

SEQ ID NO: 33515 - RNA, 20 nt, Artificial Sequence
  LRRK2 RNA guide
caccuugcugauauuggaug

SEQ ID NO: 33516 - RNA, 20 nt, Artificial Sequence
  LRRK2 RNA guide
cacuuucuucauccaauauc

SEQ ID NO: 33517 - RNA, 20 nt, Artificial Sequence
  LRRK2 RNA guide
cauccaauaucagcaaggug

SEQ ID NO: 33518 - RNA, 20 nt, Artificial Sequence
  LRRK2 RNA guide
ccaauaucagcaaggugauu

SEQ ID NO: 33519 - RNA, 20 nt, Artificial Sequence
  LRRK2 RNA guide
ccuugcugauauuggaugaa

SEQ ID NO: 33520 - RNA, 20 nt, Artificial Sequence
  LRRK2 RNA guide
cugauauuggaugaagaaag

SEQ ID NO: 33521 - RNA, 20 nt, Artificial Sequence
  LRRK2 RNA guide
cuucauccaauaucagcaag

SEQ ID NO: 33522 - RNA, 20 nt, Artificial Sequence
  LRRK2 RNA guide
cuugcugauauuggaugaag

SEQ ID NO: 33523 - RNA, 20 nt, Artificial Sequence
  LRRK2 RNA guide
cuuucuucauccaauaucag

SEQ ID NO: 33524 - RNA, 20 nt, Artificial Sequence
  LRRK2 RNA guide
gauauuggaugaagaaagug

SEQ ID NO: 33525 - RNA, 20 nt, Artificial Sequence
  LRRK2 RNA guide
gcugauauuggaugaagaaa

SEQ ID NO: 33526 - RNA, 20 nt, Artificial Sequence
  LRRK2 RNA guide
gguaaaaucaccuugcugau

SEQ ID NO: 33527 - RNA, 20 nt, Artificial Sequence
  LRRK2 RNA guide
guaaaaucaccuugcugaua

SEQ ID NO: 33528 - RNA, 20 nt, Artificial Sequence
  LRRK2 RNA guide
uaaaaucaccuugcugauau

SEQ ID NO: 33529 - RNA, 20 nt, Artificial Sequence
  LRRK2 RNA guide
uagguaaaaucaccuugcug

SEQ ID NO: 33530 - RNA, 20 nt, Artificial Sequence
  LRRK2 RNA guide
uaucacuuucuucauccaau

SEQ ID NO: 33531 - RNA, 20 nt, Artificial Sequence
  LRRK2 RNA guide
uauuggaugaagaaagugau

SEQ ID NO: 33532 - RNA, 20 nt, Artificial Sequence
  LRRK2 RNA guide
ucaccuugcugauauuggau

SEQ ID NO: 33533 - RNA, 20 nt, Artificial Sequence
  LRRK2 RNA guide
uccaauaucagcaaggugau

SEQ ID NO: 33534 - RNA, 20 nt, Artificial Sequence
  LRRK2 RNA guide
ucuucauccaauaucagcaa

SEQ ID NO: 33535 - RNA, 20 nt, Artificial Sequence
  LRRK2 RNA guide
ugauauuggaugaagaaagu

SEQ ID NO: 33536 - RNA, 20 nt, Artificial Sequence
  LRRK2 RNA guide
ugcugauauuggaugaagaa

SEQ ID NO: 33537 - RNA, 20 nt, Artificial Sequence
  LRRK2 RNA guide
uucauccaauaucagcaagg

SEQ ID NO: 33538 - RNA, 20 nt, Artificial Sequence
  LRRK2 RNA guide
uucuucauccaauaucagca

SEQ ID NO: 33539 - RNA, 20 nt, Artificial Sequence
  LRRK2 RNA guide
uugcugauauuggaugaaga

SEQ ID NO: 33540 - RNA, 20 nt, Artificial Sequence
  LRRK2 RNA guide
uuucuucauccaauaucagc

SEQ ID NO: 33541 - RNA, 21 nt, Artificial Sequence
  LRRK2 RNA guide
aaaaucaccuugcugauauug

SEQ ID NO: 33542 - RNA, 21 nt, Artificial Sequence
  LRRK2 RNA guide
aaaucaccuugcugauauugg

SEQ ID NO: 33543 - RNA, 21 nt, Artificial Sequence
  LRRK2 RNA guide
aauagguaaaaucaccuugcu

SEQ ID NO: 33544 - RNA, 21 nt, Artificial Sequence
  LRRK2 RNA guide
aaucaccuugcugauauugga

SEQ ID NO: 33545 - RNA, 21 nt, Artificial Sequence
  LRRK2 RNA guide
accuugcugauauuggaugaa

SEQ ID NO: 33546 - RNA, 21 nt, Artificial Sequence
  LRRK2 RNA guide
acuuucuucauccaauaucag

SEQ ID NO: 33547 - RNA, 21 nt, Artificial Sequence
  LRRK2 RNA guide
agguaaaaucaccuugcugau

SEQ ID NO: 33548 - RNA, 21 nt, Artificial Sequence
  LRRK2 RNA guide
auagguaaaaucaccuugcug

SEQ ID NO: 33549 - RNA, 21 nt, Artificial Sequence
  LRRK2 RNA guide
aucaccuugcugauauuggau

SEQ ID NO: 33550 - RNA, 21 nt, Artificial Sequence
  LRRK2 RNA guide
auccaauaucagcaaggugau

SEQ ID NO: 33551 - RNA, 21 nt, Artificial Sequence
  LRRK2 RNA guide
caauaucagcaaggugauuuu

SEQ ID NO: 33552 - RNA, 21 nt, Artificial Sequence
  LRRK2 RNA guide
caccuugcugauauuggauga

SEQ ID NO: 33553 - RNA, 21 nt, Artificial Sequence
  LRRK2 RNA guide
cacuuucuucauccaauauca

SEQ ID NO: 33554 - RNA, 21 nt, Artificial Sequence
  LRRK2 RNA guide
cauccaauaucagcaagguga

SEQ ID NO: 33555 - RNA, 21 nt, Artificial Sequence
  LRRK2 RNA guide
ccaauaucagcaaggugauuu

SEQ ID NO: 33556 - RNA, 21 nt, Artificial Sequence
  LRRK2 RNA guide
ccuugcugauauuggaugaag

SEQ ID NO: 33557 - RNA, 21 nt, Artificial Sequence
  LRRK2 RNA guide
cugauauuggaugaagaaagu

SEQ ID NO: 33558 - RNA, 21 nt, Artificial Sequence
  LRRK2 RNA guide
cuucauccaauaucagcaagg

SEQ ID NO: 33559 - RNA, 21 nt, Artificial Sequence
  LRRK2 RNA guide
cuugcugauauuggaugaaga

SEQ ID NO: 33560 - RNA, 21 nt, Artificial Sequence
  LRRK2 RNA guide
cuuucuucauccaauaucagc

SEQ ID NO: 33561 - RNA, 21 nt, Artificial Sequence
  LRRK2 RNA guide
gauauuggaugaagaaaguga

SEQ ID NO: 33562 - RNA, 21 nt, Artificial Sequence
  LRRK2 RNA guide
gcugauauuggaugaagaaag

SEQ ID NO: 33563 - RNA, 21 nt, Artificial Sequence
  LRRK2 RNA guide
gguaaaaucaccuugcugaua

SEQ ID NO: 33564 - RNA, 21 nt, Artificial Sequence
  LRRK2 RNA guide
guaaaaucaccuugcugauau

SEQ ID NO: 33565 - RNA, 21 nt, Artificial Sequence
  LRRK2 RNA guide
uagguaaaaucaccuugcuga

SEQ ID NO: 33566 - RNA, 21 nt, Artificial Sequence
  LRRK2 RNA guide
ucaccuugcugauauuggaug

SEQ ID NO: 33567 - RNA, 21 nt, Artificial Sequence
  LRRK2 RNA guide
ucacuuucuucauccaauauc

SEQ ID NO: 33568 - RNA, 21 nt, Artificial Sequence
  LRRK2 RNA guide
ucauccaauaucagcaaggug

SEQ ID NO: 33569 - RNA, 21 nt, Artificial Sequence
  LRRK2 RNA guide
uccaauaucagcaaggugauu

SEQ ID NO: 33570 - RNA, 21 nt, Artificial Sequence
  LRRK2 RNA guide
ucuucauccaauaucagcaag

SEQ ID NO: 33571 - RNA, 21 nt, Artificial Sequence
  LRRK2 RNA guide
ugauauuggaugaagaaagug

SEQ ID NO: 33572 - RNA, 21 nt, Artificial Sequence
  LRRK2 RNA guide
ugcugauauuggaugaagaaa

SEQ ID NO: 33573 - RNA, 21 nt, Artificial Sequence
  LRRK2 RNA guide
uucauccaauaucagcaaggu

SEQ ID NO: 33574 - RNA, 21 nt, Artificial Sequence
  LRRK2 RNA guide
uucuucauccaauaucagcaa

SEQ ID NO: 33575 - RNA, 21 nt, Artificial Sequence
  LRRK2 RNA guide
uugcugauauuggaugaagaa

SEQ ID NO: 33576 - RNA, 21 nt, Artificial Sequence
  LRRK2 RNA guide
uuucuucauccaauaucagca

SEQ ID NO: 33577 - RNA, 22 nt, Artificial Sequence
  LRRK2 RNA guide
aaaaucaccuugcugauauugg

SEQ ID NO: 33578 - RNA, 22 nt, Artificial Sequence
  LRRK2 RNA guide
aaauagguaaaaucaccuugcu

SEQ ID NO: 33579 - RNA, 22 nt, Artificial Sequence
  LRRK2 RNA guide
aaaucaccuugcugauauugga

SEQ ID NO: 33580 - RNA, 22 nt, Artificial Sequence
  LRRK2 RNA guide
aauagguaaaaucaccuugcug

SEQ ID NO: 33581 - RNA, 22 nt, Artificial Sequence
  LRRK2 RNA guide
aauaucagcaaggugauuuuac

SEQ ID NO: 33582 - RNA, 22 nt, Artificial Sequence
  LRRK2 RNA guide
aaucaccuugcugauauuggau

SEQ ID NO: 33583 - RNA, 22 nt, Artificial Sequence
  LRRK2 RNA guide
accuugcugauauuggaugaag

SEQ ID NO: 33584 - RNA, 22 nt, Artificial Sequence
  LRRK2 RNA guide
acuuucuucauccaauaucagc

SEQ ID NO: 33585 - RNA, 22 nt, Artificial Sequence
  LRRK2 RNA guide
agguaaaaucaccuugcugaua

SEQ ID NO: 33586 - RNA, 22 nt, Artificial Sequence
  LRRK2 RNA guide
auagguaaaaucaccuugcuga

SEQ ID NO: 33587 - RNA, 22 nt, Artificial Sequence
  LRRK2 RNA guide
aucaccuugcugauauuggaug

SEQ ID NO: 33588 - RNA, 22 nt, Artificial Sequence
  LRRK2 RNA guide
aucacuuucuucauccaauauc

SEQ ID NO: 33589 - RNA, 22 nt, Artificial Sequence
  LRRK2 RNA guide
auccaauaucagcaaggugauu

SEQ ID NO: 33590 - RNA, 22 nt, Artificial Sequence
  LRRK2 RNA guide
caauaucagcaaggugauuuua

SEQ ID NO: 33591 - RNA, 22 nt, Artificial Sequence
  LRRK2 RNA guide
caccuugcugauauuggaugaa

SEQ ID NO: 33592 - RNA, 22 nt, Artificial Sequence
  LRRK2 RNA guide
cacuuucuucauccaauaucag

SEQ ID NO: 33593 - RNA, 22 nt, Artificial Sequence
  LRRK2 RNA guide
cauccaauaucagcaaggugau

SEQ ID NO: 33594 - RNA, 22 nt, Artificial Sequence
  LRRK2 RNA guide
ccaauaucagcaaggugauuuu

SEQ ID NO: 33595 - RNA, 22 nt, Artificial Sequence
  LRRK2 RNA guide
ccuugcugauauuggaugaaga

SEQ ID NO: 33596 - RNA, 22 nt, Artificial Sequence
  LRRK2 RNA guide
cugauauuggaugaagaaagug

SEQ ID NO: 33597 - RNA, 22 nt, Artificial Sequence
  LRRK2 RNA guide
cuucauccaauaucagcaaggu

SEQ ID NO: 33598 - RNA, 22 nt, Artificial Sequence
  LRRK2 RNA guide
cuugcugauauuggaugaagaa

SEQ ID NO: 33599 - RNA, 22 nt, Artificial Sequence
  LRRK2 RNA guide
cuuucuucauccaauaucagca

SEQ ID NO: 33600 - RNA, 22 nt, Artificial Sequence
  LRRK2 RNA guide
gaaaauaucacuuucuucaucc

SEQ ID NO: 33601 - RNA, 22 nt, Artificial Sequence
  LRRK2 RNA guide
gauauuggaugaagaaagugau

SEQ ID NO: 33602 - RNA, 22 nt, Artificial Sequence
  LRRK2 RNA guide
gcugauauuggaugaagaaagu

SEQ ID NO: 33603 - RNA, 22 nt, Artificial Sequence
  LRRK2 RNA guide
gguaaaaucaccuugcugauau

SEQ ID NO: 33604 - RNA, 22 nt, Artificial Sequence
  LRRK2 RNA guide
guaaaaucaccuugcugauauu

SEQ ID NO: 33605 - RNA, 22 nt, Artificial Sequence
  LRRK2 RNA guide
uaaaaucaccuugcugauauug

SEQ ID NO: 33606 - RNA, 22 nt, Artificial Sequence
  LRRK2 RNA guide
uagguaaaaucaccuugcugau

SEQ ID NO: 33607 - RNA, 22 nt, Artificial Sequence
  LRRK2 RNA guide
ucaccuugcugauauuggauga

SEQ ID NO: 33608 - RNA, 22 nt, Artificial Sequence
  LRRK2 RNA guide
ucacuuucuucauccaauauca

SEQ ID NO: 33609 - RNA, 22 nt, Artificial Sequence
  LRRK2 RNA guide
ucauccaauaucagcaagguga

SEQ ID NO: 33610 - RNA, 22 nt, Artificial Sequence
  LRRK2 RNA guide
uccaauaucagcaaggugauuu

SEQ ID NO: 33611 - RNA, 22 nt, Artificial Sequence
  LRRK2 RNA guide
ucuucauccaauaucagcaagg

SEQ ID NO: 33612 - RNA, 22 nt, Artificial Sequence
  LRRK2 RNA guide
ugauauuggaugaagaaaguga

SEQ ID NO: 33613 - RNA, 22 nt, Artificial Sequence
  LRRK2 RNA guide
ugcugauauuggaugaagaaag

SEQ ID NO: 33614 - RNA, 22 nt, Artificial Sequence
  LRRK2 RNA guide
uucauccaauaucagcaaggug

SEQ ID NO: 33615 - RNA, 22 nt, Artificial Sequence
  LRRK2 RNA guide
uucuucauccaauaucagcaag

SEQ ID NO: 33616 - RNA, 22 nt, Artificial Sequence
  LRRK2 RNA guide
uugcugauauuggaugaagaaa

SEQ ID NO: 33617 - RNA, 22 nt, Artificial Sequence
  LRRK2 RNA guide
uuucuucauccaauaucagcaa

SEQ ID NO: 33618 - RNA, 20 nt, Artificial Sequence
  LRRK2 RNA guide
aaaaucaccuugcugauacu

SEQ ID NO: 33619 - RNA, 20 nt, Artificial Sequence
  LRRK2 RNA guide
aaaucaccuugcugauacug

SEQ ID NO: 33620 - RNA, 20 nt, Artificial Sequence
  LRRK2 RNA guide
aaucaccuugcugauacugg

SEQ ID NO: 33621 - RNA, 20 nt, Artificial Sequence
  LRRK2 RNA guide
accuugcugauacuggauga

SEQ ID NO: 33622 - RNA, 20 nt, Artificial Sequence
  LRRK2 RNA guide
acuggaugaagaaagugaua

SEQ ID NO: 33623 - RNA, 20 nt, Artificial Sequence
  LRRK2 RNA guide
acuuucuucauccaguauca

SEQ ID NO: 33624 - RNA, 20 nt, Artificial Sequence
  LRRK2 RNA guide
aguaucagcaaggugauuuu

SEQ ID NO: 33625 - RNA, 20 nt, Artificial Sequence
  LRRK2 RNA guide
auacuggaugaagaaaguga

SEQ ID NO: 33626 - RNA, 20 nt, Artificial Sequence
  LRRK2 RNA guide
auaucacuuucuucauccag

SEQ ID NO: 33627 - RNA, 20 nt, Artificial Sequence
  LRRK2 RNA guide
aucaccuugcugauacugga

SEQ ID NO: 33628 - RNA, 20 nt, Artificial Sequence
  LRRK2 RNA guide
aucacuuucuucauccagua

SEQ ID NO: 33629 - RNA, 20 nt, Artificial Sequence
  LRRK2 RNA guide
auccaguaucagcaagguga

SEQ ID NO: 33630 - RNA, 20 nt, Artificial Sequence
  LRRK2 RNA guide
caccuugcugauacuggaug

SEQ ID NO: 33631 - RNA, 20 nt, Artificial Sequence
  LRRK2 RNA guide
cacuuucuucauccaguauc

SEQ ID NO: 33632 - RNA, 20 nt, Artificial Sequence
  LRRK2 RNA guide
caguaucagcaaggugauuu

SEQ ID NO: 33633 - RNA, 20 nt, Artificial Sequence
  LRRK2 RNA guide
cauccaguaucagcaaggug

SEQ ID NO: 33634 - RNA, 20 nt, Artificial Sequence
  LRRK2 RNA guide
ccaguaucagcaaggugauu

SEQ ID NO: 33635 - RNA, 20 nt, Artificial Sequence
  LRRK2 RNA guide
ccuugcugauacuggaugaa

SEQ ID NO: 33636 - RNA, 20 nt, Artificial Sequence
  LRRK2 RNA guide
cugauacuggaugaagaaag

SEQ ID NO: 33637 - RNA, 20 nt, Artificial Sequence
  LRRK2 RNA guide
cuucauccaguaucagcaag

SEQ ID NO: 33638 - RNA, 20 nt, Artificial Sequence
  LRRK2 RNA guide
cuugcugauacuggaugaag

SEQ ID NO: 33639 - RNA, 20 nt, Artificial Sequence
  LRRK2 RNA guide
cuuucuucauccaguaucag

SEQ ID NO: 33640 - RNA, 20 nt, Artificial Sequence
  LRRK2 RNA guide
gauacuggaugaagaaagug

SEQ ID NO: 33641 - RNA, 20 nt, Artificial Sequence
  LRRK2 RNA guide
gcugauacuggaugaagaaa

SEQ ID NO: 33642 - RNA, 20 nt, Artificial Sequence
  LRRK2 RNA guide
uaaaaucaccuugcugauac

SEQ ID NO: 33643 - RNA, 20 nt, Artificial Sequence
  LRRK2 RNA guide
uacuggaugaagaaagugau

SEQ ID NO: 33644 - RNA, 20 nt, Artificial Sequence
  LRRK2 RNA guide
uaucacuuucuucauccagu

SEQ ID NO: 33645 - RNA, 20 nt, Artificial Sequence
  LRRK2 RNA guide
ucaccuugcugauacuggau

SEQ ID NO: 33646 - RNA, 20 nt, Artificial Sequence
  LRRK2 RNA guide
ucacuuucuucauccaguau

SEQ ID NO: 33647 - RNA, 20 nt, Artificial Sequence
  LRRK2 RNA guide
ucauccaguaucagcaaggu

SEQ ID NO: 33648 - RNA, 20 nt, Artificial Sequence
  LRRK2 RNA guide
uccaguaucagcaaggugau

SEQ ID NO: 33649 - RNA, 20 nt, Artificial Sequence
  LRRK2 RNA guide
ucuucauccaguaucagcaa

SEQ ID NO: 33650 - RNA, 20 nt, Artificial Sequence
  LRRK2 RNA guide
ugauacuggaugaagaaagu

SEQ ID NO: 33651 - RNA, 20 nt, Artificial Sequence
  LRRK2 RNA guide
ugcugauacuggaugaagaa

SEQ ID NO: 33652 - RNA, 20 nt, Artificial Sequence
  LRRK2 RNA guide
uucauccaguaucagcaagg

SEQ ID NO: 33653 - RNA, 20 nt, Artificial Sequence
  LRRK2 RNA guide
uucuucauccaguaucagca

SEQ ID NO: 33654 - RNA, 20 nt, Artificial Sequence
  LRRK2 RNA guide
uugcugauacuggaugaaga

SEQ ID NO: 33655 - RNA, 20 nt, Artificial Sequence
  LRRK2 RNA guide
uuucuucauccaguaucagc

SEQ ID NO: 33656 - RNA, 21 nt, Artificial Sequence
  LRRK2 RNA guide
aaaaucaccuugcugauacug

SEQ ID NO: 33657 - RNA, 21 nt, Artificial Sequence
  LRRK2 RNA guide
aaaucaccuugcugauacugg

SEQ ID NO: 33658 - RNA, 21 nt, Artificial Sequence
  LRRK2 RNA guide
aauaucacuuucuucauccag

SEQ ID NO: 33659 - RNA, 21 nt, Artificial Sequence
  LRRK2 RNA guide
aaucaccuugcugauacugga

SEQ ID NO: 33660 - RNA, 21 nt, Artificial Sequence
  LRRK2 RNA guide
accuugcugauacuggaugaa

SEQ ID NO: 33661 - RNA, 21 nt, Artificial Sequence
  LRRK2 RNA guide
acuggaugaagaaagugauau

SEQ ID NO: 33662 - RNA, 21 nt, Artificial Sequence
  LRRK2 RNA guide
acuuucuucauccaguaucag

SEQ ID NO: 33663 - RNA, 21 nt, Artificial Sequence
  LRRK2 RNA guide
aguaucagcaaggugauuuua

SEQ ID NO: 33664 - RNA, 21 nt, Artificial Sequence
  LRRK2 RNA guide
auacuggaugaagaaagugau

SEQ ID NO: 33665 - RNA, 21 nt, Artificial Sequence
  LRRK2 RNA guide
auaucacuuucuucauccagu

SEQ ID NO: 33666 - RNA, 21 nt, Artificial Sequence
  LRRK2 RNA guide
aucaccuugcugauacuggau

SEQ ID NO: 33667 - RNA, 21 nt, Artificial Sequence
  LRRK2 RNA guide
aucacuuucuucauccaguau

SEQ ID NO: 33668 - RNA, 21 nt, Artificial Sequence
  LRRK2 RNA guide
auccaguaucagcaaggugau

SEQ ID NO: 33669 - RNA, 21 nt, Artificial Sequence
  LRRK2 RNA guide
caccuugcugauacuggauga

SEQ ID NO: 33670 - RNA, 21 nt, Artificial Sequence
  LRRK2 RNA guide
cacuuucuucauccaguauca

SEQ ID NO: 33671 - RNA, 21 nt, Artificial Sequence
  LRRK2 RNA guide
caguaucagcaaggugauuuu

SEQ ID NO: 33672 - RNA, 21 nt, Artificial Sequence
  LRRK2 RNA guide
cauccaguaucagcaagguga

SEQ ID NO: 33673 - RNA, 21 nt, Artificial Sequence
  LRRK2 RNA guide
ccaguaucagcaaggugauuu

SEQ ID NO: 33674 - RNA, 21 nt, Artificial Sequence
  LRRK2 RNA guide
ccuugcugauacuggaugaag

SEQ ID NO: 33675 - RNA, 21 nt, Artificial Sequence
  LRRK2 RNA guide
cugauacuggaugaagaaagu

SEQ ID NO: 33676 - RNA, 21 nt, Artificial Sequence
  LRRK2 RNA guide
cuucauccaguaucagcaagg

SEQ ID NO: 33677 - RNA, 21 nt, Artificial Sequence
  LRRK2 RNA guide
cuugcugauacuggaugaaga

SEQ ID NO: 33678 - RNA, 21 nt, Artificial Sequence
  LRRK2 RNA guide
cuuucuucauccaguaucagc

SEQ ID NO: 33679 - RNA, 21 nt, Artificial Sequence
  LRRK2 RNA guide
gauacuggaugaagaaaguga

SEQ ID NO: 33680 - RNA, 21 nt, Artificial Sequence
  LRRK2 RNA guide
gcugauacuggaugaagaaag

SEQ ID NO: 33681 - RNA, 21 nt, Artificial Sequence
  LRRK2 RNA guide
guaaaaucaccuugcugauac

SEQ ID NO: 33682 - RNA, 21 nt, Artificial Sequence
  LRRK2 RNA guide
uaaaaucaccuugcugauacu

SEQ ID NO: 33683 - RNA, 21 nt, Artificial Sequence
  LRRK2 RNA guide
uacuggaugaagaaagugaua

SEQ ID NO: 33684 - RNA, 21 nt, Artificial Sequence
  LRRK2 RNA guide
uaucacuuucuucauccagua

SEQ ID NO: 33685 - RNA, 21 nt, Artificial Sequence
  LRRK2 RNA guide
ucaccuugcugauacuggaug

SEQ ID NO: 33686 - RNA, 21 nt, Artificial Sequence
  LRRK2 RNA guide
ucacuuucuucauccaguauc

SEQ ID NO: 33687 - RNA, 21 nt, Artificial Sequence
  LRRK2 RNA guide
ucauccaguaucagcaaggug

SEQ ID NO: 33688 - RNA, 21 nt, Artificial Sequence
  LRRK2 RNA guide
uccaguaucagcaaggugauu

SEQ ID NO: 33689 - RNA, 21 nt, Artificial Sequence
  LRRK2 RNA guide
ucuucauccaguaucagcaag

SEQ ID NO: 33690 - RNA, 21 nt, Artificial Sequence
  LRRK2 RNA guide
ugauacuggaugaagaaagug

SEQ ID NO: 33691 - RNA, 21 nt, Artificial Sequence
  LRRK2 RNA guide
ugcugauacuggaugaagaaa

SEQ ID NO: 33692 - RNA, 21 nt, Artificial Sequence
  LRRK2 RNA guide
uucauccaguaucagcaaggu

SEQ ID NO: 33693 - RNA, 21 nt, Artificial Sequence
  LRRK2 RNA guide
uucuucauccaguaucagcaa

SEQ ID NO: 33694 - RNA, 21 nt, Artificial Sequence
  LRRK2 RNA guide
uugcugauacuggaugaagaa

SEQ ID NO: 33695 - RNA, 21 nt, Artificial Sequence
  LRRK2 RNA guide
uuucuucauccaguaucagca

SEQ ID NO: 33696 - RNA, 22 nt, Artificial Sequence
  LRRK2 RNA guide
aaaaucaccuugcugauacugg

SEQ ID NO: 33697 - RNA, 22 nt, Artificial Sequence
  LRRK2 RNA guide
aaauaucacuuucuucauccag

SEQ ID NO: 33698 - RNA, 22 nt, Artificial Sequence
  LRRK2 RNA guide
aaaucaccuugcugauacugga

SEQ ID NO: 33699 - RNA, 22 nt, Artificial Sequence
  LRRK2 RNA guide
aauaucacuuucuucauccagu

SEQ ID NO: 33700 - RNA, 22 nt, Artificial Sequence
  LRRK2 RNA guide
aaucaccuugcugauacuggau

SEQ ID NO: 33701 - RNA, 22 nt, Artificial Sequence
  LRRK2 RNA guide
accuugcugauacuggaugaag

SEQ ID NO: 33702 - RNA, 22 nt, Artificial Sequence
  LRRK2 RNA guide
acuggaugaagaaagugauauu

SEQ ID NO: 33703 - RNA, 22 nt, Artificial Sequence
  LRRK2 RNA guide
acuuucuucauccaguaucagc

SEQ ID NO: 33704 - RNA, 22 nt, Artificial Sequence
  LRRK2 RNA guide
aguaucagcaaggugauuuuac

SEQ ID NO: 33705 - RNA, 22 nt, Artificial Sequence
  LRRK2 RNA guide
auacuggaugaagaaagugaua

SEQ ID NO: 33706 - RNA, 22 nt, Artificial Sequence
  LRRK2 RNA guide
auaucacuuucuucauccagua

SEQ ID NO: 33707 - RNA, 22 nt, Artificial Sequence
  LRRK2 RNA guide
aucaccuugcugauacuggaug

SEQ ID NO: 33708 - RNA, 22 nt, Artificial Sequence
  LRRK2 RNA guide
aucacuuucuucauccaguauc

SEQ ID NO: 33709 - RNA, 22 nt, Artificial Sequence
  LRRK2 RNA guide
auccaguaucagcaaggugauu

SEQ ID NO: 33710 - RNA, 22 nt, Artificial Sequence
  LRRK2 RNA guide
caccuugcugauacuggaugaa

SEQ ID NO: 33711 - RNA, 22 nt, Artificial Sequence
  LRRK2 RNA guide
cacuuucuucauccaguaucag

SEQ ID NO: 33712 - RNA, 22 nt, Artificial Sequence
  LRRK2 RNA guide
caguaucagcaaggugauuuua

SEQ ID NO: 33713 - RNA, 22 nt, Artificial Sequence
  LRRK2 RNA guide
cauccaguaucagcaaggugau

SEQ ID NO: 33714 - RNA, 22 nt, Artificial Sequence
  LRRK2 RNA guide
ccaguaucagcaaggugauuuu

SEQ ID NO: 33715 - RNA, 22 nt, Artificial Sequence
  LRRK2 RNA guide
ccuugcugauacuggaugaaga

SEQ ID NO: 33716 - RNA, 22 nt, Artificial Sequence
  LRRK2 RNA guide
cugauacuggaugaagaaagug

SEQ ID NO: 33717 - RNA, 22 nt, Artificial Sequence
  LRRK2 RNA guide
cuucauccaguaucagcaaggu

SEQ ID NO: 33718 - RNA, 22 nt, Artificial Sequence
  LRRK2 RNA guide
cuugcugauacuggaugaagaa

SEQ ID NO: 33719 - RNA, 22 nt, Artificial Sequence
  LRRK2 RNA guide
cuuucuucauccaguaucagca

SEQ ID NO: 33720 - RNA, 22 nt, Artificial Sequence
  LRRK2 RNA guide
gauacuggaugaagaaagugau

SEQ ID NO: 33721 - RNA, 22 nt, Artificial Sequence
  LRRK2 RNA guide
gcugauacuggaugaagaaagu

SEQ ID NO: 33722 - RNA, 22 nt, Artificial Sequence
  LRRK2 RNA guide
gguaaaaucaccuugcugauac

SEQ ID NO: 33723 - RNA, 22 nt, Artificial Sequence
  LRRK2 RNA guide
guaaaaucaccuugcugauacu

SEQ ID NO: 33724 - RNA, 22 nt, Artificial Sequence
  LRRK2 RNA guide
uaaaaucaccuugcugauacug

SEQ ID NO: 33725 - RNA, 22 nt, Artificial Sequence
  LRRK2 RNA guide
uacuggaugaagaaagugauau

SEQ ID NO: 33726 - RNA, 22 nt, Artificial Sequence
  LRRK2 RNA guide
uaucacuuucuucauccaguau

SEQ ID NO: 33727 - RNA, 22 nt, Artificial Sequence
  LRRK2 RNA guide
ucaccuugcugauacuggauga

SEQ ID NO: 33728 - RNA, 22 nt, Artificial Sequence
  LRRK2 RNA guide
ucacuuucuucauccaguauca

SEQ ID NO: 33729 - RNA, 22 nt, Artificial Sequence
  LRRK2 RNA guide
ucauccaguaucagcaagguga

SEQ ID NO: 33730 - RNA, 22 nt, Artificial Sequence
  LRRK2 RNA guide
uccaguaucagcaaggugauuu

SEQ ID NO: 33731 - RNA, 22 nt, Artificial Sequence
  LRRK2 RNA guide
ucuucauccaguaucagcaagg

SEQ ID NO: 33732 - RNA, 22 nt, Artificial Sequence
  LRRK2 RNA guide
ugauacuggaugaagaaaguga

SEQ ID NO: 33733 - RNA, 22 nt, Artificial Sequence
  LRRK2 RNA guide
ugcugauacuggaugaagaaag

SEQ ID NO: 33734 - RNA, 22 nt, Artificial Sequence
  LRRK2 RNA guide
uucauccaguaucagcaaggug

SEQ ID NO: 33735 - RNA, 22 nt, Artificial Sequence
  LRRK2 RNA guide
uucuucauccaguaucagcaag

SEQ ID NO: 33736 - RNA, 22 nt, Artificial Sequence
  LRRK2 RNA guide
uugcugauacuggaugaagaaa

SEQ ID NO: 33737 - RNA, 22 nt, Artificial Sequence
  LRRK2 RNA guide
uuucuucauccaguaucagcaa

SEQ ID NO: 33738 - RNA, 20 nt, Artificial Sequence
  LRRK2 RNA guide
aacccacgaaugaaauucac

SEQ ID NO: 33739 - RNA, 20 nt, Artificial Sequence
  LRRK2 RNA guide
aauuucauucguggguuaua

SEQ ID NO: 33740 - RNA, 20 nt, Artificial Sequence
  LRRK2 RNA guide
acccacgaaugaaauucacc

SEQ ID NO: 33741 - RNA, 20 nt, Artificial Sequence
  LRRK2 RNA guide
acgaaugaaauucaccccac

SEQ ID NO: 33742 - RNA, 20 nt, Artificial Sequence
  LRRK2 RNA guide
aggggcaugauuuauaaccc

SEQ ID NO: 33743 - RNA, 20 nt, Artificial Sequence
  LRRK2 RNA guide
auaacccacgaaugaaauuc

SEQ ID NO: 33744 - RNA, 20 nt, Artificial Sequence
  LRRK2 RNA guide
augauuuauaacccacgaau

SEQ ID NO: 33745 - RNA, 20 nt, Artificial Sequence
  LRRK2 RNA guide
auucguggguuauaaaucau

SEQ ID NO: 33746 - RNA, 20 nt, Artificial Sequence
  LRRK2 RNA guide
auuuauaacccacgaaugaa

SEQ ID NO: 33747 - RNA, 20 nt, Artificial Sequence
  LRRK2 RNA guide
auuucauucguggguuauaa

SEQ ID NO: 33748 - RNA, 20 nt, Artificial Sequence
  LRRK2 RNA guide
cacgaaugaaauucacccca

SEQ ID NO: 33749 - RNA, 20 nt, Artificial Sequence
  LRRK2 RNA guide
caggggcaugauuuauaacc

SEQ ID NO: 33750 - RNA, 20 nt, Artificial Sequence
  LRRK2 RNA guide
caugauuuauaacccacgaa

SEQ ID NO: 33751 - RNA, 20 nt, Artificial Sequence
  LRRK2 RNA guide
cauucguggguuauaaauca

SEQ ID NO: 33752 - RNA, 20 nt, Artificial Sequence
  LRRK2 RNA guide
ccacgaaugaaauucacccc

SEQ ID NO: 33753 - RNA, 20 nt, Artificial Sequence
  LRRK2 RNA guide
cccacgaaugaaauucaccc

SEQ ID NO: 33754 - RNA, 20 nt, Artificial Sequence
  LRRK2 RNA guide
cgaaugaaauucaccccacc

SEQ ID NO: 33755 - RNA, 20 nt, Artificial Sequence
  LRRK2 RNA guide
gaaugaaauucaccccacca

SEQ ID NO: 33756 - RNA, 20 nt, Artificial Sequence
  LRRK2 RNA guide
gaauuucauucguggguuau

SEQ ID NO: 33757 - RNA, 20 nt, Artificial Sequence
  LRRK2 RNA guide
gauuuauaacccacgaauga

SEQ ID NO: 33758 - RNA, 20 nt, Artificial Sequence
  LRRK2 RNA guide
gcaugauuuauaacccacga

SEQ ID NO: 33759 - RNA, 20 nt, Artificial Sequence
  LRRK2 RNA guide
ggcaugauuuauaacccacg

SEQ ID NO: 33760 - RNA, 20 nt, Artificial Sequence
  LRRK2 RNA guide
gggcaugauuuauaacccac

SEQ ID NO: 33761 - RNA, 20 nt, Artificial Sequence
  LRRK2 RNA guide
ggggcaugauuuauaaccca

SEQ ID NO: 33762 - RNA, 20 nt, Artificial Sequence
  LRRK2 RNA guide
ggggugaauuucauucgugg

SEQ ID NO: 33763 - RNA, 20 nt, Artificial Sequence
  LRRK2 RNA guide
gggugaauuucauucguggg

SEQ ID NO: 33764 - RNA, 20 nt, Artificial Sequence
  LRRK2 RNA guide
ggugaauuucauucgugggu

SEQ ID NO: 33765 - RNA, 20 nt, Artificial Sequence
  LRRK2 RNA guide
gguggggugaauuucauucg

SEQ ID NO: 33766 - RNA, 20 nt, Artificial Sequence
  LRRK2 RNA guide
gugaauuucauucguggguu

SEQ ID NO: 33767 - RNA, 20 nt, Artificial Sequence
  LRRK2 RNA guide
guggggugaauuucauucgu

SEQ ID NO: 33768 - RNA, 20 nt, Artificial Sequence
  LRRK2 RNA guide
guuuugguggggugaauuuc

SEQ ID NO: 33769 - RNA, 20 nt, Artificial Sequence
  LRRK2 RNA guide
uaacccacgaaugaaauuca

SEQ ID NO: 33770 - RNA, 20 nt, Artificial Sequence
  LRRK2 RNA guide
uauaacccacgaaugaaauu

SEQ ID NO: 33771 - RNA, 20 nt, Artificial Sequence
  LRRK2 RNA guide
ucauucguggguuauaaauc

SEQ ID NO: 33772 - RNA, 20 nt, Artificial Sequence
  LRRK2 RNA guide
ugaauuucauucguggguua

SEQ ID NO: 33773 - RNA, 20 nt, Artificial Sequence
  LRRK2 RNA guide
ugauuuauaacccacgaaug

SEQ ID NO: 33774 - RNA, 20 nt, Artificial Sequence
  LRRK2 RNA guide
uggggugaauuucauucgug

SEQ ID NO: 33775 - RNA, 20 nt, Artificial Sequence
  LRRK2 RNA guide
ugguggggugaauuucauuc

SEQ ID NO: 33776 - RNA, 20 nt, Artificial Sequence
  LRRK2 RNA guide
uguuuugguggggugaauuu

SEQ ID NO: 33777 - RNA, 20 nt, Artificial Sequence
  LRRK2 RNA guide
uuauaacccacgaaugaaau

SEQ ID NO: 33778 - RNA, 20 nt, Artificial Sequence
  LRRK2 RNA guide
uucauucguggguuauaaau

SEQ ID NO: 33779 - RNA, 20 nt, Artificial Sequence
  LRRK2 RNA guide
uucguggguuauaaaucaug

SEQ ID NO: 33780 - RNA, 20 nt, Artificial Sequence
  LRRK2 RNA guide
uugguggggugaauuucauu

SEQ ID NO: 33781 - RNA, 20 nt, Artificial Sequence
  LRRK2 RNA guide
uuguuuugguggggugaauu

SEQ ID NO: 33782 - RNA, 20 nt, Artificial Sequence
  LRRK2 RNA guide
uuuauaacccacgaaugaaa

SEQ ID NO: 33783 - RNA, 20 nt, Artificial Sequence
  LRRK2 RNA guide
uuucauucguggguuauaaa

SEQ ID NO: 33784 - RNA, 20 nt, Artificial Sequence
  LRRK2 RNA guide
uuugguggggugaauuucau

SEQ ID NO: 33785 - RNA, 20 nt, Artificial Sequence
  LRRK2 RNA guide
uuuugguggggugaauuuca

SEQ ID NO: 33786 - RNA, 21 nt, Artificial Sequence
  LRRK2 RNA guide
aacccacgaaugaaauucacc

SEQ ID NO: 33787 - RNA, 21 nt, Artificial Sequence
  LRRK2 RNA guide
acccacgaaugaaauucaccc

SEQ ID NO: 33788 - RNA, 21 nt, Artificial Sequence
  LRRK2 RNA guide
acgaaugaaauucaccccacc

SEQ ID NO: 33789 - RNA, 21 nt, Artificial Sequence
  LRRK2 RNA guide
aggggcaugauuuauaaccca

SEQ ID NO: 33790 - RNA, 21 nt, Artificial Sequence
  LRRK2 RNA guide
auaacccacgaaugaaauuca

SEQ ID NO: 33791 - RNA, 21 nt, Artificial Sequence
  LRRK2 RNA guide
augauuuauaacccacgaaug

SEQ ID NO: 33792 - RNA, 21 nt, Artificial Sequence
  LRRK2 RNA guide
auucguggguuauaaaucaug

SEQ ID NO: 33793 - RNA, 21 nt, Artificial Sequence
  LRRK2 RNA guide
cacgaaugaaauucaccccac

SEQ ID NO: 33794 - RNA, 21 nt, Artificial Sequence
  LRRK2 RNA guide
caggggcaugauuuauaaccc

SEQ ID NO: 33795 - RNA, 21 nt, Artificial Sequence
  LRRK2 RNA guide
caugauuuauaacccacgaau

SEQ ID NO: 33796 - RNA, 21 nt, Artificial Sequence
  LRRK2 RNA guide
cauucguggguuauaaaucau

SEQ ID NO: 33797 - RNA, 21 nt, Artificial Sequence
  LRRK2 RNA guide
ccacgaaugaaauucacccca

SEQ ID NO: 33798 - RNA, 21 nt, Artificial Sequence
  LRRK2 RNA guide
ccaggggcaugauuuauaacc

SEQ ID NO: 33799 - RNA, 21 nt, Artificial Sequence
  LRRK2 RNA guide
cccacgaaugaaauucacccc

SEQ ID NO: 33800 - RNA, 21 nt, Artificial Sequence
  LRRK2 RNA guide
cgaaugaaauucaccccacca

SEQ ID NO: 33801 - RNA, 21 nt, Artificial Sequence
  LRRK2 RNA guide
cuuguuuugguggggugaauu

SEQ ID NO: 33802 - RNA, 21 nt, Artificial Sequence
  LRRK2 RNA guide
gaaugaaauucaccccaccaa

SEQ ID NO: 33803 - RNA, 21 nt, Artificial Sequence
  LRRK2 RNA guide
gaauuucauucguggguuaua

SEQ ID NO: 33804 - RNA, 21 nt, Artificial Sequence
  LRRK2 RNA guide
gauuuauaacccacgaaugaa

SEQ ID NO: 33805 - RNA, 21 nt, Artificial Sequence
  LRRK2 RNA guide
gcaugauuuauaacccacgaa

SEQ ID NO: 33806 - RNA, 21 nt, Artificial Sequence
  LRRK2 RNA guide
ggcaugauuuauaacccacga

SEQ ID NO: 33807 - RNA, 21 nt, Artificial Sequence
  LRRK2 RNA guide
gggcaugauuuauaacccacg

SEQ ID NO: 33808 - RNA, 21 nt, Artificial Sequence
  LRRK2 RNA guide
ggggcaugauuuauaacccac

SEQ ID NO: 33809 - RNA, 21 nt, Artificial Sequence
  LRRK2 RNA guide
ggggugaauuucauucguggg

SEQ ID NO: 33810 - RNA, 21 nt, Artificial Sequence
  LRRK2 RNA guide
gggugaauuucauucgugggu

SEQ ID NO: 33811 - RNA, 21 nt, Artificial Sequence
  LRRK2 RNA guide
ggugaauuucauucguggguu

SEQ ID NO: 33812 - RNA, 21 nt, Artificial Sequence
  LRRK2 RNA guide
gguggggugaauuucauucgu

SEQ ID NO: 33813 - RNA, 21 nt, Artificial Sequence
  LRRK2 RNA guide
gugaauuucauucguggguua

SEQ ID NO: 33814 - RNA, 21 nt, Artificial Sequence
  LRRK2 RNA guide
guggggugaauuucauucgug

SEQ ID NO: 33815 - RNA, 21 nt, Artificial Sequence
  LRRK2 RNA guide
guuuugguggggugaauuuca

SEQ ID NO: 33816 - RNA, 21 nt, Artificial Sequence
  LRRK2 RNA guide
uaacccacgaaugaaauucac

SEQ ID NO: 33817 - RNA, 21 nt, Artificial Sequence
  LRRK2 RNA guide
uauaacccacgaaugaaauuc

SEQ ID NO: 33818 - RNA, 21 nt, Artificial Sequence
  LRRK2 RNA guide
ucauucguggguuauaaauca

SEQ ID NO: 33819 - RNA, 21 nt, Artificial Sequence
  LRRK2 RNA guide
ugaauuucauucguggguuau

SEQ ID NO: 33820 - RNA, 21 nt, Artificial Sequence
  LRRK2 RNA guide
ugauuuauaacccacgaauga

SEQ ID NO: 33821 - RNA, 21 nt, Artificial Sequence
  LRRK2 RNA guide
uggggugaauuucauucgugg

SEQ ID NO: 33822 - RNA, 21 nt, Artificial Sequence
  LRRK2 RNA guide
ugguggggugaauuucauucg

SEQ ID NO: 33823 - RNA, 21 nt, Artificial Sequence
  LRRK2 RNA guide
uguuuugguggggugaauuuc

SEQ ID NO: 33824 - RNA, 21 nt, Artificial Sequence
  LRRK2 RNA guide
uucauucguggguuauaaauc

SEQ ID NO: 33825 - RNA, 21 nt, Artificial Sequence
  LRRK2 RNA guide
uucguggguuauaaaucaugc

SEQ ID NO: 33826 - RNA, 21 nt, Artificial Sequence
  LRRK2 RNA guide
uugguggggugaauuucauuc

SEQ ID NO: 33827 - RNA, 21 nt, Artificial Sequence
  LRRK2 RNA guide
uuguuuugguggggugaauuu

SEQ ID NO: 33828 - RNA, 21 nt, Artificial Sequence
  LRRK2 RNA guide
uuugguggggugaauuucauu

SEQ ID NO: 33829 - RNA, 21 nt, Artificial Sequence
  LRRK2 RNA guide
uuuugguggggugaauuucau

SEQ ID NO: 33830 - RNA, 22 nt, Artificial Sequence
  LRRK2 RNA guide
aacccacgaaugaaauucaccc

SEQ ID NO: 33831 - RNA, 22 nt, Artificial Sequence
  LRRK2 RNA guide
acccacgaaugaaauucacccc

SEQ ID NO: 33832 - RNA, 22 nt, Artificial Sequence
  LRRK2 RNA guide
acgaaugaaauucaccccacca

SEQ ID NO: 33833 - RNA, 22 nt, Artificial Sequence
  LRRK2 RNA guide
aggggcaugauuuauaacccac

SEQ ID NO: 33834 - RNA, 22 nt, Artificial Sequence
  LRRK2 RNA guide
auaacccacgaaugaaauucac

SEQ ID NO: 33835 - RNA, 22 nt, Artificial Sequence
  LRRK2 RNA guide
augauuuauaacccacgaauga

SEQ ID NO: 33836 - RNA, 22 nt, Artificial Sequence
  LRRK2 RNA guide
auucguggguuauaaaucaugc

SEQ ID NO: 33837 - RNA, 22 nt, Artificial Sequence
  LRRK2 RNA guide
cacgaaugaaauucaccccacc

SEQ ID NO: 33838 - RNA, 22 nt, Artificial Sequence
  LRRK2 RNA guide
caggggcaugauuuauaaccca

SEQ ID NO: 33839 - RNA, 22 nt, Artificial Sequence
  LRRK2 RNA guide
caugauuuauaacccacgaaug

SEQ ID NO: 33840 - RNA, 22 nt, Artificial Sequence
  LRRK2 RNA guide
cauucguggguuauaaaucaug

SEQ ID NO: 33841 - RNA, 22 nt, Artificial Sequence
  LRRK2 RNA guide
ccacgaaugaaauucaccccac

SEQ ID NO: 33842 - RNA, 22 nt, Artificial Sequence
  LRRK2 RNA guide
ccaggggcaugauuuauaaccc

SEQ ID NO: 33843 - RNA, 22 nt, Artificial Sequence
  LRRK2 RNA guide
cccacgaaugaaauucacccca

SEQ ID NO: 33844 - RNA, 22 nt, Artificial Sequence
  LRRK2 RNA guide
cgaaugaaauucaccccaccaa

SEQ ID NO: 33845 - RNA, 22 nt, Artificial Sequence
  LRRK2 RNA guide
cuuguuuugguggggugaauuu

SEQ ID NO: 33846 - RNA, 22 nt, Artificial Sequence
  LRRK2 RNA guide
gaaugaaauucaccccaccaaa

SEQ ID NO: 33847 - RNA, 22 nt, Artificial Sequence
  LRRK2 RNA guide
gaauuucauucguggguuauaa

SEQ ID NO: 33848 - RNA, 22 nt, Artificial Sequence
  LRRK2 RNA guide
gauuuauaacccacgaaugaaa

SEQ ID NO: 33849 - RNA, 22 nt, Artificial Sequence
  LRRK2 RNA guide
gcaugauuuauaacccacgaau

SEQ ID NO: 33850 - RNA, 22 nt, Artificial Sequence
  LRRK2 RNA guide
gcuuguuuugguggggugaauu

SEQ ID NO: 33851 - RNA, 22 nt, Artificial Sequence
  LRRK2 RNA guide
ggcaugauuuauaacccacgaa

SEQ ID NO: 33852 - RNA, 22 nt, Artificial Sequence
  LRRK2 RNA guide
gggcaugauuuauaacccacga

SEQ ID NO: 33853 - RNA, 22 nt, Artificial Sequence
  LRRK2 RNA guide
ggggcaugauuuauaacccacg

SEQ ID NO: 33854 - RNA, 22 nt, Artificial Sequence
  LRRK2 RNA guide
ggggugaauuucauucgugggu

SEQ ID NO: 33855 - RNA, 22 nt, Artificial Sequence
  LRRK2 RNA guide
gggugaauuucauucguggguu

SEQ ID NO: 33856 - RNA, 22 nt, Artificial Sequence
  LRRK2 RNA guide
ggugaauuucauucguggguua

SEQ ID NO: 33857 - RNA, 22 nt, Artificial Sequence
  LRRK2 RNA guide
gguggggugaauuucauucgug

SEQ ID NO: 33858 - RNA, 22 nt, Artificial Sequence
  LRRK2 RNA guide
gugaauuucauucguggguuau

SEQ ID NO: 33859 - RNA, 22 nt, Artificial Sequence
  LRRK2 RNA guide
guggggugaauuucauucgugg

SEQ ID NO: 33860 - RNA, 22 nt, Artificial Sequence
  LRRK2 RNA guide
guuuugguggggugaauuucau

SEQ ID NO: 33861 - RNA, 22 nt, Artificial Sequence
  LRRK2 RNA guide
uaacccacgaaugaaauucacc

SEQ ID NO: 33862 - RNA, 22 nt, Artificial Sequence
  LRRK2 RNA guide
uauaacccacgaaugaaauuca

SEQ ID NO: 33863 - RNA, 22 nt, Artificial Sequence
  LRRK2 RNA guide
ucauucguggguuauaaaucau

SEQ ID NO: 33864 - RNA, 22 nt, Artificial Sequence
  LRRK2 RNA guide
uccaggggcaugauuuauaacc

SEQ ID NO: 33865 - RNA, 22 nt, Artificial Sequence
  LRRK2 RNA guide
ugaauuucauucguggguuaua

SEQ ID NO: 33866 - RNA, 22 nt, Artificial Sequence
  LRRK2 RNA guide
ugauuuauaacccacgaaugaa

SEQ ID NO: 33867 - RNA, 22 nt, Artificial Sequence
  LRRK2 RNA guide
uggggugaauuucauucguggg

SEQ ID NO: 33868 - RNA, 22 nt, Artificial Sequence
  LRRK2 RNA guide
ugguggggugaauuucauucgu

SEQ ID NO: 33869 - RNA, 22 nt, Artificial Sequence
  LRRK2 RNA guide
uguuuugguggggugaauuuca

SEQ ID NO: 33870 - RNA, 22 nt, Artificial Sequence
  LRRK2 RNA guide
uuauaacccacgaaugaaauuc

SEQ ID NO: 33871 - RNA, 22 nt, Artificial Sequence
  LRRK2 RNA guide
uucauucguggguuauaaauca

SEQ ID NO: 33872 - RNA, 22 nt, Artificial Sequence
  LRRK2 RNA guide
uucguggguuauaaaucaugcc

SEQ ID NO: 33873 - RNA, 22 nt, Artificial Sequence
  LRRK2 RNA guide
uugguggggugaauuucauucg

SEQ ID NO: 33874 - RNA, 22 nt, Artificial Sequence
  LRRK2 RNA guide
uuguuuugguggggugaauuuc

SEQ ID NO: 33875 - RNA, 22 nt, Artificial Sequence
  LRRK2 RNA guide
uuucauucguggguuauaaauc

SEQ ID NO: 33876 - RNA, 22 nt, Artificial Sequence
  LRRK2 RNA guide
uuugguggggugaauuucauuc

SEQ ID NO: 33877 - RNA, 22 nt, Artificial Sequence
  LRRK2 RNA guide
uuuugguggggugaauuucauu

SEQ ID NO: 33878 - RNA, 20 nt, Artificial Sequence
  LRRK2 RNA guide
aacccacgcaugaaauucac

SEQ ID NO: 33879 - RNA, 20 nt, Artificial Sequence
  LRRK2 RNA guide
aauuucaugcguggguuaua

SEQ ID NO: 33880 - RNA, 20 nt, Artificial Sequence
  LRRK2 RNA guide
acccacgcaugaaauucacc

SEQ ID NO: 33881 - RNA, 20 nt, Artificial Sequence
  LRRK2 RNA guide
acgcaugaaauucaccccac

SEQ ID NO: 33882 - RNA, 20 nt, Artificial Sequence
  LRRK2 RNA guide
auaacccacgcaugaaauuc

SEQ ID NO: 33883 - RNA, 20 nt, Artificial Sequence
  LRRK2 RNA guide
augauuuauaacccacgcau

SEQ ID NO: 33884 - RNA, 20 nt, Artificial Sequence
  LRRK2 RNA guide
augcguggguuauaaaucau

SEQ ID NO: 33885 - RNA, 20 nt, Artificial Sequence
  LRRK2 RNA guide
auuuauaacccacgcaugaa

SEQ ID NO: 33886 - RNA, 20 nt, Artificial Sequence
  LRRK2 RNA guide
auuucaugcguggguuauaa

SEQ ID NO: 33887 - RNA, 20 nt, Artificial Sequence
  LRRK2 RNA guide
cacgcaugaaauucacccca

SEQ ID NO: 33888 - RNA, 20 nt, Artificial Sequence
  LRRK2 RNA guide
caugauuuauaacccacgca

SEQ ID NO: 33889 - RNA, 20 nt, Artificial Sequence
  LRRK2 RNA guide
caugcguggguuauaaauca

SEQ ID NO: 33890 - RNA, 20 nt, Artificial Sequence
  LRRK2 RNA guide
ccacgcaugaaauucacccc

SEQ ID NO: 33891 - RNA, 20 nt, Artificial Sequence
  LRRK2 RNA guide
cccacgcaugaaauucaccc

SEQ ID NO: 33892 - RNA, 20 nt, Artificial Sequence
  LRRK2 RNA guide
cgcaugaaauucaccccacc

SEQ ID NO: 33893 - RNA, 20 nt, Artificial Sequence
  LRRK2 RNA guide
gaauuucaugcguggguuau

SEQ ID NO: 33894 - RNA, 20 nt, Artificial Sequence
  LRRK2 RNA guide
gauuuauaacccacgcauga

SEQ ID NO: 33895 - RNA, 20 nt, Artificial Sequence
  LRRK2 RNA guide
gcaugaaauucaccccacca

SEQ ID NO: 33896 - RNA, 20 nt, Artificial Sequence
  LRRK2 RNA guide
gcaugauuuauaacccacgc

SEQ ID NO: 33897 - RNA, 20 nt, Artificial Sequence
  LRRK2 RNA guide
ggggugaauuucaugcgugg

SEQ ID NO: 33898 - RNA, 20 nt, Artificial Sequence
  LRRK2 RNA guide
gggugaauuucaugcguggg

SEQ ID NO: 33899 - RNA, 20 nt, Artificial Sequence
  LRRK2 RNA guide
ggugaauuucaugcgugggu

SEQ ID NO: 33900 - RNA, 20 nt, Artificial Sequence
  LRRK2 RNA guide
gguggggugaauuucaugcg

SEQ ID NO: 33901 - RNA, 20 nt, Artificial Sequence
  LRRK2 RNA guide
gugaauuucaugcguggguu

SEQ ID NO: 33902 - RNA, 20 nt, Artificial Sequence
  LRRK2 RNA guide
guggggugaauuucaugcgu

SEQ ID NO: 33903 - RNA, 20 nt, Artificial Sequence
  LRRK2 RNA guide
uaacccacgcaugaaauuca

SEQ ID NO: 33904 - RNA, 20 nt, Artificial Sequence
  LRRK2 RNA guide
uauaacccacgcaugaaauu

SEQ ID NO: 33905 - RNA, 20 nt, Artificial Sequence
  LRRK2 RNA guide
ucaugcguggguuauaaauc

SEQ ID NO: 33906 - RNA, 20 nt, Artificial Sequence
  LRRK2 RNA guide
ugaauuucaugcguggguua

SEQ ID NO: 33907 - RNA, 20 nt, Artificial Sequence
  LRRK2 RNA guide
ugauuuauaacccacgcaug

SEQ ID NO: 33908 - RNA, 20 nt, Artificial Sequence
  LRRK2 RNA guide
ugcguggguuauaaaucaug

SEQ ID NO: 33909 - RNA, 20 nt, Artificial Sequence
  LRRK2 RNA guide
uggggugaauuucaugcgug

SEQ ID NO: 33910 - RNA, 20 nt, Artificial Sequence
  LRRK2 RNA guide
ugguggggugaauuucaugc

SEQ ID NO: 33911 - RNA, 20 nt, Artificial Sequence
  LRRK2 RNA guide
uuauaacccacgcaugaaau

SEQ ID NO: 33912 - RNA, 20 nt, Artificial Sequence
  LRRK2 RNA guide
uucaugcguggguuauaaau

SEQ ID NO: 33913 - RNA, 20 nt, Artificial Sequence
  LRRK2 RNA guide
uugguggggugaauuucaug

SEQ ID NO: 33914 - RNA, 20 nt, Artificial Sequence
  LRRK2 RNA guide
uuuauaacccacgcaugaaa

SEQ ID NO: 33915 - RNA, 20 nt, Artificial Sequence
  LRRK2 RNA guide
uuucaugcguggguuauaaa

SEQ ID NO: 33916 - RNA, 21 nt, Artificial Sequence
  LRRK2 RNA guide
aacccacgcaugaaauucacc

SEQ ID NO: 33917 - RNA, 21 nt, Artificial Sequence
  LRRK2 RNA guide
aauuucaugcguggguuauaa

SEQ ID NO: 33918 - RNA, 21 nt, Artificial Sequence
  LRRK2 RNA guide
acccacgcaugaaauucaccc

SEQ ID NO: 33919 - RNA, 21 nt, Artificial Sequence
  LRRK2 RNA guide
acgcaugaaauucaccccacc

SEQ ID NO: 33920 - RNA, 21 nt, Artificial Sequence
  LRRK2 RNA guide
auaacccacgcaugaaauuca

SEQ ID NO: 33921 - RNA, 21 nt, Artificial Sequence
  LRRK2 RNA guide
augauuuauaacccacgcaug

SEQ ID NO: 33922 - RNA, 21 nt, Artificial Sequence
  LRRK2 RNA guide
augcguggguuauaaaucaug

SEQ ID NO: 33923 - RNA, 21 nt, Artificial Sequence
  LRRK2 RNA guide
auuuauaacccacgcaugaaa

SEQ ID NO: 33924 - RNA, 21 nt, Artificial Sequence
  LRRK2 RNA guide
auuucaugcguggguuauaaa

SEQ ID NO: 33925 - RNA, 21 nt, Artificial Sequence
  LRRK2 RNA guide
cacgcaugaaauucaccccac

SEQ ID NO: 33926 - RNA, 21 nt, Artificial Sequence
  LRRK2 RNA guide
caugauuuauaacccacgcau

SEQ ID NO: 33927 - RNA, 21 nt, Artificial Sequence
  LRRK2 RNA guide
caugcguggguuauaaaucau

SEQ ID NO: 33928 - RNA, 21 nt, Artificial Sequence
  LRRK2 RNA guide
ccacgcaugaaauucacccca

SEQ ID NO: 33929 - RNA, 21 nt, Artificial Sequence
  LRRK2 RNA guide
cccacgcaugaaauucacccc

SEQ ID NO: 33930 - RNA, 21 nt, Artificial Sequence
  LRRK2 RNA guide
cgcaugaaauucaccccacca

SEQ ID NO: 33931 - RNA, 21 nt, Artificial Sequence
  LRRK2 RNA guide
gaauuucaugcguggguuaua

SEQ ID NO: 33932 - RNA, 21 nt, Artificial Sequence
  LRRK2 RNA guide
gauuuauaacccacgcaugaa

SEQ ID NO: 33933 - RNA, 21 nt, Artificial Sequence
  LRRK2 RNA guide
gcaugaaauucaccccaccaa

SEQ ID NO: 33934 - RNA, 21 nt, Artificial Sequence
  LRRK2 RNA guide
gcaugauuuauaacccacgca

SEQ ID NO: 33935 - RNA, 21 nt, Artificial Sequence
  LRRK2 RNA guide
ggcaugauuuauaacccacgc

SEQ ID NO: 33936 - RNA, 21 nt, Artificial Sequence
  LRRK2 RNA guide
ggggugaauuucaugcguggg

SEQ ID NO: 33937 - RNA, 21 nt, Artificial Sequence
  LRRK2 RNA guide
gggugaauuucaugcgugggu

SEQ ID NO: 33938 - RNA, 21 nt, Artificial Sequence
  LRRK2 RNA guide
ggugaauuucaugcguggguu

SEQ ID NO: 33939 - RNA, 21 nt, Artificial Sequence
  LRRK2 RNA guide
gguggggugaauuucaugcgu

SEQ ID NO: 33940 - RNA, 21 nt, Artificial Sequence
  LRRK2 RNA guide
gugaauuucaugcguggguua

SEQ ID NO: 33941 - RNA, 21 nt, Artificial Sequence
  LRRK2 RNA guide
guggggugaauuucaugcgug

SEQ ID NO: 33942 - RNA, 21 nt, Artificial Sequence
  LRRK2 RNA guide
uaacccacgcaugaaauucac

SEQ ID NO: 33943 - RNA, 21 nt, Artificial Sequence
  LRRK2 RNA guide
uauaacccacgcaugaaauuc

SEQ ID NO: 33944 - RNA, 21 nt, Artificial Sequence
  LRRK2 RNA guide
ucaugcguggguuauaaauca

SEQ ID NO: 33945 - RNA, 21 nt, Artificial Sequence
  LRRK2 RNA guide
ugaauuucaugcguggguuau

SEQ ID NO: 33946 - RNA, 21 nt, Artificial Sequence
  LRRK2 RNA guide
ugauuuauaacccacgcauga

SEQ ID NO: 33947 - RNA, 21 nt, Artificial Sequence
  LRRK2 RNA guide
ugcguggguuauaaaucaugc

SEQ ID NO: 33948 - RNA, 21 nt, Artificial Sequence
  LRRK2 RNA guide
uggggugaauuucaugcgugg

SEQ ID NO: 33949 - RNA, 21 nt, Artificial Sequence
  LRRK2 RNA guide
ugguggggugaauuucaugcg

SEQ ID NO: 33950 - RNA, 21 nt, Artificial Sequence
  LRRK2 RNA guide
uuauaacccacgcaugaaauu

SEQ ID NO: 33951 - RNA, 21 nt, Artificial Sequence
  LRRK2 RNA guide
uucaugcguggguuauaaauc

SEQ ID NO: 33952 - RNA, 21 nt, Artificial Sequence
  LRRK2 RNA guide
uugguggggugaauuucaugc

SEQ ID NO: 33953 - RNA, 21 nt, Artificial Sequence
  LRRK2 RNA guide
uuuauaacccacgcaugaaau

SEQ ID NO: 33954 - RNA, 21 nt, Artificial Sequence
  LRRK2 RNA guide
uuucaugcguggguuauaaau

SEQ ID NO: 33955 - RNA, 21 nt, Artificial Sequence
  LRRK2 RNA guide
uuugguggggugaauuucaug

SEQ ID NO: 33956 - RNA, 22 nt, Artificial Sequence
  LRRK2 RNA guide
aacccacgcaugaaauucaccc

SEQ ID NO: 33957 - RNA, 22 nt, Artificial Sequence
  LRRK2 RNA guide
aauuucaugcguggguuauaaa

SEQ ID NO: 33958 - RNA, 22 nt, Artificial Sequence
  LRRK2 RNA guide
acccacgcaugaaauucacccc

SEQ ID NO: 33959 - RNA, 22 nt, Artificial Sequence
  LRRK2 RNA guide
acgcaugaaauucaccccacca

SEQ ID NO: 33960 - RNA, 22 nt, Artificial Sequence
  LRRK2 RNA guide
auaacccacgcaugaaauucac

SEQ ID NO: 33961 - RNA, 22 nt, Artificial Sequence
  LRRK2 RNA guide
augauuuauaacccacgcauga

SEQ ID NO: 33962 - RNA, 22 nt, Artificial Sequence
  LRRK2 RNA guide
augcguggguuauaaaucaugc

SEQ ID NO: 33963 - RNA, 22 nt, Artificial Sequence
  LRRK2 RNA guide
auuuauaacccacgcaugaaau

SEQ ID NO: 33964 - RNA, 22 nt, Artificial Sequence
  LRRK2 RNA guide
auuucaugcguggguuauaaau

SEQ ID NO: 33965 - RNA, 22 nt, Artificial Sequence
  LRRK2 RNA guide
cacgcaugaaauucaccccacc

SEQ ID NO: 33966 - RNA, 22 nt, Artificial Sequence
  LRRK2 RNA guide
caugauuuauaacccacgcaug

SEQ ID NO: 33967 - RNA, 22 nt, Artificial Sequence
  LRRK2 RNA guide
caugcguggguuauaaaucaug

SEQ ID NO: 33968 - RNA, 22 nt, Artificial Sequence
  LRRK2 RNA guide
ccacgcaugaaauucaccccac

SEQ ID NO: 33969 - RNA, 22 nt, Artificial Sequence
  LRRK2 RNA guide
cccacgcaugaaauucacccca

SEQ ID NO: 33970 - RNA, 22 nt, Artificial Sequence
  LRRK2 RNA guide
cgcaugaaauucaccccaccaa

SEQ ID NO: 33971 - RNA, 22 nt, Artificial Sequence
  LRRK2 RNA guide
gaauuucaugcguggguuauaa

SEQ ID NO: 33972 - RNA, 22 nt, Artificial Sequence
  LRRK2 RNA guide
gauuuauaacccacgcaugaaa

SEQ ID NO: 33973 - RNA, 22 nt, Artificial Sequence
  LRRK2 RNA guide
gcaugaaauucaccccaccaaa

SEQ ID NO: 33974 - RNA, 22 nt, Artificial Sequence
  LRRK2 RNA guide
gcaugauuuauaacccacgcau

SEQ ID NO: 33975 - RNA, 22 nt, Artificial Sequence
  LRRK2 RNA guide
ggcaugauuuauaacccacgca

SEQ ID NO: 33976 - RNA, 22 nt, Artificial Sequence
  LRRK2 RNA guide
gggcaugauuuauaacccacgc

SEQ ID NO: 33977 - RNA, 22 nt, Artificial Sequence
  LRRK2 RNA guide
ggggugaauuucaugcgugggu

SEQ ID NO: 33978 - RNA, 22 nt, Artificial Sequence
  LRRK2 RNA guide
gggugaauuucaugcguggguu

SEQ ID NO: 33979 - RNA, 22 nt, Artificial Sequence
  LRRK2 RNA guide
ggugaauuucaugcguggguua

SEQ ID NO: 33980 - RNA, 22 nt, Artificial Sequence
  LRRK2 RNA guide
gguggggugaauuucaugcgug

SEQ ID NO: 33981 - RNA, 22 nt, Artificial Sequence
  LRRK2 RNA guide
gugaauuucaugcguggguuau

SEQ ID NO: 33982 - RNA, 22 nt, Artificial Sequence
  LRRK2 RNA guide
guggggugaauuucaugcgugg

SEQ ID NO: 33983 - RNA, 22 nt, Artificial Sequence
  LRRK2 RNA guide
uaacccacgcaugaaauucacc

SEQ ID NO: 33984 - RNA, 22 nt, Artificial Sequence
  LRRK2 RNA guide
uauaacccacgcaugaaauuca

SEQ ID NO: 33985 - RNA, 22 nt, Artificial Sequence
  LRRK2 RNA guide
ucaugcguggguuauaaaucau

SEQ ID NO: 33986 - RNA, 22 nt, Artificial Sequence
  LRRK2 RNA guide
ugaauuucaugcguggguuaua

SEQ ID NO: 33987 - RNA, 22 nt, Artificial Sequence
  LRRK2 RNA guide
ugauuuauaacccacgcaugaa

SEQ ID NO: 33988 - RNA, 22 nt, Artificial Sequence
  LRRK2 RNA guide
ugcguggguuauaaaucaugcc

SEQ ID NO: 33989 - RNA, 22 nt, Artificial Sequence
  LRRK2 RNA guide
uggggugaauuucaugcguggg

SEQ ID NO: 33990 - RNA, 22 nt, Artificial Sequence
  LRRK2 RNA guide
ugguggggugaauuucaugcgu

SEQ ID NO: 33991 - RNA, 22 nt, Artificial Sequence
  LRRK2 RNA guide
uuauaacccacgcaugaaauuc

SEQ ID NO: 33992 - RNA, 22 nt, Artificial Sequence
  LRRK2 RNA guide
uucaugcguggguuauaaauca

SEQ ID NO: 33993 - RNA, 22 nt, Artificial Sequence
  LRRK2 RNA guide
uugguggggugaauuucaugcg

SEQ ID NO: 33994 - RNA, 22 nt, Artificial Sequence
  LRRK2 RNA guide
uuuauaacccacgcaugaaauu

SEQ ID NO: 33995 - RNA, 22 nt, Artificial Sequence
  LRRK2 RNA guide
uuucaugcguggguuauaaauc

SEQ ID NO: 33996 - RNA, 22 nt, Artificial Sequence
  LRRK2 RNA guide
uuugguggggugaauuucaugc

SEQ ID NO: 33997 - RNA, 22 nt, Artificial Sequence
  LRRK2 RNA guide
uuuugguggggugaauuucaug

SEQ ID NO: 33998 - RNA, 20 nt, Artificial Sequence
  LRRK2 RNA guide
ccaggggcaugauuuauaac

SEQ ID NO: 33999 - RNA, 20 nt, Artificial Sequence
  LRRK2 RNA guide
ucguggguuauaaaucaugc

SEQ ID NO: 34000 - RNA, 21 nt, Artificial Sequence
  LRRK2 RNA guide
uccaggggcaugauuuauaac

SEQ ID NO: 34001 - RNA, 21 nt, Artificial Sequence
  LRRK2 RNA guide
ucguggguuauaaaucaugcc

SEQ ID NO: 34002 - RNA, 22 nt, Artificial Sequence
  LRRK2 RNA guide
cuccaggggcaugauuuauaac

SEQ ID NO: 34003 - RNA, 22 nt, Artificial Sequence
  LRRK2 RNA guide
ucguggguuauaaaucaugccc

SEQ ID NO: 34004 - RNA, 20 nt, Artificial Sequence
  LRRK2 RNA guide
aacccacaaaugaaauucac

SEQ ID NO: 34005 - RNA, 20 nt, Artificial Sequence
  LRRK2 RNA guide
acaaaugaaauucaccccac

SEQ ID NO: 34006 - RNA, 20 nt, Artificial Sequence
  LRRK2 RNA guide
acccacaaaugaaauucacc

SEQ ID NO: 34007 - RNA, 20 nt, Artificial Sequence
  LRRK2 RNA guide
auaacccacaaaugaaauuc

SEQ ID NO: 34008 - RNA, 20 nt, Artificial Sequence
  LRRK2 RNA guide
caaaugaaauucaccccacc

SEQ ID NO: 34009 - RNA, 20 nt, Artificial Sequence
  LRRK2 RNA guide
cacaaaugaaauucacccca

SEQ ID NO: 34010 - RNA, 20 nt, Artificial Sequence
  LRRK2 RNA guide
caugauuuauaacccacaaa

SEQ ID NO: 34011 - RNA, 20 nt, Artificial Sequence
  LRRK2 RNA guide
cauuuguggguuauaaauca

SEQ ID NO: 34012 - RNA, 20 nt, Artificial Sequence
  LRRK2 RNA guide
ccacaaaugaaauucacccc

SEQ ID NO: 34013 - RNA, 20 nt, Artificial Sequence
  LRRK2 RNA guide
cccacaaaugaaauucaccc

SEQ ID NO: 34014 - RNA, 20 nt, Artificial Sequence
  LRRK2 RNA guide
gaauuucauuuguggguuau

SEQ ID NO: 34015 - RNA, 20 nt, Artificial Sequence
  LRRK2 RNA guide
gauuuauaacccacaaauga

SEQ ID NO: 34016 - RNA, 20 nt, Artificial Sequence
  LRRK2 RNA guide
gcaugauuuauaacccacaa

SEQ ID NO: 34017 - RNA, 20 nt, Artificial Sequence
  LRRK2 RNA guide
ggcaugauuuauaacccaca

SEQ ID NO: 34018 - RNA, 20 nt, Artificial Sequence
  LRRK2 RNA guide
ggggugaauuucauuugugg

SEQ ID NO: 34019 - RNA, 20 nt, Artificial Sequence
  LRRK2 RNA guide
gggugaauuucauuuguggg

SEQ ID NO: 34020 - RNA, 20 nt, Artificial Sequence
  LRRK2 RNA guide
ggugaauuucauuugugggu

SEQ ID NO: 34021 - RNA, 20 nt, Artificial Sequence
  LRRK2 RNA guide
gguggggugaauuucauuug

SEQ ID NO: 34022 - RNA, 20 nt, Artificial Sequence
  LRRK2 RNA guide
gugaauuucauuuguggguu

SEQ ID NO: 34023 - RNA, 20 nt, Artificial Sequence
  LRRK2 RNA guide
guggggugaauuucauuugu

SEQ ID NO: 34024 - RNA, 20 nt, Artificial Sequence
  LRRK2 RNA guide
uaacccacaaaugaaauuca

SEQ ID NO: 34025 - RNA, 20 nt, Artificial Sequence
  LRRK2 RNA guide
ucauuuguggguuauaaauc

SEQ ID NO: 34026 - RNA, 20 nt, Artificial Sequence
  LRRK2 RNA guide
ugaauuucauuuguggguua

SEQ ID NO: 34027 - RNA, 20 nt, Artificial Sequence
  LRRK2 RNA guide
ugauuuauaacccacaaaug

SEQ ID NO: 34028 - RNA, 20 nt, Artificial Sequence
  LRRK2 RNA guide
uggggugaauuucauuugug

SEQ ID NO: 34029 - RNA, 20 nt, Artificial Sequence
  LRRK2 RNA guide
ugguggggugaauuucauuu

SEQ ID NO: 34030 - RNA, 20 nt, Artificial Sequence
  LRRK2 RNA guide
uuguggguuauaaaucaugc

SEQ ID NO: 34031 - RNA, 20 nt, Artificial Sequence
  LRRK2 RNA guide
uuuguggguuauaaaucaug

SEQ ID NO: 34032 - RNA, 21 nt, Artificial Sequence
  LRRK2 RNA guide
aacccacaaaugaaauucacc

SEQ ID NO: 34033 - RNA, 21 nt, Artificial Sequence
  LRRK2 RNA guide
acaaaugaaauucaccccacc

SEQ ID NO: 34034 - RNA, 21 nt, Artificial Sequence
  LRRK2 RNA guide
acccacaaaugaaauucaccc

SEQ ID NO: 34035 - RNA, 21 nt, Artificial Sequence
  LRRK2 RNA guide
caaaugaaauucaccccacca

SEQ ID NO: 34036 - RNA, 21 nt, Artificial Sequence
  LRRK2 RNA guide
cacaaaugaaauucaccccac

SEQ ID NO: 34037 - RNA, 21 nt, Artificial Sequence
  LRRK2 RNA guide
ccacaaaugaaauucacccca

SEQ ID NO: 34038 - RNA, 21 nt, Artificial Sequence
  LRRK2 RNA guide
cccacaaaugaaauucacccc

SEQ ID NO: 34039 - RNA, 21 nt, Artificial Sequence
  LRRK2 RNA guide
gcaugauuuauaacccacaaa

SEQ ID NO: 34040 - RNA, 21 nt, Artificial Sequence
  LRRK2 RNA guide
ggcaugauuuauaacccacaa

SEQ ID NO: 34041 - RNA, 21 nt, Artificial Sequence
  LRRK2 RNA guide
gggcaugauuuauaacccaca

SEQ ID NO: 34042 - RNA, 21 nt, Artificial Sequence
  LRRK2 RNA guide
ggggugaauuucauuuguggg

SEQ ID NO: 34043 - RNA, 21 nt, Artificial Sequence
  LRRK2 RNA guide
gggugaauuucauuugugggu

SEQ ID NO: 34044 - RNA, 21 nt, Artificial Sequence
  LRRK2 RNA guide
ggugaauuucauuuguggguu

SEQ ID NO: 34045 - RNA, 21 nt, Artificial Sequence
  LRRK2 RNA guide
gguggggugaauuucauuugu

SEQ ID NO: 34046 - RNA, 21 nt, Artificial Sequence
  LRRK2 RNA guide
gugaauuucauuuguggguua

SEQ ID NO: 34047 - RNA, 21 nt, Artificial Sequence
  LRRK2 RNA guide
guggggugaauuucauuugug

SEQ ID NO: 34048 - RNA, 21 nt, Artificial Sequence
  LRRK2 RNA guide
uaacccacaaaugaaauucac

SEQ ID NO: 34049 - RNA, 21 nt, Artificial Sequence
  LRRK2 RNA guide
uggggugaauuucauuugugg

SEQ ID NO: 34050 - RNA, 21 nt, Artificial Sequence
  LRRK2 RNA guide
ugguggggugaauuucauuug

SEQ ID NO: 34051 - RNA, 21 nt, Artificial Sequence
  LRRK2 RNA guide
uugguggggugaauuucauuu

SEQ ID NO: 34052 - RNA, 21 nt, Artificial Sequence
  LRRK2 RNA guide
uuguggguuauaaaucaugcc

SEQ ID NO: 34053 - RNA, 21 nt, Artificial Sequence
  LRRK2 RNA guide
uuuguggguuauaaaucaugc

SEQ ID NO: 34054 - RNA, 22 nt, Artificial Sequence
  LRRK2 RNA guide
aacccacaaaugaaauucaccc

SEQ ID NO: 34055 - RNA, 22 nt, Artificial Sequence
  LRRK2 RNA guide
acaaaugaaauucaccccacca

SEQ ID NO: 34056 - RNA, 22 nt, Artificial Sequence
  LRRK2 RNA guide
acccacaaaugaaauucacccc

SEQ ID NO: 34057 - RNA, 22 nt, Artificial Sequence
  LRRK2 RNA guide
auaacccacaaaugaaauucac

SEQ ID NO: 34058 - RNA, 22 nt, Artificial Sequence
  LRRK2 RNA guide
auuuguggguuauaaaucaugc

SEQ ID NO: 34059 - RNA, 22 nt, Artificial Sequence
  LRRK2 RNA guide
caaaugaaauucaccccaccaa

SEQ ID NO: 34060 - RNA, 22 nt, Artificial Sequence
  LRRK2 RNA guide
cacaaaugaaauucaccccacc

SEQ ID NO: 34061 - RNA, 22 nt, Artificial Sequence
  LRRK2 RNA guide
caugauuuauaacccacaaaug

SEQ ID NO: 34062 - RNA, 22 nt, Artificial Sequence
  LRRK2 RNA guide
cauuuguggguuauaaaucaug

SEQ ID NO: 34063 - RNA, 22 nt, Artificial Sequence
  LRRK2 RNA guide
ccacaaaugaaauucaccccac

SEQ ID NO: 34064 - RNA, 22 nt, Artificial Sequence
  LRRK2 RNA guide
cccacaaaugaaauucacccca

SEQ ID NO: 34065 - RNA, 22 nt, Artificial Sequence
  LRRK2 RNA guide
gcaugauuuauaacccacaaau

SEQ ID NO: 34066 - RNA, 22 nt, Artificial Sequence
  LRRK2 RNA guide
ggcaugauuuauaacccacaaa

SEQ ID NO: 34067 - RNA, 22 nt, Artificial Sequence
  LRRK2 RNA guide
gggcaugauuuauaacccacaa

SEQ ID NO: 34068 - RNA, 22 nt, Artificial Sequence
  LRRK2 RNA guide
ggggcaugauuuauaacccaca

SEQ ID NO: 34069 - RNA, 22 nt, Artificial Sequence
  LRRK2 RNA guide
ggggugaauuucauuugugggu

SEQ ID NO: 34070 - RNA, 22 nt, Artificial Sequence
  LRRK2 RNA guide
gggugaauuucauuuguggguu

SEQ ID NO: 34071 - RNA, 22 nt, Artificial Sequence
  LRRK2 RNA guide
ggugaauuucauuuguggguua

SEQ ID NO: 34072 - RNA, 22 nt, Artificial Sequence
  LRRK2 RNA guide
gguggggugaauuucauuugug

SEQ ID NO: 34073 - RNA, 22 nt, Artificial Sequence
  LRRK2 RNA guide
gugaauuucauuuguggguuau

SEQ ID NO: 34074 - RNA, 22 nt, Artificial Sequence
  LRRK2 RNA guide
guggggugaauuucauuugugg

SEQ ID NO: 34075 - RNA, 22 nt, Artificial Sequence
  LRRK2 RNA guide
uaacccacaaaugaaauucacc

SEQ ID NO: 34076 - RNA, 22 nt, Artificial Sequence
  LRRK2 RNA guide
uggggugaauuucauuuguggg

SEQ ID NO: 34077 - RNA, 22 nt, Artificial Sequence
  LRRK2 RNA guide
ugguggggugaauuucauuugu

SEQ ID NO: 34078 - RNA, 22 nt, Artificial Sequence
  LRRK2 RNA guide
uugguggggugaauuucauuug

SEQ ID NO: 34079 - RNA, 22 nt, Artificial Sequence
  LRRK2 RNA guide
uuguggguuauaaaucaugccc

SEQ ID NO: 34080 - RNA, 22 nt, Artificial Sequence
  LRRK2 RNA guide
uuugguggggugaauuucauuu

SEQ ID NO: 34081 - RNA, 22 nt, Artificial Sequence
  LRRK2 RNA guide
uuuguggguuauaaaucaugcc

SEQ ID NO: 34082 - RNA, 20 nt, Artificial Sequence
  LRRK2 RNA guide
aaaacccaugggaagauguu

SEQ ID NO: 34083 - RNA, 20 nt, Artificial Sequence
  LRRK2 RNA guide
aaacaucuucccauggguuu

SEQ ID NO: 34084 - RNA, 20 nt, Artificial Sequence
  LRRK2 RNA guide
aaacccaugggaagauguuu

SEQ ID NO: 34085 - RNA, 20 nt, Artificial Sequence
  LRRK2 RNA guide
aacaucuucccauggguuuu

SEQ ID NO: 34086 - RNA, 20 nt, Artificial Sequence
  LRRK2 RNA guide
aacccaugggaagauguuuc

SEQ ID NO: 34087 - RNA, 20 nt, Artificial Sequence
  LRRK2 RNA guide
acaucuucccauggguuuuc

SEQ ID NO: 34088 - RNA, 20 nt, Artificial Sequence
  LRRK2 RNA guide
acccaugggaagauguuucu

SEQ ID NO: 34089 - RNA, 20 nt, Artificial Sequence
  LRRK2 RNA guide
agaaacaucuucccaugggu

SEQ ID NO: 34090 - RNA, 20 nt, Artificial Sequence
  LRRK2 RNA guide
aggaaaacccaugggaagau

SEQ ID NO: 34091 - RNA, 20 nt, Artificial Sequence
  LRRK2 RNA guide
auccaggaaaacccauggga

SEQ ID NO: 34092 - RNA, 20 nt, Artificial Sequence
  LRRK2 RNA guide
aucugagaaacaucuuccca

SEQ ID NO: 34093 - RNA, 20 nt, Artificial Sequence
  LRRK2 RNA guide
aucuucccauggguuuuccu

SEQ ID NO: 34094 - RNA, 20 nt, Artificial Sequence
  LRRK2 RNA guide
auggguuuuccuggaugaga

SEQ ID NO: 34095 - RNA, 20 nt, Artificial Sequence
  LRRK2 RNA guide
auugucucauccaggaaaac

SEQ ID NO: 34096 - RNA, 20 nt, Artificial Sequence
  LRRK2 RNA guide
caggaaaacccaugggaaga

SEQ ID NO: 34097 - RNA, 20 nt, Artificial Sequence
  LRRK2 RNA guide
cauccaggaaaacccauggg

SEQ ID NO: 34098 - RNA, 20 nt, Artificial Sequence
  LRRK2 RNA guide
caucuucccauggguuuucc

SEQ ID NO: 34099 - RNA, 20 nt, Artificial Sequence
  LRRK2 RNA guide
cauggguuuuccuggaugag

SEQ ID NO: 34100 - RNA, 20 nt, Artificial Sequence
  LRRK2 RNA guide
ccaggaaaacccaugggaag

SEQ ID NO: 34101 - RNA, 20 nt, Artificial Sequence
  LRRK2 RNA guide
ccauggguuuuccuggauga

SEQ ID NO: 34102 - RNA, 20 nt, Artificial Sequence
  LRRK2 RNA guide
cccauggguuuuccuggaug

SEQ ID NO: 34103 - RNA, 20 nt, Artificial Sequence
  LRRK2 RNA guide
ccuuuauugucucauccagg

SEQ ID NO: 34104 - RNA, 20 nt, Artificial Sequence
  LRRK2 RNA guide
cucauccaggaaaacccaug

SEQ ID NO: 34105 - RNA, 20 nt, Artificial Sequence
  LRRK2 RNA guide
cugagaaacaucuucccaug

SEQ ID NO: 34106 - RNA, 20 nt, Artificial Sequence
  LRRK2 RNA guide
cuucccauggguuuuccugg

SEQ ID NO: 34107 - RNA, 20 nt, Artificial Sequence
  LRRK2 RNA guide
cuuuauugucucauccagga

SEQ ID NO: 34108 - RNA, 20 nt, Artificial Sequence
  LRRK2 RNA guide
gaaaacccaugggaagaugu

SEQ ID NO: 34109 - RNA, 20 nt, Artificial Sequence
  LRRK2 RNA guide
gaaacaucuucccauggguu

SEQ ID NO: 34110 - RNA, 20 nt, Artificial Sequence
  LRRK2 RNA guide
gagaaacaucuucccauggg

SEQ ID NO: 34111 - RNA, 20 nt, Artificial Sequence
  LRRK2 RNA guide
gaucugagaaacaucuuccc

SEQ ID NO: 34112 - RNA, 20 nt, Artificial Sequence
  LRRK2 RNA guide
ggaaaacccaugggaagaug

SEQ ID NO: 34113 - RNA, 20 nt, Artificial Sequence
  LRRK2 RNA guide
ggguuuuccuggaugagaca

SEQ ID NO: 34114 - RNA, 20 nt, Artificial Sequence
  LRRK2 RNA guide
gguuuuccuggaugagacaa

SEQ ID NO: 34115 - RNA, 20 nt, Artificial Sequence
  LRRK2 RNA guide
gucucauccaggaaaaccca

SEQ ID NO: 34116 - RNA, 20 nt, Artificial Sequence
  LRRK2 RNA guide
uauugucucauccaggaaaa

SEQ ID NO: 34117 - RNA, 20 nt, Artificial Sequence
  LRRK2 RNA guide
ucauccaggaaaacccaugg

SEQ ID NO: 34118 - RNA, 20 nt, Artificial Sequence
  LRRK2 RNA guide
uccaggaaaacccaugggaa

SEQ ID NO: 34119 - RNA, 20 nt, Artificial Sequence
  LRRK2 RNA guide
ucccauggguuuuccuggau

SEQ ID NO: 34120 - RNA, 20 nt, Artificial Sequence
  LRRK2 RNA guide
ucucauccaggaaaacccau

SEQ ID NO: 34121 - RNA, 20 nt, Artificial Sequence
  LRRK2 RNA guide
ucugagaaacaucuucccau

SEQ ID NO: 34122 - RNA, 20 nt, Artificial Sequence
  LRRK2 RNA guide
ucuucccauggguuuuccug

SEQ ID NO: 34123 - RNA, 20 nt, Artificial Sequence
  LRRK2 RNA guide
ugagaaacaucuucccaugg

SEQ ID NO: 34124 - RNA, 20 nt, Artificial Sequence
  LRRK2 RNA guide
uggguuuuccuggaugagac

SEQ ID NO: 34125 - RNA, 20 nt, Artificial Sequence
  LRRK2 RNA guide
ugucucauccaggaaaaccc

SEQ ID NO: 34126 - RNA, 20 nt, Artificial Sequence
  LRRK2 RNA guide
uuauugucucauccaggaaa

SEQ ID NO: 34127 - RNA, 20 nt, Artificial Sequence
  LRRK2 RNA guide
uucccauggguuuuccugga

SEQ ID NO: 34128 - RNA, 20 nt, Artificial Sequence
  LRRK2 RNA guide
uugucucauccaggaaaacc

SEQ ID NO: 34129 - RNA, 20 nt, Artificial Sequence
  LRRK2 RNA guide
uuuauugucucauccaggaa

SEQ ID NO: 34130 - RNA, 21 nt, Artificial Sequence
  LRRK2 RNA guide
aaaacccaugggaagauguuu

SEQ ID NO: 34131 - RNA, 21 nt, Artificial Sequence
  LRRK2 RNA guide
aaacaucuucccauggguuuu

SEQ ID NO: 34132 - RNA, 21 nt, Artificial Sequence
  LRRK2 RNA guide
aaacccaugggaagauguuuc

SEQ ID NO: 34133 - RNA, 21 nt, Artificial Sequence
  LRRK2 RNA guide
aacaucuucccauggguuuuc

SEQ ID NO: 34134 - RNA, 21 nt, Artificial Sequence
  LRRK2 RNA guide
aacccaugggaagauguuucu

SEQ ID NO: 34135 - RNA, 21 nt, Artificial Sequence
  LRRK2 RNA guide
acaucuucccauggguuuucc

SEQ ID NO: 34136 - RNA, 21 nt, Artificial Sequence
  LRRK2 RNA guide
acccaugggaagauguuucuc

SEQ ID NO: 34137 - RNA, 21 nt, Artificial Sequence
  LRRK2 RNA guide
agaaacaucuucccauggguu

SEQ ID NO: 34138 - RNA, 21 nt, Artificial Sequence
  LRRK2 RNA guide
agaucugagaaacaucuuccc

SEQ ID NO: 34139 - RNA, 21 nt, Artificial Sequence
  LRRK2 RNA guide
aggaaaacccaugggaagaug

SEQ ID NO: 34140 - RNA, 21 nt, Artificial Sequence
  LRRK2 RNA guide
auccaggaaaacccaugggaa

SEQ ID NO: 34141 - RNA, 21 nt, Artificial Sequence
  LRRK2 RNA guide
aucugagaaacaucuucccau

SEQ ID NO: 34142 - RNA, 21 nt, Artificial Sequence
  LRRK2 RNA guide
aucuucccauggguuuuccug

SEQ ID NO: 34143 - RNA, 21 nt, Artificial Sequence
  LRRK2 RNA guide
auggguuuuccuggaugagac

SEQ ID NO: 34144 - RNA, 21 nt, Artificial Sequence
  LRRK2 RNA guide
auugucucauccaggaaaacc

SEQ ID NO: 34145 - RNA, 21 nt, Artificial Sequence
  LRRK2 RNA guide
caggaaaacccaugggaagau

SEQ ID NO: 34146 - RNA, 21 nt, Artificial Sequence
  LRRK2 RNA guide
cauccaggaaaacccauggga

SEQ ID NO: 34147 - RNA, 21 nt, Artificial Sequence
  LRRK2 RNA guide
caucuucccauggguuuuccu

SEQ ID NO: 34148 - RNA, 21 nt, Artificial Sequence
  LRRK2 RNA guide
cauggguuuuccuggaugaga

SEQ ID NO: 34149 - RNA, 21 nt, Artificial Sequence
  LRRK2 RNA guide
ccaggaaaacccaugggaaga

SEQ ID NO: 34150 - RNA, 21 nt, Artificial Sequence
  LRRK2 RNA guide
ccauggguuuuccuggaugag

SEQ ID NO: 34151 - RNA, 21 nt, Artificial Sequence
  LRRK2 RNA guide
cccauggguuuuccuggauga

SEQ ID NO: 34152 - RNA, 21 nt, Artificial Sequence
  LRRK2 RNA guide
ccuuuauugucucauccagga

SEQ ID NO: 34153 - RNA, 21 nt, Artificial Sequence
  LRRK2 RNA guide
cucauccaggaaaacccaugg

SEQ ID NO: 34154 - RNA, 21 nt, Artificial Sequence
  LRRK2 RNA guide
cugagaaacaucuucccaugg

SEQ ID NO: 34155 - RNA, 21 nt, Artificial Sequence
  LRRK2 RNA guide
cuucccauggguuuuccugga

SEQ ID NO: 34156 - RNA, 21 nt, Artificial Sequence
  LRRK2 RNA guide
cuuuauugucucauccaggaa

SEQ ID NO: 34157 - RNA, 21 nt, Artificial Sequence
  LRRK2 RNA guide
gaaaacccaugggaagauguu

SEQ ID NO: 34158 - RNA, 21 nt, Artificial Sequence
  LRRK2 RNA guide
gaaacaucuucccauggguuu

SEQ ID NO: 34159 - RNA, 21 nt, Artificial Sequence
  LRRK2 RNA guide
gagaaacaucuucccaugggu

SEQ ID NO: 34160 - RNA, 21 nt, Artificial Sequence
  LRRK2 RNA guide
gaucugagaaacaucuuccca

SEQ ID NO: 34161 - RNA, 21 nt, Artificial Sequence
  LRRK2 RNA guide
ggaaaacccaugggaagaugu

SEQ ID NO: 34162 - RNA, 21 nt, Artificial Sequence
  LRRK2 RNA guide
ggguuuuccuggaugagacaa

SEQ ID NO: 34163 - RNA, 21 nt, Artificial Sequence
  LRRK2 RNA guide
gguuuuccuggaugagacaau

SEQ ID NO: 34164 - RNA, 21 nt, Artificial Sequence
  LRRK2 RNA guide
gucucauccaggaaaacccau

SEQ ID NO: 34165 - RNA, 21 nt, Artificial Sequence
  LRRK2 RNA guide
uauugucucauccaggaaaac

SEQ ID NO: 34166 - RNA, 21 nt, Artificial Sequence
  LRRK2 RNA guide
ucauccaggaaaacccauggg

SEQ ID NO: 34167 - RNA, 21 nt, Artificial Sequence
  LRRK2 RNA guide
uccaggaaaacccaugggaag

SEQ ID NO: 34168 - RNA, 21 nt, Artificial Sequence
  LRRK2 RNA guide
ucccauggguuuuccuggaug

SEQ ID NO: 34169 - RNA, 21 nt, Artificial Sequence
  LRRK2 RNA guide
uccuuuauugucucauccagg

SEQ ID NO: 34170 - RNA, 21 nt, Artificial Sequence
  LRRK2 RNA guide
ucucauccaggaaaacccaug

SEQ ID NO: 34171 - RNA, 21 nt, Artificial Sequence
  LRRK2 RNA guide
ucugagaaacaucuucccaug

SEQ ID NO: 34172 - RNA, 21 nt, Artificial Sequence
  LRRK2 RNA guide
ucuucccauggguuuuccugg

SEQ ID NO: 34173 - RNA, 21 nt, Artificial Sequence
  LRRK2 RNA guide
ugagaaacaucuucccauggg

SEQ ID NO: 34174 - RNA, 21 nt, Artificial Sequence
  LRRK2 RNA guide
uggguuuuccuggaugagaca

SEQ ID NO: 34175 - RNA, 21 nt, Artificial Sequence
  LRRK2 RNA guide
ugucucauccaggaaaaccca

SEQ ID NO: 34176 - RNA, 21 nt, Artificial Sequence
  LRRK2 RNA guide
uuauugucucauccaggaaaa

SEQ ID NO: 34177 - RNA, 21 nt, Artificial Sequence
  LRRK2 RNA guide
uucccauggguuuuccuggau

SEQ ID NO: 34178 - RNA, 21 nt, Artificial Sequence
  LRRK2 RNA guide
uugucucauccaggaaaaccc

SEQ ID NO: 34179 - RNA, 21 nt, Artificial Sequence
  LRRK2 RNA guide
uuuauugucucauccaggaaa

SEQ ID NO: 34180 - RNA, 22 nt, Artificial Sequence
  LRRK2 RNA guide
aaaacccaugggaagauguuuc

SEQ ID NO: 34181 - RNA, 22 nt, Artificial Sequence
  LRRK2 RNA guide
aaacaucuucccauggguuuuc

SEQ ID NO: 34182 - RNA, 22 nt, Artificial Sequence
  LRRK2 RNA guide
aaacccaugggaagauguuucu

SEQ ID NO: 34183 - RNA, 22 nt, Artificial Sequence
  LRRK2 RNA guide
aacaucuucccauggguuuucc

SEQ ID NO: 34184 - RNA, 22 nt, Artificial Sequence
  LRRK2 RNA guide
aacccaugggaagauguuucuc

SEQ ID NO: 34185 - RNA, 22 nt, Artificial Sequence
  LRRK2 RNA guide
acaucuucccauggguuuuccu

SEQ ID NO: 34186 - RNA, 22 nt, Artificial Sequence
  LRRK2 RNA guide
acccaugggaagauguuucuca

SEQ ID NO: 34187 - RNA, 22 nt, Artificial Sequence
  LRRK2 RNA guide
agaaacaucuucccauggguuu

SEQ ID NO: 34188 - RNA, 22 nt, Artificial Sequence
  LRRK2 RNA guide
agaucugagaaacaucuuccca

SEQ ID NO: 34189 - RNA, 22 nt, Artificial Sequence
  LRRK2 RNA guide
aggaaaacccaugggaagaugu

SEQ ID NO: 34190 - RNA, 22 nt, Artificial Sequence
  LRRK2 RNA guide
auccaggaaaacccaugggaag

SEQ ID NO: 34191 - RNA, 22 nt, Artificial Sequence
  LRRK2 RNA guide
aucugagaaacaucuucccaug

SEQ ID NO: 34192 - RNA, 22 nt, Artificial Sequence
  LRRK2 RNA guide
aucuucccauggguuuuccugg

SEQ ID NO: 34193 - RNA, 22 nt, Artificial Sequence
  LRRK2 RNA guide
auggguuuuccuggaugagaca

SEQ ID NO: 34194 - RNA, 22 nt, Artificial Sequence
  LRRK2 RNA guide
auugucucauccaggaaaaccc

SEQ ID NO: 34195 - RNA, 22 nt, Artificial Sequence
  LRRK2 RNA guide
caggaaaacccaugggaagaug

SEQ ID NO: 34196 - RNA, 22 nt, Artificial Sequence
  LRRK2 RNA guide
cauccaggaaaacccaugggaa

SEQ ID NO: 34197 - RNA, 22 nt, Artificial Sequence
  LRRK2 RNA guide
caucuucccauggguuuuccug

SEQ ID NO: 34198 - RNA, 22 nt, Artificial Sequence
  LRRK2 RNA guide
cauggguuuuccuggaugagac

SEQ ID NO: 34199 - RNA, 22 nt, Artificial Sequence
  LRRK2 RNA guide
ccaggaaaacccaugggaagau

SEQ ID NO: 34200 - RNA, 22 nt, Artificial Sequence
  LRRK2 RNA guide
ccauggguuuuccuggaugaga

SEQ ID NO: 34201 - RNA, 22 nt, Artificial Sequence
  LRRK2 RNA guide
cccauggguuuuccuggaugag

SEQ ID NO: 34202 - RNA, 22 nt, Artificial Sequence
  LRRK2 RNA guide
ccuuuauugucucauccaggaa

SEQ ID NO: 34203 - RNA, 22 nt, Artificial Sequence
  LRRK2 RNA guide
cucauccaggaaaacccauggg

SEQ ID NO: 34204 - RNA, 22 nt, Artificial Sequence
  LRRK2 RNA guide
cugagaaacaucuucccauggg

SEQ ID NO: 34205 - RNA, 22 nt, Artificial Sequence
  LRRK2 RNA guide
cuucccauggguuuuccuggau

SEQ ID NO: 34206 - RNA, 22 nt, Artificial Sequence
  LRRK2 RNA guide
cuuuauugucucauccaggaaa

SEQ ID NO: 34207 - RNA, 22 nt, Artificial Sequence
  LRRK2 RNA guide
gaaaacccaugggaagauguuu

SEQ ID NO: 34208 - RNA, 22 nt, Artificial Sequence
  LRRK2 RNA guide
gaaacaucuucccauggguuuu

SEQ ID NO: 34209 - RNA, 22 nt, Artificial Sequence
  LRRK2 RNA guide
gagaaacaucuucccauggguu

SEQ ID NO: 34210 - RNA, 22 nt, Artificial Sequence
  LRRK2 RNA guide
gagaucugagaaacaucuuccc

SEQ ID NO: 34211 - RNA, 22 nt, Artificial Sequence
  LRRK2 RNA guide
gaucugagaaacaucuucccau

SEQ ID NO: 34212 - RNA, 22 nt, Artificial Sequence
  LRRK2 RNA guide
ggaaaacccaugggaagauguu

SEQ ID NO: 34213 - RNA, 22 nt, Artificial Sequence
  LRRK2 RNA guide
ggguuuuccuggaugagacaau

SEQ ID NO: 34214 - RNA, 22 nt, Artificial Sequence
  LRRK2 RNA guide
gguuuuccuggaugagacaaua

SEQ ID NO: 34215 - RNA, 22 nt, Artificial Sequence
  LRRK2 RNA guide
guccuuuauugucucauccagg

SEQ ID NO: 34216 - RNA, 22 nt, Artificial Sequence
  LRRK2 RNA guide
gucucauccaggaaaacccaug

SEQ ID NO: 34217 - RNA, 22 nt, Artificial Sequence
  LRRK2 RNA guide
uauugucucauccaggaaaacc

SEQ ID NO: 34218 - RNA, 22 nt, Artificial Sequence
  LRRK2 RNA guide
ucauccaggaaaacccauggga

SEQ ID NO: 34219 - RNA, 22 nt, Artificial Sequence
  LRRK2 RNA guide
uccaggaaaacccaugggaaga

SEQ ID NO: 34220 - RNA, 22 nt, Artificial Sequence
  LRRK2 RNA guide
ucccauggguuuuccuggauga

SEQ ID NO: 34221 - RNA, 22 nt, Artificial Sequence
  LRRK2 RNA guide
uccuuuauugucucauccagga

SEQ ID NO: 34222 - RNA, 22 nt, Artificial Sequence
  LRRK2 RNA guide
ucucauccaggaaaacccaugg

SEQ ID NO: 34223 - RNA, 22 nt, Artificial Sequence
  LRRK2 RNA guide
ucugagaaacaucuucccaugg

SEQ ID NO: 34224 - RNA, 22 nt, Artificial Sequence
  LRRK2 RNA guide
ucuucccauggguuuuccugga

SEQ ID NO: 34225 - RNA, 22 nt, Artificial Sequence
  LRRK2 RNA guide
ugagaaacaucuucccaugggu

SEQ ID NO: 34226 - RNA, 22 nt, Artificial Sequence
  LRRK2 RNA guide
uggguuuuccuggaugagacaa

SEQ ID NO: 34227 - RNA, 22 nt, Artificial Sequence
  LRRK2 RNA guide
ugucucauccaggaaaacccau

SEQ ID NO: 34228 - RNA, 22 nt, Artificial Sequence
  LRRK2 RNA guide
uuauugucucauccaggaaaac

SEQ ID NO: 34229 - RNA, 22 nt, Artificial Sequence
  LRRK2 RNA guide
uucccauggguuuuccuggaug

SEQ ID NO: 34230 - RNA, 22 nt, Artificial Sequence
  LRRK2 RNA guide
uugucucauccaggaaaaccca

SEQ ID NO: 34231 - RNA, 22 nt, Artificial Sequence
  LRRK2 RNA guide
uuuauugucucauccaggaaaa

SEQ ID NO: 34232 - RNA, 20 nt, Artificial Sequence
  LRRK2 RNA guide
aaaaaccaugggaagauguu

SEQ ID NO: 34233 - RNA, 20 nt, Artificial Sequence
  LRRK2 RNA guide
aaaaccaugggaagauguuu

SEQ ID NO: 34234 - RNA, 20 nt, Artificial Sequence
  LRRK2 RNA guide
aaacaucuucccaugguuuu

SEQ ID NO: 34235 - RNA, 20 nt, Artificial Sequence
  LRRK2 RNA guide
aaaccaugggaagauguuuc

SEQ ID NO: 34236 - RNA, 20 nt, Artificial Sequence
  LRRK2 RNA guide
aacaucuucccaugguuuuu

SEQ ID NO: 34237 - RNA, 20 nt, Artificial Sequence
  LRRK2 RNA guide
aaccaugggaagauguuucu

SEQ ID NO: 34238 - RNA, 20 nt, Artificial Sequence
  LRRK2 RNA guide
acaucuucccaugguuuuuc

SEQ ID NO: 34239 - RNA, 20 nt, Artificial Sequence
  LRRK2 RNA guide
agaaacaucuucccaugguu

SEQ ID NO: 34240 - RNA, 20 nt, Artificial Sequence
  LRRK2 RNA guide
aggaaaaaccaugggaagau

SEQ ID NO: 34241 - RNA, 20 nt, Artificial Sequence
  LRRK2 RNA guide
auccaggaaaaaccauggga

SEQ ID NO: 34242 - RNA, 20 nt, Artificial Sequence
  LRRK2 RNA guide
aucuucccaugguuuuuccu

SEQ ID NO: 34243 - RNA, 20 nt, Artificial Sequence
  LRRK2 RNA guide
augguuuuuccuggaugaga

SEQ ID NO: 34244 - RNA, 20 nt, Artificial Sequence
  LRRK2 RNA guide
auugucucauccaggaaaaa

SEQ ID NO: 34245 - RNA, 20 nt, Artificial Sequence
  LRRK2 RNA guide
caggaaaaaccaugggaaga

SEQ ID NO: 34246 - RNA, 20 nt, Artificial Sequence
  LRRK2 RNA guide
cauccaggaaaaaccauggg

SEQ ID NO: 34247 - RNA, 20 nt, Artificial Sequence
  LRRK2 RNA guide
caucuucccaugguuuuucc

SEQ ID NO: 34248 - RNA, 20 nt, Artificial Sequence
  LRRK2 RNA guide
caugguuuuuccuggaugag

SEQ ID NO: 34249 - RNA, 20 nt, Artificial Sequence
  LRRK2 RNA guide
ccaggaaaaaccaugggaag

SEQ ID NO: 34250 - RNA, 20 nt, Artificial Sequence
  LRRK2 RNA guide
ccaugguuuuuccuggauga

SEQ ID NO: 34251 - RNA, 20 nt, Artificial Sequence
  LRRK2 RNA guide
cccaugguuuuuccuggaug

SEQ ID NO: 34252 - RNA, 20 nt, Artificial Sequence
  LRRK2 RNA guide
cucauccaggaaaaaccaug

SEQ ID NO: 34253 - RNA, 20 nt, Artificial Sequence
  LRRK2 RNA guide
cuucccaugguuuuuccugg

SEQ ID NO: 34254 - RNA, 20 nt, Artificial Sequence
  LRRK2 RNA guide
gaaaaaccaugggaagaugu

SEQ ID NO: 34255 - RNA, 20 nt, Artificial Sequence
  LRRK2 RNA guide
gaaacaucuucccaugguuu

SEQ ID NO: 34256 - RNA, 20 nt, Artificial Sequence
  LRRK2 RNA guide
gagaaacaucuucccauggu

SEQ ID NO: 34257 - RNA, 20 nt, Artificial Sequence
  LRRK2 RNA guide
ggaaaaaccaugggaagaug

SEQ ID NO: 34258 - RNA, 20 nt, Artificial Sequence
  LRRK2 RNA guide
gguuuuuccuggaugagaca

SEQ ID NO: 34259 - RNA, 20 nt, Artificial Sequence
  LRRK2 RNA guide
gucucauccaggaaaaacca

SEQ ID NO: 34260 - RNA, 20 nt, Artificial Sequence
  LRRK2 RNA guide
guuuuuccuggaugagacaa

SEQ ID NO: 34261 - RNA, 20 nt, Artificial Sequence
  LRRK2 RNA guide
ucauccaggaaaaaccaugg

SEQ ID NO: 34262 - RNA, 20 nt, Artificial Sequence
  LRRK2 RNA guide
uccaggaaaaaccaugggaa

SEQ ID NO: 34263 - RNA, 20 nt, Artificial Sequence
  LRRK2 RNA guide
ucccaugguuuuuccuggau

SEQ ID NO: 34264 - RNA, 20 nt, Artificial Sequence
  LRRK2 RNA guide
ucucauccaggaaaaaccau

SEQ ID NO: 34265 - RNA, 20 nt, Artificial Sequence
  LRRK2 RNA guide
ucuucccaugguuuuuccug

SEQ ID NO: 34266 - RNA, 20 nt, Artificial Sequence
  LRRK2 RNA guide
ugguuuuuccuggaugagac

SEQ ID NO: 34267 - RNA, 20 nt, Artificial Sequence
  LRRK2 RNA guide
ugucucauccaggaaaaacc

SEQ ID NO: 34268 - RNA, 20 nt, Artificial Sequence
  LRRK2 RNA guide
uucccaugguuuuuccugga

SEQ ID NO: 34269 - RNA, 20 nt, Artificial Sequence
  LRRK2 RNA guide
uugucucauccaggaaaaac

SEQ ID NO: 34270 - RNA, 21 nt, Artificial Sequence
  LRRK2 RNA guide
aaaaaccaugggaagauguuu

SEQ ID NO: 34271 - RNA, 21 nt, Artificial Sequence
  LRRK2 RNA guide
aaaaccaugggaagauguuuc

SEQ ID NO: 34272 - RNA, 21 nt, Artificial Sequence
  LRRK2 RNA guide
aaacaucuucccaugguuuuu

SEQ ID NO: 34273 - RNA, 21 nt, Artificial Sequence
  LRRK2 RNA guide
aaaccaugggaagauguuucu

SEQ ID NO: 34274 - RNA, 21 nt, Artificial Sequence
  LRRK2 RNA guide
aacaucuucccaugguuuuuc

SEQ ID NO: 34275 - RNA, 21 nt, Artificial Sequence
  LRRK2 RNA guide
aaccaugggaagauguuucuc

SEQ ID NO: 34276 - RNA, 21 nt, Artificial Sequence
  LRRK2 RNA guide
acaucuucccaugguuuuucc

SEQ ID NO: 34277 - RNA, 21 nt, Artificial Sequence
  LRRK2 RNA guide
agaaacaucuucccaugguuu

SEQ ID NO: 34278 - RNA, 21 nt, Artificial Sequence
  LRRK2 RNA guide
aggaaaaaccaugggaagaug

SEQ ID NO: 34279 - RNA, 21 nt, Artificial Sequence
  LRRK2 RNA guide
auccaggaaaaaccaugggaa

SEQ ID NO: 34280 - RNA, 21 nt, Artificial Sequence
  LRRK2 RNA guide
aucuucccaugguuuuuccug

SEQ ID NO: 34281 - RNA, 21 nt, Artificial Sequence
  LRRK2 RNA guide
augguuuuuccuggaugagac

SEQ ID NO: 34282 - RNA, 21 nt, Artificial Sequence
  LRRK2 RNA guide
auugucucauccaggaaaaac

SEQ ID NO: 34283 - RNA, 21 nt, Artificial Sequence
  LRRK2 RNA guide
caggaaaaaccaugggaagau

SEQ ID NO: 34284 - RNA, 21 nt, Artificial Sequence
  LRRK2 RNA guide
cauccaggaaaaaccauggga

SEQ ID NO: 34285 - RNA, 21 nt, Artificial Sequence
  LRRK2 RNA guide
caucuucccaugguuuuuccu

SEQ ID NO: 34286 - RNA, 21 nt, Artificial Sequence
  LRRK2 RNA guide
caugguuuuuccuggaugaga

SEQ ID NO: 34287 - RNA, 21 nt, Artificial Sequence
  LRRK2 RNA guide
ccaggaaaaaccaugggaaga

SEQ ID NO: 34288 - RNA, 21 nt, Artificial Sequence
  LRRK2 RNA guide
ccaugguuuuuccuggaugag

SEQ ID NO: 34289 - RNA, 21 nt, Artificial Sequence
  LRRK2 RNA guide
cccaugguuuuuccuggauga

SEQ ID NO: 34290 - RNA, 21 nt, Artificial Sequence
  LRRK2 RNA guide
cucauccaggaaaaaccaugg

SEQ ID NO: 34291 - RNA, 21 nt, Artificial Sequence
  LRRK2 RNA guide
cuucccaugguuuuuccugga

SEQ ID NO: 34292 - RNA, 21 nt, Artificial Sequence
  LRRK2 RNA guide
gaaaaaccaugggaagauguu

SEQ ID NO: 34293 - RNA, 21 nt, Artificial Sequence
  LRRK2 RNA guide
gaaacaucuucccaugguuuu

SEQ ID NO: 34294 - RNA, 21 nt, Artificial Sequence
  LRRK2 RNA guide
gagaaacaucuucccaugguu

SEQ ID NO: 34295 - RNA, 21 nt, Artificial Sequence
  LRRK2 RNA guide
ggaaaaaccaugggaagaugu

SEQ ID NO: 34296 - RNA, 21 nt, Artificial Sequence
  LRRK2 RNA guide
gguuuuuccuggaugagacaa

SEQ ID NO: 34297 - RNA, 21 nt, Artificial Sequence
  LRRK2 RNA guide
gucucauccaggaaaaaccau

SEQ ID NO: 34298 - RNA, 21 nt, Artificial Sequence
  LRRK2 RNA guide
guuuuuccuggaugagacaau

SEQ ID NO: 34299 - RNA, 21 nt, Artificial Sequence
  LRRK2 RNA guide
uauugucucauccaggaaaaa

SEQ ID NO: 34300 - RNA, 21 nt, Artificial Sequence
  LRRK2 RNA guide
ucauccaggaaaaaccauggg

SEQ ID NO: 34301 - RNA, 21 nt, Artificial Sequence
  LRRK2 RNA guide
uccaggaaaaaccaugggaag

SEQ ID NO: 34302 - RNA, 21 nt, Artificial Sequence
  LRRK2 RNA guide
ucccaugguuuuuccuggaug

SEQ ID NO: 34303 - RNA, 21 nt, Artificial Sequence
  LRRK2 RNA guide
ucucauccaggaaaaaccaug

SEQ ID NO: 34304 - RNA, 21 nt, Artificial Sequence
  LRRK2 RNA guide
ucuucccaugguuuuuccugg

SEQ ID NO: 34305 - RNA, 21 nt, Artificial Sequence
  LRRK2 RNA guide
ugagaaacaucuucccauggu

SEQ ID NO: 34306 - RNA, 21 nt, Artificial Sequence
  LRRK2 RNA guide
ugguuuuuccuggaugagaca

SEQ ID NO: 34307 - RNA, 21 nt, Artificial Sequence
  LRRK2 RNA guide
ugucucauccaggaaaaacca

SEQ ID NO: 34308 - RNA, 21 nt, Artificial Sequence
  LRRK2 RNA guide
uucccaugguuuuuccuggau

SEQ ID NO: 34309 - RNA, 21 nt, Artificial Sequence
  LRRK2 RNA guide
uugucucauccaggaaaaacc

SEQ ID NO: 34310 - RNA, 22 nt, Artificial Sequence
  LRRK2 RNA guide
aaaaaccaugggaagauguuuc

SEQ ID NO: 34311 - RNA, 22 nt, Artificial Sequence
  LRRK2 RNA guide
aaaaccaugggaagauguuucu

SEQ ID NO: 34312 - RNA, 22 nt, Artificial Sequence
  LRRK2 RNA guide
aaacaucuucccaugguuuuuc

SEQ ID NO: 34313 - RNA, 22 nt, Artificial Sequence
  LRRK2 RNA guide
aaaccaugggaagauguuucuc

SEQ ID NO: 34314 - RNA, 22 nt, Artificial Sequence
  LRRK2 RNA guide
aacaucuucccaugguuuuucc

SEQ ID NO: 34315 - RNA, 22 nt, Artificial Sequence
  LRRK2 RNA guide
aaccaugggaagauguuucuca

SEQ ID NO: 34316 - RNA, 22 nt, Artificial Sequence
  LRRK2 RNA guide
acaucuucccaugguuuuuccu

SEQ ID NO: 34317 - RNA, 22 nt, Artificial Sequence
  LRRK2 RNA guide
agaaacaucuucccaugguuuu

SEQ ID NO: 34318 - RNA, 22 nt, Artificial Sequence
  LRRK2 RNA guide
aggaaaaaccaugggaagaugu

SEQ ID NO: 34319 - RNA, 22 nt, Artificial Sequence
  LRRK2 RNA guide
auccaggaaaaaccaugggaag

SEQ ID NO: 34320 - RNA, 22 nt, Artificial Sequence
  LRRK2 RNA guide
aucuucccaugguuuuuccugg

SEQ ID NO: 34321 - RNA, 22 nt, Artificial Sequence
  LRRK2 RNA guide
augguuuuuccuggaugagaca

SEQ ID NO: 34322 - RNA, 22 nt, Artificial Sequence
  LRRK2 RNA guide
auugucucauccaggaaaaacc

SEQ ID NO: 34323 - RNA, 22 nt, Artificial Sequence
  LRRK2 RNA guide
caggaaaaaccaugggaagaug

SEQ ID NO: 34324 - RNA, 22 nt, Artificial Sequence
  LRRK2 RNA guide
cauccaggaaaaaccaugggaa

SEQ ID NO: 34325 - RNA, 22 nt, Artificial Sequence
  LRRK2 RNA guide
caucuucccaugguuuuuccug

SEQ ID NO: 34326 - RNA, 22 nt, Artificial Sequence
  LRRK2 RNA guide
caugguuuuuccuggaugagac

SEQ ID NO: 34327 - RNA, 22 nt, Artificial Sequence
  LRRK2 RNA guide
ccaggaaaaaccaugggaagau

SEQ ID NO: 34328 - RNA, 22 nt, Artificial Sequence
  LRRK2 RNA guide
ccaugguuuuuccuggaugaga

SEQ ID NO: 34329 - RNA, 22 nt, Artificial Sequence
  LRRK2 RNA guide
cccaugguuuuuccuggaugag

SEQ ID NO: 34330 - RNA, 22 nt, Artificial Sequence
  LRRK2 RNA guide
cucauccaggaaaaaccauggg

SEQ ID NO: 34331 - RNA, 22 nt, Artificial Sequence
  LRRK2 RNA guide
cugagaaacaucuucccauggu

SEQ ID NO: 34332 - RNA, 22 nt, Artificial Sequence
  LRRK2 RNA guide
cuucccaugguuuuuccuggau

SEQ ID NO: 34333 - RNA, 22 nt, Artificial Sequence
  LRRK2 RNA guide
gaaaaaccaugggaagauguuu

SEQ ID NO: 34334 - RNA, 22 nt, Artificial Sequence
  LRRK2 RNA guide
gaaacaucuucccaugguuuuu

SEQ ID NO: 34335 - RNA, 22 nt, Artificial Sequence
  LRRK2 RNA guide
gagaaacaucuucccaugguuu

SEQ ID NO: 34336 - RNA, 22 nt, Artificial Sequence
  LRRK2 RNA guide
ggaaaaaccaugggaagauguu

SEQ ID NO: 34337 - RNA, 22 nt, Artificial Sequence
  LRRK2 RNA guide
gguuuuuccuggaugagacaau

SEQ ID NO: 34338 - RNA, 22 nt, Artificial Sequence
  LRRK2 RNA guide
gucucauccaggaaaaaccaug

SEQ ID NO: 34339 - RNA, 22 nt, Artificial Sequence
  LRRK2 RNA guide
guuuuuccuggaugagacaaua

SEQ ID NO: 34340 - RNA, 22 nt, Artificial Sequence
  LRRK2 RNA guide
uauugucucauccaggaaaaac

SEQ ID NO: 34341 - RNA, 22 nt, Artificial Sequence
  LRRK2 RNA guide
ucauccaggaaaaaccauggga

SEQ ID NO: 34342 - RNA, 22 nt, Artificial Sequence
  LRRK2 RNA guide
uccaggaaaaaccaugggaaga

SEQ ID NO: 34343 - RNA, 22 nt, Artificial Sequence
  LRRK2 RNA guide
ucccaugguuuuuccuggauga

SEQ ID NO: 34344 - RNA, 22 nt, Artificial Sequence
  LRRK2 RNA guide
ucucauccaggaaaaaccaugg

SEQ ID NO: 34345 - RNA, 22 nt, Artificial Sequence
  LRRK2 RNA guide
ucuucccaugguuuuuccugga

SEQ ID NO: 34346 - RNA, 22 nt, Artificial Sequence
  LRRK2 RNA guide
ugagaaacaucuucccaugguu

SEQ ID NO: 34347 - RNA, 22 nt, Artificial Sequence
  LRRK2 RNA guide
ugguuuuuccuggaugagacaa

SEQ ID NO: 34348 - RNA, 22 nt, Artificial Sequence
  LRRK2 RNA guide
ugucucauccaggaaaaaccau

SEQ ID NO: 34349 - RNA, 22 nt, Artificial Sequence
  LRRK2 RNA guide
uuauugucucauccaggaaaaa

SEQ ID NO: 34350 - RNA, 22 nt, Artificial Sequence
  LRRK2 RNA guide
uucccaugguuuuuccuggaug

SEQ ID NO: 34351 - RNA, 22 nt, Artificial Sequence
  LRRK2 RNA guide
uugucucauccaggaaaaacca

SEQ ID NO: 34352 - RNA, 20 nt, Artificial Sequence
  LRRK2 RNA guide
aacauucuauggucuaccuc

SEQ ID NO: 34353 - RNA, 20 nt, Artificial Sequence
  LRRK2 RNA guide
aagacacuggagguagacca

SEQ ID NO: 34354 - RNA, 20 nt, Artificial Sequence
  LRRK2 RNA guide
acacuggagguagaccauag

SEQ ID NO: 34355 - RNA, 20 nt, Artificial Sequence
  LRRK2 RNA guide
acauucuauggucuaccucc

SEQ ID NO: 34356 - RNA, 20 nt, Artificial Sequence
  LRRK2 RNA guide
accuccagugucuuagaugg

SEQ ID NO: 34357 - RNA, 20 nt, Artificial Sequence
  LRRK2 RNA guide
acuggagguagaccauagaa

SEQ ID NO: 34358 - RNA, 20 nt, Artificial Sequence
  LRRK2 RNA guide
agacacuggagguagaccau

SEQ ID NO: 34359 - RNA, 20 nt, Artificial Sequence
  LRRK2 RNA guide
aguccaucuaagacacugga

SEQ ID NO: 34360 - RNA, 20 nt, Artificial Sequence
  LRRK2 RNA guide
aucuaagacacuggagguag

SEQ ID NO: 34361 - RNA, 20 nt, Artificial Sequence
  LRRK2 RNA guide
auggucuaccuccagugucu

SEQ ID NO: 34362 - RNA, 20 nt, Artificial Sequence
  LRRK2 RNA guide
auucuauggucuaccuccag

SEQ ID NO: 34363 - RNA, 20 nt, Artificial Sequence
  LRRK2 RNA guide
cacuggagguagaccauaga

SEQ ID NO: 34364 - RNA, 20 nt, Artificial Sequence
  LRRK2 RNA guide
cagugucuuagauggacuaa

SEQ ID NO: 34365 - RNA, 20 nt, Artificial Sequence
  LRRK2 RNA guide
caucuaagacacuggaggua

SEQ ID NO: 34366 - RNA, 20 nt, Artificial Sequence
  LRRK2 RNA guide
cauucuauggucuaccucca

SEQ ID NO: 34367 - RNA, 20 nt, Artificial Sequence
  LRRK2 RNA guide
ccagugucuuagauggacua

SEQ ID NO: 34368 - RNA, 20 nt, Artificial Sequence
  LRRK2 RNA guide
ccaucuaagacacuggaggu

SEQ ID NO: 34369 - RNA, 20 nt, Artificial Sequence
  LRRK2 RNA guide
ccuccagugucuuagaugga

SEQ ID NO: 34370 - RNA, 20 nt, Artificial Sequence
  LRRK2 RNA guide
cguuguuuaguccaucuaag

SEQ ID NO: 34371 - RNA, 20 nt, Artificial Sequence
  LRRK2 RNA guide
cuaagacacuggagguagac

SEQ ID NO: 34372 - RNA, 20 nt, Artificial Sequence
  LRRK2 RNA guide
cuaccuccagugucuuagau

SEQ ID NO: 34373 - RNA, 20 nt, Artificial Sequence
  LRRK2 RNA guide
cuauggucuaccuccagugu

SEQ ID NO: 34374 - RNA, 20 nt, Artificial Sequence
  LRRK2 RNA guide
cuccagugucuuagauggac

SEQ ID NO: 34375 - RNA, 20 nt, Artificial Sequence
  LRRK2 RNA guide
cuggagguagaccauagaau

SEQ ID NO: 34376 - RNA, 20 nt, Artificial Sequence
  LRRK2 RNA guide
gacacuggagguagaccaua

SEQ ID NO: 34377 - RNA, 20 nt, Artificial Sequence
  LRRK2 RNA guide
ggucuaccuccagugucuua

SEQ ID NO: 34378 - RNA, 20 nt, Artificial Sequence
  LRRK2 RNA guide
guaacauucuauggucuacc

SEQ ID NO: 34379 - RNA, 20 nt, Artificial Sequence
  LRRK2 RNA guide
guccaucuaagacacuggag

SEQ ID NO: 34380 - RNA, 20 nt, Artificial Sequence
  LRRK2 RNA guide
gucuaccuccagugucuuag

SEQ ID NO: 34381 - RNA, 20 nt, Artificial Sequence
  LRRK2 RNA guide
guuguuuaguccaucuaaga

SEQ ID NO: 34382 - RNA, 20 nt, Artificial Sequence
  LRRK2 RNA guide
guuuaguccaucuaagacac

SEQ ID NO: 34383 - RNA, 20 nt, Artificial Sequence
  LRRK2 RNA guide
uaacauucuauggucuaccu

SEQ ID NO: 34384 - RNA, 20 nt, Artificial Sequence
  LRRK2 RNA guide
uaagacacuggagguagacc

SEQ ID NO: 34385 - RNA, 20 nt, Artificial Sequence
  LRRK2 RNA guide
uaccuccagugucuuagaug

SEQ ID NO: 34386 - RNA, 20 nt, Artificial Sequence
  LRRK2 RNA guide
uaguccaucuaagacacugg

SEQ ID NO: 34387 - RNA, 20 nt, Artificial Sequence
  LRRK2 RNA guide
uauggucuaccuccaguguc

SEQ ID NO: 34388 - RNA, 20 nt, Artificial Sequence
  LRRK2 RNA guide
uccagugucuuagauggacu

SEQ ID NO: 34389 - RNA, 20 nt, Artificial Sequence
  LRRK2 RNA guide
uccaucuaagacacuggagg

SEQ ID NO: 34390 - RNA, 20 nt, Artificial Sequence
  LRRK2 RNA guide
ucuaagacacuggagguaga

SEQ ID NO: 34391 - RNA, 20 nt, Artificial Sequence
  LRRK2 RNA guide
ucuaccuccagugucuuaga

SEQ ID NO: 34392 - RNA, 20 nt, Artificial Sequence
  LRRK2 RNA guide
ucuauggucuaccuccagug

SEQ ID NO: 34393 - RNA, 20 nt, Artificial Sequence
  LRRK2 RNA guide
uggucuaccuccagugucuu

SEQ ID NO: 34394 - RNA, 20 nt, Artificial Sequence
  LRRK2 RNA guide
uguaacauucuauggucuac

SEQ ID NO: 34395 - RNA, 20 nt, Artificial Sequence
  LRRK2 RNA guide
uguuuaguccaucuaagaca

SEQ ID NO: 34396 - RNA, 20 nt, Artificial Sequence
  LRRK2 RNA guide
uuaguccaucuaagacacug

SEQ ID NO: 34397 - RNA, 20 nt, Artificial Sequence
  LRRK2 RNA guide
uucuauggucuaccuccagu

SEQ ID NO: 34398 - RNA, 20 nt, Artificial Sequence
  LRRK2 RNA guide
uuguuuaguccaucuaagac

SEQ ID NO: 34399 - RNA, 20 nt, Artificial Sequence
  LRRK2 RNA guide
uuuaguccaucuaagacacu

SEQ ID NO: 34400 - RNA, 21 nt, Artificial Sequence
  LRRK2 RNA guide
aacauucuauggucuaccucc

SEQ ID NO: 34401 - RNA, 21 nt, Artificial Sequence
  LRRK2 RNA guide
aagacacuggagguagaccau

SEQ ID NO: 34402 - RNA, 21 nt, Artificial Sequence
  LRRK2 RNA guide
acacuggagguagaccauaga

SEQ ID NO: 34403 - RNA, 21 nt, Artificial Sequence
  LRRK2 RNA guide
acauucuauggucuaccucca

SEQ ID NO: 34404 - RNA, 21 nt, Artificial Sequence
  LRRK2 RNA guide
accuccagugucuuagaugga

SEQ ID NO: 34405 - RNA, 21 nt, Artificial Sequence
  LRRK2 RNA guide
acuggagguagaccauagaau

SEQ ID NO: 34406 - RNA, 21 nt, Artificial Sequence
  LRRK2 RNA guide
agacacuggagguagaccaua

SEQ ID NO: 34407 - RNA, 21 nt, Artificial Sequence
  LRRK2 RNA guide
aguccaucuaagacacuggag

SEQ ID NO: 34408 - RNA, 21 nt, Artificial Sequence
  LRRK2 RNA guide
aucuaagacacuggagguaga

SEQ ID NO: 34409 - RNA, 21 nt, Artificial Sequence
  LRRK2 RNA guide
auggucuaccuccagugucuu

SEQ ID NO: 34410 - RNA, 21 nt, Artificial Sequence
  LRRK2 RNA guide
auucuauggucuaccuccagu

SEQ ID NO: 34411 - RNA, 21 nt, Artificial Sequence
  LRRK2 RNA guide
cacuggagguagaccauagaa

SEQ ID NO: 34412 - RNA, 21 nt, Artificial Sequence
  LRRK2 RNA guide
cagugucuuagauggacuaaa

SEQ ID NO: 34413 - RNA, 21 nt, Artificial Sequence
  LRRK2 RNA guide
caucuaagacacuggagguag

SEQ ID NO: 34414 - RNA, 21 nt, Artificial Sequence
  LRRK2 RNA guide
cauucuauggucuaccuccag

SEQ ID NO: 34415 - RNA, 21 nt, Artificial Sequence
  LRRK2 RNA guide
ccagugucuuagauggacuaa

SEQ ID NO: 34416 - RNA, 21 nt, Artificial Sequence
  LRRK2 RNA guide
ccaucuaagacacuggaggua

SEQ ID NO: 34417 - RNA, 21 nt, Artificial Sequence
  LRRK2 RNA guide
ccuccagugucuuagauggac

SEQ ID NO: 34418 - RNA, 21 nt, Artificial Sequence
  LRRK2 RNA guide
cguuguuuaguccaucuaaga

SEQ ID NO: 34419 - RNA, 21 nt, Artificial Sequence
  LRRK2 RNA guide
cuaagacacuggagguagacc

SEQ ID NO: 34420 - RNA, 21 nt, Artificial Sequence
  LRRK2 RNA guide
cuaccuccagugucuuagaug

SEQ ID NO: 34421 - RNA, 21 nt, Artificial Sequence
  LRRK2 RNA guide
cuauggucuaccuccaguguc

SEQ ID NO: 34422 - RNA, 21 nt, Artificial Sequence
  LRRK2 RNA guide
cuccagugucuuagauggacu

SEQ ID NO: 34423 - RNA, 21 nt, Artificial Sequence
  LRRK2 RNA guide
cuggagguagaccauagaaug

SEQ ID NO: 34424 - RNA, 21 nt, Artificial Sequence
  LRRK2 RNA guide
gacacuggagguagaccauag

SEQ ID NO: 34425 - RNA, 21 nt, Artificial Sequence
  LRRK2 RNA guide
ggucuaccuccagugucuuag

SEQ ID NO: 34426 - RNA, 21 nt, Artificial Sequence
  LRRK2 RNA guide
guaacauucuauggucuaccu

SEQ ID NO: 34427 - RNA, 21 nt, Artificial Sequence
  LRRK2 RNA guide
guccaucuaagacacuggagg

SEQ ID NO: 34428 - RNA, 21 nt, Artificial Sequence
  LRRK2 RNA guide
gucuaccuccagugucuuaga

SEQ ID NO: 34429 - RNA, 21 nt, Artificial Sequence
  LRRK2 RNA guide
guuguuuaguccaucuaagac

SEQ ID NO: 34430 - RNA, 21 nt, Artificial Sequence
  LRRK2 RNA guide
guuuaguccaucuaagacacu

SEQ ID NO: 34431 - RNA, 21 nt, Artificial Sequence
  LRRK2 RNA guide
uaacauucuauggucuaccuc

SEQ ID NO: 34432 - RNA, 21 nt, Artificial Sequence
  LRRK2 RNA guide
uaagacacuggagguagacca

SEQ ID NO: 34433 - RNA, 21 nt, Artificial Sequence
  LRRK2 RNA guide
uaccuccagugucuuagaugg

SEQ ID NO: 34434 - RNA, 21 nt, Artificial Sequence
  LRRK2 RNA guide
uaguccaucuaagacacugga

SEQ ID NO: 34435 - RNA, 21 nt, Artificial Sequence
  LRRK2 RNA guide
uauggucuaccuccagugucu

SEQ ID NO: 34436 - RNA, 21 nt, Artificial Sequence
  LRRK2 RNA guide
uccagugucuuagauggacua

SEQ ID NO: 34437 - RNA, 21 nt, Artificial Sequence
  LRRK2 RNA guide
uccaucuaagacacuggaggu

SEQ ID NO: 34438 - RNA, 21 nt, Artificial Sequence
  LRRK2 RNA guide
ucguuguuuaguccaucuaag

SEQ ID NO: 34439 - RNA, 21 nt, Artificial Sequence
  LRRK2 RNA guide
ucuaagacacuggagguagac

SEQ ID NO: 34440 - RNA, 21 nt, Artificial Sequence
  LRRK2 RNA guide
ucuaccuccagugucuuagau

SEQ ID NO: 34441 - RNA, 21 nt, Artificial Sequence
  LRRK2 RNA guide
ucuauggucuaccuccagugu

SEQ ID NO: 34442 - RNA, 21 nt, Artificial Sequence
  LRRK2 RNA guide
uggucuaccuccagugucuua

SEQ ID NO: 34443 - RNA, 21 nt, Artificial Sequence
  LRRK2 RNA guide
uguaacauucuauggucuacc

SEQ ID NO: 34444 - RNA, 21 nt, Artificial Sequence
  LRRK2 RNA guide
uguuuaguccaucuaagacac

SEQ ID NO: 34445 - RNA, 21 nt, Artificial Sequence
  LRRK2 RNA guide
uuaguccaucuaagacacugg

SEQ ID NO: 34446 - RNA, 21 nt, Artificial Sequence
  LRRK2 RNA guide
uucuauggucuaccuccagug

SEQ ID NO: 34447 - RNA, 21 nt, Artificial Sequence
  LRRK2 RNA guide
uuguaacauucuauggucuac

SEQ ID NO: 34448 - RNA, 21 nt, Artificial Sequence
  LRRK2 RNA guide
uuguuuaguccaucuaagaca

SEQ ID NO: 34449 - RNA, 21 nt, Artificial Sequence
  LRRK2 RNA guide
uuuaguccaucuaagacacug

SEQ ID NO: 34450 - RNA, 22 nt, Artificial Sequence
  LRRK2 RNA guide
aacauucuauggucuaccucca

SEQ ID NO: 34451 - RNA, 22 nt, Artificial Sequence
  LRRK2 RNA guide
aagacacuggagguagaccaua

SEQ ID NO: 34452 - RNA, 22 nt, Artificial Sequence
  LRRK2 RNA guide
acacuggagguagaccauagaa

SEQ ID NO: 34453 - RNA, 22 nt, Artificial Sequence
  LRRK2 RNA guide
acauucuauggucuaccuccag

SEQ ID NO: 34454 - RNA, 22 nt, Artificial Sequence
  LRRK2 RNA guide
accuccagugucuuagauggac

SEQ ID NO: 34455 - RNA, 22 nt, Artificial Sequence
  LRRK2 RNA guide
acuggagguagaccauagaaug

SEQ ID NO: 34456 - RNA, 22 nt, Artificial Sequence
  LRRK2 RNA guide
agacacuggagguagaccauag

SEQ ID NO: 34457 - RNA, 22 nt, Artificial Sequence
  LRRK2 RNA guide
aguccaucuaagacacuggagg

SEQ ID NO: 34458 - RNA, 22 nt, Artificial Sequence
  LRRK2 RNA guide
aucguuguuuaguccaucuaag

SEQ ID NO: 34459 - RNA, 22 nt, Artificial Sequence
  LRRK2 RNA guide
aucuaagacacuggagguagac

SEQ ID NO: 34460 - RNA, 22 nt, Artificial Sequence
  LRRK2 RNA guide
auggucuaccuccagugucuua

SEQ ID NO: 34461 - RNA, 22 nt, Artificial Sequence
  LRRK2 RNA guide
auucuauggucuaccuccagug

SEQ ID NO: 34462 - RNA, 22 nt, Artificial Sequence
  LRRK2 RNA guide
cacuggagguagaccauagaau

SEQ ID NO: 34463 - RNA, 22 nt, Artificial Sequence
  LRRK2 RNA guide
cagugucuuagauggacuaaac

SEQ ID NO: 34464 - RNA, 22 nt, Artificial Sequence
  LRRK2 RNA guide
caucuaagacacuggagguaga

SEQ ID NO: 34465 - RNA, 22 nt, Artificial Sequence
  LRRK2 RNA guide
cauucuauggucuaccuccagu

SEQ ID NO: 34466 - RNA, 22 nt, Artificial Sequence
  LRRK2 RNA guide
ccagugucuuagauggacuaaa

SEQ ID NO: 34467 - RNA, 22 nt, Artificial Sequence
  LRRK2 RNA guide
ccaucuaagacacuggagguag

SEQ ID NO: 34468 - RNA, 22 nt, Artificial Sequence
  LRRK2 RNA guide
ccuccagugucuuagauggacu

SEQ ID NO: 34469 - RNA, 22 nt, Artificial Sequence
  LRRK2 RNA guide
cguuguuuaguccaucuaagac

SEQ ID NO: 34470 - RNA, 22 nt, Artificial Sequence
  LRRK2 RNA guide
cuaagacacuggagguagacca

SEQ ID NO: 34471 - RNA, 22 nt, Artificial Sequence
  LRRK2 RNA guide
cuaccuccagugucuuagaugg

SEQ ID NO: 34472 - RNA, 22 nt, Artificial Sequence
  LRRK2 RNA guide
cuauggucuaccuccagugucu

SEQ ID NO: 34473 - RNA, 22 nt, Artificial Sequence
  LRRK2 RNA guide
cuccagugucuuagauggacua

SEQ ID NO: 34474 - RNA, 22 nt, Artificial Sequence
  LRRK2 RNA guide
cuggagguagaccauagaaugu

SEQ ID NO: 34475 - RNA, 22 nt, Artificial Sequence
  LRRK2 RNA guide
gacacuggagguagaccauaga

SEQ ID NO: 34476 - RNA, 22 nt, Artificial Sequence
  LRRK2 RNA guide
ggucuaccuccagugucuuaga

SEQ ID NO: 34477 - RNA, 22 nt, Artificial Sequence
  LRRK2 RNA guide
guaacauucuauggucuaccuc

SEQ ID NO: 34478 - RNA, 22 nt, Artificial Sequence
  LRRK2 RNA guide
guccaucuaagacacuggaggu

SEQ ID NO: 34479 - RNA, 22 nt, Artificial Sequence
  LRRK2 RNA guide
gucuaccuccagugucuuagau

SEQ ID NO: 34480 - RNA, 22 nt, Artificial Sequence
  LRRK2 RNA guide
guuguuuaguccaucuaagaca

SEQ ID NO: 34481 - RNA, 22 nt, Artificial Sequence
  LRRK2 RNA guide
guuuaguccaucuaagacacug

SEQ ID NO: 34482 - RNA, 22 nt, Artificial Sequence
  LRRK2 RNA guide
uaacauucuauggucuaccucc

SEQ ID NO: 34483 - RNA, 22 nt, Artificial Sequence
  LRRK2 RNA guide
uaagacacuggagguagaccau

SEQ ID NO: 34484 - RNA, 22 nt, Artificial Sequence
  LRRK2 RNA guide
uaccuccagugucuuagaugga

SEQ ID NO: 34485 - RNA, 22 nt, Artificial Sequence
  LRRK2 RNA guide
uaguccaucuaagacacuggag

SEQ ID NO: 34486 - RNA, 22 nt, Artificial Sequence
  LRRK2 RNA guide
uauggucuaccuccagugucuu

SEQ ID NO: 34487 - RNA, 22 nt, Artificial Sequence
  LRRK2 RNA guide
uccagugucuuagauggacuaa

SEQ ID NO: 34488 - RNA, 22 nt, Artificial Sequence
  LRRK2 RNA guide
uccaucuaagacacuggaggua

SEQ ID NO: 34489 - RNA, 22 nt, Artificial Sequence
  LRRK2 RNA guide
ucguuguuuaguccaucuaaga

SEQ ID NO: 34490 - RNA, 22 nt, Artificial Sequence
  LRRK2 RNA guide
ucuaagacacuggagguagacc

SEQ ID NO: 34491 - RNA, 22 nt, Artificial Sequence
  LRRK2 RNA guide
ucuaccuccagugucuuagaug

SEQ ID NO: 34492 - RNA, 22 nt, Artificial Sequence
  LRRK2 RNA guide
ucuauggucuaccuccaguguc

SEQ ID NO: 34493 - RNA, 22 nt, Artificial Sequence
  LRRK2 RNA guide
uggucuaccuccagugucuuag

SEQ ID NO: 34494 - RNA, 22 nt, Artificial Sequence
  LRRK2 RNA guide
uguaacauucuauggucuaccu

SEQ ID NO: 34495 - RNA, 22 nt, Artificial Sequence
  LRRK2 RNA guide
uguuuaguccaucuaagacacu

SEQ ID NO: 34496 - RNA, 22 nt, Artificial Sequence
  LRRK2 RNA guide
uuaguccaucuaagacacugga

SEQ ID NO: 34497 - RNA, 22 nt, Artificial Sequence
  LRRK2 RNA guide
uucuauggucuaccuccagugu

SEQ ID NO: 34498 - RNA, 22 nt, Artificial Sequence
  LRRK2 RNA guide
uuguaacauucuauggucuacc

SEQ ID NO: 34499 - RNA, 22 nt, Artificial Sequence
  LRRK2 RNA guide
uuguuuaguccaucuaagacac

SEQ ID NO: 34500 - RNA, 22 nt, Artificial Sequence
  LRRK2 RNA guide
uuuaguccaucuaagacacugg

SEQ ID NO: 34501 - RNA, 22 nt, Artificial Sequence
  LRRK2 RNA guide
uuuguaacauucuauggucuac

SEQ ID NO: 34502 - RNA, 20 nt, Artificial Sequence
  LRRK2 RNA guide
aagacaccggagguagacca

SEQ ID NO: 34503 - RNA, 20 nt, Artificial Sequence
  LRRK2 RNA guide
acaccggagguagaccauag

SEQ ID NO: 34504 - RNA, 20 nt, Artificial Sequence
  LRRK2 RNA guide
accggagguagaccauagaa

SEQ ID NO: 34505 - RNA, 20 nt, Artificial Sequence
  LRRK2 RNA guide
accuccggugucuuagaugg

SEQ ID NO: 34506 - RNA, 20 nt, Artificial Sequence
  LRRK2 RNA guide
agacaccggagguagaccau

SEQ ID NO: 34507 - RNA, 20 nt, Artificial Sequence
  LRRK2 RNA guide
aguccaucuaagacaccgga

SEQ ID NO: 34508 - RNA, 20 nt, Artificial Sequence
  LRRK2 RNA guide
aucuaagacaccggagguag

SEQ ID NO: 34509 - RNA, 20 nt, Artificial Sequence
  LRRK2 RNA guide
auggucuaccuccggugucu

SEQ ID NO: 34510 - RNA, 20 nt, Artificial Sequence
  LRRK2 RNA guide
auucuauggucuaccuccgg

SEQ ID NO: 34511 - RNA, 20 nt, Artificial Sequence
  LRRK2 RNA guide
caccggagguagaccauaga

SEQ ID NO: 34512 - RNA, 20 nt, Artificial Sequence
  LRRK2 RNA guide
caucuaagacaccggaggua

SEQ ID NO: 34513 - RNA, 20 nt, Artificial Sequence
  LRRK2 RNA guide
cauucuauggucuaccuccg

SEQ ID NO: 34514 - RNA, 20 nt, Artificial Sequence
  LRRK2 RNA guide
ccaucuaagacaccggaggu

SEQ ID NO: 34515 - RNA, 20 nt, Artificial Sequence
  LRRK2 RNA guide
ccggagguagaccauagaau

SEQ ID NO: 34516 - RNA, 20 nt, Artificial Sequence
  LRRK2 RNA guide
ccggugucuuagauggacua

SEQ ID NO: 34517 - RNA, 20 nt, Artificial Sequence
  LRRK2 RNA guide
ccuccggugucuuagaugga

SEQ ID NO: 34518 - RNA, 20 nt, Artificial Sequence
  LRRK2 RNA guide
cggugucuuagauggacuaa

SEQ ID NO: 34519 - RNA, 20 nt, Artificial Sequence
  LRRK2 RNA guide
cuaagacaccggagguagac

SEQ ID NO: 34520 - RNA, 20 nt, Artificial Sequence
  LRRK2 RNA guide
cuaccuccggugucuuagau

SEQ ID NO: 34521 - RNA, 20 nt, Artificial Sequence
  LRRK2 RNA guide
cuauggucuaccuccggugu

SEQ ID NO: 34522 - RNA, 20 nt, Artificial Sequence
  LRRK2 RNA guide
cuccggugucuuagauggac

SEQ ID NO: 34523 - RNA, 20 nt, Artificial Sequence
  LRRK2 RNA guide
gacaccggagguagaccaua

SEQ ID NO: 34524 - RNA, 20 nt, Artificial Sequence
  LRRK2 RNA guide
ggucuaccuccggugucuua

SEQ ID NO: 34525 - RNA, 20 nt, Artificial Sequence
  LRRK2 RNA guide
guccaucuaagacaccggag

SEQ ID NO: 34526 - RNA, 20 nt, Artificial Sequence
  LRRK2 RNA guide
gucuaccuccggugucuuag

SEQ ID NO: 34527 - RNA, 20 nt, Artificial Sequence
  LRRK2 RNA guide
uaagacaccggagguagacc

SEQ ID NO: 34528 - RNA, 20 nt, Artificial Sequence
  LRRK2 RNA guide
uaccuccggugucuuagaug

SEQ ID NO: 34529 - RNA, 20 nt, Artificial Sequence
  LRRK2 RNA guide
uaguccaucuaagacaccgg

SEQ ID NO: 34530 - RNA, 20 nt, Artificial Sequence
  LRRK2 RNA guide
uauggucuaccuccgguguc

SEQ ID NO: 34531 - RNA, 20 nt, Artificial Sequence
  LRRK2 RNA guide
uccaucuaagacaccggagg

SEQ ID NO: 34532 - RNA, 20 nt, Artificial Sequence
  LRRK2 RNA guide
uccggugucuuagauggacu

SEQ ID NO: 34533 - RNA, 20 nt, Artificial Sequence
  LRRK2 RNA guide
ucuaagacaccggagguaga

SEQ ID NO: 34534 - RNA, 20 nt, Artificial Sequence
  LRRK2 RNA guide
ucuaccuccggugucuuaga

SEQ ID NO: 34535 - RNA, 20 nt, Artificial Sequence
  LRRK2 RNA guide
ucuauggucuaccuccggug

SEQ ID NO: 34536 - RNA, 20 nt, Artificial Sequence
  LRRK2 RNA guide
uggucuaccuccggugucuu

SEQ ID NO: 34537 - RNA, 20 nt, Artificial Sequence
  LRRK2 RNA guide
uuaguccaucuaagacaccg

SEQ ID NO: 34538 - RNA, 20 nt, Artificial Sequence
  LRRK2 RNA guide
uucuauggucuaccuccggu

SEQ ID NO: 34539 - RNA, 20 nt, Artificial Sequence
  LRRK2 RNA guide
uuuaguccaucuaagacacc

SEQ ID NO: 34540 - RNA, 21 nt, Artificial Sequence
  LRRK2 RNA guide
aagacaccggagguagaccau

SEQ ID NO: 34541 - RNA, 21 nt, Artificial Sequence
  LRRK2 RNA guide
acaccggagguagaccauaga

SEQ ID NO: 34542 - RNA, 21 nt, Artificial Sequence
  LRRK2 RNA guide
acauucuauggucuaccuccg

SEQ ID NO: 34543 - RNA, 21 nt, Artificial Sequence
  LRRK2 RNA guide
accggagguagaccauagaau

SEQ ID NO: 34544 - RNA, 21 nt, Artificial Sequence
  LRRK2 RNA guide
accuccggugucuuagaugga

SEQ ID NO: 34545 - RNA, 21 nt, Artificial Sequence
  LRRK2 RNA guide
agacaccggagguagaccaua

SEQ ID NO: 34546 - RNA, 21 nt, Artificial Sequence
  LRRK2 RNA guide
aguccaucuaagacaccggag

SEQ ID NO: 34547 - RNA, 21 nt, Artificial Sequence
  LRRK2 RNA guide
aucuaagacaccggagguaga

SEQ ID NO: 34548 - RNA, 21 nt, Artificial Sequence
  LRRK2 RNA guide
auggucuaccuccggugucuu

SEQ ID NO: 34549 - RNA, 21 nt, Artificial Sequence
  LRRK2 RNA guide
auucuauggucuaccuccggu

SEQ ID NO: 34550 - RNA, 21 nt, Artificial Sequence
  LRRK2 RNA guide
caccggagguagaccauagaa

SEQ ID NO: 34551 - RNA, 21 nt, Artificial Sequence
  LRRK2 RNA guide
caucuaagacaccggagguag

SEQ ID NO: 34552 - RNA, 21 nt, Artificial Sequence
  LRRK2 RNA guide
cauucuauggucuaccuccgg

SEQ ID NO: 34553 - RNA, 21 nt, Artificial Sequence
  LRRK2 RNA guide
ccaucuaagacaccggaggua

SEQ ID NO: 34554 - RNA, 21 nt, Artificial Sequence
  LRRK2 RNA guide
ccggagguagaccauagaaug

SEQ ID NO: 34555 - RNA, 21 nt, Artificial Sequence
  LRRK2 RNA guide
ccggugucuuagauggacuaa

SEQ ID NO: 34556 - RNA, 21 nt, Artificial Sequence
  LRRK2 RNA guide
ccuccggugucuuagauggac

SEQ ID NO: 34557 - RNA, 21 nt, Artificial Sequence
  LRRK2 RNA guide
cggugucuuagauggacuaaa

SEQ ID NO: 34558 - RNA, 21 nt, Artificial Sequence
  LRRK2 RNA guide
cuaagacaccggagguagacc

SEQ ID NO: 34559 - RNA, 21 nt, Artificial Sequence
  LRRK2 RNA guide
cuaccuccggugucuuagaug

SEQ ID NO: 34560 - RNA, 21 nt, Artificial Sequence
  LRRK2 RNA guide
cuauggucuaccuccgguguc

SEQ ID NO: 34561 - RNA, 21 nt, Artificial Sequence
  LRRK2 RNA guide
cuccggugucuuagauggacu

SEQ ID NO: 34562 - RNA, 21 nt, Artificial Sequence
  LRRK2 RNA guide
gacaccggagguagaccauag

SEQ ID NO: 34563 - RNA, 21 nt, Artificial Sequence
  LRRK2 RNA guide
ggucuaccuccggugucuuag

SEQ ID NO: 34564 - RNA, 21 nt, Artificial Sequence
  LRRK2 RNA guide
guccaucuaagacaccggagg

SEQ ID NO: 34565 - RNA, 21 nt, Artificial Sequence
  LRRK2 RNA guide
gucuaccuccggugucuuaga

SEQ ID NO: 34566 - RNA, 21 nt, Artificial Sequence
  LRRK2 RNA guide
guuuaguccaucuaagacacc

SEQ ID NO: 34567 - RNA, 21 nt, Artificial Sequence
  LRRK2 RNA guide
uaagacaccggagguagacca

SEQ ID NO: 34568 - RNA, 21 nt, Artificial Sequence
  LRRK2 RNA guide
uaccuccggugucuuagaugg

SEQ ID NO: 34569 - RNA, 21 nt, Artificial Sequence
  LRRK2 RNA guide
uaguccaucuaagacaccgga

SEQ ID NO: 34570 - RNA, 21 nt, Artificial Sequence
  LRRK2 RNA guide
uauggucuaccuccggugucu

SEQ ID NO: 34571 - RNA, 21 nt, Artificial Sequence
  LRRK2 RNA guide
uccaucuaagacaccggaggu

SEQ ID NO: 34572 - RNA, 21 nt, Artificial Sequence
  LRRK2 RNA guide
uccggugucuuagauggacua

SEQ ID NO: 34573 - RNA, 21 nt, Artificial Sequence
  LRRK2 RNA guide
ucuaagacaccggagguagac

SEQ ID NO: 34574 - RNA, 21 nt, Artificial Sequence
  LRRK2 RNA guide
ucuaccuccggugucuuagau

SEQ ID NO: 34575 - RNA, 21 nt, Artificial Sequence
  LRRK2 RNA guide
ucuauggucuaccuccggugu

SEQ ID NO: 34576 - RNA, 21 nt, Artificial Sequence
  LRRK2 RNA guide
uggucuaccuccggugucuua

SEQ ID NO: 34577 - RNA, 21 nt, Artificial Sequence
  LRRK2 RNA guide
uuaguccaucuaagacaccgg

SEQ ID NO: 34578 - RNA, 21 nt, Artificial Sequence
  LRRK2 RNA guide
uucuauggucuaccuccggug

SEQ ID NO: 34579 - RNA, 21 nt, Artificial Sequence
  LRRK2 RNA guide
uuuaguccaucuaagacaccg

SEQ ID NO: 34580 - RNA, 22 nt, Artificial Sequence
  LRRK2 RNA guide
aacauucuauggucuaccuccg

SEQ ID NO: 34581 - RNA, 22 nt, Artificial Sequence
  LRRK2 RNA guide
aagacaccggagguagaccaua

SEQ ID NO: 34582 - RNA, 22 nt, Artificial Sequence
  LRRK2 RNA guide
acaccggagguagaccauagaa

SEQ ID NO: 34583 - RNA, 22 nt, Artificial Sequence
  LRRK2 RNA guide
acauucuauggucuaccuccgg

SEQ ID NO: 34584 - RNA, 22 nt, Artificial Sequence
  LRRK2 RNA guide
accggagguagaccauagaaug

SEQ ID NO: 34585 - RNA, 22 nt, Artificial Sequence
  LRRK2 RNA guide
accuccggugucuuagauggac

SEQ ID NO: 34586 - RNA, 22 nt, Artificial Sequence
  LRRK2 RNA guide
agacaccggagguagaccauag

SEQ ID NO: 34587 - RNA, 22 nt, Artificial Sequence
  LRRK2 RNA guide
aguccaucuaagacaccggagg

SEQ ID NO: 34588 - RNA, 22 nt, Artificial Sequence
  LRRK2 RNA guide
aucuaagacaccggagguagac

SEQ ID NO: 34589 - RNA, 22 nt, Artificial Sequence
  LRRK2 RNA guide
auggucuaccuccggugucuua

SEQ ID NO: 34590 - RNA, 22 nt, Artificial Sequence
  LRRK2 RNA guide
auucuauggucuaccuccggug

SEQ ID NO: 34591 - RNA, 22 nt, Artificial Sequence
  LRRK2 RNA guide
caccggagguagaccauagaau

SEQ ID NO: 34592 - RNA, 22 nt, Artificial Sequence
  LRRK2 RNA guide
caucuaagacaccggagguaga

SEQ ID NO: 34593 - RNA, 22 nt, Artificial Sequence
  LRRK2 RNA guide
cauucuauggucuaccuccggu

SEQ ID NO: 34594 - RNA, 22 nt, Artificial Sequence
  LRRK2 RNA guide
ccaucuaagacaccggagguag

SEQ ID NO: 34595 - RNA, 22 nt, Artificial Sequence
  LRRK2 RNA guide
ccggagguagaccauagaaugu

SEQ ID NO: 34596 - RNA, 22 nt, Artificial Sequence
  LRRK2 RNA guide
ccggugucuuagauggacuaaa

SEQ ID NO: 34597 - RNA, 22 nt, Artificial Sequence
  LRRK2 RNA guide
ccuccggugucuuagauggacu

SEQ ID NO: 34598 - RNA, 22 nt, Artificial Sequence
  LRRK2 RNA guide
cggugucuuagauggacuaaac

SEQ ID NO: 34599 - RNA, 22 nt, Artificial Sequence
  LRRK2 RNA guide
cuaagacaccggagguagacca

SEQ ID NO: 34600 - RNA, 22 nt, Artificial Sequence
  LRRK2 RNA guide
cuaccuccggugucuuagaugg

SEQ ID NO: 34601 - RNA, 22 nt, Artificial Sequence
  LRRK2 RNA guide
cuauggucuaccuccggugucu

SEQ ID NO: 34602 - RNA, 22 nt, Artificial Sequence
  LRRK2 RNA guide
cuccggugucuuagauggacua

SEQ ID NO: 34603 - RNA, 22 nt, Artificial Sequence
  LRRK2 RNA guide
gacaccggagguagaccauaga

SEQ ID NO: 34604 - RNA, 22 nt, Artificial Sequence
  LRRK2 RNA guide
ggucuaccuccggugucuuaga

SEQ ID NO: 34605 - RNA, 22 nt, Artificial Sequence
  LRRK2 RNA guide
guccaucuaagacaccggaggu

SEQ ID NO: 34606 - RNA, 22 nt, Artificial Sequence
  LRRK2 RNA guide
gucuaccuccggugucuuagau

SEQ ID NO: 34607 - RNA, 22 nt, Artificial Sequence
  LRRK2 RNA guide
guuuaguccaucuaagacaccg

SEQ ID NO: 34608 - RNA, 22 nt, Artificial Sequence
  LRRK2 RNA guide
uaagacaccggagguagaccau

SEQ ID NO: 34609 - RNA, 22 nt, Artificial Sequence
  LRRK2 RNA guide
uaccuccggugucuuagaugga

SEQ ID NO: 34610 - RNA, 22 nt, Artificial Sequence
  LRRK2 RNA guide
uaguccaucuaagacaccggag

SEQ ID NO: 34611 - RNA, 22 nt, Artificial Sequence
  LRRK2 RNA guide
uauggucuaccuccggugucuu

SEQ ID NO: 34612 - RNA, 22 nt, Artificial Sequence
  LRRK2 RNA guide
uccaucuaagacaccggaggua

SEQ ID NO: 34613 - RNA, 22 nt, Artificial Sequence
  LRRK2 RNA guide
uccggugucuuagauggacuaa

SEQ ID NO: 34614 - RNA, 22 nt, Artificial Sequence
  LRRK2 RNA guide
ucuaagacaccggagguagacc

SEQ ID NO: 34615 - RNA, 22 nt, Artificial Sequence
  LRRK2 RNA guide
ucuaccuccggugucuuagaug

SEQ ID NO: 34616 - RNA, 22 nt, Artificial Sequence
  LRRK2 RNA guide
ucuauggucuaccuccgguguc

SEQ ID NO: 34617 - RNA, 22 nt, Artificial Sequence
  LRRK2 RNA guide
uggucuaccuccggugucuuag

SEQ ID NO: 34618 - RNA, 22 nt, Artificial Sequence
  LRRK2 RNA guide
uguuuaguccaucuaagacacc

SEQ ID NO: 34619 - RNA, 22 nt, Artificial Sequence
  LRRK2 RNA guide
uuaguccaucuaagacaccgga

SEQ ID NO: 34620 - RNA, 22 nt, Artificial Sequence
  LRRK2 RNA guide
uucuauggucuaccuccggugu

SEQ ID NO: 34621 - RNA, 22 nt, Artificial Sequence
  LRRK2 RNA guide
uuuaguccaucuaagacaccgg

SEQ ID NO: 34622 - RNA, 20 nt, Artificial Sequence
  LRRK2 RNA guide
aaaguguacuguggaaacua

SEQ ID NO: 34623 - RNA, 20 nt, Artificial Sequence
  LRRK2 RNA guide
aaauuugaaaguguacugug

SEQ ID NO: 34624 - RNA, 20 nt, Artificial Sequence
  LRRK2 RNA guide
aaguguacuguggaaacuag

SEQ ID NO: 34625 - RNA, 20 nt, Artificial Sequence
  LRRK2 RNA guide
aauuugaaaguguacugugg

SEQ ID NO: 34626 - RNA, 20 nt, Artificial Sequence
  LRRK2 RNA guide
aguguacuguggaaacuaga

SEQ ID NO: 34627 - RNA, 20 nt, Artificial Sequence
  LRRK2 RNA guide
aguuuccacaguacacuuuc

SEQ ID NO: 34628 - RNA, 20 nt, Artificial Sequence
  LRRK2 RNA guide
auuugaaaguguacugugga

SEQ ID NO: 34629 - RNA, 20 nt, Artificial Sequence
  LRRK2 RNA guide
caaaauuugaaaguguacug

SEQ ID NO: 34630 - RNA, 20 nt, Artificial Sequence
  LRRK2 RNA guide
cacaguacacuuucaaauuu

SEQ ID NO: 34631 - RNA, 20 nt, Artificial Sequence
  LRRK2 RNA guide
caguacacuuucaaauuuug

SEQ ID NO: 34632 - RNA, 20 nt, Artificial Sequence
  LRRK2 RNA guide
ccacaguacacuuucaaauu

SEQ ID NO: 34633 - RNA, 20 nt, Artificial Sequence
  LRRK2 RNA guide
cuaguuuccacaguacacuu

SEQ ID NO: 34634 - RNA, 20 nt, Artificial Sequence
  LRRK2 RNA guide
cuuuauggucuaguuuccac

SEQ ID NO: 34635 - RNA, 20 nt, Artificial Sequence
  LRRK2 RNA guide
gaaaguguacuguggaaacu

SEQ ID NO: 34636 - RNA, 20 nt, Artificial Sequence
  LRRK2 RNA guide
ggucuaguuuccacaguaca

SEQ ID NO: 34637 - RNA, 20 nt, Artificial Sequence
  LRRK2 RNA guide
gucuaguuuccacaguacac

SEQ ID NO: 34638 - RNA, 20 nt, Artificial Sequence
  LRRK2 RNA guide
guguacuguggaaacuagac

SEQ ID NO: 34639 - RNA, 20 nt, Artificial Sequence
  LRRK2 RNA guide
guuuccacaguacacuuuca

SEQ ID NO: 34640 - RNA, 20 nt, Artificial Sequence
  LRRK2 RNA guide
uaguuuccacaguacacuuu

SEQ ID NO: 34641 - RNA, 20 nt, Artificial Sequence
  LRRK2 RNA guide
uauggucuaguuuccacagu

SEQ ID NO: 34642 - RNA, 20 nt, Artificial Sequence
  LRRK2 RNA guide
uccacaguacacuuucaaau

SEQ ID NO: 34643 - RNA, 20 nt, Artificial Sequence
  LRRK2 RNA guide
ucuaguuuccacaguacacu

SEQ ID NO: 34644 - RNA, 20 nt, Artificial Sequence
  LRRK2 RNA guide
ugaaaguguacuguggaaac

SEQ ID NO: 34645 - RNA, 20 nt, Artificial Sequence
  LRRK2 RNA guide
uggucuaguuuccacaguac

SEQ ID NO: 34646 - RNA, 20 nt, Artificial Sequence
  LRRK2 RNA guide
uguacuguggaaacuagacc

SEQ ID NO: 34647 - RNA, 20 nt, Artificial Sequence
  LRRK2 RNA guide
uuauggucuaguuuccacag

SEQ ID NO: 34648 - RNA, 20 nt, Artificial Sequence
  LRRK2 RNA guide
uuccacaguacacuuucaaa

SEQ ID NO: 34649 - RNA, 20 nt, Artificial Sequence
  LRRK2 RNA guide
uugaaaguguacuguggaaa

SEQ ID NO: 34650 - RNA, 20 nt, Artificial Sequence
  LRRK2 RNA guide
uuuauggucuaguuuccaca

SEQ ID NO: 34651 - RNA, 20 nt, Artificial Sequence
  LRRK2 RNA guide
uuuccacaguacacuuucaa

SEQ ID NO: 34652 - RNA, 20 nt, Artificial Sequence
  LRRK2 RNA guide
uuugaaaguguacuguggaa

SEQ ID NO: 34653 - RNA, 21 nt, Artificial Sequence
  LRRK2 RNA guide
aaaguguacuguggaaacuag

SEQ ID NO: 34654 - RNA, 21 nt, Artificial Sequence
  LRRK2 RNA guide
aaauuugaaaguguacugugg

SEQ ID NO: 34655 - RNA, 21 nt, Artificial Sequence
  LRRK2 RNA guide
aaguguacuguggaaacuaga

SEQ ID NO: 34656 - RNA, 21 nt, Artificial Sequence
  LRRK2 RNA guide
aauuugaaaguguacugugga

SEQ ID NO: 34657 - RNA, 21 nt, Artificial Sequence
  LRRK2 RNA guide
acuuuauggucuaguuuccac

SEQ ID NO: 34658 - RNA, 21 nt, Artificial Sequence
  LRRK2 RNA guide
aguguacuguggaaacuagac

SEQ ID NO: 34659 - RNA, 21 nt, Artificial Sequence
  LRRK2 RNA guide
aguuuccacaguacacuuuca

SEQ ID NO: 34660 - RNA, 21 nt, Artificial Sequence
  LRRK2 RNA guide
auggucuaguuuccacaguac

SEQ ID NO: 34661 - RNA, 21 nt, Artificial Sequence
  LRRK2 RNA guide
auuugaaaguguacuguggaa

SEQ ID NO: 34662 - RNA, 21 nt, Artificial Sequence
  LRRK2 RNA guide
ccacaguacacuuucaaauuu

SEQ ID NO: 34663 - RNA, 21 nt, Artificial Sequence
  LRRK2 RNA guide
cuaguuuccacaguacacuuu

SEQ ID NO: 34664 - RNA, 21 nt, Artificial Sequence
  LRRK2 RNA guide
cuuuauggucuaguuuccaca

SEQ ID NO: 34665 - RNA, 21 nt, Artificial Sequence
  LRRK2 RNA guide
gaaaguguacuguggaaacua

SEQ ID NO: 34666 - RNA, 21 nt, Artificial Sequence
  LRRK2 RNA guide
ggucuaguuuccacaguacac

SEQ ID NO: 34667 - RNA, 21 nt, Artificial Sequence
  LRRK2 RNA guide
gucuaguuuccacaguacacu

SEQ ID NO: 34668 - RNA, 21 nt, Artificial Sequence
  LRRK2 RNA guide
guguacuguggaaacuagacc

SEQ ID NO: 34669 - RNA, 21 nt, Artificial Sequence
  LRRK2 RNA guide
guuuccacaguacacuuucaa

SEQ ID NO: 34670 - RNA, 21 nt, Artificial Sequence
  LRRK2 RNA guide
uaguuuccacaguacacuuuc

SEQ ID NO: 34671 - RNA, 21 nt, Artificial Sequence
  LRRK2 RNA guide
uauggucuaguuuccacagua

SEQ ID NO: 34672 - RNA, 21 nt, Artificial Sequence
  LRRK2 RNA guide
uccacaguacacuuucaaauu

SEQ ID NO: 34673 - RNA, 21 nt, Artificial Sequence
  LRRK2 RNA guide
ucuaguuuccacaguacacuu

SEQ ID NO: 34674 - RNA, 21 nt, Artificial Sequence
  LRRK2 RNA guide
ugaaaguguacuguggaaacu

SEQ ID NO: 34675 - RNA, 21 nt, Artificial Sequence
  LRRK2 RNA guide
uggucuaguuuccacaguaca

SEQ ID NO: 34676 - RNA, 21 nt, Artificial Sequence
  LRRK2 RNA guide
uguacuguggaaacuagacca

SEQ ID NO: 34677 - RNA, 21 nt, Artificial Sequence
  LRRK2 RNA guide
uuauggucuaguuuccacagu

SEQ ID NO: 34678 - RNA, 21 nt, Artificial Sequence
  LRRK2 RNA guide
uuccacaguacacuuucaaau

SEQ ID NO: 34679 - RNA, 21 nt, Artificial Sequence
  LRRK2 RNA guide
uugaaaguguacuguggaaac

SEQ ID NO: 34680 - RNA, 21 nt, Artificial Sequence
  LRRK2 RNA guide
uuuauggucuaguuuccacag

SEQ ID NO: 34681 - RNA, 21 nt, Artificial Sequence
  LRRK2 RNA guide
uuuccacaguacacuuucaaa

SEQ ID NO: 34682 - RNA, 21 nt, Artificial Sequence
  LRRK2 RNA guide
uuugaaaguguacuguggaaa

SEQ ID NO: 34683 - RNA, 22 nt, Artificial Sequence
  LRRK2 RNA guide
aaaauuugaaaguguacugugg

SEQ ID NO: 34684 - RNA, 22 nt, Artificial Sequence
  LRRK2 RNA guide
aaaguguacuguggaaacuaga

SEQ ID NO: 34685 - RNA, 22 nt, Artificial Sequence
  LRRK2 RNA guide
aaauuugaaaguguacugugga

SEQ ID NO: 34686 - RNA, 22 nt, Artificial Sequence
  LRRK2 RNA guide
aaguguacuguggaaacuagac

SEQ ID NO: 34687 - RNA, 22 nt, Artificial Sequence
  LRRK2 RNA guide
aauuugaaaguguacuguggaa

SEQ ID NO: 34688 - RNA, 22 nt, Artificial Sequence
  LRRK2 RNA guide
acuuuauggucuaguuuccaca

SEQ ID NO: 34689 - RNA, 22 nt, Artificial Sequence
  LRRK2 RNA guide
aguguacuguggaaacuagacc

SEQ ID NO: 34690 - RNA, 22 nt, Artificial Sequence
  LRRK2 RNA guide
aguuuccacaguacacuuucaa

SEQ ID NO: 34691 - RNA, 22 nt, Artificial Sequence
  LRRK2 RNA guide
auggucuaguuuccacaguaca

SEQ ID NO: 34692 - RNA, 22 nt, Artificial Sequence
  LRRK2 RNA guide
auuugaaaguguacuguggaaa

SEQ ID NO: 34693 - RNA, 22 nt, Artificial Sequence
  LRRK2 RNA guide
caaaauuugaaaguguacugug

SEQ ID NO: 34694 - RNA, 22 nt, Artificial Sequence
  LRRK2 RNA guide
cacaguacacuuucaaauuuug

SEQ ID NO: 34695 - RNA, 22 nt, Artificial Sequence
  LRRK2 RNA guide
cacuuuauggucuaguuuccac

SEQ ID NO: 34696 - RNA, 22 nt, Artificial Sequence
  LRRK2 RNA guide
ccacaguacacuuucaaauuuu

SEQ ID NO: 34697 - RNA, 22 nt, Artificial Sequence
  LRRK2 RNA guide
cuaguuuccacaguacacuuuc

SEQ ID NO: 34698 - RNA, 22 nt, Artificial Sequence
  LRRK2 RNA guide
cuuuauggucuaguuuccacag

SEQ ID NO: 34699 - RNA, 22 nt, Artificial Sequence
  LRRK2 RNA guide
gaaaguguacuguggaaacuag

SEQ ID NO: 34700 - RNA, 22 nt, Artificial Sequence
  LRRK2 RNA guide
ggucuaguuuccacaguacacu

SEQ ID NO: 34701 - RNA, 22 nt, Artificial Sequence
  LRRK2 RNA guide
gucuaguuuccacaguacacuu

SEQ ID NO: 34702 - RNA, 22 nt, Artificial Sequence
  LRRK2 RNA guide
guguacuguggaaacuagacca

SEQ ID NO: 34703 - RNA, 22 nt, Artificial Sequence
  LRRK2 RNA guide
guuuccacaguacacuuucaaa

SEQ ID NO: 34704 - RNA, 22 nt, Artificial Sequence
  LRRK2 RNA guide
uaguuuccacaguacacuuuca

SEQ ID NO: 34705 - RNA, 22 nt, Artificial Sequence
  LRRK2 RNA guide
uauggucuaguuuccacaguac

SEQ ID NO: 34706 - RNA, 22 nt, Artificial Sequence
  LRRK2 RNA guide
uccacaguacacuuucaaauuu

SEQ ID NO: 34707 - RNA, 22 nt, Artificial Sequence
  LRRK2 RNA guide
ucuaguuuccacaguacacuuu

SEQ ID NO: 34708 - RNA, 22 nt, Artificial Sequence
  LRRK2 RNA guide
ugaaaguguacuguggaaacua

SEQ ID NO: 34709 - RNA, 22 nt, Artificial Sequence
  LRRK2 RNA guide
uggucuaguuuccacaguacac

SEQ ID NO: 34710 - RNA, 22 nt, Artificial Sequence
  LRRK2 RNA guide
uguacuguggaaacuagaccau

SEQ ID NO: 34711 - RNA, 22 nt, Artificial Sequence
  LRRK2 RNA guide
uuauggucuaguuuccacagua

SEQ ID NO: 34712 - RNA, 22 nt, Artificial Sequence
  LRRK2 RNA guide
uuccacaguacacuuucaaauu

SEQ ID NO: 34713 - RNA, 22 nt, Artificial Sequence
  LRRK2 RNA guide
uugaaaguguacuguggaaacu

SEQ ID NO: 34714 - RNA, 22 nt, Artificial Sequence
  LRRK2 RNA guide
uuuauggucuaguuuccacagu

SEQ ID NO: 34715 - RNA, 22 nt, Artificial Sequence
  LRRK2 RNA guide
uuuccacaguacacuuucaaau

SEQ ID NO: 34716 - RNA, 22 nt, Artificial Sequence
  LRRK2 RNA guide
uuugaaaguguacuguggaaac

SEQ ID NO: 34717 - RNA, 20 nt, Artificial Sequence
  LRRK2 RNA guide
aaaguauacuguggaaacua

SEQ ID NO: 34718 - RNA, 20 nt, Artificial Sequence
  LRRK2 RNA guide
aaguauacuguggaaacuag

SEQ ID NO: 34719 - RNA, 20 nt, Artificial Sequence
  LRRK2 RNA guide
aauuugaaaguauacugugg

SEQ ID NO: 34720 - RNA, 20 nt, Artificial Sequence
  LRRK2 RNA guide
aguauacuguggaaacuaga

SEQ ID NO: 34721 - RNA, 20 nt, Artificial Sequence
  LRRK2 RNA guide
aguuuccacaguauacuuuc

SEQ ID NO: 34722 - RNA, 20 nt, Artificial Sequence
  LRRK2 RNA guide
auuugaaaguauacugugga

SEQ ID NO: 34723 - RNA, 20 nt, Artificial Sequence
  LRRK2 RNA guide
ccacaguauacuuucaaauu

SEQ ID NO: 34724 - RNA, 20 nt, Artificial Sequence
  LRRK2 RNA guide
cuaguuuccacaguauacuu

SEQ ID NO: 34725 - RNA, 20 nt, Artificial Sequence
  LRRK2 RNA guide
gaaaguauacuguggaaacu

SEQ ID NO: 34726 - RNA, 20 nt, Artificial Sequence
  LRRK2 RNA guide
ggucuaguuuccacaguaua

SEQ ID NO: 34727 - RNA, 20 nt, Artificial Sequence
  LRRK2 RNA guide
guauacuguggaaacuagac

SEQ ID NO: 34728 - RNA, 20 nt, Artificial Sequence
  LRRK2 RNA guide
gucuaguuuccacaguauac

SEQ ID NO: 34729 - RNA, 20 nt, Artificial Sequence
  LRRK2 RNA guide
guuuccacaguauacuuuca

SEQ ID NO: 34730 - RNA, 20 nt, Artificial Sequence
  LRRK2 RNA guide
uaguuuccacaguauacuuu

SEQ ID NO: 34731 - RNA, 20 nt, Artificial Sequence
  LRRK2 RNA guide
uauacuguggaaacuagacc

SEQ ID NO: 34732 - RNA, 20 nt, Artificial Sequence
  LRRK2 RNA guide
uccacaguauacuuucaaau

SEQ ID NO: 34733 - RNA, 20 nt, Artificial Sequence
  LRRK2 RNA guide
ucuaguuuccacaguauacu

SEQ ID NO: 34734 - RNA, 20 nt, Artificial Sequence
  LRRK2 RNA guide
ugaaaguauacuguggaaac

SEQ ID NO: 34735 - RNA, 20 nt, Artificial Sequence
  LRRK2 RNA guide
uggucuaguuuccacaguau

SEQ ID NO: 34736 - RNA, 20 nt, Artificial Sequence
  LRRK2 RNA guide
uuccacaguauacuuucaaa

SEQ ID NO: 34737 - RNA, 20 nt, Artificial Sequence
  LRRK2 RNA guide
uugaaaguauacuguggaaa

SEQ ID NO: 34738 - RNA, 20 nt, Artificial Sequence
  LRRK2 RNA guide
uuuccacaguauacuuucaa

SEQ ID NO: 34739 - RNA, 20 nt, Artificial Sequence
  LRRK2 RNA guide
uuugaaaguauacuguggaa

SEQ ID NO: 34740 - RNA, 21 nt, Artificial Sequence
  LRRK2 RNA guide
aaaguauacuguggaaacuag

SEQ ID NO: 34741 - RNA, 21 nt, Artificial Sequence
  LRRK2 RNA guide
aaguauacuguggaaacuaga

SEQ ID NO: 34742 - RNA, 21 nt, Artificial Sequence
  LRRK2 RNA guide
aguauacuguggaaacuagac

SEQ ID NO: 34743 - RNA, 21 nt, Artificial Sequence
  LRRK2 RNA guide
aguuuccacaguauacuuuca

SEQ ID NO: 34744 - RNA, 21 nt, Artificial Sequence
  LRRK2 RNA guide
auggucuaguuuccacaguau

SEQ ID NO: 34745 - RNA, 21 nt, Artificial Sequence
  LRRK2 RNA guide
cuaguuuccacaguauacuuu

SEQ ID NO: 34746 - RNA, 21 nt, Artificial Sequence
  LRRK2 RNA guide
gaaaguauacuguggaaacua

SEQ ID NO: 34747 - RNA, 21 nt, Artificial Sequence
  LRRK2 RNA guide
ggucuaguuuccacaguauac

SEQ ID NO: 34748 - RNA, 21 nt, Artificial Sequence
  LRRK2 RNA guide
guauacuguggaaacuagacc

SEQ ID NO: 34749 - RNA, 21 nt, Artificial Sequence
  LRRK2 RNA guide
gucuaguuuccacaguauacu

SEQ ID NO: 34750 - RNA, 21 nt, Artificial Sequence
  LRRK2 RNA guide
guuuccacaguauacuuucaa

SEQ ID NO: 34751 - RNA, 21 nt, Artificial Sequence
  LRRK2 RNA guide
uaguuuccacaguauacuuuc

SEQ ID NO: 34752 - RNA, 21 nt, Artificial Sequence
  LRRK2 RNA guide
uauacuguggaaacuagacca

SEQ ID NO: 34753 - RNA, 21 nt, Artificial Sequence
  LRRK2 RNA guide
ucuaguuuccacaguauacuu

SEQ ID NO: 34754 - RNA, 21 nt, Artificial Sequence
  LRRK2 RNA guide
ugaaaguauacuguggaaacu

SEQ ID NO: 34755 - RNA, 21 nt, Artificial Sequence
  LRRK2 RNA guide
uggucuaguuuccacaguaua

SEQ ID NO: 34756 - RNA, 21 nt, Artificial Sequence
  LRRK2 RNA guide
uugaaaguauacuguggaaac

SEQ ID NO: 34757 - RNA, 22 nt, Artificial Sequence
  LRRK2 RNA guide
aaaguauacuguggaaacuaga

SEQ ID NO: 34758 - RNA, 22 nt, Artificial Sequence
  LRRK2 RNA guide
aaguauacuguggaaacuagac

SEQ ID NO: 34759 - RNA, 22 nt, Artificial Sequence
  LRRK2 RNA guide
aguauacuguggaaacuagacc

SEQ ID NO: 34760 - RNA, 22 nt, Artificial Sequence
  LRRK2 RNA guide
aguuuccacaguauacuuucaa

SEQ ID NO: 34761 - RNA, 22 nt, Artificial Sequence
  LRRK2 RNA guide
auggucuaguuuccacaguaua

SEQ ID NO: 34762 - RNA, 22 nt, Artificial Sequence
  LRRK2 RNA guide
cuaguuuccacaguauacuuuc

SEQ ID NO: 34763 - RNA, 22 nt, Artificial Sequence
  LRRK2 RNA guide
gaaaguauacuguggaaacuag

SEQ ID NO: 34764 - RNA, 22 nt, Artificial Sequence
  LRRK2 RNA guide
ggucuaguuuccacaguauacu

SEQ ID NO: 34765 - RNA, 22 nt, Artificial Sequence
  LRRK2 RNA guide
guauacuguggaaacuagacca

SEQ ID NO: 34766 - RNA, 22 nt, Artificial Sequence
  LRRK2 RNA guide
gucuaguuuccacaguauacuu

SEQ ID NO: 34767 - RNA, 22 nt, Artificial Sequence
  LRRK2 RNA guide
guuuccacaguauacuuucaaa

SEQ ID NO: 34768 - RNA, 22 nt, Artificial Sequence
  LRRK2 RNA guide
uaguuuccacaguauacuuuca

SEQ ID NO: 34769 - RNA, 22 nt, Artificial Sequence
  LRRK2 RNA guide
uauacuguggaaacuagaccau

SEQ ID NO: 34770 - RNA, 22 nt, Artificial Sequence
  LRRK2 RNA guide
uauggucuaguuuccacaguau

SEQ ID NO: 34771 - RNA, 22 nt, Artificial Sequence
  LRRK2 RNA guide
ucuaguuuccacaguauacuuu

SEQ ID NO: 34772 - RNA, 22 nt, Artificial Sequence
  LRRK2 RNA guide
ugaaaguauacuguggaaacua

SEQ ID NO: 34773 - RNA, 22 nt, Artificial Sequence
  LRRK2 RNA guide
uggucuaguuuccacaguauac

SEQ ID NO: 34774 - RNA, 22 nt, Artificial Sequence
  LRRK2 RNA guide
uugaaaguauacuguggaaacu

SEQ ID NO: 34775 - RNA, 22 nt, Artificial Sequence
  LRRK2 RNA guide
uuugaaaguauacuguggaaac

SEQ ID NO: 34776 - RNA, 20 nt, Artificial Sequence
  LRRK2 RNA guide
aagggcugcuucacagaaau

SEQ ID NO: 34777 - RNA, 20 nt, Artificial Sequence
  LRRK2 RNA guide
aauauauuucugugaagcag

SEQ ID NO: 34778 - RNA, 20 nt, Artificial Sequence
  LRRK2 RNA guide
aggaagggcugcuucacaga

SEQ ID NO: 34779 - RNA, 20 nt, Artificial Sequence
  LRRK2 RNA guide
agggcugcuucacagaaaua

SEQ ID NO: 34780 - RNA, 20 nt, Artificial Sequence
  LRRK2 RNA guide
auauauuucugugaagcagc

SEQ ID NO: 34781 - RNA, 20 nt, Artificial Sequence
  LRRK2 RNA guide
cugcuucacagaaauauauu

SEQ ID NO: 34782 - RNA, 20 nt, Artificial Sequence
  LRRK2 RNA guide
gaagggcugcuucacagaaa

SEQ ID NO: 34783 - RNA, 20 nt, Artificial Sequence
  LRRK2 RNA guide
gcugcuucacagaaauauau

SEQ ID NO: 34784 - RNA, 20 nt, Artificial Sequence
  LRRK2 RNA guide
ggaagggcugcuucacagaa

SEQ ID NO: 34785 - RNA, 20 nt, Artificial Sequence
  LRRK2 RNA guide
ggcugcuucacagaaauaua

SEQ ID NO: 34786 - RNA, 20 nt, Artificial Sequence
  LRRK2 RNA guide
gggcugcuucacagaaauau

SEQ ID NO: 34787 - RNA, 20 nt, Artificial Sequence
  LRRK2 RNA guide
uauauuucugugaagcagcc

SEQ ID NO: 34788 - RNA, 21 nt, Artificial Sequence
  LRRK2 RNA guide
aagggcugcuucacagaaaua

SEQ ID NO: 34789 - RNA, 21 nt, Artificial Sequence
  LRRK2 RNA guide
aauauauuucugugaagcagc

SEQ ID NO: 34790 - RNA, 21 nt, Artificial Sequence
  LRRK2 RNA guide
aggaagggcugcuucacagaa

SEQ ID NO: 34791 - RNA, 21 nt, Artificial Sequence
  LRRK2 RNA guide
agggcugcuucacagaaauau

SEQ ID NO: 34792 - RNA, 21 nt, Artificial Sequence
  LRRK2 RNA guide
auauauuucugugaagcagcc

SEQ ID NO: 34793 - RNA, 21 nt, Artificial Sequence
  LRRK2 RNA guide
gaagggcugcuucacagaaau

SEQ ID NO: 34794 - RNA, 21 nt, Artificial Sequence
  LRRK2 RNA guide
gcugcuucacagaaauauauu

SEQ ID NO: 34795 - RNA, 21 nt, Artificial Sequence
  LRRK2 RNA guide
ggaagggcugcuucacagaaa

SEQ ID NO: 34796 - RNA, 21 nt, Artificial Sequence
  LRRK2 RNA guide
ggcugcuucacagaaauauau

SEQ ID NO: 34797 - RNA, 21 nt, Artificial Sequence
  LRRK2 RNA guide
gggcugcuucacagaaauaua

SEQ ID NO: 34798 - RNA, 21 nt, Artificial Sequence
  LRRK2 RNA guide
uaggaagggcugcuucacaga

SEQ ID NO: 34799 - RNA, 21 nt, Artificial Sequence
  LRRK2 RNA guide
uauauuucugugaagcagccc

SEQ ID NO: 34800 - RNA, 22 nt, Artificial Sequence
  LRRK2 RNA guide
aaauauauuucugugaagcagc

SEQ ID NO: 34801 - RNA, 22 nt, Artificial Sequence
  LRRK2 RNA guide
aagggcugcuucacagaaauau

SEQ ID NO: 34802 - RNA, 22 nt, Artificial Sequence
  LRRK2 RNA guide
aauauauuucugugaagcagcc

SEQ ID NO: 34803 - RNA, 22 nt, Artificial Sequence
  LRRK2 RNA guide
aggaagggcugcuucacagaaa

SEQ ID NO: 34804 - RNA, 22 nt, Artificial Sequence
  LRRK2 RNA guide
agggcugcuucacagaaauaua

SEQ ID NO: 34805 - RNA, 22 nt, Artificial Sequence
  LRRK2 RNA guide
auauauuucugugaagcagccc

SEQ ID NO: 34806 - RNA, 22 nt, Artificial Sequence
  LRRK2 RNA guide
gaagggcugcuucacagaaaua

SEQ ID NO: 34807 - RNA, 22 nt, Artificial Sequence
  LRRK2 RNA guide
gcugcuucacagaaauauauuu

SEQ ID NO: 34808 - RNA, 22 nt, Artificial Sequence
  LRRK2 RNA guide
ggaagggcugcuucacagaaau

SEQ ID NO: 34809 - RNA, 22 nt, Artificial Sequence
  LRRK2 RNA guide
ggcugcuucacagaaauauauu

SEQ ID NO: 34810 - RNA, 22 nt, Artificial Sequence
  LRRK2 RNA guide
gggcugcuucacagaaauauau

SEQ ID NO: 34811 - RNA, 22 nt, Artificial Sequence
  LRRK2 RNA guide
uaggaagggcugcuucacagaa

SEQ ID NO: 34812 - RNA, 22 nt, Artificial Sequence
  LRRK2 RNA guide
uauauuucugugaagcagcccu

SEQ ID NO: 34813 - RNA, 22 nt, Artificial Sequence
  LRRK2 RNA guide
uuaggaagggcugcuucacaga

SEQ ID NO: 34814 - RNA, 20 nt, Artificial Sequence
  LRRK2 RNA guide
aaaauguauuucugugaagc

SEQ ID NO: 34815 - RNA, 20 nt, Artificial Sequence
  LRRK2 RNA guide
aaauguauuucugugaagca

SEQ ID NO: 34816 - RNA, 20 nt, Artificial Sequence
  LRRK2 RNA guide
aauguauuucugugaagcag

SEQ ID NO: 34817 - RNA, 20 nt, Artificial Sequence
  LRRK2 RNA guide
auguauuucugugaagcagc

SEQ ID NO: 34818 - RNA, 20 nt, Artificial Sequence
  LRRK2 RNA guide
cugcuucacagaaauacauu

SEQ ID NO: 34819 - RNA, 20 nt, Artificial Sequence
  LRRK2 RNA guide
gcugcuucacagaaauacau

SEQ ID NO: 34820 - RNA, 20 nt, Artificial Sequence
  LRRK2 RNA guide
gcuucacagaaauacauuuu

SEQ ID NO: 34821 - RNA, 20 nt, Artificial Sequence
  LRRK2 RNA guide
ggcugcuucacagaaauaca

SEQ ID NO: 34822 - RNA, 20 nt, Artificial Sequence
  LRRK2 RNA guide
gggcugcuucacagaaauac

SEQ ID NO: 34823 - RNA, 20 nt, Artificial Sequence
  LRRK2 RNA guide
ugcuucacagaaauacauuu

SEQ ID NO: 34824 - RNA, 20 nt, Artificial Sequence
  LRRK2 RNA guide
uguauuucugugaagcagcc

SEQ ID NO: 34825 - RNA, 21 nt, Artificial Sequence
  LRRK2 RNA guide
aaauguauuucugugaagcag

SEQ ID NO: 34826 - RNA, 21 nt, Artificial Sequence
  LRRK2 RNA guide
aauguauuucugugaagcagc

SEQ ID NO: 34827 - RNA, 21 nt, Artificial Sequence
  LRRK2 RNA guide
agggcugcuucacagaaauac

SEQ ID NO: 34828 - RNA, 21 nt, Artificial Sequence
  LRRK2 RNA guide
auguauuucugugaagcagcc

SEQ ID NO: 34829 - RNA, 21 nt, Artificial Sequence
  LRRK2 RNA guide
cugcuucacagaaauacauuu

SEQ ID NO: 34830 - RNA, 21 nt, Artificial Sequence
  LRRK2 RNA guide
gcugcuucacagaaauacauu

SEQ ID NO: 34831 - RNA, 21 nt, Artificial Sequence
  LRRK2 RNA guide
ggcugcuucacagaaauacau

SEQ ID NO: 34832 - RNA, 21 nt, Artificial Sequence
  LRRK2 RNA guide
gggcugcuucacagaaauaca

SEQ ID NO: 34833 - RNA, 21 nt, Artificial Sequence
  LRRK2 RNA guide
uguauuucugugaagcagccc

SEQ ID NO: 34834 - RNA, 22 nt, Artificial Sequence
  LRRK2 RNA guide
aaaauguauuucugugaagcag

SEQ ID NO: 34835 - RNA, 22 nt, Artificial Sequence
  LRRK2 RNA guide
aaauguauuucugugaagcagc

SEQ ID NO: 34836 - RNA, 22 nt, Artificial Sequence
  LRRK2 RNA guide
aagggcugcuucacagaaauac

SEQ ID NO: 34837 - RNA, 22 nt, Artificial Sequence
  LRRK2 RNA guide
aauguauuucugugaagcagcc

SEQ ID NO: 34838 - RNA, 22 nt, Artificial Sequence
  LRRK2 RNA guide
agggcugcuucacagaaauaca

SEQ ID NO: 34839 - RNA, 22 nt, Artificial Sequence
  LRRK2 RNA guide
auguauuucugugaagcagccc

SEQ ID NO: 34840 - RNA, 22 nt, Artificial Sequence
  LRRK2 RNA guide
cugcuucacagaaauacauuuu

SEQ ID NO: 34841 - RNA, 22 nt, Artificial Sequence
  LRRK2 RNA guide
gcugcuucacagaaauacauuu

SEQ ID NO: 34842 - RNA, 22 nt, Artificial Sequence
  LRRK2 RNA guide
ggcugcuucacagaaauacauu

SEQ ID NO: 34843 - RNA, 22 nt, Artificial Sequence
  LRRK2 RNA guide
gggcugcuucacagaaauacau

SEQ ID NO: 34844 - RNA, 22 nt, Artificial Sequence
  LRRK2 RNA guide
uguauuucugugaagcagcccu

SEQ ID NO: 34845 - RNA, 20 nt, Artificial Sequence
  LRRK2 RNA guide
aaaugcauauguauauccug

SEQ ID NO: 34846 - RNA, 20 nt, Artificial Sequence
  LRRK2 RNA guide
aaugcauauguauauccugu

SEQ ID NO: 34847 - RNA, 20 nt, Artificial Sequence
  LRRK2 RNA guide
acaggauauacauaugcauu

SEQ ID NO: 34848 - RNA, 20 nt, Artificial Sequence
  LRRK2 RNA guide
acuuguguggguuucuacag

SEQ ID NO: 34849 - RNA, 20 nt, Artificial Sequence
  LRRK2 RNA guide
auauccuguagaaacccaca

SEQ ID NO: 34850 - RNA, 20 nt, Artificial Sequence
  LRRK2 RNA guide
auccuguagaaacccacaca

SEQ ID NO: 34851 - RNA, 20 nt, Artificial Sequence
  LRRK2 RNA guide
augcauauguauauccugua

SEQ ID NO: 34852 - RNA, 20 nt, Artificial Sequence
  LRRK2 RNA guide
auguauauccuguagaaacc

SEQ ID NO: 34853 - RNA, 20 nt, Artificial Sequence
  LRRK2 RNA guide
auuacuuguguggguuucua

SEQ ID NO: 34854 - RNA, 20 nt, Artificial Sequence
  LRRK2 RNA guide
caggauauacauaugcauuu

SEQ ID NO: 34855 - RNA, 20 nt, Artificial Sequence
  LRRK2 RNA guide
cauauguauauccuguagaa

SEQ ID NO: 34856 - RNA, 20 nt, Artificial Sequence
  LRRK2 RNA guide
ccuguagaaacccacacaag

SEQ ID NO: 34857 - RNA, 20 nt, Artificial Sequence
  LRRK2 RNA guide
cuacaggauauacauaugca

SEQ ID NO: 34858 - RNA, 20 nt, Artificial Sequence
  LRRK2 RNA guide
cuuguguggguuucuacagg

SEQ ID NO: 34859 - RNA, 20 nt, Artificial Sequence
  LRRK2 RNA guide
gcauauguauauccuguaga

SEQ ID NO: 34860 - RNA, 20 nt, Artificial Sequence
  LRRK2 RNA guide
ggguuucuacaggauauaca

SEQ ID NO: 34861 - RNA, 20 nt, Artificial Sequence
  LRRK2 RNA guide
gguuucuacaggauauacau

SEQ ID NO: 34862 - RNA, 20 nt, Artificial Sequence
  LRRK2 RNA guide
guauauccuguagaaaccca

SEQ ID NO: 34863 - RNA, 20 nt, Artificial Sequence
  LRRK2 RNA guide
guauuacuuguguggguuuc

SEQ ID NO: 34864 - RNA, 20 nt, Artificial Sequence
  LRRK2 RNA guide
guggguuucuacaggauaua

SEQ ID NO: 34865 - RNA, 20 nt, Artificial Sequence
  LRRK2 RNA guide
guguggguuucuacaggaua

SEQ ID NO: 34866 - RNA, 20 nt, Artificial Sequence
  LRRK2 RNA guide
guuucuacaggauauacaua

SEQ ID NO: 34867 - RNA, 20 nt, Artificial Sequence
  LRRK2 RNA guide
uacaggauauacauaugcau

SEQ ID NO: 34868 - RNA, 20 nt, Artificial Sequence
  LRRK2 RNA guide
uacuuguguggguuucuaca

SEQ ID NO: 34869 - RNA, 20 nt, Artificial Sequence
  LRRK2 RNA guide
uauauccuguagaaacccac

SEQ ID NO: 34870 - RNA, 20 nt, Artificial Sequence
  LRRK2 RNA guide
uauccuguagaaacccacac

SEQ ID NO: 34871 - RNA, 20 nt, Artificial Sequence
  LRRK2 RNA guide
uauguauauccuguagaaac

SEQ ID NO: 34872 - RNA, 20 nt, Artificial Sequence
  LRRK2 RNA guide
uauuacuuguguggguuucu

SEQ ID NO: 34873 - RNA, 20 nt, Artificial Sequence
  LRRK2 RNA guide
uccuguagaaacccacacaa

SEQ ID NO: 34874 - RNA, 20 nt, Artificial Sequence
  LRRK2 RNA guide
ucuacaggauauacauaugc

SEQ ID NO: 34875 - RNA, 20 nt, Artificial Sequence
  LRRK2 RNA guide
ugcauauguauauccuguag

SEQ ID NO: 34876 - RNA, 20 nt, Artificial Sequence
  LRRK2 RNA guide
uggguuucuacaggauauac

SEQ ID NO: 34877 - RNA, 20 nt, Artificial Sequence
  LRRK2 RNA guide
uguauauccuguagaaaccc

SEQ ID NO: 34878 - RNA, 20 nt, Artificial Sequence
  LRRK2 RNA guide
uguggguuucuacaggauau

SEQ ID NO: 34879 - RNA, 20 nt, Artificial Sequence
  LRRK2 RNA guide
uguguggguuucuacaggau

SEQ ID NO: 34880 - RNA, 20 nt, Artificial Sequence
  LRRK2 RNA guide
uuacuuguguggguuucuac

SEQ ID NO: 34881 - RNA, 20 nt, Artificial Sequence
  LRRK2 RNA guide
uucuacaggauauacauaug

SEQ ID NO: 34882 - RNA, 20 nt, Artificial Sequence
  LRRK2 RNA guide
uuguguggguuucuacagga

SEQ ID NO: 34883 - RNA, 21 nt, Artificial Sequence
  LRRK2 RNA guide
acuuguguggguuucuacagg

SEQ ID NO: 34884 - RNA, 21 nt, Artificial Sequence
  LRRK2 RNA guide
auauccuguagaaacccacac

SEQ ID NO: 34885 - RNA, 21 nt, Artificial Sequence
  LRRK2 RNA guide
auccuguagaaacccacacaa

SEQ ID NO: 34886 - RNA, 21 nt, Artificial Sequence
  LRRK2 RNA guide
augcauauguauauccuguag

SEQ ID NO: 34887 - RNA, 21 nt, Artificial Sequence
  LRRK2 RNA guide
auguauauccuguagaaaccc

SEQ ID NO: 34888 - RNA, 21 nt, Artificial Sequence
  LRRK2 RNA guide
auuacuuguguggguuucuac

SEQ ID NO: 34889 - RNA, 21 nt, Artificial Sequence
  LRRK2 RNA guide
ccuguagaaacccacacaagu

SEQ ID NO: 34890 - RNA, 21 nt, Artificial Sequence
  LRRK2 RNA guide
cuacaggauauacauaugcau

SEQ ID NO: 34891 - RNA, 21 nt, Artificial Sequence
  LRRK2 RNA guide
cuuguguggguuucuacagga

SEQ ID NO: 34892 - RNA, 21 nt, Artificial Sequence
  LRRK2 RNA guide
gcauauguauauccuguagaa

SEQ ID NO: 34893 - RNA, 21 nt, Artificial Sequence
  LRRK2 RNA guide
ggguuucuacaggauauacau

SEQ ID NO: 34894 - RNA, 21 nt, Artificial Sequence
  LRRK2 RNA guide
gguuucuacaggauauacaua

SEQ ID NO: 34895 - RNA, 21 nt, Artificial Sequence
  LRRK2 RNA guide
guauauccuguagaaacccac

SEQ ID NO: 34896 - RNA, 21 nt, Artificial Sequence
  LRRK2 RNA guide
guauuacuuguguggguuucu

SEQ ID NO: 34897 - RNA, 21 nt, Artificial Sequence
  LRRK2 RNA guide
guggguuucuacaggauauac

SEQ ID NO: 34898 - RNA, 21 nt, Artificial Sequence
  LRRK2 RNA guide
guguggguuucuacaggauau

SEQ ID NO: 34899 - RNA, 21 nt, Artificial Sequence
  LRRK2 RNA guide
uacuuguguggguuucuacag

SEQ ID NO: 34900 - RNA, 21 nt, Artificial Sequence
  LRRK2 RNA guide
uauauccuguagaaacccaca

SEQ ID NO: 34901 - RNA, 21 nt, Artificial Sequence
  LRRK2 RNA guide
uauccuguagaaacccacaca

SEQ ID NO: 34902 - RNA, 21 nt, Artificial Sequence
  LRRK2 RNA guide
uauguauauccuguagaaacc

SEQ ID NO: 34903 - RNA, 21 nt, Artificial Sequence
  LRRK2 RNA guide
uauuacuuguguggguuucua

SEQ ID NO: 34904 - RNA, 21 nt, Artificial Sequence
  LRRK2 RNA guide
uccuguagaaacccacacaag

SEQ ID NO: 34905 - RNA, 21 nt, Artificial Sequence
  LRRK2 RNA guide
ucuacaggauauacauaugca

SEQ ID NO: 34906 - RNA, 21 nt, Artificial Sequence
  LRRK2 RNA guide
ugcauauguauauccuguaga

SEQ ID NO: 34907 - RNA, 21 nt, Artificial Sequence
  LRRK2 RNA guide
uggguuucuacaggauauaca

SEQ ID NO: 34908 - RNA, 21 nt, Artificial Sequence
  LRRK2 RNA guide
uguauauccuguagaaaccca

SEQ ID NO: 34909 - RNA, 21 nt, Artificial Sequence
  LRRK2 RNA guide
uguauuacuuguguggguuuc

SEQ ID NO: 34910 - RNA, 21 nt, Artificial Sequence
  LRRK2 RNA guide
uguggguuucuacaggauaua

SEQ ID NO: 34911 - RNA, 21 nt, Artificial Sequence
  LRRK2 RNA guide
uguguggguuucuacaggaua

SEQ ID NO: 34912 - RNA, 21 nt, Artificial Sequence
  LRRK2 RNA guide
uuacuuguguggguuucuaca

SEQ ID NO: 34913 - RNA, 21 nt, Artificial Sequence
  LRRK2 RNA guide
uucuacaggauauacauaugc

SEQ ID NO: 34914 - RNA, 21 nt, Artificial Sequence
  LRRK2 RNA guide
uuguguggguuucuacaggau

SEQ ID NO: 34915 - RNA, 22 nt, Artificial Sequence
  LRRK2 RNA guide
aaugcauauguauauccuguag

SEQ ID NO: 34916 - RNA, 22 nt, Artificial Sequence
  LRRK2 RNA guide
acuuguguggguuucuacagga

SEQ ID NO: 34917 - RNA, 22 nt, Artificial Sequence
  LRRK2 RNA guide
auauccuguagaaacccacaca

SEQ ID NO: 34918 - RNA, 22 nt, Artificial Sequence
  LRRK2 RNA guide
auauguauauccuguagaaacc

SEQ ID NO: 34919 - RNA, 22 nt, Artificial Sequence
  LRRK2 RNA guide
auccuguagaaacccacacaag

SEQ ID NO: 34920 - RNA, 22 nt, Artificial Sequence
  LRRK2 RNA guide
augcauauguauauccuguaga

SEQ ID NO: 34921 - RNA, 22 nt, Artificial Sequence
  LRRK2 RNA guide
auguauauccuguagaaaccca

SEQ ID NO: 34922 - RNA, 22 nt, Artificial Sequence
  LRRK2 RNA guide
auguauuacuuguguggguuuc

SEQ ID NO: 34923 - RNA, 22 nt, Artificial Sequence
  LRRK2 RNA guide
auuacuuguguggguuucuaca

SEQ ID NO: 34924 - RNA, 22 nt, Artificial Sequence
  LRRK2 RNA guide
cauauguauauccuguagaaac

SEQ ID NO: 34925 - RNA, 22 nt, Artificial Sequence
  LRRK2 RNA guide
ccuguagaaacccacacaagua

SEQ ID NO: 34926 - RNA, 22 nt, Artificial Sequence
  LRRK2 RNA guide
cuacaggauauacauaugcauu

SEQ ID NO: 34927 - RNA, 22 nt, Artificial Sequence
  LRRK2 RNA guide
cuuguguggguuucuacaggau

SEQ ID NO: 34928 - RNA, 22 nt, Artificial Sequence
  LRRK2 RNA guide
gcauauguauauccuguagaaa

SEQ ID NO: 34929 - RNA, 22 nt, Artificial Sequence
  LRRK2 RNA guide
ggguuucuacaggauauacaua

SEQ ID NO: 34930 - RNA, 22 nt, Artificial Sequence
  LRRK2 RNA guide
gguuucuacaggauauacauau

SEQ ID NO: 34931 - RNA, 22 nt, Artificial Sequence
  LRRK2 RNA guide
guauauccuguagaaacccaca

SEQ ID NO: 34932 - RNA, 22 nt, Artificial Sequence
  LRRK2 RNA guide
guauuacuuguguggguuucua

SEQ ID NO: 34933 - RNA, 22 nt, Artificial Sequence
  LRRK2 RNA guide
guggguuucuacaggauauaca

SEQ ID NO: 34934 - RNA, 22 nt, Artificial Sequence
  LRRK2 RNA guide
guguggguuucuacaggauaua

SEQ ID NO: 34935 - RNA, 22 nt, Artificial Sequence
  LRRK2 RNA guide
guuucuacaggauauacauaug

SEQ ID NO: 34936 - RNA, 22 nt, Artificial Sequence
  LRRK2 RNA guide
uacuuguguggguuucuacagg

SEQ ID NO: 34937 - RNA, 22 nt, Artificial Sequence
  LRRK2 RNA guide
uauauccuguagaaacccacac

SEQ ID NO: 34938 - RNA, 22 nt, Artificial Sequence
  LRRK2 RNA guide
uauccuguagaaacccacacaa

SEQ ID NO: 34939 - RNA, 22 nt, Artificial Sequence
  LRRK2 RNA guide
uauguauauccuguagaaaccc

SEQ ID NO: 34940 - RNA, 22 nt, Artificial Sequence
  LRRK2 RNA guide
uauuacuuguguggguuucuac

SEQ ID NO: 34941 - RNA, 22 nt, Artificial Sequence
  LRRK2 RNA guide
uccuguagaaacccacacaagu

SEQ ID NO: 34942 - RNA, 22 nt, Artificial Sequence
  LRRK2 RNA guide
ucuacaggauauacauaugcau

SEQ ID NO: 34943 - RNA, 22 nt, Artificial Sequence
  LRRK2 RNA guide
ugcauauguauauccuguagaa

SEQ ID NO: 34944 - RNA, 22 nt, Artificial Sequence
  LRRK2 RNA guide
uggguuucuacaggauauacau

SEQ ID NO: 34945 - RNA, 22 nt, Artificial Sequence
  LRRK2 RNA guide
uguauauccuguagaaacccac

SEQ ID NO: 34946 - RNA, 22 nt, Artificial Sequence
  LRRK2 RNA guide
uguauuacuuguguggguuucu

SEQ ID NO: 34947 - RNA, 22 nt, Artificial Sequence
  LRRK2 RNA guide
uguggguuucuacaggauauac

SEQ ID NO: 34948 - RNA, 22 nt, Artificial Sequence
  LRRK2 RNA guide
uguguggguuucuacaggauau

SEQ ID NO: 34949 - RNA, 22 nt, Artificial Sequence
  LRRK2 RNA guide
uuacuuguguggguuucuacag

SEQ ID NO: 34950 - RNA, 22 nt, Artificial Sequence
  LRRK2 RNA guide
uucuacaggauauacauaugca

SEQ ID NO: 34951 - RNA, 22 nt, Artificial Sequence
  LRRK2 RNA guide
uuguguggguuucuacaggaua

SEQ ID NO: 34952 - RNA, 22 nt, Artificial Sequence
  LRRK2 RNA guide
uuucuacaggauauacauaugc

SEQ ID NO: 34953 - RNA, 20 nt, Artificial Sequence
  LRRK2 RNA guide
acuuguguggguuucuacaa

SEQ ID NO: 34954 - RNA, 20 nt, Artificial Sequence
  LRRK2 RNA guide
auaucuuguagaaacccaca

SEQ ID NO: 34955 - RNA, 20 nt, Artificial Sequence
  LRRK2 RNA guide
aucuuguagaaacccacaca

SEQ ID NO: 34956 - RNA, 20 nt, Artificial Sequence
  LRRK2 RNA guide
auguauaucuuguagaaacc

SEQ ID NO: 34957 - RNA, 20 nt, Artificial Sequence
  LRRK2 RNA guide
cuacaagauauacauaugca

SEQ ID NO: 34958 - RNA, 20 nt, Artificial Sequence
  LRRK2 RNA guide
cuuguagaaacccacacaag

SEQ ID NO: 34959 - RNA, 20 nt, Artificial Sequence
  LRRK2 RNA guide
cuuguguggguuucuacaag

SEQ ID NO: 34960 - RNA, 20 nt, Artificial Sequence
  LRRK2 RNA guide
gcauauguauaucuuguaga

SEQ ID NO: 34961 - RNA, 20 nt, Artificial Sequence
  LRRK2 RNA guide
ggguuucuacaagauauaca

SEQ ID NO: 34962 - RNA, 20 nt, Artificial Sequence
  LRRK2 RNA guide
gguuucuacaagauauacau

SEQ ID NO: 34963 - RNA, 20 nt, Artificial Sequence
  LRRK2 RNA guide
guauaucuuguagaaaccca

SEQ ID NO: 34964 - RNA, 20 nt, Artificial Sequence
  LRRK2 RNA guide
guggguuucuacaagauaua

SEQ ID NO: 34965 - RNA, 20 nt, Artificial Sequence
  LRRK2 RNA guide
guguggguuucuacaagaua

SEQ ID NO: 34966 - RNA, 20 nt, Artificial Sequence
  LRRK2 RNA guide
uauaucuuguagaaacccac

SEQ ID NO: 34967 - RNA, 20 nt, Artificial Sequence
  LRRK2 RNA guide
uaucuuguagaaacccacac

SEQ ID NO: 34968 - RNA, 20 nt, Artificial Sequence
  LRRK2 RNA guide
ucuacaagauauacauaugc

SEQ ID NO: 34969 - RNA, 20 nt, Artificial Sequence
  LRRK2 RNA guide
ucuuguagaaacccacacaa

SEQ ID NO: 34970 - RNA, 20 nt, Artificial Sequence
  LRRK2 RNA guide
ugcauauguauaucuuguag

SEQ ID NO: 34971 - RNA, 20 nt, Artificial Sequence
  LRRK2 RNA guide
uggguuucuacaagauauac

SEQ ID NO: 34972 - RNA, 20 nt, Artificial Sequence
  LRRK2 RNA guide
uguauaucuuguagaaaccc

SEQ ID NO: 34973 - RNA, 20 nt, Artificial Sequence
  LRRK2 RNA guide
uguggguuucuacaagauau

SEQ ID NO: 34974 - RNA, 20 nt, Artificial Sequence
  LRRK2 RNA guide
uguguggguuucuacaagau

SEQ ID NO: 34975 - RNA, 20 nt, Artificial Sequence
  LRRK2 RNA guide
uuguguggguuucuacaaga

SEQ ID NO: 34976 - RNA, 21 nt, Artificial Sequence
  LRRK2 RNA guide
acuuguguggguuucuacaag

SEQ ID NO: 34977 - RNA, 21 nt, Artificial Sequence
  LRRK2 RNA guide
auaucuuguagaaacccacac

SEQ ID NO: 34978 - RNA, 21 nt, Artificial Sequence
  LRRK2 RNA guide
aucuuguagaaacccacacaa

SEQ ID NO: 34979 - RNA, 21 nt, Artificial Sequence
  LRRK2 RNA guide
auguauaucuuguagaaaccc

SEQ ID NO: 34980 - RNA, 21 nt, Artificial Sequence
  LRRK2 RNA guide
cuuguagaaacccacacaagu

SEQ ID NO: 34981 - RNA, 21 nt, Artificial Sequence
  LRRK2 RNA guide
cuuguguggguuucuacaaga

SEQ ID NO: 34982 - RNA, 21 nt, Artificial Sequence
  LRRK2 RNA guide
ggguuucuacaagauauacau

SEQ ID NO: 34983 - RNA, 21 nt, Artificial Sequence
  LRRK2 RNA guide
guauaucuuguagaaacccac

SEQ ID NO: 34984 - RNA, 21 nt, Artificial Sequence
  LRRK2 RNA guide
guggguuucuacaagauauac

SEQ ID NO: 34985 - RNA, 21 nt, Artificial Sequence
  LRRK2 RNA guide
guguggguuucuacaagauau

SEQ ID NO: 34986 - RNA, 21 nt, Artificial Sequence
  LRRK2 RNA guide
uacuuguguggguuucuacaa

SEQ ID NO: 34987 - RNA, 21 nt, Artificial Sequence
  LRRK2 RNA guide
uauaucuuguagaaacccaca

SEQ ID NO: 34988 - RNA, 21 nt, Artificial Sequence
  LRRK2 RNA guide
uaucuuguagaaacccacaca

SEQ ID NO: 34989 - RNA, 21 nt, Artificial Sequence
  LRRK2 RNA guide
ucuuguagaaacccacacaag

SEQ ID NO: 34990 - RNA, 21 nt, Artificial Sequence
  LRRK2 RNA guide
uggguuucuacaagauauaca

SEQ ID NO: 34991 - RNA, 21 nt, Artificial Sequence
  LRRK2 RNA guide
uguauaucuuguagaaaccca

SEQ ID NO: 34992 - RNA, 21 nt, Artificial Sequence
  LRRK2 RNA guide
uguggguuucuacaagauaua

SEQ ID NO: 34993 - RNA, 21 nt, Artificial Sequence
  LRRK2 RNA guide
uguguggguuucuacaagaua

SEQ ID NO: 34994 - RNA, 21 nt, Artificial Sequence
  LRRK2 RNA guide
uuguguggguuucuacaagau

SEQ ID NO: 34995 - RNA, 22 nt, Artificial Sequence
  LRRK2 RNA guide
acuuguguggguuucuacaaga

SEQ ID NO: 34996 - RNA, 22 nt, Artificial Sequence
  LRRK2 RNA guide
auaucuuguagaaacccacaca

SEQ ID NO: 34997 - RNA, 22 nt, Artificial Sequence
  LRRK2 RNA guide
aucuuguagaaacccacacaag

SEQ ID NO: 34998 - RNA, 22 nt, Artificial Sequence
  LRRK2 RNA guide
auguauaucuuguagaaaccca

SEQ ID NO: 34999 - RNA, 22 nt, Artificial Sequence
  LRRK2 RNA guide
cuuguagaaacccacacaagua

SEQ ID NO: 35000 - RNA, 22 nt, Artificial Sequence
  LRRK2 RNA guide
cuuguguggguuucuacaagau

SEQ ID NO: 35001 - RNA, 22 nt, Artificial Sequence
  LRRK2 RNA guide
ggguuucuacaagauauacaua

SEQ ID NO: 35002 - RNA, 22 nt, Artificial Sequence
  LRRK2 RNA guide
guauaucuuguagaaacccaca

SEQ ID NO: 35003 - RNA, 22 nt, Artificial Sequence
  LRRK2 RNA guide
guggguuucuacaagauauaca

SEQ ID NO: 35004 - RNA, 22 nt, Artificial Sequence
  LRRK2 RNA guide
guguggguuucuacaagauaua

SEQ ID NO: 35005 - RNA, 22 nt, Artificial Sequence
  LRRK2 RNA guide
uacuuguguggguuucuacaag

SEQ ID NO: 35006 - RNA, 22 nt, Artificial Sequence
  LRRK2 RNA guide
uauaucuuguagaaacccacac

SEQ ID NO: 35007 - RNA, 22 nt, Artificial Sequence
  LRRK2 RNA guide
uaucuuguagaaacccacacaa

SEQ ID NO: 35008 - RNA, 22 nt, Artificial Sequence
  LRRK2 RNA guide
uauguauaucuuguagaaaccc

SEQ ID NO: 35009 - RNA, 22 nt, Artificial Sequence
  LRRK2 RNA guide
ucuuguagaaacccacacaagu

SEQ ID NO: 35010 - RNA, 22 nt, Artificial Sequence
  LRRK2 RNA guide
uggguuucuacaagauauacau

SEQ ID NO: 35011 - RNA, 22 nt, Artificial Sequence
  LRRK2 RNA guide
uguauaucuuguagaaacccac

SEQ ID NO: 35012 - RNA, 22 nt, Artificial Sequence
  LRRK2 RNA guide
uguggguuucuacaagauauac

SEQ ID NO: 35013 - RNA, 22 nt, Artificial Sequence
  LRRK2 RNA guide
uguguggguuucuacaagauau

SEQ ID NO: 35014 - RNA, 22 nt, Artificial Sequence
  LRRK2 RNA guide
uuacuuguguggguuucuacaa

SEQ ID NO: 35015 - RNA, 22 nt, Artificial Sequence
  LRRK2 RNA guide
uuguguggguuucuacaagaua

SEQ ID NO: 35016 - RNA, 20 nt, Artificial Sequence
  LRRK2 RNA guide
aaguguuccuauuucuccac

SEQ ID NO: 35017 - RNA, 20 nt, Artificial Sequence
  LRRK2 RNA guide
aguguuccuauuucuccaca

SEQ ID NO: 35018 - RNA, 20 nt, Artificial Sequence
  LRRK2 RNA guide
ccuauuucuccacaucaaaa

SEQ ID NO: 35019 - RNA, 20 nt, Artificial Sequence
  LRRK2 RNA guide
cuauuucuccacaucaaaaa

SEQ ID NO: 35020 - RNA, 20 nt, Artificial Sequence
  LRRK2 RNA guide
guguuccuauuucuccacau

SEQ ID NO: 35021 - RNA, 20 nt, Artificial Sequence
  LRRK2 RNA guide
guuccuauuucuccacauca

SEQ ID NO: 35022 - RNA, 20 nt, Artificial Sequence
  LRRK2 RNA guide
uccuauuucuccacaucaaa

SEQ ID NO: 35023 - RNA, 20 nt, Artificial Sequence
  LRRK2 RNA guide
uguuccuauuucuccacauc

SEQ ID NO: 35024 - RNA, 20 nt, Artificial Sequence
  LRRK2 RNA guide
uuccuauuucuccacaucaa

SEQ ID NO: 35025 - RNA, 20 nt, Artificial Sequence
  LRRK2 RNA guide
uugauguggagaaauaggaa

SEQ ID NO: 35026 - RNA, 20 nt, Artificial Sequence
  LRRK2 RNA guide
uuugauguggagaaauagga

SEQ ID NO: 35027 - RNA, 20 nt, Artificial Sequence
  LRRK2 RNA guide
uuuugauguggagaaauagg

SEQ ID NO: 35028 - RNA, 20 nt, Artificial Sequence
  LRRK2 RNA guide
uuuuugauguggagaaauag

SEQ ID NO: 35029 - RNA, 21 nt, Artificial Sequence
  LRRK2 RNA guide
aaaguguuccuauuucuccac

SEQ ID NO: 35030 - RNA, 21 nt, Artificial Sequence
  LRRK2 RNA guide
aaguguuccuauuucuccaca

SEQ ID NO: 35031 - RNA, 21 nt, Artificial Sequence
  LRRK2 RNA guide
aguguuccuauuucuccacau

SEQ ID NO: 35032 - RNA, 21 nt, Artificial Sequence
  LRRK2 RNA guide
ccuauuucuccacaucaaaaa

SEQ ID NO: 35033 - RNA, 21 nt, Artificial Sequence
  LRRK2 RNA guide
guguuccuauuucuccacauc

SEQ ID NO: 35034 - RNA, 21 nt, Artificial Sequence
  LRRK2 RNA guide
guuccuauuucuccacaucaa

SEQ ID NO: 35035 - RNA, 21 nt, Artificial Sequence
  LRRK2 RNA guide
uccuauuucuccacaucaaaa

SEQ ID NO: 35036 - RNA, 21 nt, Artificial Sequence
  LRRK2 RNA guide
uguuccuauuucuccacauca

SEQ ID NO: 35037 - RNA, 21 nt, Artificial Sequence
  LRRK2 RNA guide
uuccuauuucuccacaucaaa

SEQ ID NO: 35038 - RNA, 21 nt, Artificial Sequence
  LRRK2 RNA guide
uugauguggagaaauaggaac

SEQ ID NO: 35039 - RNA, 21 nt, Artificial Sequence
  LRRK2 RNA guide
uuugauguggagaaauaggaa

SEQ ID NO: 35040 - RNA, 21 nt, Artificial Sequence
  LRRK2 RNA guide
uuuugauguggagaaauagga

SEQ ID NO: 35041 - RNA, 21 nt, Artificial Sequence
  LRRK2 RNA guide
uuuuugauguggagaaauagg

SEQ ID NO: 35042 - RNA, 22 nt, Artificial Sequence
  LRRK2 RNA guide
aaaaguguuccuauuucuccac

SEQ ID NO: 35043 - RNA, 22 nt, Artificial Sequence
  LRRK2 RNA guide
aaaguguuccuauuucuccaca

SEQ ID NO: 35044 - RNA, 22 nt, Artificial Sequence
  LRRK2 RNA guide
aaguguuccuauuucuccacau

SEQ ID NO: 35045 - RNA, 22 nt, Artificial Sequence
  LRRK2 RNA guide
aguguuccuauuucuccacauc

SEQ ID NO: 35046 - RNA, 22 nt, Artificial Sequence
  LRRK2 RNA guide
ccuauuucuccacaucaaaaaa

SEQ ID NO: 35047 - RNA, 22 nt, Artificial Sequence
  LRRK2 RNA guide
guguuccuauuucuccacauca

SEQ ID NO: 35048 - RNA, 22 nt, Artificial Sequence
  LRRK2 RNA guide
guuccuauuucuccacaucaaa

SEQ ID NO: 35049 - RNA, 22 nt, Artificial Sequence
  LRRK2 RNA guide
uccuauuucuccacaucaaaaa

SEQ ID NO: 35050 - RNA, 22 nt, Artificial Sequence
  LRRK2 RNA guide
uguuccuauuucuccacaucaa

SEQ ID NO: 35051 - RNA, 22 nt, Artificial Sequence
  LRRK2 RNA guide
uuccuauuucuccacaucaaaa

SEQ ID NO: 35052 - RNA, 22 nt, Artificial Sequence
  LRRK2 RNA guide
uugauguggagaaauaggaaca

SEQ ID NO: 35053 - RNA, 22 nt, Artificial Sequence
  LRRK2 RNA guide
uuugauguggagaaauaggaac

SEQ ID NO: 35054 - RNA, 22 nt, Artificial Sequence
  LRRK2 RNA guide
uuuugauguggagaaauaggaa

SEQ ID NO: 35055 - RNA, 22 nt, Artificial Sequence
  LRRK2 RNA guide
uuuuugauguggagaaauagga

SEQ ID NO: 35056 - RNA, 22 nt, Artificial Sequence
  LRRK2 RNA guide
uuuuuugauguggagaaauagg

SEQ ID NO: 35057 - RNA, 20 nt, Artificial Sequence
  LRRK2 RNA guide
auggcucauguuauauugcu

SEQ ID NO: 35058 - RNA, 20 nt, Artificial Sequence
  LRRK2 RNA guide
cucauguuauauugcuuacu

SEQ ID NO: 35059 - RNA, 20 nt, Artificial Sequence
  LRRK2 RNA guide
gcucauguuauauugcuuac

SEQ ID NO: 35060 - RNA, 20 nt, Artificial Sequence
  LRRK2 RNA guide
ggcucauguuauauugcuua

SEQ ID NO: 35061 - RNA, 20 nt, Artificial Sequence
  LRRK2 RNA guide
uauggcucauguuauauugc

SEQ ID NO: 35062 - RNA, 20 nt, Artificial Sequence
  LRRK2 RNA guide
uggcucauguuauauugcuu

SEQ ID NO: 35063 - RNA, 21 nt, Artificial Sequence
  LRRK2 RNA guide
auauggcucauguuauauugc

SEQ ID NO: 35064 - RNA, 21 nt, Artificial Sequence
  LRRK2 RNA guide
auggcucauguuauauugcuu

SEQ ID NO: 35065 - RNA, 21 nt, Artificial Sequence
  LRRK2 RNA guide
gcucauguuauauugcuuacu

SEQ ID NO: 35066 - RNA, 21 nt, Artificial Sequence
  LRRK2 RNA guide
ggcucauguuauauugcuuac

SEQ ID NO: 35067 - RNA, 21 nt, Artificial Sequence
  LRRK2 RNA guide
uauggcucauguuauauugcu

SEQ ID NO: 35068 - RNA, 21 nt, Artificial Sequence
  LRRK2 RNA guide
uggcucauguuauauugcuua

SEQ ID NO: 35069 - RNA, 22 nt, Artificial Sequence
  LRRK2 RNA guide
aaguaagcaauauaacaugagc

SEQ ID NO: 35070 - RNA, 22 nt, Artificial Sequence
  LRRK2 RNA guide
auauggcucauguuauauugcu

SEQ ID NO: 35071 - RNA, 22 nt, Artificial Sequence
  LRRK2 RNA guide
auggcucauguuauauugcuua

SEQ ID NO: 35072 - RNA, 22 nt, Artificial Sequence
  LRRK2 RNA guide
gauauggcucauguuauauugc

SEQ ID NO: 35073 - RNA, 22 nt, Artificial Sequence
  LRRK2 RNA guide
gcucauguuauauugcuuacuu

SEQ ID NO: 35074 - RNA, 22 nt, Artificial Sequence
  LRRK2 RNA guide
ggcucauguuauauugcuuacu

SEQ ID NO: 35075 - RNA, 22 nt, Artificial Sequence
  LRRK2 RNA guide
uauggcucauguuauauugcuu

SEQ ID NO: 35076 - RNA, 22 nt, Artificial Sequence
  LRRK2 RNA guide
uggcucauguuauauugcuuac

SEQ ID NO: 35077 - RNA, 20 nt, Artificial Sequence
  LRRK2 RNA guide
auauggcucauguuauauug

SEQ ID NO: 35078 - RNA, 20 nt, Artificial Sequence
  LRRK2 RNA guide
cucauguuauauugcuuauc

SEQ ID NO: 35079 - RNA, 20 nt, Artificial Sequence
  LRRK2 RNA guide
gauaagcaauauaacaugag

SEQ ID NO: 35080 - RNA, 20 nt, Artificial Sequence
  LRRK2 RNA guide
gcucauguuauauugcuuau

SEQ ID NO: 35081 - RNA, 21 nt, Artificial Sequence
  LRRK2 RNA guide
gauaagcaauauaacaugagc

SEQ ID NO: 35082 - RNA, 21 nt, Artificial Sequence
  LRRK2 RNA guide
gauauggcucauguuauauug

SEQ ID NO: 35083 - RNA, 21 nt, Artificial Sequence
  LRRK2 RNA guide
gcucauguuauauugcuuauc

SEQ ID NO: 35084 - RNA, 21 nt, Artificial Sequence
  LRRK2 RNA guide
ggcucauguuauauugcuuau

SEQ ID NO: 35085 - RNA, 22 nt, Artificial Sequence
  LRRK2 RNA guide
agauaagcaauauaacaugagc

SEQ ID NO: 35086 - RNA, 22 nt, Artificial Sequence
  LRRK2 RNA guide
agauauggcucauguuauauug

SEQ ID NO: 35087 - RNA, 22 nt, Artificial Sequence
  LRRK2 RNA guide
gauaagcaauauaacaugagcc

SEQ ID NO: 35088 - RNA, 22 nt, Artificial Sequence
  LRRK2 RNA guide
gcucauguuauauugcuuaucu

SEQ ID NO: 35089 - RNA, 22 nt, Artificial Sequence
  LRRK2 RNA guide
ggcucauguuauauugcuuauc

SEQ ID NO: 35090 - RNA, 22 nt, Artificial Sequence
  LRRK2 RNA guide
uggcucauguuauauugcuuau

SEQ ID NO: 35091 - RNA, 20 nt, Artificial Sequence
  LRRK2 RNA guide
aaggaaagcaauauaacaug

SEQ ID NO: 35092 - RNA, 20 nt, Artificial Sequence
  LRRK2 RNA guide
aggaaagcaauauaacauga

SEQ ID NO: 35093 - RNA, 20 nt, Artificial Sequence
  LRRK2 RNA guide
cauguuauauugcuuuccuu

SEQ ID NO: 35094 - RNA, 20 nt, Artificial Sequence
  LRRK2 RNA guide
cucauguuauauugcuuucc

SEQ ID NO: 35095 - RNA, 20 nt, Artificial Sequence
  LRRK2 RNA guide
gaaagcaauauaacaugagc

SEQ ID NO: 35096 - RNA, 20 nt, Artificial Sequence
  LRRK2 RNA guide
gauauggcucauguuauauu

SEQ ID NO: 35097 - RNA, 20 nt, Artificial Sequence
  LRRK2 RNA guide
gcucauguuauauugcuuuc

SEQ ID NO: 35098 - RNA, 20 nt, Artificial Sequence
  LRRK2 RNA guide
ggaaagcaauauaacaugag

SEQ ID NO: 35099 - RNA, 20 nt, Artificial Sequence
  LRRK2 RNA guide
ggcucauguuauauugcuuu

SEQ ID NO: 35100 - RNA, 20 nt, Artificial Sequence
  LRRK2 RNA guide
ucauguuauauugcuuuccu

SEQ ID NO: 35101 - RNA, 21 nt, Artificial Sequence
  LRRK2 RNA guide
aggaaagcaauauaacaugag

SEQ ID NO: 35102 - RNA, 21 nt, Artificial Sequence
  LRRK2 RNA guide
cucauguuauauugcuuuccu

SEQ ID NO: 35103 - RNA, 21 nt, Artificial Sequence
  LRRK2 RNA guide
gaaagcaauauaacaugagcc

SEQ ID NO: 35104 - RNA, 21 nt, Artificial Sequence
  LRRK2 RNA guide
gcucauguuauauugcuuucc

SEQ ID NO: 35105 - RNA, 21 nt, Artificial Sequence
  LRRK2 RNA guide
ggaaagcaauauaacaugagc

SEQ ID NO: 35106 - RNA, 21 nt, Artificial Sequence
  LRRK2 RNA guide
ggcucauguuauauugcuuuc

SEQ ID NO: 35107 - RNA, 21 nt, Artificial Sequence
  LRRK2 RNA guide
uggcucauguuauauugcuuu

SEQ ID NO: 35108 - RNA, 22 nt, Artificial Sequence
  LRRK2 RNA guide
aaggaaagcaauauaacaugag

SEQ ID NO: 35109 - RNA, 22 nt, Artificial Sequence
  LRRK2 RNA guide
aggaaagcaauauaacaugagc

SEQ ID NO: 35110 - RNA, 22 nt, Artificial Sequence
  LRRK2 RNA guide
auggcucauguuauauugcuuu

SEQ ID NO: 35111 - RNA, 22 nt, Artificial Sequence
  LRRK2 RNA guide
cucauguuauauugcuuuccuu

SEQ ID NO: 35112 - RNA, 22 nt, Artificial Sequence
  LRRK2 RNA guide
gaaagcaauauaacaugagcca

SEQ ID NO: 35113 - RNA, 22 nt, Artificial Sequence
  LRRK2 RNA guide
gcucauguuauauugcuuuccu

SEQ ID NO: 35114 - RNA, 22 nt, Artificial Sequence
  LRRK2 RNA guide
ggaaagcaauauaacaugagcc

SEQ ID NO: 35115 - RNA, 22 nt, Artificial Sequence
  LRRK2 RNA guide
ggcucauguuauauugcuuucc

SEQ ID NO: 35116 - RNA, 22 nt, Artificial Sequence
  LRRK2 RNA guide
uggcucauguuauauugcuuuc

SEQ ID NO: 35117 - RNA, 20 nt, Artificial Sequence
  LRRK2 RNA guide
aaacaauauaacaugagcca

SEQ ID NO: 35118 - RNA, 20 nt, Artificial Sequence
  LRRK2 RNA guide
aacaauauaacaugagccau

SEQ ID NO: 35119 - RNA, 20 nt, Artificial Sequence
  LRRK2 RNA guide
agauauggcucauguuauau

SEQ ID NO: 35120 - RNA, 20 nt, Artificial Sequence
  LRRK2 RNA guide
auggcucauguuauauuguu

SEQ ID NO: 35121 - RNA, 20 nt, Artificial Sequence
  LRRK2 RNA guide
cucauguuauauuguuuacc

SEQ ID NO: 35122 - RNA, 20 nt, Artificial Sequence
  LRRK2 RNA guide
gcucauguuauauuguuuac

SEQ ID NO: 35123 - RNA, 20 nt, Artificial Sequence
  LRRK2 RNA guide
ggcucauguuauauuguuua

SEQ ID NO: 35124 - RNA, 20 nt, Artificial Sequence
  LRRK2 RNA guide
gguaaacaauauaacaugag

SEQ ID NO: 35125 - RNA, 20 nt, Artificial Sequence
  LRRK2 RNA guide
guaaacaauauaacaugagc

SEQ ID NO: 35126 - RNA, 20 nt, Artificial Sequence
  LRRK2 RNA guide
uaaacaauauaacaugagcc

SEQ ID NO: 35127 - RNA, 20 nt, Artificial Sequence
  LRRK2 RNA guide
uagauauggcucauguuaua

SEQ ID NO: 35128 - RNA, 20 nt, Artificial Sequence
  LRRK2 RNA guide
uauggcucauguuauauugu

SEQ ID NO: 35129 - RNA, 20 nt, Artificial Sequence
  LRRK2 RNA guide
uggcucauguuauauuguuu

SEQ ID NO: 35130 - RNA, 20 nt, Artificial Sequence
  LRRK2 RNA guide
uuagauauggcucauguuau

SEQ ID NO: 35131 - RNA, 21 nt, Artificial Sequence
  LRRK2 RNA guide
gcucauguuauauuguuuacc

SEQ ID NO: 35132 - RNA, 21 nt, Artificial Sequence
  LRRK2 RNA guide
ggcucauguuauauuguuuac

SEQ ID NO: 35133 - RNA, 21 nt, Artificial Sequence
  LRRK2 RNA guide
gguaaacaauauaacaugagc

SEQ ID NO: 35134 - RNA, 21 nt, Artificial Sequence
  LRRK2 RNA guide
guaaacaauauaacaugagcc

SEQ ID NO: 35135 - RNA, 22 nt, Artificial Sequence
  LRRK2 RNA guide
agguaaacaauauaacaugagc

SEQ ID NO: 35136 - RNA, 22 nt, Artificial Sequence
  LRRK2 RNA guide
gauauggcucauguuauauugu

SEQ ID NO: 35137 - RNA, 22 nt, Artificial Sequence
  LRRK2 RNA guide
gcucauguuauauuguuuaccu

SEQ ID NO: 35138 - RNA, 22 nt, Artificial Sequence
  LRRK2 RNA guide
ggcucauguuauauuguuuacc

SEQ ID NO: 35139 - RNA, 22 nt, Artificial Sequence
  LRRK2 RNA guide
gguaaacaauauaacaugagcc

SEQ ID NO: 35140 - RNA, 22 nt, Artificial Sequence
  LRRK2 RNA guide
guaaacaauauaacaugagcca

SEQ ID NO: 35141 - RNA, 22 nt, Artificial Sequence
  LRRK2 RNA guide
uggcucauguuauauuguuuac

SEQ ID NO: 35142 - RNA, 20 nt, Artificial Sequence
  LRRK2 RNA guide
aagaaauauaacaugagcca

SEQ ID NO: 35143 - RNA, 20 nt, Artificial Sequence
  LRRK2 RNA guide
agaaauauaacaugagccau

SEQ ID NO: 35144 - RNA, 20 nt, Artificial Sequence
  LRRK2 RNA guide
auggcucauguuauauuucu

SEQ ID NO: 35145 - RNA, 20 nt, Artificial Sequence
  LRRK2 RNA guide
auuagauauggcucauguua

SEQ ID NO: 35146 - RNA, 20 nt, Artificial Sequence
  LRRK2 RNA guide
cucauguuauauuucuuacc

SEQ ID NO: 35147 - RNA, 20 nt, Artificial Sequence
  LRRK2 RNA guide
gaaauauaacaugagccaua

SEQ ID NO: 35148 - RNA, 20 nt, Artificial Sequence
  LRRK2 RNA guide
gcucauguuauauuucuuac

SEQ ID NO: 35149 - RNA, 20 nt, Artificial Sequence
  LRRK2 RNA guide
ggcucauguuauauuucuua

SEQ ID NO: 35150 - RNA, 20 nt, Artificial Sequence
  LRRK2 RNA guide
gguaagaaauauaacaugag

SEQ ID NO: 35151 - RNA, 20 nt, Artificial Sequence
  LRRK2 RNA guide
guaagaaauauaacaugagc

SEQ ID NO: 35152 - RNA, 20 nt, Artificial Sequence
  LRRK2 RNA guide
uaagaaauauaacaugagcc

SEQ ID NO: 35153 - RNA, 20 nt, Artificial Sequence
  LRRK2 RNA guide
uauggcucauguuauauuuc

SEQ ID NO: 35154 - RNA, 20 nt, Artificial Sequence
  LRRK2 RNA guide
uggcucauguuauauuucuu

SEQ ID NO: 35155 - RNA, 21 nt, Artificial Sequence
  LRRK2 RNA guide
gcucauguuauauuucuuacc

SEQ ID NO: 35156 - RNA, 21 nt, Artificial Sequence
  LRRK2 RNA guide
ggcucauguuauauuucuuac

SEQ ID NO: 35157 - RNA, 21 nt, Artificial Sequence
  LRRK2 RNA guide
gguaagaaauauaacaugagc

SEQ ID NO: 35158 - RNA, 21 nt, Artificial Sequence
  LRRK2 RNA guide
guaagaaauauaacaugagcc

SEQ ID NO: 35159 - RNA, 22 nt, Artificial Sequence
  LRRK2 RNA guide
agguaagaaauauaacaugagc

SEQ ID NO: 35160 - RNA, 22 nt, Artificial Sequence
  LRRK2 RNA guide
cuauuagauauggcucauguua

SEQ ID NO: 35161 - RNA, 22 nt, Artificial Sequence
  LRRK2 RNA guide
gaaauauaacaugagccauauc

SEQ ID NO: 35162 - RNA, 22 nt, Artificial Sequence
  LRRK2 RNA guide
gauauggcucauguuauauuuc

SEQ ID NO: 35163 - RNA, 22 nt, Artificial Sequence
  LRRK2 RNA guide
gcucauguuauauuucuuaccu

SEQ ID NO: 35164 - RNA, 22 nt, Artificial Sequence
  LRRK2 RNA guide
ggcucauguuauauuucuuacc

SEQ ID NO: 35165 - RNA, 22 nt, Artificial Sequence
  LRRK2 RNA guide
gguaagaaauauaacaugagcc

SEQ ID NO: 35166 - RNA, 22 nt, Artificial Sequence
  LRRK2 RNA guide
guaagaaauauaacaugagcca

SEQ ID NO: 35167 - RNA, 22 nt, Artificial Sequence
  LRRK2 RNA guide
uggcucauguuauauuucuuac

SEQ ID NO: 35168 - RNA, 20 nt, Artificial Sequence
  LRRK2 RNA guide
aaaauaacaugagccauauc

SEQ ID NO: 35169 - RNA, 20 nt, Artificial Sequence
  LRRK2 RNA guide
aaauaacaugagccauaucu

SEQ ID NO: 35170 - RNA, 20 nt, Artificial Sequence
  LRRK2 RNA guide
aagcaaaauaacaugagcca

SEQ ID NO: 35171 - RNA, 20 nt, Artificial Sequence
  LRRK2 RNA guide
aagguaagcaaaauaacaug

SEQ ID NO: 35172 - RNA, 20 nt, Artificial Sequence
  LRRK2 RNA guide
agauauggcucauguuauuu

SEQ ID NO: 35173 - RNA, 20 nt, Artificial Sequence
  LRRK2 RNA guide
agcaaaauaacaugagccau

SEQ ID NO: 35174 - RNA, 20 nt, Artificial Sequence
  LRRK2 RNA guide
agguaagcaaaauaacauga

SEQ ID NO: 35175 - RNA, 20 nt, Artificial Sequence
  LRRK2 RNA guide
auauggcucauguuauuuug

SEQ ID NO: 35176 - RNA, 20 nt, Artificial Sequence
  LRRK2 RNA guide
auggcucauguuauuuugcu

SEQ ID NO: 35177 - RNA, 20 nt, Artificial Sequence
  LRRK2 RNA guide
caaaauaacaugagccauau

SEQ ID NO: 35178 - RNA, 20 nt, Artificial Sequence
  LRRK2 RNA guide
cauguuauuuugcuuaccuu

SEQ ID NO: 35179 - RNA, 20 nt, Artificial Sequence
  LRRK2 RNA guide
ccuauuagauauggcucaug

SEQ ID NO: 35180 - RNA, 20 nt, Artificial Sequence
  LRRK2 RNA guide
cuauuagauauggcucaugu

SEQ ID NO: 35181 - RNA, 20 nt, Artificial Sequence
  LRRK2 RNA guide
cucauguuauuuugcuuacc

SEQ ID NO: 35182 - RNA, 20 nt, Artificial Sequence
  LRRK2 RNA guide
gauauggcucauguuauuuu

SEQ ID NO: 35183 - RNA, 20 nt, Artificial Sequence
  LRRK2 RNA guide
gcaaaauaacaugagccaua

SEQ ID NO: 35184 - RNA, 20 nt, Artificial Sequence
  LRRK2 RNA guide
gcucauguuauuuugcuuac

SEQ ID NO: 35185 - RNA, 20 nt, Artificial Sequence
  LRRK2 RNA guide
ggcucauguuauuuugcuua

SEQ ID NO: 35186 - RNA, 20 nt, Artificial Sequence
  LRRK2 RNA guide
gguaagcaaaauaacaugag

SEQ ID NO: 35187 - RNA, 20 nt, Artificial Sequence
  LRRK2 RNA guide
guaagcaaaauaacaugagc

SEQ ID NO: 35188 - RNA, 20 nt, Artificial Sequence
  LRRK2 RNA guide
uaagcaaaauaacaugagcc

SEQ ID NO: 35189 - RNA, 20 nt, Artificial Sequence
  LRRK2 RNA guide
uagauauggcucauguuauu

SEQ ID NO: 35190 - RNA, 20 nt, Artificial Sequence
  LRRK2 RNA guide
uauggcucauguuauuuugc

SEQ ID NO: 35191 - RNA, 20 nt, Artificial Sequence
  LRRK2 RNA guide
uauuagauauggcucauguu

SEQ ID NO: 35192 - RNA, 20 nt, Artificial Sequence
  LRRK2 RNA guide
ucauguuauuuugcuuaccu

SEQ ID NO: 35193 - RNA, 20 nt, Artificial Sequence
  LRRK2 RNA guide
uggcucauguuauuuugcuu

SEQ ID NO: 35194 - RNA, 21 nt, Artificial Sequence
  LRRK2 RNA guide
aagcaaaauaacaugagccau

SEQ ID NO: 35195 - RNA, 21 nt, Artificial Sequence
  LRRK2 RNA guide
agcaaaauaacaugagccaua

SEQ ID NO: 35196 - RNA, 21 nt, Artificial Sequence
  LRRK2 RNA guide
agguaagcaaaauaacaugag

SEQ ID NO: 35197 - RNA, 21 nt, Artificial Sequence
  LRRK2 RNA guide
auauggcucauguuauuuugc

SEQ ID NO: 35198 - RNA, 21 nt, Artificial Sequence
  LRRK2 RNA guide
auggcucauguuauuuugcuu

SEQ ID NO: 35199 - RNA, 21 nt, Artificial Sequence
  LRRK2 RNA guide
caaaauaacaugagccauauc

SEQ ID NO: 35200 - RNA, 21 nt, Artificial Sequence
  LRRK2 RNA guide
ccuauuagauauggcucaugu

SEQ ID NO: 35201 - RNA, 21 nt, Artificial Sequence
  LRRK2 RNA guide
cuauuagauauggcucauguu

SEQ ID NO: 35202 - RNA, 21 nt, Artificial Sequence
  LRRK2 RNA guide
cucauguuauuuugcuuaccu

SEQ ID NO: 35203 - RNA, 21 nt, Artificial Sequence
  LRRK2 RNA guide
gauauggcucauguuauuuug

SEQ ID NO: 35204 - RNA, 21 nt, Artificial Sequence
  LRRK2 RNA guide
gcaaaauaacaugagccauau

SEQ ID NO: 35205 - RNA, 21 nt, Artificial Sequence
  LRRK2 RNA guide
gcucauguuauuuugcuuacc

SEQ ID NO: 35206 - RNA, 21 nt, Artificial Sequence
  LRRK2 RNA guide
ggcucauguuauuuugcuuac

SEQ ID NO: 35207 - RNA, 21 nt, Artificial Sequence
  LRRK2 RNA guide
gguaagcaaaauaacaugagc

SEQ ID NO: 35208 - RNA, 21 nt, Artificial Sequence
  LRRK2 RNA guide
guaagcaaaauaacaugagcc

SEQ ID NO: 35209 - RNA, 21 nt, Artificial Sequence
  LRRK2 RNA guide
uaagcaaaauaacaugagcca

SEQ ID NO: 35210 - RNA, 21 nt, Artificial Sequence
  LRRK2 RNA guide
uauggcucauguuauuuugcu

SEQ ID NO: 35211 - RNA, 21 nt, Artificial Sequence
  LRRK2 RNA guide
uccuauuagauauggcucaug

SEQ ID NO: 35212 - RNA, 21 nt, Artificial Sequence
  LRRK2 RNA guide
uggcucauguuauuuugcuua

SEQ ID NO: 35213 - RNA, 22 nt, Artificial Sequence
  LRRK2 RNA guide
aagcaaaauaacaugagccaua

SEQ ID NO: 35214 - RNA, 22 nt, Artificial Sequence
  LRRK2 RNA guide
aagguaagcaaaauaacaugag

SEQ ID NO: 35215 - RNA, 22 nt, Artificial Sequence
  LRRK2 RNA guide
agauauggcucauguuauuuug

SEQ ID NO: 35216 - RNA, 22 nt, Artificial Sequence
  LRRK2 RNA guide
agcaaaauaacaugagccauau

SEQ ID NO: 35217 - RNA, 22 nt, Artificial Sequence
  LRRK2 RNA guide
agguaagcaaaauaacaugagc

SEQ ID NO: 35218 - RNA, 22 nt, Artificial Sequence
  LRRK2 RNA guide
auauggcucauguuauuuugcu

SEQ ID NO: 35219 - RNA, 22 nt, Artificial Sequence
  LRRK2 RNA guide
auggcucauguuauuuugcuua

SEQ ID NO: 35220 - RNA, 22 nt, Artificial Sequence
  LRRK2 RNA guide
caaaauaacaugagccauaucu

SEQ ID NO: 35221 - RNA, 22 nt, Artificial Sequence
  LRRK2 RNA guide
ccuauuagauauggcucauguu

SEQ ID NO: 35222 - RNA, 22 nt, Artificial Sequence
  LRRK2 RNA guide
cucauguuauuuugcuuaccuu

SEQ ID NO: 35223 - RNA, 22 nt, Artificial Sequence
  LRRK2 RNA guide
gauauggcucauguuauuuugc

SEQ ID NO: 35224 - RNA, 22 nt, Artificial Sequence
  LRRK2 RNA guide
gcaaaauaacaugagccauauc

SEQ ID NO: 35225 - RNA, 22 nt, Artificial Sequence
  LRRK2 RNA guide
gcucauguuauuuugcuuaccu

SEQ ID NO: 35226 - RNA, 22 nt, Artificial Sequence
  LRRK2 RNA guide
ggcucauguuauuuugcuuacc

SEQ ID NO: 35227 - RNA, 22 nt, Artificial Sequence
  LRRK2 RNA guide
gguaagcaaaauaacaugagcc

SEQ ID NO: 35228 - RNA, 22 nt, Artificial Sequence
  LRRK2 RNA guide
guaagcaaaauaacaugagcca

SEQ ID NO: 35229 - RNA, 22 nt, Artificial Sequence
  LRRK2 RNA guide
guccuauuagauauggcucaug

SEQ ID NO: 35230 - RNA, 22 nt, Artificial Sequence
  LRRK2 RNA guide
uaagcaaaauaacaugagccau

SEQ ID NO: 35231 - RNA, 22 nt, Artificial Sequence
  LRRK2 RNA guide
uauggcucauguuauuuugcuu

SEQ ID NO: 35232 - RNA, 22 nt, Artificial Sequence
  LRRK2 RNA guide
uccuauuagauauggcucaugu

SEQ ID NO: 35233 - RNA, 22 nt, Artificial Sequence
  LRRK2 RNA guide
uggcucauguuauuuugcuuac

SEQ ID NO: 35234 - RNA, 20 nt, Artificial Sequence
  LRRK2 RNA guide
aaaacaugagccauaucuaa

SEQ ID NO: 35235 - RNA, 20 nt, Artificial Sequence
  LRRK2 RNA guide
aagcaauaaaacaugagcca

SEQ ID NO: 35236 - RNA, 20 nt, Artificial Sequence
  LRRK2 RNA guide
aagguaagcaauaaaacaug

SEQ ID NO: 35237 - RNA, 20 nt, Artificial Sequence
  LRRK2 RNA guide
aauaaaacaugagccauauc

SEQ ID NO: 35238 - RNA, 20 nt, Artificial Sequence
  LRRK2 RNA guide
agauauggcucauguuuuau

SEQ ID NO: 35239 - RNA, 20 nt, Artificial Sequence
  LRRK2 RNA guide
agcaauaaaacaugagccau

SEQ ID NO: 35240 - RNA, 20 nt, Artificial Sequence
  LRRK2 RNA guide
agguaagcaauaaaacauga

SEQ ID NO: 35241 - RNA, 20 nt, Artificial Sequence
  LRRK2 RNA guide
auaaaacaugagccauaucu

SEQ ID NO: 35242 - RNA, 20 nt, Artificial Sequence
  LRRK2 RNA guide
auauggcucauguuuuauug

SEQ ID NO: 35243 - RNA, 20 nt, Artificial Sequence
  LRRK2 RNA guide
auggcucauguuuuauugcu

SEQ ID NO: 35244 - RNA, 20 nt, Artificial Sequence
  LRRK2 RNA guide
auuagauauggcucauguuu

SEQ ID NO: 35245 - RNA, 20 nt, Artificial Sequence
  LRRK2 RNA guide
caauaaaacaugagccauau

SEQ ID NO: 35246 - RNA, 20 nt, Artificial Sequence
  LRRK2 RNA guide
cauguuuuauugcuuaccuu

SEQ ID NO: 35247 - RNA, 20 nt, Artificial Sequence
  LRRK2 RNA guide
cucauguuuuauugcuuacc

SEQ ID NO: 35248 - RNA, 20 nt, Artificial Sequence
  LRRK2 RNA guide
gauauggcucauguuuuauu

SEQ ID NO: 35249 - RNA, 20 nt, Artificial Sequence
  LRRK2 RNA guide
gcaauaaaacaugagccaua

SEQ ID NO: 35250 - RNA, 20 nt, Artificial Sequence
  LRRK2 RNA guide
gcucauguuuuauugcuuac

SEQ ID NO: 35251 - RNA, 20 nt, Artificial Sequence
  LRRK2 RNA guide
ggcucauguuuuauugcuua

SEQ ID NO: 35252 - RNA, 20 nt, Artificial Sequence
  LRRK2 RNA guide
gguaagcaauaaaacaugag

SEQ ID NO: 35253 - RNA, 20 nt, Artificial Sequence
  LRRK2 RNA guide
guaagcaauaaaacaugagc

SEQ ID NO: 35254 - RNA, 20 nt, Artificial Sequence
  LRRK2 RNA guide
guccuauuagauauggcuca

SEQ ID NO: 35255 - RNA, 20 nt, Artificial Sequence
  LRRK2 RNA guide
uaaaacaugagccauaucua

SEQ ID NO: 35256 - RNA, 20 nt, Artificial Sequence
  LRRK2 RNA guide
uaagcaauaaaacaugagcc

SEQ ID NO: 35257 - RNA, 20 nt, Artificial Sequence
  LRRK2 RNA guide
uagauauggcucauguuuua

SEQ ID NO: 35258 - RNA, 20 nt, Artificial Sequence
  LRRK2 RNA guide
uauggcucauguuuuauugc

SEQ ID NO: 35259 - RNA, 20 nt, Artificial Sequence
  LRRK2 RNA guide
ucauguuuuauugcuuaccu

SEQ ID NO: 35260 - RNA, 20 nt, Artificial Sequence
  LRRK2 RNA guide
uccuauuagauauggcucau

SEQ ID NO: 35261 - RNA, 20 nt, Artificial Sequence
  LRRK2 RNA guide
uggcucauguuuuauugcuu

SEQ ID NO: 35262 - RNA, 20 nt, Artificial Sequence
  LRRK2 RNA guide
uuagauauggcucauguuuu

SEQ ID NO: 35263 - RNA, 21 nt, Artificial Sequence
  LRRK2 RNA guide
aagcaauaaaacaugagccau

SEQ ID NO: 35264 - RNA, 21 nt, Artificial Sequence
  LRRK2 RNA guide
agcaauaaaacaugagccaua

SEQ ID NO: 35265 - RNA, 21 nt, Artificial Sequence
  LRRK2 RNA guide
agguaagcaauaaaacaugag

SEQ ID NO: 35266 - RNA, 21 nt, Artificial Sequence
  LRRK2 RNA guide
aguccuauuagauauggcuca

SEQ ID NO: 35267 - RNA, 21 nt, Artificial Sequence
  LRRK2 RNA guide
auauggcucauguuuuauugc

SEQ ID NO: 35268 - RNA, 21 nt, Artificial Sequence
  LRRK2 RNA guide
auggcucauguuuuauugcuu

SEQ ID NO: 35269 - RNA, 21 nt, Artificial Sequence
  LRRK2 RNA guide
caauaaaacaugagccauauc

SEQ ID NO: 35270 - RNA, 21 nt, Artificial Sequence
  LRRK2 RNA guide
cucauguuuuauugcuuaccu

SEQ ID NO: 35271 - RNA, 21 nt, Artificial Sequence
  LRRK2 RNA guide
gauauggcucauguuuuauug

SEQ ID NO: 35272 - RNA, 21 nt, Artificial Sequence
  LRRK2 RNA guide
gcaauaaaacaugagccauau

SEQ ID NO: 35273 - RNA, 21 nt, Artificial Sequence
  LRRK2 RNA guide
gcucauguuuuauugcuuacc

SEQ ID NO: 35274 - RNA, 21 nt, Artificial Sequence
  LRRK2 RNA guide
ggcucauguuuuauugcuuac

SEQ ID NO: 35275 - RNA, 21 nt, Artificial Sequence
  LRRK2 RNA guide
gguaagcaauaaaacaugagc

SEQ ID NO: 35276 - RNA, 21 nt, Artificial Sequence
  LRRK2 RNA guide
guaagcaauaaaacaugagcc

SEQ ID NO: 35277 - RNA, 21 nt, Artificial Sequence
  LRRK2 RNA guide
guccuauuagauauggcucau

SEQ ID NO: 35278 - RNA, 21 nt, Artificial Sequence
  LRRK2 RNA guide
uaagcaauaaaacaugagcca

SEQ ID NO: 35279 - RNA, 21 nt, Artificial Sequence
  LRRK2 RNA guide
uauggcucauguuuuauugcu

SEQ ID NO: 35280 - RNA, 21 nt, Artificial Sequence
  LRRK2 RNA guide
uggcucauguuuuauugcuua

SEQ ID NO: 35281 - RNA, 22 nt, Artificial Sequence
  LRRK2 RNA guide
aagcaauaaaacaugagccaua

SEQ ID NO: 35282 - RNA, 22 nt, Artificial Sequence
  LRRK2 RNA guide
aagguaagcaauaaaacaugag

SEQ ID NO: 35283 - RNA, 22 nt, Artificial Sequence
  LRRK2 RNA guide
aaguccuauuagauauggcuca

SEQ ID NO: 35284 - RNA, 22 nt, Artificial Sequence
  LRRK2 RNA guide
agauauggcucauguuuuauug

SEQ ID NO: 35285 - RNA, 22 nt, Artificial Sequence
  LRRK2 RNA guide
agcaauaaaacaugagccauau

SEQ ID NO: 35286 - RNA, 22 nt, Artificial Sequence
  LRRK2 RNA guide
agguaagcaauaaaacaugagc

SEQ ID NO: 35287 - RNA, 22 nt, Artificial Sequence
  LRRK2 RNA guide
aguccuauuagauauggcucau

SEQ ID NO: 35288 - RNA, 22 nt, Artificial Sequence
  LRRK2 RNA guide
auauggcucauguuuuauugcu

SEQ ID NO: 35289 - RNA, 22 nt, Artificial Sequence
  LRRK2 RNA guide
auggcucauguuuuauugcuua

SEQ ID NO: 35290 - RNA, 22 nt, Artificial Sequence
  LRRK2 RNA guide
caauaaaacaugagccauaucu

SEQ ID NO: 35291 - RNA, 22 nt, Artificial Sequence
  LRRK2 RNA guide
cuauuagauauggcucauguuu

SEQ ID NO: 35292 - RNA, 22 nt, Artificial Sequence
  LRRK2 RNA guide
cucauguuuuauugcuuaccuu

SEQ ID NO: 35293 - RNA, 22 nt, Artificial Sequence
  LRRK2 RNA guide
gauauggcucauguuuuauugc

SEQ ID NO: 35294 - RNA, 22 nt, Artificial Sequence
  LRRK2 RNA guide
gcaauaaaacaugagccauauc

SEQ ID NO: 35295 - RNA, 22 nt, Artificial Sequence
  LRRK2 RNA guide
gcucauguuuuauugcuuaccu

SEQ ID NO: 35296 - RNA, 22 nt, Artificial Sequence
  LRRK2 RNA guide
ggcucauguuuuauugcuuacc

SEQ ID NO: 35297 - RNA, 22 nt, Artificial Sequence
  LRRK2 RNA guide
gguaagcaauaaaacaugagcc

SEQ ID NO: 35298 - RNA, 22 nt, Artificial Sequence
  LRRK2 RNA guide
guaagcaauaaaacaugagcca

SEQ ID NO: 35299 - RNA, 22 nt, Artificial Sequence
  LRRK2 RNA guide
uaagcaauaaaacaugagccau

SEQ ID NO: 35300 - RNA, 22 nt, Artificial Sequence
  LRRK2 RNA guide
uauggcucauguuuuauugcuu

SEQ ID NO: 35301 - RNA, 22 nt, Artificial Sequence
  LRRK2 RNA guide
uggcucauguuuuauugcuuac

SEQ ID NO: 35302 - RNA, 20 nt, Artificial Sequence
  LRRK2 RNA guide
aaaugagccauaucuaauag

SEQ ID NO: 35303 - RNA, 20 nt, Artificial Sequence
  LRRK2 RNA guide
aagcaauauaaaaugagcca

SEQ ID NO: 35304 - RNA, 20 nt, Artificial Sequence
  LRRK2 RNA guide
aaguccuauuagauauggcu

SEQ ID NO: 35305 - RNA, 20 nt, Artificial Sequence
  LRRK2 RNA guide
agcaauauaaaaugagccau

SEQ ID NO: 35306 - RNA, 20 nt, Artificial Sequence
  LRRK2 RNA guide
aguccuauuagauauggcuc

SEQ ID NO: 35307 - RNA, 20 nt, Artificial Sequence
  LRRK2 RNA guide
auggcucauuuuauauugcu

SEQ ID NO: 35308 - RNA, 20 nt, Artificial Sequence
  LRRK2 RNA guide
ccuauuagauauggcucauu

SEQ ID NO: 35309 - RNA, 20 nt, Artificial Sequence
  LRRK2 RNA guide
cuauuagauauggcucauuu

SEQ ID NO: 35310 - RNA, 20 nt, Artificial Sequence
  LRRK2 RNA guide
cucauuuuauauugcuuacc

SEQ ID NO: 35311 - RNA, 20 nt, Artificial Sequence
  LRRK2 RNA guide
gaaguccuauuagauauggc

SEQ ID NO: 35312 - RNA, 20 nt, Artificial Sequence
  LRRK2 RNA guide
gcaauauaaaaugagccaua

SEQ ID NO: 35313 - RNA, 20 nt, Artificial Sequence
  LRRK2 RNA guide
gcucauuuuauauugcuuac

SEQ ID NO: 35314 - RNA, 20 nt, Artificial Sequence
  LRRK2 RNA guide
ggcucauuuuauauugcuua

SEQ ID NO: 35315 - RNA, 20 nt, Artificial Sequence
  LRRK2 RNA guide
gguaagcaauauaaaaugag

SEQ ID NO: 35316 - RNA, 20 nt, Artificial Sequence
  LRRK2 RNA guide
guaagcaauauaaaaugagc

SEQ ID NO: 35317 - RNA, 20 nt, Artificial Sequence
  LRRK2 RNA guide
uaagcaauauaaaaugagcc

SEQ ID NO: 35318 - RNA, 20 nt, Artificial Sequence
  LRRK2 RNA guide
uauggcucauuuuauauugc

SEQ ID NO: 35319 - RNA, 20 nt, Artificial Sequence
  LRRK2 RNA guide
uggcucauuuuauauugcuu

SEQ ID NO: 35320 - RNA, 21 nt, Artificial Sequence
  LRRK2 RNA guide
aaaugagccauaucuaauagg

SEQ ID NO: 35321 - RNA, 21 nt, Artificial Sequence
  LRRK2 RNA guide
aaguccuauuagauauggcuc

SEQ ID NO: 35322 - RNA, 21 nt, Artificial Sequence
  LRRK2 RNA guide
ccuauuagauauggcucauuu

SEQ ID NO: 35323 - RNA, 21 nt, Artificial Sequence
  LRRK2 RNA guide
gaaguccuauuagauauggcu

SEQ ID NO: 35324 - RNA, 21 nt, Artificial Sequence
  LRRK2 RNA guide
gcucauuuuauauugcuuacc

SEQ ID NO: 35325 - RNA, 21 nt, Artificial Sequence
  LRRK2 RNA guide
ggcucauuuuauauugcuuac

SEQ ID NO: 35326 - RNA, 21 nt, Artificial Sequence
  LRRK2 RNA guide
gguaagcaauauaaaaugagc

SEQ ID NO: 35327 - RNA, 21 nt, Artificial Sequence
  LRRK2 RNA guide
guaagcaauauaaaaugagcc

SEQ ID NO: 35328 - RNA, 21 nt, Artificial Sequence
  LRRK2 RNA guide
uccuauuagauauggcucauu

SEQ ID NO: 35329 - RNA, 21 nt, Artificial Sequence
  LRRK2 RNA guide
ugaaguccuauuagauauggc

SEQ ID NO: 35330 - RNA, 22 nt, Artificial Sequence
  LRRK2 RNA guide
aaaaugagccauaucuaauagg

SEQ ID NO: 35331 - RNA, 22 nt, Artificial Sequence
  LRRK2 RNA guide
aaaugagccauaucuaauagga

SEQ ID NO: 35332 - RNA, 22 nt, Artificial Sequence
  LRRK2 RNA guide
agguaagcaauauaaaaugagc

SEQ ID NO: 35333 - RNA, 22 nt, Artificial Sequence
  LRRK2 RNA guide
ccuauuagauauggcucauuuu

SEQ ID NO: 35334 - RNA, 22 nt, Artificial Sequence
  LRRK2 RNA guide
cugaaguccuauuagauauggc

SEQ ID NO: 35335 - RNA, 22 nt, Artificial Sequence
  LRRK2 RNA guide
gaaguccuauuagauauggcuc

SEQ ID NO: 35336 - RNA, 22 nt, Artificial Sequence
  LRRK2 RNA guide
gauauggcucauuuuauauugc

SEQ ID NO: 35337 - RNA, 22 nt, Artificial Sequence
  LRRK2 RNA guide
gcaauauaaaaugagccauauc

SEQ ID NO: 35338 - RNA, 22 nt, Artificial Sequence
  LRRK2 RNA guide
gcucauuuuauauugcuuaccu

SEQ ID NO: 35339 - RNA, 22 nt, Artificial Sequence
  LRRK2 RNA guide
ggcucauuuuauauugcuuacc

SEQ ID NO: 35340 - RNA, 22 nt, Artificial Sequence
  LRRK2 RNA guide
gguaagcaauauaaaaugagcc

SEQ ID NO: 35341 - RNA, 22 nt, Artificial Sequence
  LRRK2 RNA guide
guaagcaauauaaaaugagcca

SEQ ID NO: 35342 - RNA, 22 nt, Artificial Sequence
  LRRK2 RNA guide
guccuauuagauauggcucauu

SEQ ID NO: 35343 - RNA, 22 nt, Artificial Sequence
  LRRK2 RNA guide
uccuauuagauauggcucauuu

SEQ ID NO: 35344 - RNA, 22 nt, Artificial Sequence
  LRRK2 RNA guide
ugaaguccuauuagauauggcu

SEQ ID NO: 35345 - RNA, 22 nt, Artificial Sequence
  LRRK2 RNA guide
uggcucauuuuauauugcuuac

SEQ ID NO: 35346 - RNA, 20 nt, Artificial Sequence
  LRRK2 RNA guide
cuuuaugaaaacacaguuca

SEQ ID NO: 35347 - RNA, 20 nt, Artificial Sequence
  LRRK2 RNA guide
gaacuguguuuucauaaaga

SEQ ID NO: 35348 - RNA, 20 nt, Artificial Sequence
  LRRK2 RNA guide
gcauuucuuuaugaaaacac

SEQ ID NO: 35349 - RNA, 20 nt, Artificial Sequence
  LRRK2 RNA guide
ucuuuaugaaaacacaguuc

SEQ ID NO: 35350 - RNA, 20 nt, Artificial Sequence
  LRRK2 RNA guide
ugaacuguguuuucauaaag

SEQ ID NO: 35351 - RNA, 22 nt, Artificial Sequence
  LRRK2 RNA guide
gcauuucuuuaugaaaacacag

SEQ ID NO: 35352 - RNA, 20 nt, Artificial Sequence
  LRRK2 RNA guide
aaacacaguccaaaaauaug

SEQ ID NO: 35353 - RNA, 20 nt, Artificial Sequence
  LRRK2 RNA guide
aacacaguccaaaaauauga

SEQ ID NO: 35354 - RNA, 20 nt, Artificial Sequence
  LRRK2 RNA guide
aaucauauuuuuggacugug

SEQ ID NO: 35355 - RNA, 20 nt, Artificial Sequence
  LRRK2 RNA guide
acacaguccaaaaauaugau

SEQ ID NO: 35356 - RNA, 20 nt, Artificial Sequence
  LRRK2 RNA guide
aucauauuuuuggacugugu

SEQ ID NO: 35357 - RNA, 20 nt, Artificial Sequence
  LRRK2 RNA guide
augaaaacacaguccaaaaa

SEQ ID NO: 35358 - RNA, 20 nt, Artificial Sequence
  LRRK2 RNA guide
auuuuuggacuguguuuuca

SEQ ID NO: 35359 - RNA, 20 nt, Artificial Sequence
  LRRK2 RNA guide
cacaguccaaaaauaugauu

SEQ ID NO: 35360 - RNA, 20 nt, Artificial Sequence
  LRRK2 RNA guide
cauauuuuuggacuguguuu

SEQ ID NO: 35361 - RNA, 20 nt, Artificial Sequence
  LRRK2 RNA guide
cuuuaugaaaacacagucca

SEQ ID NO: 35362 - RNA, 20 nt, Artificial Sequence
  LRRK2 RNA guide
gaaaacacaguccaaaaaua

SEQ ID NO: 35363 - RNA, 20 nt, Artificial Sequence
  LRRK2 RNA guide
ggacuguguuuucauaaaga

SEQ ID NO: 35364 - RNA, 20 nt, Artificial Sequence
  LRRK2 RNA guide
uaugaaaacacaguccaaaa

SEQ ID NO: 35365 - RNA, 20 nt, Artificial Sequence
  LRRK2 RNA guide
uauuuuuggacuguguuuuc

SEQ ID NO: 35366 - RNA, 20 nt, Artificial Sequence
  LRRK2 RNA guide
ucauauuuuuggacuguguu

SEQ ID NO: 35367 - RNA, 20 nt, Artificial Sequence
  LRRK2 RNA guide
ucuuuaugaaaacacagucc

SEQ ID NO: 35368 - RNA, 20 nt, Artificial Sequence
  LRRK2 RNA guide
ugaaaacacaguccaaaaau

SEQ ID NO: 35369 - RNA, 20 nt, Artificial Sequence
  LRRK2 RNA guide
uggacuguguuuucauaaag

SEQ ID NO: 35370 - RNA, 20 nt, Artificial Sequence
  LRRK2 RNA guide
uuaugaaaacacaguccaaa

SEQ ID NO: 35371 - RNA, 20 nt, Artificial Sequence
  LRRK2 RNA guide
uucuuuaugaaaacacaguc

SEQ ID NO: 35372 - RNA, 20 nt, Artificial Sequence
  LRRK2 RNA guide
uuggacuguguuuucauaaa

SEQ ID NO: 35373 - RNA, 20 nt, Artificial Sequence
  LRRK2 RNA guide
uuuaugaaaacacaguccaa

SEQ ID NO: 35374 - RNA, 20 nt, Artificial Sequence
  LRRK2 RNA guide
uuuggacuguguuuucauaa

SEQ ID NO: 35375 - RNA, 20 nt, Artificial Sequence
  LRRK2 RNA guide
uuuuggacuguguuuucaua

SEQ ID NO: 35376 - RNA, 20 nt, Artificial Sequence
  LRRK2 RNA guide
uuuuuggacuguguuuucau

SEQ ID NO: 35377 - RNA, 21 nt, Artificial Sequence
  LRRK2 RNA guide
cuuuaugaaaacacaguccaa

SEQ ID NO: 35378 - RNA, 21 nt, Artificial Sequence
  LRRK2 RNA guide
ggacuguguuuucauaaagaa

SEQ ID NO: 35379 - RNA, 21 nt, Artificial Sequence
  LRRK2 RNA guide
ucuuuaugaaaacacagucca

SEQ ID NO: 35380 - RNA, 21 nt, Artificial Sequence
  LRRK2 RNA guide
uggacuguguuuucauaaaga

SEQ ID NO: 35381 - RNA, 21 nt, Artificial Sequence
  LRRK2 RNA guide
uucuuuaugaaaacacagucc

SEQ ID NO: 35382 - RNA, 21 nt, Artificial Sequence
  LRRK2 RNA guide
uuggacuguguuuucauaaag

SEQ ID NO: 35383 - RNA, 22 nt, Artificial Sequence
  LRRK2 RNA guide
cauauuuuuggacuguguuuuc

SEQ ID NO: 35384 - RNA, 22 nt, Artificial Sequence
  LRRK2 RNA guide
cuuuaugaaaacacaguccaaa

SEQ ID NO: 35385 - RNA, 22 nt, Artificial Sequence
  LRRK2 RNA guide
gaaaacacaguccaaaaauaug

SEQ ID NO: 35386 - RNA, 22 nt, Artificial Sequence
  LRRK2 RNA guide
ggacuguguuuucauaaagaaa

SEQ ID NO: 35387 - RNA, 22 nt, Artificial Sequence
  LRRK2 RNA guide
ucuuuaugaaaacacaguccaa

SEQ ID NO: 35388 - RNA, 22 nt, Artificial Sequence
  LRRK2 RNA guide
uggacuguguuuucauaaagaa

SEQ ID NO: 35389 - RNA, 22 nt, Artificial Sequence
  LRRK2 RNA guide
uucuuuaugaaaacacagucca

SEQ ID NO: 35390 - RNA, 22 nt, Artificial Sequence
  LRRK2 RNA guide
uuggacuguguuuucauaaaga

SEQ ID NO: 35391 - RNA, 22 nt, Artificial Sequence
  LRRK2 RNA guide
uuucuuuaugaaaacacagucc

SEQ ID NO: 35392 - RNA, 22 nt, Artificial Sequence
  LRRK2 RNA guide
uuuggacuguguuuucauaaag

SEQ ID NO: 35393 - RNA, 20 nt, Artificial Sequence
  LRRK2 RNA guide
aaaguuuaaacccuuguaag

SEQ ID NO: 35394 - RNA, 20 nt, Artificial Sequence
  LRRK2 RNA guide
aaguuuaaacccuuguaaga

SEQ ID NO: 35395 - RNA, 20 nt, Artificial Sequence
  LRRK2 RNA guide
aaugcaucuuacaaggguuu

SEQ ID NO: 35396 - RNA, 20 nt, Artificial Sequence
  LRRK2 RNA guide
aguuuaaacccuuguaagau

SEQ ID NO: 35397 - RNA, 20 nt, Artificial Sequence
  LRRK2 RNA guide
aucuuacaaggguuuaaacu

SEQ ID NO: 35398 - RNA, 20 nt, Artificial Sequence
  LRRK2 RNA guide
augcaucuuacaaggguuua

SEQ ID NO: 35399 - RNA, 20 nt, Artificial Sequence
  LRRK2 RNA guide
caucuuacaaggguuuaaac

SEQ ID NO: 35400 - RNA, 20 nt, Artificial Sequence
  LRRK2 RNA guide
cuuacaaggguuuaaacuuu

SEQ ID NO: 35401 - RNA, 20 nt, Artificial Sequence
  LRRK2 RNA guide
gcaucuuacaaggguuuaaa

SEQ ID NO: 35402 - RNA, 20 nt, Artificial Sequence
  LRRK2 RNA guide
uaaugcaucuuacaaggguu

SEQ ID NO: 35403 - RNA, 20 nt, Artificial Sequence
  LRRK2 RNA guide
ucuuacaaggguuuaaacuu

SEQ ID NO: 35404 - RNA, 20 nt, Artificial Sequence
  LRRK2 RNA guide
ugcaucuuacaaggguuuaa

SEQ ID NO: 35405 - RNA, 21 nt, Artificial Sequence
  LRRK2 RNA guide
aaugcaucuuacaaggguuua

SEQ ID NO: 35406 - RNA, 21 nt, Artificial Sequence
  LRRK2 RNA guide
aguuuaaacccuuguaagaug

SEQ ID NO: 35407 - RNA, 21 nt, Artificial Sequence
  LRRK2 RNA guide
auaaugcaucuuacaaggguu

SEQ ID NO: 35408 - RNA, 21 nt, Artificial Sequence
  LRRK2 RNA guide
augcaucuuacaaggguuuaa

SEQ ID NO: 35409 - RNA, 21 nt, Artificial Sequence
  LRRK2 RNA guide
caucuuacaaggguuuaaacu

SEQ ID NO: 35410 - RNA, 21 nt, Artificial Sequence
  LRRK2 RNA guide
gcaucuuacaaggguuuaaac

SEQ ID NO: 35411 - RNA, 21 nt, Artificial Sequence
  LRRK2 RNA guide
uaaugcaucuuacaaggguuu

SEQ ID NO: 35412 - RNA, 21 nt, Artificial Sequence
  LRRK2 RNA guide
ugcaucuuacaaggguuuaaa

SEQ ID NO: 35413 - RNA, 22 nt, Artificial Sequence
  LRRK2 RNA guide
aaguuuaaacccuuguaagaug

SEQ ID NO: 35414 - RNA, 22 nt, Artificial Sequence
  LRRK2 RNA guide
aauaaugcaucuuacaaggguu

SEQ ID NO: 35415 - RNA, 22 nt, Artificial Sequence
  LRRK2 RNA guide
aaugcaucuuacaaggguuuaa

SEQ ID NO: 35416 - RNA, 22 nt, Artificial Sequence
  LRRK2 RNA guide
aguuuaaacccuuguaagaugc

SEQ ID NO: 35417 - RNA, 22 nt, Artificial Sequence
  LRRK2 RNA guide
auaaugcaucuuacaaggguuu

SEQ ID NO: 35418 - RNA, 22 nt, Artificial Sequence
  LRRK2 RNA guide
augcaucuuacaaggguuuaaa

SEQ ID NO: 35419 - RNA, 22 nt, Artificial Sequence
  LRRK2 RNA guide
caucuuacaaggguuuaaacuu

SEQ ID NO: 35420 - RNA, 22 nt, Artificial Sequence
  LRRK2 RNA guide
gcaucuuacaaggguuuaaacu

SEQ ID NO: 35421 - RNA, 22 nt, Artificial Sequence
  LRRK2 RNA guide
uaaugcaucuuacaaggguuua

SEQ ID NO: 35422 - RNA, 22 nt, Artificial Sequence
  LRRK2 RNA guide
ugcaucuuacaaggguuuaaac

SEQ ID NO: 35423 - RNA, 20 nt, Artificial Sequence
  LRRK2 RNA guide
caucuuacaaggguuuaaau

SEQ ID NO: 35424 - RNA, 21 nt, Artificial Sequence
  LRRK2 RNA guide
gcaucuuacaaggguuuaaau

SEQ ID NO: 35425 - RNA, 22 nt, Artificial Sequence
  LRRK2 RNA guide
aauuuaaacccuuguaagaugc

SEQ ID NO: 35426 - RNA, 22 nt, Artificial Sequence
  LRRK2 RNA guide
gcaucuuacaaggguuuaaauu

SEQ ID NO: 35427 - RNA, 22 nt, Artificial Sequence
  LRRK2 RNA guide
ugcaucuuacaaggguuuaaau

SEQ ID NO: 35428 - RNA, 22 nt, Artificial Sequence
  LRRK2 RNA guide
ccugauaaauuuaacuugguca

SEQ ID NO: 35429 - RNA, 20 nt, Artificial Sequence
  LRRK2 RNA guide
aaaucuaguaaaugaccaag

SEQ ID NO: 35430 - RNA, 20 nt, Artificial Sequence
  LRRK2 RNA guide
aacuuggucauuuacuagau

SEQ ID NO: 35431 - RNA, 20 nt, Artificial Sequence
  LRRK2 RNA guide
aaucuaguaaaugaccaagu

SEQ ID NO: 35432 - RNA, 20 nt, Artificial Sequence
  LRRK2 RNA guide
acuuggucauuuacuagauu

SEQ ID NO: 35433 - RNA, 20 nt, Artificial Sequence
  LRRK2 RNA guide
aucuaguaaaugaccaaguu

SEQ ID NO: 35434 - RNA, 20 nt, Artificial Sequence
  LRRK2 RNA guide
cuaguaaaugaccaaguuaa

SEQ ID NO: 35435 - RNA, 20 nt, Artificial Sequence
  LRRK2 RNA guide
cuuggucauuuacuagauuu

SEQ ID NO: 35436 - RNA, 20 nt, Artificial Sequence
  LRRK2 RNA guide
uaacuuggucauuuacuaga

SEQ ID NO: 35437 - RNA, 20 nt, Artificial Sequence
  LRRK2 RNA guide
ucuaguaaaugaccaaguua

SEQ ID NO: 35438 - RNA, 20 nt, Artificial Sequence
  LRRK2 RNA guide
uuaacuuggucauuuacuag

SEQ ID NO: 35439 - RNA, 20 nt, Artificial Sequence
  LRRK2 RNA guide
aacgccagaguagucuugug

SEQ ID NO: 35440 - RNA, 20 nt, Artificial Sequence
  LRRK2 RNA guide
acaagacuacucuggcguuc

SEQ ID NO: 35441 - RNA, 20 nt, Artificial Sequence
  LRRK2 RNA guide
acgccagaguagucuugugg

SEQ ID NO: 35442 - RNA, 20 nt, Artificial Sequence
  LRRK2 RNA guide
agaguagucuugugggaaag

SEQ ID NO: 35443 - RNA, 20 nt, Artificial Sequence
  LRRK2 RNA guide
aggauucaugcuuucccaca

SEQ ID NO: 35444 - RNA, 20 nt, Artificial Sequence
  LRRK2 RNA guide
aguagucuugugggaaagca

SEQ ID NO: 35445 - RNA, 20 nt, Artificial Sequence
  LRRK2 RNA guide
agucuugugggaaagcauga

SEQ ID NO: 35446 - RNA, 20 nt, Artificial Sequence
  LRRK2 RNA guide
aguugaacgccagaguaguc

SEQ ID NO: 35447 - RNA, 20 nt, Artificial Sequence
  LRRK2 RNA guide
augcuuucccacaagacuac

SEQ ID NO: 35448 - RNA, 20 nt, Artificial Sequence
  LRRK2 RNA guide
auucaugcuuucccacaaga

SEQ ID NO: 35449 - RNA, 20 nt, Artificial Sequence
  LRRK2 RNA guide
caagacuacucuggcguuca

SEQ ID NO: 35450 - RNA, 20 nt, Artificial Sequence
  LRRK2 RNA guide
cacaagacuacucuggcguu

SEQ ID NO: 35451 - RNA, 20 nt, Artificial Sequence
  LRRK2 RNA guide
cagaguagucuugugggaaa

SEQ ID NO: 35452 - RNA, 20 nt, Artificial Sequence
  LRRK2 RNA guide
caggauucaugcuuucccac

SEQ ID NO: 35453 - RNA, 20 nt, Artificial Sequence
  LRRK2 RNA guide
caugcuuucccacaagacua

SEQ ID NO: 35454 - RNA, 20 nt, Artificial Sequence
  LRRK2 RNA guide
ccacaagacuacucuggcgu

SEQ ID NO: 35455 - RNA, 20 nt, Artificial Sequence
  LRRK2 RNA guide
ccagaguagucuugugggaa

SEQ ID NO: 35456 - RNA, 20 nt, Artificial Sequence
  LRRK2 RNA guide
ccaggauucaugcuuuccca

SEQ ID NO: 35457 - RNA, 20 nt, Artificial Sequence
  LRRK2 RNA guide
cccacaagacuacucuggcg

SEQ ID NO: 35458 - RNA, 20 nt, Artificial Sequence
  LRRK2 RNA guide
cgccagaguagucuuguggg

SEQ ID NO: 35459 - RNA, 20 nt, Artificial Sequence
  LRRK2 RNA guide
cgccaggauucaugcuuucc

SEQ ID NO: 35460 - RNA, 20 nt, Artificial Sequence
  LRRK2 RNA guide
cuuucccacaagacuacucu

SEQ ID NO: 35461 - RNA, 20 nt, Artificial Sequence
  LRRK2 RNA guide
gaacgccagaguagucuugu

SEQ ID NO: 35462 - RNA, 20 nt, Artificial Sequence
  LRRK2 RNA guide
gaguagucuugugggaaagc

SEQ ID NO: 35463 - RNA, 20 nt, Artificial Sequence
  LRRK2 RNA guide
gaguugaacgccagaguagu

SEQ ID NO: 35464 - RNA, 20 nt, Artificial Sequence
  LRRK2 RNA guide
gauucaugcuuucccacaag

SEQ ID NO: 35465 - RNA, 20 nt, Artificial Sequence
  LRRK2 RNA guide
gccagaguagucuuguggga

SEQ ID NO: 35466 - RNA, 20 nt, Artificial Sequence
  LRRK2 RNA guide
gccaggauucaugcuuuccc

SEQ ID NO: 35467 - RNA, 20 nt, Artificial Sequence
  LRRK2 RNA guide
gcgccaggauucaugcuuuc

SEQ ID NO: 35468 - RNA, 20 nt, Artificial Sequence
  LRRK2 RNA guide
gcuuucccacaagacuacuc

SEQ ID NO: 35469 - RNA, 20 nt, Artificial Sequence
  LRRK2 RNA guide
ggauucaugcuuucccacaa

SEQ ID NO: 35470 - RNA, 20 nt, Artificial Sequence
  LRRK2 RNA guide
guagucuugugggaaagcau

SEQ ID NO: 35471 - RNA, 20 nt, Artificial Sequence
  LRRK2 RNA guide
gucuugugggaaagcaugaa

SEQ ID NO: 35472 - RNA, 20 nt, Artificial Sequence
  LRRK2 RNA guide
gugaguugaacgccagagua

SEQ ID NO: 35473 - RNA, 20 nt, Artificial Sequence
  LRRK2 RNA guide
guugaacgccagaguagucu

SEQ ID NO: 35474 - RNA, 20 nt, Artificial Sequence
  LRRK2 RNA guide
uagucuugugggaaagcaug

SEQ ID NO: 35475 - RNA, 20 nt, Artificial Sequence
  LRRK2 RNA guide
ucaugcuuucccacaagacu

SEQ ID NO: 35476 - RNA, 20 nt, Artificial Sequence
  LRRK2 RNA guide
ucccacaagacuacucuggc

SEQ ID NO: 35477 - RNA, 20 nt, Artificial Sequence
  LRRK2 RNA guide
ucuugugggaaagcaugaau

SEQ ID NO: 35478 - RNA, 20 nt, Artificial Sequence
  LRRK2 RNA guide
ugaacgccagaguagucuug

SEQ ID NO: 35479 - RNA, 20 nt, Artificial Sequence
  LRRK2 RNA guide
ugaguugaacgccagaguag

SEQ ID NO: 35480 - RNA, 20 nt, Artificial Sequence
  LRRK2 RNA guide
ugcuuucccacaagacuacu

SEQ ID NO: 35481 - RNA, 20 nt, Artificial Sequence
  LRRK2 RNA guide
uucaugcuuucccacaagac

SEQ ID NO: 35482 - RNA, 20 nt, Artificial Sequence
  LRRK2 RNA guide
uucccacaagacuacucugg

SEQ ID NO: 35483 - RNA, 20 nt, Artificial Sequence
  LRRK2 RNA guide
uugaacgccagaguagucuu

SEQ ID NO: 35484 - RNA, 20 nt, Artificial Sequence
  LRRK2 RNA guide
uugugggaaagcaugaaucc

SEQ ID NO: 35485 - RNA, 20 nt, Artificial Sequence
  LRRK2 RNA guide
uuucccacaagacuacucug

SEQ ID NO: 35486 - RNA, 21 nt, Artificial Sequence
  LRRK2 RNA guide
aacgccagaguagucuugugg

SEQ ID NO: 35487 - RNA, 21 nt, Artificial Sequence
  LRRK2 RNA guide
acaagacuacucuggcguuca

SEQ ID NO: 35488 - RNA, 21 nt, Artificial Sequence
  LRRK2 RNA guide
acgccagaguagucuuguggg

SEQ ID NO: 35489 - RNA, 21 nt, Artificial Sequence
  LRRK2 RNA guide
agaguagucuugugggaaagc

SEQ ID NO: 35490 - RNA, 21 nt, Artificial Sequence
  LRRK2 RNA guide
agcgccaggauucaugcuuuc

SEQ ID NO: 35491 - RNA, 21 nt, Artificial Sequence
  LRRK2 RNA guide
aggauucaugcuuucccacaa

SEQ ID NO: 35492 - RNA, 21 nt, Artificial Sequence
  LRRK2 RNA guide
aguagucuugugggaaagcau

SEQ ID NO: 35493 - RNA, 21 nt, Artificial Sequence
  LRRK2 RNA guide
agucuugugggaaagcaugaa

SEQ ID NO: 35494 - RNA, 21 nt, Artificial Sequence
  LRRK2 RNA guide
aguugaacgccagaguagucu

SEQ ID NO: 35495 - RNA, 21 nt, Artificial Sequence
  LRRK2 RNA guide
augcuuucccacaagacuacu

SEQ ID NO: 35496 - RNA, 21 nt, Artificial Sequence
  LRRK2 RNA guide
auucaugcuuucccacaagac

SEQ ID NO: 35497 - RNA, 21 nt, Artificial Sequence
  LRRK2 RNA guide
caagacuacucuggcguucaa

SEQ ID NO: 35498 - RNA, 21 nt, Artificial Sequence
  LRRK2 RNA guide
cacaagacuacucuggcguuc

SEQ ID NO: 35499 - RNA, 21 nt, Artificial Sequence
  LRRK2 RNA guide
cagaguagucuugugggaaag

SEQ ID NO: 35500 - RNA, 21 nt, Artificial Sequence
  LRRK2 RNA guide
caggauucaugcuuucccaca

SEQ ID NO: 35501 - RNA, 21 nt, Artificial Sequence
  LRRK2 RNA guide
caugcuuucccacaagacuac

SEQ ID NO: 35502 - RNA, 21 nt, Artificial Sequence
  LRRK2 RNA guide
ccacaagacuacucuggcguu

SEQ ID NO: 35503 - RNA, 21 nt, Artificial Sequence
  LRRK2 RNA guide
ccagaguagucuugugggaaa

SEQ ID NO: 35504 - RNA, 21 nt, Artificial Sequence
  LRRK2 RNA guide
ccaggauucaugcuuucccac

SEQ ID NO: 35505 - RNA, 21 nt, Artificial Sequence
  LRRK2 RNA guide
cccacaagacuacucuggcgu

SEQ ID NO: 35506 - RNA, 21 nt, Artificial Sequence
  LRRK2 RNA guide
cgccagaguagucuuguggga

SEQ ID NO: 35507 - RNA, 21 nt, Artificial Sequence
  LRRK2 RNA guide
cgccaggauucaugcuuuccc

SEQ ID NO: 35508 - RNA, 21 nt, Artificial Sequence
  LRRK2 RNA guide
cuugugggaaagcaugaaucc

SEQ ID NO: 35509 - RNA, 21 nt, Artificial Sequence
  LRRK2 RNA guide
cuuucccacaagacuacucug

SEQ ID NO: 35510 - RNA, 21 nt, Artificial Sequence
  LRRK2 RNA guide
gaacgccagaguagucuugug

SEQ ID NO: 35511 - RNA, 21 nt, Artificial Sequence
  LRRK2 RNA guide
gaguagucuugugggaaagca

SEQ ID NO: 35512 - RNA, 21 nt, Artificial Sequence
  LRRK2 RNA guide
gaguugaacgccagaguaguc

SEQ ID NO: 35513 - RNA, 21 nt, Artificial Sequence
  LRRK2 RNA guide
gauucaugcuuucccacaaga

SEQ ID NO: 35514 - RNA, 21 nt, Artificial Sequence
  LRRK2 RNA guide
gccagaguagucuugugggaa

SEQ ID NO: 35515 - RNA, 21 nt, Artificial Sequence
  LRRK2 RNA guide
gccaggauucaugcuuuccca

SEQ ID NO: 35516 - RNA, 21 nt, Artificial Sequence
  LRRK2 RNA guide
gcgccaggauucaugcuuucc

SEQ ID NO: 35517 - RNA, 21 nt, Artificial Sequence
  LRRK2 RNA guide
gcuuucccacaagacuacucu

SEQ ID NO: 35518 - RNA, 21 nt, Artificial Sequence
  LRRK2 RNA guide
ggauucaugcuuucccacaag

SEQ ID NO: 35519 - RNA, 21 nt, Artificial Sequence
  LRRK2 RNA guide
guagucuugugggaaagcaug

SEQ ID NO: 35520 - RNA, 21 nt, Artificial Sequence
  LRRK2 RNA guide
gucuugugggaaagcaugaau

SEQ ID NO: 35521 - RNA, 21 nt, Artificial Sequence
  LRRK2 RNA guide
gugaguugaacgccagaguag

SEQ ID NO: 35522 - RNA, 21 nt, Artificial Sequence
  LRRK2 RNA guide
guugaacgccagaguagucuu

SEQ ID NO: 35523 - RNA, 21 nt, Artificial Sequence
  LRRK2 RNA guide
uagucuugugggaaagcauga

SEQ ID NO: 35524 - RNA, 21 nt, Artificial Sequence
  LRRK2 RNA guide
ucaugcuuucccacaagacua

SEQ ID NO: 35525 - RNA, 21 nt, Artificial Sequence
  LRRK2 RNA guide
ucccacaagacuacucuggcg

SEQ ID NO: 35526 - RNA, 21 nt, Artificial Sequence
  LRRK2 RNA guide
ucuugugggaaagcaugaauc

SEQ ID NO: 35527 - RNA, 21 nt, Artificial Sequence
  LRRK2 RNA guide
ugaacgccagaguagucuugu

SEQ ID NO: 35528 - RNA, 21 nt, Artificial Sequence
  LRRK2 RNA guide
ugaguugaacgccagaguagu

SEQ ID NO: 35529 - RNA, 21 nt, Artificial Sequence
  LRRK2 RNA guide
ugcuuucccacaagacuacuc

SEQ ID NO: 35530 - RNA, 21 nt, Artificial Sequence
  LRRK2 RNA guide
ugugaguugaacgccagagua

SEQ ID NO: 35531 - RNA, 21 nt, Artificial Sequence
  LRRK2 RNA guide
uucaugcuuucccacaagacu

SEQ ID NO: 35532 - RNA, 21 nt, Artificial Sequence
  LRRK2 RNA guide
uucccacaagacuacucuggc

SEQ ID NO: 35533 - RNA, 21 nt, Artificial Sequence
  LRRK2 RNA guide
uugaacgccagaguagucuug

SEQ ID NO: 35534 - RNA, 21 nt, Artificial Sequence
  LRRK2 RNA guide
uugugggaaagcaugaauccu

SEQ ID NO: 35535 - RNA, 21 nt, Artificial Sequence
  LRRK2 RNA guide
uuucccacaagacuacucugg

SEQ ID NO: 35536 - RNA, 22 nt, Artificial Sequence
  LRRK2 RNA guide
aacgccagaguagucuuguggg

SEQ ID NO: 35537 - RNA, 22 nt, Artificial Sequence
  LRRK2 RNA guide
acaagacuacucuggcguucaa

SEQ ID NO: 35538 - RNA, 22 nt, Artificial Sequence
  LRRK2 RNA guide
acgccagaguagucuuguggga

SEQ ID NO: 35539 - RNA, 22 nt, Artificial Sequence
  LRRK2 RNA guide
agaguagucuugugggaaagca

SEQ ID NO: 35540 - RNA, 22 nt, Artificial Sequence
  LRRK2 RNA guide
agcgccaggauucaugcuuucc

SEQ ID NO: 35541 - RNA, 22 nt, Artificial Sequence
  LRRK2 RNA guide
aggauucaugcuuucccacaag

SEQ ID NO: 35542 - RNA, 22 nt, Artificial Sequence
  LRRK2 RNA guide
aguagucuugugggaaagcaug

SEQ ID NO: 35543 - RNA, 22 nt, Artificial Sequence
  LRRK2 RNA guide
agucuugugggaaagcaugaau

SEQ ID NO: 35544 - RNA, 22 nt, Artificial Sequence
  LRRK2 RNA guide
aguugaacgccagaguagucuu

SEQ ID NO: 35545 - RNA, 22 nt, Artificial Sequence
  LRRK2 RNA guide
augcuuucccacaagacuacuc

SEQ ID NO: 35546 - RNA, 22 nt, Artificial Sequence
  LRRK2 RNA guide
auucaugcuuucccacaagacu

SEQ ID NO: 35547 - RNA, 22 nt, Artificial Sequence
  LRRK2 RNA guide
caagacuacucuggcguucaac

SEQ ID NO: 35548 - RNA, 22 nt, Artificial Sequence
  LRRK2 RNA guide
cacaagacuacucuggcguuca

SEQ ID NO: 35549 - RNA, 22 nt, Artificial Sequence
  LRRK2 RNA guide
cagaguagucuugugggaaagc

SEQ ID NO: 35550 - RNA, 22 nt, Artificial Sequence
  LRRK2 RNA guide
cagcgccaggauucaugcuuuc

SEQ ID NO: 35551 - RNA, 22 nt, Artificial Sequence
  LRRK2 RNA guide
caggauucaugcuuucccacaa

SEQ ID NO: 35552 - RNA, 22 nt, Artificial Sequence
  LRRK2 RNA guide
caugcuuucccacaagacuacu

SEQ ID NO: 35553 - RNA, 22 nt, Artificial Sequence
  LRRK2 RNA guide
ccacaagacuacucuggcguuc

SEQ ID NO: 35554 - RNA, 22 nt, Artificial Sequence
  LRRK2 RNA guide
ccagaguagucuugugggaaag

SEQ ID NO: 35555 - RNA, 22 nt, Artificial Sequence
  LRRK2 RNA guide
ccaggauucaugcuuucccaca

SEQ ID NO: 35556 - RNA, 22 nt, Artificial Sequence
  LRRK2 RNA guide
cccacaagacuacucuggcguu

SEQ ID NO: 35557 - RNA, 22 nt, Artificial Sequence
  LRRK2 RNA guide
cgccagaguagucuugugggaa

SEQ ID NO: 35558 - RNA, 22 nt, Artificial Sequence
  LRRK2 RNA guide
cgccaggauucaugcuuuccca

SEQ ID NO: 35559 - RNA, 22 nt, Artificial Sequence
  LRRK2 RNA guide
cugugaguugaacgccagagua

SEQ ID NO: 35560 - RNA, 22 nt, Artificial Sequence
  LRRK2 RNA guide
cuugugggaaagcaugaauccu

SEQ ID NO: 35561 - RNA, 22 nt, Artificial Sequence
  LRRK2 RNA guide
cuuucccacaagacuacucugg

SEQ ID NO: 35562 - RNA, 22 nt, Artificial Sequence
  LRRK2 RNA guide
gaacgccagaguagucuugugg

SEQ ID NO: 35563 - RNA, 22 nt, Artificial Sequence
  LRRK2 RNA guide
gaguagucuugugggaaagcau

SEQ ID NO: 35564 - RNA, 22 nt, Artificial Sequence
  LRRK2 RNA guide
gaguugaacgccagaguagucu

SEQ ID NO: 35565 - RNA, 22 nt, Artificial Sequence
  LRRK2 RNA guide
gauucaugcuuucccacaagac

SEQ ID NO: 35566 - RNA, 22 nt, Artificial Sequence
  LRRK2 RNA guide
gccagaguagucuugugggaaa

SEQ ID NO: 35567 - RNA, 22 nt, Artificial Sequence
  LRRK2 RNA guide
gccaggauucaugcuuucccac

SEQ ID NO: 35568 - RNA, 22 nt, Artificial Sequence
  LRRK2 RNA guide
gcgccaggauucaugcuuuccc

SEQ ID NO: 35569 - RNA, 22 nt, Artificial Sequence
  LRRK2 RNA guide
gcuuucccacaagacuacucug

SEQ ID NO: 35570 - RNA, 22 nt, Artificial Sequence
  LRRK2 RNA guide
ggauucaugcuuucccacaaga

SEQ ID NO: 35571 - RNA, 22 nt, Artificial Sequence
  LRRK2 RNA guide
guagucuugugggaaagcauga

SEQ ID NO: 35572 - RNA, 22 nt, Artificial Sequence
  LRRK2 RNA guide
gucuugugggaaagcaugaauc

SEQ ID NO: 35573 - RNA, 22 nt, Artificial Sequence
  LRRK2 RNA guide
gugaguugaacgccagaguagu

SEQ ID NO: 35574 - RNA, 22 nt, Artificial Sequence
  LRRK2 RNA guide
guugaacgccagaguagucuug

SEQ ID NO: 35575 - RNA, 22 nt, Artificial Sequence
  LRRK2 RNA guide
uagucuugugggaaagcaugaa

SEQ ID NO: 35576 - RNA, 22 nt, Artificial Sequence
  LRRK2 RNA guide
ucaugcuuucccacaagacuac

SEQ ID NO: 35577 - RNA, 22 nt, Artificial Sequence
  LRRK2 RNA guide
ucccacaagacuacucuggcgu

SEQ ID NO: 35578 - RNA, 22 nt, Artificial Sequence
  LRRK2 RNA guide
ucuugugggaaagcaugaaucc

SEQ ID NO: 35579 - RNA, 22 nt, Artificial Sequence
  LRRK2 RNA guide
ugaacgccagaguagucuugug

SEQ ID NO: 35580 - RNA, 22 nt, Artificial Sequence
  LRRK2 RNA guide
ugaguugaacgccagaguaguc

SEQ ID NO: 35581 - RNA, 22 nt, Artificial Sequence
  LRRK2 RNA guide
ugcuuucccacaagacuacucu

SEQ ID NO: 35582 - RNA, 22 nt, Artificial Sequence
  LRRK2 RNA guide
ugugaguugaacgccagaguag

SEQ ID NO: 35583 - RNA, 22 nt, Artificial Sequence
  LRRK2 RNA guide
uucaugcuuucccacaagacua

SEQ ID NO: 35584 - RNA, 22 nt, Artificial Sequence
  LRRK2 RNA guide
uucccacaagacuacucuggcg

SEQ ID NO: 35585 - RNA, 22 nt, Artificial Sequence
  LRRK2 RNA guide
uugaacgccagaguagucuugu

SEQ ID NO: 35586 - RNA, 22 nt, Artificial Sequence
  LRRK2 RNA guide
uugugggaaagcaugaauccug

SEQ ID NO: 35587 - RNA, 22 nt, Artificial Sequence
  LRRK2 RNA guide
uuucccacaagacuacucuggc

SEQ ID NO: 35588 - RNA, 20 nt, Artificial Sequence
  LRRK2 RNA guide
aacgccagaguagucucgug

SEQ ID NO: 35589 - RNA, 20 nt, Artificial Sequence
  LRRK2 RNA guide
acgagacuacucuggcguuc

SEQ ID NO: 35590 - RNA, 20 nt, Artificial Sequence
  LRRK2 RNA guide
acgccagaguagucucgugg

SEQ ID NO: 35591 - RNA, 20 nt, Artificial Sequence
  LRRK2 RNA guide
agaguagucucgugggaaag

SEQ ID NO: 35592 - RNA, 20 nt, Artificial Sequence
  LRRK2 RNA guide
aggauucaugcuuucccacg

SEQ ID NO: 35593 - RNA, 20 nt, Artificial Sequence
  LRRK2 RNA guide
aguagucucgugggaaagca

SEQ ID NO: 35594 - RNA, 20 nt, Artificial Sequence
  LRRK2 RNA guide
agucucgugggaaagcauga

SEQ ID NO: 35595 - RNA, 20 nt, Artificial Sequence
  LRRK2 RNA guide
augcuuucccacgagacuac

SEQ ID NO: 35596 - RNA, 20 nt, Artificial Sequence
  LRRK2 RNA guide
auucaugcuuucccacgaga

SEQ ID NO: 35597 - RNA, 20 nt, Artificial Sequence
  LRRK2 RNA guide
cacgagacuacucuggcguu

SEQ ID NO: 35598 - RNA, 20 nt, Artificial Sequence
  LRRK2 RNA guide
cagaguagucucgugggaaa

SEQ ID NO: 35599 - RNA, 20 nt, Artificial Sequence
  LRRK2 RNA guide
caugcuuucccacgagacua

SEQ ID NO: 35600 - RNA, 20 nt, Artificial Sequence
  LRRK2 RNA guide
ccacgagacuacucuggcgu

SEQ ID NO: 35601 - RNA, 20 nt, Artificial Sequence
  LRRK2 RNA guide
ccagaguagucucgugggaa

SEQ ID NO: 35602 - RNA, 20 nt, Artificial Sequence
  LRRK2 RNA guide
cccacgagacuacucuggcg

SEQ ID NO: 35603 - RNA, 20 nt, Artificial Sequence
  LRRK2 RNA guide
cgagacuacucuggcguuca

SEQ ID NO: 35604 - RNA, 20 nt, Artificial Sequence
  LRRK2 RNA guide
cgccagaguagucucguggg

SEQ ID NO: 35605 - RNA, 20 nt, Artificial Sequence
  LRRK2 RNA guide
cucgugggaaagcaugaauc

SEQ ID NO: 35606 - RNA, 20 nt, Artificial Sequence
  LRRK2 RNA guide
cuuucccacgagacuacucu

SEQ ID NO: 35607 - RNA, 20 nt, Artificial Sequence
  LRRK2 RNA guide
gaacgccagaguagucucgu

SEQ ID NO: 35608 - RNA, 20 nt, Artificial Sequence
  LRRK2 RNA guide
gaguagucucgugggaaagc

SEQ ID NO: 35609 - RNA, 20 nt, Artificial Sequence
  LRRK2 RNA guide
gauucaugcuuucccacgag

SEQ ID NO: 35610 - RNA, 20 nt, Artificial Sequence
  LRRK2 RNA guide
gccagaguagucucguggga

SEQ ID NO: 35611 - RNA, 20 nt, Artificial Sequence
  LRRK2 RNA guide
gcuuucccacgagacuacuc

SEQ ID NO: 35612 - RNA, 20 nt, Artificial Sequence
  LRRK2 RNA guide
ggauucaugcuuucccacga

SEQ ID NO: 35613 - RNA, 20 nt, Artificial Sequence
  LRRK2 RNA guide
guagucucgugggaaagcau

SEQ ID NO: 35614 - RNA, 20 nt, Artificial Sequence
  LRRK2 RNA guide
gucucgugggaaagcaugaa

SEQ ID NO: 35615 - RNA, 20 nt, Artificial Sequence
  LRRK2 RNA guide
uagucucgugggaaagcaug

SEQ ID NO: 35616 - RNA, 20 nt, Artificial Sequence
  LRRK2 RNA guide
ucaugcuuucccacgagacu

SEQ ID NO: 35617 - RNA, 20 nt, Artificial Sequence
  LRRK2 RNA guide
ucccacgagacuacucuggc

SEQ ID NO: 35618 - RNA, 20 nt, Artificial Sequence
  LRRK2 RNA guide
ucgugggaaagcaugaaucc

SEQ ID NO: 35619 - RNA, 20 nt, Artificial Sequence
  LRRK2 RNA guide
ucucgugggaaagcaugaau

SEQ ID NO: 35620 - RNA, 20 nt, Artificial Sequence
  LRRK2 RNA guide
ugaacgccagaguagucucg

SEQ ID NO: 35621 - RNA, 20 nt, Artificial Sequence
  LRRK2 RNA guide
ugcuuucccacgagacuacu

SEQ ID NO: 35622 - RNA, 20 nt, Artificial Sequence
  LRRK2 RNA guide
uucaugcuuucccacgagac

SEQ ID NO: 35623 - RNA, 20 nt, Artificial Sequence
  LRRK2 RNA guide
uucccacgagacuacucugg

SEQ ID NO: 35624 - RNA, 20 nt, Artificial Sequence
  LRRK2 RNA guide
uugaacgccagaguagucuc

SEQ ID NO: 35625 - RNA, 20 nt, Artificial Sequence
  LRRK2 RNA guide
uuucccacgagacuacucug

SEQ ID NO: 35626 - RNA, 21 nt, Artificial Sequence
  LRRK2 RNA guide
aacgccagaguagucucgugg

SEQ ID NO: 35627 - RNA, 21 nt, Artificial Sequence
  LRRK2 RNA guide
acgagacuacucuggcguuca

SEQ ID NO: 35628 - RNA, 21 nt, Artificial Sequence
  LRRK2 RNA guide
acgccagaguagucucguggg

SEQ ID NO: 35629 - RNA, 21 nt, Artificial Sequence
  LRRK2 RNA guide
agaguagucucgugggaaagc

SEQ ID NO: 35630 - RNA, 21 nt, Artificial Sequence
  LRRK2 RNA guide
aggauucaugcuuucccacga

SEQ ID NO: 35631 - RNA, 21 nt, Artificial Sequence
  LRRK2 RNA guide
aguagucucgugggaaagcau

SEQ ID NO: 35632 - RNA, 21 nt, Artificial Sequence
  LRRK2 RNA guide
agucucgugggaaagcaugaa

SEQ ID NO: 35633 - RNA, 21 nt, Artificial Sequence
  LRRK2 RNA guide
augcuuucccacgagacuacu

SEQ ID NO: 35634 - RNA, 21 nt, Artificial Sequence
  LRRK2 RNA guide
auucaugcuuucccacgagac

SEQ ID NO: 35635 - RNA, 21 nt, Artificial Sequence
  LRRK2 RNA guide
cacgagacuacucuggcguuc

SEQ ID NO: 35636 - RNA, 21 nt, Artificial Sequence
  LRRK2 RNA guide
cagaguagucucgugggaaag

SEQ ID NO: 35637 - RNA, 21 nt, Artificial Sequence
  LRRK2 RNA guide
caggauucaugcuuucccacg

SEQ ID NO: 35638 - RNA, 21 nt, Artificial Sequence
  LRRK2 RNA guide
caugcuuucccacgagacuac

SEQ ID NO: 35639 - RNA, 21 nt, Artificial Sequence
  LRRK2 RNA guide
ccacgagacuacucuggcguu

SEQ ID NO: 35640 - RNA, 21 nt, Artificial Sequence
  LRRK2 RNA guide
ccagaguagucucgugggaaa

SEQ ID NO: 35641 - RNA, 21 nt, Artificial Sequence
  LRRK2 RNA guide
cccacgagacuacucuggcgu

SEQ ID NO: 35642 - RNA, 21 nt, Artificial Sequence
  LRRK2 RNA guide
cgagacuacucuggcguucaa

SEQ ID NO: 35643 - RNA, 21 nt, Artificial Sequence
  LRRK2 RNA guide
cgccagaguagucucguggga

SEQ ID NO: 35644 - RNA, 21 nt, Artificial Sequence
  LRRK2 RNA guide
cucgugggaaagcaugaaucc

SEQ ID NO: 35645 - RNA, 21 nt, Artificial Sequence
  LRRK2 RNA guide
cuuucccacgagacuacucug

SEQ ID NO: 35646 - RNA, 21 nt, Artificial Sequence
  LRRK2 RNA guide
gaacgccagaguagucucgug

SEQ ID NO: 35647 - RNA, 21 nt, Artificial Sequence
  LRRK2 RNA guide
gaguagucucgugggaaagca

SEQ ID NO: 35648 - RNA, 21 nt, Artificial Sequence
  LRRK2 RNA guide
gauucaugcuuucccacgaga

SEQ ID NO: 35649 - RNA, 21 nt, Artificial Sequence
  LRRK2 RNA guide
gccagaguagucucgugggaa

SEQ ID NO: 35650 - RNA, 21 nt, Artificial Sequence
  LRRK2 RNA guide
gcuuucccacgagacuacucu

SEQ ID NO: 35651 - RNA, 21 nt, Artificial Sequence
  LRRK2 RNA guide
ggauucaugcuuucccacgag

SEQ ID NO: 35652 - RNA, 21 nt, Artificial Sequence
  LRRK2 RNA guide
guagucucgugggaaagcaug

SEQ ID NO: 35653 - RNA, 21 nt, Artificial Sequence
  LRRK2 RNA guide
gucucgugggaaagcaugaau

SEQ ID NO: 35654 - RNA, 21 nt, Artificial Sequence
  LRRK2 RNA guide
guugaacgccagaguagucuc

SEQ ID NO: 35655 - RNA, 21 nt, Artificial Sequence
  LRRK2 RNA guide
uagucucgugggaaagcauga

SEQ ID NO: 35656 - RNA, 21 nt, Artificial Sequence
  LRRK2 RNA guide
ucaugcuuucccacgagacua

SEQ ID NO: 35657 - RNA, 21 nt, Artificial Sequence
  LRRK2 RNA guide
ucccacgagacuacucuggcg

SEQ ID NO: 35658 - RNA, 21 nt, Artificial Sequence
  LRRK2 RNA guide
ucgugggaaagcaugaauccu

SEQ ID NO: 35659 - RNA, 21 nt, Artificial Sequence
  LRRK2 RNA guide
ucucgugggaaagcaugaauc

SEQ ID NO: 35660 - RNA, 21 nt, Artificial Sequence
  LRRK2 RNA guide
ugaacgccagaguagucucgu

SEQ ID NO: 35661 - RNA, 21 nt, Artificial Sequence
  LRRK2 RNA guide
ugcuuucccacgagacuacuc

SEQ ID NO: 35662 - RNA, 21 nt, Artificial Sequence
  LRRK2 RNA guide
uucaugcuuucccacgagacu

SEQ ID NO: 35663 - RNA, 21 nt, Artificial Sequence
  LRRK2 RNA guide
uucccacgagacuacucuggc

SEQ ID NO: 35664 - RNA, 21 nt, Artificial Sequence
  LRRK2 RNA guide
uugaacgccagaguagucucg

SEQ ID NO: 35665 - RNA, 21 nt, Artificial Sequence
  LRRK2 RNA guide
uuucccacgagacuacucugg

SEQ ID NO: 35666 - RNA, 22 nt, Artificial Sequence
  LRRK2 RNA guide
aacgccagaguagucucguggg

SEQ ID NO: 35667 - RNA, 22 nt, Artificial Sequence
  LRRK2 RNA guide
acgagacuacucuggcguucaa

SEQ ID NO: 35668 - RNA, 22 nt, Artificial Sequence
  LRRK2 RNA guide
acgccagaguagucucguggga

SEQ ID NO: 35669 - RNA, 22 nt, Artificial Sequence
  LRRK2 RNA guide
agaguagucucgugggaaagca

SEQ ID NO: 35670 - RNA, 22 nt, Artificial Sequence
  LRRK2 RNA guide
aggauucaugcuuucccacgag

SEQ ID NO: 35671 - RNA, 22 nt, Artificial Sequence
  LRRK2 RNA guide
aguagucucgugggaaagcaug

SEQ ID NO: 35672 - RNA, 22 nt, Artificial Sequence
  LRRK2 RNA guide
agucucgugggaaagcaugaau

SEQ ID NO: 35673 - RNA, 22 nt, Artificial Sequence
  LRRK2 RNA guide
aguugaacgccagaguagucuc

SEQ ID NO: 35674 - RNA, 22 nt, Artificial Sequence
  LRRK2 RNA guide
augcuuucccacgagacuacuc

SEQ ID NO: 35675 - RNA, 22 nt, Artificial Sequence
  LRRK2 RNA guide
auucaugcuuucccacgagacu

SEQ ID NO: 35676 - RNA, 22 nt, Artificial Sequence
  LRRK2 RNA guide
cacgagacuacucuggcguuca

SEQ ID NO: 35677 - RNA, 22 nt, Artificial Sequence
  LRRK2 RNA guide
cagaguagucucgugggaaagc

SEQ ID NO: 35678 - RNA, 22 nt, Artificial Sequence
  LRRK2 RNA guide
caggauucaugcuuucccacga

SEQ ID NO: 35679 - RNA, 22 nt, Artificial Sequence
  LRRK2 RNA guide
caugcuuucccacgagacuacu

SEQ ID NO: 35680 - RNA, 22 nt, Artificial Sequence
  LRRK2 RNA guide
ccacgagacuacucuggcguuc

SEQ ID NO: 35681 - RNA, 22 nt, Artificial Sequence
  LRRK2 RNA guide
ccagaguagucucgugggaaag

SEQ ID NO: 35682 - RNA, 22 nt, Artificial Sequence
  LRRK2 RNA guide
ccaggauucaugcuuucccacg

SEQ ID NO: 35683 - RNA, 22 nt, Artificial Sequence
  LRRK2 RNA guide
cccacgagacuacucuggcguu

SEQ ID NO: 35684 - RNA, 22 nt, Artificial Sequence
  LRRK2 RNA guide
cgagacuacucuggcguucaac

SEQ ID NO: 35685 - RNA, 22 nt, Artificial Sequence
  LRRK2 RNA guide
cgccagaguagucucgugggaa

SEQ ID NO: 35686 - RNA, 22 nt, Artificial Sequence
  LRRK2 RNA guide
cucgugggaaagcaugaauccu

SEQ ID NO: 35687 - RNA, 22 nt, Artificial Sequence
  LRRK2 RNA guide
cuuucccacgagacuacucugg

SEQ ID NO: 35688 - RNA, 22 nt, Artificial Sequence
  LRRK2 RNA guide
gaacgccagaguagucucgugg

SEQ ID NO: 35689 - RNA, 22 nt, Artificial Sequence
  LRRK2 RNA guide
gaguagucucgugggaaagcau

SEQ ID NO: 35690 - RNA, 22 nt, Artificial Sequence
  LRRK2 RNA guide
gauucaugcuuucccacgagac

SEQ ID NO: 35691 - RNA, 22 nt, Artificial Sequence
  LRRK2 RNA guide
gccagaguagucucgugggaaa

SEQ ID NO: 35692 - RNA, 22 nt, Artificial Sequence
  LRRK2 RNA guide
gcuuucccacgagacuacucug

SEQ ID NO: 35693 - RNA, 22 nt, Artificial Sequence
  LRRK2 RNA guide
ggauucaugcuuucccacgaga

SEQ ID NO: 35694 - RNA, 22 nt, Artificial Sequence
  LRRK2 RNA guide
guagucucgugggaaagcauga

SEQ ID NO: 35695 - RNA, 22 nt, Artificial Sequence
  LRRK2 RNA guide
gucucgugggaaagcaugaauc

SEQ ID NO: 35696 - RNA, 22 nt, Artificial Sequence
  LRRK2 RNA guide
guugaacgccagaguagucucg

SEQ ID NO: 35697 - RNA, 22 nt, Artificial Sequence
  LRRK2 RNA guide
uagucucgugggaaagcaugaa

SEQ ID NO: 35698 - RNA, 22 nt, Artificial Sequence
  LRRK2 RNA guide
ucaugcuuucccacgagacuac

SEQ ID NO: 35699 - RNA, 22 nt, Artificial Sequence
  LRRK2 RNA guide
ucccacgagacuacucuggcgu

SEQ ID NO: 35700 - RNA, 22 nt, Artificial Sequence
  LRRK2 RNA guide
ucgugggaaagcaugaauccug

SEQ ID NO: 35701 - RNA, 22 nt, Artificial Sequence
  LRRK2 RNA guide
ucucgugggaaagcaugaaucc

SEQ ID NO: 35702 - RNA, 22 nt, Artificial Sequence
  LRRK2 RNA guide
ugaacgccagaguagucucgug

SEQ ID NO: 35703 - RNA, 22 nt, Artificial Sequence
  LRRK2 RNA guide
ugcuuucccacgagacuacucu

SEQ ID NO: 35704 - RNA, 22 nt, Artificial Sequence
  LRRK2 RNA guide
uucaugcuuucccacgagacua

SEQ ID NO: 35705 - RNA, 22 nt, Artificial Sequence
  LRRK2 RNA guide
uucccacgagacuacucuggcg

SEQ ID NO: 35706 - RNA, 22 nt, Artificial Sequence
  LRRK2 RNA guide
uugaacgccagaguagucucgu

SEQ ID NO: 35707 - RNA, 22 nt, Artificial Sequence
  LRRK2 RNA guide
uuucccacgagacuacucuggc

SEQ ID NO: 35708 - RNA, 20 nt, Artificial Sequence
  LRRK2 RNA guide
aaccacaggaccucaucugu

SEQ ID NO: 35709 - RNA, 20 nt, Artificial Sequence
  LRRK2 RNA guide
acagaugagguccugugguu

SEQ ID NO: 35710 - RNA, 20 nt, Artificial Sequence
  LRRK2 RNA guide
acaggaccucaucuguaaau

SEQ ID NO: 35711 - RNA, 20 nt, Artificial Sequence
  LRRK2 RNA guide
acauuuacagaugagguccu

SEQ ID NO: 35712 - RNA, 20 nt, Artificial Sequence
  LRRK2 RNA guide
accacaggaccucaucugua

SEQ ID NO: 35713 - RNA, 20 nt, Artificial Sequence
  LRRK2 RNA guide
accucaucuguaaaugugga

SEQ ID NO: 35714 - RNA, 20 nt, Artificial Sequence
  LRRK2 RNA guide
agaugagguccugugguuca

SEQ ID NO: 35715 - RNA, 20 nt, Artificial Sequence
  LRRK2 RNA guide
agauugaugaaccacaggac

SEQ ID NO: 35716 - RNA, 20 nt, Artificial Sequence
  LRRK2 RNA guide
aggaccucaucuguaaaugu

SEQ ID NO: 35717 - RNA, 20 nt, Artificial Sequence
  LRRK2 RNA guide
augaaccacaggaccucauc

SEQ ID NO: 35718 - RNA, 20 nt, Artificial Sequence
  LRRK2 RNA guide
auugaugaaccacaggaccu

SEQ ID NO: 35719 - RNA, 20 nt, Artificial Sequence
  LRRK2 RNA guide
auuuacagaugagguccugu

SEQ ID NO: 35720 - RNA, 20 nt, Artificial Sequence
  LRRK2 RNA guide
auuuccacauuuacagauga

SEQ ID NO: 35721 - RNA, 20 nt, Artificial Sequence
  LRRK2 RNA guide
cacaggaccucaucuguaaa

SEQ ID NO: 35722 - RNA, 20 nt, Artificial Sequence
  LRRK2 RNA guide
cacauuuacagaugaggucc

SEQ ID NO: 35723 - RNA, 20 nt, Artificial Sequence
  LRRK2 RNA guide
cagaugagguccugugguuc

SEQ ID NO: 35724 - RNA, 20 nt, Artificial Sequence
  LRRK2 RNA guide
caggaccucaucuguaaaug

SEQ ID NO: 35725 - RNA, 20 nt, Artificial Sequence
  LRRK2 RNA guide
caucuguaaauguggaaaua

SEQ ID NO: 35726 - RNA, 20 nt, Artificial Sequence
  LRRK2 RNA guide
cauuuacagaugagguccug

SEQ ID NO: 35727 - RNA, 20 nt, Artificial Sequence
  LRRK2 RNA guide
ccacaggaccucaucuguaa

SEQ ID NO: 35728 - RNA, 20 nt, Artificial Sequence
  LRRK2 RNA guide
ccacauuuacagaugagguc

SEQ ID NO: 35729 - RNA, 20 nt, Artificial Sequence
  LRRK2 RNA guide
ccucaucuguaaauguggaa

SEQ ID NO: 35730 - RNA, 20 nt, Artificial Sequence
  LRRK2 RNA guide
cucaucuguaaauguggaaa

SEQ ID NO: 35731 - RNA, 20 nt, Artificial Sequence
  LRRK2 RNA guide
gaaccacaggaccucaucug

SEQ ID NO: 35732 - RNA, 20 nt, Artificial Sequence
  LRRK2 RNA guide
gaccucaucuguaaaugugg

SEQ ID NO: 35733 - RNA, 20 nt, Artificial Sequence
  LRRK2 RNA guide
gaugaaccacaggaccucau

SEQ ID NO: 35734 - RNA, 20 nt, Artificial Sequence
  LRRK2 RNA guide
gaugagguccugugguucau

SEQ ID NO: 35735 - RNA, 20 nt, Artificial Sequence
  LRRK2 RNA guide
gauugaugaaccacaggacc

SEQ ID NO: 35736 - RNA, 20 nt, Artificial Sequence
  LRRK2 RNA guide
ggaccucaucuguaaaugug

SEQ ID NO: 35737 - RNA, 20 nt, Artificial Sequence
  LRRK2 RNA guide
uacagaugagguccuguggu

SEQ ID NO: 35738 - RNA, 20 nt, Artificial Sequence
  LRRK2 RNA guide
uauuuccacauuuacagaug

SEQ ID NO: 35739 - RNA, 20 nt, Artificial Sequence
  LRRK2 RNA guide
ucaucuguaaauguggaaau

SEQ ID NO: 35740 - RNA, 20 nt, Artificial Sequence
  LRRK2 RNA guide
uccacauuuacagaugaggu

SEQ ID NO: 35741 - RNA, 20 nt, Artificial Sequence
  LRRK2 RNA guide
ugaaccacaggaccucaucu

SEQ ID NO: 35742 - RNA, 20 nt, Artificial Sequence
  LRRK2 RNA guide
ugaugaaccacaggaccuca

SEQ ID NO: 35743 - RNA, 20 nt, Artificial Sequence
  LRRK2 RNA guide
uuacagaugagguccugugg

SEQ ID NO: 35744 - RNA, 20 nt, Artificial Sequence
  LRRK2 RNA guide
uuccacauuuacagaugagg

SEQ ID NO: 35745 - RNA, 20 nt, Artificial Sequence
  LRRK2 RNA guide
uugaugaaccacaggaccuc

SEQ ID NO: 35746 - RNA, 20 nt, Artificial Sequence
  LRRK2 RNA guide
uuuacagaugagguccugug

SEQ ID NO: 35747 - RNA, 20 nt, Artificial Sequence
  LRRK2 RNA guide
uuuccacauuuacagaugag

SEQ ID NO: 35748 - RNA, 21 nt, Artificial Sequence
  LRRK2 RNA guide
aaccacaggaccucaucugua

SEQ ID NO: 35749 - RNA, 21 nt, Artificial Sequence
  LRRK2 RNA guide
aagauugaugaaccacaggac

SEQ ID NO: 35750 - RNA, 21 nt, Artificial Sequence
  LRRK2 RNA guide
acagaugagguccugugguuc

SEQ ID NO: 35751 - RNA, 21 nt, Artificial Sequence
  LRRK2 RNA guide
acaggaccucaucuguaaaug

SEQ ID NO: 35752 - RNA, 21 nt, Artificial Sequence
  LRRK2 RNA guide
acauuuacagaugagguccug

SEQ ID NO: 35753 - RNA, 21 nt, Artificial Sequence
  LRRK2 RNA guide
accacaggaccucaucuguaa

SEQ ID NO: 35754 - RNA, 21 nt, Artificial Sequence
  LRRK2 RNA guide
accucaucuguaaauguggaa

SEQ ID NO: 35755 - RNA, 21 nt, Artificial Sequence
  LRRK2 RNA guide
agaugagguccugugguucau

SEQ ID NO: 35756 - RNA, 21 nt, Artificial Sequence
  LRRK2 RNA guide
agauugaugaaccacaggacc

SEQ ID NO: 35757 - RNA, 21 nt, Artificial Sequence
  LRRK2 RNA guide
aggaccucaucuguaaaugug

SEQ ID NO: 35758 - RNA, 21 nt, Artificial Sequence
  LRRK2 RNA guide
augaaccacaggaccucaucu

SEQ ID NO: 35759 - RNA, 21 nt, Artificial Sequence
  LRRK2 RNA guide
auugaugaaccacaggaccuc

SEQ ID NO: 35760 - RNA, 21 nt, Artificial Sequence
  LRRK2 RNA guide
auuuacagaugagguccugug

SEQ ID NO: 35761 - RNA, 21 nt, Artificial Sequence
  LRRK2 RNA guide
auuuccacauuuacagaugag

SEQ ID NO: 35762 - RNA, 21 nt, Artificial Sequence
  LRRK2 RNA guide
cacaggaccucaucuguaaau

SEQ ID NO: 35763 - RNA, 21 nt, Artificial Sequence
  LRRK2 RNA guide
cacauuuacagaugagguccu

SEQ ID NO: 35764 - RNA, 21 nt, Artificial Sequence
  LRRK2 RNA guide
cagaugagguccugugguuca

SEQ ID NO: 35765 - RNA, 21 nt, Artificial Sequence
  LRRK2 RNA guide
caggaccucaucuguaaaugu

SEQ ID NO: 35766 - RNA, 21 nt, Artificial Sequence
  LRRK2 RNA guide
cauuuacagaugagguccugu

SEQ ID NO: 35767 - RNA, 21 nt, Artificial Sequence
  LRRK2 RNA guide
ccacaggaccucaucuguaaa

SEQ ID NO: 35768 - RNA, 21 nt, Artificial Sequence
  LRRK2 RNA guide
ccacauuuacagaugaggucc

SEQ ID NO: 35769 - RNA, 21 nt, Artificial Sequence
  LRRK2 RNA guide
ccucaucuguaaauguggaaa

SEQ ID NO: 35770 - RNA, 21 nt, Artificial Sequence
  LRRK2 RNA guide
cucaucuguaaauguggaaau

SEQ ID NO: 35771 - RNA, 21 nt, Artificial Sequence
  LRRK2 RNA guide
gaaccacaggaccucaucugu

SEQ ID NO: 35772 - RNA, 21 nt, Artificial Sequence
  LRRK2 RNA guide
gaccucaucuguaaaugugga

SEQ ID NO: 35773 - RNA, 21 nt, Artificial Sequence
  LRRK2 RNA guide
gaugaaccacaggaccucauc

SEQ ID NO: 35774 - RNA, 21 nt, Artificial Sequence
  LRRK2 RNA guide
gaugagguccugugguucauc

SEQ ID NO: 35775 - RNA, 21 nt, Artificial Sequence
  LRRK2 RNA guide
gauugaugaaccacaggaccu

SEQ ID NO: 35776 - RNA, 21 nt, Artificial Sequence
  LRRK2 RNA guide
ggaccucaucuguaaaugugg

SEQ ID NO: 35777 - RNA, 21 nt, Artificial Sequence
  LRRK2 RNA guide
uacagaugagguccugugguu

SEQ ID NO: 35778 - RNA, 21 nt, Artificial Sequence
  LRRK2 RNA guide
uccacauuuacagaugagguc

SEQ ID NO: 35779 - RNA, 21 nt, Artificial Sequence
  LRRK2 RNA guide
ugaaccacaggaccucaucug

SEQ ID NO: 35780 - RNA, 21 nt, Artificial Sequence
  LRRK2 RNA guide
ugaugaaccacaggaccucau

SEQ ID NO: 35781 - RNA, 21 nt, Artificial Sequence
  LRRK2 RNA guide
uuacagaugagguccuguggu

SEQ ID NO: 35782 - RNA, 21 nt, Artificial Sequence
  LRRK2 RNA guide
uuccacauuuacagaugaggu

SEQ ID NO: 35783 - RNA, 21 nt, Artificial Sequence
  LRRK2 RNA guide
uugaugaaccacaggaccuca

SEQ ID NO: 35784 - RNA, 21 nt, Artificial Sequence
  LRRK2 RNA guide
uuuacagaugagguccugugg

SEQ ID NO: 35785 - RNA, 21 nt, Artificial Sequence
  LRRK2 RNA guide
uuuccacauuuacagaugagg

SEQ ID NO: 35786 - RNA, 22 nt, Artificial Sequence
  LRRK2 RNA guide
aaagauugaugaaccacaggac

SEQ ID NO: 35787 - RNA, 22 nt, Artificial Sequence
  LRRK2 RNA guide
aaccacaggaccucaucuguaa

SEQ ID NO: 35788 - RNA, 22 nt, Artificial Sequence
  LRRK2 RNA guide
aagauugaugaaccacaggacc

SEQ ID NO: 35789 - RNA, 22 nt, Artificial Sequence
  LRRK2 RNA guide
acagaugagguccugugguuca

SEQ ID NO: 35790 - RNA, 22 nt, Artificial Sequence
  LRRK2 RNA guide
acaggaccucaucuguaaaugu

SEQ ID NO: 35791 - RNA, 22 nt, Artificial Sequence
  LRRK2 RNA guide
acauuuacagaugagguccugu

SEQ ID NO: 35792 - RNA, 22 nt, Artificial Sequence
  LRRK2 RNA guide
accacaggaccucaucuguaaa

SEQ ID NO: 35793 - RNA, 22 nt, Artificial Sequence
  LRRK2 RNA guide
accucaucuguaaauguggaaa

SEQ ID NO: 35794 - RNA, 22 nt, Artificial Sequence
  LRRK2 RNA guide
agaugagguccugugguucauc

SEQ ID NO: 35795 - RNA, 22 nt, Artificial Sequence
  LRRK2 RNA guide
agauugaugaaccacaggaccu

SEQ ID NO: 35796 - RNA, 22 nt, Artificial Sequence
  LRRK2 RNA guide
aggaccucaucuguaaaugugg

SEQ ID NO: 35797 - RNA, 22 nt, Artificial Sequence
  LRRK2 RNA guide
augaaccacaggaccucaucug

SEQ ID NO: 35798 - RNA, 22 nt, Artificial Sequence
  LRRK2 RNA guide
auugaugaaccacaggaccuca

SEQ ID NO: 35799 - RNA, 22 nt, Artificial Sequence
  LRRK2 RNA guide
auuuacagaugagguccugugg

SEQ ID NO: 35800 - RNA, 22 nt, Artificial Sequence
  LRRK2 RNA guide
auuuccacauuuacagaugagg

SEQ ID NO: 35801 - RNA, 22 nt, Artificial Sequence
  LRRK2 RNA guide
cacaggaccucaucuguaaaug

SEQ ID NO: 35802 - RNA, 22 nt, Artificial Sequence
  LRRK2 RNA guide
cacauuuacagaugagguccug

SEQ ID NO: 35803 - RNA, 22 nt, Artificial Sequence
  LRRK2 RNA guide
cagaugagguccugugguucau

SEQ ID NO: 35804 - RNA, 22 nt, Artificial Sequence
  LRRK2 RNA guide
caggaccucaucuguaaaugug

SEQ ID NO: 35805 - RNA, 22 nt, Artificial Sequence
  LRRK2 RNA guide
cauuuacagaugagguccugug

SEQ ID NO: 35806 - RNA, 22 nt, Artificial Sequence
  LRRK2 RNA guide
ccacaggaccucaucuguaaau

SEQ ID NO: 35807 - RNA, 22 nt, Artificial Sequence
  LRRK2 RNA guide
ccacauuuacagaugagguccu

SEQ ID NO: 35808 - RNA, 22 nt, Artificial Sequence
  LRRK2 RNA guide
ccucaucuguaaauguggaaau

SEQ ID NO: 35809 - RNA, 22 nt, Artificial Sequence
  LRRK2 RNA guide
cucaucuguaaauguggaaaua

SEQ ID NO: 35810 - RNA, 22 nt, Artificial Sequence
  LRRK2 RNA guide
gaaccacaggaccucaucugua

SEQ ID NO: 35811 - RNA, 22 nt, Artificial Sequence
  LRRK2 RNA guide
gaccucaucuguaaauguggaa

SEQ ID NO: 35812 - RNA, 22 nt, Artificial Sequence
  LRRK2 RNA guide
gaugaaccacaggaccucaucu

SEQ ID NO: 35813 - RNA, 22 nt, Artificial Sequence
  LRRK2 RNA guide
gaugagguccugugguucauca

SEQ ID NO: 35814 - RNA, 22 nt, Artificial Sequence
  LRRK2 RNA guide
gauugaugaaccacaggaccuc

SEQ ID NO: 35815 - RNA, 22 nt, Artificial Sequence
  LRRK2 RNA guide
ggaccucaucuguaaaugugga

SEQ ID NO: 35816 - RNA, 22 nt, Artificial Sequence
  LRRK2 RNA guide
uacagaugagguccugugguuc

SEQ ID NO: 35817 - RNA, 22 nt, Artificial Sequence
  LRRK2 RNA guide
uauuuccacauuuacagaugag

SEQ ID NO: 35818 - RNA, 22 nt, Artificial Sequence
  LRRK2 RNA guide
uccacauuuacagaugaggucc

SEQ ID NO: 35819 - RNA, 22 nt, Artificial Sequence
  LRRK2 RNA guide
ugaaccacaggaccucaucugu

SEQ ID NO: 35820 - RNA, 22 nt, Artificial Sequence
  LRRK2 RNA guide
ugaugaaccacaggaccucauc

SEQ ID NO: 35821 - RNA, 22 nt, Artificial Sequence
  LRRK2 RNA guide
uuacagaugagguccugugguu

SEQ ID NO: 35822 - RNA, 22 nt, Artificial Sequence
  LRRK2 RNA guide
uuccacauuuacagaugagguc

SEQ ID NO: 35823 - RNA, 22 nt, Artificial Sequence
  LRRK2 RNA guide
uugaugaaccacaggaccucau

SEQ ID NO: 35824 - RNA, 22 nt, Artificial Sequence
  LRRK2 RNA guide
uuuacagaugagguccuguggu

SEQ ID NO: 35825 - RNA, 22 nt, Artificial Sequence
  LRRK2 RNA guide
uuuccacauuuacagaugaggu

SEQ ID NO: 35826 - RNA, 20 nt, Artificial Sequence
  LRRK2 RNA guide
aaccacaggaccucaccugu

SEQ ID NO: 35827 - RNA, 20 nt, Artificial Sequence
  LRRK2 RNA guide
acaggaccucaccuguaaau

SEQ ID NO: 35828 - RNA, 20 nt, Artificial Sequence
  LRRK2 RNA guide
acaggugagguccugugguu

SEQ ID NO: 35829 - RNA, 20 nt, Artificial Sequence
  LRRK2 RNA guide
acauuuacaggugagguccu

SEQ ID NO: 35830 - RNA, 20 nt, Artificial Sequence
  LRRK2 RNA guide
accacaggaccucaccugua

SEQ ID NO: 35831 - RNA, 20 nt, Artificial Sequence
  LRRK2 RNA guide
accucaccuguaaaugugga

SEQ ID NO: 35832 - RNA, 20 nt, Artificial Sequence
  LRRK2 RNA guide
accuguaaauguggaaauaa

SEQ ID NO: 35833 - RNA, 20 nt, Artificial Sequence
  LRRK2 RNA guide
aggaccucaccuguaaaugu

SEQ ID NO: 35834 - RNA, 20 nt, Artificial Sequence
  LRRK2 RNA guide
aggugagguccugugguuca

SEQ ID NO: 35835 - RNA, 20 nt, Artificial Sequence
  LRRK2 RNA guide
augaaccacaggaccucacc

SEQ ID NO: 35836 - RNA, 20 nt, Artificial Sequence
  LRRK2 RNA guide
auuauuuccacauuuacagg

SEQ ID NO: 35837 - RNA, 20 nt, Artificial Sequence
  LRRK2 RNA guide
auuuacaggugagguccugu

SEQ ID NO: 35838 - RNA, 20 nt, Artificial Sequence
  LRRK2 RNA guide
auuuccacauuuacagguga

SEQ ID NO: 35839 - RNA, 20 nt, Artificial Sequence
  LRRK2 RNA guide
cacaggaccucaccuguaaa

SEQ ID NO: 35840 - RNA, 20 nt, Artificial Sequence
  LRRK2 RNA guide
cacauuuacaggugaggucc

SEQ ID NO: 35841 - RNA, 20 nt, Artificial Sequence
  LRRK2 RNA guide
caccuguaaauguggaaaua

SEQ ID NO: 35842 - RNA, 20 nt, Artificial Sequence
  LRRK2 RNA guide
caggaccucaccuguaaaug

SEQ ID NO: 35843 - RNA, 20 nt, Artificial Sequence
  LRRK2 RNA guide
caggugagguccugugguuc

SEQ ID NO: 35844 - RNA, 20 nt, Artificial Sequence
  LRRK2 RNA guide
cauuuacaggugagguccug

SEQ ID NO: 35845 - RNA, 20 nt, Artificial Sequence
  LRRK2 RNA guide
ccacaggaccucaccuguaa

SEQ ID NO: 35846 - RNA, 20 nt, Artificial Sequence
  LRRK2 RNA guide
ccacauuuacaggugagguc

SEQ ID NO: 35847 - RNA, 20 nt, Artificial Sequence
  LRRK2 RNA guide
ccucaccuguaaauguggaa

SEQ ID NO: 35848 - RNA, 20 nt, Artificial Sequence
  LRRK2 RNA guide
cucaccuguaaauguggaaa

SEQ ID NO: 35849 - RNA, 20 nt, Artificial Sequence
  LRRK2 RNA guide
gaaccacaggaccucaccug

SEQ ID NO: 35850 - RNA, 20 nt, Artificial Sequence
  LRRK2 RNA guide
gaccucaccuguaaaugugg

SEQ ID NO: 35851 - RNA, 20 nt, Artificial Sequence
  LRRK2 RNA guide
gaugaaccacaggaccucac

SEQ ID NO: 35852 - RNA, 20 nt, Artificial Sequence
  LRRK2 RNA guide
ggaccucaccuguaaaugug

SEQ ID NO: 35853 - RNA, 20 nt, Artificial Sequence
  LRRK2 RNA guide
ggugagguccugugguucau

SEQ ID NO: 35854 - RNA, 20 nt, Artificial Sequence
  LRRK2 RNA guide
uacaggugagguccuguggu

SEQ ID NO: 35855 - RNA, 20 nt, Artificial Sequence
  LRRK2 RNA guide
uauuuccacauuuacaggug

SEQ ID NO: 35856 - RNA, 20 nt, Artificial Sequence
  LRRK2 RNA guide
ucaccuguaaauguggaaau

SEQ ID NO: 35857 - RNA, 20 nt, Artificial Sequence
  LRRK2 RNA guide
uccacauuuacaggugaggu

SEQ ID NO: 35858 - RNA, 20 nt, Artificial Sequence
  LRRK2 RNA guide
ugaaccacaggaccucaccu

SEQ ID NO: 35859 - RNA, 20 nt, Artificial Sequence
  LRRK2 RNA guide
uuacaggugagguccugugg

SEQ ID NO: 35860 - RNA, 20 nt, Artificial Sequence
  LRRK2 RNA guide
uuauuuccacauuuacaggu

SEQ ID NO: 35861 - RNA, 20 nt, Artificial Sequence
  LRRK2 RNA guide
uuccacauuuacaggugagg

SEQ ID NO: 35862 - RNA, 20 nt, Artificial Sequence
  LRRK2 RNA guide
uuuacaggugagguccugug

SEQ ID NO: 35863 - RNA, 20 nt, Artificial Sequence
  LRRK2 RNA guide
uuuccacauuuacaggugag

SEQ ID NO: 35864 - RNA, 21 nt, Artificial Sequence
  LRRK2 RNA guide
aaccacaggaccucaccugua

SEQ ID NO: 35865 - RNA, 21 nt, Artificial Sequence
  LRRK2 RNA guide
acaggaccucaccuguaaaug

SEQ ID NO: 35866 - RNA, 21 nt, Artificial Sequence
  LRRK2 RNA guide
acaggugagguccugugguuc

SEQ ID NO: 35867 - RNA, 21 nt, Artificial Sequence
  LRRK2 RNA guide
acauuuacaggugagguccug

SEQ ID NO: 35868 - RNA, 21 nt, Artificial Sequence
  LRRK2 RNA guide
accacaggaccucaccuguaa

SEQ ID NO: 35869 - RNA, 21 nt, Artificial Sequence
  LRRK2 RNA guide
accucaccuguaaauguggaa

SEQ ID NO: 35870 - RNA, 21 nt, Artificial Sequence
  LRRK2 RNA guide
aggaccucaccuguaaaugug

SEQ ID NO: 35871 - RNA, 21 nt, Artificial Sequence
  LRRK2 RNA guide
aggugagguccugugguucau

SEQ ID NO: 35872 - RNA, 21 nt, Artificial Sequence
  LRRK2 RNA guide
augaaccacaggaccucaccu

SEQ ID NO: 35873 - RNA, 21 nt, Artificial Sequence
  LRRK2 RNA guide
auuuacaggugagguccugug

SEQ ID NO: 35874 - RNA, 21 nt, Artificial Sequence
  LRRK2 RNA guide
auuuccacauuuacaggugag

SEQ ID NO: 35875 - RNA, 21 nt, Artificial Sequence
  LRRK2 RNA guide
cacaggaccucaccuguaaau

SEQ ID NO: 35876 - RNA, 21 nt, Artificial Sequence
  LRRK2 RNA guide
cacauuuacaggugagguccu

SEQ ID NO: 35877 - RNA, 21 nt, Artificial Sequence
  LRRK2 RNA guide
caccuguaaauguggaaauaa

SEQ ID NO: 35878 - RNA, 21 nt, Artificial Sequence
  LRRK2 RNA guide
caggaccucaccuguaaaugu

SEQ ID NO: 35879 - RNA, 21 nt, Artificial Sequence
  LRRK2 RNA guide
caggugagguccugugguuca

SEQ ID NO: 35880 - RNA, 21 nt, Artificial Sequence
  LRRK2 RNA guide
cauuuacaggugagguccugu

SEQ ID NO: 35881 - RNA, 21 nt, Artificial Sequence
  LRRK2 RNA guide
ccacaggaccucaccuguaaa

SEQ ID NO: 35882 - RNA, 21 nt, Artificial Sequence
  LRRK2 RNA guide
ccacauuuacaggugaggucc

SEQ ID NO: 35883 - RNA, 21 nt, Artificial Sequence
  LRRK2 RNA guide
ccucaccuguaaauguggaaa

SEQ ID NO: 35884 - RNA, 21 nt, Artificial Sequence
  LRRK2 RNA guide
cucaccuguaaauguggaaau

SEQ ID NO: 35885 - RNA, 21 nt, Artificial Sequence
  LRRK2 RNA guide
gaaccacaggaccucaccugu

SEQ ID NO: 35886 - RNA, 21 nt, Artificial Sequence
  LRRK2 RNA guide
gaccucaccuguaaaugugga

SEQ ID NO: 35887 - RNA, 21 nt, Artificial Sequence
  LRRK2 RNA guide
gaugaaccacaggaccucacc

SEQ ID NO: 35888 - RNA, 21 nt, Artificial Sequence
  LRRK2 RNA guide
ggaccucaccuguaaaugugg

SEQ ID NO: 35889 - RNA, 21 nt, Artificial Sequence
  LRRK2 RNA guide
ggugagguccugugguucauc

SEQ ID NO: 35890 - RNA, 21 nt, Artificial Sequence
  LRRK2 RNA guide
uacaggugagguccugugguu

SEQ ID NO: 35891 - RNA, 21 nt, Artificial Sequence
  LRRK2 RNA guide
uauuuccacauuuacagguga

SEQ ID NO: 35892 - RNA, 21 nt, Artificial Sequence
  LRRK2 RNA guide
ucaccuguaaauguggaaaua

SEQ ID NO: 35893 - RNA, 21 nt, Artificial Sequence
  LRRK2 RNA guide
uccacauuuacaggugagguc

SEQ ID NO: 35894 - RNA, 21 nt, Artificial Sequence
  LRRK2 RNA guide
ugaaccacaggaccucaccug

SEQ ID NO: 35895 - RNA, 21 nt, Artificial Sequence
  LRRK2 RNA guide
ugaugaaccacaggaccucac

SEQ ID NO: 35896 - RNA, 21 nt, Artificial Sequence
  LRRK2 RNA guide
uuacaggugagguccuguggu

SEQ ID NO: 35897 - RNA, 21 nt, Artificial Sequence
  LRRK2 RNA guide
uuauuuccacauuuacaggug

SEQ ID NO: 35898 - RNA, 21 nt, Artificial Sequence
  LRRK2 RNA guide
uuccacauuuacaggugaggu

SEQ ID NO: 35899 - RNA, 21 nt, Artificial Sequence
  LRRK2 RNA guide
uuuacaggugagguccugugg

SEQ ID NO: 35900 - RNA, 21 nt, Artificial Sequence
  LRRK2 RNA guide
uuuccacauuuacaggugagg

SEQ ID NO: 35901 - RNA, 22 nt, Artificial Sequence
  LRRK2 RNA guide
aaccacaggaccucaccuguaa

SEQ ID NO: 35902 - RNA, 22 nt, Artificial Sequence
  LRRK2 RNA guide
acaggaccucaccuguaaaugu

SEQ ID NO: 35903 - RNA, 22 nt, Artificial Sequence
  LRRK2 RNA guide
acaggugagguccugugguuca

SEQ ID NO: 35904 - RNA, 22 nt, Artificial Sequence
  LRRK2 RNA guide
acauuuacaggugagguccugu

SEQ ID NO: 35905 - RNA, 22 nt, Artificial Sequence
  LRRK2 RNA guide
accacaggaccucaccuguaaa

SEQ ID NO: 35906 - RNA, 22 nt, Artificial Sequence
  LRRK2 RNA guide
accucaccuguaaauguggaaa

SEQ ID NO: 35907 - RNA, 22 nt, Artificial Sequence
  LRRK2 RNA guide
aggaccucaccuguaaaugugg

SEQ ID NO: 35908 - RNA, 22 nt, Artificial Sequence
  LRRK2 RNA guide
aggugagguccugugguucauc

SEQ ID NO: 35909 - RNA, 22 nt, Artificial Sequence
  LRRK2 RNA guide
augaaccacaggaccucaccug

SEQ ID NO: 35910 - RNA, 22 nt, Artificial Sequence
  LRRK2 RNA guide
auuauuuccacauuuacaggug

SEQ ID NO: 35911 - RNA, 22 nt, Artificial Sequence
  LRRK2 RNA guide
auuuacaggugagguccugugg

SEQ ID NO: 35912 - RNA, 22 nt, Artificial Sequence
  LRRK2 RNA guide
auuuccacauuuacaggugagg

SEQ ID NO: 35913 - RNA, 22 nt, Artificial Sequence
  LRRK2 RNA guide
cacaggaccucaccuguaaaug

SEQ ID NO: 35914 - RNA, 22 nt, Artificial Sequence
  LRRK2 RNA guide
cacauuuacaggugagguccug

SEQ ID NO: 35915 - RNA, 22 nt, Artificial Sequence
  LRRK2 RNA guide
caccuguaaauguggaaauaau

SEQ ID NO: 35916 - RNA, 22 nt, Artificial Sequence
  LRRK2 RNA guide
caggaccucaccuguaaaugug

SEQ ID NO: 35917 - RNA, 22 nt, Artificial Sequence
  LRRK2 RNA guide
caggugagguccugugguucau

SEQ ID NO: 35918 - RNA, 22 nt, Artificial Sequence
  LRRK2 RNA guide
cauuuacaggugagguccugug

SEQ ID NO: 35919 - RNA, 22 nt, Artificial Sequence
  LRRK2 RNA guide
ccacaggaccucaccuguaaau

SEQ ID NO: 35920 - RNA, 22 nt, Artificial Sequence
  LRRK2 RNA guide
ccacauuuacaggugagguccu

SEQ ID NO: 35921 - RNA, 22 nt, Artificial Sequence
  LRRK2 RNA guide
ccucaccuguaaauguggaaau

SEQ ID NO: 35922 - RNA, 22 nt, Artificial Sequence
  LRRK2 RNA guide
cucaccuguaaauguggaaaua

SEQ ID NO: 35923 - RNA, 22 nt, Artificial Sequence
  LRRK2 RNA guide
gaaccacaggaccucaccugua

SEQ ID NO: 35924 - RNA, 22 nt, Artificial Sequence
  LRRK2 RNA guide
gaccucaccuguaaauguggaa

SEQ ID NO: 35925 - RNA, 22 nt, Artificial Sequence
  LRRK2 RNA guide
gaugaaccacaggaccucaccu

SEQ ID NO: 35926 - RNA, 22 nt, Artificial Sequence
  LRRK2 RNA guide
ggaccucaccuguaaaugugga

SEQ ID NO: 35927 - RNA, 22 nt, Artificial Sequence
  LRRK2 RNA guide
ggugagguccugugguucauca

SEQ ID NO: 35928 - RNA, 22 nt, Artificial Sequence
  LRRK2 RNA guide
uacaggugagguccugugguuc

SEQ ID NO: 35929 - RNA, 22 nt, Artificial Sequence
  LRRK2 RNA guide
uauuuccacauuuacaggugag

SEQ ID NO: 35930 - RNA, 22 nt, Artificial Sequence
  LRRK2 RNA guide
ucaccuguaaauguggaaauaa

SEQ ID NO: 35931 - RNA, 22 nt, Artificial Sequence
  LRRK2 RNA guide
uccacauuuacaggugaggucc

SEQ ID NO: 35932 - RNA, 22 nt, Artificial Sequence
  LRRK2 RNA guide
ugaaccacaggaccucaccugu

SEQ ID NO: 35933 - RNA, 22 nt, Artificial Sequence
  LRRK2 RNA guide
ugaugaaccacaggaccucacc

SEQ ID NO: 35934 - RNA, 22 nt, Artificial Sequence
  LRRK2 RNA guide
uuacaggugagguccugugguu

SEQ ID NO: 35935 - RNA, 22 nt, Artificial Sequence
  LRRK2 RNA guide
uuauuuccacauuuacagguga

SEQ ID NO: 35936 - RNA, 22 nt, Artificial Sequence
  LRRK2 RNA guide
uuccacauuuacaggugagguc

SEQ ID NO: 35937 - RNA, 22 nt, Artificial Sequence
  LRRK2 RNA guide
uugaugaaccacaggaccucac

SEQ ID NO: 35938 - RNA, 22 nt, Artificial Sequence
  LRRK2 RNA guide
uuuacaggugagguccuguggu

SEQ ID NO: 35939 - RNA, 22 nt, Artificial Sequence
  LRRK2 RNA guide
uuuccacauuuacaggugaggu

SEQ ID NO: 35940 - RNA, 20 nt, Artificial Sequence
  LRRK2 RNA guide
acaccagaacuuaaaacaca

SEQ ID NO: 35941 - RNA, 20 nt, Artificial Sequence
  LRRK2 RNA guide
accagaacuuaaaacacaaa

SEQ ID NO: 35942 - RNA, 20 nt, Artificial Sequence
  LRRK2 RNA guide
caccagaacuuaaaacacaa

SEQ ID NO: 35943 - RNA, 20 nt, Artificial Sequence
  LRRK2 RNA guide
ccagaacuuaaaacacaaau

SEQ ID NO: 35944 - RNA, 21 nt, Artificial Sequence
  LRRK2 RNA guide
acaccagaacuuaaaacacaa

SEQ ID NO: 35945 - RNA, 21 nt, Artificial Sequence
  LRRK2 RNA guide
caccagaacuuaaaacacaaa

SEQ ID NO: 35946 - RNA, 21 nt, Artificial Sequence
  LRRK2 RNA guide
uacaccagaacuuaaaacaca

SEQ ID NO: 35947 - RNA, 22 nt, Artificial Sequence
  LRRK2 RNA guide
acaccagaacuuaaaacacaaa

SEQ ID NO: 35948 - RNA, 22 nt, Artificial Sequence
  LRRK2 RNA guide
caccagaacuuaaaacacaaau

SEQ ID NO: 35949 - RNA, 22 nt, Artificial Sequence
  LRRK2 RNA guide
guacaccagaacuuaaaacaca

SEQ ID NO: 35950 - RNA, 22 nt, Artificial Sequence
  LRRK2 RNA guide
uacaccagaacuuaaaacacaa

SEQ ID NO: 35951 - RNA, 22 nt, Artificial Sequence
  LRRK2 RNA guide
ccagaacuuaaaacacaaauag

SEQ ID NO: 35952 - RNA, 20 nt, Artificial Sequence
  LRRK2 RNA guide
acacgucuaccuaugugaaa

SEQ ID NO: 35953 - RNA, 20 nt, Artificial Sequence
  LRRK2 RNA guide
accauggcacacgucuaccu

SEQ ID NO: 35954 - RNA, 20 nt, Artificial Sequence
  LRRK2 RNA guide
acgucuaccuaugugaaaaa

SEQ ID NO: 35955 - RNA, 20 nt, Artificial Sequence
  LRRK2 RNA guide
agacgugugccauggugguu

SEQ ID NO: 35956 - RNA, 20 nt, Artificial Sequence
  LRRK2 RNA guide
agguuuuucacauagguaga

SEQ ID NO: 35957 - RNA, 20 nt, Artificial Sequence
  LRRK2 RNA guide
auagcaaaccaccauggcac

SEQ ID NO: 35958 - RNA, 20 nt, Artificial Sequence
  LRRK2 RNA guide
auggcacacgucuaccuaug

SEQ ID NO: 35959 - RNA, 20 nt, Artificial Sequence
  LRRK2 RNA guide
cacacgucuaccuaugugaa

SEQ ID NO: 35960 - RNA, 20 nt, Artificial Sequence
  LRRK2 RNA guide
cacauagguagacgugugcc

SEQ ID NO: 35961 - RNA, 20 nt, Artificial Sequence
  LRRK2 RNA guide
cacgucuaccuaugugaaaa

SEQ ID NO: 35962 - RNA, 20 nt, Artificial Sequence
  LRRK2 RNA guide
cagguuuuucacauagguag

SEQ ID NO: 35963 - RNA, 20 nt, Artificial Sequence
  LRRK2 RNA guide
cauggcacacgucuaccuau

SEQ ID NO: 35964 - RNA, 20 nt, Artificial Sequence
  LRRK2 RNA guide
ccauggcacacgucuaccua

SEQ ID NO: 35965 - RNA, 20 nt, Artificial Sequence
  LRRK2 RNA guide
cgucuaccuaugugaaaaac

SEQ ID NO: 35966 - RNA, 20 nt, Artificial Sequence
  LRRK2 RNA guide
gacgugugccauggugguuu

SEQ ID NO: 35967 - RNA, 20 nt, Artificial Sequence
  LRRK2 RNA guide
gcacacgucuaccuauguga

SEQ ID NO: 35968 - RNA, 20 nt, Artificial Sequence
  LRRK2 RNA guide
gcagguuuuucacauaggua

SEQ ID NO: 35969 - RNA, 20 nt, Artificial Sequence
  LRRK2 RNA guide
ggcacacgucuaccuaugug

SEQ ID NO: 35970 - RNA, 20 nt, Artificial Sequence
  LRRK2 RNA guide
gguuuuucacauagguagac

SEQ ID NO: 35971 - RNA, 20 nt, Artificial Sequence
  LRRK2 RNA guide
gugcagguuuuucacauagg

SEQ ID NO: 35972 - RNA, 20 nt, Artificial Sequence
  LRRK2 RNA guide
guuuuucacauagguagacg

SEQ ID NO: 35973 - RNA, 20 nt, Artificial Sequence
  LRRK2 RNA guide
uagcaaaccaccauggcaca

SEQ ID NO: 35974 - RNA, 20 nt, Artificial Sequence
  LRRK2 RNA guide
ucacauagguagacgugugc

SEQ ID NO: 35975 - RNA, 20 nt, Artificial Sequence
  LRRK2 RNA guide
ugcagguuuuucacauaggu

SEQ ID NO: 35976 - RNA, 20 nt, Artificial Sequence
  LRRK2 RNA guide
uggcacacgucuaccuaugu

SEQ ID NO: 35977 - RNA, 20 nt, Artificial Sequence
  LRRK2 RNA guide
uucacauagguagacgugug

SEQ ID NO: 35978 - RNA, 20 nt, Artificial Sequence
  LRRK2 RNA guide
uuucacauagguagacgugu

SEQ ID NO: 35979 - RNA, 20 nt, Artificial Sequence
  LRRK2 RNA guide
uuuucacauagguagacgug

SEQ ID NO: 35980 - RNA, 20 nt, Artificial Sequence
  LRRK2 RNA guide
uuuuucacauagguagacgu

SEQ ID NO: 35981 - RNA, 21 nt, Artificial Sequence
  LRRK2 RNA guide
acacgucuaccuaugugaaaa

SEQ ID NO: 35982 - RNA, 21 nt, Artificial Sequence
  LRRK2 RNA guide
accauggcacacgucuaccua

SEQ ID NO: 35983 - RNA, 21 nt, Artificial Sequence
  LRRK2 RNA guide
acgucuaccuaugugaaaaac

SEQ ID NO: 35984 - RNA, 21 nt, Artificial Sequence
  LRRK2 RNA guide
agacgugugccauggugguuu

SEQ ID NO: 35985 - RNA, 21 nt, Artificial Sequence
  LRRK2 RNA guide
agguuuuucacauagguagac

SEQ ID NO: 35986 - RNA, 21 nt, Artificial Sequence
  LRRK2 RNA guide
auagcaaaccaccauggcaca

SEQ ID NO: 35987 - RNA, 21 nt, Artificial Sequence
  LRRK2 RNA guide
auggcacacgucuaccuaugu

SEQ ID NO: 35988 - RNA, 21 nt, Artificial Sequence
  LRRK2 RNA guide
cacacgucuaccuaugugaaa

SEQ ID NO: 35989 - RNA, 21 nt, Artificial Sequence
  LRRK2 RNA guide
cacauagguagacgugugcca

SEQ ID NO: 35990 - RNA, 21 nt, Artificial Sequence
  LRRK2 RNA guide
caccauggcacacgucuaccu

SEQ ID NO: 35991 - RNA, 21 nt, Artificial Sequence
  LRRK2 RNA guide
cacgucuaccuaugugaaaaa

SEQ ID NO: 35992 - RNA, 21 nt, Artificial Sequence
  LRRK2 RNA guide
cagguuuuucacauagguaga

SEQ ID NO: 35993 - RNA, 21 nt, Artificial Sequence
  LRRK2 RNA guide
cauggcacacgucuaccuaug

SEQ ID NO: 35994 - RNA, 21 nt, Artificial Sequence
  LRRK2 RNA guide
ccauggcacacgucuaccuau

SEQ ID NO: 35995 - RNA, 21 nt, Artificial Sequence
  LRRK2 RNA guide
cgucuaccuaugugaaaaacc

SEQ ID NO: 35996 - RNA, 21 nt, Artificial Sequence
  LRRK2 RNA guide
gacgugugccauggugguuug

SEQ ID NO: 35997 - RNA, 21 nt, Artificial Sequence
  LRRK2 RNA guide
gcacacgucuaccuaugugaa

SEQ ID NO: 35998 - RNA, 21 nt, Artificial Sequence
  LRRK2 RNA guide
gcagguuuuucacauagguag

SEQ ID NO: 35999 - RNA, 21 nt, Artificial Sequence
  LRRK2 RNA guide
ggcacacgucuaccuauguga

SEQ ID NO: 36000 - RNA, 21 nt, Artificial Sequence
  LRRK2 RNA guide
gguauagcaaaccaccauggc

SEQ ID NO: 36001 - RNA, 21 nt, Artificial Sequence
  LRRK2 RNA guide
gguuuuucacauagguagacg

SEQ ID NO: 36002 - RNA, 21 nt, Artificial Sequence
  LRRK2 RNA guide
gugcagguuuuucacauaggu

SEQ ID NO: 36003 - RNA, 21 nt, Artificial Sequence
  LRRK2 RNA guide
guuuuucacauagguagacgu

SEQ ID NO: 36004 - RNA, 21 nt, Artificial Sequence
  LRRK2 RNA guide
uagacgugugccauggugguu

SEQ ID NO: 36005 - RNA, 21 nt, Artificial Sequence
  LRRK2 RNA guide
uagcaaaccaccauggcacac

SEQ ID NO: 36006 - RNA, 21 nt, Artificial Sequence
  LRRK2 RNA guide
uauagcaaaccaccauggcac

SEQ ID NO: 36007 - RNA, 21 nt, Artificial Sequence
  LRRK2 RNA guide
ucacauagguagacgugugcc

SEQ ID NO: 36008 - RNA, 21 nt, Artificial Sequence
  LRRK2 RNA guide
ugcagguuuuucacauaggua

SEQ ID NO: 36009 - RNA, 21 nt, Artificial Sequence
  LRRK2 RNA guide
uggcacacgucuaccuaugug

SEQ ID NO: 36010 - RNA, 21 nt, Artificial Sequence
  LRRK2 RNA guide
ugugcagguuuuucacauagg

SEQ ID NO: 36011 - RNA, 21 nt, Artificial Sequence
  LRRK2 RNA guide
uucacauagguagacgugugc

SEQ ID NO: 36012 - RNA, 21 nt, Artificial Sequence
  LRRK2 RNA guide
uuucacauagguagacgugug

SEQ ID NO: 36013 - RNA, 21 nt, Artificial Sequence
  LRRK2 RNA guide
uuuucacauagguagacgugu

SEQ ID NO: 36014 - RNA, 21 nt, Artificial Sequence
  LRRK2 RNA guide
uuuuucacauagguagacgug

SEQ ID NO: 36015 - RNA, 22 nt, Artificial Sequence
  LRRK2 RNA guide
acacgucuaccuaugugaaaaa

SEQ ID NO: 36016 - RNA, 22 nt, Artificial Sequence
  LRRK2 RNA guide
accauggcacacgucuaccuau

SEQ ID NO: 36017 - RNA, 22 nt, Artificial Sequence
  LRRK2 RNA guide
acgucuaccuaugugaaaaacc

SEQ ID NO: 36018 - RNA, 22 nt, Artificial Sequence
  LRRK2 RNA guide
acgugugccauggugguuugcu

SEQ ID NO: 36019 - RNA, 22 nt, Artificial Sequence
  LRRK2 RNA guide
agacgugugccauggugguuug

SEQ ID NO: 36020 - RNA, 22 nt, Artificial Sequence
  LRRK2 RNA guide
agguauagcaaaccaccauggc

SEQ ID NO: 36021 - RNA, 22 nt, Artificial Sequence
  LRRK2 RNA guide
agguuuuucacauagguagacg

SEQ ID NO: 36022 - RNA, 22 nt, Artificial Sequence
  LRRK2 RNA guide
auagcaaaccaccauggcacac

SEQ ID NO: 36023 - RNA, 22 nt, Artificial Sequence
  LRRK2 RNA guide
auggcacacgucuaccuaugug

SEQ ID NO: 36024 - RNA, 22 nt, Artificial Sequence
  LRRK2 RNA guide
augugcagguuuuucacauagg

SEQ ID NO: 36025 - RNA, 22 nt, Artificial Sequence
  LRRK2 RNA guide
cacacgucuaccuaugugaaaa

SEQ ID NO: 36026 - RNA, 22 nt, Artificial Sequence
  LRRK2 RNA guide
cacauagguagacgugugccau

SEQ ID NO: 36027 - RNA, 22 nt, Artificial Sequence
  LRRK2 RNA guide
caccauggcacacgucuaccua

SEQ ID NO: 36028 - RNA, 22 nt, Artificial Sequence
  LRRK2 RNA guide
cacgucuaccuaugugaaaaac

SEQ ID NO: 36029 - RNA, 22 nt, Artificial Sequence
  LRRK2 RNA guide
cagguuuuucacauagguagac

SEQ ID NO: 36030 - RNA, 22 nt, Artificial Sequence
  LRRK2 RNA guide
cauggcacacgucuaccuaugu

SEQ ID NO: 36031 - RNA, 22 nt, Artificial Sequence
  LRRK2 RNA guide
ccaccauggcacacgucuaccu

SEQ ID NO: 36032 - RNA, 22 nt, Artificial Sequence
  LRRK2 RNA guide
ccauggcacacgucuaccuaug

SEQ ID NO: 36033 - RNA, 22 nt, Artificial Sequence
  LRRK2 RNA guide
cgucuaccuaugugaaaaaccu

SEQ ID NO: 36034 - RNA, 22 nt, Artificial Sequence
  LRRK2 RNA guide
gacgugugccauggugguuugc

SEQ ID NO: 36035 - RNA, 22 nt, Artificial Sequence
  LRRK2 RNA guide
gcacacgucuaccuaugugaaa

SEQ ID NO: 36036 - RNA, 22 nt, Artificial Sequence
  LRRK2 RNA guide
gcagguuuuucacauagguaga

SEQ ID NO: 36037 - RNA, 22 nt, Artificial Sequence
  LRRK2 RNA guide
ggcacacgucuaccuaugugaa

SEQ ID NO: 36038 - RNA, 22 nt, Artificial Sequence
  LRRK2 RNA guide
gguauagcaaaccaccauggca

SEQ ID NO: 36039 - RNA, 22 nt, Artificial Sequence
  LRRK2 RNA guide
gguuuuucacauagguagacgu

SEQ ID NO: 36040 - RNA, 22 nt, Artificial Sequence
  LRRK2 RNA guide
guagacgugugccauggugguu

SEQ ID NO: 36041 - RNA, 22 nt, Artificial Sequence
  LRRK2 RNA guide
guauagcaaaccaccauggcac

SEQ ID NO: 36042 - RNA, 22 nt, Artificial Sequence
  LRRK2 RNA guide
gugcagguuuuucacauaggua

SEQ ID NO: 36043 - RNA, 22 nt, Artificial Sequence
  LRRK2 RNA guide
guuuuucacauagguagacgug

SEQ ID NO: 36044 - RNA, 22 nt, Artificial Sequence
  LRRK2 RNA guide
uagacgugugccauggugguuu

SEQ ID NO: 36045 - RNA, 22 nt, Artificial Sequence
  LRRK2 RNA guide
uagcaaaccaccauggcacacg

SEQ ID NO: 36046 - RNA, 22 nt, Artificial Sequence
  LRRK2 RNA guide
uauagcaaaccaccauggcaca

SEQ ID NO: 36047 - RNA, 22 nt, Artificial Sequence
  LRRK2 RNA guide
ucacauagguagacgugugcca

SEQ ID NO: 36048 - RNA, 22 nt, Artificial Sequence
  LRRK2 RNA guide
ugcagguuuuucacauagguag

SEQ ID NO: 36049 - RNA, 22 nt, Artificial Sequence
  LRRK2 RNA guide
uggcacacgucuaccuauguga

SEQ ID NO: 36050 - RNA, 22 nt, Artificial Sequence
  LRRK2 RNA guide
ugugcagguuuuucacauaggu

SEQ ID NO: 36051 - RNA, 22 nt, Artificial Sequence
  LRRK2 RNA guide
uucacauagguagacgugugcc

SEQ ID NO: 36052 - RNA, 22 nt, Artificial Sequence
  LRRK2 RNA guide
uuucacauagguagacgugugc

SEQ ID NO: 36053 - RNA, 22 nt, Artificial Sequence
  LRRK2 RNA guide
uuuucacauagguagacgugug

SEQ ID NO: 36054 - RNA, 22 nt, Artificial Sequence
  LRRK2 RNA guide
uuuuucacauagguagacgugu

SEQ ID NO: 36055 - RNA, 20 nt, Artificial Sequence
  LRRK2 RNA guide
acacaucuaccuaugugaaa

SEQ ID NO: 36056 - RNA, 20 nt, Artificial Sequence
  LRRK2 RNA guide
acaucuaccuaugugaaaaa

SEQ ID NO: 36057 - RNA, 20 nt, Artificial Sequence
  LRRK2 RNA guide
accauggcacacaucuaccu

SEQ ID NO: 36058 - RNA, 20 nt, Artificial Sequence
  LRRK2 RNA guide
auggcacacaucuaccuaug

SEQ ID NO: 36059 - RNA, 20 nt, Artificial Sequence
  LRRK2 RNA guide
cacacaucuaccuaugugaa

SEQ ID NO: 36060 - RNA, 20 nt, Artificial Sequence
  LRRK2 RNA guide
cacauagguagaugugugcc

SEQ ID NO: 36061 - RNA, 20 nt, Artificial Sequence
  LRRK2 RNA guide
cacaucuaccuaugugaaaa

SEQ ID NO: 36062 - RNA, 20 nt, Artificial Sequence
  LRRK2 RNA guide
caucuaccuaugugaaaaac

SEQ ID NO: 36063 - RNA, 20 nt, Artificial Sequence
  LRRK2 RNA guide
cauggcacacaucuaccuau

SEQ ID NO: 36064 - RNA, 20 nt, Artificial Sequence
  LRRK2 RNA guide
ccauggcacacaucuaccua

SEQ ID NO: 36065 - RNA, 20 nt, Artificial Sequence
  LRRK2 RNA guide
gaugugugccauggugguuu

SEQ ID NO: 36066 - RNA, 20 nt, Artificial Sequence
  LRRK2 RNA guide
gcacacaucuaccuauguga

SEQ ID NO: 36067 - RNA, 20 nt, Artificial Sequence
  LRRK2 RNA guide
ggcacacaucuaccuaugug

SEQ ID NO: 36068 - RNA, 20 nt, Artificial Sequence
  LRRK2 RNA guide
gguuuuucacauagguagau

SEQ ID NO: 36069 - RNA, 20 nt, Artificial Sequence
  LRRK2 RNA guide
guuuuucacauagguagaug

SEQ ID NO: 36070 - RNA, 20 nt, Artificial Sequence
  LRRK2 RNA guide
ucacauagguagaugugugc

SEQ ID NO: 36071 - RNA, 20 nt, Artificial Sequence
  LRRK2 RNA guide
uggcacacaucuaccuaugu

SEQ ID NO: 36072 - RNA, 20 nt, Artificial Sequence
  LRRK2 RNA guide
uucacauagguagaugugug

SEQ ID NO: 36073 - RNA, 20 nt, Artificial Sequence
  LRRK2 RNA guide
uuucacauagguagaugugu

SEQ ID NO: 36074 - RNA, 20 nt, Artificial Sequence
  LRRK2 RNA guide
uuuucacauagguagaugug

SEQ ID NO: 36075 - RNA, 20 nt, Artificial Sequence
  LRRK2 RNA guide
uuuuucacauagguagaugu

SEQ ID NO: 36076 - RNA, 21 nt, Artificial Sequence
  LRRK2 RNA guide
acacaucuaccuaugugaaaa

SEQ ID NO: 36077 - RNA, 21 nt, Artificial Sequence
  LRRK2 RNA guide
acaucuaccuaugugaaaaac

SEQ ID NO: 36078 - RNA, 21 nt, Artificial Sequence
  LRRK2 RNA guide
accauggcacacaucuaccua

SEQ ID NO: 36079 - RNA, 21 nt, Artificial Sequence
  LRRK2 RNA guide
agaugugugccauggugguuu

SEQ ID NO: 36080 - RNA, 21 nt, Artificial Sequence
  LRRK2 RNA guide
agguuuuucacauagguagau

SEQ ID NO: 36081 - RNA, 21 nt, Artificial Sequence
  LRRK2 RNA guide
auggcacacaucuaccuaugu

SEQ ID NO: 36082 - RNA, 21 nt, Artificial Sequence
  LRRK2 RNA guide
cacacaucuaccuaugugaaa

SEQ ID NO: 36083 - RNA, 21 nt, Artificial Sequence
  LRRK2 RNA guide
cacauagguagaugugugcca

SEQ ID NO: 36084 - RNA, 21 nt, Artificial Sequence
  LRRK2 RNA guide
cacaucuaccuaugugaaaaa

SEQ ID NO: 36085 - RNA, 21 nt, Artificial Sequence
  LRRK2 RNA guide
caccauggcacacaucuaccu

SEQ ID NO: 36086 - RNA, 21 nt, Artificial Sequence
  LRRK2 RNA guide
caucuaccuaugugaaaaacc

SEQ ID NO: 36087 - RNA, 21 nt, Artificial Sequence
  LRRK2 RNA guide
cauggcacacaucuaccuaug

SEQ ID NO: 36088 - RNA, 21 nt, Artificial Sequence
  LRRK2 RNA guide
ccauggcacacaucuaccuau

SEQ ID NO: 36089 - RNA, 21 nt, Artificial Sequence
  LRRK2 RNA guide
gaugugugccauggugguuug

SEQ ID NO: 36090 - RNA, 21 nt, Artificial Sequence
  LRRK2 RNA guide
gcacacaucuaccuaugugaa

SEQ ID NO: 36091 - RNA, 21 nt, Artificial Sequence
  LRRK2 RNA guide
ggcacacaucuaccuauguga

SEQ ID NO: 36092 - RNA, 21 nt, Artificial Sequence
  LRRK2 RNA guide
gguuuuucacauagguagaug

SEQ ID NO: 36093 - RNA, 21 nt, Artificial Sequence
  LRRK2 RNA guide
guuuuucacauagguagaugu

SEQ ID NO: 36094 - RNA, 21 nt, Artificial Sequence
  LRRK2 RNA guide
ucacauagguagaugugugcc

SEQ ID NO: 36095 - RNA, 21 nt, Artificial Sequence
  LRRK2 RNA guide
uggcacacaucuaccuaugug

SEQ ID NO: 36096 - RNA, 21 nt, Artificial Sequence
  LRRK2 RNA guide
uucacauagguagaugugugc

SEQ ID NO: 36097 - RNA, 21 nt, Artificial Sequence
  LRRK2 RNA guide
uuucacauagguagaugugug

SEQ ID NO: 36098 - RNA, 21 nt, Artificial Sequence
  LRRK2 RNA guide
uuuucacauagguagaugugu

SEQ ID NO: 36099 - RNA, 21 nt, Artificial Sequence
  LRRK2 RNA guide
uuuuucacauagguagaugug

SEQ ID NO: 36100 - RNA, 22 nt, Artificial Sequence
  LRRK2 RNA guide
acacaucuaccuaugugaaaaa

SEQ ID NO: 36101 - RNA, 22 nt, Artificial Sequence
  LRRK2 RNA guide
acaucuaccuaugugaaaaacc

SEQ ID NO: 36102 - RNA, 22 nt, Artificial Sequence
  LRRK2 RNA guide
accauggcacacaucuaccuau

SEQ ID NO: 36103 - RNA, 22 nt, Artificial Sequence
  LRRK2 RNA guide
agaugugugccauggugguuug

SEQ ID NO: 36104 - RNA, 22 nt, Artificial Sequence
  LRRK2 RNA guide
agguuuuucacauagguagaug

SEQ ID NO: 36105 - RNA, 22 nt, Artificial Sequence
  LRRK2 RNA guide
auggcacacaucuaccuaugug

SEQ ID NO: 36106 - RNA, 22 nt, Artificial Sequence
  LRRK2 RNA guide
cacacaucuaccuaugugaaaa

SEQ ID NO: 36107 - RNA, 22 nt, Artificial Sequence
  LRRK2 RNA guide
cacauagguagaugugugccau

SEQ ID NO: 36108 - RNA, 22 nt, Artificial Sequence
  LRRK2 RNA guide
cacaucuaccuaugugaaaaac

SEQ ID NO: 36109 - RNA, 22 nt, Artificial Sequence
  LRRK2 RNA guide
caccauggcacacaucuaccua

SEQ ID NO: 36110 - RNA, 22 nt, Artificial Sequence
  LRRK2 RNA guide
cagguuuuucacauagguagau

SEQ ID NO: 36111 - RNA, 22 nt, Artificial Sequence
  LRRK2 RNA guide
caucuaccuaugugaaaaaccu

SEQ ID NO: 36112 - RNA, 22 nt, Artificial Sequence
  LRRK2 RNA guide
cauggcacacaucuaccuaugu

SEQ ID NO: 36113 - RNA, 22 nt, Artificial Sequence
  LRRK2 RNA guide
ccaccauggcacacaucuaccu

SEQ ID NO: 36114 - RNA, 22 nt, Artificial Sequence
  LRRK2 RNA guide
ccauggcacacaucuaccuaug

SEQ ID NO: 36115 - RNA, 22 nt, Artificial Sequence
  LRRK2 RNA guide
gaugugugccauggugguuugc

SEQ ID NO: 36116 - RNA, 22 nt, Artificial Sequence
  LRRK2 RNA guide
gcacacaucuaccuaugugaaa

SEQ ID NO: 36117 - RNA, 22 nt, Artificial Sequence
  LRRK2 RNA guide
ggcacacaucuaccuaugugaa

SEQ ID NO: 36118 - RNA, 22 nt, Artificial Sequence
  LRRK2 RNA guide
gguuuuucacauagguagaugu

SEQ ID NO: 36119 - RNA, 22 nt, Artificial Sequence
  LRRK2 RNA guide
guuuuucacauagguagaugug

SEQ ID NO: 36120 - RNA, 22 nt, Artificial Sequence
  LRRK2 RNA guide
uagaugugugccauggugguuu

SEQ ID NO: 36121 - RNA, 22 nt, Artificial Sequence
  LRRK2 RNA guide
ucacauagguagaugugugcca

SEQ ID NO: 36122 - RNA, 22 nt, Artificial Sequence
  LRRK2 RNA guide
uggcacacaucuaccuauguga

SEQ ID NO: 36123 - RNA, 22 nt, Artificial Sequence
  LRRK2 RNA guide
uucacauagguagaugugugcc

SEQ ID NO: 36124 - RNA, 22 nt, Artificial Sequence
  LRRK2 RNA guide
uuucacauagguagaugugugc

SEQ ID NO: 36125 - RNA, 22 nt, Artificial Sequence
  LRRK2 RNA guide
uuuucacauagguagaugugug

SEQ ID NO: 36126 - RNA, 22 nt, Artificial Sequence
  LRRK2 RNA guide
uuuuucacauagguagaugugu

SEQ ID NO: 36127 - RNA, 20 nt, Artificial Sequence
  LRRK2 RNA guide
aaagauuaguucaucacagc

SEQ ID NO: 36128 - RNA, 20 nt, Artificial Sequence
  LRRK2 RNA guide
aagauuaguucaucacagca

SEQ ID NO: 36129 - RNA, 20 nt, Artificial Sequence
  LRRK2 RNA guide
aauagugcugugaugaacua

SEQ ID NO: 36130 - RNA, 20 nt, Artificial Sequence
  LRRK2 RNA guide
agauuaguucaucacagcac

SEQ ID NO: 36131 - RNA, 20 nt, Artificial Sequence
  LRRK2 RNA guide
aguucaucacagcacuauuc

SEQ ID NO: 36132 - RNA, 20 nt, Artificial Sequence
  LRRK2 RNA guide
auuaguucaucacagcacua

SEQ ID NO: 36133 - RNA, 20 nt, Artificial Sequence
  LRRK2 RNA guide
cuugugaauagugcugugau

SEQ ID NO: 36134 - RNA, 20 nt, Artificial Sequence
  LRRK2 RNA guide
gaauagugcugugaugaacu

SEQ ID NO: 36135 - RNA, 20 nt, Artificial Sequence
  LRRK2 RNA guide
gauuaguucaucacagcacu

SEQ ID NO: 36136 - RNA, 20 nt, Artificial Sequence
  LRRK2 RNA guide
gugaauagugcugugaugaa

SEQ ID NO: 36137 - RNA, 20 nt, Artificial Sequence
  LRRK2 RNA guide
ugaauagugcugugaugaac

SEQ ID NO: 36138 - RNA, 20 nt, Artificial Sequence
  LRRK2 RNA guide
ugugaauagugcugugauga

SEQ ID NO: 36139 - RNA, 20 nt, Artificial Sequence
  LRRK2 RNA guide
uuaguucaucacagcacuau

SEQ ID NO: 36140 - RNA, 21 nt, Artificial Sequence
  LRRK2 RNA guide
aaaagauuaguucaucacagc

SEQ ID NO: 36141 - RNA, 21 nt, Artificial Sequence
  LRRK2 RNA guide
aaagauuaguucaucacagca

SEQ ID NO: 36142 - RNA, 21 nt, Artificial Sequence
  LRRK2 RNA guide
aagauuaguucaucacagcac

SEQ ID NO: 36143 - RNA, 21 nt, Artificial Sequence
  LRRK2 RNA guide
aauagugcugugaugaacuaa

SEQ ID NO: 36144 - RNA, 21 nt, Artificial Sequence
  LRRK2 RNA guide
agauuaguucaucacagcacu

SEQ ID NO: 36145 - RNA, 21 nt, Artificial Sequence
  LRRK2 RNA guide
aguucaucacagcacuauuca

SEQ ID NO: 36146 - RNA, 21 nt, Artificial Sequence
  LRRK2 RNA guide
auuaguucaucacagcacuau

SEQ ID NO: 36147 - RNA, 21 nt, Artificial Sequence
  LRRK2 RNA guide
cuugugaauagugcugugaug

SEQ ID NO: 36148 - RNA, 21 nt, Artificial Sequence
  LRRK2 RNA guide
gaauagugcugugaugaacua

SEQ ID NO: 36149 - RNA, 21 nt, Artificial Sequence
  LRRK2 RNA guide
gauuaguucaucacagcacua

SEQ ID NO: 36150 - RNA, 21 nt, Artificial Sequence
  LRRK2 RNA guide
gugaauagugcugugaugaac

SEQ ID NO: 36151 - RNA, 21 nt, Artificial Sequence
  LRRK2 RNA guide
uaguucaucacagcacuauuc

SEQ ID NO: 36152 - RNA, 21 nt, Artificial Sequence
  LRRK2 RNA guide
ucuugugaauagugcugugau

SEQ ID NO: 36153 - RNA, 21 nt, Artificial Sequence
  LRRK2 RNA guide
ugaauagugcugugaugaacu

SEQ ID NO: 36154 - RNA, 21 nt, Artificial Sequence
  LRRK2 RNA guide
ugugaauagugcugugaugaa

SEQ ID NO: 36155 - RNA, 21 nt, Artificial Sequence
  LRRK2 RNA guide
uuaguucaucacagcacuauu

SEQ ID NO: 36156 - RNA, 21 nt, Artificial Sequence
  LRRK2 RNA guide
uugugaauagugcugugauga

SEQ ID NO: 36157 - RNA, 22 nt, Artificial Sequence
  LRRK2 RNA guide
aaaagauuaguucaucacagca

SEQ ID NO: 36158 - RNA, 22 nt, Artificial Sequence
  LRRK2 RNA guide
aaagauuaguucaucacagcac

SEQ ID NO: 36159 - RNA, 22 nt, Artificial Sequence
  LRRK2 RNA guide
aagauuaguucaucacagcacu

SEQ ID NO: 36160 - RNA, 22 nt, Artificial Sequence
  LRRK2 RNA guide
aauagugcugugaugaacuaau

SEQ ID NO: 36161 - RNA, 22 nt, Artificial Sequence
  LRRK2 RNA guide
agauuaguucaucacagcacua

SEQ ID NO: 36162 - RNA, 22 nt, Artificial Sequence
  LRRK2 RNA guide
aguucaucacagcacuauucac

SEQ ID NO: 36163 - RNA, 22 nt, Artificial Sequence
  LRRK2 RNA guide
auuaguucaucacagcacuauu

SEQ ID NO: 36164 - RNA, 22 nt, Artificial Sequence
  LRRK2 RNA guide
cucuugugaauagugcugugau

SEQ ID NO: 36165 - RNA, 22 nt, Artificial Sequence
  LRRK2 RNA guide
cuugugaauagugcugugauga

SEQ ID NO: 36166 - RNA, 22 nt, Artificial Sequence
  LRRK2 RNA guide
gaaaagauuaguucaucacagc

SEQ ID NO: 36167 - RNA, 22 nt, Artificial Sequence
  LRRK2 RNA guide
gaauagugcugugaugaacuaa

SEQ ID NO: 36168 - RNA, 22 nt, Artificial Sequence
  LRRK2 RNA guide
gauuaguucaucacagcacuau

SEQ ID NO: 36169 - RNA, 22 nt, Artificial Sequence
  LRRK2 RNA guide
gugaauagugcugugaugaacu

SEQ ID NO: 36170 - RNA, 22 nt, Artificial Sequence
  LRRK2 RNA guide
uaguucaucacagcacuauuca

SEQ ID NO: 36171 - RNA, 22 nt, Artificial Sequence
  LRRK2 RNA guide
ucuugugaauagugcugugaug

SEQ ID NO: 36172 - RNA, 22 nt, Artificial Sequence
  LRRK2 RNA guide
ugaauagugcugugaugaacua

SEQ ID NO: 36173 - RNA, 22 nt, Artificial Sequence
  LRRK2 RNA guide
ugugaauagugcugugaugaac

SEQ ID NO: 36174 - RNA, 22 nt, Artificial Sequence
  LRRK2 RNA guide
uuaguucaucacagcacuauuc

SEQ ID NO: 36175 - RNA, 20 nt, Artificial Sequence
  LRRK2 RNA guide
acagcacuacucacaagagc

SEQ ID NO: 36176 - RNA, 20 nt, Artificial Sequence
  LRRK2 RNA guide
acucacaagagcaaagacau

SEQ ID NO: 36177 - RNA, 20 nt, Artificial Sequence
  LRRK2 RNA guide
aguagugcugugaugaacua

SEQ ID NO: 36178 - RNA, 20 nt, Artificial Sequence
  LRRK2 RNA guide
aguucaucacagcacuacuc

SEQ ID NO: 36179 - RNA, 20 nt, Artificial Sequence
  LRRK2 RNA guide
aucacagcacuacucacaag

SEQ ID NO: 36180 - RNA, 20 nt, Artificial Sequence
  LRRK2 RNA guide
auuccaugucuuugcucuug

SEQ ID NO: 36181 - RNA, 20 nt, Artificial Sequence
  LRRK2 RNA guide
cacagcacuacucacaagag

SEQ ID NO: 36182 - RNA, 20 nt, Artificial Sequence
  LRRK2 RNA guide
caucacagcacuacucacaa

SEQ ID NO: 36183 - RNA, 20 nt, Artificial Sequence
  LRRK2 RNA guide
cucuugugaguagugcugug

SEQ ID NO: 36184 - RNA, 20 nt, Artificial Sequence
  LRRK2 RNA guide
cuugugaguagugcugugau

SEQ ID NO: 36185 - RNA, 20 nt, Artificial Sequence
  LRRK2 RNA guide
cuuugcucuugugaguagug

SEQ ID NO: 36186 - RNA, 20 nt, Artificial Sequence
  LRRK2 RNA guide
gaguagugcugugaugaacu

SEQ ID NO: 36187 - RNA, 20 nt, Artificial Sequence
  LRRK2 RNA guide
gauuccaugucuuugcucuu

SEQ ID NO: 36188 - RNA, 20 nt, Artificial Sequence
  LRRK2 RNA guide
gcucuugugaguagugcugu

SEQ ID NO: 36189 - RNA, 20 nt, Artificial Sequence
  LRRK2 RNA guide
gugaguagugcugugaugaa

SEQ ID NO: 36190 - RNA, 20 nt, Artificial Sequence
  LRRK2 RNA guide
guucaucacagcacuacuca

SEQ ID NO: 36191 - RNA, 20 nt, Artificial Sequence
  LRRK2 RNA guide
uaguucaucacagcacuacu

SEQ ID NO: 36192 - RNA, 20 nt, Artificial Sequence
  LRRK2 RNA guide
ucacagcacuacucacaaga

SEQ ID NO: 36193 - RNA, 20 nt, Artificial Sequence
  LRRK2 RNA guide
ucaucacagcacuacucaca

SEQ ID NO: 36194 - RNA, 20 nt, Artificial Sequence
  LRRK2 RNA guide
ucuugugaguagugcuguga

SEQ ID NO: 36195 - RNA, 20 nt, Artificial Sequence
  LRRK2 RNA guide
ucuuugcucuugugaguagu

SEQ ID NO: 36196 - RNA, 20 nt, Artificial Sequence
  LRRK2 RNA guide
ugaguagugcugugaugaac

SEQ ID NO: 36197 - RNA, 20 nt, Artificial Sequence
  LRRK2 RNA guide
ugcucuugugaguagugcug

SEQ ID NO: 36198 - RNA, 20 nt, Artificial Sequence
  LRRK2 RNA guide
ugugaguagugcugugauga

SEQ ID NO: 36199 - RNA, 20 nt, Artificial Sequence
  LRRK2 RNA guide
uuaguucaucacagcacuac

SEQ ID NO: 36200 - RNA, 20 nt, Artificial Sequence
  LRRK2 RNA guide
uucaucacagcacuacucac

SEQ ID NO: 36201 - RNA, 20 nt, Artificial Sequence
  LRRK2 RNA guide
uugcucuugugaguagugcu

SEQ ID NO: 36202 - RNA, 20 nt, Artificial Sequence
  LRRK2 RNA guide
uugugaguagugcugugaug

SEQ ID NO: 36203 - RNA, 20 nt, Artificial Sequence
  LRRK2 RNA guide
uuugcucuugugaguagugc

SEQ ID NO: 36204 - RNA, 21 nt, Artificial Sequence
  LRRK2 RNA guide
acagcacuacucacaagagca

SEQ ID NO: 36205 - RNA, 21 nt, Artificial Sequence
  LRRK2 RNA guide
acucacaagagcaaagacaug

SEQ ID NO: 36206 - RNA, 21 nt, Artificial Sequence
  LRRK2 RNA guide
aguagugcugugaugaacuaa

SEQ ID NO: 36207 - RNA, 21 nt, Artificial Sequence
  LRRK2 RNA guide
aguucaucacagcacuacuca

SEQ ID NO: 36208 - RNA, 21 nt, Artificial Sequence
  LRRK2 RNA guide
aucacagcacuacucacaaga

SEQ ID NO: 36209 - RNA, 21 nt, Artificial Sequence
  LRRK2 RNA guide
auuaguucaucacagcacuac

SEQ ID NO: 36210 - RNA, 21 nt, Artificial Sequence
  LRRK2 RNA guide
auuccaugucuuugcucuugu

SEQ ID NO: 36211 - RNA, 21 nt, Artificial Sequence
  LRRK2 RNA guide
cacagcacuacucacaagagc

SEQ ID NO: 36212 - RNA, 21 nt, Artificial Sequence
  LRRK2 RNA guide
caucacagcacuacucacaag

SEQ ID NO: 36213 - RNA, 21 nt, Artificial Sequence
  LRRK2 RNA guide
cucuugugaguagugcuguga

SEQ ID NO: 36214 - RNA, 21 nt, Artificial Sequence
  LRRK2 RNA guide
cuugugaguagugcugugaug

SEQ ID NO: 36215 - RNA, 21 nt, Artificial Sequence
  LRRK2 RNA guide
cuuugcucuugugaguagugc

SEQ ID NO: 36216 - RNA, 21 nt, Artificial Sequence
  LRRK2 RNA guide
gaguagugcugugaugaacua

SEQ ID NO: 36217 - RNA, 21 nt, Artificial Sequence
  LRRK2 RNA guide
gauuccaugucuuugcucuug

SEQ ID NO: 36218 - RNA, 21 nt, Artificial Sequence
  LRRK2 RNA guide
gcucuugugaguagugcugug

SEQ ID NO: 36219 - RNA, 21 nt, Artificial Sequence
  LRRK2 RNA guide
gucuuugcucuugugaguagu

SEQ ID NO: 36220 - RNA, 21 nt, Artificial Sequence
  LRRK2 RNA guide
gugaguagugcugugaugaac

SEQ ID NO: 36221 - RNA, 21 nt, Artificial Sequence
  LRRK2 RNA guide
guucaucacagcacuacucac

SEQ ID NO: 36222 - RNA, 21 nt, Artificial Sequence
  LRRK2 RNA guide
uacucacaagagcaaagacau

SEQ ID NO: 36223 - RNA, 21 nt, Artificial Sequence
  LRRK2 RNA guide
uaguucaucacagcacuacuc

SEQ ID NO: 36224 - RNA, 21 nt, Artificial Sequence
  LRRK2 RNA guide
ucacagcacuacucacaagag

SEQ ID NO: 36225 - RNA, 21 nt, Artificial Sequence
  LRRK2 RNA guide
ucaucacagcacuacucacaa

SEQ ID NO: 36226 - RNA, 21 nt, Artificial Sequence
  LRRK2 RNA guide
ucuugugaguagugcugugau

SEQ ID NO: 36227 - RNA, 21 nt, Artificial Sequence
  LRRK2 RNA guide
ucuuugcucuugugaguagug

SEQ ID NO: 36228 - RNA, 21 nt, Artificial Sequence
  LRRK2 RNA guide
ugaguagugcugugaugaacu

SEQ ID NO: 36229 - RNA, 21 nt, Artificial Sequence
  LRRK2 RNA guide
ugauuccaugucuuugcucuu

SEQ ID NO: 36230 - RNA, 21 nt, Artificial Sequence
  LRRK2 RNA guide
ugcucuugugaguagugcugu

SEQ ID NO: 36231 - RNA, 21 nt, Artificial Sequence
  LRRK2 RNA guide
ugugaguagugcugugaugaa

SEQ ID NO: 36232 - RNA, 21 nt, Artificial Sequence
  LRRK2 RNA guide
uuaguucaucacagcacuacu

SEQ ID NO: 36233 - RNA, 21 nt, Artificial Sequence
  LRRK2 RNA guide
uucaucacagcacuacucaca

SEQ ID NO: 36234 - RNA, 21 nt, Artificial Sequence
  LRRK2 RNA guide
uugcucuugugaguagugcug

SEQ ID NO: 36235 - RNA, 21 nt, Artificial Sequence
  LRRK2 RNA guide
uugugaguagugcugugauga

SEQ ID NO: 36236 - RNA, 21 nt, Artificial Sequence
  LRRK2 RNA guide
uuugcucuugugaguagugcu

SEQ ID NO: 36237 - RNA, 22 nt, Artificial Sequence
  LRRK2 RNA guide
acagcacuacucacaagagcaa

SEQ ID NO: 36238 - RNA, 22 nt, Artificial Sequence
  LRRK2 RNA guide
acucacaagagcaaagacaugg

SEQ ID NO: 36239 - RNA, 22 nt, Artificial Sequence
  LRRK2 RNA guide
aguagugcugugaugaacuaau

SEQ ID NO: 36240 - RNA, 22 nt, Artificial Sequence
  LRRK2 RNA guide
aguucaucacagcacuacucac

SEQ ID NO: 36241 - RNA, 22 nt, Artificial Sequence
  LRRK2 RNA guide
aucacagcacuacucacaagag

SEQ ID NO: 36242 - RNA, 22 nt, Artificial Sequence
  LRRK2 RNA guide
auuaguucaucacagcacuacu

SEQ ID NO: 36243 - RNA, 22 nt, Artificial Sequence
  LRRK2 RNA guide
auuccaugucuuugcucuugug

SEQ ID NO: 36244 - RNA, 22 nt, Artificial Sequence
  LRRK2 RNA guide
cacagcacuacucacaagagca

SEQ ID NO: 36245 - RNA, 22 nt, Artificial Sequence
  LRRK2 RNA guide
caucacagcacuacucacaaga

SEQ ID NO: 36246 - RNA, 22 nt, Artificial Sequence
  LRRK2 RNA guide
cuacucacaagagcaaagacau

SEQ ID NO: 36247 - RNA, 22 nt, Artificial Sequence
  LRRK2 RNA guide
cucuugugaguagugcugugau

SEQ ID NO: 36248 - RNA, 22 nt, Artificial Sequence
  LRRK2 RNA guide
cuugugaguagugcugugauga

SEQ ID NO: 36249 - RNA, 22 nt, Artificial Sequence
  LRRK2 RNA guide
cuuugcucuugugaguagugcu

SEQ ID NO: 36250 - RNA, 22 nt, Artificial Sequence
  LRRK2 RNA guide
gaguagugcugugaugaacuaa

SEQ ID NO: 36251 - RNA, 22 nt, Artificial Sequence
  LRRK2 RNA guide
gauuaguucaucacagcacuac

SEQ ID NO: 36252 - RNA, 22 nt, Artificial Sequence
  LRRK2 RNA guide
gauuccaugucuuugcucuugu

SEQ ID NO: 36253 - RNA, 22 nt, Artificial Sequence
  LRRK2 RNA guide
gcucuugugaguagugcuguga

SEQ ID NO: 36254 - RNA, 22 nt, Artificial Sequence
  LRRK2 RNA guide
gucuuugcucuugugaguagug

SEQ ID NO: 36255 - RNA, 22 nt, Artificial Sequence
  LRRK2 RNA guide
gugaguagugcugugaugaacu

SEQ ID NO: 36256 - RNA, 22 nt, Artificial Sequence
  LRRK2 RNA guide
guucaucacagcacuacucaca

SEQ ID NO: 36257 - RNA, 22 nt, Artificial Sequence
  LRRK2 RNA guide
uacucacaagagcaaagacaug

SEQ ID NO: 36258 - RNA, 22 nt, Artificial Sequence
  LRRK2 RNA guide
uaguucaucacagcacuacuca

SEQ ID NO: 36259 - RNA, 22 nt, Artificial Sequence
  LRRK2 RNA guide
ucacagcacuacucacaagagc

SEQ ID NO: 36260 - RNA, 22 nt, Artificial Sequence
  LRRK2 RNA guide
ucaucacagcacuacucacaag

SEQ ID NO: 36261 - RNA, 22 nt, Artificial Sequence
  LRRK2 RNA guide
ucuugugaguagugcugugaug

SEQ ID NO: 36262 - RNA, 22 nt, Artificial Sequence
  LRRK2 RNA guide
ucuuugcucuugugaguagugc

SEQ ID NO: 36263 - RNA, 22 nt, Artificial Sequence
  LRRK2 RNA guide
ugaguagugcugugaugaacua

SEQ ID NO: 36264 - RNA, 22 nt, Artificial Sequence
  LRRK2 RNA guide
ugauuccaugucuuugcucuug

SEQ ID NO: 36265 - RNA, 22 nt, Artificial Sequence
  LRRK2 RNA guide
ugcucuugugaguagugcugug

SEQ ID NO: 36266 - RNA, 22 nt, Artificial Sequence
  LRRK2 RNA guide
ugucuuugcucuugugaguagu

SEQ ID NO: 36267 - RNA, 22 nt, Artificial Sequence
  LRRK2 RNA guide
ugugaguagugcugugaugaac

SEQ ID NO: 36268 - RNA, 22 nt, Artificial Sequence
  LRRK2 RNA guide
uuaguucaucacagcacuacuc

SEQ ID NO: 36269 - RNA, 22 nt, Artificial Sequence
  LRRK2 RNA guide
uucaucacagcacuacucacaa

SEQ ID NO: 36270 - RNA, 22 nt, Artificial Sequence
  LRRK2 RNA guide
uugauuccaugucuuugcucuu

SEQ ID NO: 36271 - RNA, 22 nt, Artificial Sequence
  LRRK2 RNA guide
uugcucuugugaguagugcugu

SEQ ID NO: 36272 - RNA, 22 nt, Artificial Sequence
  LRRK2 RNA guide
uugugaguagugcugugaugaa

SEQ ID NO: 36273 - RNA, 22 nt, Artificial Sequence
  LRRK2 RNA guide
uuugcucuugugaguagugcug

SEQ ID NO: 36274 - RNA, 20 nt, Artificial Sequence
  LRRK2 RNA guide
aaaaaaccuaauagacgaga

SEQ ID NO: 36275 - RNA, 20 nt, Artificial Sequence
  LRRK2 RNA guide
aaaaaccuaauagacgagag

SEQ ID NO: 36276 - RNA, 20 nt, Artificial Sequence
  LRRK2 RNA guide
aaaaccuaauagacgagagg

SEQ ID NO: 36277 - RNA, 20 nt, Artificial Sequence
  LRRK2 RNA guide
aaaccuaauagacgagagga

SEQ ID NO: 36278 - RNA, 20 nt, Artificial Sequence
  LRRK2 RNA guide
aaccuaauagacgagaggag

SEQ ID NO: 36279 - RNA, 20 nt, Artificial Sequence
  LRRK2 RNA guide
aauaauccuccucucgucua

SEQ ID NO: 36280 - RNA, 20 nt, Artificial Sequence
  LRRK2 RNA guide
aauccuccucucgucuauua

SEQ ID NO: 36281 - RNA, 20 nt, Artificial Sequence
  LRRK2 RNA guide
accuaauagacgagaggagg

SEQ ID NO: 36282 - RNA, 20 nt, Artificial Sequence
  LRRK2 RNA guide
auaauccuccucucgucuau

SEQ ID NO: 36283 - RNA, 20 nt, Artificial Sequence
  LRRK2 RNA guide
auccuccucucgucuauuag

SEQ ID NO: 36284 - RNA, 20 nt, Artificial Sequence
  LRRK2 RNA guide
ccuccucucgucuauuaggu

SEQ ID NO: 36285 - RNA, 20 nt, Artificial Sequence
  LRRK2 RNA guide
ccucucgucuauuagguuuu

SEQ ID NO: 36286 - RNA, 20 nt, Artificial Sequence
  LRRK2 RNA guide
cuccucucgucuauuagguu

SEQ ID NO: 36287 - RNA, 20 nt, Artificial Sequence
  LRRK2 RNA guide
cucucgucuauuagguuuuu

SEQ ID NO: 36288 - RNA, 20 nt, Artificial Sequence
  LRRK2 RNA guide
uaauccuccucucgucuauu

SEQ ID NO: 36289 - RNA, 20 nt, Artificial Sequence
  LRRK2 RNA guide
uccuccucucgucuauuagg

SEQ ID NO: 36290 - RNA, 20 nt, Artificial Sequence
  LRRK2 RNA guide
uccucucgucuauuagguuu

SEQ ID NO: 36291 - RNA, 20 nt, Artificial Sequence
  LRRK2 RNA guide
ucucgucuauuagguuuuuu

SEQ ID NO: 36292 - RNA, 21 nt, Artificial Sequence
  LRRK2 RNA guide
aaaaaaccuaauagacgagag

SEQ ID NO: 36293 - RNA, 21 nt, Artificial Sequence
  LRRK2 RNA guide
aaaaaccuaauagacgagagg

SEQ ID NO: 36294 - RNA, 21 nt, Artificial Sequence
  LRRK2 RNA guide
aaaaccuaauagacgagagga

SEQ ID NO: 36295 - RNA, 21 nt, Artificial Sequence
  LRRK2 RNA guide
aaaccuaauagacgagaggag

SEQ ID NO: 36296 - RNA, 21 nt, Artificial Sequence
  LRRK2 RNA guide
aaauaauccuccucucgucua

SEQ ID NO: 36297 - RNA, 21 nt, Artificial Sequence
  LRRK2 RNA guide
aaccuaauagacgagaggagg

SEQ ID NO: 36298 - RNA, 21 nt, Artificial Sequence
  LRRK2 RNA guide
aauaauccuccucucgucuau

SEQ ID NO: 36299 - RNA, 21 nt, Artificial Sequence
  LRRK2 RNA guide
aauccuccucucgucuauuag

SEQ ID NO: 36300 - RNA, 21 nt, Artificial Sequence
  LRRK2 RNA guide
accuaauagacgagaggagga

SEQ ID NO: 36301 - RNA, 21 nt, Artificial Sequence
  LRRK2 RNA guide
auaauccuccucucgucuauu

SEQ ID NO: 36302 - RNA, 21 nt, Artificial Sequence
  LRRK2 RNA guide
auccuccucucgucuauuagg

SEQ ID NO: 36303 - RNA, 21 nt, Artificial Sequence
  LRRK2 RNA guide
ccuccucucgucuauuagguu

SEQ ID NO: 36304 - RNA, 21 nt, Artificial Sequence
  LRRK2 RNA guide
ccucucgucuauuagguuuuu

SEQ ID NO: 36305 - RNA, 21 nt, Artificial Sequence
  LRRK2 RNA guide
cuccucucgucuauuagguuu

SEQ ID NO: 36306 - RNA, 21 nt, Artificial Sequence
  LRRK2 RNA guide
cucucgucuauuagguuuuuu

SEQ ID NO: 36307 - RNA, 21 nt, Artificial Sequence
  LRRK2 RNA guide
uaauccuccucucgucuauua

SEQ ID NO: 36308 - RNA, 21 nt, Artificial Sequence
  LRRK2 RNA guide
uccuccucucgucuauuaggu

SEQ ID NO: 36309 - RNA, 21 nt, Artificial Sequence
  LRRK2 RNA guide
uccucucgucuauuagguuuu

SEQ ID NO: 36310 - RNA, 22 nt, Artificial Sequence
  LRRK2 RNA guide
aaaaaaccuaauagacgagagg

SEQ ID NO: 36311 - RNA, 22 nt, Artificial Sequence
  LRRK2 RNA guide
aaaaaccuaauagacgagagga

SEQ ID NO: 36312 - RNA, 22 nt, Artificial Sequence
  LRRK2 RNA guide
aaaaccuaauagacgagaggag

SEQ ID NO: 36313 - RNA, 22 nt, Artificial Sequence
  LRRK2 RNA guide
aaaccuaauagacgagaggagg

SEQ ID NO: 36314 - RNA, 22 nt, Artificial Sequence
  LRRK2 RNA guide
aaauaauccuccucucgucuau

SEQ ID NO: 36315 - RNA, 22 nt, Artificial Sequence
  LRRK2 RNA guide
aaccuaauagacgagaggagga

SEQ ID NO: 36316 - RNA, 22 nt, Artificial Sequence
  LRRK2 RNA guide
aauaauccuccucucgucuauu

SEQ ID NO: 36317 - RNA, 22 nt, Artificial Sequence
  LRRK2 RNA guide
aauccuccucucgucuauuagg

SEQ ID NO: 36318 - RNA, 22 nt, Artificial Sequence
  LRRK2 RNA guide
accuaauagacgagaggaggau

SEQ ID NO: 36319 - RNA, 22 nt, Artificial Sequence
  LRRK2 RNA guide
auaauccuccucucgucuauua

SEQ ID NO: 36320 - RNA, 22 nt, Artificial Sequence
  LRRK2 RNA guide
auccuccucucgucuauuaggu

SEQ ID NO: 36321 - RNA, 22 nt, Artificial Sequence
  LRRK2 RNA guide
caaauaauccuccucucgucua

SEQ ID NO: 36322 - RNA, 22 nt, Artificial Sequence
  LRRK2 RNA guide
ccuccucucgucuauuagguuu

SEQ ID NO: 36323 - RNA, 22 nt, Artificial Sequence
  LRRK2 RNA guide
ccucucgucuauuagguuuuuu

SEQ ID NO: 36324 - RNA, 22 nt, Artificial Sequence
  LRRK2 RNA guide
cuccucucgucuauuagguuuu

SEQ ID NO: 36325 - RNA, 22 nt, Artificial Sequence
  LRRK2 RNA guide
uaauccuccucucgucuauuag

SEQ ID NO: 36326 - RNA, 22 nt, Artificial Sequence
  LRRK2 RNA guide
uccuccucucgucuauuagguu

SEQ ID NO: 36327 - RNA, 22 nt, Artificial Sequence
  LRRK2 RNA guide
uccucucgucuauuagguuuuu

SEQ ID NO: 36328 - RNA, 20 nt, Artificial Sequence
  LRRK2 RNA guide
acgucucauaaugcuaccau

SEQ ID NO: 36329 - RNA, 20 nt, Artificial Sequence
  LRRK2 RNA guide
agcauuaugagacguauaau

SEQ ID NO: 36330 - RNA, 20 nt, Artificial Sequence
  LRRK2 RNA guide
aggaugguagcauuaugaga

SEQ ID NO: 36331 - RNA, 20 nt, Artificial Sequence
  LRRK2 RNA guide
auacgucucauaaugcuacc

SEQ ID NO: 36332 - RNA, 20 nt, Artificial Sequence
  LRRK2 RNA guide
auaggaugguagcauuauga

SEQ ID NO: 36333 - RNA, 20 nt, Artificial Sequence
  LRRK2 RNA guide
augguagcauuaugagacgu

SEQ ID NO: 36334 - RNA, 20 nt, Artificial Sequence
  LRRK2 RNA guide
auuauacgucucauaaugcu

SEQ ID NO: 36335 - RNA, 20 nt, Artificial Sequence
  LRRK2 RNA guide
cgucucauaaugcuaccauc

SEQ ID NO: 36336 - RNA, 20 nt, Artificial Sequence
  LRRK2 RNA guide
gauaggaugguagcauuaug

SEQ ID NO: 36337 - RNA, 20 nt, Artificial Sequence
  LRRK2 RNA guide
gaugguagcauuaugagacg

SEQ ID NO: 36338 - RNA, 20 nt, Artificial Sequence
  LRRK2 RNA guide
gcauuaugagacguauaaua

SEQ ID NO: 36339 - RNA, 20 nt, Artificial Sequence
  LRRK2 RNA guide
ggauaggaugguagcauuau

SEQ ID NO: 36340 - RNA, 20 nt, Artificial Sequence
  LRRK2 RNA guide
ggaugguagcauuaugagac

SEQ ID NO: 36341 - RNA, 20 nt, Artificial Sequence
  LRRK2 RNA guide
gguagcauuaugagacguau

SEQ ID NO: 36342 - RNA, 20 nt, Artificial Sequence
  LRRK2 RNA guide
guagcauuaugagacguaua

SEQ ID NO: 36343 - RNA, 20 nt, Artificial Sequence
  LRRK2 RNA guide
uacgucucauaaugcuacca

SEQ ID NO: 36344 - RNA, 20 nt, Artificial Sequence
  LRRK2 RNA guide
uagcauuaugagacguauaa

SEQ ID NO: 36345 - RNA, 20 nt, Artificial Sequence
  LRRK2 RNA guide
uaggaugguagcauuaugag

SEQ ID NO: 36346 - RNA, 20 nt, Artificial Sequence
  LRRK2 RNA guide
uauacgucucauaaugcuac

SEQ ID NO: 36347 - RNA, 20 nt, Artificial Sequence
  LRRK2 RNA guide
uauuauacgucucauaaugc

SEQ ID NO: 36348 - RNA, 20 nt, Artificial Sequence
  LRRK2 RNA guide
ugguagcauuaugagacgua

SEQ ID NO: 36349 - RNA, 20 nt, Artificial Sequence
  LRRK2 RNA guide
uuauacgucucauaaugcua

SEQ ID NO: 36350 - RNA, 21 nt, Artificial Sequence
  LRRK2 RNA guide
acgucucauaaugcuaccauc

SEQ ID NO: 36351 - RNA, 21 nt, Artificial Sequence
  LRRK2 RNA guide
aggaugguagcauuaugagac

SEQ ID NO: 36352 - RNA, 21 nt, Artificial Sequence
  LRRK2 RNA guide
auacgucucauaaugcuacca

SEQ ID NO: 36353 - RNA, 21 nt, Artificial Sequence
  LRRK2 RNA guide
auaggaugguagcauuaugag

SEQ ID NO: 36354 - RNA, 21 nt, Artificial Sequence
  LRRK2 RNA guide
augguagcauuaugagacgua

SEQ ID NO: 36355 - RNA, 21 nt, Artificial Sequence
  LRRK2 RNA guide
cgucucauaaugcuaccaucc

SEQ ID NO: 36356 - RNA, 21 nt, Artificial Sequence
  LRRK2 RNA guide
gauaggaugguagcauuauga

SEQ ID NO: 36357 - RNA, 21 nt, Artificial Sequence
  LRRK2 RNA guide
gaugguagcauuaugagacgu

SEQ ID NO: 36358 - RNA, 21 nt, Artificial Sequence
  LRRK2 RNA guide
ggauaggaugguagcauuaug

SEQ ID NO: 36359 - RNA, 21 nt, Artificial Sequence
  LRRK2 RNA guide
ggaugguagcauuaugagacg

SEQ ID NO: 36360 - RNA, 21 nt, Artificial Sequence
  LRRK2 RNA guide
gguagcauuaugagacguaua

SEQ ID NO: 36361 - RNA, 21 nt, Artificial Sequence
  LRRK2 RNA guide
guagcauuaugagacguauaa

SEQ ID NO: 36362 - RNA, 21 nt, Artificial Sequence
  LRRK2 RNA guide
uacgucucauaaugcuaccau

SEQ ID NO: 36363 - RNA, 21 nt, Artificial Sequence
  LRRK2 RNA guide
uaggaugguagcauuaugaga

SEQ ID NO: 36364 - RNA, 21 nt, Artificial Sequence
  LRRK2 RNA guide
uauacgucucauaaugcuacc

SEQ ID NO: 36365 - RNA, 21 nt, Artificial Sequence
  LRRK2 RNA guide
uggauaggaugguagcauuau

SEQ ID NO: 36366 - RNA, 21 nt, Artificial Sequence
  LRRK2 RNA guide
ugguagcauuaugagacguau

SEQ ID NO: 36367 - RNA, 21 nt, Artificial Sequence
  LRRK2 RNA guide
uuauacgucucauaaugcuac

SEQ ID NO: 36368 - RNA, 22 nt, Artificial Sequence
  LRRK2 RNA guide
acgucucauaaugcuaccaucc

SEQ ID NO: 36369 - RNA, 22 nt, Artificial Sequence
  LRRK2 RNA guide
aggaugguagcauuaugagacg

SEQ ID NO: 36370 - RNA, 22 nt, Artificial Sequence
  LRRK2 RNA guide
auacgucucauaaugcuaccau

SEQ ID NO: 36371 - RNA, 22 nt, Artificial Sequence
  LRRK2 RNA guide
auaggaugguagcauuaugaga

SEQ ID NO: 36372 - RNA, 22 nt, Artificial Sequence
  LRRK2 RNA guide
augguagcauuaugagacguau

SEQ ID NO: 36373 - RNA, 22 nt, Artificial Sequence
  LRRK2 RNA guide
auuauacgucucauaaugcuac

SEQ ID NO: 36374 - RNA, 22 nt, Artificial Sequence
  LRRK2 RNA guide
cgucucauaaugcuaccauccu

SEQ ID NO: 36375 - RNA, 22 nt, Artificial Sequence
  LRRK2 RNA guide
cuggauaggaugguagcauuau

SEQ ID NO: 36376 - RNA, 22 nt, Artificial Sequence
  LRRK2 RNA guide
gauaggaugguagcauuaugag

SEQ ID NO: 36377 - RNA, 22 nt, Artificial Sequence
  LRRK2 RNA guide
gaugguagcauuaugagacgua

SEQ ID NO: 36378 - RNA, 22 nt, Artificial Sequence
  LRRK2 RNA guide
ggauaggaugguagcauuauga

SEQ ID NO: 36379 - RNA, 22 nt, Artificial Sequence
  LRRK2 RNA guide
ggaugguagcauuaugagacgu

SEQ ID NO: 36380 - RNA, 22 nt, Artificial Sequence
  LRRK2 RNA guide
gguagcauuaugagacguauaa

SEQ ID NO: 36381 - RNA, 22 nt, Artificial Sequence
  LRRK2 RNA guide
guagcauuaugagacguauaau

SEQ ID NO: 36382 - RNA, 22 nt, Artificial Sequence
  LRRK2 RNA guide
uacgucucauaaugcuaccauc

SEQ ID NO: 36383 - RNA, 22 nt, Artificial Sequence
  LRRK2 RNA guide
uaggaugguagcauuaugagac

SEQ ID NO: 36384 - RNA, 22 nt, Artificial Sequence
  LRRK2 RNA guide
uauacgucucauaaugcuacca

SEQ ID NO: 36385 - RNA, 22 nt, Artificial Sequence
  LRRK2 RNA guide
uggauaggaugguagcauuaug

SEQ ID NO: 36386 - RNA, 22 nt, Artificial Sequence
  LRRK2 RNA guide
ugguagcauuaugagacguaua

SEQ ID NO: 36387 - RNA, 22 nt, Artificial Sequence
  LRRK2 RNA guide
uuauacgucucauaaugcuacc

SEQ ID NO: 36388 - RNA, 20 nt, Artificial Sequence
  LRRK2 RNA guide
acaucucauaaugcuaccau

SEQ ID NO: 36389 - RNA, 20 nt, Artificial Sequence
  LRRK2 RNA guide
auacaucucauaaugcuacc

SEQ ID NO: 36390 - RNA, 20 nt, Artificial Sequence
  LRRK2 RNA guide
augguagcauuaugagaugu

SEQ ID NO: 36391 - RNA, 20 nt, Artificial Sequence
  LRRK2 RNA guide
caucucauaaugcuaccauc

SEQ ID NO: 36392 - RNA, 20 nt, Artificial Sequence
  LRRK2 RNA guide
gaugguagcauuaugagaug

SEQ ID NO: 36393 - RNA, 20 nt, Artificial Sequence
  LRRK2 RNA guide
ggaugguagcauuaugagau

SEQ ID NO: 36394 - RNA, 20 nt, Artificial Sequence
  LRRK2 RNA guide
gguagcauuaugagauguau

SEQ ID NO: 36395 - RNA, 20 nt, Artificial Sequence
  LRRK2 RNA guide
guagcauuaugagauguaua

SEQ ID NO: 36396 - RNA, 20 nt, Artificial Sequence
  LRRK2 RNA guide
uacaucucauaaugcuacca

SEQ ID NO: 36397 - RNA, 20 nt, Artificial Sequence
  LRRK2 RNA guide
uauacaucucauaaugcuac

SEQ ID NO: 36398 - RNA, 20 nt, Artificial Sequence
  LRRK2 RNA guide
ugguagcauuaugagaugua

SEQ ID NO: 36399 - RNA, 21 nt, Artificial Sequence
  LRRK2 RNA guide
acaucucauaaugcuaccauc

SEQ ID NO: 36400 - RNA, 21 nt, Artificial Sequence
  LRRK2 RNA guide
aggaugguagcauuaugagau

SEQ ID NO: 36401 - RNA, 21 nt, Artificial Sequence
  LRRK2 RNA guide
auacaucucauaaugcuacca

SEQ ID NO: 36402 - RNA, 21 nt, Artificial Sequence
  LRRK2 RNA guide
augguagcauuaugagaugua

SEQ ID NO: 36403 - RNA, 21 nt, Artificial Sequence
  LRRK2 RNA guide
caucucauaaugcuaccaucc

SEQ ID NO: 36404 - RNA, 21 nt, Artificial Sequence
  LRRK2 RNA guide
gaugguagcauuaugagaugu

SEQ ID NO: 36405 - RNA, 21 nt, Artificial Sequence
  LRRK2 RNA guide
ggaugguagcauuaugagaug

SEQ ID NO: 36406 - RNA, 21 nt, Artificial Sequence
  LRRK2 RNA guide
gguagcauuaugagauguaua

SEQ ID NO: 36407 - RNA, 21 nt, Artificial Sequence
  LRRK2 RNA guide
uacaucucauaaugcuaccau

SEQ ID NO: 36408 - RNA, 21 nt, Artificial Sequence
  LRRK2 RNA guide
uauacaucucauaaugcuacc

SEQ ID NO: 36409 - RNA, 21 nt, Artificial Sequence
  LRRK2 RNA guide
ugguagcauuaugagauguau

SEQ ID NO: 36410 - RNA, 22 nt, Artificial Sequence
  LRRK2 RNA guide
acaucucauaaugcuaccaucc

SEQ ID NO: 36411 - RNA, 22 nt, Artificial Sequence
  LRRK2 RNA guide
aggaugguagcauuaugagaug

SEQ ID NO: 36412 - RNA, 22 nt, Artificial Sequence
  LRRK2 RNA guide
auacaucucauaaugcuaccau

SEQ ID NO: 36413 - RNA, 22 nt, Artificial Sequence
  LRRK2 RNA guide
augguagcauuaugagauguau

SEQ ID NO: 36414 - RNA, 22 nt, Artificial Sequence
  LRRK2 RNA guide
caucucauaaugcuaccauccu

SEQ ID NO: 36415 - RNA, 22 nt, Artificial Sequence
  LRRK2 RNA guide
gaugguagcauuaugagaugua

SEQ ID NO: 36416 - RNA, 22 nt, Artificial Sequence
  LRRK2 RNA guide
ggaugguagcauuaugagaugu

SEQ ID NO: 36417 - RNA, 22 nt, Artificial Sequence
  LRRK2 RNA guide
gguagcauuaugagauguauaa

SEQ ID NO: 36418 - RNA, 22 nt, Artificial Sequence
  LRRK2 RNA guide
uacaucucauaaugcuaccauc

SEQ ID NO: 36419 - RNA, 22 nt, Artificial Sequence
  LRRK2 RNA guide
uaggaugguagcauuaugagau

SEQ ID NO: 36420 - RNA, 22 nt, Artificial Sequence
  LRRK2 RNA guide
uauacaucucauaaugcuacca

SEQ ID NO: 36421 - RNA, 22 nt, Artificial Sequence
  LRRK2 RNA guide
ugguagcauuaugagauguaua

SEQ ID NO: 36422 - RNA, 22 nt, Artificial Sequence
  LRRK2 RNA guide
uuauacaucucauaaugcuacc

SEQ ID NO: 36423 - RNA, 20 nt, Artificial Sequence
  LRRK2 RNA guide
acagauuucuuuuuucuccc

SEQ ID NO: 36424 - RNA, 20 nt, Artificial Sequence
  LRRK2 RNA guide
agauuucuuuuuucuccccu

SEQ ID NO: 36425 - RNA, 20 nt, Artificial Sequence
  LRRK2 RNA guide
agcaugcggccuccuggauu

SEQ ID NO: 36426 - RNA, 20 nt, Artificial Sequence
  LRRK2 RNA guide
aggggagaaaaaagaaaucu

SEQ ID NO: 36427 - RNA, 20 nt, Artificial Sequence
  LRRK2 RNA guide
augcggccuccuggauuagg

SEQ ID NO: 36428 - RNA, 20 nt, Artificial Sequence
  LRRK2 RNA guide
auuaggggagaaaaaagaaa

SEQ ID NO: 36429 - RNA, 20 nt, Artificial Sequence
  LRRK2 RNA guide
auuucuuuuuucuccccuaa

SEQ ID NO: 36430 - RNA, 20 nt, Artificial Sequence
  LRRK2 RNA guide
cagauuucuuuuuucucccc

SEQ ID NO: 36431 - RNA, 20 nt, Artificial Sequence
  LRRK2 RNA guide
cagcaugcggccuccuggau

SEQ ID NO: 36432 - RNA, 20 nt, Artificial Sequence
  LRRK2 RNA guide
caugcggccuccuggauuag

SEQ ID NO: 36433 - RNA, 20 nt, Artificial Sequence
  LRRK2 RNA guide
ccagcaugcggccuccugga

SEQ ID NO: 36434 - RNA, 20 nt, Artificial Sequence
  LRRK2 RNA guide
ccccuaauccaggaggccgc

SEQ ID NO: 36435 - RNA, 20 nt, Artificial Sequence
  LRRK2 RNA guide
cccuaauccaggaggccgca

SEQ ID NO: 36436 - RNA, 20 nt, Artificial Sequence
  LRRK2 RNA guide
ccuccuggauuaggggagaa

SEQ ID NO: 36437 - RNA, 20 nt, Artificial Sequence
  LRRK2 RNA guide
ccuggauuaggggagaaaaa

SEQ ID NO: 36438 - RNA, 20 nt, Artificial Sequence
  LRRK2 RNA guide
cggccuccuggauuagggga

SEQ ID NO: 36439 - RNA, 20 nt, Artificial Sequence
  LRRK2 RNA guide
cuccccuaauccaggaggcc

SEQ ID NO: 36440 - RNA, 20 nt, Artificial Sequence
  LRRK2 RNA guide
cuccuggauuaggggagaaa

SEQ ID NO: 36441 - RNA, 20 nt, Artificial Sequence
  LRRK2 RNA guide
cuggauuaggggagaaaaaa

SEQ ID NO: 36442 - RNA, 20 nt, Artificial Sequence
  LRRK2 RNA guide
cuuuuuucuccccuaaucca

SEQ ID NO: 36443 - RNA, 20 nt, Artificial Sequence
  LRRK2 RNA guide
gacagauuucuuuuuucucc

SEQ ID NO: 36444 - RNA, 20 nt, Artificial Sequence
  LRRK2 RNA guide
gauuaggggagaaaaaagaa

SEQ ID NO: 36445 - RNA, 20 nt, Artificial Sequence
  LRRK2 RNA guide
gauuucuuuuuucuccccua

SEQ ID NO: 36446 - RNA, 20 nt, Artificial Sequence
  LRRK2 RNA guide
gcaugcggccuccuggauua

SEQ ID NO: 36447 - RNA, 20 nt, Artificial Sequence
  LRRK2 RNA guide
gccuccuggauuaggggaga

SEQ ID NO: 36448 - RNA, 20 nt, Artificial Sequence
  LRRK2 RNA guide
gcggccuccuggauuagggg

SEQ ID NO: 36449 - RNA, 20 nt, Artificial Sequence
  LRRK2 RNA guide
ggauuaggggagaaaaaaga

SEQ ID NO: 36450 - RNA, 20 nt, Artificial Sequence
  LRRK2 RNA guide
ggccuccuggauuaggggag

SEQ ID NO: 36451 - RNA, 20 nt, Artificial Sequence
  LRRK2 RNA guide
ggggagaaaaaagaaaucug

SEQ ID NO: 36452 - RNA, 20 nt, Artificial Sequence
  LRRK2 RNA guide
uaggggagaaaaaagaaauc

SEQ ID NO: 36453 - RNA, 20 nt, Artificial Sequence
  LRRK2 RNA guide
uccccuaauccaggaggccg

SEQ ID NO: 36454 - RNA, 20 nt, Artificial Sequence
  LRRK2 RNA guide
uccuggauuaggggagaaaa

SEQ ID NO: 36455 - RNA, 20 nt, Artificial Sequence
  LRRK2 RNA guide
ucuccccuaauccaggaggc

SEQ ID NO: 36456 - RNA, 20 nt, Artificial Sequence
  LRRK2 RNA guide
ucuuuuuucuccccuaaucc

SEQ ID NO: 36457 - RNA, 20 nt, Artificial Sequence
  LRRK2 RNA guide
ugacagauuucuuuuuucuc

SEQ ID NO: 36458 - RNA, 20 nt, Artificial Sequence
  LRRK2 RNA guide
ugcggccuccuggauuaggg

SEQ ID NO: 36459 - RNA, 20 nt, Artificial Sequence
  LRRK2 RNA guide
uggauuaggggagaaaaaag

SEQ ID NO: 36460 - RNA, 20 nt, Artificial Sequence
  LRRK2 RNA guide
uuaggggagaaaaaagaaau

SEQ ID NO: 36461 - RNA, 20 nt, Artificial Sequence
  LRRK2 RNA guide
uucuccccuaauccaggagg

SEQ ID NO: 36462 - RNA, 20 nt, Artificial Sequence
  LRRK2 RNA guide
uucuuuuuucuccccuaauc

SEQ ID NO: 36463 - RNA, 20 nt, Artificial Sequence
  LRRK2 RNA guide
uuucuccccuaauccaggag

SEQ ID NO: 36464 - RNA, 20 nt, Artificial Sequence
  LRRK2 RNA guide
uuucuuuuuucuccccuaau

SEQ ID NO: 36465 - RNA, 20 nt, Artificial Sequence
  LRRK2 RNA guide
uuuucuccccuaauccagga

SEQ ID NO: 36466 - RNA, 20 nt, Artificial Sequence
  LRRK2 RNA guide
uuuuucuccccuaauccagg

SEQ ID NO: 36467 - RNA, 20 nt, Artificial Sequence
  LRRK2 RNA guide
uuuuuucuccccuaauccag

SEQ ID NO: 36468 - RNA, 21 nt, Artificial Sequence
  LRRK2 RNA guide
acagauuucuuuuuucucccc

SEQ ID NO: 36469 - RNA, 21 nt, Artificial Sequence
  LRRK2 RNA guide
agauuucuuuuuucuccccua

SEQ ID NO: 36470 - RNA, 21 nt, Artificial Sequence
  LRRK2 RNA guide
agcaugcggccuccuggauua

SEQ ID NO: 36471 - RNA, 21 nt, Artificial Sequence
  LRRK2 RNA guide
aggggagaaaaaagaaaucug

SEQ ID NO: 36472 - RNA, 21 nt, Artificial Sequence
  LRRK2 RNA guide
augcggccuccuggauuaggg

SEQ ID NO: 36473 - RNA, 21 nt, Artificial Sequence
  LRRK2 RNA guide
cagauuucuuuuuucuccccu

SEQ ID NO: 36474 - RNA, 21 nt, Artificial Sequence
  LRRK2 RNA guide
cagcaugcggccuccuggauu

SEQ ID NO: 36475 - RNA, 21 nt, Artificial Sequence
  LRRK2 RNA guide
caugcggccuccuggauuagg

SEQ ID NO: 36476 - RNA, 21 nt, Artificial Sequence
  LRRK2 RNA guide
ccagcaugcggccuccuggau

SEQ ID NO: 36477 - RNA, 21 nt, Artificial Sequence
  LRRK2 RNA guide
cccagcaugcggccuccugga

SEQ ID NO: 36478 - RNA, 21 nt, Artificial Sequence
  LRRK2 RNA guide
ccccuaauccaggaggccgca

SEQ ID NO: 36479 - RNA, 21 nt, Artificial Sequence
  LRRK2 RNA guide
cccuaauccaggaggccgcau

SEQ ID NO: 36480 - RNA, 21 nt, Artificial Sequence
  LRRK2 RNA guide
ccuccuggauuaggggagaaa

SEQ ID NO: 36481 - RNA, 21 nt, Artificial Sequence
  LRRK2 RNA guide
ccuggauuaggggagaaaaaa

SEQ ID NO: 36482 - RNA, 21 nt, Artificial Sequence
  LRRK2 RNA guide
cggccuccuggauuaggggag

SEQ ID NO: 36483 - RNA, 21 nt, Artificial Sequence
  LRRK2 RNA guide
cuccccuaauccaggaggccg

SEQ ID NO: 36484 - RNA, 21 nt, Artificial Sequence
  LRRK2 RNA guide
cuccuggauuaggggagaaaa

SEQ ID NO: 36485 - RNA, 21 nt, Artificial Sequence
  LRRK2 RNA guide
cuggauuaggggagaaaaaag

SEQ ID NO: 36486 - RNA, 21 nt, Artificial Sequence
  LRRK2 RNA guide
cuuuuuucuccccuaauccag

SEQ ID NO: 36487 - RNA, 21 nt, Artificial Sequence
  LRRK2 RNA guide
gacagauuucuuuuuucuccc

SEQ ID NO: 36488 - RNA, 21 nt, Artificial Sequence
  LRRK2 RNA guide
gauuaggggagaaaaaagaaa

SEQ ID NO: 36489 - RNA, 21 nt, Artificial Sequence
  LRRK2 RNA guide
gauuucuuuuuucuccccuaa

SEQ ID NO: 36490 - RNA, 21 nt, Artificial Sequence
  LRRK2 RNA guide
gcaugcggccuccuggauuag

SEQ ID NO: 36491 - RNA, 21 nt, Artificial Sequence
  LRRK2 RNA guide
gccuccuggauuaggggagaa

SEQ ID NO: 36492 - RNA, 21 nt, Artificial Sequence
  LRRK2 RNA guide
gcggccuccuggauuagggga

SEQ ID NO: 36493 - RNA, 21 nt, Artificial Sequence
  LRRK2 RNA guide
ggauuaggggagaaaaaagaa

SEQ ID NO: 36494 - RNA, 21 nt, Artificial Sequence
  LRRK2 RNA guide
ggccuccuggauuaggggaga

SEQ ID NO: 36495 - RNA, 21 nt, Artificial Sequence
  LRRK2 RNA guide
ggggagaaaaaagaaaucugu

SEQ ID NO: 36496 - RNA, 21 nt, Artificial Sequence
  LRRK2 RNA guide
uaggggagaaaaaagaaaucu

SEQ ID NO: 36497 - RNA, 21 nt, Artificial Sequence
  LRRK2 RNA guide
uccccuaauccaggaggccgc

SEQ ID NO: 36498 - RNA, 21 nt, Artificial Sequence
  LRRK2 RNA guide
uccuggauuaggggagaaaaa

SEQ ID NO: 36499 - RNA, 21 nt, Artificial Sequence
  LRRK2 RNA guide
ucuccccuaauccaggaggcc

SEQ ID NO: 36500 - RNA, 21 nt, Artificial Sequence
  LRRK2 RNA guide
ucuuuuuucuccccuaaucca

SEQ ID NO: 36501 - RNA, 21 nt, Artificial Sequence
  LRRK2 RNA guide
ugacagauuucuuuuuucucc

SEQ ID NO: 36502 - RNA, 21 nt, Artificial Sequence
  LRRK2 RNA guide
ugcggccuccuggauuagggg

SEQ ID NO: 36503 - RNA, 21 nt, Artificial Sequence
  LRRK2 RNA guide
uggauuaggggagaaaaaaga

SEQ ID NO: 36504 - RNA, 21 nt, Artificial Sequence
  LRRK2 RNA guide
uuaggggagaaaaaagaaauc

SEQ ID NO: 36505 - RNA, 21 nt, Artificial Sequence
  LRRK2 RNA guide
uucuccccuaauccaggaggc

SEQ ID NO: 36506 - RNA, 21 nt, Artificial Sequence
  LRRK2 RNA guide
uucuuuuuucuccccuaaucc

SEQ ID NO: 36507 - RNA, 21 nt, Artificial Sequence
  LRRK2 RNA guide
uuucuccccuaauccaggagg

SEQ ID NO: 36508 - RNA, 21 nt, Artificial Sequence
  LRRK2 RNA guide
uuucuuuuuucuccccuaauc

SEQ ID NO: 36509 - RNA, 21 nt, Artificial Sequence
  LRRK2 RNA guide
uuuucuccccuaauccaggag

SEQ ID NO: 36510 - RNA, 21 nt, Artificial Sequence
  LRRK2 RNA guide
uuuuucuccccuaauccagga

SEQ ID NO: 36511 - RNA, 21 nt, Artificial Sequence
  LRRK2 RNA guide
uuuuuucuccccuaauccagg

SEQ ID NO: 36512 - RNA, 22 nt, Artificial Sequence
  LRRK2 RNA guide
acagauuucuuuuuucuccccu

SEQ ID NO: 36513 - RNA, 22 nt, Artificial Sequence
  LRRK2 RNA guide
agauuucuuuuuucuccccuaa

SEQ ID NO: 36514 - RNA, 22 nt, Artificial Sequence
  LRRK2 RNA guide
agcaugcggccuccuggauuag

SEQ ID NO: 36515 - RNA, 22 nt, Artificial Sequence
  LRRK2 RNA guide
aggggagaaaaaagaaaucugu

SEQ ID NO: 36516 - RNA, 22 nt, Artificial Sequence
  LRRK2 RNA guide
augcggccuccuggauuagggg

SEQ ID NO: 36517 - RNA, 22 nt, Artificial Sequence
  LRRK2 RNA guide
auuaggggagaaaaaagaaauc

SEQ ID NO: 36518 - RNA, 22 nt, Artificial Sequence
  LRRK2 RNA guide
auuucuuuuuucuccccuaauc

SEQ ID NO: 36519 - RNA, 22 nt, Artificial Sequence
  LRRK2 RNA guide
cagauuucuuuuuucuccccua

SEQ ID NO: 36520 - RNA, 22 nt, Artificial Sequence
  LRRK2 RNA guide
cagcaugcggccuccuggauua

SEQ ID NO: 36521 - RNA, 22 nt, Artificial Sequence
  LRRK2 RNA guide
caugcggccuccuggauuaggg

SEQ ID NO: 36522 - RNA, 22 nt, Artificial Sequence
  LRRK2 RNA guide
ccagcaugcggccuccuggauu

SEQ ID NO: 36523 - RNA, 22 nt, Artificial Sequence
  LRRK2 RNA guide
cccagcaugcggccuccuggau

SEQ ID NO: 36524 - RNA, 22 nt, Artificial Sequence
  LRRK2 RNA guide
ccccuaauccaggaggccgcau

SEQ ID NO: 36525 - RNA, 22 nt, Artificial Sequence
  LRRK2 RNA guide
cccuaauccaggaggccgcaug

SEQ ID NO: 36526 - RNA, 22 nt, Artificial Sequence
  LRRK2 RNA guide
ccuccuggauuaggggagaaaa

SEQ ID NO: 36527 - RNA, 22 nt, Artificial Sequence
  LRRK2 RNA guide
ccuggauuaggggagaaaaaag

SEQ ID NO: 36528 - RNA, 22 nt, Artificial Sequence
  LRRK2 RNA guide
cggccuccuggauuaggggaga

SEQ ID NO: 36529 - RNA, 22 nt, Artificial Sequence
  LRRK2 RNA guide
cuccccuaauccaggaggccgc

SEQ ID NO: 36530 - RNA, 22 nt, Artificial Sequence
  LRRK2 RNA guide
cuccuggauuaggggagaaaaa

SEQ ID NO: 36531 - RNA, 22 nt, Artificial Sequence
  LRRK2 RNA guide
cuggauuaggggagaaaaaaga

SEQ ID NO: 36532 - RNA, 22 nt, Artificial Sequence
  LRRK2 RNA guide
cuuuuuucuccccuaauccagg

SEQ ID NO: 36533 - RNA, 22 nt, Artificial Sequence
  LRRK2 RNA guide
gacagauuucuuuuuucucccc

SEQ ID NO: 36534 - RNA, 22 nt, Artificial Sequence
  LRRK2 RNA guide
gauuaggggagaaaaaagaaau

SEQ ID NO: 36535 - RNA, 22 nt, Artificial Sequence
  LRRK2 RNA guide
gauuucuuuuuucuccccuaau

SEQ ID NO: 36536 - RNA, 22 nt, Artificial Sequence
  LRRK2 RNA guide
gcaugcggccuccuggauuagg

SEQ ID NO: 36537 - RNA, 22 nt, Artificial Sequence
  LRRK2 RNA guide
gcccagcaugcggccuccugga

SEQ ID NO: 36538 - RNA, 22 nt, Artificial Sequence
  LRRK2 RNA guide
gccuccuggauuaggggagaaa

SEQ ID NO: 36539 - RNA, 22 nt, Artificial Sequence
  LRRK2 RNA guide
gcggccuccuggauuaggggag

SEQ ID NO: 36540 - RNA, 22 nt, Artificial Sequence
  LRRK2 RNA guide
ggauuaggggagaaaaaagaaa

SEQ ID NO: 36541 - RNA, 22 nt, Artificial Sequence
  LRRK2 RNA guide
ggccuccuggauuaggggagaa

SEQ ID NO: 36542 - RNA, 22 nt, Artificial Sequence
  LRRK2 RNA guide
ggggagaaaaaagaaaucuguc

SEQ ID NO: 36543 - RNA, 22 nt, Artificial Sequence
  LRRK2 RNA guide
uaggggagaaaaaagaaaucug

SEQ ID NO: 36544 - RNA, 22 nt, Artificial Sequence
  LRRK2 RNA guide
uccccuaauccaggaggccgca

SEQ ID NO: 36545 - RNA, 22 nt, Artificial Sequence
  LRRK2 RNA guide
uccuggauuaggggagaaaaaa

SEQ ID NO: 36546 - RNA, 22 nt, Artificial Sequence
  LRRK2 RNA guide
ucuccccuaauccaggaggccg

SEQ ID NO: 36547 - RNA, 22 nt, Artificial Sequence
  LRRK2 RNA guide
ucuuuuuucuccccuaauccag

SEQ ID NO: 36548 - RNA, 22 nt, Artificial Sequence
  LRRK2 RNA guide
ugacagauuucuuuuuucuccc

SEQ ID NO: 36549 - RNA, 22 nt, Artificial Sequence
  LRRK2 RNA guide
ugcggccuccuggauuagggga

SEQ ID NO: 36550 - RNA, 22 nt, Artificial Sequence
  LRRK2 RNA guide
uggauuaggggagaaaaaagaa

SEQ ID NO: 36551 - RNA, 22 nt, Artificial Sequence
  LRRK2 RNA guide
uuaggggagaaaaaagaaaucu

SEQ ID NO: 36552 - RNA, 22 nt, Artificial Sequence
  LRRK2 RNA guide
uucuccccuaauccaggaggcc

SEQ ID NO: 36553 - RNA, 22 nt, Artificial Sequence
  LRRK2 RNA guide
uucuuuuuucuccccuaaucca

SEQ ID NO: 36554 - RNA, 22 nt, Artificial Sequence
  LRRK2 RNA guide
uugacagauuucuuuuuucucc

SEQ ID NO: 36555 - RNA, 22 nt, Artificial Sequence
  LRRK2 RNA guide
uuucuccccuaauccaggaggc

SEQ ID NO: 36556 - RNA, 22 nt, Artificial Sequence
  LRRK2 RNA guide
uuucuuuuuucuccccuaaucc

SEQ ID NO: 36557 - RNA, 22 nt, Artificial Sequence
  LRRK2 RNA guide
uuuucuccccuaauccaggagg

SEQ ID NO: 36558 - RNA, 22 nt, Artificial Sequence
  LRRK2 RNA guide
uuuuucuccccuaauccaggag

SEQ ID NO: 36559 - RNA, 22 nt, Artificial Sequence
  LRRK2 RNA guide
uuuuuucuccccuaauccagga

SEQ ID NO: 36560 - RNA, 20 nt, Artificial Sequence
  LRRK2 RNA guide
acagauuucuuuuuucucca

SEQ ID NO: 36561 - RNA, 20 nt, Artificial Sequence
  LRRK2 RNA guide
agauuucuuuuuucuccacu

SEQ ID NO: 36562 - RNA, 20 nt, Artificial Sequence
  LRRK2 RNA guide
aguggagaaaaaagaaaucu

SEQ ID NO: 36563 - RNA, 20 nt, Artificial Sequence
  LRRK2 RNA guide
augcggccuccuggauuagu

SEQ ID NO: 36564 - RNA, 20 nt, Artificial Sequence
  LRRK2 RNA guide
cacuaauccaggaggccgca

SEQ ID NO: 36565 - RNA, 20 nt, Artificial Sequence
  LRRK2 RNA guide
cagauuucuuuuuucuccac

SEQ ID NO: 36566 - RNA, 20 nt, Artificial Sequence
  LRRK2 RNA guide
ccacuaauccaggaggccgc

SEQ ID NO: 36567 - RNA, 20 nt, Artificial Sequence
  LRRK2 RNA guide
ccuccuggauuaguggagaa

SEQ ID NO: 36568 - RNA, 20 nt, Artificial Sequence
  LRRK2 RNA guide
ccuggauuaguggagaaaaa

SEQ ID NO: 36569 - RNA, 20 nt, Artificial Sequence
  LRRK2 RNA guide
cggccuccuggauuagugga

SEQ ID NO: 36570 - RNA, 20 nt, Artificial Sequence
  LRRK2 RNA guide
cuccacuaauccaggaggcc

SEQ ID NO: 36571 - RNA, 20 nt, Artificial Sequence
  LRRK2 RNA guide
cuccuggauuaguggagaaa

SEQ ID NO: 36572 - RNA, 20 nt, Artificial Sequence
  LRRK2 RNA guide
cuggauuaguggagaaaaaa

SEQ ID NO: 36573 - RNA, 20 nt, Artificial Sequence
  LRRK2 RNA guide
cuuuuuucuccacuaaucca

SEQ ID NO: 36574 - RNA, 20 nt, Artificial Sequence
  LRRK2 RNA guide
gauuaguggagaaaaaagaa

SEQ ID NO: 36575 - RNA, 20 nt, Artificial Sequence
  LRRK2 RNA guide
gauuucuuuuuucuccacua

SEQ ID NO: 36576 - RNA, 20 nt, Artificial Sequence
  LRRK2 RNA guide
gccuccuggauuaguggaga

SEQ ID NO: 36577 - RNA, 20 nt, Artificial Sequence
  LRRK2 RNA guide
gcggccuccuggauuagugg

SEQ ID NO: 36578 - RNA, 20 nt, Artificial Sequence
  LRRK2 RNA guide
ggauuaguggagaaaaaaga

SEQ ID NO: 36579 - RNA, 20 nt, Artificial Sequence
  LRRK2 RNA guide
ggccuccuggauuaguggag

SEQ ID NO: 36580 - RNA, 20 nt, Artificial Sequence
  LRRK2 RNA guide
guggagaaaaaagaaaucug

SEQ ID NO: 36581 - RNA, 20 nt, Artificial Sequence
  LRRK2 RNA guide
uaguggagaaaaaagaaauc

SEQ ID NO: 36582 - RNA, 20 nt, Artificial Sequence
  LRRK2 RNA guide
uccacuaauccaggaggccg

SEQ ID NO: 36583 - RNA, 20 nt, Artificial Sequence
  LRRK2 RNA guide
uccuggauuaguggagaaaa

SEQ ID NO: 36584 - RNA, 20 nt, Artificial Sequence
  LRRK2 RNA guide
ucuccacuaauccaggaggc

SEQ ID NO: 36585 - RNA, 20 nt, Artificial Sequence
  LRRK2 RNA guide
ucuuuuuucuccacuaaucc

SEQ ID NO: 36586 - RNA, 20 nt, Artificial Sequence
  LRRK2 RNA guide
ugcggccuccuggauuagug

SEQ ID NO: 36587 - RNA, 20 nt, Artificial Sequence
  LRRK2 RNA guide
uggauuaguggagaaaaaag

SEQ ID NO: 36588 - RNA, 20 nt, Artificial Sequence
  LRRK2 RNA guide
uucuccacuaauccaggagg

SEQ ID NO: 36589 - RNA, 20 nt, Artificial Sequence
  LRRK2 RNA guide
uucuuuuuucuccacuaauc

SEQ ID NO: 36590 - RNA, 20 nt, Artificial Sequence
  LRRK2 RNA guide
uuucuccacuaauccaggag

SEQ ID NO: 36591 - RNA, 20 nt, Artificial Sequence
  LRRK2 RNA guide
uuuucuccacuaauccagga

SEQ ID NO: 36592 - RNA, 20 nt, Artificial Sequence
  LRRK2 RNA guide
uuuuucuccacuaauccagg

SEQ ID NO: 36593 - RNA, 20 nt, Artificial Sequence
  LRRK2 RNA guide
uuuuuucuccacuaauccag

SEQ ID NO: 36594 - RNA, 21 nt, Artificial Sequence
  LRRK2 RNA guide
acagauuucuuuuuucuccac

SEQ ID NO: 36595 - RNA, 21 nt, Artificial Sequence
  LRRK2 RNA guide
aguggagaaaaaagaaaucug

SEQ ID NO: 36596 - RNA, 21 nt, Artificial Sequence
  LRRK2 RNA guide
augcggccuccuggauuagug

SEQ ID NO: 36597 - RNA, 21 nt, Artificial Sequence
  LRRK2 RNA guide
cacuaauccaggaggccgcau

SEQ ID NO: 36598 - RNA, 21 nt, Artificial Sequence
  LRRK2 RNA guide
cagauuucuuuuuucuccacu

SEQ ID NO: 36599 - RNA, 21 nt, Artificial Sequence
  LRRK2 RNA guide
caugcggccuccuggauuagu

SEQ ID NO: 36600 - RNA, 21 nt, Artificial Sequence
  LRRK2 RNA guide
ccacuaauccaggaggccgca

SEQ ID NO: 36601 - RNA, 21 nt, Artificial Sequence
  LRRK2 RNA guide
ccuccuggauuaguggagaaa

SEQ ID NO: 36602 - RNA, 21 nt, Artificial Sequence
  LRRK2 RNA guide
ccuggauuaguggagaaaaaa

SEQ ID NO: 36603 - RNA, 21 nt, Artificial Sequence
  LRRK2 RNA guide
cggccuccuggauuaguggag

SEQ ID NO: 36604 - RNA, 21 nt, Artificial Sequence
  LRRK2 RNA guide
cuccacuaauccaggaggccg

SEQ ID NO: 36605 - RNA, 21 nt, Artificial Sequence
  LRRK2 RNA guide
cuccuggauuaguggagaaaa

SEQ ID NO: 36606 - RNA, 21 nt, Artificial Sequence
  LRRK2 RNA guide
cuggauuaguggagaaaaaag

SEQ ID NO: 36607 - RNA, 21 nt, Artificial Sequence
  LRRK2 RNA guide
cuuuuuucuccacuaauccag

SEQ ID NO: 36608 - RNA, 21 nt, Artificial Sequence
  LRRK2 RNA guide
gacagauuucuuuuuucucca

SEQ ID NO: 36609 - RNA, 21 nt, Artificial Sequence
  LRRK2 RNA guide
gccuccuggauuaguggagaa

SEQ ID NO: 36610 - RNA, 21 nt, Artificial Sequence
  LRRK2 RNA guide
gcggccuccuggauuagugga

SEQ ID NO: 36611 - RNA, 21 nt, Artificial Sequence
  LRRK2 RNA guide
ggauuaguggagaaaaaagaa

SEQ ID NO: 36612 - RNA, 21 nt, Artificial Sequence
  LRRK2 RNA guide
ggccuccuggauuaguggaga

SEQ ID NO: 36613 - RNA, 21 nt, Artificial Sequence
  LRRK2 RNA guide
guggagaaaaaagaaaucugu

SEQ ID NO: 36614 - RNA, 21 nt, Artificial Sequence
  LRRK2 RNA guide
uccacuaauccaggaggccgc

SEQ ID NO: 36615 - RNA, 21 nt, Artificial Sequence
  LRRK2 RNA guide
uccuggauuaguggagaaaaa

SEQ ID NO: 36616 - RNA, 21 nt, Artificial Sequence
  LRRK2 RNA guide
ucuccacuaauccaggaggcc

SEQ ID NO: 36617 - RNA, 21 nt, Artificial Sequence
  LRRK2 RNA guide
ucuuuuuucuccacuaaucca

SEQ ID NO: 36618 - RNA, 21 nt, Artificial Sequence
  LRRK2 RNA guide
ugcggccuccuggauuagugg

SEQ ID NO: 36619 - RNA, 21 nt, Artificial Sequence
  LRRK2 RNA guide
uggauuaguggagaaaaaaga

SEQ ID NO: 36620 - RNA, 21 nt, Artificial Sequence
  LRRK2 RNA guide
uucuccacuaauccaggaggc

SEQ ID NO: 36621 - RNA, 21 nt, Artificial Sequence
  LRRK2 RNA guide
uucuuuuuucuccacuaaucc

SEQ ID NO: 36622 - RNA, 21 nt, Artificial Sequence
  LRRK2 RNA guide
uuucuccacuaauccaggagg

SEQ ID NO: 36623 - RNA, 21 nt, Artificial Sequence
  LRRK2 RNA guide
uuuucuccacuaauccaggag

SEQ ID NO: 36624 - RNA, 21 nt, Artificial Sequence
  LRRK2 RNA guide
uuuuucuccacuaauccagga

SEQ ID NO: 36625 - RNA, 21 nt, Artificial Sequence
  LRRK2 RNA guide
uuuuuucuccacuaauccagg

SEQ ID NO: 36626 - RNA, 22 nt, Artificial Sequence
  LRRK2 RNA guide
acagauuucuuuuuucuccacu

SEQ ID NO: 36627 - RNA, 22 nt, Artificial Sequence
  LRRK2 RNA guide
aguggagaaaaaagaaaucugu

SEQ ID NO: 36628 - RNA, 22 nt, Artificial Sequence
  LRRK2 RNA guide
augcggccuccuggauuagugg

SEQ ID NO: 36629 - RNA, 22 nt, Artificial Sequence
  LRRK2 RNA guide
cacuaauccaggaggccgcaug

SEQ ID NO: 36630 - RNA, 22 nt, Artificial Sequence
  LRRK2 RNA guide
cagauuucuuuuuucuccacua

SEQ ID NO: 36631 - RNA, 22 nt, Artificial Sequence
  LRRK2 RNA guide
caugcggccuccuggauuagug

SEQ ID NO: 36632 - RNA, 22 nt, Artificial Sequence
  LRRK2 RNA guide
ccacuaauccaggaggccgcau

SEQ ID NO: 36633 - RNA, 22 nt, Artificial Sequence
  LRRK2 RNA guide
ccuccuggauuaguggagaaaa

SEQ ID NO: 36634 - RNA, 22 nt, Artificial Sequence
  LRRK2 RNA guide
ccuggauuaguggagaaaaaag

SEQ ID NO: 36635 - RNA, 22 nt, Artificial Sequence
  LRRK2 RNA guide
cggccuccuggauuaguggaga

SEQ ID NO: 36636 - RNA, 22 nt, Artificial Sequence
  LRRK2 RNA guide
cuccacuaauccaggaggccgc

SEQ ID NO: 36637 - RNA, 22 nt, Artificial Sequence
  LRRK2 RNA guide
cuccuggauuaguggagaaaaa

SEQ ID NO: 36638 - RNA, 22 nt, Artificial Sequence
  LRRK2 RNA guide
cuggauuaguggagaaaaaaga

SEQ ID NO: 36639 - RNA, 22 nt, Artificial Sequence
  LRRK2 RNA guide
cuuuuuucuccacuaauccagg

SEQ ID NO: 36640 - RNA, 22 nt, Artificial Sequence
  LRRK2 RNA guide
gacagauuucuuuuuucuccac

SEQ ID NO: 36641 - RNA, 22 nt, Artificial Sequence
  LRRK2 RNA guide
gcaugcggccuccuggauuagu

SEQ ID NO: 36642 - RNA, 22 nt, Artificial Sequence
  LRRK2 RNA guide
gccuccuggauuaguggagaaa

SEQ ID NO: 36643 - RNA, 22 nt, Artificial Sequence
  LRRK2 RNA guide
gcggccuccuggauuaguggag

SEQ ID NO: 36644 - RNA, 22 nt, Artificial Sequence
  LRRK2 RNA guide
ggauuaguggagaaaaaagaaa

SEQ ID NO: 36645 - RNA, 22 nt, Artificial Sequence
  LRRK2 RNA guide
ggccuccuggauuaguggagaa

SEQ ID NO: 36646 - RNA, 22 nt, Artificial Sequence
  LRRK2 RNA guide
guggagaaaaaagaaaucuguc

SEQ ID NO: 36647 - RNA, 22 nt, Artificial Sequence
  LRRK2 RNA guide
uaguggagaaaaaagaaaucug

SEQ ID NO: 36648 - RNA, 22 nt, Artificial Sequence
  LRRK2 RNA guide
uccacuaauccaggaggccgca

SEQ ID NO: 36649 - RNA, 22 nt, Artificial Sequence
  LRRK2 RNA guide
uccuggauuaguggagaaaaaa

SEQ ID NO: 36650 - RNA, 22 nt, Artificial Sequence
  LRRK2 RNA guide
ucuccacuaauccaggaggccg

SEQ ID NO: 36651 - RNA, 22 nt, Artificial Sequence
  LRRK2 RNA guide
ucuuuuuucuccacuaauccag

SEQ ID NO: 36652 - RNA, 22 nt, Artificial Sequence
  LRRK2 RNA guide
ugacagauuucuuuuuucucca

SEQ ID NO: 36653 - RNA, 22 nt, Artificial Sequence
  LRRK2 RNA guide
ugcggccuccuggauuagugga

SEQ ID NO: 36654 - RNA, 22 nt, Artificial Sequence
  LRRK2 RNA guide
uggauuaguggagaaaaaagaa

SEQ ID NO: 36655 - RNA, 22 nt, Artificial Sequence
  LRRK2 RNA guide
uucuccacuaauccaggaggcc

SEQ ID NO: 36656 - RNA, 22 nt, Artificial Sequence
  LRRK2 RNA guide
uucuuuuuucuccacuaaucca

SEQ ID NO: 36657 - RNA, 22 nt, Artificial Sequence
  LRRK2 RNA guide
uuucuccacuaauccaggaggc

SEQ ID NO: 36658 - RNA, 22 nt, Artificial Sequence
  LRRK2 RNA guide
uuucuuuuuucuccacuaaucc

SEQ ID NO: 36659 - RNA, 22 nt, Artificial Sequence
  LRRK2 RNA guide
uuuucuccacuaauccaggagg

SEQ ID NO: 36660 - RNA, 22 nt, Artificial Sequence
  LRRK2 RNA guide
uuuuucuccacuaauccaggag

SEQ ID NO: 36661 - RNA, 22 nt, Artificial Sequence
  LRRK2 RNA guide
uuuuuucuccacuaauccagga

SEQ ID NO: 36662 - RNA, 20 nt, Artificial Sequence
  LRRK2 RNA guide
aaagauucuuucuccaugau

SEQ ID NO: 36663 - RNA, 20 nt, Artificial Sequence
  LRRK2 RNA guide
aagauucuuucuccaugauu

SEQ ID NO: 36664 - RNA, 20 nt, Artificial Sequence
  LRRK2 RNA guide
aauagaaagauucuuucucc

SEQ ID NO: 36665 - RNA, 20 nt, Artificial Sequence
  LRRK2 RNA guide
aaucauggagaaagaaucuu

SEQ ID NO: 36666 - RNA, 20 nt, Artificial Sequence
  LRRK2 RNA guide
aauucaugaaucauggagaa

SEQ ID NO: 36667 - RNA, 20 nt, Artificial Sequence
  LRRK2 RNA guide
agaaagauucuuucuccaug

SEQ ID NO: 36668 - RNA, 20 nt, Artificial Sequence
  LRRK2 RNA guide
agauucuuucuccaugauuc

SEQ ID NO: 36669 - RNA, 20 nt, Artificial Sequence
  LRRK2 RNA guide
auagaaagauucuuucucca

SEQ ID NO: 36670 - RNA, 20 nt, Artificial Sequence
  LRRK2 RNA guide
aucauggagaaagaaucuuu

SEQ ID NO: 36671 - RNA, 20 nt, Artificial Sequence
  LRRK2 RNA guide
augaaucauggagaaagaau

SEQ ID NO: 36672 - RNA, 20 nt, Artificial Sequence
  LRRK2 RNA guide
auucaugaaucauggagaaa

SEQ ID NO: 36673 - RNA, 20 nt, Artificial Sequence
  LRRK2 RNA guide
auucuuucuccaugauucau

SEQ ID NO: 36674 - RNA, 20 nt, Artificial Sequence
  LRRK2 RNA guide
caugaaucauggagaaagaa

SEQ ID NO: 36675 - RNA, 20 nt, Artificial Sequence
  LRRK2 RNA guide
caugauucaugaauuaccaa

SEQ ID NO: 36676 - RNA, 20 nt, Artificial Sequence
  LRRK2 RNA guide
cauggagaaagaaucuuucu

SEQ ID NO: 36677 - RNA, 20 nt, Artificial Sequence
  LRRK2 RNA guide
cauuugguaauucaugaauc

SEQ ID NO: 36678 - RNA, 20 nt, Artificial Sequence
  LRRK2 RNA guide
ccaugauucaugaauuacca

SEQ ID NO: 36679 - RNA, 20 nt, Artificial Sequence
  LRRK2 RNA guide
cuccaugauucaugaauuac

SEQ ID NO: 36680 - RNA, 20 nt, Artificial Sequence
  LRRK2 RNA guide
cuuucuccaugauucaugaa

SEQ ID NO: 36681 - RNA, 20 nt, Artificial Sequence
  LRRK2 RNA guide
gaaagauucuuucuccauga

SEQ ID NO: 36682 - RNA, 20 nt, Artificial Sequence
  LRRK2 RNA guide
gaaucauggagaaagaaucu

SEQ ID NO: 36683 - RNA, 20 nt, Artificial Sequence
  LRRK2 RNA guide
gauucuuucuccaugauuca

SEQ ID NO: 36684 - RNA, 20 nt, Artificial Sequence
  LRRK2 RNA guide
gggucauuugguaauucaug

SEQ ID NO: 36685 - RNA, 20 nt, Artificial Sequence
  LRRK2 RNA guide
gguaauucaugaaucaugga

SEQ ID NO: 36686 - RNA, 20 nt, Artificial Sequence
  LRRK2 RNA guide
ggucauuugguaauucauga

SEQ ID NO: 36687 - RNA, 20 nt, Artificial Sequence
  LRRK2 RNA guide
guaauucaugaaucauggag

SEQ ID NO: 36688 - RNA, 20 nt, Artificial Sequence
  LRRK2 RNA guide
gucauuugguaauucaugaa

SEQ ID NO: 36689 - RNA, 20 nt, Artificial Sequence
  LRRK2 RNA guide
uaauucaugaaucauggaga

SEQ ID NO: 36690 - RNA, 20 nt, Artificial Sequence
  LRRK2 RNA guide
uagaaagauucuuucuccau

SEQ ID NO: 36691 - RNA, 20 nt, Artificial Sequence
  LRRK2 RNA guide
ucaugaaucauggagaaaga

SEQ ID NO: 36692 - RNA, 20 nt, Artificial Sequence
  LRRK2 RNA guide
ucauggagaaagaaucuuuc

SEQ ID NO: 36693 - RNA, 20 nt, Artificial Sequence
  LRRK2 RNA guide
uccaugauucaugaauuacc

SEQ ID NO: 36694 - RNA, 20 nt, Artificial Sequence
  LRRK2 RNA guide
ucuccaugauucaugaauua

SEQ ID NO: 36695 - RNA, 20 nt, Artificial Sequence
  LRRK2 RNA guide
ucuuucuccaugauucauga

SEQ ID NO: 36696 - RNA, 20 nt, Artificial Sequence
  LRRK2 RNA guide
ugaaucauggagaaagaauc

SEQ ID NO: 36697 - RNA, 20 nt, Artificial Sequence
  LRRK2 RNA guide
ugguaauucaugaaucaugg

SEQ ID NO: 36698 - RNA, 20 nt, Artificial Sequence
  LRRK2 RNA guide
uucaugaaucauggagaaag

SEQ ID NO: 36699 - RNA, 20 nt, Artificial Sequence
  LRRK2 RNA guide
uucuccaugauucaugaauu

SEQ ID NO: 36700 - RNA, 20 nt, Artificial Sequence
  LRRK2 RNA guide
uucuuucuccaugauucaug

SEQ ID NO: 36701 - RNA, 20 nt, Artificial Sequence
  LRRK2 RNA guide
uugguaauucaugaaucaug

SEQ ID NO: 36702 - RNA, 20 nt, Artificial Sequence
  LRRK2 RNA guide
uuucuccaugauucaugaau

SEQ ID NO: 36703 - RNA, 21 nt, Artificial Sequence
  LRRK2 RNA guide
aagauucuuucuccaugauuc

SEQ ID NO: 36704 - RNA, 21 nt, Artificial Sequence
  LRRK2 RNA guide
agaaagauucuuucuccauga

SEQ ID NO: 36705 - RNA, 21 nt, Artificial Sequence
  LRRK2 RNA guide
agauucuuucuccaugauuca

SEQ ID NO: 36706 - RNA, 21 nt, Artificial Sequence
  LRRK2 RNA guide
agggucauuugguaauucaug

SEQ ID NO: 36707 - RNA, 21 nt, Artificial Sequence
  LRRK2 RNA guide
aucauggagaaagaaucuuuc

SEQ ID NO: 36708 - RNA, 21 nt, Artificial Sequence
  LRRK2 RNA guide
augaaucauggagaaagaauc

SEQ ID NO: 36709 - RNA, 21 nt, Artificial Sequence
  LRRK2 RNA guide
auucaugaaucauggagaaag

SEQ ID NO: 36710 - RNA, 21 nt, Artificial Sequence
  LRRK2 RNA guide
auucuuucuccaugauucaug

SEQ ID NO: 36711 - RNA, 21 nt, Artificial Sequence
  LRRK2 RNA guide
caugaaucauggagaaagaau

SEQ ID NO: 36712 - RNA, 21 nt, Artificial Sequence
  LRRK2 RNA guide
cauggagaaagaaucuuucua

SEQ ID NO: 36713 - RNA, 21 nt, Artificial Sequence
  LRRK2 RNA guide
ccaugauucaugaauuaccaa

SEQ ID NO: 36714 - RNA, 21 nt, Artificial Sequence
  LRRK2 RNA guide
cuccaugauucaugaauuacc

SEQ ID NO: 36715 - RNA, 21 nt, Artificial Sequence
  LRRK2 RNA guide
cuuucuccaugauucaugaau

SEQ ID NO: 36716 - RNA, 21 nt, Artificial Sequence
  LRRK2 RNA guide
gaaagauucuuucuccaugau

SEQ ID NO: 36717 - RNA, 21 nt, Artificial Sequence
  LRRK2 RNA guide
gaaucauggagaaagaaucuu

SEQ ID NO: 36718 - RNA, 21 nt, Artificial Sequence
  LRRK2 RNA guide
gauucuuucuccaugauucau

SEQ ID NO: 36719 - RNA, 21 nt, Artificial Sequence
  LRRK2 RNA guide
gggucauuugguaauucauga

SEQ ID NO: 36720 - RNA, 21 nt, Artificial Sequence
  LRRK2 RNA guide
gguaauucaugaaucauggag

SEQ ID NO: 36721 - RNA, 21 nt, Artificial Sequence
  LRRK2 RNA guide
ggucauuugguaauucaugaa

SEQ ID NO: 36722 - RNA, 21 nt, Artificial Sequence
  LRRK2 RNA guide
guaauucaugaaucauggaga

SEQ ID NO: 36723 - RNA, 21 nt, Artificial Sequence
  LRRK2 RNA guide
uagaaagauucuuucuccaug

SEQ ID NO: 36724 - RNA, 21 nt, Artificial Sequence
  LRRK2 RNA guide
ucaugaaucauggagaaagaa

SEQ ID NO: 36725 - RNA, 21 nt, Artificial Sequence
  LRRK2 RNA guide
ucauggagaaagaaucuuucu

SEQ ID NO: 36726 - RNA, 21 nt, Artificial Sequence
  LRRK2 RNA guide
uccaugauucaugaauuacca

SEQ ID NO: 36727 - RNA, 21 nt, Artificial Sequence
  LRRK2 RNA guide
ucuccaugauucaugaauuac

SEQ ID NO: 36728 - RNA, 21 nt, Artificial Sequence
  LRRK2 RNA guide
ucuuucuccaugauucaugaa

SEQ ID NO: 36729 - RNA, 21 nt, Artificial Sequence
  LRRK2 RNA guide
ugaaucauggagaaagaaucu

SEQ ID NO: 36730 - RNA, 21 nt, Artificial Sequence
  LRRK2 RNA guide
ugguaauucaugaaucaugga

SEQ ID NO: 36731 - RNA, 21 nt, Artificial Sequence
  LRRK2 RNA guide
uucaugaaucauggagaaaga

SEQ ID NO: 36732 - RNA, 21 nt, Artificial Sequence
  LRRK2 RNA guide
uucuuucuccaugauucauga

SEQ ID NO: 36733 - RNA, 21 nt, Artificial Sequence
  LRRK2 RNA guide
uugguaauucaugaaucaugg

SEQ ID NO: 36734 - RNA, 22 nt, Artificial Sequence
  LRRK2 RNA guide
aaagauucuuucuccaugauuc

SEQ ID NO: 36735 - RNA, 22 nt, Artificial Sequence
  LRRK2 RNA guide
aagauucuuucuccaugauuca

SEQ ID NO: 36736 - RNA, 22 nt, Artificial Sequence
  LRRK2 RNA guide
aagggucauuugguaauucaug

SEQ ID NO: 36737 - RNA, 22 nt, Artificial Sequence
  LRRK2 RNA guide
aaucauggagaaagaaucuuuc

SEQ ID NO: 36738 - RNA, 22 nt, Artificial Sequence
  LRRK2 RNA guide
aauucaugaaucauggagaaag

SEQ ID NO: 36739 - RNA, 22 nt, Artificial Sequence
  LRRK2 RNA guide
agaaagauucuuucuccaugau

SEQ ID NO: 36740 - RNA, 22 nt, Artificial Sequence
  LRRK2 RNA guide
agauucuuucuccaugauucau

SEQ ID NO: 36741 - RNA, 22 nt, Artificial Sequence
  LRRK2 RNA guide
agggucauuugguaauucauga

SEQ ID NO: 36742 - RNA, 22 nt, Artificial Sequence
  LRRK2 RNA guide
auagaaagauucuuucuccaug

SEQ ID NO: 36743 - RNA, 22 nt, Artificial Sequence
  LRRK2 RNA guide
aucauggagaaagaaucuuucu

SEQ ID NO: 36744 - RNA, 22 nt, Artificial Sequence
  LRRK2 RNA guide
augaaucauggagaaagaaucu

SEQ ID NO: 36745 - RNA, 22 nt, Artificial Sequence
  LRRK2 RNA guide
auucaugaaucauggagaaaga

SEQ ID NO: 36746 - RNA, 22 nt, Artificial Sequence
  LRRK2 RNA guide
auucuuucuccaugauucauga

SEQ ID NO: 36747 - RNA, 22 nt, Artificial Sequence
  LRRK2 RNA guide
caugaaucauggagaaagaauc

SEQ ID NO: 36748 - RNA, 22 nt, Artificial Sequence
  LRRK2 RNA guide
cauggagaaagaaucuuucuau

SEQ ID NO: 36749 - RNA, 22 nt, Artificial Sequence
  LRRK2 RNA guide
ccaugauucaugaauuaccaaa

SEQ ID NO: 36750 - RNA, 22 nt, Artificial Sequence
  LRRK2 RNA guide
cuccaugauucaugaauuacca

SEQ ID NO: 36751 - RNA, 22 nt, Artificial Sequence
  LRRK2 RNA guide
cuuucuccaugauucaugaauu

SEQ ID NO: 36752 - RNA, 22 nt, Artificial Sequence
  LRRK2 RNA guide
gaaagauucuuucuccaugauu

SEQ ID NO: 36753 - RNA, 22 nt, Artificial Sequence
  LRRK2 RNA guide
gaaucauggagaaagaaucuuu

SEQ ID NO: 36754 - RNA, 22 nt, Artificial Sequence
  LRRK2 RNA guide
gauucuuucuccaugauucaug

SEQ ID NO: 36755 - RNA, 22 nt, Artificial Sequence
  LRRK2 RNA guide
gggucauuugguaauucaugaa

SEQ ID NO: 36756 - RNA, 22 nt, Artificial Sequence
  LRRK2 RNA guide
gguaauucaugaaucauggaga

SEQ ID NO: 36757 - RNA, 22 nt, Artificial Sequence
  LRRK2 RNA guide
ggucauuugguaauucaugaau

SEQ ID NO: 36758 - RNA, 22 nt, Artificial Sequence
  LRRK2 RNA guide
guaauucaugaaucauggagaa

SEQ ID NO: 36759 - RNA, 22 nt, Artificial Sequence
  LRRK2 RNA guide
gucauuugguaauucaugaauc

SEQ ID NO: 36760 - RNA, 22 nt, Artificial Sequence
  LRRK2 RNA guide
uagaaagauucuuucuccauga

SEQ ID NO: 36761 - RNA, 22 nt, Artificial Sequence
  LRRK2 RNA guide
ucaugaaucauggagaaagaau

SEQ ID NO: 36762 - RNA, 22 nt, Artificial Sequence
  LRRK2 RNA guide
ucauggagaaagaaucuuucua

SEQ ID NO: 36763 - RNA, 22 nt, Artificial Sequence
  LRRK2 RNA guide
uccaugauucaugaauuaccaa

SEQ ID NO: 36764 - RNA, 22 nt, Artificial Sequence
  LRRK2 RNA guide
ucuccaugauucaugaauuacc

SEQ ID NO: 36765 - RNA, 22 nt, Artificial Sequence
  LRRK2 RNA guide
ucuuucuccaugauucaugaau

SEQ ID NO: 36766 - RNA, 22 nt, Artificial Sequence
  LRRK2 RNA guide
ugaaucauggagaaagaaucuu

SEQ ID NO: 36767 - RNA, 22 nt, Artificial Sequence
  LRRK2 RNA guide
ugguaauucaugaaucauggag

SEQ ID NO: 36768 - RNA, 22 nt, Artificial Sequence
  LRRK2 RNA guide
uucaugaaucauggagaaagaa

SEQ ID NO: 36769 - RNA, 22 nt, Artificial Sequence
  LRRK2 RNA guide
uucuccaugauucaugaauuac

SEQ ID NO: 36770 - RNA, 22 nt, Artificial Sequence
  LRRK2 RNA guide
uucuuucuccaugauucaugaa

SEQ ID NO: 36771 - RNA, 22 nt, Artificial Sequence
  LRRK2 RNA guide
uugguaauucaugaaucaugga

SEQ ID NO: 36772 - RNA, 22 nt, Artificial Sequence
  LRRK2 RNA guide
uuugguaauucaugaaucaugg

SEQ ID NO: 36773 - RNA, 20 nt, Artificial Sequence
  LRRK2 RNA guide
aaagauucuuucuccacgau

SEQ ID NO: 36774 - RNA, 20 nt, Artificial Sequence
  LRRK2 RNA guide
aagauucuuucuccacgauu

SEQ ID NO: 36775 - RNA, 20 nt, Artificial Sequence
  LRRK2 RNA guide
aaucguggagaaagaaucuu

SEQ ID NO: 36776 - RNA, 20 nt, Artificial Sequence
  LRRK2 RNA guide
aauucaugaaucguggagaa

SEQ ID NO: 36777 - RNA, 20 nt, Artificial Sequence
  LRRK2 RNA guide
acgauucaugaauuaccaaa

SEQ ID NO: 36778 - RNA, 20 nt, Artificial Sequence
  LRRK2 RNA guide
agaaagauucuuucuccacg

SEQ ID NO: 36779 - RNA, 20 nt, Artificial Sequence
  LRRK2 RNA guide
agauucuuucuccacgauuc

SEQ ID NO: 36780 - RNA, 20 nt, Artificial Sequence
  LRRK2 RNA guide
aucguggagaaagaaucuuu

SEQ ID NO: 36781 - RNA, 20 nt, Artificial Sequence
  LRRK2 RNA guide
augaaucguggagaaagaau

SEQ ID NO: 36782 - RNA, 20 nt, Artificial Sequence
  LRRK2 RNA guide
auucaugaaucguggagaaa

SEQ ID NO: 36783 - RNA, 20 nt, Artificial Sequence
  LRRK2 RNA guide
auucuuucuccacgauucau

SEQ ID NO: 36784 - RNA, 20 nt, Artificial Sequence
  LRRK2 RNA guide
auuugguaauucaugaaucg

SEQ ID NO: 36785 - RNA, 20 nt, Artificial Sequence
  LRRK2 RNA guide
cacgauucaugaauuaccaa

SEQ ID NO: 36786 - RNA, 20 nt, Artificial Sequence
  LRRK2 RNA guide
caugaaucguggagaaagaa

SEQ ID NO: 36787 - RNA, 20 nt, Artificial Sequence
  LRRK2 RNA guide
ccacgauucaugaauuacca

SEQ ID NO: 36788 - RNA, 20 nt, Artificial Sequence
  LRRK2 RNA guide
cguggagaaagaaucuuucu

SEQ ID NO: 36789 - RNA, 20 nt, Artificial Sequence
  LRRK2 RNA guide
cuccacgauucaugaauuac

SEQ ID NO: 36790 - RNA, 20 nt, Artificial Sequence
  LRRK2 RNA guide
cuuucuccacgauucaugaa

SEQ ID NO: 36791 - RNA, 20 nt, Artificial Sequence
  LRRK2 RNA guide
gaaagauucuuucuccacga

SEQ ID NO: 36792 - RNA, 20 nt, Artificial Sequence
  LRRK2 RNA guide
gaaucguggagaaagaaucu

SEQ ID NO: 36793 - RNA, 20 nt, Artificial Sequence
  LRRK2 RNA guide
gauucuuucuccacgauuca

SEQ ID NO: 36794 - RNA, 20 nt, Artificial Sequence
  LRRK2 RNA guide
gguaauucaugaaucgugga

SEQ ID NO: 36795 - RNA, 20 nt, Artificial Sequence
  LRRK2 RNA guide
guaauucaugaaucguggag

SEQ ID NO: 36796 - RNA, 20 nt, Artificial Sequence
  LRRK2 RNA guide
uaauucaugaaucguggaga

SEQ ID NO: 36797 - RNA, 20 nt, Artificial Sequence
  LRRK2 RNA guide
uagaaagauucuuucuccac

SEQ ID NO: 36798 - RNA, 20 nt, Artificial Sequence
  LRRK2 RNA guide
ucaugaaucguggagaaaga

SEQ ID NO: 36799 - RNA, 20 nt, Artificial Sequence
  LRRK2 RNA guide
uccacgauucaugaauuacc

SEQ ID NO: 36800 - RNA, 20 nt, Artificial Sequence
  LRRK2 RNA guide
ucguggagaaagaaucuuuc

SEQ ID NO: 36801 - RNA, 20 nt, Artificial Sequence
  LRRK2 RNA guide
ucuccacgauucaugaauua

SEQ ID NO: 36802 - RNA, 20 nt, Artificial Sequence
  LRRK2 RNA guide
ucuuucuccacgauucauga

SEQ ID NO: 36803 - RNA, 20 nt, Artificial Sequence
  LRRK2 RNA guide
ugaaucguggagaaagaauc

SEQ ID NO: 36804 - RNA, 20 nt, Artificial Sequence
  LRRK2 RNA guide
ugguaauucaugaaucgugg

SEQ ID NO: 36805 - RNA, 20 nt, Artificial Sequence
  LRRK2 RNA guide
uucaugaaucguggagaaag

SEQ ID NO: 36806 - RNA, 20 nt, Artificial Sequence
  LRRK2 RNA guide
uucuccacgauucaugaauu

SEQ ID NO: 36807 - RNA, 20 nt, Artificial Sequence
  LRRK2 RNA guide
uucuuucuccacgauucaug

SEQ ID NO: 36808 - RNA, 20 nt, Artificial Sequence
  LRRK2 RNA guide
uugguaauucaugaaucgug

SEQ ID NO: 36809 - RNA, 20 nt, Artificial Sequence
  LRRK2 RNA guide
uuucuccacgauucaugaau

SEQ ID NO: 36810 - RNA, 20 nt, Artificial Sequence
  LRRK2 RNA guide
uuugguaauucaugaaucgu

SEQ ID NO: 36811 - RNA, 21 nt, Artificial Sequence
  LRRK2 RNA guide
aaagauucuuucuccacgauu

SEQ ID NO: 36812 - RNA, 21 nt, Artificial Sequence
  LRRK2 RNA guide
aagauucuuucuccacgauuc

SEQ ID NO: 36813 - RNA, 21 nt, Artificial Sequence
  LRRK2 RNA guide
aaucguggagaaagaaucuuu

SEQ ID NO: 36814 - RNA, 21 nt, Artificial Sequence
  LRRK2 RNA guide
aauucaugaaucguggagaaa

SEQ ID NO: 36815 - RNA, 21 nt, Artificial Sequence
  LRRK2 RNA guide
agaaagauucuuucuccacga

SEQ ID NO: 36816 - RNA, 21 nt, Artificial Sequence
  LRRK2 RNA guide
agauucuuucuccacgauuca

SEQ ID NO: 36817 - RNA, 21 nt, Artificial Sequence
  LRRK2 RNA guide
auagaaagauucuuucuccac

SEQ ID NO: 36818 - RNA, 21 nt, Artificial Sequence
  LRRK2 RNA guide
aucguggagaaagaaucuuuc

SEQ ID NO: 36819 - RNA, 21 nt, Artificial Sequence
  LRRK2 RNA guide
augaaucguggagaaagaauc

SEQ ID NO: 36820 - RNA, 21 nt, Artificial Sequence
  LRRK2 RNA guide
auucaugaaucguggagaaag

SEQ ID NO: 36821 - RNA, 21 nt, Artificial Sequence
  LRRK2 RNA guide
auucuuucuccacgauucaug

SEQ ID NO: 36822 - RNA, 21 nt, Artificial Sequence
  LRRK2 RNA guide
cacgauucaugaauuaccaaa

SEQ ID NO: 36823 - RNA, 21 nt, Artificial Sequence
  LRRK2 RNA guide
caugaaucguggagaaagaau

SEQ ID NO: 36824 - RNA, 21 nt, Artificial Sequence
  LRRK2 RNA guide
cauuugguaauucaugaaucg

SEQ ID NO: 36825 - RNA, 21 nt, Artificial Sequence
  LRRK2 RNA guide
ccacgauucaugaauuaccaa

SEQ ID NO: 36826 - RNA, 21 nt, Artificial Sequence
  LRRK2 RNA guide
cguggagaaagaaucuuucua

SEQ ID NO: 36827 - RNA, 21 nt, Artificial Sequence
  LRRK2 RNA guide
cuccacgauucaugaauuacc

SEQ ID NO: 36828 - RNA, 21 nt, Artificial Sequence
  LRRK2 RNA guide
cuuucuccacgauucaugaau

SEQ ID NO: 36829 - RNA, 21 nt, Artificial Sequence
  LRRK2 RNA guide
gaaagauucuuucuccacgau

SEQ ID NO: 36830 - RNA, 21 nt, Artificial Sequence
  LRRK2 RNA guide
gaaucguggagaaagaaucuu

SEQ ID NO: 36831 - RNA, 21 nt, Artificial Sequence
  LRRK2 RNA guide
gauucuuucuccacgauucau

SEQ ID NO: 36832 - RNA, 21 nt, Artificial Sequence
  LRRK2 RNA guide
gguaauucaugaaucguggag

SEQ ID NO: 36833 - RNA, 21 nt, Artificial Sequence
  LRRK2 RNA guide
guaauucaugaaucguggaga

SEQ ID NO: 36834 - RNA, 21 nt, Artificial Sequence
  LRRK2 RNA guide
uaauucaugaaucguggagaa

SEQ ID NO: 36835 - RNA, 21 nt, Artificial Sequence
  LRRK2 RNA guide
uagaaagauucuuucuccacg

SEQ ID NO: 36836 - RNA, 21 nt, Artificial Sequence
  LRRK2 RNA guide
ucaugaaucguggagaaagaa

SEQ ID NO: 36837 - RNA, 21 nt, Artificial Sequence
  LRRK2 RNA guide
uccacgauucaugaauuacca

SEQ ID NO: 36838 - RNA, 21 nt, Artificial Sequence
  LRRK2 RNA guide
ucguggagaaagaaucuuucu

SEQ ID NO: 36839 - RNA, 21 nt, Artificial Sequence
  LRRK2 RNA guide
ucuccacgauucaugaauuac

SEQ ID NO: 36840 - RNA, 21 nt, Artificial Sequence
  LRRK2 RNA guide
ucuuucuccacgauucaugaa

SEQ ID NO: 36841 - RNA, 21 nt, Artificial Sequence
  LRRK2 RNA guide
ugaaucguggagaaagaaucu

SEQ ID NO: 36842 - RNA, 21 nt, Artificial Sequence
  LRRK2 RNA guide
ugguaauucaugaaucgugga

SEQ ID NO: 36843 - RNA, 21 nt, Artificial Sequence
  LRRK2 RNA guide
uucaugaaucguggagaaaga

SEQ ID NO: 36844 - RNA, 21 nt, Artificial Sequence
  LRRK2 RNA guide
uucuccacgauucaugaauua

SEQ ID NO: 36845 - RNA, 21 nt, Artificial Sequence
  LRRK2 RNA guide
uucuuucuccacgauucauga

SEQ ID NO: 36846 - RNA, 21 nt, Artificial Sequence
  LRRK2 RNA guide
uugguaauucaugaaucgugg

SEQ ID NO: 36847 - RNA, 21 nt, Artificial Sequence
  LRRK2 RNA guide
uuucuccacgauucaugaauu

SEQ ID NO: 36848 - RNA, 21 nt, Artificial Sequence
  LRRK2 RNA guide
uuugguaauucaugaaucgug

SEQ ID NO: 36849 - RNA, 22 nt, Artificial Sequence
  LRRK2 RNA guide
aaagauucuuucuccacgauuc

SEQ ID NO: 36850 - RNA, 22 nt, Artificial Sequence
  LRRK2 RNA guide
aagauucuuucuccacgauuca

SEQ ID NO: 36851 - RNA, 22 nt, Artificial Sequence
  LRRK2 RNA guide
aauagaaagauucuuucuccac

SEQ ID NO: 36852 - RNA, 22 nt, Artificial Sequence
  LRRK2 RNA guide
aaucguggagaaagaaucuuuc

SEQ ID NO: 36853 - RNA, 22 nt, Artificial Sequence
  LRRK2 RNA guide
aauucaugaaucguggagaaag

SEQ ID NO: 36854 - RNA, 22 nt, Artificial Sequence
  LRRK2 RNA guide
acgauucaugaauuaccaaaug

SEQ ID NO: 36855 - RNA, 22 nt, Artificial Sequence
  LRRK2 RNA guide
agaaagauucuuucuccacgau

SEQ ID NO: 36856 - RNA, 22 nt, Artificial Sequence
  LRRK2 RNA guide
agauucuuucuccacgauucau

SEQ ID NO: 36857 - RNA, 22 nt, Artificial Sequence
  LRRK2 RNA guide
auagaaagauucuuucuccacg

SEQ ID NO: 36858 - RNA, 22 nt, Artificial Sequence
  LRRK2 RNA guide
aucguggagaaagaaucuuucu

SEQ ID NO: 36859 - RNA, 22 nt, Artificial Sequence
  LRRK2 RNA guide
augaaucguggagaaagaaucu

SEQ ID NO: 36860 - RNA, 22 nt, Artificial Sequence
  LRRK2 RNA guide
auucaugaaucguggagaaaga

SEQ ID NO: 36861 - RNA, 22 nt, Artificial Sequence
  LRRK2 RNA guide
auucuuucuccacgauucauga

SEQ ID NO: 36862 - RNA, 22 nt, Artificial Sequence
  LRRK2 RNA guide
auuugguaauucaugaaucgug

SEQ ID NO: 36863 - RNA, 22 nt, Artificial Sequence
  LRRK2 RNA guide
cacgauucaugaauuaccaaau

SEQ ID NO: 36864 - RNA, 22 nt, Artificial Sequence
  LRRK2 RNA guide
caugaaucguggagaaagaauc

SEQ ID NO: 36865 - RNA, 22 nt, Artificial Sequence
  LRRK2 RNA guide
cauuugguaauucaugaaucgu

SEQ ID NO: 36866 - RNA, 22 nt, Artificial Sequence
  LRRK2 RNA guide
ccacgauucaugaauuaccaaa

SEQ ID NO: 36867 - RNA, 22 nt, Artificial Sequence
  LRRK2 RNA guide
cguggagaaagaaucuuucuau

SEQ ID NO: 36868 - RNA, 22 nt, Artificial Sequence
  LRRK2 RNA guide
cuccacgauucaugaauuacca

SEQ ID NO: 36869 - RNA, 22 nt, Artificial Sequence
  LRRK2 RNA guide
cuuucuccacgauucaugaauu

SEQ ID NO: 36870 - RNA, 22 nt, Artificial Sequence
  LRRK2 RNA guide
gaaagauucuuucuccacgauu

SEQ ID NO: 36871 - RNA, 22 nt, Artificial Sequence
  LRRK2 RNA guide
gaaucguggagaaagaaucuuu

SEQ ID NO: 36872 - RNA, 22 nt, Artificial Sequence
  LRRK2 RNA guide
gauucuuucuccacgauucaug

SEQ ID NO: 36873 - RNA, 22 nt, Artificial Sequence
  LRRK2 RNA guide
gguaauucaugaaucguggaga

SEQ ID NO: 36874 - RNA, 22 nt, Artificial Sequence
  LRRK2 RNA guide
guaauucaugaaucguggagaa

SEQ ID NO: 36875 - RNA, 22 nt, Artificial Sequence
  LRRK2 RNA guide
uaauucaugaaucguggagaaa

SEQ ID NO: 36876 - RNA, 22 nt, Artificial Sequence
  LRRK2 RNA guide
uagaaagauucuuucuccacga

SEQ ID NO: 36877 - RNA, 22 nt, Artificial Sequence
  LRRK2 RNA guide
ucaugaaucguggagaaagaau

SEQ ID NO: 36878 - RNA, 22 nt, Artificial Sequence
  LRRK2 RNA guide
ucauuugguaauucaugaaucg

SEQ ID NO: 36879 - RNA, 22 nt, Artificial Sequence
  LRRK2 RNA guide
uccacgauucaugaauuaccaa

SEQ ID NO: 36880 - RNA, 22 nt, Artificial Sequence
  LRRK2 RNA guide
ucguggagaaagaaucuuucua

SEQ ID NO: 36881 - RNA, 22 nt, Artificial Sequence
  LRRK2 RNA guide
ucuccacgauucaugaauuacc

SEQ ID NO: 36882 - RNA, 22 nt, Artificial Sequence
  LRRK2 RNA guide
ucuuucuccacgauucaugaau

SEQ ID NO: 36883 - RNA, 22 nt, Artificial Sequence
  LRRK2 RNA guide
ugaaucguggagaaagaaucuu

SEQ ID NO: 36884 - RNA, 22 nt, Artificial Sequence
  LRRK2 RNA guide
ugguaauucaugaaucguggag

SEQ ID NO: 36885 - RNA, 22 nt, Artificial Sequence
  LRRK2 RNA guide
uucaugaaucguggagaaagaa

SEQ ID NO: 36886 - RNA, 22 nt, Artificial Sequence
  LRRK2 RNA guide
uucuccacgauucaugaauuac

SEQ ID NO: 36887 - RNA, 22 nt, Artificial Sequence
  LRRK2 RNA guide
uucuuucuccacgauucaugaa

SEQ ID NO: 36888 - RNA, 22 nt, Artificial Sequence
  LRRK2 RNA guide
uugguaauucaugaaucgugga

SEQ ID NO: 36889 - RNA, 22 nt, Artificial Sequence
  LRRK2 RNA guide
uuucuccacgauucaugaauua

SEQ ID NO: 36890 - RNA, 22 nt, Artificial Sequence
  LRRK2 RNA guide
uuugguaauucaugaaucgugg

SEQ ID NO: 36891 - RNA, 20 nt, Artificial Sequence
  LRRK2 RNA guide
aaaacgaucagccagaaaau

SEQ ID NO: 36892 - RNA, 20 nt, Artificial Sequence
  LRRK2 RNA guide
aaacgaucagccagaaaaua

SEQ ID NO: 36893 - RNA, 20 nt, Artificial Sequence
  LRRK2 RNA guide
aacgaucagccagaaaauag

SEQ ID NO: 36894 - RNA, 20 nt, Artificial Sequence
  LRRK2 RNA guide
aaucuuucuauuuucuggcu

SEQ ID NO: 36895 - RNA, 20 nt, Artificial Sequence
  LRRK2 RNA guide
acgaucagccagaaaauaga

SEQ ID NO: 36896 - RNA, 20 nt, Artificial Sequence
  LRRK2 RNA guide
aucuuucuauuuucuggcug

SEQ ID NO: 36897 - RNA, 20 nt, Artificial Sequence
  LRRK2 RNA guide
auggcauuuuaaaacgauca

SEQ ID NO: 36898 - RNA, 20 nt, Artificial Sequence
  LRRK2 RNA guide
auuuucuggcugaucguuuu

SEQ ID NO: 36899 - RNA, 20 nt, Artificial Sequence
  LRRK2 RNA guide
cauuuuaaaacgaucagcca

SEQ ID NO: 36900 - RNA, 20 nt, Artificial Sequence
  LRRK2 RNA guide
cuauuuucuggcugaucguu

SEQ ID NO: 36901 - RNA, 20 nt, Artificial Sequence
  LRRK2 RNA guide
cugaucguuuuaaaaugcca

SEQ ID NO: 36902 - RNA, 20 nt, Artificial Sequence
  LRRK2 RNA guide
cuggcugaucguuuuaaaau

SEQ ID NO: 36903 - RNA, 20 nt, Artificial Sequence
  LRRK2 RNA guide
cuuucuauuuucuggcugau

SEQ ID NO: 36904 - RNA, 20 nt, Artificial Sequence
  LRRK2 RNA guide
gaucguuuuaaaaugccaua

SEQ ID NO: 36905 - RNA, 20 nt, Artificial Sequence
  LRRK2 RNA guide
gcauuuuaaaacgaucagcc

SEQ ID NO: 36906 - RNA, 20 nt, Artificial Sequence
  LRRK2 RNA guide
gcugaucguuuuaaaaugcc

SEQ ID NO: 36907 - RNA, 20 nt, Artificial Sequence
  LRRK2 RNA guide
ggcauuuuaaaacgaucagc

SEQ ID NO: 36908 - RNA, 20 nt, Artificial Sequence
  LRRK2 RNA guide
ggcugaucguuuuaaaaugc

SEQ ID NO: 36909 - RNA, 20 nt, Artificial Sequence
  LRRK2 RNA guide
uaaaacgaucagccagaaaa

SEQ ID NO: 36910 - RNA, 20 nt, Artificial Sequence
  LRRK2 RNA guide
uauggcauuuuaaaacgauc

SEQ ID NO: 36911 - RNA, 20 nt, Artificial Sequence
  LRRK2 RNA guide
uauuuucuggcugaucguuu

SEQ ID NO: 36912 - RNA, 20 nt, Artificial Sequence
  LRRK2 RNA guide
ucuauuuucuggcugaucgu

SEQ ID NO: 36913 - RNA, 20 nt, Artificial Sequence
  LRRK2 RNA guide
ucuggcugaucguuuuaaaa

SEQ ID NO: 36914 - RNA, 20 nt, Artificial Sequence
  LRRK2 RNA guide
ucuuucuauuuucuggcuga

SEQ ID NO: 36915 - RNA, 20 nt, Artificial Sequence
  LRRK2 RNA guide
ugaucguuuuaaaaugccau

SEQ ID NO: 36916 - RNA, 20 nt, Artificial Sequence
  LRRK2 RNA guide
uggcauuuuaaaacgaucag

SEQ ID NO: 36917 - RNA, 20 nt, Artificial Sequence
  LRRK2 RNA guide
uggcugaucguuuuaaaaug

SEQ ID NO: 36918 - RNA, 20 nt, Artificial Sequence
  LRRK2 RNA guide
uuaaaacgaucagccagaaa

SEQ ID NO: 36919 - RNA, 20 nt, Artificial Sequence
  LRRK2 RNA guide
uucuauuuucuggcugaucg

SEQ ID NO: 36920 - RNA, 20 nt, Artificial Sequence
  LRRK2 RNA guide
uucuggcugaucguuuuaaa

SEQ ID NO: 36921 - RNA, 20 nt, Artificial Sequence
  LRRK2 RNA guide
uuuaaaacgaucagccagaa

SEQ ID NO: 36922 - RNA, 20 nt, Artificial Sequence
  LRRK2 RNA guide
uuucuauuuucuggcugauc

SEQ ID NO: 36923 - RNA, 20 nt, Artificial Sequence
  LRRK2 RNA guide
uuucuggcugaucguuuuaa

SEQ ID NO: 36924 - RNA, 20 nt, Artificial Sequence
  LRRK2 RNA guide
uuuuaaaacgaucagccaga

SEQ ID NO: 36925 - RNA, 20 nt, Artificial Sequence
  LRRK2 RNA guide
uuuucuggcugaucguuuua

SEQ ID NO: 36926 - RNA, 21 nt, Artificial Sequence
  LRRK2 RNA guide
aaaacgaucagccagaaaaua

SEQ ID NO: 36927 - RNA, 21 nt, Artificial Sequence
  LRRK2 RNA guide
aaacgaucagccagaaaauag

SEQ ID NO: 36928 - RNA, 21 nt, Artificial Sequence
  LRRK2 RNA guide
aacgaucagccagaaaauaga

SEQ ID NO: 36929 - RNA, 21 nt, Artificial Sequence
  LRRK2 RNA guide
aaucuuucuauuuucuggcug

SEQ ID NO: 36930 - RNA, 21 nt, Artificial Sequence
  LRRK2 RNA guide
acgaucagccagaaaauagaa

SEQ ID NO: 36931 - RNA, 21 nt, Artificial Sequence
  LRRK2 RNA guide
aucuuucuauuuucuggcuga

SEQ ID NO: 36932 - RNA, 21 nt, Artificial Sequence
  LRRK2 RNA guide
auggcauuuuaaaacgaucag

SEQ ID NO: 36933 - RNA, 21 nt, Artificial Sequence
  LRRK2 RNA guide
auuuuaaaacgaucagccaga

SEQ ID NO: 36934 - RNA, 21 nt, Artificial Sequence
  LRRK2 RNA guide
auuuucuggcugaucguuuua

SEQ ID NO: 36935 - RNA, 21 nt, Artificial Sequence
  LRRK2 RNA guide
cauuuuaaaacgaucagccag

SEQ ID NO: 36936 - RNA, 21 nt, Artificial Sequence
  LRRK2 RNA guide
cuauuuucuggcugaucguuu

SEQ ID NO: 36937 - RNA, 21 nt, Artificial Sequence
  LRRK2 RNA guide
cugaucguuuuaaaaugccau

SEQ ID NO: 36938 - RNA, 21 nt, Artificial Sequence
  LRRK2 RNA guide
cuggcugaucguuuuaaaaug

SEQ ID NO: 36939 - RNA, 21 nt, Artificial Sequence
  LRRK2 RNA guide
cuuucuauuuucuggcugauc

SEQ ID NO: 36940 - RNA, 21 nt, Artificial Sequence
  LRRK2 RNA guide
gaaucuuucuauuuucuggcu

SEQ ID NO: 36941 - RNA, 21 nt, Artificial Sequence
  LRRK2 RNA guide
gcauuuuaaaacgaucagcca

SEQ ID NO: 36942 - RNA, 21 nt, Artificial Sequence
  LRRK2 RNA guide
gcugaucguuuuaaaaugcca

SEQ ID NO: 36943 - RNA, 21 nt, Artificial Sequence
  LRRK2 RNA guide
ggcauuuuaaaacgaucagcc

SEQ ID NO: 36944 - RNA, 21 nt, Artificial Sequence
  LRRK2 RNA guide
ggcugaucguuuuaaaaugcc

SEQ ID NO: 36945 - RNA, 21 nt, Artificial Sequence
  LRRK2 RNA guide
uaaaacgaucagccagaaaau

SEQ ID NO: 36946 - RNA, 21 nt, Artificial Sequence
  LRRK2 RNA guide
uauuuucuggcugaucguuuu

SEQ ID NO: 36947 - RNA, 21 nt, Artificial Sequence
  LRRK2 RNA guide
ucuauuuucuggcugaucguu

SEQ ID NO: 36948 - RNA, 21 nt, Artificial Sequence
  LRRK2 RNA guide
ucuggcugaucguuuuaaaau

SEQ ID NO: 36949 - RNA, 21 nt, Artificial Sequence
  LRRK2 RNA guide
ucuuucuauuuucuggcugau

SEQ ID NO: 36950 - RNA, 21 nt, Artificial Sequence
  LRRK2 RNA guide
uggcauuuuaaaacgaucagc

SEQ ID NO: 36951 - RNA, 21 nt, Artificial Sequence
  LRRK2 RNA guide
uggcugaucguuuuaaaaugc

SEQ ID NO: 36952 - RNA, 21 nt, Artificial Sequence
  LRRK2 RNA guide
uuaaaacgaucagccagaaaa

SEQ ID NO: 36953 - RNA, 21 nt, Artificial Sequence
  LRRK2 RNA guide
uucuauuuucuggcugaucgu

SEQ ID NO: 36954 - RNA, 21 nt, Artificial Sequence
  LRRK2 RNA guide
uucuggcugaucguuuuaaaa

SEQ ID NO: 36955 - RNA, 21 nt, Artificial Sequence
  LRRK2 RNA guide
uuuaaaacgaucagccagaaa

SEQ ID NO: 36956 - RNA, 21 nt, Artificial Sequence
  LRRK2 RNA guide
uuucuauuuucuggcugaucg

SEQ ID NO: 36957 - RNA, 21 nt, Artificial Sequence
  LRRK2 RNA guide
uuucuggcugaucguuuuaaa

SEQ ID NO: 36958 - RNA, 21 nt, Artificial Sequence
  LRRK2 RNA guide
uuuuaaaacgaucagccagaa

SEQ ID NO: 36959 - RNA, 21 nt, Artificial Sequence
  LRRK2 RNA guide
uuuucuggcugaucguuuuaa

SEQ ID NO: 36960 - RNA, 22 nt, Artificial Sequence
  LRRK2 RNA guide
aaaacgaucagccagaaaauag

SEQ ID NO: 36961 - RNA, 22 nt, Artificial Sequence
  LRRK2 RNA guide
aaacgaucagccagaaaauaga

SEQ ID NO: 36962 - RNA, 22 nt, Artificial Sequence
  LRRK2 RNA guide
aacgaucagccagaaaauagaa

SEQ ID NO: 36963 - RNA, 22 nt, Artificial Sequence
  LRRK2 RNA guide
aaucuuucuauuuucuggcuga

SEQ ID NO: 36964 - RNA, 22 nt, Artificial Sequence
  LRRK2 RNA guide
acgaucagccagaaaauagaaa

SEQ ID NO: 36965 - RNA, 22 nt, Artificial Sequence
  LRRK2 RNA guide
agaaucuuucuauuuucuggcu

SEQ ID NO: 36966 - RNA, 22 nt, Artificial Sequence
  LRRK2 RNA guide
aucuuucuauuuucuggcugau

SEQ ID NO: 36967 - RNA, 22 nt, Artificial Sequence
  LRRK2 RNA guide
auggcauuuuaaaacgaucagc

SEQ ID NO: 36968 - RNA, 22 nt, Artificial Sequence
  LRRK2 RNA guide
auuuuaaaacgaucagccagaa

SEQ ID NO: 36969 - RNA, 22 nt, Artificial Sequence
  LRRK2 RNA guide
auuuucuggcugaucguuuuaa

SEQ ID NO: 36970 - RNA, 22 nt, Artificial Sequence
  LRRK2 RNA guide
cauuuuaaaacgaucagccaga

SEQ ID NO: 36971 - RNA, 22 nt, Artificial Sequence
  LRRK2 RNA guide
cuauuuucuggcugaucguuuu

SEQ ID NO: 36972 - RNA, 22 nt, Artificial Sequence
  LRRK2 RNA guide
cugaucguuuuaaaaugccaua

SEQ ID NO: 36973 - RNA, 22 nt, Artificial Sequence
  LRRK2 RNA guide
cuggcugaucguuuuaaaaugc

SEQ ID NO: 36974 - RNA, 22 nt, Artificial Sequence
  LRRK2 RNA guide
cuuucuauuuucuggcugaucg

SEQ ID NO: 36975 - RNA, 22 nt, Artificial Sequence
  LRRK2 RNA guide
gaaucuuucuauuuucuggcug

SEQ ID NO: 36976 - RNA, 22 nt, Artificial Sequence
  LRRK2 RNA guide
gcauuuuaaaacgaucagccag

SEQ ID NO: 36977 - RNA, 22 nt, Artificial Sequence
  LRRK2 RNA guide
gcugaucguuuuaaaaugccau

SEQ ID NO: 36978 - RNA, 22 nt, Artificial Sequence
  LRRK2 RNA guide
ggcauuuuaaaacgaucagcca

SEQ ID NO: 36979 - RNA, 22 nt, Artificial Sequence
  LRRK2 RNA guide
ggcugaucguuuuaaaaugcca

SEQ ID NO: 36980 - RNA, 22 nt, Artificial Sequence
  LRRK2 RNA guide
uaaaacgaucagccagaaaaua

SEQ ID NO: 36981 - RNA, 22 nt, Artificial Sequence
  LRRK2 RNA guide
uauggcauuuuaaaacgaucag

SEQ ID NO: 36982 - RNA, 22 nt, Artificial Sequence
  LRRK2 RNA guide
uauuuucuggcugaucguuuua

SEQ ID NO: 36983 - RNA, 22 nt, Artificial Sequence
  LRRK2 RNA guide
ucuauuuucuggcugaucguuu

SEQ ID NO: 36984 - RNA, 22 nt, Artificial Sequence
  LRRK2 RNA guide
ucuggcugaucguuuuaaaaug

SEQ ID NO: 36985 - RNA, 22 nt, Artificial Sequence
  LRRK2 RNA guide
ucuuucuauuuucuggcugauc

SEQ ID NO: 36986 - RNA, 22 nt, Artificial Sequence
  LRRK2 RNA guide
uggcauuuuaaaacgaucagcc

SEQ ID NO: 36987 - RNA, 22 nt, Artificial Sequence
  LRRK2 RNA guide
uggcugaucguuuuaaaaugcc

SEQ ID NO: 36988 - RNA, 22 nt, Artificial Sequence
  LRRK2 RNA guide
uuaaaacgaucagccagaaaau

SEQ ID NO: 36989 - RNA, 22 nt, Artificial Sequence
  LRRK2 RNA guide
uucuauuuucuggcugaucguu

SEQ ID NO: 36990 - RNA, 22 nt, Artificial Sequence
  LRRK2 RNA guide
uucuggcugaucguuuuaaaau

SEQ ID NO: 36991 - RNA, 22 nt, Artificial Sequence
  LRRK2 RNA guide
uuuaaaacgaucagccagaaaa

SEQ ID NO: 36992 - RNA, 22 nt, Artificial Sequence
  LRRK2 RNA guide
uuucuauuuucuggcugaucgu

SEQ ID NO: 36993 - RNA, 22 nt, Artificial Sequence
  LRRK2 RNA guide
uuucuggcugaucguuuuaaaa

SEQ ID NO: 36994 - RNA, 22 nt, Artificial Sequence
  LRRK2 RNA guide
uuuuaaaacgaucagccagaaa

SEQ ID NO: 36995 - RNA, 22 nt, Artificial Sequence
  LRRK2 RNA guide
uuuucuggcugaucguuuuaaa

SEQ ID NO: 36996 - RNA, 20 nt, Artificial Sequence
  LRRK2 RNA guide
aaaaugaucagccagaaaau

SEQ ID NO: 36997 - RNA, 20 nt, Artificial Sequence
  LRRK2 RNA guide
aaaugaucagccagaaaaua

SEQ ID NO: 36998 - RNA, 20 nt, Artificial Sequence
  LRRK2 RNA guide
aaugaucagccagaaaauag

SEQ ID NO: 36999 - RNA, 20 nt, Artificial Sequence
  LRRK2 RNA guide
augaucagccagaaaauaga

SEQ ID NO: 37000 - RNA, 20 nt, Artificial Sequence
  LRRK2 RNA guide
auuuuaaaaugaucagccag

SEQ ID NO: 37001 - RNA, 20 nt, Artificial Sequence
  LRRK2 RNA guide
auuuucuggcugaucauuuu

SEQ ID NO: 37002 - RNA, 20 nt, Artificial Sequence
  LRRK2 RNA guide
cauuuuaaaaugaucagcca

SEQ ID NO: 37003 - RNA, 20 nt, Artificial Sequence
  LRRK2 RNA guide
cuauuuucuggcugaucauu

SEQ ID NO: 37004 - RNA, 20 nt, Artificial Sequence
  LRRK2 RNA guide
cugaucauuuuaaaaugcca

SEQ ID NO: 37005 - RNA, 20 nt, Artificial Sequence
  LRRK2 RNA guide
cuggcugaucauuuuaaaau

SEQ ID NO: 37006 - RNA, 20 nt, Artificial Sequence
  LRRK2 RNA guide
gcauuuuaaaaugaucagcc

SEQ ID NO: 37007 - RNA, 20 nt, Artificial Sequence
  LRRK2 RNA guide
gcugaucauuuuaaaaugcc

SEQ ID NO: 37008 - RNA, 20 nt, Artificial Sequence
  LRRK2 RNA guide
ggcauuuuaaaaugaucagc

SEQ ID NO: 37009 - RNA, 20 nt, Artificial Sequence
  LRRK2 RNA guide
ggcugaucauuuuaaaaugc

SEQ ID NO: 37010 - RNA, 20 nt, Artificial Sequence
  LRRK2 RNA guide
uaaaaugaucagccagaaaa

SEQ ID NO: 37011 - RNA, 20 nt, Artificial Sequence
  LRRK2 RNA guide
uauuuucuggcugaucauuu

SEQ ID NO: 37012 - RNA, 20 nt, Artificial Sequence
  LRRK2 RNA guide
ucuauuuucuggcugaucau

SEQ ID NO: 37013 - RNA, 20 nt, Artificial Sequence
  LRRK2 RNA guide
ucuggcugaucauuuuaaaa

SEQ ID NO: 37014 - RNA, 20 nt, Artificial Sequence
  LRRK2 RNA guide
uggcauuuuaaaaugaucag

SEQ ID NO: 37015 - RNA, 20 nt, Artificial Sequence
  LRRK2 RNA guide
uggcugaucauuuuaaaaug

SEQ ID NO: 37016 - RNA, 20 nt, Artificial Sequence
  LRRK2 RNA guide
uuaaaaugaucagccagaaa

SEQ ID NO: 37017 - RNA, 20 nt, Artificial Sequence
  LRRK2 RNA guide
uucuauuuucuggcugauca

SEQ ID NO: 37018 - RNA, 20 nt, Artificial Sequence
  LRRK2 RNA guide
uucuggcugaucauuuuaaa

SEQ ID NO: 37019 - RNA, 20 nt, Artificial Sequence
  LRRK2 RNA guide
uuuaaaaugaucagccagaa

SEQ ID NO: 37020 - RNA, 20 nt, Artificial Sequence
  LRRK2 RNA guide
uuucuggcugaucauuuuaa

SEQ ID NO: 37021 - RNA, 20 nt, Artificial Sequence
  LRRK2 RNA guide
uuuuaaaaugaucagccaga

SEQ ID NO: 37022 - RNA, 20 nt, Artificial Sequence
  LRRK2 RNA guide
uuuucuggcugaucauuuua

SEQ ID NO: 37023 - RNA, 21 nt, Artificial Sequence
  LRRK2 RNA guide
aaaugaucagccagaaaauag

SEQ ID NO: 37024 - RNA, 21 nt, Artificial Sequence
  LRRK2 RNA guide
aaugaucagccagaaaauaga

SEQ ID NO: 37025 - RNA, 21 nt, Artificial Sequence
  LRRK2 RNA guide
augaucagccagaaaauagaa

SEQ ID NO: 37026 - RNA, 21 nt, Artificial Sequence
  LRRK2 RNA guide
cauuuuaaaaugaucagccag

SEQ ID NO: 37027 - RNA, 21 nt, Artificial Sequence
  LRRK2 RNA guide
cuauuuucuggcugaucauuu

SEQ ID NO: 37028 - RNA, 21 nt, Artificial Sequence
  LRRK2 RNA guide
cuggcugaucauuuuaaaaug

SEQ ID NO: 37029 - RNA, 21 nt, Artificial Sequence
  LRRK2 RNA guide
gcauuuuaaaaugaucagcca

SEQ ID NO: 37030 - RNA, 21 nt, Artificial Sequence
  LRRK2 RNA guide
gcugaucauuuuaaaaugcca

SEQ ID NO: 37031 - RNA, 21 nt, Artificial Sequence
  LRRK2 RNA guide
ggcauuuuaaaaugaucagcc

SEQ ID NO: 37032 - RNA, 21 nt, Artificial Sequence
  LRRK2 RNA guide
ggcugaucauuuuaaaaugcc

SEQ ID NO: 37033 - RNA, 21 nt, Artificial Sequence
  LRRK2 RNA guide
ucuauuuucuggcugaucauu

SEQ ID NO: 37034 - RNA, 21 nt, Artificial Sequence
  LRRK2 RNA guide
uggcauuuuaaaaugaucagc

SEQ ID NO: 37035 - RNA, 21 nt, Artificial Sequence
  LRRK2 RNA guide
uggcugaucauuuuaaaaugc

SEQ ID NO: 37036 - RNA, 21 nt, Artificial Sequence
  LRRK2 RNA guide
uucuauuuucuggcugaucau

SEQ ID NO: 37037 - RNA, 21 nt, Artificial Sequence
  LRRK2 RNA guide
uuucuauuuucuggcugauca

SEQ ID NO: 37038 - RNA, 22 nt, Artificial Sequence
  LRRK2 RNA guide
aaaaugaucagccagaaaauag

SEQ ID NO: 37039 - RNA, 22 nt, Artificial Sequence
  LRRK2 RNA guide
aaaugaucagccagaaaauaga

SEQ ID NO: 37040 - RNA, 22 nt, Artificial Sequence
  LRRK2 RNA guide
aaugaucagccagaaaauagaa

SEQ ID NO: 37041 - RNA, 22 nt, Artificial Sequence
  LRRK2 RNA guide
augaucagccagaaaauagaaa

SEQ ID NO: 37042 - RNA, 22 nt, Artificial Sequence
  LRRK2 RNA guide
auggcauuuuaaaaugaucagc

SEQ ID NO: 37043 - RNA, 22 nt, Artificial Sequence
  LRRK2 RNA guide
cauuuuaaaaugaucagccaga

SEQ ID NO: 37044 - RNA, 22 nt, Artificial Sequence
  LRRK2 RNA guide
cuauuuucuggcugaucauuuu

SEQ ID NO: 37045 - RNA, 22 nt, Artificial Sequence
  LRRK2 RNA guide
cuggcugaucauuuuaaaaugc

SEQ ID NO: 37046 - RNA, 22 nt, Artificial Sequence
  LRRK2 RNA guide
cuuucuauuuucuggcugauca

SEQ ID NO: 37047 - RNA, 22 nt, Artificial Sequence
  LRRK2 RNA guide
gcauuuuaaaaugaucagccag

SEQ ID NO: 37048 - RNA, 22 nt, Artificial Sequence
  LRRK2 RNA guide
gcugaucauuuuaaaaugccau

SEQ ID NO: 37049 - RNA, 22 nt, Artificial Sequence
  LRRK2 RNA guide
ggcauuuuaaaaugaucagcca

SEQ ID NO: 37050 - RNA, 22 nt, Artificial Sequence
  LRRK2 RNA guide
ggcugaucauuuuaaaaugcca

SEQ ID NO: 37051 - RNA, 22 nt, Artificial Sequence
  LRRK2 RNA guide
ucuauuuucuggcugaucauuu

SEQ ID NO: 37052 - RNA, 22 nt, Artificial Sequence
  LRRK2 RNA guide
ucuggcugaucauuuuaaaaug

SEQ ID NO: 37053 - RNA, 22 nt, Artificial Sequence
  LRRK2 RNA guide
uggcauuuuaaaaugaucagcc

SEQ ID NO: 37054 - RNA, 22 nt, Artificial Sequence
  LRRK2 RNA guide
uggcugaucauuuuaaaaugcc

SEQ ID NO: 37055 - RNA, 22 nt, Artificial Sequence
  LRRK2 RNA guide
uucuauuuucuggcugaucauu

SEQ ID NO: 37056 - RNA, 22 nt, Artificial Sequence
  LRRK2 RNA guide
uuucuauuuucuggcugaucau

SEQ ID NO: 37057 - RNA, 20 nt, Artificial Sequence
  LRRK2 RNA guide
aaagauaucucuauguguag

SEQ ID NO: 37058 - RNA, 20 nt, Artificial Sequence
  LRRK2 RNA guide
aagauaucucuauguguaga

SEQ ID NO: 37059 - RNA, 20 nt, Artificial Sequence
  LRRK2 RNA guide
aauacaucucuacacauaga

SEQ ID NO: 37060 - RNA, 20 nt, Artificial Sequence
  LRRK2 RNA guide
aauccauaugucaauacauc

SEQ ID NO: 37061 - RNA, 20 nt, Artificial Sequence
  LRRK2 RNA guide
acacauagagauaucuuuca

SEQ ID NO: 37062 - RNA, 20 nt, Artificial Sequence
  LRRK2 RNA guide
acaucucuacacauagagau

SEQ ID NO: 37063 - RNA, 20 nt, Artificial Sequence
  LRRK2 RNA guide
agauaucucuauguguagag

SEQ ID NO: 37064 - RNA, 20 nt, Artificial Sequence
  LRRK2 RNA guide
auacaucucuacacauagag

SEQ ID NO: 37065 - RNA, 20 nt, Artificial Sequence
  LRRK2 RNA guide
auaucucuauguguagagau

SEQ ID NO: 37066 - RNA, 20 nt, Artificial Sequence
  LRRK2 RNA guide
auaugucaauacaucucuac

SEQ ID NO: 37067 - RNA, 20 nt, Artificial Sequence
  LRRK2 RNA guide
auccauaugucaauacaucu

SEQ ID NO: 37068 - RNA, 20 nt, Artificial Sequence
  LRRK2 RNA guide
aucucuacacauagagauau

SEQ ID NO: 37069 - RNA, 20 nt, Artificial Sequence
  LRRK2 RNA guide
aucucuauguguagagaugu

SEQ ID NO: 37070 - RNA, 20 nt, Artificial Sequence
  LRRK2 RNA guide
augucaauacaucucuacac

SEQ ID NO: 37071 - RNA, 20 nt, Artificial Sequence
  LRRK2 RNA guide
auguguagagauguauugac

SEQ ID NO: 37072 - RNA, 20 nt, Artificial Sequence
  LRRK2 RNA guide
caauacaucucuacacauag

SEQ ID NO: 37073 - RNA, 20 nt, Artificial Sequence
  LRRK2 RNA guide
cauaugucaauacaucucua

SEQ ID NO: 37074 - RNA, 20 nt, Artificial Sequence
  LRRK2 RNA guide
caucucuacacauagagaua

SEQ ID NO: 37075 - RNA, 20 nt, Artificial Sequence
  LRRK2 RNA guide
ccauaugucaauacaucucu

SEQ ID NO: 37076 - RNA, 20 nt, Artificial Sequence
  LRRK2 RNA guide
cuacacauagagauaucuuu

SEQ ID NO: 37077 - RNA, 20 nt, Artificial Sequence
  LRRK2 RNA guide
cuauguguagagauguauug

SEQ ID NO: 37078 - RNA, 20 nt, Artificial Sequence
  LRRK2 RNA guide
cucuacacauagagauaucu

SEQ ID NO: 37079 - RNA, 20 nt, Artificial Sequence
  LRRK2 RNA guide
cucuauguguagagauguau

SEQ ID NO: 37080 - RNA, 20 nt, Artificial Sequence
  LRRK2 RNA guide
gaaagauaucucuaugugua

SEQ ID NO: 37081 - RNA, 20 nt, Artificial Sequence
  LRRK2 RNA guide
gauaucucuauguguagaga

SEQ ID NO: 37082 - RNA, 20 nt, Artificial Sequence
  LRRK2 RNA guide
gucaauacaucucuacacau

SEQ ID NO: 37083 - RNA, 20 nt, Artificial Sequence
  LRRK2 RNA guide
gugaaagauaucucuaugug

SEQ ID NO: 37084 - RNA, 20 nt, Artificial Sequence
  LRRK2 RNA guide
guguagagauguauugacau

SEQ ID NO: 37085 - RNA, 20 nt, Artificial Sequence
  LRRK2 RNA guide
uacacauagagauaucuuuc

SEQ ID NO: 37086 - RNA, 20 nt, Artificial Sequence
  LRRK2 RNA guide
uacaucucuacacauagaga

SEQ ID NO: 37087 - RNA, 20 nt, Artificial Sequence
  LRRK2 RNA guide
uaucucuauguguagagaug

SEQ ID NO: 37088 - RNA, 20 nt, Artificial Sequence
  LRRK2 RNA guide
uaugucaauacaucucuaca

SEQ ID NO: 37089 - RNA, 20 nt, Artificial Sequence
  LRRK2 RNA guide
uauguguagagauguauuga

SEQ ID NO: 37090 - RNA, 20 nt, Artificial Sequence
  LRRK2 RNA guide
ucaauacaucucuacacaua

SEQ ID NO: 37091 - RNA, 20 nt, Artificial Sequence
  LRRK2 RNA guide
uccauaugucaauacaucuc

SEQ ID NO: 37092 - RNA, 20 nt, Artificial Sequence
  LRRK2 RNA guide
ucuacacauagagauaucuu

SEQ ID NO: 37093 - RNA, 20 nt, Artificial Sequence
  LRRK2 RNA guide
ucuauguguagagauguauu

SEQ ID NO: 37094 - RNA, 20 nt, Artificial Sequence
  LRRK2 RNA guide
ucucuacacauagagauauc

SEQ ID NO: 37095 - RNA, 20 nt, Artificial Sequence
  LRRK2 RNA guide
ucucuauguguagagaugua

SEQ ID NO: 37096 - RNA, 20 nt, Artificial Sequence
  LRRK2 RNA guide
ugaaagauaucucuaugugu

SEQ ID NO: 37097 - RNA, 20 nt, Artificial Sequence
  LRRK2 RNA guide
uguagagauguauugacaua

SEQ ID NO: 37098 - RNA, 20 nt, Artificial Sequence
  LRRK2 RNA guide
ugucaauacaucucuacaca

SEQ ID NO: 37099 - RNA, 20 nt, Artificial Sequence
  LRRK2 RNA guide
ugugaaagauaucucuaugu

SEQ ID NO: 37100 - RNA, 20 nt, Artificial Sequence
  LRRK2 RNA guide
uguguagagauguauugaca

SEQ ID NO: 37101 - RNA, 20 nt, Artificial Sequence
  LRRK2 RNA guide
uugugaaagauaucucuaug

SEQ ID NO: 37102 - RNA, 21 nt, Artificial Sequence
  LRRK2 RNA guide
aagauaucucuauguguagag

SEQ ID NO: 37103 - RNA, 21 nt, Artificial Sequence
  LRRK2 RNA guide
aauacaucucuacacauagag

SEQ ID NO: 37104 - RNA, 21 nt, Artificial Sequence
  LRRK2 RNA guide
acacauagagauaucuuucac

SEQ ID NO: 37105 - RNA, 21 nt, Artificial Sequence
  LRRK2 RNA guide
acaucucuacacauagagaua

SEQ ID NO: 37106 - RNA, 21 nt, Artificial Sequence
  LRRK2 RNA guide
agauaucucuauguguagaga

SEQ ID NO: 37107 - RNA, 21 nt, Artificial Sequence
  LRRK2 RNA guide
auacaucucuacacauagaga

SEQ ID NO: 37108 - RNA, 21 nt, Artificial Sequence
  LRRK2 RNA guide
auaucucuauguguagagaug

SEQ ID NO: 37109 - RNA, 21 nt, Artificial Sequence
  LRRK2 RNA guide
auccauaugucaauacaucuc

SEQ ID NO: 37110 - RNA, 21 nt, Artificial Sequence
  LRRK2 RNA guide
aucucuacacauagagauauc

SEQ ID NO: 37111 - RNA, 21 nt, Artificial Sequence
  LRRK2 RNA guide
aucucuauguguagagaugua

SEQ ID NO: 37112 - RNA, 21 nt, Artificial Sequence
  LRRK2 RNA guide
augucaauacaucucuacaca

SEQ ID NO: 37113 - RNA, 21 nt, Artificial Sequence
  LRRK2 RNA guide
auguguagagauguauugaca

SEQ ID NO: 37114 - RNA, 21 nt, Artificial Sequence
  LRRK2 RNA guide
caauacaucucuacacauaga

SEQ ID NO: 37115 - RNA, 21 nt, Artificial Sequence
  LRRK2 RNA guide
cauaugucaauacaucucuac

SEQ ID NO: 37116 - RNA, 21 nt, Artificial Sequence
  LRRK2 RNA guide
caucucuacacauagagauau

SEQ ID NO: 37117 - RNA, 21 nt, Artificial Sequence
  LRRK2 RNA guide
ccauaugucaauacaucucua

SEQ ID NO: 37118 - RNA, 21 nt, Artificial Sequence
  LRRK2 RNA guide
cuacacauagagauaucuuuc

SEQ ID NO: 37119 - RNA, 21 nt, Artificial Sequence
  LRRK2 RNA guide
cuauguguagagauguauuga

SEQ ID NO: 37120 - RNA, 21 nt, Artificial Sequence
  LRRK2 RNA guide
cucuacacauagagauaucuu

SEQ ID NO: 37121 - RNA, 21 nt, Artificial Sequence
  LRRK2 RNA guide
cucuauguguagagauguauu

SEQ ID NO: 37122 - RNA, 21 nt, Artificial Sequence
  LRRK2 RNA guide
gaaagauaucucuauguguag

SEQ ID NO: 37123 - RNA, 21 nt, Artificial Sequence
  LRRK2 RNA guide
gauaucucuauguguagagau

SEQ ID NO: 37124 - RNA, 21 nt, Artificial Sequence
  LRRK2 RNA guide
gucaauacaucucuacacaua

SEQ ID NO: 37125 - RNA, 21 nt, Artificial Sequence
  LRRK2 RNA guide
gugaaagauaucucuaugugu

SEQ ID NO: 37126 - RNA, 21 nt, Artificial Sequence
  LRRK2 RNA guide
guguagagauguauugacaua

SEQ ID NO: 37127 - RNA, 21 nt, Artificial Sequence
  LRRK2 RNA guide
uacaucucuacacauagagau

SEQ ID NO: 37128 - RNA, 21 nt, Artificial Sequence
  LRRK2 RNA guide
uaucucuauguguagagaugu

SEQ ID NO: 37129 - RNA, 21 nt, Artificial Sequence
  LRRK2 RNA guide
uaugucaauacaucucuacac

SEQ ID NO: 37130 - RNA, 21 nt, Artificial Sequence
  LRRK2 RNA guide
uauguguagagauguauugac

SEQ ID NO: 37131 - RNA, 21 nt, Artificial Sequence
  LRRK2 RNA guide
ucaauacaucucuacacauag

SEQ ID NO: 37132 - RNA, 21 nt, Artificial Sequence
  LRRK2 RNA guide
uccauaugucaauacaucucu

SEQ ID NO: 37133 - RNA, 21 nt, Artificial Sequence
  LRRK2 RNA guide
ucuauguguagagauguauug

SEQ ID NO: 37134 - RNA, 21 nt, Artificial Sequence
  LRRK2 RNA guide
ucucuacacauagagauaucu

SEQ ID NO: 37135 - RNA, 21 nt, Artificial Sequence
  LRRK2 RNA guide
ucucuauguguagagauguau

SEQ ID NO: 37136 - RNA, 21 nt, Artificial Sequence
  LRRK2 RNA guide
ugucaauacaucucuacacau

SEQ ID NO: 37137 - RNA, 21 nt, Artificial Sequence
  LRRK2 RNA guide
ugugaaagauaucucuaugug

SEQ ID NO: 37138 - RNA, 21 nt, Artificial Sequence
  LRRK2 RNA guide
uguguagagauguauugacau

SEQ ID NO: 37139 - RNA, 22 nt, Artificial Sequence
  LRRK2 RNA guide
aaagauaucucuauguguagag

SEQ ID NO: 37140 - RNA, 22 nt, Artificial Sequence
  LRRK2 RNA guide
aagauaucucuauguguagaga

SEQ ID NO: 37141 - RNA, 22 nt, Artificial Sequence
  LRRK2 RNA guide
aauacaucucuacacauagaga

SEQ ID NO: 37142 - RNA, 22 nt, Artificial Sequence
  LRRK2 RNA guide
aauccauaugucaauacaucuc

SEQ ID NO: 37143 - RNA, 22 nt, Artificial Sequence
  LRRK2 RNA guide
acacauagagauaucuuucaca

SEQ ID NO: 37144 - RNA, 22 nt, Artificial Sequence
  LRRK2 RNA guide
acaucucuacacauagagauau

SEQ ID NO: 37145 - RNA, 22 nt, Artificial Sequence
  LRRK2 RNA guide
agauaucucuauguguagagau

SEQ ID NO: 37146 - RNA, 22 nt, Artificial Sequence
  LRRK2 RNA guide
auacaucucuacacauagagau

SEQ ID NO: 37147 - RNA, 22 nt, Artificial Sequence
  LRRK2 RNA guide
auaucucuauguguagagaugu

SEQ ID NO: 37148 - RNA, 22 nt, Artificial Sequence
  LRRK2 RNA guide
auaugucaauacaucucuacac

SEQ ID NO: 37149 - RNA, 22 nt, Artificial Sequence
  LRRK2 RNA guide
auccauaugucaauacaucucu

SEQ ID NO: 37150 - RNA, 22 nt, Artificial Sequence
  LRRK2 RNA guide
aucucuacacauagagauaucu

SEQ ID NO: 37151 - RNA, 22 nt, Artificial Sequence
  LRRK2 RNA guide
aucucuauguguagagauguau

SEQ ID NO: 37152 - RNA, 22 nt, Artificial Sequence
  LRRK2 RNA guide
augucaauacaucucuacacau

SEQ ID NO: 37153 - RNA, 22 nt, Artificial Sequence
  LRRK2 RNA guide
auguguagagauguauugacau

SEQ ID NO: 37154 - RNA, 22 nt, Artificial Sequence
  LRRK2 RNA guide
caauacaucucuacacauagag

SEQ ID NO: 37155 - RNA, 22 nt, Artificial Sequence
  LRRK2 RNA guide
cauaugucaauacaucucuaca

SEQ ID NO: 37156 - RNA, 22 nt, Artificial Sequence
  LRRK2 RNA guide
caucucuacacauagagauauc

SEQ ID NO: 37157 - RNA, 22 nt, Artificial Sequence
  LRRK2 RNA guide
ccauaugucaauacaucucuac

SEQ ID NO: 37158 - RNA, 22 nt, Artificial Sequence
  LRRK2 RNA guide
cuacacauagagauaucuuuca

SEQ ID NO: 37159 - RNA, 22 nt, Artificial Sequence
  LRRK2 RNA guide
cuauguguagagauguauugac

SEQ ID NO: 37160 - RNA, 22 nt, Artificial Sequence
  LRRK2 RNA guide
cucuacacauagagauaucuuu

SEQ ID NO: 37161 - RNA, 22 nt, Artificial Sequence
  LRRK2 RNA guide
cucuauguguagagauguauug

SEQ ID NO: 37162 - RNA, 22 nt, Artificial Sequence
  LRRK2 RNA guide
gaaagauaucucuauguguaga

SEQ ID NO: 37163 - RNA, 22 nt, Artificial Sequence
  LRRK2 RNA guide
gauaucucuauguguagagaug

SEQ ID NO: 37164 - RNA, 22 nt, Artificial Sequence
  LRRK2 RNA guide
gucaauacaucucuacacauag

SEQ ID NO: 37165 - RNA, 22 nt, Artificial Sequence
  LRRK2 RNA guide
gugaaagauaucucuaugugua

SEQ ID NO: 37166 - RNA, 22 nt, Artificial Sequence
  LRRK2 RNA guide
guguagagauguauugacauau

SEQ ID NO: 37167 - RNA, 22 nt, Artificial Sequence
  LRRK2 RNA guide
uacacauagagauaucuuucac

SEQ ID NO: 37168 - RNA, 22 nt, Artificial Sequence
  LRRK2 RNA guide
uacaucucuacacauagagaua

SEQ ID NO: 37169 - RNA, 22 nt, Artificial Sequence
  LRRK2 RNA guide
uaucucuauguguagagaugua

SEQ ID NO: 37170 - RNA, 22 nt, Artificial Sequence
  LRRK2 RNA guide
uaugucaauacaucucuacaca

SEQ ID NO: 37171 - RNA, 22 nt, Artificial Sequence
  LRRK2 RNA guide
uauguguagagauguauugaca

SEQ ID NO: 37172 - RNA, 22 nt, Artificial Sequence
  LRRK2 RNA guide
ucaauacaucucuacacauaga

SEQ ID NO: 37173 - RNA, 22 nt, Artificial Sequence
  LRRK2 RNA guide
uccauaugucaauacaucucua

SEQ ID NO: 37174 - RNA, 22 nt, Artificial Sequence
  LRRK2 RNA guide
ucuacacauagagauaucuuuc

SEQ ID NO: 37175 - RNA, 22 nt, Artificial Sequence
  LRRK2 RNA guide
ucuauguguagagauguauuga

SEQ ID NO: 37176 - RNA, 22 nt, Artificial Sequence
  LRRK2 RNA guide
ucucuacacauagagauaucuu

SEQ ID NO: 37177 - RNA, 22 nt, Artificial Sequence
  LRRK2 RNA guide
ucucuauguguagagauguauu

SEQ ID NO: 37178 - RNA, 22 nt, Artificial Sequence
  LRRK2 RNA guide
ugaaagauaucucuauguguag

SEQ ID NO: 37179 - RNA, 22 nt, Artificial Sequence
  LRRK2 RNA guide
uguagagauguauugacauaug

SEQ ID NO: 37180 - RNA, 22 nt, Artificial Sequence
  LRRK2 RNA guide
ugucaauacaucucuacacaua

SEQ ID NO: 37181 - RNA, 22 nt, Artificial Sequence
  LRRK2 RNA guide
ugugaaagauaucucuaugugu

SEQ ID NO: 37182 - RNA, 22 nt, Artificial Sequence
  LRRK2 RNA guide
uguguagagauguauugacaua

SEQ ID NO: 37183 - RNA, 22 nt, Artificial Sequence
  LRRK2 RNA guide
uugugaaagauaucucuaugug

SEQ ID NO: 37184 - RNA, 20 nt, Artificial Sequence
  LRRK2 RNA guide
acaucucuauacauagagau

SEQ ID NO: 37185 - RNA, 20 nt, Artificial Sequence
  LRRK2 RNA guide
agauaucucuauguauagag

SEQ ID NO: 37186 - RNA, 20 nt, Artificial Sequence
  LRRK2 RNA guide
auacaucucuauacauagag

SEQ ID NO: 37187 - RNA, 20 nt, Artificial Sequence
  LRRK2 RNA guide
aucucuauguauagagaugu

SEQ ID NO: 37188 - RNA, 20 nt, Artificial Sequence
  LRRK2 RNA guide
auguauagagauguauugac

SEQ ID NO: 37189 - RNA, 20 nt, Artificial Sequence
  LRRK2 RNA guide
augucaauacaucucuauac

SEQ ID NO: 37190 - RNA, 20 nt, Artificial Sequence
  LRRK2 RNA guide
caauacaucucuauacauag

SEQ ID NO: 37191 - RNA, 20 nt, Artificial Sequence
  LRRK2 RNA guide
caucucuauacauagagaua

SEQ ID NO: 37192 - RNA, 20 nt, Artificial Sequence
  LRRK2 RNA guide
cuauguauagagauguauug

SEQ ID NO: 37193 - RNA, 20 nt, Artificial Sequence
  LRRK2 RNA guide
cucuauacauagagauaucu

SEQ ID NO: 37194 - RNA, 20 nt, Artificial Sequence
  LRRK2 RNA guide
cucuauguauagagauguau

SEQ ID NO: 37195 - RNA, 20 nt, Artificial Sequence
  LRRK2 RNA guide
gauaucucuauguauagaga

SEQ ID NO: 37196 - RNA, 20 nt, Artificial Sequence
  LRRK2 RNA guide
guauagagauguauugacau

SEQ ID NO: 37197 - RNA, 20 nt, Artificial Sequence
  LRRK2 RNA guide
gucaauacaucucuauacau

SEQ ID NO: 37198 - RNA, 20 nt, Artificial Sequence
  LRRK2 RNA guide
gugaaagauaucucuaugua

SEQ ID NO: 37199 - RNA, 20 nt, Artificial Sequence
  LRRK2 RNA guide
uacaucucuauacauagaga

SEQ ID NO: 37200 - RNA, 20 nt, Artificial Sequence
  LRRK2 RNA guide
uaucucuauguauagagaug

SEQ ID NO: 37201 - RNA, 20 nt, Artificial Sequence
  LRRK2 RNA guide
ucucuauacauagagauauc

SEQ ID NO: 37202 - RNA, 20 nt, Artificial Sequence
  LRRK2 RNA guide
ucucuauguauagagaugua

SEQ ID NO: 37203 - RNA, 20 nt, Artificial Sequence
  LRRK2 RNA guide
uguauagagauguauugaca

SEQ ID NO: 37204 - RNA, 20 nt, Artificial Sequence
  LRRK2 RNA guide
ugucaauacaucucuauaca

SEQ ID NO: 37205 - RNA, 22 nt, Artificial Sequence
  LRRK2 RNA guide
caauacaucucuauacauagag

SEQ ID NO: 37206 - RNA, 22 nt, Artificial Sequence
  LRRK2 RNA guide
caucucuauacauagagauauc

SEQ ID NO: 37207 - RNA, 22 nt, Artificial Sequence
  LRRK2 RNA guide
ccauaugucaauacaucucuau

SEQ ID NO: 37208 - RNA, 22 nt, Artificial Sequence
  LRRK2 RNA guide
cuauguauagagauguauugac

SEQ ID NO: 37209 - RNA, 22 nt, Artificial Sequence
  LRRK2 RNA guide
cucuauguauagagauguauug

SEQ ID NO: 37210 - RNA, 22 nt, Artificial Sequence
  LRRK2 RNA guide
gauaucucuauguauagagaug

SEQ ID NO: 37211 - RNA, 22 nt, Artificial Sequence
  LRRK2 RNA guide
gucaauacaucucuauacauag

SEQ ID NO: 37212 - RNA, 20 nt, Artificial Sequence
  LRRK2 RNA guide
aaaccacacauuggguuacu

SEQ ID NO: 37213 - RNA, 20 nt, Artificial Sequence
  LRRK2 RNA guide
aaccacacauuggguuacug

SEQ ID NO: 37214 - RNA, 20 nt, Artificial Sequence
  LRRK2 RNA guide
aacccaaugugugguuugaa

SEQ ID NO: 37215 - RNA, 20 nt, Artificial Sequence
  LRRK2 RNA guide
aaugugugguuugaaaauug

SEQ ID NO: 37216 - RNA, 20 nt, Artificial Sequence
  LRRK2 RNA guide
aauuuucaaaccacacauug

SEQ ID NO: 37217 - RNA, 20 nt, Artificial Sequence
  LRRK2 RNA guide
acaguaacccaauguguggu

SEQ ID NO: 37218 - RNA, 20 nt, Artificial Sequence
  LRRK2 RNA guide
accacacauuggguuacugu

SEQ ID NO: 37219 - RNA, 20 nt, Artificial Sequence
  LRRK2 RNA guide
acccaaugugugguuugaaa

SEQ ID NO: 37220 - RNA, 20 nt, Artificial Sequence
  LRRK2 RNA guide
agacaguaacccaaugugug

SEQ ID NO: 37221 - RNA, 20 nt, Artificial Sequence
  LRRK2 RNA guide
aguaacccaaugugugguuu

SEQ ID NO: 37222 - RNA, 20 nt, Artificial Sequence
  LRRK2 RNA guide
augugugguuugaaaauugc

SEQ ID NO: 37223 - RNA, 20 nt, Artificial Sequence
  LRRK2 RNA guide
auugcuugcaauuuucaaac

SEQ ID NO: 37224 - RNA, 20 nt, Artificial Sequence
  LRRK2 RNA guide
auuuucaaaccacacauugg

SEQ ID NO: 37225 - RNA, 20 nt, Artificial Sequence
  LRRK2 RNA guide
caaaccacacauuggguuac

SEQ ID NO: 37226 - RNA, 20 nt, Artificial Sequence
  LRRK2 RNA guide
caaugugugguuugaaaauu

SEQ ID NO: 37227 - RNA, 20 nt, Artificial Sequence
  LRRK2 RNA guide
caauuuucaaaccacacauu

SEQ ID NO: 37228 - RNA, 20 nt, Artificial Sequence
  LRRK2 RNA guide
caguaacccaaugugugguu

SEQ ID NO: 37229 - RNA, 20 nt, Artificial Sequence
  LRRK2 RNA guide
ccaaugugugguuugaaaau

SEQ ID NO: 37230 - RNA, 20 nt, Artificial Sequence
  LRRK2 RNA guide
cccaaugugugguuugaaaa

SEQ ID NO: 37231 - RNA, 20 nt, Artificial Sequence
  LRRK2 RNA guide
ccuagacaguaacccaaugu

SEQ ID NO: 37232 - RNA, 20 nt, Artificial Sequence
  LRRK2 RNA guide
cuagacaguaacccaaugug

SEQ ID NO: 37233 - RNA, 20 nt, Artificial Sequence
  LRRK2 RNA guide
cuugcaauuuucaaaccaca

SEQ ID NO: 37234 - RNA, 20 nt, Artificial Sequence
  LRRK2 RNA guide
gacaguaacccaaugugugg

SEQ ID NO: 37235 - RNA, 20 nt, Artificial Sequence
  LRRK2 RNA guide
gcaauuuucaaaccacacau

SEQ ID NO: 37236 - RNA, 20 nt, Artificial Sequence
  LRRK2 RNA guide
gcuugcaauuuucaaaccac

SEQ ID NO: 37237 - RNA, 20 nt, Artificial Sequence
  LRRK2 RNA guide
gguuuauugcuugcaauuuu

SEQ ID NO: 37238 - RNA, 20 nt, Artificial Sequence
  LRRK2 RNA guide
gguuugaaaauugcaagcaa

SEQ ID NO: 37239 - RNA, 20 nt, Artificial Sequence
  LRRK2 RNA guide
guaacccaaugugugguuug

SEQ ID NO: 37240 - RNA, 20 nt, Artificial Sequence
  LRRK2 RNA guide
gugguuugaaaauugcaagc

SEQ ID NO: 37241 - RNA, 20 nt, Artificial Sequence
  LRRK2 RNA guide
gugugguuugaaaauugcaa

SEQ ID NO: 37242 - RNA, 20 nt, Artificial Sequence
  LRRK2 RNA guide
guuuauugcuugcaauuuuc

SEQ ID NO: 37243 - RNA, 20 nt, Artificial Sequence
  LRRK2 RNA guide
uaacccaaugugugguuuga

SEQ ID NO: 37244 - RNA, 20 nt, Artificial Sequence
  LRRK2 RNA guide
uagacaguaacccaaugugu

SEQ ID NO: 37245 - RNA, 20 nt, Artificial Sequence
  LRRK2 RNA guide
ucaaaccacacauuggguua

SEQ ID NO: 37246 - RNA, 20 nt, Artificial Sequence
  LRRK2 RNA guide
uccuagacaguaacccaaug

SEQ ID NO: 37247 - RNA, 20 nt, Artificial Sequence
  LRRK2 RNA guide
ugcaauuuucaaaccacaca

SEQ ID NO: 37248 - RNA, 20 nt, Artificial Sequence
  LRRK2 RNA guide
ugcuugcaauuuucaaacca

SEQ ID NO: 37249 - RNA, 20 nt, Artificial Sequence
  LRRK2 RNA guide
ugguuugaaaauugcaagca

SEQ ID NO: 37250 - RNA, 20 nt, Artificial Sequence
  LRRK2 RNA guide
ugugguuugaaaauugcaag

SEQ ID NO: 37251 - RNA, 20 nt, Artificial Sequence
  LRRK2 RNA guide
ugugugguuugaaaauugca

SEQ ID NO: 37252 - RNA, 20 nt, Artificial Sequence
  LRRK2 RNA guide
uucaaaccacacauuggguu

SEQ ID NO: 37253 - RNA, 20 nt, Artificial Sequence
  LRRK2 RNA guide
uugcaauuuucaaaccacac

SEQ ID NO: 37254 - RNA, 20 nt, Artificial Sequence
  LRRK2 RNA guide
uugcuugcaauuuucaaacc

SEQ ID NO: 37255 - RNA, 20 nt, Artificial Sequence
  LRRK2 RNA guide
uuucaaaccacacauugggu

SEQ ID NO: 37256 - RNA, 20 nt, Artificial Sequence
  LRRK2 RNA guide
uuuucaaaccacacauuggg

SEQ ID NO: 37257 - RNA, 21 nt, Artificial Sequence
  LRRK2 RNA guide
aaaccacacauuggguuacug

SEQ ID NO: 37258 - RNA, 21 nt, Artificial Sequence
  LRRK2 RNA guide
aaccacacauuggguuacugu

SEQ ID NO: 37259 - RNA, 21 nt, Artificial Sequence
  LRRK2 RNA guide
aacccaaugugugguuugaaa

SEQ ID NO: 37260 - RNA, 21 nt, Artificial Sequence
  LRRK2 RNA guide
aaugugugguuugaaaauugc

SEQ ID NO: 37261 - RNA, 21 nt, Artificial Sequence
  LRRK2 RNA guide
aauuuucaaaccacacauugg

SEQ ID NO: 37262 - RNA, 21 nt, Artificial Sequence
  LRRK2 RNA guide
acaguaacccaaugugugguu

SEQ ID NO: 37263 - RNA, 21 nt, Artificial Sequence
  LRRK2 RNA guide
accacacauuggguuacuguc

SEQ ID NO: 37264 - RNA, 21 nt, Artificial Sequence
  LRRK2 RNA guide
acccaaugugugguuugaaaa

SEQ ID NO: 37265 - RNA, 21 nt, Artificial Sequence
  LRRK2 RNA guide
agacaguaacccaaugugugg

SEQ ID NO: 37266 - RNA, 21 nt, Artificial Sequence
  LRRK2 RNA guide
aguaacccaaugugugguuug

SEQ ID NO: 37267 - RNA, 21 nt, Artificial Sequence
  LRRK2 RNA guide
auccuagacaguaacccaaug

SEQ ID NO: 37268 - RNA, 21 nt, Artificial Sequence
  LRRK2 RNA guide
augugugguuugaaaauugca

SEQ ID NO: 37269 - RNA, 21 nt, Artificial Sequence
  LRRK2 RNA guide
auugcuugcaauuuucaaacc

SEQ ID NO: 37270 - RNA, 21 nt, Artificial Sequence
  LRRK2 RNA guide
auuuucaaaccacacauuggg

SEQ ID NO: 37271 - RNA, 21 nt, Artificial Sequence
  LRRK2 RNA guide
caaaccacacauuggguuacu

SEQ ID NO: 37272 - RNA, 21 nt, Artificial Sequence
  LRRK2 RNA guide
caaugugugguuugaaaauug

SEQ ID NO: 37273 - RNA, 21 nt, Artificial Sequence
  LRRK2 RNA guide
caauuuucaaaccacacauug

SEQ ID NO: 37274 - RNA, 21 nt, Artificial Sequence
  LRRK2 RNA guide
caguaacccaaugugugguuu

SEQ ID NO: 37275 - RNA, 21 nt, Artificial Sequence
  LRRK2 RNA guide
ccaaugugugguuugaaaauu

SEQ ID NO: 37276 - RNA, 21 nt, Artificial Sequence
  LRRK2 RNA guide
cccaaugugugguuugaaaau

SEQ ID NO: 37277 - RNA, 21 nt, Artificial Sequence
  LRRK2 RNA guide
ccuagacaguaacccaaugug

SEQ ID NO: 37278 - RNA, 21 nt, Artificial Sequence
  LRRK2 RNA guide
cuagacaguaacccaaugugu

SEQ ID NO: 37279 - RNA, 21 nt, Artificial Sequence
  LRRK2 RNA guide
cuugcaauuuucaaaccacac

SEQ ID NO: 37280 - RNA, 21 nt, Artificial Sequence
  LRRK2 RNA guide
gacaguaacccaauguguggu

SEQ ID NO: 37281 - RNA, 21 nt, Artificial Sequence
  LRRK2 RNA guide
gcaauuuucaaaccacacauu

SEQ ID NO: 37282 - RNA, 21 nt, Artificial Sequence
  LRRK2 RNA guide
gcuugcaauuuucaaaccaca

SEQ ID NO: 37283 - RNA, 21 nt, Artificial Sequence
  LRRK2 RNA guide
gguuuauugcuugcaauuuuc

SEQ ID NO: 37284 - RNA, 21 nt, Artificial Sequence
  LRRK2 RNA guide
gguuugaaaauugcaagcaau

SEQ ID NO: 37285 - RNA, 21 nt, Artificial Sequence
  LRRK2 RNA guide
guaacccaaugugugguuuga

SEQ ID NO: 37286 - RNA, 21 nt, Artificial Sequence
  LRRK2 RNA guide
gugguuugaaaauugcaagca

SEQ ID NO: 37287 - RNA, 21 nt, Artificial Sequence
  LRRK2 RNA guide
gugugguuugaaaauugcaag

SEQ ID NO: 37288 - RNA, 21 nt, Artificial Sequence
  LRRK2 RNA guide
uaacccaaugugugguuugaa

SEQ ID NO: 37289 - RNA, 21 nt, Artificial Sequence
  LRRK2 RNA guide
uagacaguaacccaaugugug

SEQ ID NO: 37290 - RNA, 21 nt, Artificial Sequence
  LRRK2 RNA guide
ucaaaccacacauuggguuac

SEQ ID NO: 37291 - RNA, 21 nt, Artificial Sequence
  LRRK2 RNA guide
uccuagacaguaacccaaugu

SEQ ID NO: 37292 - RNA, 21 nt, Artificial Sequence
  LRRK2 RNA guide
ugcaauuuucaaaccacacau

SEQ ID NO: 37293 - RNA, 21 nt, Artificial Sequence
  LRRK2 RNA guide
ugcuugcaauuuucaaaccac

SEQ ID NO: 37294 - RNA, 21 nt, Artificial Sequence
  LRRK2 RNA guide
ugguuugaaaauugcaagcaa

SEQ ID NO: 37295 - RNA, 21 nt, Artificial Sequence
  LRRK2 RNA guide
ugugguuugaaaauugcaagc

SEQ ID NO: 37296 - RNA, 21 nt, Artificial Sequence
  LRRK2 RNA guide
ugugugguuugaaaauugcaa

SEQ ID NO: 37297 - RNA, 21 nt, Artificial Sequence
  LRRK2 RNA guide
uucaaaccacacauuggguua

SEQ ID NO: 37298 - RNA, 21 nt, Artificial Sequence
  LRRK2 RNA guide
uugcaauuuucaaaccacaca

SEQ ID NO: 37299 - RNA, 21 nt, Artificial Sequence
  LRRK2 RNA guide
uugcuugcaauuuucaaacca

SEQ ID NO: 37300 - RNA, 21 nt, Artificial Sequence
  LRRK2 RNA guide
uuucaaaccacacauuggguu

SEQ ID NO: 37301 - RNA, 21 nt, Artificial Sequence
  LRRK2 RNA guide
uuuucaaaccacacauugggu

SEQ ID NO: 37302 - RNA, 22 nt, Artificial Sequence
  LRRK2 RNA guide
aaaccacacauuggguuacugu

SEQ ID NO: 37303 - RNA, 22 nt, Artificial Sequence
  LRRK2 RNA guide
aaccacacauuggguuacuguc

SEQ ID NO: 37304 - RNA, 22 nt, Artificial Sequence
  LRRK2 RNA guide
aacccaaugugugguuugaaaa

SEQ ID NO: 37305 - RNA, 22 nt, Artificial Sequence
  LRRK2 RNA guide
aaugugugguuugaaaauugca

SEQ ID NO: 37306 - RNA, 22 nt, Artificial Sequence
  LRRK2 RNA guide
aauuuucaaaccacacauuggg

SEQ ID NO: 37307 - RNA, 22 nt, Artificial Sequence
  LRRK2 RNA guide
acaguaacccaaugugugguuu

SEQ ID NO: 37308 - RNA, 22 nt, Artificial Sequence
  LRRK2 RNA guide
accacacauuggguuacugucu

SEQ ID NO: 37309 - RNA, 22 nt, Artificial Sequence
  LRRK2 RNA guide
acccaaugugugguuugaaaau

SEQ ID NO: 37310 - RNA, 22 nt, Artificial Sequence
  LRRK2 RNA guide
agacaguaacccaauguguggu

SEQ ID NO: 37311 - RNA, 22 nt, Artificial Sequence
  LRRK2 RNA guide
agguuuauugcuugcaauuuuc

SEQ ID NO: 37312 - RNA, 22 nt, Artificial Sequence
  LRRK2 RNA guide
aguaacccaaugugugguuuga

SEQ ID NO: 37313 - RNA, 22 nt, Artificial Sequence
  LRRK2 RNA guide
auccuagacaguaacccaaugu

SEQ ID NO: 37314 - RNA, 22 nt, Artificial Sequence
  LRRK2 RNA guide
augugugguuugaaaauugcaa

SEQ ID NO: 37315 - RNA, 22 nt, Artificial Sequence
  LRRK2 RNA guide
auugcuugcaauuuucaaacca

SEQ ID NO: 37316 - RNA, 22 nt, Artificial Sequence
  LRRK2 RNA guide
auuuucaaaccacacauugggu

SEQ ID NO: 37317 - RNA, 22 nt, Artificial Sequence
  LRRK2 RNA guide
caaaccacacauuggguuacug

SEQ ID NO: 37318 - RNA, 22 nt, Artificial Sequence
  LRRK2 RNA guide
caaugugugguuugaaaauugc

SEQ ID NO: 37319 - RNA, 22 nt, Artificial Sequence
  LRRK2 RNA guide
caauuuucaaaccacacauugg

SEQ ID NO: 37320 - RNA, 22 nt, Artificial Sequence
  LRRK2 RNA guide
caguaacccaaugugugguuug

SEQ ID NO: 37321 - RNA, 22 nt, Artificial Sequence
  LRRK2 RNA guide
ccaaugugugguuugaaaauug

SEQ ID NO: 37322 - RNA, 22 nt, Artificial Sequence
  LRRK2 RNA guide
cccaaugugugguuugaaaauu

SEQ ID NO: 37323 - RNA, 22 nt, Artificial Sequence
  LRRK2 RNA guide
ccuagacaguaacccaaugugu

SEQ ID NO: 37324 - RNA, 22 nt, Artificial Sequence
  LRRK2 RNA guide
cuagacaguaacccaaugugug

SEQ ID NO: 37325 - RNA, 22 nt, Artificial Sequence
  LRRK2 RNA guide
cuugcaauuuucaaaccacaca

SEQ ID NO: 37326 - RNA, 22 nt, Artificial Sequence
  LRRK2 RNA guide
gacaguaacccaaugugugguu

SEQ ID NO: 37327 - RNA, 22 nt, Artificial Sequence
  LRRK2 RNA guide
gcaauuuucaaaccacacauug

SEQ ID NO: 37328 - RNA, 22 nt, Artificial Sequence
  LRRK2 RNA guide
gcuugcaauuuucaaaccacac

SEQ ID NO: 37329 - RNA, 22 nt, Artificial Sequence
  LRRK2 RNA guide
gguuuauugcuugcaauuuuca

SEQ ID NO: 37330 - RNA, 22 nt, Artificial Sequence
  LRRK2 RNA guide
gguuugaaaauugcaagcaaua

SEQ ID NO: 37331 - RNA, 22 nt, Artificial Sequence
  LRRK2 RNA guide
guaacccaaugugugguuugaa

SEQ ID NO: 37332 - RNA, 22 nt, Artificial Sequence
  LRRK2 RNA guide
gugguuugaaaauugcaagcaa

SEQ ID NO: 37333 - RNA, 22 nt, Artificial Sequence
  LRRK2 RNA guide
gugugguuugaaaauugcaagc

SEQ ID NO: 37334 - RNA, 22 nt, Artificial Sequence
  LRRK2 RNA guide
uaacccaaugugugguuugaaa

SEQ ID NO: 37335 - RNA, 22 nt, Artificial Sequence
  LRRK2 RNA guide
uagacaguaacccaaugugugg

SEQ ID NO: 37336 - RNA, 22 nt, Artificial Sequence
  LRRK2 RNA guide
uauccuagacaguaacccaaug

SEQ ID NO: 37337 - RNA, 22 nt, Artificial Sequence
  LRRK2 RNA guide
uauugcuugcaauuuucaaacc

SEQ ID NO: 37338 - RNA, 22 nt, Artificial Sequence
  LRRK2 RNA guide
ucaaaccacacauuggguuacu

SEQ ID NO: 37339 - RNA, 22 nt, Artificial Sequence
  LRRK2 RNA guide
uccuagacaguaacccaaugug

SEQ ID NO: 37340 - RNA, 22 nt, Artificial Sequence
  LRRK2 RNA guide
ugcaauuuucaaaccacacauu

SEQ ID NO: 37341 - RNA, 22 nt, Artificial Sequence
  LRRK2 RNA guide
ugcuugcaauuuucaaaccaca

SEQ ID NO: 37342 - RNA, 22 nt, Artificial Sequence
  LRRK2 RNA guide
ugguuugaaaauugcaagcaau

SEQ ID NO: 37343 - RNA, 22 nt, Artificial Sequence
  LRRK2 RNA guide
ugugguuugaaaauugcaagca

SEQ ID NO: 37344 - RNA, 22 nt, Artificial Sequence
  LRRK2 RNA guide
ugugugguuugaaaauugcaag

SEQ ID NO: 37345 - RNA, 22 nt, Artificial Sequence
  LRRK2 RNA guide
uucaaaccacacauuggguuac

SEQ ID NO: 37346 - RNA, 22 nt, Artificial Sequence
  LRRK2 RNA guide
uugcaauuuucaaaccacacau

SEQ ID NO: 37347 - RNA, 22 nt, Artificial Sequence
  LRRK2 RNA guide
uugcuugcaauuuucaaaccac

SEQ ID NO: 37348 - RNA, 22 nt, Artificial Sequence
  LRRK2 RNA guide
uuucaaaccacacauuggguua

SEQ ID NO: 37349 - RNA, 22 nt, Artificial Sequence
  LRRK2 RNA guide
uuuucaaaccacacauuggguu

SEQ ID NO: 37350 - RNA, 20 nt, Artificial Sequence
  LRRK2 RNA guide
aaaucacacauuggguuacu

SEQ ID NO: 37351 - RNA, 20 nt, Artificial Sequence
  LRRK2 RNA guide
aacccaaugugugauuugaa

SEQ ID NO: 37352 - RNA, 20 nt, Artificial Sequence
  LRRK2 RNA guide
aaucacacauuggguuacug

SEQ ID NO: 37353 - RNA, 20 nt, Artificial Sequence
  LRRK2 RNA guide
acaguaacccaaugugugau

SEQ ID NO: 37354 - RNA, 20 nt, Artificial Sequence
  LRRK2 RNA guide
acccaaugugugauuugaaa

SEQ ID NO: 37355 - RNA, 20 nt, Artificial Sequence
  LRRK2 RNA guide
aguaacccaaugugugauuu

SEQ ID NO: 37356 - RNA, 20 nt, Artificial Sequence
  LRRK2 RNA guide
aucacacauuggguuacugu

SEQ ID NO: 37357 - RNA, 20 nt, Artificial Sequence
  LRRK2 RNA guide
augugugauuugaaaauugc

SEQ ID NO: 37358 - RNA, 20 nt, Artificial Sequence
  LRRK2 RNA guide
auuuucaaaucacacauugg

SEQ ID NO: 37359 - RNA, 20 nt, Artificial Sequence
  LRRK2 RNA guide
caaaucacacauuggguuac

SEQ ID NO: 37360 - RNA, 20 nt, Artificial Sequence
  LRRK2 RNA guide
caguaacccaaugugugauu

SEQ ID NO: 37361 - RNA, 20 nt, Artificial Sequence
  LRRK2 RNA guide
ccaaugugugauuugaaaau

SEQ ID NO: 37362 - RNA, 20 nt, Artificial Sequence
  LRRK2 RNA guide
cccaaugugugauuugaaaa

SEQ ID NO: 37363 - RNA, 20 nt, Artificial Sequence
  LRRK2 RNA guide
cuugcaauuuucaaaucaca

SEQ ID NO: 37364 - RNA, 20 nt, Artificial Sequence
  LRRK2 RNA guide
gacaguaacccaauguguga

SEQ ID NO: 37365 - RNA, 20 nt, Artificial Sequence
  LRRK2 RNA guide
gauuugaaaauugcaagcaa

SEQ ID NO: 37366 - RNA, 20 nt, Artificial Sequence
  LRRK2 RNA guide
gcaauuuucaaaucacacau

SEQ ID NO: 37367 - RNA, 20 nt, Artificial Sequence
  LRRK2 RNA guide
gcuugcaauuuucaaaucac

SEQ ID NO: 37368 - RNA, 20 nt, Artificial Sequence
  LRRK2 RNA guide
guaacccaaugugugauuug

SEQ ID NO: 37369 - RNA, 20 nt, Artificial Sequence
  LRRK2 RNA guide
gugauuugaaaauugcaagc

SEQ ID NO: 37370 - RNA, 20 nt, Artificial Sequence
  LRRK2 RNA guide
gugugauuugaaaauugcaa

SEQ ID NO: 37371 - RNA, 20 nt, Artificial Sequence
  LRRK2 RNA guide
uaacccaaugugugauuuga

SEQ ID NO: 37372 - RNA, 20 nt, Artificial Sequence
  LRRK2 RNA guide
ucaaaucacacauuggguua

SEQ ID NO: 37373 - RNA, 20 nt, Artificial Sequence
  LRRK2 RNA guide
ugauuugaaaauugcaagca

SEQ ID NO: 37374 - RNA, 20 nt, Artificial Sequence
  LRRK2 RNA guide
ugcaauuuucaaaucacaca

SEQ ID NO: 37375 - RNA, 20 nt, Artificial Sequence
  LRRK2 RNA guide
ugcuugcaauuuucaaauca

SEQ ID NO: 37376 - RNA, 20 nt, Artificial Sequence
  LRRK2 RNA guide
ugugauuugaaaauugcaag

SEQ ID NO: 37377 - RNA, 20 nt, Artificial Sequence
  LRRK2 RNA guide
ugugugauuugaaaauugca

SEQ ID NO: 37378 - RNA, 20 nt, Artificial Sequence
  LRRK2 RNA guide
uucaaaucacacauuggguu

SEQ ID NO: 37379 - RNA, 20 nt, Artificial Sequence
  LRRK2 RNA guide
uugcaauuuucaaaucacac

SEQ ID NO: 37380 - RNA, 20 nt, Artificial Sequence
  LRRK2 RNA guide
uugcuugcaauuuucaaauc

SEQ ID NO: 37381 - RNA, 20 nt, Artificial Sequence
  LRRK2 RNA guide
uuucaaaucacacauugggu

SEQ ID NO: 37382 - RNA, 20 nt, Artificial Sequence
  LRRK2 RNA guide
uuuucaaaucacacauuggg

SEQ ID NO: 37383 - RNA, 21 nt, Artificial Sequence
  LRRK2 RNA guide
aaaucacacauuggguuacug

SEQ ID NO: 37384 - RNA, 21 nt, Artificial Sequence
  LRRK2 RNA guide
aacccaaugugugauuugaaa

SEQ ID NO: 37385 - RNA, 21 nt, Artificial Sequence
  LRRK2 RNA guide
aaucacacauuggguuacugu

SEQ ID NO: 37386 - RNA, 21 nt, Artificial Sequence
  LRRK2 RNA guide
acaguaacccaaugugugauu

SEQ ID NO: 37387 - RNA, 21 nt, Artificial Sequence
  LRRK2 RNA guide
acccaaugugugauuugaaaa

SEQ ID NO: 37388 - RNA, 21 nt, Artificial Sequence
  LRRK2 RNA guide
agacaguaacccaauguguga

SEQ ID NO: 37389 - RNA, 21 nt, Artificial Sequence
  LRRK2 RNA guide
aguaacccaaugugugauuug

SEQ ID NO: 37390 - RNA, 21 nt, Artificial Sequence
  LRRK2 RNA guide
aucacacauuggguuacuguc

SEQ ID NO: 37391 - RNA, 21 nt, Artificial Sequence
  LRRK2 RNA guide
auuuucaaaucacacauuggg

SEQ ID NO: 37392 - RNA, 21 nt, Artificial Sequence
  LRRK2 RNA guide
caaaucacacauuggguuacu

SEQ ID NO: 37393 - RNA, 21 nt, Artificial Sequence
  LRRK2 RNA guide
caguaacccaaugugugauuu

SEQ ID NO: 37394 - RNA, 21 nt, Artificial Sequence
  LRRK2 RNA guide
cccaaugugugauuugaaaau

SEQ ID NO: 37395 - RNA, 21 nt, Artificial Sequence
  LRRK2 RNA guide
cuugcaauuuucaaaucacac

SEQ ID NO: 37396 - RNA, 21 nt, Artificial Sequence
  LRRK2 RNA guide
gacaguaacccaaugugugau

SEQ ID NO: 37397 - RNA, 21 nt, Artificial Sequence
  LRRK2 RNA guide
gcuugcaauuuucaaaucaca

SEQ ID NO: 37398 - RNA, 21 nt, Artificial Sequence
  LRRK2 RNA guide
guaacccaaugugugauuuga

SEQ ID NO: 37399 - RNA, 21 nt, Artificial Sequence
  LRRK2 RNA guide
gugauuugaaaauugcaagca

SEQ ID NO: 37400 - RNA, 21 nt, Artificial Sequence
  LRRK2 RNA guide
gugugauuugaaaauugcaag

SEQ ID NO: 37401 - RNA, 21 nt, Artificial Sequence
  LRRK2 RNA guide
uaacccaaugugugauuugaa

SEQ ID NO: 37402 - RNA, 21 nt, Artificial Sequence
  LRRK2 RNA guide
ucaaaucacacauuggguuac

SEQ ID NO: 37403 - RNA, 21 nt, Artificial Sequence
  LRRK2 RNA guide
ugcuugcaauuuucaaaucac

SEQ ID NO: 37404 - RNA, 21 nt, Artificial Sequence
  LRRK2 RNA guide
ugugauuugaaaauugcaagc

SEQ ID NO: 37405 - RNA, 21 nt, Artificial Sequence
  LRRK2 RNA guide
uucaaaucacacauuggguua

SEQ ID NO: 37406 - RNA, 21 nt, Artificial Sequence
  LRRK2 RNA guide
uuucaaaucacacauuggguu

SEQ ID NO: 37407 - RNA, 21 nt, Artificial Sequence
  LRRK2 RNA guide
uuuucaaaucacacauugggu

SEQ ID NO: 37408 - RNA, 22 nt, Artificial Sequence
  LRRK2 RNA guide
aaaucacacauuggguuacugu

SEQ ID NO: 37409 - RNA, 22 nt, Artificial Sequence
  LRRK2 RNA guide
aacccaaugugugauuugaaaa

SEQ ID NO: 37410 - RNA, 22 nt, Artificial Sequence
  LRRK2 RNA guide
aaucacacauuggguuacuguc

SEQ ID NO: 37411 - RNA, 22 nt, Artificial Sequence
  LRRK2 RNA guide
aauuuucaaaucacacauuggg

SEQ ID NO: 37412 - RNA, 22 nt, Artificial Sequence
  LRRK2 RNA guide
acaguaacccaaugugugauuu

SEQ ID NO: 37413 - RNA, 22 nt, Artificial Sequence
  LRRK2 RNA guide
acccaaugugugauuugaaaau

SEQ ID NO: 37414 - RNA, 22 nt, Artificial Sequence
  LRRK2 RNA guide
agacaguaacccaaugugugau

SEQ ID NO: 37415 - RNA, 22 nt, Artificial Sequence
  LRRK2 RNA guide
aguaacccaaugugugauuuga

SEQ ID NO: 37416 - RNA, 22 nt, Artificial Sequence
  LRRK2 RNA guide
aucacacauuggguuacugucu

SEQ ID NO: 37417 - RNA, 22 nt, Artificial Sequence
  LRRK2 RNA guide
auuuucaaaucacacauugggu

SEQ ID NO: 37418 - RNA, 22 nt, Artificial Sequence
  LRRK2 RNA guide
caaaucacacauuggguuacug

SEQ ID NO: 37419 - RNA, 22 nt, Artificial Sequence
  LRRK2 RNA guide
caaugugugauuugaaaauugc

SEQ ID NO: 37420 - RNA, 22 nt, Artificial Sequence
  LRRK2 RNA guide
caauuuucaaaucacacauugg

SEQ ID NO: 37421 - RNA, 22 nt, Artificial Sequence
  LRRK2 RNA guide
caguaacccaaugugugauuug

SEQ ID NO: 37422 - RNA, 22 nt, Artificial Sequence
  LRRK2 RNA guide
ccaaugugugauuugaaaauug

SEQ ID NO: 37423 - RNA, 22 nt, Artificial Sequence
  LRRK2 RNA guide
cccaaugugugauuugaaaauu

SEQ ID NO: 37424 - RNA, 22 nt, Artificial Sequence
  LRRK2 RNA guide
cuugcaauuuucaaaucacaca

SEQ ID NO: 37425 - RNA, 22 nt, Artificial Sequence
  LRRK2 RNA guide
gacaguaacccaaugugugauu

SEQ ID NO: 37426 - RNA, 22 nt, Artificial Sequence
  LRRK2 RNA guide
gcaauuuucaaaucacacauug

SEQ ID NO: 37427 - RNA, 22 nt, Artificial Sequence
  LRRK2 RNA guide
gcuugcaauuuucaaaucacac

SEQ ID NO: 37428 - RNA, 22 nt, Artificial Sequence
  LRRK2 RNA guide
guaacccaaugugugauuugaa

SEQ ID NO: 37429 - RNA, 22 nt, Artificial Sequence
  LRRK2 RNA guide
gugauuugaaaauugcaagcaa

SEQ ID NO: 37430 - RNA, 22 nt, Artificial Sequence
  LRRK2 RNA guide
gugugauuugaaaauugcaagc

SEQ ID NO: 37431 - RNA, 22 nt, Artificial Sequence
  LRRK2 RNA guide
uaacccaaugugugauuugaaa

SEQ ID NO: 37432 - RNA, 22 nt, Artificial Sequence
  LRRK2 RNA guide
uagacaguaacccaauguguga

SEQ ID NO: 37433 - RNA, 22 nt, Artificial Sequence
  LRRK2 RNA guide
ucaaaucacacauuggguuacu

SEQ ID NO: 37434 - RNA, 22 nt, Artificial Sequence
  LRRK2 RNA guide
ugcuugcaauuuucaaaucaca

SEQ ID NO: 37435 - RNA, 22 nt, Artificial Sequence
  LRRK2 RNA guide
ugugauuugaaaauugcaagca

SEQ ID NO: 37436 - RNA, 22 nt, Artificial Sequence
  LRRK2 RNA guide
ugugugauuugaaaauugcaag

SEQ ID NO: 37437 - RNA, 22 nt, Artificial Sequence
  LRRK2 RNA guide
uucaaaucacacauuggguuac

SEQ ID NO: 37438 - RNA, 22 nt, Artificial Sequence
  LRRK2 RNA guide
uugcuugcaauuuucaaaucac

SEQ ID NO: 37439 - RNA, 22 nt, Artificial Sequence
  LRRK2 RNA guide
uuucaaaucacacauuggguua

SEQ ID NO: 37440 - RNA, 22 nt, Artificial Sequence
  LRRK2 RNA guide
uuuucaaaucacacauuggguu

SEQ ID NO: 37441 - RNA, 20 nt, Artificial Sequence
  LRRK2 RNA guide
aagaagauaggacaaaacau

SEQ ID NO: 37442 - RNA, 20 nt, Artificial Sequence
  LRRK2 RNA guide
aagauaggacaaaacaugga

SEQ ID NO: 37443 - RNA, 20 nt, Artificial Sequence
  LRRK2 RNA guide
agaagauaggacaaaacaug

SEQ ID NO: 37444 - RNA, 20 nt, Artificial Sequence
  LRRK2 RNA guide
agauaggacaaaacauggaa

SEQ ID NO: 37445 - RNA, 20 nt, Artificial Sequence
  LRRK2 RNA guide
aggacaaaacauggaaauaa

SEQ ID NO: 37446 - RNA, 20 nt, Artificial Sequence
  LRRK2 RNA guide
agucuaucuuaagaagauag

SEQ ID NO: 37447 - RNA, 20 nt, Artificial Sequence
  LRRK2 RNA guide
auaggacaaaacauggaaau

SEQ ID NO: 37448 - RNA, 20 nt, Artificial Sequence
  LRRK2 RNA guide
aucuuaagaagauaggacaa

SEQ ID NO: 37449 - RNA, 20 nt, Artificial Sequence
  LRRK2 RNA guide
auguuuuguccuaucuucuu

SEQ ID NO: 37450 - RNA, 20 nt, Artificial Sequence
  LRRK2 RNA guide
auuuccauguuuuguccuau

SEQ ID NO: 37451 - RNA, 20 nt, Artificial Sequence
  LRRK2 RNA guide
cauguuuuguccuaucuucu

SEQ ID NO: 37452 - RNA, 20 nt, Artificial Sequence
  LRRK2 RNA guide
ccauguuuuguccuaucuuc

SEQ ID NO: 37453 - RNA, 20 nt, Artificial Sequence
  LRRK2 RNA guide
cuaucuuaagaagauaggac

SEQ ID NO: 37454 - RNA, 20 nt, Artificial Sequence
  LRRK2 RNA guide
cuuaagaagauaggacaaaa

SEQ ID NO: 37455 - RNA, 20 nt, Artificial Sequence
  LRRK2 RNA guide
gaagauaggacaaaacaugg

SEQ ID NO: 37456 - RNA, 20 nt, Artificial Sequence
  LRRK2 RNA guide
gauaggacaaaacauggaaa

SEQ ID NO: 37457 - RNA, 20 nt, Artificial Sequence
  LRRK2 RNA guide
ggacaaaacauggaaauaaa

SEQ ID NO: 37458 - RNA, 20 nt, Artificial Sequence
  LRRK2 RNA guide
guagucuaucuuaagaagau

SEQ ID NO: 37459 - RNA, 20 nt, Artificial Sequence
  LRRK2 RNA guide
gucuaucuuaagaagauagg

SEQ ID NO: 37460 - RNA, 20 nt, Artificial Sequence
  LRRK2 RNA guide
guuuuguccuaucuucuuaa

SEQ ID NO: 37461 - RNA, 20 nt, Artificial Sequence
  LRRK2 RNA guide
uaagaagauaggacaaaaca

SEQ ID NO: 37462 - RNA, 20 nt, Artificial Sequence
  LRRK2 RNA guide
uaggacaaaacauggaaaua

SEQ ID NO: 37463 - RNA, 20 nt, Artificial Sequence
  LRRK2 RNA guide
uaucuuaagaagauaggaca

SEQ ID NO: 37464 - RNA, 20 nt, Artificial Sequence
  LRRK2 RNA guide
uauuuccauguuuuguccua

SEQ ID NO: 37465 - RNA, 20 nt, Artificial Sequence
  LRRK2 RNA guide
uccauguuuuguccuaucuu

SEQ ID NO: 37466 - RNA, 20 nt, Artificial Sequence
  LRRK2 RNA guide
ucuaucuuaagaagauagga

SEQ ID NO: 37467 - RNA, 20 nt, Artificial Sequence
  LRRK2 RNA guide
ucuuaagaagauaggacaaa

SEQ ID NO: 37468 - RNA, 20 nt, Artificial Sequence
  LRRK2 RNA guide
uguccuaucuucuuaagaua

SEQ ID NO: 37469 - RNA, 20 nt, Artificial Sequence
  LRRK2 RNA guide
uguuuuguccuaucuucuua

SEQ ID NO: 37470 - RNA, 20 nt, Artificial Sequence
  LRRK2 RNA guide
uuaagaagauaggacaaaac

SEQ ID NO: 37471 - RNA, 20 nt, Artificial Sequence
  LRRK2 RNA guide
uuauuuccauguuuuguccu

SEQ ID NO: 37472 - RNA, 20 nt, Artificial Sequence
  LRRK2 RNA guide
uuccauguuuuguccuaucu

SEQ ID NO: 37473 - RNA, 20 nt, Artificial Sequence
  LRRK2 RNA guide
uuguccuaucuucuuaagau

SEQ ID NO: 37474 - RNA, 20 nt, Artificial Sequence
  LRRK2 RNA guide
uuuauuuccauguuuugucc

SEQ ID NO: 37475 - RNA, 20 nt, Artificial Sequence
  LRRK2 RNA guide
uuuccauguuuuguccuauc

SEQ ID NO: 37476 - RNA, 20 nt, Artificial Sequence
  LRRK2 RNA guide
uuuguccuaucuucuuaaga

SEQ ID NO: 37477 - RNA, 20 nt, Artificial Sequence
  LRRK2 RNA guide
uuuuguccuaucuucuuaag

SEQ ID NO: 37478 - RNA, 21 nt, Artificial Sequence
  LRRK2 RNA guide
aagaagauaggacaaaacaug

SEQ ID NO: 37479 - RNA, 21 nt, Artificial Sequence
  LRRK2 RNA guide
aagauaggacaaaacauggaa

SEQ ID NO: 37480 - RNA, 21 nt, Artificial Sequence
  LRRK2 RNA guide
agaagauaggacaaaacaugg

SEQ ID NO: 37481 - RNA, 21 nt, Artificial Sequence
  LRRK2 RNA guide
agauaggacaaaacauggaaa

SEQ ID NO: 37482 - RNA, 21 nt, Artificial Sequence
  LRRK2 RNA guide
agucuaucuuaagaagauagg

SEQ ID NO: 37483 - RNA, 21 nt, Artificial Sequence
  LRRK2 RNA guide
auuuccauguuuuguccuauc

SEQ ID NO: 37484 - RNA, 21 nt, Artificial Sequence
  LRRK2 RNA guide
cauguuuuguccuaucuucuu

SEQ ID NO: 37485 - RNA, 21 nt, Artificial Sequence
  LRRK2 RNA guide
ccauguuuuguccuaucuucu

SEQ ID NO: 37486 - RNA, 21 nt, Artificial Sequence
  LRRK2 RNA guide
cuaucuuaagaagauaggaca

SEQ ID NO: 37487 - RNA, 21 nt, Artificial Sequence
  LRRK2 RNA guide
cuuaagaagauaggacaaaac

SEQ ID NO: 37488 - RNA, 21 nt, Artificial Sequence
  LRRK2 RNA guide
gaagauaggacaaaacaugga

SEQ ID NO: 37489 - RNA, 21 nt, Artificial Sequence
  LRRK2 RNA guide
gauaggacaaaacauggaaau

SEQ ID NO: 37490 - RNA, 21 nt, Artificial Sequence
  LRRK2 RNA guide
gucuaucuuaagaagauagga

SEQ ID NO: 37491 - RNA, 21 nt, Artificial Sequence
  LRRK2 RNA guide
guuuuguccuaucuucuuaag

SEQ ID NO: 37492 - RNA, 21 nt, Artificial Sequence
  LRRK2 RNA guide
uccauguuuuguccuaucuuc

SEQ ID NO: 37493 - RNA, 21 nt, Artificial Sequence
  LRRK2 RNA guide
ucuaucuuaagaagauaggac

SEQ ID NO: 37494 - RNA, 21 nt, Artificial Sequence
  LRRK2 RNA guide
uguccuaucuucuuaagauag

SEQ ID NO: 37495 - RNA, 21 nt, Artificial Sequence
  LRRK2 RNA guide
uuccauguuuuguccuaucuu

SEQ ID NO: 37496 - RNA, 21 nt, Artificial Sequence
  LRRK2 RNA guide
uuuccauguuuuguccuaucu

SEQ ID NO: 37497 - RNA, 22 nt, Artificial Sequence
  LRRK2 RNA guide
aagaagauaggacaaaacaugg

SEQ ID NO: 37498 - RNA, 22 nt, Artificial Sequence
  LRRK2 RNA guide
aagauaggacaaaacauggaaa

SEQ ID NO: 37499 - RNA, 22 nt, Artificial Sequence
  LRRK2 RNA guide
agaagauaggacaaaacaugga

SEQ ID NO: 37500 - RNA, 22 nt, Artificial Sequence
  LRRK2 RNA guide
agauaggacaaaacauggaaau

SEQ ID NO: 37501 - RNA, 22 nt, Artificial Sequence
  LRRK2 RNA guide
agucuaucuuaagaagauagga

SEQ ID NO: 37502 - RNA, 22 nt, Artificial Sequence
  LRRK2 RNA guide
auuuccauguuuuguccuaucu

SEQ ID NO: 37503 - RNA, 22 nt, Artificial Sequence
  LRRK2 RNA guide
cauguuuuguccuaucuucuua

SEQ ID NO: 37504 - RNA, 22 nt, Artificial Sequence
  LRRK2 RNA guide
ccauguuuuguccuaucuucuu

SEQ ID NO: 37505 - RNA, 22 nt, Artificial Sequence
  LRRK2 RNA guide
cuaucuuaagaagauaggacaa

SEQ ID NO: 37506 - RNA, 22 nt, Artificial Sequence
  LRRK2 RNA guide
cuuaagaagauaggacaaaaca

SEQ ID NO: 37507 - RNA, 22 nt, Artificial Sequence
  LRRK2 RNA guide
gaagauaggacaaaacauggaa

SEQ ID NO: 37508 - RNA, 22 nt, Artificial Sequence
  LRRK2 RNA guide
gauaggacaaaacauggaaaua

SEQ ID NO: 37509 - RNA, 22 nt, Artificial Sequence
  LRRK2 RNA guide
guagucuaucuuaagaagauag

SEQ ID NO: 37510 - RNA, 22 nt, Artificial Sequence
  LRRK2 RNA guide
gucuaucuuaagaagauaggac

SEQ ID NO: 37511 - RNA, 22 nt, Artificial Sequence
  LRRK2 RNA guide
guuuuguccuaucuucuuaaga

SEQ ID NO: 37512 - RNA, 22 nt, Artificial Sequence
  LRRK2 RNA guide
uaagaagauaggacaaaacaug

SEQ ID NO: 37513 - RNA, 22 nt, Artificial Sequence
  LRRK2 RNA guide
uagucuaucuuaagaagauagg

SEQ ID NO: 37514 - RNA, 22 nt, Artificial Sequence
  LRRK2 RNA guide
uauuuccauguuuuguccuauc

SEQ ID NO: 37515 - RNA, 22 nt, Artificial Sequence
  LRRK2 RNA guide
uccauguuuuguccuaucuucu

SEQ ID NO: 37516 - RNA, 22 nt, Artificial Sequence
  LRRK2 RNA guide
ucuaucuuaagaagauaggaca

SEQ ID NO: 37517 - RNA, 22 nt, Artificial Sequence
  LRRK2 RNA guide
ucuuaagaagauaggacaaaac

SEQ ID NO: 37518 - RNA, 22 nt, Artificial Sequence
  LRRK2 RNA guide
uguccuaucuucuuaagauaga

SEQ ID NO: 37519 - RNA, 22 nt, Artificial Sequence
  LRRK2 RNA guide
uguuuuguccuaucuucuuaag

SEQ ID NO: 37520 - RNA, 22 nt, Artificial Sequence
  LRRK2 RNA guide
uuccauguuuuguccuaucuuc

SEQ ID NO: 37521 - RNA, 22 nt, Artificial Sequence
  LRRK2 RNA guide
uuguccuaucuucuuaagauag

SEQ ID NO: 37522 - RNA, 22 nt, Artificial Sequence
  LRRK2 RNA guide
uuuccauguuuuguccuaucuu

SEQ ID NO: 37523 - RNA, 20 nt, Artificial Sequence
  LRRK2 RNA guide
aagaagauaggagaaaacau

SEQ ID NO: 37524 - RNA, 20 nt, Artificial Sequence
  LRRK2 RNA guide
aagauaggagaaaacaugga

SEQ ID NO: 37525 - RNA, 20 nt, Artificial Sequence
  LRRK2 RNA guide
agaagauaggagaaaacaug

SEQ ID NO: 37526 - RNA, 20 nt, Artificial Sequence
  LRRK2 RNA guide
agauaggagaaaacauggaa

SEQ ID NO: 37527 - RNA, 20 nt, Artificial Sequence
  LRRK2 RNA guide
aggagaaaacauggaaauaa

SEQ ID NO: 37528 - RNA, 20 nt, Artificial Sequence
  LRRK2 RNA guide
auaggagaaaacauggaaau

SEQ ID NO: 37529 - RNA, 20 nt, Artificial Sequence
  LRRK2 RNA guide
aucuuaagaagauaggagaa

SEQ ID NO: 37530 - RNA, 20 nt, Artificial Sequence
  LRRK2 RNA guide
auguuuucuccuaucuucuu

SEQ ID NO: 37531 - RNA, 20 nt, Artificial Sequence
  LRRK2 RNA guide
auuuccauguuuucuccuau

SEQ ID NO: 37532 - RNA, 20 nt, Artificial Sequence
  LRRK2 RNA guide
cauguuuucuccuaucuucu

SEQ ID NO: 37533 - RNA, 20 nt, Artificial Sequence
  LRRK2 RNA guide
ccauguuuucuccuaucuuc

SEQ ID NO: 37534 - RNA, 20 nt, Artificial Sequence
  LRRK2 RNA guide
cuaucuuaagaagauaggag

SEQ ID NO: 37535 - RNA, 20 nt, Artificial Sequence
  LRRK2 RNA guide
cuuaagaagauaggagaaaa

SEQ ID NO: 37536 - RNA, 20 nt, Artificial Sequence
  LRRK2 RNA guide
gaagauaggagaaaacaugg

SEQ ID NO: 37537 - RNA, 20 nt, Artificial Sequence
  LRRK2 RNA guide
gauaggagaaaacauggaaa

SEQ ID NO: 37538 - RNA, 20 nt, Artificial Sequence
  LRRK2 RNA guide
ggagaaaacauggaaauaaa

SEQ ID NO: 37539 - RNA, 20 nt, Artificial Sequence
  LRRK2 RNA guide
guuuucuccuaucuucuuaa

SEQ ID NO: 37540 - RNA, 20 nt, Artificial Sequence
  LRRK2 RNA guide
uaagaagauaggagaaaaca

SEQ ID NO: 37541 - RNA, 20 nt, Artificial Sequence
  LRRK2 RNA guide
uaggagaaaacauggaaaua

SEQ ID NO: 37542 - RNA, 20 nt, Artificial Sequence
  LRRK2 RNA guide
uaucuuaagaagauaggaga

SEQ ID NO: 37543 - RNA, 20 nt, Artificial Sequence
  LRRK2 RNA guide
uauuuccauguuuucuccua

SEQ ID NO: 37544 - RNA, 20 nt, Artificial Sequence
  LRRK2 RNA guide
uccauguuuucuccuaucuu

SEQ ID NO: 37545 - RNA, 20 nt, Artificial Sequence
  LRRK2 RNA guide
ucuccuaucuucuuaagaua

SEQ ID NO: 37546 - RNA, 20 nt, Artificial Sequence
  LRRK2 RNA guide
ucuuaagaagauaggagaaa

SEQ ID NO: 37547 - RNA, 20 nt, Artificial Sequence
  LRRK2 RNA guide
uguuuucuccuaucuucuua

SEQ ID NO: 37548 - RNA, 20 nt, Artificial Sequence
  LRRK2 RNA guide
uuaagaagauaggagaaaac

SEQ ID NO: 37549 - RNA, 20 nt, Artificial Sequence
  LRRK2 RNA guide
uuauuuccauguuuucuccu

SEQ ID NO: 37550 - RNA, 20 nt, Artificial Sequence
  LRRK2 RNA guide
uuccauguuuucuccuaucu

SEQ ID NO: 37551 - RNA, 20 nt, Artificial Sequence
  LRRK2 RNA guide
uucuccuaucuucuuaagau

SEQ ID NO: 37552 - RNA, 20 nt, Artificial Sequence
  LRRK2 RNA guide
uuuauuuccauguuuucucc

SEQ ID NO: 37553 - RNA, 20 nt, Artificial Sequence
  LRRK2 RNA guide
uuuccauguuuucuccuauc

SEQ ID NO: 37554 - RNA, 20 nt, Artificial Sequence
  LRRK2 RNA guide
uuucuccuaucuucuuaaga

SEQ ID NO: 37555 - RNA, 20 nt, Artificial Sequence
  LRRK2 RNA guide
uuuucuccuaucuucuuaag

SEQ ID NO: 37556 - RNA, 21 nt, Artificial Sequence
  LRRK2 RNA guide
aagaagauaggagaaaacaug

SEQ ID NO: 37557 - RNA, 21 nt, Artificial Sequence
  LRRK2 RNA guide
aagauaggagaaaacauggaa

SEQ ID NO: 37558 - RNA, 21 nt, Artificial Sequence
  LRRK2 RNA guide
agaagauaggagaaaacaugg

SEQ ID NO: 37559 - RNA, 21 nt, Artificial Sequence
  LRRK2 RNA guide
agauaggagaaaacauggaaa

SEQ ID NO: 37560 - RNA, 21 nt, Artificial Sequence
  LRRK2 RNA guide
auuuccauguuuucuccuauc

SEQ ID NO: 37561 - RNA, 21 nt, Artificial Sequence
  LRRK2 RNA guide
cauguuuucuccuaucuucuu

SEQ ID NO: 37562 - RNA, 21 nt, Artificial Sequence
  LRRK2 RNA guide
ccauguuuucuccuaucuucu

SEQ ID NO: 37563 - RNA, 21 nt, Artificial Sequence
  LRRK2 RNA guide
cuaucuuaagaagauaggaga

SEQ ID NO: 37564 - RNA, 21 nt, Artificial Sequence
  LRRK2 RNA guide
cuuaagaagauaggagaaaac

SEQ ID NO: 37565 - RNA, 21 nt, Artificial Sequence
  LRRK2 RNA guide
gaagauaggagaaaacaugga

SEQ ID NO: 37566 - RNA, 21 nt, Artificial Sequence
  LRRK2 RNA guide
gauaggagaaaacauggaaau

SEQ ID NO: 37567 - RNA, 21 nt, Artificial Sequence
  LRRK2 RNA guide
guuuucuccuaucuucuuaag

SEQ ID NO: 37568 - RNA, 21 nt, Artificial Sequence
  LRRK2 RNA guide
uccauguuuucuccuaucuuc

SEQ ID NO: 37569 - RNA, 21 nt, Artificial Sequence
  LRRK2 RNA guide
ucuaucuuaagaagauaggag

SEQ ID NO: 37570 - RNA, 21 nt, Artificial Sequence
  LRRK2 RNA guide
ucuccuaucuucuuaagauag

SEQ ID NO: 37571 - RNA, 21 nt, Artificial Sequence
  LRRK2 RNA guide
uuccauguuuucuccuaucuu

SEQ ID NO: 37572 - RNA, 21 nt, Artificial Sequence
  LRRK2 RNA guide
uuuccauguuuucuccuaucu

SEQ ID NO: 37573 - RNA, 22 nt, Artificial Sequence
  LRRK2 RNA guide
aagaagauaggagaaaacaugg

SEQ ID NO: 37574 - RNA, 22 nt, Artificial Sequence
  LRRK2 RNA guide
aagauaggagaaaacauggaaa

SEQ ID NO: 37575 - RNA, 22 nt, Artificial Sequence
  LRRK2 RNA guide
agaagauaggagaaaacaugga

SEQ ID NO: 37576 - RNA, 22 nt, Artificial Sequence
  LRRK2 RNA guide
agauaggagaaaacauggaaau

SEQ ID NO: 37577 - RNA, 22 nt, Artificial Sequence
  LRRK2 RNA guide
auuuccauguuuucuccuaucu

SEQ ID NO: 37578 - RNA, 22 nt, Artificial Sequence
  LRRK2 RNA guide
cauguuuucuccuaucuucuua

SEQ ID NO: 37579 - RNA, 22 nt, Artificial Sequence
  LRRK2 RNA guide
ccauguuuucuccuaucuucuu

SEQ ID NO: 37580 - RNA, 22 nt, Artificial Sequence
  LRRK2 RNA guide
cuaucuuaagaagauaggagaa

SEQ ID NO: 37581 - RNA, 22 nt, Artificial Sequence
  LRRK2 RNA guide
cuuaagaagauaggagaaaaca

SEQ ID NO: 37582 - RNA, 22 nt, Artificial Sequence
  LRRK2 RNA guide
gaagauaggagaaaacauggaa

SEQ ID NO: 37583 - RNA, 22 nt, Artificial Sequence
  LRRK2 RNA guide
gauaggagaaaacauggaaaua

SEQ ID NO: 37584 - RNA, 22 nt, Artificial Sequence
  LRRK2 RNA guide
gucuaucuuaagaagauaggag

SEQ ID NO: 37585 - RNA, 22 nt, Artificial Sequence
  LRRK2 RNA guide
guuuucuccuaucuucuuaaga

SEQ ID NO: 37586 - RNA, 22 nt, Artificial Sequence
  LRRK2 RNA guide
uaagaagauaggagaaaacaug

SEQ ID NO: 37587 - RNA, 22 nt, Artificial Sequence
  LRRK2 RNA guide
uauuuccauguuuucuccuauc

SEQ ID NO: 37588 - RNA, 22 nt, Artificial Sequence
  LRRK2 RNA guide
uccauguuuucuccuaucuucu

SEQ ID NO: 37589 - RNA, 22 nt, Artificial Sequence
  LRRK2 RNA guide
ucuaucuuaagaagauaggaga

SEQ ID NO: 37590 - RNA, 22 nt, Artificial Sequence
  LRRK2 RNA guide
ucuccuaucuucuuaagauaga

SEQ ID NO: 37591 - RNA, 22 nt, Artificial Sequence
  LRRK2 RNA guide
ucuuaagaagauaggagaaaac

SEQ ID NO: 37592 - RNA, 22 nt, Artificial Sequence
  LRRK2 RNA guide
uguuuucuccuaucuucuuaag

SEQ ID NO: 37593 - RNA, 22 nt, Artificial Sequence
  LRRK2 RNA guide
uuccauguuuucuccuaucuuc

SEQ ID NO: 37594 - RNA, 22 nt, Artificial Sequence
  LRRK2 RNA guide
uucuccuaucuucuuaagauag

SEQ ID NO: 37595 - RNA, 22 nt, Artificial Sequence
  LRRK2 RNA guide
uuuccauguuuucuccuaucuu

SEQ ID NO: 37596 - RNA, 20 nt, Artificial Sequence
  LRRK2 RNA guide
aauaucaauugucuugaagc

SEQ ID NO: 37597 - RNA, 20 nt, Artificial Sequence
  LRRK2 RNA guide
aauugucuugaagccgcuau

SEQ ID NO: 37598 - RNA, 20 nt, Artificial Sequence
  LRRK2 RNA guide
agcggcuucaagacaauuga

SEQ ID NO: 37599 - RNA, 20 nt, Artificial Sequence
  LRRK2 RNA guide
auagcggcuucaagacaauu

SEQ ID NO: 37600 - RNA, 20 nt, Artificial Sequence
  LRRK2 RNA guide
auaucaauugucuugaagcc

SEQ ID NO: 37601 - RNA, 20 nt, Artificial Sequence
  LRRK2 RNA guide
auauuuuuauagcggcuuca

SEQ ID NO: 37602 - RNA, 20 nt, Artificial Sequence
  LRRK2 RNA guide
aucaauugucuugaagccgc

SEQ ID NO: 37603 - RNA, 20 nt, Artificial Sequence
  LRRK2 RNA guide
auugucuugaagccgcuaua

SEQ ID NO: 37604 - RNA, 20 nt, Artificial Sequence
  LRRK2 RNA guide
auuuuuauagcggcuucaag

SEQ ID NO: 37605 - RNA, 20 nt, Artificial Sequence
  LRRK2 RNA guide
caauugucuugaagccgcua

SEQ ID NO: 37606 - RNA, 20 nt, Artificial Sequence
  LRRK2 RNA guide
ccacauaaauaucaauuguc

SEQ ID NO: 37607 - RNA, 20 nt, Artificial Sequence
  LRRK2 RNA guide
cggcuucaagacaauugaua

SEQ ID NO: 37608 - RNA, 20 nt, Artificial Sequence
  LRRK2 RNA guide
cugauauuuuuauagcggcu

SEQ ID NO: 37609 - RNA, 20 nt, Artificial Sequence
  LRRK2 RNA guide
gauauuuuuauagcggcuuc

SEQ ID NO: 37610 - RNA, 20 nt, Artificial Sequence
  LRRK2 RNA guide
gcggcuucaagacaauugau

SEQ ID NO: 37611 - RNA, 20 nt, Artificial Sequence
  LRRK2 RNA guide
gcuucaagacaauugauauu

SEQ ID NO: 37612 - RNA, 20 nt, Artificial Sequence
  LRRK2 RNA guide
ggcuucaagacaauugauau

SEQ ID NO: 37613 - RNA, 20 nt, Artificial Sequence
  LRRK2 RNA guide
gucuugaagccgcuauaaaa

SEQ ID NO: 37614 - RNA, 20 nt, Artificial Sequence
  LRRK2 RNA guide
uagcggcuucaagacaauug

SEQ ID NO: 37615 - RNA, 20 nt, Artificial Sequence
  LRRK2 RNA guide
uauagcggcuucaagacaau

SEQ ID NO: 37616 - RNA, 20 nt, Artificial Sequence
  LRRK2 RNA guide
uaucaauugucuugaagccg

SEQ ID NO: 37617 - RNA, 20 nt, Artificial Sequence
  LRRK2 RNA guide
uauuuuuauagcggcuucaa

SEQ ID NO: 37618 - RNA, 20 nt, Artificial Sequence
  LRRK2 RNA guide
ucaauugucuugaagccgcu

SEQ ID NO: 37619 - RNA, 20 nt, Artificial Sequence
  LRRK2 RNA guide
ucuugaagccgcuauaaaaa

SEQ ID NO: 37620 - RNA, 20 nt, Artificial Sequence
  LRRK2 RNA guide
ugauauuuuuauagcggcuu

SEQ ID NO: 37621 - RNA, 20 nt, Artificial Sequence
  LRRK2 RNA guide
ugucuugaagccgcuauaaa

SEQ ID NO: 37622 - RNA, 20 nt, Artificial Sequence
  LRRK2 RNA guide
uuauagcggcuucaagacaa

SEQ ID NO: 37623 - RNA, 20 nt, Artificial Sequence
  LRRK2 RNA guide
uugucuugaagccgcuauaa

SEQ ID NO: 37624 - RNA, 20 nt, Artificial Sequence
  LRRK2 RNA guide
uuuauagcggcuucaagaca

SEQ ID NO: 37625 - RNA, 20 nt, Artificial Sequence
  LRRK2 RNA guide
uuuuauagcggcuucaagac

SEQ ID NO: 37626 - RNA, 20 nt, Artificial Sequence
  LRRK2 RNA guide
uuuuuauagcggcuucaaga

SEQ ID NO: 37627 - RNA, 21 nt, Artificial Sequence
  LRRK2 RNA guide
aauaucaauugucuugaagcc

SEQ ID NO: 37628 - RNA, 21 nt, Artificial Sequence
  LRRK2 RNA guide
aauugucuugaagccgcuaua

SEQ ID NO: 37629 - RNA, 21 nt, Artificial Sequence
  LRRK2 RNA guide
acugauauuuuuauagcggcu

SEQ ID NO: 37630 - RNA, 21 nt, Artificial Sequence
  LRRK2 RNA guide
agcggcuucaagacaauugau

SEQ ID NO: 37631 - RNA, 21 nt, Artificial Sequence
  LRRK2 RNA guide
auagcggcuucaagacaauug

SEQ ID NO: 37632 - RNA, 21 nt, Artificial Sequence
  LRRK2 RNA guide
auaucaauugucuugaagccg

SEQ ID NO: 37633 - RNA, 21 nt, Artificial Sequence
  LRRK2 RNA guide
aucaauugucuugaagccgcu

SEQ ID NO: 37634 - RNA, 21 nt, Artificial Sequence
  LRRK2 RNA guide
auugucuugaagccgcuauaa

SEQ ID NO: 37635 - RNA, 21 nt, Artificial Sequence
  LRRK2 RNA guide
auuuuuauagcggcuucaaga

SEQ ID NO: 37636 - RNA, 21 nt, Artificial Sequence
  LRRK2 RNA guide
caauugucuugaagccgcuau

SEQ ID NO: 37637 - RNA, 21 nt, Artificial Sequence
  LRRK2 RNA guide
cggcuucaagacaauugauau

SEQ ID NO: 37638 - RNA, 21 nt, Artificial Sequence
  LRRK2 RNA guide
cugauauuuuuauagcggcuu

SEQ ID NO: 37639 - RNA, 21 nt, Artificial Sequence
  LRRK2 RNA guide
gauauuuuuauagcggcuuca

SEQ ID NO: 37640 - RNA, 21 nt, Artificial Sequence
  LRRK2 RNA guide
gcggcuucaagacaauugaua

SEQ ID NO: 37641 - RNA, 21 nt, Artificial Sequence
  LRRK2 RNA guide
ggcuucaagacaauugauauu

SEQ ID NO: 37642 - RNA, 21 nt, Artificial Sequence
  LRRK2 RNA guide
gucuugaagccgcuauaaaaa

SEQ ID NO: 37643 - RNA, 21 nt, Artificial Sequence
  LRRK2 RNA guide
uagcggcuucaagacaauuga

SEQ ID NO: 37644 - RNA, 21 nt, Artificial Sequence
  LRRK2 RNA guide
uauagcggcuucaagacaauu

SEQ ID NO: 37645 - RNA, 21 nt, Artificial Sequence
  LRRK2 RNA guide
uaucaauugucuugaagccgc

SEQ ID NO: 37646 - RNA, 21 nt, Artificial Sequence
  LRRK2 RNA guide
uauuuuuauagcggcuucaag

SEQ ID NO: 37647 - RNA, 21 nt, Artificial Sequence
  LRRK2 RNA guide
ucaauugucuugaagccgcua

SEQ ID NO: 37648 - RNA, 21 nt, Artificial Sequence
  LRRK2 RNA guide
ucuugaagccgcuauaaaaau

SEQ ID NO: 37649 - RNA, 21 nt, Artificial Sequence
  LRRK2 RNA guide
ugauauuuuuauagcggcuuc

SEQ ID NO: 37650 - RNA, 21 nt, Artificial Sequence
  LRRK2 RNA guide
ugucuugaagccgcuauaaaa

SEQ ID NO: 37651 - RNA, 21 nt, Artificial Sequence
  LRRK2 RNA guide
uuauagcggcuucaagacaau

SEQ ID NO: 37652 - RNA, 21 nt, Artificial Sequence
  LRRK2 RNA guide
uugucuugaagccgcuauaaa

SEQ ID NO: 37653 - RNA, 21 nt, Artificial Sequence
  LRRK2 RNA guide
uuuauagcggcuucaagacaa

SEQ ID NO: 37654 - RNA, 21 nt, Artificial Sequence
  LRRK2 RNA guide
uuuuauagcggcuucaagaca

SEQ ID NO: 37655 - RNA, 21 nt, Artificial Sequence
  LRRK2 RNA guide
uuuuuauagcggcuucaagac

SEQ ID NO: 37656 - RNA, 22 nt, Artificial Sequence
  LRRK2 RNA guide
aaauaucaauugucuugaagcc

SEQ ID NO: 37657 - RNA, 22 nt, Artificial Sequence
  LRRK2 RNA guide
aacugauauuuuuauagcggcu

SEQ ID NO: 37658 - RNA, 22 nt, Artificial Sequence
  LRRK2 RNA guide
aauaucaauugucuugaagccg

SEQ ID NO: 37659 - RNA, 22 nt, Artificial Sequence
  LRRK2 RNA guide
aauugucuugaagccgcuauaa

SEQ ID NO: 37660 - RNA, 22 nt, Artificial Sequence
  LRRK2 RNA guide
acugauauuuuuauagcggcuu

SEQ ID NO: 37661 - RNA, 22 nt, Artificial Sequence
  LRRK2 RNA guide
agcggcuucaagacaauugaua

SEQ ID NO: 37662 - RNA, 22 nt, Artificial Sequence
  LRRK2 RNA guide
auagcggcuucaagacaauuga

SEQ ID NO: 37663 - RNA, 22 nt, Artificial Sequence
  LRRK2 RNA guide
auaucaauugucuugaagccgc

SEQ ID NO: 37664 - RNA, 22 nt, Artificial Sequence
  LRRK2 RNA guide
auauuuuuauagcggcuucaag

SEQ ID NO: 37665 - RNA, 22 nt, Artificial Sequence
  LRRK2 RNA guide
aucaauugucuugaagccgcua

SEQ ID NO: 37666 - RNA, 22 nt, Artificial Sequence
  LRRK2 RNA guide
auugucuugaagccgcuauaaa

SEQ ID NO: 37667 - RNA, 22 nt, Artificial Sequence
  LRRK2 RNA guide
auuuuuauagcggcuucaagac

SEQ ID NO: 37668 - RNA, 22 nt, Artificial Sequence
  LRRK2 RNA guide
caauugucuugaagccgcuaua

SEQ ID NO: 37669 - RNA, 22 nt, Artificial Sequence
  LRRK2 RNA guide
cggcuucaagacaauugauauu

SEQ ID NO: 37670 - RNA, 22 nt, Artificial Sequence
  LRRK2 RNA guide
cugauauuuuuauagcggcuuc

SEQ ID NO: 37671 - RNA, 22 nt, Artificial Sequence
  LRRK2 RNA guide
gauauuuuuauagcggcuucaa

SEQ ID NO: 37672 - RNA, 22 nt, Artificial Sequence
  LRRK2 RNA guide
gcggcuucaagacaauugauau

SEQ ID NO: 37673 - RNA, 22 nt, Artificial Sequence
  LRRK2 RNA guide
ggcuucaagacaauugauauuu

SEQ ID NO: 37674 - RNA, 22 nt, Artificial Sequence
  LRRK2 RNA guide
gucuugaagccgcuauaaaaau

SEQ ID NO: 37675 - RNA, 22 nt, Artificial Sequence
  LRRK2 RNA guide
uagcggcuucaagacaauugau

SEQ ID NO: 37676 - RNA, 22 nt, Artificial Sequence
  LRRK2 RNA guide
uauagcggcuucaagacaauug

SEQ ID NO: 37677 - RNA, 22 nt, Artificial Sequence
  LRRK2 RNA guide
uaucaauugucuugaagccgcu

SEQ ID NO: 37678 - RNA, 22 nt, Artificial Sequence
  LRRK2 RNA guide
uauuuuuauagcggcuucaaga

SEQ ID NO: 37679 - RNA, 22 nt, Artificial Sequence
  LRRK2 RNA guide
ucaauugucuugaagccgcuau

SEQ ID NO: 37680 - RNA, 22 nt, Artificial Sequence
  LRRK2 RNA guide
ucuugaagccgcuauaaaaaua

SEQ ID NO: 37681 - RNA, 22 nt, Artificial Sequence
  LRRK2 RNA guide
ugauauuuuuauagcggcuuca

SEQ ID NO: 37682 - RNA, 22 nt, Artificial Sequence
  LRRK2 RNA guide
ugucuugaagccgcuauaaaaa

SEQ ID NO: 37683 - RNA, 22 nt, Artificial Sequence
  LRRK2 RNA guide
uuauagcggcuucaagacaauu

SEQ ID NO: 37684 - RNA, 22 nt, Artificial Sequence
  LRRK2 RNA guide
uugucuugaagccgcuauaaaa

SEQ ID NO: 37685 - RNA, 22 nt, Artificial Sequence
  LRRK2 RNA guide
uuuauagcggcuucaagacaau

SEQ ID NO: 37686 - RNA, 22 nt, Artificial Sequence
  LRRK2 RNA guide
uuuuauagcggcuucaagacaa

SEQ ID NO: 37687 - RNA, 22 nt, Artificial Sequence
  LRRK2 RNA guide
uuuuuauagcggcuucaagaca

SEQ ID NO: 37688 - RNA, 20 nt, Artificial Sequence
  LRRK2 RNA guide
aauuguuuugaagccgcuau

SEQ ID NO: 37689 - RNA, 20 nt, Artificial Sequence
  LRRK2 RNA guide
agcggcuucaaaacaauuga

SEQ ID NO: 37690 - RNA, 20 nt, Artificial Sequence
  LRRK2 RNA guide
auagcggcuucaaaacaauu

SEQ ID NO: 37691 - RNA, 20 nt, Artificial Sequence
  LRRK2 RNA guide
auaucaauuguuuugaagcc

SEQ ID NO: 37692 - RNA, 20 nt, Artificial Sequence
  LRRK2 RNA guide
aucaauuguuuugaagccgc

SEQ ID NO: 37693 - RNA, 20 nt, Artificial Sequence
  LRRK2 RNA guide
auuguuuugaagccgcuaua

SEQ ID NO: 37694 - RNA, 20 nt, Artificial Sequence
  LRRK2 RNA guide
auuuuuauagcggcuucaaa

SEQ ID NO: 37695 - RNA, 20 nt, Artificial Sequence
  LRRK2 RNA guide
caauuguuuugaagccgcua

SEQ ID NO: 37696 - RNA, 20 nt, Artificial Sequence
  LRRK2 RNA guide
cggcuucaaaacaauugaua

SEQ ID NO: 37697 - RNA, 20 nt, Artificial Sequence
  LRRK2 RNA guide
gcggcuucaaaacaauugau

SEQ ID NO: 37698 - RNA, 20 nt, Artificial Sequence
  LRRK2 RNA guide
ggcuucaaaacaauugauau

SEQ ID NO: 37699 - RNA, 20 nt, Artificial Sequence
  LRRK2 RNA guide
guuuugaagccgcuauaaaa

SEQ ID NO: 37700 - RNA, 20 nt, Artificial Sequence
  LRRK2 RNA guide
uagcggcuucaaaacaauug

SEQ ID NO: 37701 - RNA, 20 nt, Artificial Sequence
  LRRK2 RNA guide
uauagcggcuucaaaacaau

SEQ ID NO: 37702 - RNA, 20 nt, Artificial Sequence
  LRRK2 RNA guide
uaucaauuguuuugaagccg

SEQ ID NO: 37703 - RNA, 20 nt, Artificial Sequence
  LRRK2 RNA guide
ucaauuguuuugaagccgcu

SEQ ID NO: 37704 - RNA, 20 nt, Artificial Sequence
  LRRK2 RNA guide
uguuuugaagccgcuauaaa

SEQ ID NO: 37705 - RNA, 20 nt, Artificial Sequence
  LRRK2 RNA guide
uuauagcggcuucaaaacaa

SEQ ID NO: 37706 - RNA, 20 nt, Artificial Sequence
  LRRK2 RNA guide
uuguuuugaagccgcuauaa

SEQ ID NO: 37707 - RNA, 20 nt, Artificial Sequence
  LRRK2 RNA guide
uuuauagcggcuucaaaaca

SEQ ID NO: 37708 - RNA, 20 nt, Artificial Sequence
  LRRK2 RNA guide
uuuuauagcggcuucaaaac

SEQ ID NO: 37709 - RNA, 20 nt, Artificial Sequence
  LRRK2 RNA guide
uuuugaagccgcuauaaaaa

SEQ ID NO: 37710 - RNA, 20 nt, Artificial Sequence
  LRRK2 RNA guide
uuuuuauagcggcuucaaaa

SEQ ID NO: 37711 - RNA, 21 nt, Artificial Sequence
  LRRK2 RNA guide
aauuguuuugaagccgcuaua

SEQ ID NO: 37712 - RNA, 21 nt, Artificial Sequence
  LRRK2 RNA guide
agcggcuucaaaacaauugau

SEQ ID NO: 37713 - RNA, 21 nt, Artificial Sequence
  LRRK2 RNA guide
auagcggcuucaaaacaauug

SEQ ID NO: 37714 - RNA, 21 nt, Artificial Sequence
  LRRK2 RNA guide
auaucaauuguuuugaagccg

SEQ ID NO: 37715 - RNA, 21 nt, Artificial Sequence
  LRRK2 RNA guide
aucaauuguuuugaagccgcu

SEQ ID NO: 37716 - RNA, 21 nt, Artificial Sequence
  LRRK2 RNA guide
auuguuuugaagccgcuauaa

SEQ ID NO: 37717 - RNA, 21 nt, Artificial Sequence
  LRRK2 RNA guide
caauuguuuugaagccgcuau

SEQ ID NO: 37718 - RNA, 21 nt, Artificial Sequence
  LRRK2 RNA guide
cggcuucaaaacaauugauau

SEQ ID NO: 37719 - RNA, 21 nt, Artificial Sequence
  LRRK2 RNA guide
gcggcuucaaaacaauugaua

SEQ ID NO: 37720 - RNA, 21 nt, Artificial Sequence
  LRRK2 RNA guide
guuuugaagccgcuauaaaaa

SEQ ID NO: 37721 - RNA, 21 nt, Artificial Sequence
  LRRK2 RNA guide
uagcggcuucaaaacaauuga

SEQ ID NO: 37722 - RNA, 21 nt, Artificial Sequence
  LRRK2 RNA guide
uauagcggcuucaaaacaauu

SEQ ID NO: 37723 - RNA, 21 nt, Artificial Sequence
  LRRK2 RNA guide
uaucaauuguuuugaagccgc

SEQ ID NO: 37724 - RNA, 21 nt, Artificial Sequence
  LRRK2 RNA guide
ucaauuguuuugaagccgcua

SEQ ID NO: 37725 - RNA, 21 nt, Artificial Sequence
  LRRK2 RNA guide
uguuuugaagccgcuauaaaa

SEQ ID NO: 37726 - RNA, 21 nt, Artificial Sequence
  LRRK2 RNA guide
uuauagcggcuucaaaacaau

SEQ ID NO: 37727 - RNA, 21 nt, Artificial Sequence
  LRRK2 RNA guide
uuguuuugaagccgcuauaaa

SEQ ID NO: 37728 - RNA, 21 nt, Artificial Sequence
  LRRK2 RNA guide
uuuauagcggcuucaaaacaa

SEQ ID NO: 37729 - RNA, 21 nt, Artificial Sequence
  LRRK2 RNA guide
uuuuauagcggcuucaaaaca

SEQ ID NO: 37730 - RNA, 21 nt, Artificial Sequence
  LRRK2 RNA guide
uuuuuauagcggcuucaaaac

SEQ ID NO: 37731 - RNA, 22 nt, Artificial Sequence
  LRRK2 RNA guide
aauaucaauuguuuugaagccg

SEQ ID NO: 37732 - RNA, 22 nt, Artificial Sequence
  LRRK2 RNA guide
aauuguuuugaagccgcuauaa

SEQ ID NO: 37733 - RNA, 22 nt, Artificial Sequence
  LRRK2 RNA guide
agcggcuucaaaacaauugaua

SEQ ID NO: 37734 - RNA, 22 nt, Artificial Sequence
  LRRK2 RNA guide
auagcggcuucaaaacaauuga

SEQ ID NO: 37735 - RNA, 22 nt, Artificial Sequence
  LRRK2 RNA guide
auaucaauuguuuugaagccgc

SEQ ID NO: 37736 - RNA, 22 nt, Artificial Sequence
  LRRK2 RNA guide
aucaauuguuuugaagccgcua

SEQ ID NO: 37737 - RNA, 22 nt, Artificial Sequence
  LRRK2 RNA guide
auuguuuugaagccgcuauaaa

SEQ ID NO: 37738 - RNA, 22 nt, Artificial Sequence
  LRRK2 RNA guide
auuuuuauagcggcuucaaaac

SEQ ID NO: 37739 - RNA, 22 nt, Artificial Sequence
  LRRK2 RNA guide
caauuguuuugaagccgcuaua

SEQ ID NO: 37740 - RNA, 22 nt, Artificial Sequence
  LRRK2 RNA guide
cggcuucaaaacaauugauauu

SEQ ID NO: 37741 - RNA, 22 nt, Artificial Sequence
  LRRK2 RNA guide
gcggcuucaaaacaauugauau

SEQ ID NO: 37742 - RNA, 22 nt, Artificial Sequence
  LRRK2 RNA guide
guuuugaagccgcuauaaaaau

SEQ ID NO: 37743 - RNA, 22 nt, Artificial Sequence
  LRRK2 RNA guide
uagcggcuucaaaacaauugau

SEQ ID NO: 37744 - RNA, 22 nt, Artificial Sequence
  LRRK2 RNA guide
uauagcggcuucaaaacaauug

SEQ ID NO: 37745 - RNA, 22 nt, Artificial Sequence
  LRRK2 RNA guide
uaucaauuguuuugaagccgcu

SEQ ID NO: 37746 - RNA, 22 nt, Artificial Sequence
  LRRK2 RNA guide
ucaauuguuuugaagccgcuau

SEQ ID NO: 37747 - RNA, 22 nt, Artificial Sequence
  LRRK2 RNA guide
uguuuugaagccgcuauaaaaa

SEQ ID NO: 37748 - RNA, 22 nt, Artificial Sequence
  LRRK2 RNA guide
uuauagcggcuucaaaacaauu

SEQ ID NO: 37749 - RNA, 22 nt, Artificial Sequence
  LRRK2 RNA guide
uuguuuugaagccgcuauaaaa

SEQ ID NO: 37750 - RNA, 22 nt, Artificial Sequence
  LRRK2 RNA guide
uuuauagcggcuucaaaacaau

SEQ ID NO: 37751 - RNA, 22 nt, Artificial Sequence
  LRRK2 RNA guide
uuuuauagcggcuucaaaacaa

SEQ ID NO: 37752 - RNA, 22 nt, Artificial Sequence
  LRRK2 RNA guide
uuuuuauagcggcuucaaaaca

SEQ ID NO: 37753 - RNA, 20 nt, Artificial Sequence
  LRRK2 RNA guide
aaagaggaaaauuggccagu

SEQ ID NO: 37754 - RNA, 20 nt, Artificial Sequence
  LRRK2 RNA guide
aaauuggccaguuguggugg

SEQ ID NO: 37755 - RNA, 20 nt, Artificial Sequence
  LRRK2 RNA guide
aagaggaaaauuggccaguu

SEQ ID NO: 37756 - RNA, 20 nt, Artificial Sequence
  LRRK2 RNA guide
acaaagaggaaaauuggcca

SEQ ID NO: 37757 - RNA, 20 nt, Artificial Sequence
  LRRK2 RNA guide
acaacuggccaauuuuccuc

SEQ ID NO: 37758 - RNA, 20 nt, Artificial Sequence
  LRRK2 RNA guide
accacaacuggccaauuuuc

SEQ ID NO: 37759 - RNA, 20 nt, Artificial Sequence
  LRRK2 RNA guide
agaggaaaauuggccaguug

SEQ ID NO: 37760 - RNA, 20 nt, Artificial Sequence
  LRRK2 RNA guide
agccaccacaacuggccaau

SEQ ID NO: 37761 - RNA, 20 nt, Artificial Sequence
  LRRK2 RNA guide
aggaaaauuggccaguugug

SEQ ID NO: 37762 - RNA, 20 nt, Artificial Sequence
  LRRK2 RNA guide
caaagaggaaaauuggccag

SEQ ID NO: 37763 - RNA, 20 nt, Artificial Sequence
  LRRK2 RNA guide
cacaacuggccaauuuuccu

SEQ ID NO: 37764 - RNA, 20 nt, Artificial Sequence
  LRRK2 RNA guide
caccacaacuggccaauuuu

SEQ ID NO: 37765 - RNA, 20 nt, Artificial Sequence
  LRRK2 RNA guide
ccacaacuggccaauuuucc

SEQ ID NO: 37766 - RNA, 20 nt, Artificial Sequence
  LRRK2 RNA guide
ccaccacaacuggccaauuu

SEQ ID NO: 37767 - RNA, 20 nt, Artificial Sequence
  LRRK2 RNA guide
gaggaaaauuggccaguugu

SEQ ID NO: 37768 - RNA, 20 nt, Artificial Sequence
  LRRK2 RNA guide
gccaccacaacuggccaauu

SEQ ID NO: 37769 - RNA, 20 nt, Artificial Sequence
  LRRK2 RNA guide
ggaaaauuggccaguugugg

SEQ ID NO: 37770 - RNA, 20 nt, Artificial Sequence
  LRRK2 RNA guide
gugagccaccacaacuggcc

SEQ ID NO: 37771 - RNA, 20 nt, Artificial Sequence
  LRRK2 RNA guide
uacaaagaggaaaauuggcc

SEQ ID NO: 37772 - RNA, 21 nt, Artificial Sequence
  LRRK2 RNA guide
aaaauuggccaguuguggugg

SEQ ID NO: 37773 - RNA, 21 nt, Artificial Sequence
  LRRK2 RNA guide
aaagaggaaaauuggccaguu

SEQ ID NO: 37774 - RNA, 21 nt, Artificial Sequence
  LRRK2 RNA guide
aaauuggccaguugugguggc

SEQ ID NO: 37775 - RNA, 21 nt, Artificial Sequence
  LRRK2 RNA guide
aagaggaaaauuggccaguug

SEQ ID NO: 37776 - RNA, 21 nt, Artificial Sequence
  LRRK2 RNA guide
acaaagaggaaaauuggccag

SEQ ID NO: 37777 - RNA, 21 nt, Artificial Sequence
  LRRK2 RNA guide
acaacuggccaauuuuccucu

SEQ ID NO: 37778 - RNA, 21 nt, Artificial Sequence
  LRRK2 RNA guide
accacaacuggccaauuuucc

SEQ ID NO: 37779 - RNA, 21 nt, Artificial Sequence
  LRRK2 RNA guide
agaggaaaauuggccaguugu

SEQ ID NO: 37780 - RNA, 21 nt, Artificial Sequence
  LRRK2 RNA guide
agccaccacaacuggccaauu

SEQ ID NO: 37781 - RNA, 21 nt, Artificial Sequence
  LRRK2 RNA guide
aggaaaauuggccaguugugg

SEQ ID NO: 37782 - RNA, 21 nt, Artificial Sequence
  LRRK2 RNA guide
caaagaggaaaauuggccagu

SEQ ID NO: 37783 - RNA, 21 nt, Artificial Sequence
  LRRK2 RNA guide
cacaacuggccaauuuuccuc

SEQ ID NO: 37784 - RNA, 21 nt, Artificial Sequence
  LRRK2 RNA guide
caccacaacuggccaauuuuc

SEQ ID NO: 37785 - RNA, 21 nt, Artificial Sequence
  LRRK2 RNA guide
ccacaacuggccaauuuuccu

SEQ ID NO: 37786 - RNA, 21 nt, Artificial Sequence
  LRRK2 RNA guide
ccaccacaacuggccaauuuu

SEQ ID NO: 37787 - RNA, 21 nt, Artificial Sequence
  LRRK2 RNA guide
cgugagccaccacaacuggcc

SEQ ID NO: 37788 - RNA, 21 nt, Artificial Sequence
  LRRK2 RNA guide
gagccaccacaacuggccaau

SEQ ID NO: 37789 - RNA, 21 nt, Artificial Sequence
  LRRK2 RNA guide
gaggaaaauuggccaguugug

SEQ ID NO: 37790 - RNA, 21 nt, Artificial Sequence
  LRRK2 RNA guide
gccaccacaacuggccaauuu

SEQ ID NO: 37791 - RNA, 21 nt, Artificial Sequence
  LRRK2 RNA guide
ggaaaauuggccaguuguggu

SEQ ID NO: 37792 - RNA, 21 nt, Artificial Sequence
  LRRK2 RNA guide
gugagccaccacaacuggcca

SEQ ID NO: 37793 - RNA, 21 nt, Artificial Sequence
  LRRK2 RNA guide
uacaaagaggaaaauuggcca

SEQ ID NO: 37794 - RNA, 21 nt, Artificial Sequence
  LRRK2 RNA guide
uuacaaagaggaaaauuggcc

SEQ ID NO: 37795 - RNA, 22 nt, Artificial Sequence
  LRRK2 RNA guide
aaaauuggccaguugugguggc

SEQ ID NO: 37796 - RNA, 22 nt, Artificial Sequence
  LRRK2 RNA guide
aaagaggaaaauuggccaguug

SEQ ID NO: 37797 - RNA, 22 nt, Artificial Sequence
  LRRK2 RNA guide
aaauuggccaguugugguggcu

SEQ ID NO: 37798 - RNA, 22 nt, Artificial Sequence
  LRRK2 RNA guide
aagaggaaaauuggccaguugu

SEQ ID NO: 37799 - RNA, 22 nt, Artificial Sequence
  LRRK2 RNA guide
acaaagaggaaaauuggccagu

SEQ ID NO: 37800 - RNA, 22 nt, Artificial Sequence
  LRRK2 RNA guide
acaacuggccaauuuuccucuu

SEQ ID NO: 37801 - RNA, 22 nt, Artificial Sequence
  LRRK2 RNA guide
accacaacuggccaauuuuccu

SEQ ID NO: 37802 - RNA, 22 nt, Artificial Sequence
  LRRK2 RNA guide
agaggaaaauuggccaguugug

SEQ ID NO: 37803 - RNA, 22 nt, Artificial Sequence
  LRRK2 RNA guide
agccaccacaacuggccaauuu

SEQ ID NO: 37804 - RNA, 22 nt, Artificial Sequence
  LRRK2 RNA guide
aggaaaauuggccaguuguggu

SEQ ID NO: 37805 - RNA, 22 nt, Artificial Sequence
  LRRK2 RNA guide
auuacaaagaggaaaauuggcc

SEQ ID NO: 37806 - RNA, 22 nt, Artificial Sequence
  LRRK2 RNA guide
caaagaggaaaauuggccaguu

SEQ ID NO: 37807 - RNA, 22 nt, Artificial Sequence
  LRRK2 RNA guide
cacaacuggccaauuuuccucu

SEQ ID NO: 37808 - RNA, 22 nt, Artificial Sequence
  LRRK2 RNA guide
caccacaacuggccaauuuucc

SEQ ID NO: 37809 - RNA, 22 nt, Artificial Sequence
  LRRK2 RNA guide
ccacaacuggccaauuuuccuc

SEQ ID NO: 37810 - RNA, 22 nt, Artificial Sequence
  LRRK2 RNA guide
ccaccacaacuggccaauuuuc

SEQ ID NO: 37811 - RNA, 22 nt, Artificial Sequence
  LRRK2 RNA guide
cgugagccaccacaacuggcca

SEQ ID NO: 37812 - RNA, 22 nt, Artificial Sequence
  LRRK2 RNA guide
gaaaauuggccaguuguggugg

SEQ ID NO: 37813 - RNA, 22 nt, Artificial Sequence
  LRRK2 RNA guide
gagccaccacaacuggccaauu

SEQ ID NO: 37814 - RNA, 22 nt, Artificial Sequence
  LRRK2 RNA guide
gaggaaaauuggccaguugugg

SEQ ID NO: 37815 - RNA, 22 nt, Artificial Sequence
  LRRK2 RNA guide
gccaccacaacuggccaauuuu

SEQ ID NO: 37816 - RNA, 22 nt, Artificial Sequence
  LRRK2 RNA guide
gcgugagccaccacaacuggcc

SEQ ID NO: 37817 - RNA, 22 nt, Artificial Sequence
  LRRK2 RNA guide
ggaaaauuggccaguuguggug

SEQ ID NO: 37818 - RNA, 22 nt, Artificial Sequence
  LRRK2 RNA guide
gugagccaccacaacuggccaa

SEQ ID NO: 37819 - RNA, 22 nt, Artificial Sequence
  LRRK2 RNA guide
uacaaagaggaaaauuggccag

SEQ ID NO: 37820 - RNA, 22 nt, Artificial Sequence
  LRRK2 RNA guide
ugagccaccacaacuggccaau

SEQ ID NO: 37821 - RNA, 22 nt, Artificial Sequence
  LRRK2 RNA guide
uuacaaagaggaaaauuggcca

SEQ ID NO: 37822 - RNA, 20 nt, Artificial Sequence
  LRRK2 RNA guide
aaaauuggccaguuauggug

SEQ ID NO: 37823 - RNA, 20 nt, Artificial Sequence
  LRRK2 RNA guide
aaauuggccaguuauggugg

SEQ ID NO: 37824 - RNA, 20 nt, Artificial Sequence
  LRRK2 RNA guide
aauuggccaguuaugguggc

SEQ ID NO: 37825 - RNA, 20 nt, Artificial Sequence
  LRRK2 RNA guide
accauaacuggccaauuuuc

SEQ ID NO: 37826 - RNA, 20 nt, Artificial Sequence
  LRRK2 RNA guide
agaggaaaauuggccaguua

SEQ ID NO: 37827 - RNA, 20 nt, Artificial Sequence
  LRRK2 RNA guide
agccaccauaacuggccaau

SEQ ID NO: 37828 - RNA, 20 nt, Artificial Sequence
  LRRK2 RNA guide
aggaaaauuggccaguuaug

SEQ ID NO: 37829 - RNA, 20 nt, Artificial Sequence
  LRRK2 RNA guide
aggcgugagccaccauaacu

SEQ ID NO: 37830 - RNA, 20 nt, Artificial Sequence
  LRRK2 RNA guide
auaacuggccaauuuuccuc

SEQ ID NO: 37831 - RNA, 20 nt, Artificial Sequence
  LRRK2 RNA guide
caccauaacuggccaauuuu

SEQ ID NO: 37832 - RNA, 20 nt, Artificial Sequence
  LRRK2 RNA guide
cauaacuggccaauuuuccu

SEQ ID NO: 37833 - RNA, 20 nt, Artificial Sequence
  LRRK2 RNA guide
ccaccauaacuggccaauuu

SEQ ID NO: 37834 - RNA, 20 nt, Artificial Sequence
  LRRK2 RNA guide
ccauaacuggccaauuuucc

SEQ ID NO: 37835 - RNA, 20 nt, Artificial Sequence
  LRRK2 RNA guide
cgugagccaccauaacuggc

SEQ ID NO: 37836 - RNA, 20 nt, Artificial Sequence
  LRRK2 RNA guide
gaaaauuggccaguuauggu

SEQ ID NO: 37837 - RNA, 20 nt, Artificial Sequence
  LRRK2 RNA guide
gagccaccauaacuggccaa

SEQ ID NO: 37838 - RNA, 20 nt, Artificial Sequence
  LRRK2 RNA guide
gaggaaaauuggccaguuau

SEQ ID NO: 37839 - RNA, 20 nt, Artificial Sequence
  LRRK2 RNA guide
gccaccauaacuggccaauu

SEQ ID NO: 37840 - RNA, 20 nt, Artificial Sequence
  LRRK2 RNA guide
ggaaaauuggccaguuaugg

SEQ ID NO: 37841 - RNA, 20 nt, Artificial Sequence
  LRRK2 RNA guide
ggcgugagccaccauaacug

SEQ ID NO: 37842 - RNA, 20 nt, Artificial Sequence
  LRRK2 RNA guide
gugagccaccauaacuggcc

SEQ ID NO: 37843 - RNA, 20 nt, Artificial Sequence
  LRRK2 RNA guide
ugagccaccauaacuggcca

SEQ ID NO: 37844 - RNA, 20 nt, Artificial Sequence
  LRRK2 RNA guide
uggccaguuaugguggcuca

SEQ ID NO: 37845 - RNA, 20 nt, Artificial Sequence
  LRRK2 RNA guide
uuggccaguuaugguggcuc

SEQ ID NO: 37846 - RNA, 21 nt, Artificial Sequence
  LRRK2 RNA guide
aaaauuggccaguuauggugg

SEQ ID NO: 37847 - RNA, 21 nt, Artificial Sequence
  LRRK2 RNA guide
aaauuggccaguuaugguggc

SEQ ID NO: 37848 - RNA, 21 nt, Artificial Sequence
  LRRK2 RNA guide
aagaggaaaauuggccaguua

SEQ ID NO: 37849 - RNA, 21 nt, Artificial Sequence
  LRRK2 RNA guide
aauuggccaguuaugguggcu

SEQ ID NO: 37850 - RNA, 21 nt, Artificial Sequence
  LRRK2 RNA guide
accauaacuggccaauuuucc

SEQ ID NO: 37851 - RNA, 21 nt, Artificial Sequence
  LRRK2 RNA guide
agaggaaaauuggccaguuau

SEQ ID NO: 37852 - RNA, 21 nt, Artificial Sequence
  LRRK2 RNA guide
agccaccauaacuggccaauu

SEQ ID NO: 37853 - RNA, 21 nt, Artificial Sequence
  LRRK2 RNA guide
aggaaaauuggccaguuaugg

SEQ ID NO: 37854 - RNA, 21 nt, Artificial Sequence
  LRRK2 RNA guide
aggcgugagccaccauaacug

SEQ ID NO: 37855 - RNA, 21 nt, Artificial Sequence
  LRRK2 RNA guide
auaacuggccaauuuuccucu

SEQ ID NO: 37856 - RNA, 21 nt, Artificial Sequence
  LRRK2 RNA guide
auuggccaguuaugguggcuc

SEQ ID NO: 37857 - RNA, 21 nt, Artificial Sequence
  LRRK2 RNA guide
caccauaacuggccaauuuuc

SEQ ID NO: 37858 - RNA, 21 nt, Artificial Sequence
  LRRK2 RNA guide
caggcgugagccaccauaacu

SEQ ID NO: 37859 - RNA, 21 nt, Artificial Sequence
  LRRK2 RNA guide
cauaacuggccaauuuuccuc

SEQ ID NO: 37860 - RNA, 21 nt, Artificial Sequence
  LRRK2 RNA guide
ccaccauaacuggccaauuuu

SEQ ID NO: 37861 - RNA, 21 nt, Artificial Sequence
  LRRK2 RNA guide
ccauaacuggccaauuuuccu

SEQ ID NO: 37862 - RNA, 21 nt, Artificial Sequence
  LRRK2 RNA guide
cgugagccaccauaacuggcc

SEQ ID NO: 37863 - RNA, 21 nt, Artificial Sequence
  LRRK2 RNA guide
gaaaauuggccaguuauggug

SEQ ID NO: 37864 - RNA, 21 nt, Artificial Sequence
  LRRK2 RNA guide
gagccaccauaacuggccaau

SEQ ID NO: 37865 - RNA, 21 nt, Artificial Sequence
  LRRK2 RNA guide
gaggaaaauuggccaguuaug

SEQ ID NO: 37866 - RNA, 21 nt, Artificial Sequence
  LRRK2 RNA guide
gccaccauaacuggccaauuu

SEQ ID NO: 37867 - RNA, 21 nt, Artificial Sequence
  LRRK2 RNA guide
gcgugagccaccauaacuggc

SEQ ID NO: 37868 - RNA, 21 nt, Artificial Sequence
  LRRK2 RNA guide
ggaaaauuggccaguuauggu

SEQ ID NO: 37869 - RNA, 21 nt, Artificial Sequence
  LRRK2 RNA guide
ggcgugagccaccauaacugg

SEQ ID NO: 37870 - RNA, 21 nt, Artificial Sequence
  LRRK2 RNA guide
gugagccaccauaacuggcca

SEQ ID NO: 37871 - RNA, 21 nt, Artificial Sequence
  LRRK2 RNA guide
ugagccaccauaacuggccaa

SEQ ID NO: 37872 - RNA, 21 nt, Artificial Sequence
  LRRK2 RNA guide
uggccaguuaugguggcucac

SEQ ID NO: 37873 - RNA, 21 nt, Artificial Sequence
  LRRK2 RNA guide
uuggccaguuaugguggcuca

SEQ ID NO: 37874 - RNA, 22 nt, Artificial Sequence
  LRRK2 RNA guide
aaaauuggccaguuaugguggc

SEQ ID NO: 37875 - RNA, 22 nt, Artificial Sequence
  LRRK2 RNA guide
aaagaggaaaauuggccaguua

SEQ ID NO: 37876 - RNA, 22 nt, Artificial Sequence
  LRRK2 RNA guide
aaauuggccaguuaugguggcu

SEQ ID NO: 37877 - RNA, 22 nt, Artificial Sequence
  LRRK2 RNA guide
aagaggaaaauuggccaguuau

SEQ ID NO: 37878 - RNA, 22 nt, Artificial Sequence
  LRRK2 RNA guide
aauuggccaguuaugguggcuc

SEQ ID NO: 37879 - RNA, 22 nt, Artificial Sequence
  LRRK2 RNA guide
acaggcgugagccaccauaacu

SEQ ID NO: 37880 - RNA, 22 nt, Artificial Sequence
  LRRK2 RNA guide
accauaacuggccaauuuuccu

SEQ ID NO: 37881 - RNA, 22 nt, Artificial Sequence
  LRRK2 RNA guide
agaggaaaauuggccaguuaug

SEQ ID NO: 37882 - RNA, 22 nt, Artificial Sequence
  LRRK2 RNA guide
agccaccauaacuggccaauuu

SEQ ID NO: 37883 - RNA, 22 nt, Artificial Sequence
  LRRK2 RNA guide
aggaaaauuggccaguuauggu

SEQ ID NO: 37884 - RNA, 22 nt, Artificial Sequence
  LRRK2 RNA guide
aggcgugagccaccauaacugg

SEQ ID NO: 37885 - RNA, 22 nt, Artificial Sequence
  LRRK2 RNA guide
auaacuggccaauuuuccucuu

SEQ ID NO: 37886 - RNA, 22 nt, Artificial Sequence
  LRRK2 RNA guide
auuggccaguuaugguggcuca

SEQ ID NO: 37887 - RNA, 22 nt, Artificial Sequence
  LRRK2 RNA guide
caccauaacuggccaauuuucc

SEQ ID NO: 37888 - RNA, 22 nt, Artificial Sequence
  LRRK2 RNA guide
caggcgugagccaccauaacug

SEQ ID NO: 37889 - RNA, 22 nt, Artificial Sequence
  LRRK2 RNA guide
cauaacuggccaauuuuccucu

SEQ ID NO: 37890 - RNA, 22 nt, Artificial Sequence
  LRRK2 RNA guide
ccaccauaacuggccaauuuuc

SEQ ID NO: 37891 - RNA, 22 nt, Artificial Sequence
  LRRK2 RNA guide
ccauaacuggccaauuuuccuc

SEQ ID NO: 37892 - RNA, 22 nt, Artificial Sequence
  LRRK2 RNA guide
cgugagccaccauaacuggcca

SEQ ID NO: 37893 - RNA, 22 nt, Artificial Sequence
  LRRK2 RNA guide
gaaaauuggccaguuauggugg

SEQ ID NO: 37894 - RNA, 22 nt, Artificial Sequence
  LRRK2 RNA guide
gagccaccauaacuggccaauu

SEQ ID NO: 37895 - RNA, 22 nt, Artificial Sequence
  LRRK2 RNA guide
gaggaaaauuggccaguuaugg

SEQ ID NO: 37896 - RNA, 22 nt, Artificial Sequence
  LRRK2 RNA guide
gccaccauaacuggccaauuuu

SEQ ID NO: 37897 - RNA, 22 nt, Artificial Sequence
  LRRK2 RNA guide
gcgugagccaccauaacuggcc

SEQ ID NO: 37898 - RNA, 22 nt, Artificial Sequence
  LRRK2 RNA guide
ggaaaauuggccaguuauggug

SEQ ID NO: 37899 - RNA, 22 nt, Artificial Sequence
  LRRK2 RNA guide
ggcgugagccaccauaacuggc

SEQ ID NO: 37900 - RNA, 22 nt, Artificial Sequence
  LRRK2 RNA guide
gugagccaccauaacuggccaa

SEQ ID NO: 37901 - RNA, 22 nt, Artificial Sequence
  LRRK2 RNA guide
ugagccaccauaacuggccaau

SEQ ID NO: 37902 - RNA, 22 nt, Artificial Sequence
  LRRK2 RNA guide
uggccaguuaugguggcucacg

SEQ ID NO: 37903 - RNA, 22 nt, Artificial Sequence
  LRRK2 RNA guide
uuggccaguuaugguggcucac

SEQ ID NO: 37904 - RNA, 20 nt, Artificial Sequence
  LRRK2 RNA guide
aaagucuaggaaacauauag

SEQ ID NO: 37905 - RNA, 20 nt, Artificial Sequence
  LRRK2 RNA guide
aagcauaucuauauguuucc

SEQ ID NO: 37906 - RNA, 20 nt, Artificial Sequence
  LRRK2 RNA guide
aagucuaggaaacauauaga

SEQ ID NO: 37907 - RNA, 20 nt, Artificial Sequence
  LRRK2 RNA guide
aagugccaguuguaaagcau

SEQ ID NO: 37908 - RNA, 20 nt, Artificial Sequence
  LRRK2 RNA guide
agauaugcuuuacaacuggc

SEQ ID NO: 37909 - RNA, 20 nt, Artificial Sequence
  LRRK2 RNA guide
agcauaucuauauguuuccu

SEQ ID NO: 37910 - RNA, 20 nt, Artificial Sequence
  LRRK2 RNA guide
aggaaacauauagauaugcu

SEQ ID NO: 37911 - RNA, 20 nt, Artificial Sequence
  LRRK2 RNA guide
agucuaggaaacauauagau

SEQ ID NO: 37912 - RNA, 20 nt, Artificial Sequence
  LRRK2 RNA guide
agugccaguuguaaagcaua

SEQ ID NO: 37913 - RNA, 20 nt, Artificial Sequence
  LRRK2 RNA guide
auagauaugcuuuacaacug

SEQ ID NO: 37914 - RNA, 20 nt, Artificial Sequence
  LRRK2 RNA guide
aucuauauguuuccuagacu

SEQ ID NO: 37915 - RNA, 20 nt, Artificial Sequence
  LRRK2 RNA guide
augccaaagucuaggaaaca

SEQ ID NO: 37916 - RNA, 20 nt, Artificial Sequence
  LRRK2 RNA guide
caaagucuaggaaacauaua

SEQ ID NO: 37917 - RNA, 20 nt, Artificial Sequence
  LRRK2 RNA guide
caguuguaaagcauaucuau

SEQ ID NO: 37918 - RNA, 20 nt, Artificial Sequence
  LRRK2 RNA guide
cauaucuauauguuuccuag

SEQ ID NO: 37919 - RNA, 20 nt, Artificial Sequence
  LRRK2 RNA guide
ccaaagucuaggaaacauau

SEQ ID NO: 37920 - RNA, 20 nt, Artificial Sequence
  LRRK2 RNA guide
ccaguuguaaagcauaucua

SEQ ID NO: 37921 - RNA, 20 nt, Artificial Sequence
  LRRK2 RNA guide
cuaggaaacauauagauaug

SEQ ID NO: 37922 - RNA, 20 nt, Artificial Sequence
  LRRK2 RNA guide
gaagugccaguuguaaagca

SEQ ID NO: 37923 - RNA, 20 nt, Artificial Sequence
  LRRK2 RNA guide
gcauaucuauauguuuccua

SEQ ID NO: 37924 - RNA, 20 nt, Artificial Sequence
  LRRK2 RNA guide
gccaaagucuaggaaacaua

SEQ ID NO: 37925 - RNA, 20 nt, Artificial Sequence
  LRRK2 RNA guide
gccaguuguaaagcauaucu

SEQ ID NO: 37926 - RNA, 20 nt, Artificial Sequence
  LRRK2 RNA guide
ggaaacauauagauaugcuu

SEQ ID NO: 37927 - RNA, 20 nt, Artificial Sequence
  LRRK2 RNA guide
gucuaggaaacauauagaua

SEQ ID NO: 37928 - RNA, 20 nt, Artificial Sequence
  LRRK2 RNA guide
gugccaguuguaaagcauau

SEQ ID NO: 37929 - RNA, 20 nt, Artificial Sequence
  LRRK2 RNA guide
uagauaugcuuuacaacugg

SEQ ID NO: 37930 - RNA, 20 nt, Artificial Sequence
  LRRK2 RNA guide
uaggaaacauauagauaugc

SEQ ID NO: 37931 - RNA, 20 nt, Artificial Sequence
  LRRK2 RNA guide
uaucuauauguuuccuagac

SEQ ID NO: 37932 - RNA, 20 nt, Artificial Sequence
  LRRK2 RNA guide
ucuauauguuuccuagacuu

SEQ ID NO: 37933 - RNA, 20 nt, Artificial Sequence
  LRRK2 RNA guide
ugaagugccaguuguaaagc

SEQ ID NO: 37934 - RNA, 20 nt, Artificial Sequence
  LRRK2 RNA guide
ugccaaagucuaggaaacau

SEQ ID NO: 37935 - RNA, 20 nt, Artificial Sequence
  LRRK2 RNA guide
ugccaguuguaaagcauauc

SEQ ID NO: 37936 - RNA, 21 nt, Artificial Sequence
  LRRK2 RNA guide
aagugccaguuguaaagcaua

SEQ ID NO: 37937 - RNA, 21 nt, Artificial Sequence
  LRRK2 RNA guide
aaugccaaagucuaggaaaca

SEQ ID NO: 37938 - RNA, 21 nt, Artificial Sequence
  LRRK2 RNA guide
agauaugcuuuacaacuggca

SEQ ID NO: 37939 - RNA, 21 nt, Artificial Sequence
  LRRK2 RNA guide
agugccaguuguaaagcauau

SEQ ID NO: 37940 - RNA, 21 nt, Artificial Sequence
  LRRK2 RNA guide
auagauaugcuuuacaacugg

SEQ ID NO: 37941 - RNA, 21 nt, Artificial Sequence
  LRRK2 RNA guide
augccaaagucuaggaaacau

SEQ ID NO: 37942 - RNA, 21 nt, Artificial Sequence
  LRRK2 RNA guide
caaagucuaggaaacauauag

SEQ ID NO: 37943 - RNA, 21 nt, Artificial Sequence
  LRRK2 RNA guide
ccaaagucuaggaaacauaua

SEQ ID NO: 37944 - RNA, 21 nt, Artificial Sequence
  LRRK2 RNA guide
ccaguuguaaagcauaucuau

SEQ ID NO: 37945 - RNA, 21 nt, Artificial Sequence
  LRRK2 RNA guide
cuaggaaacauauagauaugc

SEQ ID NO: 37946 - RNA, 21 nt, Artificial Sequence
  LRRK2 RNA guide
gaagugccaguuguaaagcau

SEQ ID NO: 37947 - RNA, 21 nt, Artificial Sequence
  LRRK2 RNA guide
gcauaucuauauguuuccuag

SEQ ID NO: 37948 - RNA, 21 nt, Artificial Sequence
  LRRK2 RNA guide
gccaaagucuaggaaacauau

SEQ ID NO: 37949 - RNA, 21 nt, Artificial Sequence
  LRRK2 RNA guide
gccaguuguaaagcauaucua

SEQ ID NO: 37950 - RNA, 21 nt, Artificial Sequence
  LRRK2 RNA guide
gugaagugccaguuguaaagc

SEQ ID NO: 37951 - RNA, 21 nt, Artificial Sequence
  LRRK2 RNA guide
gugccaguuguaaagcauauc

SEQ ID NO: 37952 - RNA, 21 nt, Artificial Sequence
  LRRK2 RNA guide
uagauaugcuuuacaacuggc

SEQ ID NO: 37953 - RNA, 21 nt, Artificial Sequence
  LRRK2 RNA guide
ugaagugccaguuguaaagca

SEQ ID NO: 37954 - RNA, 21 nt, Artificial Sequence
  LRRK2 RNA guide
ugccaaagucuaggaaacaua

SEQ ID NO: 37955 - RNA, 21 nt, Artificial Sequence
  LRRK2 RNA guide
ugccaguuguaaagcauaucu

SEQ ID NO: 37956 - RNA, 22 nt, Artificial Sequence
  LRRK2 RNA guide
aagugccaguuguaaagcauau

SEQ ID NO: 37957 - RNA, 22 nt, Artificial Sequence
  LRRK2 RNA guide
aaugccaaagucuaggaaacau

SEQ ID NO: 37958 - RNA, 22 nt, Artificial Sequence
  LRRK2 RNA guide
agauaugcuuuacaacuggcac

SEQ ID NO: 37959 - RNA, 22 nt, Artificial Sequence
  LRRK2 RNA guide
agcauaucuauauguuuccuag

SEQ ID NO: 37960 - RNA, 22 nt, Artificial Sequence
  LRRK2 RNA guide
agugaagugccaguuguaaagc

SEQ ID NO: 37961 - RNA, 22 nt, Artificial Sequence
  LRRK2 RNA guide
agugccaguuguaaagcauauc

SEQ ID NO: 37962 - RNA, 22 nt, Artificial Sequence
  LRRK2 RNA guide
auagauaugcuuuacaacuggc

SEQ ID NO: 37963 - RNA, 22 nt, Artificial Sequence
  LRRK2 RNA guide
augccaaagucuaggaaacaua

SEQ ID NO: 37964 - RNA, 22 nt, Artificial Sequence
  LRRK2 RNA guide
caaagucuaggaaacauauaga

SEQ ID NO: 37965 - RNA, 22 nt, Artificial Sequence
  LRRK2 RNA guide
cauaucuauauguuuccuagac

SEQ ID NO: 37966 - RNA, 22 nt, Artificial Sequence
  LRRK2 RNA guide
ccaaagucuaggaaacauauag

SEQ ID NO: 37967 - RNA, 22 nt, Artificial Sequence
  LRRK2 RNA guide
ccaguuguaaagcauaucuaua

SEQ ID NO: 37968 - RNA, 22 nt, Artificial Sequence
  LRRK2 RNA guide
cuaggaaacauauagauaugcu

SEQ ID NO: 37969 - RNA, 22 nt, Artificial Sequence
  LRRK2 RNA guide
gaagugccaguuguaaagcaua

SEQ ID NO: 37970 - RNA, 22 nt, Artificial Sequence
  LRRK2 RNA guide
gcauaucuauauguuuccuaga

SEQ ID NO: 37971 - RNA, 22 nt, Artificial Sequence
  LRRK2 RNA guide
gccaaagucuaggaaacauaua

SEQ ID NO: 37972 - RNA, 22 nt, Artificial Sequence
  LRRK2 RNA guide
gccaguuguaaagcauaucuau

SEQ ID NO: 37973 - RNA, 22 nt, Artificial Sequence
  LRRK2 RNA guide
gucuaggaaacauauagauaug

SEQ ID NO: 37974 - RNA, 22 nt, Artificial Sequence
  LRRK2 RNA guide
gugaagugccaguuguaaagca

SEQ ID NO: 37975 - RNA, 22 nt, Artificial Sequence
  LRRK2 RNA guide
gugccaguuguaaagcauaucu

SEQ ID NO: 37976 - RNA, 22 nt, Artificial Sequence
  LRRK2 RNA guide
uaaugccaaagucuaggaaaca

SEQ ID NO: 37977 - RNA, 22 nt, Artificial Sequence
  LRRK2 RNA guide
uagauaugcuuuacaacuggca

SEQ ID NO: 37978 - RNA, 22 nt, Artificial Sequence
  LRRK2 RNA guide
uauagauaugcuuuacaacugg

SEQ ID NO: 37979 - RNA, 22 nt, Artificial Sequence
  LRRK2 RNA guide
ucuaggaaacauauagauaugc

SEQ ID NO: 37980 - RNA, 22 nt, Artificial Sequence
  LRRK2 RNA guide
ucuauauguuuccuagacuuug

SEQ ID NO: 37981 - RNA, 22 nt, Artificial Sequence
  LRRK2 RNA guide
ugaagugccaguuguaaagcau

SEQ ID NO: 37982 - RNA, 22 nt, Artificial Sequence
  LRRK2 RNA guide
ugccaaagucuaggaaacauau

SEQ ID NO: 37983 - RNA, 22 nt, Artificial Sequence
  LRRK2 RNA guide
ugccaguuguaaagcauaucua

SEQ ID NO: 37984 - RNA, 20 nt, Artificial Sequence
  LRRK2 RNA guide
aaauaugcuuuacaacuggc

SEQ ID NO: 37985 - RNA, 20 nt, Artificial Sequence
  LRRK2 RNA guide
ccaguuguaaagcauauuua

SEQ ID NO: 37986 - RNA, 20 nt, Artificial Sequence
  LRRK2 RNA guide
gccaguuguaaagcauauuu

SEQ ID NO: 37987 - RNA, 20 nt, Artificial Sequence
  LRRK2 RNA guide
uaaauaugcuuuacaacugg

SEQ ID NO: 37988 - RNA, 20 nt, Artificial Sequence
  LRRK2 RNA guide
ugccaguuguaaagcauauu

SEQ ID NO: 37989 - RNA, 21 nt, Artificial Sequence
  LRRK2 RNA guide
aaauaugcuuuacaacuggca

SEQ ID NO: 37990 - RNA, 21 nt, Artificial Sequence
  LRRK2 RNA guide
gccaguuguaaagcauauuua

SEQ ID NO: 37991 - RNA, 21 nt, Artificial Sequence
  LRRK2 RNA guide
gugccaguuguaaagcauauu

SEQ ID NO: 37992 - RNA, 21 nt, Artificial Sequence
  LRRK2 RNA guide
uaaauaugcuuuacaacuggc

SEQ ID NO: 37993 - RNA, 21 nt, Artificial Sequence
  LRRK2 RNA guide
ugccaguuguaaagcauauuu

SEQ ID NO: 37994 - RNA, 22 nt, Artificial Sequence
  LRRK2 RNA guide
aaauaugcuuuacaacuggcac

SEQ ID NO: 37995 - RNA, 22 nt, Artificial Sequence
  LRRK2 RNA guide
agugccaguuguaaagcauauu

SEQ ID NO: 37996 - RNA, 22 nt, Artificial Sequence
  LRRK2 RNA guide
auaaauaugcuuuacaacuggc

SEQ ID NO: 37997 - RNA, 22 nt, Artificial Sequence
  LRRK2 RNA guide
ccaaagucuaggaaacauauaa

SEQ ID NO: 37998 - RNA, 22 nt, Artificial Sequence
  LRRK2 RNA guide
gccaguuguaaagcauauuuau

SEQ ID NO: 37999 - RNA, 22 nt, Artificial Sequence
  LRRK2 RNA guide
gugccaguuguaaagcauauuu

SEQ ID NO: 38000 - RNA, 22 nt, Artificial Sequence
  LRRK2 RNA guide
uaaauaugcuuuacaacuggca

SEQ ID NO: 38001 - RNA, 22 nt, Artificial Sequence
  LRRK2 RNA guide
ugccaguuguaaagcauauuua

SEQ ID NO: 38002 - RNA, 20 nt, Artificial Sequence
  LRRK2 RNA guide
auucauuuguauaugauggc

SEQ ID NO: 38003 - RNA, 20 nt, Artificial Sequence
  LRRK2 RNA guide
cauucauuuguauaugaugg

SEQ ID NO: 38004 - RNA, 20 nt, Artificial Sequence
  LRRK2 RNA guide
cauuuguauaugauggcaua

SEQ ID NO: 38005 - RNA, 20 nt, Artificial Sequence
  LRRK2 RNA guide
cuauauaugccaucauauac

SEQ ID NO: 38006 - RNA, 20 nt, Artificial Sequence
  LRRK2 RNA guide
guauaugauggcauauauag

SEQ ID NO: 38007 - RNA, 20 nt, Artificial Sequence
  LRRK2 RNA guide
ucauuuguauaugauggcau

SEQ ID NO: 38008 - RNA, 20 nt, Artificial Sequence
  LRRK2 RNA guide
uucauuuguauaugauggca

SEQ ID NO: 38009 - RNA, 21 nt, Artificial Sequence
  LRRK2 RNA guide
cauucauuuguauaugauggc

SEQ ID NO: 38010 - RNA, 21 nt, Artificial Sequence
  LRRK2 RNA guide
ccauucauuuguauaugaugg

SEQ ID NO: 38011 - RNA, 22 nt, Artificial Sequence
  LRRK2 RNA guide
cauucauuuguauaugauggca

SEQ ID NO: 38012 - RNA, 22 nt, Artificial Sequence
  LRRK2 RNA guide
ccauucauuuguauaugauggc

SEQ ID NO: 38013 - RNA, 22 nt, Artificial Sequence
  LRRK2 RNA guide
uccauucauuuguauaugaugg

SEQ ID NO: 38014 - RNA, 20 nt, Artificial Sequence
  LRRK2 RNA guide
aauuucuauguaugccauca

SEQ ID NO: 38015 - RNA, 20 nt, Artificial Sequence
  LRRK2 RNA guide
auaugauggcauacauagaa

SEQ ID NO: 38016 - RNA, 20 nt, Artificial Sequence
  LRRK2 RNA guide
augauggcauacauagaaau

SEQ ID NO: 38017 - RNA, 20 nt, Artificial Sequence
  LRRK2 RNA guide
auguaugccaucauauacaa

SEQ ID NO: 38018 - RNA, 20 nt, Artificial Sequence
  LRRK2 RNA guide
auuucuauguaugccaucau

SEQ ID NO: 38019 - RNA, 20 nt, Artificial Sequence
  LRRK2 RNA guide
auuuguauaugauggcauac

SEQ ID NO: 38020 - RNA, 20 nt, Artificial Sequence
  LRRK2 RNA guide
cuauguaugccaucauauac

SEQ ID NO: 38021 - RNA, 20 nt, Artificial Sequence
  LRRK2 RNA guide
gauggcauacauagaaauua

SEQ ID NO: 38022 - RNA, 20 nt, Artificial Sequence
  LRRK2 RNA guide
guauaugauggcauacauag

SEQ ID NO: 38023 - RNA, 20 nt, Artificial Sequence
  LRRK2 RNA guide
uaauuucuauguaugccauc

SEQ ID NO: 38024 - RNA, 20 nt, Artificial Sequence
  LRRK2 RNA guide
uauaugauggcauacauaga

SEQ ID NO: 38025 - RNA, 20 nt, Artificial Sequence
  LRRK2 RNA guide
uaugauggcauacauagaaa

SEQ ID NO: 38026 - RNA, 20 nt, Artificial Sequence
  LRRK2 RNA guide
uauguaugccaucauauaca

SEQ ID NO: 38027 - RNA, 20 nt, Artificial Sequence
  LRRK2 RNA guide
ucuauguaugccaucauaua

SEQ ID NO: 38028 - RNA, 20 nt, Artificial Sequence
  LRRK2 RNA guide
ugauggcauacauagaaauu

SEQ ID NO: 38029 - RNA, 20 nt, Artificial Sequence
  LRRK2 RNA guide
uguauaugauggcauacaua

SEQ ID NO: 38030 - RNA, 20 nt, Artificial Sequence
  LRRK2 RNA guide
uguaugccaucauauacaaa

SEQ ID NO: 38031 - RNA, 20 nt, Artificial Sequence
  LRRK2 RNA guide
uucuauguaugccaucauau

SEQ ID NO: 38032 - RNA, 20 nt, Artificial Sequence
  LRRK2 RNA guide
uuguauaugauggcauacau

SEQ ID NO: 38033 - RNA, 20 nt, Artificial Sequence
  LRRK2 RNA guide
uuucuauguaugccaucaua

SEQ ID NO: 38034 - RNA, 20 nt, Artificial Sequence
  LRRK2 RNA guide
uuuguauaugauggcauaca

SEQ ID NO: 38035 - RNA, 21 nt, Artificial Sequence
  LRRK2 RNA guide
cauuuguauaugauggcauac

SEQ ID NO: 38036 - RNA, 21 nt, Artificial Sequence
  LRRK2 RNA guide
cuauguaugccaucauauaca

SEQ ID NO: 38037 - RNA, 21 nt, Artificial Sequence
  LRRK2 RNA guide
guauaugauggcauacauaga

SEQ ID NO: 38038 - RNA, 21 nt, Artificial Sequence
  LRRK2 RNA guide
ucuauguaugccaucauauac

SEQ ID NO: 38039 - RNA, 21 nt, Artificial Sequence
  LRRK2 RNA guide
uguauaugauggcauacauag

SEQ ID NO: 38040 - RNA, 22 nt, Artificial Sequence
  LRRK2 RNA guide
cauuuguauaugauggcauaca

SEQ ID NO: 38041 - RNA, 22 nt, Artificial Sequence
  LRRK2 RNA guide
cuauguaugccaucauauacaa

SEQ ID NO: 38042 - RNA, 22 nt, Artificial Sequence
  LRRK2 RNA guide
guauaugauggcauacauagaa

SEQ ID NO: 38043 - RNA, 22 nt, Artificial Sequence
  LRRK2 RNA guide
ucauuuguauaugauggcauac

SEQ ID NO: 38044 - RNA, 22 nt, Artificial Sequence
  LRRK2 RNA guide
ucuauguaugccaucauauaca

SEQ ID NO: 38045 - RNA, 22 nt, Artificial Sequence
  LRRK2 RNA guide
uguauaugauggcauacauaga

SEQ ID NO: 38046 - RNA, 22 nt, Artificial Sequence
  LRRK2 RNA guide
uguaugccaucauauacaaaug

SEQ ID NO: 38047 - RNA, 22 nt, Artificial Sequence
  LRRK2 RNA guide
uucuauguaugccaucauauac

SEQ ID NO: 38048 - RNA, 22 nt, Artificial Sequence
  LRRK2 RNA guide
uuguauaugauggcauacauag

SEQ ID NO: 38049 - RNA, 20 nt, Artificial Sequence
  LRRK2 RNA guide
aaagcagcugaaggcugaaa

SEQ ID NO: 38050 - RNA, 20 nt, Artificial Sequence
  LRRK2 RNA guide
aaaggcuugguugcuuucag

SEQ ID NO: 38051 - RNA, 20 nt, Artificial Sequence
  LRRK2 RNA guide
aaauggacaaagcagcugaa

SEQ ID NO: 38052 - RNA, 20 nt, Artificial Sequence
  LRRK2 RNA guide
aagcagcugaaggcugaaag

SEQ ID NO: 38053 - RNA, 20 nt, Artificial Sequence
  LRRK2 RNA guide
aaggcuugguugcuuucagc

SEQ ID NO: 38054 - RNA, 20 nt, Artificial Sequence
  LRRK2 RNA guide
aauggacaaagcagcugaag

SEQ ID NO: 38055 - RNA, 20 nt, Artificial Sequence
  LRRK2 RNA guide
acaaagcagcugaaggcuga

SEQ ID NO: 38056 - RNA, 20 nt, Artificial Sequence
  LRRK2 RNA guide
agcagcugaaggcugaaagc

SEQ ID NO: 38057 - RNA, 20 nt, Artificial Sequence
  LRRK2 RNA guide
agccuucagcugcuuugucc

SEQ ID NO: 38058 - RNA, 20 nt, Artificial Sequence
  LRRK2 RNA guide
agcugaaggcugaaagcaac

SEQ ID NO: 38059 - RNA, 20 nt, Artificial Sequence
  LRRK2 RNA guide
aggcuugguugcuuucagcc

SEQ ID NO: 38060 - RNA, 20 nt, Artificial Sequence
  LRRK2 RNA guide
auaaauggacaaagcagcug

SEQ ID NO: 38061 - RNA, 20 nt, Artificial Sequence
  LRRK2 RNA guide
auggacaaagcagcugaagg

SEQ ID NO: 38062 - RNA, 20 nt, Artificial Sequence
  LRRK2 RNA guide
caaagcagcugaaggcugaa

SEQ ID NO: 38063 - RNA, 20 nt, Artificial Sequence
  LRRK2 RNA guide
cagccuucagcugcuuuguc

SEQ ID NO: 38064 - RNA, 20 nt, Artificial Sequence
  LRRK2 RNA guide
cagcugaaggcugaaagcaa

SEQ ID NO: 38065 - RNA, 20 nt, Artificial Sequence
  LRRK2 RNA guide
ccuucagcugcuuuguccau

SEQ ID NO: 38066 - RNA, 20 nt, Artificial Sequence
  LRRK2 RNA guide
cugaaggcugaaagcaacca

SEQ ID NO: 38067 - RNA, 20 nt, Artificial Sequence
  LRRK2 RNA guide
cugggauaaauggacaaagc

SEQ ID NO: 38068 - RNA, 20 nt, Artificial Sequence
  LRRK2 RNA guide
cuucagcugcuuuguccauu

SEQ ID NO: 38069 - RNA, 20 nt, Artificial Sequence
  LRRK2 RNA guide
cuugguugcuuucagccuuc

SEQ ID NO: 38070 - RNA, 20 nt, Artificial Sequence
  LRRK2 RNA guide
cuuucagccuucagcugcuu

SEQ ID NO: 38071 - RNA, 20 nt, Artificial Sequence
  LRRK2 RNA guide
gacaaagcagcugaaggcug

SEQ ID NO: 38072 - RNA, 20 nt, Artificial Sequence
  LRRK2 RNA guide
gauaaauggacaaagcagcu

SEQ ID NO: 38073 - RNA, 20 nt, Artificial Sequence
  LRRK2 RNA guide
gcagcugaaggcugaaagca

SEQ ID NO: 38074 - RNA, 20 nt, Artificial Sequence
  LRRK2 RNA guide
gccuucagcugcuuugucca

SEQ ID NO: 38075 - RNA, 20 nt, Artificial Sequence
  LRRK2 RNA guide
gcugaaggcugaaagcaacc

SEQ ID NO: 38076 - RNA, 20 nt, Artificial Sequence
  LRRK2 RNA guide
gcuugguugcuuucagccuu

SEQ ID NO: 38077 - RNA, 20 nt, Artificial Sequence
  LRRK2 RNA guide
gcuuucagccuucagcugcu

SEQ ID NO: 38078 - RNA, 20 nt, Artificial Sequence
  LRRK2 RNA guide
ggacaaagcagcugaaggcu

SEQ ID NO: 38079 - RNA, 20 nt, Artificial Sequence
  LRRK2 RNA guide
ggauaaauggacaaagcagc

SEQ ID NO: 38080 - RNA, 20 nt, Artificial Sequence
  LRRK2 RNA guide
ggcuugguugcuuucagccu

SEQ ID NO: 38081 - RNA, 20 nt, Artificial Sequence
  LRRK2 RNA guide
gggauaaauggacaaagcag

SEQ ID NO: 38082 - RNA, 20 nt, Artificial Sequence
  LRRK2 RNA guide
gguugcuuucagccuucagc

SEQ ID NO: 38083 - RNA, 20 nt, Artificial Sequence
  LRRK2 RNA guide
guugcuuucagccuucagcu

SEQ ID NO: 38084 - RNA, 20 nt, Artificial Sequence
  LRRK2 RNA guide
uaaauggacaaagcagcuga

SEQ ID NO: 38085 - RNA, 20 nt, Artificial Sequence
  LRRK2 RNA guide
ucagccuucagcugcuuugu

SEQ ID NO: 38086 - RNA, 20 nt, Artificial Sequence
  LRRK2 RNA guide
ucagcugcuuuguccauuua

SEQ ID NO: 38087 - RNA, 20 nt, Artificial Sequence
  LRRK2 RNA guide
ugaaggcugaaagcaaccaa

SEQ ID NO: 38088 - RNA, 20 nt, Artificial Sequence
  LRRK2 RNA guide
ugcuuucagccuucagcugc

SEQ ID NO: 38089 - RNA, 20 nt, Artificial Sequence
  LRRK2 RNA guide
uggacaaagcagcugaaggc

SEQ ID NO: 38090 - RNA, 20 nt, Artificial Sequence
  LRRK2 RNA guide
ugggauaaauggacaaagca

SEQ ID NO: 38091 - RNA, 20 nt, Artificial Sequence
  LRRK2 RNA guide
ugguugcuuucagccuucag

SEQ ID NO: 38092 - RNA, 20 nt, Artificial Sequence
  LRRK2 RNA guide
uucagccuucagcugcuuug

SEQ ID NO: 38093 - RNA, 20 nt, Artificial Sequence
  LRRK2 RNA guide
uucagcugcuuuguccauuu

SEQ ID NO: 38094 - RNA, 20 nt, Artificial Sequence
  LRRK2 RNA guide
uugcuuucagccuucagcug

SEQ ID NO: 38095 - RNA, 20 nt, Artificial Sequence
  LRRK2 RNA guide
uugguugcuuucagccuuca

SEQ ID NO: 38096 - RNA, 20 nt, Artificial Sequence
  LRRK2 RNA guide
uuucagccuucagcugcuuu

SEQ ID NO: 38097 - RNA, 21 nt, Artificial Sequence
  LRRK2 RNA guide
aaaaggcuugguugcuuucag

SEQ ID NO: 38098 - RNA, 21 nt, Artificial Sequence
  LRRK2 RNA guide
aaagcagcugaaggcugaaag

SEQ ID NO: 38099 - RNA, 21 nt, Artificial Sequence
  LRRK2 RNA guide
aaaggcuugguugcuuucagc

SEQ ID NO: 38100 - RNA, 21 nt, Artificial Sequence
  LRRK2 RNA guide
aaauggacaaagcagcugaag

SEQ ID NO: 38101 - RNA, 21 nt, Artificial Sequence
  LRRK2 RNA guide
aagcagcugaaggcugaaagc

SEQ ID NO: 38102 - RNA, 21 nt, Artificial Sequence
  LRRK2 RNA guide
aaggcuugguugcuuucagcc

SEQ ID NO: 38103 - RNA, 21 nt, Artificial Sequence
  LRRK2 RNA guide
aauggacaaagcagcugaagg

SEQ ID NO: 38104 - RNA, 21 nt, Artificial Sequence
  LRRK2 RNA guide
acaaagcagcugaaggcugaa

SEQ ID NO: 38105 - RNA, 21 nt, Artificial Sequence
  LRRK2 RNA guide
acugggauaaauggacaaagc

SEQ ID NO: 38106 - RNA, 21 nt, Artificial Sequence
  LRRK2 RNA guide
agcagcugaaggcugaaagca

SEQ ID NO: 38107 - RNA, 21 nt, Artificial Sequence
  LRRK2 RNA guide
agccuucagcugcuuugucca

SEQ ID NO: 38108 - RNA, 21 nt, Artificial Sequence
  LRRK2 RNA guide
agcugaaggcugaaagcaacc

SEQ ID NO: 38109 - RNA, 21 nt, Artificial Sequence
  LRRK2 RNA guide
aggcuugguugcuuucagccu

SEQ ID NO: 38110 - RNA, 21 nt, Artificial Sequence
  LRRK2 RNA guide
auaaauggacaaagcagcuga

SEQ ID NO: 38111 - RNA, 21 nt, Artificial Sequence
  LRRK2 RNA guide
auggacaaagcagcugaaggc

SEQ ID NO: 38112 - RNA, 21 nt, Artificial Sequence
  LRRK2 RNA guide
caaagcagcugaaggcugaaa

SEQ ID NO: 38113 - RNA, 21 nt, Artificial Sequence
  LRRK2 RNA guide
cagccuucagcugcuuugucc

SEQ ID NO: 38114 - RNA, 21 nt, Artificial Sequence
  LRRK2 RNA guide
cagcugaaggcugaaagcaac

SEQ ID NO: 38115 - RNA, 21 nt, Artificial Sequence
  LRRK2 RNA guide
ccuucagcugcuuuguccauu

SEQ ID NO: 38116 - RNA, 21 nt, Artificial Sequence
  LRRK2 RNA guide
cugaaggcugaaagcaaccaa

SEQ ID NO: 38117 - RNA, 21 nt, Artificial Sequence
  LRRK2 RNA guide
cugggauaaauggacaaagca

SEQ ID NO: 38118 - RNA, 21 nt, Artificial Sequence
  LRRK2 RNA guide
cuucagcugcuuuguccauuu

SEQ ID NO: 38119 - RNA, 21 nt, Artificial Sequence
  LRRK2 RNA guide
cuugguugcuuucagccuuca

SEQ ID NO: 38120 - RNA, 21 nt, Artificial Sequence
  LRRK2 RNA guide
cuuucagccuucagcugcuuu

SEQ ID NO: 38121 - RNA, 21 nt, Artificial Sequence
  LRRK2 RNA guide
gacaaagcagcugaaggcuga

SEQ ID NO: 38122 - RNA, 21 nt, Artificial Sequence
  LRRK2 RNA guide
gauaaauggacaaagcagcug

SEQ ID NO: 38123 - RNA, 21 nt, Artificial Sequence
  LRRK2 RNA guide
gcagcugaaggcugaaagcaa

SEQ ID NO: 38124 - RNA, 21 nt, Artificial Sequence
  LRRK2 RNA guide
gccuucagcugcuuuguccau

SEQ ID NO: 38125 - RNA, 21 nt, Artificial Sequence
  LRRK2 RNA guide
gcugaaggcugaaagcaacca

SEQ ID NO: 38126 - RNA, 21 nt, Artificial Sequence
  LRRK2 RNA guide
gcuugguugcuuucagccuuc

SEQ ID NO: 38127 - RNA, 21 nt, Artificial Sequence
  LRRK2 RNA guide
gcuuucagccuucagcugcuu

SEQ ID NO: 38128 - RNA, 21 nt, Artificial Sequence
  LRRK2 RNA guide
ggacaaagcagcugaaggcug

SEQ ID NO: 38129 - RNA, 21 nt, Artificial Sequence
  LRRK2 RNA guide
ggauaaauggacaaagcagcu

SEQ ID NO: 38130 - RNA, 21 nt, Artificial Sequence
  LRRK2 RNA guide
ggcuugguugcuuucagccuu

SEQ ID NO: 38131 - RNA, 21 nt, Artificial Sequence
  LRRK2 RNA guide
gggauaaauggacaaagcagc

SEQ ID NO: 38132 - RNA, 21 nt, Artificial Sequence
  LRRK2 RNA guide
gguugcuuucagccuucagcu

SEQ ID NO: 38133 - RNA, 21 nt, Artificial Sequence
  LRRK2 RNA guide
guugcuuucagccuucagcug

SEQ ID NO: 38134 - RNA, 21 nt, Artificial Sequence
  LRRK2 RNA guide
uaaauggacaaagcagcugaa

SEQ ID NO: 38135 - RNA, 21 nt, Artificial Sequence
  LRRK2 RNA guide
ucagccuucagcugcuuuguc

SEQ ID NO: 38136 - RNA, 21 nt, Artificial Sequence
  LRRK2 RNA guide
ucagcugcuuuguccauuuau

SEQ ID NO: 38137 - RNA, 21 nt, Artificial Sequence
  LRRK2 RNA guide
ugaaggcugaaagcaaccaag

SEQ ID NO: 38138 - RNA, 21 nt, Artificial Sequence
  LRRK2 RNA guide
ugcuuucagccuucagcugcu

SEQ ID NO: 38139 - RNA, 21 nt, Artificial Sequence
  LRRK2 RNA guide
uggacaaagcagcugaaggcu

SEQ ID NO: 38140 - RNA, 21 nt, Artificial Sequence
  LRRK2 RNA guide
ugggauaaauggacaaagcag

SEQ ID NO: 38141 - RNA, 21 nt, Artificial Sequence
  LRRK2 RNA guide
ugguugcuuucagccuucagc

SEQ ID NO: 38142 - RNA, 21 nt, Artificial Sequence
  LRRK2 RNA guide
uucagccuucagcugcuuugu

SEQ ID NO: 38143 - RNA, 21 nt, Artificial Sequence
  LRRK2 RNA guide
uucagcugcuuuguccauuua

SEQ ID NO: 38144 - RNA, 21 nt, Artificial Sequence
  LRRK2 RNA guide
uugcuuucagccuucagcugc

SEQ ID NO: 38145 - RNA, 21 nt, Artificial Sequence
  LRRK2 RNA guide
uugguugcuuucagccuucag

SEQ ID NO: 38146 - RNA, 21 nt, Artificial Sequence
  LRRK2 RNA guide
uuucagccuucagcugcuuug

SEQ ID NO: 38147 - RNA, 22 nt, Artificial Sequence
  LRRK2 RNA guide
aaaaggcuugguugcuuucagc

SEQ ID NO: 38148 - RNA, 22 nt, Artificial Sequence
  LRRK2 RNA guide
aaagcagcugaaggcugaaagc

SEQ ID NO: 38149 - RNA, 22 nt, Artificial Sequence
  LRRK2 RNA guide
aaaggcuugguugcuuucagcc

SEQ ID NO: 38150 - RNA, 22 nt, Artificial Sequence
  LRRK2 RNA guide
aaauggacaaagcagcugaagg

SEQ ID NO: 38151 - RNA, 22 nt, Artificial Sequence
  LRRK2 RNA guide
aagcagcugaaggcugaaagca

SEQ ID NO: 38152 - RNA, 22 nt, Artificial Sequence
  LRRK2 RNA guide
aaggcuugguugcuuucagccu

SEQ ID NO: 38153 - RNA, 22 nt, Artificial Sequence
  LRRK2 RNA guide
aauggacaaagcagcugaaggc

SEQ ID NO: 38154 - RNA, 22 nt, Artificial Sequence
  LRRK2 RNA guide
acaaagcagcugaaggcugaaa

SEQ ID NO: 38155 - RNA, 22 nt, Artificial Sequence
  LRRK2 RNA guide
acugggauaaauggacaaagca

SEQ ID NO: 38156 - RNA, 22 nt, Artificial Sequence
  LRRK2 RNA guide
agcagcugaaggcugaaagcaa

SEQ ID NO: 38157 - RNA, 22 nt, Artificial Sequence
  LRRK2 RNA guide
agccuucagcugcuuuguccau

SEQ ID NO: 38158 - RNA, 22 nt, Artificial Sequence
  LRRK2 RNA guide
agcugaaggcugaaagcaacca

SEQ ID NO: 38159 - RNA, 22 nt, Artificial Sequence
  LRRK2 RNA guide
aggcuugguugcuuucagccuu

SEQ ID NO: 38160 - RNA, 22 nt, Artificial Sequence
  LRRK2 RNA guide
auaaauggacaaagcagcugaa

SEQ ID NO: 38161 - RNA, 22 nt, Artificial Sequence
  LRRK2 RNA guide
auggacaaagcagcugaaggcu

SEQ ID NO: 38162 - RNA, 22 nt, Artificial Sequence
  LRRK2 RNA guide
caaagcagcugaaggcugaaag

SEQ ID NO: 38163 - RNA, 22 nt, Artificial Sequence
  LRRK2 RNA guide
cacugggauaaauggacaaagc

SEQ ID NO: 38164 - RNA, 22 nt, Artificial Sequence
  LRRK2 RNA guide
cagccuucagcugcuuugucca

SEQ ID NO: 38165 - RNA, 22 nt, Artificial Sequence
  LRRK2 RNA guide
cagcugaaggcugaaagcaacc

SEQ ID NO: 38166 - RNA, 22 nt, Artificial Sequence
  LRRK2 RNA guide
ccuucagcugcuuuguccauuu

SEQ ID NO: 38167 - RNA, 22 nt, Artificial Sequence
  LRRK2 RNA guide
cugaaggcugaaagcaaccaag

SEQ ID NO: 38168 - RNA, 22 nt, Artificial Sequence
  LRRK2 RNA guide
cugggauaaauggacaaagcag

SEQ ID NO: 38169 - RNA, 22 nt, Artificial Sequence
  LRRK2 RNA guide
cuucagcugcuuuguccauuua

SEQ ID NO: 38170 - RNA, 22 nt, Artificial Sequence
  LRRK2 RNA guide
cuugguugcuuucagccuucag

SEQ ID NO: 38171 - RNA, 22 nt, Artificial Sequence
  LRRK2 RNA guide
cuuucagccuucagcugcuuug

SEQ ID NO: 38172 - RNA, 22 nt, Artificial Sequence
  LRRK2 RNA guide
gacaaagcagcugaaggcugaa

SEQ ID NO: 38173 - RNA, 22 nt, Artificial Sequence
  LRRK2 RNA guide
gauaaauggacaaagcagcuga

SEQ ID NO: 38174 - RNA, 22 nt, Artificial Sequence
  LRRK2 RNA guide
gcagcugaaggcugaaagcaac

SEQ ID NO: 38175 - RNA, 22 nt, Artificial Sequence
  LRRK2 RNA guide
gccuucagcugcuuuguccauu

SEQ ID NO: 38176 - RNA, 22 nt, Artificial Sequence
  LRRK2 RNA guide
gcugaaggcugaaagcaaccaa

SEQ ID NO: 38177 - RNA, 22 nt, Artificial Sequence
  LRRK2 RNA guide
gcuugguugcuuucagccuuca

SEQ ID NO: 38178 - RNA, 22 nt, Artificial Sequence
  LRRK2 RNA guide
gcuuucagccuucagcugcuuu

SEQ ID NO: 38179 - RNA, 22 nt, Artificial Sequence
  LRRK2 RNA guide
ggacaaagcagcugaaggcuga

SEQ ID NO: 38180 - RNA, 22 nt, Artificial Sequence
  LRRK2 RNA guide
ggauaaauggacaaagcagcug

SEQ ID NO: 38181 - RNA, 22 nt, Artificial Sequence
  LRRK2 RNA guide
ggcuugguugcuuucagccuuc

SEQ ID NO: 38182 - RNA, 22 nt, Artificial Sequence
  LRRK2 RNA guide
gggauaaauggacaaagcagcu

SEQ ID NO: 38183 - RNA, 22 nt, Artificial Sequence
  LRRK2 RNA guide
gguugcuuucagccuucagcug

SEQ ID NO: 38184 - RNA, 22 nt, Artificial Sequence
  LRRK2 RNA guide
guugcuuucagccuucagcugc

SEQ ID NO: 38185 - RNA, 22 nt, Artificial Sequence
  LRRK2 RNA guide
uaaaaggcuugguugcuuucag

SEQ ID NO: 38186 - RNA, 22 nt, Artificial Sequence
  LRRK2 RNA guide
uaaauggacaaagcagcugaag

SEQ ID NO: 38187 - RNA, 22 nt, Artificial Sequence
  LRRK2 RNA guide
ucagccuucagcugcuuugucc

SEQ ID NO: 38188 - RNA, 22 nt, Artificial Sequence
  LRRK2 RNA guide
ucagcugcuuuguccauuuauc

SEQ ID NO: 38189 - RNA, 22 nt, Artificial Sequence
  LRRK2 RNA guide
ugaaggcugaaagcaaccaagc

SEQ ID NO: 38190 - RNA, 22 nt, Artificial Sequence
  LRRK2 RNA guide
ugcuuucagccuucagcugcuu

SEQ ID NO: 38191 - RNA, 22 nt, Artificial Sequence
  LRRK2 RNA guide
uggacaaagcagcugaaggcug

SEQ ID NO: 38192 - RNA, 22 nt, Artificial Sequence
  LRRK2 RNA guide
ugggauaaauggacaaagcagc

SEQ ID NO: 38193 - RNA, 22 nt, Artificial Sequence
  LRRK2 RNA guide
ugguugcuuucagccuucagcu

SEQ ID NO: 38194 - RNA, 22 nt, Artificial Sequence
  LRRK2 RNA guide
uucagccuucagcugcuuuguc

SEQ ID NO: 38195 - RNA, 22 nt, Artificial Sequence
  LRRK2 RNA guide
uucagcugcuuuguccauuuau

SEQ ID NO: 38196 - RNA, 22 nt, Artificial Sequence
  LRRK2 RNA guide
uugcuuucagccuucagcugcu

SEQ ID NO: 38197 - RNA, 22 nt, Artificial Sequence
  LRRK2 RNA guide
uugguugcuuucagccuucagc

SEQ ID NO: 38198 - RNA, 22 nt, Artificial Sequence
  LRRK2 RNA guide
uuucagccuucagcugcuuugu

SEQ ID NO: 38199 - RNA, 20 nt, Artificial Sequence
  LRRK2 RNA guide
aaagcagcuaaaggcugaaa

SEQ ID NO: 38200 - RNA, 20 nt, Artificial Sequence
  LRRK2 RNA guide
aaauggacaaagcagcuaaa

SEQ ID NO: 38201 - RNA, 20 nt, Artificial Sequence
  LRRK2 RNA guide
aagcagcuaaaggcugaaag

SEQ ID NO: 38202 - RNA, 20 nt, Artificial Sequence
  LRRK2 RNA guide
aauggacaaagcagcuaaag

SEQ ID NO: 38203 - RNA, 20 nt, Artificial Sequence
  LRRK2 RNA guide
acaaagcagcuaaaggcuga

SEQ ID NO: 38204 - RNA, 20 nt, Artificial Sequence
  LRRK2 RNA guide
agcagcuaaaggcugaaagc

SEQ ID NO: 38205 - RNA, 20 nt, Artificial Sequence
  LRRK2 RNA guide
agccuuuagcugcuuugucc

SEQ ID NO: 38206 - RNA, 20 nt, Artificial Sequence
  LRRK2 RNA guide
agcuaaaggcugaaagcaac

SEQ ID NO: 38207 - RNA, 20 nt, Artificial Sequence
  LRRK2 RNA guide
auaaauggacaaagcagcua

SEQ ID NO: 38208 - RNA, 20 nt, Artificial Sequence
  LRRK2 RNA guide
auggacaaagcagcuaaagg

SEQ ID NO: 38209 - RNA, 20 nt, Artificial Sequence
  LRRK2 RNA guide
caaagcagcuaaaggcugaa

SEQ ID NO: 38210 - RNA, 20 nt, Artificial Sequence
  LRRK2 RNA guide
cagccuuuagcugcuuuguc

SEQ ID NO: 38211 - RNA, 20 nt, Artificial Sequence
  LRRK2 RNA guide
cagcuaaaggcugaaagcaa

SEQ ID NO: 38212 - RNA, 20 nt, Artificial Sequence
  LRRK2 RNA guide
ccuuuagcugcuuuguccau

SEQ ID NO: 38213 - RNA, 20 nt, Artificial Sequence
  LRRK2 RNA guide
cuaaaggcugaaagcaacca

SEQ ID NO: 38214 - RNA, 20 nt, Artificial Sequence
  LRRK2 RNA guide
cuugguugcuuucagccuuu

SEQ ID NO: 38215 - RNA, 20 nt, Artificial Sequence
  LRRK2 RNA guide
cuuuagcugcuuuguccauu

SEQ ID NO: 38216 - RNA, 20 nt, Artificial Sequence
  LRRK2 RNA guide
cuuucagccuuuagcugcuu

SEQ ID NO: 38217 - RNA, 20 nt, Artificial Sequence
  LRRK2 RNA guide
gacaaagcagcuaaaggcug

SEQ ID NO: 38218 - RNA, 20 nt, Artificial Sequence
  LRRK2 RNA guide
gcagcuaaaggcugaaagca

SEQ ID NO: 38219 - RNA, 20 nt, Artificial Sequence
  LRRK2 RNA guide
gccuuuagcugcuuugucca

SEQ ID NO: 38220 - RNA, 20 nt, Artificial Sequence
  LRRK2 RNA guide
gcuaaaggcugaaagcaacc

SEQ ID NO: 38221 - RNA, 20 nt, Artificial Sequence
  LRRK2 RNA guide
gcuuucagccuuuagcugcu

SEQ ID NO: 38222 - RNA, 20 nt, Artificial Sequence
  LRRK2 RNA guide
ggacaaagcagcuaaaggcu

SEQ ID NO: 38223 - RNA, 20 nt, Artificial Sequence
  LRRK2 RNA guide
gguugcuuucagccuuuagc

SEQ ID NO: 38224 - RNA, 20 nt, Artificial Sequence
  LRRK2 RNA guide
guugcuuucagccuuuagcu

SEQ ID NO: 38225 - RNA, 20 nt, Artificial Sequence
  LRRK2 RNA guide
uaaaggcugaaagcaaccaa

SEQ ID NO: 38226 - RNA, 20 nt, Artificial Sequence
  LRRK2 RNA guide
uaaauggacaaagcagcuaa

SEQ ID NO: 38227 - RNA, 20 nt, Artificial Sequence
  LRRK2 RNA guide
ucagccuuuagcugcuuugu

SEQ ID NO: 38228 - RNA, 20 nt, Artificial Sequence
  LRRK2 RNA guide
ugcuuucagccuuuagcugc

SEQ ID NO: 38229 - RNA, 20 nt, Artificial Sequence
  LRRK2 RNA guide
uggacaaagcagcuaaaggc

SEQ ID NO: 38230 - RNA, 20 nt, Artificial Sequence
  LRRK2 RNA guide
ugguugcuuucagccuuuag

SEQ ID NO: 38231 - RNA, 20 nt, Artificial Sequence
  LRRK2 RNA guide
uuagcugcuuuguccauuua

SEQ ID NO: 38232 - RNA, 20 nt, Artificial Sequence
  LRRK2 RNA guide
uucagccuuuagcugcuuug

SEQ ID NO: 38233 - RNA, 20 nt, Artificial Sequence
  LRRK2 RNA guide
uugcuuucagccuuuagcug

SEQ ID NO: 38234 - RNA, 20 nt, Artificial Sequence
  LRRK2 RNA guide
uugguugcuuucagccuuua

SEQ ID NO: 38235 - RNA, 20 nt, Artificial Sequence
  LRRK2 RNA guide
uuuagcugcuuuguccauuu

SEQ ID NO: 38236 - RNA, 20 nt, Artificial Sequence
  LRRK2 RNA guide
uuucagccuuuagcugcuuu

SEQ ID NO: 38237 - RNA, 21 nt, Artificial Sequence
  LRRK2 RNA guide
aaagcagcuaaaggcugaaag

SEQ ID NO: 38238 - RNA, 21 nt, Artificial Sequence
  LRRK2 RNA guide
aaauggacaaagcagcuaaag

SEQ ID NO: 38239 - RNA, 21 nt, Artificial Sequence
  LRRK2 RNA guide
aagcagcuaaaggcugaaagc

SEQ ID NO: 38240 - RNA, 21 nt, Artificial Sequence
  LRRK2 RNA guide
aauggacaaagcagcuaaagg

SEQ ID NO: 38241 - RNA, 21 nt, Artificial Sequence
  LRRK2 RNA guide
acaaagcagcuaaaggcugaa

SEQ ID NO: 38242 - RNA, 21 nt, Artificial Sequence
  LRRK2 RNA guide
agcagcuaaaggcugaaagca

SEQ ID NO: 38243 - RNA, 21 nt, Artificial Sequence
  LRRK2 RNA guide
agccuuuagcugcuuugucca

SEQ ID NO: 38244 - RNA, 21 nt, Artificial Sequence
  LRRK2 RNA guide
agcuaaaggcugaaagcaacc

SEQ ID NO: 38245 - RNA, 21 nt, Artificial Sequence
  LRRK2 RNA guide
auaaauggacaaagcagcuaa

SEQ ID NO: 38246 - RNA, 21 nt, Artificial Sequence
  LRRK2 RNA guide
auggacaaagcagcuaaaggc

SEQ ID NO: 38247 - RNA, 21 nt, Artificial Sequence
  LRRK2 RNA guide
caaagcagcuaaaggcugaaa

SEQ ID NO: 38248 - RNA, 21 nt, Artificial Sequence
  LRRK2 RNA guide
cagccuuuagcugcuuugucc

SEQ ID NO: 38249 - RNA, 21 nt, Artificial Sequence
  LRRK2 RNA guide
cagcuaaaggcugaaagcaac

SEQ ID NO: 38250 - RNA, 21 nt, Artificial Sequence
  LRRK2 RNA guide
ccuuuagcugcuuuguccauu

SEQ ID NO: 38251 - RNA, 21 nt, Artificial Sequence
  LRRK2 RNA guide
cuaaaggcugaaagcaaccaa

SEQ ID NO: 38252 - RNA, 21 nt, Artificial Sequence
  LRRK2 RNA guide
cuugguugcuuucagccuuua

SEQ ID NO: 38253 - RNA, 21 nt, Artificial Sequence
  LRRK2 RNA guide
cuuuagcugcuuuguccauuu

SEQ ID NO: 38254 - RNA, 21 nt, Artificial Sequence
  LRRK2 RNA guide
cuuucagccuuuagcugcuuu

SEQ ID NO: 38255 - RNA, 21 nt, Artificial Sequence
  LRRK2 RNA guide
gacaaagcagcuaaaggcuga

SEQ ID NO: 38256 - RNA, 21 nt, Artificial Sequence
  LRRK2 RNA guide
gauaaauggacaaagcagcua

SEQ ID NO: 38257 - RNA, 21 nt, Artificial Sequence
  LRRK2 RNA guide
gcagcuaaaggcugaaagcaa

SEQ ID NO: 38258 - RNA, 21 nt, Artificial Sequence
  LRRK2 RNA guide
gccuuuagcugcuuuguccau

SEQ ID NO: 38259 - RNA, 21 nt, Artificial Sequence
  LRRK2 RNA guide
gcuaaaggcugaaagcaacca

SEQ ID NO: 38260 - RNA, 21 nt, Artificial Sequence
  LRRK2 RNA guide
gcuugguugcuuucagccuuu

SEQ ID NO: 38261 - RNA, 21 nt, Artificial Sequence
  LRRK2 RNA guide
gcuuucagccuuuagcugcuu

SEQ ID NO: 38262 - RNA, 21 nt, Artificial Sequence
  LRRK2 RNA guide
ggacaaagcagcuaaaggcug

SEQ ID NO: 38263 - RNA, 21 nt, Artificial Sequence
  LRRK2 RNA guide
gguugcuuucagccuuuagcu

SEQ ID NO: 38264 - RNA, 21 nt, Artificial Sequence
  LRRK2 RNA guide
guugcuuucagccuuuagcug

SEQ ID NO: 38265 - RNA, 21 nt, Artificial Sequence
  LRRK2 RNA guide
uaaaggcugaaagcaaccaag

SEQ ID NO: 38266 - RNA, 21 nt, Artificial Sequence
  LRRK2 RNA guide
uaaauggacaaagcagcuaaa

SEQ ID NO: 38267 - RNA, 21 nt, Artificial Sequence
  LRRK2 RNA guide
ucagccuuuagcugcuuuguc

SEQ ID NO: 38268 - RNA, 21 nt, Artificial Sequence
  LRRK2 RNA guide
ugcuuucagccuuuagcugcu

SEQ ID NO: 38269 - RNA, 21 nt, Artificial Sequence
  LRRK2 RNA guide
uggacaaagcagcuaaaggcu

SEQ ID NO: 38270 - RNA, 21 nt, Artificial Sequence
  LRRK2 RNA guide
ugguugcuuucagccuuuagc

SEQ ID NO: 38271 - RNA, 21 nt, Artificial Sequence
  LRRK2 RNA guide
uuagcugcuuuguccauuuau

SEQ ID NO: 38272 - RNA, 21 nt, Artificial Sequence
  LRRK2 RNA guide
uucagccuuuagcugcuuugu

SEQ ID NO: 38273 - RNA, 21 nt, Artificial Sequence
  LRRK2 RNA guide
uugcuuucagccuuuagcugc

SEQ ID NO: 38274 - RNA, 21 nt, Artificial Sequence
  LRRK2 RNA guide
uugguugcuuucagccuuuag

SEQ ID NO: 38275 - RNA, 21 nt, Artificial Sequence
  LRRK2 RNA guide
uuuagcugcuuuguccauuua

SEQ ID NO: 38276 - RNA, 21 nt, Artificial Sequence
  LRRK2 RNA guide
uuucagccuuuagcugcuuug

SEQ ID NO: 38277 - RNA, 22 nt, Artificial Sequence
  LRRK2 RNA guide
aaagcagcuaaaggcugaaagc

SEQ ID NO: 38278 - RNA, 22 nt, Artificial Sequence
  LRRK2 RNA guide
aaauggacaaagcagcuaaagg

SEQ ID NO: 38279 - RNA, 22 nt, Artificial Sequence
  LRRK2 RNA guide
aagcagcuaaaggcugaaagca

SEQ ID NO: 38280 - RNA, 22 nt, Artificial Sequence
  LRRK2 RNA guide
aauggacaaagcagcuaaaggc

SEQ ID NO: 38281 - RNA, 22 nt, Artificial Sequence
  LRRK2 RNA guide
acaaagcagcuaaaggcugaaa

SEQ ID NO: 38282 - RNA, 22 nt, Artificial Sequence
  LRRK2 RNA guide
agcagcuaaaggcugaaagcaa

SEQ ID NO: 38283 - RNA, 22 nt, Artificial Sequence
  LRRK2 RNA guide
agccuuuagcugcuuuguccau

SEQ ID NO: 38284 - RNA, 22 nt, Artificial Sequence
  LRRK2 RNA guide
agcuaaaggcugaaagcaacca

SEQ ID NO: 38285 - RNA, 22 nt, Artificial Sequence
  LRRK2 RNA guide
auaaauggacaaagcagcuaaa

SEQ ID NO: 38286 - RNA, 22 nt, Artificial Sequence
  LRRK2 RNA guide
auggacaaagcagcuaaaggcu

SEQ ID NO: 38287 - RNA, 22 nt, Artificial Sequence
  LRRK2 RNA guide
caaagcagcuaaaggcugaaag

SEQ ID NO: 38288 - RNA, 22 nt, Artificial Sequence
  LRRK2 RNA guide
cagccuuuagcugcuuugucca

SEQ ID NO: 38289 - RNA, 22 nt, Artificial Sequence
  LRRK2 RNA guide
cagcuaaaggcugaaagcaacc

SEQ ID NO: 38290 - RNA, 22 nt, Artificial Sequence
  LRRK2 RNA guide
ccuuuagcugcuuuguccauuu

SEQ ID NO: 38291 - RNA, 22 nt, Artificial Sequence
  LRRK2 RNA guide
cuaaaggcugaaagcaaccaag

SEQ ID NO: 38292 - RNA, 22 nt, Artificial Sequence
  LRRK2 RNA guide
cuugguugcuuucagccuuuag

SEQ ID NO: 38293 - RNA, 22 nt, Artificial Sequence
  LRRK2 RNA guide
cuuuagcugcuuuguccauuua

SEQ ID NO: 38294 - RNA, 22 nt, Artificial Sequence
  LRRK2 RNA guide
cuuucagccuuuagcugcuuug

SEQ ID NO: 38295 - RNA, 22 nt, Artificial Sequence
  LRRK2 RNA guide
gacaaagcagcuaaaggcugaa

SEQ ID NO: 38296 - RNA, 22 nt, Artificial Sequence
  LRRK2 RNA guide
gauaaauggacaaagcagcuaa

SEQ ID NO: 38297 - RNA, 22 nt, Artificial Sequence
  LRRK2 RNA guide
gcagcuaaaggcugaaagcaac

SEQ ID NO: 38298 - RNA, 22 nt, Artificial Sequence
  LRRK2 RNA guide
gccuuuagcugcuuuguccauu

SEQ ID NO: 38299 - RNA, 22 nt, Artificial Sequence
  LRRK2 RNA guide
gcuaaaggcugaaagcaaccaa

SEQ ID NO: 38300 - RNA, 22 nt, Artificial Sequence
  LRRK2 RNA guide
gcuugguugcuuucagccuuua

SEQ ID NO: 38301 - RNA, 22 nt, Artificial Sequence
  LRRK2 RNA guide
gcuuucagccuuuagcugcuuu

SEQ ID NO: 38302 - RNA, 22 nt, Artificial Sequence
  LRRK2 RNA guide
ggacaaagcagcuaaaggcuga

SEQ ID NO: 38303 - RNA, 22 nt, Artificial Sequence
  LRRK2 RNA guide
ggauaaauggacaaagcagcua

SEQ ID NO: 38304 - RNA, 22 nt, Artificial Sequence
  LRRK2 RNA guide
ggcuugguugcuuucagccuuu

SEQ ID NO: 38305 - RNA, 22 nt, Artificial Sequence
  LRRK2 RNA guide
gguugcuuucagccuuuagcug

SEQ ID NO: 38306 - RNA, 22 nt, Artificial Sequence
  LRRK2 RNA guide
guugcuuucagccuuuagcugc

SEQ ID NO: 38307 - RNA, 22 nt, Artificial Sequence
  LRRK2 RNA guide
uaaaggcugaaagcaaccaagc

SEQ ID NO: 38308 - RNA, 22 nt, Artificial Sequence
  LRRK2 RNA guide
uaaauggacaaagcagcuaaag

SEQ ID NO: 38309 - RNA, 22 nt, Artificial Sequence
  LRRK2 RNA guide
ucagccuuuagcugcuuugucc

SEQ ID NO: 38310 - RNA, 22 nt, Artificial Sequence
  LRRK2 RNA guide
ugcuuucagccuuuagcugcuu

SEQ ID NO: 38311 - RNA, 22 nt, Artificial Sequence
  LRRK2 RNA guide
uggacaaagcagcuaaaggcug

SEQ ID NO: 38312 - RNA, 22 nt, Artificial Sequence
  LRRK2 RNA guide
ugguugcuuucagccuuuagcu

SEQ ID NO: 38313 - RNA, 22 nt, Artificial Sequence
  LRRK2 RNA guide
uuagcugcuuuguccauuuauc

SEQ ID NO: 38314 - RNA, 22 nt, Artificial Sequence
  LRRK2 RNA guide
uucagccuuuagcugcuuuguc

SEQ ID NO: 38315 - RNA, 22 nt, Artificial Sequence
  LRRK2 RNA guide
uugcuuucagccuuuagcugcu

SEQ ID NO: 38316 - RNA, 22 nt, Artificial Sequence
  LRRK2 RNA guide
uugguugcuuucagccuuuagc

SEQ ID NO: 38317 - RNA, 22 nt, Artificial Sequence
  LRRK2 RNA guide
uuuagcugcuuuguccauuuau

SEQ ID NO: 38318 - RNA, 22 nt, Artificial Sequence
  LRRK2 RNA guide
uuucagccuuuagcugcuuugu

SEQ ID NO: 38319 - RNA, 20 nt, Artificial Sequence
  LRRK2 RNA guide
acacacugucagagccaaug

SEQ ID NO: 38320 - RNA, 20 nt, Artificial Sequence
  LRRK2 RNA guide
acacugucagagccaaugcg

SEQ ID NO: 38321 - RNA, 20 nt, Artificial Sequence
  LRRK2 RNA guide
acagugugucugccccuaca

SEQ ID NO: 38322 - RNA, 20 nt, Artificial Sequence
  LRRK2 RNA guide
acugucagagccaaugcgga

SEQ ID NO: 38323 - RNA, 20 nt, Artificial Sequence
  LRRK2 RNA guide
agacacacugucagagccaa

SEQ ID NO: 38324 - RNA, 20 nt, Artificial Sequence
  LRRK2 RNA guide
agauuccgcauuggcucuga

SEQ ID NO: 38325 - RNA, 20 nt, Artificial Sequence
  LRRK2 RNA guide
aggggcagacacacugucag

SEQ ID NO: 38326 - RNA, 20 nt, Artificial Sequence
  LRRK2 RNA guide
aguucuguaggggcagacac

SEQ ID NO: 38327 - RNA, 20 nt, Artificial Sequence
  LRRK2 RNA guide
auuccgcauuggcucugaca

SEQ ID NO: 38328 - RNA, 20 nt, Artificial Sequence
  LRRK2 RNA guide
auuggcucugacaguguguc

SEQ ID NO: 38329 - RNA, 20 nt, Artificial Sequence
  LRRK2 RNA guide
cacacugucagagccaaugc

SEQ ID NO: 38330 - RNA, 20 nt, Artificial Sequence
  LRRK2 RNA guide
cacugucagagccaaugcgg

SEQ ID NO: 38331 - RNA, 20 nt, Artificial Sequence
  LRRK2 RNA guide
cagacacacugucagagcca

SEQ ID NO: 38332 - RNA, 20 nt, Artificial Sequence
  LRRK2 RNA guide
cagugugucugccccuacag

SEQ ID NO: 38333 - RNA, 20 nt, Artificial Sequence
  LRRK2 RNA guide
cauuggcucugacagugugu

SEQ ID NO: 38334 - RNA, 20 nt, Artificial Sequence
  LRRK2 RNA guide
ccgcauuggcucugacagug

SEQ ID NO: 38335 - RNA, 20 nt, Artificial Sequence
  LRRK2 RNA guide
cgcauuggcucugacagugu

SEQ ID NO: 38336 - RNA, 20 nt, Artificial Sequence
  LRRK2 RNA guide
cucugacagugugucugccc

SEQ ID NO: 38337 - RNA, 20 nt, Artificial Sequence
  LRRK2 RNA guide
cugacagugugucugccccu

SEQ ID NO: 38338 - RNA, 20 nt, Artificial Sequence
  LRRK2 RNA guide
cuguaggggcagacacacug

SEQ ID NO: 38339 - RNA, 20 nt, Artificial Sequence
  LRRK2 RNA guide
cugucagagccaaugcggaa

SEQ ID NO: 38340 - RNA, 20 nt, Artificial Sequence
  LRRK2 RNA guide
gacacacugucagagccaau

SEQ ID NO: 38341 - RNA, 20 nt, Artificial Sequence
  LRRK2 RNA guide
gacagugugucugccccuac

SEQ ID NO: 38342 - RNA, 20 nt, Artificial Sequence
  LRRK2 RNA guide
gagauuccgcauuggcucug

SEQ ID NO: 38343 - RNA, 20 nt, Artificial Sequence
  LRRK2 RNA guide
gaguucuguaggggcagaca

SEQ ID NO: 38344 - RNA, 20 nt, Artificial Sequence
  LRRK2 RNA guide
gauuccgcauuggcucugac

SEQ ID NO: 38345 - RNA, 20 nt, Artificial Sequence
  LRRK2 RNA guide
gcagacacacugucagagcc

SEQ ID NO: 38346 - RNA, 20 nt, Artificial Sequence
  LRRK2 RNA guide
gcauuggcucugacagugug

SEQ ID NO: 38347 - RNA, 20 nt, Artificial Sequence
  LRRK2 RNA guide
gcucugacagugugucugcc

SEQ ID NO: 38348 - RNA, 20 nt, Artificial Sequence
  LRRK2 RNA guide
ggagauuccgcauuggcucu

SEQ ID NO: 38349 - RNA, 20 nt, Artificial Sequence
  LRRK2 RNA guide
ggcagacacacugucagagc

SEQ ID NO: 38350 - RNA, 20 nt, Artificial Sequence
  LRRK2 RNA guide
ggcucugacagugugucugc

SEQ ID NO: 38351 - RNA, 20 nt, Artificial Sequence
  LRRK2 RNA guide
gggcagacacacugucagag

SEQ ID NO: 38352 - RNA, 20 nt, Artificial Sequence
  LRRK2 RNA guide
ggggcagacacacugucaga

SEQ ID NO: 38353 - RNA, 20 nt, Artificial Sequence
  LRRK2 RNA guide
guaggggcagacacacuguc

SEQ ID NO: 38354 - RNA, 20 nt, Artificial Sequence
  LRRK2 RNA guide
guucuguaggggcagacaca

SEQ ID NO: 38355 - RNA, 20 nt, Artificial Sequence
  LRRK2 RNA guide
uaggggcagacacacuguca

SEQ ID NO: 38356 - RNA, 20 nt, Artificial Sequence
  LRRK2 RNA guide
uccgcauuggcucugacagu

SEQ ID NO: 38357 - RNA, 20 nt, Artificial Sequence
  LRRK2 RNA guide
ucugacagugugucugcccc

SEQ ID NO: 38358 - RNA, 20 nt, Artificial Sequence
  LRRK2 RNA guide
ucuguaggggcagacacacu

SEQ ID NO: 38359 - RNA, 20 nt, Artificial Sequence
  LRRK2 RNA guide
ugacagugugucugccccua

SEQ ID NO: 38360 - RNA, 20 nt, Artificial Sequence
  LRRK2 RNA guide
ugaguucuguaggggcagac

SEQ ID NO: 38361 - RNA, 20 nt, Artificial Sequence
  LRRK2 RNA guide
uggagauuccgcauuggcuc

SEQ ID NO: 38362 - RNA, 20 nt, Artificial Sequence
  LRRK2 RNA guide
uggcucugacagugugucug

SEQ ID NO: 38363 - RNA, 20 nt, Artificial Sequence
  LRRK2 RNA guide
uguaggggcagacacacugu

SEQ ID NO: 38364 - RNA, 20 nt, Artificial Sequence
  LRRK2 RNA guide
uuccgcauuggcucugacag

SEQ ID NO: 38365 - RNA, 20 nt, Artificial Sequence
  LRRK2 RNA guide
uucuguaggggcagacacac

SEQ ID NO: 38366 - RNA, 20 nt, Artificial Sequence
  LRRK2 RNA guide
uuggcucugacagugugucu

SEQ ID NO: 38367 - RNA, 21 nt, Artificial Sequence
  LRRK2 RNA guide
acacacugucagagccaaugc

SEQ ID NO: 38368 - RNA, 21 nt, Artificial Sequence
  LRRK2 RNA guide
acacugucagagccaaugcgg

SEQ ID NO: 38369 - RNA, 21 nt, Artificial Sequence
  LRRK2 RNA guide
acagugugucugccccuacag

SEQ ID NO: 38370 - RNA, 21 nt, Artificial Sequence
  LRRK2 RNA guide
acugucagagccaaugcggaa

SEQ ID NO: 38371 - RNA, 21 nt, Artificial Sequence
  LRRK2 RNA guide
agacacacugucagagccaau

SEQ ID NO: 38372 - RNA, 21 nt, Artificial Sequence
  LRRK2 RNA guide
agauuccgcauuggcucugac

SEQ ID NO: 38373 - RNA, 21 nt, Artificial Sequence
  LRRK2 RNA guide
aggggcagacacacugucaga

SEQ ID NO: 38374 - RNA, 21 nt, Artificial Sequence
  LRRK2 RNA guide
aguucuguaggggcagacaca

SEQ ID NO: 38375 - RNA, 21 nt, Artificial Sequence
  LRRK2 RNA guide
augaguucuguaggggcagac

SEQ ID NO: 38376 - RNA, 21 nt, Artificial Sequence
  LRRK2 RNA guide
auuccgcauuggcucugacag

SEQ ID NO: 38377 - RNA, 21 nt, Artificial Sequence
  LRRK2 RNA guide
auuggcucugacagugugucu

SEQ ID NO: 38378 - RNA, 21 nt, Artificial Sequence
  LRRK2 RNA guide
cacacugucagagccaaugcg

SEQ ID NO: 38379 - RNA, 21 nt, Artificial Sequence
  LRRK2 RNA guide
cacugucagagccaaugcgga

SEQ ID NO: 38380 - RNA, 21 nt, Artificial Sequence
  LRRK2 RNA guide
cagacacacugucagagccaa

SEQ ID NO: 38381 - RNA, 21 nt, Artificial Sequence
  LRRK2 RNA guide
cagugugucugccccuacaga

SEQ ID NO: 38382 - RNA, 21 nt, Artificial Sequence
  LRRK2 RNA guide
cauuggcucugacaguguguc

SEQ ID NO: 38383 - RNA, 21 nt, Artificial Sequence
  LRRK2 RNA guide
ccgcauuggcucugacagugu

SEQ ID NO: 38384 - RNA, 21 nt, Artificial Sequence
  LRRK2 RNA guide
cgcauuggcucugacagugug

SEQ ID NO: 38385 - RNA, 21 nt, Artificial Sequence
  LRRK2 RNA guide
cucugacagugugucugcccc

SEQ ID NO: 38386 - RNA, 21 nt, Artificial Sequence
  LRRK2 RNA guide
cugacagugugucugccccua

SEQ ID NO: 38387 - RNA, 21 nt, Artificial Sequence
  LRRK2 RNA guide
cuggagauuccgcauuggcuc

SEQ ID NO: 38388 - RNA, 21 nt, Artificial Sequence
  LRRK2 RNA guide
cuguaggggcagacacacugu

SEQ ID NO: 38389 - RNA, 21 nt, Artificial Sequence
  LRRK2 RNA guide
cugucagagccaaugcggaau

SEQ ID NO: 38390 - RNA, 21 nt, Artificial Sequence
  LRRK2 RNA guide
gacacacugucagagccaaug

SEQ ID NO: 38391 - RNA, 21 nt, Artificial Sequence
  LRRK2 RNA guide
gacagugugucugccccuaca

SEQ ID NO: 38392 - RNA, 21 nt, Artificial Sequence
  LRRK2 RNA guide
gagauuccgcauuggcucuga

SEQ ID NO: 38393 - RNA, 21 nt, Artificial Sequence
  LRRK2 RNA guide
gaguucuguaggggcagacac

SEQ ID NO: 38394 - RNA, 21 nt, Artificial Sequence
  LRRK2 RNA guide
gauuccgcauuggcucugaca

SEQ ID NO: 38395 - RNA, 21 nt, Artificial Sequence
  LRRK2 RNA guide
gcagacacacugucagagcca

SEQ ID NO: 38396 - RNA, 21 nt, Artificial Sequence
  LRRK2 RNA guide
gcauuggcucugacagugugu

SEQ ID NO: 38397 - RNA, 21 nt, Artificial Sequence
  LRRK2 RNA guide
gcucugacagugugucugccc

SEQ ID NO: 38398 - RNA, 21 nt, Artificial Sequence
  LRRK2 RNA guide
ggagauuccgcauuggcucug

SEQ ID NO: 38399 - RNA, 21 nt, Artificial Sequence
  LRRK2 RNA guide
ggcagacacacugucagagcc

SEQ ID NO: 38400 - RNA, 21 nt, Artificial Sequence
  LRRK2 RNA guide
ggcucugacagugugucugcc

SEQ ID NO: 38401 - RNA, 21 nt, Artificial Sequence
  LRRK2 RNA guide
gggcagacacacugucagagc

SEQ ID NO: 38402 - RNA, 21 nt, Artificial Sequence
  LRRK2 RNA guide
ggggcagacacacugucagag

SEQ ID NO: 38403 - RNA, 21 nt, Artificial Sequence
  LRRK2 RNA guide
guaggggcagacacacuguca

SEQ ID NO: 38404 - RNA, 21 nt, Artificial Sequence
  LRRK2 RNA guide
guucuguaggggcagacacac

SEQ ID NO: 38405 - RNA, 21 nt, Artificial Sequence
  LRRK2 RNA guide
uaggggcagacacacugucag

SEQ ID NO: 38406 - RNA, 21 nt, Artificial Sequence
  LRRK2 RNA guide
uccgcauuggcucugacagug

SEQ ID NO: 38407 - RNA, 21 nt, Artificial Sequence
  LRRK2 RNA guide
ucugacagugugucugccccu

SEQ ID NO: 38408 - RNA, 21 nt, Artificial Sequence
  LRRK2 RNA guide
ucuguaggggcagacacacug

SEQ ID NO: 38409 - RNA, 21 nt, Artificial Sequence
  LRRK2 RNA guide
ugacagugugucugccccuac

SEQ ID NO: 38410 - RNA, 21 nt, Artificial Sequence
  LRRK2 RNA guide
ugaguucuguaggggcagaca

SEQ ID NO: 38411 - RNA, 21 nt, Artificial Sequence
  LRRK2 RNA guide
uggagauuccgcauuggcucu

SEQ ID NO: 38412 - RNA, 21 nt, Artificial Sequence
  LRRK2 RNA guide
uggcucugacagugugucugc

SEQ ID NO: 38413 - RNA, 21 nt, Artificial Sequence
  LRRK2 RNA guide
uguaggggcagacacacuguc

SEQ ID NO: 38414 - RNA, 21 nt, Artificial Sequence
  LRRK2 RNA guide
uuccgcauuggcucugacagu

SEQ ID NO: 38415 - RNA, 21 nt, Artificial Sequence
  LRRK2 RNA guide
uucuguaggggcagacacacu

SEQ ID NO: 38416 - RNA, 21 nt, Artificial Sequence
  LRRK2 RNA guide
uuggcucugacagugugucug

SEQ ID NO: 38417 - RNA, 22 nt, Artificial Sequence
  LRRK2 RNA guide
acacacugucagagccaaugcg

SEQ ID NO: 38418 - RNA, 22 nt, Artificial Sequence
  LRRK2 RNA guide
acacugucagagccaaugcgga

SEQ ID NO: 38419 - RNA, 22 nt, Artificial Sequence
  LRRK2 RNA guide
acagugugucugccccuacaga

SEQ ID NO: 38420 - RNA, 22 nt, Artificial Sequence
  LRRK2 RNA guide
acugucagagccaaugcggaau

SEQ ID NO: 38421 - RNA, 22 nt, Artificial Sequence
  LRRK2 RNA guide
agacacacugucagagccaaug

SEQ ID NO: 38422 - RNA, 22 nt, Artificial Sequence
  LRRK2 RNA guide
agauuccgcauuggcucugaca

SEQ ID NO: 38423 - RNA, 22 nt, Artificial Sequence
  LRRK2 RNA guide
aggggcagacacacugucagag

SEQ ID NO: 38424 - RNA, 22 nt, Artificial Sequence
  LRRK2 RNA guide
aguucuguaggggcagacacac

SEQ ID NO: 38425 - RNA, 22 nt, Artificial Sequence
  LRRK2 RNA guide
augaguucuguaggggcagaca

SEQ ID NO: 38426 - RNA, 22 nt, Artificial Sequence
  LRRK2 RNA guide
auuccgcauuggcucugacagu

SEQ ID NO: 38427 - RNA, 22 nt, Artificial Sequence
  LRRK2 RNA guide
auuggcucugacagugugucug

SEQ ID NO: 38428 - RNA, 22 nt, Artificial Sequence
  LRRK2 RNA guide
cacacugucagagccaaugcgg

SEQ ID NO: 38429 - RNA, 22 nt, Artificial Sequence
  LRRK2 RNA guide
cacugucagagccaaugcggaa

SEQ ID NO: 38430 - RNA, 22 nt, Artificial Sequence
  LRRK2 RNA guide
cagacacacugucagagccaau

SEQ ID NO: 38431 - RNA, 22 nt, Artificial Sequence
  LRRK2 RNA guide
cagugugucugccccuacagaa

SEQ ID NO: 38432 - RNA, 22 nt, Artificial Sequence
  LRRK2 RNA guide
caugaguucuguaggggcagac

SEQ ID NO: 38433 - RNA, 22 nt, Artificial Sequence
  LRRK2 RNA guide
cauuggcucugacagugugucu

SEQ ID NO: 38434 - RNA, 22 nt, Artificial Sequence
  LRRK2 RNA guide
ccgcauuggcucugacagugug

SEQ ID NO: 38435 - RNA, 22 nt, Artificial Sequence
  LRRK2 RNA guide
ccuggagauuccgcauuggcuc

SEQ ID NO: 38436 - RNA, 22 nt, Artificial Sequence
  LRRK2 RNA guide
cgcauuggcucugacagugugu

SEQ ID NO: 38437 - RNA, 22 nt, Artificial Sequence
  LRRK2 RNA guide
cucugacagugugucugccccu

SEQ ID NO: 38438 - RNA, 22 nt, Artificial Sequence
  LRRK2 RNA guide
cugacagugugucugccccuac

SEQ ID NO: 38439 - RNA, 22 nt, Artificial Sequence
  LRRK2 RNA guide
cuggagauuccgcauuggcucu

SEQ ID NO: 38440 - RNA, 22 nt, Artificial Sequence
  LRRK2 RNA guide
cuguaggggcagacacacuguc

SEQ ID NO: 38441 - RNA, 22 nt, Artificial Sequence
  LRRK2 RNA guide
cugucagagccaaugcggaauc

SEQ ID NO: 38442 - RNA, 22 nt, Artificial Sequence
  LRRK2 RNA guide
gacacacugucagagccaaugc

SEQ ID NO: 38443 - RNA, 22 nt, Artificial Sequence
  LRRK2 RNA guide
gacagugugucugccccuacag

SEQ ID NO: 38444 - RNA, 22 nt, Artificial Sequence
  LRRK2 RNA guide
gagauuccgcauuggcucugac

SEQ ID NO: 38445 - RNA, 22 nt, Artificial Sequence
  LRRK2 RNA guide
gaguucuguaggggcagacaca

SEQ ID NO: 38446 - RNA, 22 nt, Artificial Sequence
  LRRK2 RNA guide
gauuccgcauuggcucugacag

SEQ ID NO: 38447 - RNA, 22 nt, Artificial Sequence
  LRRK2 RNA guide
gcagacacacugucagagccaa

SEQ ID NO: 38448 - RNA, 22 nt, Artificial Sequence
  LRRK2 RNA guide
gcauuggcucugacaguguguc

SEQ ID NO: 38449 - RNA, 22 nt, Artificial Sequence
  LRRK2 RNA guide
gcucugacagugugucugcccc

SEQ ID NO: 38450 - RNA, 22 nt, Artificial Sequence
  LRRK2 RNA guide
ggagauuccgcauuggcucuga

SEQ ID NO: 38451 - RNA, 22 nt, Artificial Sequence
  LRRK2 RNA guide
ggcagacacacugucagagcca

SEQ ID NO: 38452 - RNA, 22 nt, Artificial Sequence
  LRRK2 RNA guide
ggcucugacagugugucugccc

SEQ ID NO: 38453 - RNA, 22 nt, Artificial Sequence
  LRRK2 RNA guide
gggcagacacacugucagagcc

SEQ ID NO: 38454 - RNA, 22 nt, Artificial Sequence
  LRRK2 RNA guide
ggggcagacacacugucagagc

SEQ ID NO: 38455 - RNA, 22 nt, Artificial Sequence
  LRRK2 RNA guide
guaggggcagacacacugucag

SEQ ID NO: 38456 - RNA, 22 nt, Artificial Sequence
  LRRK2 RNA guide
guucuguaggggcagacacacu

SEQ ID NO: 38457 - RNA, 22 nt, Artificial Sequence
  LRRK2 RNA guide
uaggggcagacacacugucaga

SEQ ID NO: 38458 - RNA, 22 nt, Artificial Sequence
  LRRK2 RNA guide
uccgcauuggcucugacagugu

SEQ ID NO: 38459 - RNA, 22 nt, Artificial Sequence
  LRRK2 RNA guide
ucugacagugugucugccccua

SEQ ID NO: 38460 - RNA, 22 nt, Artificial Sequence
  LRRK2 RNA guide
ucuguaggggcagacacacugu

SEQ ID NO: 38461 - RNA, 22 nt, Artificial Sequence
  LRRK2 RNA guide
ugacagugugucugccccuaca

SEQ ID NO: 38462 - RNA, 22 nt, Artificial Sequence
  LRRK2 RNA guide
ugaguucuguaggggcagacac

SEQ ID NO: 38463 - RNA, 22 nt, Artificial Sequence
  LRRK2 RNA guide
uggagauuccgcauuggcucug

SEQ ID NO: 38464 - RNA, 22 nt, Artificial Sequence
  LRRK2 RNA guide
uggcucugacagugugucugcc

SEQ ID NO: 38465 - RNA, 22 nt, Artificial Sequence
  LRRK2 RNA guide
uguaggggcagacacacuguca

SEQ ID NO: 38466 - RNA, 22 nt, Artificial Sequence
  LRRK2 RNA guide
uuccgcauuggcucugacagug

SEQ ID NO: 38467 - RNA, 22 nt, Artificial Sequence
  LRRK2 RNA guide
uucuguaggggcagacacacug

SEQ ID NO: 38468 - RNA, 22 nt, Artificial Sequence
  LRRK2 RNA guide
uuggcucugacagugugucugc

SEQ ID NO: 38469 - RNA, 20 nt, Artificial Sequence
  LRRK2 RNA guide
acacaccgucagagccaaug

SEQ ID NO: 38470 - RNA, 20 nt, Artificial Sequence
  LRRK2 RNA guide
acaccgucagagccaaugcg

SEQ ID NO: 38471 - RNA, 20 nt, Artificial Sequence
  LRRK2 RNA guide
accgucagagccaaugcgga

SEQ ID NO: 38472 - RNA, 20 nt, Artificial Sequence
  LRRK2 RNA guide
acggugugucugccccuaca

SEQ ID NO: 38473 - RNA, 20 nt, Artificial Sequence
  LRRK2 RNA guide
agacacaccgucagagccaa

SEQ ID NO: 38474 - RNA, 20 nt, Artificial Sequence
  LRRK2 RNA guide
aggggcagacacaccgucag

SEQ ID NO: 38475 - RNA, 20 nt, Artificial Sequence
  LRRK2 RNA guide
auuccgcauuggcucugacg

SEQ ID NO: 38476 - RNA, 20 nt, Artificial Sequence
  LRRK2 RNA guide
auuggcucugacgguguguc

SEQ ID NO: 38477 - RNA, 20 nt, Artificial Sequence
  LRRK2 RNA guide
cacaccgucagagccaaugc

SEQ ID NO: 38478 - RNA, 20 nt, Artificial Sequence
  LRRK2 RNA guide
caccgucagagccaaugcgg

SEQ ID NO: 38479 - RNA, 20 nt, Artificial Sequence
  LRRK2 RNA guide
cagacacaccgucagagcca

SEQ ID NO: 38480 - RNA, 20 nt, Artificial Sequence
  LRRK2 RNA guide
cauuggcucugacggugugu

SEQ ID NO: 38481 - RNA, 20 nt, Artificial Sequence
  LRRK2 RNA guide
ccgcauuggcucugacggug

SEQ ID NO: 38482 - RNA, 20 nt, Artificial Sequence
  LRRK2 RNA guide
ccgucagagccaaugcggaa

SEQ ID NO: 38483 - RNA, 20 nt, Artificial Sequence
  LRRK2 RNA guide
cgcauuggcucugacggugu

SEQ ID NO: 38484 - RNA, 20 nt, Artificial Sequence
  LRRK2 RNA guide
cggugugucugccccuacag

SEQ ID NO: 38485 - RNA, 20 nt, Artificial Sequence
  LRRK2 RNA guide
cucugacggugugucugccc

SEQ ID NO: 38486 - RNA, 20 nt, Artificial Sequence
  LRRK2 RNA guide
cugacggugugucugccccu

SEQ ID NO: 38487 - RNA, 20 nt, Artificial Sequence
  LRRK2 RNA guide
cuguaggggcagacacaccg

SEQ ID NO: 38488 - RNA, 20 nt, Artificial Sequence
  LRRK2 RNA guide
gacacaccgucagagccaau

SEQ ID NO: 38489 - RNA, 20 nt, Artificial Sequence
  LRRK2 RNA guide
gacggugugucugccccuac

SEQ ID NO: 38490 - RNA, 20 nt, Artificial Sequence
  LRRK2 RNA guide
gcagacacaccgucagagcc

SEQ ID NO: 38491 - RNA, 20 nt, Artificial Sequence
  LRRK2 RNA guide
gcauuggcucugacggugug

SEQ ID NO: 38492 - RNA, 20 nt, Artificial Sequence
  LRRK2 RNA guide
gcucugacggugugucugcc

SEQ ID NO: 38493 - RNA, 20 nt, Artificial Sequence
  LRRK2 RNA guide
ggcagacacaccgucagagc

SEQ ID NO: 38494 - RNA, 20 nt, Artificial Sequence
  LRRK2 RNA guide
ggcucugacggugugucugc

SEQ ID NO: 38495 - RNA, 20 nt, Artificial Sequence
  LRRK2 RNA guide
gggcagacacaccgucagag

SEQ ID NO: 38496 - RNA, 20 nt, Artificial Sequence
  LRRK2 RNA guide
ggggcagacacaccgucaga

SEQ ID NO: 38497 - RNA, 20 nt, Artificial Sequence
  LRRK2 RNA guide
guaggggcagacacaccguc

SEQ ID NO: 38498 - RNA, 20 nt, Artificial Sequence
  LRRK2 RNA guide
uaggggcagacacaccguca

SEQ ID NO: 38499 - RNA, 20 nt, Artificial Sequence
  LRRK2 RNA guide
uccgcauuggcucugacggu

SEQ ID NO: 38500 - RNA, 20 nt, Artificial Sequence
  LRRK2 RNA guide
ucugacggugugucugcccc

SEQ ID NO: 38501 - RNA, 20 nt, Artificial Sequence
  LRRK2 RNA guide
ucuguaggggcagacacacc

SEQ ID NO: 38502 - RNA, 20 nt, Artificial Sequence
  LRRK2 RNA guide
ugacggugugucugccccua

SEQ ID NO: 38503 - RNA, 20 nt, Artificial Sequence
  LRRK2 RNA guide
uggcucugacggugugucug

SEQ ID NO: 38504 - RNA, 20 nt, Artificial Sequence
  LRRK2 RNA guide
uguaggggcagacacaccgu

SEQ ID NO: 38505 - RNA, 20 nt, Artificial Sequence
  LRRK2 RNA guide
uuccgcauuggcucugacgg

SEQ ID NO: 38506 - RNA, 20 nt, Artificial Sequence
  LRRK2 RNA guide
uuggcucugacggugugucu

SEQ ID NO: 38507 - RNA, 21 nt, Artificial Sequence
  LRRK2 RNA guide
acacaccgucagagccaaugc

SEQ ID NO: 38508 - RNA, 21 nt, Artificial Sequence
  LRRK2 RNA guide
acaccgucagagccaaugcgg

SEQ ID NO: 38509 - RNA, 21 nt, Artificial Sequence
  LRRK2 RNA guide
accgucagagccaaugcggaa

SEQ ID NO: 38510 - RNA, 21 nt, Artificial Sequence
  LRRK2 RNA guide
acggugugucugccccuacag

SEQ ID NO: 38511 - RNA, 21 nt, Artificial Sequence
  LRRK2 RNA guide
agacacaccgucagagccaau

SEQ ID NO: 38512 - RNA, 21 nt, Artificial Sequence
  LRRK2 RNA guide
aggggcagacacaccgucaga

SEQ ID NO: 38513 - RNA, 21 nt, Artificial Sequence
  LRRK2 RNA guide
auuccgcauuggcucugacgg

SEQ ID NO: 38514 - RNA, 21 nt, Artificial Sequence
  LRRK2 RNA guide
auuggcucugacggugugucu

SEQ ID NO: 38515 - RNA, 21 nt, Artificial Sequence
  LRRK2 RNA guide
cacaccgucagagccaaugcg

SEQ ID NO: 38516 - RNA, 21 nt, Artificial Sequence
  LRRK2 RNA guide
caccgucagagccaaugcgga

SEQ ID NO: 38517 - RNA, 21 nt, Artificial Sequence
  LRRK2 RNA guide
cagacacaccgucagagccaa

SEQ ID NO: 38518 - RNA, 21 nt, Artificial Sequence
  LRRK2 RNA guide
cauuggcucugacgguguguc

SEQ ID NO: 38519 - RNA, 21 nt, Artificial Sequence
  LRRK2 RNA guide
ccgcauuggcucugacggugu

SEQ ID NO: 38520 - RNA, 21 nt, Artificial Sequence
  LRRK2 RNA guide
ccgucagagccaaugcggaau

SEQ ID NO: 38521 - RNA, 21 nt, Artificial Sequence
  LRRK2 RNA guide
cgcauuggcucugacggugug

SEQ ID NO: 38522 - RNA, 21 nt, Artificial Sequence
  LRRK2 RNA guide
cggugugucugccccuacaga

SEQ ID NO: 38523 - RNA, 21 nt, Artificial Sequence
  LRRK2 RNA guide
cucugacggugugucugcccc

SEQ ID NO: 38524 - RNA, 21 nt, Artificial Sequence
  LRRK2 RNA guide
cugacggugugucugccccua

SEQ ID NO: 38525 - RNA, 21 nt, Artificial Sequence
  LRRK2 RNA guide
cuguaggggcagacacaccgu

SEQ ID NO: 38526 - RNA, 21 nt, Artificial Sequence
  LRRK2 RNA guide
gacacaccgucagagccaaug

SEQ ID NO: 38527 - RNA, 21 nt, Artificial Sequence
  LRRK2 RNA guide
gacggugugucugccccuaca

SEQ ID NO: 38528 - RNA, 21 nt, Artificial Sequence
  LRRK2 RNA guide
gauuccgcauuggcucugacg

SEQ ID NO: 38529 - RNA, 21 nt, Artificial Sequence
  LRRK2 RNA guide
gcagacacaccgucagagcca

SEQ ID NO: 38530 - RNA, 21 nt, Artificial Sequence
  LRRK2 RNA guide
gcauuggcucugacggugugu

SEQ ID NO: 38531 - RNA, 21 nt, Artificial Sequence
  LRRK2 RNA guide
gcucugacggugugucugccc

SEQ ID NO: 38532 - RNA, 21 nt, Artificial Sequence
  LRRK2 RNA guide
ggcagacacaccgucagagcc

SEQ ID NO: 38533 - RNA, 21 nt, Artificial Sequence
  LRRK2 RNA guide
ggcucugacggugugucugcc

SEQ ID NO: 38534 - RNA, 21 nt, Artificial Sequence
  LRRK2 RNA guide
gggcagacacaccgucagagc

SEQ ID NO: 38535 - RNA, 21 nt, Artificial Sequence
  LRRK2 RNA guide
ggggcagacacaccgucagag

SEQ ID NO: 38536 - RNA, 21 nt, Artificial Sequence
  LRRK2 RNA guide
guaggggcagacacaccguca

SEQ ID NO: 38537 - RNA, 21 nt, Artificial Sequence
  LRRK2 RNA guide
uaggggcagacacaccgucag

SEQ ID NO: 38538 - RNA, 21 nt, Artificial Sequence
  LRRK2 RNA guide
uccgcauuggcucugacggug

SEQ ID NO: 38539 - RNA, 21 nt, Artificial Sequence
  LRRK2 RNA guide
ucugacggugugucugccccu

SEQ ID NO: 38540 - RNA, 21 nt, Artificial Sequence
  LRRK2 RNA guide
ucuguaggggcagacacaccg

SEQ ID NO: 38541 - RNA, 21 nt, Artificial Sequence
  LRRK2 RNA guide
ugacggugugucugccccuac

SEQ ID NO: 38542 - RNA, 21 nt, Artificial Sequence
  LRRK2 RNA guide
uggcucugacggugugucugc

SEQ ID NO: 38543 - RNA, 21 nt, Artificial Sequence
  LRRK2 RNA guide
uguaggggcagacacaccguc

SEQ ID NO: 38544 - RNA, 21 nt, Artificial Sequence
  LRRK2 RNA guide
uuccgcauuggcucugacggu

SEQ ID NO: 38545 - RNA, 21 nt, Artificial Sequence
  LRRK2 RNA guide
uucuguaggggcagacacacc

SEQ ID NO: 38546 - RNA, 21 nt, Artificial Sequence
  LRRK2 RNA guide
uuggcucugacggugugucug

SEQ ID NO: 38547 - RNA, 22 nt, Artificial Sequence
  LRRK2 RNA guide
acacaccgucagagccaaugcg

SEQ ID NO: 38548 - RNA, 22 nt, Artificial Sequence
  LRRK2 RNA guide
acaccgucagagccaaugcgga

SEQ ID NO: 38549 - RNA, 22 nt, Artificial Sequence
  LRRK2 RNA guide
accgucagagccaaugcggaau

SEQ ID NO: 38550 - RNA, 22 nt, Artificial Sequence
  LRRK2 RNA guide
acggugugucugccccuacaga

SEQ ID NO: 38551 - RNA, 22 nt, Artificial Sequence
  LRRK2 RNA guide
agacacaccgucagagccaaug

SEQ ID NO: 38552 - RNA, 22 nt, Artificial Sequence
  LRRK2 RNA guide
agauuccgcauuggcucugacg

SEQ ID NO: 38553 - RNA, 22 nt, Artificial Sequence
  LRRK2 RNA guide
aggggcagacacaccgucagag

SEQ ID NO: 38554 - RNA, 22 nt, Artificial Sequence
  LRRK2 RNA guide
auuccgcauuggcucugacggu

SEQ ID NO: 38555 - RNA, 22 nt, Artificial Sequence
  LRRK2 RNA guide
auuggcucugacggugugucug

SEQ ID NO: 38556 - RNA, 22 nt, Artificial Sequence
  LRRK2 RNA guide
cacaccgucagagccaaugcgg

SEQ ID NO: 38557 - RNA, 22 nt, Artificial Sequence
  LRRK2 RNA guide
caccgucagagccaaugcggaa

SEQ ID NO: 38558 - RNA, 22 nt, Artificial Sequence
  LRRK2 RNA guide
cagacacaccgucagagccaau

SEQ ID NO: 38559 - RNA, 22 nt, Artificial Sequence
  LRRK2 RNA guide
cauuggcucugacggugugucu

SEQ ID NO: 38560 - RNA, 22 nt, Artificial Sequence
  LRRK2 RNA guide
ccgcauuggcucugacggugug

SEQ ID NO: 38561 - RNA, 22 nt, Artificial Sequence
  LRRK2 RNA guide
ccgucagagccaaugcggaauc

SEQ ID NO: 38562 - RNA, 22 nt, Artificial Sequence
  LRRK2 RNA guide
cgcauuggcucugacggugugu

SEQ ID NO: 38563 - RNA, 22 nt, Artificial Sequence
  LRRK2 RNA guide
cggugugucugccccuacagaa

SEQ ID NO: 38564 - RNA, 22 nt, Artificial Sequence
  LRRK2 RNA guide
cucugacggugugucugccccu

SEQ ID NO: 38565 - RNA, 22 nt, Artificial Sequence
  LRRK2 RNA guide
cugacggugugucugccccuac

SEQ ID NO: 38566 - RNA, 22 nt, Artificial Sequence
  LRRK2 RNA guide
cuguaggggcagacacaccguc

SEQ ID NO: 38567 - RNA, 22 nt, Artificial Sequence
  LRRK2 RNA guide
gacacaccgucagagccaaugc

SEQ ID NO: 38568 - RNA, 22 nt, Artificial Sequence
  LRRK2 RNA guide
gacggugugucugccccuacag

SEQ ID NO: 38569 - RNA, 22 nt, Artificial Sequence
  LRRK2 RNA guide
gauuccgcauuggcucugacgg

SEQ ID NO: 38570 - RNA, 22 nt, Artificial Sequence
  LRRK2 RNA guide
gcagacacaccgucagagccaa

SEQ ID NO: 38571 - RNA, 22 nt, Artificial Sequence
  LRRK2 RNA guide
gcauuggcucugacgguguguc

SEQ ID NO: 38572 - RNA, 22 nt, Artificial Sequence
  LRRK2 RNA guide
gcucugacggugugucugcccc

SEQ ID NO: 38573 - RNA, 22 nt, Artificial Sequence
  LRRK2 RNA guide
ggcagacacaccgucagagcca

SEQ ID NO: 38574 - RNA, 22 nt, Artificial Sequence
  LRRK2 RNA guide
ggcucugacggugugucugccc

SEQ ID NO: 38575 - RNA, 22 nt, Artificial Sequence
  LRRK2 RNA guide
gggcagacacaccgucagagcc

SEQ ID NO: 38576 - RNA, 22 nt, Artificial Sequence
  LRRK2 RNA guide
ggggcagacacaccgucagagc

SEQ ID NO: 38577 - RNA, 22 nt, Artificial Sequence
  LRRK2 RNA guide
guaggggcagacacaccgucag

SEQ ID NO: 38578 - RNA, 22 nt, Artificial Sequence
  LRRK2 RNA guide
guucuguaggggcagacacacc

SEQ ID NO: 38579 - RNA, 22 nt, Artificial Sequence
  LRRK2 RNA guide
uaggggcagacacaccgucaga

SEQ ID NO: 38580 - RNA, 22 nt, Artificial Sequence
  LRRK2 RNA guide
uccgcauuggcucugacggugu

SEQ ID NO: 38581 - RNA, 22 nt, Artificial Sequence
  LRRK2 RNA guide
ucugacggugugucugccccua

SEQ ID NO: 38582 - RNA, 22 nt, Artificial Sequence
  LRRK2 RNA guide
ucuguaggggcagacacaccgu

SEQ ID NO: 38583 - RNA, 22 nt, Artificial Sequence
  LRRK2 RNA guide
ugacggugugucugccccuaca

SEQ ID NO: 38584 - RNA, 22 nt, Artificial Sequence
  LRRK2 RNA guide
uggcucugacggugugucugcc

SEQ ID NO: 38585 - RNA, 22 nt, Artificial Sequence
  LRRK2 RNA guide
uguaggggcagacacaccguca

SEQ ID NO: 38586 - RNA, 22 nt, Artificial Sequence
  LRRK2 RNA guide
uuccgcauuggcucugacggug

SEQ ID NO: 38587 - RNA, 22 nt, Artificial Sequence
  LRRK2 RNA guide
uucuguaggggcagacacaccg

SEQ ID NO: 38588 - RNA, 22 nt, Artificial Sequence
  LRRK2 RNA guide
uuggcucugacggugugucugc

SEQ ID NO: 38589 - RNA, 20 nt, Artificial Sequence
  LRRK2 RNA guide
aaccccagcugaguccacuc

SEQ ID NO: 38590 - RNA, 20 nt, Artificial Sequence
  LRRK2 RNA guide
aagaguagaguggacucagc

SEQ ID NO: 38591 - RNA, 20 nt, Artificial Sequence
  LRRK2 RNA guide
aaugguaagaguagagugga

SEQ ID NO: 38592 - RNA, 20 nt, Artificial Sequence
  LRRK2 RNA guide
accccagcugaguccacucu

SEQ ID NO: 38593 - RNA, 20 nt, Artificial Sequence
  LRRK2 RNA guide
acucagcugggguuacccaa

SEQ ID NO: 38594 - RNA, 20 nt, Artificial Sequence
  LRRK2 RNA guide
agaguagaguggacucagcu

SEQ ID NO: 38595 - RNA, 20 nt, Artificial Sequence
  LRRK2 RNA guide
agaguggacucagcuggggu

SEQ ID NO: 38596 - RNA, 20 nt, Artificial Sequence
  LRRK2 RNA guide
agcugaguccacucuacucu

SEQ ID NO: 38597 - RNA, 20 nt, Artificial Sequence
  LRRK2 RNA guide
aguagaguggacucagcugg

SEQ ID NO: 38598 - RNA, 20 nt, Artificial Sequence
  LRRK2 RNA guide
aguggacucagcugggguua

SEQ ID NO: 38599 - RNA, 20 nt, Artificial Sequence
  LRRK2 RNA guide
augguaagaguagaguggac

SEQ ID NO: 38600 - RNA, 20 nt, Artificial Sequence
  LRRK2 RNA guide
caaugguaagaguagagugg

SEQ ID NO: 38601 - RNA, 20 nt, Artificial Sequence
  LRRK2 RNA guide
cagcugaguccacucuacuc

SEQ ID NO: 38602 - RNA, 20 nt, Artificial Sequence
  LRRK2 RNA guide
ccagcugaguccacucuacu

SEQ ID NO: 38603 - RNA, 20 nt, Artificial Sequence
  LRRK2 RNA guide
cccagcugaguccacucuac

SEQ ID NO: 38604 - RNA, 20 nt, Artificial Sequence
  LRRK2 RNA guide
ccccagcugaguccacucua

SEQ ID NO: 38605 - RNA, 20 nt, Artificial Sequence
  LRRK2 RNA guide
ccccuccuuggguaacccca

SEQ ID NO: 38606 - RNA, 20 nt, Artificial Sequence
  LRRK2 RNA guide
cccuccuuggguaaccccag

SEQ ID NO: 38607 - RNA, 20 nt, Artificial Sequence
  LRRK2 RNA guide
ccuccuuggguaaccccagc

SEQ ID NO: 38608 - RNA, 20 nt, Artificial Sequence
  LRRK2 RNA guide
ccuuggguaaccccagcuga

SEQ ID NO: 38609 - RNA, 20 nt, Artificial Sequence
  LRRK2 RNA guide
cgcaaugguaagaguagagu

SEQ ID NO: 38610 - RNA, 20 nt, Artificial Sequence
  LRRK2 RNA guide
cucagcugggguuacccaag

SEQ ID NO: 38611 - RNA, 20 nt, Artificial Sequence
  LRRK2 RNA guide
cuccuuggguaaccccagcu

SEQ ID NO: 38612 - RNA, 20 nt, Artificial Sequence
  LRRK2 RNA guide
cugaguccacucuacucuua

SEQ ID NO: 38613 - RNA, 20 nt, Artificial Sequence
  LRRK2 RNA guide
cuuggguaaccccagcugag

SEQ ID NO: 38614 - RNA, 20 nt, Artificial Sequence
  LRRK2 RNA guide
gacucagcugggguuaccca

SEQ ID NO: 38615 - RNA, 20 nt, Artificial Sequence
  LRRK2 RNA guide
gaguagaguggacucagcug

SEQ ID NO: 38616 - RNA, 20 nt, Artificial Sequence
  LRRK2 RNA guide
gaguccacucuacucuuacc

SEQ ID NO: 38617 - RNA, 20 nt, Artificial Sequence
  LRRK2 RNA guide
gaguggacucagcugggguu

SEQ ID NO: 38618 - RNA, 20 nt, Artificial Sequence
  LRRK2 RNA guide
gcaaugguaagaguagagug

SEQ ID NO: 38619 - RNA, 20 nt, Artificial Sequence
  LRRK2 RNA guide
gcugaguccacucuacucuu

SEQ ID NO: 38620 - RNA, 20 nt, Artificial Sequence
  LRRK2 RNA guide
ggacucagcugggguuaccc

SEQ ID NO: 38621 - RNA, 20 nt, Artificial Sequence
  LRRK2 RNA guide
ggguaaccccagcugagucc

SEQ ID NO: 38622 - RNA, 20 nt, Artificial Sequence
  LRRK2 RNA guide
gguaaccccagcugagucca

SEQ ID NO: 38623 - RNA, 20 nt, Artificial Sequence
  LRRK2 RNA guide
gguaagaguagaguggacuc

SEQ ID NO: 38624 - RNA, 20 nt, Artificial Sequence
  LRRK2 RNA guide
guaaccccagcugaguccac

SEQ ID NO: 38625 - RNA, 20 nt, Artificial Sequence
  LRRK2 RNA guide
guaagaguagaguggacuca

SEQ ID NO: 38626 - RNA, 20 nt, Artificial Sequence
  LRRK2 RNA guide
guagaguggacucagcuggg

SEQ ID NO: 38627 - RNA, 20 nt, Artificial Sequence
  LRRK2 RNA guide
guggacucagcugggguuac

SEQ ID NO: 38628 - RNA, 20 nt, Artificial Sequence
  LRRK2 RNA guide
uaaccccagcugaguccacu

SEQ ID NO: 38629 - RNA, 20 nt, Artificial Sequence
  LRRK2 RNA guide
uaagaguagaguggacucag

SEQ ID NO: 38630 - RNA, 20 nt, Artificial Sequence
  LRRK2 RNA guide
uagaguggacucagcugggg

SEQ ID NO: 38631 - RNA, 20 nt, Artificial Sequence
  LRRK2 RNA guide
uccuuggguaaccccagcug

SEQ ID NO: 38632 - RNA, 20 nt, Artificial Sequence
  LRRK2 RNA guide
ugaguccacucuacucuuac

SEQ ID NO: 38633 - RNA, 20 nt, Artificial Sequence
  LRRK2 RNA guide
uggacucagcugggguuacc

SEQ ID NO: 38634 - RNA, 20 nt, Artificial Sequence
  LRRK2 RNA guide
uggguaaccccagcugaguc

SEQ ID NO: 38635 - RNA, 20 nt, Artificial Sequence
  LRRK2 RNA guide
ugguaagaguagaguggacu

SEQ ID NO: 38636 - RNA, 20 nt, Artificial Sequence
  LRRK2 RNA guide
uuggguaaccccagcugagu

SEQ ID NO: 38637 - RNA, 21 nt, Artificial Sequence
  LRRK2 RNA guide
aaccccagcugaguccacucu

SEQ ID NO: 38638 - RNA, 21 nt, Artificial Sequence
  LRRK2 RNA guide
aagaguagaguggacucagcu

SEQ ID NO: 38639 - RNA, 21 nt, Artificial Sequence
  LRRK2 RNA guide
aaugguaagaguagaguggac

SEQ ID NO: 38640 - RNA, 21 nt, Artificial Sequence
  LRRK2 RNA guide
accccagcugaguccacucua

SEQ ID NO: 38641 - RNA, 21 nt, Artificial Sequence
  LRRK2 RNA guide
acgcaaugguaagaguagagu

SEQ ID NO: 38642 - RNA, 21 nt, Artificial Sequence
  LRRK2 RNA guide
acucagcugggguuacccaag

SEQ ID NO: 38643 - RNA, 21 nt, Artificial Sequence
  LRRK2 RNA guide
agaguagaguggacucagcug

SEQ ID NO: 38644 - RNA, 21 nt, Artificial Sequence
  LRRK2 RNA guide
agaguggacucagcugggguu

SEQ ID NO: 38645 - RNA, 21 nt, Artificial Sequence
  LRRK2 RNA guide
agcugaguccacucuacucuu

SEQ ID NO: 38646 - RNA, 21 nt, Artificial Sequence
  LRRK2 RNA guide
aguagaguggacucagcuggg

SEQ ID NO: 38647 - RNA, 21 nt, Artificial Sequence
  LRRK2 RNA guide
aguggacucagcugggguuac

SEQ ID NO: 38648 - RNA, 21 nt, Artificial Sequence
  LRRK2 RNA guide
augguaagaguagaguggacu

SEQ ID NO: 38649 - RNA, 21 nt, Artificial Sequence
  LRRK2 RNA guide
caaugguaagaguagagugga

SEQ ID NO: 38650 - RNA, 21 nt, Artificial Sequence
  LRRK2 RNA guide
cagcugaguccacucuacucu

SEQ ID NO: 38651 - RNA, 21 nt, Artificial Sequence
  LRRK2 RNA guide
ccagcugaguccacucuacuc

SEQ ID NO: 38652 - RNA, 21 nt, Artificial Sequence
  LRRK2 RNA guide
cccagcugaguccacucuacu

SEQ ID NO: 38653 - RNA, 21 nt, Artificial Sequence
  LRRK2 RNA guide
ccccagcugaguccacucuac

SEQ ID NO: 38654 - RNA, 21 nt, Artificial Sequence
  LRRK2 RNA guide
ccccuccuuggguaaccccag

SEQ ID NO: 38655 - RNA, 21 nt, Artificial Sequence
  LRRK2 RNA guide
cccuccuuggguaaccccagc

SEQ ID NO: 38656 - RNA, 21 nt, Artificial Sequence
  LRRK2 RNA guide
ccuccuuggguaaccccagcu

SEQ ID NO: 38657 - RNA, 21 nt, Artificial Sequence
  LRRK2 RNA guide
ccuuggguaaccccagcugag

SEQ ID NO: 38658 - RNA, 21 nt, Artificial Sequence
  LRRK2 RNA guide
cgcaaugguaagaguagagug

SEQ ID NO: 38659 - RNA, 21 nt, Artificial Sequence
  LRRK2 RNA guide
cucagcugggguuacccaagg

SEQ ID NO: 38660 - RNA, 21 nt, Artificial Sequence
  LRRK2 RNA guide
cuccuuggguaaccccagcug

SEQ ID NO: 38661 - RNA, 21 nt, Artificial Sequence
  LRRK2 RNA guide
cugaguccacucuacucuuac

SEQ ID NO: 38662 - RNA, 21 nt, Artificial Sequence
  LRRK2 RNA guide
cuuggguaaccccagcugagu

SEQ ID NO: 38663 - RNA, 21 nt, Artificial Sequence
  LRRK2 RNA guide
gacucagcugggguuacccaa

SEQ ID NO: 38664 - RNA, 21 nt, Artificial Sequence
  LRRK2 RNA guide
gaguagaguggacucagcugg

SEQ ID NO: 38665 - RNA, 21 nt, Artificial Sequence
  LRRK2 RNA guide
gaguccacucuacucuuacca

SEQ ID NO: 38666 - RNA, 21 nt, Artificial Sequence
  LRRK2 RNA guide
gaguggacucagcugggguua

SEQ ID NO: 38667 - RNA, 21 nt, Artificial Sequence
  LRRK2 RNA guide
gcaaugguaagaguagagugg

SEQ ID NO: 38668 - RNA, 21 nt, Artificial Sequence
  LRRK2 RNA guide
gcugaguccacucuacucuua

SEQ ID NO: 38669 - RNA, 21 nt, Artificial Sequence
  LRRK2 RNA guide
ggacucagcugggguuaccca

SEQ ID NO: 38670 - RNA, 21 nt, Artificial Sequence
  LRRK2 RNA guide
ggguaaccccagcugagucca

SEQ ID NO: 38671 - RNA, 21 nt, Artificial Sequence
  LRRK2 RNA guide
gguaaccccagcugaguccac

SEQ ID NO: 38672 - RNA, 21 nt, Artificial Sequence
  LRRK2 RNA guide
gguaagaguagaguggacuca

SEQ ID NO: 38673 - RNA, 21 nt, Artificial Sequence
  LRRK2 RNA guide
guaaccccagcugaguccacu

SEQ ID NO: 38674 - RNA, 21 nt, Artificial Sequence
  LRRK2 RNA guide
guaagaguagaguggacucag

SEQ ID NO: 38675 - RNA, 21 nt, Artificial Sequence
  LRRK2 RNA guide
guagaguggacucagcugggg

SEQ ID NO: 38676 - RNA, 21 nt, Artificial Sequence
  LRRK2 RNA guide
guggacucagcugggguuacc

SEQ ID NO: 38677 - RNA, 21 nt, Artificial Sequence
  LRRK2 RNA guide
uaaccccagcugaguccacuc

SEQ ID NO: 38678 - RNA, 21 nt, Artificial Sequence
  LRRK2 RNA guide
uaagaguagaguggacucagc

SEQ ID NO: 38679 - RNA, 21 nt, Artificial Sequence
  LRRK2 RNA guide
uagaguggacucagcuggggu

SEQ ID NO: 38680 - RNA, 21 nt, Artificial Sequence
  LRRK2 RNA guide
uccccuccuuggguaacccca

SEQ ID NO: 38681 - RNA, 21 nt, Artificial Sequence
  LRRK2 RNA guide
uccuuggguaaccccagcuga

SEQ ID NO: 38682 - RNA, 21 nt, Artificial Sequence
  LRRK2 RNA guide
ugaguccacucuacucuuacc

SEQ ID NO: 38683 - RNA, 21 nt, Artificial Sequence
  LRRK2 RNA guide
uggacucagcugggguuaccc

SEQ ID NO: 38684 - RNA, 21 nt, Artificial Sequence
  LRRK2 RNA guide
uggguaaccccagcugagucc

SEQ ID NO: 38685 - RNA, 21 nt, Artificial Sequence
  LRRK2 RNA guide
ugguaagaguagaguggacuc

SEQ ID NO: 38686 - RNA, 21 nt, Artificial Sequence
  LRRK2 RNA guide
uuggguaaccccagcugaguc

SEQ ID NO: 38687 - RNA, 22 nt, Artificial Sequence
  LRRK2 RNA guide
aaccccagcugaguccacucua

SEQ ID NO: 38688 - RNA, 22 nt, Artificial Sequence
  LRRK2 RNA guide
aagaguagaguggacucagcug

SEQ ID NO: 38689 - RNA, 22 nt, Artificial Sequence
  LRRK2 RNA guide
aaugguaagaguagaguggacu

SEQ ID NO: 38690 - RNA, 22 nt, Artificial Sequence
  LRRK2 RNA guide
accccagcugaguccacucuac

SEQ ID NO: 38691 - RNA, 22 nt, Artificial Sequence
  LRRK2 RNA guide
acgcaaugguaagaguagagug

SEQ ID NO: 38692 - RNA, 22 nt, Artificial Sequence
  LRRK2 RNA guide
acucagcugggguuacccaagg

SEQ ID NO: 38693 - RNA, 22 nt, Artificial Sequence
  LRRK2 RNA guide
agaguagaguggacucagcugg

SEQ ID NO: 38694 - RNA, 22 nt, Artificial Sequence
  LRRK2 RNA guide
agaguggacucagcugggguua

SEQ ID NO: 38695 - RNA, 22 nt, Artificial Sequence
  LRRK2 RNA guide
agcugaguccacucuacucuua

SEQ ID NO: 38696 - RNA, 22 nt, Artificial Sequence
  LRRK2 RNA guide
aguagaguggacucagcugggg

SEQ ID NO: 38697 - RNA, 22 nt, Artificial Sequence
  LRRK2 RNA guide
aguggacucagcugggguuacc

SEQ ID NO: 38698 - RNA, 22 nt, Artificial Sequence
  LRRK2 RNA guide
augguaagaguagaguggacuc

SEQ ID NO: 38699 - RNA, 22 nt, Artificial Sequence
  LRRK2 RNA guide
caaugguaagaguagaguggac

SEQ ID NO: 38700 - RNA, 22 nt, Artificial Sequence
  LRRK2 RNA guide
cagcugaguccacucuacucuu

SEQ ID NO: 38701 - RNA, 22 nt, Artificial Sequence
  LRRK2 RNA guide
ccagcugaguccacucuacucu

SEQ ID NO: 38702 - RNA, 22 nt, Artificial Sequence
  LRRK2 RNA guide
cccagcugaguccacucuacuc

SEQ ID NO: 38703 - RNA, 22 nt, Artificial Sequence
  LRRK2 RNA guide
ccccagcugaguccacucuacu

SEQ ID NO: 38704 - RNA, 22 nt, Artificial Sequence
  LRRK2 RNA guide
ccccuccuuggguaaccccagc

SEQ ID NO: 38705 - RNA, 22 nt, Artificial Sequence
  LRRK2 RNA guide
cccuccuuggguaaccccagcu

SEQ ID NO: 38706 - RNA, 22 nt, Artificial Sequence
  LRRK2 RNA guide
ccuccuuggguaaccccagcug

SEQ ID NO: 38707 - RNA, 22 nt, Artificial Sequence
  LRRK2 RNA guide
ccuuggguaaccccagcugagu

SEQ ID NO: 38708 - RNA, 22 nt, Artificial Sequence
  LRRK2 RNA guide
cgcaaugguaagaguagagugg

SEQ ID NO: 38709 - RNA, 22 nt, Artificial Sequence
  LRRK2 RNA guide
cucagcugggguuacccaagga

SEQ ID NO: 38710 - RNA, 22 nt, Artificial Sequence
  LRRK2 RNA guide
cuccccuccuuggguaacccca

SEQ ID NO: 38711 - RNA, 22 nt, Artificial Sequence
  LRRK2 RNA guide
cuccuuggguaaccccagcuga

SEQ ID NO: 38712 - RNA, 22 nt, Artificial Sequence
  LRRK2 RNA guide
cugaguccacucuacucuuacc

SEQ ID NO: 38713 - RNA, 22 nt, Artificial Sequence
  LRRK2 RNA guide
cuuggguaaccccagcugaguc

SEQ ID NO: 38714 - RNA, 22 nt, Artificial Sequence
  LRRK2 RNA guide
gacgcaaugguaagaguagagu

SEQ ID NO: 38715 - RNA, 22 nt, Artificial Sequence
  LRRK2 RNA guide
gacucagcugggguuacccaag

SEQ ID NO: 38716 - RNA, 22 nt, Artificial Sequence
  LRRK2 RNA guide
gaguagaguggacucagcuggg

SEQ ID NO: 38717 - RNA, 22 nt, Artificial Sequence
  LRRK2 RNA guide
gaguccacucuacucuuaccau

SEQ ID NO: 38718 - RNA, 22 nt, Artificial Sequence
  LRRK2 RNA guide
gaguggacucagcugggguuac

SEQ ID NO: 38719 - RNA, 22 nt, Artificial Sequence
  LRRK2 RNA guide
gcaaugguaagaguagagugga

SEQ ID NO: 38720 - RNA, 22 nt, Artificial Sequence
  LRRK2 RNA guide
gcugaguccacucuacucuuac

SEQ ID NO: 38721 - RNA, 22 nt, Artificial Sequence
  LRRK2 RNA guide
ggacucagcugggguuacccaa

SEQ ID NO: 38722 - RNA, 22 nt, Artificial Sequence
  LRRK2 RNA guide
ggguaaccccagcugaguccac

SEQ ID NO: 38723 - RNA, 22 nt, Artificial Sequence
  LRRK2 RNA guide
gguaaccccagcugaguccacu

SEQ ID NO: 38724 - RNA, 22 nt, Artificial Sequence
  LRRK2 RNA guide
gguaagaguagaguggacucag

SEQ ID NO: 38725 - RNA, 22 nt, Artificial Sequence
  LRRK2 RNA guide
guaaccccagcugaguccacuc

SEQ ID NO: 38726 - RNA, 22 nt, Artificial Sequence
  LRRK2 RNA guide
guaagaguagaguggacucagc

SEQ ID NO: 38727 - RNA, 22 nt, Artificial Sequence
  LRRK2 RNA guide
guagaguggacucagcuggggu

SEQ ID NO: 38728 - RNA, 22 nt, Artificial Sequence
  LRRK2 RNA guide
guggacucagcugggguuaccc

SEQ ID NO: 38729 - RNA, 22 nt, Artificial Sequence
  LRRK2 RNA guide
uaaccccagcugaguccacucu

SEQ ID NO: 38730 - RNA, 22 nt, Artificial Sequence
  LRRK2 RNA guide
uaagaguagaguggacucagcu

SEQ ID NO: 38731 - RNA, 22 nt, Artificial Sequence
  LRRK2 RNA guide
uagaguggacucagcugggguu

SEQ ID NO: 38732 - RNA, 22 nt, Artificial Sequence
  LRRK2 RNA guide
uccccuccuuggguaaccccag

SEQ ID NO: 38733 - RNA, 22 nt, Artificial Sequence
  LRRK2 RNA guide
uccuuggguaaccccagcugag

SEQ ID NO: 38734 - RNA, 22 nt, Artificial Sequence
  LRRK2 RNA guide
ugaguccacucuacucuuacca

SEQ ID NO: 38735 - RNA, 22 nt, Artificial Sequence
  LRRK2 RNA guide
uggacucagcugggguuaccca

SEQ ID NO: 38736 - RNA, 22 nt, Artificial Sequence
  LRRK2 RNA guide
uggguaaccccagcugagucca

SEQ ID NO: 38737 - RNA, 22 nt, Artificial Sequence
  LRRK2 RNA guide
ugguaagaguagaguggacuca

SEQ ID NO: 38738 - RNA, 22 nt, Artificial Sequence
  LRRK2 RNA guide
uuggguaaccccagcugagucc

SEQ ID NO: 38739 - RNA, 20 nt, Artificial Sequence
  LRRK2 RNA guide
aaccccagcuggguccacuc

SEQ ID NO: 38740 - RNA, 20 nt, Artificial Sequence
  LRRK2 RNA guide
aagaguagaguggacccagc

SEQ ID NO: 38741 - RNA, 20 nt, Artificial Sequence
  LRRK2 RNA guide
acccagcugggguuacccaa

SEQ ID NO: 38742 - RNA, 20 nt, Artificial Sequence
  LRRK2 RNA guide
accccagcuggguccacucu

SEQ ID NO: 38743 - RNA, 20 nt, Artificial Sequence
  LRRK2 RNA guide
agaguagaguggacccagcu

SEQ ID NO: 38744 - RNA, 20 nt, Artificial Sequence
  LRRK2 RNA guide
agaguggacccagcuggggu

SEQ ID NO: 38745 - RNA, 20 nt, Artificial Sequence
  LRRK2 RNA guide
agcuggguccacucuacucu

SEQ ID NO: 38746 - RNA, 20 nt, Artificial Sequence
  LRRK2 RNA guide
aguagaguggacccagcugg

SEQ ID NO: 38747 - RNA, 20 nt, Artificial Sequence
  LRRK2 RNA guide
aguggacccagcugggguua

SEQ ID NO: 38748 - RNA, 20 nt, Artificial Sequence
  LRRK2 RNA guide
cagcuggguccacucuacuc

SEQ ID NO: 38749 - RNA, 20 nt, Artificial Sequence
  LRRK2 RNA guide
ccagcuggguccacucuacu

SEQ ID NO: 38750 - RNA, 20 nt, Artificial Sequence
  LRRK2 RNA guide
cccagcugggguuacccaag

SEQ ID NO: 38751 - RNA, 20 nt, Artificial Sequence
  LRRK2 RNA guide
cccagcuggguccacucuac

SEQ ID NO: 38752 - RNA, 20 nt, Artificial Sequence
  LRRK2 RNA guide
ccccagcuggguccacucua

SEQ ID NO: 38753 - RNA, 20 nt, Artificial Sequence
  LRRK2 RNA guide
ccuuggguaaccccagcugg

SEQ ID NO: 38754 - RNA, 20 nt, Artificial Sequence
  LRRK2 RNA guide
cuggguccacucuacucuua

SEQ ID NO: 38755 - RNA, 20 nt, Artificial Sequence
  LRRK2 RNA guide
cuuggguaaccccagcuggg

SEQ ID NO: 38756 - RNA, 20 nt, Artificial Sequence
  LRRK2 RNA guide
gacccagcugggguuaccca

SEQ ID NO: 38757 - RNA, 20 nt, Artificial Sequence
  LRRK2 RNA guide
gaguagaguggacccagcug

SEQ ID NO: 38758 - RNA, 20 nt, Artificial Sequence
  LRRK2 RNA guide
gaguggacccagcugggguu

SEQ ID NO: 38759 - RNA, 20 nt, Artificial Sequence
  LRRK2 RNA guide
gcuggguccacucuacucuu

SEQ ID NO: 38760 - RNA, 20 nt, Artificial Sequence
  LRRK2 RNA guide
ggacccagcugggguuaccc

SEQ ID NO: 38761 - RNA, 20 nt, Artificial Sequence
  LRRK2 RNA guide
ggguaaccccagcugggucc

SEQ ID NO: 38762 - RNA, 20 nt, Artificial Sequence
  LRRK2 RNA guide
ggguccacucuacucuuacc

SEQ ID NO: 38763 - RNA, 20 nt, Artificial Sequence
  LRRK2 RNA guide
gguaaccccagcugggucca

SEQ ID NO: 38764 - RNA, 20 nt, Artificial Sequence
  LRRK2 RNA guide
gguaagaguagaguggaccc

SEQ ID NO: 38765 - RNA, 20 nt, Artificial Sequence
  LRRK2 RNA guide
guaaccccagcuggguccac

SEQ ID NO: 38766 - RNA, 20 nt, Artificial Sequence
  LRRK2 RNA guide
guaagaguagaguggaccca

SEQ ID NO: 38767 - RNA, 20 nt, Artificial Sequence
  LRRK2 RNA guide
guagaguggacccagcuggg

SEQ ID NO: 38768 - RNA, 20 nt, Artificial Sequence
  LRRK2 RNA guide
guggacccagcugggguuac

SEQ ID NO: 38769 - RNA, 20 nt, Artificial Sequence
  LRRK2 RNA guide
uaaccccagcuggguccacu

SEQ ID NO: 38770 - RNA, 20 nt, Artificial Sequence
  LRRK2 RNA guide
uaagaguagaguggacccag

SEQ ID NO: 38771 - RNA, 20 nt, Artificial Sequence
  LRRK2 RNA guide
uagaguggacccagcugggg

SEQ ID NO: 38772 - RNA, 20 nt, Artificial Sequence
  LRRK2 RNA guide
uggacccagcugggguuacc

SEQ ID NO: 38773 - RNA, 20 nt, Artificial Sequence
  LRRK2 RNA guide
uggguaaccccagcuggguc

SEQ ID NO: 38774 - RNA, 20 nt, Artificial Sequence
  LRRK2 RNA guide
uggguccacucuacucuuac

SEQ ID NO: 38775 - RNA, 20 nt, Artificial Sequence
  LRRK2 RNA guide
ugguaagaguagaguggacc

SEQ ID NO: 38776 - RNA, 20 nt, Artificial Sequence
  LRRK2 RNA guide
uuggguaaccccagcugggu

SEQ ID NO: 38777 - RNA, 21 nt, Artificial Sequence
  LRRK2 RNA guide
aaccccagcuggguccacucu

SEQ ID NO: 38778 - RNA, 21 nt, Artificial Sequence
  LRRK2 RNA guide
aagaguagaguggacccagcu

SEQ ID NO: 38779 - RNA, 21 nt, Artificial Sequence
  LRRK2 RNA guide
acccagcugggguuacccaag

SEQ ID NO: 38780 - RNA, 21 nt, Artificial Sequence
  LRRK2 RNA guide
accccagcuggguccacucua

SEQ ID NO: 38781 - RNA, 21 nt, Artificial Sequence
  LRRK2 RNA guide
agaguagaguggacccagcug

SEQ ID NO: 38782 - RNA, 21 nt, Artificial Sequence
  LRRK2 RNA guide
agaguggacccagcugggguu

SEQ ID NO: 38783 - RNA, 21 nt, Artificial Sequence
  LRRK2 RNA guide
agcuggguccacucuacucuu

SEQ ID NO: 38784 - RNA, 21 nt, Artificial Sequence
  LRRK2 RNA guide
aguagaguggacccagcuggg

SEQ ID NO: 38785 - RNA, 21 nt, Artificial Sequence
  LRRK2 RNA guide
aguggacccagcugggguuac

SEQ ID NO: 38786 - RNA, 21 nt, Artificial Sequence
  LRRK2 RNA guide
augguaagaguagaguggacc

SEQ ID NO: 38787 - RNA, 21 nt, Artificial Sequence
  LRRK2 RNA guide
cagcuggguccacucuacucu

SEQ ID NO: 38788 - RNA, 21 nt, Artificial Sequence
  LRRK2 RNA guide
ccagcuggguccacucuacuc

SEQ ID NO: 38789 - RNA, 21 nt, Artificial Sequence
  LRRK2 RNA guide
cccagcugggguuacccaagg

SEQ ID NO: 38790 - RNA, 21 nt, Artificial Sequence
  LRRK2 RNA guide
cccagcuggguccacucuacu

SEQ ID NO: 38791 - RNA, 21 nt, Artificial Sequence
  LRRK2 RNA guide
ccccagcuggguccacucuac

SEQ ID NO: 38792 - RNA, 21 nt, Artificial Sequence
  LRRK2 RNA guide
ccuuggguaaccccagcuggg

SEQ ID NO: 38793 - RNA, 21 nt, Artificial Sequence
  LRRK2 RNA guide
cuggguccacucuacucuuac

SEQ ID NO: 38794 - RNA, 21 nt, Artificial Sequence
  LRRK2 RNA guide
cuuggguaaccccagcugggu

SEQ ID NO: 38795 - RNA, 21 nt, Artificial Sequence
  LRRK2 RNA guide
gacccagcugggguuacccaa

SEQ ID NO: 38796 - RNA, 21 nt, Artificial Sequence
  LRRK2 RNA guide
gaguagaguggacccagcugg

SEQ ID NO: 38797 - RNA, 21 nt, Artificial Sequence
  LRRK2 RNA guide
gaguggacccagcugggguua

SEQ ID NO: 38798 - RNA, 21 nt, Artificial Sequence
  LRRK2 RNA guide
gcuggguccacucuacucuua

SEQ ID NO: 38799 - RNA, 21 nt, Artificial Sequence
  LRRK2 RNA guide
ggacccagcugggguuaccca

SEQ ID NO: 38800 - RNA, 21 nt, Artificial Sequence
  LRRK2 RNA guide
ggguaaccccagcugggucca

SEQ ID NO: 38801 - RNA, 21 nt, Artificial Sequence
  LRRK2 RNA guide
ggguccacucuacucuuacca

SEQ ID NO: 38802 - RNA, 21 nt, Artificial Sequence
  LRRK2 RNA guide
gguaaccccagcuggguccac

SEQ ID NO: 38803 - RNA, 21 nt, Artificial Sequence
  LRRK2 RNA guide
gguaagaguagaguggaccca

SEQ ID NO: 38804 - RNA, 21 nt, Artificial Sequence
  LRRK2 RNA guide
guaaccccagcuggguccacu

SEQ ID NO: 38805 - RNA, 21 nt, Artificial Sequence
  LRRK2 RNA guide
guaagaguagaguggacccag

SEQ ID NO: 38806 - RNA, 21 nt, Artificial Sequence
  LRRK2 RNA guide
guagaguggacccagcugggg

SEQ ID NO: 38807 - RNA, 21 nt, Artificial Sequence
  LRRK2 RNA guide
guggacccagcugggguuacc

SEQ ID NO: 38808 - RNA, 21 nt, Artificial Sequence
  LRRK2 RNA guide
uaaccccagcuggguccacuc

SEQ ID NO: 38809 - RNA, 21 nt, Artificial Sequence
  LRRK2 RNA guide
uaagaguagaguggacccagc

SEQ ID NO: 38810 - RNA, 21 nt, Artificial Sequence
  LRRK2 RNA guide
uagaguggacccagcuggggu

SEQ ID NO: 38811 - RNA, 21 nt, Artificial Sequence
  LRRK2 RNA guide
uccuuggguaaccccagcugg

SEQ ID NO: 38812 - RNA, 21 nt, Artificial Sequence
  LRRK2 RNA guide
uggacccagcugggguuaccc

SEQ ID NO: 38813 - RNA, 21 nt, Artificial Sequence
  LRRK2 RNA guide
uggguaaccccagcugggucc

SEQ ID NO: 38814 - RNA, 21 nt, Artificial Sequence
  LRRK2 RNA guide
uggguccacucuacucuuacc

SEQ ID NO: 38815 - RNA, 21 nt, Artificial Sequence
  LRRK2 RNA guide
ugguaagaguagaguggaccc

SEQ ID NO: 38816 - RNA, 21 nt, Artificial Sequence
  LRRK2 RNA guide
uuggguaaccccagcuggguc

SEQ ID NO: 38817 - RNA, 22 nt, Artificial Sequence
  LRRK2 RNA guide
aaccccagcuggguccacucua

SEQ ID NO: 38818 - RNA, 22 nt, Artificial Sequence
  LRRK2 RNA guide
aagaguagaguggacccagcug

SEQ ID NO: 38819 - RNA, 22 nt, Artificial Sequence
  LRRK2 RNA guide
aaugguaagaguagaguggacc

SEQ ID NO: 38820 - RNA, 22 nt, Artificial Sequence
  LRRK2 RNA guide
acccagcugggguuacccaagg

SEQ ID NO: 38821 - RNA, 22 nt, Artificial Sequence
  LRRK2 RNA guide
accccagcuggguccacucuac

SEQ ID NO: 38822 - RNA, 22 nt, Artificial Sequence
  LRRK2 RNA guide
agaguagaguggacccagcugg

SEQ ID NO: 38823 - RNA, 22 nt, Artificial Sequence
  LRRK2 RNA guide
agaguggacccagcugggguua

SEQ ID NO: 38824 - RNA, 22 nt, Artificial Sequence
  LRRK2 RNA guide
agcuggguccacucuacucuua

SEQ ID NO: 38825 - RNA, 22 nt, Artificial Sequence
  LRRK2 RNA guide
aguagaguggacccagcugggg

SEQ ID NO: 38826 - RNA, 22 nt, Artificial Sequence
  LRRK2 RNA guide
aguggacccagcugggguuacc

SEQ ID NO: 38827 - RNA, 22 nt, Artificial Sequence
  LRRK2 RNA guide
augguaagaguagaguggaccc

SEQ ID NO: 38828 - RNA, 22 nt, Artificial Sequence
  LRRK2 RNA guide
cagcuggguccacucuacucuu

SEQ ID NO: 38829 - RNA, 22 nt, Artificial Sequence
  LRRK2 RNA guide
ccagcuggguccacucuacucu

SEQ ID NO: 38830 - RNA, 22 nt, Artificial Sequence
  LRRK2 RNA guide
cccagcugggguuacccaagga

SEQ ID NO: 38831 - RNA, 22 nt, Artificial Sequence
  LRRK2 RNA guide
cccagcuggguccacucuacuc

SEQ ID NO: 38832 - RNA, 22 nt, Artificial Sequence
  LRRK2 RNA guide
ccccagcuggguccacucuacu

SEQ ID NO: 38833 - RNA, 22 nt, Artificial Sequence
  LRRK2 RNA guide
ccuuggguaaccccagcugggu

SEQ ID NO: 38834 - RNA, 22 nt, Artificial Sequence
  LRRK2 RNA guide
cuccuuggguaaccccagcugg

SEQ ID NO: 38835 - RNA, 22 nt, Artificial Sequence
  LRRK2 RNA guide
cuggguccacucuacucuuacc

SEQ ID NO: 38836 - RNA, 22 nt, Artificial Sequence
  LRRK2 RNA guide
cuuggguaaccccagcuggguc

SEQ ID NO: 38837 - RNA, 22 nt, Artificial Sequence
  LRRK2 RNA guide
gacccagcugggguuacccaag

SEQ ID NO: 38838 - RNA, 22 nt, Artificial Sequence
  LRRK2 RNA guide
gaguagaguggacccagcuggg

SEQ ID NO: 38839 - RNA, 22 nt, Artificial Sequence
  LRRK2 RNA guide
gaguggacccagcugggguuac

SEQ ID NO: 38840 - RNA, 22 nt, Artificial Sequence
  LRRK2 RNA guide
gcuggguccacucuacucuuac

SEQ ID NO: 38841 - RNA, 22 nt, Artificial Sequence
  LRRK2 RNA guide
ggacccagcugggguuacccaa

SEQ ID NO: 38842 - RNA, 22 nt, Artificial Sequence
  LRRK2 RNA guide
ggguaaccccagcuggguccac

SEQ ID NO: 38843 - RNA, 22 nt, Artificial Sequence
  LRRK2 RNA guide
ggguccacucuacucuuaccau

SEQ ID NO: 38844 - RNA, 22 nt, Artificial Sequence
  LRRK2 RNA guide
gguaaccccagcuggguccacu

SEQ ID NO: 38845 - RNA, 22 nt, Artificial Sequence
  LRRK2 RNA guide
gguaagaguagaguggacccag

SEQ ID NO: 38846 - RNA, 22 nt, Artificial Sequence
  LRRK2 RNA guide
guaaccccagcuggguccacuc

SEQ ID NO: 38847 - RNA, 22 nt, Artificial Sequence
  LRRK2 RNA guide
guaagaguagaguggacccagc

SEQ ID NO: 38848 - RNA, 22 nt, Artificial Sequence
  LRRK2 RNA guide
guagaguggacccagcuggggu

SEQ ID NO: 38849 - RNA, 22 nt, Artificial Sequence
  LRRK2 RNA guide
guggacccagcugggguuaccc

SEQ ID NO: 38850 - RNA, 22 nt, Artificial Sequence
  LRRK2 RNA guide
uaaccccagcuggguccacucu

SEQ ID NO: 38851 - RNA, 22 nt, Artificial Sequence
  LRRK2 RNA guide
uaagaguagaguggacccagcu

SEQ ID NO: 38852 - RNA, 22 nt, Artificial Sequence
  LRRK2 RNA guide
uagaguggacccagcugggguu

SEQ ID NO: 38853 - RNA, 22 nt, Artificial Sequence
  LRRK2 RNA guide
uccuuggguaaccccagcuggg

SEQ ID NO: 38854 - RNA, 22 nt, Artificial Sequence
  LRRK2 RNA guide
uggacccagcugggguuaccca

SEQ ID NO: 38855 - RNA, 22 nt, Artificial Sequence
  LRRK2 RNA guide
uggguaaccccagcugggucca

SEQ ID NO: 38856 - RNA, 22 nt, Artificial Sequence
  LRRK2 RNA guide
uggguccacucuacucuuacca

SEQ ID NO: 38857 - RNA, 22 nt, Artificial Sequence
  LRRK2 RNA guide
ugguaagaguagaguggaccca

SEQ ID NO: 38858 - RNA, 22 nt, Artificial Sequence
  LRRK2 RNA guide
uuggguaaccccagcugggucc

SEQ ID NO: 38859 - RNA, 20 nt, Artificial Sequence
  LRRK2 RNA guide
aaaaaagcuugaacucaggu

SEQ ID NO: 38860 - RNA, 20 nt, Artificial Sequence
  LRRK2 RNA guide
aaaaagcuugaacucagguc

SEQ ID NO: 38861 - RNA, 20 nt, Artificial Sequence
  LRRK2 RNA guide
aaaagcuugaacucagguca

SEQ ID NO: 38862 - RNA, 20 nt, Artificial Sequence
  LRRK2 RNA guide
aaagcuugaacucaggucau

SEQ ID NO: 38863 - RNA, 20 nt, Artificial Sequence
  LRRK2 RNA guide
aacucaggucauggcaacaa

SEQ ID NO: 38864 - RNA, 20 nt, Artificial Sequence
  LRRK2 RNA guide
aagcuugaacucaggucaug

SEQ ID NO: 38865 - RNA, 20 nt, Artificial Sequence
  LRRK2 RNA guide
accugaguucaagcuuuuuu

SEQ ID NO: 38866 - RNA, 20 nt, Artificial Sequence
  LRRK2 RNA guide
acucaggucauggcaacaaa

SEQ ID NO: 38867 - RNA, 20 nt, Artificial Sequence
  LRRK2 RNA guide
agcuugaacucaggucaugg

SEQ ID NO: 38868 - RNA, 20 nt, Artificial Sequence
  LRRK2 RNA guide
aggucauggcaacaaaaaua

SEQ ID NO: 38869 - RNA, 20 nt, Artificial Sequence
  LRRK2 RNA guide
augaccugaguucaagcuuu

SEQ ID NO: 38870 - RNA, 20 nt, Artificial Sequence
  LRRK2 RNA guide
auuuuuguugccaugaccug

SEQ ID NO: 38871 - RNA, 20 nt, Artificial Sequence
  LRRK2 RNA guide
caggucauggcaacaaaaau

SEQ ID NO: 38872 - RNA, 20 nt, Artificial Sequence
  LRRK2 RNA guide
caugaccugaguucaagcuu

SEQ ID NO: 38873 - RNA, 20 nt, Artificial Sequence
  LRRK2 RNA guide
ccaugaccugaguucaagcu

SEQ ID NO: 38874 - RNA, 20 nt, Artificial Sequence
  LRRK2 RNA guide
cuauuuuuguugccaugacc

SEQ ID NO: 38875 - RNA, 20 nt, Artificial Sequence
  LRRK2 RNA guide
cucaggucauggcaacaaaa

SEQ ID NO: 38876 - RNA, 20 nt, Artificial Sequence
  LRRK2 RNA guide
cuuuucuauuuuuguugcca

SEQ ID NO: 38877 - RNA, 20 nt, Artificial Sequence
  LRRK2 RNA guide
gaacucaggucauggcaaca

SEQ ID NO: 38878 - RNA, 20 nt, Artificial Sequence
  LRRK2 RNA guide
gaccugaguucaagcuuuuu

SEQ ID NO: 38879 - RNA, 20 nt, Artificial Sequence
  LRRK2 RNA guide
gccaugaccugaguucaagc

SEQ ID NO: 38880 - RNA, 20 nt, Artificial Sequence
  LRRK2 RNA guide
gcuugaacucaggucauggc

SEQ ID NO: 38881 - RNA, 20 nt, Artificial Sequence
  LRRK2 RNA guide
guugccaugaccugaguuca

SEQ ID NO: 38882 - RNA, 20 nt, Artificial Sequence
  LRRK2 RNA guide
uauuuuuguugccaugaccu

SEQ ID NO: 38883 - RNA, 20 nt, Artificial Sequence
  LRRK2 RNA guide
ucaggucauggcaacaaaaa

SEQ ID NO: 38884 - RNA, 20 nt, Artificial Sequence
  LRRK2 RNA guide
ucuauuuuuguugccaugac

SEQ ID NO: 38885 - RNA, 20 nt, Artificial Sequence
  LRRK2 RNA guide
ugaacucaggucauggcaac

SEQ ID NO: 38886 - RNA, 20 nt, Artificial Sequence
  LRRK2 RNA guide
ugaccugaguucaagcuuuu

SEQ ID NO: 38887 - RNA, 20 nt, Artificial Sequence
  LRRK2 RNA guide
ugccaugaccugaguucaag

SEQ ID NO: 38888 - RNA, 20 nt, Artificial Sequence
  LRRK2 RNA guide
uguugccaugaccugaguuc

SEQ ID NO: 38889 - RNA, 20 nt, Artificial Sequence
  LRRK2 RNA guide
uucuauuuuuguugccauga

SEQ ID NO: 38890 - RNA, 20 nt, Artificial Sequence
  LRRK2 RNA guide
uugaacucaggucauggcaa

SEQ ID NO: 38891 - RNA, 20 nt, Artificial Sequence
  LRRK2 RNA guide
uugccaugaccugaguucaa

SEQ ID NO: 38892 - RNA, 20 nt, Artificial Sequence
  LRRK2 RNA guide
uuguugccaugaccugaguu

SEQ ID NO: 38893 - RNA, 20 nt, Artificial Sequence
  LRRK2 RNA guide
uuucuauuuuuguugccaug

SEQ ID NO: 38894 - RNA, 20 nt, Artificial Sequence
  LRRK2 RNA guide
uuuguugccaugaccugagu

SEQ ID NO: 38895 - RNA, 20 nt, Artificial Sequence
  LRRK2 RNA guide
uuuuguugccaugaccugag

SEQ ID NO: 38896 - RNA, 20 nt, Artificial Sequence
  LRRK2 RNA guide
uuuuuguugccaugaccuga

SEQ ID NO: 38897 - RNA, 21 nt, Artificial Sequence
  LRRK2 RNA guide
aaaaaagcuugaacucagguc

SEQ ID NO: 38898 - RNA, 21 nt, Artificial Sequence
  LRRK2 RNA guide
aaaaagcuugaacucagguca

SEQ ID NO: 38899 - RNA, 21 nt, Artificial Sequence
  LRRK2 RNA guide
aaaagcuugaacucaggucau

SEQ ID NO: 38900 - RNA, 21 nt, Artificial Sequence
  LRRK2 RNA guide
aaagcuugaacucaggucaug

SEQ ID NO: 38901 - RNA, 21 nt, Artificial Sequence
  LRRK2 RNA guide
aacucaggucauggcaacaaa

SEQ ID NO: 38902 - RNA, 21 nt, Artificial Sequence
  LRRK2 RNA guide
aagcuugaacucaggucaugg

SEQ ID NO: 38903 - RNA, 21 nt, Artificial Sequence
  LRRK2 RNA guide
acucaggucauggcaacaaaa

SEQ ID NO: 38904 - RNA, 21 nt, Artificial Sequence
  LRRK2 RNA guide
agcuugaacucaggucauggc

SEQ ID NO: 38905 - RNA, 21 nt, Artificial Sequence
  LRRK2 RNA guide
aggucauggcaacaaaaauag

SEQ ID NO: 38906 - RNA, 21 nt, Artificial Sequence
  LRRK2 RNA guide
augaccugaguucaagcuuuu

SEQ ID NO: 38907 - RNA, 21 nt, Artificial Sequence
  LRRK2 RNA guide
auuuuuguugccaugaccuga

SEQ ID NO: 38908 - RNA, 21 nt, Artificial Sequence
  LRRK2 RNA guide
caggucauggcaacaaaaaua

SEQ ID NO: 38909 - RNA, 21 nt, Artificial Sequence
  LRRK2 RNA guide
caugaccugaguucaagcuuu

SEQ ID NO: 38910 - RNA, 21 nt, Artificial Sequence
  LRRK2 RNA guide
ccaugaccugaguucaagcuu

SEQ ID NO: 38911 - RNA, 21 nt, Artificial Sequence
  LRRK2 RNA guide
cuauuuuuguugccaugaccu

SEQ ID NO: 38912 - RNA, 21 nt, Artificial Sequence
  LRRK2 RNA guide
cucaggucauggcaacaaaaa

SEQ ID NO: 38913 - RNA, 21 nt, Artificial Sequence
  LRRK2 RNA guide
cuugaacucaggucauggcaa

SEQ ID NO: 38914 - RNA, 21 nt, Artificial Sequence
  LRRK2 RNA guide
gaacucaggucauggcaacaa

SEQ ID NO: 38915 - RNA, 21 nt, Artificial Sequence
  LRRK2 RNA guide
gaccugaguucaagcuuuuuu

SEQ ID NO: 38916 - RNA, 21 nt, Artificial Sequence
  LRRK2 RNA guide
gccaugaccugaguucaagcu

SEQ ID NO: 38917 - RNA, 21 nt, Artificial Sequence
  LRRK2 RNA guide
gcuugaacucaggucauggca

SEQ ID NO: 38918 - RNA, 21 nt, Artificial Sequence
  LRRK2 RNA guide
guugccaugaccugaguucaa

SEQ ID NO: 38919 - RNA, 21 nt, Artificial Sequence
  LRRK2 RNA guide
uauuuuuguugccaugaccug

SEQ ID NO: 38920 - RNA, 21 nt, Artificial Sequence
  LRRK2 RNA guide
ucaggucauggcaacaaaaau

SEQ ID NO: 38921 - RNA, 21 nt, Artificial Sequence
  LRRK2 RNA guide
ucuauuuuuguugccaugacc

SEQ ID NO: 38922 - RNA, 21 nt, Artificial Sequence
  LRRK2 RNA guide
ugaacucaggucauggcaaca

SEQ ID NO: 38923 - RNA, 21 nt, Artificial Sequence
  LRRK2 RNA guide
ugaccugaguucaagcuuuuu

SEQ ID NO: 38924 - RNA, 21 nt, Artificial Sequence
  LRRK2 RNA guide
ugccaugaccugaguucaagc

SEQ ID NO: 38925 - RNA, 21 nt, Artificial Sequence
  LRRK2 RNA guide
uguugccaugaccugaguuca

SEQ ID NO: 38926 - RNA, 21 nt, Artificial Sequence
  LRRK2 RNA guide
uucuauuuuuguugccaugac

SEQ ID NO: 38927 - RNA, 21 nt, Artificial Sequence
  LRRK2 RNA guide
uugaacucaggucauggcaac

SEQ ID NO: 38928 - RNA, 21 nt, Artificial Sequence
  LRRK2 RNA guide
uugccaugaccugaguucaag

SEQ ID NO: 38929 - RNA, 21 nt, Artificial Sequence
  LRRK2 RNA guide
uuguugccaugaccugaguuc

SEQ ID NO: 38930 - RNA, 21 nt, Artificial Sequence
  LRRK2 RNA guide
uuuguugccaugaccugaguu

SEQ ID NO: 38931 - RNA, 21 nt, Artificial Sequence
  LRRK2 RNA guide
uuuuguugccaugaccugagu

SEQ ID NO: 38932 - RNA, 21 nt, Artificial Sequence
  LRRK2 RNA guide
uuuuuguugccaugaccugag

SEQ ID NO: 38933 - RNA, 22 nt, Artificial Sequence
  LRRK2 RNA guide
aaaaaagcuugaacucagguca

SEQ ID NO: 38934 - RNA, 22 nt, Artificial Sequence
  LRRK2 RNA guide
aaaaagcuugaacucaggucau

SEQ ID NO: 38935 - RNA, 22 nt, Artificial Sequence
  LRRK2 RNA guide
aaaagcuugaacucaggucaug

SEQ ID NO: 38936 - RNA, 22 nt, Artificial Sequence
  LRRK2 RNA guide
aaagcuugaacucaggucaugg

SEQ ID NO: 38937 - RNA, 22 nt, Artificial Sequence
  LRRK2 RNA guide
aacucaggucauggcaacaaaa

SEQ ID NO: 38938 - RNA, 22 nt, Artificial Sequence
  LRRK2 RNA guide
aagcuugaacucaggucauggc

SEQ ID NO: 38939 - RNA, 22 nt, Artificial Sequence
  LRRK2 RNA guide
acucaggucauggcaacaaaaa

SEQ ID NO: 38940 - RNA, 22 nt, Artificial Sequence
  LRRK2 RNA guide
agcuugaacucaggucauggca

SEQ ID NO: 38941 - RNA, 22 nt, Artificial Sequence
  LRRK2 RNA guide
aggucauggcaacaaaaauaga

SEQ ID NO: 38942 - RNA, 22 nt, Artificial Sequence
  LRRK2 RNA guide
augaccugaguucaagcuuuuu

SEQ ID NO: 38943 - RNA, 22 nt, Artificial Sequence
  LRRK2 RNA guide
auuuuuguugccaugaccugag

SEQ ID NO: 38944 - RNA, 22 nt, Artificial Sequence
  LRRK2 RNA guide
caggucauggcaacaaaaauag

SEQ ID NO: 38945 - RNA, 22 nt, Artificial Sequence
  LRRK2 RNA guide
caugaccugaguucaagcuuuu

SEQ ID NO: 38946 - RNA, 22 nt, Artificial Sequence
  LRRK2 RNA guide
ccaugaccugaguucaagcuuu

SEQ ID NO: 38947 - RNA, 22 nt, Artificial Sequence
  LRRK2 RNA guide
cuauuuuuguugccaugaccug

SEQ ID NO: 38948 - RNA, 22 nt, Artificial Sequence
  LRRK2 RNA guide
cucaggucauggcaacaaaaau

SEQ ID NO: 38949 - RNA, 22 nt, Artificial Sequence
  LRRK2 RNA guide
cuugaacucaggucauggcaac

SEQ ID NO: 38950 - RNA, 22 nt, Artificial Sequence
  LRRK2 RNA guide
cuuuucuauuuuuguugccaug

SEQ ID NO: 38951 - RNA, 22 nt, Artificial Sequence
  LRRK2 RNA guide
gaacucaggucauggcaacaaa

SEQ ID NO: 38952 - RNA, 22 nt, Artificial Sequence
  LRRK2 RNA guide
gccaugaccugaguucaagcuu

SEQ ID NO: 38953 - RNA, 22 nt, Artificial Sequence
  LRRK2 RNA guide
gcuugaacucaggucauggcaa

SEQ ID NO: 38954 - RNA, 22 nt, Artificial Sequence
  LRRK2 RNA guide
guugccaugaccugaguucaag

SEQ ID NO: 38955 - RNA, 22 nt, Artificial Sequence
  LRRK2 RNA guide
uauuuuuguugccaugaccuga

SEQ ID NO: 38956 - RNA, 22 nt, Artificial Sequence
  LRRK2 RNA guide
ucaggucauggcaacaaaaaua

SEQ ID NO: 38957 - RNA, 22 nt, Artificial Sequence
  LRRK2 RNA guide
ucuauuuuuguugccaugaccu

SEQ ID NO: 38958 - RNA, 22 nt, Artificial Sequence
  LRRK2 RNA guide
ugaacucaggucauggcaacaa

SEQ ID NO: 38959 - RNA, 22 nt, Artificial Sequence
  LRRK2 RNA guide
ugaccugaguucaagcuuuuuu

SEQ ID NO: 38960 - RNA, 22 nt, Artificial Sequence
  LRRK2 RNA guide
ugccaugaccugaguucaagcu

SEQ ID NO: 38961 - RNA, 22 nt, Artificial Sequence
  LRRK2 RNA guide
uguugccaugaccugaguucaa

SEQ ID NO: 38962 - RNA, 22 nt, Artificial Sequence
  LRRK2 RNA guide
uucuauuuuuguugccaugacc

SEQ ID NO: 38963 - RNA, 22 nt, Artificial Sequence
  LRRK2 RNA guide
uugaacucaggucauggcaaca

SEQ ID NO: 38964 - RNA, 22 nt, Artificial Sequence
  LRRK2 RNA guide
uugccaugaccugaguucaagc

SEQ ID NO: 38965 - RNA, 22 nt, Artificial Sequence
  LRRK2 RNA guide
uuguugccaugaccugaguuca

SEQ ID NO: 38966 - RNA, 22 nt, Artificial Sequence
  LRRK2 RNA guide
uuucuauuuuuguugccaugac

SEQ ID NO: 38967 - RNA, 22 nt, Artificial Sequence
  LRRK2 RNA guide
uuuguugccaugaccugaguuc

SEQ ID NO: 38968 - RNA, 22 nt, Artificial Sequence
  LRRK2 RNA guide
uuuuguugccaugaccugaguu

SEQ ID NO: 38969 - RNA, 22 nt, Artificial Sequence
  LRRK2 RNA guide
uuuuuguugccaugaccugagu

SEQ ID NO: 38970 - RNA, 20 nt, Artificial Sequence
  LRRK2 RNA guide
aaaaaagcuugaacucaagu

SEQ ID NO: 38971 - RNA, 20 nt, Artificial Sequence
  LRRK2 RNA guide
aaaaagcuugaacucaaguc

SEQ ID NO: 38972 - RNA, 20 nt, Artificial Sequence
  LRRK2 RNA guide
aaaagcuugaacucaaguca

SEQ ID NO: 38973 - RNA, 20 nt, Artificial Sequence
  LRRK2 RNA guide
aaagcuugaacucaagucau

SEQ ID NO: 38974 - RNA, 20 nt, Artificial Sequence
  LRRK2 RNA guide
aacucaagucauggcaacaa

SEQ ID NO: 38975 - RNA, 20 nt, Artificial Sequence
  LRRK2 RNA guide
aagcuugaacucaagucaug

SEQ ID NO: 38976 - RNA, 20 nt, Artificial Sequence
  LRRK2 RNA guide
aagucauggcaacaaaaaua

SEQ ID NO: 38977 - RNA, 20 nt, Artificial Sequence
  LRRK2 RNA guide
acucaagucauggcaacaaa

SEQ ID NO: 38978 - RNA, 20 nt, Artificial Sequence
  LRRK2 RNA guide
acuugaguucaagcuuuuuu

SEQ ID NO: 38979 - RNA, 20 nt, Artificial Sequence
  LRRK2 RNA guide
agcuugaacucaagucaugg

SEQ ID NO: 38980 - RNA, 20 nt, Artificial Sequence
  LRRK2 RNA guide
augacuugaguucaagcuuu

SEQ ID NO: 38981 - RNA, 20 nt, Artificial Sequence
  LRRK2 RNA guide
auuuuuguugccaugacuug

SEQ ID NO: 38982 - RNA, 20 nt, Artificial Sequence
  LRRK2 RNA guide
caagucauggcaacaaaaau

SEQ ID NO: 38983 - RNA, 20 nt, Artificial Sequence
  LRRK2 RNA guide
caugacuugaguucaagcuu

SEQ ID NO: 38984 - RNA, 20 nt, Artificial Sequence
  LRRK2 RNA guide
ccaugacuugaguucaagcu

SEQ ID NO: 38985 - RNA, 20 nt, Artificial Sequence
  LRRK2 RNA guide
cuauuuuuguugccaugacu

SEQ ID NO: 38986 - RNA, 20 nt, Artificial Sequence
  LRRK2 RNA guide
cucaagucauggcaacaaaa

SEQ ID NO: 38987 - RNA, 20 nt, Artificial Sequence
  LRRK2 RNA guide
cuugaacucaagucauggca

SEQ ID NO: 38988 - RNA, 20 nt, Artificial Sequence
  LRRK2 RNA guide
gaacucaagucauggcaaca

SEQ ID NO: 38989 - RNA, 20 nt, Artificial Sequence
  LRRK2 RNA guide
gacuugaguucaagcuuuuu

SEQ ID NO: 38990 - RNA, 20 nt, Artificial Sequence
  LRRK2 RNA guide
gccaugacuugaguucaagc

SEQ ID NO: 38991 - RNA, 20 nt, Artificial Sequence
  LRRK2 RNA guide
gcuugaacucaagucauggc

SEQ ID NO: 38992 - RNA, 20 nt, Artificial Sequence
  LRRK2 RNA guide
guugccaugacuugaguuca

SEQ ID NO: 38993 - RNA, 20 nt, Artificial Sequence
  LRRK2 RNA guide
uauuuuuguugccaugacuu

SEQ ID NO: 38994 - RNA, 20 nt, Artificial Sequence
  LRRK2 RNA guide
ucaagucauggcaacaaaaa

SEQ ID NO: 38995 - RNA, 20 nt, Artificial Sequence
  LRRK2 RNA guide
ugaacucaagucauggcaac

SEQ ID NO: 38996 - RNA, 20 nt, Artificial Sequence
  LRRK2 RNA guide
ugacuugaguucaagcuuuu

SEQ ID NO: 38997 - RNA, 20 nt, Artificial Sequence
  LRRK2 RNA guide
ugccaugacuugaguucaag

SEQ ID NO: 38998 - RNA, 20 nt, Artificial Sequence
  LRRK2 RNA guide
uguugccaugacuugaguuc

SEQ ID NO: 38999 - RNA, 20 nt, Artificial Sequence
  LRRK2 RNA guide
uugaacucaagucauggcaa

SEQ ID NO: 39000 - RNA, 20 nt, Artificial Sequence
  LRRK2 RNA guide
uugccaugacuugaguucaa

SEQ ID NO: 39001 - RNA, 20 nt, Artificial Sequence
  LRRK2 RNA guide
uuguugccaugacuugaguu

SEQ ID NO: 39002 - RNA, 20 nt, Artificial Sequence
  LRRK2 RNA guide
uuuguugccaugacuugagu

SEQ ID NO: 39003 - RNA, 20 nt, Artificial Sequence
  LRRK2 RNA guide
uuuuguugccaugacuugag

SEQ ID NO: 39004 - RNA, 20 nt, Artificial Sequence
  LRRK2 RNA guide
uuuuuguugccaugacuuga

SEQ ID NO: 39005 - RNA, 21 nt, Artificial Sequence
  LRRK2 RNA guide
aaaaaagcuugaacucaaguc

SEQ ID NO: 39006 - RNA, 21 nt, Artificial Sequence
  LRRK2 RNA guide
aaaaagcuugaacucaaguca

SEQ ID NO: 39007 - RNA, 21 nt, Artificial Sequence
  LRRK2 RNA guide
aaaagcuugaacucaagucau

SEQ ID NO: 39008 - RNA, 21 nt, Artificial Sequence
  LRRK2 RNA guide
aaagcuugaacucaagucaug

SEQ ID NO: 39009 - RNA, 21 nt, Artificial Sequence
  LRRK2 RNA guide
aacucaagucauggcaacaaa

SEQ ID NO: 39010 - RNA, 21 nt, Artificial Sequence
  LRRK2 RNA guide
aagcuugaacucaagucaugg

SEQ ID NO: 39011 - RNA, 21 nt, Artificial Sequence
  LRRK2 RNA guide
aagucauggcaacaaaaauag

SEQ ID NO: 39012 - RNA, 21 nt, Artificial Sequence
  LRRK2 RNA guide
acucaagucauggcaacaaaa

SEQ ID NO: 39013 - RNA, 21 nt, Artificial Sequence
  LRRK2 RNA guide
agcuugaacucaagucauggc

SEQ ID NO: 39014 - RNA, 21 nt, Artificial Sequence
  LRRK2 RNA guide
augacuugaguucaagcuuuu

SEQ ID NO: 39015 - RNA, 21 nt, Artificial Sequence
  LRRK2 RNA guide
auuuuuguugccaugacuuga

SEQ ID NO: 39016 - RNA, 21 nt, Artificial Sequence
  LRRK2 RNA guide
caagucauggcaacaaaaaua

SEQ ID NO: 39017 - RNA, 21 nt, Artificial Sequence
  LRRK2 RNA guide
caugacuugaguucaagcuuu

SEQ ID NO: 39018 - RNA, 21 nt, Artificial Sequence
  LRRK2 RNA guide
ccaugacuugaguucaagcuu

SEQ ID NO: 39019 - RNA, 21 nt, Artificial Sequence
  LRRK2 RNA guide
cuauuuuuguugccaugacuu

SEQ ID NO: 39020 - RNA, 21 nt, Artificial Sequence
  LRRK2 RNA guide
cucaagucauggcaacaaaaa

SEQ ID NO: 39021 - RNA, 21 nt, Artificial Sequence
  LRRK2 RNA guide
cuugaacucaagucauggcaa

SEQ ID NO: 39022 - RNA, 21 nt, Artificial Sequence
  LRRK2 RNA guide
gaacucaagucauggcaacaa

SEQ ID NO: 39023 - RNA, 21 nt, Artificial Sequence
  LRRK2 RNA guide
gacuugaguucaagcuuuuuu

SEQ ID NO: 39024 - RNA, 21 nt, Artificial Sequence
  LRRK2 RNA guide
gccaugacuugaguucaagcu

SEQ ID NO: 39025 - RNA, 21 nt, Artificial Sequence
  LRRK2 RNA guide
gcuugaacucaagucauggca

SEQ ID NO: 39026 - RNA, 21 nt, Artificial Sequence
  LRRK2 RNA guide
guugccaugacuugaguucaa

SEQ ID NO: 39027 - RNA, 21 nt, Artificial Sequence
  LRRK2 RNA guide
uauuuuuguugccaugacuug

SEQ ID NO: 39028 - RNA, 21 nt, Artificial Sequence
  LRRK2 RNA guide
ucaagucauggcaacaaaaau

SEQ ID NO: 39029 - RNA, 21 nt, Artificial Sequence
  LRRK2 RNA guide
ucuauuuuuguugccaugacu

SEQ ID NO: 39030 - RNA, 21 nt, Artificial Sequence
  LRRK2 RNA guide
ugaacucaagucauggcaaca

SEQ ID NO: 39031 - RNA, 21 nt, Artificial Sequence
  LRRK2 RNA guide
ugacuugaguucaagcuuuuu

SEQ ID NO: 39032 - RNA, 21 nt, Artificial Sequence
  LRRK2 RNA guide
ugccaugacuugaguucaagc

SEQ ID NO: 39033 - RNA, 21 nt, Artificial Sequence
  LRRK2 RNA guide
uguugccaugacuugaguuca

SEQ ID NO: 39034 - RNA, 21 nt, Artificial Sequence
  LRRK2 RNA guide
uugaacucaagucauggcaac

SEQ ID NO: 39035 - RNA, 21 nt, Artificial Sequence
  LRRK2 RNA guide
uugccaugacuugaguucaag

SEQ ID NO: 39036 - RNA, 21 nt, Artificial Sequence
  LRRK2 RNA guide
uuguugccaugacuugaguuc

SEQ ID NO: 39037 - RNA, 21 nt, Artificial Sequence
  LRRK2 RNA guide
uuuguugccaugacuugaguu

SEQ ID NO: 39038 - RNA, 21 nt, Artificial Sequence
  LRRK2 RNA guide
uuuuguugccaugacuugagu

SEQ ID NO: 39039 - RNA, 21 nt, Artificial Sequence
  LRRK2 RNA guide
uuuuuguugccaugacuugag

SEQ ID NO: 39040 - RNA, 22 nt, Artificial Sequence
  LRRK2 RNA guide
aaaaaagcuugaacucaaguca

SEQ ID NO: 39041 - RNA, 22 nt, Artificial Sequence
  LRRK2 RNA guide
aaaaagcuugaacucaagucau

SEQ ID NO: 39042 - RNA, 22 nt, Artificial Sequence
  LRRK2 RNA guide
aaaagcuugaacucaagucaug

SEQ ID NO: 39043 - RNA, 22 nt, Artificial Sequence
  LRRK2 RNA guide
aaagcuugaacucaagucaugg

SEQ ID NO: 39044 - RNA, 22 nt, Artificial Sequence
  LRRK2 RNA guide
aacucaagucauggcaacaaaa

SEQ ID NO: 39045 - RNA, 22 nt, Artificial Sequence
  LRRK2 RNA guide
aagcuugaacucaagucauggc

SEQ ID NO: 39046 - RNA, 22 nt, Artificial Sequence
  LRRK2 RNA guide
aagucauggcaacaaaaauaga

SEQ ID NO: 39047 - RNA, 22 nt, Artificial Sequence
  LRRK2 RNA guide
acucaagucauggcaacaaaaa

SEQ ID NO: 39048 - RNA, 22 nt, Artificial Sequence
  LRRK2 RNA guide
agcuugaacucaagucauggca

SEQ ID NO: 39049 - RNA, 22 nt, Artificial Sequence
  LRRK2 RNA guide
augacuugaguucaagcuuuuu

SEQ ID NO: 39050 - RNA, 22 nt, Artificial Sequence
  LRRK2 RNA guide
auuuuuguugccaugacuugag

SEQ ID NO: 39051 - RNA, 22 nt, Artificial Sequence
  LRRK2 RNA guide
caagucauggcaacaaaaauag

SEQ ID NO: 39052 - RNA, 22 nt, Artificial Sequence
  LRRK2 RNA guide
caugacuugaguucaagcuuuu

SEQ ID NO: 39053 - RNA, 22 nt, Artificial Sequence
  LRRK2 RNA guide
ccaugacuugaguucaagcuuu

SEQ ID NO: 39054 - RNA, 22 nt, Artificial Sequence
  LRRK2 RNA guide
cuauuuuuguugccaugacuug

SEQ ID NO: 39055 - RNA, 22 nt, Artificial Sequence
  LRRK2 RNA guide
cucaagucauggcaacaaaaau

SEQ ID NO: 39056 - RNA, 22 nt, Artificial Sequence
  LRRK2 RNA guide
cuugaacucaagucauggcaac

SEQ ID NO: 39057 - RNA, 22 nt, Artificial Sequence
  LRRK2 RNA guide
gaacucaagucauggcaacaaa

SEQ ID NO: 39058 - RNA, 22 nt, Artificial Sequence
  LRRK2 RNA guide
gccaugacuugaguucaagcuu

SEQ ID NO: 39059 - RNA, 22 nt, Artificial Sequence
  LRRK2 RNA guide
gcuugaacucaagucauggcaa

SEQ ID NO: 39060 - RNA, 22 nt, Artificial Sequence
  LRRK2 RNA guide
guugccaugacuugaguucaag

SEQ ID NO: 39061 - RNA, 22 nt, Artificial Sequence
  LRRK2 RNA guide
uauuuuuguugccaugacuuga

SEQ ID NO: 39062 - RNA, 22 nt, Artificial Sequence
  LRRK2 RNA guide
ucaagucauggcaacaaaaaua

SEQ ID NO: 39063 - RNA, 22 nt, Artificial Sequence
  LRRK2 RNA guide
ucuauuuuuguugccaugacuu

SEQ ID NO: 39064 - RNA, 22 nt, Artificial Sequence
  LRRK2 RNA guide
ugaacucaagucauggcaacaa

SEQ ID NO: 39065 - RNA, 22 nt, Artificial Sequence
  LRRK2 RNA guide
ugacuugaguucaagcuuuuuu

SEQ ID NO: 39066 - RNA, 22 nt, Artificial Sequence
  LRRK2 RNA guide
ugccaugacuugaguucaagcu

SEQ ID NO: 39067 - RNA, 22 nt, Artificial Sequence
  LRRK2 RNA guide
uguugccaugacuugaguucaa

SEQ ID NO: 39068 - RNA, 22 nt, Artificial Sequence
  LRRK2 RNA guide
uucuauuuuuguugccaugacu

SEQ ID NO: 39069 - RNA, 22 nt, Artificial Sequence
  LRRK2 RNA guide
uugaacucaagucauggcaaca

SEQ ID NO: 39070 - RNA, 22 nt, Artificial Sequence
  LRRK2 RNA guide
uugccaugacuugaguucaagc

SEQ ID NO: 39071 - RNA, 22 nt, Artificial Sequence
  LRRK2 RNA guide
uuguugccaugacuugaguuca

SEQ ID NO: 39072 - RNA, 22 nt, Artificial Sequence
  LRRK2 RNA guide
uuuguugccaugacuugaguuc

SEQ ID NO: 39073 - RNA, 22 nt, Artificial Sequence
  LRRK2 RNA guide
uuuuguugccaugacuugaguu

SEQ ID NO: 39074 - RNA, 22 nt, Artificial Sequence
  LRRK2 RNA guide
uuuuuguugccaugacuugagu

SEQ ID NO: 39075 - RNA, 20 nt, Artificial Sequence
  LRRK2 RNA guide
aaaguuuaacagcaucacag

SEQ ID NO: 39076 - RNA, 20 nt, Artificial Sequence
  LRRK2 RNA guide
aacagcaucacagugcuuag

SEQ ID NO: 39077 - RNA, 20 nt, Artificial Sequence
  LRRK2 RNA guide
aagcacugugaugcuguuaa

SEQ ID NO: 39078 - RNA, 20 nt, Artificial Sequence
  LRRK2 RNA guide
aagugcuucuuauguucuaa

SEQ ID NO: 39079 - RNA, 20 nt, Artificial Sequence
  LRRK2 RNA guide
aaguuuaacagcaucacagu

SEQ ID NO: 39080 - RNA, 20 nt, Artificial Sequence
  LRRK2 RNA guide
acagcaucacagugcuuaga

SEQ ID NO: 39081 - RNA, 20 nt, Artificial Sequence
  LRRK2 RNA guide
acagugcuuagaacauaaga

SEQ ID NO: 39082 - RNA, 20 nt, Artificial Sequence
  LRRK2 RNA guide
agcacugugaugcuguuaaa

SEQ ID NO: 39083 - RNA, 20 nt, Artificial Sequence
  LRRK2 RNA guide
agcaucacagugcuuagaac

SEQ ID NO: 39084 - RNA, 20 nt, Artificial Sequence
  LRRK2 RNA guide
agugcuuagaacauaagaag

SEQ ID NO: 39085 - RNA, 20 nt, Artificial Sequence
  LRRK2 RNA guide
agugcuucuuauguucuaag

SEQ ID NO: 39086 - RNA, 20 nt, Artificial Sequence
  LRRK2 RNA guide
aguuuaacagcaucacagug

SEQ ID NO: 39087 - RNA, 20 nt, Artificial Sequence
  LRRK2 RNA guide
aucacagugcuuagaacaua

SEQ ID NO: 39088 - RNA, 20 nt, Artificial Sequence
  LRRK2 RNA guide
auguucuaagcacugugaug

SEQ ID NO: 39089 - RNA, 20 nt, Artificial Sequence
  LRRK2 RNA guide
auuaagugcuucuuauguuc

SEQ ID NO: 39090 - RNA, 20 nt, Artificial Sequence
  LRRK2 RNA guide
cacagugcuuagaacauaag

SEQ ID NO: 39091 - RNA, 20 nt, Artificial Sequence
  LRRK2 RNA guide
cagcaucacagugcuuagaa

SEQ ID NO: 39092 - RNA, 20 nt, Artificial Sequence
  LRRK2 RNA guide
cagugcuuagaacauaagaa

SEQ ID NO: 39093 - RNA, 20 nt, Artificial Sequence
  LRRK2 RNA guide
caucacagugcuuagaacau

SEQ ID NO: 39094 - RNA, 20 nt, Artificial Sequence
  LRRK2 RNA guide
cuaagcacugugaugcuguu

SEQ ID NO: 39095 - RNA, 20 nt, Artificial Sequence
  LRRK2 RNA guide
cuuauguucuaagcacugug

SEQ ID NO: 39096 - RNA, 20 nt, Artificial Sequence
  LRRK2 RNA guide
cuucuuauguucuaagcacu

SEQ ID NO: 39097 - RNA, 20 nt, Artificial Sequence
  LRRK2 RNA guide
gcacugugaugcuguuaaac

SEQ ID NO: 39098 - RNA, 20 nt, Artificial Sequence
  LRRK2 RNA guide
gcaucacagugcuuagaaca

SEQ ID NO: 39099 - RNA, 20 nt, Artificial Sequence
  LRRK2 RNA guide
gcuucuuauguucuaagcac

SEQ ID NO: 39100 - RNA, 20 nt, Artificial Sequence
  LRRK2 RNA guide
gugcuuagaacauaagaagc

SEQ ID NO: 39101 - RNA, 20 nt, Artificial Sequence
  LRRK2 RNA guide
gugcuucuuauguucuaagc

SEQ ID NO: 39102 - RNA, 20 nt, Artificial Sequence
  LRRK2 RNA guide
guucuaagcacugugaugcu

SEQ ID NO: 39103 - RNA, 20 nt, Artificial Sequence
  LRRK2 RNA guide
guuuaacagcaucacagugc

SEQ ID NO: 39104 - RNA, 20 nt, Artificial Sequence
  LRRK2 RNA guide
uaaaguuuaacagcaucaca

SEQ ID NO: 39105 - RNA, 20 nt, Artificial Sequence
  LRRK2 RNA guide
uaacagcaucacagugcuua

SEQ ID NO: 39106 - RNA, 20 nt, Artificial Sequence
  LRRK2 RNA guide
uaagcacugugaugcuguua

SEQ ID NO: 39107 - RNA, 20 nt, Artificial Sequence
  LRRK2 RNA guide
uaagugcuucuuauguucua

SEQ ID NO: 39108 - RNA, 20 nt, Artificial Sequence
  LRRK2 RNA guide
uauguucuaagcacugugau

SEQ ID NO: 39109 - RNA, 20 nt, Artificial Sequence
  LRRK2 RNA guide
ucacagugcuuagaacauaa

SEQ ID NO: 39110 - RNA, 20 nt, Artificial Sequence
  LRRK2 RNA guide
ucuaagcacugugaugcugu

SEQ ID NO: 39111 - RNA, 20 nt, Artificial Sequence
  LRRK2 RNA guide
ucuuauguucuaagcacugu

SEQ ID NO: 39112 - RNA, 20 nt, Artificial Sequence
  LRRK2 RNA guide
ugcuuagaacauaagaagca

SEQ ID NO: 39113 - RNA, 20 nt, Artificial Sequence
  LRRK2 RNA guide
ugcuucuuauguucuaagca

SEQ ID NO: 39114 - RNA, 20 nt, Artificial Sequence
  LRRK2 RNA guide
uguucuaagcacugugaugc

SEQ ID NO: 39115 - RNA, 20 nt, Artificial Sequence
  LRRK2 RNA guide
uuaaaguuuaacagcaucac

SEQ ID NO: 39116 - RNA, 20 nt, Artificial Sequence
  LRRK2 RNA guide
uuaacagcaucacagugcuu

SEQ ID NO: 39117 - RNA, 20 nt, Artificial Sequence
  LRRK2 RNA guide
uuaagugcuucuuauguucu

SEQ ID NO: 39118 - RNA, 20 nt, Artificial Sequence
  LRRK2 RNA guide
uuauguucuaagcacuguga

SEQ ID NO: 39119 - RNA, 20 nt, Artificial Sequence
  LRRK2 RNA guide
uucuaagcacugugaugcug

SEQ ID NO: 39120 - RNA, 20 nt, Artificial Sequence
  LRRK2 RNA guide
uucuuauguucuaagcacug

SEQ ID NO: 39121 - RNA, 20 nt, Artificial Sequence
  LRRK2 RNA guide
uuuaacagcaucacagugcu

SEQ ID NO: 39122 - RNA, 21 nt, Artificial Sequence
  LRRK2 RNA guide
aaaguuuaacagcaucacagu

SEQ ID NO: 39123 - RNA, 21 nt, Artificial Sequence
  LRRK2 RNA guide
aacagcaucacagugcuuaga

SEQ ID NO: 39124 - RNA, 21 nt, Artificial Sequence
  LRRK2 RNA guide
aagcacugugaugcuguuaaa

SEQ ID NO: 39125 - RNA, 21 nt, Artificial Sequence
  LRRK2 RNA guide
aagugcuucuuauguucuaag

SEQ ID NO: 39126 - RNA, 21 nt, Artificial Sequence
  LRRK2 RNA guide
aaguuuaacagcaucacagug

SEQ ID NO: 39127 - RNA, 21 nt, Artificial Sequence
  LRRK2 RNA guide
acagcaucacagugcuuagaa

SEQ ID NO: 39128 - RNA, 21 nt, Artificial Sequence
  LRRK2 RNA guide
acagugcuuagaacauaagaa

SEQ ID NO: 39129 - RNA, 21 nt, Artificial Sequence
  LRRK2 RNA guide
agcacugugaugcuguuaaac

SEQ ID NO: 39130 - RNA, 21 nt, Artificial Sequence
  LRRK2 RNA guide
agcaucacagugcuuagaaca

SEQ ID NO: 39131 - RNA, 21 nt, Artificial Sequence
  LRRK2 RNA guide
agugcuuagaacauaagaagc

SEQ ID NO: 39132 - RNA, 21 nt, Artificial Sequence
  LRRK2 RNA guide
agugcuucuuauguucuaagc

SEQ ID NO: 39133 - RNA, 21 nt, Artificial Sequence
  LRRK2 RNA guide
aguuuaacagcaucacagugc

SEQ ID NO: 39134 - RNA, 21 nt, Artificial Sequence
  LRRK2 RNA guide
aucacagugcuuagaacauaa

SEQ ID NO: 39135 - RNA, 21 nt, Artificial Sequence
  LRRK2 RNA guide
auguucuaagcacugugaugc

SEQ ID NO: 39136 - RNA, 21 nt, Artificial Sequence
  LRRK2 RNA guide
cacagugcuuagaacauaaga

SEQ ID NO: 39137 - RNA, 21 nt, Artificial Sequence
  LRRK2 RNA guide
cagcaucacagugcuuagaac

SEQ ID NO: 39138 - RNA, 21 nt, Artificial Sequence
  LRRK2 RNA guide
cagugcuuagaacauaagaag

SEQ ID NO: 39139 - RNA, 21 nt, Artificial Sequence
  LRRK2 RNA guide
caucacagugcuuagaacaua

SEQ ID NO: 39140 - RNA, 21 nt, Artificial Sequence
  LRRK2 RNA guide
cuaagcacugugaugcuguua

SEQ ID NO: 39141 - RNA, 21 nt, Artificial Sequence
  LRRK2 RNA guide
cuuauguucuaagcacuguga

SEQ ID NO: 39142 - RNA, 21 nt, Artificial Sequence
  LRRK2 RNA guide
cuucuuauguucuaagcacug

SEQ ID NO: 39143 - RNA, 21 nt, Artificial Sequence
  LRRK2 RNA guide
gcacugugaugcuguuaaacu

SEQ ID NO: 39144 - RNA, 21 nt, Artificial Sequence
  LRRK2 RNA guide
gcaucacagugcuuagaacau

SEQ ID NO: 39145 - RNA, 21 nt, Artificial Sequence
  LRRK2 RNA guide
gcuucuuauguucuaagcacu

SEQ ID NO: 39146 - RNA, 21 nt, Artificial Sequence
  LRRK2 RNA guide
gugcuuagaacauaagaagca

SEQ ID NO: 39147 - RNA, 21 nt, Artificial Sequence
  LRRK2 RNA guide
gugcuucuuauguucuaagca

SEQ ID NO: 39148 - RNA, 21 nt, Artificial Sequence
  LRRK2 RNA guide
guucuaagcacugugaugcug

SEQ ID NO: 39149 - RNA, 21 nt, Artificial Sequence
  LRRK2 RNA guide
guuuaacagcaucacagugcu

SEQ ID NO: 39150 - RNA, 21 nt, Artificial Sequence
  LRRK2 RNA guide
uaaaguuuaacagcaucacag

SEQ ID NO: 39151 - RNA, 21 nt, Artificial Sequence
  LRRK2 RNA guide
uaacagcaucacagugcuuag

SEQ ID NO: 39152 - RNA, 21 nt, Artificial Sequence
  LRRK2 RNA guide
uaagcacugugaugcuguuaa

SEQ ID NO: 39153 - RNA, 21 nt, Artificial Sequence
  LRRK2 RNA guide
uauguucuaagcacugugaug

SEQ ID NO: 39154 - RNA, 21 nt, Artificial Sequence
  LRRK2 RNA guide
ucacagugcuuagaacauaag

SEQ ID NO: 39155 - RNA, 21 nt, Artificial Sequence
  LRRK2 RNA guide
ucuaagcacugugaugcuguu

SEQ ID NO: 39156 - RNA, 21 nt, Artificial Sequence
  LRRK2 RNA guide
ucuuauguucuaagcacugug

SEQ ID NO: 39157 - RNA, 21 nt, Artificial Sequence
  LRRK2 RNA guide
ugcuuagaacauaagaagcac

SEQ ID NO: 39158 - RNA, 21 nt, Artificial Sequence
  LRRK2 RNA guide
ugcuucuuauguucuaagcac

SEQ ID NO: 39159 - RNA, 21 nt, Artificial Sequence
  LRRK2 RNA guide
uguucuaagcacugugaugcu

SEQ ID NO: 39160 - RNA, 21 nt, Artificial Sequence
  LRRK2 RNA guide
uuaacagcaucacagugcuua

SEQ ID NO: 39161 - RNA, 21 nt, Artificial Sequence
  LRRK2 RNA guide
uuauguucuaagcacugugau

SEQ ID NO: 39162 - RNA, 21 nt, Artificial Sequence
  LRRK2 RNA guide
uucuaagcacugugaugcugu

SEQ ID NO: 39163 - RNA, 21 nt, Artificial Sequence
  LRRK2 RNA guide
uucuuauguucuaagcacugu

SEQ ID NO: 39164 - RNA, 21 nt, Artificial Sequence
  LRRK2 RNA guide
uuuaacagcaucacagugcuu

SEQ ID NO: 39165 - RNA, 22 nt, Artificial Sequence
  LRRK2 RNA guide
aaaguuuaacagcaucacagug

SEQ ID NO: 39166 - RNA, 22 nt, Artificial Sequence
  LRRK2 RNA guide
aacagcaucacagugcuuagaa

SEQ ID NO: 39167 - RNA, 22 nt, Artificial Sequence
  LRRK2 RNA guide
aagcacugugaugcuguuaaac

SEQ ID NO: 39168 - RNA, 22 nt, Artificial Sequence
  LRRK2 RNA guide
aagugcuucuuauguucuaagc

SEQ ID NO: 39169 - RNA, 22 nt, Artificial Sequence
  LRRK2 RNA guide
aaguuuaacagcaucacagugc

SEQ ID NO: 39170 - RNA, 22 nt, Artificial Sequence
  LRRK2 RNA guide
acagcaucacagugcuuagaac

SEQ ID NO: 39171 - RNA, 22 nt, Artificial Sequence
  LRRK2 RNA guide
acagugcuuagaacauaagaag

SEQ ID NO: 39172 - RNA, 22 nt, Artificial Sequence
  LRRK2 RNA guide
agcacugugaugcuguuaaacu

SEQ ID NO: 39173 - RNA, 22 nt, Artificial Sequence
  LRRK2 RNA guide
agcaucacagugcuuagaacau

SEQ ID NO: 39174 - RNA, 22 nt, Artificial Sequence
  LRRK2 RNA guide
agugcuuagaacauaagaagca

SEQ ID NO: 39175 - RNA, 22 nt, Artificial Sequence
  LRRK2 RNA guide
agugcuucuuauguucuaagca

SEQ ID NO: 39176 - RNA, 22 nt, Artificial Sequence
  LRRK2 RNA guide
aguuuaacagcaucacagugcu

SEQ ID NO: 39177 - RNA, 22 nt, Artificial Sequence
  LRRK2 RNA guide
aucacagugcuuagaacauaag

SEQ ID NO: 39178 - RNA, 22 nt, Artificial Sequence
  LRRK2 RNA guide
auguucuaagcacugugaugcu

SEQ ID NO: 39179 - RNA, 22 nt, Artificial Sequence
  LRRK2 RNA guide
cacagugcuuagaacauaagaa

SEQ ID NO: 39180 - RNA, 22 nt, Artificial Sequence
  LRRK2 RNA guide
cagcaucacagugcuuagaaca

SEQ ID NO: 39181 - RNA, 22 nt, Artificial Sequence
  LRRK2 RNA guide
cagugcuuagaacauaagaagc

SEQ ID NO: 39182 - RNA, 22 nt, Artificial Sequence
  LRRK2 RNA guide
caucacagugcuuagaacauaa

SEQ ID NO: 39183 - RNA, 22 nt, Artificial Sequence
  LRRK2 RNA guide
cuaagcacugugaugcuguuaa

SEQ ID NO: 39184 - RNA, 22 nt, Artificial Sequence
  LRRK2 RNA guide
cuuauguucuaagcacugugau

SEQ ID NO: 39185 - RNA, 22 nt, Artificial Sequence
  LRRK2 RNA guide
cuucuuauguucuaagcacugu

SEQ ID NO: 39186 - RNA, 22 nt, Artificial Sequence
  LRRK2 RNA guide
gcacugugaugcuguuaaacuu

SEQ ID NO: 39187 - RNA, 22 nt, Artificial Sequence
  LRRK2 RNA guide
gcaucacagugcuuagaacaua

SEQ ID NO: 39188 - RNA, 22 nt, Artificial Sequence
  LRRK2 RNA guide
gcuucuuauguucuaagcacug

SEQ ID NO: 39189 - RNA, 22 nt, Artificial Sequence
  LRRK2 RNA guide
gugcuuagaacauaagaagcac

SEQ ID NO: 39190 - RNA, 22 nt, Artificial Sequence
  LRRK2 RNA guide
gugcuucuuauguucuaagcac

SEQ ID NO: 39191 - RNA, 22 nt, Artificial Sequence
  LRRK2 RNA guide
guucuaagcacugugaugcugu

SEQ ID NO: 39192 - RNA, 22 nt, Artificial Sequence
  LRRK2 RNA guide
guuuaacagcaucacagugcuu

SEQ ID NO: 39193 - RNA, 22 nt, Artificial Sequence
  LRRK2 RNA guide
uaaaguuuaacagcaucacagu

SEQ ID NO: 39194 - RNA, 22 nt, Artificial Sequence
  LRRK2 RNA guide
uaacagcaucacagugcuuaga

SEQ ID NO: 39195 - RNA, 22 nt, Artificial Sequence
  LRRK2 RNA guide
uaagcacugugaugcuguuaaa

SEQ ID NO: 39196 - RNA, 22 nt, Artificial Sequence
  LRRK2 RNA guide
uaagugcuucuuauguucuaag

SEQ ID NO: 39197 - RNA, 22 nt, Artificial Sequence
  LRRK2 RNA guide
uauguucuaagcacugugaugc

SEQ ID NO: 39198 - RNA, 22 nt, Artificial Sequence
  LRRK2 RNA guide
ucacagugcuuagaacauaaga

SEQ ID NO: 39199 - RNA, 22 nt, Artificial Sequence
  LRRK2 RNA guide
ucuaagcacugugaugcuguua

SEQ ID NO: 39200 - RNA, 22 nt, Artificial Sequence
  LRRK2 RNA guide
ucuuauguucuaagcacuguga

SEQ ID NO: 39201 - RNA, 22 nt, Artificial Sequence
  LRRK2 RNA guide
ugcuuagaacauaagaagcacu

SEQ ID NO: 39202 - RNA, 22 nt, Artificial Sequence
  LRRK2 RNA guide
ugcuucuuauguucuaagcacu

SEQ ID NO: 39203 - RNA, 22 nt, Artificial Sequence
  LRRK2 RNA guide
uguucuaagcacugugaugcug

SEQ ID NO: 39204 - RNA, 22 nt, Artificial Sequence
  LRRK2 RNA guide
uuaaaguuuaacagcaucacag

SEQ ID NO: 39205 - RNA, 22 nt, Artificial Sequence
  LRRK2 RNA guide
uuaacagcaucacagugcuuag

SEQ ID NO: 39206 - RNA, 22 nt, Artificial Sequence
  LRRK2 RNA guide
uuauguucuaagcacugugaug

SEQ ID NO: 39207 - RNA, 22 nt, Artificial Sequence
  LRRK2 RNA guide
uucuaagcacugugaugcuguu

SEQ ID NO: 39208 - RNA, 22 nt, Artificial Sequence
  LRRK2 RNA guide
uucuuauguucuaagcacugug

SEQ ID NO: 39209 - RNA, 22 nt, Artificial Sequence
  LRRK2 RNA guide
uuuaacagcaucacagugcuua

SEQ ID NO: 39210 - RNA, 20 nt, Artificial Sequence
  LRRK2 RNA guide
aacagcaucacaguacuuag

SEQ ID NO: 39211 - RNA, 20 nt, Artificial Sequence
  LRRK2 RNA guide
aaguacugugaugcuguuaa

SEQ ID NO: 39212 - RNA, 20 nt, Artificial Sequence
  LRRK2 RNA guide
acagcaucacaguacuuaga

SEQ ID NO: 39213 - RNA, 20 nt, Artificial Sequence
  LRRK2 RNA guide
acaguacuuagaacauaaga

SEQ ID NO: 39214 - RNA, 20 nt, Artificial Sequence
  LRRK2 RNA guide
agcaucacaguacuuagaac

SEQ ID NO: 39215 - RNA, 20 nt, Artificial Sequence
  LRRK2 RNA guide
aguacugugaugcuguuaaa

SEQ ID NO: 39216 - RNA, 20 nt, Artificial Sequence
  LRRK2 RNA guide
aguacuuagaacauaagaag

SEQ ID NO: 39217 - RNA, 20 nt, Artificial Sequence
  LRRK2 RNA guide
aguuuaacagcaucacagua

SEQ ID NO: 39218 - RNA, 20 nt, Artificial Sequence
  LRRK2 RNA guide
aucacaguacuuagaacaua

SEQ ID NO: 39219 - RNA, 20 nt, Artificial Sequence
  LRRK2 RNA guide
auguucuaaguacugugaug

SEQ ID NO: 39220 - RNA, 20 nt, Artificial Sequence
  LRRK2 RNA guide
cacaguacuuagaacauaag

SEQ ID NO: 39221 - RNA, 20 nt, Artificial Sequence
  LRRK2 RNA guide
cagcaucacaguacuuagaa

SEQ ID NO: 39222 - RNA, 20 nt, Artificial Sequence
  LRRK2 RNA guide
caguacuuagaacauaagaa

SEQ ID NO: 39223 - RNA, 20 nt, Artificial Sequence
  LRRK2 RNA guide
caucacaguacuuagaacau

SEQ ID NO: 39224 - RNA, 20 nt, Artificial Sequence
  LRRK2 RNA guide
cuaaguacugugaugcuguu

SEQ ID NO: 39225 - RNA, 20 nt, Artificial Sequence
  LRRK2 RNA guide
cuuauguucuaaguacugug

SEQ ID NO: 39226 - RNA, 20 nt, Artificial Sequence
  LRRK2 RNA guide
cuucuuauguucuaaguacu

SEQ ID NO: 39227 - RNA, 20 nt, Artificial Sequence
  LRRK2 RNA guide
gcaucacaguacuuagaaca

SEQ ID NO: 39228 - RNA, 20 nt, Artificial Sequence
  LRRK2 RNA guide
gcuucuuauguucuaaguac

SEQ ID NO: 39229 - RNA, 20 nt, Artificial Sequence
  LRRK2 RNA guide
guacugugaugcuguuaaac

SEQ ID NO: 39230 - RNA, 20 nt, Artificial Sequence
  LRRK2 RNA guide
guacuuagaacauaagaagc

SEQ ID NO: 39231 - RNA, 20 nt, Artificial Sequence
  LRRK2 RNA guide
gugcuucuuauguucuaagu

SEQ ID NO: 39232 - RNA, 20 nt, Artificial Sequence
  LRRK2 RNA guide
guucuaaguacugugaugcu

SEQ ID NO: 39233 - RNA, 20 nt, Artificial Sequence
  LRRK2 RNA guide
guuuaacagcaucacaguac

SEQ ID NO: 39234 - RNA, 20 nt, Artificial Sequence
  LRRK2 RNA guide
uaacagcaucacaguacuua

SEQ ID NO: 39235 - RNA, 20 nt, Artificial Sequence
  LRRK2 RNA guide
uaaguacugugaugcuguua

SEQ ID NO: 39236 - RNA, 20 nt, Artificial Sequence
  LRRK2 RNA guide
uacuuagaacauaagaagca

SEQ ID NO: 39237 - RNA, 20 nt, Artificial Sequence
  LRRK2 RNA guide
uauguucuaaguacugugau

SEQ ID NO: 39238 - RNA, 20 nt, Artificial Sequence
  LRRK2 RNA guide
ucacaguacuuagaacauaa

SEQ ID NO: 39239 - RNA, 20 nt, Artificial Sequence
  LRRK2 RNA guide
ucuaaguacugugaugcugu

SEQ ID NO: 39240 - RNA, 20 nt, Artificial Sequence
  LRRK2 RNA guide
ucuuauguucuaaguacugu

SEQ ID NO: 39241 - RNA, 20 nt, Artificial Sequence
  LRRK2 RNA guide
ugcuucuuauguucuaagua

SEQ ID NO: 39242 - RNA, 20 nt, Artificial Sequence
  LRRK2 RNA guide
uguucuaaguacugugaugc

SEQ ID NO: 39243 - RNA, 20 nt, Artificial Sequence
  LRRK2 RNA guide
uuaacagcaucacaguacuu

SEQ ID NO: 39244 - RNA, 20 nt, Artificial Sequence
  LRRK2 RNA guide
uuauguucuaaguacuguga

SEQ ID NO: 39245 - RNA, 20 nt, Artificial Sequence
  LRRK2 RNA guide
uucuaaguacugugaugcug

SEQ ID NO: 39246 - RNA, 20 nt, Artificial Sequence
  LRRK2 RNA guide
uucuuauguucuaaguacug

SEQ ID NO: 39247 - RNA, 20 nt, Artificial Sequence
  LRRK2 RNA guide
uuuaacagcaucacaguacu

SEQ ID NO: 39248 - RNA, 21 nt, Artificial Sequence
  LRRK2 RNA guide
aacagcaucacaguacuuaga

SEQ ID NO: 39249 - RNA, 21 nt, Artificial Sequence
  LRRK2 RNA guide
aaguacugugaugcuguuaaa

SEQ ID NO: 39250 - RNA, 21 nt, Artificial Sequence
  LRRK2 RNA guide
aaguuuaacagcaucacagua

SEQ ID NO: 39251 - RNA, 21 nt, Artificial Sequence
  LRRK2 RNA guide
acagcaucacaguacuuagaa

SEQ ID NO: 39252 - RNA, 21 nt, Artificial Sequence
  LRRK2 RNA guide
agcaucacaguacuuagaaca

SEQ ID NO: 39253 - RNA, 21 nt, Artificial Sequence
  LRRK2 RNA guide
aguacugugaugcuguuaaac

SEQ ID NO: 39254 - RNA, 21 nt, Artificial Sequence
  LRRK2 RNA guide
aguacuuagaacauaagaagc

SEQ ID NO: 39255 - RNA, 21 nt, Artificial Sequence
  LRRK2 RNA guide
agugcuucuuauguucuaagu

SEQ ID NO: 39256 - RNA, 21 nt, Artificial Sequence
  LRRK2 RNA guide
aguuuaacagcaucacaguac

SEQ ID NO: 39257 - RNA, 21 nt, Artificial Sequence
  LRRK2 RNA guide
auguucuaaguacugugaugc

SEQ ID NO: 39258 - RNA, 21 nt, Artificial Sequence
  LRRK2 RNA guide
cacaguacuuagaacauaaga

SEQ ID NO: 39259 - RNA, 21 nt, Artificial Sequence
  LRRK2 RNA guide
cagcaucacaguacuuagaac

SEQ ID NO: 39260 - RNA, 21 nt, Artificial Sequence
  LRRK2 RNA guide
caguacuuagaacauaagaag

SEQ ID NO: 39261 - RNA, 21 nt, Artificial Sequence
  LRRK2 RNA guide
caucacaguacuuagaacaua

SEQ ID NO: 39262 - RNA, 21 nt, Artificial Sequence
  LRRK2 RNA guide
cuaaguacugugaugcuguua

SEQ ID NO: 39263 - RNA, 21 nt, Artificial Sequence
  LRRK2 RNA guide
cuuauguucuaaguacuguga

SEQ ID NO: 39264 - RNA, 21 nt, Artificial Sequence
  LRRK2 RNA guide
cuucuuauguucuaaguacug

SEQ ID NO: 39265 - RNA, 21 nt, Artificial Sequence
  LRRK2 RNA guide
gcaucacaguacuuagaacau

SEQ ID NO: 39266 - RNA, 21 nt, Artificial Sequence
  LRRK2 RNA guide
gcuucuuauguucuaaguacu

SEQ ID NO: 39267 - RNA, 21 nt, Artificial Sequence
  LRRK2 RNA guide
guacugugaugcuguuaaacu

SEQ ID NO: 39268 - RNA, 21 nt, Artificial Sequence
  LRRK2 RNA guide
guacuuagaacauaagaagca

SEQ ID NO: 39269 - RNA, 21 nt, Artificial Sequence
  LRRK2 RNA guide
gugcuucuuauguucuaagua

SEQ ID NO: 39270 - RNA, 21 nt, Artificial Sequence
  LRRK2 RNA guide
guucuaaguacugugaugcug

SEQ ID NO: 39271 - RNA, 21 nt, Artificial Sequence
  LRRK2 RNA guide
guuuaacagcaucacaguacu

SEQ ID NO: 39272 - RNA, 21 nt, Artificial Sequence
  LRRK2 RNA guide
uaacagcaucacaguacuuag

SEQ ID NO: 39273 - RNA, 21 nt, Artificial Sequence
  LRRK2 RNA guide
uaaguacugugaugcuguuaa

SEQ ID NO: 39274 - RNA, 21 nt, Artificial Sequence
  LRRK2 RNA guide
uacuuagaacauaagaagcac

SEQ ID NO: 39275 - RNA, 21 nt, Artificial Sequence
  LRRK2 RNA guide
uauguucuaaguacugugaug

SEQ ID NO: 39276 - RNA, 21 nt, Artificial Sequence
  LRRK2 RNA guide
ucacaguacuuagaacauaag

SEQ ID NO: 39277 - RNA, 21 nt, Artificial Sequence
  LRRK2 RNA guide
ucuaaguacugugaugcuguu

SEQ ID NO: 39278 - RNA, 21 nt, Artificial Sequence
  LRRK2 RNA guide
ucuuauguucuaaguacugug

SEQ ID NO: 39279 - RNA, 21 nt, Artificial Sequence
  LRRK2 RNA guide
ugcuucuuauguucuaaguac

SEQ ID NO: 39280 - RNA, 21 nt, Artificial Sequence
  LRRK2 RNA guide
uguucuaaguacugugaugcu

SEQ ID NO: 39281 - RNA, 21 nt, Artificial Sequence
  LRRK2 RNA guide
uuaacagcaucacaguacuua

SEQ ID NO: 39282 - RNA, 21 nt, Artificial Sequence
  LRRK2 RNA guide
uucuaaguacugugaugcugu

SEQ ID NO: 39283 - RNA, 21 nt, Artificial Sequence
  LRRK2 RNA guide
uuuaacagcaucacaguacuu

SEQ ID NO: 39284 - RNA, 22 nt, Artificial Sequence
  LRRK2 RNA guide
aaaguuuaacagcaucacagua

SEQ ID NO: 39285 - RNA, 22 nt, Artificial Sequence
  LRRK2 RNA guide
aacagcaucacaguacuuagaa

SEQ ID NO: 39286 - RNA, 22 nt, Artificial Sequence
  LRRK2 RNA guide
aaguacugugaugcuguuaaac

SEQ ID NO: 39287 - RNA, 22 nt, Artificial Sequence
  LRRK2 RNA guide
aagugcuucuuauguucuaagu

SEQ ID NO: 39288 - RNA, 22 nt, Artificial Sequence
  LRRK2 RNA guide
aaguuuaacagcaucacaguac

SEQ ID NO: 39289 - RNA, 22 nt, Artificial Sequence
  LRRK2 RNA guide
acagcaucacaguacuuagaac

SEQ ID NO: 39290 - RNA, 22 nt, Artificial Sequence
  LRRK2 RNA guide
acaguacuuagaacauaagaag

SEQ ID NO: 39291 - RNA, 22 nt, Artificial Sequence
  LRRK2 RNA guide
agcaucacaguacuuagaacau

SEQ ID NO: 39292 - RNA, 22 nt, Artificial Sequence
  LRRK2 RNA guide
aguacugugaugcuguuaaacu

SEQ ID NO: 39293 - RNA, 22 nt, Artificial Sequence
  LRRK2 RNA guide
aguacuuagaacauaagaagca

SEQ ID NO: 39294 - RNA, 22 nt, Artificial Sequence
  LRRK2 RNA guide
agugcuucuuauguucuaagua

SEQ ID NO: 39295 - RNA, 22 nt, Artificial Sequence
  LRRK2 RNA guide
aguuuaacagcaucacaguacu

SEQ ID NO: 39296 - RNA, 22 nt, Artificial Sequence
  LRRK2 RNA guide
aucacaguacuuagaacauaag

SEQ ID NO: 39297 - RNA, 22 nt, Artificial Sequence
  LRRK2 RNA guide
auguucuaaguacugugaugcu

SEQ ID NO: 39298 - RNA, 22 nt, Artificial Sequence
  LRRK2 RNA guide
cacaguacuuagaacauaagaa

SEQ ID NO: 39299 - RNA, 22 nt, Artificial Sequence
  LRRK2 RNA guide
cagcaucacaguacuuagaaca

SEQ ID NO: 39300 - RNA, 22 nt, Artificial Sequence
  LRRK2 RNA guide
caguacuuagaacauaagaagc

SEQ ID NO: 39301 - RNA, 22 nt, Artificial Sequence
  LRRK2 RNA guide
caucacaguacuuagaacauaa

SEQ ID NO: 39302 - RNA, 22 nt, Artificial Sequence
  LRRK2 RNA guide
cuaaguacugugaugcuguuaa

SEQ ID NO: 39303 - RNA, 22 nt, Artificial Sequence
  LRRK2 RNA guide
cuuauguucuaaguacugugau

SEQ ID NO: 39304 - RNA, 22 nt, Artificial Sequence
  LRRK2 RNA guide
cuucuuauguucuaaguacugu

SEQ ID NO: 39305 - RNA, 22 nt, Artificial Sequence
  LRRK2 RNA guide
gcaucacaguacuuagaacaua

SEQ ID NO: 39306 - RNA, 22 nt, Artificial Sequence
  LRRK2 RNA guide
gcuucuuauguucuaaguacug

SEQ ID NO: 39307 - RNA, 22 nt, Artificial Sequence
  LRRK2 RNA guide
guacugugaugcuguuaaacuu

SEQ ID NO: 39308 - RNA, 22 nt, Artificial Sequence
  LRRK2 RNA guide
guacuuagaacauaagaagcac

SEQ ID NO: 39309 - RNA, 22 nt, Artificial Sequence
  LRRK2 RNA guide
gugcuucuuauguucuaaguac

SEQ ID NO: 39310 - RNA, 22 nt, Artificial Sequence
  LRRK2 RNA guide
guucuaaguacugugaugcugu

SEQ ID NO: 39311 - RNA, 22 nt, Artificial Sequence
  LRRK2 RNA guide
guuuaacagcaucacaguacuu

SEQ ID NO: 39312 - RNA, 22 nt, Artificial Sequence
  LRRK2 RNA guide
uaacagcaucacaguacuuaga

SEQ ID NO: 39313 - RNA, 22 nt, Artificial Sequence
  LRRK2 RNA guide
uaaguacugugaugcuguuaaa

SEQ ID NO: 39314 - RNA, 22 nt, Artificial Sequence
  LRRK2 RNA guide
uacuuagaacauaagaagcacu

SEQ ID NO: 39315 - RNA, 22 nt, Artificial Sequence
  LRRK2 RNA guide
uauguucuaaguacugugaugc

SEQ ID NO: 39316 - RNA, 22 nt, Artificial Sequence
  LRRK2 RNA guide
ucacaguacuuagaacauaaga

SEQ ID NO: 39317 - RNA, 22 nt, Artificial Sequence
  LRRK2 RNA guide
ucuaaguacugugaugcuguua

SEQ ID NO: 39318 - RNA, 22 nt, Artificial Sequence
  LRRK2 RNA guide
ucuuauguucuaaguacuguga

SEQ ID NO: 39319 - RNA, 22 nt, Artificial Sequence
  LRRK2 RNA guide
ugcuucuuauguucuaaguacu

SEQ ID NO: 39320 - RNA, 22 nt, Artificial Sequence
  LRRK2 RNA guide
uguucuaaguacugugaugcug

SEQ ID NO: 39321 - RNA, 22 nt, Artificial Sequence
  LRRK2 RNA guide
uuaacagcaucacaguacuuag

SEQ ID NO: 39322 - RNA, 22 nt, Artificial Sequence
  LRRK2 RNA guide
uuauguucuaaguacugugaug

SEQ ID NO: 39323 - RNA, 22 nt, Artificial Sequence
  LRRK2 RNA guide
uucuaaguacugugaugcuguu

SEQ ID NO: 39324 - RNA, 22 nt, Artificial Sequence
  LRRK2 RNA guide
uucuuauguucuaaguacugug

SEQ ID NO: 39325 - RNA, 22 nt, Artificial Sequence
  LRRK2 RNA guide
uuuaacagcaucacaguacuua

SEQ ID NO: 39326 - RNA, 20 nt, Artificial Sequence
  LRRK2 RNA guide
aaggauaaucaaaaggcauu

SEQ ID NO: 39327 - RNA, 20 nt, Artificial Sequence
  LRRK2 RNA guide
aggauaaucaaaaggcauuu

SEQ ID NO: 39328 - RNA, 20 nt, Artificial Sequence
  LRRK2 RNA guide
ggauaaucaaaaggcauuuu

SEQ ID NO: 39329 - RNA, 20 nt, Artificial Sequence
  LRRK2 RNA guide
uaaggauaaucaaaaggcau

SEQ ID NO: 39330 - RNA, 20 nt, Artificial Sequence
  LRRK2 RNA guide
aacaacaaaaaugccuuuug

SEQ ID NO: 39331 - RNA, 20 nt, Artificial Sequence
  LRRK2 RNA guide
acaacaaaaaugccuuuuga

SEQ ID NO: 39332 - RNA, 20 nt, Artificial Sequence
  LRRK2 RNA guide
aucaaaaggcauuuuuguug

SEQ ID NO: 39333 - RNA, 20 nt, Artificial Sequence
  LRRK2 RNA guide
caaaaggcauuuuuguuguu

SEQ ID NO: 39334 - RNA, 20 nt, Artificial Sequence
  LRRK2 RNA guide
caacaaaaaugccuuuugau

SEQ ID NO: 39335 - RNA, 20 nt, Artificial Sequence
  LRRK2 RNA guide
ucaaaaggcauuuuuguugu

SEQ ID NO: 39336 - RNA, 22 nt, Artificial Sequence
  LRRK2 RNA guide
ggauaaucaaaaggcauuuuug

SEQ ID NO: 39337 - RNA, 20 nt, Artificial Sequence
  LRRK2 RNA guide
aaguagaagagaaaaaguac

SEQ ID NO: 39338 - RNA, 20 nt, Artificial Sequence
  LRRK2 RNA guide
acuguacuuuuucucuucua

SEQ ID NO: 39339 - RNA, 20 nt, Artificial Sequence
  LRRK2 RNA guide
agaagagaaaaaguacagua

SEQ ID NO: 39340 - RNA, 20 nt, Artificial Sequence
  LRRK2 RNA guide
aguagaagagaaaaaguaca

SEQ ID NO: 39341 - RNA, 20 nt, Artificial Sequence
  LRRK2 RNA guide
cuauuacuguacuuuuucuc

SEQ ID NO: 39342 - RNA, 20 nt, Artificial Sequence
  LRRK2 RNA guide
cuguacuuuuucucuucuac

SEQ ID NO: 39343 - RNA, 20 nt, Artificial Sequence
  LRRK2 RNA guide
gaagagaaaaaguacaguaa

SEQ ID NO: 39344 - RNA, 20 nt, Artificial Sequence
  LRRK2 RNA guide
gagaaaaaguacaguaauag

SEQ ID NO: 39345 - RNA, 20 nt, Artificial Sequence
  LRRK2 RNA guide
guacuuuuucucuucuacuu

SEQ ID NO: 39346 - RNA, 20 nt, Artificial Sequence
  LRRK2 RNA guide
guagaagagaaaaaguacag

SEQ ID NO: 39347 - RNA, 20 nt, Artificial Sequence
  LRRK2 RNA guide
uacuguacuuuuucucuucu

SEQ ID NO: 39348 - RNA, 20 nt, Artificial Sequence
  LRRK2 RNA guide
uagaagagaaaaaguacagu

SEQ ID NO: 39349 - RNA, 20 nt, Artificial Sequence
  LRRK2 RNA guide
uguacuuuuucucuucuacu

SEQ ID NO: 39350 - RNA, 20 nt, Artificial Sequence
  LRRK2 RNA guide
uuacuguacuuuuucucuuc

SEQ ID NO: 39351 - RNA, 21 nt, Artificial Sequence
  LRRK2 RNA guide
acuguacuuuuucucuucuac

SEQ ID NO: 39352 - RNA, 21 nt, Artificial Sequence
  LRRK2 RNA guide
aguagaagagaaaaaguacag

SEQ ID NO: 39353 - RNA, 21 nt, Artificial Sequence
  LRRK2 RNA guide
cuguacuuuuucucuucuacu

SEQ ID NO: 39354 - RNA, 21 nt, Artificial Sequence
  LRRK2 RNA guide
guagaagagaaaaaguacagu

SEQ ID NO: 39355 - RNA, 22 nt, Artificial Sequence
  LRRK2 RNA guide
aaguagaagagaaaaaguacag

SEQ ID NO: 39356 - RNA, 22 nt, Artificial Sequence
  LRRK2 RNA guide
acuguacuuuuucucuucuacu

SEQ ID NO: 39357 - RNA, 22 nt, Artificial Sequence
  LRRK2 RNA guide
aguagaagagaaaaaguacagu

SEQ ID NO: 39358 - RNA, 22 nt, Artificial Sequence
  LRRK2 RNA guide
cuguacuuuuucucuucuacuu

SEQ ID NO: 39359 - RNA, 22 nt, Artificial Sequence
  LRRK2 RNA guide
guagaagagaaaaaguacagua

SEQ ID NO: 39360 - RNA, 22 nt, Artificial Sequence
  LRRK2 RNA guide
uacuguacuuuuucucuucuac

SEQ ID NO: 39361 - RNA, 20 nt, Artificial Sequence
  LRRK2 RNA guide
aaaacugaggcauagaauug

SEQ ID NO: 39362 - RNA, 20 nt, Artificial Sequence
  LRRK2 RNA guide
aaacugaggcauagaauugu

SEQ ID NO: 39363 - RNA, 20 nt, Artificial Sequence
  LRRK2 RNA guide
aaaucucuacaauucuaugc

SEQ ID NO: 39364 - RNA, 20 nt, Artificial Sequence
  LRRK2 RNA guide
aacugaggcauagaauugua

SEQ ID NO: 39365 - RNA, 20 nt, Artificial Sequence
  LRRK2 RNA guide
aaucucuacaauucuaugcc

SEQ ID NO: 39366 - RNA, 20 nt, Artificial Sequence
  LRRK2 RNA guide
aauucuaugccucaguuuug

SEQ ID NO: 39367 - RNA, 20 nt, Artificial Sequence
  LRRK2 RNA guide
acaaaacugaggcauagaau

SEQ ID NO: 39368 - RNA, 20 nt, Artificial Sequence
  LRRK2 RNA guide
acaauucuaugccucaguuu

SEQ ID NO: 39369 - RNA, 20 nt, Artificial Sequence
  LRRK2 RNA guide
acuacaaaacugaggcauag

SEQ ID NO: 39370 - RNA, 20 nt, Artificial Sequence
  LRRK2 RNA guide
acugaggcauagaauuguag

SEQ ID NO: 39371 - RNA, 20 nt, Artificial Sequence
  LRRK2 RNA guide
aggcauagaauuguagagau

SEQ ID NO: 39372 - RNA, 20 nt, Artificial Sequence
  LRRK2 RNA guide
aucucuacaauucuaugccu

SEQ ID NO: 39373 - RNA, 20 nt, Artificial Sequence
  LRRK2 RNA guide
auggacuacaaaacugaggc

SEQ ID NO: 39374 - RNA, 20 nt, Artificial Sequence
  LRRK2 RNA guide
auucuaugccucaguuuugu

SEQ ID NO: 39375 - RNA, 20 nt, Artificial Sequence
  LRRK2 RNA guide
caaaacugaggcauagaauu

SEQ ID NO: 39376 - RNA, 20 nt, Artificial Sequence
  LRRK2 RNA guide
caauucuaugccucaguuuu

SEQ ID NO: 39377 - RNA, 20 nt, Artificial Sequence
  LRRK2 RNA guide
cuacaaaacugaggcauaga

SEQ ID NO: 39378 - RNA, 20 nt, Artificial Sequence
  LRRK2 RNA guide
cuacaauucuaugccucagu

SEQ ID NO: 39379 - RNA, 20 nt, Artificial Sequence
  LRRK2 RNA guide
cuaugccucaguuuuguagu

SEQ ID NO: 39380 - RNA, 20 nt, Artificial Sequence
  LRRK2 RNA guide
cucuacaauucuaugccuca

SEQ ID NO: 39381 - RNA, 20 nt, Artificial Sequence
  LRRK2 RNA guide
cugaggcauagaauuguaga

SEQ ID NO: 39382 - RNA, 20 nt, Artificial Sequence
  LRRK2 RNA guide
gaccuuaaaaaucucuacaa

SEQ ID NO: 39383 - RNA, 20 nt, Artificial Sequence
  LRRK2 RNA guide
gacuacaaaacugaggcaua

SEQ ID NO: 39384 - RNA, 20 nt, Artificial Sequence
  LRRK2 RNA guide
gaggcauagaauuguagaga

SEQ ID NO: 39385 - RNA, 20 nt, Artificial Sequence
  LRRK2 RNA guide
gcauagaauuguagagauuu

SEQ ID NO: 39386 - RNA, 20 nt, Artificial Sequence
  LRRK2 RNA guide
ggacuacaaaacugaggcau

SEQ ID NO: 39387 - RNA, 20 nt, Artificial Sequence
  LRRK2 RNA guide
ggcauagaauuguagagauu

SEQ ID NO: 39388 - RNA, 20 nt, Artificial Sequence
  LRRK2 RNA guide
guauggacuacaaaacugag

SEQ ID NO: 39389 - RNA, 20 nt, Artificial Sequence
  LRRK2 RNA guide
uacaaaacugaggcauagaa

SEQ ID NO: 39390 - RNA, 20 nt, Artificial Sequence
  LRRK2 RNA guide
uacaauucuaugccucaguu

SEQ ID NO: 39391 - RNA, 20 nt, Artificial Sequence
  LRRK2 RNA guide
uauggacuacaaaacugagg

SEQ ID NO: 39392 - RNA, 20 nt, Artificial Sequence
  LRRK2 RNA guide
ucuacaauucuaugccucag

SEQ ID NO: 39393 - RNA, 20 nt, Artificial Sequence
  LRRK2 RNA guide
ucuaugccucaguuuuguag

SEQ ID NO: 39394 - RNA, 20 nt, Artificial Sequence
  LRRK2 RNA guide
ucucuacaauucuaugccuc

SEQ ID NO: 39395 - RNA, 20 nt, Artificial Sequence
  LRRK2 RNA guide
ugaccuuaaaaaucucuaca

SEQ ID NO: 39396 - RNA, 20 nt, Artificial Sequence
  LRRK2 RNA guide
ugaggcauagaauuguagag

SEQ ID NO: 39397 - RNA, 20 nt, Artificial Sequence
  LRRK2 RNA guide
uggacuacaaaacugaggca

SEQ ID NO: 39398 - RNA, 20 nt, Artificial Sequence
  LRRK2 RNA guide
uucuaugccucaguuuugua

SEQ ID NO: 39399 - RNA, 21 nt, Artificial Sequence
  LRRK2 RNA guide
aaaacugaggcauagaauugu

SEQ ID NO: 39400 - RNA, 21 nt, Artificial Sequence
  LRRK2 RNA guide
aaacugaggcauagaauugua

SEQ ID NO: 39401 - RNA, 21 nt, Artificial Sequence
  LRRK2 RNA guide
aaaucucuacaauucuaugcc

SEQ ID NO: 39402 - RNA, 21 nt, Artificial Sequence
  LRRK2 RNA guide
aacugaggcauagaauuguag

SEQ ID NO: 39403 - RNA, 21 nt, Artificial Sequence
  LRRK2 RNA guide
aaucucuacaauucuaugccu

SEQ ID NO: 39404 - RNA, 21 nt, Artificial Sequence
  LRRK2 RNA guide
aauucuaugccucaguuuugu

SEQ ID NO: 39405 - RNA, 21 nt, Artificial Sequence
  LRRK2 RNA guide
acaaaacugaggcauagaauu

SEQ ID NO: 39406 - RNA, 21 nt, Artificial Sequence
  LRRK2 RNA guide
acaauucuaugccucaguuuu

SEQ ID NO: 39407 - RNA, 21 nt, Artificial Sequence
  LRRK2 RNA guide
acuacaaaacugaggcauaga

SEQ ID NO: 39408 - RNA, 21 nt, Artificial Sequence
  LRRK2 RNA guide
acugaggcauagaauuguaga

SEQ ID NO: 39409 - RNA, 21 nt, Artificial Sequence
  LRRK2 RNA guide
aggcauagaauuguagagauu

SEQ ID NO: 39410 - RNA, 21 nt, Artificial Sequence
  LRRK2 RNA guide
aucucuacaauucuaugccuc

SEQ ID NO: 39411 - RNA, 21 nt, Artificial Sequence
  LRRK2 RNA guide
auggacuacaaaacugaggca

SEQ ID NO: 39412 - RNA, 21 nt, Artificial Sequence
  LRRK2 RNA guide
auucuaugccucaguuuugua

SEQ ID NO: 39413 - RNA, 21 nt, Artificial Sequence
  LRRK2 RNA guide
caaaacugaggcauagaauug

SEQ ID NO: 39414 - RNA, 21 nt, Artificial Sequence
  LRRK2 RNA guide
caauucuaugccucaguuuug

SEQ ID NO: 39415 - RNA, 21 nt, Artificial Sequence
  LRRK2 RNA guide
cuacaaaacugaggcauagaa

SEQ ID NO: 39416 - RNA, 21 nt, Artificial Sequence
  LRRK2 RNA guide
cuacaauucuaugccucaguu

SEQ ID NO: 39417 - RNA, 21 nt, Artificial Sequence
  LRRK2 RNA guide
cuaugccucaguuuuguaguc

SEQ ID NO: 39418 - RNA, 21 nt, Artificial Sequence
  LRRK2 RNA guide
cucuacaauucuaugccucag

SEQ ID NO: 39419 - RNA, 21 nt, Artificial Sequence
  LRRK2 RNA guide
cugaccuuaaaaaucucuaca

SEQ ID NO: 39420 - RNA, 21 nt, Artificial Sequence
  LRRK2 RNA guide
cugaggcauagaauuguagag

SEQ ID NO: 39421 - RNA, 21 nt, Artificial Sequence
  LRRK2 RNA guide
gacuacaaaacugaggcauag

SEQ ID NO: 39422 - RNA, 21 nt, Artificial Sequence
  LRRK2 RNA guide
gaggcauagaauuguagagau

SEQ ID NO: 39423 - RNA, 21 nt, Artificial Sequence
  LRRK2 RNA guide
ggacuacaaaacugaggcaua

SEQ ID NO: 39424 - RNA, 21 nt, Artificial Sequence
  LRRK2 RNA guide
ggcauagaauuguagagauuu

SEQ ID NO: 39425 - RNA, 21 nt, Artificial Sequence
  LRRK2 RNA guide
guauggacuacaaaacugagg

SEQ ID NO: 39426 - RNA, 21 nt, Artificial Sequence
  LRRK2 RNA guide
uacaaaacugaggcauagaau

SEQ ID NO: 39427 - RNA, 21 nt, Artificial Sequence
  LRRK2 RNA guide
uacaauucuaugccucaguuu

SEQ ID NO: 39428 - RNA, 21 nt, Artificial Sequence
  LRRK2 RNA guide
uauggacuacaaaacugaggc

SEQ ID NO: 39429 - RNA, 21 nt, Artificial Sequence
  LRRK2 RNA guide
ucuacaauucuaugccucagu

SEQ ID NO: 39430 - RNA, 21 nt, Artificial Sequence
  LRRK2 RNA guide
ucuaugccucaguuuuguagu

SEQ ID NO: 39431 - RNA, 21 nt, Artificial Sequence
  LRRK2 RNA guide
ucucuacaauucuaugccuca

SEQ ID NO: 39432 - RNA, 21 nt, Artificial Sequence
  LRRK2 RNA guide
ugaggcauagaauuguagaga

SEQ ID NO: 39433 - RNA, 21 nt, Artificial Sequence
  LRRK2 RNA guide
uggacuacaaaacugaggcau

SEQ ID NO: 39434 - RNA, 21 nt, Artificial Sequence
  LRRK2 RNA guide
uguauggacuacaaaacugag

SEQ ID NO: 39435 - RNA, 21 nt, Artificial Sequence
  LRRK2 RNA guide
uucuaugccucaguuuuguag

SEQ ID NO: 39436 - RNA, 22 nt, Artificial Sequence
  LRRK2 RNA guide
aaaacugaggcauagaauugua

SEQ ID NO: 39437 - RNA, 22 nt, Artificial Sequence
  LRRK2 RNA guide
aaaaucucuacaauucuaugcc

SEQ ID NO: 39438 - RNA, 22 nt, Artificial Sequence
  LRRK2 RNA guide
aaacugaggcauagaauuguag

SEQ ID NO: 39439 - RNA, 22 nt, Artificial Sequence
  LRRK2 RNA guide
aaaucucuacaauucuaugccu

SEQ ID NO: 39440 - RNA, 22 nt, Artificial Sequence
  LRRK2 RNA guide
aacugaggcauagaauuguaga

SEQ ID NO: 39441 - RNA, 22 nt, Artificial Sequence
  LRRK2 RNA guide
aaucucuacaauucuaugccuc

SEQ ID NO: 39442 - RNA, 22 nt, Artificial Sequence
  LRRK2 RNA guide
aauucuaugccucaguuuugua

SEQ ID NO: 39443 - RNA, 22 nt, Artificial Sequence
  LRRK2 RNA guide
acaaaacugaggcauagaauug

SEQ ID NO: 39444 - RNA, 22 nt, Artificial Sequence
  LRRK2 RNA guide
acaauucuaugccucaguuuug

SEQ ID NO: 39445 - RNA, 22 nt, Artificial Sequence
  LRRK2 RNA guide
acuacaaaacugaggcauagaa

SEQ ID NO: 39446 - RNA, 22 nt, Artificial Sequence
  LRRK2 RNA guide
acugaggcauagaauuguagag

SEQ ID NO: 39447 - RNA, 22 nt, Artificial Sequence
  LRRK2 RNA guide
aggcauagaauuguagagauuu

SEQ ID NO: 39448 - RNA, 22 nt, Artificial Sequence
  LRRK2 RNA guide
aucucuacaauucuaugccuca

SEQ ID NO: 39449 - RNA, 22 nt, Artificial Sequence
  LRRK2 RNA guide
auggacuacaaaacugaggcau

SEQ ID NO: 39450 - RNA, 22 nt, Artificial Sequence
  LRRK2 RNA guide
auucuaugccucaguuuuguag

SEQ ID NO: 39451 - RNA, 22 nt, Artificial Sequence
  LRRK2 RNA guide
caaaacugaggcauagaauugu

SEQ ID NO: 39452 - RNA, 22 nt, Artificial Sequence
  LRRK2 RNA guide
caauucuaugccucaguuuugu

SEQ ID NO: 39453 - RNA, 22 nt, Artificial Sequence
  LRRK2 RNA guide
ccugaccuuaaaaaucucuaca

SEQ ID NO: 39454 - RNA, 22 nt, Artificial Sequence
  LRRK2 RNA guide
cuacaaaacugaggcauagaau

SEQ ID NO: 39455 - RNA, 22 nt, Artificial Sequence
  LRRK2 RNA guide
cuacaauucuaugccucaguuu

SEQ ID NO: 39456 - RNA, 22 nt, Artificial Sequence
  LRRK2 RNA guide
cuaugccucaguuuuguagucc

SEQ ID NO: 39457 - RNA, 22 nt, Artificial Sequence
  LRRK2 RNA guide
cucuacaauucuaugccucagu

SEQ ID NO: 39458 - RNA, 22 nt, Artificial Sequence
  LRRK2 RNA guide
cugaccuuaaaaaucucuacaa

SEQ ID NO: 39459 - RNA, 22 nt, Artificial Sequence
  LRRK2 RNA guide
cugaggcauagaauuguagaga

SEQ ID NO: 39460 - RNA, 22 nt, Artificial Sequence
  LRRK2 RNA guide
gacuacaaaacugaggcauaga

SEQ ID NO: 39461 - RNA, 22 nt, Artificial Sequence
  LRRK2 RNA guide
gaggcauagaauuguagagauu

SEQ ID NO: 39462 - RNA, 22 nt, Artificial Sequence
  LRRK2 RNA guide
ggacuacaaaacugaggcauag

SEQ ID NO: 39463 - RNA, 22 nt, Artificial Sequence
  LRRK2 RNA guide
ggcauagaauuguagagauuuu

SEQ ID NO: 39464 - RNA, 22 nt, Artificial Sequence
  LRRK2 RNA guide
guauggacuacaaaacugaggc

SEQ ID NO: 39465 - RNA, 22 nt, Artificial Sequence
  LRRK2 RNA guide
uacaaaacugaggcauagaauu

SEQ ID NO: 39466 - RNA, 22 nt, Artificial Sequence
  LRRK2 RNA guide
uacaauucuaugccucaguuuu

SEQ ID NO: 39467 - RNA, 22 nt, Artificial Sequence
  LRRK2 RNA guide
uauggacuacaaaacugaggca

SEQ ID NO: 39468 - RNA, 22 nt, Artificial Sequence
  LRRK2 RNA guide
ucuacaauucuaugccucaguu

SEQ ID NO: 39469 - RNA, 22 nt, Artificial Sequence
  LRRK2 RNA guide
ucuaugccucaguuuuguaguc

SEQ ID NO: 39470 - RNA, 22 nt, Artificial Sequence
  LRRK2 RNA guide
ucucuacaauucuaugccucag

SEQ ID NO: 39471 - RNA, 22 nt, Artificial Sequence
  LRRK2 RNA guide
ugaggcauagaauuguagagau

SEQ ID NO: 39472 - RNA, 22 nt, Artificial Sequence
  LRRK2 RNA guide
uggacuacaaaacugaggcaua

SEQ ID NO: 39473 - RNA, 22 nt, Artificial Sequence
  LRRK2 RNA guide
uguauggacuacaaaacugagg

SEQ ID NO: 39474 - RNA, 22 nt, Artificial Sequence
  LRRK2 RNA guide
uucuaugccucaguuuuguagu

SEQ ID NO: 39475 - RNA, 22 nt, Artificial Sequence
  LRRK2 RNA guide
uuguauggacuacaaaacugag

SEQ ID NO: 39476 - RNA, 20 nt, Artificial Sequence
  LRRK2 RNA guide
aaaacugaggcauggaauug

SEQ ID NO: 39477 - RNA, 20 nt, Artificial Sequence
  LRRK2 RNA guide
aaaaucucuacaauuccaug

SEQ ID NO: 39478 - RNA, 20 nt, Artificial Sequence
  LRRK2 RNA guide
aaacugaggcauggaauugu

SEQ ID NO: 39479 - RNA, 20 nt, Artificial Sequence
  LRRK2 RNA guide
aaaucucuacaauuccaugc

SEQ ID NO: 39480 - RNA, 20 nt, Artificial Sequence
  LRRK2 RNA guide
aacugaggcauggaauugua

SEQ ID NO: 39481 - RNA, 20 nt, Artificial Sequence
  LRRK2 RNA guide
aaucucuacaauuccaugcc

SEQ ID NO: 39482 - RNA, 20 nt, Artificial Sequence
  LRRK2 RNA guide
aauuccaugccucaguuuug

SEQ ID NO: 39483 - RNA, 20 nt, Artificial Sequence
  LRRK2 RNA guide
acaaaacugaggcauggaau

SEQ ID NO: 39484 - RNA, 20 nt, Artificial Sequence
  LRRK2 RNA guide
acaauuccaugccucaguuu

SEQ ID NO: 39485 - RNA, 20 nt, Artificial Sequence
  LRRK2 RNA guide
acuacaaaacugaggcaugg

SEQ ID NO: 39486 - RNA, 20 nt, Artificial Sequence
  LRRK2 RNA guide
acugaggcauggaauuguag

SEQ ID NO: 39487 - RNA, 20 nt, Artificial Sequence
  LRRK2 RNA guide
aggcauggaauuguagagau

SEQ ID NO: 39488 - RNA, 20 nt, Artificial Sequence
  LRRK2 RNA guide
aucucuacaauuccaugccu

SEQ ID NO: 39489 - RNA, 20 nt, Artificial Sequence
  LRRK2 RNA guide
auuccaugccucaguuuugu

SEQ ID NO: 39490 - RNA, 20 nt, Artificial Sequence
  LRRK2 RNA guide
caaaacugaggcauggaauu

SEQ ID NO: 39491 - RNA, 20 nt, Artificial Sequence
  LRRK2 RNA guide
caauuccaugccucaguuuu

SEQ ID NO: 39492 - RNA, 20 nt, Artificial Sequence
  LRRK2 RNA guide
cauggaauuguagagauuuu

SEQ ID NO: 39493 - RNA, 20 nt, Artificial Sequence
  LRRK2 RNA guide
ccaugccucaguuuuguagu

SEQ ID NO: 39494 - RNA, 20 nt, Artificial Sequence
  LRRK2 RNA guide
cuacaaaacugaggcaugga

SEQ ID NO: 39495 - RNA, 20 nt, Artificial Sequence
  LRRK2 RNA guide
cuacaauuccaugccucagu

SEQ ID NO: 39496 - RNA, 20 nt, Artificial Sequence
  LRRK2 RNA guide
cucuacaauuccaugccuca

SEQ ID NO: 39497 - RNA, 20 nt, Artificial Sequence
  LRRK2 RNA guide
cugaggcauggaauuguaga

SEQ ID NO: 39498 - RNA, 20 nt, Artificial Sequence
  LRRK2 RNA guide
gacuacaaaacugaggcaug

SEQ ID NO: 39499 - RNA, 20 nt, Artificial Sequence
  LRRK2 RNA guide
gaggcauggaauuguagaga

SEQ ID NO: 39500 - RNA, 20 nt, Artificial Sequence
  LRRK2 RNA guide
gcauggaauuguagagauuu

SEQ ID NO: 39501 - RNA, 20 nt, Artificial Sequence
  LRRK2 RNA guide
ggcauggaauuguagagauu

SEQ ID NO: 39502 - RNA, 20 nt, Artificial Sequence
  LRRK2 RNA guide
uacaaaacugaggcauggaa

SEQ ID NO: 39503 - RNA, 20 nt, Artificial Sequence
  LRRK2 RNA guide
uacaauuccaugccucaguu

SEQ ID NO: 39504 - RNA, 20 nt, Artificial Sequence
  LRRK2 RNA guide
uccaugccucaguuuuguag

SEQ ID NO: 39505 - RNA, 20 nt, Artificial Sequence
  LRRK2 RNA guide
ucuacaauuccaugccucag

SEQ ID NO: 39506 - RNA, 20 nt, Artificial Sequence
  LRRK2 RNA guide
ucucuacaauuccaugccuc

SEQ ID NO: 39507 - RNA, 20 nt, Artificial Sequence
  LRRK2 RNA guide
ugaggcauggaauuguagag

SEQ ID NO: 39508 - RNA, 20 nt, Artificial Sequence
  LRRK2 RNA guide
uuccaugccucaguuuugua

SEQ ID NO: 39509 - RNA, 21 nt, Artificial Sequence
  LRRK2 RNA guide
aaaacugaggcauggaauugu

SEQ ID NO: 39510 - RNA, 21 nt, Artificial Sequence
  LRRK2 RNA guide
aaaaucucuacaauuccaugc

SEQ ID NO: 39511 - RNA, 21 nt, Artificial Sequence
  LRRK2 RNA guide
aaacugaggcauggaauugua

SEQ ID NO: 39512 - RNA, 21 nt, Artificial Sequence
  LRRK2 RNA guide
aaaucucuacaauuccaugcc

SEQ ID NO: 39513 - RNA, 21 nt, Artificial Sequence
  LRRK2 RNA guide
aacugaggcauggaauuguag

SEQ ID NO: 39514 - RNA, 21 nt, Artificial Sequence
  LRRK2 RNA guide
aaucucuacaauuccaugccu

SEQ ID NO: 39515 - RNA, 21 nt, Artificial Sequence
  LRRK2 RNA guide
aauuccaugccucaguuuugu

SEQ ID NO: 39516 - RNA, 21 nt, Artificial Sequence
  LRRK2 RNA guide
acaaaacugaggcauggaauu

SEQ ID NO: 39517 - RNA, 21 nt, Artificial Sequence
  LRRK2 RNA guide
acaauuccaugccucaguuuu

SEQ ID NO: 39518 - RNA, 21 nt, Artificial Sequence
  LRRK2 RNA guide
acuacaaaacugaggcaugga

SEQ ID NO: 39519 - RNA, 21 nt, Artificial Sequence
  LRRK2 RNA guide
acugaggcauggaauuguaga

SEQ ID NO: 39520 - RNA, 21 nt, Artificial Sequence
  LRRK2 RNA guide
aggcauggaauuguagagauu

SEQ ID NO: 39521 - RNA, 21 nt, Artificial Sequence
  LRRK2 RNA guide
aucucuacaauuccaugccuc

SEQ ID NO: 39522 - RNA, 21 nt, Artificial Sequence
  LRRK2 RNA guide
auuccaugccucaguuuugua

SEQ ID NO: 39523 - RNA, 21 nt, Artificial Sequence
  LRRK2 RNA guide
caaaacugaggcauggaauug

SEQ ID NO: 39524 - RNA, 21 nt, Artificial Sequence
  LRRK2 RNA guide
caauuccaugccucaguuuug

SEQ ID NO: 39525 - RNA, 21 nt, Artificial Sequence
  LRRK2 RNA guide
ccaugccucaguuuuguaguc

SEQ ID NO: 39526 - RNA, 21 nt, Artificial Sequence
  LRRK2 RNA guide
cuacaaaacugaggcauggaa

SEQ ID NO: 39527 - RNA, 21 nt, Artificial Sequence
  LRRK2 RNA guide
cuacaauuccaugccucaguu

SEQ ID NO: 39528 - RNA, 21 nt, Artificial Sequence
  LRRK2 RNA guide
cucuacaauuccaugccucag

SEQ ID NO: 39529 - RNA, 21 nt, Artificial Sequence
  LRRK2 RNA guide
cugaggcauggaauuguagag

SEQ ID NO: 39530 - RNA, 21 nt, Artificial Sequence
  LRRK2 RNA guide
gacuacaaaacugaggcaugg

SEQ ID NO: 39531 - RNA, 21 nt, Artificial Sequence
  LRRK2 RNA guide
gaggcauggaauuguagagau

SEQ ID NO: 39532 - RNA, 21 nt, Artificial Sequence
  LRRK2 RNA guide
gcauggaauuguagagauuuu

SEQ ID NO: 39533 - RNA, 21 nt, Artificial Sequence
  LRRK2 RNA guide
ggacuacaaaacugaggcaug

SEQ ID NO: 39534 - RNA, 21 nt, Artificial Sequence
  LRRK2 RNA guide
ggcauggaauuguagagauuu

SEQ ID NO: 39535 - RNA, 21 nt, Artificial Sequence
  LRRK2 RNA guide
uacaaaacugaggcauggaau

SEQ ID NO: 39536 - RNA, 21 nt, Artificial Sequence
  LRRK2 RNA guide
uacaauuccaugccucaguuu

SEQ ID NO: 39537 - RNA, 21 nt, Artificial Sequence
  LRRK2 RNA guide
uccaugccucaguuuuguagu

SEQ ID NO: 39538 - RNA, 21 nt, Artificial Sequence
  LRRK2 RNA guide
ucuacaauuccaugccucagu

SEQ ID NO: 39539 - RNA, 21 nt, Artificial Sequence
  LRRK2 RNA guide
ucucuacaauuccaugccuca

SEQ ID NO: 39540 - RNA, 21 nt, Artificial Sequence
  LRRK2 RNA guide
ugaggcauggaauuguagaga

SEQ ID NO: 39541 - RNA, 21 nt, Artificial Sequence
  LRRK2 RNA guide
uuccaugccucaguuuuguag

SEQ ID NO: 39542 - RNA, 22 nt, Artificial Sequence
  LRRK2 RNA guide
aaaaaucucuacaauuccaugc

SEQ ID NO: 39543 - RNA, 22 nt, Artificial Sequence
  LRRK2 RNA guide
aaaacugaggcauggaauugua

SEQ ID NO: 39544 - RNA, 22 nt, Artificial Sequence
  LRRK2 RNA guide
aaaaucucuacaauuccaugcc

SEQ ID NO: 39545 - RNA, 22 nt, Artificial Sequence
  LRRK2 RNA guide
aaacugaggcauggaauuguag

SEQ ID NO: 39546 - RNA, 22 nt, Artificial Sequence
  LRRK2 RNA guide
aaaucucuacaauuccaugccu

SEQ ID NO: 39547 - RNA, 22 nt, Artificial Sequence
  LRRK2 RNA guide
aacugaggcauggaauuguaga

SEQ ID NO: 39548 - RNA, 22 nt, Artificial Sequence
  LRRK2 RNA guide
aaucucuacaauuccaugccuc

SEQ ID NO: 39549 - RNA, 22 nt, Artificial Sequence
  LRRK2 RNA guide
aauuccaugccucaguuuugua

SEQ ID NO: 39550 - RNA, 22 nt, Artificial Sequence
  LRRK2 RNA guide
acaaaacugaggcauggaauug

SEQ ID NO: 39551 - RNA, 22 nt, Artificial Sequence
  LRRK2 RNA guide
acaauuccaugccucaguuuug

SEQ ID NO: 39552 - RNA, 22 nt, Artificial Sequence
  LRRK2 RNA guide
acuacaaaacugaggcauggaa

SEQ ID NO: 39553 - RNA, 22 nt, Artificial Sequence
  LRRK2 RNA guide
acugaggcauggaauuguagag

SEQ ID NO: 39554 - RNA, 22 nt, Artificial Sequence
  LRRK2 RNA guide
aggcauggaauuguagagauuu

SEQ ID NO: 39555 - RNA, 22 nt, Artificial Sequence
  LRRK2 RNA guide
aucucuacaauuccaugccuca

SEQ ID NO: 39556 - RNA, 22 nt, Artificial Sequence
  LRRK2 RNA guide
auuccaugccucaguuuuguag

SEQ ID NO: 39557 - RNA, 22 nt, Artificial Sequence
  LRRK2 RNA guide
caaaacugaggcauggaauugu

SEQ ID NO: 39558 - RNA, 22 nt, Artificial Sequence
  LRRK2 RNA guide
caauuccaugccucaguuuugu

SEQ ID NO: 39559 - RNA, 22 nt, Artificial Sequence
  LRRK2 RNA guide
ccaugccucaguuuuguagucc

SEQ ID NO: 39560 - RNA, 22 nt, Artificial Sequence
  LRRK2 RNA guide
ccuuaaaaaucucuacaauucc

SEQ ID NO: 39561 - RNA, 22 nt, Artificial Sequence
  LRRK2 RNA guide
cuacaaaacugaggcauggaau

SEQ ID NO: 39562 - RNA, 22 nt, Artificial Sequence
  LRRK2 RNA guide
cuacaauuccaugccucaguuu

SEQ ID NO: 39563 - RNA, 22 nt, Artificial Sequence
  LRRK2 RNA guide
cucuacaauuccaugccucagu

SEQ ID NO: 39564 - RNA, 22 nt, Artificial Sequence
  LRRK2 RNA guide
cugaggcauggaauuguagaga

SEQ ID NO: 39565 - RNA, 22 nt, Artificial Sequence
  LRRK2 RNA guide
gacuacaaaacugaggcaugga

SEQ ID NO: 39566 - RNA, 22 nt, Artificial Sequence
  LRRK2 RNA guide
gaggcauggaauuguagagauu

SEQ ID NO: 39567 - RNA, 22 nt, Artificial Sequence
  LRRK2 RNA guide
gcauggaauuguagagauuuuu

SEQ ID NO: 39568 - RNA, 22 nt, Artificial Sequence
  LRRK2 RNA guide
ggacuacaaaacugaggcaugg

SEQ ID NO: 39569 - RNA, 22 nt, Artificial Sequence
  LRRK2 RNA guide
ggcauggaauuguagagauuuu

SEQ ID NO: 39570 - RNA, 22 nt, Artificial Sequence
  LRRK2 RNA guide
uacaaaacugaggcauggaauu

SEQ ID NO: 39571 - RNA, 22 nt, Artificial Sequence
  LRRK2 RNA guide
uacaauuccaugccucaguuuu

SEQ ID NO: 39572 - RNA, 22 nt, Artificial Sequence
  LRRK2 RNA guide
uccaugccucaguuuuguaguc

SEQ ID NO: 39573 - RNA, 22 nt, Artificial Sequence
  LRRK2 RNA guide
ucuacaauuccaugccucaguu

SEQ ID NO: 39574 - RNA, 22 nt, Artificial Sequence
  LRRK2 RNA guide
ucucuacaauuccaugccucag

SEQ ID NO: 39575 - RNA, 22 nt, Artificial Sequence
  LRRK2 RNA guide
ugaggcauggaauuguagagau

SEQ ID NO: 39576 - RNA, 22 nt, Artificial Sequence
  LRRK2 RNA guide
uggacuacaaaacugaggcaug

SEQ ID NO: 39577 - RNA, 22 nt, Artificial Sequence
  LRRK2 RNA guide
uuccaugccucaguuuuguagu

SEQ ID NO: 39578 - RNA, 20 nt, Artificial Sequence
  LRRK2 RNA guide
aaaaaauuuacaguccacac

SEQ ID NO: 39579 - RNA, 20 nt, Artificial Sequence
  LRRK2 RNA guide
aaaaauuuacaguccacacg

SEQ ID NO: 39580 - RNA, 20 nt, Artificial Sequence
  LRRK2 RNA guide
aaaauuuacaguccacacga

SEQ ID NO: 39581 - RNA, 20 nt, Artificial Sequence
  LRRK2 RNA guide
aaauuuacaguccacacgac

SEQ ID NO: 39582 - RNA, 20 nt, Artificial Sequence
  LRRK2 RNA guide
aacaguccuuuaggucgugu

SEQ ID NO: 39583 - RNA, 20 nt, Artificial Sequence
  LRRK2 RNA guide
aauuuacaguccacacgacc

SEQ ID NO: 39584 - RNA, 20 nt, Artificial Sequence
  LRRK2 RNA guide
acacgaccuaaaggacuguu

SEQ ID NO: 39585 - RNA, 20 nt, Artificial Sequence
  LRRK2 RNA guide
acaguccacacgaccuaaag

SEQ ID NO: 39586 - RNA, 20 nt, Artificial Sequence
  LRRK2 RNA guide
acaguccuuuaggucgugug

SEQ ID NO: 39587 - RNA, 20 nt, Artificial Sequence
  LRRK2 RNA guide
acauaacaguccuuuagguc

SEQ ID NO: 39588 - RNA, 20 nt, Artificial Sequence
  LRRK2 RNA guide
acgaccuaaaggacuguuau

SEQ ID NO: 39589 - RNA, 20 nt, Artificial Sequence
  LRRK2 RNA guide
aggucguguggacuguaaau

SEQ ID NO: 39590 - RNA, 20 nt, Artificial Sequence
  LRRK2 RNA guide
aguccacacgaccuaaagga

SEQ ID NO: 39591 - RNA, 20 nt, Artificial Sequence
  LRRK2 RNA guide
aguccuuuaggucgugugga

SEQ ID NO: 39592 - RNA, 20 nt, Artificial Sequence
  LRRK2 RNA guide
auaacaguccuuuaggucgu

SEQ ID NO: 39593 - RNA, 20 nt, Artificial Sequence
  LRRK2 RNA guide
auuuacaguccacacgaccu

SEQ ID NO: 39594 - RNA, 20 nt, Artificial Sequence
  LRRK2 RNA guide
cacacgaccuaaaggacugu

SEQ ID NO: 39595 - RNA, 20 nt, Artificial Sequence
  LRRK2 RNA guide
cacgaccuaaaggacuguua

SEQ ID NO: 39596 - RNA, 20 nt, Artificial Sequence
  LRRK2 RNA guide
caguccacacgaccuaaagg

SEQ ID NO: 39597 - RNA, 20 nt, Artificial Sequence
  LRRK2 RNA guide
caguccuuuaggucgugugg

SEQ ID NO: 39598 - RNA, 20 nt, Artificial Sequence
  LRRK2 RNA guide
cauaacaguccuuuaggucg

SEQ ID NO: 39599 - RNA, 20 nt, Artificial Sequence
  LRRK2 RNA guide
ccacacgaccuaaaggacug

SEQ ID NO: 39600 - RNA, 20 nt, Artificial Sequence
  LRRK2 RNA guide
ccuuuaggucguguggacug

SEQ ID NO: 39601 - RNA, 20 nt, Artificial Sequence
  LRRK2 RNA guide
cuacauaacaguccuuuagg

SEQ ID NO: 39602 - RNA, 20 nt, Artificial Sequence
  LRRK2 RNA guide
cuuuaggucguguggacugu

SEQ ID NO: 39603 - RNA, 20 nt, Artificial Sequence
  LRRK2 RNA guide
ggucguguggacuguaaauu

SEQ ID NO: 39604 - RNA, 20 nt, Artificial Sequence
  LRRK2 RNA guide
guccacacgaccuaaaggac

SEQ ID NO: 39605 - RNA, 20 nt, Artificial Sequence
  LRRK2 RNA guide
guccuuuaggucguguggac

SEQ ID NO: 39606 - RNA, 20 nt, Artificial Sequence
  LRRK2 RNA guide
gucguguggacuguaaauuu

SEQ ID NO: 39607 - RNA, 20 nt, Artificial Sequence
  LRRK2 RNA guide
uaacaguccuuuaggucgug

SEQ ID NO: 39608 - RNA, 20 nt, Artificial Sequence
  LRRK2 RNA guide
uacaguccacacgaccuaaa

SEQ ID NO: 39609 - RNA, 20 nt, Artificial Sequence
  LRRK2 RNA guide
uacauaacaguccuuuaggu

SEQ ID NO: 39610 - RNA, 20 nt, Artificial Sequence
  LRRK2 RNA guide
uaggucguguggacuguaaa

SEQ ID NO: 39611 - RNA, 20 nt, Artificial Sequence
  LRRK2 RNA guide
uccacacgaccuaaaggacu

SEQ ID NO: 39612 - RNA, 20 nt, Artificial Sequence
  LRRK2 RNA guide
uccuuuaggucguguggacu

SEQ ID NO: 39613 - RNA, 20 nt, Artificial Sequence
  LRRK2 RNA guide
ucguguggacuguaaauuuu

SEQ ID NO: 39614 - RNA, 20 nt, Artificial Sequence
  LRRK2 RNA guide
ucuacauaacaguccuuuag

SEQ ID NO: 39615 - RNA, 20 nt, Artificial Sequence
  LRRK2 RNA guide
uuacaguccacacgaccuaa

SEQ ID NO: 39616 - RNA, 20 nt, Artificial Sequence
  LRRK2 RNA guide
uuaggucguguggacuguaa

SEQ ID NO: 39617 - RNA, 20 nt, Artificial Sequence
  LRRK2 RNA guide
uucuacauaacaguccuuua

SEQ ID NO: 39618 - RNA, 20 nt, Artificial Sequence
  LRRK2 RNA guide
uuuacaguccacacgaccua

SEQ ID NO: 39619 - RNA, 20 nt, Artificial Sequence
  LRRK2 RNA guide
uuuaggucguguggacugua

SEQ ID NO: 39620 - RNA, 21 nt, Artificial Sequence
  LRRK2 RNA guide
aaaaaauuuacaguccacacg

SEQ ID NO: 39621 - RNA, 21 nt, Artificial Sequence
  LRRK2 RNA guide
aaaaauuuacaguccacacga

SEQ ID NO: 39622 - RNA, 21 nt, Artificial Sequence
  LRRK2 RNA guide
aaaauuuacaguccacacgac

SEQ ID NO: 39623 - RNA, 21 nt, Artificial Sequence
  LRRK2 RNA guide
aaauuuacaguccacacgacc

SEQ ID NO: 39624 - RNA, 21 nt, Artificial Sequence
  LRRK2 RNA guide
aacaguccuuuaggucgugug

SEQ ID NO: 39625 - RNA, 21 nt, Artificial Sequence
  LRRK2 RNA guide
aauuuacaguccacacgaccu

SEQ ID NO: 39626 - RNA, 21 nt, Artificial Sequence
  LRRK2 RNA guide
acacgaccuaaaggacuguua

SEQ ID NO: 39627 - RNA, 21 nt, Artificial Sequence
  LRRK2 RNA guide
acaguccacacgaccuaaagg

SEQ ID NO: 39628 - RNA, 21 nt, Artificial Sequence
  LRRK2 RNA guide
acaguccuuuaggucgugugg

SEQ ID NO: 39629 - RNA, 21 nt, Artificial Sequence
  LRRK2 RNA guide
acauaacaguccuuuaggucg

SEQ ID NO: 39630 - RNA, 21 nt, Artificial Sequence
  LRRK2 RNA guide
acgaccuaaaggacuguuaug

SEQ ID NO: 39631 - RNA, 21 nt, Artificial Sequence
  LRRK2 RNA guide
aggucguguggacuguaaauu

SEQ ID NO: 39632 - RNA, 21 nt, Artificial Sequence
  LRRK2 RNA guide
aguccacacgaccuaaaggac

SEQ ID NO: 39633 - RNA, 21 nt, Artificial Sequence
  LRRK2 RNA guide
aguccuuuaggucguguggac

SEQ ID NO: 39634 - RNA, 21 nt, Artificial Sequence
  LRRK2 RNA guide
auaacaguccuuuaggucgug

SEQ ID NO: 39635 - RNA, 21 nt, Artificial Sequence
  LRRK2 RNA guide
auuuacaguccacacgaccua

SEQ ID NO: 39636 - RNA, 21 nt, Artificial Sequence
  LRRK2 RNA guide
cacacgaccuaaaggacuguu

SEQ ID NO: 39637 - RNA, 21 nt, Artificial Sequence
  LRRK2 RNA guide
cacgaccuaaaggacuguuau

SEQ ID NO: 39638 - RNA, 21 nt, Artificial Sequence
  LRRK2 RNA guide
caguccacacgaccuaaagga

SEQ ID NO: 39639 - RNA, 21 nt, Artificial Sequence
  LRRK2 RNA guide
caguccuuuaggucgugugga

SEQ ID NO: 39640 - RNA, 21 nt, Artificial Sequence
  LRRK2 RNA guide
cauaacaguccuuuaggucgu

SEQ ID NO: 39641 - RNA, 21 nt, Artificial Sequence
  LRRK2 RNA guide
ccacacgaccuaaaggacugu

SEQ ID NO: 39642 - RNA, 21 nt, Artificial Sequence
  LRRK2 RNA guide
ccuuuaggucguguggacugu

SEQ ID NO: 39643 - RNA, 21 nt, Artificial Sequence
  LRRK2 RNA guide
cguguggacuguaaauuuuuu

SEQ ID NO: 39644 - RNA, 21 nt, Artificial Sequence
  LRRK2 RNA guide
cuacauaacaguccuuuaggu

SEQ ID NO: 39645 - RNA, 21 nt, Artificial Sequence
  LRRK2 RNA guide
cuuuaggucguguggacugua

SEQ ID NO: 39646 - RNA, 21 nt, Artificial Sequence
  LRRK2 RNA guide
ggucguguggacuguaaauuu

SEQ ID NO: 39647 - RNA, 21 nt, Artificial Sequence
  LRRK2 RNA guide
guccacacgaccuaaaggacu

SEQ ID NO: 39648 - RNA, 21 nt, Artificial Sequence
  LRRK2 RNA guide
guccuuuaggucguguggacu

SEQ ID NO: 39649 - RNA, 21 nt, Artificial Sequence
  LRRK2 RNA guide
gucguguggacuguaaauuuu

SEQ ID NO: 39650 - RNA, 21 nt, Artificial Sequence
  LRRK2 RNA guide
uaacaguccuuuaggucgugu

SEQ ID NO: 39651 - RNA, 21 nt, Artificial Sequence
  LRRK2 RNA guide
uacaguccacacgaccuaaag

SEQ ID NO: 39652 - RNA, 21 nt, Artificial Sequence
  LRRK2 RNA guide
uacauaacaguccuuuagguc

SEQ ID NO: 39653 - RNA, 21 nt, Artificial Sequence
  LRRK2 RNA guide
uaggucguguggacuguaaau

SEQ ID NO: 39654 - RNA, 21 nt, Artificial Sequence
  LRRK2 RNA guide
uccacacgaccuaaaggacug

SEQ ID NO: 39655 - RNA, 21 nt, Artificial Sequence
  LRRK2 RNA guide
uccuuuaggucguguggacug

SEQ ID NO: 39656 - RNA, 21 nt, Artificial Sequence
  LRRK2 RNA guide
ucguguggacuguaaauuuuu

SEQ ID NO: 39657 - RNA, 21 nt, Artificial Sequence
  LRRK2 RNA guide
ucuacauaacaguccuuuagg

SEQ ID NO: 39658 - RNA, 21 nt, Artificial Sequence
  LRRK2 RNA guide
uuacaguccacacgaccuaaa

SEQ ID NO: 39659 - RNA, 21 nt, Artificial Sequence
  LRRK2 RNA guide
uuaggucguguggacuguaaa

SEQ ID NO: 39660 - RNA, 21 nt, Artificial Sequence
  LRRK2 RNA guide
uucuacauaacaguccuuuag

SEQ ID NO: 39661 - RNA, 21 nt, Artificial Sequence
  LRRK2 RNA guide
uuuacaguccacacgaccuaa

SEQ ID NO: 39662 - RNA, 21 nt, Artificial Sequence
  LRRK2 RNA guide
uuuaggucguguggacuguaa

SEQ ID NO: 39663 - RNA, 22 nt, Artificial Sequence
  LRRK2 RNA guide
aaaaaauuuacaguccacacga

SEQ ID NO: 39664 - RNA, 22 nt, Artificial Sequence
  LRRK2 RNA guide
aaaaauuuacaguccacacgac

SEQ ID NO: 39665 - RNA, 22 nt, Artificial Sequence
  LRRK2 RNA guide
aaaauuuacaguccacacgacc

SEQ ID NO: 39666 - RNA, 22 nt, Artificial Sequence
  LRRK2 RNA guide
aaauuuacaguccacacgaccu

SEQ ID NO: 39667 - RNA, 22 nt, Artificial Sequence
  LRRK2 RNA guide
aacaguccuuuaggucgugugg

SEQ ID NO: 39668 - RNA, 22 nt, Artificial Sequence
  LRRK2 RNA guide
aauuuacaguccacacgaccua

SEQ ID NO: 39669 - RNA, 22 nt, Artificial Sequence
  LRRK2 RNA guide
acacgaccuaaaggacuguuau

SEQ ID NO: 39670 - RNA, 22 nt, Artificial Sequence
  LRRK2 RNA guide
acaguccacacgaccuaaagga

SEQ ID NO: 39671 - RNA, 22 nt, Artificial Sequence
  LRRK2 RNA guide
acaguccuuuaggucgugugga

SEQ ID NO: 39672 - RNA, 22 nt, Artificial Sequence
  LRRK2 RNA guide
acauaacaguccuuuaggucgu

SEQ ID NO: 39673 - RNA, 22 nt, Artificial Sequence
  LRRK2 RNA guide
acgaccuaaaggacuguuaugu

SEQ ID NO: 39674 - RNA, 22 nt, Artificial Sequence
  LRRK2 RNA guide
aggucguguggacuguaaauuu

SEQ ID NO: 39675 - RNA, 22 nt, Artificial Sequence
  LRRK2 RNA guide
aguccacacgaccuaaaggacu

SEQ ID NO: 39676 - RNA, 22 nt, Artificial Sequence
  LRRK2 RNA guide
aguccuuuaggucguguggacu

SEQ ID NO: 39677 - RNA, 22 nt, Artificial Sequence
  LRRK2 RNA guide
auaacaguccuuuaggucgugu

SEQ ID NO: 39678 - RNA, 22 nt, Artificial Sequence
  LRRK2 RNA guide
auuuacaguccacacgaccuaa

SEQ ID NO: 39679 - RNA, 22 nt, Artificial Sequence
  LRRK2 RNA guide
cacacgaccuaaaggacuguua

SEQ ID NO: 39680 - RNA, 22 nt, Artificial Sequence
  LRRK2 RNA guide
cacgaccuaaaggacuguuaug

SEQ ID NO: 39681 - RNA, 22 nt, Artificial Sequence
  LRRK2 RNA guide
caguccacacgaccuaaaggac

SEQ ID NO: 39682 - RNA, 22 nt, Artificial Sequence
  LRRK2 RNA guide
caguccuuuaggucguguggac

SEQ ID NO: 39683 - RNA, 22 nt, Artificial Sequence
  LRRK2 RNA guide
cauaacaguccuuuaggucgug

SEQ ID NO: 39684 - RNA, 22 nt, Artificial Sequence
  LRRK2 RNA guide
ccacacgaccuaaaggacuguu

SEQ ID NO: 39685 - RNA, 22 nt, Artificial Sequence
  LRRK2 RNA guide
ccuuuaggucguguggacugua

SEQ ID NO: 39686 - RNA, 22 nt, Artificial Sequence
  LRRK2 RNA guide
cuacauaacaguccuuuagguc

SEQ ID NO: 39687 - RNA, 22 nt, Artificial Sequence
  LRRK2 RNA guide
cuuuaggucguguggacuguaa

SEQ ID NO: 39688 - RNA, 22 nt, Artificial Sequence
  LRRK2 RNA guide
cuuucuacauaacaguccuuua

SEQ ID NO: 39689 - RNA, 22 nt, Artificial Sequence
  LRRK2 RNA guide
ggucguguggacuguaaauuuu

SEQ ID NO: 39690 - RNA, 22 nt, Artificial Sequence
  LRRK2 RNA guide
guccacacgaccuaaaggacug

SEQ ID NO: 39691 - RNA, 22 nt, Artificial Sequence
  LRRK2 RNA guide
guccuuuaggucguguggacug

SEQ ID NO: 39692 - RNA, 22 nt, Artificial Sequence
  LRRK2 RNA guide
gucguguggacuguaaauuuuu

SEQ ID NO: 39693 - RNA, 22 nt, Artificial Sequence
  LRRK2 RNA guide
uaacaguccuuuaggucgugug

SEQ ID NO: 39694 - RNA, 22 nt, Artificial Sequence
  LRRK2 RNA guide
uacaguccacacgaccuaaagg

SEQ ID NO: 39695 - RNA, 22 nt, Artificial Sequence
  LRRK2 RNA guide
uacauaacaguccuuuaggucg

SEQ ID NO: 39696 - RNA, 22 nt, Artificial Sequence
  LRRK2 RNA guide
uaggucguguggacuguaaauu

SEQ ID NO: 39697 - RNA, 22 nt, Artificial Sequence
  LRRK2 RNA guide
uccacacgaccuaaaggacugu

SEQ ID NO: 39698 - RNA, 22 nt, Artificial Sequence
  LRRK2 RNA guide
uccuuuaggucguguggacugu

SEQ ID NO: 39699 - RNA, 22 nt, Artificial Sequence
  LRRK2 RNA guide
ucguguggacuguaaauuuuuu

SEQ ID NO: 39700 - RNA, 22 nt, Artificial Sequence
  LRRK2 RNA guide
ucuacauaacaguccuuuaggu

SEQ ID NO: 39701 - RNA, 22 nt, Artificial Sequence
  LRRK2 RNA guide
uuacaguccacacgaccuaaag

SEQ ID NO: 39702 - RNA, 22 nt, Artificial Sequence
  LRRK2 RNA guide
uuaggucguguggacuguaaau

SEQ ID NO: 39703 - RNA, 22 nt, Artificial Sequence
  LRRK2 RNA guide
uucuacauaacaguccuuuagg

SEQ ID NO: 39704 - RNA, 22 nt, Artificial Sequence
  LRRK2 RNA guide
uuuacaguccacacgaccuaaa

SEQ ID NO: 39705 - RNA, 22 nt, Artificial Sequence
  LRRK2 RNA guide
uuuaggucguguggacuguaaa

SEQ ID NO: 39706 - RNA, 22 nt, Artificial Sequence
  LRRK2 RNA guide
uuucuacauaacaguccuuuag

SEQ ID NO: 39707 - RNA, 20 nt, Artificial Sequence
  LRRK2 RNA guide
aaaaauuuacaguccacaug

SEQ ID NO: 39708 - RNA, 20 nt, Artificial Sequence
  LRRK2 RNA guide
aaaauuuacaguccacauga

SEQ ID NO: 39709 - RNA, 20 nt, Artificial Sequence
  LRRK2 RNA guide
aaauuuacaguccacaugac

SEQ ID NO: 39710 - RNA, 20 nt, Artificial Sequence
  LRRK2 RNA guide
aacaguccuuuaggucaugu

SEQ ID NO: 39711 - RNA, 20 nt, Artificial Sequence
  LRRK2 RNA guide
aauuuacaguccacaugacc

SEQ ID NO: 39712 - RNA, 20 nt, Artificial Sequence
  LRRK2 RNA guide
acaguccacaugaccuaaag

SEQ ID NO: 39713 - RNA, 20 nt, Artificial Sequence
  LRRK2 RNA guide
acaguccuuuaggucaugug

SEQ ID NO: 39714 - RNA, 20 nt, Artificial Sequence
  LRRK2 RNA guide
acaugaccuaaaggacuguu

SEQ ID NO: 39715 - RNA, 20 nt, Artificial Sequence
  LRRK2 RNA guide
aggucauguggacuguaaau

SEQ ID NO: 39716 - RNA, 20 nt, Artificial Sequence
  LRRK2 RNA guide
aguccacaugaccuaaagga

SEQ ID NO: 39717 - RNA, 20 nt, Artificial Sequence
  LRRK2 RNA guide
aguccuuuaggucaugugga

SEQ ID NO: 39718 - RNA, 20 nt, Artificial Sequence
  LRRK2 RNA guide
auaacaguccuuuaggucau

SEQ ID NO: 39719 - RNA, 20 nt, Artificial Sequence
  LRRK2 RNA guide
augaccuaaaggacuguuau

SEQ ID NO: 39720 - RNA, 20 nt, Artificial Sequence
  LRRK2 RNA guide
auuuacaguccacaugaccu

SEQ ID NO: 39721 - RNA, 20 nt, Artificial Sequence
  LRRK2 RNA guide
cacaugaccuaaaggacugu

SEQ ID NO: 39722 - RNA, 20 nt, Artificial Sequence
  LRRK2 RNA guide
caguccacaugaccuaaagg

SEQ ID NO: 39723 - RNA, 20 nt, Artificial Sequence
  LRRK2 RNA guide
caguccuuuaggucaugugg

SEQ ID NO: 39724 - RNA, 20 nt, Artificial Sequence
  LRRK2 RNA guide
cauaacaguccuuuagguca

SEQ ID NO: 39725 - RNA, 20 nt, Artificial Sequence
  LRRK2 RNA guide
caugaccuaaaggacuguua

SEQ ID NO: 39726 - RNA, 20 nt, Artificial Sequence
  LRRK2 RNA guide
cauguggacuguaaauuuuu

SEQ ID NO: 39727 - RNA, 20 nt, Artificial Sequence
  LRRK2 RNA guide
ccacaugaccuaaaggacug

SEQ ID NO: 39728 - RNA, 20 nt, Artificial Sequence
  LRRK2 RNA guide
ccuuuaggucauguggacug

SEQ ID NO: 39729 - RNA, 20 nt, Artificial Sequence
  LRRK2 RNA guide
cuuuaggucauguggacugu

SEQ ID NO: 39730 - RNA, 20 nt, Artificial Sequence
  LRRK2 RNA guide
ggucauguggacuguaaauu

SEQ ID NO: 39731 - RNA, 20 nt, Artificial Sequence
  LRRK2 RNA guide
gucauguggacuguaaauuu

SEQ ID NO: 39732 - RNA, 20 nt, Artificial Sequence
  LRRK2 RNA guide
guccacaugaccuaaaggac

SEQ ID NO: 39733 - RNA, 20 nt, Artificial Sequence
  LRRK2 RNA guide
guccuuuaggucauguggac

SEQ ID NO: 39734 - RNA, 20 nt, Artificial Sequence
  LRRK2 RNA guide
uaacaguccuuuaggucaug

SEQ ID NO: 39735 - RNA, 20 nt, Artificial Sequence
  LRRK2 RNA guide
uacaguccacaugaccuaaa

SEQ ID NO: 39736 - RNA, 20 nt, Artificial Sequence
  LRRK2 RNA guide
uaggucauguggacuguaaa

SEQ ID NO: 39737 - RNA, 20 nt, Artificial Sequence
  LRRK2 RNA guide
ucauguggacuguaaauuuu

SEQ ID NO: 39738 - RNA, 20 nt, Artificial Sequence
  LRRK2 RNA guide
uccacaugaccuaaaggacu

SEQ ID NO: 39739 - RNA, 20 nt, Artificial Sequence
  LRRK2 RNA guide
uccuuuaggucauguggacu

SEQ ID NO: 39740 - RNA, 20 nt, Artificial Sequence
  LRRK2 RNA guide
uuacaguccacaugaccuaa

SEQ ID NO: 39741 - RNA, 20 nt, Artificial Sequence
  LRRK2 RNA guide
uuaggucauguggacuguaa

SEQ ID NO: 39742 - RNA, 20 nt, Artificial Sequence
  LRRK2 RNA guide
uuuacaguccacaugaccua

SEQ ID NO: 39743 - RNA, 20 nt, Artificial Sequence
  LRRK2 RNA guide
uuuaggucauguggacugua

SEQ ID NO: 39744 - RNA, 21 nt, Artificial Sequence
  LRRK2 RNA guide
aaaauuuacaguccacaugac

SEQ ID NO: 39745 - RNA, 21 nt, Artificial Sequence
  LRRK2 RNA guide
aaauuuacaguccacaugacc

SEQ ID NO: 39746 - RNA, 21 nt, Artificial Sequence
  LRRK2 RNA guide
aacaguccuuuaggucaugug

SEQ ID NO: 39747 - RNA, 21 nt, Artificial Sequence
  LRRK2 RNA guide
aauuuacaguccacaugaccu

SEQ ID NO: 39748 - RNA, 21 nt, Artificial Sequence
  LRRK2 RNA guide
acaguccacaugaccuaaagg

SEQ ID NO: 39749 - RNA, 21 nt, Artificial Sequence
  LRRK2 RNA guide
acaguccuuuaggucaugugg

SEQ ID NO: 39750 - RNA, 21 nt, Artificial Sequence
  LRRK2 RNA guide
acauaacaguccuuuagguca

SEQ ID NO: 39751 - RNA, 21 nt, Artificial Sequence
  LRRK2 RNA guide
acaugaccuaaaggacuguua

SEQ ID NO: 39752 - RNA, 21 nt, Artificial Sequence
  LRRK2 RNA guide
aggucauguggacuguaaauu

SEQ ID NO: 39753 - RNA, 21 nt, Artificial Sequence
  LRRK2 RNA guide
aguccacaugaccuaaaggac

SEQ ID NO: 39754 - RNA, 21 nt, Artificial Sequence
  LRRK2 RNA guide
aguccuuuaggucauguggac

SEQ ID NO: 39755 - RNA, 21 nt, Artificial Sequence
  LRRK2 RNA guide
auaacaguccuuuaggucaug

SEQ ID NO: 39756 - RNA, 21 nt, Artificial Sequence
  LRRK2 RNA guide
augaccuaaaggacuguuaug

SEQ ID NO: 39757 - RNA, 21 nt, Artificial Sequence
  LRRK2 RNA guide
auuuacaguccacaugaccua

SEQ ID NO: 39758 - RNA, 21 nt, Artificial Sequence
  LRRK2 RNA guide
cacaugaccuaaaggacuguu

SEQ ID NO: 39759 - RNA, 21 nt, Artificial Sequence
  LRRK2 RNA guide
caguccacaugaccuaaagga

SEQ ID NO: 39760 - RNA, 21 nt, Artificial Sequence
  LRRK2 RNA guide
caguccuuuaggucaugugga

SEQ ID NO: 39761 - RNA, 21 nt, Artificial Sequence
  LRRK2 RNA guide
cauaacaguccuuuaggucau

SEQ ID NO: 39762 - RNA, 21 nt, Artificial Sequence
  LRRK2 RNA guide
caugaccuaaaggacuguuau

SEQ ID NO: 39763 - RNA, 21 nt, Artificial Sequence
  LRRK2 RNA guide
ccacaugaccuaaaggacugu

SEQ ID NO: 39764 - RNA, 21 nt, Artificial Sequence
  LRRK2 RNA guide
ccuuuaggucauguggacugu

SEQ ID NO: 39765 - RNA, 21 nt, Artificial Sequence
  LRRK2 RNA guide
cuuuaggucauguggacugua

SEQ ID NO: 39766 - RNA, 21 nt, Artificial Sequence
  LRRK2 RNA guide
ggucauguggacuguaaauuu

SEQ ID NO: 39767 - RNA, 21 nt, Artificial Sequence
  LRRK2 RNA guide
gucauguggacuguaaauuuu

SEQ ID NO: 39768 - RNA, 21 nt, Artificial Sequence
  LRRK2 RNA guide
guccacaugaccuaaaggacu

SEQ ID NO: 39769 - RNA, 21 nt, Artificial Sequence
  LRRK2 RNA guide
guccuuuaggucauguggacu

SEQ ID NO: 39770 - RNA, 21 nt, Artificial Sequence
  LRRK2 RNA guide
uaacaguccuuuaggucaugu

SEQ ID NO: 39771 - RNA, 21 nt, Artificial Sequence
  LRRK2 RNA guide
uacaguccacaugaccuaaag

SEQ ID NO: 39772 - RNA, 21 nt, Artificial Sequence
  LRRK2 RNA guide
uaggucauguggacuguaaau

SEQ ID NO: 39773 - RNA, 21 nt, Artificial Sequence
  LRRK2 RNA guide
uccacaugaccuaaaggacug

SEQ ID NO: 39774 - RNA, 21 nt, Artificial Sequence
  LRRK2 RNA guide
uccuuuaggucauguggacug

SEQ ID NO: 39775 - RNA, 21 nt, Artificial Sequence
  LRRK2 RNA guide
uuacaguccacaugaccuaaa

SEQ ID NO: 39776 - RNA, 21 nt, Artificial Sequence
  LRRK2 RNA guide
uuaggucauguggacuguaaa

SEQ ID NO: 39777 - RNA, 21 nt, Artificial Sequence
  LRRK2 RNA guide
uuuacaguccacaugaccuaa

SEQ ID NO: 39778 - RNA, 21 nt, Artificial Sequence
  LRRK2 RNA guide
uuuaggucauguggacuguaa

SEQ ID NO: 39779 - RNA, 22 nt, Artificial Sequence
  LRRK2 RNA guide
aaaaauuuacaguccacaugac

SEQ ID NO: 39780 - RNA, 22 nt, Artificial Sequence
  LRRK2 RNA guide
aaaauuuacaguccacaugacc

SEQ ID NO: 39781 - RNA, 22 nt, Artificial Sequence
  LRRK2 RNA guide
aaauuuacaguccacaugaccu

SEQ ID NO: 39782 - RNA, 22 nt, Artificial Sequence
  LRRK2 RNA guide
aacaguccuuuaggucaugugg

SEQ ID NO: 39783 - RNA, 22 nt, Artificial Sequence
  LRRK2 RNA guide
aauuuacaguccacaugaccua

SEQ ID NO: 39784 - RNA, 22 nt, Artificial Sequence
  LRRK2 RNA guide
acaguccacaugaccuaaagga

SEQ ID NO: 39785 - RNA, 22 nt, Artificial Sequence
  LRRK2 RNA guide
acaguccuuuaggucaugugga

SEQ ID NO: 39786 - RNA, 22 nt, Artificial Sequence
  LRRK2 RNA guide
acauaacaguccuuuaggucau

SEQ ID NO: 39787 - RNA, 22 nt, Artificial Sequence
  LRRK2 RNA guide
acaugaccuaaaggacuguuau

SEQ ID NO: 39788 - RNA, 22 nt, Artificial Sequence
  LRRK2 RNA guide
aggucauguggacuguaaauuu

SEQ ID NO: 39789 - RNA, 22 nt, Artificial Sequence
  LRRK2 RNA guide
aguccacaugaccuaaaggacu

SEQ ID NO: 39790 - RNA, 22 nt, Artificial Sequence
  LRRK2 RNA guide
aguccuuuaggucauguggacu

SEQ ID NO: 39791 - RNA, 22 nt, Artificial Sequence
  LRRK2 RNA guide
auaacaguccuuuaggucaugu

SEQ ID NO: 39792 - RNA, 22 nt, Artificial Sequence
  LRRK2 RNA guide
augaccuaaaggacuguuaugu

SEQ ID NO: 39793 - RNA, 22 nt, Artificial Sequence
  LRRK2 RNA guide
auuuacaguccacaugaccuaa

SEQ ID NO: 39794 - RNA, 22 nt, Artificial Sequence
  LRRK2 RNA guide
cacaugaccuaaaggacuguua

SEQ ID NO: 39795 - RNA, 22 nt, Artificial Sequence
  LRRK2 RNA guide
caguccacaugaccuaaaggac

SEQ ID NO: 39796 - RNA, 22 nt, Artificial Sequence
  LRRK2 RNA guide
caguccuuuaggucauguggac

SEQ ID NO: 39797 - RNA, 22 nt, Artificial Sequence
  LRRK2 RNA guide
cauaacaguccuuuaggucaug

SEQ ID NO: 39798 - RNA, 22 nt, Artificial Sequence
  LRRK2 RNA guide
caugaccuaaaggacuguuaug

SEQ ID NO: 39799 - RNA, 22 nt, Artificial Sequence
  LRRK2 RNA guide
ccacaugaccuaaaggacuguu

SEQ ID NO: 39800 - RNA, 22 nt, Artificial Sequence
  LRRK2 RNA guide
ccuuuaggucauguggacugua

SEQ ID NO: 39801 - RNA, 22 nt, Artificial Sequence
  LRRK2 RNA guide
cuuuaggucauguggacuguaa

SEQ ID NO: 39802 - RNA, 22 nt, Artificial Sequence
  LRRK2 RNA guide
ggucauguggacuguaaauuuu

SEQ ID NO: 39803 - RNA, 22 nt, Artificial Sequence
  LRRK2 RNA guide
gucauguggacuguaaauuuuu

SEQ ID NO: 39804 - RNA, 22 nt, Artificial Sequence
  LRRK2 RNA guide
guccacaugaccuaaaggacug

SEQ ID NO: 39805 - RNA, 22 nt, Artificial Sequence
  LRRK2 RNA guide
guccuuuaggucauguggacug

SEQ ID NO: 39806 - RNA, 22 nt, Artificial Sequence
  LRRK2 RNA guide
uaacaguccuuuaggucaugug

SEQ ID NO: 39807 - RNA, 22 nt, Artificial Sequence
  LRRK2 RNA guide
uacaguccacaugaccuaaagg

SEQ ID NO: 39808 - RNA, 22 nt, Artificial Sequence
  LRRK2 RNA guide
uacauaacaguccuuuagguca

SEQ ID NO: 39809 - RNA, 22 nt, Artificial Sequence
  LRRK2 RNA guide
uaggucauguggacuguaaauu

SEQ ID NO: 39810 - RNA, 22 nt, Artificial Sequence
  LRRK2 RNA guide
uccacaugaccuaaaggacugu

SEQ ID NO: 39811 - RNA, 22 nt, Artificial Sequence
  LRRK2 RNA guide
uccuuuaggucauguggacugu

SEQ ID NO: 39812 - RNA, 22 nt, Artificial Sequence
  LRRK2 RNA guide
uuacaguccacaugaccuaaag

SEQ ID NO: 39813 - RNA, 22 nt, Artificial Sequence
  LRRK2 RNA guide
uuaggucauguggacuguaaau

SEQ ID NO: 39814 - RNA, 22 nt, Artificial Sequence
  LRRK2 RNA guide
uuuacaguccacaugaccuaaa

SEQ ID NO: 39815 - RNA, 22 nt, Artificial Sequence
  LRRK2 RNA guide
uuuaggucauguggacuguaaa

SEQ ID NO: 39816 - RNA, 20 nt, Artificial Sequence
  LRRK2 RNA guide
aagggacuugccccagacca

SEQ ID NO: 39817 - RNA, 20 nt, Artificial Sequence
  LRRK2 RNA guide
acaguuuaagggacuugccc

SEQ ID NO: 39818 - RNA, 20 nt, Artificial Sequence
  LRRK2 RNA guide
acauucaccucuugccgugu

SEQ ID NO: 39819 - RNA, 20 nt, Artificial Sequence
  LRRK2 RNA guide
accacacggcaagaggugaa

SEQ ID NO: 39820 - RNA, 20 nt, Artificial Sequence
  LRRK2 RNA guide
accucuugccguguggucug

SEQ ID NO: 39821 - RNA, 20 nt, Artificial Sequence
  LRRK2 RNA guide
acuugccccagaccacacgg

SEQ ID NO: 39822 - RNA, 20 nt, Artificial Sequence
  LRRK2 RNA guide
agaccacacggcaagaggug

SEQ ID NO: 39823 - RNA, 20 nt, Artificial Sequence
  LRRK2 RNA guide
agggacuugccccagaccac

SEQ ID NO: 39824 - RNA, 20 nt, Artificial Sequence
  LRRK2 RNA guide
aguuuaagggacuugcccca

SEQ ID NO: 39825 - RNA, 20 nt, Artificial Sequence
  LRRK2 RNA guide
auucaccucuugccgugugg

SEQ ID NO: 39826 - RNA, 20 nt, Artificial Sequence
  LRRK2 RNA guide
caccucuugccguguggucu

SEQ ID NO: 39827 - RNA, 20 nt, Artificial Sequence
  LRRK2 RNA guide
cagaccacacggcaagaggu

SEQ ID NO: 39828 - RNA, 20 nt, Artificial Sequence
  LRRK2 RNA guide
caguuuaagggacuugcccc

SEQ ID NO: 39829 - RNA, 20 nt, Artificial Sequence
  LRRK2 RNA guide
cauucaccucuugccgugug

SEQ ID NO: 39830 - RNA, 20 nt, Artificial Sequence
  LRRK2 RNA guide
ccagaccacacggcaagagg

SEQ ID NO: 39831 - RNA, 20 nt, Artificial Sequence
  LRRK2 RNA guide
cccagaccacacggcaagag

SEQ ID NO: 39832 - RNA, 20 nt, Artificial Sequence
  LRRK2 RNA guide
ccccagaccacacggcaaga

SEQ ID NO: 39833 - RNA, 20 nt, Artificial Sequence
  LRRK2 RNA guide
ccguguggucuggggcaagu

SEQ ID NO: 39834 - RNA, 20 nt, Artificial Sequence
  LRRK2 RNA guide
ccucuugccguguggucugg

SEQ ID NO: 39835 - RNA, 20 nt, Artificial Sequence
  LRRK2 RNA guide
cguguggucuggggcaaguc

SEQ ID NO: 39836 - RNA, 20 nt, Artificial Sequence
  LRRK2 RNA guide
cucuugccguguggucuggg

SEQ ID NO: 39837 - RNA, 20 nt, Artificial Sequence
  LRRK2 RNA guide
cugacauucaccucuugccg

SEQ ID NO: 39838 - RNA, 20 nt, Artificial Sequence
  LRRK2 RNA guide
cuugccccagaccacacggc

SEQ ID NO: 39839 - RNA, 20 nt, Artificial Sequence
  LRRK2 RNA guide
cuugccguguggucuggggc

SEQ ID NO: 39840 - RNA, 20 nt, Artificial Sequence
  LRRK2 RNA guide
gacauucaccucuugccgug

SEQ ID NO: 39841 - RNA, 20 nt, Artificial Sequence
  LRRK2 RNA guide
gaccacacggcaagagguga

SEQ ID NO: 39842 - RNA, 20 nt, Artificial Sequence
  LRRK2 RNA guide
gacuugccccagaccacacg

SEQ ID NO: 39843 - RNA, 20 nt, Artificial Sequence
  LRRK2 RNA guide
gccccagaccacacggcaag

SEQ ID NO: 39844 - RNA, 20 nt, Artificial Sequence
  LRRK2 RNA guide
gccguguggucuggggcaag

SEQ ID NO: 39845 - RNA, 20 nt, Artificial Sequence
  LRRK2 RNA guide
ggacuugccccagaccacac

SEQ ID NO: 39846 - RNA, 20 nt, Artificial Sequence
  LRRK2 RNA guide
gggacuugccccagaccaca

SEQ ID NO: 39847 - RNA, 20 nt, Artificial Sequence
  LRRK2 RNA guide
ggucuggggcaagucccuua

SEQ ID NO: 39848 - RNA, 20 nt, Artificial Sequence
  LRRK2 RNA guide
guggucuggggcaagucccu

SEQ ID NO: 39849 - RNA, 20 nt, Artificial Sequence
  LRRK2 RNA guide
guguggucuggggcaagucc

SEQ ID NO: 39850 - RNA, 20 nt, Artificial Sequence
  LRRK2 RNA guide
guuuaagggacuugccccag

SEQ ID NO: 39851 - RNA, 20 nt, Artificial Sequence
  LRRK2 RNA guide
uaagggacuugccccagacc

SEQ ID NO: 39852 - RNA, 20 nt, Artificial Sequence
  LRRK2 RNA guide
ucaccucuugccgugugguc

SEQ ID NO: 39853 - RNA, 20 nt, Artificial Sequence
  LRRK2 RNA guide
ucuugccguguggucugggg

SEQ ID NO: 39854 - RNA, 20 nt, Artificial Sequence
  LRRK2 RNA guide
ugacauucaccucuugccgu

SEQ ID NO: 39855 - RNA, 20 nt, Artificial Sequence
  LRRK2 RNA guide
ugccccagaccacacggcaa

SEQ ID NO: 39856 - RNA, 20 nt, Artificial Sequence
  LRRK2 RNA guide
ugccguguggucuggggcaa

SEQ ID NO: 39857 - RNA, 20 nt, Artificial Sequence
  LRRK2 RNA guide
uggucuggggcaagucccuu

SEQ ID NO: 39858 - RNA, 20 nt, Artificial Sequence
  LRRK2 RNA guide
uguggucuggggcaaguccc

SEQ ID NO: 39859 - RNA, 20 nt, Artificial Sequence
  LRRK2 RNA guide
uuaagggacuugccccagac

SEQ ID NO: 39860 - RNA, 20 nt, Artificial Sequence
  LRRK2 RNA guide
uucaccucuugccguguggu

SEQ ID NO: 39861 - RNA, 20 nt, Artificial Sequence
  LRRK2 RNA guide
uugccccagaccacacggca

SEQ ID NO: 39862 - RNA, 20 nt, Artificial Sequence
  LRRK2 RNA guide
uugccguguggucuggggca

SEQ ID NO: 39863 - RNA, 20 nt, Artificial Sequence
  LRRK2 RNA guide
uuuaagggacuugccccaga

SEQ ID NO: 39864 - RNA, 21 nt, Artificial Sequence
  LRRK2 RNA guide
aagggacuugccccagaccac

SEQ ID NO: 39865 - RNA, 21 nt, Artificial Sequence
  LRRK2 RNA guide
acaguuuaagggacuugcccc

SEQ ID NO: 39866 - RNA, 21 nt, Artificial Sequence
  LRRK2 RNA guide
acauucaccucuugccgugug

SEQ ID NO: 39867 - RNA, 21 nt, Artificial Sequence
  LRRK2 RNA guide
accacacggcaagaggugaau

SEQ ID NO: 39868 - RNA, 21 nt, Artificial Sequence
  LRRK2 RNA guide
accucuugccguguggucugg

SEQ ID NO: 39869 - RNA, 21 nt, Artificial Sequence
  LRRK2 RNA guide
acuugccccagaccacacggc

SEQ ID NO: 39870 - RNA, 21 nt, Artificial Sequence
  LRRK2 RNA guide
agaccacacggcaagagguga

SEQ ID NO: 39871 - RNA, 21 nt, Artificial Sequence
  LRRK2 RNA guide
agggacuugccccagaccaca

SEQ ID NO: 39872 - RNA, 21 nt, Artificial Sequence
  LRRK2 RNA guide
aguuuaagggacuugccccag

SEQ ID NO: 39873 - RNA, 21 nt, Artificial Sequence
  LRRK2 RNA guide
auucaccucuugccguguggu

SEQ ID NO: 39874 - RNA, 21 nt, Artificial Sequence
  LRRK2 RNA guide
caccucuugccguguggucug

SEQ ID NO: 39875 - RNA, 21 nt, Artificial Sequence
  LRRK2 RNA guide
cagaccacacggcaagaggug

SEQ ID NO: 39876 - RNA, 21 nt, Artificial Sequence
  LRRK2 RNA guide
caguuuaagggacuugcccca

SEQ ID NO: 39877 - RNA, 21 nt, Artificial Sequence
  LRRK2 RNA guide
cauucaccucuugccgugugg

SEQ ID NO: 39878 - RNA, 21 nt, Artificial Sequence
  LRRK2 RNA guide
ccagaccacacggcaagaggu

SEQ ID NO: 39879 - RNA, 21 nt, Artificial Sequence
  LRRK2 RNA guide
cccagaccacacggcaagagg

SEQ ID NO: 39880 - RNA, 21 nt, Artificial Sequence
  LRRK2 RNA guide
ccccagaccacacggcaagag

SEQ ID NO: 39881 - RNA, 21 nt, Artificial Sequence
  LRRK2 RNA guide
ccguguggucuggggcaaguc

SEQ ID NO: 39882 - RNA, 21 nt, Artificial Sequence
  LRRK2 RNA guide
ccucuugccguguggucuggg

SEQ ID NO: 39883 - RNA, 21 nt, Artificial Sequence
  LRRK2 RNA guide
cguguggucuggggcaagucc

SEQ ID NO: 39884 - RNA, 21 nt, Artificial Sequence
  LRRK2 RNA guide
cucuugccguguggucugggg

SEQ ID NO: 39885 - RNA, 21 nt, Artificial Sequence
  LRRK2 RNA guide
cugacauucaccucuugccgu

SEQ ID NO: 39886 - RNA, 21 nt, Artificial Sequence
  LRRK2 RNA guide
cuugccccagaccacacggca

SEQ ID NO: 39887 - RNA, 21 nt, Artificial Sequence
  LRRK2 RNA guide
cuugccguguggucuggggca

SEQ ID NO: 39888 - RNA, 21 nt, Artificial Sequence
  LRRK2 RNA guide
gacaguuuaagggacuugccc

SEQ ID NO: 39889 - RNA, 21 nt, Artificial Sequence
  LRRK2 RNA guide
gacauucaccucuugccgugu

SEQ ID NO: 39890 - RNA, 21 nt, Artificial Sequence
  LRRK2 RNA guide
gaccacacggcaagaggugaa

SEQ ID NO: 39891 - RNA, 21 nt, Artificial Sequence
  LRRK2 RNA guide
gacuugccccagaccacacgg

SEQ ID NO: 39892 - RNA, 21 nt, Artificial Sequence
  LRRK2 RNA guide
gccccagaccacacggcaaga

SEQ ID NO: 39893 - RNA, 21 nt, Artificial Sequence
  LRRK2 RNA guide
gccguguggucuggggcaagu

SEQ ID NO: 39894 - RNA, 21 nt, Artificial Sequence
  LRRK2 RNA guide
ggacuugccccagaccacacg

SEQ ID NO: 39895 - RNA, 21 nt, Artificial Sequence
  LRRK2 RNA guide
gggacuugccccagaccacac

SEQ ID NO: 39896 - RNA, 21 nt, Artificial Sequence
  LRRK2 RNA guide
ggucuggggcaagucccuuaa

SEQ ID NO: 39897 - RNA, 21 nt, Artificial Sequence
  LRRK2 RNA guide
guggucuggggcaagucccuu

SEQ ID NO: 39898 - RNA, 21 nt, Artificial Sequence
  LRRK2 RNA guide
guguggucuggggcaaguccc

SEQ ID NO: 39899 - RNA, 21 nt, Artificial Sequence
  LRRK2 RNA guide
guuuaagggacuugccccaga

SEQ ID NO: 39900 - RNA, 21 nt, Artificial Sequence
  LRRK2 RNA guide
uaagggacuugccccagacca

SEQ ID NO: 39901 - RNA, 21 nt, Artificial Sequence
  LRRK2 RNA guide
ucaccucuugccguguggucu

SEQ ID NO: 39902 - RNA, 21 nt, Artificial Sequence
  LRRK2 RNA guide
ucugacauucaccucuugccg

SEQ ID NO: 39903 - RNA, 21 nt, Artificial Sequence
  LRRK2 RNA guide
ucuugccguguggucuggggc

SEQ ID NO: 39904 - RNA, 21 nt, Artificial Sequence
  LRRK2 RNA guide
ugacauucaccucuugccgug

SEQ ID NO: 39905 - RNA, 21 nt, Artificial Sequence
  LRRK2 RNA guide
ugccccagaccacacggcaag

SEQ ID NO: 39906 - RNA, 21 nt, Artificial Sequence
  LRRK2 RNA guide
ugccguguggucuggggcaag

SEQ ID NO: 39907 - RNA, 21 nt, Artificial Sequence
  LRRK2 RNA guide
uggucuggggcaagucccuua

SEQ ID NO: 39908 - RNA, 21 nt, Artificial Sequence
  LRRK2 RNA guide
uguggucuggggcaagucccu

SEQ ID NO: 39909 - RNA, 21 nt, Artificial Sequence
  LRRK2 RNA guide
uuaagggacuugccccagacc

SEQ ID NO: 39910 - RNA, 21 nt, Artificial Sequence
  LRRK2 RNA guide
uucaccucuugccgugugguc

SEQ ID NO: 39911 - RNA, 21 nt, Artificial Sequence
  LRRK2 RNA guide
uugccccagaccacacggcaa

SEQ ID NO: 39912 - RNA, 21 nt, Artificial Sequence
  LRRK2 RNA guide
uugccguguggucuggggcaa

SEQ ID NO: 39913 - RNA, 21 nt, Artificial Sequence
  LRRK2 RNA guide
uuuaagggacuugccccagac

SEQ ID NO: 39914 - RNA, 22 nt, Artificial Sequence
  LRRK2 RNA guide
aagggacuugccccagaccaca

SEQ ID NO: 39915 - RNA, 22 nt, Artificial Sequence
  LRRK2 RNA guide
acaguuuaagggacuugcccca

SEQ ID NO: 39916 - RNA, 22 nt, Artificial Sequence
  LRRK2 RNA guide
acauucaccucuugccgugugg

SEQ ID NO: 39917 - RNA, 22 nt, Artificial Sequence
  LRRK2 RNA guide
accacacggcaagaggugaaug

SEQ ID NO: 39918 - RNA, 22 nt, Artificial Sequence
  LRRK2 RNA guide
accucuugccguguggucuggg

SEQ ID NO: 39919 - RNA, 22 nt, Artificial Sequence
  LRRK2 RNA guide
acuugccccagaccacacggca

SEQ ID NO: 39920 - RNA, 22 nt, Artificial Sequence
  LRRK2 RNA guide
agacaguuuaagggacuugccc

SEQ ID NO: 39921 - RNA, 22 nt, Artificial Sequence
  LRRK2 RNA guide
agaccacacggcaagaggugaa

SEQ ID NO: 39922 - RNA, 22 nt, Artificial Sequence
  LRRK2 RNA guide
agggacuugccccagaccacac

SEQ ID NO: 39923 - RNA, 22 nt, Artificial Sequence
  LRRK2 RNA guide
aguuuaagggacuugccccaga

SEQ ID NO: 39924 - RNA, 22 nt, Artificial Sequence
  LRRK2 RNA guide
auucaccucuugccgugugguc

SEQ ID NO: 39925 - RNA, 22 nt, Artificial Sequence
  LRRK2 RNA guide
caccucuugccguguggucugg

SEQ ID NO: 39926 - RNA, 22 nt, Artificial Sequence
  LRRK2 RNA guide
cagaccacacggcaagagguga

SEQ ID NO: 39927 - RNA, 22 nt, Artificial Sequence
  LRRK2 RNA guide
caguuuaagggacuugccccag

SEQ ID NO: 39928 - RNA, 22 nt, Artificial Sequence
  LRRK2 RNA guide
cauucaccucuugccguguggu

SEQ ID NO: 39929 - RNA, 22 nt, Artificial Sequence
  LRRK2 RNA guide
ccagaccacacggcaagaggug

SEQ ID NO: 39930 - RNA, 22 nt, Artificial Sequence
  LRRK2 RNA guide
cccagaccacacggcaagaggu

SEQ ID NO: 39931 - RNA, 22 nt, Artificial Sequence
  LRRK2 RNA guide
ccccagaccacacggcaagagg

SEQ ID NO: 39932 - RNA, 22 nt, Artificial Sequence
  LRRK2 RNA guide
ccguguggucuggggcaagucc

SEQ ID NO: 39933 - RNA, 22 nt, Artificial Sequence
  LRRK2 RNA guide
ccucuugccguguggucugggg

SEQ ID NO: 39934 - RNA, 22 nt, Artificial Sequence
  LRRK2 RNA guide
cguguggucuggggcaaguccc

SEQ ID NO: 39935 - RNA, 22 nt, Artificial Sequence
  LRRK2 RNA guide
cucuugccguguggucuggggc

SEQ ID NO: 39936 - RNA, 22 nt, Artificial Sequence
  LRRK2 RNA guide
cugacauucaccucuugccgug

SEQ ID NO: 39937 - RNA, 22 nt, Artificial Sequence
  LRRK2 RNA guide
cuugccccagaccacacggcaa

SEQ ID NO: 39938 - RNA, 22 nt, Artificial Sequence
  LRRK2 RNA guide
cuugccguguggucuggggcaa

SEQ ID NO: 39939 - RNA, 22 nt, Artificial Sequence
  LRRK2 RNA guide
gacaguuuaagggacuugcccc

SEQ ID NO: 39940 - RNA, 22 nt, Artificial Sequence
  LRRK2 RNA guide
gacauucaccucuugccgugug

SEQ ID NO: 39941 - RNA, 22 nt, Artificial Sequence
  LRRK2 RNA guide
gaccacacggcaagaggugaau

SEQ ID NO: 39942 - RNA, 22 nt, Artificial Sequence
  LRRK2 RNA guide
gacuugccccagaccacacggc

SEQ ID NO: 39943 - RNA, 22 nt, Artificial Sequence
  LRRK2 RNA guide
gccccagaccacacggcaagag

SEQ ID NO: 39944 - RNA, 22 nt, Artificial Sequence
  LRRK2 RNA guide
gccguguggucuggggcaaguc

SEQ ID NO: 39945 - RNA, 22 nt, Artificial Sequence
  LRRK2 RNA guide
ggacuugccccagaccacacgg

SEQ ID NO: 39946 - RNA, 22 nt, Artificial Sequence
  LRRK2 RNA guide
gggacuugccccagaccacacg

SEQ ID NO: 39947 - RNA, 22 nt, Artificial Sequence
  LRRK2 RNA guide
ggucuggggcaagucccuuaaa

SEQ ID NO: 39948 - RNA, 22 nt, Artificial Sequence
  LRRK2 RNA guide
guggucuggggcaagucccuua

SEQ ID NO: 39949 - RNA, 22 nt, Artificial Sequence
  LRRK2 RNA guide
guguggucuggggcaagucccu

SEQ ID NO: 39950 - RNA, 22 nt, Artificial Sequence
  LRRK2 RNA guide
guuuaagggacuugccccagac

SEQ ID NO: 39951 - RNA, 22 nt, Artificial Sequence
  LRRK2 RNA guide
uaagggacuugccccagaccac

SEQ ID NO: 39952 - RNA, 22 nt, Artificial Sequence
  LRRK2 RNA guide
ucaccucuugccguguggucug

SEQ ID NO: 39953 - RNA, 22 nt, Artificial Sequence
  LRRK2 RNA guide
ucugacauucaccucuugccgu

SEQ ID NO: 39954 - RNA, 22 nt, Artificial Sequence
  LRRK2 RNA guide
ucuugccguguggucuggggca

SEQ ID NO: 39955 - RNA, 22 nt, Artificial Sequence
  LRRK2 RNA guide
ugacauucaccucuugccgugu

SEQ ID NO: 39956 - RNA, 22 nt, Artificial Sequence
  LRRK2 RNA guide
ugccccagaccacacggcaaga

SEQ ID NO: 39957 - RNA, 22 nt, Artificial Sequence
  LRRK2 RNA guide
ugccguguggucuggggcaagu

SEQ ID NO: 39958 - RNA, 22 nt, Artificial Sequence
  LRRK2 RNA guide
uggucuggggcaagucccuuaa

SEQ ID NO: 39959 - RNA, 22 nt, Artificial Sequence
  LRRK2 RNA guide
uguggucuggggcaagucccuu

SEQ ID NO: 39960 - RNA, 22 nt, Artificial Sequence
  LRRK2 RNA guide
uuaagggacuugccccagacca

SEQ ID NO: 39961 - RNA, 22 nt, Artificial Sequence
  LRRK2 RNA guide
uucaccucuugccguguggucu

SEQ ID NO: 39962 - RNA, 22 nt, Artificial Sequence
  LRRK2 RNA guide
uucugacauucaccucuugccg

SEQ ID NO: 39963 - RNA, 22 nt, Artificial Sequence
  LRRK2 RNA guide
uugccccagaccacacggcaag

SEQ ID NO: 39964 - RNA, 22 nt, Artificial Sequence
  LRRK2 RNA guide
uugccguguggucuggggcaag

SEQ ID NO: 39965 - RNA, 22 nt, Artificial Sequence
  LRRK2 RNA guide
uuuaagggacuugccccagacc

SEQ ID NO: 39966 - RNA, 20 nt, Artificial Sequence
  LRRK2 RNA guide
aacacacggcaagaggugaa

SEQ ID NO: 39967 - RNA, 20 nt, Artificial Sequence
  LRRK2 RNA guide
aagggacuugccccagaaca

SEQ ID NO: 39968 - RNA, 20 nt, Artificial Sequence
  LRRK2 RNA guide
accucuugccguguguucug

SEQ ID NO: 39969 - RNA, 20 nt, Artificial Sequence
  LRRK2 RNA guide
acuugccccagaacacacgg

SEQ ID NO: 39970 - RNA, 20 nt, Artificial Sequence
  LRRK2 RNA guide
agaacacacggcaagaggug

SEQ ID NO: 39971 - RNA, 20 nt, Artificial Sequence
  LRRK2 RNA guide
agggacuugccccagaacac

SEQ ID NO: 39972 - RNA, 20 nt, Artificial Sequence
  LRRK2 RNA guide
auucaccucuugccgugugu

SEQ ID NO: 39973 - RNA, 20 nt, Artificial Sequence
  LRRK2 RNA guide
caccucuugccguguguucu

SEQ ID NO: 39974 - RNA, 20 nt, Artificial Sequence
  LRRK2 RNA guide
cagaacacacggcaagaggu

SEQ ID NO: 39975 - RNA, 20 nt, Artificial Sequence
  LRRK2 RNA guide
ccagaacacacggcaagagg

SEQ ID NO: 39976 - RNA, 20 nt, Artificial Sequence
  LRRK2 RNA guide
cccagaacacacggcaagag

SEQ ID NO: 39977 - RNA, 20 nt, Artificial Sequence
  LRRK2 RNA guide
ccccagaacacacggcaaga

SEQ ID NO: 39978 - RNA, 20 nt, Artificial Sequence
  LRRK2 RNA guide
ccguguguucuggggcaagu

SEQ ID NO: 39979 - RNA, 20 nt, Artificial Sequence
  LRRK2 RNA guide
ccucuugccguguguucugg

SEQ ID NO: 39980 - RNA, 20 nt, Artificial Sequence
  LRRK2 RNA guide
cguguguucuggggcaaguc

SEQ ID NO: 39981 - RNA, 20 nt, Artificial Sequence
  LRRK2 RNA guide
cucuugccguguguucuggg

SEQ ID NO: 39982 - RNA, 20 nt, Artificial Sequence
  LRRK2 RNA guide
cuugccccagaacacacggc

SEQ ID NO: 39983 - RNA, 20 nt, Artificial Sequence
  LRRK2 RNA guide
cuugccguguguucuggggc

SEQ ID NO: 39984 - RNA, 20 nt, Artificial Sequence
  LRRK2 RNA guide
gaacacacggcaagagguga

SEQ ID NO: 39985 - RNA, 20 nt, Artificial Sequence
  LRRK2 RNA guide
gacuugccccagaacacacg

SEQ ID NO: 39986 - RNA, 20 nt, Artificial Sequence
  LRRK2 RNA guide
gccccagaacacacggcaag

SEQ ID NO: 39987 - RNA, 20 nt, Artificial Sequence
  LRRK2 RNA guide
gccguguguucuggggcaag

SEQ ID NO: 39988 - RNA, 20 nt, Artificial Sequence
  LRRK2 RNA guide
ggacuugccccagaacacac

SEQ ID NO: 39989 - RNA, 20 nt, Artificial Sequence
  LRRK2 RNA guide
gggacuugccccagaacaca

SEQ ID NO: 39990 - RNA, 20 nt, Artificial Sequence
  LRRK2 RNA guide
guguguucuggggcaagucc

SEQ ID NO: 39991 - RNA, 20 nt, Artificial Sequence
  LRRK2 RNA guide
guguucuggggcaagucccu

SEQ ID NO: 39992 - RNA, 20 nt, Artificial Sequence
  LRRK2 RNA guide
guucuggggcaagucccuua

SEQ ID NO: 39993 - RNA, 20 nt, Artificial Sequence
  LRRK2 RNA guide
uaagggacuugccccagaac

SEQ ID NO: 39994 - RNA, 20 nt, Artificial Sequence
  LRRK2 RNA guide
ucaccucuugccguguguuc

SEQ ID NO: 39995 - RNA, 20 nt, Artificial Sequence
  LRRK2 RNA guide
ucuugccguguguucugggg

SEQ ID NO: 39996 - RNA, 20 nt, Artificial Sequence
  LRRK2 RNA guide
ugccccagaacacacggcaa

SEQ ID NO: 39997 - RNA, 20 nt, Artificial Sequence
  LRRK2 RNA guide
ugccguguguucuggggcaa

SEQ ID NO: 39998 - RNA, 20 nt, Artificial Sequence
  LRRK2 RNA guide
uguguucuggggcaaguccc

SEQ ID NO: 39999 - RNA, 20 nt, Artificial Sequence
  LRRK2 RNA guide
uguucuggggcaagucccuu

SEQ ID NO: 40000 - RNA, 20 nt, Artificial Sequence
  LRRK2 RNA guide
uuaagggacuugccccagaa

SEQ ID NO: 40001 - RNA, 20 nt, Artificial Sequence
  LRRK2 RNA guide
uucaccucuugccguguguu

SEQ ID NO: 40002 - RNA, 20 nt, Artificial Sequence
  LRRK2 RNA guide
uugccccagaacacacggca

SEQ ID NO: 40003 - RNA, 20 nt, Artificial Sequence
  LRRK2 RNA guide
uugccguguguucuggggca

SEQ ID NO: 40004 - RNA, 21 nt, Artificial Sequence
  LRRK2 RNA guide
aacacacggcaagaggugaau

SEQ ID NO: 40005 - RNA, 21 nt, Artificial Sequence
  LRRK2 RNA guide
aagggacuugccccagaacac

SEQ ID NO: 40006 - RNA, 21 nt, Artificial Sequence
  LRRK2 RNA guide
accucuugccguguguucugg

SEQ ID NO: 40007 - RNA, 21 nt, Artificial Sequence
  LRRK2 RNA guide
acuugccccagaacacacggc

SEQ ID NO: 40008 - RNA, 21 nt, Artificial Sequence
  LRRK2 RNA guide
agaacacacggcaagagguga

SEQ ID NO: 40009 - RNA, 21 nt, Artificial Sequence
  LRRK2 RNA guide
agggacuugccccagaacaca

SEQ ID NO: 40010 - RNA, 21 nt, Artificial Sequence
  LRRK2 RNA guide
auucaccucuugccguguguu

SEQ ID NO: 40011 - RNA, 21 nt, Artificial Sequence
  LRRK2 RNA guide
caccucuugccguguguucug

SEQ ID NO: 40012 - RNA, 21 nt, Artificial Sequence
  LRRK2 RNA guide
cagaacacacggcaagaggug

SEQ ID NO: 40013 - RNA, 21 nt, Artificial Sequence
  LRRK2 RNA guide
cauucaccucuugccgugugu

SEQ ID NO: 40014 - RNA, 21 nt, Artificial Sequence
  LRRK2 RNA guide
ccagaacacacggcaagaggu

SEQ ID NO: 40015 - RNA, 21 nt, Artificial Sequence
  LRRK2 RNA guide
cccagaacacacggcaagagg

SEQ ID NO: 40016 - RNA, 21 nt, Artificial Sequence
  LRRK2 RNA guide
ccccagaacacacggcaagag

SEQ ID NO: 40017 - RNA, 21 nt, Artificial Sequence
  LRRK2 RNA guide
ccguguguucuggggcaaguc

SEQ ID NO: 40018 - RNA, 21 nt, Artificial Sequence
  LRRK2 RNA guide
ccucuugccguguguucuggg

SEQ ID NO: 40019 - RNA, 21 nt, Artificial Sequence
  LRRK2 RNA guide
cguguguucuggggcaagucc

SEQ ID NO: 40020 - RNA, 21 nt, Artificial Sequence
  LRRK2 RNA guide
cucuugccguguguucugggg

SEQ ID NO: 40021 - RNA, 21 nt, Artificial Sequence
  LRRK2 RNA guide
cuugccccagaacacacggca

SEQ ID NO: 40022 - RNA, 21 nt, Artificial Sequence
  LRRK2 RNA guide
cuugccguguguucuggggca

SEQ ID NO: 40023 - RNA, 21 nt, Artificial Sequence
  LRRK2 RNA guide
gaacacacggcaagaggugaa

SEQ ID NO: 40024 - RNA, 21 nt, Artificial Sequence
  LRRK2 RNA guide
gacuugccccagaacacacgg

SEQ ID NO: 40025 - RNA, 21 nt, Artificial Sequence
  LRRK2 RNA guide
gccccagaacacacggcaaga

SEQ ID NO: 40026 - RNA, 21 nt, Artificial Sequence
  LRRK2 RNA guide
gccguguguucuggggcaagu

SEQ ID NO: 40027 - RNA, 21 nt, Artificial Sequence
  LRRK2 RNA guide
ggacuugccccagaacacacg

SEQ ID NO: 40028 - RNA, 21 nt, Artificial Sequence
  LRRK2 RNA guide
gggacuugccccagaacacac

SEQ ID NO: 40029 - RNA, 21 nt, Artificial Sequence
  LRRK2 RNA guide
guguguucuggggcaaguccc

SEQ ID NO: 40030 - RNA, 21 nt, Artificial Sequence
  LRRK2 RNA guide
guguucuggggcaagucccuu

SEQ ID NO: 40031 - RNA, 21 nt, Artificial Sequence
  LRRK2 RNA guide
guucuggggcaagucccuuaa

SEQ ID NO: 40032 - RNA, 21 nt, Artificial Sequence
  LRRK2 RNA guide
uaagggacuugccccagaaca

SEQ ID NO: 40033 - RNA, 21 nt, Artificial Sequence
  LRRK2 RNA guide
ucaccucuugccguguguucu

SEQ ID NO: 40034 - RNA, 21 nt, Artificial Sequence
  LRRK2 RNA guide
ucuugccguguguucuggggc

SEQ ID NO: 40035 - RNA, 21 nt, Artificial Sequence
  LRRK2 RNA guide
ugccccagaacacacggcaag

SEQ ID NO: 40036 - RNA, 21 nt, Artificial Sequence
  LRRK2 RNA guide
ugccguguguucuggggcaag

SEQ ID NO: 40037 - RNA, 21 nt, Artificial Sequence
  LRRK2 RNA guide
uguguucuggggcaagucccu

SEQ ID NO: 40038 - RNA, 21 nt, Artificial Sequence
  LRRK2 RNA guide
uguucuggggcaagucccuua

SEQ ID NO: 40039 - RNA, 21 nt, Artificial Sequence
  LRRK2 RNA guide
uuaagggacuugccccagaac

SEQ ID NO: 40040 - RNA, 21 nt, Artificial Sequence
  LRRK2 RNA guide
uucaccucuugccguguguuc

SEQ ID NO: 40041 - RNA, 21 nt, Artificial Sequence
  LRRK2 RNA guide
uugccccagaacacacggcaa

SEQ ID NO: 40042 - RNA, 21 nt, Artificial Sequence
  LRRK2 RNA guide
uugccguguguucuggggcaa

SEQ ID NO: 40043 - RNA, 21 nt, Artificial Sequence
  LRRK2 RNA guide
uuuaagggacuugccccagaa

SEQ ID NO: 40044 - RNA, 22 nt, Artificial Sequence
  LRRK2 RNA guide
aacacacggcaagaggugaaug

SEQ ID NO: 40045 - RNA, 22 nt, Artificial Sequence
  LRRK2 RNA guide
aagggacuugccccagaacaca

SEQ ID NO: 40046 - RNA, 22 nt, Artificial Sequence
  LRRK2 RNA guide
acauucaccucuugccgugugu

SEQ ID NO: 40047 - RNA, 22 nt, Artificial Sequence
  LRRK2 RNA guide
accucuugccguguguucuggg

SEQ ID NO: 40048 - RNA, 22 nt, Artificial Sequence
  LRRK2 RNA guide
acuugccccagaacacacggca

SEQ ID NO: 40049 - RNA, 22 nt, Artificial Sequence
  LRRK2 RNA guide
agaacacacggcaagaggugaa

SEQ ID NO: 40050 - RNA, 22 nt, Artificial Sequence
  LRRK2 RNA guide
agggacuugccccagaacacac

SEQ ID NO: 40051 - RNA, 22 nt, Artificial Sequence
  LRRK2 RNA guide
auucaccucuugccguguguuc

SEQ ID NO: 40052 - RNA, 22 nt, Artificial Sequence
  LRRK2 RNA guide
caccucuugccguguguucugg

SEQ ID NO: 40053 - RNA, 22 nt, Artificial Sequence
  LRRK2 RNA guide
cagaacacacggcaagagguga

SEQ ID NO: 40054 - RNA, 22 nt, Artificial Sequence
  LRRK2 RNA guide
cauucaccucuugccguguguu

SEQ ID NO: 40055 - RNA, 22 nt, Artificial Sequence
  LRRK2 RNA guide
ccagaacacacggcaagaggug

SEQ ID NO: 40056 - RNA, 22 nt, Artificial Sequence
  LRRK2 RNA guide
cccagaacacacggcaagaggu

SEQ ID NO: 40057 - RNA, 22 nt, Artificial Sequence
  LRRK2 RNA guide
ccccagaacacacggcaagagg

SEQ ID NO: 40058 - RNA, 22 nt, Artificial Sequence
  LRRK2 RNA guide
ccguguguucuggggcaagucc

SEQ ID NO: 40059 - RNA, 22 nt, Artificial Sequence
  LRRK2 RNA guide
ccucuugccguguguucugggg

SEQ ID NO: 40060 - RNA, 22 nt, Artificial Sequence
  LRRK2 RNA guide
cguguguucuggggcaaguccc

SEQ ID NO: 40061 - RNA, 22 nt, Artificial Sequence
  LRRK2 RNA guide
cucuugccguguguucuggggc

SEQ ID NO: 40062 - RNA, 22 nt, Artificial Sequence
  LRRK2 RNA guide
cuugccccagaacacacggcaa

SEQ ID NO: 40063 - RNA, 22 nt, Artificial Sequence
  LRRK2 RNA guide
cuugccguguguucuggggcaa

SEQ ID NO: 40064 - RNA, 22 nt, Artificial Sequence
  LRRK2 RNA guide
gaacacacggcaagaggugaau

SEQ ID NO: 40065 - RNA, 22 nt, Artificial Sequence
  LRRK2 RNA guide
gacuugccccagaacacacggc

SEQ ID NO: 40066 - RNA, 22 nt, Artificial Sequence
  LRRK2 RNA guide
gccccagaacacacggcaagag

SEQ ID NO: 40067 - RNA, 22 nt, Artificial Sequence
  LRRK2 RNA guide
gccguguguucuggggcaaguc

SEQ ID NO: 40068 - RNA, 22 nt, Artificial Sequence
  LRRK2 RNA guide
ggacuugccccagaacacacgg

SEQ ID NO: 40069 - RNA, 22 nt, Artificial Sequence
  LRRK2 RNA guide
gggacuugccccagaacacacg

SEQ ID NO: 40070 - RNA, 22 nt, Artificial Sequence
  LRRK2 RNA guide
guguguucuggggcaagucccu

SEQ ID NO: 40071 - RNA, 22 nt, Artificial Sequence
  LRRK2 RNA guide
guguucuggggcaagucccuua

SEQ ID NO: 40072 - RNA, 22 nt, Artificial Sequence
  LRRK2 RNA guide
guucuggggcaagucccuuaaa

SEQ ID NO: 40073 - RNA, 22 nt, Artificial Sequence
  LRRK2 RNA guide
guuuaagggacuugccccagaa

SEQ ID NO: 40074 - RNA, 22 nt, Artificial Sequence
  LRRK2 RNA guide
uaagggacuugccccagaacac

SEQ ID NO: 40075 - RNA, 22 nt, Artificial Sequence
  LRRK2 RNA guide
ucaccucuugccguguguucug

SEQ ID NO: 40076 - RNA, 22 nt, Artificial Sequence
  LRRK2 RNA guide
ucuugccguguguucuggggca

SEQ ID NO: 40077 - RNA, 22 nt, Artificial Sequence
  LRRK2 RNA guide
ugccccagaacacacggcaaga

SEQ ID NO: 40078 - RNA, 22 nt, Artificial Sequence
  LRRK2 RNA guide
ugccguguguucuggggcaagu

SEQ ID NO: 40079 - RNA, 22 nt, Artificial Sequence
  LRRK2 RNA guide
uguguucuggggcaagucccuu

SEQ ID NO: 40080 - RNA, 22 nt, Artificial Sequence
  LRRK2 RNA guide
uguucuggggcaagucccuuaa

SEQ ID NO: 40081 - RNA, 22 nt, Artificial Sequence
  LRRK2 RNA guide
uuaagggacuugccccagaaca

SEQ ID NO: 40082 - RNA, 22 nt, Artificial Sequence
  LRRK2 RNA guide
uucaccucuugccguguguucu

SEQ ID NO: 40083 - RNA, 22 nt, Artificial Sequence
  LRRK2 RNA guide
uugccccagaacacacggcaag

SEQ ID NO: 40084 - RNA, 22 nt, Artificial Sequence
  LRRK2 RNA guide
uugccguguguucuggggcaag

SEQ ID NO: 40085 - RNA, 22 nt, Artificial Sequence
  LRRK2 RNA guide
uuuaagggacuugccccagaac

SEQ ID NO: 40086 - RNA, 20 nt, Artificial Sequence
  LRRK2 RNA guide
agguuuggaaaacauuauuc

SEQ ID NO: 40087 - RNA, 20 nt, Artificial Sequence
  LRRK2 RNA guide
cuuagguuuggaaaacauua

SEQ ID NO: 40088 - RNA, 20 nt, Artificial Sequence
  LRRK2 RNA guide
gguuuggaaaacauuauuca

SEQ ID NO: 40089 - RNA, 20 nt, Artificial Sequence
  LRRK2 RNA guide
aacauaaaaaggcagaaaug

SEQ ID NO: 40090 - RNA, 20 nt, Artificial Sequence
  LRRK2 RNA guide
aaggcagaaaugaaauauag

SEQ ID NO: 40091 - RNA, 20 nt, Artificial Sequence
  LRRK2 RNA guide
acaacauaaaaaggcagaaa

SEQ ID NO: 40092 - RNA, 20 nt, Artificial Sequence
  LRRK2 RNA guide
acauaaaaaggcagaaauga

SEQ ID NO: 40093 - RNA, 20 nt, Artificial Sequence
  LRRK2 RNA guide
accacaacauaaaaaggcag

SEQ ID NO: 40094 - RNA, 20 nt, Artificial Sequence
  LRRK2 RNA guide
acuuggaccacaacauaaaa

SEQ ID NO: 40095 - RNA, 20 nt, Artificial Sequence
  LRRK2 RNA guide
aggcagaaaugaaauauaga

SEQ ID NO: 40096 - RNA, 20 nt, Artificial Sequence
  LRRK2 RNA guide
auuucugccuuuuuauguug

SEQ ID NO: 40097 - RNA, 20 nt, Artificial Sequence
  LRRK2 RNA guide
caacauaaaaaggcagaaau

SEQ ID NO: 40098 - RNA, 20 nt, Artificial Sequence
  LRRK2 RNA guide
cacaacauaaaaaggcagaa

SEQ ID NO: 40099 - RNA, 20 nt, Artificial Sequence
  LRRK2 RNA guide
cauaaaaaggcagaaaugaa

SEQ ID NO: 40100 - RNA, 20 nt, Artificial Sequence
  LRRK2 RNA guide
cauuucugccuuuuuauguu

SEQ ID NO: 40101 - RNA, 20 nt, Artificial Sequence
  LRRK2 RNA guide
ccacaacauaaaaaggcaga

SEQ ID NO: 40102 - RNA, 20 nt, Artificial Sequence
  LRRK2 RNA guide
cuauauuucauuucugccuu

SEQ ID NO: 40103 - RNA, 20 nt, Artificial Sequence
  LRRK2 RNA guide
cugccuuuuuauguuguggu

SEQ ID NO: 40104 - RNA, 20 nt, Artificial Sequence
  LRRK2 RNA guide
cuuggaccacaacauaaaaa

SEQ ID NO: 40105 - RNA, 20 nt, Artificial Sequence
  LRRK2 RNA guide
gaccacaacauaaaaaggca

SEQ ID NO: 40106 - RNA, 20 nt, Artificial Sequence
  LRRK2 RNA guide
gcagaaaugaaauauagaca

SEQ ID NO: 40107 - RNA, 20 nt, Artificial Sequence
  LRRK2 RNA guide
ggaccacaacauaaaaaggc

SEQ ID NO: 40108 - RNA, 20 nt, Artificial Sequence
  LRRK2 RNA guide
ggcagaaaugaaauauagac

SEQ ID NO: 40109 - RNA, 20 nt, Artificial Sequence
  LRRK2 RNA guide
gucuauauuucauuucugcc

SEQ ID NO: 40110 - RNA, 20 nt, Artificial Sequence
  LRRK2 RNA guide
uacuuggaccacaacauaaa

SEQ ID NO: 40111 - RNA, 20 nt, Artificial Sequence
  LRRK2 RNA guide
ucauuucugccuuuuuaugu

SEQ ID NO: 40112 - RNA, 20 nt, Artificial Sequence
  LRRK2 RNA guide
ucuauauuucauuucugccu

SEQ ID NO: 40113 - RNA, 20 nt, Artificial Sequence
  LRRK2 RNA guide
ucugccuuuuuauguugugg

SEQ ID NO: 40114 - RNA, 20 nt, Artificial Sequence
  LRRK2 RNA guide
ugccuuuuuauguugugguc

SEQ ID NO: 40115 - RNA, 20 nt, Artificial Sequence
  LRRK2 RNA guide
uggaccacaacauaaaaagg

SEQ ID NO: 40116 - RNA, 20 nt, Artificial Sequence
  LRRK2 RNA guide
ugucuauauuucauuucugc

SEQ ID NO: 40117 - RNA, 20 nt, Artificial Sequence
  LRRK2 RNA guide
uucauuucugccuuuuuaug

SEQ ID NO: 40118 - RNA, 20 nt, Artificial Sequence
  LRRK2 RNA guide
uucugccuuuuuauguugug

SEQ ID NO: 40119 - RNA, 20 nt, Artificial Sequence
  LRRK2 RNA guide
uuggaccacaacauaaaaag

SEQ ID NO: 40120 - RNA, 20 nt, Artificial Sequence
  LRRK2 RNA guide
uuucugccuuuuuauguugu

SEQ ID NO: 40121 - RNA, 21 nt, Artificial Sequence
  LRRK2 RNA guide
accacaacauaaaaaggcaga

SEQ ID NO: 40122 - RNA, 21 nt, Artificial Sequence
  LRRK2 RNA guide
acuuggaccacaacauaaaaa

SEQ ID NO: 40123 - RNA, 21 nt, Artificial Sequence
  LRRK2 RNA guide
aggcagaaaugaaauauagac

SEQ ID NO: 40124 - RNA, 21 nt, Artificial Sequence
  LRRK2 RNA guide
caacauaaaaaggcagaaaug

SEQ ID NO: 40125 - RNA, 21 nt, Artificial Sequence
  LRRK2 RNA guide
cacaacauaaaaaggcagaaa

SEQ ID NO: 40126 - RNA, 21 nt, Artificial Sequence
  LRRK2 RNA guide
cauuucugccuuuuuauguug

SEQ ID NO: 40127 - RNA, 21 nt, Artificial Sequence
  LRRK2 RNA guide
ccacaacauaaaaaggcagaa

SEQ ID NO: 40128 - RNA, 21 nt, Artificial Sequence
  LRRK2 RNA guide
cugccuuuuuauguugugguc

SEQ ID NO: 40129 - RNA, 21 nt, Artificial Sequence
  LRRK2 RNA guide
cuuggaccacaacauaaaaag

SEQ ID NO: 40130 - RNA, 21 nt, Artificial Sequence
  LRRK2 RNA guide
gaccacaacauaaaaaggcag

SEQ ID NO: 40131 - RNA, 21 nt, Artificial Sequence
  LRRK2 RNA guide
ggaccacaacauaaaaaggca

SEQ ID NO: 40132 - RNA, 21 nt, Artificial Sequence
  LRRK2 RNA guide
ggcagaaaugaaauauagaca

SEQ ID NO: 40133 - RNA, 21 nt, Artificial Sequence
  LRRK2 RNA guide
gucuauauuucauuucugccu

SEQ ID NO: 40134 - RNA, 21 nt, Artificial Sequence
  LRRK2 RNA guide
uacuuggaccacaacauaaaa

SEQ ID NO: 40135 - RNA, 21 nt, Artificial Sequence
  LRRK2 RNA guide
ucugccuuuuuauguuguggu

SEQ ID NO: 40136 - RNA, 21 nt, Artificial Sequence
  LRRK2 RNA guide
ugccuuuuuauguuguggucc

SEQ ID NO: 40137 - RNA, 21 nt, Artificial Sequence
  LRRK2 RNA guide
uggaccacaacauaaaaaggc

SEQ ID NO: 40138 - RNA, 21 nt, Artificial Sequence
  LRRK2 RNA guide
ugucuauauuucauuucugcc

SEQ ID NO: 40139 - RNA, 21 nt, Artificial Sequence
  LRRK2 RNA guide
uuacuuggaccacaacauaaa

SEQ ID NO: 40140 - RNA, 21 nt, Artificial Sequence
  LRRK2 RNA guide
uucugccuuuuuauguugugg

SEQ ID NO: 40141 - RNA, 21 nt, Artificial Sequence
  LRRK2 RNA guide
uuggaccacaacauaaaaagg

SEQ ID NO: 40142 - RNA, 21 nt, Artificial Sequence
  LRRK2 RNA guide
uuucugccuuuuuauguugug

SEQ ID NO: 40143 - RNA, 22 nt, Artificial Sequence
  LRRK2 RNA guide
aaggcagaaaugaaauauagac

SEQ ID NO: 40144 - RNA, 22 nt, Artificial Sequence
  LRRK2 RNA guide
acaacauaaaaaggcagaaaug

SEQ ID NO: 40145 - RNA, 22 nt, Artificial Sequence
  LRRK2 RNA guide
accacaacauaaaaaggcagaa

SEQ ID NO: 40146 - RNA, 22 nt, Artificial Sequence
  LRRK2 RNA guide
acuuggaccacaacauaaaaag

SEQ ID NO: 40147 - RNA, 22 nt, Artificial Sequence
  LRRK2 RNA guide
aggcagaaaugaaauauagaca

SEQ ID NO: 40148 - RNA, 22 nt, Artificial Sequence
  LRRK2 RNA guide
auuucugccuuuuuauguugug

SEQ ID NO: 40149 - RNA, 22 nt, Artificial Sequence
  LRRK2 RNA guide
caacauaaaaaggcagaaauga

SEQ ID NO: 40150 - RNA, 22 nt, Artificial Sequence
  LRRK2 RNA guide
cacaacauaaaaaggcagaaau

SEQ ID NO: 40151 - RNA, 22 nt, Artificial Sequence
  LRRK2 RNA guide
cauuucugccuuuuuauguugu

SEQ ID NO: 40152 - RNA, 22 nt, Artificial Sequence
  LRRK2 RNA guide
ccacaacauaaaaaggcagaaa

SEQ ID NO: 40153 - RNA, 22 nt, Artificial Sequence
  LRRK2 RNA guide
cugccuuuuuauguuguggucc

SEQ ID NO: 40154 - RNA, 22 nt, Artificial Sequence
  LRRK2 RNA guide
cuuggaccacaacauaaaaagg

SEQ ID NO: 40155 - RNA, 22 nt, Artificial Sequence
  LRRK2 RNA guide
gaccacaacauaaaaaggcaga

SEQ ID NO: 40156 - RNA, 22 nt, Artificial Sequence
  LRRK2 RNA guide
ggaccacaacauaaaaaggcag

SEQ ID NO: 40157 - RNA, 22 nt, Artificial Sequence
  LRRK2 RNA guide
ggcagaaaugaaauauagacaa

SEQ ID NO: 40158 - RNA, 22 nt, Artificial Sequence
  LRRK2 RNA guide
gucuauauuucauuucugccuu

SEQ ID NO: 40159 - RNA, 22 nt, Artificial Sequence
  LRRK2 RNA guide
guuacuuggaccacaacauaaa

SEQ ID NO: 40160 - RNA, 22 nt, Artificial Sequence
  LRRK2 RNA guide
uacuuggaccacaacauaaaaa

SEQ ID NO: 40161 - RNA, 22 nt, Artificial Sequence
  LRRK2 RNA guide
ucauuucugccuuuuuauguug

SEQ ID NO: 40162 - RNA, 22 nt, Artificial Sequence
  LRRK2 RNA guide
ucugccuuuuuauguugugguc

SEQ ID NO: 40163 - RNA, 22 nt, Artificial Sequence
  LRRK2 RNA guide
ugccuuuuuauguuguggucca

SEQ ID NO: 40164 - RNA, 22 nt, Artificial Sequence
  LRRK2 RNA guide
uggaccacaacauaaaaaggca

SEQ ID NO: 40165 - RNA, 22 nt, Artificial Sequence
  LRRK2 RNA guide
ugucuauauuucauuucugccu

SEQ ID NO: 40166 - RNA, 22 nt, Artificial Sequence
  LRRK2 RNA guide
uuacuuggaccacaacauaaaa

SEQ ID NO: 40167 - RNA, 22 nt, Artificial Sequence
  LRRK2 RNA guide
uucugccuuuuuauguuguggu

SEQ ID NO: 40168 - RNA, 22 nt, Artificial Sequence
  LRRK2 RNA guide
uuggaccacaacauaaaaaggc

SEQ ID NO: 40169 - RNA, 22 nt, Artificial Sequence
  LRRK2 RNA guide
uugucuauauuucauuucugcc

SEQ ID NO: 40170 - RNA, 22 nt, Artificial Sequence
  LRRK2 RNA guide
uuucugccuuuuuauguugugg

SEQ ID NO: 40171 - RNA, 20 nt, Artificial Sequence
  LRRK2 RNA guide
acaacauaaaaaggucagaa

SEQ ID NO: 40172 - RNA, 20 nt, Artificial Sequence
  LRRK2 RNA guide
acauaaaaaggucagaaaug

SEQ ID NO: 40173 - RNA, 20 nt, Artificial Sequence
  LRRK2 RNA guide
accacaacauaaaaagguca

SEQ ID NO: 40174 - RNA, 20 nt, Artificial Sequence
  LRRK2 RNA guide
aggucagaaaugaaauauag

SEQ ID NO: 40175 - RNA, 20 nt, Artificial Sequence
  LRRK2 RNA guide
caacauaaaaaggucagaaa

SEQ ID NO: 40176 - RNA, 20 nt, Artificial Sequence
  LRRK2 RNA guide
cacaacauaaaaaggucaga

SEQ ID NO: 40177 - RNA, 20 nt, Artificial Sequence
  LRRK2 RNA guide
cauaaaaaggucagaaauga

SEQ ID NO: 40178 - RNA, 20 nt, Artificial Sequence
  LRRK2 RNA guide
cauuucugaccuuuuuaugu

SEQ ID NO: 40179 - RNA, 20 nt, Artificial Sequence
  LRRK2 RNA guide
ccacaacauaaaaaggucag

SEQ ID NO: 40180 - RNA, 20 nt, Artificial Sequence
  LRRK2 RNA guide
cuauauuucauuucugaccu

SEQ ID NO: 40181 - RNA, 20 nt, Artificial Sequence
  LRRK2 RNA guide
cugaccuuuuuauguugugg

SEQ ID NO: 40182 - RNA, 20 nt, Artificial Sequence
  LRRK2 RNA guide
gaccacaacauaaaaagguc

SEQ ID NO: 40183 - RNA, 20 nt, Artificial Sequence
  LRRK2 RNA guide
ggaccacaacauaaaaaggu

SEQ ID NO: 40184 - RNA, 20 nt, Artificial Sequence
  LRRK2 RNA guide
ggucagaaaugaaauauaga

SEQ ID NO: 40185 - RNA, 20 nt, Artificial Sequence
  LRRK2 RNA guide
gucagaaaugaaauauagac

SEQ ID NO: 40186 - RNA, 20 nt, Artificial Sequence
  LRRK2 RNA guide
gucuauauuucauuucugac

SEQ ID NO: 40187 - RNA, 20 nt, Artificial Sequence
  LRRK2 RNA guide
ucauuucugaccuuuuuaug

SEQ ID NO: 40188 - RNA, 20 nt, Artificial Sequence
  LRRK2 RNA guide
ucuauauuucauuucugacc

SEQ ID NO: 40189 - RNA, 20 nt, Artificial Sequence
  LRRK2 RNA guide
ucugaccuuuuuauguugug

SEQ ID NO: 40190 - RNA, 20 nt, Artificial Sequence
  LRRK2 RNA guide
ugaccuuuuuauguuguggu

SEQ ID NO: 40191 - RNA, 20 nt, Artificial Sequence
  LRRK2 RNA guide
uucugaccuuuuuauguugu

SEQ ID NO: 40192 - RNA, 20 nt, Artificial Sequence
  LRRK2 RNA guide
uuucugaccuuuuuauguug

SEQ ID NO: 40193 - RNA, 21 nt, Artificial Sequence
  LRRK2 RNA guide
accacaacauaaaaaggucag

SEQ ID NO: 40194 - RNA, 21 nt, Artificial Sequence
  LRRK2 RNA guide
cacaacauaaaaaggucagaa

SEQ ID NO: 40195 - RNA, 21 nt, Artificial Sequence
  LRRK2 RNA guide
ccacaacauaaaaaggucaga

SEQ ID NO: 40196 - RNA, 21 nt, Artificial Sequence
  LRRK2 RNA guide
cugaccuuuuuauguuguggu

SEQ ID NO: 40197 - RNA, 21 nt, Artificial Sequence
  LRRK2 RNA guide
gaccacaacauaaaaagguca

SEQ ID NO: 40198 - RNA, 21 nt, Artificial Sequence
  LRRK2 RNA guide
ggaccacaacauaaaaagguc

SEQ ID NO: 40199 - RNA, 21 nt, Artificial Sequence
  LRRK2 RNA guide
ggucagaaaugaaauauagac

SEQ ID NO: 40200 - RNA, 21 nt, Artificial Sequence
  LRRK2 RNA guide
gucuauauuucauuucugacc

SEQ ID NO: 40201 - RNA, 21 nt, Artificial Sequence
  LRRK2 RNA guide
ucugaccuuuuuauguugugg

SEQ ID NO: 40202 - RNA, 21 nt, Artificial Sequence
  LRRK2 RNA guide
ugaccuuuuuauguugugguc

SEQ ID NO: 40203 - RNA, 21 nt, Artificial Sequence
  LRRK2 RNA guide
uggaccacaacauaaaaaggu

SEQ ID NO: 40204 - RNA, 21 nt, Artificial Sequence
  LRRK2 RNA guide
uucugaccuuuuuauguugug

SEQ ID NO: 40205 - RNA, 22 nt, Artificial Sequence
  LRRK2 RNA guide
accacaacauaaaaaggucaga

SEQ ID NO: 40206 - RNA, 22 nt, Artificial Sequence
  LRRK2 RNA guide
aggucagaaaugaaauauagac

SEQ ID NO: 40207 - RNA, 22 nt, Artificial Sequence
  LRRK2 RNA guide
caacauaaaaaggucagaaaug

SEQ ID NO: 40208 - RNA, 22 nt, Artificial Sequence
  LRRK2 RNA guide
cacaacauaaaaaggucagaaa

SEQ ID NO: 40209 - RNA, 22 nt, Artificial Sequence
  LRRK2 RNA guide
cauuucugaccuuuuuauguug

SEQ ID NO: 40210 - RNA, 22 nt, Artificial Sequence
  LRRK2 RNA guide
ccacaacauaaaaaggucagaa

SEQ ID NO: 40211 - RNA, 22 nt, Artificial Sequence
  LRRK2 RNA guide
cugaccuuuuuauguugugguc

SEQ ID NO: 40212 - RNA, 22 nt, Artificial Sequence
  LRRK2 RNA guide
gaccacaacauaaaaaggucag

SEQ ID NO: 40213 - RNA, 22 nt, Artificial Sequence
  LRRK2 RNA guide
ggaccacaacauaaaaagguca

SEQ ID NO: 40214 - RNA, 22 nt, Artificial Sequence
  LRRK2 RNA guide
ggucagaaaugaaauauagaca

SEQ ID NO: 40215 - RNA, 22 nt, Artificial Sequence
  LRRK2 RNA guide
gucuauauuucauuucugaccu

SEQ ID NO: 40216 - RNA, 22 nt, Artificial Sequence
  LRRK2 RNA guide
ucugaccuuuuuauguuguggu

SEQ ID NO: 40217 - RNA, 22 nt, Artificial Sequence
  LRRK2 RNA guide
ugaccuuuuuauguuguggucc

SEQ ID NO: 40218 - RNA, 22 nt, Artificial Sequence
  LRRK2 RNA guide
uggaccacaacauaaaaagguc

SEQ ID NO: 40219 - RNA, 22 nt, Artificial Sequence
  LRRK2 RNA guide
ugucuauauuucauuucugacc

SEQ ID NO: 40220 - RNA, 22 nt, Artificial Sequence
  LRRK2 RNA guide
uucugaccuuuuuauguugugg

SEQ ID NO: 40221 - RNA, 22 nt, Artificial Sequence
  LRRK2 RNA guide
uuggaccacaacauaaaaaggu

SEQ ID NO: 40222 - RNA, 22 nt, Artificial Sequence
  LRRK2 RNA guide
uuucugaccuuuuuauguugug

SEQ ID NO: 40223 - RNA, 20 nt, Artificial Sequence
  LRRK2 RNA guide
aaaagcucagaguuacuugg

SEQ ID NO: 40224 - RNA, 20 nt, Artificial Sequence
  LRRK2 RNA guide
aaagcucagaguuacuugga

SEQ ID NO: 40225 - RNA, 20 nt, Artificial Sequence
  LRRK2 RNA guide
aacaugagaaaagcucagag

SEQ ID NO: 40226 - RNA, 20 nt, Artificial Sequence
  LRRK2 RNA guide
aaguaacucugagcuuuucu

SEQ ID NO: 40227 - RNA, 20 nt, Artificial Sequence
  LRRK2 RNA guide
acaugagaaaagcucagagu

SEQ ID NO: 40228 - RNA, 20 nt, Artificial Sequence
  LRRK2 RNA guide
agaaaagcucagaguuacuu

SEQ ID NO: 40229 - RNA, 20 nt, Artificial Sequence
  LRRK2 RNA guide
agaguuacuuggaccacaac

SEQ ID NO: 40230 - RNA, 20 nt, Artificial Sequence
  LRRK2 RNA guide
agcucagaguuacuuggacc

SEQ ID NO: 40231 - RNA, 20 nt, Artificial Sequence
  LRRK2 RNA guide
aguaacucugagcuuuucuc

SEQ ID NO: 40232 - RNA, 20 nt, Artificial Sequence
  LRRK2 RNA guide
aguuacuuggaccacaacau

SEQ ID NO: 40233 - RNA, 20 nt, Artificial Sequence
  LRRK2 RNA guide
augagaaaagcucagaguua

SEQ ID NO: 40234 - RNA, 20 nt, Artificial Sequence
  LRRK2 RNA guide
auguugugguccaaguaacu

SEQ ID NO: 40235 - RNA, 20 nt, Artificial Sequence
  LRRK2 RNA guide
caacaugagaaaagcucaga

SEQ ID NO: 40236 - RNA, 20 nt, Artificial Sequence
  LRRK2 RNA guide
caaguaacucugagcuuuuc

SEQ ID NO: 40237 - RNA, 20 nt, Artificial Sequence
  LRRK2 RNA guide
cagaguuacuuggaccacaa

SEQ ID NO: 40238 - RNA, 20 nt, Artificial Sequence
  LRRK2 RNA guide
caugagaaaagcucagaguu

SEQ ID NO: 40239 - RNA, 20 nt, Artificial Sequence
  LRRK2 RNA guide
ccaaguaacucugagcuuuu

SEQ ID NO: 40240 - RNA, 20 nt, Artificial Sequence
  LRRK2 RNA guide
ccuuuuuauguuguggucca

SEQ ID NO: 40241 - RNA, 20 nt, Artificial Sequence
  LRRK2 RNA guide
cucagaguuacuuggaccac

SEQ ID NO: 40242 - RNA, 20 nt, Artificial Sequence
  LRRK2 RNA guide
cuuuuuauguugugguccaa

SEQ ID NO: 40243 - RNA, 20 nt, Artificial Sequence
  LRRK2 RNA guide
gaaaagcucagaguuacuug

SEQ ID NO: 40244 - RNA, 20 nt, Artificial Sequence
  LRRK2 RNA guide
gagaaaagcucagaguuacu

SEQ ID NO: 40245 - RNA, 20 nt, Artificial Sequence
  LRRK2 RNA guide
gaguuacuuggaccacaaca

SEQ ID NO: 40246 - RNA, 20 nt, Artificial Sequence
  LRRK2 RNA guide
gccuuuuuauguuguggucc

SEQ ID NO: 40247 - RNA, 20 nt, Artificial Sequence
  LRRK2 RNA guide
gcucagaguuacuuggacca

SEQ ID NO: 40248 - RNA, 20 nt, Artificial Sequence
  LRRK2 RNA guide
gguccaaguaacucugagcu

SEQ ID NO: 40249 - RNA, 20 nt, Artificial Sequence
  LRRK2 RNA guide
guccaaguaacucugagcuu

SEQ ID NO: 40250 - RNA, 20 nt, Artificial Sequence
  LRRK2 RNA guide
gugguccaaguaacucugag

SEQ ID NO: 40251 - RNA, 20 nt, Artificial Sequence
  LRRK2 RNA guide
guuacuuggaccacaacaua

SEQ ID NO: 40252 - RNA, 20 nt, Artificial Sequence
  LRRK2 RNA guide
guugugguccaaguaacucu

SEQ ID NO: 40253 - RNA, 20 nt, Artificial Sequence
  LRRK2 RNA guide
uauguugugguccaaguaac

SEQ ID NO: 40254 - RNA, 20 nt, Artificial Sequence
  LRRK2 RNA guide
ucagaguuacuuggaccaca

SEQ ID NO: 40255 - RNA, 20 nt, Artificial Sequence
  LRRK2 RNA guide
uccaaguaacucugagcuuu

SEQ ID NO: 40256 - RNA, 20 nt, Artificial Sequence
  LRRK2 RNA guide
ugagaaaagcucagaguuac

SEQ ID NO: 40257 - RNA, 20 nt, Artificial Sequence
  LRRK2 RNA guide
ugguccaaguaacucugagc

SEQ ID NO: 40258 - RNA, 20 nt, Artificial Sequence
  LRRK2 RNA guide
ugugguccaaguaacucuga

SEQ ID NO: 40259 - RNA, 20 nt, Artificial Sequence
  LRRK2 RNA guide
uguugugguccaaguaacuc

SEQ ID NO: 40260 - RNA, 20 nt, Artificial Sequence
  LRRK2 RNA guide
uuacuuggaccacaacauaa

SEQ ID NO: 40261 - RNA, 20 nt, Artificial Sequence
  LRRK2 RNA guide
uuauguugugguccaaguaa

SEQ ID NO: 40262 - RNA, 20 nt, Artificial Sequence
  LRRK2 RNA guide
uugugguccaaguaacucug

SEQ ID NO: 40263 - RNA, 20 nt, Artificial Sequence
  LRRK2 RNA guide
uuuauguugugguccaagua

SEQ ID NO: 40264 - RNA, 20 nt, Artificial Sequence
  LRRK2 RNA guide
uuuuauguugugguccaagu

SEQ ID NO: 40265 - RNA, 20 nt, Artificial Sequence
  LRRK2 RNA guide
uuuuuauguugugguccaag

SEQ ID NO: 40266 - RNA, 21 nt, Artificial Sequence
  LRRK2 RNA guide
aaaagcucagaguuacuugga

SEQ ID NO: 40267 - RNA, 21 nt, Artificial Sequence
  LRRK2 RNA guide
aaagcucagaguuacuuggac

SEQ ID NO: 40268 - RNA, 21 nt, Artificial Sequence
  LRRK2 RNA guide
aacaugagaaaagcucagagu

SEQ ID NO: 40269 - RNA, 21 nt, Artificial Sequence
  LRRK2 RNA guide
aagcucagaguuacuuggacc

SEQ ID NO: 40270 - RNA, 21 nt, Artificial Sequence
  LRRK2 RNA guide
aaguaacucugagcuuuucuc

SEQ ID NO: 40271 - RNA, 21 nt, Artificial Sequence
  LRRK2 RNA guide
acaacaugagaaaagcucaga

SEQ ID NO: 40272 - RNA, 21 nt, Artificial Sequence
  LRRK2 RNA guide
acaugagaaaagcucagaguu

SEQ ID NO: 40273 - RNA, 21 nt, Artificial Sequence
  LRRK2 RNA guide
agaaaagcucagaguuacuug

SEQ ID NO: 40274 - RNA, 21 nt, Artificial Sequence
  LRRK2 RNA guide
agaguuacuuggaccacaaca

SEQ ID NO: 40275 - RNA, 21 nt, Artificial Sequence
  LRRK2 RNA guide
agcucagaguuacuuggacca

SEQ ID NO: 40276 - RNA, 21 nt, Artificial Sequence
  LRRK2 RNA guide
aguaacucugagcuuuucuca

SEQ ID NO: 40277 - RNA, 21 nt, Artificial Sequence
  LRRK2 RNA guide
aguuacuuggaccacaacaua

SEQ ID NO: 40278 - RNA, 21 nt, Artificial Sequence
  LRRK2 RNA guide
augagaaaagcucagaguuac

SEQ ID NO: 40279 - RNA, 21 nt, Artificial Sequence
  LRRK2 RNA guide
auguugugguccaaguaacuc

SEQ ID NO: 40280 - RNA, 21 nt, Artificial Sequence
  LRRK2 RNA guide
caacaugagaaaagcucagag

SEQ ID NO: 40281 - RNA, 21 nt, Artificial Sequence
  LRRK2 RNA guide
caaguaacucugagcuuuucu

SEQ ID NO: 40282 - RNA, 21 nt, Artificial Sequence
  LRRK2 RNA guide
cagaguuacuuggaccacaac

SEQ ID NO: 40283 - RNA, 21 nt, Artificial Sequence
  LRRK2 RNA guide
caugagaaaagcucagaguua

SEQ ID NO: 40284 - RNA, 21 nt, Artificial Sequence
  LRRK2 RNA guide
ccaaguaacucugagcuuuuc

SEQ ID NO: 40285 - RNA, 21 nt, Artificial Sequence
  LRRK2 RNA guide
ccuuuuuauguugugguccaa

SEQ ID NO: 40286 - RNA, 21 nt, Artificial Sequence
  LRRK2 RNA guide
cucagaguuacuuggaccaca

SEQ ID NO: 40287 - RNA, 21 nt, Artificial Sequence
  LRRK2 RNA guide
cuuuuuauguugugguccaag

SEQ ID NO: 40288 - RNA, 21 nt, Artificial Sequence
  LRRK2 RNA guide
gaaaagcucagaguuacuugg

SEQ ID NO: 40289 - RNA, 21 nt, Artificial Sequence
  LRRK2 RNA guide
gagaaaagcucagaguuacuu

SEQ ID NO: 40290 - RNA, 21 nt, Artificial Sequence
  LRRK2 RNA guide
gaguuacuuggaccacaacau

SEQ ID NO: 40291 - RNA, 21 nt, Artificial Sequence
  LRRK2 RNA guide
gccuuuuuauguuguggucca

SEQ ID NO: 40292 - RNA, 21 nt, Artificial Sequence
  LRRK2 RNA guide
gcucagaguuacuuggaccac

SEQ ID NO: 40293 - RNA, 21 nt, Artificial Sequence
  LRRK2 RNA guide
gguccaaguaacucugagcuu

SEQ ID NO: 40294 - RNA, 21 nt, Artificial Sequence
  LRRK2 RNA guide
guccaaguaacucugagcuuu

SEQ ID NO: 40295 - RNA, 21 nt, Artificial Sequence
  LRRK2 RNA guide
gugguccaaguaacucugagc

SEQ ID NO: 40296 - RNA, 21 nt, Artificial Sequence
  LRRK2 RNA guide
guuacuuggaccacaacauaa

SEQ ID NO: 40297 - RNA, 21 nt, Artificial Sequence
  LRRK2 RNA guide
guugugguccaaguaacucug

SEQ ID NO: 40298 - RNA, 21 nt, Artificial Sequence
  LRRK2 RNA guide
uauguugugguccaaguaacu

SEQ ID NO: 40299 - RNA, 21 nt, Artificial Sequence
  LRRK2 RNA guide
ucagaguuacuuggaccacaa

SEQ ID NO: 40300 - RNA, 21 nt, Artificial Sequence
  LRRK2 RNA guide
uccaaguaacucugagcuuuu

SEQ ID NO: 40301 - RNA, 21 nt, Artificial Sequence
  LRRK2 RNA guide
ugagaaaagcucagaguuacu

SEQ ID NO: 40302 - RNA, 21 nt, Artificial Sequence
  LRRK2 RNA guide
ugguccaaguaacucugagcu

SEQ ID NO: 40303 - RNA, 21 nt, Artificial Sequence
  LRRK2 RNA guide
ugugguccaaguaacucugag

SEQ ID NO: 40304 - RNA, 21 nt, Artificial Sequence
  LRRK2 RNA guide
uguugugguccaaguaacucu

SEQ ID NO: 40305 - RNA, 21 nt, Artificial Sequence
  LRRK2 RNA guide
uuauguugugguccaaguaac

SEQ ID NO: 40306 - RNA, 21 nt, Artificial Sequence
  LRRK2 RNA guide
uugugguccaaguaacucuga

SEQ ID NO: 40307 - RNA, 21 nt, Artificial Sequence
  LRRK2 RNA guide
uuuauguugugguccaaguaa

SEQ ID NO: 40308 - RNA, 21 nt, Artificial Sequence
  LRRK2 RNA guide
uuuuauguugugguccaagua

SEQ ID NO: 40309 - RNA, 21 nt, Artificial Sequence
  LRRK2 RNA guide
uuuuuauguugugguccaagu

SEQ ID NO: 40310 - RNA, 22 nt, Artificial Sequence
  LRRK2 RNA guide
aaaagcucagaguuacuuggac

SEQ ID NO: 40311 - RNA, 22 nt, Artificial Sequence
  LRRK2 RNA guide
aaagcucagaguuacuuggacc

SEQ ID NO: 40312 - RNA, 22 nt, Artificial Sequence
  LRRK2 RNA guide
aacaugagaaaagcucagaguu

SEQ ID NO: 40313 - RNA, 22 nt, Artificial Sequence
  LRRK2 RNA guide
aagcucagaguuacuuggacca

SEQ ID NO: 40314 - RNA, 22 nt, Artificial Sequence
  LRRK2 RNA guide
aaguaacucugagcuuuucuca

SEQ ID NO: 40315 - RNA, 22 nt, Artificial Sequence
  LRRK2 RNA guide
acaacaugagaaaagcucagag

SEQ ID NO: 40316 - RNA, 22 nt, Artificial Sequence
  LRRK2 RNA guide
acaugagaaaagcucagaguua

SEQ ID NO: 40317 - RNA, 22 nt, Artificial Sequence
  LRRK2 RNA guide
agaaaagcucagaguuacuugg

SEQ ID NO: 40318 - RNA, 22 nt, Artificial Sequence
  LRRK2 RNA guide
agaguuacuuggaccacaacau

SEQ ID NO: 40319 - RNA, 22 nt, Artificial Sequence
  LRRK2 RNA guide
agcucagaguuacuuggaccac

SEQ ID NO: 40320 - RNA, 22 nt, Artificial Sequence
  LRRK2 RNA guide
aguaacucugagcuuuucucau

SEQ ID NO: 40321 - RNA, 22 nt, Artificial Sequence
  LRRK2 RNA guide
aguuacuuggaccacaacauaa

SEQ ID NO: 40322 - RNA, 22 nt, Artificial Sequence
  LRRK2 RNA guide
augagaaaagcucagaguuacu

SEQ ID NO: 40323 - RNA, 22 nt, Artificial Sequence
  LRRK2 RNA guide
auguugugguccaaguaacucu

SEQ ID NO: 40324 - RNA, 22 nt, Artificial Sequence
  LRRK2 RNA guide
caacaugagaaaagcucagagu

SEQ ID NO: 40325 - RNA, 22 nt, Artificial Sequence
  LRRK2 RNA guide
caaguaacucugagcuuuucuc

SEQ ID NO: 40326 - RNA, 22 nt, Artificial Sequence
  LRRK2 RNA guide
cagaguuacuuggaccacaaca

SEQ ID NO: 40327 - RNA, 22 nt, Artificial Sequence
  LRRK2 RNA guide
caugagaaaagcucagaguuac

SEQ ID NO: 40328 - RNA, 22 nt, Artificial Sequence
  LRRK2 RNA guide
ccaaguaacucugagcuuuucu

SEQ ID NO: 40329 - RNA, 22 nt, Artificial Sequence
  LRRK2 RNA guide
ccuuuuuauguugugguccaag

SEQ ID NO: 40330 - RNA, 22 nt, Artificial Sequence
  LRRK2 RNA guide
cucagaguuacuuggaccacaa

SEQ ID NO: 40331 - RNA, 22 nt, Artificial Sequence
  LRRK2 RNA guide
cuuuuuauguugugguccaagu

SEQ ID NO: 40332 - RNA, 22 nt, Artificial Sequence
  LRRK2 RNA guide
gaaaagcucagaguuacuugga

SEQ ID NO: 40333 - RNA, 22 nt, Artificial Sequence
  LRRK2 RNA guide
gacaacaugagaaaagcucaga

SEQ ID NO: 40334 - RNA, 22 nt, Artificial Sequence
  LRRK2 RNA guide
gagaaaagcucagaguuacuug

SEQ ID NO: 40335 - RNA, 22 nt, Artificial Sequence
  LRRK2 RNA guide
gaguuacuuggaccacaacaua

SEQ ID NO: 40336 - RNA, 22 nt, Artificial Sequence
  LRRK2 RNA guide
gccuuuuuauguugugguccaa

SEQ ID NO: 40337 - RNA, 22 nt, Artificial Sequence
  LRRK2 RNA guide
gcucagaguuacuuggaccaca

SEQ ID NO: 40338 - RNA, 22 nt, Artificial Sequence
  LRRK2 RNA guide
gguccaaguaacucugagcuuu

SEQ ID NO: 40339 - RNA, 22 nt, Artificial Sequence
  LRRK2 RNA guide
guccaaguaacucugagcuuuu

SEQ ID NO: 40340 - RNA, 22 nt, Artificial Sequence
  LRRK2 RNA guide
gugguccaaguaacucugagcu

SEQ ID NO: 40341 - RNA, 22 nt, Artificial Sequence
  LRRK2 RNA guide
guugugguccaaguaacucuga

SEQ ID NO: 40342 - RNA, 22 nt, Artificial Sequence
  LRRK2 RNA guide
uauguugugguccaaguaacuc

SEQ ID NO: 40343 - RNA, 22 nt, Artificial Sequence
  LRRK2 RNA guide
ucagaguuacuuggaccacaac

SEQ ID NO: 40344 - RNA, 22 nt, Artificial Sequence
  LRRK2 RNA guide
uccaaguaacucugagcuuuuc

SEQ ID NO: 40345 - RNA, 22 nt, Artificial Sequence
  LRRK2 RNA guide
ugagaaaagcucagaguuacuu

SEQ ID NO: 40346 - RNA, 22 nt, Artificial Sequence
  LRRK2 RNA guide
ugguccaaguaacucugagcuu

SEQ ID NO: 40347 - RNA, 22 nt, Artificial Sequence
  LRRK2 RNA guide
ugugguccaaguaacucugagc

SEQ ID NO: 40348 - RNA, 22 nt, Artificial Sequence
  LRRK2 RNA guide
uguugugguccaaguaacucug

SEQ ID NO: 40349 - RNA, 22 nt, Artificial Sequence
  LRRK2 RNA guide
uuauguugugguccaaguaacu

SEQ ID NO: 40350 - RNA, 22 nt, Artificial Sequence
  LRRK2 RNA guide
uugugguccaaguaacucugag

SEQ ID NO: 40351 - RNA, 22 nt, Artificial Sequence
  LRRK2 RNA guide
uuuauguugugguccaaguaac

SEQ ID NO: 40352 - RNA, 22 nt, Artificial Sequence
  LRRK2 RNA guide
uuuuauguugugguccaaguaa

SEQ ID NO: 40353 - RNA, 22 nt, Artificial Sequence
  LRRK2 RNA guide
uuuuuauguugugguccaagua

SEQ ID NO: 40354 - RNA, 20 nt, Artificial Sequence
  LRRK2 RNA guide
aaaagcucagaguuauuugg

SEQ ID NO: 40355 - RNA, 20 nt, Artificial Sequence
  LRRK2 RNA guide
aaagcucagaguuauuugga

SEQ ID NO: 40356 - RNA, 20 nt, Artificial Sequence
  LRRK2 RNA guide
aaauaacucugagcuuuucu

SEQ ID NO: 40357 - RNA, 20 nt, Artificial Sequence
  LRRK2 RNA guide
aagcucagaguuauuuggac

SEQ ID NO: 40358 - RNA, 20 nt, Artificial Sequence
  LRRK2 RNA guide
aauaacucugagcuuuucuc

SEQ ID NO: 40359 - RNA, 20 nt, Artificial Sequence
  LRRK2 RNA guide
agaaaagcucagaguuauuu

SEQ ID NO: 40360 - RNA, 20 nt, Artificial Sequence
  LRRK2 RNA guide
agaguuauuuggaccacaac

SEQ ID NO: 40361 - RNA, 20 nt, Artificial Sequence
  LRRK2 RNA guide
agcucagaguuauuuggacc

SEQ ID NO: 40362 - RNA, 20 nt, Artificial Sequence
  LRRK2 RNA guide
aguuauuuggaccacaacau

SEQ ID NO: 40363 - RNA, 20 nt, Artificial Sequence
  LRRK2 RNA guide
auguugugguccaaauaacu

SEQ ID NO: 40364 - RNA, 20 nt, Artificial Sequence
  LRRK2 RNA guide
auuuggaccacaacauaaaa

SEQ ID NO: 40365 - RNA, 20 nt, Artificial Sequence
  LRRK2 RNA guide
caaauaacucugagcuuuuc

SEQ ID NO: 40366 - RNA, 20 nt, Artificial Sequence
  LRRK2 RNA guide
cagaguuauuuggaccacaa

SEQ ID NO: 40367 - RNA, 20 nt, Artificial Sequence
  LRRK2 RNA guide
ccaaauaacucugagcuuuu

SEQ ID NO: 40368 - RNA, 20 nt, Artificial Sequence
  LRRK2 RNA guide
cucagaguuauuuggaccac

SEQ ID NO: 40369 - RNA, 20 nt, Artificial Sequence
  LRRK2 RNA guide
gaaaagcucagaguuauuug

SEQ ID NO: 40370 - RNA, 20 nt, Artificial Sequence
  LRRK2 RNA guide
gagaaaagcucagaguuauu

SEQ ID NO: 40371 - RNA, 20 nt, Artificial Sequence
  LRRK2 RNA guide
gaguuauuuggaccacaaca

SEQ ID NO: 40372 - RNA, 20 nt, Artificial Sequence
  LRRK2 RNA guide
gcucagaguuauuuggacca

SEQ ID NO: 40373 - RNA, 20 nt, Artificial Sequence
  LRRK2 RNA guide
gguccaaauaacucugagcu

SEQ ID NO: 40374 - RNA, 20 nt, Artificial Sequence
  LRRK2 RNA guide
guccaaauaacucugagcuu

SEQ ID NO: 40375 - RNA, 20 nt, Artificial Sequence
  LRRK2 RNA guide
gugguccaaauaacucugag

SEQ ID NO: 40376 - RNA, 20 nt, Artificial Sequence
  LRRK2 RNA guide
guuauuuggaccacaacaua

SEQ ID NO: 40377 - RNA, 20 nt, Artificial Sequence
  LRRK2 RNA guide
guugugguccaaauaacucu

SEQ ID NO: 40378 - RNA, 20 nt, Artificial Sequence
  LRRK2 RNA guide
uauguugugguccaaauaac

SEQ ID NO: 40379 - RNA, 20 nt, Artificial Sequence
  LRRK2 RNA guide
uauuuggaccacaacauaaa

SEQ ID NO: 40380 - RNA, 20 nt, Artificial Sequence
  LRRK2 RNA guide
ucagaguuauuuggaccaca

SEQ ID NO: 40381 - RNA, 20 nt, Artificial Sequence
  LRRK2 RNA guide
uccaaauaacucugagcuuu

SEQ ID NO: 40382 - RNA, 20 nt, Artificial Sequence
  LRRK2 RNA guide
ugagaaaagcucagaguuau

SEQ ID NO: 40383 - RNA, 20 nt, Artificial Sequence
  LRRK2 RNA guide
ugguccaaauaacucugagc

SEQ ID NO: 40384 - RNA, 20 nt, Artificial Sequence
  LRRK2 RNA guide
ugugguccaaauaacucuga

SEQ ID NO: 40385 - RNA, 20 nt, Artificial Sequence
  LRRK2 RNA guide
uguugugguccaaauaacuc

SEQ ID NO: 40386 - RNA, 20 nt, Artificial Sequence
  LRRK2 RNA guide
uuauguugugguccaaauaa

SEQ ID NO: 40387 - RNA, 20 nt, Artificial Sequence
  LRRK2 RNA guide
uuauuuggaccacaacauaa

SEQ ID NO: 40388 - RNA, 20 nt, Artificial Sequence
  LRRK2 RNA guide
uugugguccaaauaacucug

SEQ ID NO: 40389 - RNA, 20 nt, Artificial Sequence
  LRRK2 RNA guide
uuuauguugugguccaaaua

SEQ ID NO: 40390 - RNA, 20 nt, Artificial Sequence
  LRRK2 RNA guide
uuuuauguugugguccaaau

SEQ ID NO: 40391 - RNA, 20 nt, Artificial Sequence
  LRRK2 RNA guide
uuuuuauguugugguccaaa

SEQ ID NO: 40392 - RNA, 21 nt, Artificial Sequence
  LRRK2 RNA guide
aaaagcucagaguuauuugga

SEQ ID NO: 40393 - RNA, 21 nt, Artificial Sequence
  LRRK2 RNA guide
aaagcucagaguuauuuggac

SEQ ID NO: 40394 - RNA, 21 nt, Artificial Sequence
  LRRK2 RNA guide
aaauaacucugagcuuuucuc

SEQ ID NO: 40395 - RNA, 21 nt, Artificial Sequence
  LRRK2 RNA guide
aagcucagaguuauuuggacc

SEQ ID NO: 40396 - RNA, 21 nt, Artificial Sequence
  LRRK2 RNA guide
aauaacucugagcuuuucuca

SEQ ID NO: 40397 - RNA, 21 nt, Artificial Sequence
  LRRK2 RNA guide
agaaaagcucagaguuauuug

SEQ ID NO: 40398 - RNA, 21 nt, Artificial Sequence
  LRRK2 RNA guide
agaguuauuuggaccacaaca

SEQ ID NO: 40399 - RNA, 21 nt, Artificial Sequence
  LRRK2 RNA guide
agcucagaguuauuuggacca

SEQ ID NO: 40400 - RNA, 21 nt, Artificial Sequence
  LRRK2 RNA guide
aguuauuuggaccacaacaua

SEQ ID NO: 40401 - RNA, 21 nt, Artificial Sequence
  LRRK2 RNA guide
augagaaaagcucagaguuau

SEQ ID NO: 40402 - RNA, 21 nt, Artificial Sequence
  LRRK2 RNA guide
auguugugguccaaauaacuc

SEQ ID NO: 40403 - RNA, 21 nt, Artificial Sequence
  LRRK2 RNA guide
caaauaacucugagcuuuucu

SEQ ID NO: 40404 - RNA, 21 nt, Artificial Sequence
  LRRK2 RNA guide
cagaguuauuuggaccacaac

SEQ ID NO: 40405 - RNA, 21 nt, Artificial Sequence
  LRRK2 RNA guide
ccaaauaacucugagcuuuuc

SEQ ID NO: 40406 - RNA, 21 nt, Artificial Sequence
  LRRK2 RNA guide
cucagaguuauuuggaccaca

SEQ ID NO: 40407 - RNA, 21 nt, Artificial Sequence
  LRRK2 RNA guide
cuuuuuauguugugguccaaa

SEQ ID NO: 40408 - RNA, 21 nt, Artificial Sequence
  LRRK2 RNA guide
gaaaagcucagaguuauuugg

SEQ ID NO: 40409 - RNA, 21 nt, Artificial Sequence
  LRRK2 RNA guide
gagaaaagcucagaguuauuu

SEQ ID NO: 40410 - RNA, 21 nt, Artificial Sequence
  LRRK2 RNA guide
gaguuauuuggaccacaacau

SEQ ID NO: 40411 - RNA, 21 nt, Artificial Sequence
  LRRK2 RNA guide
gcucagaguuauuuggaccac

SEQ ID NO: 40412 - RNA, 21 nt, Artificial Sequence
  LRRK2 RNA guide
gguccaaauaacucugagcuu

SEQ ID NO: 40413 - RNA, 21 nt, Artificial Sequence
  LRRK2 RNA guide
guccaaauaacucugagcuuu

SEQ ID NO: 40414 - RNA, 21 nt, Artificial Sequence
  LRRK2 RNA guide
gugguccaaauaacucugagc

SEQ ID NO: 40415 - RNA, 21 nt, Artificial Sequence
  LRRK2 RNA guide
guuauuuggaccacaacauaa

SEQ ID NO: 40416 - RNA, 21 nt, Artificial Sequence
  LRRK2 RNA guide
guugugguccaaauaacucug

SEQ ID NO: 40417 - RNA, 21 nt, Artificial Sequence
  LRRK2 RNA guide
uauguugugguccaaauaacu

SEQ ID NO: 40418 - RNA, 21 nt, Artificial Sequence
  LRRK2 RNA guide
ucagaguuauuuggaccacaa

SEQ ID NO: 40419 - RNA, 21 nt, Artificial Sequence
  LRRK2 RNA guide
uccaaauaacucugagcuuuu

SEQ ID NO: 40420 - RNA, 21 nt, Artificial Sequence
  LRRK2 RNA guide
ugagaaaagcucagaguuauu

SEQ ID NO: 40421 - RNA, 21 nt, Artificial Sequence
  LRRK2 RNA guide
ugguccaaauaacucugagcu

SEQ ID NO: 40422 - RNA, 21 nt, Artificial Sequence
  LRRK2 RNA guide
ugugguccaaauaacucugag

SEQ ID NO: 40423 - RNA, 21 nt, Artificial Sequence
  LRRK2 RNA guide
uguugugguccaaauaacucu

SEQ ID NO: 40424 - RNA, 21 nt, Artificial Sequence
  LRRK2 RNA guide
uuauguugugguccaaauaac

SEQ ID NO: 40425 - RNA, 21 nt, Artificial Sequence
  LRRK2 RNA guide
uugugguccaaauaacucuga

SEQ ID NO: 40426 - RNA, 22 nt, Artificial Sequence
  LRRK2 RNA guide
aaaagcucagaguuauuuggac

SEQ ID NO: 40427 - RNA, 22 nt, Artificial Sequence
  LRRK2 RNA guide
aaagcucagaguuauuuggacc

SEQ ID NO: 40428 - RNA, 22 nt, Artificial Sequence
  LRRK2 RNA guide
aaauaacucugagcuuuucuca

SEQ ID NO: 40429 - RNA, 22 nt, Artificial Sequence
  LRRK2 RNA guide
aagcucagaguuauuuggacca

SEQ ID NO: 40430 - RNA, 22 nt, Artificial Sequence
  LRRK2 RNA guide
aauaacucugagcuuuucucau

SEQ ID NO: 40431 - RNA, 22 nt, Artificial Sequence
  LRRK2 RNA guide
agaaaagcucagaguuauuugg

SEQ ID NO: 40432 - RNA, 22 nt, Artificial Sequence
  LRRK2 RNA guide
agaguuauuuggaccacaacau

SEQ ID NO: 40433 - RNA, 22 nt, Artificial Sequence
  LRRK2 RNA guide
agcucagaguuauuuggaccac

SEQ ID NO: 40434 - RNA, 22 nt, Artificial Sequence
  LRRK2 RNA guide
aguuauuuggaccacaacauaa

SEQ ID NO: 40435 - RNA, 22 nt, Artificial Sequence
  LRRK2 RNA guide
augagaaaagcucagaguuauu

SEQ ID NO: 40436 - RNA, 22 nt, Artificial Sequence
  LRRK2 RNA guide
auguugugguccaaauaacucu

SEQ ID NO: 40437 - RNA, 22 nt, Artificial Sequence
  LRRK2 RNA guide
auuuggaccacaacauaaaaag

SEQ ID NO: 40438 - RNA, 22 nt, Artificial Sequence
  LRRK2 RNA guide
caaauaacucugagcuuuucuc

SEQ ID NO: 40439 - RNA, 22 nt, Artificial Sequence
  LRRK2 RNA guide
cagaguuauuuggaccacaaca

SEQ ID NO: 40440 - RNA, 22 nt, Artificial Sequence
  LRRK2 RNA guide
caugagaaaagcucagaguuau

SEQ ID NO: 40441 - RNA, 22 nt, Artificial Sequence
  LRRK2 RNA guide
ccaaauaacucugagcuuuucu

SEQ ID NO: 40442 - RNA, 22 nt, Artificial Sequence
  LRRK2 RNA guide
ccuuuuuauguugugguccaaa

SEQ ID NO: 40443 - RNA, 22 nt, Artificial Sequence
  LRRK2 RNA guide
cucagaguuauuuggaccacaa

SEQ ID NO: 40444 - RNA, 22 nt, Artificial Sequence
  LRRK2 RNA guide
cuuuuuauguugugguccaaau

SEQ ID NO: 40445 - RNA, 22 nt, Artificial Sequence
  LRRK2 RNA guide
gaaaagcucagaguuauuugga

SEQ ID NO: 40446 - RNA, 22 nt, Artificial Sequence
  LRRK2 RNA guide
gagaaaagcucagaguuauuug

SEQ ID NO: 40447 - RNA, 22 nt, Artificial Sequence
  LRRK2 RNA guide
gaguuauuuggaccacaacaua

SEQ ID NO: 40448 - RNA, 22 nt, Artificial Sequence
  LRRK2 RNA guide
gcucagaguuauuuggaccaca

SEQ ID NO: 40449 - RNA, 22 nt, Artificial Sequence
  LRRK2 RNA guide
gguccaaauaacucugagcuuu

SEQ ID NO: 40450 - RNA, 22 nt, Artificial Sequence
  LRRK2 RNA guide
guccaaauaacucugagcuuuu

SEQ ID NO: 40451 - RNA, 22 nt, Artificial Sequence
  LRRK2 RNA guide
gugguccaaauaacucugagcu

SEQ ID NO: 40452 - RNA, 22 nt, Artificial Sequence
  LRRK2 RNA guide
guuauuuggaccacaacauaaa

SEQ ID NO: 40453 - RNA, 22 nt, Artificial Sequence
  LRRK2 RNA guide
guugugguccaaauaacucuga

SEQ ID NO: 40454 - RNA, 22 nt, Artificial Sequence
  LRRK2 RNA guide
uauguugugguccaaauaacuc

SEQ ID NO: 40455 - RNA, 22 nt, Artificial Sequence
  LRRK2 RNA guide
ucagaguuauuuggaccacaac

SEQ ID NO: 40456 - RNA, 22 nt, Artificial Sequence
  LRRK2 RNA guide
uccaaauaacucugagcuuuuc

SEQ ID NO: 40457 - RNA, 22 nt, Artificial Sequence
  LRRK2 RNA guide
ugagaaaagcucagaguuauuu

SEQ ID NO: 40458 - RNA, 22 nt, Artificial Sequence
  LRRK2 RNA guide
ugguccaaauaacucugagcuu

SEQ ID NO: 40459 - RNA, 22 nt, Artificial Sequence
  LRRK2 RNA guide
ugugguccaaauaacucugagc

SEQ ID NO: 40460 - RNA, 22 nt, Artificial Sequence
  LRRK2 RNA guide
uguugugguccaaauaacucug

SEQ ID NO: 40461 - RNA, 22 nt, Artificial Sequence
  LRRK2 RNA guide
uuauguugugguccaaauaacu

SEQ ID NO: 40462 - RNA, 22 nt, Artificial Sequence
  LRRK2 RNA guide
uugugguccaaauaacucugag

SEQ ID NO: 40463 - RNA, 22 nt, Artificial Sequence
  LRRK2 RNA guide
uuuauguugugguccaaauaac

SEQ ID NO: 40464 - RNA, 20 nt, Artificial Sequence
  LRRK2 RNA guide
aaacauuugaguugaacaga

SEQ ID NO: 40465 - RNA, 20 nt, Artificial Sequence
  LRRK2 RNA guide
aaaguaacagucuguucaac

SEQ ID NO: 40466 - RNA, 20 nt, Artificial Sequence
  LRRK2 RNA guide
aacagucuguucaacucaaa

SEQ ID NO: 40467 - RNA, 20 nt, Artificial Sequence
  LRRK2 RNA guide
aacauuugaguugaacagac

SEQ ID NO: 40468 - RNA, 20 nt, Artificial Sequence
  LRRK2 RNA guide
aaguaacagucuguucaacu

SEQ ID NO: 40469 - RNA, 20 nt, Artificial Sequence
  LRRK2 RNA guide
acagucuguucaacucaaau

SEQ ID NO: 40470 - RNA, 20 nt, Artificial Sequence
  LRRK2 RNA guide
acauuugaguugaacagacu

SEQ ID NO: 40471 - RNA, 20 nt, Artificial Sequence
  LRRK2 RNA guide
agaaaguaacagucuguuca

SEQ ID NO: 40472 - RNA, 20 nt, Artificial Sequence
  LRRK2 RNA guide
aguaacagucuguucaacuc

SEQ ID NO: 40473 - RNA, 20 nt, Artificial Sequence
  LRRK2 RNA guide
agucuguucaacucaaaugu

SEQ ID NO: 40474 - RNA, 20 nt, Artificial Sequence
  LRRK2 RNA guide
aguugaacagacuguuacuu

SEQ ID NO: 40475 - RNA, 20 nt, Artificial Sequence
  LRRK2 RNA guide
auuugaguugaacagacugu

SEQ ID NO: 40476 - RNA, 20 nt, Artificial Sequence
  LRRK2 RNA guide
cagucuguucaacucaaaug

SEQ ID NO: 40477 - RNA, 20 nt, Artificial Sequence
  LRRK2 RNA guide
cauuugaguugaacagacug

SEQ ID NO: 40478 - RNA, 20 nt, Artificial Sequence
  LRRK2 RNA guide
cuagaaaguaacagucuguu

SEQ ID NO: 40479 - RNA, 20 nt, Artificial Sequence
  LRRK2 RNA guide
cuguucaacucaaauguuua

SEQ ID NO: 40480 - RNA, 20 nt, Artificial Sequence
  LRRK2 RNA guide
gaaaguaacagucuguucaa

SEQ ID NO: 40481 - RNA, 20 nt, Artificial Sequence
  LRRK2 RNA guide
gaguugaacagacuguuacu

SEQ ID NO: 40482 - RNA, 20 nt, Artificial Sequence
  LRRK2 RNA guide
guaacagucuguucaacuca

SEQ ID NO: 40483 - RNA, 20 nt, Artificial Sequence
  LRRK2 RNA guide
gucuguucaacucaaauguu

SEQ ID NO: 40484 - RNA, 20 nt, Artificial Sequence
  LRRK2 RNA guide
guugaacagacuguuacuuu

SEQ ID NO: 40485 - RNA, 20 nt, Artificial Sequence
  LRRK2 RNA guide
uaaacauuugaguugaacag

SEQ ID NO: 40486 - RNA, 20 nt, Artificial Sequence
  LRRK2 RNA guide
uaacagucuguucaacucaa

SEQ ID NO: 40487 - RNA, 20 nt, Artificial Sequence
  LRRK2 RNA guide
uagaaaguaacagucuguuc

SEQ ID NO: 40488 - RNA, 20 nt, Artificial Sequence
  LRRK2 RNA guide
ucuagaaaguaacagucugu

SEQ ID NO: 40489 - RNA, 20 nt, Artificial Sequence
  LRRK2 RNA guide
ucuguucaacucaaauguuu

SEQ ID NO: 40490 - RNA, 20 nt, Artificial Sequence
  LRRK2 RNA guide
ugaguugaacagacuguuac

SEQ ID NO: 40491 - RNA, 20 nt, Artificial Sequence
  LRRK2 RNA guide
uucuagaaaguaacagucug

SEQ ID NO: 40492 - RNA, 20 nt, Artificial Sequence
  LRRK2 RNA guide
uugaacagacuguuacuuuc

SEQ ID NO: 40493 - RNA, 20 nt, Artificial Sequence
  LRRK2 RNA guide
uugaguugaacagacuguua

SEQ ID NO: 40494 - RNA, 20 nt, Artificial Sequence
  LRRK2 RNA guide
uuucuagaaaguaacagucu

SEQ ID NO: 40495 - RNA, 20 nt, Artificial Sequence
  LRRK2 RNA guide
uuugaguugaacagacuguu

SEQ ID NO: 40496 - RNA, 21 nt, Artificial Sequence
  LRRK2 RNA guide
aaacauuugaguugaacagac

SEQ ID NO: 40497 - RNA, 21 nt, Artificial Sequence
  LRRK2 RNA guide
aaaguaacagucuguucaacu

SEQ ID NO: 40498 - RNA, 21 nt, Artificial Sequence
  LRRK2 RNA guide
aacagucuguucaacucaaau

SEQ ID NO: 40499 - RNA, 21 nt, Artificial Sequence
  LRRK2 RNA guide
aacauuugaguugaacagacu

SEQ ID NO: 40500 - RNA, 21 nt, Artificial Sequence
  LRRK2 RNA guide
aaguaacagucuguucaacuc

SEQ ID NO: 40501 - RNA, 21 nt, Artificial Sequence
  LRRK2 RNA guide
acagucuguucaacucaaaug

SEQ ID NO: 40502 - RNA, 21 nt, Artificial Sequence
  LRRK2 RNA guide
acauuugaguugaacagacug

SEQ ID NO: 40503 - RNA, 21 nt, Artificial Sequence
  LRRK2 RNA guide
agaaaguaacagucuguucaa

SEQ ID NO: 40504 - RNA, 21 nt, Artificial Sequence
  LRRK2 RNA guide
aguaacagucuguucaacuca

SEQ ID NO: 40505 - RNA, 21 nt, Artificial Sequence
  LRRK2 RNA guide
agucuguucaacucaaauguu

SEQ ID NO: 40506 - RNA, 21 nt, Artificial Sequence
  LRRK2 RNA guide
aguugaacagacuguuacuuu

SEQ ID NO: 40507 - RNA, 21 nt, Artificial Sequence
  LRRK2 RNA guide
auuugaguugaacagacuguu

SEQ ID NO: 40508 - RNA, 21 nt, Artificial Sequence
  LRRK2 RNA guide
cagucuguucaacucaaaugu

SEQ ID NO: 40509 - RNA, 21 nt, Artificial Sequence
  LRRK2 RNA guide
cauuugaguugaacagacugu

SEQ ID NO: 40510 - RNA, 21 nt, Artificial Sequence
  LRRK2 RNA guide
cuagaaaguaacagucuguuc

SEQ ID NO: 40511 - RNA, 21 nt, Artificial Sequence
  LRRK2 RNA guide
gaaaguaacagucuguucaac

SEQ ID NO: 40512 - RNA, 21 nt, Artificial Sequence
  LRRK2 RNA guide
gaguugaacagacuguuacuu

SEQ ID NO: 40513 - RNA, 21 nt, Artificial Sequence
  LRRK2 RNA guide
guaacagucuguucaacucaa

SEQ ID NO: 40514 - RNA, 21 nt, Artificial Sequence
  LRRK2 RNA guide
gucuguucaacucaaauguuu

SEQ ID NO: 40515 - RNA, 21 nt, Artificial Sequence
  LRRK2 RNA guide
guugaacagacuguuacuuuc

SEQ ID NO: 40516 - RNA, 21 nt, Artificial Sequence
  LRRK2 RNA guide
uaacagucuguucaacucaaa

SEQ ID NO: 40517 - RNA, 21 nt, Artificial Sequence
  LRRK2 RNA guide
uagaaaguaacagucuguuca

SEQ ID NO: 40518 - RNA, 21 nt, Artificial Sequence
  LRRK2 RNA guide
ucuagaaaguaacagucuguu

SEQ ID NO: 40519 - RNA, 21 nt, Artificial Sequence
  LRRK2 RNA guide
ugaguugaacagacuguuacu

SEQ ID NO: 40520 - RNA, 21 nt, Artificial Sequence
  LRRK2 RNA guide
uucuagaaaguaacagucugu

SEQ ID NO: 40521 - RNA, 21 nt, Artificial Sequence
  LRRK2 RNA guide
uugaacagacuguuacuuucu

SEQ ID NO: 40522 - RNA, 21 nt, Artificial Sequence
  LRRK2 RNA guide
uugaguugaacagacuguuac

SEQ ID NO: 40523 - RNA, 21 nt, Artificial Sequence
  LRRK2 RNA guide
uuucuagaaaguaacagucug

SEQ ID NO: 40524 - RNA, 21 nt, Artificial Sequence
  LRRK2 RNA guide
uuugaguugaacagacuguua

SEQ ID NO: 40525 - RNA, 22 nt, Artificial Sequence
  LRRK2 RNA guide
aaacauuugaguugaacagacu

SEQ ID NO: 40526 - RNA, 22 nt, Artificial Sequence
  LRRK2 RNA guide
aaaguaacagucuguucaacuc

SEQ ID NO: 40527 - RNA, 22 nt, Artificial Sequence
  LRRK2 RNA guide
aacagucuguucaacucaaaug

SEQ ID NO: 40528 - RNA, 22 nt, Artificial Sequence
  LRRK2 RNA guide
aacauuugaguugaacagacug

SEQ ID NO: 40529 - RNA, 22 nt, Artificial Sequence
  LRRK2 RNA guide
aaguaacagucuguucaacuca

SEQ ID NO: 40530 - RNA, 22 nt, Artificial Sequence
  LRRK2 RNA guide
acagucuguucaacucaaaugu

SEQ ID NO: 40531 - RNA, 22 nt, Artificial Sequence
  LRRK2 RNA guide
acauuugaguugaacagacugu

SEQ ID NO: 40532 - RNA, 22 nt, Artificial Sequence
  LRRK2 RNA guide
agaaaguaacagucuguucaac

SEQ ID NO: 40533 - RNA, 22 nt, Artificial Sequence
  LRRK2 RNA guide
aguaacagucuguucaacucaa

SEQ ID NO: 40534 - RNA, 22 nt, Artificial Sequence
  LRRK2 RNA guide
agucuguucaacucaaauguuu

SEQ ID NO: 40535 - RNA, 22 nt, Artificial Sequence
  LRRK2 RNA guide
aguugaacagacuguuacuuuc

SEQ ID NO: 40536 - RNA, 22 nt, Artificial Sequence
  LRRK2 RNA guide
auuucuagaaaguaacagucug

SEQ ID NO: 40537 - RNA, 22 nt, Artificial Sequence
  LRRK2 RNA guide
auuugaguugaacagacuguua

SEQ ID NO: 40538 - RNA, 22 nt, Artificial Sequence
  LRRK2 RNA guide
cagucuguucaacucaaauguu

SEQ ID NO: 40539 - RNA, 22 nt, Artificial Sequence
  LRRK2 RNA guide
cauuugaguugaacagacuguu

SEQ ID NO: 40540 - RNA, 22 nt, Artificial Sequence
  LRRK2 RNA guide
cuagaaaguaacagucuguuca

SEQ ID NO: 40541 - RNA, 22 nt, Artificial Sequence
  LRRK2 RNA guide
gaaaguaacagucuguucaacu

SEQ ID NO: 40542 - RNA, 22 nt, Artificial Sequence
  LRRK2 RNA guide
gaguugaacagacuguuacuuu

SEQ ID NO: 40543 - RNA, 22 nt, Artificial Sequence
  LRRK2 RNA guide
guaacagucuguucaacucaaa

SEQ ID NO: 40544 - RNA, 22 nt, Artificial Sequence
  LRRK2 RNA guide
gucuguucaacucaaauguuua

SEQ ID NO: 40545 - RNA, 22 nt, Artificial Sequence
  LRRK2 RNA guide
guugaacagacuguuacuuucu

SEQ ID NO: 40546 - RNA, 22 nt, Artificial Sequence
  LRRK2 RNA guide
uaaacauuugaguugaacagac

SEQ ID NO: 40547 - RNA, 22 nt, Artificial Sequence
  LRRK2 RNA guide
uaacagucuguucaacucaaau

SEQ ID NO: 40548 - RNA, 22 nt, Artificial Sequence
  LRRK2 RNA guide
uagaaaguaacagucuguucaa

SEQ ID NO: 40549 - RNA, 22 nt, Artificial Sequence
  LRRK2 RNA guide
ucuagaaaguaacagucuguuc

SEQ ID NO: 40550 - RNA, 22 nt, Artificial Sequence
  LRRK2 RNA guide
ugaguugaacagacuguuacuu

SEQ ID NO: 40551 - RNA, 22 nt, Artificial Sequence
  LRRK2 RNA guide
uucuagaaaguaacagucuguu

SEQ ID NO: 40552 - RNA, 22 nt, Artificial Sequence
  LRRK2 RNA guide
uugaacagacuguuacuuucua

SEQ ID NO: 40553 - RNA, 22 nt, Artificial Sequence
  LRRK2 RNA guide
uugaguugaacagacuguuacu

SEQ ID NO: 40554 - RNA, 22 nt, Artificial Sequence
  LRRK2 RNA guide
uuucuagaaaguaacagucugu

SEQ ID NO: 40555 - RNA, 22 nt, Artificial Sequence
  LRRK2 RNA guide
uuugaguugaacagacuguuac

SEQ ID NO: 40556 - RNA, 20 nt, Artificial Sequence
  LRRK2 RNA guide
aaacauuugagucgaacaga

SEQ ID NO: 40557 - RNA, 20 nt, Artificial Sequence
  LRRK2 RNA guide
aaaguaacagucuguucgac

SEQ ID NO: 40558 - RNA, 20 nt, Artificial Sequence
  LRRK2 RNA guide
aacagucuguucgacucaaa

SEQ ID NO: 40559 - RNA, 20 nt, Artificial Sequence
  LRRK2 RNA guide
aacauuugagucgaacagac

SEQ ID NO: 40560 - RNA, 20 nt, Artificial Sequence
  LRRK2 RNA guide
aaguaacagucuguucgacu

SEQ ID NO: 40561 - RNA, 20 nt, Artificial Sequence
  LRRK2 RNA guide
acagucuguucgacucaaau

SEQ ID NO: 40562 - RNA, 20 nt, Artificial Sequence
  LRRK2 RNA guide
acauuugagucgaacagacu

SEQ ID NO: 40563 - RNA, 20 nt, Artificial Sequence
  LRRK2 RNA guide
agaaaguaacagucuguucg

SEQ ID NO: 40564 - RNA, 20 nt, Artificial Sequence
  LRRK2 RNA guide
aguaacagucuguucgacuc

SEQ ID NO: 40565 - RNA, 20 nt, Artificial Sequence
  LRRK2 RNA guide
agucgaacagacuguuacuu

SEQ ID NO: 40566 - RNA, 20 nt, Artificial Sequence
  LRRK2 RNA guide
agucuguucgacucaaaugu

SEQ ID NO: 40567 - RNA, 20 nt, Artificial Sequence
  LRRK2 RNA guide
auaaacauuugagucgaaca

SEQ ID NO: 40568 - RNA, 20 nt, Artificial Sequence
  LRRK2 RNA guide
auuugagucgaacagacugu

SEQ ID NO: 40569 - RNA, 20 nt, Artificial Sequence
  LRRK2 RNA guide
cagucuguucgacucaaaug

SEQ ID NO: 40570 - RNA, 20 nt, Artificial Sequence
  LRRK2 RNA guide
cauuugagucgaacagacug

SEQ ID NO: 40571 - RNA, 20 nt, Artificial Sequence
  LRRK2 RNA guide
cgacucaaauguuuauaaga

SEQ ID NO: 40572 - RNA, 20 nt, Artificial Sequence
  LRRK2 RNA guide
cuguucgacucaaauguuua

SEQ ID NO: 40573 - RNA, 20 nt, Artificial Sequence
  LRRK2 RNA guide
cuuauaaacauuugagucga

SEQ ID NO: 40574 - RNA, 20 nt, Artificial Sequence
  LRRK2 RNA guide
gaaaguaacagucuguucga

SEQ ID NO: 40575 - RNA, 20 nt, Artificial Sequence
  LRRK2 RNA guide
gagucgaacagacuguuacu

SEQ ID NO: 40576 - RNA, 20 nt, Artificial Sequence
  LRRK2 RNA guide
guaacagucuguucgacuca

SEQ ID NO: 40577 - RNA, 20 nt, Artificial Sequence
  LRRK2 RNA guide
gucgaacagacuguuacuuu

SEQ ID NO: 40578 - RNA, 20 nt, Artificial Sequence
  LRRK2 RNA guide
gucuguucgacucaaauguu

SEQ ID NO: 40579 - RNA, 20 nt, Artificial Sequence
  LRRK2 RNA guide
guucgacucaaauguuuaua

SEQ ID NO: 40580 - RNA, 20 nt, Artificial Sequence
  LRRK2 RNA guide
uaaacauuugagucgaacag

SEQ ID NO: 40581 - RNA, 20 nt, Artificial Sequence
  LRRK2 RNA guide
uaacagucuguucgacucaa

SEQ ID NO: 40582 - RNA, 20 nt, Artificial Sequence
  LRRK2 RNA guide
uauaaacauuugagucgaac

SEQ ID NO: 40583 - RNA, 20 nt, Artificial Sequence
  LRRK2 RNA guide
ucgaacagacuguuacuuuc

SEQ ID NO: 40584 - RNA, 20 nt, Artificial Sequence
  LRRK2 RNA guide
ucgacucaaauguuuauaag

SEQ ID NO: 40585 - RNA, 20 nt, Artificial Sequence
  LRRK2 RNA guide
ucuguucgacucaaauguuu

SEQ ID NO: 40586 - RNA, 20 nt, Artificial Sequence
  LRRK2 RNA guide
ucuuauaaacauuugagucg

SEQ ID NO: 40587 - RNA, 20 nt, Artificial Sequence
  LRRK2 RNA guide
ugagucgaacagacuguuac

SEQ ID NO: 40588 - RNA, 20 nt, Artificial Sequence
  LRRK2 RNA guide
uguucgacucaaauguuuau

SEQ ID NO: 40589 - RNA, 20 nt, Artificial Sequence
  LRRK2 RNA guide
uugagucgaacagacuguua

SEQ ID NO: 40590 - RNA, 20 nt, Artificial Sequence
  LRRK2 RNA guide
uuugagucgaacagacuguu

SEQ ID NO: 40591 - RNA, 21 nt, Artificial Sequence
  LRRK2 RNA guide
aaacauuugagucgaacagac

SEQ ID NO: 40592 - RNA, 21 nt, Artificial Sequence
  LRRK2 RNA guide
aaaguaacagucuguucgacu

SEQ ID NO: 40593 - RNA, 21 nt, Artificial Sequence
  LRRK2 RNA guide
aacagucuguucgacucaaau

SEQ ID NO: 40594 - RNA, 21 nt, Artificial Sequence
  LRRK2 RNA guide
aacauuugagucgaacagacu

SEQ ID NO: 40595 - RNA, 21 nt, Artificial Sequence
  LRRK2 RNA guide
aaguaacagucuguucgacuc

SEQ ID NO: 40596 - RNA, 21 nt, Artificial Sequence
  LRRK2 RNA guide
acagucuguucgacucaaaug

SEQ ID NO: 40597 - RNA, 21 nt, Artificial Sequence
  LRRK2 RNA guide
acauuugagucgaacagacug

SEQ ID NO: 40598 - RNA, 21 nt, Artificial Sequence
  LRRK2 RNA guide
agaaaguaacagucuguucga

SEQ ID NO: 40599 - RNA, 21 nt, Artificial Sequence
  LRRK2 RNA guide
aguaacagucuguucgacuca

SEQ ID NO: 40600 - RNA, 21 nt, Artificial Sequence
  LRRK2 RNA guide
agucgaacagacuguuacuuu

SEQ ID NO: 40601 - RNA, 21 nt, Artificial Sequence
  LRRK2 RNA guide
agucuguucgacucaaauguu

SEQ ID NO: 40602 - RNA, 21 nt, Artificial Sequence
  LRRK2 RNA guide
auaaacauuugagucgaacag

SEQ ID NO: 40603 - RNA, 21 nt, Artificial Sequence
  LRRK2 RNA guide
auuugagucgaacagacuguu

SEQ ID NO: 40604 - RNA, 21 nt, Artificial Sequence
  LRRK2 RNA guide
cagucuguucgacucaaaugu

SEQ ID NO: 40605 - RNA, 21 nt, Artificial Sequence
  LRRK2 RNA guide
cauuugagucgaacagacugu

SEQ ID NO: 40606 - RNA, 21 nt, Artificial Sequence
  LRRK2 RNA guide
cuguucgacucaaauguuuau

SEQ ID NO: 40607 - RNA, 21 nt, Artificial Sequence
  LRRK2 RNA guide
gaaaguaacagucuguucgac

SEQ ID NO: 40608 - RNA, 21 nt, Artificial Sequence
  LRRK2 RNA guide
gagucgaacagacuguuacuu

SEQ ID NO: 40609 - RNA, 21 nt, Artificial Sequence
  LRRK2 RNA guide
guaacagucuguucgacucaa

SEQ ID NO: 40610 - RNA, 21 nt, Artificial Sequence
  LRRK2 RNA guide
gucgaacagacuguuacuuuc

SEQ ID NO: 40611 - RNA, 21 nt, Artificial Sequence
  LRRK2 RNA guide
gucuguucgacucaaauguuu

SEQ ID NO: 40612 - RNA, 21 nt, Artificial Sequence
  LRRK2 RNA guide
uaaacauuugagucgaacaga

SEQ ID NO: 40613 - RNA, 21 nt, Artificial Sequence
  LRRK2 RNA guide
uaacagucuguucgacucaaa

SEQ ID NO: 40614 - RNA, 21 nt, Artificial Sequence
  LRRK2 RNA guide
uagaaaguaacagucuguucg

SEQ ID NO: 40615 - RNA, 21 nt, Artificial Sequence
  LRRK2 RNA guide
ucgaacagacuguuacuuucu

SEQ ID NO: 40616 - RNA, 21 nt, Artificial Sequence
  LRRK2 RNA guide
ucuguucgacucaaauguuua

SEQ ID NO: 40617 - RNA, 21 nt, Artificial Sequence
  LRRK2 RNA guide
ugagucgaacagacuguuacu

SEQ ID NO: 40618 - RNA, 21 nt, Artificial Sequence
  LRRK2 RNA guide
uugagucgaacagacuguuac

SEQ ID NO: 40619 - RNA, 21 nt, Artificial Sequence
  LRRK2 RNA guide
uuugagucgaacagacuguua

SEQ ID NO: 40620 - RNA, 22 nt, Artificial Sequence
  LRRK2 RNA guide
aaacauuugagucgaacagacu

SEQ ID NO: 40621 - RNA, 22 nt, Artificial Sequence
  LRRK2 RNA guide
aaaguaacagucuguucgacuc

SEQ ID NO: 40622 - RNA, 22 nt, Artificial Sequence
  LRRK2 RNA guide
aacagucuguucgacucaaaug

SEQ ID NO: 40623 - RNA, 22 nt, Artificial Sequence
  LRRK2 RNA guide
aacauuugagucgaacagacug

SEQ ID NO: 40624 - RNA, 22 nt, Artificial Sequence
  LRRK2 RNA guide
aaguaacagucuguucgacuca

SEQ ID NO: 40625 - RNA, 22 nt, Artificial Sequence
  LRRK2 RNA guide
acagucuguucgacucaaaugu

SEQ ID NO: 40626 - RNA, 22 nt, Artificial Sequence
  LRRK2 RNA guide
acauuugagucgaacagacugu

SEQ ID NO: 40627 - RNA, 22 nt, Artificial Sequence
  LRRK2 RNA guide
agaaaguaacagucuguucgac

SEQ ID NO: 40628 - RNA, 22 nt, Artificial Sequence
  LRRK2 RNA guide
aguaacagucuguucgacucaa

SEQ ID NO: 40629 - RNA, 22 nt, Artificial Sequence
  LRRK2 RNA guide
agucgaacagacuguuacuuuc

SEQ ID NO: 40630 - RNA, 22 nt, Artificial Sequence
  LRRK2 RNA guide
agucuguucgacucaaauguuu

SEQ ID NO: 40631 - RNA, 22 nt, Artificial Sequence
  LRRK2 RNA guide
auaaacauuugagucgaacaga

SEQ ID NO: 40632 - RNA, 22 nt, Artificial Sequence
  LRRK2 RNA guide
auuugagucgaacagacuguua

SEQ ID NO: 40633 - RNA, 22 nt, Artificial Sequence
  LRRK2 RNA guide
cagucuguucgacucaaauguu

SEQ ID NO: 40634 - RNA, 22 nt, Artificial Sequence
  LRRK2 RNA guide
cauuugagucgaacagacuguu

SEQ ID NO: 40635 - RNA, 22 nt, Artificial Sequence
  LRRK2 RNA guide
cuagaaaguaacagucuguucg

SEQ ID NO: 40636 - RNA, 22 nt, Artificial Sequence
  LRRK2 RNA guide
cuguucgacucaaauguuuaua

SEQ ID NO: 40637 - RNA, 22 nt, Artificial Sequence
  LRRK2 RNA guide
cuuauaaacauuugagucgaac

SEQ ID NO: 40638 - RNA, 22 nt, Artificial Sequence
  LRRK2 RNA guide
gaaaguaacagucuguucgacu

SEQ ID NO: 40639 - RNA, 22 nt, Artificial Sequence
  LRRK2 RNA guide
gagucgaacagacuguuacuuu

SEQ ID NO: 40640 - RNA, 22 nt, Artificial Sequence
  LRRK2 RNA guide
guaacagucuguucgacucaaa

SEQ ID NO: 40641 - RNA, 22 nt, Artificial Sequence
  LRRK2 RNA guide
gucgaacagacuguuacuuucu

SEQ ID NO: 40642 - RNA, 22 nt, Artificial Sequence
  LRRK2 RNA guide
gucuguucgacucaaauguuua

SEQ ID NO: 40643 - RNA, 22 nt, Artificial Sequence
  LRRK2 RNA guide
guucgacucaaauguuuauaag

SEQ ID NO: 40644 - RNA, 22 nt, Artificial Sequence
  LRRK2 RNA guide
uaaacauuugagucgaacagac

SEQ ID NO: 40645 - RNA, 22 nt, Artificial Sequence
  LRRK2 RNA guide
uaacagucuguucgacucaaau

SEQ ID NO: 40646 - RNA, 22 nt, Artificial Sequence
  LRRK2 RNA guide
uagaaaguaacagucuguucga

SEQ ID NO: 40647 - RNA, 22 nt, Artificial Sequence
  LRRK2 RNA guide
uauaaacauuugagucgaacag

SEQ ID NO: 40648 - RNA, 22 nt, Artificial Sequence
  LRRK2 RNA guide
ucgaacagacuguuacuuucua

SEQ ID NO: 40649 - RNA, 22 nt, Artificial Sequence
  LRRK2 RNA guide
ucuguucgacucaaauguuuau

SEQ ID NO: 40650 - RNA, 22 nt, Artificial Sequence
  LRRK2 RNA guide
ugagucgaacagacuguuacuu

SEQ ID NO: 40651 - RNA, 22 nt, Artificial Sequence
  LRRK2 RNA guide
uugagucgaacagacuguuacu

SEQ ID NO: 40652 - RNA, 22 nt, Artificial Sequence
  LRRK2 RNA guide
uuugagucgaacagacuguuac

SEQ ID NO: 40653 - RNA, 20 nt, Artificial Sequence
  LRRK2 RNA guide
aaacugguccuagcagcuuu

SEQ ID NO: 40654 - RNA, 20 nt, Artificial Sequence
  LRRK2 RNA guide
aacaggguauguugaauaua

SEQ ID NO: 40655 - RNA, 20 nt, Artificial Sequence
  LRRK2 RNA guide
aacauacccuguucaaagcu

SEQ ID NO: 40656 - RNA, 20 nt, Artificial Sequence
  LRRK2 RNA guide
aacuuauauucaacauaccc

SEQ ID NO: 40657 - RNA, 20 nt, Artificial Sequence
  LRRK2 RNA guide
acaggguauguugaauauaa

SEQ ID NO: 40658 - RNA, 20 nt, Artificial Sequence
  LRRK2 RNA guide
acauacccuguucaaagcug

SEQ ID NO: 40659 - RNA, 20 nt, Artificial Sequence
  LRRK2 RNA guide
acccuguucaaagcugcuag

SEQ ID NO: 40660 - RNA, 20 nt, Artificial Sequence
  LRRK2 RNA guide
acuuauauucaacauacccu

SEQ ID NO: 40661 - RNA, 20 nt, Artificial Sequence
  LRRK2 RNA guide
agcuuugaacaggguauguu

SEQ ID NO: 40662 - RNA, 20 nt, Artificial Sequence
  LRRK2 RNA guide
auacccuguucaaagcugcu

SEQ ID NO: 40663 - RNA, 20 nt, Artificial Sequence
  LRRK2 RNA guide
auauucaacauacccuguuc

SEQ ID NO: 40664 - RNA, 20 nt, Artificial Sequence
  LRRK2 RNA guide
auucaacauacccuguucaa

SEQ ID NO: 40665 - RNA, 20 nt, Artificial Sequence
  LRRK2 RNA guide
caaacugguccuagcagcuu

SEQ ID NO: 40666 - RNA, 20 nt, Artificial Sequence
  LRRK2 RNA guide
caacauacccuguucaaagc

SEQ ID NO: 40667 - RNA, 20 nt, Artificial Sequence
  LRRK2 RNA guide
cagcuuugaacaggguaugu

SEQ ID NO: 40668 - RNA, 20 nt, Artificial Sequence
  LRRK2 RNA guide
cauacccuguucaaagcugc

SEQ ID NO: 40669 - RNA, 20 nt, Artificial Sequence
  LRRK2 RNA guide
cccuguucaaagcugcuagg

SEQ ID NO: 40670 - RNA, 20 nt, Artificial Sequence
  LRRK2 RNA guide
ccuguucaaagcugcuagga

SEQ ID NO: 40671 - RNA, 20 nt, Artificial Sequence
  LRRK2 RNA guide
cuguucaaagcugcuaggac

SEQ ID NO: 40672 - RNA, 20 nt, Artificial Sequence
  LRRK2 RNA guide
cuuauauucaacauacccug

SEQ ID NO: 40673 - RNA, 20 nt, Artificial Sequence
  LRRK2 RNA guide
cuuugaacaggguauguuga

SEQ ID NO: 40674 - RNA, 20 nt, Artificial Sequence
  LRRK2 RNA guide
gaacaggguauguugaauau

SEQ ID NO: 40675 - RNA, 20 nt, Artificial Sequence
  LRRK2 RNA guide
gcuuugaacaggguauguug

SEQ ID NO: 40676 - RNA, 20 nt, Artificial Sequence
  LRRK2 RNA guide
guccuagcagcuuugaacag

SEQ ID NO: 40677 - RNA, 20 nt, Artificial Sequence
  LRRK2 RNA guide
uacccuguucaaagcugcua

SEQ ID NO: 40678 - RNA, 20 nt, Artificial Sequence
  LRRK2 RNA guide
uauucaacauacccuguuca

SEQ ID NO: 40679 - RNA, 20 nt, Artificial Sequence
  LRRK2 RNA guide
ucaacauacccuguucaaag

SEQ ID NO: 40680 - RNA, 20 nt, Artificial Sequence
  LRRK2 RNA guide
uccuagcagcuuugaacagg

SEQ ID NO: 40681 - RNA, 20 nt, Artificial Sequence
  LRRK2 RNA guide
ugaacaggguauguugaaua

SEQ ID NO: 40682 - RNA, 20 nt, Artificial Sequence
  LRRK2 RNA guide
uuauauucaacauacccugu

SEQ ID NO: 40683 - RNA, 20 nt, Artificial Sequence
  LRRK2 RNA guide
uucaacauacccuguucaaa

SEQ ID NO: 40684 - RNA, 20 nt, Artificial Sequence
  LRRK2 RNA guide
uugaacaggguauguugaau

SEQ ID NO: 40685 - RNA, 20 nt, Artificial Sequence
  LRRK2 RNA guide
uuugaacaggguauguugaa

SEQ ID NO: 40686 - RNA, 21 nt, Artificial Sequence
  LRRK2 RNA guide
aacauacccuguucaaagcug

SEQ ID NO: 40687 - RNA, 21 nt, Artificial Sequence
  LRRK2 RNA guide
acaaacugguccuagcagcuu

SEQ ID NO: 40688 - RNA, 21 nt, Artificial Sequence
  LRRK2 RNA guide
acaggguauguugaauauaag

SEQ ID NO: 40689 - RNA, 21 nt, Artificial Sequence
  LRRK2 RNA guide
acauacccuguucaaagcugc

SEQ ID NO: 40690 - RNA, 21 nt, Artificial Sequence
  LRRK2 RNA guide
acccuguucaaagcugcuagg

SEQ ID NO: 40691 - RNA, 21 nt, Artificial Sequence
  LRRK2 RNA guide
acuuauauucaacauacccug

SEQ ID NO: 40692 - RNA, 21 nt, Artificial Sequence
  LRRK2 RNA guide
agcuuugaacaggguauguug

SEQ ID NO: 40693 - RNA, 21 nt, Artificial Sequence
  LRRK2 RNA guide
auacccuguucaaagcugcua

SEQ ID NO: 40694 - RNA, 21 nt, Artificial Sequence
  LRRK2 RNA guide
auauucaacauacccuguuca

SEQ ID NO: 40695 - RNA, 21 nt, Artificial Sequence
  LRRK2 RNA guide
auucaacauacccuguucaaa

SEQ ID NO: 40696 - RNA, 21 nt, Artificial Sequence
  LRRK2 RNA guide
caaacugguccuagcagcuuu

SEQ ID NO: 40697 - RNA, 21 nt, Artificial Sequence
  LRRK2 RNA guide
caacauacccuguucaaagcu

SEQ ID NO: 40698 - RNA, 21 nt, Artificial Sequence
  LRRK2 RNA guide
cagcuuugaacaggguauguu

SEQ ID NO: 40699 - RNA, 21 nt, Artificial Sequence
  LRRK2 RNA guide
cauacccuguucaaagcugcu

SEQ ID NO: 40700 - RNA, 21 nt, Artificial Sequence
  LRRK2 RNA guide
cccuguucaaagcugcuagga

SEQ ID NO: 40701 - RNA, 21 nt, Artificial Sequence
  LRRK2 RNA guide
ccuguucaaagcugcuaggac

SEQ ID NO: 40702 - RNA, 21 nt, Artificial Sequence
  LRRK2 RNA guide
cuuauauucaacauacccugu

SEQ ID NO: 40703 - RNA, 21 nt, Artificial Sequence
  LRRK2 RNA guide
cuuugaacaggguauguugaa

SEQ ID NO: 40704 - RNA, 21 nt, Artificial Sequence
  LRRK2 RNA guide
gaacaggguauguugaauaua

SEQ ID NO: 40705 - RNA, 21 nt, Artificial Sequence
  LRRK2 RNA guide
gcagcuuugaacaggguaugu

SEQ ID NO: 40706 - RNA, 21 nt, Artificial Sequence
  LRRK2 RNA guide
gcuuugaacaggguauguuga

SEQ ID NO: 40707 - RNA, 21 nt, Artificial Sequence
  LRRK2 RNA guide
gguccuagcagcuuugaacag

SEQ ID NO: 40708 - RNA, 21 nt, Artificial Sequence
  LRRK2 RNA guide
guccuagcagcuuugaacagg

SEQ ID NO: 40709 - RNA, 21 nt, Artificial Sequence
  LRRK2 RNA guide
uacccuguucaaagcugcuag

SEQ ID NO: 40710 - RNA, 21 nt, Artificial Sequence
  LRRK2 RNA guide
uauauucaacauacccuguuc

SEQ ID NO: 40711 - RNA, 21 nt, Artificial Sequence
  LRRK2 RNA guide
uauucaacauacccuguucaa

SEQ ID NO: 40712 - RNA, 21 nt, Artificial Sequence
  LRRK2 RNA guide
ucaacauacccuguucaaagc

SEQ ID NO: 40713 - RNA, 21 nt, Artificial Sequence
  LRRK2 RNA guide
ugaacaggguauguugaauau

SEQ ID NO: 40714 - RNA, 21 nt, Artificial Sequence
  LRRK2 RNA guide
uucaacauacccuguucaaag

SEQ ID NO: 40715 - RNA, 21 nt, Artificial Sequence
  LRRK2 RNA guide
uugaacaggguauguugaaua

SEQ ID NO: 40716 - RNA, 21 nt, Artificial Sequence
  LRRK2 RNA guide
uuugaacaggguauguugaau

SEQ ID NO: 40717 - RNA, 22 nt, Artificial Sequence
  LRRK2 RNA guide
aacaggguauguugaauauaag

SEQ ID NO: 40718 - RNA, 22 nt, Artificial Sequence
  LRRK2 RNA guide
aacauacccuguucaaagcugc

SEQ ID NO: 40719 - RNA, 22 nt, Artificial Sequence
  LRRK2 RNA guide
aacuuauauucaacauacccug

SEQ ID NO: 40720 - RNA, 22 nt, Artificial Sequence
  LRRK2 RNA guide
acaaacugguccuagcagcuuu

SEQ ID NO: 40721 - RNA, 22 nt, Artificial Sequence
  LRRK2 RNA guide
acaggguauguugaauauaagu

SEQ ID NO: 40722 - RNA, 22 nt, Artificial Sequence
  LRRK2 RNA guide
acauacccuguucaaagcugcu

SEQ ID NO: 40723 - RNA, 22 nt, Artificial Sequence
  LRRK2 RNA guide
acccuguucaaagcugcuagga

SEQ ID NO: 40724 - RNA, 22 nt, Artificial Sequence
  LRRK2 RNA guide
acuuauauucaacauacccugu

SEQ ID NO: 40725 - RNA, 22 nt, Artificial Sequence
  LRRK2 RNA guide
agcagcuuugaacaggguaugu

SEQ ID NO: 40726 - RNA, 22 nt, Artificial Sequence
  LRRK2 RNA guide
agcuuugaacaggguauguuga

SEQ ID NO: 40727 - RNA, 22 nt, Artificial Sequence
  LRRK2 RNA guide
auacccuguucaaagcugcuag

SEQ ID NO: 40728 - RNA, 22 nt, Artificial Sequence
  LRRK2 RNA guide
auauucaacauacccuguucaa

SEQ ID NO: 40729 - RNA, 22 nt, Artificial Sequence
  LRRK2 RNA guide
auucaacauacccuguucaaag

SEQ ID NO: 40730 - RNA, 22 nt, Artificial Sequence
  LRRK2 RNA guide
caacauacccuguucaaagcug

SEQ ID NO: 40731 - RNA, 22 nt, Artificial Sequence
  LRRK2 RNA guide
cacaaacugguccuagcagcuu

SEQ ID NO: 40732 - RNA, 22 nt, Artificial Sequence
  LRRK2 RNA guide
cagcuuugaacaggguauguug

SEQ ID NO: 40733 - RNA, 22 nt, Artificial Sequence
  LRRK2 RNA guide
cauacccuguucaaagcugcua

SEQ ID NO: 40734 - RNA, 22 nt, Artificial Sequence
  LRRK2 RNA guide
cccuguucaaagcugcuaggac

SEQ ID NO: 40735 - RNA, 22 nt, Artificial Sequence
  LRRK2 RNA guide
cuuauauucaacauacccuguu

SEQ ID NO: 40736 - RNA, 22 nt, Artificial Sequence
  LRRK2 RNA guide
cuuugaacaggguauguugaau

SEQ ID NO: 40737 - RNA, 22 nt, Artificial Sequence
  LRRK2 RNA guide
gaacaggguauguugaauauaa

SEQ ID NO: 40738 - RNA, 22 nt, Artificial Sequence
  LRRK2 RNA guide
gcagcuuugaacaggguauguu

SEQ ID NO: 40739 - RNA, 22 nt, Artificial Sequence
  LRRK2 RNA guide
gcuuugaacaggguauguugaa

SEQ ID NO: 40740 - RNA, 22 nt, Artificial Sequence
  LRRK2 RNA guide
gguccuagcagcuuugaacagg

SEQ ID NO: 40741 - RNA, 22 nt, Artificial Sequence
  LRRK2 RNA guide
uacccuguucaaagcugcuagg

SEQ ID NO: 40742 - RNA, 22 nt, Artificial Sequence
  LRRK2 RNA guide
uauauucaacauacccuguuca

SEQ ID NO: 40743 - RNA, 22 nt, Artificial Sequence
  LRRK2 RNA guide
uauucaacauacccuguucaaa

SEQ ID NO: 40744 - RNA, 22 nt, Artificial Sequence
  LRRK2 RNA guide
ucaacauacccuguucaaagcu

SEQ ID NO: 40745 - RNA, 22 nt, Artificial Sequence
  LRRK2 RNA guide
ugaacaggguauguugaauaua

SEQ ID NO: 40746 - RNA, 22 nt, Artificial Sequence
  LRRK2 RNA guide
ugguccuagcagcuuugaacag

SEQ ID NO: 40747 - RNA, 22 nt, Artificial Sequence
  LRRK2 RNA guide
uuauauucaacauacccuguuc

SEQ ID NO: 40748 - RNA, 22 nt, Artificial Sequence
  LRRK2 RNA guide
uucaacauacccuguucaaagc

SEQ ID NO: 40749 - RNA, 22 nt, Artificial Sequence
  LRRK2 RNA guide
uugaacaggguauguugaauau

SEQ ID NO: 40750 - RNA, 22 nt, Artificial Sequence
  LRRK2 RNA guide
uuugaacaggguauguugaaua

SEQ ID NO: 40751 - RNA, 20 nt, Artificial Sequence
  LRRK2 RNA guide
aacauacccucuucaaagcu

SEQ ID NO: 40752 - RNA, 20 nt, Artificial Sequence
  LRRK2 RNA guide
aagaggguauguugaauaua

SEQ ID NO: 40753 - RNA, 20 nt, Artificial Sequence
  LRRK2 RNA guide
acauacccucuucaaagcug

SEQ ID NO: 40754 - RNA, 20 nt, Artificial Sequence
  LRRK2 RNA guide
acccucuucaaagcugcuag

SEQ ID NO: 40755 - RNA, 20 nt, Artificial Sequence
  LRRK2 RNA guide
agaggguauguugaauauaa

SEQ ID NO: 40756 - RNA, 20 nt, Artificial Sequence
  LRRK2 RNA guide
agcagcuuugaagaggguau

SEQ ID NO: 40757 - RNA, 20 nt, Artificial Sequence
  LRRK2 RNA guide
agcuuugaagaggguauguu

SEQ ID NO: 40758 - RNA, 20 nt, Artificial Sequence
  LRRK2 RNA guide
auacccucuucaaagcugcu

SEQ ID NO: 40759 - RNA, 20 nt, Artificial Sequence
  LRRK2 RNA guide
auauucaacauacccucuuc

SEQ ID NO: 40760 - RNA, 20 nt, Artificial Sequence
  LRRK2 RNA guide
auucaacauacccucuucaa

SEQ ID NO: 40761 - RNA, 20 nt, Artificial Sequence
  LRRK2 RNA guide
caacauacccucuucaaagc

SEQ ID NO: 40762 - RNA, 20 nt, Artificial Sequence
  LRRK2 RNA guide
cagcuuugaagaggguaugu

SEQ ID NO: 40763 - RNA, 20 nt, Artificial Sequence
  LRRK2 RNA guide
cauacccucuucaaagcugc

SEQ ID NO: 40764 - RNA, 20 nt, Artificial Sequence
  LRRK2 RNA guide
cccucuucaaagcugcuagg

SEQ ID NO: 40765 - RNA, 20 nt, Artificial Sequence
  LRRK2 RNA guide
ccuagcagcuuugaagaggg

SEQ ID NO: 40766 - RNA, 20 nt, Artificial Sequence
  LRRK2 RNA guide
ccucuucaaagcugcuagga

SEQ ID NO: 40767 - RNA, 20 nt, Artificial Sequence
  LRRK2 RNA guide
cuagcagcuuugaagagggu

SEQ ID NO: 40768 - RNA, 20 nt, Artificial Sequence
  LRRK2 RNA guide
cucuucaaagcugcuaggac

SEQ ID NO: 40769 - RNA, 20 nt, Artificial Sequence
  LRRK2 RNA guide
cuuauauucaacauacccuc

SEQ ID NO: 40770 - RNA, 20 nt, Artificial Sequence
  LRRK2 RNA guide
cuuugaagaggguauguuga

SEQ ID NO: 40771 - RNA, 20 nt, Artificial Sequence
  LRRK2 RNA guide
gaagaggguauguugaauau

SEQ ID NO: 40772 - RNA, 20 nt, Artificial Sequence
  LRRK2 RNA guide
gcagcuuugaagaggguaug

SEQ ID NO: 40773 - RNA, 20 nt, Artificial Sequence
  LRRK2 RNA guide
gcuuugaagaggguauguug

SEQ ID NO: 40774 - RNA, 20 nt, Artificial Sequence
  LRRK2 RNA guide
gguccuagcagcuuugaaga

SEQ ID NO: 40775 - RNA, 20 nt, Artificial Sequence
  LRRK2 RNA guide
guccuagcagcuuugaagag

SEQ ID NO: 40776 - RNA, 20 nt, Artificial Sequence
  LRRK2 RNA guide
uacccucuucaaagcugcua

SEQ ID NO: 40777 - RNA, 20 nt, Artificial Sequence
  LRRK2 RNA guide
uagcagcuuugaagagggua

SEQ ID NO: 40778 - RNA, 20 nt, Artificial Sequence
  LRRK2 RNA guide
uauauucaacauacccucuu

SEQ ID NO: 40779 - RNA, 20 nt, Artificial Sequence
  LRRK2 RNA guide
uauucaacauacccucuuca

SEQ ID NO: 40780 - RNA, 20 nt, Artificial Sequence
  LRRK2 RNA guide
ucaacauacccucuucaaag

SEQ ID NO: 40781 - RNA, 20 nt, Artificial Sequence
  LRRK2 RNA guide
uccuagcagcuuugaagagg

SEQ ID NO: 40782 - RNA, 20 nt, Artificial Sequence
  LRRK2 RNA guide
ucuucaaagcugcuaggacc

SEQ ID NO: 40783 - RNA, 20 nt, Artificial Sequence
  LRRK2 RNA guide
ugaagaggguauguugaaua

SEQ ID NO: 40784 - RNA, 20 nt, Artificial Sequence
  LRRK2 RNA guide
ugguccuagcagcuuugaag

SEQ ID NO: 40785 - RNA, 20 nt, Artificial Sequence
  LRRK2 RNA guide
uuauauucaacauacccucu

SEQ ID NO: 40786 - RNA, 20 nt, Artificial Sequence
  LRRK2 RNA guide
uucaacauacccucuucaaa

SEQ ID NO: 40787 - RNA, 20 nt, Artificial Sequence
  LRRK2 RNA guide
uugaagaggguauguugaau

SEQ ID NO: 40788 - RNA, 20 nt, Artificial Sequence
  LRRK2 RNA guide
uuugaagaggguauguugaa

SEQ ID NO: 40789 - RNA, 21 nt, Artificial Sequence
  LRRK2 RNA guide
aacauacccucuucaaagcug

SEQ ID NO: 40790 - RNA, 21 nt, Artificial Sequence
  LRRK2 RNA guide
acauacccucuucaaagcugc

SEQ ID NO: 40791 - RNA, 21 nt, Artificial Sequence
  LRRK2 RNA guide
acccucuucaaagcugcuagg

SEQ ID NO: 40792 - RNA, 21 nt, Artificial Sequence
  LRRK2 RNA guide
acuuauauucaacauacccuc

SEQ ID NO: 40793 - RNA, 21 nt, Artificial Sequence
  LRRK2 RNA guide
agaggguauguugaauauaag

SEQ ID NO: 40794 - RNA, 21 nt, Artificial Sequence
  LRRK2 RNA guide
agcagcuuugaagaggguaug

SEQ ID NO: 40795 - RNA, 21 nt, Artificial Sequence
  LRRK2 RNA guide
agcuuugaagaggguauguug

SEQ ID NO: 40796 - RNA, 21 nt, Artificial Sequence
  LRRK2 RNA guide
auacccucuucaaagcugcua

SEQ ID NO: 40797 - RNA, 21 nt, Artificial Sequence
  LRRK2 RNA guide
auauucaacauacccucuuca

SEQ ID NO: 40798 - RNA, 21 nt, Artificial Sequence
  LRRK2 RNA guide
auucaacauacccucuucaaa

SEQ ID NO: 40799 - RNA, 21 nt, Artificial Sequence
  LRRK2 RNA guide
caacauacccucuucaaagcu

SEQ ID NO: 40800 - RNA, 21 nt, Artificial Sequence
  LRRK2 RNA guide
cagcuuugaagaggguauguu

SEQ ID NO: 40801 - RNA, 21 nt, Artificial Sequence
  LRRK2 RNA guide
cauacccucuucaaagcugcu

SEQ ID NO: 40802 - RNA, 21 nt, Artificial Sequence
  LRRK2 RNA guide
cccucuucaaagcugcuagga

SEQ ID NO: 40803 - RNA, 21 nt, Artificial Sequence
  LRRK2 RNA guide
ccuagcagcuuugaagagggu

SEQ ID NO: 40804 - RNA, 21 nt, Artificial Sequence
  LRRK2 RNA guide
ccucuucaaagcugcuaggac

SEQ ID NO: 40805 - RNA, 21 nt, Artificial Sequence
  LRRK2 RNA guide
cuagcagcuuugaagagggua

SEQ ID NO: 40806 - RNA, 21 nt, Artificial Sequence
  LRRK2 RNA guide
cucuucaaagcugcuaggacc

SEQ ID NO: 40807 - RNA, 21 nt, Artificial Sequence
  LRRK2 RNA guide
cugguccuagcagcuuugaag

SEQ ID NO: 40808 - RNA, 21 nt, Artificial Sequence
  LRRK2 RNA guide
cuuauauucaacauacccucu

SEQ ID NO: 40809 - RNA, 21 nt, Artificial Sequence
  LRRK2 RNA guide
cuuugaagaggguauguugaa

SEQ ID NO: 40810 - RNA, 21 nt, Artificial Sequence
  LRRK2 RNA guide
gaagaggguauguugaauaua

SEQ ID NO: 40811 - RNA, 21 nt, Artificial Sequence
  LRRK2 RNA guide
gcagcuuugaagaggguaugu

SEQ ID NO: 40812 - RNA, 21 nt, Artificial Sequence
  LRRK2 RNA guide
gcuuugaagaggguauguuga

SEQ ID NO: 40813 - RNA, 21 nt, Artificial Sequence
  LRRK2 RNA guide
gguccuagcagcuuugaagag

SEQ ID NO: 40814 - RNA, 21 nt, Artificial Sequence
  LRRK2 RNA guide
guccuagcagcuuugaagagg

SEQ ID NO: 40815 - RNA, 21 nt, Artificial Sequence
  LRRK2 RNA guide
uacccucuucaaagcugcuag

SEQ ID NO: 40816 - RNA, 21 nt, Artificial Sequence
  LRRK2 RNA guide
uagcagcuuugaagaggguau

SEQ ID NO: 40817 - RNA, 21 nt, Artificial Sequence
  LRRK2 RNA guide
uauauucaacauacccucuuc

SEQ ID NO: 40818 - RNA, 21 nt, Artificial Sequence
  LRRK2 RNA guide
uauucaacauacccucuucaa

SEQ ID NO: 40819 - RNA, 21 nt, Artificial Sequence
  LRRK2 RNA guide
ucaacauacccucuucaaagc

SEQ ID NO: 40820 - RNA, 21 nt, Artificial Sequence
  LRRK2 RNA guide
uccuagcagcuuugaagaggg

SEQ ID NO: 40821 - RNA, 21 nt, Artificial Sequence
  LRRK2 RNA guide
ucuucaaagcugcuaggacca

SEQ ID NO: 40822 - RNA, 21 nt, Artificial Sequence
  LRRK2 RNA guide
ugaagaggguauguugaauau

SEQ ID NO: 40823 - RNA, 21 nt, Artificial Sequence
  LRRK2 RNA guide
ugguccuagcagcuuugaaga

SEQ ID NO: 40824 - RNA, 21 nt, Artificial Sequence
  LRRK2 RNA guide
uucaacauacccucuucaaag

SEQ ID NO: 40825 - RNA, 21 nt, Artificial Sequence
  LRRK2 RNA guide
uugaagaggguauguugaaua

SEQ ID NO: 40826 - RNA, 21 nt, Artificial Sequence
  LRRK2 RNA guide
uuugaagaggguauguugaau

SEQ ID NO: 40827 - RNA, 22 nt, Artificial Sequence
  LRRK2 RNA guide
aacauacccucuucaaagcugc

SEQ ID NO: 40828 - RNA, 22 nt, Artificial Sequence
  LRRK2 RNA guide
aacuuauauucaacauacccuc

SEQ ID NO: 40829 - RNA, 22 nt, Artificial Sequence
  LRRK2 RNA guide
aagaggguauguugaauauaag

SEQ ID NO: 40830 - RNA, 22 nt, Artificial Sequence
  LRRK2 RNA guide
acauacccucuucaaagcugcu

SEQ ID NO: 40831 - RNA, 22 nt, Artificial Sequence
  LRRK2 RNA guide
acccucuucaaagcugcuagga

SEQ ID NO: 40832 - RNA, 22 nt, Artificial Sequence
  LRRK2 RNA guide
acugguccuagcagcuuugaag

SEQ ID NO: 40833 - RNA, 22 nt, Artificial Sequence
  LRRK2 RNA guide
acuuauauucaacauacccucu

SEQ ID NO: 40834 - RNA, 22 nt, Artificial Sequence
  LRRK2 RNA guide
agaggguauguugaauauaagu

SEQ ID NO: 40835 - RNA, 22 nt, Artificial Sequence
  LRRK2 RNA guide
agcagcuuugaagaggguaugu

SEQ ID NO: 40836 - RNA, 22 nt, Artificial Sequence
  LRRK2 RNA guide
agcuuugaagaggguauguuga

SEQ ID NO: 40837 - RNA, 22 nt, Artificial Sequence
  LRRK2 RNA guide
auacccucuucaaagcugcuag

SEQ ID NO: 40838 - RNA, 22 nt, Artificial Sequence
  LRRK2 RNA guide
auauucaacauacccucuucaa

SEQ ID NO: 40839 - RNA, 22 nt, Artificial Sequence
  LRRK2 RNA guide
auucaacauacccucuucaaag

SEQ ID NO: 40840 - RNA, 22 nt, Artificial Sequence
  LRRK2 RNA guide
caacauacccucuucaaagcug

SEQ ID NO: 40841 - RNA, 22 nt, Artificial Sequence
  LRRK2 RNA guide
cagcuuugaagaggguauguug

SEQ ID NO: 40842 - RNA, 22 nt, Artificial Sequence
  LRRK2 RNA guide
cauacccucuucaaagcugcua

SEQ ID NO: 40843 - RNA, 22 nt, Artificial Sequence
  LRRK2 RNA guide
cccucuucaaagcugcuaggac

SEQ ID NO: 40844 - RNA, 22 nt, Artificial Sequence
  LRRK2 RNA guide
ccuagcagcuuugaagagggua

SEQ ID NO: 40845 - RNA, 22 nt, Artificial Sequence
  LRRK2 RNA guide
ccucuucaaagcugcuaggacc

SEQ ID NO: 40846 - RNA, 22 nt, Artificial Sequence
  LRRK2 RNA guide
cuagcagcuuugaagaggguau

SEQ ID NO: 40847 - RNA, 22 nt, Artificial Sequence
  LRRK2 RNA guide
cucuucaaagcugcuaggacca

SEQ ID NO: 40848 - RNA, 22 nt, Artificial Sequence
  LRRK2 RNA guide
cugguccuagcagcuuugaaga

SEQ ID NO: 40849 - RNA, 22 nt, Artificial Sequence
  LRRK2 RNA guide
cuuauauucaacauacccucuu

SEQ ID NO: 40850 - RNA, 22 nt, Artificial Sequence
  LRRK2 RNA guide
cuuugaagaggguauguugaau

SEQ ID NO: 40851 - RNA, 22 nt, Artificial Sequence
  LRRK2 RNA guide
gaagaggguauguugaauauaa

SEQ ID NO: 40852 - RNA, 22 nt, Artificial Sequence
  LRRK2 RNA guide
gcagcuuugaagaggguauguu

SEQ ID NO: 40853 - RNA, 22 nt, Artificial Sequence
  LRRK2 RNA guide
gcuuugaagaggguauguugaa

SEQ ID NO: 40854 - RNA, 22 nt, Artificial Sequence
  LRRK2 RNA guide
gguccuagcagcuuugaagagg

SEQ ID NO: 40855 - RNA, 22 nt, Artificial Sequence
  LRRK2 RNA guide
guccuagcagcuuugaagaggg

SEQ ID NO: 40856 - RNA, 22 nt, Artificial Sequence
  LRRK2 RNA guide
uacccucuucaaagcugcuagg

SEQ ID NO: 40857 - RNA, 22 nt, Artificial Sequence
  LRRK2 RNA guide
uagcagcuuugaagaggguaug

SEQ ID NO: 40858 - RNA, 22 nt, Artificial Sequence
  LRRK2 RNA guide
uauauucaacauacccucuuca

SEQ ID NO: 40859 - RNA, 22 nt, Artificial Sequence
  LRRK2 RNA guide
uauucaacauacccucuucaaa

SEQ ID NO: 40860 - RNA, 22 nt, Artificial Sequence
  LRRK2 RNA guide
ucaacauacccucuucaaagcu

SEQ ID NO: 40861 - RNA, 22 nt, Artificial Sequence
  LRRK2 RNA guide
uccuagcagcuuugaagagggu

SEQ ID NO: 40862 - RNA, 22 nt, Artificial Sequence
  LRRK2 RNA guide
ucuucaaagcugcuaggaccag

SEQ ID NO: 40863 - RNA, 22 nt, Artificial Sequence
  LRRK2 RNA guide
ugaagaggguauguugaauaua

SEQ ID NO: 40864 - RNA, 22 nt, Artificial Sequence
  LRRK2 RNA guide
ugguccuagcagcuuugaagag

SEQ ID NO: 40865 - RNA, 22 nt, Artificial Sequence
  LRRK2 RNA guide
uuauauucaacauacccucuuc

SEQ ID NO: 40866 - RNA, 22 nt, Artificial Sequence
  LRRK2 RNA guide
uucaacauacccucuucaaagc

SEQ ID NO: 40867 - RNA, 22 nt, Artificial Sequence
  LRRK2 RNA guide
uugaagaggguauguugaauau

SEQ ID NO: 40868 - RNA, 22 nt, Artificial Sequence
  LRRK2 RNA guide
uuugaagaggguauguugaaua

SEQ ID NO: 40869 - RNA, 20 nt, Artificial Sequence
  LRRK2 RNA guide
aaaaagcgccccuaguucuc

SEQ ID NO: 40870 - RNA, 20 nt, Artificial Sequence
  LRRK2 RNA guide
aaaacuuagacugaaaaagc

SEQ ID NO: 40871 - RNA, 20 nt, Artificial Sequence
  LRRK2 RNA guide
aaaagcgccccuaguucucc

SEQ ID NO: 40872 - RNA, 20 nt, Artificial Sequence
  LRRK2 RNA guide
aaacuuagacugaaaaagcg

SEQ ID NO: 40873 - RNA, 20 nt, Artificial Sequence
  LRRK2 RNA guide
aaagcgccccuaguucucca

SEQ ID NO: 40874 - RNA, 20 nt, Artificial Sequence
  LRRK2 RNA guide
aaauuuggagaacuaggggc

SEQ ID NO: 40875 - RNA, 20 nt, Artificial Sequence
  LRRK2 RNA guide
aacuaggggcgcuuuuucag

SEQ ID NO: 40876 - RNA, 20 nt, Artificial Sequence
  LRRK2 RNA guide
aacuuagacugaaaaagcgc

SEQ ID NO: 40877 - RNA, 20 nt, Artificial Sequence
  LRRK2 RNA guide
aagcgccccuaguucuccaa

SEQ ID NO: 40878 - RNA, 20 nt, Artificial Sequence
  LRRK2 RNA guide
aauuuggagaacuaggggcg

SEQ ID NO: 40879 - RNA, 20 nt, Artificial Sequence
  LRRK2 RNA guide
acagaaaacuuagacugaaa

SEQ ID NO: 40880 - RNA, 20 nt, Artificial Sequence
  LRRK2 RNA guide
acuaggggcgcuuuuucagu

SEQ ID NO: 40881 - RNA, 20 nt, Artificial Sequence
  LRRK2 RNA guide
acugaaaaagcgccccuagu

SEQ ID NO: 40882 - RNA, 20 nt, Artificial Sequence
  LRRK2 RNA guide
acuuagacugaaaaagcgcc

SEQ ID NO: 40883 - RNA, 20 nt, Artificial Sequence
  LRRK2 RNA guide
agaacuaggggcgcuuuuuc

SEQ ID NO: 40884 - RNA, 20 nt, Artificial Sequence
  LRRK2 RNA guide
agacugaaaaagcgccccua

SEQ ID NO: 40885 - RNA, 20 nt, Artificial Sequence
  LRRK2 RNA guide
agcgccccuaguucuccaaa

SEQ ID NO: 40886 - RNA, 20 nt, Artificial Sequence
  LRRK2 RNA guide
aggggcgcuuuuucagucua

SEQ ID NO: 40887 - RNA, 20 nt, Artificial Sequence
  LRRK2 RNA guide
auuaaauuuggagaacuagg

SEQ ID NO: 40888 - RNA, 20 nt, Artificial Sequence
  LRRK2 RNA guide
auuuggagaacuaggggcgc

SEQ ID NO: 40889 - RNA, 20 nt, Artificial Sequence
  LRRK2 RNA guide
cagaaaacuuagacugaaaa

SEQ ID NO: 40890 - RNA, 20 nt, Artificial Sequence
  LRRK2 RNA guide
cgccccuaguucuccaaauu

SEQ ID NO: 40891 - RNA, 20 nt, Artificial Sequence
  LRRK2 RNA guide
cuaggggcgcuuuuucaguc

SEQ ID NO: 40892 - RNA, 20 nt, Artificial Sequence
  LRRK2 RNA guide
cugaaaaagcgccccuaguu

SEQ ID NO: 40893 - RNA, 20 nt, Artificial Sequence
  LRRK2 RNA guide
cuuagacugaaaaagcgccc

SEQ ID NO: 40894 - RNA, 20 nt, Artificial Sequence
  LRRK2 RNA guide
gaaaaagcgccccuaguucu

SEQ ID NO: 40895 - RNA, 20 nt, Artificial Sequence
  LRRK2 RNA guide
gaaaacuuagacugaaaaag

SEQ ID NO: 40896 - RNA, 20 nt, Artificial Sequence
  LRRK2 RNA guide
gaacuaggggcgcuuuuuca

SEQ ID NO: 40897 - RNA, 20 nt, Artificial Sequence
  LRRK2 RNA guide
gacugaaaaagcgccccuag

SEQ ID NO: 40898 - RNA, 20 nt, Artificial Sequence
  LRRK2 RNA guide
gagaacuaggggcgcuuuuu

SEQ ID NO: 40899 - RNA, 20 nt, Artificial Sequence
  LRRK2 RNA guide
gcgccccuaguucuccaaau

SEQ ID NO: 40900 - RNA, 20 nt, Artificial Sequence
  LRRK2 RNA guide
gcgcuuuuucagucuaaguu

SEQ ID NO: 40901 - RNA, 20 nt, Artificial Sequence
  LRRK2 RNA guide
ggagaacuaggggcgcuuuu

SEQ ID NO: 40902 - RNA, 20 nt, Artificial Sequence
  LRRK2 RNA guide
ggcgcuuuuucagucuaagu

SEQ ID NO: 40903 - RNA, 20 nt, Artificial Sequence
  LRRK2 RNA guide
gggcgcuuuuucagucuaag

SEQ ID NO: 40904 - RNA, 20 nt, Artificial Sequence
  LRRK2 RNA guide
ggggcgcuuuuucagucuaa

SEQ ID NO: 40905 - RNA, 20 nt, Artificial Sequence
  LRRK2 RNA guide
uaaauuuggagaacuagggg

SEQ ID NO: 40906 - RNA, 20 nt, Artificial Sequence
  LRRK2 RNA guide
uagacugaaaaagcgccccu

SEQ ID NO: 40907 - RNA, 20 nt, Artificial Sequence
  LRRK2 RNA guide
uaggggcgcuuuuucagucu

SEQ ID NO: 40908 - RNA, 20 nt, Artificial Sequence
  LRRK2 RNA guide
ugaaaaagcgccccuaguuc

SEQ ID NO: 40909 - RNA, 20 nt, Artificial Sequence
  LRRK2 RNA guide
uggagaacuaggggcgcuuu

SEQ ID NO: 40910 - RNA, 20 nt, Artificial Sequence
  LRRK2 RNA guide
uuaaauuuggagaacuaggg

SEQ ID NO: 40911 - RNA, 20 nt, Artificial Sequence
  LRRK2 RNA guide
uuagacugaaaaagcgcccc

SEQ ID NO: 40912 - RNA, 20 nt, Artificial Sequence
  LRRK2 RNA guide
uuggagaacuaggggcgcuu

SEQ ID NO: 40913 - RNA, 20 nt, Artificial Sequence
  LRRK2 RNA guide
uuuggagaacuaggggcgcu

SEQ ID NO: 40914 - RNA, 21 nt, Artificial Sequence
  LRRK2 RNA guide
aaaaagcgccccuaguucucc

SEQ ID NO: 40915 - RNA, 21 nt, Artificial Sequence
  LRRK2 RNA guide
aaaacuuagacugaaaaagcg

SEQ ID NO: 40916 - RNA, 21 nt, Artificial Sequence
  LRRK2 RNA guide
aaaagcgccccuaguucucca

SEQ ID NO: 40917 - RNA, 21 nt, Artificial Sequence
  LRRK2 RNA guide
aaacuuagacugaaaaagcgc

SEQ ID NO: 40918 - RNA, 21 nt, Artificial Sequence
  LRRK2 RNA guide
aaagcgccccuaguucuccaa

SEQ ID NO: 40919 - RNA, 21 nt, Artificial Sequence
  LRRK2 RNA guide
aaauuuggagaacuaggggcg

SEQ ID NO: 40920 - RNA, 21 nt, Artificial Sequence
  LRRK2 RNA guide
aacuaggggcgcuuuuucagu

SEQ ID NO: 40921 - RNA, 21 nt, Artificial Sequence
  LRRK2 RNA guide
aacuuagacugaaaaagcgcc

SEQ ID NO: 40922 - RNA, 21 nt, Artificial Sequence
  LRRK2 RNA guide
aagcgccccuaguucuccaaa

SEQ ID NO: 40923 - RNA, 21 nt, Artificial Sequence
  LRRK2 RNA guide
aauuuggagaacuaggggcgc

SEQ ID NO: 40924 - RNA, 21 nt, Artificial Sequence
  LRRK2 RNA guide
acuaggggcgcuuuuucaguc

SEQ ID NO: 40925 - RNA, 21 nt, Artificial Sequence
  LRRK2 RNA guide
acugaaaaagcgccccuaguu

SEQ ID NO: 40926 - RNA, 21 nt, Artificial Sequence
  LRRK2 RNA guide
acuuagacugaaaaagcgccc

SEQ ID NO: 40927 - RNA, 21 nt, Artificial Sequence
  LRRK2 RNA guide
agaacuaggggcgcuuuuuca

SEQ ID NO: 40928 - RNA, 21 nt, Artificial Sequence
  LRRK2 RNA guide
agacugaaaaagcgccccuag

SEQ ID NO: 40929 - RNA, 21 nt, Artificial Sequence
  LRRK2 RNA guide
agcgccccuaguucuccaaau

SEQ ID NO: 40930 - RNA, 21 nt, Artificial Sequence
  LRRK2 RNA guide
aggggcgcuuuuucagucuaa

SEQ ID NO: 40931 - RNA, 21 nt, Artificial Sequence
  LRRK2 RNA guide
auuaaauuuggagaacuaggg

SEQ ID NO: 40932 - RNA, 21 nt, Artificial Sequence
  LRRK2 RNA guide
auuuggagaacuaggggcgcu

SEQ ID NO: 40933 - RNA, 21 nt, Artificial Sequence
  LRRK2 RNA guide
cgccccuaguucuccaaauuu

SEQ ID NO: 40934 - RNA, 21 nt, Artificial Sequence
  LRRK2 RNA guide
cuaggggcgcuuuuucagucu

SEQ ID NO: 40935 - RNA, 21 nt, Artificial Sequence
  LRRK2 RNA guide
cugaaaaagcgccccuaguuc

SEQ ID NO: 40936 - RNA, 21 nt, Artificial Sequence
  LRRK2 RNA guide
cuuagacugaaaaagcgcccc

SEQ ID NO: 40937 - RNA, 21 nt, Artificial Sequence
  LRRK2 RNA guide
gaaaaagcgccccuaguucuc

SEQ ID NO: 40938 - RNA, 21 nt, Artificial Sequence
  LRRK2 RNA guide
gaaaacuuagacugaaaaagc

SEQ ID NO: 40939 - RNA, 21 nt, Artificial Sequence
  LRRK2 RNA guide
gaacuaggggcgcuuuuucag

SEQ ID NO: 40940 - RNA, 21 nt, Artificial Sequence
  LRRK2 RNA guide
gacugaaaaagcgccccuagu

SEQ ID NO: 40941 - RNA, 21 nt, Artificial Sequence
  LRRK2 RNA guide
gagaacuaggggcgcuuuuuc

SEQ ID NO: 40942 - RNA, 21 nt, Artificial Sequence
  LRRK2 RNA guide
gcgccccuaguucuccaaauu

SEQ ID NO: 40943 - RNA, 21 nt, Artificial Sequence
  LRRK2 RNA guide
gcgcuuuuucagucuaaguuu

SEQ ID NO: 40944 - RNA, 21 nt, Artificial Sequence
  LRRK2 RNA guide
ggagaacuaggggcgcuuuuu

SEQ ID NO: 40945 - RNA, 21 nt, Artificial Sequence
  LRRK2 RNA guide
ggcgcuuuuucagucuaaguu

SEQ ID NO: 40946 - RNA, 21 nt, Artificial Sequence
  LRRK2 RNA guide
gggcgcuuuuucagucuaagu

SEQ ID NO: 40947 - RNA, 21 nt, Artificial Sequence
  LRRK2 RNA guide
ggggcgcuuuuucagucuaag

SEQ ID NO: 40948 - RNA, 21 nt, Artificial Sequence
  LRRK2 RNA guide
uaaauuuggagaacuaggggc

SEQ ID NO: 40949 - RNA, 21 nt, Artificial Sequence
  LRRK2 RNA guide
uagacugaaaaagcgccccua

SEQ ID NO: 40950 - RNA, 21 nt, Artificial Sequence
  LRRK2 RNA guide
uaggggcgcuuuuucagucua

SEQ ID NO: 40951 - RNA, 21 nt, Artificial Sequence
  LRRK2 RNA guide
ugaaaaagcgccccuaguucu

SEQ ID NO: 40952 - RNA, 21 nt, Artificial Sequence
  LRRK2 RNA guide
uggagaacuaggggcgcuuuu

SEQ ID NO: 40953 - RNA, 21 nt, Artificial Sequence
  LRRK2 RNA guide
uuaaauuuggagaacuagggg

SEQ ID NO: 40954 - RNA, 21 nt, Artificial Sequence
  LRRK2 RNA guide
uuagacugaaaaagcgccccu

SEQ ID NO: 40955 - RNA, 21 nt, Artificial Sequence
  LRRK2 RNA guide
uuggagaacuaggggcgcuuu

SEQ ID NO: 40956 - RNA, 21 nt, Artificial Sequence
  LRRK2 RNA guide
uuuggagaacuaggggcgcuu

SEQ ID NO: 40957 - RNA, 22 nt, Artificial Sequence
  LRRK2 RNA guide
aaaaagcgccccuaguucucca

SEQ ID NO: 40958 - RNA, 22 nt, Artificial Sequence
  LRRK2 RNA guide
aaaacuuagacugaaaaagcgc

SEQ ID NO: 40959 - RNA, 22 nt, Artificial Sequence
  LRRK2 RNA guide
aaaagcgccccuaguucuccaa

SEQ ID NO: 40960 - RNA, 22 nt, Artificial Sequence
  LRRK2 RNA guide
aaacuuagacugaaaaagcgcc

SEQ ID NO: 40961 - RNA, 22 nt, Artificial Sequence
  LRRK2 RNA guide
aaagcgccccuaguucuccaaa

SEQ ID NO: 40962 - RNA, 22 nt, Artificial Sequence
  LRRK2 RNA guide
aaauuuggagaacuaggggcgc

SEQ ID NO: 40963 - RNA, 22 nt, Artificial Sequence
  LRRK2 RNA guide
aacuaggggcgcuuuuucaguc

SEQ ID NO: 40964 - RNA, 22 nt, Artificial Sequence
  LRRK2 RNA guide
aacuuagacugaaaaagcgccc

SEQ ID NO: 40965 - RNA, 22 nt, Artificial Sequence
  LRRK2 RNA guide
aagcgccccuaguucuccaaau

SEQ ID NO: 40966 - RNA, 22 nt, Artificial Sequence
  LRRK2 RNA guide
aauuuggagaacuaggggcgcu

SEQ ID NO: 40967 - RNA, 22 nt, Artificial Sequence
  LRRK2 RNA guide
acuaggggcgcuuuuucagucu

SEQ ID NO: 40968 - RNA, 22 nt, Artificial Sequence
  LRRK2 RNA guide
acugaaaaagcgccccuaguuc

SEQ ID NO: 40969 - RNA, 22 nt, Artificial Sequence
  LRRK2 RNA guide
acuuagacugaaaaagcgcccc

SEQ ID NO: 40970 - RNA, 22 nt, Artificial Sequence
  LRRK2 RNA guide
agaaaacuuagacugaaaaagc

SEQ ID NO: 40971 - RNA, 22 nt, Artificial Sequence
  LRRK2 RNA guide
agaacuaggggcgcuuuuucag

SEQ ID NO: 40972 - RNA, 22 nt, Artificial Sequence
  LRRK2 RNA guide
agacugaaaaagcgccccuagu

SEQ ID NO: 40973 - RNA, 22 nt, Artificial Sequence
  LRRK2 RNA guide
agcgccccuaguucuccaaauu

SEQ ID NO: 40974 - RNA, 22 nt, Artificial Sequence
  LRRK2 RNA guide
aggggcgcuuuuucagucuaag

SEQ ID NO: 40975 - RNA, 22 nt, Artificial Sequence
  LRRK2 RNA guide
auuaaauuuggagaacuagggg

SEQ ID NO: 40976 - RNA, 22 nt, Artificial Sequence
  LRRK2 RNA guide
auuuggagaacuaggggcgcuu

SEQ ID NO: 40977 - RNA, 22 nt, Artificial Sequence
  LRRK2 RNA guide
cagaaaacuuagacugaaaaag

SEQ ID NO: 40978 - RNA, 22 nt, Artificial Sequence
  LRRK2 RNA guide
cgccccuaguucuccaaauuua

SEQ ID NO: 40979 - RNA, 22 nt, Artificial Sequence
  LRRK2 RNA guide
cuaggggcgcuuuuucagucua

SEQ ID NO: 40980 - RNA, 22 nt, Artificial Sequence
  LRRK2 RNA guide
cugaaaaagcgccccuaguucu

SEQ ID NO: 40981 - RNA, 22 nt, Artificial Sequence
  LRRK2 RNA guide
cuuagacugaaaaagcgccccu

SEQ ID NO: 40982 - RNA, 22 nt, Artificial Sequence
  LRRK2 RNA guide
gaaaaagcgccccuaguucucc

SEQ ID NO: 40983 - RNA, 22 nt, Artificial Sequence
  LRRK2 RNA guide
gaaaacuuagacugaaaaagcg

SEQ ID NO: 40984 - RNA, 22 nt, Artificial Sequence
  LRRK2 RNA guide
gaacagaaaacuuagacugaaa

SEQ ID NO: 40985 - RNA, 22 nt, Artificial Sequence
  LRRK2 RNA guide
gaacuaggggcgcuuuuucagu

SEQ ID NO: 40986 - RNA, 22 nt, Artificial Sequence
  LRRK2 RNA guide
gacugaaaaagcgccccuaguu

SEQ ID NO: 40987 - RNA, 22 nt, Artificial Sequence
  LRRK2 RNA guide
gagaacuaggggcgcuuuuuca

SEQ ID NO: 40988 - RNA, 22 nt, Artificial Sequence
  LRRK2 RNA guide
gcgccccuaguucuccaaauuu

SEQ ID NO: 40989 - RNA, 22 nt, Artificial Sequence
  LRRK2 RNA guide
gcgcuuuuucagucuaaguuuu

SEQ ID NO: 40990 - RNA, 22 nt, Artificial Sequence
  LRRK2 RNA guide
ggagaacuaggggcgcuuuuuc

SEQ ID NO: 40991 - RNA, 22 nt, Artificial Sequence
  LRRK2 RNA guide
ggcgcuuuuucagucuaaguuu

SEQ ID NO: 40992 - RNA, 22 nt, Artificial Sequence
  LRRK2 RNA guide
gggcgcuuuuucagucuaaguu

SEQ ID NO: 40993 - RNA, 22 nt, Artificial Sequence
  LRRK2 RNA guide
ggggcgcuuuuucagucuaagu

SEQ ID NO: 40994 - RNA, 22 nt, Artificial Sequence
  LRRK2 RNA guide
uaaauuuggagaacuaggggcg

SEQ ID NO: 40995 - RNA, 22 nt, Artificial Sequence
  LRRK2 RNA guide
uagacugaaaaagcgccccuag

SEQ ID NO: 40996 - RNA, 22 nt, Artificial Sequence
  LRRK2 RNA guide
uaggggcgcuuuuucagucuaa

SEQ ID NO: 40997 - RNA, 22 nt, Artificial Sequence
  LRRK2 RNA guide
uauuaaauuuggagaacuaggg

SEQ ID NO: 40998 - RNA, 22 nt, Artificial Sequence
  LRRK2 RNA guide
ugaaaaagcgccccuaguucuc

SEQ ID NO: 40999 - RNA, 22 nt, Artificial Sequence
  LRRK2 RNA guide
uggagaacuaggggcgcuuuuu

SEQ ID NO: 41000 - RNA, 22 nt, Artificial Sequence
  LRRK2 RNA guide
uuaaauuuggagaacuaggggc

SEQ ID NO: 41001 - RNA, 22 nt, Artificial Sequence
  LRRK2 RNA guide
uuagacugaaaaagcgccccua

SEQ ID NO: 41002 - RNA, 22 nt, Artificial Sequence
  LRRK2 RNA guide
uuggagaacuaggggcgcuuuu

SEQ ID NO: 41003 - RNA, 22 nt, Artificial Sequence
  LRRK2 RNA guide
uuuggagaacuaggggcgcuuu

SEQ ID NO: 41004 - RNA, 20 nt, Artificial Sequence
  LRRK2 RNA guide
aaaaagccccccuaguucuc

SEQ ID NO: 41005 - RNA, 20 nt, Artificial Sequence
  LRRK2 RNA guide
aaaagccccccuaguucucc

SEQ ID NO: 41006 - RNA, 20 nt, Artificial Sequence
  LRRK2 RNA guide
aaacuuagacugaaaaagcc

SEQ ID NO: 41007 - RNA, 20 nt, Artificial Sequence
  LRRK2 RNA guide
aaagccccccuaguucucca

SEQ ID NO: 41008 - RNA, 20 nt, Artificial Sequence
  LRRK2 RNA guide
aaauuuggagaacuaggggg

SEQ ID NO: 41009 - RNA, 20 nt, Artificial Sequence
  LRRK2 RNA guide
aacuaggggggcuuuuucag

SEQ ID NO: 41010 - RNA, 20 nt, Artificial Sequence
  LRRK2 RNA guide
aacuuagacugaaaaagccc

SEQ ID NO: 41011 - RNA, 20 nt, Artificial Sequence
  LRRK2 RNA guide
aagccccccuaguucuccaa

SEQ ID NO: 41012 - RNA, 20 nt, Artificial Sequence
  LRRK2 RNA guide
aauuuggagaacuagggggg

SEQ ID NO: 41013 - RNA, 20 nt, Artificial Sequence
  LRRK2 RNA guide
acuaggggggcuuuuucagu

SEQ ID NO: 41014 - RNA, 20 nt, Artificial Sequence
  LRRK2 RNA guide
acugaaaaagccccccuagu

SEQ ID NO: 41015 - RNA, 20 nt, Artificial Sequence
  LRRK2 RNA guide
acuuagacugaaaaagcccc

SEQ ID NO: 41016 - RNA, 20 nt, Artificial Sequence
  LRRK2 RNA guide
agaacuaggggggcuuuuuc

SEQ ID NO: 41017 - RNA, 20 nt, Artificial Sequence
  LRRK2 RNA guide
agacugaaaaagccccccua

SEQ ID NO: 41018 - RNA, 20 nt, Artificial Sequence
  LRRK2 RNA guide
agccccccuaguucuccaaa

SEQ ID NO: 41019 - RNA, 20 nt, Artificial Sequence
  LRRK2 RNA guide
aggggggcuuuuucagucua

SEQ ID NO: 41020 - RNA, 20 nt, Artificial Sequence
  LRRK2 RNA guide
auuuggagaacuaggggggc

SEQ ID NO: 41021 - RNA, 20 nt, Artificial Sequence
  LRRK2 RNA guide
ccccccuaguucuccaaauu

SEQ ID NO: 41022 - RNA, 20 nt, Artificial Sequence
  LRRK2 RNA guide
cuaggggggcuuuuucaguc

SEQ ID NO: 41023 - RNA, 20 nt, Artificial Sequence
  LRRK2 RNA guide
cugaaaaagccccccuaguu

SEQ ID NO: 41024 - RNA, 20 nt, Artificial Sequence
  LRRK2 RNA guide
cuuagacugaaaaagccccc

SEQ ID NO: 41025 - RNA, 20 nt, Artificial Sequence
  LRRK2 RNA guide
gaaaaagccccccuaguucu

SEQ ID NO: 41026 - RNA, 20 nt, Artificial Sequence
  LRRK2 RNA guide
gaacuaggggggcuuuuuca

SEQ ID NO: 41027 - RNA, 20 nt, Artificial Sequence
  LRRK2 RNA guide
gacugaaaaagccccccuag

SEQ ID NO: 41028 - RNA, 20 nt, Artificial Sequence
  LRRK2 RNA guide
gagaacuaggggggcuuuuu

SEQ ID NO: 41029 - RNA, 20 nt, Artificial Sequence
  LRRK2 RNA guide
gccccccuaguucuccaaau

SEQ ID NO: 41030 - RNA, 20 nt, Artificial Sequence
  LRRK2 RNA guide
ggagaacuaggggggcuuuu

SEQ ID NO: 41031 - RNA, 20 nt, Artificial Sequence
  LRRK2 RNA guide
gggcuuuuucagucuaaguu

SEQ ID NO: 41032 - RNA, 20 nt, Artificial Sequence
  LRRK2 RNA guide
ggggcuuuuucagucuaagu

SEQ ID NO: 41033 - RNA, 20 nt, Artificial Sequence
  LRRK2 RNA guide
gggggcuuuuucagucuaag

SEQ ID NO: 41034 - RNA, 20 nt, Artificial Sequence
  LRRK2 RNA guide
ggggggcuuuuucagucuaa

SEQ ID NO: 41035 - RNA, 20 nt, Artificial Sequence
  LRRK2 RNA guide
uagacugaaaaagccccccu

SEQ ID NO: 41036 - RNA, 20 nt, Artificial Sequence
  LRRK2 RNA guide
uaggggggcuuuuucagucu

SEQ ID NO: 41037 - RNA, 20 nt, Artificial Sequence
  LRRK2 RNA guide
ugaaaaagccccccuaguuc

SEQ ID NO: 41038 - RNA, 20 nt, Artificial Sequence
  LRRK2 RNA guide
uggagaacuaggggggcuuu

SEQ ID NO: 41039 - RNA, 20 nt, Artificial Sequence
  LRRK2 RNA guide
uuagacugaaaaagcccccc

SEQ ID NO: 41040 - RNA, 20 nt, Artificial Sequence
  LRRK2 RNA guide
uuggagaacuaggggggcuu

SEQ ID NO: 41041 - RNA, 20 nt, Artificial Sequence
  LRRK2 RNA guide
uuuggagaacuaggggggcu

SEQ ID NO: 41042 - RNA, 21 nt, Artificial Sequence
  LRRK2 RNA guide
aaaaagccccccuaguucucc

SEQ ID NO: 41043 - RNA, 21 nt, Artificial Sequence
  LRRK2 RNA guide
aaaacuuagacugaaaaagcc

SEQ ID NO: 41044 - RNA, 21 nt, Artificial Sequence
  LRRK2 RNA guide
aaaagccccccuaguucucca

SEQ ID NO: 41045 - RNA, 21 nt, Artificial Sequence
  LRRK2 RNA guide
aaacuuagacugaaaaagccc

SEQ ID NO: 41046 - RNA, 21 nt, Artificial Sequence
  LRRK2 RNA guide
aaagccccccuaguucuccaa

SEQ ID NO: 41047 - RNA, 21 nt, Artificial Sequence
  LRRK2 RNA guide
aaauuuggagaacuagggggg

SEQ ID NO: 41048 - RNA, 21 nt, Artificial Sequence
  LRRK2 RNA guide
aacuaggggggcuuuuucagu

SEQ ID NO: 41049 - RNA, 21 nt, Artificial Sequence
  LRRK2 RNA guide
aacuuagacugaaaaagcccc

SEQ ID NO: 41050 - RNA, 21 nt, Artificial Sequence
  LRRK2 RNA guide
aagccccccuaguucuccaaa

SEQ ID NO: 41051 - RNA, 21 nt, Artificial Sequence
  LRRK2 RNA guide
aauuuggagaacuaggggggc

SEQ ID NO: 41052 - RNA, 21 nt, Artificial Sequence
  LRRK2 RNA guide
acuaggggggcuuuuucaguc

SEQ ID NO: 41053 - RNA, 21 nt, Artificial Sequence
  LRRK2 RNA guide
acugaaaaagccccccuaguu

SEQ ID NO: 41054 - RNA, 21 nt, Artificial Sequence
  LRRK2 RNA guide
acuuagacugaaaaagccccc

SEQ ID NO: 41055 - RNA, 21 nt, Artificial Sequence
  LRRK2 RNA guide
agaacuaggggggcuuuuuca

SEQ ID NO: 41056 - RNA, 21 nt, Artificial Sequence
  LRRK2 RNA guide
agacugaaaaagccccccuag

SEQ ID NO: 41057 - RNA, 21 nt, Artificial Sequence
  LRRK2 RNA guide
agccccccuaguucuccaaau

SEQ ID NO: 41058 - RNA, 21 nt, Artificial Sequence
  LRRK2 RNA guide
aggggggcuuuuucagucuaa

SEQ ID NO: 41059 - RNA, 21 nt, Artificial Sequence
  LRRK2 RNA guide
auuuggagaacuaggggggcu

SEQ ID NO: 41060 - RNA, 21 nt, Artificial Sequence
  LRRK2 RNA guide
ccccccuaguucuccaaauuu

SEQ ID NO: 41061 - RNA, 21 nt, Artificial Sequence
  LRRK2 RNA guide
cuaggggggcuuuuucagucu

SEQ ID NO: 41062 - RNA, 21 nt, Artificial Sequence
  LRRK2 RNA guide
cugaaaaagccccccuaguuc

SEQ ID NO: 41063 - RNA, 21 nt, Artificial Sequence
  LRRK2 RNA guide
cuuagacugaaaaagcccccc

SEQ ID NO: 41064 - RNA, 21 nt, Artificial Sequence
  LRRK2 RNA guide
gaaaaagccccccuaguucuc

SEQ ID NO: 41065 - RNA, 21 nt, Artificial Sequence
  LRRK2 RNA guide
gaacuaggggggcuuuuucag

SEQ ID NO: 41066 - RNA, 21 nt, Artificial Sequence
  LRRK2 RNA guide
gacugaaaaagccccccuagu

SEQ ID NO: 41067 - RNA, 21 nt, Artificial Sequence
  LRRK2 RNA guide
gagaacuaggggggcuuuuuc

SEQ ID NO: 41068 - RNA, 21 nt, Artificial Sequence
  LRRK2 RNA guide
gccccccuaguucuccaaauu

SEQ ID NO: 41069 - RNA, 21 nt, Artificial Sequence
  LRRK2 RNA guide
ggagaacuaggggggcuuuuu

SEQ ID NO: 41070 - RNA, 21 nt, Artificial Sequence
  LRRK2 RNA guide
gggcuuuuucagucuaaguuu

SEQ ID NO: 41071 - RNA, 21 nt, Artificial Sequence
  LRRK2 RNA guide
ggggcuuuuucagucuaaguu

SEQ ID NO: 41072 - RNA, 21 nt, Artificial Sequence
  LRRK2 RNA guide
gggggcuuuuucagucuaagu

SEQ ID NO: 41073 - RNA, 21 nt, Artificial Sequence
  LRRK2 RNA guide
ggggggcuuuuucagucuaag

SEQ ID NO: 41074 - RNA, 21 nt, Artificial Sequence
  LRRK2 RNA guide
uaaauuuggagaacuaggggg

SEQ ID NO: 41075 - RNA, 21 nt, Artificial Sequence
  LRRK2 RNA guide
uagacugaaaaagccccccua

SEQ ID NO: 41076 - RNA, 21 nt, Artificial Sequence
  LRRK2 RNA guide
uaggggggcuuuuucagucua

SEQ ID NO: 41077 - RNA, 21 nt, Artificial Sequence
  LRRK2 RNA guide
ugaaaaagccccccuaguucu

SEQ ID NO: 41078 - RNA, 21 nt, Artificial Sequence
  LRRK2 RNA guide
uggagaacuaggggggcuuuu

SEQ ID NO: 41079 - RNA, 21 nt, Artificial Sequence
  LRRK2 RNA guide
uuagacugaaaaagccccccu

SEQ ID NO: 41080 - RNA, 21 nt, Artificial Sequence
  LRRK2 RNA guide
uuggagaacuaggggggcuuu

SEQ ID NO: 41081 - RNA, 21 nt, Artificial Sequence
  LRRK2 RNA guide
uuuggagaacuaggggggcuu

SEQ ID NO: 41082 - RNA, 22 nt, Artificial Sequence
  LRRK2 RNA guide
aaaaagccccccuaguucucca

SEQ ID NO: 41083 - RNA, 22 nt, Artificial Sequence
  LRRK2 RNA guide
aaaacuuagacugaaaaagccc

SEQ ID NO: 41084 - RNA, 22 nt, Artificial Sequence
  LRRK2 RNA guide
aaaagccccccuaguucuccaa

SEQ ID NO: 41085 - RNA, 22 nt, Artificial Sequence
  LRRK2 RNA guide
aaacuuagacugaaaaagcccc

SEQ ID NO: 41086 - RNA, 22 nt, Artificial Sequence
  LRRK2 RNA guide
aaagccccccuaguucuccaaa

SEQ ID NO: 41087 - RNA, 22 nt, Artificial Sequence
  LRRK2 RNA guide
aaauuuggagaacuaggggggc

SEQ ID NO: 41088 - RNA, 22 nt, Artificial Sequence
  LRRK2 RNA guide
aacuaggggggcuuuuucaguc

SEQ ID NO: 41089 - RNA, 22 nt, Artificial Sequence
  LRRK2 RNA guide
aacuuagacugaaaaagccccc

SEQ ID NO: 41090 - RNA, 22 nt, Artificial Sequence
  LRRK2 RNA guide
aagccccccuaguucuccaaau

SEQ ID NO: 41091 - RNA, 22 nt, Artificial Sequence
  LRRK2 RNA guide
aauuuggagaacuaggggggcu

SEQ ID NO: 41092 - RNA, 22 nt, Artificial Sequence
  LRRK2 RNA guide
acuaggggggcuuuuucagucu

SEQ ID NO: 41093 - RNA, 22 nt, Artificial Sequence
  LRRK2 RNA guide
acugaaaaagccccccuaguuc

SEQ ID NO: 41094 - RNA, 22 nt, Artificial Sequence
  LRRK2 RNA guide
acuuagacugaaaaagcccccc

SEQ ID NO: 41095 - RNA, 22 nt, Artificial Sequence
  LRRK2 RNA guide
agaacuaggggggcuuuuucag

SEQ ID NO: 41096 - RNA, 22 nt, Artificial Sequence
  LRRK2 RNA guide
agacugaaaaagccccccuagu

SEQ ID NO: 41097 - RNA, 22 nt, Artificial Sequence
  LRRK2 RNA guide
agccccccuaguucuccaaauu

SEQ ID NO: 41098 - RNA, 22 nt, Artificial Sequence
  LRRK2 RNA guide
aggggggcuuuuucagucuaag

SEQ ID NO: 41099 - RNA, 22 nt, Artificial Sequence
  LRRK2 RNA guide
auuuggagaacuaggggggcuu

SEQ ID NO: 41100 - RNA, 22 nt, Artificial Sequence
  LRRK2 RNA guide
ccccccuaguucuccaaauuua

SEQ ID NO: 41101 - RNA, 22 nt, Artificial Sequence
  LRRK2 RNA guide
cuaggggggcuuuuucagucua

SEQ ID NO: 41102 - RNA, 22 nt, Artificial Sequence
  LRRK2 RNA guide
cugaaaaagccccccuaguucu

SEQ ID NO: 41103 - RNA, 22 nt, Artificial Sequence
  LRRK2 RNA guide
cuuagacugaaaaagccccccu

SEQ ID NO: 41104 - RNA, 22 nt, Artificial Sequence
  LRRK2 RNA guide
gaaaaagccccccuaguucucc

SEQ ID NO: 41105 - RNA, 22 nt, Artificial Sequence
  LRRK2 RNA guide
gaaaacuuagacugaaaaagcc

SEQ ID NO: 41106 - RNA, 22 nt, Artificial Sequence
  LRRK2 RNA guide
gaacuaggggggcuuuuucagu

SEQ ID NO: 41107 - RNA, 22 nt, Artificial Sequence
  LRRK2 RNA guide
gacugaaaaagccccccuaguu

SEQ ID NO: 41108 - RNA, 22 nt, Artificial Sequence
  LRRK2 RNA guide
gagaacuaggggggcuuuuuca

SEQ ID NO: 41109 - RNA, 22 nt, Artificial Sequence
  LRRK2 RNA guide
gccccccuaguucuccaaauuu

SEQ ID NO: 41110 - RNA, 22 nt, Artificial Sequence
  LRRK2 RNA guide
ggagaacuaggggggcuuuuuc

SEQ ID NO: 41111 - RNA, 22 nt, Artificial Sequence
  LRRK2 RNA guide
gggcuuuuucagucuaaguuuu

SEQ ID NO: 41112 - RNA, 22 nt, Artificial Sequence
  LRRK2 RNA guide
ggggcuuuuucagucuaaguuu

SEQ ID NO: 41113 - RNA, 22 nt, Artificial Sequence
  LRRK2 RNA guide
gggggcuuuuucagucuaaguu

SEQ ID NO: 41114 - RNA, 22 nt, Artificial Sequence
  LRRK2 RNA guide
ggggggcuuuuucagucuaagu

SEQ ID NO: 41115 - RNA, 22 nt, Artificial Sequence
  LRRK2 RNA guide
uaaauuuggagaacuagggggg

SEQ ID NO: 41116 - RNA, 22 nt, Artificial Sequence
  LRRK2 RNA guide
uagacugaaaaagccccccuag

SEQ ID NO: 41117 - RNA, 22 nt, Artificial Sequence
  LRRK2 RNA guide
uaggggggcuuuuucagucuaa

SEQ ID NO: 41118 - RNA, 22 nt, Artificial Sequence
  LRRK2 RNA guide
ugaaaaagccccccuaguucuc

SEQ ID NO: 41119 - RNA, 22 nt, Artificial Sequence
  LRRK2 RNA guide
uggagaacuaggggggcuuuuu

SEQ ID NO: 41120 - RNA, 22 nt, Artificial Sequence
  LRRK2 RNA guide
uuaaauuuggagaacuaggggg

SEQ ID NO: 41121 - RNA, 22 nt, Artificial Sequence
  LRRK2 RNA guide
uuagacugaaaaagccccccua

SEQ ID NO: 41122 - RNA, 22 nt, Artificial Sequence
  LRRK2 RNA guide
uuggagaacuaggggggcuuuu

SEQ ID NO: 41123 - RNA, 22 nt, Artificial Sequence
  LRRK2 RNA guide
uuuggagaacuaggggggcuuu

SEQ ID NO: 41124 - RNA, 20 nt, Artificial Sequence
  LRRK2 RNA guide
acgaggucaggaguucgaga

SEQ ID NO: 41125 - RNA, 20 nt, Artificial Sequence
  LRRK2 RNA guide
cacgaggucaggaguucgag

SEQ ID NO: 41126 - RNA, 20 nt, Artificial Sequence
  LRRK2 RNA guide
guugcucucgaacuccugac

SEQ ID NO: 41127 - RNA, 20 nt, Artificial Sequence
  LRRK2 RNA guide
uugcucucgaacuccugacc

SEQ ID NO: 41128 - RNA, 21 nt, Artificial Sequence
  LRRK2 RNA guide
acgaggucaggaguucgagag

SEQ ID NO: 41129 - RNA, 21 nt, Artificial Sequence
  LRRK2 RNA guide
cacgaggucaggaguucgaga

SEQ ID NO: 41130 - RNA, 21 nt, Artificial Sequence
  LRRK2 RNA guide
gguugcucucgaacuccugac

SEQ ID NO: 41131 - RNA, 21 nt, Artificial Sequence
  LRRK2 RNA guide
guugcucucgaacuccugacc

SEQ ID NO: 41132 - RNA, 21 nt, Artificial Sequence
  LRRK2 RNA guide
ucacgaggucaggaguucgag

SEQ ID NO: 41133 - RNA, 21 nt, Artificial Sequence
  LRRK2 RNA guide
uugcucucgaacuccugaccu

SEQ ID NO: 41134 - RNA, 22 nt, Artificial Sequence
  LRRK2 RNA guide
acgaggucaggaguucgagagc

SEQ ID NO: 41135 - RNA, 22 nt, Artificial Sequence
  LRRK2 RNA guide
agguugcucucgaacuccugac

SEQ ID NO: 41136 - RNA, 22 nt, Artificial Sequence
  LRRK2 RNA guide
aucacgaggucaggaguucgag

SEQ ID NO: 41137 - RNA, 22 nt, Artificial Sequence
  LRRK2 RNA guide
cacgaggucaggaguucgagag

SEQ ID NO: 41138 - RNA, 22 nt, Artificial Sequence
  LRRK2 RNA guide
guugcucucgaacuccugaccu

SEQ ID NO: 41139 - RNA, 22 nt, Artificial Sequence
  LRRK2 RNA guide
uugcucucgaacuccugaccuc

SEQ ID NO: 41140 - RNA, 20 nt, Artificial Sequence
  LRRK2 RNA guide
aacaaccggcuuaugagauu

SEQ ID NO: 41141 - RNA, 20 nt, Artificial Sequence
  LRRK2 RNA guide
aacagccaucaacaaccggc

SEQ ID NO: 41142 - RNA, 20 nt, Artificial Sequence
  LRRK2 RNA guide
aaccggcuuaugagauucag

SEQ ID NO: 41143 - RNA, 20 nt, Artificial Sequence
  LRRK2 RNA guide
aagccgguuguugauggcug

SEQ ID NO: 41144 - RNA, 20 nt, Artificial Sequence
  LRRK2 RNA guide
aaucucauaagccgguuguu

SEQ ID NO: 41145 - RNA, 20 nt, Artificial Sequence
  LRRK2 RNA guide
acaacagccaucaacaaccg

SEQ ID NO: 41146 - RNA, 20 nt, Artificial Sequence
  LRRK2 RNA guide
acaaccggcuuaugagauuc

SEQ ID NO: 41147 - RNA, 20 nt, Artificial Sequence
  LRRK2 RNA guide
acagccaucaacaaccggcu

SEQ ID NO: 41148 - RNA, 20 nt, Artificial Sequence
  LRRK2 RNA guide
accggcuuaugagauucagg

SEQ ID NO: 41149 - RNA, 20 nt, Artificial Sequence
  LRRK2 RNA guide
agccaucaacaaccggcuua

SEQ ID NO: 41150 - RNA, 20 nt, Artificial Sequence
  LRRK2 RNA guide
agccgguuguugauggcugu

SEQ ID NO: 41151 - RNA, 20 nt, Artificial Sequence
  LRRK2 RNA guide
auaagccgguuguugauggc

SEQ ID NO: 41152 - RNA, 20 nt, Artificial Sequence
  LRRK2 RNA guide
aucaacaaccggcuuaugag

SEQ ID NO: 41153 - RNA, 20 nt, Artificial Sequence
  LRRK2 RNA guide
aucucauaagccgguuguug

SEQ ID NO: 41154 - RNA, 20 nt, Artificial Sequence
  LRRK2 RNA guide
caacaaccggcuuaugagau

SEQ ID NO: 41155 - RNA, 20 nt, Artificial Sequence
  LRRK2 RNA guide
caacagccaucaacaaccgg

SEQ ID NO: 41156 - RNA, 20 nt, Artificial Sequence
  LRRK2 RNA guide
caaccggcuuaugagauuca

SEQ ID NO: 41157 - RNA, 20 nt, Artificial Sequence
  LRRK2 RNA guide
cacaacagccaucaacaacc

SEQ ID NO: 41158 - RNA, 20 nt, Artificial Sequence
  LRRK2 RNA guide
cagccaucaacaaccggcuu

SEQ ID NO: 41159 - RNA, 20 nt, Artificial Sequence
  LRRK2 RNA guide
cauaagccgguuguugaugg

SEQ ID NO: 41160 - RNA, 20 nt, Artificial Sequence
  LRRK2 RNA guide
caucaacaaccggcuuauga

SEQ ID NO: 41161 - RNA, 20 nt, Artificial Sequence
  LRRK2 RNA guide
ccaucaacaaccggcuuaug

SEQ ID NO: 41162 - RNA, 20 nt, Artificial Sequence
  LRRK2 RNA guide
ccggcuuaugagauucagga

SEQ ID NO: 41163 - RNA, 20 nt, Artificial Sequence
  LRRK2 RNA guide
ccgguuguugauggcuguug

SEQ ID NO: 41164 - RNA, 20 nt, Artificial Sequence
  LRRK2 RNA guide
ccugaaucucauaagccggu

SEQ ID NO: 41165 - RNA, 20 nt, Artificial Sequence
  LRRK2 RNA guide
cggcuuaugagauucaggag

SEQ ID NO: 41166 - RNA, 20 nt, Artificial Sequence
  LRRK2 RNA guide
cucauaagccgguuguugau

SEQ ID NO: 41167 - RNA, 20 nt, Artificial Sequence
  LRRK2 RNA guide
cuccugaaucucauaagccg

SEQ ID NO: 41168 - RNA, 20 nt, Artificial Sequence
  LRRK2 RNA guide
cucuccugaaucucauaagc

SEQ ID NO: 41169 - RNA, 20 nt, Artificial Sequence
  LRRK2 RNA guide
cugaaucucauaagccgguu

SEQ ID NO: 41170 - RNA, 20 nt, Artificial Sequence
  LRRK2 RNA guide
cuucucuccugaaucucaua

SEQ ID NO: 41171 - RNA, 20 nt, Artificial Sequence
  LRRK2 RNA guide
gaaucucauaagccgguugu

SEQ ID NO: 41172 - RNA, 20 nt, Artificial Sequence
  LRRK2 RNA guide
gccaucaacaaccggcuuau

SEQ ID NO: 41173 - RNA, 20 nt, Artificial Sequence
  LRRK2 RNA guide
gccgguuguugauggcuguu

SEQ ID NO: 41174 - RNA, 20 nt, Artificial Sequence
  LRRK2 RNA guide
guuucacaacagccaucaac

SEQ ID NO: 41175 - RNA, 20 nt, Artificial Sequence
  LRRK2 RNA guide
uaagccgguuguugauggcu

SEQ ID NO: 41176 - RNA, 20 nt, Artificial Sequence
  LRRK2 RNA guide
ucaacaaccggcuuaugaga

SEQ ID NO: 41177 - RNA, 20 nt, Artificial Sequence
  LRRK2 RNA guide
ucacaacagccaucaacaac

SEQ ID NO: 41178 - RNA, 20 nt, Artificial Sequence
  LRRK2 RNA guide
ucauaagccgguuguugaug

SEQ ID NO: 41179 - RNA, 20 nt, Artificial Sequence
  LRRK2 RNA guide
uccugaaucucauaagccgg

SEQ ID NO: 41180 - RNA, 20 nt, Artificial Sequence
  LRRK2 RNA guide
ucucauaagccgguuguuga

SEQ ID NO: 41181 - RNA, 20 nt, Artificial Sequence
  LRRK2 RNA guide
ucuccugaaucucauaagcc

SEQ ID NO: 41182 - RNA, 20 nt, Artificial Sequence
  LRRK2 RNA guide
ucucuccugaaucucauaag

SEQ ID NO: 41183 - RNA, 20 nt, Artificial Sequence
  LRRK2 RNA guide
ucuucucuccugaaucucau

SEQ ID NO: 41184 - RNA, 20 nt, Artificial Sequence
  LRRK2 RNA guide
ugaaucucauaagccgguug

SEQ ID NO: 41185 - RNA, 20 nt, Artificial Sequence
  LRRK2 RNA guide
uucacaacagccaucaacaa

SEQ ID NO: 41186 - RNA, 20 nt, Artificial Sequence
  LRRK2 RNA guide
uucucuccugaaucucauaa

SEQ ID NO: 41187 - RNA, 20 nt, Artificial Sequence
  LRRK2 RNA guide
uuucacaacagccaucaaca

SEQ ID NO: 41188 - RNA, 21 nt, Artificial Sequence
  LRRK2 RNA guide
aacaaccggcuuaugagauuc

SEQ ID NO: 41189 - RNA, 21 nt, Artificial Sequence
  LRRK2 RNA guide
aacagccaucaacaaccggcu

SEQ ID NO: 41190 - RNA, 21 nt, Artificial Sequence
  LRRK2 RNA guide
aaccggcuuaugagauucagg

SEQ ID NO: 41191 - RNA, 21 nt, Artificial Sequence
  LRRK2 RNA guide
aagccgguuguugauggcugu

SEQ ID NO: 41192 - RNA, 21 nt, Artificial Sequence
  LRRK2 RNA guide
aaucucauaagccgguuguug

SEQ ID NO: 41193 - RNA, 21 nt, Artificial Sequence
  LRRK2 RNA guide
acaacagccaucaacaaccgg

SEQ ID NO: 41194 - RNA, 21 nt, Artificial Sequence
  LRRK2 RNA guide
acaaccggcuuaugagauuca

SEQ ID NO: 41195 - RNA, 21 nt, Artificial Sequence
  LRRK2 RNA guide
acagccaucaacaaccggcuu

SEQ ID NO: 41196 - RNA, 21 nt, Artificial Sequence
  LRRK2 RNA guide
accggcuuaugagauucagga

SEQ ID NO: 41197 - RNA, 21 nt, Artificial Sequence
  LRRK2 RNA guide
agccaucaacaaccggcuuau

SEQ ID NO: 41198 - RNA, 21 nt, Artificial Sequence
  LRRK2 RNA guide
agccgguuguugauggcuguu

SEQ ID NO: 41199 - RNA, 21 nt, Artificial Sequence
  LRRK2 RNA guide
auaagccgguuguugauggcu

SEQ ID NO: 41200 - RNA, 21 nt, Artificial Sequence
  LRRK2 RNA guide
aucaacaaccggcuuaugaga

SEQ ID NO: 41201 - RNA, 21 nt, Artificial Sequence
  LRRK2 RNA guide
aucucauaagccgguuguuga

SEQ ID NO: 41202 - RNA, 21 nt, Artificial Sequence
  LRRK2 RNA guide
caacaaccggcuuaugagauu

SEQ ID NO: 41203 - RNA, 21 nt, Artificial Sequence
  LRRK2 RNA guide
caacagccaucaacaaccggc

SEQ ID NO: 41204 - RNA, 21 nt, Artificial Sequence
  LRRK2 RNA guide
caaccggcuuaugagauucag

SEQ ID NO: 41205 - RNA, 21 nt, Artificial Sequence
  LRRK2 RNA guide
cacaacagccaucaacaaccg

SEQ ID NO: 41206 - RNA, 21 nt, Artificial Sequence
  LRRK2 RNA guide
cagccaucaacaaccggcuua

SEQ ID NO: 41207 - RNA, 21 nt, Artificial Sequence
  LRRK2 RNA guide
cauaagccgguuguugauggc

SEQ ID NO: 41208 - RNA, 21 nt, Artificial Sequence
  LRRK2 RNA guide
caucaacaaccggcuuaugag

SEQ ID NO: 41209 - RNA, 21 nt, Artificial Sequence
  LRRK2 RNA guide
ccaucaacaaccggcuuauga

SEQ ID NO: 41210 - RNA, 21 nt, Artificial Sequence
  LRRK2 RNA guide
ccggcuuaugagauucaggag

SEQ ID NO: 41211 - RNA, 21 nt, Artificial Sequence
  LRRK2 RNA guide
ccgguuguugauggcuguugu

SEQ ID NO: 41212 - RNA, 21 nt, Artificial Sequence
  LRRK2 RNA guide
ccugaaucucauaagccgguu

SEQ ID NO: 41213 - RNA, 21 nt, Artificial Sequence
  LRRK2 RNA guide
cggcuuaugagauucaggaga

SEQ ID NO: 41214 - RNA, 21 nt, Artificial Sequence
  LRRK2 RNA guide
cucauaagccgguuguugaug

SEQ ID NO: 41215 - RNA, 21 nt, Artificial Sequence
  LRRK2 RNA guide
cuccugaaucucauaagccgg

SEQ ID NO: 41216 - RNA, 21 nt, Artificial Sequence
  LRRK2 RNA guide
cucuccugaaucucauaagcc

SEQ ID NO: 41217 - RNA, 21 nt, Artificial Sequence
  LRRK2 RNA guide
cucuucucuccugaaucucau

SEQ ID NO: 41218 - RNA, 21 nt, Artificial Sequence
  LRRK2 RNA guide
cugaaucucauaagccgguug

SEQ ID NO: 41219 - RNA, 21 nt, Artificial Sequence
  LRRK2 RNA guide
cuucucuccugaaucucauaa

SEQ ID NO: 41220 - RNA, 21 nt, Artificial Sequence
  LRRK2 RNA guide
gaaucucauaagccgguuguu

SEQ ID NO: 41221 - RNA, 21 nt, Artificial Sequence
  LRRK2 RNA guide
gccaucaacaaccggcuuaug

SEQ ID NO: 41222 - RNA, 21 nt, Artificial Sequence
  LRRK2 RNA guide
gccgguuguugauggcuguug

SEQ ID NO: 41223 - RNA, 21 nt, Artificial Sequence
  LRRK2 RNA guide
gguuucacaacagccaucaac

SEQ ID NO: 41224 - RNA, 21 nt, Artificial Sequence
  LRRK2 RNA guide
guuucacaacagccaucaaca

SEQ ID NO: 41225 - RNA, 21 nt, Artificial Sequence
  LRRK2 RNA guide
uaagccgguuguugauggcug

SEQ ID NO: 41226 - RNA, 21 nt, Artificial Sequence
  LRRK2 RNA guide
ucaacaaccggcuuaugagau

SEQ ID NO: 41227 - RNA, 21 nt, Artificial Sequence
  LRRK2 RNA guide
ucacaacagccaucaacaacc

SEQ ID NO: 41228 - RNA, 21 nt, Artificial Sequence
  LRRK2 RNA guide
ucauaagccgguuguugaugg

SEQ ID NO: 41229 - RNA, 21 nt, Artificial Sequence
  LRRK2 RNA guide
uccugaaucucauaagccggu

SEQ ID NO: 41230 - RNA, 21 nt, Artificial Sequence
  LRRK2 RNA guide
ucucauaagccgguuguugau

SEQ ID NO: 41231 - RNA, 21 nt, Artificial Sequence
  LRRK2 RNA guide
ucuccugaaucucauaagccg

SEQ ID NO: 41232 - RNA, 21 nt, Artificial Sequence
  LRRK2 RNA guide
ucucuccugaaucucauaagc

SEQ ID NO: 41233 - RNA, 21 nt, Artificial Sequence
  LRRK2 RNA guide
ucuucucuccugaaucucaua

SEQ ID NO: 41234 - RNA, 21 nt, Artificial Sequence
  LRRK2 RNA guide
ugaaucucauaagccgguugu

SEQ ID NO: 41235 - RNA, 21 nt, Artificial Sequence
  LRRK2 RNA guide
uucacaacagccaucaacaac

SEQ ID NO: 41236 - RNA, 21 nt, Artificial Sequence
  LRRK2 RNA guide
uucucuccugaaucucauaag

SEQ ID NO: 41237 - RNA, 21 nt, Artificial Sequence
  LRRK2 RNA guide
uuucacaacagccaucaacaa

SEQ ID NO: 41238 - RNA, 22 nt, Artificial Sequence
  LRRK2 RNA guide
aacaaccggcuuaugagauuca

SEQ ID NO: 41239 - RNA, 22 nt, Artificial Sequence
  LRRK2 RNA guide
aacagccaucaacaaccggcuu

SEQ ID NO: 41240 - RNA, 22 nt, Artificial Sequence
  LRRK2 RNA guide
aaccggcuuaugagauucagga

SEQ ID NO: 41241 - RNA, 22 nt, Artificial Sequence
  LRRK2 RNA guide
aagccgguuguugauggcuguu

SEQ ID NO: 41242 - RNA, 22 nt, Artificial Sequence
  LRRK2 RNA guide
aaucucauaagccgguuguuga

SEQ ID NO: 41243 - RNA, 22 nt, Artificial Sequence
  LRRK2 RNA guide
acaacagccaucaacaaccggc

SEQ ID NO: 41244 - RNA, 22 nt, Artificial Sequence
  LRRK2 RNA guide
acaaccggcuuaugagauucag

SEQ ID NO: 41245 - RNA, 22 nt, Artificial Sequence
  LRRK2 RNA guide
acagccaucaacaaccggcuua

SEQ ID NO: 41246 - RNA, 22 nt, Artificial Sequence
  LRRK2 RNA guide
accggcuuaugagauucaggag

SEQ ID NO: 41247 - RNA, 22 nt, Artificial Sequence
  LRRK2 RNA guide
acucuucucuccugaaucucau

SEQ ID NO: 41248 - RNA, 22 nt, Artificial Sequence
  LRRK2 RNA guide
agccaucaacaaccggcuuaug

SEQ ID NO: 41249 - RNA, 22 nt, Artificial Sequence
  LRRK2 RNA guide
agccgguuguugauggcuguug

SEQ ID NO: 41250 - RNA, 22 nt, Artificial Sequence
  LRRK2 RNA guide
agguuucacaacagccaucaac

SEQ ID NO: 41251 - RNA, 22 nt, Artificial Sequence
  LRRK2 RNA guide
auaagccgguuguugauggcug

SEQ ID NO: 41252 - RNA, 22 nt, Artificial Sequence
  LRRK2 RNA guide
aucaacaaccggcuuaugagau

SEQ ID NO: 41253 - RNA, 22 nt, Artificial Sequence
  LRRK2 RNA guide
aucucauaagccgguuguugau

SEQ ID NO: 41254 - RNA, 22 nt, Artificial Sequence
  LRRK2 RNA guide
caacaaccggcuuaugagauuc

SEQ ID NO: 41255 - RNA, 22 nt, Artificial Sequence
  LRRK2 RNA guide
caacagccaucaacaaccggcu

SEQ ID NO: 41256 - RNA, 22 nt, Artificial Sequence
  LRRK2 RNA guide
caaccggcuuaugagauucagg

SEQ ID NO: 41257 - RNA, 22 nt, Artificial Sequence
  LRRK2 RNA guide
cacaacagccaucaacaaccgg

SEQ ID NO: 41258 - RNA, 22 nt, Artificial Sequence
  LRRK2 RNA guide
cagccaucaacaaccggcuuau

SEQ ID NO: 41259 - RNA, 22 nt, Artificial Sequence
  LRRK2 RNA guide
cauaagccgguuguugauggcu

SEQ ID NO: 41260 - RNA, 22 nt, Artificial Sequence
  LRRK2 RNA guide
caucaacaaccggcuuaugaga

SEQ ID NO: 41261 - RNA, 22 nt, Artificial Sequence
  LRRK2 RNA guide
ccaucaacaaccggcuuaugag

SEQ ID NO: 41262 - RNA, 22 nt, Artificial Sequence
  LRRK2 RNA guide
ccggcuuaugagauucaggaga

SEQ ID NO: 41263 - RNA, 22 nt, Artificial Sequence
  LRRK2 RNA guide
ccgguuguugauggcuguugug

SEQ ID NO: 41264 - RNA, 22 nt, Artificial Sequence
  LRRK2 RNA guide
ccugaaucucauaagccgguug

SEQ ID NO: 41265 - RNA, 22 nt, Artificial Sequence
  LRRK2 RNA guide
cggcuuaugagauucaggagag

SEQ ID NO: 41266 - RNA, 22 nt, Artificial Sequence
  LRRK2 RNA guide
cucauaagccgguuguugaugg

SEQ ID NO: 41267 - RNA, 22 nt, Artificial Sequence
  LRRK2 RNA guide
cuccugaaucucauaagccggu

SEQ ID NO: 41268 - RNA, 22 nt, Artificial Sequence
  LRRK2 RNA guide
cucuccugaaucucauaagccg

SEQ ID NO: 41269 - RNA, 22 nt, Artificial Sequence
  LRRK2 RNA guide
cucuucucuccugaaucucaua

SEQ ID NO: 41270 - RNA, 22 nt, Artificial Sequence
  LRRK2 RNA guide
cugaaucucauaagccgguugu

SEQ ID NO: 41271 - RNA, 22 nt, Artificial Sequence
  LRRK2 RNA guide
cuucucuccugaaucucauaag

SEQ ID NO: 41272 - RNA, 22 nt, Artificial Sequence
  LRRK2 RNA guide
gaaucucauaagccgguuguug

SEQ ID NO: 41273 - RNA, 22 nt, Artificial Sequence
  LRRK2 RNA guide
gccaucaacaaccggcuuauga

SEQ ID NO: 41274 - RNA, 22 nt, Artificial Sequence
  LRRK2 RNA guide
gccgguuguugauggcuguugu

SEQ ID NO: 41275 - RNA, 22 nt, Artificial Sequence
  LRRK2 RNA guide
gguuucacaacagccaucaaca

SEQ ID NO: 41276 - RNA, 22 nt, Artificial Sequence
  LRRK2 RNA guide
guuucacaacagccaucaacaa

SEQ ID NO: 41277 - RNA, 22 nt, Artificial Sequence
  LRRK2 RNA guide
uaagccgguuguugauggcugu

SEQ ID NO: 41278 - RNA, 22 nt, Artificial Sequence
  LRRK2 RNA guide
ucaacaaccggcuuaugagauu

SEQ ID NO: 41279 - RNA, 22 nt, Artificial Sequence
  LRRK2 RNA guide
ucacaacagccaucaacaaccg

SEQ ID NO: 41280 - RNA, 22 nt, Artificial Sequence
  LRRK2 RNA guide
ucauaagccgguuguugauggc

SEQ ID NO: 41281 - RNA, 22 nt, Artificial Sequence
  LRRK2 RNA guide
uccugaaucucauaagccgguu

SEQ ID NO: 41282 - RNA, 22 nt, Artificial Sequence
  LRRK2 RNA guide
ucucauaagccgguuguugaug

SEQ ID NO: 41283 - RNA, 22 nt, Artificial Sequence
  LRRK2 RNA guide
ucuccugaaucucauaagccgg

SEQ ID NO: 41284 - RNA, 22 nt, Artificial Sequence
  LRRK2 RNA guide
ucucuccugaaucucauaagcc

SEQ ID NO: 41285 - RNA, 22 nt, Artificial Sequence
  LRRK2 RNA guide
ucuucucuccugaaucucauaa

SEQ ID NO: 41286 - RNA, 22 nt, Artificial Sequence
  LRRK2 RNA guide
ugaaucucauaagccgguuguu

SEQ ID NO: 41287 - RNA, 22 nt, Artificial Sequence
  LRRK2 RNA guide
uucacaacagccaucaacaacc

SEQ ID NO: 41288 - RNA, 22 nt, Artificial Sequence
  LRRK2 RNA guide
uucucuccugaaucucauaagc

SEQ ID NO: 41289 - RNA, 22 nt, Artificial Sequence
  LRRK2 RNA guide
uuucacaacagccaucaacaac

SEQ ID NO: 41290 - RNA, 20 nt, Artificial Sequence
  LRRK2 RNA guide
aacaaccagcuuaugagauu

SEQ ID NO: 41291 - RNA, 20 nt, Artificial Sequence
  LRRK2 RNA guide
aacagccaucaacaaccagc

SEQ ID NO: 41292 - RNA, 20 nt, Artificial Sequence
  LRRK2 RNA guide
aaccagcuuaugagauucag

SEQ ID NO: 41293 - RNA, 20 nt, Artificial Sequence
  LRRK2 RNA guide
aagcugguuguugauggcug

SEQ ID NO: 41294 - RNA, 20 nt, Artificial Sequence
  LRRK2 RNA guide
aaucucauaagcugguuguu

SEQ ID NO: 41295 - RNA, 20 nt, Artificial Sequence
  LRRK2 RNA guide
acaacagccaucaacaacca

SEQ ID NO: 41296 - RNA, 20 nt, Artificial Sequence
  LRRK2 RNA guide
acaaccagcuuaugagauuc

SEQ ID NO: 41297 - RNA, 20 nt, Artificial Sequence
  LRRK2 RNA guide
acagccaucaacaaccagcu

SEQ ID NO: 41298 - RNA, 20 nt, Artificial Sequence
  LRRK2 RNA guide
accagcuuaugagauucagg

SEQ ID NO: 41299 - RNA, 20 nt, Artificial Sequence
  LRRK2 RNA guide
agccaucaacaaccagcuua

SEQ ID NO: 41300 - RNA, 20 nt, Artificial Sequence
  LRRK2 RNA guide
agcugguuguugauggcugu

SEQ ID NO: 41301 - RNA, 20 nt, Artificial Sequence
  LRRK2 RNA guide
auaagcugguuguugauggc

SEQ ID NO: 41302 - RNA, 20 nt, Artificial Sequence
  LRRK2 RNA guide
aucaacaaccagcuuaugag

SEQ ID NO: 41303 - RNA, 20 nt, Artificial Sequence
  LRRK2 RNA guide
aucucauaagcugguuguug

SEQ ID NO: 41304 - RNA, 20 nt, Artificial Sequence
  LRRK2 RNA guide
caacaaccagcuuaugagau

SEQ ID NO: 41305 - RNA, 20 nt, Artificial Sequence
  LRRK2 RNA guide
caacagccaucaacaaccag

SEQ ID NO: 41306 - RNA, 20 nt, Artificial Sequence
  LRRK2 RNA guide
caaccagcuuaugagauuca

SEQ ID NO: 41307 - RNA, 20 nt, Artificial Sequence
  LRRK2 RNA guide
cagccaucaacaaccagcuu

SEQ ID NO: 41308 - RNA, 20 nt, Artificial Sequence
  LRRK2 RNA guide
cagcuuaugagauucaggag

SEQ ID NO: 41309 - RNA, 20 nt, Artificial Sequence
  LRRK2 RNA guide
cauaagcugguuguugaugg

SEQ ID NO: 41310 - RNA, 20 nt, Artificial Sequence
  LRRK2 RNA guide
caucaacaaccagcuuauga

SEQ ID NO: 41311 - RNA, 20 nt, Artificial Sequence
  LRRK2 RNA guide
ccagcuuaugagauucagga

SEQ ID NO: 41312 - RNA, 20 nt, Artificial Sequence
  LRRK2 RNA guide
ccaucaacaaccagcuuaug

SEQ ID NO: 41313 - RNA, 20 nt, Artificial Sequence
  LRRK2 RNA guide
ccugaaucucauaagcuggu

SEQ ID NO: 41314 - RNA, 20 nt, Artificial Sequence
  LRRK2 RNA guide
cucauaagcugguuguugau

SEQ ID NO: 41315 - RNA, 20 nt, Artificial Sequence
  LRRK2 RNA guide
cuccugaaucucauaagcug

SEQ ID NO: 41316 - RNA, 20 nt, Artificial Sequence
  LRRK2 RNA guide
cugaaucucauaagcugguu

SEQ ID NO: 41317 - RNA, 20 nt, Artificial Sequence
  LRRK2 RNA guide
cugguuguugauggcuguug

SEQ ID NO: 41318 - RNA, 20 nt, Artificial Sequence
  LRRK2 RNA guide
gaaucucauaagcugguugu

SEQ ID NO: 41319 - RNA, 20 nt, Artificial Sequence
  LRRK2 RNA guide
gccaucaacaaccagcuuau

SEQ ID NO: 41320 - RNA, 20 nt, Artificial Sequence
  LRRK2 RNA guide
gcugguuguugauggcuguu

SEQ ID NO: 41321 - RNA, 20 nt, Artificial Sequence
  LRRK2 RNA guide
uaagcugguuguugauggcu

SEQ ID NO: 41322 - RNA, 20 nt, Artificial Sequence
  LRRK2 RNA guide
ucaacaaccagcuuaugaga

SEQ ID NO: 41323 - RNA, 20 nt, Artificial Sequence
  LRRK2 RNA guide
ucauaagcugguuguugaug

SEQ ID NO: 41324 - RNA, 20 nt, Artificial Sequence
  LRRK2 RNA guide
uccugaaucucauaagcugg

SEQ ID NO: 41325 - RNA, 20 nt, Artificial Sequence
  LRRK2 RNA guide
ucucauaagcugguuguuga

SEQ ID NO: 41326 - RNA, 20 nt, Artificial Sequence
  LRRK2 RNA guide
ucuccugaaucucauaagcu

SEQ ID NO: 41327 - RNA, 20 nt, Artificial Sequence
  LRRK2 RNA guide
ugaaucucauaagcugguug

SEQ ID NO: 41328 - RNA, 21 nt, Artificial Sequence
  LRRK2 RNA guide
aacaaccagcuuaugagauuc

SEQ ID NO: 41329 - RNA, 21 nt, Artificial Sequence
  LRRK2 RNA guide
aacagccaucaacaaccagcu

SEQ ID NO: 41330 - RNA, 21 nt, Artificial Sequence
  LRRK2 RNA guide
aaccagcuuaugagauucagg

SEQ ID NO: 41331 - RNA, 21 nt, Artificial Sequence
  LRRK2 RNA guide
aagcugguuguugauggcugu

SEQ ID NO: 41332 - RNA, 21 nt, Artificial Sequence
  LRRK2 RNA guide
aaucucauaagcugguuguug

SEQ ID NO: 41333 - RNA, 21 nt, Artificial Sequence
  LRRK2 RNA guide
acaacagccaucaacaaccag

SEQ ID NO: 41334 - RNA, 21 nt, Artificial Sequence
  LRRK2 RNA guide
acaaccagcuuaugagauuca

SEQ ID NO: 41335 - RNA, 21 nt, Artificial Sequence
  LRRK2 RNA guide
acagccaucaacaaccagcuu

SEQ ID NO: 41336 - RNA, 21 nt, Artificial Sequence
  LRRK2 RNA guide
accagcuuaugagauucagga

SEQ ID NO: 41337 - RNA, 21 nt, Artificial Sequence
  LRRK2 RNA guide
agccaucaacaaccagcuuau

SEQ ID NO: 41338 - RNA, 21 nt, Artificial Sequence
  LRRK2 RNA guide
agcugguuguugauggcuguu

SEQ ID NO: 41339 - RNA, 21 nt, Artificial Sequence
  LRRK2 RNA guide
auaagcugguuguugauggcu

SEQ ID NO: 41340 - RNA, 21 nt, Artificial Sequence
  LRRK2 RNA guide
aucaacaaccagcuuaugaga

SEQ ID NO: 41341 - RNA, 21 nt, Artificial Sequence
  LRRK2 RNA guide
aucucauaagcugguuguuga

SEQ ID NO: 41342 - RNA, 21 nt, Artificial Sequence
  LRRK2 RNA guide
caacaaccagcuuaugagauu

SEQ ID NO: 41343 - RNA, 21 nt, Artificial Sequence
  LRRK2 RNA guide
caacagccaucaacaaccagc

SEQ ID NO: 41344 - RNA, 21 nt, Artificial Sequence
  LRRK2 RNA guide
caaccagcuuaugagauucag

SEQ ID NO: 41345 - RNA, 21 nt, Artificial Sequence
  LRRK2 RNA guide
cacaacagccaucaacaacca

SEQ ID NO: 41346 - RNA, 21 nt, Artificial Sequence
  LRRK2 RNA guide
cagccaucaacaaccagcuua

SEQ ID NO: 41347 - RNA, 21 nt, Artificial Sequence
  LRRK2 RNA guide
cagcuuaugagauucaggaga

SEQ ID NO: 41348 - RNA, 21 nt, Artificial Sequence
  LRRK2 RNA guide
cauaagcugguuguugauggc

SEQ ID NO: 41349 - RNA, 21 nt, Artificial Sequence
  LRRK2 RNA guide
caucaacaaccagcuuaugag

SEQ ID NO: 41350 - RNA, 21 nt, Artificial Sequence
  LRRK2 RNA guide
ccagcuuaugagauucaggag

SEQ ID NO: 41351 - RNA, 21 nt, Artificial Sequence
  LRRK2 RNA guide
ccaucaacaaccagcuuauga

SEQ ID NO: 41352 - RNA, 21 nt, Artificial Sequence
  LRRK2 RNA guide
ccugaaucucauaagcugguu

SEQ ID NO: 41353 - RNA, 21 nt, Artificial Sequence
  LRRK2 RNA guide
cucauaagcugguuguugaug

SEQ ID NO: 41354 - RNA, 21 nt, Artificial Sequence
  LRRK2 RNA guide
cuccugaaucucauaagcugg

SEQ ID NO: 41355 - RNA, 21 nt, Artificial Sequence
  LRRK2 RNA guide
cucuccugaaucucauaagcu

SEQ ID NO: 41356 - RNA, 21 nt, Artificial Sequence
  LRRK2 RNA guide
cugaaucucauaagcugguug

SEQ ID NO: 41357 - RNA, 21 nt, Artificial Sequence
  LRRK2 RNA guide
cugguuguugauggcuguugu

SEQ ID NO: 41358 - RNA, 21 nt, Artificial Sequence
  LRRK2 RNA guide
gaaucucauaagcugguuguu

SEQ ID NO: 41359 - RNA, 21 nt, Artificial Sequence
  LRRK2 RNA guide
gccaucaacaaccagcuuaug

SEQ ID NO: 41360 - RNA, 21 nt, Artificial Sequence
  LRRK2 RNA guide
gcugguuguugauggcuguug

SEQ ID NO: 41361 - RNA, 21 nt, Artificial Sequence
  LRRK2 RNA guide
uaagcugguuguugauggcug

SEQ ID NO: 41362 - RNA, 21 nt, Artificial Sequence
  LRRK2 RNA guide
ucaacaaccagcuuaugagau

SEQ ID NO: 41363 - RNA, 21 nt, Artificial Sequence
  LRRK2 RNA guide
ucauaagcugguuguugaugg

SEQ ID NO: 41364 - RNA, 21 nt, Artificial Sequence
  LRRK2 RNA guide
uccugaaucucauaagcuggu

SEQ ID NO: 41365 - RNA, 21 nt, Artificial Sequence
  LRRK2 RNA guide
ucucauaagcugguuguugau

SEQ ID NO: 41366 - RNA, 21 nt, Artificial Sequence
  LRRK2 RNA guide
ucuccugaaucucauaagcug

SEQ ID NO: 41367 - RNA, 21 nt, Artificial Sequence
  LRRK2 RNA guide
ugaaucucauaagcugguugu

SEQ ID NO: 41368 - RNA, 22 nt, Artificial Sequence
  LRRK2 RNA guide
aacaaccagcuuaugagauuca

SEQ ID NO: 41369 - RNA, 22 nt, Artificial Sequence
  LRRK2 RNA guide
aacagccaucaacaaccagcuu

SEQ ID NO: 41370 - RNA, 22 nt, Artificial Sequence
  LRRK2 RNA guide
aaccagcuuaugagauucagga

SEQ ID NO: 41371 - RNA, 22 nt, Artificial Sequence
  LRRK2 RNA guide
aagcugguuguugauggcuguu

SEQ ID NO: 41372 - RNA, 22 nt, Artificial Sequence
  LRRK2 RNA guide
aaucucauaagcugguuguuga

SEQ ID NO: 41373 - RNA, 22 nt, Artificial Sequence
  LRRK2 RNA guide
acaacagccaucaacaaccagc

SEQ ID NO: 41374 - RNA, 22 nt, Artificial Sequence
  LRRK2 RNA guide
acaaccagcuuaugagauucag

SEQ ID NO: 41375 - RNA, 22 nt, Artificial Sequence
  LRRK2 RNA guide
acagccaucaacaaccagcuua

SEQ ID NO: 41376 - RNA, 22 nt, Artificial Sequence
  LRRK2 RNA guide
accagcuuaugagauucaggag

SEQ ID NO: 41377 - RNA, 22 nt, Artificial Sequence
  LRRK2 RNA guide
agccaucaacaaccagcuuaug

SEQ ID NO: 41378 - RNA, 22 nt, Artificial Sequence
  LRRK2 RNA guide
agcugguuguugauggcuguug

SEQ ID NO: 41379 - RNA, 22 nt, Artificial Sequence
  LRRK2 RNA guide
auaagcugguuguugauggcug

SEQ ID NO: 41380 - RNA, 22 nt, Artificial Sequence
  LRRK2 RNA guide
aucaacaaccagcuuaugagau

SEQ ID NO: 41381 - RNA, 22 nt, Artificial Sequence
  LRRK2 RNA guide
aucucauaagcugguuguugau

SEQ ID NO: 41382 - RNA, 22 nt, Artificial Sequence
  LRRK2 RNA guide
caacaaccagcuuaugagauuc

SEQ ID NO: 41383 - RNA, 22 nt, Artificial Sequence
  LRRK2 RNA guide
caacagccaucaacaaccagcu

SEQ ID NO: 41384 - RNA, 22 nt, Artificial Sequence
  LRRK2 RNA guide
caaccagcuuaugagauucagg

SEQ ID NO: 41385 - RNA, 22 nt, Artificial Sequence
  LRRK2 RNA guide
cacaacagccaucaacaaccag

SEQ ID NO: 41386 - RNA, 22 nt, Artificial Sequence
  LRRK2 RNA guide
cagccaucaacaaccagcuuau

SEQ ID NO: 41387 - RNA, 22 nt, Artificial Sequence
  LRRK2 RNA guide
cagcuuaugagauucaggagag

SEQ ID NO: 41388 - RNA, 22 nt, Artificial Sequence
  LRRK2 RNA guide
cauaagcugguuguugauggcu

SEQ ID NO: 41389 - RNA, 22 nt, Artificial Sequence
  LRRK2 RNA guide
caucaacaaccagcuuaugaga

SEQ ID NO: 41390 - RNA, 22 nt, Artificial Sequence
  LRRK2 RNA guide
ccagcuuaugagauucaggaga

SEQ ID NO: 41391 - RNA, 22 nt, Artificial Sequence
  LRRK2 RNA guide
ccaucaacaaccagcuuaugag

SEQ ID NO: 41392 - RNA, 22 nt, Artificial Sequence
  LRRK2 RNA guide
ccugaaucucauaagcugguug

SEQ ID NO: 41393 - RNA, 22 nt, Artificial Sequence
  LRRK2 RNA guide
cucauaagcugguuguugaugg

SEQ ID NO: 41394 - RNA, 22 nt, Artificial Sequence
  LRRK2 RNA guide
cuccugaaucucauaagcuggu

SEQ ID NO: 41395 - RNA, 22 nt, Artificial Sequence
  LRRK2 RNA guide
cucuccugaaucucauaagcug

SEQ ID NO: 41396 - RNA, 22 nt, Artificial Sequence
  LRRK2 RNA guide
cugaaucucauaagcugguugu

SEQ ID NO: 41397 - RNA, 22 nt, Artificial Sequence
  LRRK2 RNA guide
cugguuguugauggcuguugug

SEQ ID NO: 41398 - RNA, 22 nt, Artificial Sequence
  LRRK2 RNA guide
gaaucucauaagcugguuguug

SEQ ID NO: 41399 - RNA, 22 nt, Artificial Sequence
  LRRK2 RNA guide
gccaucaacaaccagcuuauga

SEQ ID NO: 41400 - RNA, 22 nt, Artificial Sequence
  LRRK2 RNA guide
gcugguuguugauggcuguugu

SEQ ID NO: 41401 - RNA, 22 nt, Artificial Sequence
  LRRK2 RNA guide
uaagcugguuguugauggcugu

SEQ ID NO: 41402 - RNA, 22 nt, Artificial Sequence
  LRRK2 RNA guide
ucaacaaccagcuuaugagauu

SEQ ID NO: 41403 - RNA, 22 nt, Artificial Sequence
  LRRK2 RNA guide
ucacaacagccaucaacaacca

SEQ ID NO: 41404 - RNA, 22 nt, Artificial Sequence
  LRRK2 RNA guide
ucauaagcugguuguugauggc

SEQ ID NO: 41405 - RNA, 22 nt, Artificial Sequence
  LRRK2 RNA guide
uccugaaucucauaagcugguu

SEQ ID NO: 41406 - RNA, 22 nt, Artificial Sequence
  LRRK2 RNA guide
ucucauaagcugguuguugaug

SEQ ID NO: 41407 - RNA, 22 nt, Artificial Sequence
  LRRK2 RNA guide
ucuccugaaucucauaagcugg

SEQ ID NO: 41408 - RNA, 22 nt, Artificial Sequence
  LRRK2 RNA guide
ucucuccugaaucucauaagcu

SEQ ID NO: 41409 - RNA, 22 nt, Artificial Sequence
  LRRK2 RNA guide
ugaaucucauaagcugguuguu

SEQ ID NO: 41410 - RNA, 20 nt, Artificial Sequence
  LRRK2 RNA guide
aaaaugugcaugcuccccac

SEQ ID NO: 41411 - RNA, 20 nt, Artificial Sequence
  LRRK2 RNA guide
aaaucaaaaugugcaugcuc

SEQ ID NO: 41412 - RNA, 20 nt, Artificial Sequence
  LRRK2 RNA guide
aaaugugcaugcuccccacg

SEQ ID NO: 41413 - RNA, 20 nt, Artificial Sequence
  LRRK2 RNA guide
aagucagguagcguggggag

SEQ ID NO: 41414 - RNA, 20 nt, Artificial Sequence
  LRRK2 RNA guide
aaucaaaaugugcaugcucc

SEQ ID NO: 41415 - RNA, 20 nt, Artificial Sequence
  LRRK2 RNA guide
aaugugcaugcuccccacgc

SEQ ID NO: 41416 - RNA, 20 nt, Artificial Sequence
  LRRK2 RNA guide
agcguggggagcaugcacau

SEQ ID NO: 41417 - RNA, 20 nt, Artificial Sequence
  LRRK2 RNA guide
agguagcguggggagcaugc

SEQ ID NO: 41418 - RNA, 20 nt, Artificial Sequence
  LRRK2 RNA guide
agucagguagcguggggagc

SEQ ID NO: 41419 - RNA, 20 nt, Artificial Sequence
  LRRK2 RNA guide
aguuugaagucagguagcgu

SEQ ID NO: 41420 - RNA, 20 nt, Artificial Sequence
  LRRK2 RNA guide
auaguuugaagucagguagc

SEQ ID NO: 41421 - RNA, 20 nt, Artificial Sequence
  LRRK2 RNA guide
aucaaaaugugcaugcuccc

SEQ ID NO: 41422 - RNA, 20 nt, Artificial Sequence
  LRRK2 RNA guide
augcuccccacgcuaccuga

SEQ ID NO: 41423 - RNA, 20 nt, Artificial Sequence
  LRRK2 RNA guide
augugcaugcuccccacgcu

SEQ ID NO: 41424 - RNA, 20 nt, Artificial Sequence
  LRRK2 RNA guide
caaaaugugcaugcucccca

SEQ ID NO: 41425 - RNA, 20 nt, Artificial Sequence
  LRRK2 RNA guide
cagguagcguggggagcaug

SEQ ID NO: 41426 - RNA, 20 nt, Artificial Sequence
  LRRK2 RNA guide
caugcuccccacgcuaccug

SEQ ID NO: 41427 - RNA, 20 nt, Artificial Sequence
  LRRK2 RNA guide
cccacgcuaccugacuucaa

SEQ ID NO: 41428 - RNA, 20 nt, Artificial Sequence
  LRRK2 RNA guide
ccccacgcuaccugacuuca

SEQ ID NO: 41429 - RNA, 20 nt, Artificial Sequence
  LRRK2 RNA guide
cguggggagcaugcacauuu

SEQ ID NO: 41430 - RNA, 20 nt, Artificial Sequence
  LRRK2 RNA guide
cuccccacgcuaccugacuu

SEQ ID NO: 41431 - RNA, 20 nt, Artificial Sequence
  LRRK2 RNA guide
gaagucagguagcgugggga

SEQ ID NO: 41432 - RNA, 20 nt, Artificial Sequence
  LRRK2 RNA guide
gcaugcuccccacgcuaccu

SEQ ID NO: 41433 - RNA, 20 nt, Artificial Sequence
  LRRK2 RNA guide
gcguggggagcaugcacauu

SEQ ID NO: 41434 - RNA, 20 nt, Artificial Sequence
  LRRK2 RNA guide
gcuccccacgcuaccugacu

SEQ ID NO: 41435 - RNA, 20 nt, Artificial Sequence
  LRRK2 RNA guide
gguagcguggggagcaugca

SEQ ID NO: 41436 - RNA, 20 nt, Artificial Sequence
  LRRK2 RNA guide
guagcguggggagcaugcac

SEQ ID NO: 41437 - RNA, 20 nt, Artificial Sequence
  LRRK2 RNA guide
gucagguagcguggggagca

SEQ ID NO: 41438 - RNA, 20 nt, Artificial Sequence
  LRRK2 RNA guide
gugcaugcuccccacgcuac

SEQ ID NO: 41439 - RNA, 20 nt, Artificial Sequence
  LRRK2 RNA guide
guuugaagucagguagcgug

SEQ ID NO: 41440 - RNA, 20 nt, Artificial Sequence
  LRRK2 RNA guide
uagcguggggagcaugcaca

SEQ ID NO: 41441 - RNA, 20 nt, Artificial Sequence
  LRRK2 RNA guide
uaguuugaagucagguagcg

SEQ ID NO: 41442 - RNA, 20 nt, Artificial Sequence
  LRRK2 RNA guide
ucaaaaugugcaugcucccc

SEQ ID NO: 41443 - RNA, 20 nt, Artificial Sequence
  LRRK2 RNA guide
ucagguagcguggggagcau

SEQ ID NO: 41444 - RNA, 20 nt, Artificial Sequence
  LRRK2 RNA guide
uccccacgcuaccugacuuc

SEQ ID NO: 41445 - RNA, 20 nt, Artificial Sequence
  LRRK2 RNA guide
ugaagucagguagcgugggg

SEQ ID NO: 41446 - RNA, 20 nt, Artificial Sequence
  LRRK2 RNA guide
ugcaugcuccccacgcuacc

SEQ ID NO: 41447 - RNA, 20 nt, Artificial Sequence
  LRRK2 RNA guide
ugcuccccacgcuaccugac

SEQ ID NO: 41448 - RNA, 20 nt, Artificial Sequence
  LRRK2 RNA guide
ugugcaugcuccccacgcua

SEQ ID NO: 41449 - RNA, 20 nt, Artificial Sequence
  LRRK2 RNA guide
uugaagucagguagcguggg

SEQ ID NO: 41450 - RNA, 20 nt, Artificial Sequence
  LRRK2 RNA guide
uuugaagucagguagcgugg

SEQ ID NO: 41451 - RNA, 21 nt, Artificial Sequence
  LRRK2 RNA guide
aaaaucaaaaugugcaugcuc

SEQ ID NO: 41452 - RNA, 21 nt, Artificial Sequence
  LRRK2 RNA guide
aaaaugugcaugcuccccacg

SEQ ID NO: 41453 - RNA, 21 nt, Artificial Sequence
  LRRK2 RNA guide
aaaucaaaaugugcaugcucc

SEQ ID NO: 41454 - RNA, 21 nt, Artificial Sequence
  LRRK2 RNA guide
aaaugugcaugcuccccacgc

SEQ ID NO: 41455 - RNA, 21 nt, Artificial Sequence
  LRRK2 RNA guide
aagucagguagcguggggagc

SEQ ID NO: 41456 - RNA, 21 nt, Artificial Sequence
  LRRK2 RNA guide
aaucaaaaugugcaugcuccc

SEQ ID NO: 41457 - RNA, 21 nt, Artificial Sequence
  LRRK2 RNA guide
aaugugcaugcuccccacgcu

SEQ ID NO: 41458 - RNA, 21 nt, Artificial Sequence
  LRRK2 RNA guide
agcguggggagcaugcacauu

SEQ ID NO: 41459 - RNA, 21 nt, Artificial Sequence
  LRRK2 RNA guide
agguagcguggggagcaugca

SEQ ID NO: 41460 - RNA, 21 nt, Artificial Sequence
  LRRK2 RNA guide
agucagguagcguggggagca

SEQ ID NO: 41461 - RNA, 21 nt, Artificial Sequence
  LRRK2 RNA guide
aguuugaagucagguagcgug

SEQ ID NO: 41462 - RNA, 21 nt, Artificial Sequence
  LRRK2 RNA guide
auaguuugaagucagguagcg

SEQ ID NO: 41463 - RNA, 21 nt, Artificial Sequence
  LRRK2 RNA guide
aucaaaaugugcaugcucccc

SEQ ID NO: 41464 - RNA, 21 nt, Artificial Sequence
  LRRK2 RNA guide
augcuccccacgcuaccugac

SEQ ID NO: 41465 - RNA, 21 nt, Artificial Sequence
  LRRK2 RNA guide
augugcaugcuccccacgcua

SEQ ID NO: 41466 - RNA, 21 nt, Artificial Sequence
  LRRK2 RNA guide
caaaaugugcaugcuccccac

SEQ ID NO: 41467 - RNA, 21 nt, Artificial Sequence
  LRRK2 RNA guide
cagguagcguggggagcaugc

SEQ ID NO: 41468 - RNA, 21 nt, Artificial Sequence
  LRRK2 RNA guide
caugcuccccacgcuaccuga

SEQ ID NO: 41469 - RNA, 21 nt, Artificial Sequence
  LRRK2 RNA guide
cccacgcuaccugacuucaaa

SEQ ID NO: 41470 - RNA, 21 nt, Artificial Sequence
  LRRK2 RNA guide
ccccacgcuaccugacuucaa

SEQ ID NO: 41471 - RNA, 21 nt, Artificial Sequence
  LRRK2 RNA guide
cguggggagcaugcacauuuu

SEQ ID NO: 41472 - RNA, 21 nt, Artificial Sequence
  LRRK2 RNA guide
cuccccacgcuaccugacuuc

SEQ ID NO: 41473 - RNA, 21 nt, Artificial Sequence
  LRRK2 RNA guide
gaagucagguagcguggggag

SEQ ID NO: 41474 - RNA, 21 nt, Artificial Sequence
  LRRK2 RNA guide
gcaugcuccccacgcuaccug

SEQ ID NO: 41475 - RNA, 21 nt, Artificial Sequence
  LRRK2 RNA guide
gcguggggagcaugcacauuu

SEQ ID NO: 41476 - RNA, 21 nt, Artificial Sequence
  LRRK2 RNA guide
gcuccccacgcuaccugacuu

SEQ ID NO: 41477 - RNA, 21 nt, Artificial Sequence
  LRRK2 RNA guide
gguagcguggggagcaugcac

SEQ ID NO: 41478 - RNA, 21 nt, Artificial Sequence
  LRRK2 RNA guide
guagcguggggagcaugcaca

SEQ ID NO: 41479 - RNA, 21 nt, Artificial Sequence
  LRRK2 RNA guide
gucagguagcguggggagcau

SEQ ID NO: 41480 - RNA, 21 nt, Artificial Sequence
  LRRK2 RNA guide
gugcaugcuccccacgcuacc

SEQ ID NO: 41481 - RNA, 21 nt, Artificial Sequence
  LRRK2 RNA guide
guuugaagucagguagcgugg

SEQ ID NO: 41482 - RNA, 21 nt, Artificial Sequence
  LRRK2 RNA guide
uagcguggggagcaugcacau

SEQ ID NO: 41483 - RNA, 21 nt, Artificial Sequence
  LRRK2 RNA guide
uaguuugaagucagguagcgu

SEQ ID NO: 41484 - RNA, 21 nt, Artificial Sequence
  LRRK2 RNA guide
uauaguuugaagucagguagc

SEQ ID NO: 41485 - RNA, 21 nt, Artificial Sequence
  LRRK2 RNA guide
ucaaaaugugcaugcucccca

SEQ ID NO: 41486 - RNA, 21 nt, Artificial Sequence
  LRRK2 RNA guide
ucagguagcguggggagcaug

SEQ ID NO: 41487 - RNA, 21 nt, Artificial Sequence
  LRRK2 RNA guide
uccccacgcuaccugacuuca

SEQ ID NO: 41488 - RNA, 21 nt, Artificial Sequence
  LRRK2 RNA guide
ugaagucagguagcgugggga

SEQ ID NO: 41489 - RNA, 21 nt, Artificial Sequence
  LRRK2 RNA guide
ugcaugcuccccacgcuaccu

SEQ ID NO: 41490 - RNA, 21 nt, Artificial Sequence
  LRRK2 RNA guide
ugcuccccacgcuaccugacu

SEQ ID NO: 41491 - RNA, 21 nt, Artificial Sequence
  LRRK2 RNA guide
ugugcaugcuccccacgcuac

SEQ ID NO: 41492 - RNA, 21 nt, Artificial Sequence
  LRRK2 RNA guide
uugaagucagguagcgugggg

SEQ ID NO: 41493 - RNA, 21 nt, Artificial Sequence
  LRRK2 RNA guide
uuugaagucagguagcguggg

SEQ ID NO: 41494 - RNA, 22 nt, Artificial Sequence
  LRRK2 RNA guide
aaaaucaaaaugugcaugcucc

SEQ ID NO: 41495 - RNA, 22 nt, Artificial Sequence
  LRRK2 RNA guide
aaaaugugcaugcuccccacgc

SEQ ID NO: 41496 - RNA, 22 nt, Artificial Sequence
  LRRK2 RNA guide
aaaucaaaaugugcaugcuccc

SEQ ID NO: 41497 - RNA, 22 nt, Artificial Sequence
  LRRK2 RNA guide
aaaugugcaugcuccccacgcu

SEQ ID NO: 41498 - RNA, 22 nt, Artificial Sequence
  LRRK2 RNA guide
aagucagguagcguggggagca

SEQ ID NO: 41499 - RNA, 22 nt, Artificial Sequence
  LRRK2 RNA guide
aaucaaaaugugcaugcucccc

SEQ ID NO: 41500 - RNA, 22 nt, Artificial Sequence
  LRRK2 RNA guide
aaugugcaugcuccccacgcua

SEQ ID NO: 41501 - RNA, 22 nt, Artificial Sequence
  LRRK2 RNA guide
agcguggggagcaugcacauuu

SEQ ID NO: 41502 - RNA, 22 nt, Artificial Sequence
  LRRK2 RNA guide
agguagcguggggagcaugcac

SEQ ID NO: 41503 - RNA, 22 nt, Artificial Sequence
  LRRK2 RNA guide
agucagguagcguggggagcau

SEQ ID NO: 41504 - RNA, 22 nt, Artificial Sequence
  LRRK2 RNA guide
aguuugaagucagguagcgugg

SEQ ID NO: 41505 - RNA, 22 nt, Artificial Sequence
  LRRK2 RNA guide
auaguuugaagucagguagcgu

SEQ ID NO: 41506 - RNA, 22 nt, Artificial Sequence
  LRRK2 RNA guide
aucaaaaugugcaugcucccca

SEQ ID NO: 41507 - RNA, 22 nt, Artificial Sequence
  LRRK2 RNA guide
augcuccccacgcuaccugacu

SEQ ID NO: 41508 - RNA, 22 nt, Artificial Sequence
  LRRK2 RNA guide
augugcaugcuccccacgcuac

SEQ ID NO: 41509 - RNA, 22 nt, Artificial Sequence
  LRRK2 RNA guide
caaaaugugcaugcuccccacg

SEQ ID NO: 41510 - RNA, 22 nt, Artificial Sequence
  LRRK2 RNA guide
cagguagcguggggagcaugca

SEQ ID NO: 41511 - RNA, 22 nt, Artificial Sequence
  LRRK2 RNA guide
caugcuccccacgcuaccugac

SEQ ID NO: 41512 - RNA, 22 nt, Artificial Sequence
  LRRK2 RNA guide
cccacgcuaccugacuucaaac

SEQ ID NO: 41513 - RNA, 22 nt, Artificial Sequence
  LRRK2 RNA guide
ccccacgcuaccugacuucaaa

SEQ ID NO: 41514 - RNA, 22 nt, Artificial Sequence
  LRRK2 RNA guide
cguggggagcaugcacauuuug

SEQ ID NO: 41515 - RNA, 22 nt, Artificial Sequence
  LRRK2 RNA guide
cuccccacgcuaccugacuuca

SEQ ID NO: 41516 - RNA, 22 nt, Artificial Sequence
  LRRK2 RNA guide
gaaaaucaaaaugugcaugcuc

SEQ ID NO: 41517 - RNA, 22 nt, Artificial Sequence
  LRRK2 RNA guide
gaagucagguagcguggggagc

SEQ ID NO: 41518 - RNA, 22 nt, Artificial Sequence
  LRRK2 RNA guide
gcaugcuccccacgcuaccuga

SEQ ID NO: 41519 - RNA, 22 nt, Artificial Sequence
  LRRK2 RNA guide
gcguggggagcaugcacauuuu

SEQ ID NO: 41520 - RNA, 22 nt, Artificial Sequence
  LRRK2 RNA guide
gcuccccacgcuaccugacuuc

SEQ ID NO: 41521 - RNA, 22 nt, Artificial Sequence
  LRRK2 RNA guide
gguagcguggggagcaugcaca

SEQ ID NO: 41522 - RNA, 22 nt, Artificial Sequence
  LRRK2 RNA guide
guagcguggggagcaugcacau

SEQ ID NO: 41523 - RNA, 22 nt, Artificial Sequence
  LRRK2 RNA guide
gucagguagcguggggagcaug

SEQ ID NO: 41524 - RNA, 22 nt, Artificial Sequence
  LRRK2 RNA guide
gugcaugcuccccacgcuaccu

SEQ ID NO: 41525 - RNA, 22 nt, Artificial Sequence
  LRRK2 RNA guide
guuugaagucagguagcguggg

SEQ ID NO: 41526 - RNA, 22 nt, Artificial Sequence
  LRRK2 RNA guide
uagcguggggagcaugcacauu

SEQ ID NO: 41527 - RNA, 22 nt, Artificial Sequence
  LRRK2 RNA guide
uaguuugaagucagguagcgug

SEQ ID NO: 41528 - RNA, 22 nt, Artificial Sequence
  LRRK2 RNA guide
uauaguuugaagucagguagcg

SEQ ID NO: 41529 - RNA, 22 nt, Artificial Sequence
  LRRK2 RNA guide
ucaaaaugugcaugcuccccac

SEQ ID NO: 41530 - RNA, 22 nt, Artificial Sequence
  LRRK2 RNA guide
ucagguagcguggggagcaugc

SEQ ID NO: 41531 - RNA, 22 nt, Artificial Sequence
  LRRK2 RNA guide
uccccacgcuaccugacuucaa

SEQ ID NO: 41532 - RNA, 22 nt, Artificial Sequence
  LRRK2 RNA guide
ugaagucagguagcguggggag

SEQ ID NO: 41533 - RNA, 22 nt, Artificial Sequence
  LRRK2 RNA guide
ugcaugcuccccacgcuaccug

SEQ ID NO: 41534 - RNA, 22 nt, Artificial Sequence
  LRRK2 RNA guide
ugcuccccacgcuaccugacuu

SEQ ID NO: 41535 - RNA, 22 nt, Artificial Sequence
  LRRK2 RNA guide
ugugcaugcuccccacgcuacc

SEQ ID NO: 41536 - RNA, 22 nt, Artificial Sequence
  LRRK2 RNA guide
uugaagucagguagcgugggga

SEQ ID NO: 41537 - RNA, 22 nt, Artificial Sequence
  LRRK2 RNA guide
uuugaagucagguagcgugggg

SEQ ID NO: 41538 - RNA, 20 nt, Artificial Sequence
  LRRK2 RNA guide
aaaaugugcaugcuccccau

SEQ ID NO: 41539 - RNA, 20 nt, Artificial Sequence
  LRRK2 RNA guide
aaaugugcaugcuccccaug

SEQ ID NO: 41540 - RNA, 20 nt, Artificial Sequence
  LRRK2 RNA guide
aagucagguagcauggggag

SEQ ID NO: 41541 - RNA, 20 nt, Artificial Sequence
  LRRK2 RNA guide
aaugugcaugcuccccaugc

SEQ ID NO: 41542 - RNA, 20 nt, Artificial Sequence
  LRRK2 RNA guide
agcauggggagcaugcacau

SEQ ID NO: 41543 - RNA, 20 nt, Artificial Sequence
  LRRK2 RNA guide
agguagcauggggagcaugc

SEQ ID NO: 41544 - RNA, 20 nt, Artificial Sequence
  LRRK2 RNA guide
agucagguagcauggggagc

SEQ ID NO: 41545 - RNA, 20 nt, Artificial Sequence
  LRRK2 RNA guide
aguuugaagucagguagcau

SEQ ID NO: 41546 - RNA, 20 nt, Artificial Sequence
  LRRK2 RNA guide
augcuccccaugcuaccuga

SEQ ID NO: 41547 - RNA, 20 nt, Artificial Sequence
  LRRK2 RNA guide
augugcaugcuccccaugcu

SEQ ID NO: 41548 - RNA, 20 nt, Artificial Sequence
  LRRK2 RNA guide
cagguagcauggggagcaug

SEQ ID NO: 41549 - RNA, 20 nt, Artificial Sequence
  LRRK2 RNA guide
caugcuccccaugcuaccug

SEQ ID NO: 41550 - RNA, 20 nt, Artificial Sequence
  LRRK2 RNA guide
cauggggagcaugcacauuu

SEQ ID NO: 41551 - RNA, 20 nt, Artificial Sequence
  LRRK2 RNA guide
cuccccaugcuaccugacuu

SEQ ID NO: 41552 - RNA, 20 nt, Artificial Sequence
  LRRK2 RNA guide
gaagucagguagcaugggga

SEQ ID NO: 41553 - RNA, 20 nt, Artificial Sequence
  LRRK2 RNA guide
gcaugcuccccaugcuaccu

SEQ ID NO: 41554 - RNA, 20 nt, Artificial Sequence
  LRRK2 RNA guide
gcauggggagcaugcacauu

SEQ ID NO: 41555 - RNA, 20 nt, Artificial Sequence
  LRRK2 RNA guide
gcuccccaugcuaccugacu

SEQ ID NO: 41556 - RNA, 20 nt, Artificial Sequence
  LRRK2 RNA guide
gguagcauggggagcaugca

SEQ ID NO: 41557 - RNA, 20 nt, Artificial Sequence
  LRRK2 RNA guide
guagcauggggagcaugcac

SEQ ID NO: 41558 - RNA, 20 nt, Artificial Sequence
  LRRK2 RNA guide
gucagguagcauggggagca

SEQ ID NO: 41559 - RNA, 20 nt, Artificial Sequence
  LRRK2 RNA guide
gugcaugcuccccaugcuac

SEQ ID NO: 41560 - RNA, 20 nt, Artificial Sequence
  LRRK2 RNA guide
guuugaagucagguagcaug

SEQ ID NO: 41561 - RNA, 20 nt, Artificial Sequence
  LRRK2 RNA guide
uagcauggggagcaugcaca

SEQ ID NO: 41562 - RNA, 20 nt, Artificial Sequence
  LRRK2 RNA guide
ucagguagcauggggagcau

SEQ ID NO: 41563 - RNA, 20 nt, Artificial Sequence
  LRRK2 RNA guide
uccccaugcuaccugacuuc

SEQ ID NO: 41564 - RNA, 20 nt, Artificial Sequence
  LRRK2 RNA guide
ugaagucagguagcaugggg

SEQ ID NO: 41565 - RNA, 20 nt, Artificial Sequence
  LRRK2 RNA guide
ugcaugcuccccaugcuacc

SEQ ID NO: 41566 - RNA, 20 nt, Artificial Sequence
  LRRK2 RNA guide
ugcuccccaugcuaccugac

SEQ ID NO: 41567 - RNA, 20 nt, Artificial Sequence
  LRRK2 RNA guide
ugugcaugcuccccaugcua

SEQ ID NO: 41568 - RNA, 20 nt, Artificial Sequence
  LRRK2 RNA guide
uugaagucagguagcauggg

SEQ ID NO: 41569 - RNA, 20 nt, Artificial Sequence
  LRRK2 RNA guide
uuugaagucagguagcaugg

SEQ ID NO: 41570 - RNA, 21 nt, Artificial Sequence
  LRRK2 RNA guide
aaaaugugcaugcuccccaug

SEQ ID NO: 41571 - RNA, 21 nt, Artificial Sequence
  LRRK2 RNA guide
aaaugugcaugcuccccaugc

SEQ ID NO: 41572 - RNA, 21 nt, Artificial Sequence
  LRRK2 RNA guide
aagucagguagcauggggagc

SEQ ID NO: 41573 - RNA, 21 nt, Artificial Sequence
  LRRK2 RNA guide
aaugugcaugcuccccaugcu

SEQ ID NO: 41574 - RNA, 21 nt, Artificial Sequence
  LRRK2 RNA guide
agcauggggagcaugcacauu

SEQ ID NO: 41575 - RNA, 21 nt, Artificial Sequence
  LRRK2 RNA guide
agguagcauggggagcaugca

SEQ ID NO: 41576 - RNA, 21 nt, Artificial Sequence
  LRRK2 RNA guide
agucagguagcauggggagca

SEQ ID NO: 41577 - RNA, 21 nt, Artificial Sequence
  LRRK2 RNA guide
aguuugaagucagguagcaug

SEQ ID NO: 41578 - RNA, 21 nt, Artificial Sequence
  LRRK2 RNA guide
augcuccccaugcuaccugac

SEQ ID NO: 41579 - RNA, 21 nt, Artificial Sequence
  LRRK2 RNA guide
augugcaugcuccccaugcua

SEQ ID NO: 41580 - RNA, 21 nt, Artificial Sequence
  LRRK2 RNA guide
caaaaugugcaugcuccccau

SEQ ID NO: 41581 - RNA, 21 nt, Artificial Sequence
  LRRK2 RNA guide
cagguagcauggggagcaugc

SEQ ID NO: 41582 - RNA, 21 nt, Artificial Sequence
  LRRK2 RNA guide
caugcuccccaugcuaccuga

SEQ ID NO: 41583 - RNA, 21 nt, Artificial Sequence
  LRRK2 RNA guide
cauggggagcaugcacauuuu

SEQ ID NO: 41584 - RNA, 21 nt, Artificial Sequence
  LRRK2 RNA guide
cuccccaugcuaccugacuuc

SEQ ID NO: 41585 - RNA, 21 nt, Artificial Sequence
  LRRK2 RNA guide
gaagucagguagcauggggag

SEQ ID NO: 41586 - RNA, 21 nt, Artificial Sequence
  LRRK2 RNA guide
gcaugcuccccaugcuaccug

SEQ ID NO: 41587 - RNA, 21 nt, Artificial Sequence
  LRRK2 RNA guide
gcauggggagcaugcacauuu

SEQ ID NO: 41588 - RNA, 21 nt, Artificial Sequence
  LRRK2 RNA guide
gcuccccaugcuaccugacuu

SEQ ID NO: 41589 - RNA, 21 nt, Artificial Sequence
  LRRK2 RNA guide
gguagcauggggagcaugcac

SEQ ID NO: 41590 - RNA, 21 nt, Artificial Sequence
  LRRK2 RNA guide
guagcauggggagcaugcaca

SEQ ID NO: 41591 - RNA, 21 nt, Artificial Sequence
  LRRK2 RNA guide
gucagguagcauggggagcau

SEQ ID NO: 41592 - RNA, 21 nt, Artificial Sequence
  LRRK2 RNA guide
gugcaugcuccccaugcuacc

SEQ ID NO: 41593 - RNA, 21 nt, Artificial Sequence
  LRRK2 RNA guide
guuugaagucagguagcaugg

SEQ ID NO: 41594 - RNA, 21 nt, Artificial Sequence
  LRRK2 RNA guide
uagcauggggagcaugcacau

SEQ ID NO: 41595 - RNA, 21 nt, Artificial Sequence
  LRRK2 RNA guide
uaguuugaagucagguagcau

SEQ ID NO: 41596 - RNA, 21 nt, Artificial Sequence
  LRRK2 RNA guide
ucagguagcauggggagcaug

SEQ ID NO: 41597 - RNA, 21 nt, Artificial Sequence
  LRRK2 RNA guide
uccccaugcuaccugacuuca

SEQ ID NO: 41598 - RNA, 21 nt, Artificial Sequence
  LRRK2 RNA guide
ugaagucagguagcaugggga

SEQ ID NO: 41599 - RNA, 21 nt, Artificial Sequence
  LRRK2 RNA guide
ugcaugcuccccaugcuaccu

SEQ ID NO: 41600 - RNA, 21 nt, Artificial Sequence
  LRRK2 RNA guide
ugcuccccaugcuaccugacu

SEQ ID NO: 41601 - RNA, 21 nt, Artificial Sequence
  LRRK2 RNA guide
ugugcaugcuccccaugcuac

SEQ ID NO: 41602 - RNA, 21 nt, Artificial Sequence
  LRRK2 RNA guide
uugaagucagguagcaugggg

SEQ ID NO: 41603 - RNA, 21 nt, Artificial Sequence
  LRRK2 RNA guide
uuugaagucagguagcauggg

SEQ ID NO: 41604 - RNA, 22 nt, Artificial Sequence
  LRRK2 RNA guide
aaaaugugcaugcuccccaugc

SEQ ID NO: 41605 - RNA, 22 nt, Artificial Sequence
  LRRK2 RNA guide
aaaugugcaugcuccccaugcu

SEQ ID NO: 41606 - RNA, 22 nt, Artificial Sequence
  LRRK2 RNA guide
aagucagguagcauggggagca

SEQ ID NO: 41607 - RNA, 22 nt, Artificial Sequence
  LRRK2 RNA guide
aaugugcaugcuccccaugcua

SEQ ID NO: 41608 - RNA, 22 nt, Artificial Sequence
  LRRK2 RNA guide
agcauggggagcaugcacauuu

SEQ ID NO: 41609 - RNA, 22 nt, Artificial Sequence
  LRRK2 RNA guide
agguagcauggggagcaugcac

SEQ ID NO: 41610 - RNA, 22 nt, Artificial Sequence
  LRRK2 RNA guide
agucagguagcauggggagcau

SEQ ID NO: 41611 - RNA, 22 nt, Artificial Sequence
  LRRK2 RNA guide
aguuugaagucagguagcaugg

SEQ ID NO: 41612 - RNA, 22 nt, Artificial Sequence
  LRRK2 RNA guide
auaguuugaagucagguagcau

SEQ ID NO: 41613 - RNA, 22 nt, Artificial Sequence
  LRRK2 RNA guide
augcuccccaugcuaccugacu

SEQ ID NO: 41614 - RNA, 22 nt, Artificial Sequence
  LRRK2 RNA guide
augugcaugcuccccaugcuac

SEQ ID NO: 41615 - RNA, 22 nt, Artificial Sequence
  LRRK2 RNA guide
caaaaugugcaugcuccccaug

SEQ ID NO: 41616 - RNA, 22 nt, Artificial Sequence
  LRRK2 RNA guide
cagguagcauggggagcaugca

SEQ ID NO: 41617 - RNA, 22 nt, Artificial Sequence
  LRRK2 RNA guide
caugcuccccaugcuaccugac

SEQ ID NO: 41618 - RNA, 22 nt, Artificial Sequence
  LRRK2 RNA guide
cauggggagcaugcacauuuug

SEQ ID NO: 41619 - RNA, 22 nt, Artificial Sequence
  LRRK2 RNA guide
cccaugcuaccugacuucaaac

SEQ ID NO: 41620 - RNA, 22 nt, Artificial Sequence
  LRRK2 RNA guide
cuccccaugcuaccugacuuca

SEQ ID NO: 41621 - RNA, 22 nt, Artificial Sequence
  LRRK2 RNA guide
gaagucagguagcauggggagc

SEQ ID NO: 41622 - RNA, 22 nt, Artificial Sequence
  LRRK2 RNA guide
gcaugcuccccaugcuaccuga

SEQ ID NO: 41623 - RNA, 22 nt, Artificial Sequence
  LRRK2 RNA guide
gcauggggagcaugcacauuuu

SEQ ID NO: 41624 - RNA, 22 nt, Artificial Sequence
  LRRK2 RNA guide
gcuccccaugcuaccugacuuc

SEQ ID NO: 41625 - RNA, 22 nt, Artificial Sequence
  LRRK2 RNA guide
gguagcauggggagcaugcaca

SEQ ID NO: 41626 - RNA, 22 nt, Artificial Sequence
  LRRK2 RNA guide
guagcauggggagcaugcacau

SEQ ID NO: 41627 - RNA, 22 nt, Artificial Sequence
  LRRK2 RNA guide
gucagguagcauggggagcaug

SEQ ID NO: 41628 - RNA, 22 nt, Artificial Sequence
  LRRK2 RNA guide
gugcaugcuccccaugcuaccu

SEQ ID NO: 41629 - RNA, 22 nt, Artificial Sequence
  LRRK2 RNA guide
guuugaagucagguagcauggg

SEQ ID NO: 41630 - RNA, 22 nt, Artificial Sequence
  LRRK2 RNA guide
uagcauggggagcaugcacauu

SEQ ID NO: 41631 - RNA, 22 nt, Artificial Sequence
  LRRK2 RNA guide
uaguuugaagucagguagcaug

SEQ ID NO: 41632 - RNA, 22 nt, Artificial Sequence
  LRRK2 RNA guide
ucaaaaugugcaugcuccccau

SEQ ID NO: 41633 - RNA, 22 nt, Artificial Sequence
  LRRK2 RNA guide
ucagguagcauggggagcaugc

SEQ ID NO: 41634 - RNA, 22 nt, Artificial Sequence
  LRRK2 RNA guide
uccccaugcuaccugacuucaa

SEQ ID NO: 41635 - RNA, 22 nt, Artificial Sequence
  LRRK2 RNA guide
ugaagucagguagcauggggag

SEQ ID NO: 41636 - RNA, 22 nt, Artificial Sequence
  LRRK2 RNA guide
ugcaugcuccccaugcuaccug

SEQ ID NO: 41637 - RNA, 22 nt, Artificial Sequence
  LRRK2 RNA guide
ugcuccccaugcuaccugacuu

SEQ ID NO: 41638 - RNA, 22 nt, Artificial Sequence
  LRRK2 RNA guide
ugugcaugcuccccaugcuacc

SEQ ID NO: 41639 - RNA, 22 nt, Artificial Sequence
  LRRK2 RNA guide
uugaagucagguagcaugggga

SEQ ID NO: 41640 - RNA, 22 nt, Artificial Sequence
  LRRK2 RNA guide
uuugaagucagguagcaugggg

SEQ ID NO: 41641 - RNA, 20 nt, Artificial Sequence
  LRRK2 RNA guide
ccaacaaauuuacaagaaag

SEQ ID NO: 41642 - RNA, 22 nt, Artificial Sequence
  LRRK2 RNA guide
cuccaacaaauuuacaagaaag

SEQ ID NO: 41643 - RNA, 21 nt, Artificial Sequence
  LRRK2 RNA guide
uagcacaccaacauggcacau

SEQ ID NO: 41644 - RNA, 22 nt, Artificial Sequence
  LRRK2 RNA guide
gaauacaugugccauguuggug

SEQ ID NO: 41645 - RNA, 22 nt, Artificial Sequence
  LRRK2 RNA guide
guagcacaccaacauggcacau

SEQ ID NO: 41646 - RNA, 22 nt, Artificial Sequence
  LRRK2 RNA guide
uagcacaccaacauggcacaug

SEQ ID NO: 41647 - RNA, 20 nt, Artificial Sequence
  LRRK2 RNA guide
aacuguggcaaucuuacugu

SEQ ID NO: 41648 - RNA, 20 nt, Artificial Sequence
  LRRK2 RNA guide
aagauugccacaguugccgc

SEQ ID NO: 41649 - RNA, 20 nt, Artificial Sequence
  LRRK2 RNA guide
acaguaagauugccacaguu

SEQ ID NO: 41650 - RNA, 20 nt, Artificial Sequence
  LRRK2 RNA guide
acgcggcaacuguggcaauc

SEQ ID NO: 41651 - RNA, 20 nt, Artificial Sequence
  LRRK2 RNA guide
acuguggcaaucuuacuguc

SEQ ID NO: 41652 - RNA, 20 nt, Artificial Sequence
  LRRK2 RNA guide
agauugccacaguugccgcg

SEQ ID NO: 41653 - RNA, 20 nt, Artificial Sequence
  LRRK2 RNA guide
aggacgcggcaacuguggca

SEQ ID NO: 41654 - RNA, 20 nt, Artificial Sequence
  LRRK2 RNA guide
aguaagauugccacaguugc

SEQ ID NO: 41655 - RNA, 20 nt, Artificial Sequence
  LRRK2 RNA guide
auauugacaguaagauugcc

SEQ ID NO: 41656 - RNA, 20 nt, Artificial Sequence
  LRRK2 RNA guide
auguccucaggacgcggcaa

SEQ ID NO: 41657 - RNA, 20 nt, Artificial Sequence
  LRRK2 RNA guide
auugacaguaagauugccac

SEQ ID NO: 41658 - RNA, 20 nt, Artificial Sequence
  LRRK2 RNA guide
auugccacaguugccgcguc

SEQ ID NO: 41659 - RNA, 20 nt, Artificial Sequence
  LRRK2 RNA guide
caacuguggcaaucuuacug

SEQ ID NO: 41660 - RNA, 20 nt, Artificial Sequence
  LRRK2 RNA guide
cacaguugccgcguccugag

SEQ ID NO: 41661 - RNA, 20 nt, Artificial Sequence
  LRRK2 RNA guide
caggacgcggcaacuguggc

SEQ ID NO: 41662 - RNA, 20 nt, Artificial Sequence
  LRRK2 RNA guide
caguaagauugccacaguug

SEQ ID NO: 41663 - RNA, 20 nt, Artificial Sequence
  LRRK2 RNA guide
cauguccucaggacgcggca

SEQ ID NO: 41664 - RNA, 20 nt, Artificial Sequence
  LRRK2 RNA guide
ccacaguugccgcguccuga

SEQ ID NO: 41665 - RNA, 20 nt, Artificial Sequence
  LRRK2 RNA guide
ccucaggacgcggcaacugu

SEQ ID NO: 41666 - RNA, 20 nt, Artificial Sequence
  LRRK2 RNA guide
cgcggcaacuguggcaaucu

SEQ ID NO: 41667 - RNA, 20 nt, Artificial Sequence
  LRRK2 RNA guide
cggcaacuguggcaaucuua

SEQ ID NO: 41668 - RNA, 20 nt, Artificial Sequence
  LRRK2 RNA guide
cuauauugacaguaagauug

SEQ ID NO: 41669 - RNA, 20 nt, Artificial Sequence
  LRRK2 RNA guide
cucaggacgcggcaacugug

SEQ ID NO: 41670 - RNA, 20 nt, Artificial Sequence
  LRRK2 RNA guide
cuguggcaaucuuacuguca

SEQ ID NO: 41671 - RNA, 20 nt, Artificial Sequence
  LRRK2 RNA guide
gacaguaagauugccacagu

SEQ ID NO: 41672 - RNA, 20 nt, Artificial Sequence
  LRRK2 RNA guide
gauugccacaguugccgcgu

SEQ ID NO: 41673 - RNA, 20 nt, Artificial Sequence
  LRRK2 RNA guide
gcaacuguggcaaucuuacu

SEQ ID NO: 41674 - RNA, 20 nt, Artificial Sequence
  LRRK2 RNA guide
gccacaguugccgcguccug

SEQ ID NO: 41675 - RNA, 20 nt, Artificial Sequence
  LRRK2 RNA guide
gcggcaacuguggcaaucuu

SEQ ID NO: 41676 - RNA, 20 nt, Artificial Sequence
  LRRK2 RNA guide
ggacgcggcaacuguggcaa

SEQ ID NO: 41677 - RNA, 20 nt, Artificial Sequence
  LRRK2 RNA guide
ggcaacuguggcaaucuuac

SEQ ID NO: 41678 - RNA, 20 nt, Artificial Sequence
  LRRK2 RNA guide
guaagauugccacaguugcc

SEQ ID NO: 41679 - RNA, 20 nt, Artificial Sequence
  LRRK2 RNA guide
guccucaggacgcggcaacu

SEQ ID NO: 41680 - RNA, 20 nt, Artificial Sequence
  LRRK2 RNA guide
guggcaaucuuacugucaau

SEQ ID NO: 41681 - RNA, 20 nt, Artificial Sequence
  LRRK2 RNA guide
uaagauugccacaguugccg

SEQ ID NO: 41682 - RNA, 20 nt, Artificial Sequence
  LRRK2 RNA guide
uauauugacaguaagauugc

SEQ ID NO: 41683 - RNA, 20 nt, Artificial Sequence
  LRRK2 RNA guide
uauugacaguaagauugcca

SEQ ID NO: 41684 - RNA, 20 nt, Artificial Sequence
  LRRK2 RNA guide
ucaggacgcggcaacugugg

SEQ ID NO: 41685 - RNA, 20 nt, Artificial Sequence
  LRRK2 RNA guide
uccucaggacgcggcaacug

SEQ ID NO: 41686 - RNA, 20 nt, Artificial Sequence
  LRRK2 RNA guide
ugacaguaagauugccacag

SEQ ID NO: 41687 - RNA, 20 nt, Artificial Sequence
  LRRK2 RNA guide
ugccacaguugccgcguccu

SEQ ID NO: 41688 - RNA, 20 nt, Artificial Sequence
  LRRK2 RNA guide
uguccucaggacgcggcaac

SEQ ID NO: 41689 - RNA, 20 nt, Artificial Sequence
  LRRK2 RNA guide
uguggcaaucuuacugucaa

SEQ ID NO: 41690 - RNA, 20 nt, Artificial Sequence
  LRRK2 RNA guide
uugacaguaagauugccaca

SEQ ID NO: 41691 - RNA, 20 nt, Artificial Sequence
  LRRK2 RNA guide
uugccacaguugccgcgucc

SEQ ID NO: 41692 - RNA, 21 nt, Artificial Sequence
  LRRK2 RNA guide
aacuguggcaaucuuacuguc

SEQ ID NO: 41693 - RNA, 21 nt, Artificial Sequence
  LRRK2 RNA guide
aagauugccacaguugccgcg

SEQ ID NO: 41694 - RNA, 21 nt, Artificial Sequence
  LRRK2 RNA guide
acaguaagauugccacaguug

SEQ ID NO: 41695 - RNA, 21 nt, Artificial Sequence
  LRRK2 RNA guide
acgcggcaacuguggcaaucu

SEQ ID NO: 41696 - RNA, 21 nt, Artificial Sequence
  LRRK2 RNA guide
acuguggcaaucuuacuguca

SEQ ID NO: 41697 - RNA, 21 nt, Artificial Sequence
  LRRK2 RNA guide
agauugccacaguugccgcgu

SEQ ID NO: 41698 - RNA, 21 nt, Artificial Sequence
  LRRK2 RNA guide
aggacgcggcaacuguggcaa

SEQ ID NO: 41699 - RNA, 21 nt, Artificial Sequence
  LRRK2 RNA guide
aguaagauugccacaguugcc

SEQ ID NO: 41700 - RNA, 21 nt, Artificial Sequence
  LRRK2 RNA guide
auauugacaguaagauugcca

SEQ ID NO: 41701 - RNA, 21 nt, Artificial Sequence
  LRRK2 RNA guide
auguccucaggacgcggcaac

SEQ ID NO: 41702 - RNA, 21 nt, Artificial Sequence
  LRRK2 RNA guide
auugacaguaagauugccaca

SEQ ID NO: 41703 - RNA, 21 nt, Artificial Sequence
  LRRK2 RNA guide
auugccacaguugccgcgucc

SEQ ID NO: 41704 - RNA, 21 nt, Artificial Sequence
  LRRK2 RNA guide
caacuguggcaaucuuacugu

SEQ ID NO: 41705 - RNA, 21 nt, Artificial Sequence
  LRRK2 RNA guide
cacaguugccgcguccugagg

SEQ ID NO: 41706 - RNA, 21 nt, Artificial Sequence
  LRRK2 RNA guide
caggacgcggcaacuguggca

SEQ ID NO: 41707 - RNA, 21 nt, Artificial Sequence
  LRRK2 RNA guide
caguaagauugccacaguugc

SEQ ID NO: 41708 - RNA, 21 nt, Artificial Sequence
  LRRK2 RNA guide
cauguccucaggacgcggcaa

SEQ ID NO: 41709 - RNA, 21 nt, Artificial Sequence
  LRRK2 RNA guide
ccacaguugccgcguccugag

SEQ ID NO: 41710 - RNA, 21 nt, Artificial Sequence
  LRRK2 RNA guide
ccauguccucaggacgcggca

SEQ ID NO: 41711 - RNA, 21 nt, Artificial Sequence
  LRRK2 RNA guide
ccucaggacgcggcaacugug

SEQ ID NO: 41712 - RNA, 21 nt, Artificial Sequence
  LRRK2 RNA guide
cgcggcaacuguggcaaucuu

SEQ ID NO: 41713 - RNA, 21 nt, Artificial Sequence
  LRRK2 RNA guide
cggcaacuguggcaaucuuac

SEQ ID NO: 41714 - RNA, 21 nt, Artificial Sequence
  LRRK2 RNA guide
cuauauugacaguaagauugc

SEQ ID NO: 41715 - RNA, 21 nt, Artificial Sequence
  LRRK2 RNA guide
cucaggacgcggcaacugugg

SEQ ID NO: 41716 - RNA, 21 nt, Artificial Sequence
  LRRK2 RNA guide
cuguggcaaucuuacugucaa

SEQ ID NO: 41717 - RNA, 21 nt, Artificial Sequence
  LRRK2 RNA guide
gacaguaagauugccacaguu

SEQ ID NO: 41718 - RNA, 21 nt, Artificial Sequence
  LRRK2 RNA guide
gacgcggcaacuguggcaauc

SEQ ID NO: 41719 - RNA, 21 nt, Artificial Sequence
  LRRK2 RNA guide
gauugccacaguugccgcguc

SEQ ID NO: 41720 - RNA, 21 nt, Artificial Sequence
  LRRK2 RNA guide
gcaacuguggcaaucuuacug

SEQ ID NO: 41721 - RNA, 21 nt, Artificial Sequence
  LRRK2 RNA guide
gccacaguugccgcguccuga

SEQ ID NO: 41722 - RNA, 21 nt, Artificial Sequence
  LRRK2 RNA guide
gcggcaacuguggcaaucuua

SEQ ID NO: 41723 - RNA, 21 nt, Artificial Sequence
  LRRK2 RNA guide
ggacgcggcaacuguggcaau

SEQ ID NO: 41724 - RNA, 21 nt, Artificial Sequence
  LRRK2 RNA guide
ggcaacuguggcaaucuuacu

SEQ ID NO: 41725 - RNA, 21 nt, Artificial Sequence
  LRRK2 RNA guide
guaagauugccacaguugccg

SEQ ID NO: 41726 - RNA, 21 nt, Artificial Sequence
  LRRK2 RNA guide
guccucaggacgcggcaacug

SEQ ID NO: 41727 - RNA, 21 nt, Artificial Sequence
  LRRK2 RNA guide
guggcaaucuuacugucaaua

SEQ ID NO: 41728 - RNA, 21 nt, Artificial Sequence
  LRRK2 RNA guide
uaagauugccacaguugccgc

SEQ ID NO: 41729 - RNA, 21 nt, Artificial Sequence
  LRRK2 RNA guide
uauauugacaguaagauugcc

SEQ ID NO: 41730 - RNA, 21 nt, Artificial Sequence
  LRRK2 RNA guide
uauugacaguaagauugccac

SEQ ID NO: 41731 - RNA, 21 nt, Artificial Sequence
  LRRK2 RNA guide
ucaggacgcggcaacuguggc

SEQ ID NO: 41732 - RNA, 21 nt, Artificial Sequence
  LRRK2 RNA guide
uccucaggacgcggcaacugu

SEQ ID NO: 41733 - RNA, 21 nt, Artificial Sequence
  LRRK2 RNA guide
ugacaguaagauugccacagu

SEQ ID NO: 41734 - RNA, 21 nt, Artificial Sequence
  LRRK2 RNA guide
ugccacaguugccgcguccug

SEQ ID NO: 41735 - RNA, 21 nt, Artificial Sequence
  LRRK2 RNA guide
uguccucaggacgcggcaacu

SEQ ID NO: 41736 - RNA, 21 nt, Artificial Sequence
  LRRK2 RNA guide
uguggcaaucuuacugucaau

SEQ ID NO: 41737 - RNA, 21 nt, Artificial Sequence
  LRRK2 RNA guide
uugacaguaagauugccacag

SEQ ID NO: 41738 - RNA, 21 nt, Artificial Sequence
  LRRK2 RNA guide
uugccacaguugccgcguccu

SEQ ID NO: 41739 - RNA, 22 nt, Artificial Sequence
  LRRK2 RNA guide
aacuguggcaaucuuacuguca

SEQ ID NO: 41740 - RNA, 22 nt, Artificial Sequence
  LRRK2 RNA guide
aagauugccacaguugccgcgu

SEQ ID NO: 41741 - RNA, 22 nt, Artificial Sequence
  LRRK2 RNA guide
acaguaagauugccacaguugc

SEQ ID NO: 41742 - RNA, 22 nt, Artificial Sequence
  LRRK2 RNA guide
accauguccucaggacgcggca

SEQ ID NO: 41743 - RNA, 22 nt, Artificial Sequence
  LRRK2 RNA guide
acgcggcaacuguggcaaucuu

SEQ ID NO: 41744 - RNA, 22 nt, Artificial Sequence
  LRRK2 RNA guide
acuauauugacaguaagauugc

SEQ ID NO: 41745 - RNA, 22 nt, Artificial Sequence
  LRRK2 RNA guide
acuguggcaaucuuacugucaa

SEQ ID NO: 41746 - RNA, 22 nt, Artificial Sequence
  LRRK2 RNA guide
agauugccacaguugccgcguc

SEQ ID NO: 41747 - RNA, 22 nt, Artificial Sequence
  LRRK2 RNA guide
aggacgcggcaacuguggcaau

SEQ ID NO: 41748 - RNA, 22 nt, Artificial Sequence
  LRRK2 RNA guide
aguaagauugccacaguugccg

SEQ ID NO: 41749 - RNA, 22 nt, Artificial Sequence
  LRRK2 RNA guide
auauugacaguaagauugccac

SEQ ID NO: 41750 - RNA, 22 nt, Artificial Sequence
  LRRK2 RNA guide
auguccucaggacgcggcaacu

SEQ ID NO: 41751 - RNA, 22 nt, Artificial Sequence
  LRRK2 RNA guide
auugacaguaagauugccacag

SEQ ID NO: 41752 - RNA, 22 nt, Artificial Sequence
  LRRK2 RNA guide
auugccacaguugccgcguccu

SEQ ID NO: 41753 - RNA, 22 nt, Artificial Sequence
  LRRK2 RNA guide
caacuguggcaaucuuacuguc

SEQ ID NO: 41754 - RNA, 22 nt, Artificial Sequence
  LRRK2 RNA guide
cacaguugccgcguccugagga

SEQ ID NO: 41755 - RNA, 22 nt, Artificial Sequence
  LRRK2 RNA guide
caggacgcggcaacuguggcaa

SEQ ID NO: 41756 - RNA, 22 nt, Artificial Sequence
  LRRK2 RNA guide
caguaagauugccacaguugcc

SEQ ID NO: 41757 - RNA, 22 nt, Artificial Sequence
  LRRK2 RNA guide
cauguccucaggacgcggcaac

SEQ ID NO: 41758 - RNA, 22 nt, Artificial Sequence
  LRRK2 RNA guide
ccacaguugccgcguccugagg

SEQ ID NO: 41759 - RNA, 22 nt, Artificial Sequence
  LRRK2 RNA guide
ccauguccucaggacgcggcaa

SEQ ID NO: 41760 - RNA, 22 nt, Artificial Sequence
  LRRK2 RNA guide
ccucaggacgcggcaacugugg

SEQ ID NO: 41761 - RNA, 22 nt, Artificial Sequence
  LRRK2 RNA guide
cgcggcaacuguggcaaucuua

SEQ ID NO: 41762 - RNA, 22 nt, Artificial Sequence
  LRRK2 RNA guide
cggcaacuguggcaaucuuacu

SEQ ID NO: 41763 - RNA, 22 nt, Artificial Sequence
  LRRK2 RNA guide
cuauauugacaguaagauugcc

SEQ ID NO: 41764 - RNA, 22 nt, Artificial Sequence
  LRRK2 RNA guide
cucaggacgcggcaacuguggc

SEQ ID NO: 41765 - RNA, 22 nt, Artificial Sequence
  LRRK2 RNA guide
cuguggcaaucuuacugucaau

SEQ ID NO: 41766 - RNA, 22 nt, Artificial Sequence
  LRRK2 RNA guide
gacaguaagauugccacaguug

SEQ ID NO: 41767 - RNA, 22 nt, Artificial Sequence
  LRRK2 RNA guide
gacgcggcaacuguggcaaucu

SEQ ID NO: 41768 - RNA, 22 nt, Artificial Sequence
  LRRK2 RNA guide
gauugccacaguugccgcgucc

SEQ ID NO: 41769 - RNA, 22 nt, Artificial Sequence
  LRRK2 RNA guide
gcaacuguggcaaucuuacugu

SEQ ID NO: 41770 - RNA, 22 nt, Artificial Sequence
  LRRK2 RNA guide
gccacaguugccgcguccugag

SEQ ID NO: 41771 - RNA, 22 nt, Artificial Sequence
  LRRK2 RNA guide
gcggcaacuguggcaaucuuac

SEQ ID NO: 41772 - RNA, 22 nt, Artificial Sequence
  LRRK2 RNA guide
ggacgcggcaacuguggcaauc

SEQ ID NO: 41773 - RNA, 22 nt, Artificial Sequence
  LRRK2 RNA guide
ggcaacuguggcaaucuuacug

SEQ ID NO: 41774 - RNA, 22 nt, Artificial Sequence
  LRRK2 RNA guide
guaagauugccacaguugccgc

SEQ ID NO: 41775 - RNA, 22 nt, Artificial Sequence
  LRRK2 RNA guide
guccucaggacgcggcaacugu

SEQ ID NO: 41776 - RNA, 22 nt, Artificial Sequence
  LRRK2 RNA guide
guggcaaucuuacugucaauau

SEQ ID NO: 41777 - RNA, 22 nt, Artificial Sequence
  LRRK2 RNA guide
uaagauugccacaguugccgcg

SEQ ID NO: 41778 - RNA, 22 nt, Artificial Sequence
  LRRK2 RNA guide
uauauugacaguaagauugcca

SEQ ID NO: 41779 - RNA, 22 nt, Artificial Sequence
  LRRK2 RNA guide
uauugacaguaagauugccaca

SEQ ID NO: 41780 - RNA, 22 nt, Artificial Sequence
  LRRK2 RNA guide
ucaggacgcggcaacuguggca

SEQ ID NO: 41781 - RNA, 22 nt, Artificial Sequence
  LRRK2 RNA guide
uccucaggacgcggcaacugug

SEQ ID NO: 41782 - RNA, 22 nt, Artificial Sequence
  LRRK2 RNA guide
ugacaguaagauugccacaguu

SEQ ID NO: 41783 - RNA, 22 nt, Artificial Sequence
  LRRK2 RNA guide
ugccacaguugccgcguccuga

SEQ ID NO: 41784 - RNA, 22 nt, Artificial Sequence
  LRRK2 RNA guide
uguccucaggacgcggcaacug

SEQ ID NO: 41785 - RNA, 22 nt, Artificial Sequence
  LRRK2 RNA guide
uguggcaaucuuacugucaaua

SEQ ID NO: 41786 - RNA, 22 nt, Artificial Sequence
  LRRK2 RNA guide
uugacaguaagauugccacagu

SEQ ID NO: 41787 - RNA, 22 nt, Artificial Sequence
  LRRK2 RNA guide
uugccacaguugccgcguccug

SEQ ID NO: 41788 - RNA, 20 nt, Artificial Sequence
  LRRK2 RNA guide
aacugaggcaaucuuacugu

SEQ ID NO: 41789 - RNA, 20 nt, Artificial Sequence
  LRRK2 RNA guide
aagauugccucaguugccgc

SEQ ID NO: 41790 - RNA, 20 nt, Artificial Sequence
  LRRK2 RNA guide
acaguaagauugccucaguu

SEQ ID NO: 41791 - RNA, 20 nt, Artificial Sequence
  LRRK2 RNA guide
acgcggcaacugaggcaauc

SEQ ID NO: 41792 - RNA, 20 nt, Artificial Sequence
  LRRK2 RNA guide
acugaggcaaucuuacuguc

SEQ ID NO: 41793 - RNA, 20 nt, Artificial Sequence
  LRRK2 RNA guide
agauugccucaguugccgcg

SEQ ID NO: 41794 - RNA, 20 nt, Artificial Sequence
  LRRK2 RNA guide
aggacgcggcaacugaggca

SEQ ID NO: 41795 - RNA, 20 nt, Artificial Sequence
  LRRK2 RNA guide
aguaagauugccucaguugc

SEQ ID NO: 41796 - RNA, 20 nt, Artificial Sequence
  LRRK2 RNA guide
auugacaguaagauugccuc

SEQ ID NO: 41797 - RNA, 20 nt, Artificial Sequence
  LRRK2 RNA guide
auugccucaguugccgcguc

SEQ ID NO: 41798 - RNA, 20 nt, Artificial Sequence
  LRRK2 RNA guide
caacugaggcaaucuuacug

SEQ ID NO: 41799 - RNA, 20 nt, Artificial Sequence
  LRRK2 RNA guide
caggacgcggcaacugaggc

SEQ ID NO: 41800 - RNA, 20 nt, Artificial Sequence
  LRRK2 RNA guide
caguaagauugccucaguug

SEQ ID NO: 41801 - RNA, 20 nt, Artificial Sequence
  LRRK2 RNA guide
ccucaggacgcggcaacuga

SEQ ID NO: 41802 - RNA, 20 nt, Artificial Sequence
  LRRK2 RNA guide
ccucaguugccgcguccuga

SEQ ID NO: 41803 - RNA, 20 nt, Artificial Sequence
  LRRK2 RNA guide
cgcggcaacugaggcaaucu

SEQ ID NO: 41804 - RNA, 20 nt, Artificial Sequence
  LRRK2 RNA guide
cggcaacugaggcaaucuua

SEQ ID NO: 41805 - RNA, 20 nt, Artificial Sequence
  LRRK2 RNA guide
cucaggacgcggcaacugag

SEQ ID NO: 41806 - RNA, 20 nt, Artificial Sequence
  LRRK2 RNA guide
cucaguugccgcguccugag

SEQ ID NO: 41807 - RNA, 20 nt, Artificial Sequence
  LRRK2 RNA guide
cugaggcaaucuuacuguca

SEQ ID NO: 41808 - RNA, 20 nt, Artificial Sequence
  LRRK2 RNA guide
gacaguaagauugccucagu

SEQ ID NO: 41809 - RNA, 20 nt, Artificial Sequence
  LRRK2 RNA guide
gacgcggcaacugaggcaau

SEQ ID NO: 41810 - RNA, 20 nt, Artificial Sequence
  LRRK2 RNA guide
gaggcaaucuuacugucaau

SEQ ID NO: 41811 - RNA, 20 nt, Artificial Sequence
  LRRK2 RNA guide
gauugccucaguugccgcgu

SEQ ID NO: 41812 - RNA, 20 nt, Artificial Sequence
  LRRK2 RNA guide
gcaacugaggcaaucuuacu

SEQ ID NO: 41813 - RNA, 20 nt, Artificial Sequence
  LRRK2 RNA guide
gccucaguugccgcguccug

SEQ ID NO: 41814 - RNA, 20 nt, Artificial Sequence
  LRRK2 RNA guide
gcggcaacugaggcaaucuu

SEQ ID NO: 41815 - RNA, 20 nt, Artificial Sequence
  LRRK2 RNA guide
ggacgcggcaacugaggcaa

SEQ ID NO: 41816 - RNA, 20 nt, Artificial Sequence
  LRRK2 RNA guide
ggcaacugaggcaaucuuac

SEQ ID NO: 41817 - RNA, 20 nt, Artificial Sequence
  LRRK2 RNA guide
guaagauugccucaguugcc

SEQ ID NO: 41818 - RNA, 20 nt, Artificial Sequence
  LRRK2 RNA guide
uaagauugccucaguugccg

SEQ ID NO: 41819 - RNA, 20 nt, Artificial Sequence
  LRRK2 RNA guide
uauugacaguaagauugccu

SEQ ID NO: 41820 - RNA, 20 nt, Artificial Sequence
  LRRK2 RNA guide
ucaggacgcggcaacugagg

SEQ ID NO: 41821 - RNA, 20 nt, Artificial Sequence
  LRRK2 RNA guide
ugacaguaagauugccucag

SEQ ID NO: 41822 - RNA, 20 nt, Artificial Sequence
  LRRK2 RNA guide
ugaggcaaucuuacugucaa

SEQ ID NO: 41823 - RNA, 20 nt, Artificial Sequence
  LRRK2 RNA guide
ugccucaguugccgcguccu

SEQ ID NO: 41824 - RNA, 20 nt, Artificial Sequence
  LRRK2 RNA guide
uugacaguaagauugccuca

SEQ ID NO: 41825 - RNA, 20 nt, Artificial Sequence
  LRRK2 RNA guide
uugccucaguugccgcgucc

SEQ ID NO: 41826 - RNA, 21 nt, Artificial Sequence
  LRRK2 RNA guide
aacugaggcaaucuuacuguc

SEQ ID NO: 41827 - RNA, 21 nt, Artificial Sequence
  LRRK2 RNA guide
aagauugccucaguugccgcg

SEQ ID NO: 41828 - RNA, 21 nt, Artificial Sequence
  LRRK2 RNA guide
acaguaagauugccucaguug

SEQ ID NO: 41829 - RNA, 21 nt, Artificial Sequence
  LRRK2 RNA guide
acgcggcaacugaggcaaucu

SEQ ID NO: 41830 - RNA, 21 nt, Artificial Sequence
  LRRK2 RNA guide
acugaggcaaucuuacuguca

SEQ ID NO: 41831 - RNA, 21 nt, Artificial Sequence
  LRRK2 RNA guide
agauugccucaguugccgcgu

SEQ ID NO: 41832 - RNA, 21 nt, Artificial Sequence
  LRRK2 RNA guide
aggacgcggcaacugaggcaa

SEQ ID NO: 41833 - RNA, 21 nt, Artificial Sequence
  LRRK2 RNA guide
aguaagauugccucaguugcc

SEQ ID NO: 41834 - RNA, 21 nt, Artificial Sequence
  LRRK2 RNA guide
auauugacaguaagauugccu

SEQ ID NO: 41835 - RNA, 21 nt, Artificial Sequence
  LRRK2 RNA guide
auugacaguaagauugccuca

SEQ ID NO: 41836 - RNA, 21 nt, Artificial Sequence
  LRRK2 RNA guide
auugccucaguugccgcgucc

SEQ ID NO: 41837 - RNA, 21 nt, Artificial Sequence
  LRRK2 RNA guide
caacugaggcaaucuuacugu

SEQ ID NO: 41838 - RNA, 21 nt, Artificial Sequence
  LRRK2 RNA guide
caggacgcggcaacugaggca

SEQ ID NO: 41839 - RNA, 21 nt, Artificial Sequence
  LRRK2 RNA guide
caguaagauugccucaguugc

SEQ ID NO: 41840 - RNA, 21 nt, Artificial Sequence
  LRRK2 RNA guide
ccucaggacgcggcaacugag

SEQ ID NO: 41841 - RNA, 21 nt, Artificial Sequence
  LRRK2 RNA guide
ccucaguugccgcguccugag

SEQ ID NO: 41842 - RNA, 21 nt, Artificial Sequence
  LRRK2 RNA guide
cgcggcaacugaggcaaucuu

SEQ ID NO: 41843 - RNA, 21 nt, Artificial Sequence
  LRRK2 RNA guide
cggcaacugaggcaaucuuac

SEQ ID NO: 41844 - RNA, 21 nt, Artificial Sequence
  LRRK2 RNA guide
cucaggacgcggcaacugagg

SEQ ID NO: 41845 - RNA, 21 nt, Artificial Sequence
  LRRK2 RNA guide
cucaguugccgcguccugagg

SEQ ID NO: 41846 - RNA, 21 nt, Artificial Sequence
  LRRK2 RNA guide
cugaggcaaucuuacugucaa

SEQ ID NO: 41847 - RNA, 21 nt, Artificial Sequence
  LRRK2 RNA guide
gacaguaagauugccucaguu

SEQ ID NO: 41848 - RNA, 21 nt, Artificial Sequence
  LRRK2 RNA guide
gacgcggcaacugaggcaauc

SEQ ID NO: 41849 - RNA, 21 nt, Artificial Sequence
  LRRK2 RNA guide
gaggcaaucuuacugucaaua

SEQ ID NO: 41850 - RNA, 21 nt, Artificial Sequence
  LRRK2 RNA guide
gauugccucaguugccgcguc

SEQ ID NO: 41851 - RNA, 21 nt, Artificial Sequence
  LRRK2 RNA guide
gcaacugaggcaaucuuacug

SEQ ID NO: 41852 - RNA, 21 nt, Artificial Sequence
  LRRK2 RNA guide
gccucaguugccgcguccuga

SEQ ID NO: 41853 - RNA, 21 nt, Artificial Sequence
  LRRK2 RNA guide
gcggcaacugaggcaaucuua

SEQ ID NO: 41854 - RNA, 21 nt, Artificial Sequence
  LRRK2 RNA guide
ggacgcggcaacugaggcaau

SEQ ID NO: 41855 - RNA, 21 nt, Artificial Sequence
  LRRK2 RNA guide
ggcaacugaggcaaucuuacu

SEQ ID NO: 41856 - RNA, 21 nt, Artificial Sequence
  LRRK2 RNA guide
guaagauugccucaguugccg

SEQ ID NO: 41857 - RNA, 21 nt, Artificial Sequence
  LRRK2 RNA guide
uaagauugccucaguugccgc

SEQ ID NO: 41858 - RNA, 21 nt, Artificial Sequence
  LRRK2 RNA guide
uauugacaguaagauugccuc

SEQ ID NO: 41859 - RNA, 21 nt, Artificial Sequence
  LRRK2 RNA guide
ucaggacgcggcaacugaggc

SEQ ID NO: 41860 - RNA, 21 nt, Artificial Sequence
  LRRK2 RNA guide
uccucaggacgcggcaacuga

SEQ ID NO: 41861 - RNA, 21 nt, Artificial Sequence
  LRRK2 RNA guide
ugacaguaagauugccucagu

SEQ ID NO: 41862 - RNA, 21 nt, Artificial Sequence
  LRRK2 RNA guide
ugaggcaaucuuacugucaau

SEQ ID NO: 41863 - RNA, 21 nt, Artificial Sequence
  LRRK2 RNA guide
ugccucaguugccgcguccug

SEQ ID NO: 41864 - RNA, 21 nt, Artificial Sequence
  LRRK2 RNA guide
uugacaguaagauugccucag

SEQ ID NO: 41865 - RNA, 21 nt, Artificial Sequence
  LRRK2 RNA guide
uugccucaguugccgcguccu

SEQ ID NO: 41866 - RNA, 22 nt, Artificial Sequence
  LRRK2 RNA guide
aacugaggcaaucuuacuguca

SEQ ID NO: 41867 - RNA, 22 nt, Artificial Sequence
  LRRK2 RNA guide
aagauugccucaguugccgcgu

SEQ ID NO: 41868 - RNA, 22 nt, Artificial Sequence
  LRRK2 RNA guide
acaguaagauugccucaguugc

SEQ ID NO: 41869 - RNA, 22 nt, Artificial Sequence
  LRRK2 RNA guide
acgcggcaacugaggcaaucuu

SEQ ID NO: 41870 - RNA, 22 nt, Artificial Sequence
  LRRK2 RNA guide
acugaggcaaucuuacugucaa

SEQ ID NO: 41871 - RNA, 22 nt, Artificial Sequence
  LRRK2 RNA guide
agauugccucaguugccgcguc

SEQ ID NO: 41872 - RNA, 22 nt, Artificial Sequence
  LRRK2 RNA guide
aggacgcggcaacugaggcaau

SEQ ID NO: 41873 - RNA, 22 nt, Artificial Sequence
  LRRK2 RNA guide
aguaagauugccucaguugccg

SEQ ID NO: 41874 - RNA, 22 nt, Artificial Sequence
  LRRK2 RNA guide
auauugacaguaagauugccuc

SEQ ID NO: 41875 - RNA, 22 nt, Artificial Sequence
  LRRK2 RNA guide
auugacaguaagauugccucag

SEQ ID NO: 41876 - RNA, 22 nt, Artificial Sequence
  LRRK2 RNA guide
auugccucaguugccgcguccu

SEQ ID NO: 41877 - RNA, 22 nt, Artificial Sequence
  LRRK2 RNA guide
caacugaggcaaucuuacuguc

SEQ ID NO: 41878 - RNA, 22 nt, Artificial Sequence
  LRRK2 RNA guide
caggacgcggcaacugaggcaa

SEQ ID NO: 41879 - RNA, 22 nt, Artificial Sequence
  LRRK2 RNA guide
caguaagauugccucaguugcc

SEQ ID NO: 41880 - RNA, 22 nt, Artificial Sequence
  LRRK2 RNA guide
ccucaggacgcggcaacugagg

SEQ ID NO: 41881 - RNA, 22 nt, Artificial Sequence
  LRRK2 RNA guide
ccucaguugccgcguccugagg

SEQ ID NO: 41882 - RNA, 22 nt, Artificial Sequence
  LRRK2 RNA guide
cgcggcaacugaggcaaucuua

SEQ ID NO: 41883 - RNA, 22 nt, Artificial Sequence
  LRRK2 RNA guide
cggcaacugaggcaaucuuacu

SEQ ID NO: 41884 - RNA, 22 nt, Artificial Sequence
  LRRK2 RNA guide
cucaggacgcggcaacugaggc

SEQ ID NO: 41885 - RNA, 22 nt, Artificial Sequence
  LRRK2 RNA guide
cucaguugccgcguccugagga

SEQ ID NO: 41886 - RNA, 22 nt, Artificial Sequence
  LRRK2 RNA guide
cugaggcaaucuuacugucaau

SEQ ID NO: 41887 - RNA, 22 nt, Artificial Sequence
  LRRK2 RNA guide
gacaguaagauugccucaguug

SEQ ID NO: 41888 - RNA, 22 nt, Artificial Sequence
  LRRK2 RNA guide
gacgcggcaacugaggcaaucu

SEQ ID NO: 41889 - RNA, 22 nt, Artificial Sequence
  LRRK2 RNA guide
gaggcaaucuuacugucaauau

SEQ ID NO: 41890 - RNA, 22 nt, Artificial Sequence
  LRRK2 RNA guide
gauugccucaguugccgcgucc

SEQ ID NO: 41891 - RNA, 22 nt, Artificial Sequence
  LRRK2 RNA guide
gcaacugaggcaaucuuacugu

SEQ ID NO: 41892 - RNA, 22 nt, Artificial Sequence
  LRRK2 RNA guide
gccucaguugccgcguccugag

SEQ ID NO: 41893 - RNA, 22 nt, Artificial Sequence
  LRRK2 RNA guide
gcggcaacugaggcaaucuuac

SEQ ID NO: 41894 - RNA, 22 nt, Artificial Sequence
  LRRK2 RNA guide
ggacgcggcaacugaggcaauc

SEQ ID NO: 41895 - RNA, 22 nt, Artificial Sequence
  LRRK2 RNA guide
ggcaacugaggcaaucuuacug

SEQ ID NO: 41896 - RNA, 22 nt, Artificial Sequence
  LRRK2 RNA guide
guaagauugccucaguugccgc

SEQ ID NO: 41897 - RNA, 22 nt, Artificial Sequence
  LRRK2 RNA guide
guccucaggacgcggcaacuga

SEQ ID NO: 41898 - RNA, 22 nt, Artificial Sequence
  LRRK2 RNA guide
uaagauugccucaguugccgcg

SEQ ID NO: 41899 - RNA, 22 nt, Artificial Sequence
  LRRK2 RNA guide
uauauugacaguaagauugccu

SEQ ID NO: 41900 - RNA, 22 nt, Artificial Sequence
  LRRK2 RNA guide
uauugacaguaagauugccuca

SEQ ID NO: 41901 - RNA, 22 nt, Artificial Sequence
  LRRK2 RNA guide
ucaggacgcggcaacugaggca

SEQ ID NO: 41902 - RNA, 22 nt, Artificial Sequence
  LRRK2 RNA guide
uccucaggacgcggcaacugag

SEQ ID NO: 41903 - RNA, 22 nt, Artificial Sequence
  LRRK2 RNA guide
ugacaguaagauugccucaguu

SEQ ID NO: 41904 - RNA, 22 nt, Artificial Sequence
  LRRK2 RNA guide
ugaggcaaucuuacugucaaua

SEQ ID NO: 41905 - RNA, 22 nt, Artificial Sequence
  LRRK2 RNA guide
ugccucaguugccgcguccuga

SEQ ID NO: 41906 - RNA, 22 nt, Artificial Sequence
  LRRK2 RNA guide
uugacaguaagauugccucagu

SEQ ID NO: 41907 - RNA, 22 nt, Artificial Sequence
  LRRK2 RNA guide
uugccucaguugccgcguccug

SEQ ID NO: 41908 - RNA, 20 nt, Artificial Sequence
  LRRK2 RNA guide
aaaacagccguauagauaac

SEQ ID NO: 41909 - RNA, 20 nt, Artificial Sequence
  LRRK2 RNA guide
aaacagccguauagauaacu

SEQ ID NO: 41910 - RNA, 20 nt, Artificial Sequence
  LRRK2 RNA guide
aacagccguauagauaacug

SEQ ID NO: 41911 - RNA, 20 nt, Artificial Sequence
  LRRK2 RNA guide
aaccaguuaucuauacggcu

SEQ ID NO: 41912 - RNA, 20 nt, Artificial Sequence
  LRRK2 RNA guide
aacuggaaccaguuaucuau

SEQ ID NO: 41913 - RNA, 20 nt, Artificial Sequence
  LRRK2 RNA guide
aacugguuccaguuagccaa

SEQ ID NO: 41914 - RNA, 20 nt, Artificial Sequence
  LRRK2 RNA guide
aauguuggcuaacuggaacc

SEQ ID NO: 41915 - RNA, 20 nt, Artificial Sequence
  LRRK2 RNA guide
acagccguauagauaacugg

SEQ ID NO: 41916 - RNA, 20 nt, Artificial Sequence
  LRRK2 RNA guide
accaaaacagccguauagau

SEQ ID NO: 41917 - RNA, 20 nt, Artificial Sequence
  LRRK2 RNA guide
accaguuaucuauacggcug

SEQ ID NO: 41918 - RNA, 20 nt, Artificial Sequence
  LRRK2 RNA guide
acuggaaccaguuaucuaua

SEQ ID NO: 41919 - RNA, 20 nt, Artificial Sequence
  LRRK2 RNA guide
acugguuccaguuagccaac

SEQ ID NO: 41920 - RNA, 20 nt, Artificial Sequence
  LRRK2 RNA guide
agaauguuggcuaacuggaa

SEQ ID NO: 41921 - RNA, 20 nt, Artificial Sequence
  LRRK2 RNA guide
agagaauguuggcuaacugg

SEQ ID NO: 41922 - RNA, 20 nt, Artificial Sequence
  LRRK2 RNA guide
agauaacugguuccaguuag

SEQ ID NO: 41923 - RNA, 20 nt, Artificial Sequence
  LRRK2 RNA guide
agccguauagauaacugguu

SEQ ID NO: 41924 - RNA, 20 nt, Artificial Sequence
  LRRK2 RNA guide
auaacugguuccaguuagcc

SEQ ID NO: 41925 - RNA, 20 nt, Artificial Sequence
  LRRK2 RNA guide
auagauaacugguuccaguu

SEQ ID NO: 41926 - RNA, 20 nt, Artificial Sequence
  LRRK2 RNA guide
auguuggcuaacuggaacca

SEQ ID NO: 41927 - RNA, 20 nt, Artificial Sequence
  LRRK2 RNA guide
caaaacagccguauagauaa

SEQ ID NO: 41928 - RNA, 20 nt, Artificial Sequence
  LRRK2 RNA guide
cagccguauagauaacuggu

SEQ ID NO: 41929 - RNA, 20 nt, Artificial Sequence
  LRRK2 RNA guide
caguuaucuauacggcuguu

SEQ ID NO: 41930 - RNA, 20 nt, Artificial Sequence
  LRRK2 RNA guide
ccaaaacagccguauagaua

SEQ ID NO: 41931 - RNA, 20 nt, Artificial Sequence
  LRRK2 RNA guide
ccaguuaucuauacggcugu

SEQ ID NO: 41932 - RNA, 20 nt, Artificial Sequence
  LRRK2 RNA guide
ccguauagauaacugguucc

SEQ ID NO: 41933 - RNA, 20 nt, Artificial Sequence
  LRRK2 RNA guide
cguauagauaacugguucca

SEQ ID NO: 41934 - RNA, 20 nt, Artificial Sequence
  LRRK2 RNA guide
cuaacuggaaccaguuaucu

SEQ ID NO: 41935 - RNA, 20 nt, Artificial Sequence
  LRRK2 RNA guide
cuggaaccaguuaucuauac

SEQ ID NO: 41936 - RNA, 20 nt, Artificial Sequence
  LRRK2 RNA guide
cugguuccaguuagccaaca

SEQ ID NO: 41937 - RNA, 20 nt, Artificial Sequence
  LRRK2 RNA guide
gaaccaguuaucuauacggc

SEQ ID NO: 41938 - RNA, 20 nt, Artificial Sequence
  LRRK2 RNA guide
gaauguuggcuaacuggaac

SEQ ID NO: 41939 - RNA, 20 nt, Artificial Sequence
  LRRK2 RNA guide
gagaauguuggcuaacugga

SEQ ID NO: 41940 - RNA, 20 nt, Artificial Sequence
  LRRK2 RNA guide
gauaacugguuccaguuagc

SEQ ID NO: 41941 - RNA, 20 nt, Artificial Sequence
  LRRK2 RNA guide
gccguauagauaacugguuc

SEQ ID NO: 41942 - RNA, 20 nt, Artificial Sequence
  LRRK2 RNA guide
gcuaacuggaaccaguuauc

SEQ ID NO: 41943 - RNA, 20 nt, Artificial Sequence
  LRRK2 RNA guide
ggaaccaguuaucuauacgg

SEQ ID NO: 41944 - RNA, 20 nt, Artificial Sequence
  LRRK2 RNA guide
guauagauaacugguuccag

SEQ ID NO: 41945 - RNA, 20 nt, Artificial Sequence
  LRRK2 RNA guide
guuggcuaacuggaaccagu

SEQ ID NO: 41946 - RNA, 20 nt, Artificial Sequence
  LRRK2 RNA guide
uaacuggaaccaguuaucua

SEQ ID NO: 41947 - RNA, 20 nt, Artificial Sequence
  LRRK2 RNA guide
uaacugguuccaguuagcca

SEQ ID NO: 41948 - RNA, 20 nt, Artificial Sequence
  LRRK2 RNA guide
uaccaaaacagccguauaga

SEQ ID NO: 41949 - RNA, 20 nt, Artificial Sequence
  LRRK2 RNA guide
uagauaacugguuccaguua

SEQ ID NO: 41950 - RNA, 20 nt, Artificial Sequence
  LRRK2 RNA guide
uauagauaacugguuccagu

SEQ ID NO: 41951 - RNA, 20 nt, Artificial Sequence
  LRRK2 RNA guide
uggaaccaguuaucuauacg

SEQ ID NO: 41952 - RNA, 20 nt, Artificial Sequence
  LRRK2 RNA guide
uggcuaacuggaaccaguua

SEQ ID NO: 41953 - RNA, 20 nt, Artificial Sequence
  LRRK2 RNA guide
uguuggcuaacuggaaccag

SEQ ID NO: 41954 - RNA, 21 nt, Artificial Sequence
  LRRK2 RNA guide
aaaacagccguauagauaacu

SEQ ID NO: 41955 - RNA, 21 nt, Artificial Sequence
  LRRK2 RNA guide
aaacagccguauagauaacug

SEQ ID NO: 41956 - RNA, 21 nt, Artificial Sequence
  LRRK2 RNA guide
aacagccguauagauaacugg

SEQ ID NO: 41957 - RNA, 21 nt, Artificial Sequence
  LRRK2 RNA guide
aaccaguuaucuauacggcug

SEQ ID NO: 41958 - RNA, 21 nt, Artificial Sequence
  LRRK2 RNA guide
aacuggaaccaguuaucuaua

SEQ ID NO: 41959 - RNA, 21 nt, Artificial Sequence
  LRRK2 RNA guide
aacugguuccaguuagccaac

SEQ ID NO: 41960 - RNA, 21 nt, Artificial Sequence
  LRRK2 RNA guide
aauguuggcuaacuggaacca

SEQ ID NO: 41961 - RNA, 21 nt, Artificial Sequence
  LRRK2 RNA guide
acagccguauagauaacuggu

SEQ ID NO: 41962 - RNA, 21 nt, Artificial Sequence
  LRRK2 RNA guide
accaaaacagccguauagaua

SEQ ID NO: 41963 - RNA, 21 nt, Artificial Sequence
  LRRK2 RNA guide
accaguuaucuauacggcugu

SEQ ID NO: 41964 - RNA, 21 nt, Artificial Sequence
  LRRK2 RNA guide
acuggaaccaguuaucuauac

SEQ ID NO: 41965 - RNA, 21 nt, Artificial Sequence
  LRRK2 RNA guide
acugguuccaguuagccaaca

SEQ ID NO: 41966 - RNA, 21 nt, Artificial Sequence
  LRRK2 RNA guide
agaauguuggcuaacuggaac

SEQ ID NO: 41967 - RNA, 21 nt, Artificial Sequence
  LRRK2 RNA guide
agagaauguuggcuaacugga

SEQ ID NO: 41968 - RNA, 21 nt, Artificial Sequence
  LRRK2 RNA guide
agauaacugguuccaguuagc

SEQ ID NO: 41969 - RNA, 21 nt, Artificial Sequence
  LRRK2 RNA guide
agccguauagauaacugguuc

SEQ ID NO: 41970 - RNA, 21 nt, Artificial Sequence
  LRRK2 RNA guide
auaacugguuccaguuagcca

SEQ ID NO: 41971 - RNA, 21 nt, Artificial Sequence
  LRRK2 RNA guide
auagauaacugguuccaguua

SEQ ID NO: 41972 - RNA, 21 nt, Artificial Sequence
  LRRK2 RNA guide
auguuggcuaacuggaaccag

SEQ ID NO: 41973 - RNA, 21 nt, Artificial Sequence
  LRRK2 RNA guide
caaaacagccguauagauaac

SEQ ID NO: 41974 - RNA, 21 nt, Artificial Sequence
  LRRK2 RNA guide
cagccguauagauaacugguu

SEQ ID NO: 41975 - RNA, 21 nt, Artificial Sequence
  LRRK2 RNA guide
caguuaucuauacggcuguuu

SEQ ID NO: 41976 - RNA, 21 nt, Artificial Sequence
  LRRK2 RNA guide
ccaaaacagccguauagauaa

SEQ ID NO: 41977 - RNA, 21 nt, Artificial Sequence
  LRRK2 RNA guide
ccaguuaucuauacggcuguu

SEQ ID NO: 41978 - RNA, 21 nt, Artificial Sequence
  LRRK2 RNA guide
ccguauagauaacugguucca

SEQ ID NO: 41979 - RNA, 21 nt, Artificial Sequence
  LRRK2 RNA guide
cguauagauaacugguuccag

SEQ ID NO: 41980 - RNA, 21 nt, Artificial Sequence
  LRRK2 RNA guide
cuaacuggaaccaguuaucua

SEQ ID NO: 41981 - RNA, 21 nt, Artificial Sequence
  LRRK2 RNA guide
cuggaaccaguuaucuauacg

SEQ ID NO: 41982 - RNA, 21 nt, Artificial Sequence
  LRRK2 RNA guide
cugguuccaguuagccaacau

SEQ ID NO: 41983 - RNA, 21 nt, Artificial Sequence
  LRRK2 RNA guide
gaaccaguuaucuauacggcu

SEQ ID NO: 41984 - RNA, 21 nt, Artificial Sequence
  LRRK2 RNA guide
gaauguuggcuaacuggaacc

SEQ ID NO: 41985 - RNA, 21 nt, Artificial Sequence
  LRRK2 RNA guide
gagaauguuggcuaacuggaa

SEQ ID NO: 41986 - RNA, 21 nt, Artificial Sequence
  LRRK2 RNA guide
gauaacugguuccaguuagcc

SEQ ID NO: 41987 - RNA, 21 nt, Artificial Sequence
  LRRK2 RNA guide
gccguauagauaacugguucc

SEQ ID NO: 41988 - RNA, 21 nt, Artificial Sequence
  LRRK2 RNA guide
gcuaacuggaaccaguuaucu

SEQ ID NO: 41989 - RNA, 21 nt, Artificial Sequence
  LRRK2 RNA guide
ggaaccaguuaucuauacggc

SEQ ID NO: 41990 - RNA, 21 nt, Artificial Sequence
  LRRK2 RNA guide
ggcuaacuggaaccaguuauc

SEQ ID NO: 41991 - RNA, 21 nt, Artificial Sequence
  LRRK2 RNA guide
guaccaaaacagccguauaga

SEQ ID NO: 41992 - RNA, 21 nt, Artificial Sequence
  LRRK2 RNA guide
guauagauaacugguuccagu

SEQ ID NO: 41993 - RNA, 21 nt, Artificial Sequence
  LRRK2 RNA guide
guuggcuaacuggaaccaguu

SEQ ID NO: 41994 - RNA, 21 nt, Artificial Sequence
  LRRK2 RNA guide
uaacuggaaccaguuaucuau

SEQ ID NO: 41995 - RNA, 21 nt, Artificial Sequence
  LRRK2 RNA guide
uaacugguuccaguuagccaa

SEQ ID NO: 41996 - RNA, 21 nt, Artificial Sequence
  LRRK2 RNA guide
uaccaaaacagccguauagau

SEQ ID NO: 41997 - RNA, 21 nt, Artificial Sequence
  LRRK2 RNA guide
uagagaauguuggcuaacugg

SEQ ID NO: 41998 - RNA, 21 nt, Artificial Sequence
  LRRK2 RNA guide
uagauaacugguuccaguuag

SEQ ID NO: 41999 - RNA, 21 nt, Artificial Sequence
  LRRK2 RNA guide
uauagauaacugguuccaguu

SEQ ID NO: 42000 - RNA, 21 nt, Artificial Sequence
  LRRK2 RNA guide
uggaaccaguuaucuauacgg

SEQ ID NO: 42001 - RNA, 21 nt, Artificial Sequence
  LRRK2 RNA guide
uggcuaacuggaaccaguuau

SEQ ID NO: 42002 - RNA, 21 nt, Artificial Sequence
  LRRK2 RNA guide
uguuggcuaacuggaaccagu

SEQ ID NO: 42003 - RNA, 21 nt, Artificial Sequence
  LRRK2 RNA guide
uuggcuaacuggaaccaguua

SEQ ID NO: 42004 - RNA, 22 nt, Artificial Sequence
  LRRK2 RNA guide
aaaacagccguauagauaacug

SEQ ID NO: 42005 - RNA, 22 nt, Artificial Sequence
  LRRK2 RNA guide
aaacagccguauagauaacugg

SEQ ID NO: 42006 - RNA, 22 nt, Artificial Sequence
  LRRK2 RNA guide
aacagccguauagauaacuggu

SEQ ID NO: 42007 - RNA, 22 nt, Artificial Sequence
  LRRK2 RNA guide
aaccaguuaucuauacggcugu

SEQ ID NO: 42008 - RNA, 22 nt, Artificial Sequence
  LRRK2 RNA guide
aacuggaaccaguuaucuauac

SEQ ID NO: 42009 - RNA, 22 nt, Artificial Sequence
  LRRK2 RNA guide
aacugguuccaguuagccaaca

SEQ ID NO: 42010 - RNA, 22 nt, Artificial Sequence
  LRRK2 RNA guide
aauguuggcuaacuggaaccag

SEQ ID NO: 42011 - RNA, 22 nt, Artificial Sequence
  LRRK2 RNA guide
acagccguauagauaacugguu

SEQ ID NO: 42012 - RNA, 22 nt, Artificial Sequence
  LRRK2 RNA guide
accaaaacagccguauagauaa

SEQ ID NO: 42013 - RNA, 22 nt, Artificial Sequence
  LRRK2 RNA guide
accaguuaucuauacggcuguu

SEQ ID NO: 42014 - RNA, 22 nt, Artificial Sequence
  LRRK2 RNA guide
acuggaaccaguuaucuauacg

SEQ ID NO: 42015 - RNA, 22 nt, Artificial Sequence
  LRRK2 RNA guide
acugguuccaguuagccaacau

SEQ ID NO: 42016 - RNA, 22 nt, Artificial Sequence
  LRRK2 RNA guide
agaauguuggcuaacuggaacc

SEQ ID NO: 42017 - RNA, 22 nt, Artificial Sequence
  LRRK2 RNA guide
agagaauguuggcuaacuggaa

SEQ ID NO: 42018 - RNA, 22 nt, Artificial Sequence
  LRRK2 RNA guide
agauaacugguuccaguuagcc

SEQ ID NO: 42019 - RNA, 22 nt, Artificial Sequence
  LRRK2 RNA guide
agccguauagauaacugguucc

SEQ ID NO: 42020 - RNA, 22 nt, Artificial Sequence
  LRRK2 RNA guide
auaacugguuccaguuagccaa

SEQ ID NO: 42021 - RNA, 22 nt, Artificial Sequence
  LRRK2 RNA guide
auagauaacugguuccaguuag

SEQ ID NO: 42022 - RNA, 22 nt, Artificial Sequence
  LRRK2 RNA guide
auguuggcuaacuggaaccagu

SEQ ID NO: 42023 - RNA, 22 nt, Artificial Sequence
  LRRK2 RNA guide
caaaacagccguauagauaacu

SEQ ID NO: 42024 - RNA, 22 nt, Artificial Sequence
  LRRK2 RNA guide
cagccguauagauaacugguuc

SEQ ID NO: 42025 - RNA, 22 nt, Artificial Sequence
  LRRK2 RNA guide
caguuaucuauacggcuguuuu

SEQ ID NO: 42026 - RNA, 22 nt, Artificial Sequence
  LRRK2 RNA guide
ccaaaacagccguauagauaac

SEQ ID NO: 42027 - RNA, 22 nt, Artificial Sequence
  LRRK2 RNA guide
ccaguuaucuauacggcuguuu

SEQ ID NO: 42028 - RNA, 22 nt, Artificial Sequence
  LRRK2 RNA guide
ccguauagauaacugguuccag

SEQ ID NO: 42029 - RNA, 22 nt, Artificial Sequence
  LRRK2 RNA guide
cguauagauaacugguuccagu

SEQ ID NO: 42030 - RNA, 22 nt, Artificial Sequence
  LRRK2 RNA guide
cuaacuggaaccaguuaucuau

SEQ ID NO: 42031 - RNA, 22 nt, Artificial Sequence
  LRRK2 RNA guide
cuggaaccaguuaucuauacgg

SEQ ID NO: 42032 - RNA, 22 nt, Artificial Sequence
  LRRK2 RNA guide
cugguuccaguuagccaacauu

SEQ ID NO: 42033 - RNA, 22 nt, Artificial Sequence
  LRRK2 RNA guide
gaaccaguuaucuauacggcug

SEQ ID NO: 42034 - RNA, 22 nt, Artificial Sequence
  LRRK2 RNA guide
gaauguuggcuaacuggaacca

SEQ ID NO: 42035 - RNA, 22 nt, Artificial Sequence
  LRRK2 RNA guide
gagaauguuggcuaacuggaac

SEQ ID NO: 42036 - RNA, 22 nt, Artificial Sequence
  LRRK2 RNA guide
gauaacugguuccaguuagcca

SEQ ID NO: 42037 - RNA, 22 nt, Artificial Sequence
  LRRK2 RNA guide
gccguauagauaacugguucca

SEQ ID NO: 42038 - RNA, 22 nt, Artificial Sequence
  LRRK2 RNA guide
gcuaacuggaaccaguuaucua

SEQ ID NO: 42039 - RNA, 22 nt, Artificial Sequence
  LRRK2 RNA guide
ggaaccaguuaucuauacggcu

SEQ ID NO: 42040 - RNA, 22 nt, Artificial Sequence
  LRRK2 RNA guide
ggcuaacuggaaccaguuaucu

SEQ ID NO: 42041 - RNA, 22 nt, Artificial Sequence
  LRRK2 RNA guide
gguaccaaaacagccguauaga

SEQ ID NO: 42042 - RNA, 22 nt, Artificial Sequence
  LRRK2 RNA guide
guaccaaaacagccguauagau

SEQ ID NO: 42043 - RNA, 22 nt, Artificial Sequence
  LRRK2 RNA guide
guauagauaacugguuccaguu

SEQ ID NO: 42044 - RNA, 22 nt, Artificial Sequence
  LRRK2 RNA guide
guuggcuaacuggaaccaguua

SEQ ID NO: 42045 - RNA, 22 nt, Artificial Sequence
  LRRK2 RNA guide
uaacuggaaccaguuaucuaua

SEQ ID NO: 42046 - RNA, 22 nt, Artificial Sequence
  LRRK2 RNA guide
uaacugguuccaguuagccaac

SEQ ID NO: 42047 - RNA, 22 nt, Artificial Sequence
  LRRK2 RNA guide
uaccaaaacagccguauagaua

SEQ ID NO: 42048 - RNA, 22 nt, Artificial Sequence
  LRRK2 RNA guide
uagagaauguuggcuaacugga

SEQ ID NO: 42049 - RNA, 22 nt, Artificial Sequence
  LRRK2 RNA guide
uagauaacugguuccaguuagc

SEQ ID NO: 42050 - RNA, 22 nt, Artificial Sequence
  LRRK2 RNA guide
uauagauaacugguuccaguua

SEQ ID NO: 42051 - RNA, 22 nt, Artificial Sequence
  LRRK2 RNA guide
uggaaccaguuaucuauacggc

SEQ ID NO: 42052 - RNA, 22 nt, Artificial Sequence
  LRRK2 RNA guide
uggcuaacuggaaccaguuauc

SEQ ID NO: 42053 - RNA, 22 nt, Artificial Sequence
  LRRK2 RNA guide
uguuggcuaacuggaaccaguu

SEQ ID NO: 42054 - RNA, 22 nt, Artificial Sequence
  LRRK2 RNA guide
uuagagaauguuggcuaacugg

SEQ ID NO: 42055 - RNA, 22 nt, Artificial Sequence
  LRRK2 RNA guide
uuggcuaacuggaaccaguuau

SEQ ID NO: 42056 - RNA, 20 nt, Artificial Sequence
  LRRK2 RNA guide
aaacagccguauagauaacc

SEQ ID NO: 42057 - RNA, 20 nt, Artificial Sequence
  LRRK2 RNA guide
aacagccguauagauaaccg

SEQ ID NO: 42058 - RNA, 20 nt, Artificial Sequence
  LRRK2 RNA guide
aaccgguuaucuauacggcu

SEQ ID NO: 42059 - RNA, 20 nt, Artificial Sequence
  LRRK2 RNA guide
aaccgguuccaguuagccaa

SEQ ID NO: 42060 - RNA, 20 nt, Artificial Sequence
  LRRK2 RNA guide
aacuggaaccgguuaucuau

SEQ ID NO: 42061 - RNA, 20 nt, Artificial Sequence
  LRRK2 RNA guide
acagccguauagauaaccgg

SEQ ID NO: 42062 - RNA, 20 nt, Artificial Sequence
  LRRK2 RNA guide
accgguuaucuauacggcug

SEQ ID NO: 42063 - RNA, 20 nt, Artificial Sequence
  LRRK2 RNA guide
accgguuccaguuagccaac

SEQ ID NO: 42064 - RNA, 20 nt, Artificial Sequence
  LRRK2 RNA guide
acuggaaccgguuaucuaua

SEQ ID NO: 42065 - RNA, 20 nt, Artificial Sequence
  LRRK2 RNA guide
agauaaccgguuccaguuag

SEQ ID NO: 42066 - RNA, 20 nt, Artificial Sequence
  LRRK2 RNA guide
agccguauagauaaccgguu

SEQ ID NO: 42067 - RNA, 20 nt, Artificial Sequence
  LRRK2 RNA guide
auaaccgguuccaguuagcc

SEQ ID NO: 42068 - RNA, 20 nt, Artificial Sequence
  LRRK2 RNA guide
auagauaaccgguuccaguu

SEQ ID NO: 42069 - RNA, 20 nt, Artificial Sequence
  LRRK2 RNA guide
auguuggcuaacuggaaccg

SEQ ID NO: 42070 - RNA, 20 nt, Artificial Sequence
  LRRK2 RNA guide
cagccguauagauaaccggu

SEQ ID NO: 42071 - RNA, 20 nt, Artificial Sequence
  LRRK2 RNA guide
ccgguuaucuauacggcugu

SEQ ID NO: 42072 - RNA, 20 nt, Artificial Sequence
  LRRK2 RNA guide
ccgguuccaguuagccaaca

SEQ ID NO: 42073 - RNA, 20 nt, Artificial Sequence
  LRRK2 RNA guide
ccguauagauaaccgguucc

SEQ ID NO: 42074 - RNA, 20 nt, Artificial Sequence
  LRRK2 RNA guide
cgguuaucuauacggcuguu

SEQ ID NO: 42075 - RNA, 20 nt, Artificial Sequence
  LRRK2 RNA guide
cguauagauaaccgguucca

SEQ ID NO: 42076 - RNA, 20 nt, Artificial Sequence
  LRRK2 RNA guide
cuaacuggaaccgguuaucu

SEQ ID NO: 42077 - RNA, 20 nt, Artificial Sequence
  LRRK2 RNA guide
cuggaaccgguuaucuauac

SEQ ID NO: 42078 - RNA, 20 nt, Artificial Sequence
  LRRK2 RNA guide
gaaccgguuaucuauacggc

SEQ ID NO: 42079 - RNA, 20 nt, Artificial Sequence
  LRRK2 RNA guide
gauaaccgguuccaguuagc

SEQ ID NO: 42080 - RNA, 20 nt, Artificial Sequence
  LRRK2 RNA guide
gccguauagauaaccgguuc

SEQ ID NO: 42081 - RNA, 20 nt, Artificial Sequence
  LRRK2 RNA guide
gcuaacuggaaccgguuauc

SEQ ID NO: 42082 - RNA, 20 nt, Artificial Sequence
  LRRK2 RNA guide
ggaaccgguuaucuauacgg

SEQ ID NO: 42083 - RNA, 20 nt, Artificial Sequence
  LRRK2 RNA guide
ggcuaacuggaaccgguuau

SEQ ID NO: 42084 - RNA, 20 nt, Artificial Sequence
  LRRK2 RNA guide
guauagauaaccgguuccag

SEQ ID NO: 42085 - RNA, 20 nt, Artificial Sequence
  LRRK2 RNA guide
guuggcuaacuggaaccggu

SEQ ID NO: 42086 - RNA, 20 nt, Artificial Sequence
  LRRK2 RNA guide
uaaccgguuccaguuagcca

SEQ ID NO: 42087 - RNA, 20 nt, Artificial Sequence
  LRRK2 RNA guide
uaacuggaaccgguuaucua

SEQ ID NO: 42088 - RNA, 20 nt, Artificial Sequence
  LRRK2 RNA guide
uagauaaccgguuccaguua

SEQ ID NO: 42089 - RNA, 20 nt, Artificial Sequence
  LRRK2 RNA guide
uauagauaaccgguuccagu

SEQ ID NO: 42090 - RNA, 20 nt, Artificial Sequence
  LRRK2 RNA guide
uggaaccgguuaucuauacg

SEQ ID NO: 42091 - RNA, 20 nt, Artificial Sequence
  LRRK2 RNA guide
uggcuaacuggaaccgguua

SEQ ID NO: 42092 - RNA, 20 nt, Artificial Sequence
  LRRK2 RNA guide
uguuggcuaacuggaaccgg

SEQ ID NO: 42093 - RNA, 20 nt, Artificial Sequence
  LRRK2 RNA guide
uuggcuaacuggaaccgguu

SEQ ID NO: 42094 - RNA, 21 nt, Artificial Sequence
  LRRK2 RNA guide
aaaacagccguauagauaacc

SEQ ID NO: 42095 - RNA, 21 nt, Artificial Sequence
  LRRK2 RNA guide
aaacagccguauagauaaccg

SEQ ID NO: 42096 - RNA, 21 nt, Artificial Sequence
  LRRK2 RNA guide
aacagccguauagauaaccgg

SEQ ID NO: 42097 - RNA, 21 nt, Artificial Sequence
  LRRK2 RNA guide
aaccgguuaucuauacggcug

SEQ ID NO: 42098 - RNA, 21 nt, Artificial Sequence
  LRRK2 RNA guide
aaccgguuccaguuagccaac

SEQ ID NO: 42099 - RNA, 21 nt, Artificial Sequence
  LRRK2 RNA guide
aacuggaaccgguuaucuaua

SEQ ID NO: 42100 - RNA, 21 nt, Artificial Sequence
  LRRK2 RNA guide
aauguuggcuaacuggaaccg

SEQ ID NO: 42101 - RNA, 21 nt, Artificial Sequence
  LRRK2 RNA guide
acagccguauagauaaccggu

SEQ ID NO: 42102 - RNA, 21 nt, Artificial Sequence
  LRRK2 RNA guide
accgguuaucuauacggcugu

SEQ ID NO: 42103 - RNA, 21 nt, Artificial Sequence
  LRRK2 RNA guide
accgguuccaguuagccaaca

SEQ ID NO: 42104 - RNA, 21 nt, Artificial Sequence
  LRRK2 RNA guide
acuggaaccgguuaucuauac

SEQ ID NO: 42105 - RNA, 21 nt, Artificial Sequence
  LRRK2 RNA guide
agauaaccgguuccaguuagc

SEQ ID NO: 42106 - RNA, 21 nt, Artificial Sequence
  LRRK2 RNA guide
agccguauagauaaccgguuc

SEQ ID NO: 42107 - RNA, 21 nt, Artificial Sequence
  LRRK2 RNA guide
auaaccgguuccaguuagcca

SEQ ID NO: 42108 - RNA, 21 nt, Artificial Sequence
  LRRK2 RNA guide
auagauaaccgguuccaguua

SEQ ID NO: 42109 - RNA, 21 nt, Artificial Sequence
  LRRK2 RNA guide
auguuggcuaacuggaaccgg

SEQ ID NO: 42110 - RNA, 21 nt, Artificial Sequence
  LRRK2 RNA guide
cagccguauagauaaccgguu

SEQ ID NO: 42111 - RNA, 21 nt, Artificial Sequence
  LRRK2 RNA guide
ccgguuaucuauacggcuguu

SEQ ID NO: 42112 - RNA, 21 nt, Artificial Sequence
  LRRK2 RNA guide
ccgguuccaguuagccaacau

SEQ ID NO: 42113 - RNA, 21 nt, Artificial Sequence
  LRRK2 RNA guide
ccguauagauaaccgguucca

SEQ ID NO: 42114 - RNA, 21 nt, Artificial Sequence
  LRRK2 RNA guide
cgguuaucuauacggcuguuu

SEQ ID NO: 42115 - RNA, 21 nt, Artificial Sequence
  LRRK2 RNA guide
cguauagauaaccgguuccag

SEQ ID NO: 42116 - RNA, 21 nt, Artificial Sequence
  LRRK2 RNA guide
cuaacuggaaccgguuaucua

SEQ ID NO: 42117 - RNA, 21 nt, Artificial Sequence
  LRRK2 RNA guide
cuggaaccgguuaucuauacg

SEQ ID NO: 42118 - RNA, 21 nt, Artificial Sequence
  LRRK2 RNA guide
gaaccgguuaucuauacggcu

SEQ ID NO: 42119 - RNA, 21 nt, Artificial Sequence
  LRRK2 RNA guide
gauaaccgguuccaguuagcc

SEQ ID NO: 42120 - RNA, 21 nt, Artificial Sequence
  LRRK2 RNA guide
gccguauagauaaccgguucc

SEQ ID NO: 42121 - RNA, 21 nt, Artificial Sequence
  LRRK2 RNA guide
gcuaacuggaaccgguuaucu

SEQ ID NO: 42122 - RNA, 21 nt, Artificial Sequence
  LRRK2 RNA guide
ggaaccgguuaucuauacggc

SEQ ID NO: 42123 - RNA, 21 nt, Artificial Sequence
  LRRK2 RNA guide
ggcuaacuggaaccgguuauc

SEQ ID NO: 42124 - RNA, 21 nt, Artificial Sequence
  LRRK2 RNA guide
guauagauaaccgguuccagu

SEQ ID NO: 42125 - RNA, 21 nt, Artificial Sequence
  LRRK2 RNA guide
guuggcuaacuggaaccgguu

SEQ ID NO: 42126 - RNA, 21 nt, Artificial Sequence
  LRRK2 RNA guide
uaaccgguuccaguuagccaa

SEQ ID NO: 42127 - RNA, 21 nt, Artificial Sequence
  LRRK2 RNA guide
uaacuggaaccgguuaucuau

SEQ ID NO: 42128 - RNA, 21 nt, Artificial Sequence
  LRRK2 RNA guide
uagauaaccgguuccaguuag

SEQ ID NO: 42129 - RNA, 21 nt, Artificial Sequence
  LRRK2 RNA guide
uauagauaaccgguuccaguu

SEQ ID NO: 42130 - RNA, 21 nt, Artificial Sequence
  LRRK2 RNA guide
uggaaccgguuaucuauacgg

SEQ ID NO: 42131 - RNA, 21 nt, Artificial Sequence
  LRRK2 RNA guide
uggcuaacuggaaccgguuau

SEQ ID NO: 42132 - RNA, 21 nt, Artificial Sequence
  LRRK2 RNA guide
uguuggcuaacuggaaccggu

SEQ ID NO: 42133 - RNA, 21 nt, Artificial Sequence
  LRRK2 RNA guide
uuggcuaacuggaaccgguua

SEQ ID NO: 42134 - RNA, 22 nt, Artificial Sequence
  LRRK2 RNA guide
aaaacagccguauagauaaccg

SEQ ID NO: 42135 - RNA, 22 nt, Artificial Sequence
  LRRK2 RNA guide
aaacagccguauagauaaccgg

SEQ ID NO: 42136 - RNA, 22 nt, Artificial Sequence
  LRRK2 RNA guide
aacagccguauagauaaccggu

SEQ ID NO: 42137 - RNA, 22 nt, Artificial Sequence
  LRRK2 RNA guide
aaccgguuaucuauacggcugu

SEQ ID NO: 42138 - RNA, 22 nt, Artificial Sequence
  LRRK2 RNA guide
aaccgguuccaguuagccaaca

SEQ ID NO: 42139 - RNA, 22 nt, Artificial Sequence
  LRRK2 RNA guide
aacuggaaccgguuaucuauac

SEQ ID NO: 42140 - RNA, 22 nt, Artificial Sequence
  LRRK2 RNA guide
aauguuggcuaacuggaaccgg

SEQ ID NO: 42141 - RNA, 22 nt, Artificial Sequence
  LRRK2 RNA guide
acagccguauagauaaccgguu

SEQ ID NO: 42142 - RNA, 22 nt, Artificial Sequence
  LRRK2 RNA guide
accgguuaucuauacggcuguu

SEQ ID NO: 42143 - RNA, 22 nt, Artificial Sequence
  LRRK2 RNA guide
accgguuccaguuagccaacau

SEQ ID NO: 42144 - RNA, 22 nt, Artificial Sequence
  LRRK2 RNA guide
acuggaaccgguuaucuauacg

SEQ ID NO: 42145 - RNA, 22 nt, Artificial Sequence
  LRRK2 RNA guide
agauaaccgguuccaguuagcc

SEQ ID NO: 42146 - RNA, 22 nt, Artificial Sequence
  LRRK2 RNA guide
agccguauagauaaccgguucc

SEQ ID NO: 42147 - RNA, 22 nt, Artificial Sequence
  LRRK2 RNA guide
auaaccgguuccaguuagccaa

SEQ ID NO: 42148 - RNA, 22 nt, Artificial Sequence
  LRRK2 RNA guide
auagauaaccgguuccaguuag

SEQ ID NO: 42149 - RNA, 22 nt, Artificial Sequence
  LRRK2 RNA guide
auguuggcuaacuggaaccggu

SEQ ID NO: 42150 - RNA, 22 nt, Artificial Sequence
  LRRK2 RNA guide
caaaacagccguauagauaacc

SEQ ID NO: 42151 - RNA, 22 nt, Artificial Sequence
  LRRK2 RNA guide
cagccguauagauaaccgguuc

SEQ ID NO: 42152 - RNA, 22 nt, Artificial Sequence
  LRRK2 RNA guide
ccgguuaucuauacggcuguuu

SEQ ID NO: 42153 - RNA, 22 nt, Artificial Sequence
  LRRK2 RNA guide
ccgguuccaguuagccaacauu

SEQ ID NO: 42154 - RNA, 22 nt, Artificial Sequence
  LRRK2 RNA guide
ccguauagauaaccgguuccag

SEQ ID NO: 42155 - RNA, 22 nt, Artificial Sequence
  LRRK2 RNA guide
cgguuaucuauacggcuguuuu

SEQ ID NO: 42156 - RNA, 22 nt, Artificial Sequence
  LRRK2 RNA guide
cguauagauaaccgguuccagu

SEQ ID NO: 42157 - RNA, 22 nt, Artificial Sequence
  LRRK2 RNA guide
cuaacuggaaccgguuaucuau

SEQ ID NO: 42158 - RNA, 22 nt, Artificial Sequence
  LRRK2 RNA guide
cuggaaccgguuaucuauacgg

SEQ ID NO: 42159 - RNA, 22 nt, Artificial Sequence
  LRRK2 RNA guide
gaaccgguuaucuauacggcug

SEQ ID NO: 42160 - RNA, 22 nt, Artificial Sequence
  LRRK2 RNA guide
gaauguuggcuaacuggaaccg

SEQ ID NO: 42161 - RNA, 22 nt, Artificial Sequence
  LRRK2 RNA guide
gauaaccgguuccaguuagcca

SEQ ID NO: 42162 - RNA, 22 nt, Artificial Sequence
  LRRK2 RNA guide
gccguauagauaaccgguucca

SEQ ID NO: 42163 - RNA, 22 nt, Artificial Sequence
  LRRK2 RNA guide
gcuaacuggaaccgguuaucua

SEQ ID NO: 42164 - RNA, 22 nt, Artificial Sequence
  LRRK2 RNA guide
ggaaccgguuaucuauacggcu

SEQ ID NO: 42165 - RNA, 22 nt, Artificial Sequence
  LRRK2 RNA guide
ggcuaacuggaaccgguuaucu

SEQ ID NO: 42166 - RNA, 22 nt, Artificial Sequence
  LRRK2 RNA guide
guauagauaaccgguuccaguu

SEQ ID NO: 42167 - RNA, 22 nt, Artificial Sequence
  LRRK2 RNA guide
guuggcuaacuggaaccgguua

SEQ ID NO: 42168 - RNA, 22 nt, Artificial Sequence
  LRRK2 RNA guide
uaaccgguuccaguuagccaac

SEQ ID NO: 42169 - RNA, 22 nt, Artificial Sequence
  LRRK2 RNA guide
uaacuggaaccgguuaucuaua

SEQ ID NO: 42170 - RNA, 22 nt, Artificial Sequence
  LRRK2 RNA guide
uagauaaccgguuccaguuagc

SEQ ID NO: 42171 - RNA, 22 nt, Artificial Sequence
  LRRK2 RNA guide
uauagauaaccgguuccaguua

SEQ ID NO: 42172 - RNA, 22 nt, Artificial Sequence
  LRRK2 RNA guide
uggaaccgguuaucuauacggc

SEQ ID NO: 42173 - RNA, 22 nt, Artificial Sequence
  LRRK2 RNA guide
uggcuaacuggaaccgguuauc

SEQ ID NO: 42174 - RNA, 22 nt, Artificial Sequence
  LRRK2 RNA guide
uguuggcuaacuggaaccgguu

SEQ ID NO: 42175 - RNA, 22 nt, Artificial Sequence
  LRRK2 RNA guide
uuggcuaacuggaaccgguuau

SEQ ID NO: 42176 - RNA, 20 nt, Artificial Sequence
  LRRK2 RNA guide
aaaaucacuuuguuccaacu

SEQ ID NO: 42177 - RNA, 20 nt, Artificial Sequence
  LRRK2 RNA guide
aaaucacuuuguuccaacug

SEQ ID NO: 42178 - RNA, 20 nt, Artificial Sequence
  LRRK2 RNA guide
aaccauuucuucucaguugg

SEQ ID NO: 42179 - RNA, 20 nt, Artificial Sequence
  LRRK2 RNA guide
aacugagaagaaaugguuga

SEQ ID NO: 42180 - RNA, 20 nt, Artificial Sequence
  LRRK2 RNA guide
aaucacuuuguuccaacuga

SEQ ID NO: 42181 - RNA, 20 nt, Artificial Sequence
  LRRK2 RNA guide
accauuucuucucaguugga

SEQ ID NO: 42182 - RNA, 20 nt, Artificial Sequence
  LRRK2 RNA guide
acuuuguuccaacugagaag

SEQ ID NO: 42183 - RNA, 20 nt, Artificial Sequence
  LRRK2 RNA guide
agaaaaucacuuuguuccaa

SEQ ID NO: 42184 - RNA, 20 nt, Artificial Sequence
  LRRK2 RNA guide
agugcucaaccauuucuucu

SEQ ID NO: 42185 - RNA, 20 nt, Artificial Sequence
  LRRK2 RNA guide
aguuggaacaaagugauuuu

SEQ ID NO: 42186 - RNA, 20 nt, Artificial Sequence
  LRRK2 RNA guide
aucacuuuguuccaacugag

SEQ ID NO: 42187 - RNA, 20 nt, Artificial Sequence
  LRRK2 RNA guide
auuucuucucaguuggaaca

SEQ ID NO: 42188 - RNA, 20 nt, Artificial Sequence
  LRRK2 RNA guide
caaccauuucuucucaguug

SEQ ID NO: 42189 - RNA, 20 nt, Artificial Sequence
  LRRK2 RNA guide
caacugagaagaaaugguug

SEQ ID NO: 42190 - RNA, 20 nt, Artificial Sequence
  LRRK2 RNA guide
cacuuuguuccaacugagaa

SEQ ID NO: 42191 - RNA, 20 nt, Artificial Sequence
  LRRK2 RNA guide
cagugcucaaccauuucuuc

SEQ ID NO: 42192 - RNA, 20 nt, Artificial Sequence
  LRRK2 RNA guide
caguuggaacaaagugauuu

SEQ ID NO: 42193 - RNA, 20 nt, Artificial Sequence
  LRRK2 RNA guide
cauuucuucucaguuggaac

SEQ ID NO: 42194 - RNA, 20 nt, Artificial Sequence
  LRRK2 RNA guide
ccaacugagaagaaaugguu

SEQ ID NO: 42195 - RNA, 20 nt, Artificial Sequence
  LRRK2 RNA guide
ccauuucuucucaguuggaa

SEQ ID NO: 42196 - RNA, 20 nt, Artificial Sequence
  LRRK2 RNA guide
cucaaccauuucuucucagu

SEQ ID NO: 42197 - RNA, 20 nt, Artificial Sequence
  LRRK2 RNA guide
cucaguuggaacaaagugau

SEQ ID NO: 42198 - RNA, 20 nt, Artificial Sequence
  LRRK2 RNA guide
cuucucaguuggaacaaagu

SEQ ID NO: 42199 - RNA, 20 nt, Artificial Sequence
  LRRK2 RNA guide
cuuuguuccaacugagaaga

SEQ ID NO: 42200 - RNA, 20 nt, Artificial Sequence
  LRRK2 RNA guide
gaaaaucacuuuguuccaac

SEQ ID NO: 42201 - RNA, 20 nt, Artificial Sequence
  LRRK2 RNA guide
gagaaaaucacuuuguucca

SEQ ID NO: 42202 - RNA, 20 nt, Artificial Sequence
  LRRK2 RNA guide
gcucaaccauuucuucucag

SEQ ID NO: 42203 - RNA, 20 nt, Artificial Sequence
  LRRK2 RNA guide
ggagaaaaucacuuuguucc

SEQ ID NO: 42204 - RNA, 20 nt, Artificial Sequence
  LRRK2 RNA guide
gugcucaaccauuucuucuc

SEQ ID NO: 42205 - RNA, 20 nt, Artificial Sequence
  LRRK2 RNA guide
guggagaaaaucacuuuguu

SEQ ID NO: 42206 - RNA, 20 nt, Artificial Sequence
  LRRK2 RNA guide
guuccaacugagaagaaaug

SEQ ID NO: 42207 - RNA, 20 nt, Artificial Sequence
  LRRK2 RNA guide
guuggaacaaagugauuuuc

SEQ ID NO: 42208 - RNA, 20 nt, Artificial Sequence
  LRRK2 RNA guide
ucaaccauuucuucucaguu

SEQ ID NO: 42209 - RNA, 20 nt, Artificial Sequence
  LRRK2 RNA guide
ucacuuuguuccaacugaga

SEQ ID NO: 42210 - RNA, 20 nt, Artificial Sequence
  LRRK2 RNA guide
ucaguuggaacaaagugauu

SEQ ID NO: 42211 - RNA, 20 nt, Artificial Sequence
  LRRK2 RNA guide
uccaacugagaagaaauggu

SEQ ID NO: 42212 - RNA, 20 nt, Artificial Sequence
  LRRK2 RNA guide
ucucaguuggaacaaaguga

SEQ ID NO: 42213 - RNA, 20 nt, Artificial Sequence
  LRRK2 RNA guide
ucuucucaguuggaacaaag

SEQ ID NO: 42214 - RNA, 20 nt, Artificial Sequence
  LRRK2 RNA guide
ugcucaaccauuucuucuca

SEQ ID NO: 42215 - RNA, 20 nt, Artificial Sequence
  LRRK2 RNA guide
uggagaaaaucacuuuguuc

SEQ ID NO: 42216 - RNA, 20 nt, Artificial Sequence
  LRRK2 RNA guide
uguggagaaaaucacuuugu

SEQ ID NO: 42217 - RNA, 20 nt, Artificial Sequence
  LRRK2 RNA guide
uguuccaacugagaagaaau

SEQ ID NO: 42218 - RNA, 20 nt, Artificial Sequence
  LRRK2 RNA guide
uuccaacugagaagaaaugg

SEQ ID NO: 42219 - RNA, 20 nt, Artificial Sequence
  LRRK2 RNA guide
uucucaguuggaacaaagug

SEQ ID NO: 42220 - RNA, 20 nt, Artificial Sequence
  LRRK2 RNA guide
uucuucucaguuggaacaaa

SEQ ID NO: 42221 - RNA, 20 nt, Artificial Sequence
  LRRK2 RNA guide
uuguuccaacugagaagaaa

SEQ ID NO: 42222 - RNA, 20 nt, Artificial Sequence
  LRRK2 RNA guide
uuucuucucaguuggaacaa

SEQ ID NO: 42223 - RNA, 20 nt, Artificial Sequence
  LRRK2 RNA guide
uuuguuccaacugagaagaa

SEQ ID NO: 42224 - RNA, 21 nt, Artificial Sequence
  LRRK2 RNA guide
aaaaucacuuuguuccaacug

SEQ ID NO: 42225 - RNA, 21 nt, Artificial Sequence
  LRRK2 RNA guide
aaaucacuuuguuccaacuga

SEQ ID NO: 42226 - RNA, 21 nt, Artificial Sequence
  LRRK2 RNA guide
aaccauuucuucucaguugga

SEQ ID NO: 42227 - RNA, 21 nt, Artificial Sequence
  LRRK2 RNA guide
aacugagaagaaaugguugag

SEQ ID NO: 42228 - RNA, 21 nt, Artificial Sequence
  LRRK2 RNA guide
aaucacuuuguuccaacugag

SEQ ID NO: 42229 - RNA, 21 nt, Artificial Sequence
  LRRK2 RNA guide
accauuucuucucaguuggaa

SEQ ID NO: 42230 - RNA, 21 nt, Artificial Sequence
  LRRK2 RNA guide
acuuuguuccaacugagaaga

SEQ ID NO: 42231 - RNA, 21 nt, Artificial Sequence
  LRRK2 RNA guide
agaaaaucacuuuguuccaac

SEQ ID NO: 42232 - RNA, 21 nt, Artificial Sequence
  LRRK2 RNA guide
agugcucaaccauuucuucuc

SEQ ID NO: 42233 - RNA, 21 nt, Artificial Sequence
  LRRK2 RNA guide
aguuggaacaaagugauuuuc

SEQ ID NO: 42234 - RNA, 21 nt, Artificial Sequence
  LRRK2 RNA guide
aucacuuuguuccaacugaga

SEQ ID NO: 42235 - RNA, 21 nt, Artificial Sequence
  LRRK2 RNA guide
auguggagaaaaucacuuugu

SEQ ID NO: 42236 - RNA, 21 nt, Artificial Sequence
  LRRK2 RNA guide
auuucuucucaguuggaacaa

SEQ ID NO: 42237 - RNA, 21 nt, Artificial Sequence
  LRRK2 RNA guide
caaccauuucuucucaguugg

SEQ ID NO: 42238 - RNA, 21 nt, Artificial Sequence
  LRRK2 RNA guide
caacugagaagaaaugguuga

SEQ ID NO: 42239 - RNA, 21 nt, Artificial Sequence
  LRRK2 RNA guide
cacuuuguuccaacugagaag

SEQ ID NO: 42240 - RNA, 21 nt, Artificial Sequence
  LRRK2 RNA guide
cagugcucaaccauuucuucu

SEQ ID NO: 42241 - RNA, 21 nt, Artificial Sequence
  LRRK2 RNA guide
caguuggaacaaagugauuuu

SEQ ID NO: 42242 - RNA, 21 nt, Artificial Sequence
  LRRK2 RNA guide
cauuucuucucaguuggaaca

SEQ ID NO: 42243 - RNA, 21 nt, Artificial Sequence
  LRRK2 RNA guide
ccaacugagaagaaaugguug

SEQ ID NO: 42244 - RNA, 21 nt, Artificial Sequence
  LRRK2 RNA guide
ccauuucuucucaguuggaac

SEQ ID NO: 42245 - RNA, 21 nt, Artificial Sequence
  LRRK2 RNA guide
cucaaccauuucuucucaguu

SEQ ID NO: 42246 - RNA, 21 nt, Artificial Sequence
  LRRK2 RNA guide
cucaguuggaacaaagugauu

SEQ ID NO: 42247 - RNA, 21 nt, Artificial Sequence
  LRRK2 RNA guide
cuucucaguuggaacaaagug

SEQ ID NO: 42248 - RNA, 21 nt, Artificial Sequence
  LRRK2 RNA guide
cuuuguuccaacugagaagaa

SEQ ID NO: 42249 - RNA, 21 nt, Artificial Sequence
  LRRK2 RNA guide
gaaaaucacuuuguuccaacu

SEQ ID NO: 42250 - RNA, 21 nt, Artificial Sequence
  LRRK2 RNA guide
gagaaaaucacuuuguuccaa

SEQ ID NO: 42251 - RNA, 21 nt, Artificial Sequence
  LRRK2 RNA guide
gcagugcucaaccauuucuuc

SEQ ID NO: 42252 - RNA, 21 nt, Artificial Sequence
  LRRK2 RNA guide
gcucaaccauuucuucucagu

SEQ ID NO: 42253 - RNA, 21 nt, Artificial Sequence
  LRRK2 RNA guide
ggagaaaaucacuuuguucca

SEQ ID NO: 42254 - RNA, 21 nt, Artificial Sequence
  LRRK2 RNA guide
gugcucaaccauuucuucuca

SEQ ID NO: 42255 - RNA, 21 nt, Artificial Sequence
  LRRK2 RNA guide
guggagaaaaucacuuuguuc

SEQ ID NO: 42256 - RNA, 21 nt, Artificial Sequence
  LRRK2 RNA guide
guuccaacugagaagaaaugg

SEQ ID NO: 42257 - RNA, 21 nt, Artificial Sequence
  LRRK2 RNA guide
guuggaacaaagugauuuucu

SEQ ID NO: 42258 - RNA, 21 nt, Artificial Sequence
  LRRK2 RNA guide
ucaaccauuucuucucaguug

SEQ ID NO: 42259 - RNA, 21 nt, Artificial Sequence
  LRRK2 RNA guide
ucacuuuguuccaacugagaa

SEQ ID NO: 42260 - RNA, 21 nt, Artificial Sequence
  LRRK2 RNA guide
ucaguuggaacaaagugauuu

SEQ ID NO: 42261 - RNA, 21 nt, Artificial Sequence
  LRRK2 RNA guide
uccaacugagaagaaaugguu

SEQ ID NO: 42262 - RNA, 21 nt, Artificial Sequence
  LRRK2 RNA guide
ucucaguuggaacaaagugau

SEQ ID NO: 42263 - RNA, 21 nt, Artificial Sequence
  LRRK2 RNA guide
ucuucucaguuggaacaaagu

SEQ ID NO: 42264 - RNA, 21 nt, Artificial Sequence
  LRRK2 RNA guide
ugcucaaccauuucuucucag

SEQ ID NO: 42265 - RNA, 21 nt, Artificial Sequence
  LRRK2 RNA guide
uggagaaaaucacuuuguucc

SEQ ID NO: 42266 - RNA, 21 nt, Artificial Sequence
  LRRK2 RNA guide
uguggagaaaaucacuuuguu

SEQ ID NO: 42267 - RNA, 21 nt, Artificial Sequence
  LRRK2 RNA guide
uguuccaacugagaagaaaug

SEQ ID NO: 42268 - RNA, 21 nt, Artificial Sequence
  LRRK2 RNA guide
uuccaacugagaagaaauggu

SEQ ID NO: 42269 - RNA, 21 nt, Artificial Sequence
  LRRK2 RNA guide
uucucaguuggaacaaaguga

SEQ ID NO: 42270 - RNA, 21 nt, Artificial Sequence
  LRRK2 RNA guide
uucuucucaguuggaacaaag

SEQ ID NO: 42271 - RNA, 21 nt, Artificial Sequence
  LRRK2 RNA guide
uuguuccaacugagaagaaau

SEQ ID NO: 42272 - RNA, 21 nt, Artificial Sequence
  LRRK2 RNA guide
uuucuucucaguuggaacaaa

SEQ ID NO: 42273 - RNA, 21 nt, Artificial Sequence
  LRRK2 RNA guide
uuuguuccaacugagaagaaa

SEQ ID NO: 42274 - RNA, 22 nt, Artificial Sequence
  LRRK2 RNA guide
aaaaucacuuuguuccaacuga

SEQ ID NO: 42275 - RNA, 22 nt, Artificial Sequence
  LRRK2 RNA guide
aaaucacuuuguuccaacugag

SEQ ID NO: 42276 - RNA, 22 nt, Artificial Sequence
  LRRK2 RNA guide
aaccauuucuucucaguuggaa

SEQ ID NO: 42277 - RNA, 22 nt, Artificial Sequence
  LRRK2 RNA guide
aacugagaagaaaugguugagc

SEQ ID NO: 42278 - RNA, 22 nt, Artificial Sequence
  LRRK2 RNA guide
aaucacuuuguuccaacugaga

SEQ ID NO: 42279 - RNA, 22 nt, Artificial Sequence
  LRRK2 RNA guide
accauuucuucucaguuggaac

SEQ ID NO: 42280 - RNA, 22 nt, Artificial Sequence
  LRRK2 RNA guide
acuuuguuccaacugagaagaa

SEQ ID NO: 42281 - RNA, 22 nt, Artificial Sequence
  LRRK2 RNA guide
agaaaaucacuuuguuccaacu

SEQ ID NO: 42282 - RNA, 22 nt, Artificial Sequence
  LRRK2 RNA guide
agcagugcucaaccauuucuuc

SEQ ID NO: 42283 - RNA, 22 nt, Artificial Sequence
  LRRK2 RNA guide
agugcucaaccauuucuucuca

SEQ ID NO: 42284 - RNA, 22 nt, Artificial Sequence
  LRRK2 RNA guide
aguuggaacaaagugauuuucu

SEQ ID NO: 42285 - RNA, 22 nt, Artificial Sequence
  LRRK2 RNA guide
aucacuuuguuccaacugagaa

SEQ ID NO: 42286 - RNA, 22 nt, Artificial Sequence
  LRRK2 RNA guide
auguggagaaaaucacuuuguu

SEQ ID NO: 42287 - RNA, 22 nt, Artificial Sequence
  LRRK2 RNA guide
auuucuucucaguuggaacaaa

SEQ ID NO: 42288 - RNA, 22 nt, Artificial Sequence
  LRRK2 RNA guide
caaccauuucuucucaguugga

SEQ ID NO: 42289 - RNA, 22 nt, Artificial Sequence
  LRRK2 RNA guide
caacugagaagaaaugguugag

SEQ ID NO: 42290 - RNA, 22 nt, Artificial Sequence
  LRRK2 RNA guide
cacuuuguuccaacugagaaga

SEQ ID NO: 42291 - RNA, 22 nt, Artificial Sequence
  LRRK2 RNA guide
cagugcucaaccauuucuucuc

SEQ ID NO: 42292 - RNA, 22 nt, Artificial Sequence
  LRRK2 RNA guide
caguuggaacaaagugauuuuc

SEQ ID NO: 42293 - RNA, 22 nt, Artificial Sequence
  LRRK2 RNA guide
cauuucuucucaguuggaacaa

SEQ ID NO: 42294 - RNA, 22 nt, Artificial Sequence
  LRRK2 RNA guide
ccaacugagaagaaaugguuga

SEQ ID NO: 42295 - RNA, 22 nt, Artificial Sequence
  LRRK2 RNA guide
ccauuucuucucaguuggaaca

SEQ ID NO: 42296 - RNA, 22 nt, Artificial Sequence
  LRRK2 RNA guide
cucaaccauuucuucucaguug

SEQ ID NO: 42297 - RNA, 22 nt, Artificial Sequence
  LRRK2 RNA guide
cucaguuggaacaaagugauuu

SEQ ID NO: 42298 - RNA, 22 nt, Artificial Sequence
  LRRK2 RNA guide
cuucucaguuggaacaaaguga

SEQ ID NO: 42299 - RNA, 22 nt, Artificial Sequence
  LRRK2 RNA guide
cuuuguuccaacugagaagaaa

SEQ ID NO: 42300 - RNA, 22 nt, Artificial Sequence
  LRRK2 RNA guide
gaaaaucacuuuguuccaacug

SEQ ID NO: 42301 - RNA, 22 nt, Artificial Sequence
  LRRK2 RNA guide
gagaaaaucacuuuguuccaac

SEQ ID NO: 42302 - RNA, 22 nt, Artificial Sequence
  LRRK2 RNA guide
gauguggagaaaaucacuuugu

SEQ ID NO: 42303 - RNA, 22 nt, Artificial Sequence
  LRRK2 RNA guide
gcagugcucaaccauuucuucu

SEQ ID NO: 42304 - RNA, 22 nt, Artificial Sequence
  LRRK2 RNA guide
gcucaaccauuucuucucaguu

SEQ ID NO: 42305 - RNA, 22 nt, Artificial Sequence
  LRRK2 RNA guide
ggagaaaaucacuuuguuccaa

SEQ ID NO: 42306 - RNA, 22 nt, Artificial Sequence
  LRRK2 RNA guide
gugcucaaccauuucuucucag

SEQ ID NO: 42307 - RNA, 22 nt, Artificial Sequence
  LRRK2 RNA guide
guggagaaaaucacuuuguucc

SEQ ID NO: 42308 - RNA, 22 nt, Artificial Sequence
  LRRK2 RNA guide
guuccaacugagaagaaauggu

SEQ ID NO: 42309 - RNA, 22 nt, Artificial Sequence
  LRRK2 RNA guide
guuggaacaaagugauuuucuc

SEQ ID NO: 42310 - RNA, 22 nt, Artificial Sequence
  LRRK2 RNA guide
ucaaccauuucuucucaguugg

SEQ ID NO: 42311 - RNA, 22 nt, Artificial Sequence
  LRRK2 RNA guide
ucacuuuguuccaacugagaag

SEQ ID NO: 42312 - RNA, 22 nt, Artificial Sequence
  LRRK2 RNA guide
ucaguuggaacaaagugauuuu

SEQ ID NO: 42313 - RNA, 22 nt, Artificial Sequence
  LRRK2 RNA guide
uccaacugagaagaaaugguug

SEQ ID NO: 42314 - RNA, 22 nt, Artificial Sequence
  LRRK2 RNA guide
ucucaguuggaacaaagugauu

SEQ ID NO: 42315 - RNA, 22 nt, Artificial Sequence
  LRRK2 RNA guide
ucuucucaguuggaacaaagug

SEQ ID NO: 42316 - RNA, 22 nt, Artificial Sequence
  LRRK2 RNA guide
ugcucaaccauuucuucucagu

SEQ ID NO: 42317 - RNA, 22 nt, Artificial Sequence
  LRRK2 RNA guide
uggagaaaaucacuuuguucca

SEQ ID NO: 42318 - RNA, 22 nt, Artificial Sequence
  LRRK2 RNA guide
uguggagaaaaucacuuuguuc

SEQ ID NO: 42319 - RNA, 22 nt, Artificial Sequence
  LRRK2 RNA guide
uguuccaacugagaagaaaugg

SEQ ID NO: 42320 - RNA, 22 nt, Artificial Sequence
  LRRK2 RNA guide
uuccaacugagaagaaaugguu

SEQ ID NO: 42321 - RNA, 22 nt, Artificial Sequence
  LRRK2 RNA guide
uucucaguuggaacaaagugau

SEQ ID NO: 42322 - RNA, 22 nt, Artificial Sequence
  LRRK2 RNA guide
uucuucucaguuggaacaaagu

SEQ ID NO: 42323 - RNA, 22 nt, Artificial Sequence
  LRRK2 RNA guide
uuguuccaacugagaagaaaug

SEQ ID NO: 42324 - RNA, 22 nt, Artificial Sequence
  LRRK2 RNA guide
uuucuucucaguuggaacaaag

SEQ ID NO: 42325 - RNA, 22 nt, Artificial Sequence
  LRRK2 RNA guide
uuuguuccaacugagaagaaau

SEQ ID NO: 42326 - RNA, 20 nt, Artificial Sequence
  LRRK2 RNA guide
aaaaucacuuuguuccaucu

SEQ ID NO: 42327 - RNA, 20 nt, Artificial Sequence
  LRRK2 RNA guide
aaaucacuuuguuccaucug

SEQ ID NO: 42328 - RNA, 20 nt, Artificial Sequence
  LRRK2 RNA guide
aaccauuucuucucagaugg

SEQ ID NO: 42329 - RNA, 20 nt, Artificial Sequence
  LRRK2 RNA guide
aaucacuuuguuccaucuga

SEQ ID NO: 42330 - RNA, 20 nt, Artificial Sequence
  LRRK2 RNA guide
accauuucuucucagaugga

SEQ ID NO: 42331 - RNA, 20 nt, Artificial Sequence
  LRRK2 RNA guide
acuuuguuccaucugagaag

SEQ ID NO: 42332 - RNA, 20 nt, Artificial Sequence
  LRRK2 RNA guide
agaaaaucacuuuguuccau

SEQ ID NO: 42333 - RNA, 20 nt, Artificial Sequence
  LRRK2 RNA guide
agauggaacaaagugauuuu

SEQ ID NO: 42334 - RNA, 20 nt, Artificial Sequence
  LRRK2 RNA guide
aucacuuuguuccaucugag

SEQ ID NO: 42335 - RNA, 20 nt, Artificial Sequence
  LRRK2 RNA guide
aucugagaagaaaugguuga

SEQ ID NO: 42336 - RNA, 20 nt, Artificial Sequence
  LRRK2 RNA guide
auuucuucucagauggaaca

SEQ ID NO: 42337 - RNA, 20 nt, Artificial Sequence
  LRRK2 RNA guide
caaccauuucuucucagaug

SEQ ID NO: 42338 - RNA, 20 nt, Artificial Sequence
  LRRK2 RNA guide
cacuuuguuccaucugagaa

SEQ ID NO: 42339 - RNA, 20 nt, Artificial Sequence
  LRRK2 RNA guide
cagauggaacaaagugauuu

SEQ ID NO: 42340 - RNA, 20 nt, Artificial Sequence
  LRRK2 RNA guide
caucugagaagaaaugguug

SEQ ID NO: 42341 - RNA, 20 nt, Artificial Sequence
  LRRK2 RNA guide
cauuucuucucagauggaac

SEQ ID NO: 42342 - RNA, 20 nt, Artificial Sequence
  LRRK2 RNA guide
ccaucugagaagaaaugguu

SEQ ID NO: 42343 - RNA, 20 nt, Artificial Sequence
  LRRK2 RNA guide
ccauuucuucucagauggaa

SEQ ID NO: 42344 - RNA, 20 nt, Artificial Sequence
  LRRK2 RNA guide
cucaaccauuucuucucaga

SEQ ID NO: 42345 - RNA, 20 nt, Artificial Sequence
  LRRK2 RNA guide
cucagauggaacaaagugau

SEQ ID NO: 42346 - RNA, 20 nt, Artificial Sequence
  LRRK2 RNA guide
cuucucagauggaacaaagu

SEQ ID NO: 42347 - RNA, 20 nt, Artificial Sequence
  LRRK2 RNA guide
cuuuguuccaucugagaaga

SEQ ID NO: 42348 - RNA, 20 nt, Artificial Sequence
  LRRK2 RNA guide
gaaaaucacuuuguuccauc

SEQ ID NO: 42349 - RNA, 20 nt, Artificial Sequence
  LRRK2 RNA guide
gauggaacaaagugauuuuc

SEQ ID NO: 42350 - RNA, 20 nt, Artificial Sequence
  LRRK2 RNA guide
guuccaucugagaagaaaug

SEQ ID NO: 42351 - RNA, 20 nt, Artificial Sequence
  LRRK2 RNA guide
ucaaccauuucuucucagau

SEQ ID NO: 42352 - RNA, 20 nt, Artificial Sequence
  LRRK2 RNA guide
ucacuuuguuccaucugaga

SEQ ID NO: 42353 - RNA, 20 nt, Artificial Sequence
  LRRK2 RNA guide
ucagauggaacaaagugauu

SEQ ID NO: 42354 - RNA, 20 nt, Artificial Sequence
  LRRK2 RNA guide
uccaucugagaagaaauggu

SEQ ID NO: 42355 - RNA, 20 nt, Artificial Sequence
  LRRK2 RNA guide
ucucagauggaacaaaguga

SEQ ID NO: 42356 - RNA, 20 nt, Artificial Sequence
  LRRK2 RNA guide
ucuucucagauggaacaaag

SEQ ID NO: 42357 - RNA, 20 nt, Artificial Sequence
  LRRK2 RNA guide
uguuccaucugagaagaaau

SEQ ID NO: 42358 - RNA, 20 nt, Artificial Sequence
  LRRK2 RNA guide
uuccaucugagaagaaaugg

SEQ ID NO: 42359 - RNA, 20 nt, Artificial Sequence
  LRRK2 RNA guide
uucucagauggaacaaagug

SEQ ID NO: 42360 - RNA, 20 nt, Artificial Sequence
  LRRK2 RNA guide
uucuucucagauggaacaaa

SEQ ID NO: 42361 - RNA, 20 nt, Artificial Sequence
  LRRK2 RNA guide
uuguuccaucugagaagaaa

SEQ ID NO: 42362 - RNA, 20 nt, Artificial Sequence
  LRRK2 RNA guide
uuucuucucagauggaacaa

SEQ ID NO: 42363 - RNA, 20 nt, Artificial Sequence
  LRRK2 RNA guide
uuuguuccaucugagaagaa

SEQ ID NO: 42364 - RNA, 21 nt, Artificial Sequence
  LRRK2 RNA guide
aaaaucacuuuguuccaucug

SEQ ID NO: 42365 - RNA, 21 nt, Artificial Sequence
  LRRK2 RNA guide
aaaucacuuuguuccaucuga

SEQ ID NO: 42366 - RNA, 21 nt, Artificial Sequence
  LRRK2 RNA guide
aaccauuucuucucagaugga

SEQ ID NO: 42367 - RNA, 21 nt, Artificial Sequence
  LRRK2 RNA guide
aaucacuuuguuccaucugag

SEQ ID NO: 42368 - RNA, 21 nt, Artificial Sequence
  LRRK2 RNA guide
accauuucuucucagauggaa

SEQ ID NO: 42369 - RNA, 21 nt, Artificial Sequence
  LRRK2 RNA guide
acuuuguuccaucugagaaga

SEQ ID NO: 42370 - RNA, 21 nt, Artificial Sequence
  LRRK2 RNA guide
agaaaaucacuuuguuccauc

SEQ ID NO: 42371 - RNA, 21 nt, Artificial Sequence
  LRRK2 RNA guide
agauggaacaaagugauuuuc

SEQ ID NO: 42372 - RNA, 21 nt, Artificial Sequence
  LRRK2 RNA guide
aucacuuuguuccaucugaga

SEQ ID NO: 42373 - RNA, 21 nt, Artificial Sequence
  LRRK2 RNA guide
aucugagaagaaaugguugag

SEQ ID NO: 42374 - RNA, 21 nt, Artificial Sequence
  LRRK2 RNA guide
auuucuucucagauggaacaa

SEQ ID NO: 42375 - RNA, 21 nt, Artificial Sequence
  LRRK2 RNA guide
caaccauuucuucucagaugg

SEQ ID NO: 42376 - RNA, 21 nt, Artificial Sequence
  LRRK2 RNA guide
cacuuuguuccaucugagaag

SEQ ID NO: 42377 - RNA, 21 nt, Artificial Sequence
  LRRK2 RNA guide
cagauggaacaaagugauuuu

SEQ ID NO: 42378 - RNA, 21 nt, Artificial Sequence
  LRRK2 RNA guide
caucugagaagaaaugguuga

SEQ ID NO: 42379 - RNA, 21 nt, Artificial Sequence
  LRRK2 RNA guide
cauuucuucucagauggaaca

SEQ ID NO: 42380 - RNA, 21 nt, Artificial Sequence
  LRRK2 RNA guide
ccaucugagaagaaaugguug

SEQ ID NO: 42381 - RNA, 21 nt, Artificial Sequence
  LRRK2 RNA guide
ccauuucuucucagauggaac

SEQ ID NO: 42382 - RNA, 21 nt, Artificial Sequence
  LRRK2 RNA guide
cucaaccauuucuucucagau

SEQ ID NO: 42383 - RNA, 21 nt, Artificial Sequence
  LRRK2 RNA guide
cucagauggaacaaagugauu

SEQ ID NO: 42384 - RNA, 21 nt, Artificial Sequence
  LRRK2 RNA guide
cuucucagauggaacaaagug

SEQ ID NO: 42385 - RNA, 21 nt, Artificial Sequence
  LRRK2 RNA guide
cuuuguuccaucugagaagaa

SEQ ID NO: 42386 - RNA, 21 nt, Artificial Sequence
  LRRK2 RNA guide
gaaaaucacuuuguuccaucu

SEQ ID NO: 42387 - RNA, 21 nt, Artificial Sequence
  LRRK2 RNA guide
gagaaaaucacuuuguuccau

SEQ ID NO: 42388 - RNA, 21 nt, Artificial Sequence
  LRRK2 RNA guide
gauggaacaaagugauuuucu

SEQ ID NO: 42389 - RNA, 21 nt, Artificial Sequence
  LRRK2 RNA guide
gcucaaccauuucuucucaga

SEQ ID NO: 42390 - RNA, 21 nt, Artificial Sequence
  LRRK2 RNA guide
guuccaucugagaagaaaugg

SEQ ID NO: 42391 - RNA, 21 nt, Artificial Sequence
  LRRK2 RNA guide
ucaaccauuucuucucagaug

SEQ ID NO: 42392 - RNA, 21 nt, Artificial Sequence
  LRRK2 RNA guide
ucacuuuguuccaucugagaa

SEQ ID NO: 42393 - RNA, 21 nt, Artificial Sequence
  LRRK2 RNA guide
ucagauggaacaaagugauuu

SEQ ID NO: 42394 - RNA, 21 nt, Artificial Sequence
  LRRK2 RNA guide
uccaucugagaagaaaugguu

SEQ ID NO: 42395 - RNA, 21 nt, Artificial Sequence
  LRRK2 RNA guide
ucucagauggaacaaagugau

SEQ ID NO: 42396 - RNA, 21 nt, Artificial Sequence
  LRRK2 RNA guide
ucuucucagauggaacaaagu

SEQ ID NO: 42397 - RNA, 21 nt, Artificial Sequence
  LRRK2 RNA guide
uguuccaucugagaagaaaug

SEQ ID NO: 42398 - RNA, 21 nt, Artificial Sequence
  LRRK2 RNA guide
uuccaucugagaagaaauggu

SEQ ID NO: 42399 - RNA, 21 nt, Artificial Sequence
  LRRK2 RNA guide
uucucagauggaacaaaguga

SEQ ID NO: 42400 - RNA, 21 nt, Artificial Sequence
  LRRK2 RNA guide
uucuucucagauggaacaaag

SEQ ID NO: 42401 - RNA, 21 nt, Artificial Sequence
  LRRK2 RNA guide
uuguuccaucugagaagaaau

SEQ ID NO: 42402 - RNA, 21 nt, Artificial Sequence
  LRRK2 RNA guide
uuucuucucagauggaacaaa

SEQ ID NO: 42403 - RNA, 21 nt, Artificial Sequence
  LRRK2 RNA guide
uuuguuccaucugagaagaaa

SEQ ID NO: 42404 - RNA, 22 nt, Artificial Sequence
  LRRK2 RNA guide
aaaaucacuuuguuccaucuga

SEQ ID NO: 42405 - RNA, 22 nt, Artificial Sequence
  LRRK2 RNA guide
aaaucacuuuguuccaucugag

SEQ ID NO: 42406 - RNA, 22 nt, Artificial Sequence
  LRRK2 RNA guide
aaccauuucuucucagauggaa

SEQ ID NO: 42407 - RNA, 22 nt, Artificial Sequence
  LRRK2 RNA guide
aaucacuuuguuccaucugaga

SEQ ID NO: 42408 - RNA, 22 nt, Artificial Sequence
  LRRK2 RNA guide
accauuucuucucagauggaac

SEQ ID NO: 42409 - RNA, 22 nt, Artificial Sequence
  LRRK2 RNA guide
acuuuguuccaucugagaagaa

SEQ ID NO: 42410 - RNA, 22 nt, Artificial Sequence
  LRRK2 RNA guide
agaaaaucacuuuguuccaucu

SEQ ID NO: 42411 - RNA, 22 nt, Artificial Sequence
  LRRK2 RNA guide
agauggaacaaagugauuuucu

SEQ ID NO: 42412 - RNA, 22 nt, Artificial Sequence
  LRRK2 RNA guide
aucacuuuguuccaucugagaa

SEQ ID NO: 42413 - RNA, 22 nt, Artificial Sequence
  LRRK2 RNA guide
aucugagaagaaaugguugagc

SEQ ID NO: 42414 - RNA, 22 nt, Artificial Sequence
  LRRK2 RNA guide
auuucuucucagauggaacaaa

SEQ ID NO: 42415 - RNA, 22 nt, Artificial Sequence
  LRRK2 RNA guide
caaccauuucuucucagaugga

SEQ ID NO: 42416 - RNA, 22 nt, Artificial Sequence
  LRRK2 RNA guide
cacuuuguuccaucugagaaga

SEQ ID NO: 42417 - RNA, 22 nt, Artificial Sequence
  LRRK2 RNA guide
cagauggaacaaagugauuuuc

SEQ ID NO: 42418 - RNA, 22 nt, Artificial Sequence
  LRRK2 RNA guide
caucugagaagaaaugguugag

SEQ ID NO: 42419 - RNA, 22 nt, Artificial Sequence
  LRRK2 RNA guide
cauuucuucucagauggaacaa

SEQ ID NO: 42420 - RNA, 22 nt, Artificial Sequence
  LRRK2 RNA guide
ccaucugagaagaaaugguuga

SEQ ID NO: 42421 - RNA, 22 nt, Artificial Sequence
  LRRK2 RNA guide
ccauuucuucucagauggaaca

SEQ ID NO: 42422 - RNA, 22 nt, Artificial Sequence
  LRRK2 RNA guide
cucaaccauuucuucucagaug

SEQ ID NO: 42423 - RNA, 22 nt, Artificial Sequence
  LRRK2 RNA guide
cucagauggaacaaagugauuu

SEQ ID NO: 42424 - RNA, 22 nt, Artificial Sequence
  LRRK2 RNA guide
cuucucagauggaacaaaguga

SEQ ID NO: 42425 - RNA, 22 nt, Artificial Sequence
  LRRK2 RNA guide
cuuuguuccaucugagaagaaa

SEQ ID NO: 42426 - RNA, 22 nt, Artificial Sequence
  LRRK2 RNA guide
gaaaaucacuuuguuccaucug

SEQ ID NO: 42427 - RNA, 22 nt, Artificial Sequence
  LRRK2 RNA guide
gagaaaaucacuuuguuccauc

SEQ ID NO: 42428 - RNA, 22 nt, Artificial Sequence
  LRRK2 RNA guide
gauggaacaaagugauuuucuc

SEQ ID NO: 42429 - RNA, 22 nt, Artificial Sequence
  LRRK2 RNA guide
gcucaaccauuucuucucagau

SEQ ID NO: 42430 - RNA, 22 nt, Artificial Sequence
  LRRK2 RNA guide
ggagaaaaucacuuuguuccau

SEQ ID NO: 42431 - RNA, 22 nt, Artificial Sequence
  LRRK2 RNA guide
guuccaucugagaagaaauggu

SEQ ID NO: 42432 - RNA, 22 nt, Artificial Sequence
  LRRK2 RNA guide
ucaaccauuucuucucagaugg

SEQ ID NO: 42433 - RNA, 22 nt, Artificial Sequence
  LRRK2 RNA guide
ucacuuuguuccaucugagaag

SEQ ID NO: 42434 - RNA, 22 nt, Artificial Sequence
  LRRK2 RNA guide
ucagauggaacaaagugauuuu

SEQ ID NO: 42435 - RNA, 22 nt, Artificial Sequence
  LRRK2 RNA guide
uccaucugagaagaaaugguug

SEQ ID NO: 42436 - RNA, 22 nt, Artificial Sequence
  LRRK2 RNA guide
ucucagauggaacaaagugauu

SEQ ID NO: 42437 - RNA, 22 nt, Artificial Sequence
  LRRK2 RNA guide
ucuucucagauggaacaaagug

SEQ ID NO: 42438 - RNA, 22 nt, Artificial Sequence
  LRRK2 RNA guide
ugcucaaccauuucuucucaga

SEQ ID NO: 42439 - RNA, 22 nt, Artificial Sequence
  LRRK2 RNA guide
uguuccaucugagaagaaaugg

SEQ ID NO: 42440 - RNA, 22 nt, Artificial Sequence
  LRRK2 RNA guide
uuccaucugagaagaaaugguu

SEQ ID NO: 42441 - RNA, 22 nt, Artificial Sequence
  LRRK2 RNA guide
uucucagauggaacaaagugau

SEQ ID NO: 42442 - RNA, 22 nt, Artificial Sequence
  LRRK2 RNA guide
uucuucucagauggaacaaagu

SEQ ID NO: 42443 - RNA, 22 nt, Artificial Sequence
  LRRK2 RNA guide
uuguuccaucugagaagaaaug

SEQ ID NO: 42444 - RNA, 22 nt, Artificial Sequence
  LRRK2 RNA guide
uuucuucucagauggaacaaag

SEQ ID NO: 42445 - RNA, 22 nt, Artificial Sequence
  LRRK2 RNA guide
uuuguuccaucugagaagaaau

SEQ ID NO: 42446 - RNA, 20 nt, Artificial Sequence
  LRRK2 RNA guide
aacaggagugucaccgcaua

SEQ ID NO: 42447 - RNA, 20 nt, Artificial Sequence
  LRRK2 RNA guide
aagagaacaggagugucacc

SEQ ID NO: 42448 - RNA, 20 nt, Artificial Sequence
  LRRK2 RNA guide
acaggagugucaccgcauau

SEQ ID NO: 42449 - RNA, 20 nt, Artificial Sequence
  LRRK2 RNA guide
accgcauauaaaacacagau

SEQ ID NO: 42450 - RNA, 20 nt, Artificial Sequence
  LRRK2 RNA guide
acugaagagaacaggagugu

SEQ ID NO: 42451 - RNA, 20 nt, Artificial Sequence
  LRRK2 RNA guide
agaacaggagugucaccgca

SEQ ID NO: 42452 - RNA, 20 nt, Artificial Sequence
  LRRK2 RNA guide
agagaacaggagugucaccg

SEQ ID NO: 42453 - RNA, 20 nt, Artificial Sequence
  LRRK2 RNA guide
aggagugucaccgcauauaa

SEQ ID NO: 42454 - RNA, 20 nt, Artificial Sequence
  LRRK2 RNA guide
agugucaccgcauauaaaac

SEQ ID NO: 42455 - RNA, 20 nt, Artificial Sequence
  LRRK2 RNA guide
auaugcggugacacuccugu

SEQ ID NO: 42456 - RNA, 20 nt, Artificial Sequence
  LRRK2 RNA guide
aucuguguuuuauaugcggu

SEQ ID NO: 42457 - RNA, 20 nt, Artificial Sequence
  LRRK2 RNA guide
augcggugacacuccuguuc

SEQ ID NO: 42458 - RNA, 20 nt, Artificial Sequence
  LRRK2 RNA guide
caccgcauauaaaacacaga

SEQ ID NO: 42459 - RNA, 20 nt, Artificial Sequence
  LRRK2 RNA guide
cacugaagagaacaggagug

SEQ ID NO: 42460 - RNA, 20 nt, Artificial Sequence
  LRRK2 RNA guide
caggagugucaccgcauaua

SEQ ID NO: 42461 - RNA, 20 nt, Artificial Sequence
  LRRK2 RNA guide
caucuguguuuuauaugcgg

SEQ ID NO: 42462 - RNA, 20 nt, Artificial Sequence
  LRRK2 RNA guide
ccgcauauaaaacacagaug

SEQ ID NO: 42463 - RNA, 20 nt, Artificial Sequence
  LRRK2 RNA guide
ccgcaucuguguuuuauaug

SEQ ID NO: 42464 - RNA, 20 nt, Artificial Sequence
  LRRK2 RNA guide
cgcaucuguguuuuauaugc

SEQ ID NO: 42465 - RNA, 20 nt, Artificial Sequence
  LRRK2 RNA guide
cggugacacuccuguucucu

SEQ ID NO: 42466 - RNA, 20 nt, Artificial Sequence
  LRRK2 RNA guide
cugaagagaacaggaguguc

SEQ ID NO: 42467 - RNA, 20 nt, Artificial Sequence
  LRRK2 RNA guide
cuguguuuuauaugcgguga

SEQ ID NO: 42468 - RNA, 20 nt, Artificial Sequence
  LRRK2 RNA guide
gaacaggagugucaccgcau

SEQ ID NO: 42469 - RNA, 20 nt, Artificial Sequence
  LRRK2 RNA guide
gaagagaacaggagugucac

SEQ ID NO: 42470 - RNA, 20 nt, Artificial Sequence
  LRRK2 RNA guide
gagaacaggagugucaccgc

SEQ ID NO: 42471 - RNA, 20 nt, Artificial Sequence
  LRRK2 RNA guide
gagugucaccgcauauaaaa

SEQ ID NO: 42472 - RNA, 20 nt, Artificial Sequence
  LRRK2 RNA guide
gcaucuguguuuuauaugcg

SEQ ID NO: 42473 - RNA, 20 nt, Artificial Sequence
  LRRK2 RNA guide
gccgcaucuguguuuuauau

SEQ ID NO: 42474 - RNA, 20 nt, Artificial Sequence
  LRRK2 RNA guide
gcggugacacuccuguucuc

SEQ ID NO: 42475 - RNA, 20 nt, Artificial Sequence
  LRRK2 RNA guide
ggagugucaccgcauauaaa

SEQ ID NO: 42476 - RNA, 20 nt, Artificial Sequence
  LRRK2 RNA guide
ggccgcaucuguguuuuaua

SEQ ID NO: 42477 - RNA, 20 nt, Artificial Sequence
  LRRK2 RNA guide
gucaccgcauauaaaacaca

SEQ ID NO: 42478 - RNA, 20 nt, Artificial Sequence
  LRRK2 RNA guide
gugucaccgcauauaaaaca

SEQ ID NO: 42479 - RNA, 20 nt, Artificial Sequence
  LRRK2 RNA guide
guguuuuauaugcggugaca

SEQ ID NO: 42480 - RNA, 20 nt, Artificial Sequence
  LRRK2 RNA guide
guuuuauaugcggugacacu

SEQ ID NO: 42481 - RNA, 20 nt, Artificial Sequence
  LRRK2 RNA guide
uauaugcggugacacuccug

SEQ ID NO: 42482 - RNA, 20 nt, Artificial Sequence
  LRRK2 RNA guide
uaugcggugacacuccuguu

SEQ ID NO: 42483 - RNA, 20 nt, Artificial Sequence
  LRRK2 RNA guide
ucaccgcauauaaaacacag

SEQ ID NO: 42484 - RNA, 20 nt, Artificial Sequence
  LRRK2 RNA guide
ucuguguuuuauaugcggug

SEQ ID NO: 42485 - RNA, 20 nt, Artificial Sequence
  LRRK2 RNA guide
ugaagagaacaggaguguca

SEQ ID NO: 42486 - RNA, 20 nt, Artificial Sequence
  LRRK2 RNA guide
ugcggugacacuccuguucu

SEQ ID NO: 42487 - RNA, 20 nt, Artificial Sequence
  LRRK2 RNA guide
uggccgcaucuguguuuuau

SEQ ID NO: 42488 - RNA, 20 nt, Artificial Sequence
  LRRK2 RNA guide
ugucaccgcauauaaaacac

SEQ ID NO: 42489 - RNA, 20 nt, Artificial Sequence
  LRRK2 RNA guide
uguguuuuauaugcggugac

SEQ ID NO: 42490 - RNA, 20 nt, Artificial Sequence
  LRRK2 RNA guide
uguuuuauaugcggugacac

SEQ ID NO: 42491 - RNA, 20 nt, Artificial Sequence
  LRRK2 RNA guide
uuauaugcggugacacuccu

SEQ ID NO: 42492 - RNA, 20 nt, Artificial Sequence
  LRRK2 RNA guide
uuuauaugcggugacacucc

SEQ ID NO: 42493 - RNA, 20 nt, Artificial Sequence
  LRRK2 RNA guide
uuuuauaugcggugacacuc

SEQ ID NO: 42494 - RNA, 21 nt, Artificial Sequence
  LRRK2 RNA guide
aacaggagugucaccgcauau

SEQ ID NO: 42495 - RNA, 21 nt, Artificial Sequence
  LRRK2 RNA guide
aagagaacaggagugucaccg

SEQ ID NO: 42496 - RNA, 21 nt, Artificial Sequence
  LRRK2 RNA guide
acaggagugucaccgcauaua

SEQ ID NO: 42497 - RNA, 21 nt, Artificial Sequence
  LRRK2 RNA guide
accgcauauaaaacacagaug

SEQ ID NO: 42498 - RNA, 21 nt, Artificial Sequence
  LRRK2 RNA guide
acugaagagaacaggaguguc

SEQ ID NO: 42499 - RNA, 21 nt, Artificial Sequence
  LRRK2 RNA guide
agaacaggagugucaccgcau

SEQ ID NO: 42500 - RNA, 21 nt, Artificial Sequence
  LRRK2 RNA guide
agagaacaggagugucaccgc

SEQ ID NO: 42501 - RNA, 21 nt, Artificial Sequence
  LRRK2 RNA guide
aggagugucaccgcauauaaa

SEQ ID NO: 42502 - RNA, 21 nt, Artificial Sequence
  LRRK2 RNA guide
agugucaccgcauauaaaaca

SEQ ID NO: 42503 - RNA, 21 nt, Artificial Sequence
  LRRK2 RNA guide
auaugcggugacacuccuguu

SEQ ID NO: 42504 - RNA, 21 nt, Artificial Sequence
  LRRK2 RNA guide
aucuguguuuuauaugcggug

SEQ ID NO: 42505 - RNA, 21 nt, Artificial Sequence
  LRRK2 RNA guide
augcggugacacuccuguucu

SEQ ID NO: 42506 - RNA, 21 nt, Artificial Sequence
  LRRK2 RNA guide
caccgcauauaaaacacagau

SEQ ID NO: 42507 - RNA, 21 nt, Artificial Sequence
  LRRK2 RNA guide
cacugaagagaacaggagugu

SEQ ID NO: 42508 - RNA, 21 nt, Artificial Sequence
  LRRK2 RNA guide
caggagugucaccgcauauaa

SEQ ID NO: 42509 - RNA, 21 nt, Artificial Sequence
  LRRK2 RNA guide
caucuguguuuuauaugcggu

SEQ ID NO: 42510 - RNA, 21 nt, Artificial Sequence
  LRRK2 RNA guide
ccgcauauaaaacacagaugc

SEQ ID NO: 42511 - RNA, 21 nt, Artificial Sequence
  LRRK2 RNA guide
ccgcaucuguguuuuauaugc

SEQ ID NO: 42512 - RNA, 21 nt, Artificial Sequence
  LRRK2 RNA guide
cgcaucuguguuuuauaugcg

SEQ ID NO: 42513 - RNA, 21 nt, Artificial Sequence
  LRRK2 RNA guide
cggugacacuccuguucucuu

SEQ ID NO: 42514 - RNA, 21 nt, Artificial Sequence
  LRRK2 RNA guide
cugaagagaacaggaguguca

SEQ ID NO: 42515 - RNA, 21 nt, Artificial Sequence
  LRRK2 RNA guide
cuguguuuuauaugcggugac

SEQ ID NO: 42516 - RNA, 21 nt, Artificial Sequence
  LRRK2 RNA guide
gaacaggagugucaccgcaua

SEQ ID NO: 42517 - RNA, 21 nt, Artificial Sequence
  LRRK2 RNA guide
gaagagaacaggagugucacc

SEQ ID NO: 42518 - RNA, 21 nt, Artificial Sequence
  LRRK2 RNA guide
gagaacaggagugucaccgca

SEQ ID NO: 42519 - RNA, 21 nt, Artificial Sequence
  LRRK2 RNA guide
gagugucaccgcauauaaaac

SEQ ID NO: 42520 - RNA, 21 nt, Artificial Sequence
  LRRK2 RNA guide
gcaucuguguuuuauaugcgg

SEQ ID NO: 42521 - RNA, 21 nt, Artificial Sequence
  LRRK2 RNA guide
gccgcaucuguguuuuauaug

SEQ ID NO: 42522 - RNA, 21 nt, Artificial Sequence
  LRRK2 RNA guide
gcggugacacuccuguucucu

SEQ ID NO: 42523 - RNA, 21 nt, Artificial Sequence
  LRRK2 RNA guide
ggagugucaccgcauauaaaa

SEQ ID NO: 42524 - RNA, 21 nt, Artificial Sequence
  LRRK2 RNA guide
ggccgcaucuguguuuuauau

SEQ ID NO: 42525 - RNA, 21 nt, Artificial Sequence
  LRRK2 RNA guide
gucaccgcauauaaaacacag

SEQ ID NO: 42526 - RNA, 21 nt, Artificial Sequence
  LRRK2 RNA guide
gugucaccgcauauaaaacac

SEQ ID NO: 42527 - RNA, 21 nt, Artificial Sequence
  LRRK2 RNA guide
guguuuuauaugcggugacac

SEQ ID NO: 42528 - RNA, 21 nt, Artificial Sequence
  LRRK2 RNA guide
guuuuauaugcggugacacuc

SEQ ID NO: 42529 - RNA, 21 nt, Artificial Sequence
  LRRK2 RNA guide
uauaugcggugacacuccugu

SEQ ID NO: 42530 - RNA, 21 nt, Artificial Sequence
  LRRK2 RNA guide
uaugcggugacacuccuguuc

SEQ ID NO: 42531 - RNA, 21 nt, Artificial Sequence
  LRRK2 RNA guide
ucaccgcauauaaaacacaga

SEQ ID NO: 42532 - RNA, 21 nt, Artificial Sequence
  LRRK2 RNA guide
ucacugaagagaacaggagug

SEQ ID NO: 42533 - RNA, 21 nt, Artificial Sequence
  LRRK2 RNA guide
ucuguguuuuauaugcgguga

SEQ ID NO: 42534 - RNA, 21 nt, Artificial Sequence
  LRRK2 RNA guide
ugaagagaacaggagugucac

SEQ ID NO: 42535 - RNA, 21 nt, Artificial Sequence
  LRRK2 RNA guide
ugcggugacacuccuguucuc

SEQ ID NO: 42536 - RNA, 21 nt, Artificial Sequence
  LRRK2 RNA guide
uggccgcaucuguguuuuaua

SEQ ID NO: 42537 - RNA, 21 nt, Artificial Sequence
  LRRK2 RNA guide
ugucaccgcauauaaaacaca

SEQ ID NO: 42538 - RNA, 21 nt, Artificial Sequence
  LRRK2 RNA guide
uguguuuuauaugcggugaca

SEQ ID NO: 42539 - RNA, 21 nt, Artificial Sequence
  LRRK2 RNA guide
uguuuuauaugcggugacacu

SEQ ID NO: 42540 - RNA, 21 nt, Artificial Sequence
  LRRK2 RNA guide
uuauaugcggugacacuccug

SEQ ID NO: 42541 - RNA, 21 nt, Artificial Sequence
  LRRK2 RNA guide
uuggccgcaucuguguuuuau

SEQ ID NO: 42542 - RNA, 21 nt, Artificial Sequence
  LRRK2 RNA guide
uuuauaugcggugacacuccu

SEQ ID NO: 42543 - RNA, 21 nt, Artificial Sequence
  LRRK2 RNA guide
uuuuauaugcggugacacucc

SEQ ID NO: 42544 - RNA, 22 nt, Artificial Sequence
  LRRK2 RNA guide
aacaggagugucaccgcauaua

SEQ ID NO: 42545 - RNA, 22 nt, Artificial Sequence
  LRRK2 RNA guide
aagagaacaggagugucaccgc

SEQ ID NO: 42546 - RNA, 22 nt, Artificial Sequence
  LRRK2 RNA guide
acaggagugucaccgcauauaa

SEQ ID NO: 42547 - RNA, 22 nt, Artificial Sequence
  LRRK2 RNA guide
accgcauauaaaacacagaugc

SEQ ID NO: 42548 - RNA, 22 nt, Artificial Sequence
  LRRK2 RNA guide
acugaagagaacaggaguguca

SEQ ID NO: 42549 - RNA, 22 nt, Artificial Sequence
  LRRK2 RNA guide
agaacaggagugucaccgcaua

SEQ ID NO: 42550 - RNA, 22 nt, Artificial Sequence
  LRRK2 RNA guide
agagaacaggagugucaccgca

SEQ ID NO: 42551 - RNA, 22 nt, Artificial Sequence
  LRRK2 RNA guide
aggagugucaccgcauauaaaa

SEQ ID NO: 42552 - RNA, 22 nt, Artificial Sequence
  LRRK2 RNA guide
agugucaccgcauauaaaacac

SEQ ID NO: 42553 - RNA, 22 nt, Artificial Sequence
  LRRK2 RNA guide
auaugcggugacacuccuguuc

SEQ ID NO: 42554 - RNA, 22 nt, Artificial Sequence
  LRRK2 RNA guide
aucuguguuuuauaugcgguga

SEQ ID NO: 42555 - RNA, 22 nt, Artificial Sequence
  LRRK2 RNA guide
augcggugacacuccuguucuc

SEQ ID NO: 42556 - RNA, 22 nt, Artificial Sequence
  LRRK2 RNA guide
caccgcauauaaaacacagaug

SEQ ID NO: 42557 - RNA, 22 nt, Artificial Sequence
  LRRK2 RNA guide
cacugaagagaacaggaguguc

SEQ ID NO: 42558 - RNA, 22 nt, Artificial Sequence
  LRRK2 RNA guide
caggagugucaccgcauauaaa

SEQ ID NO: 42559 - RNA, 22 nt, Artificial Sequence
  LRRK2 RNA guide
caucuguguuuuauaugcggug

SEQ ID NO: 42560 - RNA, 22 nt, Artificial Sequence
  LRRK2 RNA guide
ccgcauauaaaacacagaugcg

SEQ ID NO: 42561 - RNA, 22 nt, Artificial Sequence
  LRRK2 RNA guide
ccgcaucuguguuuuauaugcg

SEQ ID NO: 42562 - RNA, 22 nt, Artificial Sequence
  LRRK2 RNA guide
cgcaucuguguuuuauaugcgg

SEQ ID NO: 42563 - RNA, 22 nt, Artificial Sequence
  LRRK2 RNA guide
cggugacacuccuguucucuuc

SEQ ID NO: 42564 - RNA, 22 nt, Artificial Sequence
  LRRK2 RNA guide
cucacugaagagaacaggagug

SEQ ID NO: 42565 - RNA, 22 nt, Artificial Sequence
  LRRK2 RNA guide
cugaagagaacaggagugucac

SEQ ID NO: 42566 - RNA, 22 nt, Artificial Sequence
  LRRK2 RNA guide
cuguguuuuauaugcggugaca

SEQ ID NO: 42567 - RNA, 22 nt, Artificial Sequence
  LRRK2 RNA guide
gaacaggagugucaccgcauau

SEQ ID NO: 42568 - RNA, 22 nt, Artificial Sequence
  LRRK2 RNA guide
gaagagaacaggagugucaccg

SEQ ID NO: 42569 - RNA, 22 nt, Artificial Sequence
  LRRK2 RNA guide
gagaacaggagugucaccgcau

SEQ ID NO: 42570 - RNA, 22 nt, Artificial Sequence
  LRRK2 RNA guide
gagugucaccgcauauaaaaca

SEQ ID NO: 42571 - RNA, 22 nt, Artificial Sequence
  LRRK2 RNA guide
gcaucuguguuuuauaugcggu

SEQ ID NO: 42572 - RNA, 22 nt, Artificial Sequence
  LRRK2 RNA guide
gccgcaucuguguuuuauaugc

SEQ ID NO: 42573 - RNA, 22 nt, Artificial Sequence
  LRRK2 RNA guide
gcggugacacuccuguucucuu

SEQ ID NO: 42574 - RNA, 22 nt, Artificial Sequence
  LRRK2 RNA guide
ggagugucaccgcauauaaaac

SEQ ID NO: 42575 - RNA, 22 nt, Artificial Sequence
  LRRK2 RNA guide
ggccgcaucuguguuuuauaug

SEQ ID NO: 42576 - RNA, 22 nt, Artificial Sequence
  LRRK2 RNA guide
gucaccgcauauaaaacacaga

SEQ ID NO: 42577 - RNA, 22 nt, Artificial Sequence
  LRRK2 RNA guide
gugucaccgcauauaaaacaca

SEQ ID NO: 42578 - RNA, 22 nt, Artificial Sequence
  LRRK2 RNA guide
guguuuuauaugcggugacacu

SEQ ID NO: 42579 - RNA, 22 nt, Artificial Sequence
  LRRK2 RNA guide
guuuuauaugcggugacacucc

SEQ ID NO: 42580 - RNA, 22 nt, Artificial Sequence
  LRRK2 RNA guide
uauaugcggugacacuccuguu

SEQ ID NO: 42581 - RNA, 22 nt, Artificial Sequence
  LRRK2 RNA guide
uaugcggugacacuccuguucu

SEQ ID NO: 42582 - RNA, 22 nt, Artificial Sequence
  LRRK2 RNA guide
ucaccgcauauaaaacacagau

SEQ ID NO: 42583 - RNA, 22 nt, Artificial Sequence
  LRRK2 RNA guide
ucacugaagagaacaggagugu

SEQ ID NO: 42584 - RNA, 22 nt, Artificial Sequence
  LRRK2 RNA guide
ucuguguuuuauaugcggugac

SEQ ID NO: 42585 - RNA, 22 nt, Artificial Sequence
  LRRK2 RNA guide
ugaagagaacaggagugucacc

SEQ ID NO: 42586 - RNA, 22 nt, Artificial Sequence
  LRRK2 RNA guide
ugcggugacacuccuguucucu

SEQ ID NO: 42587 - RNA, 22 nt, Artificial Sequence
  LRRK2 RNA guide
uggccgcaucuguguuuuauau

SEQ ID NO: 42588 - RNA, 22 nt, Artificial Sequence
  LRRK2 RNA guide
ugucaccgcauauaaaacacag

SEQ ID NO: 42589 - RNA, 22 nt, Artificial Sequence
  LRRK2 RNA guide
uguguuuuauaugcggugacac

SEQ ID NO: 42590 - RNA, 22 nt, Artificial Sequence
  LRRK2 RNA guide
uguuuuauaugcggugacacuc

SEQ ID NO: 42591 - RNA, 22 nt, Artificial Sequence
  LRRK2 RNA guide
uuauaugcggugacacuccugu

SEQ ID NO: 42592 - RNA, 22 nt, Artificial Sequence
  LRRK2 RNA guide
uuggccgcaucuguguuuuaua

SEQ ID NO: 42593 - RNA, 22 nt, Artificial Sequence
  LRRK2 RNA guide
uuuauaugcggugacacuccug

SEQ ID NO: 42594 - RNA, 22 nt, Artificial Sequence
  LRRK2 RNA guide
uuuggccgcaucuguguuuuau

SEQ ID NO: 42595 - RNA, 22 nt, Artificial Sequence
  LRRK2 RNA guide
uuuuauaugcggugacacuccu

SEQ ID NO: 42596 - RNA, 20 nt, Artificial Sequence
  LRRK2 RNA guide
aacaggagugucacugcaua

SEQ ID NO: 42597 - RNA, 20 nt, Artificial Sequence
  LRRK2 RNA guide
aagagaacaggagugucacu

SEQ ID NO: 42598 - RNA, 20 nt, Artificial Sequence
  LRRK2 RNA guide
acaggagugucacugcauau

SEQ ID NO: 42599 - RNA, 20 nt, Artificial Sequence
  LRRK2 RNA guide
acugcauauaaaacacagau

SEQ ID NO: 42600 - RNA, 20 nt, Artificial Sequence
  LRRK2 RNA guide
agaacaggagugucacugca

SEQ ID NO: 42601 - RNA, 20 nt, Artificial Sequence
  LRRK2 RNA guide
agagaacaggagugucacug

SEQ ID NO: 42602 - RNA, 20 nt, Artificial Sequence
  LRRK2 RNA guide
aggagugucacugcauauaa

SEQ ID NO: 42603 - RNA, 20 nt, Artificial Sequence
  LRRK2 RNA guide
agugucacugcauauaaaac

SEQ ID NO: 42604 - RNA, 20 nt, Artificial Sequence
  LRRK2 RNA guide
auaugcagugacacuccugu

SEQ ID NO: 42605 - RNA, 20 nt, Artificial Sequence
  LRRK2 RNA guide
aucuguguuuuauaugcagu

SEQ ID NO: 42606 - RNA, 20 nt, Artificial Sequence
  LRRK2 RNA guide
augcagugacacuccuguuc

SEQ ID NO: 42607 - RNA, 20 nt, Artificial Sequence
  LRRK2 RNA guide
cacugcauauaaaacacaga

SEQ ID NO: 42608 - RNA, 20 nt, Artificial Sequence
  LRRK2 RNA guide
caggagugucacugcauaua

SEQ ID NO: 42609 - RNA, 20 nt, Artificial Sequence
  LRRK2 RNA guide
cagugacacuccuguucucu

SEQ ID NO: 42610 - RNA, 20 nt, Artificial Sequence
  LRRK2 RNA guide
caucuguguuuuauaugcag

SEQ ID NO: 42611 - RNA, 20 nt, Artificial Sequence
  LRRK2 RNA guide
cugcauauaaaacacagaug

SEQ ID NO: 42612 - RNA, 20 nt, Artificial Sequence
  LRRK2 RNA guide
cuguguuuuauaugcaguga

SEQ ID NO: 42613 - RNA, 20 nt, Artificial Sequence
  LRRK2 RNA guide
gaacaggagugucacugcau

SEQ ID NO: 42614 - RNA, 20 nt, Artificial Sequence
  LRRK2 RNA guide
gagaacaggagugucacugc

SEQ ID NO: 42615 - RNA, 20 nt, Artificial Sequence
  LRRK2 RNA guide
gagugucacugcauauaaaa

SEQ ID NO: 42616 - RNA, 20 nt, Artificial Sequence
  LRRK2 RNA guide
gcagugacacuccuguucuc

SEQ ID NO: 42617 - RNA, 20 nt, Artificial Sequence
  LRRK2 RNA guide
gcaucuguguuuuauaugca

SEQ ID NO: 42618 - RNA, 20 nt, Artificial Sequence
  LRRK2 RNA guide
ggagugucacugcauauaaa

SEQ ID NO: 42619 - RNA, 20 nt, Artificial Sequence
  LRRK2 RNA guide
gucacugcauauaaaacaca

SEQ ID NO: 42620 - RNA, 20 nt, Artificial Sequence
  LRRK2 RNA guide
gugucacugcauauaaaaca

SEQ ID NO: 42621 - RNA, 20 nt, Artificial Sequence
  LRRK2 RNA guide
guguuuuauaugcagugaca

SEQ ID NO: 42622 - RNA, 20 nt, Artificial Sequence
  LRRK2 RNA guide
guuuuauaugcagugacacu

SEQ ID NO: 42623 - RNA, 20 nt, Artificial Sequence
  LRRK2 RNA guide
uauaugcagugacacuccug

SEQ ID NO: 42624 - RNA, 20 nt, Artificial Sequence
  LRRK2 RNA guide
uaugcagugacacuccuguu

SEQ ID NO: 42625 - RNA, 20 nt, Artificial Sequence
  LRRK2 RNA guide
ucacugcauauaaaacacag

SEQ ID NO: 42626 - RNA, 20 nt, Artificial Sequence
  LRRK2 RNA guide
ucuguguuuuauaugcagug

SEQ ID NO: 42627 - RNA, 20 nt, Artificial Sequence
  LRRK2 RNA guide
ugcagugacacuccuguucu

SEQ ID NO: 42628 - RNA, 20 nt, Artificial Sequence
  LRRK2 RNA guide
ugucacugcauauaaaacac

SEQ ID NO: 42629 - RNA, 20 nt, Artificial Sequence
  LRRK2 RNA guide
uguguuuuauaugcagugac

SEQ ID NO: 42630 - RNA, 20 nt, Artificial Sequence
  LRRK2 RNA guide
uguuuuauaugcagugacac

SEQ ID NO: 42631 - RNA, 20 nt, Artificial Sequence
  LRRK2 RNA guide
uuauaugcagugacacuccu

SEQ ID NO: 42632 - RNA, 20 nt, Artificial Sequence
  LRRK2 RNA guide
uuuauaugcagugacacucc

SEQ ID NO: 42633 - RNA, 20 nt, Artificial Sequence
  LRRK2 RNA guide
uuuuauaugcagugacacuc

SEQ ID NO: 42634 - RNA, 21 nt, Artificial Sequence
  LRRK2 RNA guide
aacaggagugucacugcauau

SEQ ID NO: 42635 - RNA, 21 nt, Artificial Sequence
  LRRK2 RNA guide
aagagaacaggagugucacug

SEQ ID NO: 42636 - RNA, 21 nt, Artificial Sequence
  LRRK2 RNA guide
acaggagugucacugcauaua

SEQ ID NO: 42637 - RNA, 21 nt, Artificial Sequence
  LRRK2 RNA guide
acugcauauaaaacacagaug

SEQ ID NO: 42638 - RNA, 21 nt, Artificial Sequence
  LRRK2 RNA guide
agaacaggagugucacugcau

SEQ ID NO: 42639 - RNA, 21 nt, Artificial Sequence
  LRRK2 RNA guide
agagaacaggagugucacugc

SEQ ID NO: 42640 - RNA, 21 nt, Artificial Sequence
  LRRK2 RNA guide
aggagugucacugcauauaaa

SEQ ID NO: 42641 - RNA, 21 nt, Artificial Sequence
  LRRK2 RNA guide
agugucacugcauauaaaaca

SEQ ID NO: 42642 - RNA, 21 nt, Artificial Sequence
  LRRK2 RNA guide
auaugcagugacacuccuguu

SEQ ID NO: 42643 - RNA, 21 nt, Artificial Sequence
  LRRK2 RNA guide
aucuguguuuuauaugcagug

SEQ ID NO: 42644 - RNA, 21 nt, Artificial Sequence
  LRRK2 RNA guide
augcagugacacuccuguucu

SEQ ID NO: 42645 - RNA, 21 nt, Artificial Sequence
  LRRK2 RNA guide
cacugcauauaaaacacagau

SEQ ID NO: 42646 - RNA, 21 nt, Artificial Sequence
  LRRK2 RNA guide
caggagugucacugcauauaa

SEQ ID NO: 42647 - RNA, 21 nt, Artificial Sequence
  LRRK2 RNA guide
cagugacacuccuguucucuu

SEQ ID NO: 42648 - RNA, 21 nt, Artificial Sequence
  LRRK2 RNA guide
caucuguguuuuauaugcagu

SEQ ID NO: 42649 - RNA, 21 nt, Artificial Sequence
  LRRK2 RNA guide
cgcaucuguguuuuauaugca

SEQ ID NO: 42650 - RNA, 21 nt, Artificial Sequence
  LRRK2 RNA guide
cugcauauaaaacacagaugc

SEQ ID NO: 42651 - RNA, 21 nt, Artificial Sequence
  LRRK2 RNA guide
cuguguuuuauaugcagugac

SEQ ID NO: 42652 - RNA, 21 nt, Artificial Sequence
  LRRK2 RNA guide
gaacaggagugucacugcaua

SEQ ID NO: 42653 - RNA, 21 nt, Artificial Sequence
  LRRK2 RNA guide
gaagagaacaggagugucacu

SEQ ID NO: 42654 - RNA, 21 nt, Artificial Sequence
  LRRK2 RNA guide
gagaacaggagugucacugca

SEQ ID NO: 42655 - RNA, 21 nt, Artificial Sequence
  LRRK2 RNA guide
gagugucacugcauauaaaac

SEQ ID NO: 42656 - RNA, 21 nt, Artificial Sequence
  LRRK2 RNA guide
gcagugacacuccuguucucu

SEQ ID NO: 42657 - RNA, 21 nt, Artificial Sequence
  LRRK2 RNA guide
gcaucuguguuuuauaugcag

SEQ ID NO: 42658 - RNA, 21 nt, Artificial Sequence
  LRRK2 RNA guide
ggagugucacugcauauaaaa

SEQ ID NO: 42659 - RNA, 21 nt, Artificial Sequence
  LRRK2 RNA guide
gucacugcauauaaaacacag

SEQ ID NO: 42660 - RNA, 21 nt, Artificial Sequence
  LRRK2 RNA guide
gugucacugcauauaaaacac

SEQ ID NO: 42661 - RNA, 21 nt, Artificial Sequence
  LRRK2 RNA guide
guguuuuauaugcagugacac

SEQ ID NO: 42662 - RNA, 21 nt, Artificial Sequence
  LRRK2 RNA guide
guuuuauaugcagugacacuc

SEQ ID NO: 42663 - RNA, 21 nt, Artificial Sequence
  LRRK2 RNA guide
uauaugcagugacacuccugu

SEQ ID NO: 42664 - RNA, 21 nt, Artificial Sequence
  LRRK2 RNA guide
uaugcagugacacuccuguuc

SEQ ID NO: 42665 - RNA, 21 nt, Artificial Sequence
  LRRK2 RNA guide
ucacugcauauaaaacacaga

SEQ ID NO: 42666 - RNA, 21 nt, Artificial Sequence
  LRRK2 RNA guide
ucuguguuuuauaugcaguga

SEQ ID NO: 42667 - RNA, 21 nt, Artificial Sequence
  LRRK2 RNA guide
ugcagugacacuccuguucuc

SEQ ID NO: 42668 - RNA, 21 nt, Artificial Sequence
  LRRK2 RNA guide
ugucacugcauauaaaacaca

SEQ ID NO: 42669 - RNA, 21 nt, Artificial Sequence
  LRRK2 RNA guide
uguguuuuauaugcagugaca

SEQ ID NO: 42670 - RNA, 21 nt, Artificial Sequence
  LRRK2 RNA guide
uguuuuauaugcagugacacu

SEQ ID NO: 42671 - RNA, 21 nt, Artificial Sequence
  LRRK2 RNA guide
uuauaugcagugacacuccug

SEQ ID NO: 42672 - RNA, 21 nt, Artificial Sequence
  LRRK2 RNA guide
uuuauaugcagugacacuccu

SEQ ID NO: 42673 - RNA, 21 nt, Artificial Sequence
  LRRK2 RNA guide
uuuuauaugcagugacacucc

SEQ ID NO: 42674 - RNA, 22 nt, Artificial Sequence
  LRRK2 RNA guide
aacaggagugucacugcauaua

SEQ ID NO: 42675 - RNA, 22 nt, Artificial Sequence
  LRRK2 RNA guide
aagagaacaggagugucacugc

SEQ ID NO: 42676 - RNA, 22 nt, Artificial Sequence
  LRRK2 RNA guide
acaggagugucacugcauauaa

SEQ ID NO: 42677 - RNA, 22 nt, Artificial Sequence
  LRRK2 RNA guide
acugcauauaaaacacagaugc

SEQ ID NO: 42678 - RNA, 22 nt, Artificial Sequence
  LRRK2 RNA guide
agaacaggagugucacugcaua

SEQ ID NO: 42679 - RNA, 22 nt, Artificial Sequence
  LRRK2 RNA guide
agagaacaggagugucacugca

SEQ ID NO: 42680 - RNA, 22 nt, Artificial Sequence
  LRRK2 RNA guide
aggagugucacugcauauaaaa

SEQ ID NO: 42681 - RNA, 22 nt, Artificial Sequence
  LRRK2 RNA guide
agugucacugcauauaaaacac

SEQ ID NO: 42682 - RNA, 22 nt, Artificial Sequence
  LRRK2 RNA guide
auaugcagugacacuccuguuc

SEQ ID NO: 42683 - RNA, 22 nt, Artificial Sequence
  LRRK2 RNA guide
aucuguguuuuauaugcaguga

SEQ ID NO: 42684 - RNA, 22 nt, Artificial Sequence
  LRRK2 RNA guide
augcagugacacuccuguucuc

SEQ ID NO: 42685 - RNA, 22 nt, Artificial Sequence
  LRRK2 RNA guide
cacugcauauaaaacacagaug

SEQ ID NO: 42686 - RNA, 22 nt, Artificial Sequence
  LRRK2 RNA guide
caggagugucacugcauauaaa

SEQ ID NO: 42687 - RNA, 22 nt, Artificial Sequence
  LRRK2 RNA guide
cagugacacuccuguucucuuc

SEQ ID NO: 42688 - RNA, 22 nt, Artificial Sequence
  LRRK2 RNA guide
caucuguguuuuauaugcagug

SEQ ID NO: 42689 - RNA, 22 nt, Artificial Sequence
  LRRK2 RNA guide
ccgcaucuguguuuuauaugca

SEQ ID NO: 42690 - RNA, 22 nt, Artificial Sequence
  LRRK2 RNA guide
cgcaucuguguuuuauaugcag

SEQ ID NO: 42691 - RNA, 22 nt, Artificial Sequence
  LRRK2 RNA guide
cugcauauaaaacacagaugcg

SEQ ID NO: 42692 - RNA, 22 nt, Artificial Sequence
  LRRK2 RNA guide
cuguguuuuauaugcagugaca

SEQ ID NO: 42693 - RNA, 22 nt, Artificial Sequence
  LRRK2 RNA guide
gaacaggagugucacugcauau

SEQ ID NO: 42694 - RNA, 22 nt, Artificial Sequence
  LRRK2 RNA guide
gaagagaacaggagugucacug

SEQ ID NO: 42695 - RNA, 22 nt, Artificial Sequence
  LRRK2 RNA guide
gagaacaggagugucacugcau

SEQ ID NO: 42696 - RNA, 22 nt, Artificial Sequence
  LRRK2 RNA guide
gagugucacugcauauaaaaca

SEQ ID NO: 42697 - RNA, 22 nt, Artificial Sequence
  LRRK2 RNA guide
gcagugacacuccuguucucuu

SEQ ID NO: 42698 - RNA, 22 nt, Artificial Sequence
  LRRK2 RNA guide
gcaucuguguuuuauaugcagu

SEQ ID NO: 42699 - RNA, 22 nt, Artificial Sequence
  LRRK2 RNA guide
ggagugucacugcauauaaaac

SEQ ID NO: 42700 - RNA, 22 nt, Artificial Sequence
  LRRK2 RNA guide
gucacugcauauaaaacacaga

SEQ ID NO: 42701 - RNA, 22 nt, Artificial Sequence
  LRRK2 RNA guide
gugucacugcauauaaaacaca

SEQ ID NO: 42702 - RNA, 22 nt, Artificial Sequence
  LRRK2 RNA guide
guguuuuauaugcagugacacu

SEQ ID NO: 42703 - RNA, 22 nt, Artificial Sequence
  LRRK2 RNA guide
guuuuauaugcagugacacucc

SEQ ID NO: 42704 - RNA, 22 nt, Artificial Sequence
  LRRK2 RNA guide
uauaugcagugacacuccuguu

SEQ ID NO: 42705 - RNA, 22 nt, Artificial Sequence
  LRRK2 RNA guide
uaugcagugacacuccuguucu

SEQ ID NO: 42706 - RNA, 22 nt, Artificial Sequence
  LRRK2 RNA guide
ucacugcauauaaaacacagau

SEQ ID NO: 42707 - RNA, 22 nt, Artificial Sequence
  LRRK2 RNA guide
ucuguguuuuauaugcagugac

SEQ ID NO: 42708 - RNA, 22 nt, Artificial Sequence
  LRRK2 RNA guide
ugaagagaacaggagugucacu

SEQ ID NO: 42709 - RNA, 22 nt, Artificial Sequence
  LRRK2 RNA guide
ugcagugacacuccuguucucu

SEQ ID NO: 42710 - RNA, 22 nt, Artificial Sequence
  LRRK2 RNA guide
ugucacugcauauaaaacacag

SEQ ID NO: 42711 - RNA, 22 nt, Artificial Sequence
  LRRK2 RNA guide
uguguuuuauaugcagugacac

SEQ ID NO: 42712 - RNA, 22 nt, Artificial Sequence
  LRRK2 RNA guide
uguuuuauaugcagugacacuc

SEQ ID NO: 42713 - RNA, 22 nt, Artificial Sequence
  LRRK2 RNA guide
uuauaugcagugacacuccugu

SEQ ID NO: 42714 - RNA, 22 nt, Artificial Sequence
  LRRK2 RNA guide
uuuauaugcagugacacuccug

SEQ ID NO: 42715 - RNA, 22 nt, Artificial Sequence
  LRRK2 RNA guide
uuuuauaugcagugacacuccu

SEQ ID NO: 42716 - RNA, 20 nt, Artificial Sequence
  LRRK2 RNA guide
aacauacaggaaggaaaaaa

SEQ ID NO: 42717 - RNA, 20 nt, Artificial Sequence
  LRRK2 RNA guide
aagugugcauaaugugucaa

SEQ ID NO: 42718 - RNA, 20 nt, Artificial Sequence
  LRRK2 RNA guide
aaugugucaacauacaggaa

SEQ ID NO: 42719 - RNA, 20 nt, Artificial Sequence
  LRRK2 RNA guide
acaggaaggaaaaaacgaau

SEQ ID NO: 42720 - RNA, 20 nt, Artificial Sequence
  LRRK2 RNA guide
acauacaggaaggaaaaaac

SEQ ID NO: 42721 - RNA, 20 nt, Artificial Sequence
  LRRK2 RNA guide
agguauucguuuuuuccuuc

SEQ ID NO: 42722 - RNA, 20 nt, Artificial Sequence
  LRRK2 RNA guide
agugugcauaaugugucaac

SEQ ID NO: 42723 - RNA, 20 nt, Artificial Sequence
  LRRK2 RNA guide
auaaugugucaacauacagg

SEQ ID NO: 42724 - RNA, 20 nt, Artificial Sequence
  LRRK2 RNA guide
auacaggaaggaaaaaacga

SEQ ID NO: 42725 - RNA, 20 nt, Artificial Sequence
  LRRK2 RNA guide
augugucaacauacaggaag

SEQ ID NO: 42726 - RNA, 20 nt, Artificial Sequence
  LRRK2 RNA guide
auucguuuuuuccuuccugu

SEQ ID NO: 42727 - RNA, 20 nt, Artificial Sequence
  LRRK2 RNA guide
caacauacaggaaggaaaaa

SEQ ID NO: 42728 - RNA, 20 nt, Artificial Sequence
  LRRK2 RNA guide
cagguauucguuuuuuccuu

SEQ ID NO: 42729 - RNA, 20 nt, Artificial Sequence
  LRRK2 RNA guide
cauaaugugucaacauacag

SEQ ID NO: 42730 - RNA, 20 nt, Artificial Sequence
  LRRK2 RNA guide
cauacaggaaggaaaaaacg

SEQ ID NO: 42731 - RNA, 20 nt, Artificial Sequence
  LRRK2 RNA guide
ccagguauucguuuuuuccu

SEQ ID NO: 42732 - RNA, 20 nt, Artificial Sequence
  LRRK2 RNA guide
ccuguauguugacacauuau

SEQ ID NO: 42733 - RNA, 20 nt, Artificial Sequence
  LRRK2 RNA guide
ccuuccuguauguugacaca

SEQ ID NO: 42734 - RNA, 20 nt, Artificial Sequence
  LRRK2 RNA guide
cguuuuuuccuuccuguaug

SEQ ID NO: 42735 - RNA, 20 nt, Artificial Sequence
  LRRK2 RNA guide
cuguauguugacacauuaug

SEQ ID NO: 42736 - RNA, 20 nt, Artificial Sequence
  LRRK2 RNA guide
cuuccuguauguugacacau

SEQ ID NO: 42737 - RNA, 20 nt, Artificial Sequence
  LRRK2 RNA guide
gcauaaugugucaacauaca

SEQ ID NO: 42738 - RNA, 20 nt, Artificial Sequence
  LRRK2 RNA guide
gguauucguuuuuuccuucc

SEQ ID NO: 42739 - RNA, 20 nt, Artificial Sequence
  LRRK2 RNA guide
guauucguuuuuuccuuccu

SEQ ID NO: 42740 - RNA, 20 nt, Artificial Sequence
  LRRK2 RNA guide
gucaacauacaggaaggaaa

SEQ ID NO: 42741 - RNA, 20 nt, Artificial Sequence
  LRRK2 RNA guide
gugcauaaugugucaacaua

SEQ ID NO: 42742 - RNA, 20 nt, Artificial Sequence
  LRRK2 RNA guide
gugucaacauacaggaagga

SEQ ID NO: 42743 - RNA, 20 nt, Artificial Sequence
  LRRK2 RNA guide
gugugcauaaugugucaaca

SEQ ID NO: 42744 - RNA, 20 nt, Artificial Sequence
  LRRK2 RNA guide
guuuuuuccuuccuguaugu

SEQ ID NO: 42745 - RNA, 20 nt, Artificial Sequence
  LRRK2 RNA guide
uaaugugucaacauacagga

SEQ ID NO: 42746 - RNA, 20 nt, Artificial Sequence
  LRRK2 RNA guide
uacaggaaggaaaaaacgaa

SEQ ID NO: 42747 - RNA, 20 nt, Artificial Sequence
  LRRK2 RNA guide
uauucguuuuuuccuuccug

SEQ ID NO: 42748 - RNA, 20 nt, Artificial Sequence
  LRRK2 RNA guide
ucaacauacaggaaggaaaa

SEQ ID NO: 42749 - RNA, 20 nt, Artificial Sequence
  LRRK2 RNA guide
uccuguauguugacacauua

SEQ ID NO: 42750 - RNA, 20 nt, Artificial Sequence
  LRRK2 RNA guide
uccuuccuguauguugacac

SEQ ID NO: 42751 - RNA, 20 nt, Artificial Sequence
  LRRK2 RNA guide
ucguuuuuuccuuccuguau

SEQ ID NO: 42752 - RNA, 20 nt, Artificial Sequence
  LRRK2 RNA guide
ugcauaaugugucaacauac

SEQ ID NO: 42753 - RNA, 20 nt, Artificial Sequence
  LRRK2 RNA guide
uguauguugacacauuaugc

SEQ ID NO: 42754 - RNA, 20 nt, Artificial Sequence
  LRRK2 RNA guide
ugucaacauacaggaaggaa

SEQ ID NO: 42755 - RNA, 20 nt, Artificial Sequence
  LRRK2 RNA guide
ugugcauaaugugucaacau

SEQ ID NO: 42756 - RNA, 20 nt, Artificial Sequence
  LRRK2 RNA guide
ugugucaacauacaggaagg

SEQ ID NO: 42757 - RNA, 20 nt, Artificial Sequence
  LRRK2 RNA guide
uuccuguauguugacacauu

SEQ ID NO: 42758 - RNA, 20 nt, Artificial Sequence
  LRRK2 RNA guide
uuccuuccuguauguugaca

SEQ ID NO: 42759 - RNA, 20 nt, Artificial Sequence
  LRRK2 RNA guide
uucguuuuuuccuuccugua

SEQ ID NO: 42760 - RNA, 20 nt, Artificial Sequence
  LRRK2 RNA guide
uuuccuuccuguauguugac

SEQ ID NO: 42761 - RNA, 20 nt, Artificial Sequence
  LRRK2 RNA guide
uuuuccuuccuguauguuga

SEQ ID NO: 42762 - RNA, 20 nt, Artificial Sequence
  LRRK2 RNA guide
uuuuuccuuccuguauguug

SEQ ID NO: 42763 - RNA, 20 nt, Artificial Sequence
  LRRK2 RNA guide
uuuuuuccuuccuguauguu

SEQ ID NO: 42764 - RNA, 21 nt, Artificial Sequence
  LRRK2 RNA guide
aaagugugcauaaugugucaa

SEQ ID NO: 42765 - RNA, 21 nt, Artificial Sequence
  LRRK2 RNA guide
aacauacaggaaggaaaaaac

SEQ ID NO: 42766 - RNA, 21 nt, Artificial Sequence
  LRRK2 RNA guide
aagugugcauaaugugucaac

SEQ ID NO: 42767 - RNA, 21 nt, Artificial Sequence
  LRRK2 RNA guide
aaugugucaacauacaggaag

SEQ ID NO: 42768 - RNA, 21 nt, Artificial Sequence
  LRRK2 RNA guide
acaggaaggaaaaaacgaaua

SEQ ID NO: 42769 - RNA, 21 nt, Artificial Sequence
  LRRK2 RNA guide
acauacaggaaggaaaaaacg

SEQ ID NO: 42770 - RNA, 21 nt, Artificial Sequence
  LRRK2 RNA guide
agguauucguuuuuuccuucc

SEQ ID NO: 42771 - RNA, 21 nt, Artificial Sequence
  LRRK2 RNA guide
agugugcauaaugugucaaca

SEQ ID NO: 42772 - RNA, 21 nt, Artificial Sequence
  LRRK2 RNA guide
auaaugugucaacauacagga

SEQ ID NO: 42773 - RNA, 21 nt, Artificial Sequence
  LRRK2 RNA guide
auacaggaaggaaaaaacgaa

SEQ ID NO: 42774 - RNA, 21 nt, Artificial Sequence
  LRRK2 RNA guide
augugucaacauacaggaagg

SEQ ID NO: 42775 - RNA, 21 nt, Artificial Sequence
  LRRK2 RNA guide
auucguuuuuuccuuccugua

SEQ ID NO: 42776 - RNA, 21 nt, Artificial Sequence
  LRRK2 RNA guide
caacauacaggaaggaaaaaa

SEQ ID NO: 42777 - RNA, 21 nt, Artificial Sequence
  LRRK2 RNA guide
cagguauucguuuuuuccuuc

SEQ ID NO: 42778 - RNA, 21 nt, Artificial Sequence
  LRRK2 RNA guide
cauaaugugucaacauacagg

SEQ ID NO: 42779 - RNA, 21 nt, Artificial Sequence
  LRRK2 RNA guide
cauacaggaaggaaaaaacga

SEQ ID NO: 42780 - RNA, 21 nt, Artificial Sequence
  LRRK2 RNA guide
ccagguauucguuuuuuccuu

SEQ ID NO: 42781 - RNA, 21 nt, Artificial Sequence
  LRRK2 RNA guide
cccagguauucguuuuuuccu

SEQ ID NO: 42782 - RNA, 21 nt, Artificial Sequence
  LRRK2 RNA guide
ccuguauguugacacauuaug

SEQ ID NO: 42783 - RNA, 21 nt, Artificial Sequence
  LRRK2 RNA guide
ccuuccuguauguugacacau

SEQ ID NO: 42784 - RNA, 21 nt, Artificial Sequence
  LRRK2 RNA guide
cguuuuuuccuuccuguaugu

SEQ ID NO: 42785 - RNA, 21 nt, Artificial Sequence
  LRRK2 RNA guide
cuguauguugacacauuaugc

SEQ ID NO: 42786 - RNA, 21 nt, Artificial Sequence
  LRRK2 RNA guide
cuuccuguauguugacacauu

SEQ ID NO: 42787 - RNA, 21 nt, Artificial Sequence
  LRRK2 RNA guide
gcauaaugugucaacauacag

SEQ ID NO: 42788 - RNA, 21 nt, Artificial Sequence
  LRRK2 RNA guide
gguauucguuuuuuccuuccu

SEQ ID NO: 42789 - RNA, 21 nt, Artificial Sequence
  LRRK2 RNA guide
guauucguuuuuuccuuccug

SEQ ID NO: 42790 - RNA, 21 nt, Artificial Sequence
  LRRK2 RNA guide
gucaacauacaggaaggaaaa

SEQ ID NO: 42791 - RNA, 21 nt, Artificial Sequence
  LRRK2 RNA guide
gugcauaaugugucaacauac

SEQ ID NO: 42792 - RNA, 21 nt, Artificial Sequence
  LRRK2 RNA guide
gugucaacauacaggaaggaa

SEQ ID NO: 42793 - RNA, 21 nt, Artificial Sequence
  LRRK2 RNA guide
gugugcauaaugugucaacau

SEQ ID NO: 42794 - RNA, 21 nt, Artificial Sequence
  LRRK2 RNA guide
guuuuuuccuuccuguauguu

SEQ ID NO: 42795 - RNA, 21 nt, Artificial Sequence
  LRRK2 RNA guide
uaaugugucaacauacaggaa

SEQ ID NO: 42796 - RNA, 21 nt, Artificial Sequence
  LRRK2 RNA guide
uacaggaaggaaaaaacgaau

SEQ ID NO: 42797 - RNA, 21 nt, Artificial Sequence
  LRRK2 RNA guide
uauucguuuuuuccuuccugu

SEQ ID NO: 42798 - RNA, 21 nt, Artificial Sequence
  LRRK2 RNA guide
ucaacauacaggaaggaaaaa

SEQ ID NO: 42799 - RNA, 21 nt, Artificial Sequence
  LRRK2 RNA guide
uccuguauguugacacauuau

SEQ ID NO: 42800 - RNA, 21 nt, Artificial Sequence
  LRRK2 RNA guide
uccuuccuguauguugacaca

SEQ ID NO: 42801 - RNA, 21 nt, Artificial Sequence
  LRRK2 RNA guide
ucguuuuuuccuuccuguaug

SEQ ID NO: 42802 - RNA, 21 nt, Artificial Sequence
  LRRK2 RNA guide
ugcauaaugugucaacauaca

SEQ ID NO: 42803 - RNA, 21 nt, Artificial Sequence
  LRRK2 RNA guide
uguauguugacacauuaugca

SEQ ID NO: 42804 - RNA, 21 nt, Artificial Sequence
  LRRK2 RNA guide
ugucaacauacaggaaggaaa

SEQ ID NO: 42805 - RNA, 21 nt, Artificial Sequence
  LRRK2 RNA guide
ugugcauaaugugucaacaua

SEQ ID NO: 42806 - RNA, 21 nt, Artificial Sequence
  LRRK2 RNA guide
ugugucaacauacaggaagga

SEQ ID NO: 42807 - RNA, 21 nt, Artificial Sequence
  LRRK2 RNA guide
uuccuguauguugacacauua

SEQ ID NO: 42808 - RNA, 21 nt, Artificial Sequence
  LRRK2 RNA guide
uuccuuccuguauguugacac

SEQ ID NO: 42809 - RNA, 21 nt, Artificial Sequence
  LRRK2 RNA guide
uucguuuuuuccuuccuguau

SEQ ID NO: 42810 - RNA, 21 nt, Artificial Sequence
  LRRK2 RNA guide
uuuccuuccuguauguugaca

SEQ ID NO: 42811 - RNA, 21 nt, Artificial Sequence
  LRRK2 RNA guide
uuuuccuuccuguauguugac

SEQ ID NO: 42812 - RNA, 21 nt, Artificial Sequence
  LRRK2 RNA guide
uuuuuccuuccuguauguuga

SEQ ID NO: 42813 - RNA, 21 nt, Artificial Sequence
  LRRK2 RNA guide
uuuuuuccuuccuguauguug

SEQ ID NO: 42814 - RNA, 22 nt, Artificial Sequence
  LRRK2 RNA guide
aaaagugugcauaaugugucaa

SEQ ID NO: 42815 - RNA, 22 nt, Artificial Sequence
  LRRK2 RNA guide
aaagugugcauaaugugucaac

SEQ ID NO: 42816 - RNA, 22 nt, Artificial Sequence
  LRRK2 RNA guide
aacauacaggaaggaaaaaacg

SEQ ID NO: 42817 - RNA, 22 nt, Artificial Sequence
  LRRK2 RNA guide
aagugugcauaaugugucaaca

SEQ ID NO: 42818 - RNA, 22 nt, Artificial Sequence
  LRRK2 RNA guide
aaugugucaacauacaggaagg

SEQ ID NO: 42819 - RNA, 22 nt, Artificial Sequence
  LRRK2 RNA guide
acaggaaggaaaaaacgaauac

SEQ ID NO: 42820 - RNA, 22 nt, Artificial Sequence
  LRRK2 RNA guide
acauacaggaaggaaaaaacga

SEQ ID NO: 42821 - RNA, 22 nt, Artificial Sequence
  LRRK2 RNA guide
agguauucguuuuuuccuuccu

SEQ ID NO: 42822 - RNA, 22 nt, Artificial Sequence
  LRRK2 RNA guide
agugugcauaaugugucaacau

SEQ ID NO: 42823 - RNA, 22 nt, Artificial Sequence
  LRRK2 RNA guide
auaaugugucaacauacaggaa

SEQ ID NO: 42824 - RNA, 22 nt, Artificial Sequence
  LRRK2 RNA guide
auacaggaaggaaaaaacgaau

SEQ ID NO: 42825 - RNA, 22 nt, Artificial Sequence
  LRRK2 RNA guide
augugucaacauacaggaagga

SEQ ID NO: 42826 - RNA, 22 nt, Artificial Sequence
  LRRK2 RNA guide
auucguuuuuuccuuccuguau

SEQ ID NO: 42827 - RNA, 22 nt, Artificial Sequence
  LRRK2 RNA guide
caacauacaggaaggaaaaaac

SEQ ID NO: 42828 - RNA, 22 nt, Artificial Sequence
  LRRK2 RNA guide
cagguauucguuuuuuccuucc

SEQ ID NO: 42829 - RNA, 22 nt, Artificial Sequence
  LRRK2 RNA guide
cauaaugugucaacauacagga

SEQ ID NO: 42830 - RNA, 22 nt, Artificial Sequence
  LRRK2 RNA guide
cauacaggaaggaaaaaacgaa

SEQ ID NO: 42831 - RNA, 22 nt, Artificial Sequence
  LRRK2 RNA guide
ccagguauucguuuuuuccuuc

SEQ ID NO: 42832 - RNA, 22 nt, Artificial Sequence
  LRRK2 RNA guide
cccagguauucguuuuuuccuu

SEQ ID NO: 42833 - RNA, 22 nt, Artificial Sequence
  LRRK2 RNA guide
ccuguauguugacacauuaugc

SEQ ID NO: 42834 - RNA, 22 nt, Artificial Sequence
  LRRK2 RNA guide
ccuuccuguauguugacacauu

SEQ ID NO: 42835 - RNA, 22 nt, Artificial Sequence
  LRRK2 RNA guide
cguuuuuuccuuccuguauguu

SEQ ID NO: 42836 - RNA, 22 nt, Artificial Sequence
  LRRK2 RNA guide
cuguauguugacacauuaugca

SEQ ID NO: 42837 - RNA, 22 nt, Artificial Sequence
  LRRK2 RNA guide
cuuccuguauguugacacauua

SEQ ID NO: 42838 - RNA, 22 nt, Artificial Sequence
  LRRK2 RNA guide
gcauaaugugucaacauacagg

SEQ ID NO: 42839 - RNA, 22 nt, Artificial Sequence
  LRRK2 RNA guide
gguauucguuuuuuccuuccug

SEQ ID NO: 42840 - RNA, 22 nt, Artificial Sequence
  LRRK2 RNA guide
guauucguuuuuuccuuccugu

SEQ ID NO: 42841 - RNA, 22 nt, Artificial Sequence
  LRRK2 RNA guide
gucaacauacaggaaggaaaaa

SEQ ID NO: 42842 - RNA, 22 nt, Artificial Sequence
  LRRK2 RNA guide
gugcauaaugugucaacauaca

SEQ ID NO: 42843 - RNA, 22 nt, Artificial Sequence
  LRRK2 RNA guide
gugucaacauacaggaaggaaa

SEQ ID NO: 42844 - RNA, 22 nt, Artificial Sequence
  LRRK2 RNA guide
gugugcauaaugugucaacaua

SEQ ID NO: 42845 - RNA, 22 nt, Artificial Sequence
  LRRK2 RNA guide
guuuuuuccuuccuguauguug

SEQ ID NO: 42846 - RNA, 22 nt, Artificial Sequence
  LRRK2 RNA guide
uaaugugucaacauacaggaag

SEQ ID NO: 42847 - RNA, 22 nt, Artificial Sequence
  LRRK2 RNA guide
uacaggaaggaaaaaacgaaua

SEQ ID NO: 42848 - RNA, 22 nt, Artificial Sequence
  LRRK2 RNA guide
uauucguuuuuuccuuccugua

SEQ ID NO: 42849 - RNA, 22 nt, Artificial Sequence
  LRRK2 RNA guide
ucaacauacaggaaggaaaaaa

SEQ ID NO: 42850 - RNA, 22 nt, Artificial Sequence
  LRRK2 RNA guide
ucccagguauucguuuuuuccu

SEQ ID NO: 42851 - RNA, 22 nt, Artificial Sequence
  LRRK2 RNA guide
uccuguauguugacacauuaug

SEQ ID NO: 42852 - RNA, 22 nt, Artificial Sequence
  LRRK2 RNA guide
uccuuccuguauguugacacau

SEQ ID NO: 42853 - RNA, 22 nt, Artificial Sequence
  LRRK2 RNA guide
ucguuuuuuccuuccuguaugu

SEQ ID NO: 42854 - RNA, 22 nt, Artificial Sequence
  LRRK2 RNA guide
ugcauaaugugucaacauacag

SEQ ID NO: 42855 - RNA, 22 nt, Artificial Sequence
  LRRK2 RNA guide
uguauguugacacauuaugcac

SEQ ID NO: 42856 - RNA, 22 nt, Artificial Sequence
  LRRK2 RNA guide
ugucaacauacaggaaggaaaa

SEQ ID NO: 42857 - RNA, 22 nt, Artificial Sequence
  LRRK2 RNA guide
ugugcauaaugugucaacauac

SEQ ID NO: 42858 - RNA, 22 nt, Artificial Sequence
  LRRK2 RNA guide
ugugucaacauacaggaaggaa

SEQ ID NO: 42859 - RNA, 22 nt, Artificial Sequence
  LRRK2 RNA guide
uuccuguauguugacacauuau

SEQ ID NO: 42860 - RNA, 22 nt, Artificial Sequence
  LRRK2 RNA guide
uuccuuccuguauguugacaca

SEQ ID NO: 42861 - RNA, 22 nt, Artificial Sequence
  LRRK2 RNA guide
uucguuuuuuccuuccuguaug

SEQ ID NO: 42862 - RNA, 22 nt, Artificial Sequence
  LRRK2 RNA guide
uuuccuuccuguauguugacac

SEQ ID NO: 42863 - RNA, 22 nt, Artificial Sequence
  LRRK2 RNA guide
uuuuccuuccuguauguugaca

SEQ ID NO: 42864 - RNA, 22 nt, Artificial Sequence
  LRRK2 RNA guide
uuuuuccuuccuguauguugac

SEQ ID NO: 42865 - RNA, 22 nt, Artificial Sequence
  LRRK2 RNA guide
uuuuuuccuuccuguauguuga

SEQ ID NO: 42866 - RNA, 20 nt, Artificial Sequence
  LRRK2 RNA guide
aaaggaaggaaaaaacgaau

SEQ ID NO: 42867 - RNA, 20 nt, Artificial Sequence
  LRRK2 RNA guide
aaugugucaacauaaaggaa

SEQ ID NO: 42868 - RNA, 20 nt, Artificial Sequence
  LRRK2 RNA guide
acauaaaggaaggaaaaaac

SEQ ID NO: 42869 - RNA, 20 nt, Artificial Sequence
  LRRK2 RNA guide
auaaaggaaggaaaaaacga

SEQ ID NO: 42870 - RNA, 20 nt, Artificial Sequence
  LRRK2 RNA guide
auaaugugucaacauaaagg

SEQ ID NO: 42871 - RNA, 20 nt, Artificial Sequence
  LRRK2 RNA guide
augugucaacauaaaggaag

SEQ ID NO: 42872 - RNA, 20 nt, Artificial Sequence
  LRRK2 RNA guide
auucguuuuuuccuuccuuu

SEQ ID NO: 42873 - RNA, 20 nt, Artificial Sequence
  LRRK2 RNA guide
caacauaaaggaaggaaaaa

SEQ ID NO: 42874 - RNA, 20 nt, Artificial Sequence
  LRRK2 RNA guide
cauaaaggaaggaaaaaacg

SEQ ID NO: 42875 - RNA, 20 nt, Artificial Sequence
  LRRK2 RNA guide
cauaaugugucaacauaaag

SEQ ID NO: 42876 - RNA, 20 nt, Artificial Sequence
  LRRK2 RNA guide
ccuuccuuuauguugacaca

SEQ ID NO: 42877 - RNA, 20 nt, Artificial Sequence
  LRRK2 RNA guide
ccuuuauguugacacauuau

SEQ ID NO: 42878 - RNA, 20 nt, Artificial Sequence
  LRRK2 RNA guide
cguuuuuuccuuccuuuaug

SEQ ID NO: 42879 - RNA, 20 nt, Artificial Sequence
  LRRK2 RNA guide
cuuccuuuauguugacacau

SEQ ID NO: 42880 - RNA, 20 nt, Artificial Sequence
  LRRK2 RNA guide
cuuuauguugacacauuaug

SEQ ID NO: 42881 - RNA, 20 nt, Artificial Sequence
  LRRK2 RNA guide
gcauaaugugucaacauaaa

SEQ ID NO: 42882 - RNA, 20 nt, Artificial Sequence
  LRRK2 RNA guide
gucaacauaaaggaaggaaa

SEQ ID NO: 42883 - RNA, 20 nt, Artificial Sequence
  LRRK2 RNA guide
gugucaacauaaaggaagga

SEQ ID NO: 42884 - RNA, 20 nt, Artificial Sequence
  LRRK2 RNA guide
guuuuuuccuuccuuuaugu

SEQ ID NO: 42885 - RNA, 20 nt, Artificial Sequence
  LRRK2 RNA guide
uaaaggaaggaaaaaacgaa

SEQ ID NO: 42886 - RNA, 20 nt, Artificial Sequence
  LRRK2 RNA guide
uaaugugucaacauaaagga

SEQ ID NO: 42887 - RNA, 20 nt, Artificial Sequence
  LRRK2 RNA guide
uauucguuuuuuccuuccuu

SEQ ID NO: 42888 - RNA, 20 nt, Artificial Sequence
  LRRK2 RNA guide
ucaacauaaaggaaggaaaa

SEQ ID NO: 42889 - RNA, 20 nt, Artificial Sequence
  LRRK2 RNA guide
uccuuccuuuauguugacac

SEQ ID NO: 42890 - RNA, 20 nt, Artificial Sequence
  LRRK2 RNA guide
uccuuuauguugacacauua

SEQ ID NO: 42891 - RNA, 20 nt, Artificial Sequence
  LRRK2 RNA guide
ucguuuuuuccuuccuuuau

SEQ ID NO: 42892 - RNA, 20 nt, Artificial Sequence
  LRRK2 RNA guide
ugcauaaugugucaacauaa

SEQ ID NO: 42893 - RNA, 20 nt, Artificial Sequence
  LRRK2 RNA guide
ugucaacauaaaggaaggaa

SEQ ID NO: 42894 - RNA, 20 nt, Artificial Sequence
  LRRK2 RNA guide
ugugucaacauaaaggaagg

SEQ ID NO: 42895 - RNA, 20 nt, Artificial Sequence
  LRRK2 RNA guide
uuccuuccuuuauguugaca

SEQ ID NO: 42896 - RNA, 20 nt, Artificial Sequence
  LRRK2 RNA guide
uuccuuuauguugacacauu

SEQ ID NO: 42897 - RNA, 20 nt, Artificial Sequence
  LRRK2 RNA guide
uucguuuuuuccuuccuuua

SEQ ID NO: 42898 - RNA, 20 nt, Artificial Sequence
  LRRK2 RNA guide
uuuauguugacacauuaugc

SEQ ID NO: 42899 - RNA, 20 nt, Artificial Sequence
  LRRK2 RNA guide
uuuccuuccuuuauguugac

SEQ ID NO: 42900 - RNA, 20 nt, Artificial Sequence
  LRRK2 RNA guide
uuuuccuuccuuuauguuga

SEQ ID NO: 42901 - RNA, 20 nt, Artificial Sequence
  LRRK2 RNA guide
uuuuuccuuccuuuauguug

SEQ ID NO: 42902 - RNA, 21 nt, Artificial Sequence
  LRRK2 RNA guide
aaugugucaacauaaaggaag

SEQ ID NO: 42903 - RNA, 21 nt, Artificial Sequence
  LRRK2 RNA guide
acauaaaggaaggaaaaaacg

SEQ ID NO: 42904 - RNA, 21 nt, Artificial Sequence
  LRRK2 RNA guide
augugucaacauaaaggaagg

SEQ ID NO: 42905 - RNA, 21 nt, Artificial Sequence
  LRRK2 RNA guide
cauaaaggaaggaaaaaacga

SEQ ID NO: 42906 - RNA, 21 nt, Artificial Sequence
  LRRK2 RNA guide
cauaaugugucaacauaaagg

SEQ ID NO: 42907 - RNA, 21 nt, Artificial Sequence
  LRRK2 RNA guide
ccuuccuuuauguugacacau

SEQ ID NO: 42908 - RNA, 21 nt, Artificial Sequence
  LRRK2 RNA guide
ccuuuauguugacacauuaug

SEQ ID NO: 42909 - RNA, 21 nt, Artificial Sequence
  LRRK2 RNA guide
cguuuuuuccuuccuuuaugu

SEQ ID NO: 42910 - RNA, 21 nt, Artificial Sequence
  LRRK2 RNA guide
cuuccuuuauguugacacauu

SEQ ID NO: 42911 - RNA, 21 nt, Artificial Sequence
  LRRK2 RNA guide
cuuuauguugacacauuaugc

SEQ ID NO: 42912 - RNA, 21 nt, Artificial Sequence
  LRRK2 RNA guide
gcauaaugugucaacauaaag

SEQ ID NO: 42913 - RNA, 21 nt, Artificial Sequence
  LRRK2 RNA guide
guauucguuuuuuccuuccuu

SEQ ID NO: 42914 - RNA, 21 nt, Artificial Sequence
  LRRK2 RNA guide
gucaacauaaaggaaggaaaa

SEQ ID NO: 42915 - RNA, 21 nt, Artificial Sequence
  LRRK2 RNA guide
gugcauaaugugucaacauaa

SEQ ID NO: 42916 - RNA, 21 nt, Artificial Sequence
  LRRK2 RNA guide
gugucaacauaaaggaaggaa

SEQ ID NO: 42917 - RNA, 21 nt, Artificial Sequence
  LRRK2 RNA guide
uccuuccuuuauguugacaca

SEQ ID NO: 42918 - RNA, 21 nt, Artificial Sequence
  LRRK2 RNA guide
ucguuuuuuccuuccuuuaug

SEQ ID NO: 42919 - RNA, 21 nt, Artificial Sequence
  LRRK2 RNA guide
ugucaacauaaaggaaggaaa

SEQ ID NO: 42920 - RNA, 21 nt, Artificial Sequence
  LRRK2 RNA guide
ugugucaacauaaaggaagga

SEQ ID NO: 42921 - RNA, 21 nt, Artificial Sequence
  LRRK2 RNA guide
uuccuuccuuuauguugacac

SEQ ID NO: 42922 - RNA, 21 nt, Artificial Sequence
  LRRK2 RNA guide
uuuccuuccuuuauguugaca

SEQ ID NO: 42923 - RNA, 21 nt, Artificial Sequence
  LRRK2 RNA guide
uuuuccuuccuuuauguugac

SEQ ID NO: 42924 - RNA, 22 nt, Artificial Sequence
  LRRK2 RNA guide
aaaggaaggaaaaaacgaauac

SEQ ID NO: 42925 - RNA, 22 nt, Artificial Sequence
  LRRK2 RNA guide
aacauaaaggaaggaaaaaacg

SEQ ID NO: 42926 - RNA, 22 nt, Artificial Sequence
  LRRK2 RNA guide
aaugugucaacauaaaggaagg

SEQ ID NO: 42927 - RNA, 22 nt, Artificial Sequence
  LRRK2 RNA guide
acauaaaggaaggaaaaaacga

SEQ ID NO: 42928 - RNA, 22 nt, Artificial Sequence
  LRRK2 RNA guide
augugucaacauaaaggaagga

SEQ ID NO: 42929 - RNA, 22 nt, Artificial Sequence
  LRRK2 RNA guide
caacauaaaggaaggaaaaaac

SEQ ID NO: 42930 - RNA, 22 nt, Artificial Sequence
  LRRK2 RNA guide
cauaaaggaaggaaaaaacgaa

SEQ ID NO: 42931 - RNA, 22 nt, Artificial Sequence
  LRRK2 RNA guide
cauaaugugucaacauaaagga

SEQ ID NO: 42932 - RNA, 22 nt, Artificial Sequence
  LRRK2 RNA guide
ccuuccuuuauguugacacauu

SEQ ID NO: 42933 - RNA, 22 nt, Artificial Sequence
  LRRK2 RNA guide
ccuuuauguugacacauuaugc

SEQ ID NO: 42934 - RNA, 22 nt, Artificial Sequence
  LRRK2 RNA guide
cguuuuuuccuuccuuuauguu

SEQ ID NO: 42935 - RNA, 22 nt, Artificial Sequence
  LRRK2 RNA guide
cuuccuuuauguugacacauua

SEQ ID NO: 42936 - RNA, 22 nt, Artificial Sequence
  LRRK2 RNA guide
cuuuauguugacacauuaugca

SEQ ID NO: 42937 - RNA, 22 nt, Artificial Sequence
  LRRK2 RNA guide
gcauaaugugucaacauaaagg

SEQ ID NO: 42938 - RNA, 22 nt, Artificial Sequence
  LRRK2 RNA guide
gguauucguuuuuuccuuccuu

SEQ ID NO: 42939 - RNA, 22 nt, Artificial Sequence
  LRRK2 RNA guide
guauucguuuuuuccuuccuuu

SEQ ID NO: 42940 - RNA, 22 nt, Artificial Sequence
  LRRK2 RNA guide
gucaacauaaaggaaggaaaaa

SEQ ID NO: 42941 - RNA, 22 nt, Artificial Sequence
  LRRK2 RNA guide
gugcauaaugugucaacauaaa

SEQ ID NO: 42942 - RNA, 22 nt, Artificial Sequence
  LRRK2 RNA guide
gugucaacauaaaggaaggaaa

SEQ ID NO: 42943 - RNA, 22 nt, Artificial Sequence
  LRRK2 RNA guide
guuuuuuccuuccuuuauguug

SEQ ID NO: 42944 - RNA, 22 nt, Artificial Sequence
  LRRK2 RNA guide
uaaugugucaacauaaaggaag

SEQ ID NO: 42945 - RNA, 22 nt, Artificial Sequence
  LRRK2 RNA guide
uccuuccuuuauguugacacau

SEQ ID NO: 42946 - RNA, 22 nt, Artificial Sequence
  LRRK2 RNA guide
uccuuuauguugacacauuaug

SEQ ID NO: 42947 - RNA, 22 nt, Artificial Sequence
  LRRK2 RNA guide
ucguuuuuuccuuccuuuaugu

SEQ ID NO: 42948 - RNA, 22 nt, Artificial Sequence
  LRRK2 RNA guide
ugcauaaugugucaacauaaag

SEQ ID NO: 42949 - RNA, 22 nt, Artificial Sequence
  LRRK2 RNA guide
ugucaacauaaaggaaggaaaa

SEQ ID NO: 42950 - RNA, 22 nt, Artificial Sequence
  LRRK2 RNA guide
ugugcauaaugugucaacauaa

SEQ ID NO: 42951 - RNA, 22 nt, Artificial Sequence
  LRRK2 RNA guide
ugugucaacauaaaggaaggaa

SEQ ID NO: 42952 - RNA, 22 nt, Artificial Sequence
  LRRK2 RNA guide
uuccuuccuuuauguugacaca

SEQ ID NO: 42953 - RNA, 22 nt, Artificial Sequence
  LRRK2 RNA guide
uucguuuuuuccuuccuuuaug

SEQ ID NO: 42954 - RNA, 22 nt, Artificial Sequence
  LRRK2 RNA guide
uuuauguugacacauuaugcac

SEQ ID NO: 42955 - RNA, 22 nt, Artificial Sequence
  LRRK2 RNA guide
uuuccuuccuuuauguugacac

SEQ ID NO: 42956 - RNA, 22 nt, Artificial Sequence
  LRRK2 RNA guide
uuuuccuuccuuuauguugaca

SEQ ID NO: 42957 - RNA, 22 nt, Artificial Sequence
  LRRK2 RNA guide
uuuuuccuuccuuuauguugac

SEQ ID NO: 42958 - RNA, 20 nt, Artificial Sequence
  LRRK2 RNA guide
aaaaagugucaguauaaugc

SEQ ID NO: 42959 - RNA, 20 nt, Artificial Sequence
  LRRK2 RNA guide
aaaagugucaguauaaugcu

SEQ ID NO: 42960 - RNA, 20 nt, Artificial Sequence
  LRRK2 RNA guide
aaagugucaguauaaugcuu

SEQ ID NO: 42961 - RNA, 20 nt, Artificial Sequence
  LRRK2 RNA guide
aagcauuauacugacacuuu

SEQ ID NO: 42962 - RNA, 20 nt, Artificial Sequence
  LRRK2 RNA guide
aagugucaguauaaugcuug

SEQ ID NO: 42963 - RNA, 20 nt, Artificial Sequence
  LRRK2 RNA guide
aauucaugaaaaagugucag

SEQ ID NO: 42964 - RNA, 20 nt, Artificial Sequence
  LRRK2 RNA guide
acuaugugccaagcauuaua

SEQ ID NO: 42965 - RNA, 20 nt, Artificial Sequence
  LRRK2 RNA guide
acugacacuuuuucaugaau

SEQ ID NO: 42966 - RNA, 20 nt, Artificial Sequence
  LRRK2 RNA guide
agcauuauacugacacuuuu

SEQ ID NO: 42967 - RNA, 20 nt, Artificial Sequence
  LRRK2 RNA guide
agugucaguauaaugcuugg

SEQ ID NO: 42968 - RNA, 20 nt, Artificial Sequence
  LRRK2 RNA guide
auacuaugugccaagcauua

SEQ ID NO: 42969 - RNA, 20 nt, Artificial Sequence
  LRRK2 RNA guide
auacugacacuuuuucauga

SEQ ID NO: 42970 - RNA, 20 nt, Artificial Sequence
  LRRK2 RNA guide
augugccaagcauuauacug

SEQ ID NO: 42971 - RNA, 20 nt, Artificial Sequence
  LRRK2 RNA guide
auucaugaaaaagugucagu

SEQ ID NO: 42972 - RNA, 20 nt, Artificial Sequence
  LRRK2 RNA guide
caagcauuauacugacacuu

SEQ ID NO: 42973 - RNA, 20 nt, Artificial Sequence
  LRRK2 RNA guide
caugaaaaagugucaguaua

SEQ ID NO: 42974 - RNA, 20 nt, Artificial Sequence
  LRRK2 RNA guide
cauuauacugacacuuuuuc

SEQ ID NO: 42975 - RNA, 20 nt, Artificial Sequence
  LRRK2 RNA guide
ccaagcauuauacugacacu

SEQ ID NO: 42976 - RNA, 20 nt, Artificial Sequence
  LRRK2 RNA guide
cuaugugccaagcauuauac

SEQ ID NO: 42977 - RNA, 20 nt, Artificial Sequence
  LRRK2 RNA guide
cugacacuuuuucaugaauu

SEQ ID NO: 42978 - RNA, 20 nt, Artificial Sequence
  LRRK2 RNA guide
gaaaaagugucaguauaaug

SEQ ID NO: 42979 - RNA, 20 nt, Artificial Sequence
  LRRK2 RNA guide
gcauuauacugacacuuuuu

SEQ ID NO: 42980 - RNA, 20 nt, Artificial Sequence
  LRRK2 RNA guide
gccaagcauuauacugacac

SEQ ID NO: 42981 - RNA, 20 nt, Artificial Sequence
  LRRK2 RNA guide
gucaguauaaugcuuggcac

SEQ ID NO: 42982 - RNA, 20 nt, Artificial Sequence
  LRRK2 RNA guide
gugccaagcauuauacugac

SEQ ID NO: 42983 - RNA, 20 nt, Artificial Sequence
  LRRK2 RNA guide
gugucaguauaaugcuuggc

SEQ ID NO: 42984 - RNA, 20 nt, Artificial Sequence
  LRRK2 RNA guide
uacuaugugccaagcauuau

SEQ ID NO: 42985 - RNA, 20 nt, Artificial Sequence
  LRRK2 RNA guide
uacugacacuuuuucaugaa

SEQ ID NO: 42986 - RNA, 20 nt, Artificial Sequence
  LRRK2 RNA guide
uauacugacacuuuuucaug

SEQ ID NO: 42987 - RNA, 20 nt, Artificial Sequence
  LRRK2 RNA guide
uaugugccaagcauuauacu

SEQ ID NO: 42988 - RNA, 20 nt, Artificial Sequence
  LRRK2 RNA guide
ucaguauaaugcuuggcaca

SEQ ID NO: 42989 - RNA, 20 nt, Artificial Sequence
  LRRK2 RNA guide
ucaugaaaaagugucaguau

SEQ ID NO: 42990 - RNA, 20 nt, Artificial Sequence
  LRRK2 RNA guide
ugccaagcauuauacugaca

SEQ ID NO: 42991 - RNA, 20 nt, Artificial Sequence
  LRRK2 RNA guide
ugucaguauaaugcuuggca

SEQ ID NO: 42992 - RNA, 20 nt, Artificial Sequence
  LRRK2 RNA guide
ugugccaagcauuauacuga

SEQ ID NO: 42993 - RNA, 20 nt, Artificial Sequence
  LRRK2 RNA guide
uucaugaaaaagugucagua

SEQ ID NO: 42994 - RNA, 21 nt, Artificial Sequence
  LRRK2 RNA guide
aaagugucaguauaaugcuug

SEQ ID NO: 42995 - RNA, 21 nt, Artificial Sequence
  LRRK2 RNA guide
aagugucaguauaaugcuugg

SEQ ID NO: 42996 - RNA, 21 nt, Artificial Sequence
  LRRK2 RNA guide
acuaugugccaagcauuauac

SEQ ID NO: 42997 - RNA, 21 nt, Artificial Sequence
  LRRK2 RNA guide
agugucaguauaaugcuuggc

SEQ ID NO: 42998 - RNA, 21 nt, Artificial Sequence
  LRRK2 RNA guide
auacuaugugccaagcauuau

SEQ ID NO: 42999 - RNA, 21 nt, Artificial Sequence
  LRRK2 RNA guide
augugccaagcauuauacuga

SEQ ID NO: 43000 - RNA, 21 nt, Artificial Sequence
  LRRK2 RNA guide
caagcauuauacugacacuuu

SEQ ID NO: 43001 - RNA, 21 nt, Artificial Sequence
  LRRK2 RNA guide
cauacuaugugccaagcauua

SEQ ID NO: 43002 - RNA, 21 nt, Artificial Sequence
  LRRK2 RNA guide
ccaagcauuauacugacacuu

SEQ ID NO: 43003 - RNA, 21 nt, Artificial Sequence
  LRRK2 RNA guide
cuaugugccaagcauuauacu

SEQ ID NO: 43004 - RNA, 21 nt, Artificial Sequence
  LRRK2 RNA guide
gaaaaagugucaguauaaugc

SEQ ID NO: 43005 - RNA, 21 nt, Artificial Sequence
  LRRK2 RNA guide
gcauuauacugacacuuuuuc

SEQ ID NO: 43006 - RNA, 21 nt, Artificial Sequence
  LRRK2 RNA guide
gccaagcauuauacugacacu

SEQ ID NO: 43007 - RNA, 21 nt, Artificial Sequence
  LRRK2 RNA guide
gucaguauaaugcuuggcaca

SEQ ID NO: 43008 - RNA, 21 nt, Artificial Sequence
  LRRK2 RNA guide
gugccaagcauuauacugaca

SEQ ID NO: 43009 - RNA, 21 nt, Artificial Sequence
  LRRK2 RNA guide
gugucaguauaaugcuuggca

SEQ ID NO: 43010 - RNA, 21 nt, Artificial Sequence
  LRRK2 RNA guide
uacuaugugccaagcauuaua

SEQ ID NO: 43011 - RNA, 21 nt, Artificial Sequence
  LRRK2 RNA guide
uaugugccaagcauuauacug

SEQ ID NO: 43012 - RNA, 21 nt, Artificial Sequence
  LRRK2 RNA guide
ucaguauaaugcuuggcacau

SEQ ID NO: 43013 - RNA, 21 nt, Artificial Sequence
  LRRK2 RNA guide
ugccaagcauuauacugacac

SEQ ID NO: 43014 - RNA, 21 nt, Artificial Sequence
  LRRK2 RNA guide
ugucaguauaaugcuuggcac

SEQ ID NO: 43015 - RNA, 21 nt, Artificial Sequence
  LRRK2 RNA guide
ugugccaagcauuauacugac

SEQ ID NO: 43016 - RNA, 22 nt, Artificial Sequence
  LRRK2 RNA guide
aaaagugucaguauaaugcuug

SEQ ID NO: 43017 - RNA, 22 nt, Artificial Sequence
  LRRK2 RNA guide
aaagugucaguauaaugcuugg

SEQ ID NO: 43018 - RNA, 22 nt, Artificial Sequence
  LRRK2 RNA guide
aagugucaguauaaugcuuggc

SEQ ID NO: 43019 - RNA, 22 nt, Artificial Sequence
  LRRK2 RNA guide
acuaugugccaagcauuauacu

SEQ ID NO: 43020 - RNA, 22 nt, Artificial Sequence
  LRRK2 RNA guide
agcauuauacugacacuuuuuc

SEQ ID NO: 43021 - RNA, 22 nt, Artificial Sequence
  LRRK2 RNA guide
agugucaguauaaugcuuggca

SEQ ID NO: 43022 - RNA, 22 nt, Artificial Sequence
  LRRK2 RNA guide
auacuaugugccaagcauuaua

SEQ ID NO: 43023 - RNA, 22 nt, Artificial Sequence
  LRRK2 RNA guide
augugccaagcauuauacugac

SEQ ID NO: 43024 - RNA, 22 nt, Artificial Sequence
  LRRK2 RNA guide
caagcauuauacugacacuuuu

SEQ ID NO: 43025 - RNA, 22 nt, Artificial Sequence
  LRRK2 RNA guide
cauacuaugugccaagcauuau

SEQ ID NO: 43026 - RNA, 22 nt, Artificial Sequence
  LRRK2 RNA guide
ccaagcauuauacugacacuuu

SEQ ID NO: 43027 - RNA, 22 nt, Artificial Sequence
  LRRK2 RNA guide
cuaugugccaagcauuauacug

SEQ ID NO: 43028 - RNA, 22 nt, Artificial Sequence
  LRRK2 RNA guide
gaaaaagugucaguauaaugcu

SEQ ID NO: 43029 - RNA, 22 nt, Artificial Sequence
  LRRK2 RNA guide
gcauacuaugugccaagcauua

SEQ ID NO: 43030 - RNA, 22 nt, Artificial Sequence
  LRRK2 RNA guide
gcauuauacugacacuuuuuca

SEQ ID NO: 43031 - RNA, 22 nt, Artificial Sequence
  LRRK2 RNA guide
gccaagcauuauacugacacuu

SEQ ID NO: 43032 - RNA, 22 nt, Artificial Sequence
  LRRK2 RNA guide
gucaguauaaugcuuggcacau

SEQ ID NO: 43033 - RNA, 22 nt, Artificial Sequence
  LRRK2 RNA guide
gugccaagcauuauacugacac

SEQ ID NO: 43034 - RNA, 22 nt, Artificial Sequence
  LRRK2 RNA guide
gugucaguauaaugcuuggcac

SEQ ID NO: 43035 - RNA, 22 nt, Artificial Sequence
  LRRK2 RNA guide
uacuaugugccaagcauuauac

SEQ ID NO: 43036 - RNA, 22 nt, Artificial Sequence
  LRRK2 RNA guide
uaugugccaagcauuauacuga

SEQ ID NO: 43037 - RNA, 22 nt, Artificial Sequence
  LRRK2 RNA guide
ucaguauaaugcuuggcacaua

SEQ ID NO: 43038 - RNA, 22 nt, Artificial Sequence
  LRRK2 RNA guide
ugaaaaagugucaguauaaugc

SEQ ID NO: 43039 - RNA, 22 nt, Artificial Sequence
  LRRK2 RNA guide
ugccaagcauuauacugacacu

SEQ ID NO: 43040 - RNA, 22 nt, Artificial Sequence
  LRRK2 RNA guide
ugucaguauaaugcuuggcaca

SEQ ID NO: 43041 - RNA, 22 nt, Artificial Sequence
  LRRK2 RNA guide
ugugccaagcauuauacugaca

SEQ ID NO: 43042 - RNA, 20 nt, Artificial Sequence
  LRRK2 RNA guide
aaaaagugugaguauaaugc

SEQ ID NO: 43043 - RNA, 20 nt, Artificial Sequence
  LRRK2 RNA guide
aaaagugugaguauaaugcu

SEQ ID NO: 43044 - RNA, 20 nt, Artificial Sequence
  LRRK2 RNA guide
aaagugugaguauaaugcuu

SEQ ID NO: 43045 - RNA, 20 nt, Artificial Sequence
  LRRK2 RNA guide
aagcauuauacucacacuuu

SEQ ID NO: 43046 - RNA, 20 nt, Artificial Sequence
  LRRK2 RNA guide
aagugugaguauaaugcuug

SEQ ID NO: 43047 - RNA, 20 nt, Artificial Sequence
  LRRK2 RNA guide
aauucaugaaaaagugugag

SEQ ID NO: 43048 - RNA, 20 nt, Artificial Sequence
  LRRK2 RNA guide
acucacacuuuuucaugaau

SEQ ID NO: 43049 - RNA, 20 nt, Artificial Sequence
  LRRK2 RNA guide
agcauuauacucacacuuuu

SEQ ID NO: 43050 - RNA, 20 nt, Artificial Sequence
  LRRK2 RNA guide
agugugaguauaaugcuugg

SEQ ID NO: 43051 - RNA, 20 nt, Artificial Sequence
  LRRK2 RNA guide
auacucacacuuuuucauga

SEQ ID NO: 43052 - RNA, 20 nt, Artificial Sequence
  LRRK2 RNA guide
augugccaagcauuauacuc

SEQ ID NO: 43053 - RNA, 20 nt, Artificial Sequence
  LRRK2 RNA guide
auucaugaaaaagugugagu

SEQ ID NO: 43054 - RNA, 20 nt, Artificial Sequence
  LRRK2 RNA guide
caagcauuauacucacacuu

SEQ ID NO: 43055 - RNA, 20 nt, Artificial Sequence
  LRRK2 RNA guide
caugaaaaagugugaguaua

SEQ ID NO: 43056 - RNA, 20 nt, Artificial Sequence
  LRRK2 RNA guide
cauuauacucacacuuuuuc

SEQ ID NO: 43057 - RNA, 20 nt, Artificial Sequence
  LRRK2 RNA guide
ccaagcauuauacucacacu

SEQ ID NO: 43058 - RNA, 20 nt, Artificial Sequence
  LRRK2 RNA guide
cucacacuuuuucaugaauu

SEQ ID NO: 43059 - RNA, 20 nt, Artificial Sequence
  LRRK2 RNA guide
gaaaaagugugaguauaaug

SEQ ID NO: 43060 - RNA, 20 nt, Artificial Sequence
  LRRK2 RNA guide
gcauuauacucacacuuuuu

SEQ ID NO: 43061 - RNA, 20 nt, Artificial Sequence
  LRRK2 RNA guide
gccaagcauuauacucacac

SEQ ID NO: 43062 - RNA, 20 nt, Artificial Sequence
  LRRK2 RNA guide
gugaguauaaugcuuggcac

SEQ ID NO: 43063 - RNA, 20 nt, Artificial Sequence
  LRRK2 RNA guide
gugccaagcauuauacucac

SEQ ID NO: 43064 - RNA, 20 nt, Artificial Sequence
  LRRK2 RNA guide
gugugaguauaaugcuuggc

SEQ ID NO: 43065 - RNA, 20 nt, Artificial Sequence
  LRRK2 RNA guide
uacucacacuuuuucaugaa

SEQ ID NO: 43066 - RNA, 20 nt, Artificial Sequence
  LRRK2 RNA guide
uauacucacacuuuuucaug

SEQ ID NO: 43067 - RNA, 20 nt, Artificial Sequence
  LRRK2 RNA guide
ucaugaaaaagugugaguau

SEQ ID NO: 43068 - RNA, 20 nt, Artificial Sequence
  LRRK2 RNA guide
ugaguauaaugcuuggcaca

SEQ ID NO: 43069 - RNA, 20 nt, Artificial Sequence
  LRRK2 RNA guide
ugccaagcauuauacucaca

SEQ ID NO: 43070 - RNA, 20 nt, Artificial Sequence
  LRRK2 RNA guide
ugugaguauaaugcuuggca

SEQ ID NO: 43071 - RNA, 20 nt, Artificial Sequence
  LRRK2 RNA guide
ugugccaagcauuauacuca

SEQ ID NO: 43072 - RNA, 20 nt, Artificial Sequence
  LRRK2 RNA guide
uucaugaaaaagugugagua

SEQ ID NO: 43073 - RNA, 21 nt, Artificial Sequence
  LRRK2 RNA guide
aaagugugaguauaaugcuug

SEQ ID NO: 43074 - RNA, 21 nt, Artificial Sequence
  LRRK2 RNA guide
aagugugaguauaaugcuugg

SEQ ID NO: 43075 - RNA, 21 nt, Artificial Sequence
  LRRK2 RNA guide
agugugaguauaaugcuuggc

SEQ ID NO: 43076 - RNA, 21 nt, Artificial Sequence
  LRRK2 RNA guide
augugccaagcauuauacuca

SEQ ID NO: 43077 - RNA, 21 nt, Artificial Sequence
  LRRK2 RNA guide
caagcauuauacucacacuuu

SEQ ID NO: 43078 - RNA, 21 nt, Artificial Sequence
  LRRK2 RNA guide
ccaagcauuauacucacacuu

SEQ ID NO: 43079 - RNA, 21 nt, Artificial Sequence
  LRRK2 RNA guide
gaaaaagugugaguauaaugc

SEQ ID NO: 43080 - RNA, 21 nt, Artificial Sequence
  LRRK2 RNA guide
gcauuauacucacacuuuuuc

SEQ ID NO: 43081 - RNA, 21 nt, Artificial Sequence
  LRRK2 RNA guide
gccaagcauuauacucacacu

SEQ ID NO: 43082 - RNA, 21 nt, Artificial Sequence
  LRRK2 RNA guide
gugaguauaaugcuuggcaca

SEQ ID NO: 43083 - RNA, 21 nt, Artificial Sequence
  LRRK2 RNA guide
gugccaagcauuauacucaca

SEQ ID NO: 43084 - RNA, 21 nt, Artificial Sequence
  LRRK2 RNA guide
gugugaguauaaugcuuggca

SEQ ID NO: 43085 - RNA, 21 nt, Artificial Sequence
  LRRK2 RNA guide
uaugugccaagcauuauacuc

SEQ ID NO: 43086 - RNA, 21 nt, Artificial Sequence
  LRRK2 RNA guide
ugaguauaaugcuuggcacau

SEQ ID NO: 43087 - RNA, 21 nt, Artificial Sequence
  LRRK2 RNA guide
ugccaagcauuauacucacac

SEQ ID NO: 43088 - RNA, 21 nt, Artificial Sequence
  LRRK2 RNA guide
ugugaguauaaugcuuggcac

SEQ ID NO: 43089 - RNA, 21 nt, Artificial Sequence
  LRRK2 RNA guide
ugugccaagcauuauacucac

SEQ ID NO: 43090 - RNA, 22 nt, Artificial Sequence
  LRRK2 RNA guide
aaaagugugaguauaaugcuug

SEQ ID NO: 43091 - RNA, 22 nt, Artificial Sequence
  LRRK2 RNA guide
aaagugugaguauaaugcuugg

SEQ ID NO: 43092 - RNA, 22 nt, Artificial Sequence
  LRRK2 RNA guide
aagugugaguauaaugcuuggc

SEQ ID NO: 43093 - RNA, 22 nt, Artificial Sequence
  LRRK2 RNA guide
agcauuauacucacacuuuuuc

SEQ ID NO: 43094 - RNA, 22 nt, Artificial Sequence
  LRRK2 RNA guide
agugugaguauaaugcuuggca

SEQ ID NO: 43095 - RNA, 22 nt, Artificial Sequence
  LRRK2 RNA guide
augugccaagcauuauacucac

SEQ ID NO: 43096 - RNA, 22 nt, Artificial Sequence
  LRRK2 RNA guide
caagcauuauacucacacuuuu

SEQ ID NO: 43097 - RNA, 22 nt, Artificial Sequence
  LRRK2 RNA guide
ccaagcauuauacucacacuuu

SEQ ID NO: 43098 - RNA, 22 nt, Artificial Sequence
  LRRK2 RNA guide
cuaugugccaagcauuauacuc

SEQ ID NO: 43099 - RNA, 22 nt, Artificial Sequence
  LRRK2 RNA guide
gaaaaagugugaguauaaugcu

SEQ ID NO: 43100 - RNA, 22 nt, Artificial Sequence
  LRRK2 RNA guide
gcauuauacucacacuuuuuca

SEQ ID NO: 43101 - RNA, 22 nt, Artificial Sequence
  LRRK2 RNA guide
gccaagcauuauacucacacuu

SEQ ID NO: 43102 - RNA, 22 nt, Artificial Sequence
  LRRK2 RNA guide
gugaguauaaugcuuggcacau

SEQ ID NO: 43103 - RNA, 22 nt, Artificial Sequence
  LRRK2 RNA guide
gugccaagcauuauacucacac

SEQ ID NO: 43104 - RNA, 22 nt, Artificial Sequence
  LRRK2 RNA guide
gugugaguauaaugcuuggcac

SEQ ID NO: 43105 - RNA, 22 nt, Artificial Sequence
  LRRK2 RNA guide
uaugugccaagcauuauacuca

SEQ ID NO: 43106 - RNA, 22 nt, Artificial Sequence
  LRRK2 RNA guide
ugaaaaagugugaguauaaugc

SEQ ID NO: 43107 - RNA, 22 nt, Artificial Sequence
  LRRK2 RNA guide
ugaguauaaugcuuggcacaua

SEQ ID NO: 43108 - RNA, 22 nt, Artificial Sequence
  LRRK2 RNA guide
ugccaagcauuauacucacacu

SEQ ID NO: 43109 - RNA, 22 nt, Artificial Sequence
  LRRK2 RNA guide
ugugaguauaaugcuuggcaca

SEQ ID NO: 43110 - RNA, 22 nt, Artificial Sequence
  LRRK2 RNA guide
ugugccaagcauuauacucaca

SEQ ID NO: 43111 - RNA, 20 nt, Artificial Sequence
  LRRK2 RNA guide
aaagcaccuaucuuuauccu

SEQ ID NO: 43112 - RNA, 20 nt, Artificial Sequence
  LRRK2 RNA guide
aagcaccuaucuuuauccuu

SEQ ID NO: 43113 - RNA, 20 nt, Artificial Sequence
  LRRK2 RNA guide
aaggauaaagauaggugcuu

SEQ ID NO: 43114 - RNA, 20 nt, Artificial Sequence
  LRRK2 RNA guide
agcaccuaucuuuauccuua

SEQ ID NO: 43115 - RNA, 20 nt, Artificial Sequence
  LRRK2 RNA guide
aggauaaagauaggugcuuu

SEQ ID NO: 43116 - RNA, 20 nt, Artificial Sequence
  LRRK2 RNA guide
auaaagcaccuaucuuuauc

SEQ ID NO: 43117 - RNA, 20 nt, Artificial Sequence
  LRRK2 RNA guide
auaggugcuuuauaaauacc

SEQ ID NO: 43118 - RNA, 20 nt, Artificial Sequence
  LRRK2 RNA guide
auuaaggauaaagauaggug

SEQ ID NO: 43119 - RNA, 20 nt, Artificial Sequence
  LRRK2 RNA guide
auugguauuuauaaagcacc

SEQ ID NO: 43120 - RNA, 20 nt, Artificial Sequence
  LRRK2 RNA guide
caccuaucuuuauccuuaau

SEQ ID NO: 43121 - RNA, 20 nt, Artificial Sequence
  LRRK2 RNA guide
gauaaagauaggugcuuuau

SEQ ID NO: 43122 - RNA, 20 nt, Artificial Sequence
  LRRK2 RNA guide
gauaggugcuuuauaaauac

SEQ ID NO: 43123 - RNA, 20 nt, Artificial Sequence
  LRRK2 RNA guide
gcaccuaucuuuauccuuaa

SEQ ID NO: 43124 - RNA, 20 nt, Artificial Sequence
  LRRK2 RNA guide
ggauaaagauaggugcuuua

SEQ ID NO: 43125 - RNA, 20 nt, Artificial Sequence
  LRRK2 RNA guide
gguauuuauaaagcaccuau

SEQ ID NO: 43126 - RNA, 20 nt, Artificial Sequence
  LRRK2 RNA guide
guauuuauaaagcaccuauc

SEQ ID NO: 43127 - RNA, 20 nt, Artificial Sequence
  LRRK2 RNA guide
uaaagcaccuaucuuuaucc

SEQ ID NO: 43128 - RNA, 20 nt, Artificial Sequence
  LRRK2 RNA guide
uaaggauaaagauaggugcu

SEQ ID NO: 43129 - RNA, 20 nt, Artificial Sequence
  LRRK2 RNA guide
ugguauuuauaaagcaccua

SEQ ID NO: 43130 - RNA, 20 nt, Artificial Sequence
  LRRK2 RNA guide
uuaaggauaaagauaggugc

SEQ ID NO: 43131 - RNA, 20 nt, Artificial Sequence
  LRRK2 RNA guide
uugguauuuauaaagcaccu

SEQ ID NO: 43132 - RNA, 21 nt, Artificial Sequence
  LRRK2 RNA guide
aaagcaccuaucuuuauccuu

SEQ ID NO: 43133 - RNA, 21 nt, Artificial Sequence
  LRRK2 RNA guide
aagcaccuaucuuuauccuua

SEQ ID NO: 43134 - RNA, 21 nt, Artificial Sequence
  LRRK2 RNA guide
aaggauaaagauaggugcuuu

SEQ ID NO: 43135 - RNA, 21 nt, Artificial Sequence
  LRRK2 RNA guide
agcaccuaucuuuauccuuaa

SEQ ID NO: 43136 - RNA, 21 nt, Artificial Sequence
  LRRK2 RNA guide
aggauaaagauaggugcuuua

SEQ ID NO: 43137 - RNA, 21 nt, Artificial Sequence
  LRRK2 RNA guide
auaaagcaccuaucuuuaucc

SEQ ID NO: 43138 - RNA, 21 nt, Artificial Sequence
  LRRK2 RNA guide
auuaaggauaaagauaggugc

SEQ ID NO: 43139 - RNA, 21 nt, Artificial Sequence
  LRRK2 RNA guide
gauaggugcuuuauaaauacc

SEQ ID NO: 43140 - RNA, 21 nt, Artificial Sequence
  LRRK2 RNA guide
gcaccuaucuuuauccuuaau

SEQ ID NO: 43141 - RNA, 21 nt, Artificial Sequence
  LRRK2 RNA guide
ggauaaagauaggugcuuuau

SEQ ID NO: 43142 - RNA, 21 nt, Artificial Sequence
  LRRK2 RNA guide
gguauuuauaaagcaccuauc

SEQ ID NO: 43143 - RNA, 21 nt, Artificial Sequence
  LRRK2 RNA guide
uaaagcaccuaucuuuauccu

SEQ ID NO: 43144 - RNA, 21 nt, Artificial Sequence
  LRRK2 RNA guide
uaaggauaaagauaggugcuu

SEQ ID NO: 43145 - RNA, 21 nt, Artificial Sequence
  LRRK2 RNA guide
uuaaggauaaagauaggugcu

SEQ ID NO: 43146 - RNA, 22 nt, Artificial Sequence
  LRRK2 RNA guide
aaagcaccuaucuuuauccuua

SEQ ID NO: 43147 - RNA, 22 nt, Artificial Sequence
  LRRK2 RNA guide
aagcaccuaucuuuauccuuaa

SEQ ID NO: 43148 - RNA, 22 nt, Artificial Sequence
  LRRK2 RNA guide
aaggauaaagauaggugcuuua

SEQ ID NO: 43149 - RNA, 22 nt, Artificial Sequence
  LRRK2 RNA guide
agauaggugcuuuauaaauacc

SEQ ID NO: 43150 - RNA, 22 nt, Artificial Sequence
  LRRK2 RNA guide
agcaccuaucuuuauccuuaau

SEQ ID NO: 43151 - RNA, 22 nt, Artificial Sequence
  LRRK2 RNA guide
aggauaaagauaggugcuuuau

SEQ ID NO: 43152 - RNA, 22 nt, Artificial Sequence
  LRRK2 RNA guide
auaaagcaccuaucuuuauccu

SEQ ID NO: 43153 - RNA, 22 nt, Artificial Sequence
  LRRK2 RNA guide
auuaaggauaaagauaggugcu

SEQ ID NO: 43154 - RNA, 22 nt, Artificial Sequence
  LRRK2 RNA guide
gauaggugcuuuauaaauacca

SEQ ID NO: 43155 - RNA, 22 nt, Artificial Sequence
  LRRK2 RNA guide
gcaccuaucuuuauccuuaaua

SEQ ID NO: 43156 - RNA, 22 nt, Artificial Sequence
  LRRK2 RNA guide
ggauaaagauaggugcuuuaua

SEQ ID NO: 43157 - RNA, 22 nt, Artificial Sequence
  LRRK2 RNA guide
gguauuuauaaagcaccuaucu

SEQ ID NO: 43158 - RNA, 22 nt, Artificial Sequence
  LRRK2 RNA guide
uaaagcaccuaucuuuauccuu

SEQ ID NO: 43159 - RNA, 22 nt, Artificial Sequence
  LRRK2 RNA guide
uaaggauaaagauaggugcuuu

SEQ ID NO: 43160 - RNA, 22 nt, Artificial Sequence
  LRRK2 RNA guide
uauaaagcaccuaucuuuaucc

SEQ ID NO: 43161 - RNA, 22 nt, Artificial Sequence
  LRRK2 RNA guide
uauuaaggauaaagauaggugc

SEQ ID NO: 43162 - RNA, 22 nt, Artificial Sequence
  LRRK2 RNA guide
ugguauuuauaaagcaccuauc

SEQ ID NO: 43163 - RNA, 22 nt, Artificial Sequence
  LRRK2 RNA guide
uuaaggauaaagauaggugcuu

SEQ ID NO: 43164 - RNA, 20 nt, Artificial Sequence
  LRRK2 RNA guide
aaagcaccuuucuuuauccu

SEQ ID NO: 43165 - RNA, 20 nt, Artificial Sequence
  LRRK2 RNA guide
aaaggugcuuuauaaauacc

SEQ ID NO: 43166 - RNA, 20 nt, Artificial Sequence
  LRRK2 RNA guide
aagcaccuuucuuuauccuu

SEQ ID NO: 43167 - RNA, 20 nt, Artificial Sequence
  LRRK2 RNA guide
aaggauaaagaaaggugcuu

SEQ ID NO: 43168 - RNA, 20 nt, Artificial Sequence
  LRRK2 RNA guide
agcaccuuucuuuauccuua

SEQ ID NO: 43169 - RNA, 20 nt, Artificial Sequence
  LRRK2 RNA guide
aggauaaagaaaggugcuuu

SEQ ID NO: 43170 - RNA, 20 nt, Artificial Sequence
  LRRK2 RNA guide
auaaagcaccuuucuuuauc

SEQ ID NO: 43171 - RNA, 20 nt, Artificial Sequence
  LRRK2 RNA guide
auuaaggauaaagaaaggug

SEQ ID NO: 43172 - RNA, 20 nt, Artificial Sequence
  LRRK2 RNA guide
caccuuucuuuauccuuaau

SEQ ID NO: 43173 - RNA, 20 nt, Artificial Sequence
  LRRK2 RNA guide
gaaaggugcuuuauaaauac

SEQ ID NO: 43174 - RNA, 20 nt, Artificial Sequence
  LRRK2 RNA guide
gauaaagaaaggugcuuuau

SEQ ID NO: 43175 - RNA, 20 nt, Artificial Sequence
  LRRK2 RNA guide
gcaccuuucuuuauccuuaa

SEQ ID NO: 43176 - RNA, 20 nt, Artificial Sequence
  LRRK2 RNA guide
ggauaaagaaaggugcuuua

SEQ ID NO: 43177 - RNA, 20 nt, Artificial Sequence
  LRRK2 RNA guide
gguauuuauaaagcaccuuu

SEQ ID NO: 43178 - RNA, 20 nt, Artificial Sequence
  LRRK2 RNA guide
guauuuauaaagcaccuuuc

SEQ ID NO: 43179 - RNA, 20 nt, Artificial Sequence
  LRRK2 RNA guide
uaaagcaccuuucuuuaucc

SEQ ID NO: 43180 - RNA, 20 nt, Artificial Sequence
  LRRK2 RNA guide
uaaggauaaagaaaggugcu

SEQ ID NO: 43181 - RNA, 20 nt, Artificial Sequence
  LRRK2 RNA guide
ugguauuuauaaagcaccuu

SEQ ID NO: 43182 - RNA, 20 nt, Artificial Sequence
  LRRK2 RNA guide
uuaaggauaaagaaaggugc

SEQ ID NO: 43183 - RNA, 21 nt, Artificial Sequence
  LRRK2 RNA guide
aaagcaccuuucuuuauccuu

SEQ ID NO: 43184 - RNA, 21 nt, Artificial Sequence
  LRRK2 RNA guide
aagcaccuuucuuuauccuua

SEQ ID NO: 43185 - RNA, 21 nt, Artificial Sequence
  LRRK2 RNA guide
aaggauaaagaaaggugcuuu

SEQ ID NO: 43186 - RNA, 21 nt, Artificial Sequence
  LRRK2 RNA guide
agcaccuuucuuuauccuuaa

SEQ ID NO: 43187 - RNA, 21 nt, Artificial Sequence
  LRRK2 RNA guide
aggauaaagaaaggugcuuua

SEQ ID NO: 43188 - RNA, 21 nt, Artificial Sequence
  LRRK2 RNA guide
auaaagcaccuuucuuuaucc

SEQ ID NO: 43189 - RNA, 21 nt, Artificial Sequence
  LRRK2 RNA guide
auuaaggauaaagaaaggugc

SEQ ID NO: 43190 - RNA, 21 nt, Artificial Sequence
  LRRK2 RNA guide
gaaaggugcuuuauaaauacc

SEQ ID NO: 43191 - RNA, 21 nt, Artificial Sequence
  LRRK2 RNA guide
gcaccuuucuuuauccuuaau

SEQ ID NO: 43192 - RNA, 21 nt, Artificial Sequence
  LRRK2 RNA guide
ggauaaagaaaggugcuuuau

SEQ ID NO: 43193 - RNA, 21 nt, Artificial Sequence
  LRRK2 RNA guide
gguauuuauaaagcaccuuuc

SEQ ID NO: 43194 - RNA, 21 nt, Artificial Sequence
  LRRK2 RNA guide
uaaagcaccuuucuuuauccu

SEQ ID NO: 43195 - RNA, 21 nt, Artificial Sequence
  LRRK2 RNA guide
uaaggauaaagaaaggugcuu

SEQ ID NO: 43196 - RNA, 21 nt, Artificial Sequence
  LRRK2 RNA guide
uuaaggauaaagaaaggugcu

SEQ ID NO: 43197 - RNA, 22 nt, Artificial Sequence
  LRRK2 RNA guide
aaagcaccuuucuuuauccuua

SEQ ID NO: 43198 - RNA, 22 nt, Artificial Sequence
  LRRK2 RNA guide
aagcaccuuucuuuauccuuaa

SEQ ID NO: 43199 - RNA, 22 nt, Artificial Sequence
  LRRK2 RNA guide
aaggauaaagaaaggugcuuua

SEQ ID NO: 43200 - RNA, 22 nt, Artificial Sequence
  LRRK2 RNA guide
agaaaggugcuuuauaaauacc

SEQ ID NO: 43201 - RNA, 22 nt, Artificial Sequence
  LRRK2 RNA guide
agcaccuuucuuuauccuuaau

SEQ ID NO: 43202 - RNA, 22 nt, Artificial Sequence
  LRRK2 RNA guide
aggauaaagaaaggugcuuuau

SEQ ID NO: 43203 - RNA, 22 nt, Artificial Sequence
  LRRK2 RNA guide
auaaagcaccuuucuuuauccu

SEQ ID NO: 43204 - RNA, 22 nt, Artificial Sequence
  LRRK2 RNA guide
auuaaggauaaagaaaggugcu

SEQ ID NO: 43205 - RNA, 22 nt, Artificial Sequence
  LRRK2 RNA guide
gaaaggugcuuuauaaauacca

SEQ ID NO: 43206 - RNA, 22 nt, Artificial Sequence
  LRRK2 RNA guide
gcaccuuucuuuauccuuaaua

SEQ ID NO: 43207 - RNA, 22 nt, Artificial Sequence
  LRRK2 RNA guide
ggauaaagaaaggugcuuuaua

SEQ ID NO: 43208 - RNA, 22 nt, Artificial Sequence
  LRRK2 RNA guide
gguauuuauaaagcaccuuucu

SEQ ID NO: 43209 - RNA, 22 nt, Artificial Sequence
  LRRK2 RNA guide
uaaagcaccuuucuuuauccuu

SEQ ID NO: 43210 - RNA, 22 nt, Artificial Sequence
  LRRK2 RNA guide
uaaggauaaagaaaggugcuuu

SEQ ID NO: 43211 - RNA, 22 nt, Artificial Sequence
  LRRK2 RNA guide
uauaaagcaccuuucuuuaucc

SEQ ID NO: 43212 - RNA, 22 nt, Artificial Sequence
  LRRK2 RNA guide
uauuaaggauaaagaaaggugc

SEQ ID NO: 43213 - RNA, 22 nt, Artificial Sequence
  LRRK2 RNA guide
ugguauuuauaaagcaccuuuc

SEQ ID NO: 43214 - RNA, 22 nt, Artificial Sequence
  LRRK2 RNA guide
uuaaggauaaagaaaggugcuu

SEQ ID NO: 43215 - RNA, 20 nt, Artificial Sequence
  LRRK2 RNA guide
aaaugguuucuccaaugacu

SEQ ID NO: 43216 - RNA, 20 nt, Artificial Sequence
  LRRK2 RNA guide
aaugacugagcuagccagcu

SEQ ID NO: 43217 - RNA, 20 nt, Artificial Sequence
  LRRK2 RNA guide
aaugguuucuccaaugacug

SEQ ID NO: 43218 - RNA, 20 nt, Artificial Sequence
  LRRK2 RNA guide
acugagcuagccagcucaau

SEQ ID NO: 43219 - RNA, 20 nt, Artificial Sequence
  LRRK2 RNA guide
agcucagucauuggagaaac

SEQ ID NO: 43220 - RNA, 20 nt, Artificial Sequence
  LRRK2 RNA guide
agcuggcuagcucagucauu

SEQ ID NO: 43221 - RNA, 20 nt, Artificial Sequence
  LRRK2 RNA guide
agucauuggagaaaccauuu

SEQ ID NO: 43222 - RNA, 20 nt, Artificial Sequence
  LRRK2 RNA guide
auauugaaaugguuucucca

SEQ ID NO: 43223 - RNA, 20 nt, Artificial Sequence
  LRRK2 RNA guide
augacugagcuagccagcuc

SEQ ID NO: 43224 - RNA, 20 nt, Artificial Sequence
  LRRK2 RNA guide
augguuucuccaaugacuga

SEQ ID NO: 43225 - RNA, 20 nt, Artificial Sequence
  LRRK2 RNA guide
auugaaaugguuucuccaau

SEQ ID NO: 43226 - RNA, 20 nt, Artificial Sequence
  LRRK2 RNA guide
auugagcuggcuagcucagu

SEQ ID NO: 43227 - RNA, 20 nt, Artificial Sequence
  LRRK2 RNA guide
caaugacugagcuagccagc

SEQ ID NO: 43228 - RNA, 20 nt, Artificial Sequence
  LRRK2 RNA guide
cagucauuggagaaaccauu

SEQ ID NO: 43229 - RNA, 20 nt, Artificial Sequence
  LRRK2 RNA guide
cauugagcuggcuagcucag

SEQ ID NO: 43230 - RNA, 20 nt, Artificial Sequence
  LRRK2 RNA guide
ccaaugacugagcuagccag

SEQ ID NO: 43231 - RNA, 20 nt, Artificial Sequence
  LRRK2 RNA guide
ccauugagcuggcuagcuca

SEQ ID NO: 43232 - RNA, 20 nt, Artificial Sequence
  LRRK2 RNA guide
cuagcucagucauuggagaa

SEQ ID NO: 43233 - RNA, 20 nt, Artificial Sequence
  LRRK2 RNA guide
cucagucauuggagaaacca

SEQ ID NO: 43234 - RNA, 20 nt, Artificial Sequence
  LRRK2 RNA guide
cuccaaugacugagcuagcc

SEQ ID NO: 43235 - RNA, 20 nt, Artificial Sequence
  LRRK2 RNA guide
cuggcuagcucagucauugg

SEQ ID NO: 43236 - RNA, 20 nt, Artificial Sequence
  LRRK2 RNA guide
gaaaugguuucuccaaugac

SEQ ID NO: 43237 - RNA, 20 nt, Artificial Sequence
  LRRK2 RNA guide
gacugagcuagccagcucaa

SEQ ID NO: 43238 - RNA, 20 nt, Artificial Sequence
  LRRK2 RNA guide
gagcuggcuagcucagucau

SEQ ID NO: 43239 - RNA, 20 nt, Artificial Sequence
  LRRK2 RNA guide
gcuagcucagucauuggaga

SEQ ID NO: 43240 - RNA, 20 nt, Artificial Sequence
  LRRK2 RNA guide
gcucagucauuggagaaacc

SEQ ID NO: 43241 - RNA, 20 nt, Artificial Sequence
  LRRK2 RNA guide
gcuggcuagcucagucauug

SEQ ID NO: 43242 - RNA, 20 nt, Artificial Sequence
  LRRK2 RNA guide
ggcuagcucagucauuggag

SEQ ID NO: 43243 - RNA, 20 nt, Artificial Sequence
  LRRK2 RNA guide
gguuucuccaaugacugagc

SEQ ID NO: 43244 - RNA, 20 nt, Artificial Sequence
  LRRK2 RNA guide
guuucuccaaugacugagcu

SEQ ID NO: 43245 - RNA, 20 nt, Artificial Sequence
  LRRK2 RNA guide
uagcucagucauuggagaaa

SEQ ID NO: 43246 - RNA, 20 nt, Artificial Sequence
  LRRK2 RNA guide
uauugaaaugguuucuccaa

SEQ ID NO: 43247 - RNA, 20 nt, Artificial Sequence
  LRRK2 RNA guide
ucagucauuggagaaaccau

SEQ ID NO: 43248 - RNA, 20 nt, Artificial Sequence
  LRRK2 RNA guide
uccaaugacugagcuagcca

SEQ ID NO: 43249 - RNA, 20 nt, Artificial Sequence
  LRRK2 RNA guide
uccauugagcuggcuagcuc

SEQ ID NO: 43250 - RNA, 20 nt, Artificial Sequence
  LRRK2 RNA guide
ucuccaaugacugagcuagc

SEQ ID NO: 43251 - RNA, 20 nt, Artificial Sequence
  LRRK2 RNA guide
ugaaaugguuucuccaauga

SEQ ID NO: 43252 - RNA, 20 nt, Artificial Sequence
  LRRK2 RNA guide
ugacugagcuagccagcuca

SEQ ID NO: 43253 - RNA, 20 nt, Artificial Sequence
  LRRK2 RNA guide
ugagcuggcuagcucaguca

SEQ ID NO: 43254 - RNA, 20 nt, Artificial Sequence
  LRRK2 RNA guide
uggcuagcucagucauugga

SEQ ID NO: 43255 - RNA, 20 nt, Artificial Sequence
  LRRK2 RNA guide
ugguuucuccaaugacugag

SEQ ID NO: 43256 - RNA, 20 nt, Artificial Sequence
  LRRK2 RNA guide
uuccauugagcuggcuagcu

SEQ ID NO: 43257 - RNA, 20 nt, Artificial Sequence
  LRRK2 RNA guide
uucuccaaugacugagcuag

SEQ ID NO: 43258 - RNA, 20 nt, Artificial Sequence
  LRRK2 RNA guide
uugaaaugguuucuccaaug

SEQ ID NO: 43259 - RNA, 20 nt, Artificial Sequence
  LRRK2 RNA guide
uugagcuggcuagcucaguc

SEQ ID NO: 43260 - RNA, 20 nt, Artificial Sequence
  LRRK2 RNA guide
uuuccauugagcuggcuagc

SEQ ID NO: 43261 - RNA, 20 nt, Artificial Sequence
  LRRK2 RNA guide
uuucuccaaugacugagcua

SEQ ID NO: 43262 - RNA, 20 nt, Artificial Sequence
  LRRK2 RNA guide
uuuuccauugagcuggcuag

SEQ ID NO: 43263 - RNA, 21 nt, Artificial Sequence
  LRRK2 RNA guide
aaaugguuucuccaaugacug

SEQ ID NO: 43264 - RNA, 21 nt, Artificial Sequence
  LRRK2 RNA guide
aaugacugagcuagccagcuc

SEQ ID NO: 43265 - RNA, 21 nt, Artificial Sequence
  LRRK2 RNA guide
aaugguuucuccaaugacuga

SEQ ID NO: 43266 - RNA, 21 nt, Artificial Sequence
  LRRK2 RNA guide
acugagcuagccagcucaaug

SEQ ID NO: 43267 - RNA, 21 nt, Artificial Sequence
  LRRK2 RNA guide
agcucagucauuggagaaacc

SEQ ID NO: 43268 - RNA, 21 nt, Artificial Sequence
  LRRK2 RNA guide
agcuggcuagcucagucauug

SEQ ID NO: 43269 - RNA, 21 nt, Artificial Sequence
  LRRK2 RNA guide
agucauuggagaaaccauuuc

SEQ ID NO: 43270 - RNA, 21 nt, Artificial Sequence
  LRRK2 RNA guide
augacugagcuagccagcuca

SEQ ID NO: 43271 - RNA, 21 nt, Artificial Sequence
  LRRK2 RNA guide
augguuucuccaaugacugag

SEQ ID NO: 43272 - RNA, 21 nt, Artificial Sequence
  LRRK2 RNA guide
auugaaaugguuucuccaaug

SEQ ID NO: 43273 - RNA, 21 nt, Artificial Sequence
  LRRK2 RNA guide
auugagcuggcuagcucaguc

SEQ ID NO: 43274 - RNA, 21 nt, Artificial Sequence
  LRRK2 RNA guide
caaugacugagcuagccagcu

SEQ ID NO: 43275 - RNA, 21 nt, Artificial Sequence
  LRRK2 RNA guide
cagucauuggagaaaccauuu

SEQ ID NO: 43276 - RNA, 21 nt, Artificial Sequence
  LRRK2 RNA guide
cauugagcuggcuagcucagu

SEQ ID NO: 43277 - RNA, 21 nt, Artificial Sequence
  LRRK2 RNA guide
ccaaugacugagcuagccagc

SEQ ID NO: 43278 - RNA, 21 nt, Artificial Sequence
  LRRK2 RNA guide
ccauugagcuggcuagcucag

SEQ ID NO: 43279 - RNA, 21 nt, Artificial Sequence
  LRRK2 RNA guide
cuagcucagucauuggagaaa

SEQ ID NO: 43280 - RNA, 21 nt, Artificial Sequence
  LRRK2 RNA guide
cucagucauuggagaaaccau

SEQ ID NO: 43281 - RNA, 21 nt, Artificial Sequence
  LRRK2 RNA guide
cuccaaugacugagcuagcca

SEQ ID NO: 43282 - RNA, 21 nt, Artificial Sequence
  LRRK2 RNA guide
cuggcuagcucagucauugga

SEQ ID NO: 43283 - RNA, 21 nt, Artificial Sequence
  LRRK2 RNA guide
gaaaugguuucuccaaugacu

SEQ ID NO: 43284 - RNA, 21 nt, Artificial Sequence
  LRRK2 RNA guide
gacugagcuagccagcucaau

SEQ ID NO: 43285 - RNA, 21 nt, Artificial Sequence
  LRRK2 RNA guide
gagcuggcuagcucagucauu

SEQ ID NO: 43286 - RNA, 21 nt, Artificial Sequence
  LRRK2 RNA guide
gcuagcucagucauuggagaa

SEQ ID NO: 43287 - RNA, 21 nt, Artificial Sequence
  LRRK2 RNA guide
gcucagucauuggagaaacca

SEQ ID NO: 43288 - RNA, 21 nt, Artificial Sequence
  LRRK2 RNA guide
gcuggcuagcucagucauugg

SEQ ID NO: 43289 - RNA, 21 nt, Artificial Sequence
  LRRK2 RNA guide
ggcuagcucagucauuggaga

SEQ ID NO: 43290 - RNA, 21 nt, Artificial Sequence
  LRRK2 RNA guide
gguuucuccaaugacugagcu

SEQ ID NO: 43291 - RNA, 21 nt, Artificial Sequence
  LRRK2 RNA guide
guuucuccaaugacugagcua

SEQ ID NO: 43292 - RNA, 21 nt, Artificial Sequence
  LRRK2 RNA guide
uagcucagucauuggagaaac

SEQ ID NO: 43293 - RNA, 21 nt, Artificial Sequence
  LRRK2 RNA guide
ucagucauuggagaaaccauu

SEQ ID NO: 43294 - RNA, 21 nt, Artificial Sequence
  LRRK2 RNA guide
uccaaugacugagcuagccag

SEQ ID NO: 43295 - RNA, 21 nt, Artificial Sequence
  LRRK2 RNA guide
uccauugagcuggcuagcuca

SEQ ID NO: 43296 - RNA, 21 nt, Artificial Sequence
  LRRK2 RNA guide
ucuccaaugacugagcuagcc

SEQ ID NO: 43297 - RNA, 21 nt, Artificial Sequence
  LRRK2 RNA guide
ugaaaugguuucuccaaugac

SEQ ID NO: 43298 - RNA, 21 nt, Artificial Sequence
  LRRK2 RNA guide
ugacugagcuagccagcucaa

SEQ ID NO: 43299 - RNA, 21 nt, Artificial Sequence
  LRRK2 RNA guide
ugagcuggcuagcucagucau

SEQ ID NO: 43300 - RNA, 21 nt, Artificial Sequence
  LRRK2 RNA guide
uggcuagcucagucauuggag

SEQ ID NO: 43301 - RNA, 21 nt, Artificial Sequence
  LRRK2 RNA guide
ugguuucuccaaugacugagc

SEQ ID NO: 43302 - RNA, 21 nt, Artificial Sequence
  LRRK2 RNA guide
uuccauugagcuggcuagcuc

SEQ ID NO: 43303 - RNA, 21 nt, Artificial Sequence
  LRRK2 RNA guide
uucuccaaugacugagcuagc

SEQ ID NO: 43304 - RNA, 21 nt, Artificial Sequence
  LRRK2 RNA guide
uugaaaugguuucuccaauga

SEQ ID NO: 43305 - RNA, 21 nt, Artificial Sequence
  LRRK2 RNA guide
uugagcuggcuagcucaguca

SEQ ID NO: 43306 - RNA, 21 nt, Artificial Sequence
  LRRK2 RNA guide
uuuccauugagcuggcuagcu

SEQ ID NO: 43307 - RNA, 21 nt, Artificial Sequence
  LRRK2 RNA guide
uuucuccaaugacugagcuag

SEQ ID NO: 43308 - RNA, 21 nt, Artificial Sequence
  LRRK2 RNA guide
uuuuccauugagcuggcuagc

SEQ ID NO: 43309 - RNA, 21 nt, Artificial Sequence
  LRRK2 RNA guide
uuuuuccauugagcuggcuag

SEQ ID NO: 43310 - RNA, 22 nt, Artificial Sequence
  LRRK2 RNA guide
aaaugguuucuccaaugacuga

SEQ ID NO: 43311 - RNA, 22 nt, Artificial Sequence
  LRRK2 RNA guide
aaugacugagcuagccagcuca

SEQ ID NO: 43312 - RNA, 22 nt, Artificial Sequence
  LRRK2 RNA guide
aaugguuucuccaaugacugag

SEQ ID NO: 43313 - RNA, 22 nt, Artificial Sequence
  LRRK2 RNA guide
acugagcuagccagcucaaugg

SEQ ID NO: 43314 - RNA, 22 nt, Artificial Sequence
  LRRK2 RNA guide
agcucagucauuggagaaacca

SEQ ID NO: 43315 - RNA, 22 nt, Artificial Sequence
  LRRK2 RNA guide
agcuggcuagcucagucauugg

SEQ ID NO: 43316 - RNA, 22 nt, Artificial Sequence
  LRRK2 RNA guide
agucauuggagaaaccauuuca

SEQ ID NO: 43317 - RNA, 22 nt, Artificial Sequence
  LRRK2 RNA guide
augacugagcuagccagcucaa

SEQ ID NO: 43318 - RNA, 22 nt, Artificial Sequence
  LRRK2 RNA guide
augguuucuccaaugacugagc

SEQ ID NO: 43319 - RNA, 22 nt, Artificial Sequence
  LRRK2 RNA guide
auugaaaugguuucuccaauga

SEQ ID NO: 43320 - RNA, 22 nt, Artificial Sequence
  LRRK2 RNA guide
auugagcuggcuagcucaguca

SEQ ID NO: 43321 - RNA, 22 nt, Artificial Sequence
  LRRK2 RNA guide
auuuuuccauugagcuggcuag

SEQ ID NO: 43322 - RNA, 22 nt, Artificial Sequence
  LRRK2 RNA guide
caaugacugagcuagccagcuc

SEQ ID NO: 43323 - RNA, 22 nt, Artificial Sequence
  LRRK2 RNA guide
cagucauuggagaaaccauuuc

SEQ ID NO: 43324 - RNA, 22 nt, Artificial Sequence
  LRRK2 RNA guide
cauugagcuggcuagcucaguc

SEQ ID NO: 43325 - RNA, 22 nt, Artificial Sequence
  LRRK2 RNA guide
ccaaugacugagcuagccagcu

SEQ ID NO: 43326 - RNA, 22 nt, Artificial Sequence
  LRRK2 RNA guide
ccauugagcuggcuagcucagu

SEQ ID NO: 43327 - RNA, 22 nt, Artificial Sequence
  LRRK2 RNA guide
cuagcucagucauuggagaaac

SEQ ID NO: 43328 - RNA, 22 nt, Artificial Sequence
  LRRK2 RNA guide
cucagucauuggagaaaccauu

SEQ ID NO: 43329 - RNA, 22 nt, Artificial Sequence
  LRRK2 RNA guide
cuccaaugacugagcuagccag

SEQ ID NO: 43330 - RNA, 22 nt, Artificial Sequence
  LRRK2 RNA guide
cuggcuagcucagucauuggag

SEQ ID NO: 43331 - RNA, 22 nt, Artificial Sequence
  LRRK2 RNA guide
gaaaugguuucuccaaugacug

SEQ ID NO: 43332 - RNA, 22 nt, Artificial Sequence
  LRRK2 RNA guide
gacugagcuagccagcucaaug

SEQ ID NO: 43333 - RNA, 22 nt, Artificial Sequence
  LRRK2 RNA guide
gagcuggcuagcucagucauug

SEQ ID NO: 43334 - RNA, 22 nt, Artificial Sequence
  LRRK2 RNA guide
gcuagcucagucauuggagaaa

SEQ ID NO: 43335 - RNA, 22 nt, Artificial Sequence
  LRRK2 RNA guide
gcucagucauuggagaaaccau

SEQ ID NO: 43336 - RNA, 22 nt, Artificial Sequence
  LRRK2 RNA guide
gcuggcuagcucagucauugga

SEQ ID NO: 43337 - RNA, 22 nt, Artificial Sequence
  LRRK2 RNA guide
ggcuagcucagucauuggagaa

SEQ ID NO: 43338 - RNA, 22 nt, Artificial Sequence
  LRRK2 RNA guide
gguuucuccaaugacugagcua

SEQ ID NO: 43339 - RNA, 22 nt, Artificial Sequence
  LRRK2 RNA guide
guuucuccaaugacugagcuag

SEQ ID NO: 43340 - RNA, 22 nt, Artificial Sequence
  LRRK2 RNA guide
uagcucagucauuggagaaacc

SEQ ID NO: 43341 - RNA, 22 nt, Artificial Sequence
  LRRK2 RNA guide
uauugaaaugguuucuccaaug

SEQ ID NO: 43342 - RNA, 22 nt, Artificial Sequence
  LRRK2 RNA guide
ucagucauuggagaaaccauuu

SEQ ID NO: 43343 - RNA, 22 nt, Artificial Sequence
  LRRK2 RNA guide
uccaaugacugagcuagccagc

SEQ ID NO: 43344 - RNA, 22 nt, Artificial Sequence
  LRRK2 RNA guide
uccauugagcuggcuagcucag

SEQ ID NO: 43345 - RNA, 22 nt, Artificial Sequence
  LRRK2 RNA guide
ucuccaaugacugagcuagcca

SEQ ID NO: 43346 - RNA, 22 nt, Artificial Sequence
  LRRK2 RNA guide
ugaaaugguuucuccaaugacu

SEQ ID NO: 43347 - RNA, 22 nt, Artificial Sequence
  LRRK2 RNA guide
ugacugagcuagccagcucaau

SEQ ID NO: 43348 - RNA, 22 nt, Artificial Sequence
  LRRK2 RNA guide
ugagcuggcuagcucagucauu

SEQ ID NO: 43349 - RNA, 22 nt, Artificial Sequence
  LRRK2 RNA guide
uggcuagcucagucauuggaga

SEQ ID NO: 43350 - RNA, 22 nt, Artificial Sequence
  LRRK2 RNA guide
ugguuucuccaaugacugagcu

SEQ ID NO: 43351 - RNA, 22 nt, Artificial Sequence
  LRRK2 RNA guide
uuccauugagcuggcuagcuca

SEQ ID NO: 43352 - RNA, 22 nt, Artificial Sequence
  LRRK2 RNA guide
uucuccaaugacugagcuagcc

SEQ ID NO: 43353 - RNA, 22 nt, Artificial Sequence
  LRRK2 RNA guide
uugaaaugguuucuccaaugac

SEQ ID NO: 43354 - RNA, 22 nt, Artificial Sequence
  LRRK2 RNA guide
uugagcuggcuagcucagucau

SEQ ID NO: 43355 - RNA, 22 nt, Artificial Sequence
  LRRK2 RNA guide
uuuccauugagcuggcuagcuc

SEQ ID NO: 43356 - RNA, 22 nt, Artificial Sequence
  LRRK2 RNA guide
uuucuccaaugacugagcuagc

SEQ ID NO: 43357 - RNA, 22 nt, Artificial Sequence
  LRRK2 RNA guide
uuuuccauugagcuggcuagcu

SEQ ID NO: 43358 - RNA, 22 nt, Artificial Sequence
  LRRK2 RNA guide
uuuuuccauugagcuggcuagc

SEQ ID NO: 43359 - RNA, 20 nt, Artificial Sequence
  LRRK2 RNA guide
aaaugguuucuccaaugagu

SEQ ID NO: 43360 - RNA, 20 nt, Artificial Sequence
  LRRK2 RNA guide
aaugagugagcuagccagcu

SEQ ID NO: 43361 - RNA, 20 nt, Artificial Sequence
  LRRK2 RNA guide
aaugguuucuccaaugagug

SEQ ID NO: 43362 - RNA, 20 nt, Artificial Sequence
  LRRK2 RNA guide
acucauuggagaaaccauuu

SEQ ID NO: 43363 - RNA, 20 nt, Artificial Sequence
  LRRK2 RNA guide
agcucacucauuggagaaac

SEQ ID NO: 43364 - RNA, 20 nt, Artificial Sequence
  LRRK2 RNA guide
agcuggcuagcucacucauu

SEQ ID NO: 43365 - RNA, 20 nt, Artificial Sequence
  LRRK2 RNA guide
agugagcuagccagcucaau

SEQ ID NO: 43366 - RNA, 20 nt, Artificial Sequence
  LRRK2 RNA guide
augagugagcuagccagcuc

SEQ ID NO: 43367 - RNA, 20 nt, Artificial Sequence
  LRRK2 RNA guide
augguuucuccaaugaguga

SEQ ID NO: 43368 - RNA, 20 nt, Artificial Sequence
  LRRK2 RNA guide
auugagcuggcuagcucacu

SEQ ID NO: 43369 - RNA, 20 nt, Artificial Sequence
  LRRK2 RNA guide
caaugagugagcuagccagc

SEQ ID NO: 43370 - RNA, 20 nt, Artificial Sequence
  LRRK2 RNA guide
cacucauuggagaaaccauu

SEQ ID NO: 43371 - RNA, 20 nt, Artificial Sequence
  LRRK2 RNA guide
cauugagcuggcuagcucac

SEQ ID NO: 43372 - RNA, 20 nt, Artificial Sequence
  LRRK2 RNA guide
ccaaugagugagcuagccag

SEQ ID NO: 43373 - RNA, 20 nt, Artificial Sequence
  LRRK2 RNA guide
cuagcucacucauuggagaa

SEQ ID NO: 43374 - RNA, 20 nt, Artificial Sequence
  LRRK2 RNA guide
cucacucauuggagaaacca

SEQ ID NO: 43375 - RNA, 20 nt, Artificial Sequence
  LRRK2 RNA guide
cuccaaugagugagcuagcc

SEQ ID NO: 43376 - RNA, 20 nt, Artificial Sequence
  LRRK2 RNA guide
cuggcuagcucacucauugg

SEQ ID NO: 43377 - RNA, 20 nt, Artificial Sequence
  LRRK2 RNA guide
gaaaugguuucuccaaugag

SEQ ID NO: 43378 - RNA, 20 nt, Artificial Sequence
  LRRK2 RNA guide
gagcuggcuagcucacucau

SEQ ID NO: 43379 - RNA, 20 nt, Artificial Sequence
  LRRK2 RNA guide
gagugagcuagccagcucaa

SEQ ID NO: 43380 - RNA, 20 nt, Artificial Sequence
  LRRK2 RNA guide
gcuagcucacucauuggaga

SEQ ID NO: 43381 - RNA, 20 nt, Artificial Sequence
  LRRK2 RNA guide
gcucacucauuggagaaacc

SEQ ID NO: 43382 - RNA, 20 nt, Artificial Sequence
  LRRK2 RNA guide
gcuggcuagcucacucauug

SEQ ID NO: 43383 - RNA, 20 nt, Artificial Sequence
  LRRK2 RNA guide
ggcuagcucacucauuggag

SEQ ID NO: 43384 - RNA, 20 nt, Artificial Sequence
  LRRK2 RNA guide
gguuucuccaaugagugagc

SEQ ID NO: 43385 - RNA, 20 nt, Artificial Sequence
  LRRK2 RNA guide
guuucuccaaugagugagcu

SEQ ID NO: 43386 - RNA, 20 nt, Artificial Sequence
  LRRK2 RNA guide
uagcucacucauuggagaaa

SEQ ID NO: 43387 - RNA, 20 nt, Artificial Sequence
  LRRK2 RNA guide
ucacucauuggagaaaccau

SEQ ID NO: 43388 - RNA, 20 nt, Artificial Sequence
  LRRK2 RNA guide
uccaaugagugagcuagcca

SEQ ID NO: 43389 - RNA, 20 nt, Artificial Sequence
  LRRK2 RNA guide
ucuccaaugagugagcuagc

SEQ ID NO: 43390 - RNA, 20 nt, Artificial Sequence
  LRRK2 RNA guide
ugagcuggcuagcucacuca

SEQ ID NO: 43391 - RNA, 20 nt, Artificial Sequence
  LRRK2 RNA guide
ugagugagcuagccagcuca

SEQ ID NO: 43392 - RNA, 20 nt, Artificial Sequence
  LRRK2 RNA guide
uggcuagcucacucauugga

SEQ ID NO: 43393 - RNA, 20 nt, Artificial Sequence
  LRRK2 RNA guide
ugguuucuccaaugagugag

SEQ ID NO: 43394 - RNA, 20 nt, Artificial Sequence
  LRRK2 RNA guide
uucuccaaugagugagcuag

SEQ ID NO: 43395 - RNA, 20 nt, Artificial Sequence
  LRRK2 RNA guide
uugagcuggcuagcucacuc

SEQ ID NO: 43396 - RNA, 20 nt, Artificial Sequence
  LRRK2 RNA guide
uuucuccaaugagugagcua

SEQ ID NO: 43397 - RNA, 21 nt, Artificial Sequence
  LRRK2 RNA guide
aaaugguuucuccaaugagug

SEQ ID NO: 43398 - RNA, 21 nt, Artificial Sequence
  LRRK2 RNA guide
aaugagugagcuagccagcuc

SEQ ID NO: 43399 - RNA, 21 nt, Artificial Sequence
  LRRK2 RNA guide
aaugguuucuccaaugaguga

SEQ ID NO: 43400 - RNA, 21 nt, Artificial Sequence
  LRRK2 RNA guide
acucauuggagaaaccauuuc

SEQ ID NO: 43401 - RNA, 21 nt, Artificial Sequence
  LRRK2 RNA guide
agcucacucauuggagaaacc

SEQ ID NO: 43402 - RNA, 21 nt, Artificial Sequence
  LRRK2 RNA guide
agcuggcuagcucacucauug

SEQ ID NO: 43403 - RNA, 21 nt, Artificial Sequence
  LRRK2 RNA guide
agugagcuagccagcucaaug

SEQ ID NO: 43404 - RNA, 21 nt, Artificial Sequence
  LRRK2 RNA guide
augagugagcuagccagcuca

SEQ ID NO: 43405 - RNA, 21 nt, Artificial Sequence
  LRRK2 RNA guide
augguuucuccaaugagugag

SEQ ID NO: 43406 - RNA, 21 nt, Artificial Sequence
  LRRK2 RNA guide
auugagcuggcuagcucacuc

SEQ ID NO: 43407 - RNA, 21 nt, Artificial Sequence
  LRRK2 RNA guide
caaugagugagcuagccagcu

SEQ ID NO: 43408 - RNA, 21 nt, Artificial Sequence
  LRRK2 RNA guide
cacucauuggagaaaccauuu

SEQ ID NO: 43409 - RNA, 21 nt, Artificial Sequence
  LRRK2 RNA guide
cauugagcuggcuagcucacu

SEQ ID NO: 43410 - RNA, 21 nt, Artificial Sequence
  LRRK2 RNA guide
ccaaugagugagcuagccagc

SEQ ID NO: 43411 - RNA, 21 nt, Artificial Sequence
  LRRK2 RNA guide
ccauugagcuggcuagcucac

SEQ ID NO: 43412 - RNA, 21 nt, Artificial Sequence
  LRRK2 RNA guide
cuagcucacucauuggagaaa

SEQ ID NO: 43413 - RNA, 21 nt, Artificial Sequence
  LRRK2 RNA guide
cucacucauuggagaaaccau

SEQ ID NO: 43414 - RNA, 21 nt, Artificial Sequence
  LRRK2 RNA guide
cuccaaugagugagcuagcca

SEQ ID NO: 43415 - RNA, 21 nt, Artificial Sequence
  LRRK2 RNA guide
cuggcuagcucacucauugga

SEQ ID NO: 43416 - RNA, 21 nt, Artificial Sequence
  LRRK2 RNA guide
gaaaugguuucuccaaugagu

SEQ ID NO: 43417 - RNA, 21 nt, Artificial Sequence
  LRRK2 RNA guide
gagcuggcuagcucacucauu

SEQ ID NO: 43418 - RNA, 21 nt, Artificial Sequence
  LRRK2 RNA guide
gagugagcuagccagcucaau

SEQ ID NO: 43419 - RNA, 21 nt, Artificial Sequence
  LRRK2 RNA guide
gcuagcucacucauuggagaa

SEQ ID NO: 43420 - RNA, 21 nt, Artificial Sequence
  LRRK2 RNA guide
gcucacucauuggagaaacca

SEQ ID NO: 43421 - RNA, 21 nt, Artificial Sequence
  LRRK2 RNA guide
gcuggcuagcucacucauugg

SEQ ID NO: 43422 - RNA, 21 nt, Artificial Sequence
  LRRK2 RNA guide
ggcuagcucacucauuggaga

SEQ ID NO: 43423 - RNA, 21 nt, Artificial Sequence
  LRRK2 RNA guide
gguuucuccaaugagugagcu

SEQ ID NO: 43424 - RNA, 21 nt, Artificial Sequence
  LRRK2 RNA guide
guuucuccaaugagugagcua

SEQ ID NO: 43425 - RNA, 21 nt, Artificial Sequence
  LRRK2 RNA guide
uagcucacucauuggagaaac

SEQ ID NO: 43426 - RNA, 21 nt, Artificial Sequence
  LRRK2 RNA guide
ucacucauuggagaaaccauu

SEQ ID NO: 43427 - RNA, 21 nt, Artificial Sequence
  LRRK2 RNA guide
uccaaugagugagcuagccag

SEQ ID NO: 43428 - RNA, 21 nt, Artificial Sequence
  LRRK2 RNA guide
ucuccaaugagugagcuagcc

SEQ ID NO: 43429 - RNA, 21 nt, Artificial Sequence
  LRRK2 RNA guide
ugaaaugguuucuccaaugag

SEQ ID NO: 43430 - RNA, 21 nt, Artificial Sequence
  LRRK2 RNA guide
ugagcuggcuagcucacucau

SEQ ID NO: 43431 - RNA, 21 nt, Artificial Sequence
  LRRK2 RNA guide
ugagugagcuagccagcucaa

SEQ ID NO: 43432 - RNA, 21 nt, Artificial Sequence
  LRRK2 RNA guide
uggcuagcucacucauuggag

SEQ ID NO: 43433 - RNA, 21 nt, Artificial Sequence
  LRRK2 RNA guide
ugguuucuccaaugagugagc

SEQ ID NO: 43434 - RNA, 21 nt, Artificial Sequence
  LRRK2 RNA guide
uucuccaaugagugagcuagc

SEQ ID NO: 43435 - RNA, 21 nt, Artificial Sequence
  LRRK2 RNA guide
uugagcuggcuagcucacuca

SEQ ID NO: 43436 - RNA, 21 nt, Artificial Sequence
  LRRK2 RNA guide
uuucuccaaugagugagcuag

SEQ ID NO: 43437 - RNA, 22 nt, Artificial Sequence
  LRRK2 RNA guide
aaaugguuucuccaaugaguga

SEQ ID NO: 43438 - RNA, 22 nt, Artificial Sequence
  LRRK2 RNA guide
aaugagugagcuagccagcuca

SEQ ID NO: 43439 - RNA, 22 nt, Artificial Sequence
  LRRK2 RNA guide
aaugguuucuccaaugagugag

SEQ ID NO: 43440 - RNA, 22 nt, Artificial Sequence
  LRRK2 RNA guide
acucauuggagaaaccauuuca

SEQ ID NO: 43441 - RNA, 22 nt, Artificial Sequence
  LRRK2 RNA guide
agcucacucauuggagaaacca

SEQ ID NO: 43442 - RNA, 22 nt, Artificial Sequence
  LRRK2 RNA guide
agcuggcuagcucacucauugg

SEQ ID NO: 43443 - RNA, 22 nt, Artificial Sequence
  LRRK2 RNA guide
agugagcuagccagcucaaugg

SEQ ID NO: 43444 - RNA, 22 nt, Artificial Sequence
  LRRK2 RNA guide
augagugagcuagccagcucaa

SEQ ID NO: 43445 - RNA, 22 nt, Artificial Sequence
  LRRK2 RNA guide
augguuucuccaaugagugagc

SEQ ID NO: 43446 - RNA, 22 nt, Artificial Sequence
  LRRK2 RNA guide
auugagcuggcuagcucacuca

SEQ ID NO: 43447 - RNA, 22 nt, Artificial Sequence
  LRRK2 RNA guide
caaugagugagcuagccagcuc

SEQ ID NO: 43448 - RNA, 22 nt, Artificial Sequence
  LRRK2 RNA guide
cacucauuggagaaaccauuuc

SEQ ID NO: 43449 - RNA, 22 nt, Artificial Sequence
  LRRK2 RNA guide
cauugagcuggcuagcucacuc

SEQ ID NO: 43450 - RNA, 22 nt, Artificial Sequence
  LRRK2 RNA guide
ccaaugagugagcuagccagcu

SEQ ID NO: 43451 - RNA, 22 nt, Artificial Sequence
  LRRK2 RNA guide
ccauugagcuggcuagcucacu

SEQ ID NO: 43452 - RNA, 22 nt, Artificial Sequence
  LRRK2 RNA guide
cuagcucacucauuggagaaac

SEQ ID NO: 43453 - RNA, 22 nt, Artificial Sequence
  LRRK2 RNA guide
cucacucauuggagaaaccauu

SEQ ID NO: 43454 - RNA, 22 nt, Artificial Sequence
  LRRK2 RNA guide
cuccaaugagugagcuagccag

SEQ ID NO: 43455 - RNA, 22 nt, Artificial Sequence
  LRRK2 RNA guide
cuggcuagcucacucauuggag

SEQ ID NO: 43456 - RNA, 22 nt, Artificial Sequence
  LRRK2 RNA guide
gaaaugguuucuccaaugagug

SEQ ID NO: 43457 - RNA, 22 nt, Artificial Sequence
  LRRK2 RNA guide
gagcuggcuagcucacucauug

SEQ ID NO: 43458 - RNA, 22 nt, Artificial Sequence
  LRRK2 RNA guide
gagugagcuagccagcucaaug

SEQ ID NO: 43459 - RNA, 22 nt, Artificial Sequence
  LRRK2 RNA guide
gcuagcucacucauuggagaaa

SEQ ID NO: 43460 - RNA, 22 nt, Artificial Sequence
  LRRK2 RNA guide
gcucacucauuggagaaaccau

SEQ ID NO: 43461 - RNA, 22 nt, Artificial Sequence
  LRRK2 RNA guide
gcuggcuagcucacucauugga

SEQ ID NO: 43462 - RNA, 22 nt, Artificial Sequence
  LRRK2 RNA guide
ggcuagcucacucauuggagaa

SEQ ID NO: 43463 - RNA, 22 nt, Artificial Sequence
  LRRK2 RNA guide
gguuucuccaaugagugagcua

SEQ ID NO: 43464 - RNA, 22 nt, Artificial Sequence
  LRRK2 RNA guide
guuucuccaaugagugagcuag

SEQ ID NO: 43465 - RNA, 22 nt, Artificial Sequence
  LRRK2 RNA guide
uagcucacucauuggagaaacc

SEQ ID NO: 43466 - RNA, 22 nt, Artificial Sequence
  LRRK2 RNA guide
ucacucauuggagaaaccauuu

SEQ ID NO: 43467 - RNA, 22 nt, Artificial Sequence
  LRRK2 RNA guide
uccaaugagugagcuagccagc

SEQ ID NO: 43468 - RNA, 22 nt, Artificial Sequence
  LRRK2 RNA guide
uccauugagcuggcuagcucac

SEQ ID NO: 43469 - RNA, 22 nt, Artificial Sequence
  LRRK2 RNA guide
ucuccaaugagugagcuagcca

SEQ ID NO: 43470 - RNA, 22 nt, Artificial Sequence
  LRRK2 RNA guide
ugaaaugguuucuccaaugagu

SEQ ID NO: 43471 - RNA, 22 nt, Artificial Sequence
  LRRK2 RNA guide
ugagcuggcuagcucacucauu

SEQ ID NO: 43472 - RNA, 22 nt, Artificial Sequence
  LRRK2 RNA guide
ugagugagcuagccagcucaau

SEQ ID NO: 43473 - RNA, 22 nt, Artificial Sequence
  LRRK2 RNA guide
uggcuagcucacucauuggaga

SEQ ID NO: 43474 - RNA, 22 nt, Artificial Sequence
  LRRK2 RNA guide
ugguuucuccaaugagugagcu

SEQ ID NO: 43475 - RNA, 22 nt, Artificial Sequence
  LRRK2 RNA guide
uucuccaaugagugagcuagcc

SEQ ID NO: 43476 - RNA, 22 nt, Artificial Sequence
  LRRK2 RNA guide
uugaaaugguuucuccaaugag

SEQ ID NO: 43477 - RNA, 22 nt, Artificial Sequence
  LRRK2 RNA guide
uugagcuggcuagcucacucau

SEQ ID NO: 43478 - RNA, 22 nt, Artificial Sequence
  LRRK2 RNA guide
uuucuccaaugagugagcuagc

SEQ ID NO: 43479 - RNA, 20 nt, Artificial Sequence
  LRRK2 RNA guide
aaaaacaagaguuaacgaga

SEQ ID NO: 43480 - RNA, 20 nt, Artificial Sequence
  LRRK2 RNA guide
aaaacaagaguuaacgagag

SEQ ID NO: 43481 - RNA, 20 nt, Artificial Sequence
  LRRK2 RNA guide
aaacaagaguuaacgagaga

SEQ ID NO: 43482 - RNA, 20 nt, Artificial Sequence
  LRRK2 RNA guide
aaagucucucguuaacucuu

SEQ ID NO: 43483 - RNA, 20 nt, Artificial Sequence
  LRRK2 RNA guide
aacaagaguuaacgagagac

SEQ ID NO: 43484 - RNA, 20 nt, Artificial Sequence
  LRRK2 RNA guide
aacucuuguuuuucaucucu

SEQ ID NO: 43485 - RNA, 20 nt, Artificial Sequence
  LRRK2 RNA guide
aagaguuaacgagagacuuu

SEQ ID NO: 43486 - RNA, 20 nt, Artificial Sequence
  LRRK2 RNA guide
aagggaaagucucucguuaa

SEQ ID NO: 43487 - RNA, 20 nt, Artificial Sequence
  LRRK2 RNA guide
aagucucucguuaacucuug

SEQ ID NO: 43488 - RNA, 20 nt, Artificial Sequence
  LRRK2 RNA guide
acaagaguuaacgagagacu

SEQ ID NO: 43489 - RNA, 20 nt, Artificial Sequence
  LRRK2 RNA guide
agagaugaaaaacaagaguu

SEQ ID NO: 43490 - RNA, 20 nt, Artificial Sequence
  LRRK2 RNA guide
agaguuaacgagagacuuuc

SEQ ID NO: 43491 - RNA, 20 nt, Artificial Sequence
  LRRK2 RNA guide
agggaaagucucucguuaac

SEQ ID NO: 43492 - RNA, 20 nt, Artificial Sequence
  LRRK2 RNA guide
agucucucguuaacucuugu

SEQ ID NO: 43493 - RNA, 20 nt, Artificial Sequence
  LRRK2 RNA guide
aguuaacgagagacuuuccc

SEQ ID NO: 43494 - RNA, 20 nt, Artificial Sequence
  LRRK2 RNA guide
augaaaaacaagaguuaacg

SEQ ID NO: 43495 - RNA, 20 nt, Artificial Sequence
  LRRK2 RNA guide
auuaagggaaagucucucgu

SEQ ID NO: 43496 - RNA, 20 nt, Artificial Sequence
  LRRK2 RNA guide
caagaguuaacgagagacuu

SEQ ID NO: 43497 - RNA, 20 nt, Artificial Sequence
  LRRK2 RNA guide
cagagaugaaaaacaagagu

SEQ ID NO: 43498 - RNA, 20 nt, Artificial Sequence
  LRRK2 RNA guide
ccucagagaugaaaaacaag

SEQ ID NO: 43499 - RNA, 20 nt, Artificial Sequence
  LRRK2 RNA guide
cgauuaagggaaagucucuc

SEQ ID NO: 43500 - RNA, 20 nt, Artificial Sequence
  LRRK2 RNA guide
cguuaacucuuguuuuucau

SEQ ID NO: 43501 - RNA, 20 nt, Artificial Sequence
  LRRK2 RNA guide
cucagagaugaaaaacaaga

SEQ ID NO: 43502 - RNA, 20 nt, Artificial Sequence
  LRRK2 RNA guide
cucguuaacucuuguuuuuc

SEQ ID NO: 43503 - RNA, 20 nt, Artificial Sequence
  LRRK2 RNA guide
cucucguuaacucuuguuuu

SEQ ID NO: 43504 - RNA, 20 nt, Artificial Sequence
  LRRK2 RNA guide
gaaaaacaagaguuaacgag

SEQ ID NO: 43505 - RNA, 20 nt, Artificial Sequence
  LRRK2 RNA guide
gaaagucucucguuaacucu

SEQ ID NO: 43506 - RNA, 20 nt, Artificial Sequence
  LRRK2 RNA guide
gagaugaaaaacaagaguua

SEQ ID NO: 43507 - RNA, 20 nt, Artificial Sequence
  LRRK2 RNA guide
gaguuaacgagagacuuucc

SEQ ID NO: 43508 - RNA, 20 nt, Artificial Sequence
  LRRK2 RNA guide
gaugaaaaacaagaguuaac

SEQ ID NO: 43509 - RNA, 20 nt, Artificial Sequence
  LRRK2 RNA guide
gauuaagggaaagucucucg

SEQ ID NO: 43510 - RNA, 20 nt, Artificial Sequence
  LRRK2 RNA guide
ggaaagucucucguuaacuc

SEQ ID NO: 43511 - RNA, 20 nt, Artificial Sequence
  LRRK2 RNA guide
gggaaagucucucguuaacu

SEQ ID NO: 43512 - RNA, 20 nt, Artificial Sequence
  LRRK2 RNA guide
guccucagagaugaaaaaca

SEQ ID NO: 43513 - RNA, 20 nt, Artificial Sequence
  LRRK2 RNA guide
gucucucguuaacucuuguu

SEQ ID NO: 43514 - RNA, 20 nt, Artificial Sequence
  LRRK2 RNA guide
guuaacgagagacuuucccu

SEQ ID NO: 43515 - RNA, 20 nt, Artificial Sequence
  LRRK2 RNA guide
guuaacucuuguuuuucauc

SEQ ID NO: 43516 - RNA, 20 nt, Artificial Sequence
  LRRK2 RNA guide
uaacucuuguuuuucaucuc

SEQ ID NO: 43517 - RNA, 20 nt, Artificial Sequence
  LRRK2 RNA guide
uaagggaaagucucucguua

SEQ ID NO: 43518 - RNA, 20 nt, Artificial Sequence
  LRRK2 RNA guide
ucagagaugaaaaacaagag

SEQ ID NO: 43519 - RNA, 20 nt, Artificial Sequence
  LRRK2 RNA guide
uccucagagaugaaaaacaa

SEQ ID NO: 43520 - RNA, 20 nt, Artificial Sequence
  LRRK2 RNA guide
ucguuaacucuuguuuuuca

SEQ ID NO: 43521 - RNA, 20 nt, Artificial Sequence
  LRRK2 RNA guide
ucucguuaacucuuguuuuu

SEQ ID NO: 43522 - RNA, 20 nt, Artificial Sequence
  LRRK2 RNA guide
ucucucguuaacucuuguuu

SEQ ID NO: 43523 - RNA, 20 nt, Artificial Sequence
  LRRK2 RNA guide
ugaaaaacaagaguuaacga

SEQ ID NO: 43524 - RNA, 20 nt, Artificial Sequence
  LRRK2 RNA guide
uuaagggaaagucucucguu

SEQ ID NO: 43525 - RNA, 21 nt, Artificial Sequence
  LRRK2 RNA guide
aaaaacaagaguuaacgagag

SEQ ID NO: 43526 - RNA, 21 nt, Artificial Sequence
  LRRK2 RNA guide
aaaacaagaguuaacgagaga

SEQ ID NO: 43527 - RNA, 21 nt, Artificial Sequence
  LRRK2 RNA guide
aaacaagaguuaacgagagac

SEQ ID NO: 43528 - RNA, 21 nt, Artificial Sequence
  LRRK2 RNA guide
aaagucucucguuaacucuug

SEQ ID NO: 43529 - RNA, 21 nt, Artificial Sequence
  LRRK2 RNA guide
aacaagaguuaacgagagacu

SEQ ID NO: 43530 - RNA, 21 nt, Artificial Sequence
  LRRK2 RNA guide
aacucuuguuuuucaucucug

SEQ ID NO: 43531 - RNA, 21 nt, Artificial Sequence
  LRRK2 RNA guide
aagaguuaacgagagacuuuc

SEQ ID NO: 43532 - RNA, 21 nt, Artificial Sequence
  LRRK2 RNA guide
aagggaaagucucucguuaac

SEQ ID NO: 43533 - RNA, 21 nt, Artificial Sequence
  LRRK2 RNA guide
aagucucucguuaacucuugu

SEQ ID NO: 43534 - RNA, 21 nt, Artificial Sequence
  LRRK2 RNA guide
acaagaguuaacgagagacuu

SEQ ID NO: 43535 - RNA, 21 nt, Artificial Sequence
  LRRK2 RNA guide
agaguuaacgagagacuuucc

SEQ ID NO: 43536 - RNA, 21 nt, Artificial Sequence
  LRRK2 RNA guide
agggaaagucucucguuaacu

SEQ ID NO: 43537 - RNA, 21 nt, Artificial Sequence
  LRRK2 RNA guide
agucucucguuaacucuuguu

SEQ ID NO: 43538 - RNA, 21 nt, Artificial Sequence
  LRRK2 RNA guide
aguuaacgagagacuuucccu

SEQ ID NO: 43539 - RNA, 21 nt, Artificial Sequence
  LRRK2 RNA guide
auuaagggaaagucucucguu

SEQ ID NO: 43540 - RNA, 21 nt, Artificial Sequence
  LRRK2 RNA guide
caagaguuaacgagagacuuu

SEQ ID NO: 43541 - RNA, 21 nt, Artificial Sequence
  LRRK2 RNA guide
cagagaugaaaaacaagaguu

SEQ ID NO: 43542 - RNA, 21 nt, Artificial Sequence
  LRRK2 RNA guide
ccucagagaugaaaaacaaga

SEQ ID NO: 43543 - RNA, 21 nt, Artificial Sequence
  LRRK2 RNA guide
cgauuaagggaaagucucucg

SEQ ID NO: 43544 - RNA, 21 nt, Artificial Sequence
  LRRK2 RNA guide
cguuaacucuuguuuuucauc

SEQ ID NO: 43545 - RNA, 21 nt, Artificial Sequence
  LRRK2 RNA guide
cucagagaugaaaaacaagag

SEQ ID NO: 43546 - RNA, 21 nt, Artificial Sequence
  LRRK2 RNA guide
cucguuaacucuuguuuuuca

SEQ ID NO: 43547 - RNA, 21 nt, Artificial Sequence
  LRRK2 RNA guide
cucucguuaacucuuguuuuu

SEQ ID NO: 43548 - RNA, 21 nt, Artificial Sequence
  LRRK2 RNA guide
gaaaaacaagaguuaacgaga

SEQ ID NO: 43549 - RNA, 21 nt, Artificial Sequence
  LRRK2 RNA guide
gaaagucucucguuaacucuu

SEQ ID NO: 43550 - RNA, 21 nt, Artificial Sequence
  LRRK2 RNA guide
gaguuaacgagagacuuuccc

SEQ ID NO: 43551 - RNA, 21 nt, Artificial Sequence
  LRRK2 RNA guide
gaugaaaaacaagaguuaacg

SEQ ID NO: 43552 - RNA, 21 nt, Artificial Sequence
  LRRK2 RNA guide
gauuaagggaaagucucucgu

SEQ ID NO: 43553 - RNA, 21 nt, Artificial Sequence
  LRRK2 RNA guide
gcgauuaagggaaagucucuc

SEQ ID NO: 43554 - RNA, 21 nt, Artificial Sequence
  LRRK2 RNA guide
ggaaagucucucguuaacucu

SEQ ID NO: 43555 - RNA, 21 nt, Artificial Sequence
  LRRK2 RNA guide
gggaaagucucucguuaacuc

SEQ ID NO: 43556 - RNA, 21 nt, Artificial Sequence
  LRRK2 RNA guide
guccucagagaugaaaaacaa

SEQ ID NO: 43557 - RNA, 21 nt, Artificial Sequence
  LRRK2 RNA guide
gucucucguuaacucuuguuu

SEQ ID NO: 43558 - RNA, 21 nt, Artificial Sequence
  LRRK2 RNA guide
guuaacgagagacuuucccuu

SEQ ID NO: 43559 - RNA, 21 nt, Artificial Sequence
  LRRK2 RNA guide
uaagggaaagucucucguuaa

SEQ ID NO: 43560 - RNA, 21 nt, Artificial Sequence
  LRRK2 RNA guide
ucagagaugaaaaacaagagu

SEQ ID NO: 43561 - RNA, 21 nt, Artificial Sequence
  LRRK2 RNA guide
uccucagagaugaaaaacaag

SEQ ID NO: 43562 - RNA, 21 nt, Artificial Sequence
  LRRK2 RNA guide
ucucguuaacucuuguuuuuc

SEQ ID NO: 43563 - RNA, 21 nt, Artificial Sequence
  LRRK2 RNA guide
ucucucguuaacucuuguuuu

SEQ ID NO: 43564 - RNA, 21 nt, Artificial Sequence
  LRRK2 RNA guide
ugaaaaacaagaguuaacgag

SEQ ID NO: 43565 - RNA, 21 nt, Artificial Sequence
  LRRK2 RNA guide
uguccucagagaugaaaaaca

SEQ ID NO: 43566 - RNA, 21 nt, Artificial Sequence
  LRRK2 RNA guide
uuaagggaaagucucucguua

SEQ ID NO: 43567 - RNA, 22 nt, Artificial Sequence
  LRRK2 RNA guide
aaaaacaagaguuaacgagaga

SEQ ID NO: 43568 - RNA, 22 nt, Artificial Sequence
  LRRK2 RNA guide
aaaacaagaguuaacgagagac

SEQ ID NO: 43569 - RNA, 22 nt, Artificial Sequence
  LRRK2 RNA guide
aaacaagaguuaacgagagacu

SEQ ID NO: 43570 - RNA, 22 nt, Artificial Sequence
  LRRK2 RNA guide
aaagucucucguuaacucuugu

SEQ ID NO: 43571 - RNA, 22 nt, Artificial Sequence
  LRRK2 RNA guide
aacaagaguuaacgagagacuu

SEQ ID NO: 43572 - RNA, 22 nt, Artificial Sequence
  LRRK2 RNA guide
aacucuuguuuuucaucucuga

SEQ ID NO: 43573 - RNA, 22 nt, Artificial Sequence
  LRRK2 RNA guide
aagaguuaacgagagacuuucc

SEQ ID NO: 43574 - RNA, 22 nt, Artificial Sequence
  LRRK2 RNA guide
aagggaaagucucucguuaacu

SEQ ID NO: 43575 - RNA, 22 nt, Artificial Sequence
  LRRK2 RNA guide
aagucucucguuaacucuuguu

SEQ ID NO: 43576 - RNA, 22 nt, Artificial Sequence
  LRRK2 RNA guide
acaagaguuaacgagagacuuu

SEQ ID NO: 43577 - RNA, 22 nt, Artificial Sequence
  LRRK2 RNA guide
agaguuaacgagagacuuuccc

SEQ ID NO: 43578 - RNA, 22 nt, Artificial Sequence
  LRRK2 RNA guide
agaugaaaaacaagaguuaacg

SEQ ID NO: 43579 - RNA, 22 nt, Artificial Sequence
  LRRK2 RNA guide
agcgauuaagggaaagucucuc

SEQ ID NO: 43580 - RNA, 22 nt, Artificial Sequence
  LRRK2 RNA guide
agggaaagucucucguuaacuc

SEQ ID NO: 43581 - RNA, 22 nt, Artificial Sequence
  LRRK2 RNA guide
agucucucguuaacucuuguuu

SEQ ID NO: 43582 - RNA, 22 nt, Artificial Sequence
  LRRK2 RNA guide
aguuaacgagagacuuucccuu

SEQ ID NO: 43583 - RNA, 22 nt, Artificial Sequence
  LRRK2 RNA guide
augaaaaacaagaguuaacgag

SEQ ID NO: 43584 - RNA, 22 nt, Artificial Sequence
  LRRK2 RNA guide
auuaagggaaagucucucguua

SEQ ID NO: 43585 - RNA, 22 nt, Artificial Sequence
  LRRK2 RNA guide
caagaguuaacgagagacuuuc

SEQ ID NO: 43586 - RNA, 22 nt, Artificial Sequence
  LRRK2 RNA guide
cagagaugaaaaacaagaguua

SEQ ID NO: 43587 - RNA, 22 nt, Artificial Sequence
  LRRK2 RNA guide
ccucagagaugaaaaacaagag

SEQ ID NO: 43588 - RNA, 22 nt, Artificial Sequence
  LRRK2 RNA guide
cgauuaagggaaagucucucgu

SEQ ID NO: 43589 - RNA, 22 nt, Artificial Sequence
  LRRK2 RNA guide
cguuaacucuuguuuuucaucu

SEQ ID NO: 43590 - RNA, 22 nt, Artificial Sequence
  LRRK2 RNA guide
cucagagaugaaaaacaagagu

SEQ ID NO: 43591 - RNA, 22 nt, Artificial Sequence
  LRRK2 RNA guide
cucguuaacucuuguuuuucau

SEQ ID NO: 43592 - RNA, 22 nt, Artificial Sequence
  LRRK2 RNA guide
cucucguuaacucuuguuuuuc

SEQ ID NO: 43593 - RNA, 22 nt, Artificial Sequence
  LRRK2 RNA guide
cuguccucagagaugaaaaaca

SEQ ID NO: 43594 - RNA, 22 nt, Artificial Sequence
  LRRK2 RNA guide
gaaaaacaagaguuaacgagag

SEQ ID NO: 43595 - RNA, 22 nt, Artificial Sequence
  LRRK2 RNA guide
gaaagucucucguuaacucuug

SEQ ID NO: 43596 - RNA, 22 nt, Artificial Sequence
  LRRK2 RNA guide
gagaugaaaaacaagaguuaac

SEQ ID NO: 43597 - RNA, 22 nt, Artificial Sequence
  LRRK2 RNA guide
gaguuaacgagagacuuucccu

SEQ ID NO: 43598 - RNA, 22 nt, Artificial Sequence
  LRRK2 RNA guide
gaugaaaaacaagaguuaacga

SEQ ID NO: 43599 - RNA, 22 nt, Artificial Sequence
  LRRK2 RNA guide
gauuaagggaaagucucucguu

SEQ ID NO: 43600 - RNA, 22 nt, Artificial Sequence
  LRRK2 RNA guide
gcgauuaagggaaagucucucg

SEQ ID NO: 43601 - RNA, 22 nt, Artificial Sequence
  LRRK2 RNA guide
ggaaagucucucguuaacucuu

SEQ ID NO: 43602 - RNA, 22 nt, Artificial Sequence
  LRRK2 RNA guide
gggaaagucucucguuaacucu

SEQ ID NO: 43603 - RNA, 22 nt, Artificial Sequence
  LRRK2 RNA guide
guccucagagaugaaaaacaag

SEQ ID NO: 43604 - RNA, 22 nt, Artificial Sequence
  LRRK2 RNA guide
gucucucguuaacucuuguuuu

SEQ ID NO: 43605 - RNA, 22 nt, Artificial Sequence
  LRRK2 RNA guide
guuaacgagagacuuucccuua

SEQ ID NO: 43606 - RNA, 22 nt, Artificial Sequence
  LRRK2 RNA guide
guuaacucuuguuuuucaucuc

SEQ ID NO: 43607 - RNA, 22 nt, Artificial Sequence
  LRRK2 RNA guide
uaacucuuguuuuucaucucug

SEQ ID NO: 43608 - RNA, 22 nt, Artificial Sequence
  LRRK2 RNA guide
uaagggaaagucucucguuaac

SEQ ID NO: 43609 - RNA, 22 nt, Artificial Sequence
  LRRK2 RNA guide
ucagagaugaaaaacaagaguu

SEQ ID NO: 43610 - RNA, 22 nt, Artificial Sequence
  LRRK2 RNA guide
uccucagagaugaaaaacaaga

SEQ ID NO: 43611 - RNA, 22 nt, Artificial Sequence
  LRRK2 RNA guide
ucguuaacucuuguuuuucauc

SEQ ID NO: 43612 - RNA, 22 nt, Artificial Sequence
  LRRK2 RNA guide
ucucguuaacucuuguuuuuca

SEQ ID NO: 43613 - RNA, 22 nt, Artificial Sequence
  LRRK2 RNA guide
ucucucguuaacucuuguuuuu

SEQ ID NO: 43614 - RNA, 22 nt, Artificial Sequence
  LRRK2 RNA guide
ugaaaaacaagaguuaacgaga

SEQ ID NO: 43615 - RNA, 22 nt, Artificial Sequence
  LRRK2 RNA guide
uguccucagagaugaaaaacaa

SEQ ID NO: 43616 - RNA, 22 nt, Artificial Sequence
  LRRK2 RNA guide
uuaagggaaagucucucguuaa

SEQ ID NO: 43617 - RNA, 20 nt, Artificial Sequence
  LRRK2 RNA guide
aaaaacaagagauaacgaga

SEQ ID NO: 43618 - RNA, 20 nt, Artificial Sequence
  LRRK2 RNA guide
aaaacaagagauaacgagag

SEQ ID NO: 43619 - RNA, 20 nt, Artificial Sequence
  LRRK2 RNA guide
aaacaagagauaacgagaga

SEQ ID NO: 43620 - RNA, 20 nt, Artificial Sequence
  LRRK2 RNA guide
aaagucucucguuaucucuu

SEQ ID NO: 43621 - RNA, 20 nt, Artificial Sequence
  LRRK2 RNA guide
aacaagagauaacgagagac

SEQ ID NO: 43622 - RNA, 20 nt, Artificial Sequence
  LRRK2 RNA guide
aagagauaacgagagacuuu

SEQ ID NO: 43623 - RNA, 20 nt, Artificial Sequence
  LRRK2 RNA guide
aagggaaagucucucguuau

SEQ ID NO: 43624 - RNA, 20 nt, Artificial Sequence
  LRRK2 RNA guide
aagucucucguuaucucuug

SEQ ID NO: 43625 - RNA, 20 nt, Artificial Sequence
  LRRK2 RNA guide
acaagagauaacgagagacu

SEQ ID NO: 43626 - RNA, 20 nt, Artificial Sequence
  LRRK2 RNA guide
agagauaacgagagacuuuc

SEQ ID NO: 43627 - RNA, 20 nt, Artificial Sequence
  LRRK2 RNA guide
agagaugaaaaacaagagau

SEQ ID NO: 43628 - RNA, 20 nt, Artificial Sequence
  LRRK2 RNA guide
agauaacgagagacuuuccc

SEQ ID NO: 43629 - RNA, 20 nt, Artificial Sequence
  LRRK2 RNA guide
agggaaagucucucguuauc

SEQ ID NO: 43630 - RNA, 20 nt, Artificial Sequence
  LRRK2 RNA guide
agucucucguuaucucuugu

SEQ ID NO: 43631 - RNA, 20 nt, Artificial Sequence
  LRRK2 RNA guide
aucucuuguuuuucaucucu

SEQ ID NO: 43632 - RNA, 20 nt, Artificial Sequence
  LRRK2 RNA guide
augaaaaacaagagauaacg

SEQ ID NO: 43633 - RNA, 20 nt, Artificial Sequence
  LRRK2 RNA guide
caagagauaacgagagacuu

SEQ ID NO: 43634 - RNA, 20 nt, Artificial Sequence
  LRRK2 RNA guide
cagagaugaaaaacaagaga

SEQ ID NO: 43635 - RNA, 20 nt, Artificial Sequence
  LRRK2 RNA guide
cguuaucucuuguuuuucau

SEQ ID NO: 43636 - RNA, 20 nt, Artificial Sequence
  LRRK2 RNA guide
cucguuaucucuuguuuuuc

SEQ ID NO: 43637 - RNA, 20 nt, Artificial Sequence
  LRRK2 RNA guide
cucucguuaucucuuguuuu

SEQ ID NO: 43638 - RNA, 20 nt, Artificial Sequence
  LRRK2 RNA guide
gaaaaacaagagauaacgag

SEQ ID NO: 43639 - RNA, 20 nt, Artificial Sequence
  LRRK2 RNA guide
gaaagucucucguuaucucu

SEQ ID NO: 43640 - RNA, 20 nt, Artificial Sequence
  LRRK2 RNA guide
gagauaacgagagacuuucc

SEQ ID NO: 43641 - RNA, 20 nt, Artificial Sequence
  LRRK2 RNA guide
gagaugaaaaacaagagaua

SEQ ID NO: 43642 - RNA, 20 nt, Artificial Sequence
  LRRK2 RNA guide
gauaacgagagacuuucccu

SEQ ID NO: 43643 - RNA, 20 nt, Artificial Sequence
  LRRK2 RNA guide
gaugaaaaacaagagauaac

SEQ ID NO: 43644 - RNA, 20 nt, Artificial Sequence
  LRRK2 RNA guide
ggaaagucucucguuaucuc

SEQ ID NO: 43645 - RNA, 20 nt, Artificial Sequence
  LRRK2 RNA guide
gggaaagucucucguuaucu

SEQ ID NO: 43646 - RNA, 20 nt, Artificial Sequence
  LRRK2 RNA guide
gucucucguuaucucuuguu

SEQ ID NO: 43647 - RNA, 20 nt, Artificial Sequence
  LRRK2 RNA guide
guuaucucuuguuuuucauc

SEQ ID NO: 43648 - RNA, 20 nt, Artificial Sequence
  LRRK2 RNA guide
uaucucuuguuuuucaucuc

SEQ ID NO: 43649 - RNA, 20 nt, Artificial Sequence
  LRRK2 RNA guide
ucguuaucucuuguuuuuca

SEQ ID NO: 43650 - RNA, 20 nt, Artificial Sequence
  LRRK2 RNA guide
ucucguuaucucuuguuuuu

SEQ ID NO: 43651 - RNA, 20 nt, Artificial Sequence
  LRRK2 RNA guide
ucucucguuaucucuuguuu

SEQ ID NO: 43652 - RNA, 20 nt, Artificial Sequence
  LRRK2 RNA guide
ugaaaaacaagagauaacga

SEQ ID NO: 43653 - RNA, 21 nt, Artificial Sequence
  LRRK2 RNA guide
aaaaacaagagauaacgagag

SEQ ID NO: 43654 - RNA, 21 nt, Artificial Sequence
  LRRK2 RNA guide
aaaacaagagauaacgagaga

SEQ ID NO: 43655 - RNA, 21 nt, Artificial Sequence
  LRRK2 RNA guide
aaacaagagauaacgagagac

SEQ ID NO: 43656 - RNA, 21 nt, Artificial Sequence
  LRRK2 RNA guide
aaagucucucguuaucucuug

SEQ ID NO: 43657 - RNA, 21 nt, Artificial Sequence
  LRRK2 RNA guide
aacaagagauaacgagagacu

SEQ ID NO: 43658 - RNA, 21 nt, Artificial Sequence
  LRRK2 RNA guide
aagagauaacgagagacuuuc

SEQ ID NO: 43659 - RNA, 21 nt, Artificial Sequence
  LRRK2 RNA guide
aagggaaagucucucguuauc

SEQ ID NO: 43660 - RNA, 21 nt, Artificial Sequence
  LRRK2 RNA guide
aagucucucguuaucucuugu

SEQ ID NO: 43661 - RNA, 21 nt, Artificial Sequence
  LRRK2 RNA guide
acaagagauaacgagagacuu

SEQ ID NO: 43662 - RNA, 21 nt, Artificial Sequence
  LRRK2 RNA guide
agagauaacgagagacuuucc

SEQ ID NO: 43663 - RNA, 21 nt, Artificial Sequence
  LRRK2 RNA guide
agauaacgagagacuuucccu

SEQ ID NO: 43664 - RNA, 21 nt, Artificial Sequence
  LRRK2 RNA guide
agggaaagucucucguuaucu

SEQ ID NO: 43665 - RNA, 21 nt, Artificial Sequence
  LRRK2 RNA guide
agucucucguuaucucuuguu

SEQ ID NO: 43666 - RNA, 21 nt, Artificial Sequence
  LRRK2 RNA guide
aucucuuguuuuucaucucug

SEQ ID NO: 43667 - RNA, 21 nt, Artificial Sequence
  LRRK2 RNA guide
caagagauaacgagagacuuu

SEQ ID NO: 43668 - RNA, 21 nt, Artificial Sequence
  LRRK2 RNA guide
cagagaugaaaaacaagagau

SEQ ID NO: 43669 - RNA, 21 nt, Artificial Sequence
  LRRK2 RNA guide
cguuaucucuuguuuuucauc

SEQ ID NO: 43670 - RNA, 21 nt, Artificial Sequence
  LRRK2 RNA guide
cucguuaucucuuguuuuuca

SEQ ID NO: 43671 - RNA, 21 nt, Artificial Sequence
  LRRK2 RNA guide
cucucguuaucucuuguuuuu

SEQ ID NO: 43672 - RNA, 21 nt, Artificial Sequence
  LRRK2 RNA guide
gaaaaacaagagauaacgaga

SEQ ID NO: 43673 - RNA, 21 nt, Artificial Sequence
  LRRK2 RNA guide
gaaagucucucguuaucucuu

SEQ ID NO: 43674 - RNA, 21 nt, Artificial Sequence
  LRRK2 RNA guide
gagauaacgagagacuuuccc

SEQ ID NO: 43675 - RNA, 21 nt, Artificial Sequence
  LRRK2 RNA guide
gauaacgagagacuuucccuu

SEQ ID NO: 43676 - RNA, 21 nt, Artificial Sequence
  LRRK2 RNA guide
gaugaaaaacaagagauaacg

SEQ ID NO: 43677 - RNA, 21 nt, Artificial Sequence
  LRRK2 RNA guide
ggaaagucucucguuaucucu

SEQ ID NO: 43678 - RNA, 21 nt, Artificial Sequence
  LRRK2 RNA guide
gggaaagucucucguuaucuc

SEQ ID NO: 43679 - RNA, 21 nt, Artificial Sequence
  LRRK2 RNA guide
gucucucguuaucucuuguuu

SEQ ID NO: 43680 - RNA, 21 nt, Artificial Sequence
  LRRK2 RNA guide
uaagggaaagucucucguuau

SEQ ID NO: 43681 - RNA, 21 nt, Artificial Sequence
  LRRK2 RNA guide
ucagagaugaaaaacaagaga

SEQ ID NO: 43682 - RNA, 21 nt, Artificial Sequence
  LRRK2 RNA guide
ucucguuaucucuuguuuuuc

SEQ ID NO: 43683 - RNA, 21 nt, Artificial Sequence
  LRRK2 RNA guide
ucucucguuaucucuuguuuu

SEQ ID NO: 43684 - RNA, 21 nt, Artificial Sequence
  LRRK2 RNA guide
ugaaaaacaagagauaacgag

SEQ ID NO: 43685 - RNA, 22 nt, Artificial Sequence
  LRRK2 RNA guide
aaaaacaagagauaacgagaga

SEQ ID NO: 43686 - RNA, 22 nt, Artificial Sequence
  LRRK2 RNA guide
aaaacaagagauaacgagagac

SEQ ID NO: 43687 - RNA, 22 nt, Artificial Sequence
  LRRK2 RNA guide
aaacaagagauaacgagagacu

SEQ ID NO: 43688 - RNA, 22 nt, Artificial Sequence
  LRRK2 RNA guide
aaagucucucguuaucucuugu

SEQ ID NO: 43689 - RNA, 22 nt, Artificial Sequence
  LRRK2 RNA guide
aacaagagauaacgagagacuu

SEQ ID NO: 43690 - RNA, 22 nt, Artificial Sequence
  LRRK2 RNA guide
aagagauaacgagagacuuucc

SEQ ID NO: 43691 - RNA, 22 nt, Artificial Sequence
  LRRK2 RNA guide
aagggaaagucucucguuaucu

SEQ ID NO: 43692 - RNA, 22 nt, Artificial Sequence
  LRRK2 RNA guide
aagucucucguuaucucuuguu

SEQ ID NO: 43693 - RNA, 22 nt, Artificial Sequence
  LRRK2 RNA guide
acaagagauaacgagagacuuu

SEQ ID NO: 43694 - RNA, 22 nt, Artificial Sequence
  LRRK2 RNA guide
agagauaacgagagacuuuccc

SEQ ID NO: 43695 - RNA, 22 nt, Artificial Sequence
  LRRK2 RNA guide
agauaacgagagacuuucccuu

SEQ ID NO: 43696 - RNA, 22 nt, Artificial Sequence
  LRRK2 RNA guide
agaugaaaaacaagagauaacg

SEQ ID NO: 43697 - RNA, 22 nt, Artificial Sequence
  LRRK2 RNA guide
agggaaagucucucguuaucuc

SEQ ID NO: 43698 - RNA, 22 nt, Artificial Sequence
  LRRK2 RNA guide
agucucucguuaucucuuguuu

SEQ ID NO: 43699 - RNA, 22 nt, Artificial Sequence
  LRRK2 RNA guide
aucucuuguuuuucaucucuga

SEQ ID NO: 43700 - RNA, 22 nt, Artificial Sequence
  LRRK2 RNA guide
augaaaaacaagagauaacgag

SEQ ID NO: 43701 - RNA, 22 nt, Artificial Sequence
  LRRK2 RNA guide
caagagauaacgagagacuuuc

SEQ ID NO: 43702 - RNA, 22 nt, Artificial Sequence
  LRRK2 RNA guide
cagagaugaaaaacaagagaua

SEQ ID NO: 43703 - RNA, 22 nt, Artificial Sequence
  LRRK2 RNA guide
cguuaucucuuguuuuucaucu

SEQ ID NO: 43704 - RNA, 22 nt, Artificial Sequence
  LRRK2 RNA guide
cucagagaugaaaaacaagaga

SEQ ID NO: 43705 - RNA, 22 nt, Artificial Sequence
  LRRK2 RNA guide
cucguuaucucuuguuuuucau

SEQ ID NO: 43706 - RNA, 22 nt, Artificial Sequence
  LRRK2 RNA guide
cucucguuaucucuuguuuuuc

SEQ ID NO: 43707 - RNA, 22 nt, Artificial Sequence
  LRRK2 RNA guide
gaaaaacaagagauaacgagag

SEQ ID NO: 43708 - RNA, 22 nt, Artificial Sequence
  LRRK2 RNA guide
gaaagucucucguuaucucuug

SEQ ID NO: 43709 - RNA, 22 nt, Artificial Sequence
  LRRK2 RNA guide
gagauaacgagagacuuucccu

SEQ ID NO: 43710 - RNA, 22 nt, Artificial Sequence
  LRRK2 RNA guide
gagaugaaaaacaagagauaac

SEQ ID NO: 43711 - RNA, 22 nt, Artificial Sequence
  LRRK2 RNA guide
gauaacgagagacuuucccuua

SEQ ID NO: 43712 - RNA, 22 nt, Artificial Sequence
  LRRK2 RNA guide
gaugaaaaacaagagauaacga

SEQ ID NO: 43713 - RNA, 22 nt, Artificial Sequence
  LRRK2 RNA guide
ggaaagucucucguuaucucuu

SEQ ID NO: 43714 - RNA, 22 nt, Artificial Sequence
  LRRK2 RNA guide
gggaaagucucucguuaucucu

SEQ ID NO: 43715 - RNA, 22 nt, Artificial Sequence
  LRRK2 RNA guide
gucucucguuaucucuuguuuu

SEQ ID NO: 43716 - RNA, 22 nt, Artificial Sequence
  LRRK2 RNA guide
guuaucucuuguuuuucaucuc

SEQ ID NO: 43717 - RNA, 22 nt, Artificial Sequence
  LRRK2 RNA guide
uaagggaaagucucucguuauc

SEQ ID NO: 43718 - RNA, 22 nt, Artificial Sequence
  LRRK2 RNA guide
uaucucuuguuuuucaucucug

SEQ ID NO: 43719 - RNA, 22 nt, Artificial Sequence
  LRRK2 RNA guide
ucagagaugaaaaacaagagau

SEQ ID NO: 43720 - RNA, 22 nt, Artificial Sequence
  LRRK2 RNA guide
ucguuaucucuuguuuuucauc

SEQ ID NO: 43721 - RNA, 22 nt, Artificial Sequence
  LRRK2 RNA guide
ucucguuaucucuuguuuuuca

SEQ ID NO: 43722 - RNA, 22 nt, Artificial Sequence
  LRRK2 RNA guide
ucucucguuaucucuuguuuuu

SEQ ID NO: 43723 - RNA, 22 nt, Artificial Sequence
  LRRK2 RNA guide
ugaaaaacaagagauaacgaga

SEQ ID NO: 43724 - RNA, 22 nt, Artificial Sequence
  LRRK2 RNA guide
uuaagggaaagucucucguuau

SEQ ID NO: 43725 - RNA, 20 nt, Artificial Sequence
  LRRK2 RNA guide
aaggccugaccugugaucau

SEQ ID NO: 43726 - RNA, 20 nt, Artificial Sequence
  LRRK2 RNA guide
aaugaucacaggucaggccu

SEQ ID NO: 43727 - RNA, 20 nt, Artificial Sequence
  LRRK2 RNA guide
acagcgcuuagcccaaggcc

SEQ ID NO: 43728 - RNA, 20 nt, Artificial Sequence
  LRRK2 RNA guide
acaggucaggccuugggcua

SEQ ID NO: 43729 - RNA, 20 nt, Artificial Sequence
  LRRK2 RNA guide
agagaguaaugaucacaggu

SEQ ID NO: 43730 - RNA, 20 nt, Artificial Sequence
  LRRK2 RNA guide
agaguaaugaucacagguca

SEQ ID NO: 43731 - RNA, 20 nt, Artificial Sequence
  LRRK2 RNA guide
agcccaaggccugaccugug

SEQ ID NO: 43732 - RNA, 20 nt, Artificial Sequence
  LRRK2 RNA guide
agcgcuuagcccaaggccug

SEQ ID NO: 43733 - RNA, 20 nt, Artificial Sequence
  LRRK2 RNA guide
aggacagcgcuuagcccaag

SEQ ID NO: 43734 - RNA, 20 nt, Artificial Sequence
  LRRK2 RNA guide
aggccugaccugugaucauu

SEQ ID NO: 43735 - RNA, 20 nt, Artificial Sequence
  LRRK2 RNA guide
aggucaggccuugggcuaag

SEQ ID NO: 43736 - RNA, 20 nt, Artificial Sequence
  LRRK2 RNA guide
aguaaugaucacaggucagg

SEQ ID NO: 43737 - RNA, 20 nt, Artificial Sequence
  LRRK2 RNA guide
aucacaggucaggccuuggg

SEQ ID NO: 43738 - RNA, 20 nt, Artificial Sequence
  LRRK2 RNA guide
augaucacaggucaggccuu

SEQ ID NO: 43739 - RNA, 20 nt, Artificial Sequence
  LRRK2 RNA guide
caaggccugaccugugauca

SEQ ID NO: 43740 - RNA, 20 nt, Artificial Sequence
  LRRK2 RNA guide
cacaggucaggccuugggcu

SEQ ID NO: 43741 - RNA, 20 nt, Artificial Sequence
  LRRK2 RNA guide
cagcgcuuagcccaaggccu

SEQ ID NO: 43742 - RNA, 20 nt, Artificial Sequence
  LRRK2 RNA guide
caggucaggccuugggcuaa

SEQ ID NO: 43743 - RNA, 20 nt, Artificial Sequence
  LRRK2 RNA guide
ccaaggccugaccugugauc

SEQ ID NO: 43744 - RNA, 20 nt, Artificial Sequence
  LRRK2 RNA guide
cccaaggccugaccugugau

SEQ ID NO: 43745 - RNA, 20 nt, Artificial Sequence
  LRRK2 RNA guide
ccugaccugugaucauuacu

SEQ ID NO: 43746 - RNA, 20 nt, Artificial Sequence
  LRRK2 RNA guide
cgcuuagcccaaggccugac

SEQ ID NO: 43747 - RNA, 20 nt, Artificial Sequence
  LRRK2 RNA guide
cugaccugugaucauuacuc

SEQ ID NO: 43748 - RNA, 20 nt, Artificial Sequence
  LRRK2 RNA guide
cuuagcccaaggccugaccu

SEQ ID NO: 43749 - RNA, 20 nt, Artificial Sequence
  LRRK2 RNA guide
cuugagagaguaaugaucac

SEQ ID NO: 43750 - RNA, 20 nt, Artificial Sequence
  LRRK2 RNA guide
gacagcgcuuagcccaaggc

SEQ ID NO: 43751 - RNA, 20 nt, Artificial Sequence
  LRRK2 RNA guide
gagagaguaaugaucacagg

SEQ ID NO: 43752 - RNA, 20 nt, Artificial Sequence
  LRRK2 RNA guide
gagaguaaugaucacagguc

SEQ ID NO: 43753 - RNA, 20 nt, Artificial Sequence
  LRRK2 RNA guide
gaguaaugaucacaggucag

SEQ ID NO: 43754 - RNA, 20 nt, Artificial Sequence
  LRRK2 RNA guide
gaucacaggucaggccuugg

SEQ ID NO: 43755 - RNA, 20 nt, Artificial Sequence
  LRRK2 RNA guide
gcccaaggccugaccuguga

SEQ ID NO: 43756 - RNA, 20 nt, Artificial Sequence
  LRRK2 RNA guide
gccugaccugugaucauuac

SEQ ID NO: 43757 - RNA, 20 nt, Artificial Sequence
  LRRK2 RNA guide
gcgcuuagcccaaggccuga

SEQ ID NO: 43758 - RNA, 20 nt, Artificial Sequence
  LRRK2 RNA guide
gcuuagcccaaggccugacc

SEQ ID NO: 43759 - RNA, 20 nt, Artificial Sequence
  LRRK2 RNA guide
ggacagcgcuuagcccaagg

SEQ ID NO: 43760 - RNA, 20 nt, Artificial Sequence
  LRRK2 RNA guide
ggccugaccugugaucauua

SEQ ID NO: 43761 - RNA, 20 nt, Artificial Sequence
  LRRK2 RNA guide
ggucaggccuugggcuaagc

SEQ ID NO: 43762 - RNA, 20 nt, Artificial Sequence
  LRRK2 RNA guide
guaaugaucacaggucaggc

SEQ ID NO: 43763 - RNA, 20 nt, Artificial Sequence
  LRRK2 RNA guide
gucaggccuugggcuaagcg

SEQ ID NO: 43764 - RNA, 20 nt, Artificial Sequence
  LRRK2 RNA guide
uaaugaucacaggucaggcc

SEQ ID NO: 43765 - RNA, 20 nt, Artificial Sequence
  LRRK2 RNA guide
uagcccaaggccugaccugu

SEQ ID NO: 43766 - RNA, 20 nt, Artificial Sequence
  LRRK2 RNA guide
ucacaggucaggccuugggc

SEQ ID NO: 43767 - RNA, 20 nt, Artificial Sequence
  LRRK2 RNA guide
ucaggccuugggcuaagcgc

SEQ ID NO: 43768 - RNA, 20 nt, Artificial Sequence
  LRRK2 RNA guide
ugaccugugaucauuacucu

SEQ ID NO: 43769 - RNA, 20 nt, Artificial Sequence
  LRRK2 RNA guide
ugagagaguaaugaucacag

SEQ ID NO: 43770 - RNA, 20 nt, Artificial Sequence
  LRRK2 RNA guide
ugaucacaggucaggccuug

SEQ ID NO: 43771 - RNA, 20 nt, Artificial Sequence
  LRRK2 RNA guide
uuagcccaaggccugaccug

SEQ ID NO: 43772 - RNA, 20 nt, Artificial Sequence
  LRRK2 RNA guide
uugagagaguaaugaucaca

SEQ ID NO: 43773 - RNA, 21 nt, Artificial Sequence
  LRRK2 RNA guide
aaggccugaccugugaucauu

SEQ ID NO: 43774 - RNA, 21 nt, Artificial Sequence
  LRRK2 RNA guide
aaugaucacaggucaggccuu

SEQ ID NO: 43775 - RNA, 21 nt, Artificial Sequence
  LRRK2 RNA guide
acagcgcuuagcccaaggccu

SEQ ID NO: 43776 - RNA, 21 nt, Artificial Sequence
  LRRK2 RNA guide
acaggucaggccuugggcuaa

SEQ ID NO: 43777 - RNA, 21 nt, Artificial Sequence
  LRRK2 RNA guide
agagaguaaugaucacagguc

SEQ ID NO: 43778 - RNA, 21 nt, Artificial Sequence
  LRRK2 RNA guide
agaguaaugaucacaggucag

SEQ ID NO: 43779 - RNA, 21 nt, Artificial Sequence
  LRRK2 RNA guide
agcccaaggccugaccuguga

SEQ ID NO: 43780 - RNA, 21 nt, Artificial Sequence
  LRRK2 RNA guide
agcgcuuagcccaaggccuga

SEQ ID NO: 43781 - RNA, 21 nt, Artificial Sequence
  LRRK2 RNA guide
aggacagcgcuuagcccaagg

SEQ ID NO: 43782 - RNA, 21 nt, Artificial Sequence
  LRRK2 RNA guide
aggccugaccugugaucauua

SEQ ID NO: 43783 - RNA, 21 nt, Artificial Sequence
  LRRK2 RNA guide
aggucaggccuugggcuaagc

SEQ ID NO: 43784 - RNA, 21 nt, Artificial Sequence
  LRRK2 RNA guide
aguaaugaucacaggucaggc

SEQ ID NO: 43785 - RNA, 21 nt, Artificial Sequence
  LRRK2 RNA guide
aucacaggucaggccuugggc

SEQ ID NO: 43786 - RNA, 21 nt, Artificial Sequence
  LRRK2 RNA guide
augaucacaggucaggccuug

SEQ ID NO: 43787 - RNA, 21 nt, Artificial Sequence
  LRRK2 RNA guide
caaggccugaccugugaucau

SEQ ID NO: 43788 - RNA, 21 nt, Artificial Sequence
  LRRK2 RNA guide
cacaggucaggccuugggcua

SEQ ID NO: 43789 - RNA, 21 nt, Artificial Sequence
  LRRK2 RNA guide
cagcgcuuagcccaaggccug

SEQ ID NO: 43790 - RNA, 21 nt, Artificial Sequence
  LRRK2 RNA guide
caggucaggccuugggcuaag

SEQ ID NO: 43791 - RNA, 21 nt, Artificial Sequence
  LRRK2 RNA guide
ccaaggccugaccugugauca

SEQ ID NO: 43792 - RNA, 21 nt, Artificial Sequence
  LRRK2 RNA guide
cccaaggccugaccugugauc

SEQ ID NO: 43793 - RNA, 21 nt, Artificial Sequence
  LRRK2 RNA guide
ccugaccugugaucauuacuc

SEQ ID NO: 43794 - RNA, 21 nt, Artificial Sequence
  LRRK2 RNA guide
ccuugagagaguaaugaucac

SEQ ID NO: 43795 - RNA, 21 nt, Artificial Sequence
  LRRK2 RNA guide
cgcuuagcccaaggccugacc

SEQ ID NO: 43796 - RNA, 21 nt, Artificial Sequence
  LRRK2 RNA guide
cugaccugugaucauuacucu

SEQ ID NO: 43797 - RNA, 21 nt, Artificial Sequence
  LRRK2 RNA guide
cuuagcccaaggccugaccug

SEQ ID NO: 43798 - RNA, 21 nt, Artificial Sequence
  LRRK2 RNA guide
cuugagagaguaaugaucaca

SEQ ID NO: 43799 - RNA, 21 nt, Artificial Sequence
  LRRK2 RNA guide
gacagcgcuuagcccaaggcc

SEQ ID NO: 43800 - RNA, 21 nt, Artificial Sequence
  LRRK2 RNA guide
gagagaguaaugaucacaggu

SEQ ID NO: 43801 - RNA, 21 nt, Artificial Sequence
  LRRK2 RNA guide
gagaguaaugaucacagguca

SEQ ID NO: 43802 - RNA, 21 nt, Artificial Sequence
  LRRK2 RNA guide
gaggacagcgcuuagcccaag

SEQ ID NO: 43803 - RNA, 21 nt, Artificial Sequence
  LRRK2 RNA guide
gaguaaugaucacaggucagg

SEQ ID NO: 43804 - RNA, 21 nt, Artificial Sequence
  LRRK2 RNA guide
gaucacaggucaggccuuggg

SEQ ID NO: 43805 - RNA, 21 nt, Artificial Sequence
  LRRK2 RNA guide
gcccaaggccugaccugugau

SEQ ID NO: 43806 - RNA, 21 nt, Artificial Sequence
  LRRK2 RNA guide
gccugaccugugaucauuacu

SEQ ID NO: 43807 - RNA, 21 nt, Artificial Sequence
  LRRK2 RNA guide
gcgcuuagcccaaggccugac

SEQ ID NO: 43808 - RNA, 21 nt, Artificial Sequence
  LRRK2 RNA guide
gcuuagcccaaggccugaccu

SEQ ID NO: 43809 - RNA, 21 nt, Artificial Sequence
  LRRK2 RNA guide
ggacagcgcuuagcccaaggc

SEQ ID NO: 43810 - RNA, 21 nt, Artificial Sequence
  LRRK2 RNA guide
ggccugaccugugaucauuac

SEQ ID NO: 43811 - RNA, 21 nt, Artificial Sequence
  LRRK2 RNA guide
ggucaggccuugggcuaagcg

SEQ ID NO: 43812 - RNA, 21 nt, Artificial Sequence
  LRRK2 RNA guide
guaaugaucacaggucaggcc

SEQ ID NO: 43813 - RNA, 21 nt, Artificial Sequence
  LRRK2 RNA guide
gucaggccuugggcuaagcgc

SEQ ID NO: 43814 - RNA, 21 nt, Artificial Sequence
  LRRK2 RNA guide
uaaugaucacaggucaggccu

SEQ ID NO: 43815 - RNA, 21 nt, Artificial Sequence
  LRRK2 RNA guide
uagcccaaggccugaccugug

SEQ ID NO: 43816 - RNA, 21 nt, Artificial Sequence
  LRRK2 RNA guide
ucacaggucaggccuugggcu

SEQ ID NO: 43817 - RNA, 21 nt, Artificial Sequence
  LRRK2 RNA guide
ucaggccuugggcuaagcgcu

SEQ ID NO: 43818 - RNA, 21 nt, Artificial Sequence
  LRRK2 RNA guide
ugaccugugaucauuacucuc

SEQ ID NO: 43819 - RNA, 21 nt, Artificial Sequence
  LRRK2 RNA guide
ugagagaguaaugaucacagg

SEQ ID NO: 43820 - RNA, 21 nt, Artificial Sequence
  LRRK2 RNA guide
ugaucacaggucaggccuugg

SEQ ID NO: 43821 - RNA, 21 nt, Artificial Sequence
  LRRK2 RNA guide
uuagcccaaggccugaccugu

SEQ ID NO: 43822 - RNA, 21 nt, Artificial Sequence
  LRRK2 RNA guide
uugagagaguaaugaucacag

SEQ ID NO: 43823 - RNA, 22 nt, Artificial Sequence
  LRRK2 RNA guide
aaggccugaccugugaucauua

SEQ ID NO: 43824 - RNA, 22 nt, Artificial Sequence
  LRRK2 RNA guide
aaugaucacaggucaggccuug

SEQ ID NO: 43825 - RNA, 22 nt, Artificial Sequence
  LRRK2 RNA guide
acagcgcuuagcccaaggccug

SEQ ID NO: 43826 - RNA, 22 nt, Artificial Sequence
  LRRK2 RNA guide
acaggucaggccuugggcuaag

SEQ ID NO: 43827 - RNA, 22 nt, Artificial Sequence
  LRRK2 RNA guide
accuugagagaguaaugaucac

SEQ ID NO: 43828 - RNA, 22 nt, Artificial Sequence
  LRRK2 RNA guide
agagaguaaugaucacagguca

SEQ ID NO: 43829 - RNA, 22 nt, Artificial Sequence
  LRRK2 RNA guide
agaguaaugaucacaggucagg

SEQ ID NO: 43830 - RNA, 22 nt, Artificial Sequence
  LRRK2 RNA guide
agcccaaggccugaccugugau

SEQ ID NO: 43831 - RNA, 22 nt, Artificial Sequence
  LRRK2 RNA guide
agcgcuuagcccaaggccugac

SEQ ID NO: 43832 - RNA, 22 nt, Artificial Sequence
  LRRK2 RNA guide
aggacagcgcuuagcccaaggc

SEQ ID NO: 43833 - RNA, 22 nt, Artificial Sequence
  LRRK2 RNA guide
aggccugaccugugaucauuac

SEQ ID NO: 43834 - RNA, 22 nt, Artificial Sequence
  LRRK2 RNA guide
aggucaggccuugggcuaagcg

SEQ ID NO: 43835 - RNA, 22 nt, Artificial Sequence
  LRRK2 RNA guide
aguaaugaucacaggucaggcc

SEQ ID NO: 43836 - RNA, 22 nt, Artificial Sequence
  LRRK2 RNA guide
aucacaggucaggccuugggcu

SEQ ID NO: 43837 - RNA, 22 nt, Artificial Sequence
  LRRK2 RNA guide
augaucacaggucaggccuugg

SEQ ID NO: 43838 - RNA, 22 nt, Artificial Sequence
  LRRK2 RNA guide
caaggccugaccugugaucauu

SEQ ID NO: 43839 - RNA, 22 nt, Artificial Sequence
  LRRK2 RNA guide
cacaggucaggccuugggcuaa

SEQ ID NO: 43840 - RNA, 22 nt, Artificial Sequence
  LRRK2 RNA guide
cagcgcuuagcccaaggccuga

SEQ ID NO: 43841 - RNA, 22 nt, Artificial Sequence
  LRRK2 RNA guide
caggucaggccuugggcuaagc

SEQ ID NO: 43842 - RNA, 22 nt, Artificial Sequence
  LRRK2 RNA guide
ccaaggccugaccugugaucau

SEQ ID NO: 43843 - RNA, 22 nt, Artificial Sequence
  LRRK2 RNA guide
cccaaggccugaccugugauca

SEQ ID NO: 43844 - RNA, 22 nt, Artificial Sequence
  LRRK2 RNA guide
ccugaccugugaucauuacucu

SEQ ID NO: 43845 - RNA, 22 nt, Artificial Sequence
  LRRK2 RNA guide
ccuugagagaguaaugaucaca

SEQ ID NO: 43846 - RNA, 22 nt, Artificial Sequence
  LRRK2 RNA guide
cgcuuagcccaaggccugaccu

SEQ ID NO: 43847 - RNA, 22 nt, Artificial Sequence
  LRRK2 RNA guide
cugaccugugaucauuacucuc

SEQ ID NO: 43848 - RNA, 22 nt, Artificial Sequence
  LRRK2 RNA guide
cuuagcccaaggccugaccugu

SEQ ID NO: 43849 - RNA, 22 nt, Artificial Sequence
  LRRK2 RNA guide
cuugagagaguaaugaucacag

SEQ ID NO: 43850 - RNA, 22 nt, Artificial Sequence
  LRRK2 RNA guide
gacagcgcuuagcccaaggccu

SEQ ID NO: 43851 - RNA, 22 nt, Artificial Sequence
  LRRK2 RNA guide
gagagaguaaugaucacagguc

SEQ ID NO: 43852 - RNA, 22 nt, Artificial Sequence
  LRRK2 RNA guide
gagaguaaugaucacaggucag

SEQ ID NO: 43853 - RNA, 22 nt, Artificial Sequence
  LRRK2 RNA guide
gaggacagcgcuuagcccaagg

SEQ ID NO: 43854 - RNA, 22 nt, Artificial Sequence
  LRRK2 RNA guide
gaguaaugaucacaggucaggc

SEQ ID NO: 43855 - RNA, 22 nt, Artificial Sequence
  LRRK2 RNA guide
gaucacaggucaggccuugggc

SEQ ID NO: 43856 - RNA, 22 nt, Artificial Sequence
  LRRK2 RNA guide
gcccaaggccugaccugugauc

SEQ ID NO: 43857 - RNA, 22 nt, Artificial Sequence
  LRRK2 RNA guide
gccugaccugugaucauuacuc

SEQ ID NO: 43858 - RNA, 22 nt, Artificial Sequence
  LRRK2 RNA guide
gcgcuuagcccaaggccugacc

SEQ ID NO: 43859 - RNA, 22 nt, Artificial Sequence
  LRRK2 RNA guide
gcuuagcccaaggccugaccug

SEQ ID NO: 43860 - RNA, 22 nt, Artificial Sequence
  LRRK2 RNA guide
ggacagcgcuuagcccaaggcc

SEQ ID NO: 43861 - RNA, 22 nt, Artificial Sequence
  LRRK2 RNA guide
ggccugaccugugaucauuacu

SEQ ID NO: 43862 - RNA, 22 nt, Artificial Sequence
  LRRK2 RNA guide
ggucaggccuugggcuaagcgc

SEQ ID NO: 43863 - RNA, 22 nt, Artificial Sequence
  LRRK2 RNA guide
guaaugaucacaggucaggccu

SEQ ID NO: 43864 - RNA, 22 nt, Artificial Sequence
  LRRK2 RNA guide
gucaggccuugggcuaagcgcu

SEQ ID NO: 43865 - RNA, 22 nt, Artificial Sequence
  LRRK2 RNA guide
uaaugaucacaggucaggccuu

SEQ ID NO: 43866 - RNA, 22 nt, Artificial Sequence
  LRRK2 RNA guide
uagcccaaggccugaccuguga

SEQ ID NO: 43867 - RNA, 22 nt, Artificial Sequence
  LRRK2 RNA guide
ucacaggucaggccuugggcua

SEQ ID NO: 43868 - RNA, 22 nt, Artificial Sequence
  LRRK2 RNA guide
ucaggccuugggcuaagcgcug

SEQ ID NO: 43869 - RNA, 22 nt, Artificial Sequence
  LRRK2 RNA guide
ugaccugugaucauuacucucu

SEQ ID NO: 43870 - RNA, 22 nt, Artificial Sequence
  LRRK2 RNA guide
ugagagaguaaugaucacaggu

SEQ ID NO: 43871 - RNA, 22 nt, Artificial Sequence
  LRRK2 RNA guide
ugaggacagcgcuuagcccaag

SEQ ID NO: 43872 - RNA, 22 nt, Artificial Sequence
  LRRK2 RNA guide
ugaucacaggucaggccuuggg

SEQ ID NO: 43873 - RNA, 22 nt, Artificial Sequence
  LRRK2 RNA guide
uuagcccaaggccugaccugug

SEQ ID NO: 43874 - RNA, 22 nt, Artificial Sequence
  LRRK2 RNA guide
uugagagaguaaugaucacagg

SEQ ID NO: 43875 - RNA, 20 nt, Artificial Sequence
  LRRK2 RNA guide
aaggccugcugugaucauua

SEQ ID NO: 43876 - RNA, 20 nt, Artificial Sequence
  LRRK2 RNA guide
aaugaucacagcaggccuug

SEQ ID NO: 43877 - RNA, 20 nt, Artificial Sequence
  LRRK2 RNA guide
acagcaggccuugggcuaag

SEQ ID NO: 43878 - RNA, 20 nt, Artificial Sequence
  LRRK2 RNA guide
accuugagagaguaaugauc

SEQ ID NO: 43879 - RNA, 20 nt, Artificial Sequence
  LRRK2 RNA guide
agagaguaaugaucacagca

SEQ ID NO: 43880 - RNA, 20 nt, Artificial Sequence
  LRRK2 RNA guide
agaguaaugaucacagcagg

SEQ ID NO: 43881 - RNA, 20 nt, Artificial Sequence
  LRRK2 RNA guide
agcaggccuugggcuaagcg

SEQ ID NO: 43882 - RNA, 20 nt, Artificial Sequence
  LRRK2 RNA guide
agcccaaggccugcugugau

SEQ ID NO: 43883 - RNA, 20 nt, Artificial Sequence
  LRRK2 RNA guide
aggccugcugugaucauuac

SEQ ID NO: 43884 - RNA, 20 nt, Artificial Sequence
  LRRK2 RNA guide
aguaaugaucacagcaggcc

SEQ ID NO: 43885 - RNA, 20 nt, Artificial Sequence
  LRRK2 RNA guide
aucacagcaggccuugggcu

SEQ ID NO: 43886 - RNA, 20 nt, Artificial Sequence
  LRRK2 RNA guide
augaucacagcaggccuugg

SEQ ID NO: 43887 - RNA, 20 nt, Artificial Sequence
  LRRK2 RNA guide
caaggccugcugugaucauu

SEQ ID NO: 43888 - RNA, 20 nt, Artificial Sequence
  LRRK2 RNA guide
cacagcaggccuugggcuaa

SEQ ID NO: 43889 - RNA, 20 nt, Artificial Sequence
  LRRK2 RNA guide
cagcaggccuugggcuaagc

SEQ ID NO: 43890 - RNA, 20 nt, Artificial Sequence
  LRRK2 RNA guide
ccaaggccugcugugaucau

SEQ ID NO: 43891 - RNA, 20 nt, Artificial Sequence
  LRRK2 RNA guide
cccaaggccugcugugauca

SEQ ID NO: 43892 - RNA, 20 nt, Artificial Sequence
  LRRK2 RNA guide
ccugcugugaucauuacucu

SEQ ID NO: 43893 - RNA, 20 nt, Artificial Sequence
  LRRK2 RNA guide
ccuugagagaguaaugauca

SEQ ID NO: 43894 - RNA, 20 nt, Artificial Sequence
  LRRK2 RNA guide
cgcuuagcccaaggccugcu

SEQ ID NO: 43895 - RNA, 20 nt, Artificial Sequence
  LRRK2 RNA guide
cugcugugaucauuacucuc

SEQ ID NO: 43896 - RNA, 20 nt, Artificial Sequence
  LRRK2 RNA guide
cuuagcccaaggccugcugu

SEQ ID NO: 43897 - RNA, 20 nt, Artificial Sequence
  LRRK2 RNA guide
gagagaguaaugaucacagc

SEQ ID NO: 43898 - RNA, 20 nt, Artificial Sequence
  LRRK2 RNA guide
gagaguaaugaucacagcag

SEQ ID NO: 43899 - RNA, 20 nt, Artificial Sequence
  LRRK2 RNA guide
gaguaaugaucacagcaggc

SEQ ID NO: 43900 - RNA, 20 nt, Artificial Sequence
  LRRK2 RNA guide
gaucacagcaggccuugggc

SEQ ID NO: 43901 - RNA, 20 nt, Artificial Sequence
  LRRK2 RNA guide
gcaggccuugggcuaagcgc

SEQ ID NO: 43902 - RNA, 20 nt, Artificial Sequence
  LRRK2 RNA guide
gcccaaggccugcugugauc

SEQ ID NO: 43903 - RNA, 20 nt, Artificial Sequence
  LRRK2 RNA guide
gccugcugugaucauuacuc

SEQ ID NO: 43904 - RNA, 20 nt, Artificial Sequence
  LRRK2 RNA guide
gcgcuuagcccaaggccugc

SEQ ID NO: 43905 - RNA, 20 nt, Artificial Sequence
  LRRK2 RNA guide
gcuuagcccaaggccugcug

SEQ ID NO: 43906 - RNA, 20 nt, Artificial Sequence
  LRRK2 RNA guide
ggccugcugugaucauuacu

SEQ ID NO: 43907 - RNA, 20 nt, Artificial Sequence
  LRRK2 RNA guide
guaaugaucacagcaggccu

SEQ ID NO: 43908 - RNA, 20 nt, Artificial Sequence
  LRRK2 RNA guide
uaaugaucacagcaggccuu

SEQ ID NO: 43909 - RNA, 20 nt, Artificial Sequence
  LRRK2 RNA guide
uagcccaaggccugcuguga

SEQ ID NO: 43910 - RNA, 20 nt, Artificial Sequence
  LRRK2 RNA guide
ucacagcaggccuugggcua

SEQ ID NO: 43911 - RNA, 20 nt, Artificial Sequence
  LRRK2 RNA guide
ugaucacagcaggccuuggg

SEQ ID NO: 43912 - RNA, 20 nt, Artificial Sequence
  LRRK2 RNA guide
ugcugugaucauuacucucu

SEQ ID NO: 43913 - RNA, 20 nt, Artificial Sequence
  LRRK2 RNA guide
uuagcccaaggccugcugug

SEQ ID NO: 43914 - RNA, 21 nt, Artificial Sequence
  LRRK2 RNA guide
aaccuugagagaguaaugauc

SEQ ID NO: 43915 - RNA, 21 nt, Artificial Sequence
  LRRK2 RNA guide
aaggccugcugugaucauuac

SEQ ID NO: 43916 - RNA, 21 nt, Artificial Sequence
  LRRK2 RNA guide
aaugaucacagcaggccuugg

SEQ ID NO: 43917 - RNA, 21 nt, Artificial Sequence
  LRRK2 RNA guide
acagcaggccuugggcuaagc

SEQ ID NO: 43918 - RNA, 21 nt, Artificial Sequence
  LRRK2 RNA guide
accuugagagaguaaugauca

SEQ ID NO: 43919 - RNA, 21 nt, Artificial Sequence
  LRRK2 RNA guide
agagaguaaugaucacagcag

SEQ ID NO: 43920 - RNA, 21 nt, Artificial Sequence
  LRRK2 RNA guide
agaguaaugaucacagcaggc

SEQ ID NO: 43921 - RNA, 21 nt, Artificial Sequence
  LRRK2 RNA guide
agcaggccuugggcuaagcgc

SEQ ID NO: 43922 - RNA, 21 nt, Artificial Sequence
  LRRK2 RNA guide
agcccaaggccugcugugauc

SEQ ID NO: 43923 - RNA, 21 nt, Artificial Sequence
  LRRK2 RNA guide
agcgcuuagcccaaggccugc

SEQ ID NO: 43924 - RNA, 21 nt, Artificial Sequence
  LRRK2 RNA guide
aggccugcugugaucauuacu

SEQ ID NO: 43925 - RNA, 21 nt, Artificial Sequence
  LRRK2 RNA guide
aguaaugaucacagcaggccu

SEQ ID NO: 43926 - RNA, 21 nt, Artificial Sequence
  LRRK2 RNA guide
aucacagcaggccuugggcua

SEQ ID NO: 43927 - RNA, 21 nt, Artificial Sequence
  LRRK2 RNA guide
augaucacagcaggccuuggg

SEQ ID NO: 43928 - RNA, 21 nt, Artificial Sequence
  LRRK2 RNA guide
caaggccugcugugaucauua

SEQ ID NO: 43929 - RNA, 21 nt, Artificial Sequence
  LRRK2 RNA guide
cacagcaggccuugggcuaag

SEQ ID NO: 43930 - RNA, 21 nt, Artificial Sequence
  LRRK2 RNA guide
cagcaggccuugggcuaagcg

SEQ ID NO: 43931 - RNA, 21 nt, Artificial Sequence
  LRRK2 RNA guide
ccaaggccugcugugaucauu

SEQ ID NO: 43932 - RNA, 21 nt, Artificial Sequence
  LRRK2 RNA guide
cccaaggccugcugugaucau

SEQ ID NO: 43933 - RNA, 21 nt, Artificial Sequence
  LRRK2 RNA guide
ccugcugugaucauuacucuc

SEQ ID NO: 43934 - RNA, 21 nt, Artificial Sequence
  LRRK2 RNA guide
cgcuuagcccaaggccugcug

SEQ ID NO: 43935 - RNA, 21 nt, Artificial Sequence
  LRRK2 RNA guide
cugcugugaucauuacucucu

SEQ ID NO: 43936 - RNA, 21 nt, Artificial Sequence
  LRRK2 RNA guide
cuuagcccaaggccugcugug

SEQ ID NO: 43937 - RNA, 21 nt, Artificial Sequence
  LRRK2 RNA guide
gagagaguaaugaucacagca

SEQ ID NO: 43938 - RNA, 21 nt, Artificial Sequence
  LRRK2 RNA guide
gagaguaaugaucacagcagg

SEQ ID NO: 43939 - RNA, 21 nt, Artificial Sequence
  LRRK2 RNA guide
gaguaaugaucacagcaggcc

SEQ ID NO: 43940 - RNA, 21 nt, Artificial Sequence
  LRRK2 RNA guide
gaucacagcaggccuugggcu

SEQ ID NO: 43941 - RNA, 21 nt, Artificial Sequence
  LRRK2 RNA guide
gcaggccuugggcuaagcgcu

SEQ ID NO: 43942 - RNA, 21 nt, Artificial Sequence
  LRRK2 RNA guide
gcccaaggccugcugugauca

SEQ ID NO: 43943 - RNA, 21 nt, Artificial Sequence
  LRRK2 RNA guide
gccugcugugaucauuacucu

SEQ ID NO: 43944 - RNA, 21 nt, Artificial Sequence
  LRRK2 RNA guide
gcgcuuagcccaaggccugcu

SEQ ID NO: 43945 - RNA, 21 nt, Artificial Sequence
  LRRK2 RNA guide
gcuuagcccaaggccugcugu

SEQ ID NO: 43946 - RNA, 21 nt, Artificial Sequence
  LRRK2 RNA guide
ggccugcugugaucauuacuc

SEQ ID NO: 43947 - RNA, 21 nt, Artificial Sequence
  LRRK2 RNA guide
guaaugaucacagcaggccuu

SEQ ID NO: 43948 - RNA, 21 nt, Artificial Sequence
  LRRK2 RNA guide
uaaugaucacagcaggccuug

SEQ ID NO: 43949 - RNA, 21 nt, Artificial Sequence
  LRRK2 RNA guide
uagcccaaggccugcugugau

SEQ ID NO: 43950 - RNA, 21 nt, Artificial Sequence
  LRRK2 RNA guide
ucacagcaggccuugggcuaa

SEQ ID NO: 43951 - RNA, 21 nt, Artificial Sequence
  LRRK2 RNA guide
ugagagaguaaugaucacagc

SEQ ID NO: 43952 - RNA, 21 nt, Artificial Sequence
  LRRK2 RNA guide
ugaucacagcaggccuugggc

SEQ ID NO: 43953 - RNA, 21 nt, Artificial Sequence
  LRRK2 RNA guide
ugcugugaucauuacucucuc

SEQ ID NO: 43954 - RNA, 21 nt, Artificial Sequence
  LRRK2 RNA guide
uuagcccaaggccugcuguga

SEQ ID NO: 43955 - RNA, 22 nt, Artificial Sequence
  LRRK2 RNA guide
aaaccuugagagaguaaugauc

SEQ ID NO: 43956 - RNA, 22 nt, Artificial Sequence
  LRRK2 RNA guide
aaccuugagagaguaaugauca

SEQ ID NO: 43957 - RNA, 22 nt, Artificial Sequence
  LRRK2 RNA guide
aaggccugcugugaucauuacu

SEQ ID NO: 43958 - RNA, 22 nt, Artificial Sequence
  LRRK2 RNA guide
aaugaucacagcaggccuuggg

SEQ ID NO: 43959 - RNA, 22 nt, Artificial Sequence
  LRRK2 RNA guide
acagcaggccuugggcuaagcg

SEQ ID NO: 43960 - RNA, 22 nt, Artificial Sequence
  LRRK2 RNA guide
agagaguaaugaucacagcagg

SEQ ID NO: 43961 - RNA, 22 nt, Artificial Sequence
  LRRK2 RNA guide
agaguaaugaucacagcaggcc

SEQ ID NO: 43962 - RNA, 22 nt, Artificial Sequence
  LRRK2 RNA guide
agcaggccuugggcuaagcgcu

SEQ ID NO: 43963 - RNA, 22 nt, Artificial Sequence
  LRRK2 RNA guide
agcccaaggccugcugugauca

SEQ ID NO: 43964 - RNA, 22 nt, Artificial Sequence
  LRRK2 RNA guide
agcgcuuagcccaaggccugcu

SEQ ID NO: 43965 - RNA, 22 nt, Artificial Sequence
  LRRK2 RNA guide
aggccugcugugaucauuacuc

SEQ ID NO: 43966 - RNA, 22 nt, Artificial Sequence
  LRRK2 RNA guide
aguaaugaucacagcaggccuu

SEQ ID NO: 43967 - RNA, 22 nt, Artificial Sequence
  LRRK2 RNA guide
aucacagcaggccuugggcuaa

SEQ ID NO: 43968 - RNA, 22 nt, Artificial Sequence
  LRRK2 RNA guide
augaucacagcaggccuugggc

SEQ ID NO: 43969 - RNA, 22 nt, Artificial Sequence
  LRRK2 RNA guide
caaggccugcugugaucauuac

SEQ ID NO: 43970 - RNA, 22 nt, Artificial Sequence
  LRRK2 RNA guide
cacagcaggccuugggcuaagc

SEQ ID NO: 43971 - RNA, 22 nt, Artificial Sequence
  LRRK2 RNA guide
cagcaggccuugggcuaagcgc

SEQ ID NO: 43972 - RNA, 22 nt, Artificial Sequence
  LRRK2 RNA guide
cagcgcuuagcccaaggccugc

SEQ ID NO: 43973 - RNA, 22 nt, Artificial Sequence
  LRRK2 RNA guide
ccaaggccugcugugaucauua

SEQ ID NO: 43974 - RNA, 22 nt, Artificial Sequence
  LRRK2 RNA guide
cccaaggccugcugugaucauu

SEQ ID NO: 43975 - RNA, 22 nt, Artificial Sequence
  LRRK2 RNA guide
ccugcugugaucauuacucucu

SEQ ID NO: 43976 - RNA, 22 nt, Artificial Sequence
  LRRK2 RNA guide
cgcuuagcccaaggccugcugu

SEQ ID NO: 43977 - RNA, 22 nt, Artificial Sequence
  LRRK2 RNA guide
cugcugugaucauuacucucuc

SEQ ID NO: 43978 - RNA, 22 nt, Artificial Sequence
  LRRK2 RNA guide
cuuagcccaaggccugcuguga

SEQ ID NO: 43979 - RNA, 22 nt, Artificial Sequence
  LRRK2 RNA guide
gagagaguaaugaucacagcag

SEQ ID NO: 43980 - RNA, 22 nt, Artificial Sequence
  LRRK2 RNA guide
gagaguaaugaucacagcaggc

SEQ ID NO: 43981 - RNA, 22 nt, Artificial Sequence
  LRRK2 RNA guide
gaguaaugaucacagcaggccu

SEQ ID NO: 43982 - RNA, 22 nt, Artificial Sequence
  LRRK2 RNA guide
gaucacagcaggccuugggcua

SEQ ID NO: 43983 - RNA, 22 nt, Artificial Sequence
  LRRK2 RNA guide
gcaggccuugggcuaagcgcug

SEQ ID NO: 43984 - RNA, 22 nt, Artificial Sequence
  LRRK2 RNA guide
gcccaaggccugcugugaucau

SEQ ID NO: 43985 - RNA, 22 nt, Artificial Sequence
  LRRK2 RNA guide
gccugcugugaucauuacucuc

SEQ ID NO: 43986 - RNA, 22 nt, Artificial Sequence
  LRRK2 RNA guide
gcgcuuagcccaaggccugcug

SEQ ID NO: 43987 - RNA, 22 nt, Artificial Sequence
  LRRK2 RNA guide
gcuuagcccaaggccugcugug

SEQ ID NO: 43988 - RNA, 22 nt, Artificial Sequence
  LRRK2 RNA guide
ggccugcugugaucauuacucu

SEQ ID NO: 43989 - RNA, 22 nt, Artificial Sequence
  LRRK2 RNA guide
guaaugaucacagcaggccuug

SEQ ID NO: 43990 - RNA, 22 nt, Artificial Sequence
  LRRK2 RNA guide
uaaugaucacagcaggccuugg

SEQ ID NO: 43991 - RNA, 22 nt, Artificial Sequence
  LRRK2 RNA guide
uagcccaaggccugcugugauc

SEQ ID NO: 43992 - RNA, 22 nt, Artificial Sequence
  LRRK2 RNA guide
ucacagcaggccuugggcuaag

SEQ ID NO: 43993 - RNA, 22 nt, Artificial Sequence
  LRRK2 RNA guide
ugagagaguaaugaucacagca

SEQ ID NO: 43994 - RNA, 22 nt, Artificial Sequence
  LRRK2 RNA guide
ugaucacagcaggccuugggcu

SEQ ID NO: 43995 - RNA, 22 nt, Artificial Sequence
  LRRK2 RNA guide
ugcugugaucauuacucucuca

SEQ ID NO: 43996 - RNA, 22 nt, Artificial Sequence
  LRRK2 RNA guide
uuagcccaaggccugcugugau

SEQ ID NO: 43997 - RNA, 22 nt, Artificial Sequence
  LRRK2 RNA guide
uugagagaguaaugaucacagc

SEQ ID NO: 43998 - RNA, 20 nt, Artificial Sequence
  LRRK2 RNA guide
aacaacccuacauuauuaga

SEQ ID NO: 43999 - RNA, 20 nt, Artificial Sequence
  LRRK2 RNA guide
aauguaggguuguuauaagc

SEQ ID NO: 44000 - RNA, 20 nt, Artificial Sequence
  LRRK2 RNA guide
acaacccuacauuauuagaa

SEQ ID NO: 44001 - RNA, 20 nt, Artificial Sequence
  LRRK2 RNA guide
acaauucuaauaauguaggg

SEQ ID NO: 44002 - RNA, 20 nt, Artificial Sequence
  LRRK2 RNA guide
acccuacauuauuagaauug

SEQ ID NO: 44003 - RNA, 20 nt, Artificial Sequence
  LRRK2 RNA guide
aggguuguuauaagcaugaa

SEQ ID NO: 44004 - RNA, 20 nt, Artificial Sequence
  LRRK2 RNA guide
augcuuauaacaacccuaca

SEQ ID NO: 44005 - RNA, 20 nt, Artificial Sequence
  LRRK2 RNA guide
auguaggguuguuauaagca

SEQ ID NO: 44006 - RNA, 20 nt, Artificial Sequence
  LRRK2 RNA guide
auucuaauaauguaggguug

SEQ ID NO: 44007 - RNA, 20 nt, Artificial Sequence
  LRRK2 RNA guide
auuucaugcuuauaacaacc

SEQ ID NO: 44008 - RNA, 20 nt, Artificial Sequence
  LRRK2 RNA guide
caacccuacauuauuagaau

SEQ ID NO: 44009 - RNA, 20 nt, Artificial Sequence
  LRRK2 RNA guide
caauucuaauaauguagggu

SEQ ID NO: 44010 - RNA, 20 nt, Artificial Sequence
  LRRK2 RNA guide
caugcuuauaacaacccuac

SEQ ID NO: 44011 - RNA, 20 nt, Artificial Sequence
  LRRK2 RNA guide
cauuucaugcuuauaacaac

SEQ ID NO: 44012 - RNA, 20 nt, Artificial Sequence
  LRRK2 RNA guide
cccuacauuauuagaauugu

SEQ ID NO: 44013 - RNA, 20 nt, Artificial Sequence
  LRRK2 RNA guide
cuaauaauguaggguuguua

SEQ ID NO: 44014 - RNA, 20 nt, Artificial Sequence
  LRRK2 RNA guide
cucauuucaugcuuauaaca

SEQ ID NO: 44015 - RNA, 20 nt, Artificial Sequence
  LRRK2 RNA guide
cuuauaacaacccuacauua

SEQ ID NO: 44016 - RNA, 20 nt, Artificial Sequence
  LRRK2 RNA guide
gcuuauaacaacccuacauu

SEQ ID NO: 44017 - RNA, 20 nt, Artificial Sequence
  LRRK2 RNA guide
guaggguuguuauaagcaug

SEQ ID NO: 44018 - RNA, 20 nt, Artificial Sequence
  LRRK2 RNA guide
uaacaacccuacauuauuag

SEQ ID NO: 44019 - RNA, 20 nt, Artificial Sequence
  LRRK2 RNA guide
uaauguaggguuguuauaag

SEQ ID NO: 44020 - RNA, 20 nt, Artificial Sequence
  LRRK2 RNA guide
uaggguuguuauaagcauga

SEQ ID NO: 44021 - RNA, 20 nt, Artificial Sequence
  LRRK2 RNA guide
ucaugcuuauaacaacccua

SEQ ID NO: 44022 - RNA, 20 nt, Artificial Sequence
  LRRK2 RNA guide
ucuaauaauguaggguuguu

SEQ ID NO: 44023 - RNA, 20 nt, Artificial Sequence
  LRRK2 RNA guide
ucucauuucaugcuuauaac

SEQ ID NO: 44024 - RNA, 20 nt, Artificial Sequence
  LRRK2 RNA guide
ugcuuauaacaacccuacau

SEQ ID NO: 44025 - RNA, 20 nt, Artificial Sequence
  LRRK2 RNA guide
uguaggguuguuauaagcau

SEQ ID NO: 44026 - RNA, 20 nt, Artificial Sequence
  LRRK2 RNA guide
uucaugcuuauaacaacccu

SEQ ID NO: 44027 - RNA, 20 nt, Artificial Sequence
  LRRK2 RNA guide
uucuaauaauguaggguugu

SEQ ID NO: 44028 - RNA, 20 nt, Artificial Sequence
  LRRK2 RNA guide
uuucaugcuuauaacaaccc

SEQ ID NO: 44029 - RNA, 21 nt, Artificial Sequence
  LRRK2 RNA guide
aauguaggguuguuauaagca

SEQ ID NO: 44030 - RNA, 21 nt, Artificial Sequence
  LRRK2 RNA guide
aggguuguuauaagcaugaaa

SEQ ID NO: 44031 - RNA, 21 nt, Artificial Sequence
  LRRK2 RNA guide
augcuuauaacaacccuacau

SEQ ID NO: 44032 - RNA, 21 nt, Artificial Sequence
  LRRK2 RNA guide
auguaggguuguuauaagcau

SEQ ID NO: 44033 - RNA, 21 nt, Artificial Sequence
  LRRK2 RNA guide
auuucaugcuuauaacaaccc

SEQ ID NO: 44034 - RNA, 21 nt, Artificial Sequence
  LRRK2 RNA guide
caugcuuauaacaacccuaca

SEQ ID NO: 44035 - RNA, 21 nt, Artificial Sequence
  LRRK2 RNA guide
cauuucaugcuuauaacaacc

SEQ ID NO: 44036 - RNA, 21 nt, Artificial Sequence
  LRRK2 RNA guide
gcuuauaacaacccuacauua

SEQ ID NO: 44037 - RNA, 21 nt, Artificial Sequence
  LRRK2 RNA guide
guaggguuguuauaagcauga

SEQ ID NO: 44038 - RNA, 21 nt, Artificial Sequence
  LRRK2 RNA guide
uaauguaggguuguuauaagc

SEQ ID NO: 44039 - RNA, 21 nt, Artificial Sequence
  LRRK2 RNA guide
uaggguuguuauaagcaugaa

SEQ ID NO: 44040 - RNA, 21 nt, Artificial Sequence
  LRRK2 RNA guide
ucaugcuuauaacaacccuac

SEQ ID NO: 44041 - RNA, 21 nt, Artificial Sequence
  LRRK2 RNA guide
ugcuuauaacaacccuacauu

SEQ ID NO: 44042 - RNA, 21 nt, Artificial Sequence
  LRRK2 RNA guide
uguaggguuguuauaagcaug

SEQ ID NO: 44043 - RNA, 21 nt, Artificial Sequence
  LRRK2 RNA guide
uucaugcuuauaacaacccua

SEQ ID NO: 44044 - RNA, 21 nt, Artificial Sequence
  LRRK2 RNA guide
uuucaugcuuauaacaacccu

SEQ ID NO: 44045 - RNA, 22 nt, Artificial Sequence
  LRRK2 RNA guide
aauguaggguuguuauaagcau

SEQ ID NO: 44046 - RNA, 22 nt, Artificial Sequence
  LRRK2 RNA guide
aggguuguuauaagcaugaaau

SEQ ID NO: 44047 - RNA, 22 nt, Artificial Sequence
  LRRK2 RNA guide
auaauguaggguuguuauaagc

SEQ ID NO: 44048 - RNA, 22 nt, Artificial Sequence
  LRRK2 RNA guide
augcuuauaacaacccuacauu

SEQ ID NO: 44049 - RNA, 22 nt, Artificial Sequence
  LRRK2 RNA guide
auguaggguuguuauaagcaug

SEQ ID NO: 44050 - RNA, 22 nt, Artificial Sequence
  LRRK2 RNA guide
auuucaugcuuauaacaacccu

SEQ ID NO: 44051 - RNA, 22 nt, Artificial Sequence
  LRRK2 RNA guide
caacccuacauuauuagaauug

SEQ ID NO: 44052 - RNA, 22 nt, Artificial Sequence
  LRRK2 RNA guide
caauucuaauaauguaggguug

SEQ ID NO: 44053 - RNA, 22 nt, Artificial Sequence
  LRRK2 RNA guide
caugcuuauaacaacccuacau

SEQ ID NO: 44054 - RNA, 22 nt, Artificial Sequence
  LRRK2 RNA guide
cauuucaugcuuauaacaaccc

SEQ ID NO: 44055 - RNA, 22 nt, Artificial Sequence
  LRRK2 RNA guide
cucauuucaugcuuauaacaac

SEQ ID NO: 44056 - RNA, 22 nt, Artificial Sequence
  LRRK2 RNA guide
gcuuauaacaacccuacauuau

SEQ ID NO: 44057 - RNA, 22 nt, Artificial Sequence
  LRRK2 RNA guide
guaggguuguuauaagcaugaa

SEQ ID NO: 44058 - RNA, 22 nt, Artificial Sequence
  LRRK2 RNA guide
uaauguaggguuguuauaagca

SEQ ID NO: 44059 - RNA, 22 nt, Artificial Sequence
  LRRK2 RNA guide
uaggguuguuauaagcaugaaa

SEQ ID NO: 44060 - RNA, 22 nt, Artificial Sequence
  LRRK2 RNA guide
ucaugcuuauaacaacccuaca

SEQ ID NO: 44061 - RNA, 22 nt, Artificial Sequence
  LRRK2 RNA guide
ucauuucaugcuuauaacaacc

SEQ ID NO: 44062 - RNA, 22 nt, Artificial Sequence
  LRRK2 RNA guide
ugcuuauaacaacccuacauua

SEQ ID NO: 44063 - RNA, 22 nt, Artificial Sequence
  LRRK2 RNA guide
uguaggguuguuauaagcauga

SEQ ID NO: 44064 - RNA, 22 nt, Artificial Sequence
  LRRK2 RNA guide
uucaugcuuauaacaacccuac

SEQ ID NO: 44065 - RNA, 22 nt, Artificial Sequence
  LRRK2 RNA guide
uuucaugcuuauaacaacccua

SEQ ID NO: 44066 - RNA, 20 nt, Artificial Sequence
  LRRK2 RNA guide
aacaaccguacauuauuaga

SEQ ID NO: 44067 - RNA, 20 nt, Artificial Sequence
  LRRK2 RNA guide
aauguacgguuguuauaagc

SEQ ID NO: 44068 - RNA, 20 nt, Artificial Sequence
  LRRK2 RNA guide
acaaccguacauuauuagaa

SEQ ID NO: 44069 - RNA, 20 nt, Artificial Sequence
  LRRK2 RNA guide
acaauucuaauaauguacgg

SEQ ID NO: 44070 - RNA, 20 nt, Artificial Sequence
  LRRK2 RNA guide
accguacauuauuagaauug

SEQ ID NO: 44071 - RNA, 20 nt, Artificial Sequence
  LRRK2 RNA guide
acgguuguuauaagcaugaa

SEQ ID NO: 44072 - RNA, 20 nt, Artificial Sequence
  LRRK2 RNA guide
augcuuauaacaaccguaca

SEQ ID NO: 44073 - RNA, 20 nt, Artificial Sequence
  LRRK2 RNA guide
auguacgguuguuauaagca

SEQ ID NO: 44074 - RNA, 20 nt, Artificial Sequence
  LRRK2 RNA guide
auucuaauaauguacgguug

SEQ ID NO: 44075 - RNA, 20 nt, Artificial Sequence
  LRRK2 RNA guide
caaccguacauuauuagaau

SEQ ID NO: 44076 - RNA, 20 nt, Artificial Sequence
  LRRK2 RNA guide
caauucuaauaauguacggu

SEQ ID NO: 44077 - RNA, 20 nt, Artificial Sequence
  LRRK2 RNA guide
caugcuuauaacaaccguac

SEQ ID NO: 44078 - RNA, 20 nt, Artificial Sequence
  LRRK2 RNA guide
ccguacauuauuagaauugu

SEQ ID NO: 44079 - RNA, 20 nt, Artificial Sequence
  LRRK2 RNA guide
cuaauaauguacgguuguua

SEQ ID NO: 44080 - RNA, 20 nt, Artificial Sequence
  LRRK2 RNA guide
cuuauaacaaccguacauua

SEQ ID NO: 44081 - RNA, 20 nt, Artificial Sequence
  LRRK2 RNA guide
gcuuauaacaaccguacauu

SEQ ID NO: 44082 - RNA, 20 nt, Artificial Sequence
  LRRK2 RNA guide
guacgguuguuauaagcaug

SEQ ID NO: 44083 - RNA, 20 nt, Artificial Sequence
  LRRK2 RNA guide
uaacaaccguacauuauuag

SEQ ID NO: 44084 - RNA, 20 nt, Artificial Sequence
  LRRK2 RNA guide
uaauguacgguuguuauaag

SEQ ID NO: 44085 - RNA, 20 nt, Artificial Sequence
  LRRK2 RNA guide
uacgguuguuauaagcauga

SEQ ID NO: 44086 - RNA, 20 nt, Artificial Sequence
  LRRK2 RNA guide
ucaugcuuauaacaaccgua

SEQ ID NO: 44087 - RNA, 20 nt, Artificial Sequence
  LRRK2 RNA guide
ucuaauaauguacgguuguu

SEQ ID NO: 44088 - RNA, 20 nt, Artificial Sequence
  LRRK2 RNA guide
ugcuuauaacaaccguacau

SEQ ID NO: 44089 - RNA, 20 nt, Artificial Sequence
  LRRK2 RNA guide
uguacgguuguuauaagcau

SEQ ID NO: 44090 - RNA, 20 nt, Artificial Sequence
  LRRK2 RNA guide
uucaugcuuauaacaaccgu

SEQ ID NO: 44091 - RNA, 20 nt, Artificial Sequence
  LRRK2 RNA guide
uucuaauaauguacgguugu

SEQ ID NO: 44092 - RNA, 20 nt, Artificial Sequence
  LRRK2 RNA guide
uuucaugcuuauaacaaccg

SEQ ID NO: 44093 - RNA, 21 nt, Artificial Sequence
  LRRK2 RNA guide
aauguacgguuguuauaagca

SEQ ID NO: 44094 - RNA, 21 nt, Artificial Sequence
  LRRK2 RNA guide
acgguuguuauaagcaugaaa

SEQ ID NO: 44095 - RNA, 21 nt, Artificial Sequence
  LRRK2 RNA guide
augcuuauaacaaccguacau

SEQ ID NO: 44096 - RNA, 21 nt, Artificial Sequence
  LRRK2 RNA guide
auguacgguuguuauaagcau

SEQ ID NO: 44097 - RNA, 21 nt, Artificial Sequence
  LRRK2 RNA guide
auuucaugcuuauaacaaccg

SEQ ID NO: 44098 - RNA, 21 nt, Artificial Sequence
  LRRK2 RNA guide
caugcuuauaacaaccguaca

SEQ ID NO: 44099 - RNA, 21 nt, Artificial Sequence
  LRRK2 RNA guide
gcuuauaacaaccguacauua

SEQ ID NO: 44100 - RNA, 21 nt, Artificial Sequence
  LRRK2 RNA guide
guacgguuguuauaagcauga

SEQ ID NO: 44101 - RNA, 21 nt, Artificial Sequence
  LRRK2 RNA guide
uaauguacgguuguuauaagc

SEQ ID NO: 44102 - RNA, 21 nt, Artificial Sequence
  LRRK2 RNA guide
uacgguuguuauaagcaugaa

SEQ ID NO: 44103 - RNA, 21 nt, Artificial Sequence
  LRRK2 RNA guide
ucaugcuuauaacaaccguac

SEQ ID NO: 44104 - RNA, 21 nt, Artificial Sequence
  LRRK2 RNA guide
ugcuuauaacaaccguacauu

SEQ ID NO: 44105 - RNA, 21 nt, Artificial Sequence
  LRRK2 RNA guide
uguacgguuguuauaagcaug

SEQ ID NO: 44106 - RNA, 21 nt, Artificial Sequence
  LRRK2 RNA guide
uucaugcuuauaacaaccgua

SEQ ID NO: 44107 - RNA, 21 nt, Artificial Sequence
  LRRK2 RNA guide
uuucaugcuuauaacaaccgu

SEQ ID NO: 44108 - RNA, 22 nt, Artificial Sequence
  LRRK2 RNA guide
aauguacgguuguuauaagcau

SEQ ID NO: 44109 - RNA, 22 nt, Artificial Sequence
  LRRK2 RNA guide
acgguuguuauaagcaugaaau

SEQ ID NO: 44110 - RNA, 22 nt, Artificial Sequence
  LRRK2 RNA guide
auaauguacgguuguuauaagc

SEQ ID NO: 44111 - RNA, 22 nt, Artificial Sequence
  LRRK2 RNA guide
augcuuauaacaaccguacauu

SEQ ID NO: 44112 - RNA, 22 nt, Artificial Sequence
  LRRK2 RNA guide
auguacgguuguuauaagcaug

SEQ ID NO: 44113 - RNA, 22 nt, Artificial Sequence
  LRRK2 RNA guide
auuucaugcuuauaacaaccgu

SEQ ID NO: 44114 - RNA, 22 nt, Artificial Sequence
  LRRK2 RNA guide
caaccguacauuauuagaauug

SEQ ID NO: 44115 - RNA, 22 nt, Artificial Sequence
  LRRK2 RNA guide
caauucuaauaauguacgguug

SEQ ID NO: 44116 - RNA, 22 nt, Artificial Sequence
  LRRK2 RNA guide
caugcuuauaacaaccguacau

SEQ ID NO: 44117 - RNA, 22 nt, Artificial Sequence
  LRRK2 RNA guide
cauuucaugcuuauaacaaccg

SEQ ID NO: 44118 - RNA, 22 nt, Artificial Sequence
  LRRK2 RNA guide
gcuuauaacaaccguacauuau

SEQ ID NO: 44119 - RNA, 22 nt, Artificial Sequence
  LRRK2 RNA guide
guacgguuguuauaagcaugaa

SEQ ID NO: 44120 - RNA, 22 nt, Artificial Sequence
  LRRK2 RNA guide
uaauguacgguuguuauaagca

SEQ ID NO: 44121 - RNA, 22 nt, Artificial Sequence
  LRRK2 RNA guide
uacgguuguuauaagcaugaaa

SEQ ID NO: 44122 - RNA, 22 nt, Artificial Sequence
  LRRK2 RNA guide
ucaugcuuauaacaaccguaca

SEQ ID NO: 44123 - RNA, 22 nt, Artificial Sequence
  LRRK2 RNA guide
ugcuuauaacaaccguacauua

SEQ ID NO: 44124 - RNA, 22 nt, Artificial Sequence
  LRRK2 RNA guide
uguacgguuguuauaagcauga

SEQ ID NO: 44125 - RNA, 22 nt, Artificial Sequence
  LRRK2 RNA guide
uucaugcuuauaacaaccguac

SEQ ID NO: 44126 - RNA, 22 nt, Artificial Sequence
  LRRK2 RNA guide
uuucaugcuuauaacaaccgua

SEQ ID NO: 44127 - RNA, 20 nt, Artificial Sequence
  LRRK2 RNA guide
aaucucccgugaacuaacuc

SEQ ID NO: 44128 - RNA, 20 nt, Artificial Sequence
  LRRK2 RNA guide
aauuuauucuuaaucucccg

SEQ ID NO: 44129 - RNA, 20 nt, Artificial Sequence
  LRRK2 RNA guide
acgggagauuaagaauaaau

SEQ ID NO: 44130 - RNA, 20 nt, Artificial Sequence
  LRRK2 RNA guide
agaguuaguucacgggagau

SEQ ID NO: 44131 - RNA, 20 nt, Artificial Sequence
  LRRK2 RNA guide
aguuaguucacgggagauua

SEQ ID NO: 44132 - RNA, 20 nt, Artificial Sequence
  LRRK2 RNA guide
aguucacgggagauuaagaa

SEQ ID NO: 44133 - RNA, 20 nt, Artificial Sequence
  LRRK2 RNA guide
auuuauucuuaaucucccgu

SEQ ID NO: 44134 - RNA, 20 nt, Artificial Sequence
  LRRK2 RNA guide
cacgggagauuaagaauaaa

SEQ ID NO: 44135 - RNA, 20 nt, Artificial Sequence
  LRRK2 RNA guide
ccuagaguuaguucacggga

SEQ ID NO: 44136 - RNA, 20 nt, Artificial Sequence
  LRRK2 RNA guide
cgggagauuaagaauaaauu

SEQ ID NO: 44137 - RNA, 20 nt, Artificial Sequence
  LRRK2 RNA guide
cuagaguuaguucacgggag

SEQ ID NO: 44138 - RNA, 20 nt, Artificial Sequence
  LRRK2 RNA guide
cuuaaucucccgugaacuaa

SEQ ID NO: 44139 - RNA, 20 nt, Artificial Sequence
  LRRK2 RNA guide
gaguuaguucacgggagauu

SEQ ID NO: 44140 - RNA, 20 nt, Artificial Sequence
  LRRK2 RNA guide
gccuagaguuaguucacggg

SEQ ID NO: 44141 - RNA, 20 nt, Artificial Sequence
  LRRK2 RNA guide
ggccuagaguuaguucacgg

SEQ ID NO: 44142 - RNA, 20 nt, Artificial Sequence
  LRRK2 RNA guide
guuaguucacgggagauuaa

SEQ ID NO: 44143 - RNA, 20 nt, Artificial Sequence
  LRRK2 RNA guide
guucacgggagauuaagaau

SEQ ID NO: 44144 - RNA, 20 nt, Artificial Sequence
  LRRK2 RNA guide
uaaucucccgugaacuaacu

SEQ ID NO: 44145 - RNA, 20 nt, Artificial Sequence
  LRRK2 RNA guide
uagaguuaguucacgggaga

SEQ ID NO: 44146 - RNA, 20 nt, Artificial Sequence
  LRRK2 RNA guide
uaguucacgggagauuaaga

SEQ ID NO: 44147 - RNA, 20 nt, Artificial Sequence
  LRRK2 RNA guide
uauucuuaaucucccgugaa

SEQ ID NO: 44148 - RNA, 20 nt, Artificial Sequence
  LRRK2 RNA guide
ucacgggagauuaagaauaa

SEQ ID NO: 44149 - RNA, 20 nt, Artificial Sequence
  LRRK2 RNA guide
ucuuaaucucccgugaacua

SEQ ID NO: 44150 - RNA, 20 nt, Artificial Sequence
  LRRK2 RNA guide
uuaaucucccgugaacuaac

SEQ ID NO: 44151 - RNA, 20 nt, Artificial Sequence
  LRRK2 RNA guide
uuaguucacgggagauuaag

SEQ ID NO: 44152 - RNA, 20 nt, Artificial Sequence
  LRRK2 RNA guide
uuauucuuaaucucccguga

SEQ ID NO: 44153 - RNA, 20 nt, Artificial Sequence
  LRRK2 RNA guide
uucacgggagauuaagaaua

SEQ ID NO: 44154 - RNA, 20 nt, Artificial Sequence
  LRRK2 RNA guide
uucuuaaucucccgugaacu

SEQ ID NO: 44155 - RNA, 20 nt, Artificial Sequence
  LRRK2 RNA guide
uuuauucuuaaucucccgug

SEQ ID NO: 44156 - RNA, 21 nt, Artificial Sequence
  LRRK2 RNA guide
aaucucccgugaacuaacucu

SEQ ID NO: 44157 - RNA, 21 nt, Artificial Sequence
  LRRK2 RNA guide
agaguuaguucacgggagauu

SEQ ID NO: 44158 - RNA, 21 nt, Artificial Sequence
  LRRK2 RNA guide
aguuaguucacgggagauuaa

SEQ ID NO: 44159 - RNA, 21 nt, Artificial Sequence
  LRRK2 RNA guide
aguucacgggagauuaagaau

SEQ ID NO: 44160 - RNA, 21 nt, Artificial Sequence
  LRRK2 RNA guide
auucuuaaucucccgugaacu

SEQ ID NO: 44161 - RNA, 21 nt, Artificial Sequence
  LRRK2 RNA guide
auuuauucuuaaucucccgug

SEQ ID NO: 44162 - RNA, 21 nt, Artificial Sequence
  LRRK2 RNA guide
cacgggagauuaagaauaaau

SEQ ID NO: 44163 - RNA, 21 nt, Artificial Sequence
  LRRK2 RNA guide
ccuagaguuaguucacgggag

SEQ ID NO: 44164 - RNA, 21 nt, Artificial Sequence
  LRRK2 RNA guide
cuagaguuaguucacgggaga

SEQ ID NO: 44165 - RNA, 21 nt, Artificial Sequence
  LRRK2 RNA guide
cuuaaucucccgugaacuaac

SEQ ID NO: 44166 - RNA, 21 nt, Artificial Sequence
  LRRK2 RNA guide
gaguuaguucacgggagauua

SEQ ID NO: 44167 - RNA, 21 nt, Artificial Sequence
  LRRK2 RNA guide
gccuagaguuaguucacggga

SEQ ID NO: 44168 - RNA, 21 nt, Artificial Sequence
  LRRK2 RNA guide
ggccuagaguuaguucacggg

SEQ ID NO: 44169 - RNA, 21 nt, Artificial Sequence
  LRRK2 RNA guide
guuaguucacgggagauuaag

SEQ ID NO: 44170 - RNA, 21 nt, Artificial Sequence
  LRRK2 RNA guide
guucacgggagauuaagaaua

SEQ ID NO: 44171 - RNA, 21 nt, Artificial Sequence
  LRRK2 RNA guide
uaaucucccgugaacuaacuc

SEQ ID NO: 44172 - RNA, 21 nt, Artificial Sequence
  LRRK2 RNA guide
uagaguuaguucacgggagau

SEQ ID NO: 44173 - RNA, 21 nt, Artificial Sequence
  LRRK2 RNA guide
uaguucacgggagauuaagaa

SEQ ID NO: 44174 - RNA, 21 nt, Artificial Sequence
  LRRK2 RNA guide
uauucuuaaucucccgugaac

SEQ ID NO: 44175 - RNA, 21 nt, Artificial Sequence
  LRRK2 RNA guide
ucacgggagauuaagaauaaa

SEQ ID NO: 44176 - RNA, 21 nt, Artificial Sequence
  LRRK2 RNA guide
ucuuaaucucccgugaacuaa

SEQ ID NO: 44177 - RNA, 21 nt, Artificial Sequence
  LRRK2 RNA guide
uggccuagaguuaguucacgg

SEQ ID NO: 44178 - RNA, 21 nt, Artificial Sequence
  LRRK2 RNA guide
uuaaucucccgugaacuaacu

SEQ ID NO: 44179 - RNA, 21 nt, Artificial Sequence
  LRRK2 RNA guide
uuaguucacgggagauuaaga

SEQ ID NO: 44180 - RNA, 21 nt, Artificial Sequence
  LRRK2 RNA guide
uuauucuuaaucucccgugaa

SEQ ID NO: 44181 - RNA, 21 nt, Artificial Sequence
  LRRK2 RNA guide
uucacgggagauuaagaauaa

SEQ ID NO: 44182 - RNA, 21 nt, Artificial Sequence
  LRRK2 RNA guide
uucuuaaucucccgugaacua

SEQ ID NO: 44183 - RNA, 21 nt, Artificial Sequence
  LRRK2 RNA guide
uuuauucuuaaucucccguga

SEQ ID NO: 44184 - RNA, 22 nt, Artificial Sequence
  LRRK2 RNA guide
aaucucccgugaacuaacucua

SEQ ID NO: 44185 - RNA, 22 nt, Artificial Sequence
  LRRK2 RNA guide
aauuuauucuuaaucucccgug

SEQ ID NO: 44186 - RNA, 22 nt, Artificial Sequence
  LRRK2 RNA guide
agaguuaguucacgggagauua

SEQ ID NO: 44187 - RNA, 22 nt, Artificial Sequence
  LRRK2 RNA guide
aguuaguucacgggagauuaag

SEQ ID NO: 44188 - RNA, 22 nt, Artificial Sequence
  LRRK2 RNA guide
aguucacgggagauuaagaaua

SEQ ID NO: 44189 - RNA, 22 nt, Artificial Sequence
  LRRK2 RNA guide
auucuuaaucucccgugaacua

SEQ ID NO: 44190 - RNA, 22 nt, Artificial Sequence
  LRRK2 RNA guide
auuuauucuuaaucucccguga

SEQ ID NO: 44191 - RNA, 22 nt, Artificial Sequence
  LRRK2 RNA guide
caaauuuauucuuaaucucccg

SEQ ID NO: 44192 - RNA, 22 nt, Artificial Sequence
  LRRK2 RNA guide
cacgggagauuaagaauaaauu

SEQ ID NO: 44193 - RNA, 22 nt, Artificial Sequence
  LRRK2 RNA guide
ccuagaguuaguucacgggaga

SEQ ID NO: 44194 - RNA, 22 nt, Artificial Sequence
  LRRK2 RNA guide
cgggagauuaagaauaaauuug

SEQ ID NO: 44195 - RNA, 22 nt, Artificial Sequence
  LRRK2 RNA guide
cuagaguuaguucacgggagau

SEQ ID NO: 44196 - RNA, 22 nt, Artificial Sequence
  LRRK2 RNA guide
cuggccuagaguuaguucacgg

SEQ ID NO: 44197 - RNA, 22 nt, Artificial Sequence
  LRRK2 RNA guide
cuuaaucucccgugaacuaacu

SEQ ID NO: 44198 - RNA, 22 nt, Artificial Sequence
  LRRK2 RNA guide
gaguuaguucacgggagauuaa

SEQ ID NO: 44199 - RNA, 22 nt, Artificial Sequence
  LRRK2 RNA guide
gccuagaguuaguucacgggag

SEQ ID NO: 44200 - RNA, 22 nt, Artificial Sequence
  LRRK2 RNA guide
ggccuagaguuaguucacggga

SEQ ID NO: 44201 - RNA, 22 nt, Artificial Sequence
  LRRK2 RNA guide
guuaguucacgggagauuaaga

SEQ ID NO: 44202 - RNA, 22 nt, Artificial Sequence
  LRRK2 RNA guide
guucacgggagauuaagaauaa

SEQ ID NO: 44203 - RNA, 22 nt, Artificial Sequence
  LRRK2 RNA guide
uaaucucccgugaacuaacucu

SEQ ID NO: 44204 - RNA, 22 nt, Artificial Sequence
  LRRK2 RNA guide
uagaguuaguucacgggagauu

SEQ ID NO: 44205 - RNA, 22 nt, Artificial Sequence
  LRRK2 RNA guide
uaguucacgggagauuaagaau

SEQ ID NO: 44206 - RNA, 22 nt, Artificial Sequence
  LRRK2 RNA guide
uauucuuaaucucccgugaacu

SEQ ID NO: 44207 - RNA, 22 nt, Artificial Sequence
  LRRK2 RNA guide
ucacgggagauuaagaauaaau

SEQ ID NO: 44208 - RNA, 22 nt, Artificial Sequence
  LRRK2 RNA guide
ucuuaaucucccgugaacuaac

SEQ ID NO: 44209 - RNA, 22 nt, Artificial Sequence
  LRRK2 RNA guide
uggccuagaguuaguucacggg

SEQ ID NO: 44210 - RNA, 22 nt, Artificial Sequence
  LRRK2 RNA guide
uuaaucucccgugaacuaacuc

SEQ ID NO: 44211 - RNA, 22 nt, Artificial Sequence
  LRRK2 RNA guide
uuaguucacgggagauuaagaa

SEQ ID NO: 44212 - RNA, 22 nt, Artificial Sequence
  LRRK2 RNA guide
uuauucuuaaucucccgugaac

SEQ ID NO: 44213 - RNA, 22 nt, Artificial Sequence
  LRRK2 RNA guide
uucacgggagauuaagaauaaa

SEQ ID NO: 44214 - RNA, 22 nt, Artificial Sequence
  LRRK2 RNA guide
uucuuaaucucccgugaacuaa

SEQ ID NO: 44215 - RNA, 22 nt, Artificial Sequence
  LRRK2 RNA guide
uuuauucuuaaucucccgugaa

SEQ ID NO: 44216 - RNA, 20 nt, Artificial Sequence
  LRRK2 RNA guide
aaaacaaauuuaaucucccg

SEQ ID NO: 44217 - RNA, 20 nt, Artificial Sequence
  LRRK2 RNA guide
aaacaaauuuaaucucccgu

SEQ ID NO: 44218 - RNA, 20 nt, Artificial Sequence
  LRRK2 RNA guide
aaauuuaaucucccgugaac

SEQ ID NO: 44219 - RNA, 20 nt, Artificial Sequence
  LRRK2 RNA guide
aacaaauuuaaucucccgug

SEQ ID NO: 44220 - RNA, 20 nt, Artificial Sequence
  LRRK2 RNA guide
aauuuaaucucccgugaacu

SEQ ID NO: 44221 - RNA, 20 nt, Artificial Sequence
  LRRK2 RNA guide
acaaauuuaaucucccguga

SEQ ID NO: 44222 - RNA, 20 nt, Artificial Sequence
  LRRK2 RNA guide
acgggagauuaaauuuguuu

SEQ ID NO: 44223 - RNA, 20 nt, Artificial Sequence
  LRRK2 RNA guide
aguucacgggagauuaaauu

SEQ ID NO: 44224 - RNA, 20 nt, Artificial Sequence
  LRRK2 RNA guide
auuuaaucucccgugaacua

SEQ ID NO: 44225 - RNA, 20 nt, Artificial Sequence
  LRRK2 RNA guide
caaaacaaauuuaaucuccc

SEQ ID NO: 44226 - RNA, 20 nt, Artificial Sequence
  LRRK2 RNA guide
caaauuuaaucucccgugaa

SEQ ID NO: 44227 - RNA, 20 nt, Artificial Sequence
  LRRK2 RNA guide
cacgggagauuaaauuuguu

SEQ ID NO: 44228 - RNA, 20 nt, Artificial Sequence
  LRRK2 RNA guide
cgggagauuaaauuuguuuu

SEQ ID NO: 44229 - RNA, 20 nt, Artificial Sequence
  LRRK2 RNA guide
gggagauuaaauuuguuuug

SEQ ID NO: 44230 - RNA, 20 nt, Artificial Sequence
  LRRK2 RNA guide
guucacgggagauuaaauuu

SEQ ID NO: 44231 - RNA, 20 nt, Artificial Sequence
  LRRK2 RNA guide
uaguucacgggagauuaaau

SEQ ID NO: 44232 - RNA, 20 nt, Artificial Sequence
  LRRK2 RNA guide
ucacgggagauuaaauuugu

SEQ ID NO: 44233 - RNA, 20 nt, Artificial Sequence
  LRRK2 RNA guide
uuaguucacgggagauuaaa

SEQ ID NO: 44234 - RNA, 20 nt, Artificial Sequence
  LRRK2 RNA guide
uucacgggagauuaaauuug

SEQ ID NO: 44235 - RNA, 20 nt, Artificial Sequence
  LRRK2 RNA guide
uuuaaucucccgugaacuaa

SEQ ID NO: 44236 - RNA, 21 nt, Artificial Sequence
  LRRK2 RNA guide
aaacaaauuuaaucucccgug

SEQ ID NO: 44237 - RNA, 21 nt, Artificial Sequence
  LRRK2 RNA guide
aaauuuaaucucccgugaacu

SEQ ID NO: 44238 - RNA, 21 nt, Artificial Sequence
  LRRK2 RNA guide
aacaaauuuaaucucccguga

SEQ ID NO: 44239 - RNA, 21 nt, Artificial Sequence
  LRRK2 RNA guide
aauuuaaucucccgugaacua

SEQ ID NO: 44240 - RNA, 21 nt, Artificial Sequence
  LRRK2 RNA guide
acaaauuuaaucucccgugaa

SEQ ID NO: 44241 - RNA, 21 nt, Artificial Sequence
  LRRK2 RNA guide
aguucacgggagauuaaauuu

SEQ ID NO: 44242 - RNA, 21 nt, Artificial Sequence
  LRRK2 RNA guide
auuuaaucucccgugaacuaa

SEQ ID NO: 44243 - RNA, 21 nt, Artificial Sequence
  LRRK2 RNA guide
caaaacaaauuuaaucucccg

SEQ ID NO: 44244 - RNA, 21 nt, Artificial Sequence
  LRRK2 RNA guide
caaauuuaaucucccgugaac

SEQ ID NO: 44245 - RNA, 21 nt, Artificial Sequence
  LRRK2 RNA guide
cacgggagauuaaauuuguuu

SEQ ID NO: 44246 - RNA, 21 nt, Artificial Sequence
  LRRK2 RNA guide
cgggagauuaaauuuguuuug

SEQ ID NO: 44247 - RNA, 21 nt, Artificial Sequence
  LRRK2 RNA guide
guuaguucacgggagauuaaa

SEQ ID NO: 44248 - RNA, 21 nt, Artificial Sequence
  LRRK2 RNA guide
guucacgggagauuaaauuug

SEQ ID NO: 44249 - RNA, 21 nt, Artificial Sequence
  LRRK2 RNA guide
uaguucacgggagauuaaauu

SEQ ID NO: 44250 - RNA, 21 nt, Artificial Sequence
  LRRK2 RNA guide
ucacgggagauuaaauuuguu

SEQ ID NO: 44251 - RNA, 21 nt, Artificial Sequence
  LRRK2 RNA guide
uuaguucacgggagauuaaau

SEQ ID NO: 44252 - RNA, 21 nt, Artificial Sequence
  LRRK2 RNA guide
uucacgggagauuaaauuugu

SEQ ID NO: 44253 - RNA, 21 nt, Artificial Sequence
  LRRK2 RNA guide
uuuaaucucccgugaacuaac

SEQ ID NO: 44254 - RNA, 22 nt, Artificial Sequence
  LRRK2 RNA guide
aaaacaaauuuaaucucccgug

SEQ ID NO: 44255 - RNA, 22 nt, Artificial Sequence
  LRRK2 RNA guide
aaacaaauuuaaucucccguga

SEQ ID NO: 44256 - RNA, 22 nt, Artificial Sequence
  LRRK2 RNA guide
aaauuuaaucucccgugaacua

SEQ ID NO: 44257 - RNA, 22 nt, Artificial Sequence
  LRRK2 RNA guide
aacaaauuuaaucucccgugaa

SEQ ID NO: 44258 - RNA, 22 nt, Artificial Sequence
  LRRK2 RNA guide
aauuuaaucucccgugaacuaa

SEQ ID NO: 44259 - RNA, 22 nt, Artificial Sequence
  LRRK2 RNA guide
acaaaacaaauuuaaucucccg

SEQ ID NO: 44260 - RNA, 22 nt, Artificial Sequence
  LRRK2 RNA guide
acaaauuuaaucucccgugaac

SEQ ID NO: 44261 - RNA, 22 nt, Artificial Sequence
  LRRK2 RNA guide
acgggagauuaaauuuguuuug

SEQ ID NO: 44262 - RNA, 22 nt, Artificial Sequence
  LRRK2 RNA guide
aguuaguucacgggagauuaaa

SEQ ID NO: 44263 - RNA, 22 nt, Artificial Sequence
  LRRK2 RNA guide
aguucacgggagauuaaauuug

SEQ ID NO: 44264 - RNA, 22 nt, Artificial Sequence
  LRRK2 RNA guide
auuuaaucucccgugaacuaac

SEQ ID NO: 44265 - RNA, 22 nt, Artificial Sequence
  LRRK2 RNA guide
caaaacaaauuuaaucucccgu

SEQ ID NO: 44266 - RNA, 22 nt, Artificial Sequence
  LRRK2 RNA guide
caaauuuaaucucccgugaacu

SEQ ID NO: 44267 - RNA, 22 nt, Artificial Sequence
  LRRK2 RNA guide
cacgggagauuaaauuuguuuu

SEQ ID NO: 44268 - RNA, 22 nt, Artificial Sequence
  LRRK2 RNA guide
cgggagauuaaauuuguuuugu

SEQ ID NO: 44269 - RNA, 22 nt, Artificial Sequence
  LRRK2 RNA guide
guuaguucacgggagauuaaau

SEQ ID NO: 44270 - RNA, 22 nt, Artificial Sequence
  LRRK2 RNA guide
guucacgggagauuaaauuugu

SEQ ID NO: 44271 - RNA, 22 nt, Artificial Sequence
  LRRK2 RNA guide
uaguucacgggagauuaaauuu

SEQ ID NO: 44272 - RNA, 22 nt, Artificial Sequence
  LRRK2 RNA guide
ucacgggagauuaaauuuguuu

SEQ ID NO: 44273 - RNA, 22 nt, Artificial Sequence
  LRRK2 RNA guide
uuaguucacgggagauuaaauu

SEQ ID NO: 44274 - RNA, 22 nt, Artificial Sequence
  LRRK2 RNA guide
uucacgggagauuaaauuuguu

SEQ ID NO: 44275 - RNA, 22 nt, Artificial Sequence
  LRRK2 RNA guide
uuuaaucucccgugaacuaacu

SEQ ID NO: 44276 - RNA, 20 nt, Artificial Sequence
  LRRK2 RNA guide
gagagaauauguguaaaguu

SEQ ID NO: 44277 - RNA, 20 nt, Artificial Sequence
  LRRK2 RNA guide
ugagagaauauguguaaagu

SEQ ID NO: 44278 - RNA, 20 nt, Artificial Sequence
  LRRK2 RNA guide
aaaccaagauaggauugauu

SEQ ID NO: 44279 - RNA, 20 nt, Artificial Sequence
  LRRK2 RNA guide
aaccaagauaggauugauua

SEQ ID NO: 44280 - RNA, 20 nt, Artificial Sequence
  LRRK2 RNA guide
aaucaauccuaucuugguuu

SEQ ID NO: 44281 - RNA, 20 nt, Artificial Sequence
  LRRK2 RNA guide
aauccuaucuugguuuaauc

SEQ ID NO: 44282 - RNA, 20 nt, Artificial Sequence
  LRRK2 RNA guide
accaagauaggauugauuaa

SEQ ID NO: 44283 - RNA, 20 nt, Artificial Sequence
  LRRK2 RNA guide
aggcugauuaaaccaagaua

SEQ ID NO: 44284 - RNA, 20 nt, Artificial Sequence
  LRRK2 RNA guide
aucaauccuaucuugguuua

SEQ ID NO: 44285 - RNA, 20 nt, Artificial Sequence
  LRRK2 RNA guide
auuaaaccaagauaggauug

SEQ ID NO: 44286 - RNA, 20 nt, Artificial Sequence
  LRRK2 RNA guide
caauccuaucuugguuuaau

SEQ ID NO: 44287 - RNA, 20 nt, Artificial Sequence
  LRRK2 RNA guide
ccaagauaggauugauuaaa

SEQ ID NO: 44288 - RNA, 20 nt, Artificial Sequence
  LRRK2 RNA guide
cccuaagauuacuuuuaauc

SEQ ID NO: 44289 - RNA, 20 nt, Artificial Sequence
  LRRK2 RNA guide
cugauuaaaccaagauagga

SEQ ID NO: 44290 - RNA, 20 nt, Artificial Sequence
  LRRK2 RNA guide
gauuaaaccaagauaggauu

SEQ ID NO: 44291 - RNA, 20 nt, Artificial Sequence
  LRRK2 RNA guide
gcugauuaaaccaagauagg

SEQ ID NO: 44292 - RNA, 20 nt, Artificial Sequence
  LRRK2 RNA guide
ggcugauuaaaccaagauag

SEQ ID NO: 44293 - RNA, 20 nt, Artificial Sequence
  LRRK2 RNA guide
uaaaccaagauaggauugau

SEQ ID NO: 44294 - RNA, 20 nt, Artificial Sequence
  LRRK2 RNA guide
uaaucaauccuaucuugguu

SEQ ID NO: 44295 - RNA, 20 nt, Artificial Sequence
  LRRK2 RNA guide
uaggcugauuaaaccaagau

SEQ ID NO: 44296 - RNA, 20 nt, Artificial Sequence
  LRRK2 RNA guide
ucaauccuaucuugguuuaa

SEQ ID NO: 44297 - RNA, 20 nt, Artificial Sequence
  LRRK2 RNA guide
ugauuaaaccaagauaggau

SEQ ID NO: 44298 - RNA, 20 nt, Artificial Sequence
  LRRK2 RNA guide
uuaaaccaagauaggauuga

SEQ ID NO: 44299 - RNA, 20 nt, Artificial Sequence
  LRRK2 RNA guide
uuaaucaauccuaucuuggu

SEQ ID NO: 44300 - RNA, 20 nt, Artificial Sequence
  LRRK2 RNA guide
uuuaaucaauccuaucuugg

SEQ ID NO: 44301 - RNA, 21 nt, Artificial Sequence
  LRRK2 RNA guide
aggcugauuaaaccaagauag

SEQ ID NO: 44302 - RNA, 21 nt, Artificial Sequence
  LRRK2 RNA guide
caauccuaucuugguuuaauc

SEQ ID NO: 44303 - RNA, 21 nt, Artificial Sequence
  LRRK2 RNA guide
cuaggcugauuaaaccaagau

SEQ ID NO: 44304 - RNA, 21 nt, Artificial Sequence
  LRRK2 RNA guide
cugauuaaaccaagauaggau

SEQ ID NO: 44305 - RNA, 21 nt, Artificial Sequence
  LRRK2 RNA guide
gauuaaaccaagauaggauug

SEQ ID NO: 44306 - RNA, 21 nt, Artificial Sequence
  LRRK2 RNA guide
gcugauuaaaccaagauagga

SEQ ID NO: 44307 - RNA, 21 nt, Artificial Sequence
  LRRK2 RNA guide
ggcugauuaaaccaagauagg

SEQ ID NO: 44308 - RNA, 21 nt, Artificial Sequence
  LRRK2 RNA guide
uaggcugauuaaaccaagaua

SEQ ID NO: 44309 - RNA, 22 nt, Artificial Sequence
  LRRK2 RNA guide
aauccuaucuugguuuaaucag

SEQ ID NO: 44310 - RNA, 22 nt, Artificial Sequence
  LRRK2 RNA guide
aggcugauuaaaccaagauagg

SEQ ID NO: 44311 - RNA, 22 nt, Artificial Sequence
  LRRK2 RNA guide
caauccuaucuugguuuaauca

SEQ ID NO: 44312 - RNA, 22 nt, Artificial Sequence
  LRRK2 RNA guide
ccaagauaggauugauuaaaag

SEQ ID NO: 44313 - RNA, 22 nt, Artificial Sequence
  LRRK2 RNA guide
ccuuucccuaagauuacuuuua

SEQ ID NO: 44314 - RNA, 22 nt, Artificial Sequence
  LRRK2 RNA guide
cuaggcugauuaaaccaagaua

SEQ ID NO: 44315 - RNA, 22 nt, Artificial Sequence
  LRRK2 RNA guide
cugauuaaaccaagauaggauu

SEQ ID NO: 44316 - RNA, 22 nt, Artificial Sequence
  LRRK2 RNA guide
cuuuuaaucaauccuaucuugg

SEQ ID NO: 44317 - RNA, 22 nt, Artificial Sequence
  LRRK2 RNA guide
gauuaaaccaagauaggauuga

SEQ ID NO: 44318 - RNA, 22 nt, Artificial Sequence
  LRRK2 RNA guide
gcuaggcugauuaaaccaagau

SEQ ID NO: 44319 - RNA, 22 nt, Artificial Sequence
  LRRK2 RNA guide
gcugauuaaaccaagauaggau

SEQ ID NO: 44320 - RNA, 22 nt, Artificial Sequence
  LRRK2 RNA guide
ggcugauuaaaccaagauagga

SEQ ID NO: 44321 - RNA, 22 nt, Artificial Sequence
  LRRK2 RNA guide
uaggcugauuaaaccaagauag

SEQ ID NO: 44322 - RNA, 22 nt, Artificial Sequence
  LRRK2 RNA guide
ucaauccuaucuugguuuaauc

SEQ ID NO: 44323 - RNA, 22 nt, Artificial Sequence
  LRRK2 RNA guide
ugauuaaaccaagauaggauug

SEQ ID NO: 44324 - RNA, 20 nt, Artificial Sequence
  LRRK2 RNA guide
aaaccaagauaggacugauu

SEQ ID NO: 44325 - RNA, 20 nt, Artificial Sequence
  LRRK2 RNA guide
aaccaagauaggacugauua

SEQ ID NO: 44326 - RNA, 20 nt, Artificial Sequence
  LRRK2 RNA guide
aagauaggacugauuaaaag

SEQ ID NO: 44327 - RNA, 20 nt, Artificial Sequence
  LRRK2 RNA guide
aaucaguccuaucuugguuu

SEQ ID NO: 44328 - RNA, 20 nt, Artificial Sequence
  LRRK2 RNA guide
accaagauaggacugauuaa

SEQ ID NO: 44329 - RNA, 20 nt, Artificial Sequence
  LRRK2 RNA guide
acuuuuaaucaguccuaucu

SEQ ID NO: 44330 - RNA, 20 nt, Artificial Sequence
  LRRK2 RNA guide
agauaggacugauuaaaagu

SEQ ID NO: 44331 - RNA, 20 nt, Artificial Sequence
  LRRK2 RNA guide
agauuacuuuuaaucagucc

SEQ ID NO: 44332 - RNA, 20 nt, Artificial Sequence
  LRRK2 RNA guide
aggacugauuaaaaguaauc

SEQ ID NO: 44333 - RNA, 20 nt, Artificial Sequence
  LRRK2 RNA guide
aguccuaucuugguuuaauc

SEQ ID NO: 44334 - RNA, 20 nt, Artificial Sequence
  LRRK2 RNA guide
aucaguccuaucuugguuua

SEQ ID NO: 44335 - RNA, 20 nt, Artificial Sequence
  LRRK2 RNA guide
auuaaaccaagauaggacug

SEQ ID NO: 44336 - RNA, 20 nt, Artificial Sequence
  LRRK2 RNA guide
caagauaggacugauuaaaa

SEQ ID NO: 44337 - RNA, 20 nt, Artificial Sequence
  LRRK2 RNA guide
caguccuaucuugguuuaau

SEQ ID NO: 44338 - RNA, 20 nt, Artificial Sequence
  LRRK2 RNA guide
ccaagauaggacugauuaaa

SEQ ID NO: 44339 - RNA, 20 nt, Artificial Sequence
  LRRK2 RNA guide
cuuuuaaucaguccuaucuu

SEQ ID NO: 44340 - RNA, 20 nt, Artificial Sequence
  LRRK2 RNA guide
gauaggacugauuaaaagua

SEQ ID NO: 44341 - RNA, 20 nt, Artificial Sequence
  LRRK2 RNA guide
gauuaaaccaagauaggacu

SEQ ID NO: 44342 - RNA, 20 nt, Artificial Sequence
  LRRK2 RNA guide
gauuacuuuuaaucaguccu

SEQ ID NO: 44343 - RNA, 20 nt, Artificial Sequence
  LRRK2 RNA guide
ggacugauuaaaaguaaucu

SEQ ID NO: 44344 - RNA, 20 nt, Artificial Sequence
  LRRK2 RNA guide
uaaaccaagauaggacugau

SEQ ID NO: 44345 - RNA, 20 nt, Artificial Sequence
  LRRK2 RNA guide
uaaucaguccuaucuugguu

SEQ ID NO: 44346 - RNA, 20 nt, Artificial Sequence
  LRRK2 RNA guide
uacuuuuaaucaguccuauc

SEQ ID NO: 44347 - RNA, 20 nt, Artificial Sequence
  LRRK2 RNA guide
ucaguccuaucuugguuuaa

SEQ ID NO: 44348 - RNA, 20 nt, Artificial Sequence
  LRRK2 RNA guide
ugauuaaaccaagauaggac

SEQ ID NO: 44349 - RNA, 20 nt, Artificial Sequence
  LRRK2 RNA guide
uuaaaccaagauaggacuga

SEQ ID NO: 44350 - RNA, 20 nt, Artificial Sequence
  LRRK2 RNA guide
uuaaucaguccuaucuuggu

SEQ ID NO: 44351 - RNA, 20 nt, Artificial Sequence
  LRRK2 RNA guide
uuuaaucaguccuaucuugg

SEQ ID NO: 44352 - RNA, 20 nt, Artificial Sequence
  LRRK2 RNA guide
uuuuaaucaguccuaucuug

SEQ ID NO: 44353 - RNA, 21 nt, Artificial Sequence
  LRRK2 RNA guide
aaaccaagauaggacugauua

SEQ ID NO: 44354 - RNA, 21 nt, Artificial Sequence
  LRRK2 RNA guide
aaccaagauaggacugauuaa

SEQ ID NO: 44355 - RNA, 21 nt, Artificial Sequence
  LRRK2 RNA guide
aaucaguccuaucuugguuua

SEQ ID NO: 44356 - RNA, 21 nt, Artificial Sequence
  LRRK2 RNA guide
accaagauaggacugauuaaa

SEQ ID NO: 44357 - RNA, 21 nt, Artificial Sequence
  LRRK2 RNA guide
aguccuaucuugguuuaauca

SEQ ID NO: 44358 - RNA, 21 nt, Artificial Sequence
  LRRK2 RNA guide
aucaguccuaucuugguuuaa

SEQ ID NO: 44359 - RNA, 21 nt, Artificial Sequence
  LRRK2 RNA guide
auuaaaccaagauaggacuga

SEQ ID NO: 44360 - RNA, 21 nt, Artificial Sequence
  LRRK2 RNA guide
caagauaggacugauuaaaag

SEQ ID NO: 44361 - RNA, 21 nt, Artificial Sequence
  LRRK2 RNA guide
caguccuaucuugguuuaauc

SEQ ID NO: 44362 - RNA, 21 nt, Artificial Sequence
  LRRK2 RNA guide
ccaagauaggacugauuaaaa

SEQ ID NO: 44363 - RNA, 21 nt, Artificial Sequence
  LRRK2 RNA guide
cugauuaaaccaagauaggac

SEQ ID NO: 44364 - RNA, 21 nt, Artificial Sequence
  LRRK2 RNA guide
cuuuuaaucaguccuaucuug

SEQ ID NO: 44365 - RNA, 21 nt, Artificial Sequence
  LRRK2 RNA guide
gauuaaaccaagauaggacug

SEQ ID NO: 44366 - RNA, 21 nt, Artificial Sequence
  LRRK2 RNA guide
uaaaccaagauaggacugauu

SEQ ID NO: 44367 - RNA, 21 nt, Artificial Sequence
  LRRK2 RNA guide
uaaucaguccuaucuugguuu

SEQ ID NO: 44368 - RNA, 21 nt, Artificial Sequence
  LRRK2 RNA guide
ucaguccuaucuugguuuaau

SEQ ID NO: 44369 - RNA, 21 nt, Artificial Sequence
  LRRK2 RNA guide
ugauuaaaccaagauaggacu

SEQ ID NO: 44370 - RNA, 21 nt, Artificial Sequence
  LRRK2 RNA guide
uuaaaccaagauaggacugau

SEQ ID NO: 44371 - RNA, 21 nt, Artificial Sequence
  LRRK2 RNA guide
uuaaucaguccuaucuugguu

SEQ ID NO: 44372 - RNA, 21 nt, Artificial Sequence
  LRRK2 RNA guide
uuuaaucaguccuaucuuggu

SEQ ID NO: 44373 - RNA, 21 nt, Artificial Sequence
  LRRK2 RNA guide
uuuuaaucaguccuaucuugg

SEQ ID NO: 44374 - RNA, 22 nt, Artificial Sequence
  LRRK2 RNA guide
aaaccaagauaggacugauuaa

SEQ ID NO: 44375 - RNA, 22 nt, Artificial Sequence
  LRRK2 RNA guide
aaccaagauaggacugauuaaa

SEQ ID NO: 44376 - RNA, 22 nt, Artificial Sequence
  LRRK2 RNA guide
aaucaguccuaucuugguuuaa

SEQ ID NO: 44377 - RNA, 22 nt, Artificial Sequence
  LRRK2 RNA guide
accaagauaggacugauuaaaa

SEQ ID NO: 44378 - RNA, 22 nt, Artificial Sequence
  LRRK2 RNA guide
acuuuuaaucaguccuaucuug

SEQ ID NO: 44379 - RNA, 22 nt, Artificial Sequence
  LRRK2 RNA guide
aguccuaucuugguuuaaucag

SEQ ID NO: 44380 - RNA, 22 nt, Artificial Sequence
  LRRK2 RNA guide
aucaguccuaucuugguuuaau

SEQ ID NO: 44381 - RNA, 22 nt, Artificial Sequence
  LRRK2 RNA guide
auuaaaccaagauaggacugau

SEQ ID NO: 44382 - RNA, 22 nt, Artificial Sequence
  LRRK2 RNA guide
caagauaggacugauuaaaagu

SEQ ID NO: 44383 - RNA, 22 nt, Artificial Sequence
  LRRK2 RNA guide
caguccuaucuugguuuaauca

SEQ ID NO: 44384 - RNA, 22 nt, Artificial Sequence
  LRRK2 RNA guide
ccaagauaggacugauuaaaag

SEQ ID NO: 44385 - RNA, 22 nt, Artificial Sequence
  LRRK2 RNA guide
cccuaagauuacuuuuaaucag

SEQ ID NO: 44386 - RNA, 22 nt, Artificial Sequence
  LRRK2 RNA guide
cugauuaaaccaagauaggacu

SEQ ID NO: 44387 - RNA, 22 nt, Artificial Sequence
  LRRK2 RNA guide
cuuuuaaucaguccuaucuugg

SEQ ID NO: 44388 - RNA, 22 nt, Artificial Sequence
  LRRK2 RNA guide
gauuaaaccaagauaggacuga

SEQ ID NO: 44389 - RNA, 22 nt, Artificial Sequence
  LRRK2 RNA guide
gcugauuaaaccaagauaggac

SEQ ID NO: 44390 - RNA, 22 nt, Artificial Sequence
  LRRK2 RNA guide
uaaaccaagauaggacugauua

SEQ ID NO: 44391 - RNA, 22 nt, Artificial Sequence
  LRRK2 RNA guide
uaaucaguccuaucuugguuua

SEQ ID NO: 44392 - RNA, 22 nt, Artificial Sequence
  LRRK2 RNA guide
ucaguccuaucuugguuuaauc

SEQ ID NO: 44393 - RNA, 22 nt, Artificial Sequence
  LRRK2 RNA guide
ugauuaaaccaagauaggacug

SEQ ID NO: 44394 - RNA, 22 nt, Artificial Sequence
  LRRK2 RNA guide
uuaaaccaagauaggacugauu

SEQ ID NO: 44395 - RNA, 22 nt, Artificial Sequence
  LRRK2 RNA guide
uuaaucaguccuaucuugguuu

SEQ ID NO: 44396 - RNA, 22 nt, Artificial Sequence
  LRRK2 RNA guide
uuuaaucaguccuaucuugguu

SEQ ID NO: 44397 - RNA, 22 nt, Artificial Sequence
  LRRK2 RNA guide
uuuuaaucaguccuaucuuggu

SEQ ID NO: 44398 - RNA, 20 nt, Artificial Sequence
  LRRK2 RNA guide
aaacacugaacugaaggccg

SEQ ID NO: 44399 - RNA, 20 nt, Artificial Sequence
  LRRK2 RNA guide
aacacugaacugaaggccgg

SEQ ID NO: 44400 - RNA, 20 nt, Artificial Sequence
  LRRK2 RNA guide
aacugaaggccgggugcagu

SEQ ID NO: 44401 - RNA, 20 nt, Artificial Sequence
  LRRK2 RNA guide
acacugaacugaaggccggg

SEQ ID NO: 44402 - RNA, 20 nt, Artificial Sequence
  LRRK2 RNA guide
acccggccuucaguucagug

SEQ ID NO: 44403 - RNA, 20 nt, Artificial Sequence
  LRRK2 RNA guide
acugaacugaaggccgggug

SEQ ID NO: 44404 - RNA, 20 nt, Artificial Sequence
  LRRK2 RNA guide
acugcacccggccuucaguu

SEQ ID NO: 44405 - RNA, 20 nt, Artificial Sequence
  LRRK2 RNA guide
acuuuuaaacacugaacuga

SEQ ID NO: 44406 - RNA, 20 nt, Artificial Sequence
  LRRK2 RNA guide
agccacugcacccggccuuc

SEQ ID NO: 44407 - RNA, 20 nt, Artificial Sequence
  LRRK2 RNA guide
cacccggccuucaguucagu

SEQ ID NO: 44408 - RNA, 20 nt, Artificial Sequence
  LRRK2 RNA guide
cacugaacugaaggccgggu

SEQ ID NO: 44409 - RNA, 20 nt, Artificial Sequence
  LRRK2 RNA guide
cacugcacccggccuucagu

SEQ ID NO: 44410 - RNA, 20 nt, Artificial Sequence
  LRRK2 RNA guide
ccacugcacccggccuucag

SEQ ID NO: 44411 - RNA, 20 nt, Artificial Sequence
  LRRK2 RNA guide
cccggccuucaguucagugu

SEQ ID NO: 44412 - RNA, 20 nt, Artificial Sequence
  LRRK2 RNA guide
ccggccuucaguucaguguu

SEQ ID NO: 44413 - RNA, 20 nt, Artificial Sequence
  LRRK2 RNA guide
cggccuucaguucaguguuu

SEQ ID NO: 44414 - RNA, 20 nt, Artificial Sequence
  LRRK2 RNA guide
cugaacugaaggccgggugc

SEQ ID NO: 44415 - RNA, 20 nt, Artificial Sequence
  LRRK2 RNA guide
cugaaggccgggugcagugg

SEQ ID NO: 44416 - RNA, 20 nt, Artificial Sequence
  LRRK2 RNA guide
cugcacccggccuucaguuc

SEQ ID NO: 44417 - RNA, 20 nt, Artificial Sequence
  LRRK2 RNA guide
cuuuuaaacacugaacugaa

SEQ ID NO: 44418 - RNA, 20 nt, Artificial Sequence
  LRRK2 RNA guide
gaacugaaggccgggugcag

SEQ ID NO: 44419 - RNA, 20 nt, Artificial Sequence
  LRRK2 RNA guide
gagccacugcacccggccuu

SEQ ID NO: 44420 - RNA, 20 nt, Artificial Sequence
  LRRK2 RNA guide
gcacccggccuucaguucag

SEQ ID NO: 44421 - RNA, 20 nt, Artificial Sequence
  LRRK2 RNA guide
gccacugcacccggccuuca

SEQ ID NO: 44422 - RNA, 20 nt, Artificial Sequence
  LRRK2 RNA guide
uaaacacugaacugaaggcc

SEQ ID NO: 44423 - RNA, 20 nt, Artificial Sequence
  LRRK2 RNA guide
ugaacugaaggccgggugca

SEQ ID NO: 44424 - RNA, 20 nt, Artificial Sequence
  LRRK2 RNA guide
ugcacccggccuucaguuca

SEQ ID NO: 44425 - RNA, 20 nt, Artificial Sequence
  LRRK2 RNA guide
uuaaacacugaacugaaggc

SEQ ID NO: 44426 - RNA, 20 nt, Artificial Sequence
  LRRK2 RNA guide
uuuaaacacugaacugaagg

SEQ ID NO: 44427 - RNA, 20 nt, Artificial Sequence
  LRRK2 RNA guide
uuuuaaacacugaacugaag

SEQ ID NO: 44428 - RNA, 21 nt, Artificial Sequence
  LRRK2 RNA guide
aaacacugaacugaaggccgg

SEQ ID NO: 44429 - RNA, 21 nt, Artificial Sequence
  LRRK2 RNA guide
aacacugaacugaaggccggg

SEQ ID NO: 44430 - RNA, 21 nt, Artificial Sequence
  LRRK2 RNA guide
aacugaaggccgggugcagug

SEQ ID NO: 44431 - RNA, 21 nt, Artificial Sequence
  LRRK2 RNA guide
acacugaacugaaggccgggu

SEQ ID NO: 44432 - RNA, 21 nt, Artificial Sequence
  LRRK2 RNA guide
acccggccuucaguucagugu

SEQ ID NO: 44433 - RNA, 21 nt, Artificial Sequence
  LRRK2 RNA guide
acugaacugaaggccgggugc

SEQ ID NO: 44434 - RNA, 21 nt, Artificial Sequence
  LRRK2 RNA guide
acugaaggccgggugcagugg

SEQ ID NO: 44435 - RNA, 21 nt, Artificial Sequence
  LRRK2 RNA guide
acugcacccggccuucaguuc

SEQ ID NO: 44436 - RNA, 21 nt, Artificial Sequence
  LRRK2 RNA guide
agccacugcacccggccuuca

SEQ ID NO: 44437 - RNA, 21 nt, Artificial Sequence
  LRRK2 RNA guide
augagccacugcacccggccu

SEQ ID NO: 44438 - RNA, 21 nt, Artificial Sequence
  LRRK2 RNA guide
cacccggccuucaguucagug

SEQ ID NO: 44439 - RNA, 21 nt, Artificial Sequence
  LRRK2 RNA guide
cacugaacugaaggccgggug

SEQ ID NO: 44440 - RNA, 21 nt, Artificial Sequence
  LRRK2 RNA guide
cacugcacccggccuucaguu

SEQ ID NO: 44441 - RNA, 21 nt, Artificial Sequence
  LRRK2 RNA guide
caugagccacugcacccggcc

SEQ ID NO: 44442 - RNA, 21 nt, Artificial Sequence
  LRRK2 RNA guide
ccacugcacccggccuucagu

SEQ ID NO: 44443 - RNA, 21 nt, Artificial Sequence
  LRRK2 RNA guide
cccggccuucaguucaguguu

SEQ ID NO: 44444 - RNA, 21 nt, Artificial Sequence
  LRRK2 RNA guide
ccggccuucaguucaguguuu

SEQ ID NO: 44445 - RNA, 21 nt, Artificial Sequence
  LRRK2 RNA guide
cggccuucaguucaguguuua

SEQ ID NO: 44446 - RNA, 21 nt, Artificial Sequence
  LRRK2 RNA guide
cugaacugaaggccgggugca

SEQ ID NO: 44447 - RNA, 21 nt, Artificial Sequence
  LRRK2 RNA guide
cugaaggccgggugcaguggc

SEQ ID NO: 44448 - RNA, 21 nt, Artificial Sequence
  LRRK2 RNA guide
cugcacccggccuucaguuca

SEQ ID NO: 44449 - RNA, 21 nt, Artificial Sequence
  LRRK2 RNA guide
cuuuuaaacacugaacugaag

SEQ ID NO: 44450 - RNA, 21 nt, Artificial Sequence
  LRRK2 RNA guide
gaacugaaggccgggugcagu

SEQ ID NO: 44451 - RNA, 21 nt, Artificial Sequence
  LRRK2 RNA guide
gagccacugcacccggccuuc

SEQ ID NO: 44452 - RNA, 21 nt, Artificial Sequence
  LRRK2 RNA guide
gcacccggccuucaguucagu

SEQ ID NO: 44453 - RNA, 21 nt, Artificial Sequence
  LRRK2 RNA guide
gccacugcacccggccuucag

SEQ ID NO: 44454 - RNA, 21 nt, Artificial Sequence
  LRRK2 RNA guide
uaaacacugaacugaaggccg

SEQ ID NO: 44455 - RNA, 21 nt, Artificial Sequence
  LRRK2 RNA guide
ugaacugaaggccgggugcag

SEQ ID NO: 44456 - RNA, 21 nt, Artificial Sequence
  LRRK2 RNA guide
ugagccacugcacccggccuu

SEQ ID NO: 44457 - RNA, 21 nt, Artificial Sequence
  LRRK2 RNA guide
ugcacccggccuucaguucag

SEQ ID NO: 44458 - RNA, 21 nt, Artificial Sequence
  LRRK2 RNA guide
uuaaacacugaacugaaggcc

SEQ ID NO: 44459 - RNA, 21 nt, Artificial Sequence
  LRRK2 RNA guide
uuuaaacacugaacugaaggc

SEQ ID NO: 44460 - RNA, 21 nt, Artificial Sequence
  LRRK2 RNA guide
uuuuaaacacugaacugaagg

SEQ ID NO: 44461 - RNA, 22 nt, Artificial Sequence
  LRRK2 RNA guide
aaacacugaacugaaggccggg

SEQ ID NO: 44462 - RNA, 22 nt, Artificial Sequence
  LRRK2 RNA guide
aacacugaacugaaggccgggu

SEQ ID NO: 44463 - RNA, 22 nt, Artificial Sequence
  LRRK2 RNA guide
aacugaaggccgggugcagugg

SEQ ID NO: 44464 - RNA, 22 nt, Artificial Sequence
  LRRK2 RNA guide
acacugaacugaaggccgggug

SEQ ID NO: 44465 - RNA, 22 nt, Artificial Sequence
  LRRK2 RNA guide
acccggccuucaguucaguguu

SEQ ID NO: 44466 - RNA, 22 nt, Artificial Sequence
  LRRK2 RNA guide
acugaacugaaggccgggugca

SEQ ID NO: 44467 - RNA, 22 nt, Artificial Sequence
  LRRK2 RNA guide
acugaaggccgggugcaguggc

SEQ ID NO: 44468 - RNA, 22 nt, Artificial Sequence
  LRRK2 RNA guide
acugcacccggccuucaguuca

SEQ ID NO: 44469 - RNA, 22 nt, Artificial Sequence
  LRRK2 RNA guide
acuuuuaaacacugaacugaag

SEQ ID NO: 44470 - RNA, 22 nt, Artificial Sequence
  LRRK2 RNA guide
agccacugcacccggccuucag

SEQ ID NO: 44471 - RNA, 22 nt, Artificial Sequence
  LRRK2 RNA guide
augagccacugcacccggccuu

SEQ ID NO: 44472 - RNA, 22 nt, Artificial Sequence
  LRRK2 RNA guide
cacccggccuucaguucagugu

SEQ ID NO: 44473 - RNA, 22 nt, Artificial Sequence
  LRRK2 RNA guide
cacugaacugaaggccgggugc

SEQ ID NO: 44474 - RNA, 22 nt, Artificial Sequence
  LRRK2 RNA guide
cacugcacccggccuucaguuc

SEQ ID NO: 44475 - RNA, 22 nt, Artificial Sequence
  LRRK2 RNA guide
caugagccacugcacccggccu

SEQ ID NO: 44476 - RNA, 22 nt, Artificial Sequence
  LRRK2 RNA guide
ccacugcacccggccuucaguu

SEQ ID NO: 44477 - RNA, 22 nt, Artificial Sequence
  LRRK2 RNA guide
cccggccuucaguucaguguuu

SEQ ID NO: 44478 - RNA, 22 nt, Artificial Sequence
  LRRK2 RNA guide
ccggccuucaguucaguguuua

SEQ ID NO: 44479 - RNA, 22 nt, Artificial Sequence
  LRRK2 RNA guide
cggccuucaguucaguguuuaa

SEQ ID NO: 44480 - RNA, 22 nt, Artificial Sequence
  LRRK2 RNA guide
cugaacugaaggccgggugcag

SEQ ID NO: 44481 - RNA, 22 nt, Artificial Sequence
  LRRK2 RNA guide
cugaaggccgggugcaguggcu

SEQ ID NO: 44482 - RNA, 22 nt, Artificial Sequence
  LRRK2 RNA guide
cugcacccggccuucaguucag

SEQ ID NO: 44483 - RNA, 22 nt, Artificial Sequence
  LRRK2 RNA guide
cuuuuaaacacugaacugaagg

SEQ ID NO: 44484 - RNA, 22 nt, Artificial Sequence
  LRRK2 RNA guide
gaacugaaggccgggugcagug

SEQ ID NO: 44485 - RNA, 22 nt, Artificial Sequence
  LRRK2 RNA guide
gagccacugcacccggccuuca

SEQ ID NO: 44486 - RNA, 22 nt, Artificial Sequence
  LRRK2 RNA guide
gcacccggccuucaguucagug

SEQ ID NO: 44487 - RNA, 22 nt, Artificial Sequence
  LRRK2 RNA guide
gcaugagccacugcacccggcc

SEQ ID NO: 44488 - RNA, 22 nt, Artificial Sequence
  LRRK2 RNA guide
gccacugcacccggccuucagu

SEQ ID NO: 44489 - RNA, 22 nt, Artificial Sequence
  LRRK2 RNA guide
uaaacacugaacugaaggccgg

SEQ ID NO: 44490 - RNA, 22 nt, Artificial Sequence
  LRRK2 RNA guide
ugaacugaaggccgggugcagu

SEQ ID NO: 44491 - RNA, 22 nt, Artificial Sequence
  LRRK2 RNA guide
ugagccacugcacccggccuuc

SEQ ID NO: 44492 - RNA, 22 nt, Artificial Sequence
  LRRK2 RNA guide
ugcacccggccuucaguucagu

SEQ ID NO: 44493 - RNA, 22 nt, Artificial Sequence
  LRRK2 RNA guide
uuaaacacugaacugaaggccg

SEQ ID NO: 44494 - RNA, 22 nt, Artificial Sequence
  LRRK2 RNA guide
uuuaaacacugaacugaaggcc

SEQ ID NO: 44495 - RNA, 22 nt, Artificial Sequence
  LRRK2 RNA guide
uuuuaaacacugaacugaaggc

SEQ ID NO: 44496 - RNA, 20 nt, Artificial Sequence
  LRRK2 RNA guide
aaacacugaacugaaggcug

SEQ ID NO: 44497 - RNA, 20 nt, Artificial Sequence
  LRRK2 RNA guide
aacacugaacugaaggcugg

SEQ ID NO: 44498 - RNA, 20 nt, Artificial Sequence
  LRRK2 RNA guide
acacugaacugaaggcuggg

SEQ ID NO: 44499 - RNA, 20 nt, Artificial Sequence
  LRRK2 RNA guide
acccagccuucaguucagug

SEQ ID NO: 44500 - RNA, 20 nt, Artificial Sequence
  LRRK2 RNA guide
acugaacugaaggcugggug

SEQ ID NO: 44501 - RNA, 20 nt, Artificial Sequence
  LRRK2 RNA guide
acugcacccagccuucaguu

SEQ ID NO: 44502 - RNA, 20 nt, Artificial Sequence
  LRRK2 RNA guide
cacccagccuucaguucagu

SEQ ID NO: 44503 - RNA, 20 nt, Artificial Sequence
  LRRK2 RNA guide
cacugaacugaaggcugggu

SEQ ID NO: 44504 - RNA, 20 nt, Artificial Sequence
  LRRK2 RNA guide
cacugcacccagccuucagu

SEQ ID NO: 44505 - RNA, 20 nt, Artificial Sequence
  LRRK2 RNA guide
cagccuucaguucaguguuu

SEQ ID NO: 44506 - RNA, 20 nt, Artificial Sequence
  LRRK2 RNA guide
ccacugcacccagccuucag

SEQ ID NO: 44507 - RNA, 20 nt, Artificial Sequence
  LRRK2 RNA guide
ccagccuucaguucaguguu

SEQ ID NO: 44508 - RNA, 20 nt, Artificial Sequence
  LRRK2 RNA guide
cccagccuucaguucagugu

SEQ ID NO: 44509 - RNA, 20 nt, Artificial Sequence
  LRRK2 RNA guide
cugaacugaaggcugggugc

SEQ ID NO: 44510 - RNA, 20 nt, Artificial Sequence
  LRRK2 RNA guide
cugcacccagccuucaguuc

SEQ ID NO: 44511 - RNA, 20 nt, Artificial Sequence
  LRRK2 RNA guide
gcacccagccuucaguucag

SEQ ID NO: 44512 - RNA, 20 nt, Artificial Sequence
  LRRK2 RNA guide
gccacugcacccagccuuca

SEQ ID NO: 44513 - RNA, 20 nt, Artificial Sequence
  LRRK2 RNA guide
uaaacacugaacugaaggcu

SEQ ID NO: 44514 - RNA, 20 nt, Artificial Sequence
  LRRK2 RNA guide
ugaacugaaggcugggugca

SEQ ID NO: 44515 - RNA, 20 nt, Artificial Sequence
  LRRK2 RNA guide
ugcacccagccuucaguuca

SEQ ID NO: 44516 - RNA, 21 nt, Artificial Sequence
  LRRK2 RNA guide
aaacacugaacugaaggcugg

SEQ ID NO: 44517 - RNA, 21 nt, Artificial Sequence
  LRRK2 RNA guide
aacacugaacugaaggcuggg

SEQ ID NO: 44518 - RNA, 21 nt, Artificial Sequence
  LRRK2 RNA guide
acacugaacugaaggcugggu

SEQ ID NO: 44519 - RNA, 21 nt, Artificial Sequence
  LRRK2 RNA guide
acccagccuucaguucagugu

SEQ ID NO: 44520 - RNA, 21 nt, Artificial Sequence
  LRRK2 RNA guide
acugaacugaaggcugggugc

SEQ ID NO: 44521 - RNA, 21 nt, Artificial Sequence
  LRRK2 RNA guide
acugcacccagccuucaguuc

SEQ ID NO: 44522 - RNA, 21 nt, Artificial Sequence
  LRRK2 RNA guide
agccacugcacccagccuuca

SEQ ID NO: 44523 - RNA, 21 nt, Artificial Sequence
  LRRK2 RNA guide
cacccagccuucaguucagug

SEQ ID NO: 44524 - RNA, 21 nt, Artificial Sequence
  LRRK2 RNA guide
cacugaacugaaggcugggug

SEQ ID NO: 44525 - RNA, 21 nt, Artificial Sequence
  LRRK2 RNA guide
cacugcacccagccuucaguu

SEQ ID NO: 44526 - RNA, 21 nt, Artificial Sequence
  LRRK2 RNA guide
cagccuucaguucaguguuua

SEQ ID NO: 44527 - RNA, 21 nt, Artificial Sequence
  LRRK2 RNA guide
ccacugcacccagccuucagu

SEQ ID NO: 44528 - RNA, 21 nt, Artificial Sequence
  LRRK2 RNA guide
ccagccuucaguucaguguuu

SEQ ID NO: 44529 - RNA, 21 nt, Artificial Sequence
  LRRK2 RNA guide
cccagccuucaguucaguguu

SEQ ID NO: 44530 - RNA, 21 nt, Artificial Sequence
  LRRK2 RNA guide
cugaacugaaggcugggugca

SEQ ID NO: 44531 - RNA, 21 nt, Artificial Sequence
  LRRK2 RNA guide
cugcacccagccuucaguuca

SEQ ID NO: 44532 - RNA, 21 nt, Artificial Sequence
  LRRK2 RNA guide
gcacccagccuucaguucagu

SEQ ID NO: 44533 - RNA, 21 nt, Artificial Sequence
  LRRK2 RNA guide
gccacugcacccagccuucag

SEQ ID NO: 44534 - RNA, 21 nt, Artificial Sequence
  LRRK2 RNA guide
uaaacacugaacugaaggcug

SEQ ID NO: 44535 - RNA, 21 nt, Artificial Sequence
  LRRK2 RNA guide
ugaacugaaggcugggugcag

SEQ ID NO: 44536 - RNA, 21 nt, Artificial Sequence
  LRRK2 RNA guide
ugcacccagccuucaguucag

SEQ ID NO: 44537 - RNA, 21 nt, Artificial Sequence
  LRRK2 RNA guide
uuaaacacugaacugaaggcu

SEQ ID NO: 44538 - RNA, 22 nt, Artificial Sequence
  LRRK2 RNA guide
aaacacugaacugaaggcuggg

SEQ ID NO: 44539 - RNA, 22 nt, Artificial Sequence
  LRRK2 RNA guide
aacacugaacugaaggcugggu

SEQ ID NO: 44540 - RNA, 22 nt, Artificial Sequence
  LRRK2 RNA guide
acacugaacugaaggcugggug

SEQ ID NO: 44541 - RNA, 22 nt, Artificial Sequence
  LRRK2 RNA guide
acccagccuucaguucaguguu

SEQ ID NO: 44542 - RNA, 22 nt, Artificial Sequence
  LRRK2 RNA guide
acugaacugaaggcugggugca

SEQ ID NO: 44543 - RNA, 22 nt, Artificial Sequence
  LRRK2 RNA guide
acugcacccagccuucaguuca

SEQ ID NO: 44544 - RNA, 22 nt, Artificial Sequence
  LRRK2 RNA guide
agccacugcacccagccuucag

SEQ ID NO: 44545 - RNA, 22 nt, Artificial Sequence
  LRRK2 RNA guide
cacccagccuucaguucagugu

SEQ ID NO: 44546 - RNA, 22 nt, Artificial Sequence
  LRRK2 RNA guide
cacugaacugaaggcugggugc

SEQ ID NO: 44547 - RNA, 22 nt, Artificial Sequence
  LRRK2 RNA guide
cacugcacccagccuucaguuc

SEQ ID NO: 44548 - RNA, 22 nt, Artificial Sequence
  LRRK2 RNA guide
cagccuucaguucaguguuuaa

SEQ ID NO: 44549 - RNA, 22 nt, Artificial Sequence
  LRRK2 RNA guide
ccacugcacccagccuucaguu

SEQ ID NO: 44550 - RNA, 22 nt, Artificial Sequence
  LRRK2 RNA guide
ccagccuucaguucaguguuua

SEQ ID NO: 44551 - RNA, 22 nt, Artificial Sequence
  LRRK2 RNA guide
cccagccuucaguucaguguuu

SEQ ID NO: 44552 - RNA, 22 nt, Artificial Sequence
  LRRK2 RNA guide
cugaacugaaggcugggugcag

SEQ ID NO: 44553 - RNA, 22 nt, Artificial Sequence
  LRRK2 RNA guide
cugcacccagccuucaguucag

SEQ ID NO: 44554 - RNA, 22 nt, Artificial Sequence
  LRRK2 RNA guide
gagccacugcacccagccuuca

SEQ ID NO: 44555 - RNA, 22 nt, Artificial Sequence
  LRRK2 RNA guide
gcacccagccuucaguucagug

SEQ ID NO: 44556 - RNA, 22 nt, Artificial Sequence
  LRRK2 RNA guide
gccacugcacccagccuucagu

SEQ ID NO: 44557 - RNA, 22 nt, Artificial Sequence
  LRRK2 RNA guide
uaaacacugaacugaaggcugg

SEQ ID NO: 44558 - RNA, 22 nt, Artificial Sequence
  LRRK2 RNA guide
ugaacugaaggcugggugcagu

SEQ ID NO: 44559 - RNA, 22 nt, Artificial Sequence
  LRRK2 RNA guide
ugcacccagccuucaguucagu

SEQ ID NO: 44560 - RNA, 22 nt, Artificial Sequence
  LRRK2 RNA guide
uuaaacacugaacugaaggcug

SEQ ID NO: 44561 - RNA, 22 nt, Artificial Sequence
  LRRK2 RNA guide
uuuaaacacugaacugaaggcu

SEQ ID NO: 44562 - RNA, 20 nt, Artificial Sequence
  LRRK2 RNA guide
agccugggccauagagugag

SEQ ID NO: 44563 - RNA, 20 nt, Artificial Sequence
  LRRK2 RNA guide
auggggucucacucuauggc

SEQ ID NO: 44564 - RNA, 20 nt, Artificial Sequence
  LRRK2 RNA guide
ccugggccauagagugagac

SEQ ID NO: 44565 - RNA, 20 nt, Artificial Sequence
  LRRK2 RNA guide
cugggccauagagugagacc

SEQ ID NO: 44566 - RNA, 20 nt, Artificial Sequence
  LRRK2 RNA guide
gauggggucucacucuaugg

SEQ ID NO: 44567 - RNA, 20 nt, Artificial Sequence
  LRRK2 RNA guide
gccugggccauagagugaga

SEQ ID NO: 44568 - RNA, 20 nt, Artificial Sequence
  LRRK2 RNA guide
ggggucucacucuauggccc

SEQ ID NO: 44569 - RNA, 20 nt, Artificial Sequence
  LRRK2 RNA guide
ugagauggggucucacucua

SEQ ID NO: 44570 - RNA, 20 nt, Artificial Sequence
  LRRK2 RNA guide
uggggucucacucuauggcc

SEQ ID NO: 44571 - RNA, 21 nt, Artificial Sequence
  LRRK2 RNA guide
agauggggucucacucuaugg

SEQ ID NO: 44572 - RNA, 21 nt, Artificial Sequence
  LRRK2 RNA guide
agccugggccauagagugaga

SEQ ID NO: 44573 - RNA, 21 nt, Artificial Sequence
  LRRK2 RNA guide
auggggucucacucuauggcc

SEQ ID NO: 44574 - RNA, 21 nt, Artificial Sequence
  LRRK2 RNA guide
ccugggccauagagugagacc

SEQ ID NO: 44575 - RNA, 21 nt, Artificial Sequence
  LRRK2 RNA guide
cugggccauagagugagaccc

SEQ ID NO: 44576 - RNA, 21 nt, Artificial Sequence
  LRRK2 RNA guide
gauggggucucacucuauggc

SEQ ID NO: 44577 - RNA, 21 nt, Artificial Sequence
  LRRK2 RNA guide
gccugggccauagagugagac

SEQ ID NO: 44578 - RNA, 21 nt, Artificial Sequence
  LRRK2 RNA guide
gggccauagagugagacccca

SEQ ID NO: 44579 - RNA, 21 nt, Artificial Sequence
  LRRK2 RNA guide
ggggucucacucuauggccca

SEQ ID NO: 44580 - RNA, 21 nt, Artificial Sequence
  LRRK2 RNA guide
uagccugggccauagagugag

SEQ ID NO: 44581 - RNA, 21 nt, Artificial Sequence
  LRRK2 RNA guide
ugagauggggucucacucuau

SEQ ID NO: 44582 - RNA, 21 nt, Artificial Sequence
  LRRK2 RNA guide
uggggucucacucuauggccc

SEQ ID NO: 44583 - RNA, 21 nt, Artificial Sequence
  LRRK2 RNA guide
uugagauggggucucacucua

SEQ ID NO: 44584 - RNA, 22 nt, Artificial Sequence
  LRRK2 RNA guide
agauggggucucacucuauggc

SEQ ID NO: 44585 - RNA, 22 nt, Artificial Sequence
  LRRK2 RNA guide
agccugggccauagagugagac

SEQ ID NO: 44586 - RNA, 22 nt, Artificial Sequence
  LRRK2 RNA guide
auggggucucacucuauggccc

SEQ ID NO: 44587 - RNA, 22 nt, Artificial Sequence
  LRRK2 RNA guide
ccugggccauagagugagaccc

SEQ ID NO: 44588 - RNA, 22 nt, Artificial Sequence
  LRRK2 RNA guide
cuagccugggccauagagugag

SEQ ID NO: 44589 - RNA, 22 nt, Artificial Sequence
  LRRK2 RNA guide
cugggccauagagugagacccc

SEQ ID NO: 44590 - RNA, 22 nt, Artificial Sequence
  LRRK2 RNA guide
gagauggggucucacucuaugg

SEQ ID NO: 44591 - RNA, 22 nt, Artificial Sequence
  LRRK2 RNA guide
gauggggucucacucuauggcc

SEQ ID NO: 44592 - RNA, 22 nt, Artificial Sequence
  LRRK2 RNA guide
gccugggccauagagugagacc

SEQ ID NO: 44593 - RNA, 22 nt, Artificial Sequence
  LRRK2 RNA guide
gggccauagagugagaccccau

SEQ ID NO: 44594 - RNA, 22 nt, Artificial Sequence
  LRRK2 RNA guide
ggggucucacucuauggcccag

SEQ ID NO: 44595 - RNA, 22 nt, Artificial Sequence
  LRRK2 RNA guide
uagccugggccauagagugaga

SEQ ID NO: 44596 - RNA, 22 nt, Artificial Sequence
  LRRK2 RNA guide
ugagauggggucucacucuaug

SEQ ID NO: 44597 - RNA, 22 nt, Artificial Sequence
  LRRK2 RNA guide
ugggccauagagugagacccca

SEQ ID NO: 44598 - RNA, 22 nt, Artificial Sequence
  LRRK2 RNA guide
uggggucucacucuauggccca

SEQ ID NO: 44599 - RNA, 22 nt, Artificial Sequence
  LRRK2 RNA guide
uugagauggggucucacucuau

SEQ ID NO: 44600 - RNA, 22 nt, Artificial Sequence
  LRRK2 RNA guide
uuugagauggggucucacucua

SEQ ID NO: 44601 - RNA, 20 nt, Artificial Sequence
  LRRK2 RNA guide
acucuagccugagccauaga

SEQ ID NO: 44602 - RNA, 20 nt, Artificial Sequence
  LRRK2 RNA guide
acucuauggcucaggcuaga

SEQ ID NO: 44603 - RNA, 20 nt, Artificial Sequence
  LRRK2 RNA guide
acugcacucuagccugagcc

SEQ ID NO: 44604 - RNA, 20 nt, Artificial Sequence
  LRRK2 RNA guide
agauggggucucacucuaug

SEQ ID NO: 44605 - RNA, 20 nt, Artificial Sequence
  LRRK2 RNA guide
cacucuagccugagccauag

SEQ ID NO: 44606 - RNA, 20 nt, Artificial Sequence
  LRRK2 RNA guide
cacucuauggcucaggcuag

SEQ ID NO: 44607 - RNA, 20 nt, Artificial Sequence
  LRRK2 RNA guide
ccugagccauagagugagac

SEQ ID NO: 44608 - RNA, 20 nt, Artificial Sequence
  LRRK2 RNA guide
cuagccugagccauagagug

SEQ ID NO: 44609 - RNA, 20 nt, Artificial Sequence
  LRRK2 RNA guide
cucacucuauggcucaggcu

SEQ ID NO: 44610 - RNA, 20 nt, Artificial Sequence
  LRRK2 RNA guide
cucuagccugagccauagag

SEQ ID NO: 44611 - RNA, 20 nt, Artificial Sequence
  LRRK2 RNA guide
cucuauggcucaggcuagag

SEQ ID NO: 44612 - RNA, 20 nt, Artificial Sequence
  LRRK2 RNA guide
cugagccauagagugagacc

SEQ ID NO: 44613 - RNA, 20 nt, Artificial Sequence
  LRRK2 RNA guide
cugcacucuagccugagcca

SEQ ID NO: 44614 - RNA, 20 nt, Artificial Sequence
  LRRK2 RNA guide
gagauggggucucacucuau

SEQ ID NO: 44615 - RNA, 20 nt, Artificial Sequence
  LRRK2 RNA guide
gagccauagagugagacccc

SEQ ID NO: 44616 - RNA, 20 nt, Artificial Sequence
  LRRK2 RNA guide
gcacucuagccugagccaua

SEQ ID NO: 44617 - RNA, 20 nt, Artificial Sequence
  LRRK2 RNA guide
gccugagccauagagugaga

SEQ ID NO: 44618 - RNA, 20 nt, Artificial Sequence
  LRRK2 RNA guide
gggucucacucuauggcuca

SEQ ID NO: 44619 - RNA, 20 nt, Artificial Sequence
  LRRK2 RNA guide
ggucucacucuauggcucag

SEQ ID NO: 44620 - RNA, 20 nt, Artificial Sequence
  LRRK2 RNA guide
gucucacucuauggcucagg

SEQ ID NO: 44621 - RNA, 20 nt, Artificial Sequence
  LRRK2 RNA guide
uagccugagccauagaguga

SEQ ID NO: 44622 - RNA, 20 nt, Artificial Sequence
  LRRK2 RNA guide
ucacucuauggcucaggcua

SEQ ID NO: 44623 - RNA, 20 nt, Artificial Sequence
  LRRK2 RNA guide
ucuagccugagccauagagu

SEQ ID NO: 44624 - RNA, 20 nt, Artificial Sequence
  LRRK2 RNA guide
ucuauggcucaggcuagagu

SEQ ID NO: 44625 - RNA, 20 nt, Artificial Sequence
  LRRK2 RNA guide
ucucacucuauggcucaggc

SEQ ID NO: 44626 - RNA, 20 nt, Artificial Sequence
  LRRK2 RNA guide
ugagccauagagugagaccc

SEQ ID NO: 44627 - RNA, 20 nt, Artificial Sequence
  LRRK2 RNA guide
ugcacucuagccugagccau

SEQ ID NO: 44628 - RNA, 20 nt, Artificial Sequence
  LRRK2 RNA guide
uggggucucacucuauggcu

SEQ ID NO: 44629 - RNA, 21 nt, Artificial Sequence
  LRRK2 RNA guide
acucuagccugagccauagag

SEQ ID NO: 44630 - RNA, 21 nt, Artificial Sequence
  LRRK2 RNA guide
acucuauggcucaggcuagag

SEQ ID NO: 44631 - RNA, 21 nt, Artificial Sequence
  LRRK2 RNA guide
acugcacucuagccugagcca

SEQ ID NO: 44632 - RNA, 21 nt, Artificial Sequence
  LRRK2 RNA guide
agccugagccauagagugaga

SEQ ID NO: 44633 - RNA, 21 nt, Artificial Sequence
  LRRK2 RNA guide
auggcucaggcuagagugcag

SEQ ID NO: 44634 - RNA, 21 nt, Artificial Sequence
  LRRK2 RNA guide
auggggucucacucuauggcu

SEQ ID NO: 44635 - RNA, 21 nt, Artificial Sequence
  LRRK2 RNA guide
cacucuagccugagccauaga

SEQ ID NO: 44636 - RNA, 21 nt, Artificial Sequence
  LRRK2 RNA guide
cacucuauggcucaggcuaga

SEQ ID NO: 44637 - RNA, 21 nt, Artificial Sequence
  LRRK2 RNA guide
cacugcacucuagccugagcc

SEQ ID NO: 44638 - RNA, 21 nt, Artificial Sequence
  LRRK2 RNA guide
ccugagccauagagugagacc

SEQ ID NO: 44639 - RNA, 21 nt, Artificial Sequence
  LRRK2 RNA guide
cuagccugagccauagaguga

SEQ ID NO: 44640 - RNA, 21 nt, Artificial Sequence
  LRRK2 RNA guide
cucacucuauggcucaggcua

SEQ ID NO: 44641 - RNA, 21 nt, Artificial Sequence
  LRRK2 RNA guide
cucuagccugagccauagagu

SEQ ID NO: 44642 - RNA, 21 nt, Artificial Sequence
  LRRK2 RNA guide
cucuauggcucaggcuagagu

SEQ ID NO: 44643 - RNA, 21 nt, Artificial Sequence
  LRRK2 RNA guide
cugagccauagagugagaccc

SEQ ID NO: 44644 - RNA, 21 nt, Artificial Sequence
  LRRK2 RNA guide
cugcacucuagccugagccau

SEQ ID NO: 44645 - RNA, 21 nt, Artificial Sequence
  LRRK2 RNA guide
gagauggggucucacucuaug

SEQ ID NO: 44646 - RNA, 21 nt, Artificial Sequence
  LRRK2 RNA guide
gagccauagagugagacccca

SEQ ID NO: 44647 - RNA, 21 nt, Artificial Sequence
  LRRK2 RNA guide
gcacucuagccugagccauag

SEQ ID NO: 44648 - RNA, 21 nt, Artificial Sequence
  LRRK2 RNA guide
gccugagccauagagugagac

SEQ ID NO: 44649 - RNA, 21 nt, Artificial Sequence
  LRRK2 RNA guide
ggggucucacucuauggcuca

SEQ ID NO: 44650 - RNA, 21 nt, Artificial Sequence
  LRRK2 RNA guide
gggucucacucuauggcucag

SEQ ID NO: 44651 - RNA, 21 nt, Artificial Sequence
  LRRK2 RNA guide
ggucucacucuauggcucagg

SEQ ID NO: 44652 - RNA, 21 nt, Artificial Sequence
  LRRK2 RNA guide
gucucacucuauggcucaggc

SEQ ID NO: 44653 - RNA, 21 nt, Artificial Sequence
  LRRK2 RNA guide
uagccugagccauagagugag

SEQ ID NO: 44654 - RNA, 21 nt, Artificial Sequence
  LRRK2 RNA guide
ucacucuauggcucaggcuag

SEQ ID NO: 44655 - RNA, 21 nt, Artificial Sequence
  LRRK2 RNA guide
ucuagccugagccauagagug

SEQ ID NO: 44656 - RNA, 21 nt, Artificial Sequence
  LRRK2 RNA guide
ucuauggcucaggcuagagug

SEQ ID NO: 44657 - RNA, 21 nt, Artificial Sequence
  LRRK2 RNA guide
ucucacucuauggcucaggcu

SEQ ID NO: 44658 - RNA, 21 nt, Artificial Sequence
  LRRK2 RNA guide
ugagccauagagugagacccc

SEQ ID NO: 44659 - RNA, 21 nt, Artificial Sequence
  LRRK2 RNA guide
ugcacucuagccugagccaua

SEQ ID NO: 44660 - RNA, 21 nt, Artificial Sequence
  LRRK2 RNA guide
ugccacugcacucuagccuga

SEQ ID NO: 44661 - RNA, 21 nt, Artificial Sequence
  LRRK2 RNA guide
uggggucucacucuauggcuc

SEQ ID NO: 44662 - RNA, 22 nt, Artificial Sequence
  LRRK2 RNA guide
acucuagccugagccauagagu

SEQ ID NO: 44663 - RNA, 22 nt, Artificial Sequence
  LRRK2 RNA guide
acucuauggcucaggcuagagu

SEQ ID NO: 44664 - RNA, 22 nt, Artificial Sequence
  LRRK2 RNA guide
acugcacucuagccugagccau

SEQ ID NO: 44665 - RNA, 22 nt, Artificial Sequence
  LRRK2 RNA guide
agccugagccauagagugagac

SEQ ID NO: 44666 - RNA, 22 nt, Artificial Sequence
  LRRK2 RNA guide
auggcucaggcuagagugcagu

SEQ ID NO: 44667 - RNA, 22 nt, Artificial Sequence
  LRRK2 RNA guide
auggggucucacucuauggcuc

SEQ ID NO: 44668 - RNA, 22 nt, Artificial Sequence
  LRRK2 RNA guide
cacucuagccugagccauagag

SEQ ID NO: 44669 - RNA, 22 nt, Artificial Sequence
  LRRK2 RNA guide
cacucuauggcucaggcuagag

SEQ ID NO: 44670 - RNA, 22 nt, Artificial Sequence
  LRRK2 RNA guide
cacugcacucuagccugagcca

SEQ ID NO: 44671 - RNA, 22 nt, Artificial Sequence
  LRRK2 RNA guide
ccacugcacucuagccugagcc

SEQ ID NO: 44672 - RNA, 22 nt, Artificial Sequence
  LRRK2 RNA guide
ccugagccauagagugagaccc

SEQ ID NO: 44673 - RNA, 22 nt, Artificial Sequence
  LRRK2 RNA guide
cuagccugagccauagagugag

SEQ ID NO: 44674 - RNA, 22 nt, Artificial Sequence
  LRRK2 RNA guide
cucacucuauggcucaggcuag

SEQ ID NO: 44675 - RNA, 22 nt, Artificial Sequence
  LRRK2 RNA guide
cucuagccugagccauagagug

SEQ ID NO: 44676 - RNA, 22 nt, Artificial Sequence
  LRRK2 RNA guide
cucuauggcucaggcuagagug

SEQ ID NO: 44677 - RNA, 22 nt, Artificial Sequence
  LRRK2 RNA guide
cugagccauagagugagacccc

SEQ ID NO: 44678 - RNA, 22 nt, Artificial Sequence
  LRRK2 RNA guide
cugcacucuagccugagccaua

SEQ ID NO: 44679 - RNA, 22 nt, Artificial Sequence
  LRRK2 RNA guide
gagccauagagugagaccccau

SEQ ID NO: 44680 - RNA, 22 nt, Artificial Sequence
  LRRK2 RNA guide
gauggggucucacucuauggcu

SEQ ID NO: 44681 - RNA, 22 nt, Artificial Sequence
  LRRK2 RNA guide
gcacucuagccugagccauaga

SEQ ID NO: 44682 - RNA, 22 nt, Artificial Sequence
  LRRK2 RNA guide
gccugagccauagagugagacc

SEQ ID NO: 44683 - RNA, 22 nt, Artificial Sequence
  LRRK2 RNA guide
ggggucucacucuauggcucag

SEQ ID NO: 44684 - RNA, 22 nt, Artificial Sequence
  LRRK2 RNA guide
gggucucacucuauggcucagg

SEQ ID NO: 44685 - RNA, 22 nt, Artificial Sequence
  LRRK2 RNA guide
ggucucacucuauggcucaggc

SEQ ID NO: 44686 - RNA, 22 nt, Artificial Sequence
  LRRK2 RNA guide
gucucacucuauggcucaggcu

SEQ ID NO: 44687 - RNA, 22 nt, Artificial Sequence
  LRRK2 RNA guide
uagccugagccauagagugaga

SEQ ID NO: 44688 - RNA, 22 nt, Artificial Sequence
  LRRK2 RNA guide
uauggcucaggcuagagugcag

SEQ ID NO: 44689 - RNA, 22 nt, Artificial Sequence
  LRRK2 RNA guide
ucacucuauggcucaggcuaga

SEQ ID NO: 44690 - RNA, 22 nt, Artificial Sequence
  LRRK2 RNA guide
ucuagccugagccauagaguga

SEQ ID NO: 44691 - RNA, 22 nt, Artificial Sequence
  LRRK2 RNA guide
ucuauggcucaggcuagagugc

SEQ ID NO: 44692 - RNA, 22 nt, Artificial Sequence
  LRRK2 RNA guide
ucucacucuauggcucaggcua

SEQ ID NO: 44693 - RNA, 22 nt, Artificial Sequence
  LRRK2 RNA guide
ugagccauagagugagacccca

SEQ ID NO: 44694 - RNA, 22 nt, Artificial Sequence
  LRRK2 RNA guide
ugcacucuagccugagccauag

SEQ ID NO: 44695 - RNA, 22 nt, Artificial Sequence
  LRRK2 RNA guide
uggggucucacucuauggcuca

SEQ ID NO: 44696 - RNA, 20 nt, Artificial Sequence
  LRRK2 RNA guide
aaaauuacccgugcaugcac

SEQ ID NO: 44697 - RNA, 20 nt, Artificial Sequence
  LRRK2 RNA guide
aaauuacccgugcaugcacc

SEQ ID NO: 44698 - RNA, 20 nt, Artificial Sequence
  LRRK2 RNA guide
aauuacccgugcaugcaccu

SEQ ID NO: 44699 - RNA, 20 nt, Artificial Sequence
  LRRK2 RNA guide
acaggugcaugcacggguaa

SEQ ID NO: 44700 - RNA, 20 nt, Artificial Sequence
  LRRK2 RNA guide
acccgugcaugcaccuguag

SEQ ID NO: 44701 - RNA, 20 nt, Artificial Sequence
  LRRK2 RNA guide
acuacaggugcaugcacggg

SEQ ID NO: 44702 - RNA, 20 nt, Artificial Sequence
  LRRK2 RNA guide
agcugggacuacaggugcau

SEQ ID NO: 44703 - RNA, 20 nt, Artificial Sequence
  LRRK2 RNA guide
aggugcaugcacggguaauu

SEQ ID NO: 44704 - RNA, 20 nt, Artificial Sequence
  LRRK2 RNA guide
augcacggguaauuuuaaaa

SEQ ID NO: 44705 - RNA, 20 nt, Artificial Sequence
  LRRK2 RNA guide
auuacccgugcaugcaccug

SEQ ID NO: 44706 - RNA, 20 nt, Artificial Sequence
  LRRK2 RNA guide
auuuuaaaauuacccgugca

SEQ ID NO: 44707 - RNA, 20 nt, Artificial Sequence
  LRRK2 RNA guide
caggugcaugcacggguaau

SEQ ID NO: 44708 - RNA, 20 nt, Artificial Sequence
  LRRK2 RNA guide
caugcacggguaauuuuaaa

SEQ ID NO: 44709 - RNA, 20 nt, Artificial Sequence
  LRRK2 RNA guide
cccgugcaugcaccuguagu

SEQ ID NO: 44710 - RNA, 20 nt, Artificial Sequence
  LRRK2 RNA guide
ccgugcaugcaccuguaguc

SEQ ID NO: 44711 - RNA, 20 nt, Artificial Sequence
  LRRK2 RNA guide
cgugcaugcaccuguagucc

SEQ ID NO: 44712 - RNA, 20 nt, Artificial Sequence
  LRRK2 RNA guide
cuacaggugcaugcacgggu

SEQ ID NO: 44713 - RNA, 20 nt, Artificial Sequence
  LRRK2 RNA guide
cugggacuacaggugcaugc

SEQ ID NO: 44714 - RNA, 20 nt, Artificial Sequence
  LRRK2 RNA guide
gacuacaggugcaugcacgg

SEQ ID NO: 44715 - RNA, 20 nt, Artificial Sequence
  LRRK2 RNA guide
gcacggguaauuuuaaaaua

SEQ ID NO: 44716 - RNA, 20 nt, Artificial Sequence
  LRRK2 RNA guide
gcaugcacggguaauuuuaa

SEQ ID NO: 44717 - RNA, 20 nt, Artificial Sequence
  LRRK2 RNA guide
gcugggacuacaggugcaug

SEQ ID NO: 44718 - RNA, 20 nt, Artificial Sequence
  LRRK2 RNA guide
ggacuacaggugcaugcacg

SEQ ID NO: 44719 - RNA, 20 nt, Artificial Sequence
  LRRK2 RNA guide
gggacuacaggugcaugcac

SEQ ID NO: 44720 - RNA, 20 nt, Artificial Sequence
  LRRK2 RNA guide
ggugcaugcacggguaauuu

SEQ ID NO: 44721 - RNA, 20 nt, Artificial Sequence
  LRRK2 RNA guide
gugcaugcacggguaauuuu

SEQ ID NO: 44722 - RNA, 20 nt, Artificial Sequence
  LRRK2 RNA guide
uaaaauuacccgugcaugca

SEQ ID NO: 44723 - RNA, 20 nt, Artificial Sequence
  LRRK2 RNA guide
uacaggugcaugcacgggua

SEQ ID NO: 44724 - RNA, 20 nt, Artificial Sequence
  LRRK2 RNA guide
uacccgugcaugcaccugua

SEQ ID NO: 44725 - RNA, 20 nt, Artificial Sequence
  LRRK2 RNA guide
uauuuuaaaauuacccgugc

SEQ ID NO: 44726 - RNA, 20 nt, Artificial Sequence
  LRRK2 RNA guide
ugcacggguaauuuuaaaau

SEQ ID NO: 44727 - RNA, 20 nt, Artificial Sequence
  LRRK2 RNA guide
ugcaugcacggguaauuuua

SEQ ID NO: 44728 - RNA, 20 nt, Artificial Sequence
  LRRK2 RNA guide
ugggacuacaggugcaugca

SEQ ID NO: 44729 - RNA, 20 nt, Artificial Sequence
  LRRK2 RNA guide
uuaaaauuacccgugcaugc

SEQ ID NO: 44730 - RNA, 20 nt, Artificial Sequence
  LRRK2 RNA guide
uuuaaaauuacccgugcaug

SEQ ID NO: 44731 - RNA, 20 nt, Artificial Sequence
  LRRK2 RNA guide
uuuuaaaauuacccgugcau

SEQ ID NO: 44732 - RNA, 21 nt, Artificial Sequence
  LRRK2 RNA guide
aaaauuacccgugcaugcacc

SEQ ID NO: 44733 - RNA, 21 nt, Artificial Sequence
  LRRK2 RNA guide
aaauuacccgugcaugcaccu

SEQ ID NO: 44734 - RNA, 21 nt, Artificial Sequence
  LRRK2 RNA guide
aauuacccgugcaugcaccug

SEQ ID NO: 44735 - RNA, 21 nt, Artificial Sequence
  LRRK2 RNA guide
acaggugcaugcacggguaau

SEQ ID NO: 44736 - RNA, 21 nt, Artificial Sequence
  LRRK2 RNA guide
acccgugcaugcaccuguagu

SEQ ID NO: 44737 - RNA, 21 nt, Artificial Sequence
  LRRK2 RNA guide
acuacaggugcaugcacgggu

SEQ ID NO: 44738 - RNA, 21 nt, Artificial Sequence
  LRRK2 RNA guide
agcugggacuacaggugcaug

SEQ ID NO: 44739 - RNA, 21 nt, Artificial Sequence
  LRRK2 RNA guide
aggugcaugcacggguaauuu

SEQ ID NO: 44740 - RNA, 21 nt, Artificial Sequence
  LRRK2 RNA guide
auuacccgugcaugcaccugu

SEQ ID NO: 44741 - RNA, 21 nt, Artificial Sequence
  LRRK2 RNA guide
caggugcaugcacggguaauu

SEQ ID NO: 44742 - RNA, 21 nt, Artificial Sequence
  LRRK2 RNA guide
caugcacggguaauuuuaaaa

SEQ ID NO: 44743 - RNA, 21 nt, Artificial Sequence
  LRRK2 RNA guide
cccgugcaugcaccuguaguc

SEQ ID NO: 44744 - RNA, 21 nt, Artificial Sequence
  LRRK2 RNA guide
ccgugcaugcaccuguagucc

SEQ ID NO: 44745 - RNA, 21 nt, Artificial Sequence
  LRRK2 RNA guide
cgugcaugcaccuguaguccc

SEQ ID NO: 44746 - RNA, 21 nt, Artificial Sequence
  LRRK2 RNA guide
cuacaggugcaugcacgggua

SEQ ID NO: 44747 - RNA, 21 nt, Artificial Sequence
  LRRK2 RNA guide
cugggacuacaggugcaugca

SEQ ID NO: 44748 - RNA, 21 nt, Artificial Sequence
  LRRK2 RNA guide
gacuacaggugcaugcacggg

SEQ ID NO: 44749 - RNA, 21 nt, Artificial Sequence
  LRRK2 RNA guide
gcaugcacggguaauuuuaaa

SEQ ID NO: 44750 - RNA, 21 nt, Artificial Sequence
  LRRK2 RNA guide
gcugggacuacaggugcaugc

SEQ ID NO: 44751 - RNA, 21 nt, Artificial Sequence
  LRRK2 RNA guide
ggacuacaggugcaugcacgg

SEQ ID NO: 44752 - RNA, 21 nt, Artificial Sequence
  LRRK2 RNA guide
gggacuacaggugcaugcacg

SEQ ID NO: 44753 - RNA, 21 nt, Artificial Sequence
  LRRK2 RNA guide
ggugcaugcacggguaauuuu

SEQ ID NO: 44754 - RNA, 21 nt, Artificial Sequence
  LRRK2 RNA guide
gugcaugcacggguaauuuua

SEQ ID NO: 44755 - RNA, 21 nt, Artificial Sequence
  LRRK2 RNA guide
uaaaauuacccgugcaugcac

SEQ ID NO: 44756 - RNA, 21 nt, Artificial Sequence
  LRRK2 RNA guide
uacaggugcaugcacggguaa

SEQ ID NO: 44757 - RNA, 21 nt, Artificial Sequence
  LRRK2 RNA guide
uacccgugcaugcaccuguag

SEQ ID NO: 44758 - RNA, 21 nt, Artificial Sequence
  LRRK2 RNA guide
ugcaugcacggguaauuuuaa

SEQ ID NO: 44759 - RNA, 21 nt, Artificial Sequence
  LRRK2 RNA guide
ugggacuacaggugcaugcac

SEQ ID NO: 44760 - RNA, 21 nt, Artificial Sequence
  LRRK2 RNA guide
uuaaaauuacccgugcaugca

SEQ ID NO: 44761 - RNA, 21 nt, Artificial Sequence
  LRRK2 RNA guide
uuacccgugcaugcaccugua

SEQ ID NO: 44762 - RNA, 21 nt, Artificial Sequence
  LRRK2 RNA guide
uuuaaaauuacccgugcaugc

SEQ ID NO: 44763 - RNA, 21 nt, Artificial Sequence
  LRRK2 RNA guide
uuuuaaaauuacccgugcaug

SEQ ID NO: 44764 - RNA, 22 nt, Artificial Sequence
  LRRK2 RNA guide
aaaauuacccgugcaugcaccu

SEQ ID NO: 44765 - RNA, 22 nt, Artificial Sequence
  LRRK2 RNA guide
aaauuacccgugcaugcaccug

SEQ ID NO: 44766 - RNA, 22 nt, Artificial Sequence
  LRRK2 RNA guide
aauuacccgugcaugcaccugu

SEQ ID NO: 44767 - RNA, 22 nt, Artificial Sequence
  LRRK2 RNA guide
acaggugcaugcacggguaauu

SEQ ID NO: 44768 - RNA, 22 nt, Artificial Sequence
  LRRK2 RNA guide
acccgugcaugcaccuguaguc

SEQ ID NO: 44769 - RNA, 22 nt, Artificial Sequence
  LRRK2 RNA guide
acuacaggugcaugcacgggua

SEQ ID NO: 44770 - RNA, 22 nt, Artificial Sequence
  LRRK2 RNA guide
agcugggacuacaggugcaugc

SEQ ID NO: 44771 - RNA, 22 nt, Artificial Sequence
  LRRK2 RNA guide
aggugcaugcacggguaauuuu

SEQ ID NO: 44772 - RNA, 22 nt, Artificial Sequence
  LRRK2 RNA guide
auuacccgugcaugcaccugua

SEQ ID NO: 44773 - RNA, 22 nt, Artificial Sequence
  LRRK2 RNA guide
auuuuaaaauuacccgugcaug

SEQ ID NO: 44774 - RNA, 22 nt, Artificial Sequence
  LRRK2 RNA guide
caggugcaugcacggguaauuu

SEQ ID NO: 44775 - RNA, 22 nt, Artificial Sequence
  LRRK2 RNA guide
caugcacggguaauuuuaaaau

SEQ ID NO: 44776 - RNA, 22 nt, Artificial Sequence
  LRRK2 RNA guide
cccgugcaugcaccuguagucc

SEQ ID NO: 44777 - RNA, 22 nt, Artificial Sequence
  LRRK2 RNA guide
ccgugcaugcaccuguaguccc

SEQ ID NO: 44778 - RNA, 22 nt, Artificial Sequence
  LRRK2 RNA guide
cgugcaugcaccuguaguccca

SEQ ID NO: 44779 - RNA, 22 nt, Artificial Sequence
  LRRK2 RNA guide
cuacaggugcaugcacggguaa

SEQ ID NO: 44780 - RNA, 22 nt, Artificial Sequence
  LRRK2 RNA guide
cugggacuacaggugcaugcac

SEQ ID NO: 44781 - RNA, 22 nt, Artificial Sequence
  LRRK2 RNA guide
gacuacaggugcaugcacgggu

SEQ ID NO: 44782 - RNA, 22 nt, Artificial Sequence
  LRRK2 RNA guide
gcaugcacggguaauuuuaaaa

SEQ ID NO: 44783 - RNA, 22 nt, Artificial Sequence
  LRRK2 RNA guide
gcugggacuacaggugcaugca

SEQ ID NO: 44784 - RNA, 22 nt, Artificial Sequence
  LRRK2 RNA guide
ggacuacaggugcaugcacggg

SEQ ID NO: 44785 - RNA, 22 nt, Artificial Sequence
  LRRK2 RNA guide
gggacuacaggugcaugcacgg

SEQ ID NO: 44786 - RNA, 22 nt, Artificial Sequence
  LRRK2 RNA guide
ggugcaugcacggguaauuuua

SEQ ID NO: 44787 - RNA, 22 nt, Artificial Sequence
  LRRK2 RNA guide
guagcugggacuacaggugcau

SEQ ID NO: 44788 - RNA, 22 nt, Artificial Sequence
  LRRK2 RNA guide
gugcaugcacggguaauuuuaa

SEQ ID NO: 44789 - RNA, 22 nt, Artificial Sequence
  LRRK2 RNA guide
uaaaauuacccgugcaugcacc

SEQ ID NO: 44790 - RNA, 22 nt, Artificial Sequence
  LRRK2 RNA guide
uacaggugcaugcacggguaau

SEQ ID NO: 44791 - RNA, 22 nt, Artificial Sequence
  LRRK2 RNA guide
uacccgugcaugcaccuguagu

SEQ ID NO: 44792 - RNA, 22 nt, Artificial Sequence
  LRRK2 RNA guide
uagcugggacuacaggugcaug

SEQ ID NO: 44793 - RNA, 22 nt, Artificial Sequence
  LRRK2 RNA guide
ugcaugcacggguaauuuuaaa

SEQ ID NO: 44794 - RNA, 22 nt, Artificial Sequence
  LRRK2 RNA guide
ugggacuacaggugcaugcacg

SEQ ID NO: 44795 - RNA, 22 nt, Artificial Sequence
  LRRK2 RNA guide
uuaaaauuacccgugcaugcac

SEQ ID NO: 44796 - RNA, 22 nt, Artificial Sequence
  LRRK2 RNA guide
uuacccgugcaugcaccuguag

SEQ ID NO: 44797 - RNA, 22 nt, Artificial Sequence
  LRRK2 RNA guide
uuuaaaauuacccgugcaugca

SEQ ID NO: 44798 - RNA, 22 nt, Artificial Sequence
  LRRK2 RNA guide
uuuuaaaauuacccgugcaugc

SEQ ID NO: 44799 - RNA, 20 nt, Artificial Sequence
  LRRK2 RNA guide
aaaauuacccaugcaugcac

SEQ ID NO: 44800 - RNA, 20 nt, Artificial Sequence
  LRRK2 RNA guide
aaauuacccaugcaugcacc

SEQ ID NO: 44801 - RNA, 20 nt, Artificial Sequence
  LRRK2 RNA guide
aauuacccaugcaugcaccu

SEQ ID NO: 44802 - RNA, 20 nt, Artificial Sequence
  LRRK2 RNA guide
acaggugcaugcauggguaa

SEQ ID NO: 44803 - RNA, 20 nt, Artificial Sequence
  LRRK2 RNA guide
acccaugcaugcaccuguag

SEQ ID NO: 44804 - RNA, 20 nt, Artificial Sequence
  LRRK2 RNA guide
acuacaggugcaugcauggg

SEQ ID NO: 44805 - RNA, 20 nt, Artificial Sequence
  LRRK2 RNA guide
aggugcaugcauggguaauu

SEQ ID NO: 44806 - RNA, 20 nt, Artificial Sequence
  LRRK2 RNA guide
auuacccaugcaugcaccug

SEQ ID NO: 44807 - RNA, 20 nt, Artificial Sequence
  LRRK2 RNA guide
caggugcaugcauggguaau

SEQ ID NO: 44808 - RNA, 20 nt, Artificial Sequence
  LRRK2 RNA guide
caugcauggguaauuuuaaa

SEQ ID NO: 44809 - RNA, 20 nt, Artificial Sequence
  LRRK2 RNA guide
ccaugcaugcaccuguaguc

SEQ ID NO: 44810 - RNA, 20 nt, Artificial Sequence
  LRRK2 RNA guide
cccaugcaugcaccuguagu

SEQ ID NO: 44811 - RNA, 20 nt, Artificial Sequence
  LRRK2 RNA guide
cuacaggugcaugcaugggu

SEQ ID NO: 44812 - RNA, 20 nt, Artificial Sequence
  LRRK2 RNA guide
gacuacaggugcaugcaugg

SEQ ID NO: 44813 - RNA, 20 nt, Artificial Sequence
  LRRK2 RNA guide
gcaugcauggguaauuuuaa

SEQ ID NO: 44814 - RNA, 20 nt, Artificial Sequence
  LRRK2 RNA guide
ggacuacaggugcaugcaug

SEQ ID NO: 44815 - RNA, 20 nt, Artificial Sequence
  LRRK2 RNA guide
gggacuacaggugcaugcau

SEQ ID NO: 44816 - RNA, 20 nt, Artificial Sequence
  LRRK2 RNA guide
ggugcaugcauggguaauuu

SEQ ID NO: 44817 - RNA, 20 nt, Artificial Sequence
  LRRK2 RNA guide
gugcaugcauggguaauuuu

SEQ ID NO: 44818 - RNA, 20 nt, Artificial Sequence
  LRRK2 RNA guide
uaaaauuacccaugcaugca

SEQ ID NO: 44819 - RNA, 20 nt, Artificial Sequence
  LRRK2 RNA guide
uacaggugcaugcaugggua

SEQ ID NO: 44820 - RNA, 20 nt, Artificial Sequence
  LRRK2 RNA guide
uacccaugcaugcaccugua

SEQ ID NO: 44821 - RNA, 20 nt, Artificial Sequence
  LRRK2 RNA guide
ugcaugcauggguaauuuua

SEQ ID NO: 44822 - RNA, 20 nt, Artificial Sequence
  LRRK2 RNA guide
uuaaaauuacccaugcaugc

SEQ ID NO: 44823 - RNA, 20 nt, Artificial Sequence
  LRRK2 RNA guide
uuacccaugcaugcaccugu

SEQ ID NO: 44824 - RNA, 20 nt, Artificial Sequence
  LRRK2 RNA guide
uuuaaaauuacccaugcaug

SEQ ID NO: 44825 - RNA, 21 nt, Artificial Sequence
  LRRK2 RNA guide
aaaauuacccaugcaugcacc

SEQ ID NO: 44826 - RNA, 21 nt, Artificial Sequence
  LRRK2 RNA guide
aaauuacccaugcaugcaccu

SEQ ID NO: 44827 - RNA, 21 nt, Artificial Sequence
  LRRK2 RNA guide
aauuacccaugcaugcaccug

SEQ ID NO: 44828 - RNA, 21 nt, Artificial Sequence
  LRRK2 RNA guide
acaggugcaugcauggguaau

SEQ ID NO: 44829 - RNA, 21 nt, Artificial Sequence
  LRRK2 RNA guide
acccaugcaugcaccuguagu

SEQ ID NO: 44830 - RNA, 21 nt, Artificial Sequence
  LRRK2 RNA guide
acuacaggugcaugcaugggu

SEQ ID NO: 44831 - RNA, 21 nt, Artificial Sequence
  LRRK2 RNA guide
aggugcaugcauggguaauuu

SEQ ID NO: 44832 - RNA, 21 nt, Artificial Sequence
  LRRK2 RNA guide
auuacccaugcaugcaccugu

SEQ ID NO: 44833 - RNA, 21 nt, Artificial Sequence
  LRRK2 RNA guide
caggugcaugcauggguaauu

SEQ ID NO: 44834 - RNA, 21 nt, Artificial Sequence
  LRRK2 RNA guide
ccaugcaugcaccuguagucc

SEQ ID NO: 44835 - RNA, 21 nt, Artificial Sequence
  LRRK2 RNA guide
cccaugcaugcaccuguaguc

SEQ ID NO: 44836 - RNA, 21 nt, Artificial Sequence
  LRRK2 RNA guide
cuacaggugcaugcaugggua

SEQ ID NO: 44837 - RNA, 21 nt, Artificial Sequence
  LRRK2 RNA guide
gacuacaggugcaugcauggg

SEQ ID NO: 44838 - RNA, 21 nt, Artificial Sequence
  LRRK2 RNA guide
gcaugcauggguaauuuuaaa

SEQ ID NO: 44839 - RNA, 21 nt, Artificial Sequence
  LRRK2 RNA guide
ggacuacaggugcaugcaugg

SEQ ID NO: 44840 - RNA, 21 nt, Artificial Sequence
  LRRK2 RNA guide
gggacuacaggugcaugcaug

SEQ ID NO: 44841 - RNA, 21 nt, Artificial Sequence
  LRRK2 RNA guide
ggugcaugcauggguaauuuu

SEQ ID NO: 44842 - RNA, 21 nt, Artificial Sequence
  LRRK2 RNA guide
gugcaugcauggguaauuuua

SEQ ID NO: 44843 - RNA, 21 nt, Artificial Sequence
  LRRK2 RNA guide
uaaaauuacccaugcaugcac

SEQ ID NO: 44844 - RNA, 21 nt, Artificial Sequence
  LRRK2 RNA guide
uacaggugcaugcauggguaa

SEQ ID NO: 44845 - RNA, 21 nt, Artificial Sequence
  LRRK2 RNA guide
uacccaugcaugcaccuguag

SEQ ID NO: 44846 - RNA, 21 nt, Artificial Sequence
  LRRK2 RNA guide
ugcaugcauggguaauuuuaa

SEQ ID NO: 44847 - RNA, 21 nt, Artificial Sequence
  LRRK2 RNA guide
ugggacuacaggugcaugcau

SEQ ID NO: 44848 - RNA, 21 nt, Artificial Sequence
  LRRK2 RNA guide
uuaaaauuacccaugcaugca

SEQ ID NO: 44849 - RNA, 21 nt, Artificial Sequence
  LRRK2 RNA guide
uuacccaugcaugcaccugua

SEQ ID NO: 44850 - RNA, 21 nt, Artificial Sequence
  LRRK2 RNA guide
uuuaaaauuacccaugcaugc

SEQ ID NO: 44851 - RNA, 22 nt, Artificial Sequence
  LRRK2 RNA guide
aaaauuacccaugcaugcaccu

SEQ ID NO: 44852 - RNA, 22 nt, Artificial Sequence
  LRRK2 RNA guide
aaauuacccaugcaugcaccug

SEQ ID NO: 44853 - RNA, 22 nt, Artificial Sequence
  LRRK2 RNA guide
aauuacccaugcaugcaccugu

SEQ ID NO: 44854 - RNA, 22 nt, Artificial Sequence
  LRRK2 RNA guide
acaggugcaugcauggguaauu

SEQ ID NO: 44855 - RNA, 22 nt, Artificial Sequence
  LRRK2 RNA guide
acccaugcaugcaccuguaguc

SEQ ID NO: 44856 - RNA, 22 nt, Artificial Sequence
  LRRK2 RNA guide
acuacaggugcaugcaugggua

SEQ ID NO: 44857 - RNA, 22 nt, Artificial Sequence
  LRRK2 RNA guide
aggugcaugcauggguaauuuu

SEQ ID NO: 44858 - RNA, 22 nt, Artificial Sequence
  LRRK2 RNA guide
auuacccaugcaugcaccugua

SEQ ID NO: 44859 - RNA, 22 nt, Artificial Sequence
  LRRK2 RNA guide
caggugcaugcauggguaauuu

SEQ ID NO: 44860 - RNA, 22 nt, Artificial Sequence
  LRRK2 RNA guide
ccaugcaugcaccuguaguccc

SEQ ID NO: 44861 - RNA, 22 nt, Artificial Sequence
  LRRK2 RNA guide
cccaugcaugcaccuguagucc

SEQ ID NO: 44862 - RNA, 22 nt, Artificial Sequence
  LRRK2 RNA guide
cuacaggugcaugcauggguaa

SEQ ID NO: 44863 - RNA, 22 nt, Artificial Sequence
  LRRK2 RNA guide
cugggacuacaggugcaugcau

SEQ ID NO: 44864 - RNA, 22 nt, Artificial Sequence
  LRRK2 RNA guide
gacuacaggugcaugcaugggu

SEQ ID NO: 44865 - RNA, 22 nt, Artificial Sequence
  LRRK2 RNA guide
gcaugcauggguaauuuuaaaa

SEQ ID NO: 44866 - RNA, 22 nt, Artificial Sequence
  LRRK2 RNA guide
ggacuacaggugcaugcauggg

SEQ ID NO: 44867 - RNA, 22 nt, Artificial Sequence
  LRRK2 RNA guide
gggacuacaggugcaugcaugg

SEQ ID NO: 44868 - RNA, 22 nt, Artificial Sequence
  LRRK2 RNA guide
ggugcaugcauggguaauuuua

SEQ ID NO: 44869 - RNA, 22 nt, Artificial Sequence
  LRRK2 RNA guide
gugcaugcauggguaauuuuaa

SEQ ID NO: 44870 - RNA, 22 nt, Artificial Sequence
  LRRK2 RNA guide
uaaaauuacccaugcaugcacc

SEQ ID NO: 44871 - RNA, 22 nt, Artificial Sequence
  LRRK2 RNA guide
uacaggugcaugcauggguaau

SEQ ID NO: 44872 - RNA, 22 nt, Artificial Sequence
  LRRK2 RNA guide
uacccaugcaugcaccuguagu

SEQ ID NO: 44873 - RNA, 22 nt, Artificial Sequence
  LRRK2 RNA guide
ugcaugcauggguaauuuuaaa

SEQ ID NO: 44874 - RNA, 22 nt, Artificial Sequence
  LRRK2 RNA guide
ugggacuacaggugcaugcaug

SEQ ID NO: 44875 - RNA, 22 nt, Artificial Sequence
  LRRK2 RNA guide
uuaaaauuacccaugcaugcac

SEQ ID NO: 44876 - RNA, 22 nt, Artificial Sequence
  LRRK2 RNA guide
uuacccaugcaugcaccuguag

SEQ ID NO: 44877 - RNA, 22 nt, Artificial Sequence
  LRRK2 RNA guide
uuuaaaauuacccaugcaugca

SEQ ID NO: 44878 - RNA, 22 nt, Artificial Sequence
  LRRK2 RNA guide
uuuuaaaauuacccaugcaugc

SEQ ID NO: 44879 - RNA, 20 nt, Artificial Sequence
  LRRK2 RNA guide
acugugggauugcuugagcc

SEQ ID NO: 44880 - RNA, 20 nt, Artificial Sequence
  LRRK2 RNA guide
agcacugugggauugcuuga

SEQ ID NO: 44881 - RNA, 20 nt, Artificial Sequence
  LRRK2 RNA guide
auuccugggcucaagcaauc

SEQ ID NO: 44882 - RNA, 20 nt, Artificial Sequence
  LRRK2 RNA guide
cacugugggauugcuugagc

SEQ ID NO: 44883 - RNA, 20 nt, Artificial Sequence
  LRRK2 RNA guide
ccugggcucaagcaauccca

SEQ ID NO: 44884 - RNA, 20 nt, Artificial Sequence
  LRRK2 RNA guide
cugggcucaagcaaucccac

SEQ ID NO: 44885 - RNA, 20 nt, Artificial Sequence
  LRRK2 RNA guide
cugugggauugcuugagccc

SEQ ID NO: 44886 - RNA, 20 nt, Artificial Sequence
  LRRK2 RNA guide
gcacugugggauugcuugag

SEQ ID NO: 44887 - RNA, 20 nt, Artificial Sequence
  LRRK2 RNA guide
uccugggcucaagcaauccc

SEQ ID NO: 44888 - RNA, 20 nt, Artificial Sequence
  LRRK2 RNA guide
ugugggauugcuugagccca

SEQ ID NO: 44889 - RNA, 20 nt, Artificial Sequence
  LRRK2 RNA guide
uuccugggcucaagcaaucc

SEQ ID NO: 44890 - RNA, 21 nt, Artificial Sequence
  LRRK2 RNA guide
aauuccugggcucaagcaauc

SEQ ID NO: 44891 - RNA, 21 nt, Artificial Sequence
  LRRK2 RNA guide
acugugggauugcuugagccc

SEQ ID NO: 44892 - RNA, 21 nt, Artificial Sequence
  LRRK2 RNA guide
agcacugugggauugcuugag

SEQ ID NO: 44893 - RNA, 21 nt, Artificial Sequence
  LRRK2 RNA guide
auuccugggcucaagcaaucc

SEQ ID NO: 44894 - RNA, 21 nt, Artificial Sequence
  LRRK2 RNA guide
auugugcaggcuggucuugaa

SEQ ID NO: 44895 - RNA, 21 nt, Artificial Sequence
  LRRK2 RNA guide
cacugugggauugcuugagcc

SEQ ID NO: 44896 - RNA, 21 nt, Artificial Sequence
  LRRK2 RNA guide
cagcacugugggauugcuuga

SEQ ID NO: 44897 - RNA, 21 nt, Artificial Sequence
  LRRK2 RNA guide
ccugggcucaagcaaucccac

SEQ ID NO: 44898 - RNA, 21 nt, Artificial Sequence
  LRRK2 RNA guide
cugggcucaagcaaucccaca

SEQ ID NO: 44899 - RNA, 21 nt, Artificial Sequence
  LRRK2 RNA guide
cugugggauugcuugagccca

SEQ ID NO: 44900 - RNA, 21 nt, Artificial Sequence
  LRRK2 RNA guide
gcacugugggauugcuugagc

SEQ ID NO: 44901 - RNA, 21 nt, Artificial Sequence
  LRRK2 RNA guide
uccugggcucaagcaauccca

SEQ ID NO: 44902 - RNA, 21 nt, Artificial Sequence
  LRRK2 RNA guide
ugugggauugcuugagcccag

SEQ ID NO: 44903 - RNA, 21 nt, Artificial Sequence
  LRRK2 RNA guide
uuccugggcucaagcaauccc

SEQ ID NO: 44904 - RNA, 22 nt, Artificial Sequence
  LRRK2 RNA guide
aauuccugggcucaagcaaucc

SEQ ID NO: 44905 - RNA, 22 nt, Artificial Sequence
  LRRK2 RNA guide
acugugggauugcuugagccca

SEQ ID NO: 44906 - RNA, 22 nt, Artificial Sequence
  LRRK2 RNA guide
agcacugugggauugcuugagc

SEQ ID NO: 44907 - RNA, 22 nt, Artificial Sequence
  LRRK2 RNA guide
auuccugggcucaagcaauccc

SEQ ID NO: 44908 - RNA, 22 nt, Artificial Sequence
  LRRK2 RNA guide
auugugcaggcuggucuugaau

SEQ ID NO: 44909 - RNA, 22 nt, Artificial Sequence
  LRRK2 RNA guide
cacugugggauugcuugagccc

SEQ ID NO: 44910 - RNA, 22 nt, Artificial Sequence
  LRRK2 RNA guide
cagcacugugggauugcuugag

SEQ ID NO: 44911 - RNA, 22 nt, Artificial Sequence
  LRRK2 RNA guide
caggaauucaagaccagccugc

SEQ ID NO: 44912 - RNA, 22 nt, Artificial Sequence
  LRRK2 RNA guide
ccugggcucaagcaaucccaca

SEQ ID NO: 44913 - RNA, 22 nt, Artificial Sequence
  LRRK2 RNA guide
cugggcucaagcaaucccacag

SEQ ID NO: 44914 - RNA, 22 nt, Artificial Sequence
  LRRK2 RNA guide
cugugggauugcuugagcccag

SEQ ID NO: 44915 - RNA, 22 nt, Artificial Sequence
  LRRK2 RNA guide
gaauuccugggcucaagcaauc

SEQ ID NO: 44916 - RNA, 22 nt, Artificial Sequence
  LRRK2 RNA guide
gcacugugggauugcuugagcc

SEQ ID NO: 44917 - RNA, 22 nt, Artificial Sequence
  LRRK2 RNA guide
gugggauugcuugagcccagga

SEQ ID NO: 44918 - RNA, 22 nt, Artificial Sequence
  LRRK2 RNA guide
uauugugcaggcuggucuugaa

SEQ ID NO: 44919 - RNA, 22 nt, Artificial Sequence
  LRRK2 RNA guide
ucagcacugugggauugcuuga

SEQ ID NO: 44920 - RNA, 22 nt, Artificial Sequence
  LRRK2 RNA guide
uccugggcucaagcaaucccac

SEQ ID NO: 44921 - RNA, 22 nt, Artificial Sequence
  LRRK2 RNA guide
ugaauuccugggcucaagcaau

SEQ ID NO: 44922 - RNA, 22 nt, Artificial Sequence
  LRRK2 RNA guide
ugugggauugcuugagcccagg

SEQ ID NO: 44923 - RNA, 22 nt, Artificial Sequence
  LRRK2 RNA guide
uuccugggcucaagcaauccca

SEQ ID NO: 44924 - RNA, 20 nt, Artificial Sequence
  LRRK2 RNA guide
aauucccgggcucaagcaau

SEQ ID NO: 44925 - RNA, 20 nt, Artificial Sequence
  LRRK2 RNA guide
auucccgggcucaagcaauc

SEQ ID NO: 44926 - RNA, 20 nt, Artificial Sequence
  LRRK2 RNA guide
cccgggaauucaagaccagc

SEQ ID NO: 44927 - RNA, 20 nt, Artificial Sequence
  LRRK2 RNA guide
cccgggcucaagcaauccca

SEQ ID NO: 44928 - RNA, 20 nt, Artificial Sequence
  LRRK2 RNA guide
ccgggaauucaagaccagcc

SEQ ID NO: 44929 - RNA, 20 nt, Artificial Sequence
  LRRK2 RNA guide
ccgggcucaagcaaucccac

SEQ ID NO: 44930 - RNA, 20 nt, Artificial Sequence
  LRRK2 RNA guide
cgggaauucaagaccagccu

SEQ ID NO: 44931 - RNA, 20 nt, Artificial Sequence
  LRRK2 RNA guide
gaauucccgggcucaagcaa

SEQ ID NO: 44932 - RNA, 20 nt, Artificial Sequence
  LRRK2 RNA guide
gcaggcuggucuugaauucc

SEQ ID NO: 44933 - RNA, 20 nt, Artificial Sequence
  LRRK2 RNA guide
gcccgggaauucaagaccag

SEQ ID NO: 44934 - RNA, 20 nt, Artificial Sequence
  LRRK2 RNA guide
gggauugcuugagcccggga

SEQ ID NO: 44935 - RNA, 20 nt, Artificial Sequence
  LRRK2 RNA guide
gugcaggcuggucuugaauu

SEQ ID NO: 44936 - RNA, 20 nt, Artificial Sequence
  LRRK2 RNA guide
gugggauugcuugagcccgg

SEQ ID NO: 44937 - RNA, 20 nt, Artificial Sequence
  LRRK2 RNA guide
ucccgggcucaagcaauccc

SEQ ID NO: 44938 - RNA, 20 nt, Artificial Sequence
  LRRK2 RNA guide
ugaauucccgggcucaagca

SEQ ID NO: 44939 - RNA, 20 nt, Artificial Sequence
  LRRK2 RNA guide
ugcaggcuggucuugaauuc

SEQ ID NO: 44940 - RNA, 20 nt, Artificial Sequence
  LRRK2 RNA guide
ugggauugcuugagcccggg

SEQ ID NO: 44941 - RNA, 20 nt, Artificial Sequence
  LRRK2 RNA guide
ugugcaggcuggucuugaau

SEQ ID NO: 44942 - RNA, 20 nt, Artificial Sequence
  LRRK2 RNA guide
ugugggauugcuugagcccg

SEQ ID NO: 44943 - RNA, 20 nt, Artificial Sequence
  LRRK2 RNA guide
uucccgggcucaagcaaucc

SEQ ID NO: 44944 - RNA, 20 nt, Artificial Sequence
  LRRK2 RNA guide
uugugcaggcuggucuugaa

SEQ ID NO: 44945 - RNA, 21 nt, Artificial Sequence
  LRRK2 RNA guide
aauucccgggcucaagcaauc

SEQ ID NO: 44946 - RNA, 21 nt, Artificial Sequence
  LRRK2 RNA guide
agcccgggaauucaagaccag

SEQ ID NO: 44947 - RNA, 21 nt, Artificial Sequence
  LRRK2 RNA guide
auucccgggcucaagcaaucc

SEQ ID NO: 44948 - RNA, 21 nt, Artificial Sequence
  LRRK2 RNA guide
cccgggaauucaagaccagcc

SEQ ID NO: 44949 - RNA, 21 nt, Artificial Sequence
  LRRK2 RNA guide
cccgggcucaagcaaucccac

SEQ ID NO: 44950 - RNA, 21 nt, Artificial Sequence
  LRRK2 RNA guide
ccgggaauucaagaccagccu

SEQ ID NO: 44951 - RNA, 21 nt, Artificial Sequence
  LRRK2 RNA guide
ccgggcucaagcaaucccaca

SEQ ID NO: 44952 - RNA, 21 nt, Artificial Sequence
  LRRK2 RNA guide
cgggaauucaagaccagccug

SEQ ID NO: 44953 - RNA, 21 nt, Artificial Sequence
  LRRK2 RNA guide
cugugggauugcuugagcccg

SEQ ID NO: 44954 - RNA, 21 nt, Artificial Sequence
  LRRK2 RNA guide
gaauucccgggcucaagcaau

SEQ ID NO: 44955 - RNA, 21 nt, Artificial Sequence
  LRRK2 RNA guide
gcaggcuggucuugaauuccc

SEQ ID NO: 44956 - RNA, 21 nt, Artificial Sequence
  LRRK2 RNA guide
gcccgggaauucaagaccagc

SEQ ID NO: 44957 - RNA, 21 nt, Artificial Sequence
  LRRK2 RNA guide
gggauugcuugagcccgggaa

SEQ ID NO: 44958 - RNA, 21 nt, Artificial Sequence
  LRRK2 RNA guide
gugcaggcuggucuugaauuc

SEQ ID NO: 44959 - RNA, 21 nt, Artificial Sequence
  LRRK2 RNA guide
gugggauugcuugagcccggg

SEQ ID NO: 44960 - RNA, 21 nt, Artificial Sequence
  LRRK2 RNA guide
ucccgggcucaagcaauccca

SEQ ID NO: 44961 - RNA, 21 nt, Artificial Sequence
  LRRK2 RNA guide
ugaauucccgggcucaagcaa

SEQ ID NO: 44962 - RNA, 21 nt, Artificial Sequence
  LRRK2 RNA guide
ugcaggcuggucuugaauucc

SEQ ID NO: 44963 - RNA, 21 nt, Artificial Sequence
  LRRK2 RNA guide
ugggauugcuugagcccggga

SEQ ID NO: 44964 - RNA, 21 nt, Artificial Sequence
  LRRK2 RNA guide
ugugcaggcuggucuugaauu

SEQ ID NO: 44965 - RNA, 21 nt, Artificial Sequence
  LRRK2 RNA guide
ugugggauugcuugagcccgg

SEQ ID NO: 44966 - RNA, 21 nt, Artificial Sequence
  LRRK2 RNA guide
uucccgggcucaagcaauccc

SEQ ID NO: 44967 - RNA, 21 nt, Artificial Sequence
  LRRK2 RNA guide
uugaauucccgggcucaagca

SEQ ID NO: 44968 - RNA, 21 nt, Artificial Sequence
  LRRK2 RNA guide
uugugcaggcuggucuugaau

SEQ ID NO: 44969 - RNA, 22 nt, Artificial Sequence
  LRRK2 RNA guide
aauucccgggcucaagcaaucc

SEQ ID NO: 44970 - RNA, 22 nt, Artificial Sequence
  LRRK2 RNA guide
acugugggauugcuugagcccg

SEQ ID NO: 44971 - RNA, 22 nt, Artificial Sequence
  LRRK2 RNA guide
agcccgggaauucaagaccagc

SEQ ID NO: 44972 - RNA, 22 nt, Artificial Sequence
  LRRK2 RNA guide
auucccgggcucaagcaauccc

SEQ ID NO: 44973 - RNA, 22 nt, Artificial Sequence
  LRRK2 RNA guide
cccgggaauucaagaccagccu

SEQ ID NO: 44974 - RNA, 22 nt, Artificial Sequence
  LRRK2 RNA guide
cccgggcucaagcaaucccaca

SEQ ID NO: 44975 - RNA, 22 nt, Artificial Sequence
  LRRK2 RNA guide
ccgggaauucaagaccagccug

SEQ ID NO: 44976 - RNA, 22 nt, Artificial Sequence
  LRRK2 RNA guide
ccgggcucaagcaaucccacag

SEQ ID NO: 44977 - RNA, 22 nt, Artificial Sequence
  LRRK2 RNA guide
cgggaauucaagaccagccugc

SEQ ID NO: 44978 - RNA, 22 nt, Artificial Sequence
  LRRK2 RNA guide
cugugggauugcuugagcccgg

SEQ ID NO: 44979 - RNA, 22 nt, Artificial Sequence
  LRRK2 RNA guide
cuugaauucccgggcucaagca

SEQ ID NO: 44980 - RNA, 22 nt, Artificial Sequence
  LRRK2 RNA guide
gaauucccgggcucaagcaauc

SEQ ID NO: 44981 - RNA, 22 nt, Artificial Sequence
  LRRK2 RNA guide
gagcccgggaauucaagaccag

SEQ ID NO: 44982 - RNA, 22 nt, Artificial Sequence
  LRRK2 RNA guide
gcaggcuggucuugaauucccg

SEQ ID NO: 44983 - RNA, 22 nt, Artificial Sequence
  LRRK2 RNA guide
gcccgggaauucaagaccagcc

SEQ ID NO: 44984 - RNA, 22 nt, Artificial Sequence
  LRRK2 RNA guide
gggauugcuugagcccgggaau

SEQ ID NO: 44985 - RNA, 22 nt, Artificial Sequence
  LRRK2 RNA guide
gugcaggcuggucuugaauucc

SEQ ID NO: 44986 - RNA, 22 nt, Artificial Sequence
  LRRK2 RNA guide
gugggauugcuugagcccggga

SEQ ID NO: 44987 - RNA, 22 nt, Artificial Sequence
  LRRK2 RNA guide
ucccgggcucaagcaaucccac

SEQ ID NO: 44988 - RNA, 22 nt, Artificial Sequence
  LRRK2 RNA guide
ugaauucccgggcucaagcaau

SEQ ID NO: 44989 - RNA, 22 nt, Artificial Sequence
  LRRK2 RNA guide
ugcaggcuggucuugaauuccc

SEQ ID NO: 44990 - RNA, 22 nt, Artificial Sequence
  LRRK2 RNA guide
ugggauugcuugagcccgggaa

SEQ ID NO: 44991 - RNA, 22 nt, Artificial Sequence
  LRRK2 RNA guide
ugugcaggcuggucuugaauuc

SEQ ID NO: 44992 - RNA, 22 nt, Artificial Sequence
  LRRK2 RNA guide
ugugggauugcuugagcccggg

SEQ ID NO: 44993 - RNA, 22 nt, Artificial Sequence
  LRRK2 RNA guide
uucccgggcucaagcaauccca

SEQ ID NO: 44994 - RNA, 22 nt, Artificial Sequence
  LRRK2 RNA guide
uugaauucccgggcucaagcaa

SEQ ID NO: 44995 - RNA, 22 nt, Artificial Sequence
  LRRK2 RNA guide
uugugcaggcuggucuugaauu

SEQ ID NO: 44996 - RNA, 20 nt, Artificial Sequence
  LRRK2 RNA guide
aagaugauccuugguggcuu

SEQ ID NO: 44997 - RNA, 20 nt, Artificial Sequence
  LRRK2 RNA guide
acccaaccuaaauaauacua

SEQ ID NO: 44998 - RNA, 20 nt, Artificial Sequence
  LRRK2 RNA guide
agaugauccuugguggcuuu

SEQ ID NO: 44999 - RNA, 20 nt, Artificial Sequence
  LRRK2 RNA guide
agguuggguaaagccaccaa

SEQ ID NO: 45000 - RNA, 20 nt, Artificial Sequence
  LRRK2 RNA guide
aguauuauuuagguugggua

SEQ ID NO: 45001 - RNA, 20 nt, Artificial Sequence
  LRRK2 RNA guide
auccuugguggcuuuaccca

SEQ ID NO: 45002 - RNA, 20 nt, Artificial Sequence
  LRRK2 RNA guide
augauccuugguggcuuuac

SEQ ID NO: 45003 - RNA, 20 nt, Artificial Sequence
  LRRK2 RNA guide
auuauuuagguuggguaaag

SEQ ID NO: 45004 - RNA, 20 nt, Artificial Sequence
  LRRK2 RNA guide
auuuagguuggguaaagcca

SEQ ID NO: 45005 - RNA, 20 nt, Artificial Sequence
  LRRK2 RNA guide
cccaaccuaaauaauacuaa

SEQ ID NO: 45006 - RNA, 20 nt, Artificial Sequence
  LRRK2 RNA guide
ccuugguggcuuuacccaac

SEQ ID NO: 45007 - RNA, 20 nt, Artificial Sequence
  LRRK2 RNA guide
cuugguggcuuuacccaacc

SEQ ID NO: 45008 - RNA, 20 nt, Artificial Sequence
  LRRK2 RNA guide
cuuuacccaaccuaaauaau

SEQ ID NO: 45009 - RNA, 20 nt, Artificial Sequence
  LRRK2 RNA guide
gauccuugguggcuuuaccc

SEQ ID NO: 45010 - RNA, 20 nt, Artificial Sequence
  LRRK2 RNA guide
gaugauccuugguggcuuua

SEQ ID NO: 45011 - RNA, 20 nt, Artificial Sequence
  LRRK2 RNA guide
gcuuuacccaaccuaaauaa

SEQ ID NO: 45012 - RNA, 20 nt, Artificial Sequence
  LRRK2 RNA guide
ggcuuuacccaaccuaaaua

SEQ ID NO: 45013 - RNA, 20 nt, Artificial Sequence
  LRRK2 RNA guide
gguggcuuuacccaaccuaa

SEQ ID NO: 45014 - RNA, 20 nt, Artificial Sequence
  LRRK2 RNA guide
gguuggguaaagccaccaag

SEQ ID NO: 45015 - RNA, 20 nt, Artificial Sequence
  LRRK2 RNA guide
guauuauuuagguuggguaa

SEQ ID NO: 45016 - RNA, 20 nt, Artificial Sequence
  LRRK2 RNA guide
guggcuuuacccaaccuaaa

SEQ ID NO: 45017 - RNA, 20 nt, Artificial Sequence
  LRRK2 RNA guide
guuggguaaagccaccaagg

SEQ ID NO: 45018 - RNA, 20 nt, Artificial Sequence
  LRRK2 RNA guide
uacccaaccuaaauaauacu

SEQ ID NO: 45019 - RNA, 20 nt, Artificial Sequence
  LRRK2 RNA guide
uagguuggguaaagccacca

SEQ ID NO: 45020 - RNA, 20 nt, Artificial Sequence
  LRRK2 RNA guide
uaguauuauuuagguugggu

SEQ ID NO: 45021 - RNA, 20 nt, Artificial Sequence
  LRRK2 RNA guide
uauuuagguuggguaaagcc

SEQ ID NO: 45022 - RNA, 20 nt, Artificial Sequence
  LRRK2 RNA guide
uccuugguggcuuuacccaa

SEQ ID NO: 45023 - RNA, 20 nt, Artificial Sequence
  LRRK2 RNA guide
ugauccuugguggcuuuacc

SEQ ID NO: 45024 - RNA, 20 nt, Artificial Sequence
  LRRK2 RNA guide
uggcuuuacccaaccuaaau

SEQ ID NO: 45025 - RNA, 20 nt, Artificial Sequence
  LRRK2 RNA guide
uggguaaagccaccaaggau

SEQ ID NO: 45026 - RNA, 20 nt, Artificial Sequence
  LRRK2 RNA guide
ugguggcuuuacccaaccua

SEQ ID NO: 45027 - RNA, 20 nt, Artificial Sequence
  LRRK2 RNA guide
uuacccaaccuaaauaauac

SEQ ID NO: 45028 - RNA, 20 nt, Artificial Sequence
  LRRK2 RNA guide
uuagguuggguaaagccacc

SEQ ID NO: 45029 - RNA, 20 nt, Artificial Sequence
  LRRK2 RNA guide
uuaguauuauuuagguuggg

SEQ ID NO: 45030 - RNA, 20 nt, Artificial Sequence
  LRRK2 RNA guide
uuauuuagguuggguaaagc

SEQ ID NO: 45031 - RNA, 20 nt, Artificial Sequence
  LRRK2 RNA guide
uuggguaaagccaccaagga

SEQ ID NO: 45032 - RNA, 20 nt, Artificial Sequence
  LRRK2 RNA guide
uugguggcuuuacccaaccu

SEQ ID NO: 45033 - RNA, 20 nt, Artificial Sequence
  LRRK2 RNA guide
uuuagguuggguaaagccac

SEQ ID NO: 45034 - RNA, 21 nt, Artificial Sequence
  LRRK2 RNA guide
aagaugauccuugguggcuuu

SEQ ID NO: 45035 - RNA, 21 nt, Artificial Sequence
  LRRK2 RNA guide
agaugauccuugguggcuuua

SEQ ID NO: 45036 - RNA, 21 nt, Artificial Sequence
  LRRK2 RNA guide
agguuggguaaagccaccaag

SEQ ID NO: 45037 - RNA, 21 nt, Artificial Sequence
  LRRK2 RNA guide
auccuugguggcuuuacccaa

SEQ ID NO: 45038 - RNA, 21 nt, Artificial Sequence
  LRRK2 RNA guide
augauccuugguggcuuuacc

SEQ ID NO: 45039 - RNA, 21 nt, Artificial Sequence
  LRRK2 RNA guide
auuauuuagguuggguaaagc

SEQ ID NO: 45040 - RNA, 21 nt, Artificial Sequence
  LRRK2 RNA guide
auuuagguuggguaaagccac

SEQ ID NO: 45041 - RNA, 21 nt, Artificial Sequence
  LRRK2 RNA guide
ccuugguggcuuuacccaacc

SEQ ID NO: 45042 - RNA, 21 nt, Artificial Sequence
  LRRK2 RNA guide
cuugguggcuuuacccaaccu

SEQ ID NO: 45043 - RNA, 21 nt, Artificial Sequence
  LRRK2 RNA guide
gauccuugguggcuuuaccca

SEQ ID NO: 45044 - RNA, 21 nt, Artificial Sequence
  LRRK2 RNA guide
gaugauccuugguggcuuuac

SEQ ID NO: 45045 - RNA, 21 nt, Artificial Sequence
  LRRK2 RNA guide
gcuuuacccaaccuaaauaau

SEQ ID NO: 45046 - RNA, 21 nt, Artificial Sequence
  LRRK2 RNA guide
ggcuuuacccaaccuaaauaa

SEQ ID NO: 45047 - RNA, 21 nt, Artificial Sequence
  LRRK2 RNA guide
gguggcuuuacccaaccuaaa

SEQ ID NO: 45048 - RNA, 21 nt, Artificial Sequence
  LRRK2 RNA guide
gguuggguaaagccaccaagg

SEQ ID NO: 45049 - RNA, 21 nt, Artificial Sequence
  LRRK2 RNA guide
guggcuuuacccaaccuaaau

SEQ ID NO: 45050 - RNA, 21 nt, Artificial Sequence
  LRRK2 RNA guide
guuggguaaagccaccaagga

SEQ ID NO: 45051 - RNA, 21 nt, Artificial Sequence
  LRRK2 RNA guide
uaagaugauccuugguggcuu

SEQ ID NO: 45052 - RNA, 21 nt, Artificial Sequence
  LRRK2 RNA guide
uagguuggguaaagccaccaa

SEQ ID NO: 45053 - RNA, 21 nt, Artificial Sequence
  LRRK2 RNA guide
uauuuagguuggguaaagcca

SEQ ID NO: 45054 - RNA, 21 nt, Artificial Sequence
  LRRK2 RNA guide
uccuugguggcuuuacccaac

SEQ ID NO: 45055 - RNA, 21 nt, Artificial Sequence
  LRRK2 RNA guide
ugauccuugguggcuuuaccc

SEQ ID NO: 45056 - RNA, 21 nt, Artificial Sequence
  LRRK2 RNA guide
uggcuuuacccaaccuaaaua

SEQ ID NO: 45057 - RNA, 21 nt, Artificial Sequence
  LRRK2 RNA guide
uggguaaagccaccaaggauc

SEQ ID NO: 45058 - RNA, 21 nt, Artificial Sequence
  LRRK2 RNA guide
ugguggcuuuacccaaccuaa

SEQ ID NO: 45059 - RNA, 21 nt, Artificial Sequence
  LRRK2 RNA guide
uuagguuggguaaagccacca

SEQ ID NO: 45060 - RNA, 21 nt, Artificial Sequence
  LRRK2 RNA guide
uuauuuagguuggguaaagcc

SEQ ID NO: 45061 - RNA, 21 nt, Artificial Sequence
  LRRK2 RNA guide
uuggguaaagccaccaaggau

SEQ ID NO: 45062 - RNA, 21 nt, Artificial Sequence
  LRRK2 RNA guide
uugguggcuuuacccaaccua

SEQ ID NO: 45063 - RNA, 21 nt, Artificial Sequence
  LRRK2 RNA guide
uuuagguuggguaaagccacc

SEQ ID NO: 45064 - RNA, 22 nt, Artificial Sequence
  LRRK2 RNA guide
aagaugauccuugguggcuuua

SEQ ID NO: 45065 - RNA, 22 nt, Artificial Sequence
  LRRK2 RNA guide
agaugauccuugguggcuuuac

SEQ ID NO: 45066 - RNA, 22 nt, Artificial Sequence
  LRRK2 RNA guide
agguuggguaaagccaccaagg

SEQ ID NO: 45067 - RNA, 22 nt, Artificial Sequence
  LRRK2 RNA guide
auccuugguggcuuuacccaac

SEQ ID NO: 45068 - RNA, 22 nt, Artificial Sequence
  LRRK2 RNA guide
augauccuugguggcuuuaccc

SEQ ID NO: 45069 - RNA, 22 nt, Artificial Sequence
  LRRK2 RNA guide
auuauuuagguuggguaaagcc

SEQ ID NO: 45070 - RNA, 22 nt, Artificial Sequence
  LRRK2 RNA guide
auuuagguuggguaaagccacc

SEQ ID NO: 45071 - RNA, 22 nt, Artificial Sequence
  LRRK2 RNA guide
cccaaccuaaauaauacuaaag

SEQ ID NO: 45072 - RNA, 22 nt, Artificial Sequence
  LRRK2 RNA guide
ccuugguggcuuuacccaaccu

SEQ ID NO: 45073 - RNA, 22 nt, Artificial Sequence
  LRRK2 RNA guide
cuugguggcuuuacccaaccua

SEQ ID NO: 45074 - RNA, 22 nt, Artificial Sequence
  LRRK2 RNA guide
cuuuacccaaccuaaauaauac

SEQ ID NO: 45075 - RNA, 22 nt, Artificial Sequence
  LRRK2 RNA guide
cuuuaguauuauuuagguuggg

SEQ ID NO: 45076 - RNA, 22 nt, Artificial Sequence
  LRRK2 RNA guide
gauccuugguggcuuuacccaa

SEQ ID NO: 45077 - RNA, 22 nt, Artificial Sequence
  LRRK2 RNA guide
gaugauccuugguggcuuuacc

SEQ ID NO: 45078 - RNA, 22 nt, Artificial Sequence
  LRRK2 RNA guide
gcuuuacccaaccuaaauaaua

SEQ ID NO: 45079 - RNA, 22 nt, Artificial Sequence
  LRRK2 RNA guide
ggcuuuacccaaccuaaauaau

SEQ ID NO: 45080 - RNA, 22 nt, Artificial Sequence
  LRRK2 RNA guide
gguggcuuuacccaaccuaaau

SEQ ID NO: 45081 - RNA, 22 nt, Artificial Sequence
  LRRK2 RNA guide
gguuggguaaagccaccaagga

SEQ ID NO: 45082 - RNA, 22 nt, Artificial Sequence
  LRRK2 RNA guide
guauuauuuagguuggguaaag

SEQ ID NO: 45083 - RNA, 22 nt, Artificial Sequence
  LRRK2 RNA guide
guggcuuuacccaaccuaaaua

SEQ ID NO: 45084 - RNA, 22 nt, Artificial Sequence
  LRRK2 RNA guide
guuggguaaagccaccaaggau

SEQ ID NO: 45085 - RNA, 22 nt, Artificial Sequence
  LRRK2 RNA guide
uaagaugauccuugguggcuuu

SEQ ID NO: 45086 - RNA, 22 nt, Artificial Sequence
  LRRK2 RNA guide
uagguuggguaaagccaccaag

SEQ ID NO: 45087 - RNA, 22 nt, Artificial Sequence
  LRRK2 RNA guide
uauuauuuagguuggguaaagc

SEQ ID NO: 45088 - RNA, 22 nt, Artificial Sequence
  LRRK2 RNA guide
uauuuagguuggguaaagccac

SEQ ID NO: 45089 - RNA, 22 nt, Artificial Sequence
  LRRK2 RNA guide
uccuugguggcuuuacccaacc

SEQ ID NO: 45090 - RNA, 22 nt, Artificial Sequence
  LRRK2 RNA guide
ugauccuugguggcuuuaccca

SEQ ID NO: 45091 - RNA, 22 nt, Artificial Sequence
  LRRK2 RNA guide
uggcuuuacccaaccuaaauaa

SEQ ID NO: 45092 - RNA, 22 nt, Artificial Sequence
  LRRK2 RNA guide
uggguaaagccaccaaggauca

SEQ ID NO: 45093 - RNA, 22 nt, Artificial Sequence
  LRRK2 RNA guide
ugguggcuuuacccaaccuaaa

SEQ ID NO: 45094 - RNA, 22 nt, Artificial Sequence
  LRRK2 RNA guide
uuaagaugauccuugguggcuu

SEQ ID NO: 45095 - RNA, 22 nt, Artificial Sequence
  LRRK2 RNA guide
uuagguuggguaaagccaccaa

SEQ ID NO: 45096 - RNA, 22 nt, Artificial Sequence
  LRRK2 RNA guide
uuauuuagguuggguaaagcca

SEQ ID NO: 45097 - RNA, 22 nt, Artificial Sequence
  LRRK2 RNA guide
uuggguaaagccaccaaggauc

SEQ ID NO: 45098 - RNA, 22 nt, Artificial Sequence
  LRRK2 RNA guide
uugguggcuuuacccaaccuaa

SEQ ID NO: 45099 - RNA, 22 nt, Artificial Sequence
  LRRK2 RNA guide
uuuagguuggguaaagccacca

SEQ ID NO: 45100 - RNA, 20 nt, Artificial Sequence
  LRRK2 RNA guide
agguuugguaaagccaccaa

SEQ ID NO: 45101 - RNA, 20 nt, Artificial Sequence
  LRRK2 RNA guide
auccuugguggcuuuaccaa

SEQ ID NO: 45102 - RNA, 20 nt, Artificial Sequence
  LRRK2 RNA guide
auuuagguuugguaaagcca

SEQ ID NO: 45103 - RNA, 20 nt, Artificial Sequence
  LRRK2 RNA guide
ccuugguggcuuuaccaaac

SEQ ID NO: 45104 - RNA, 20 nt, Artificial Sequence
  LRRK2 RNA guide
cuugguggcuuuaccaaacc

SEQ ID NO: 45105 - RNA, 20 nt, Artificial Sequence
  LRRK2 RNA guide
gauccuugguggcuuuacca

SEQ ID NO: 45106 - RNA, 20 nt, Artificial Sequence
  LRRK2 RNA guide
gcuuuaccaaaccuaaauaa

SEQ ID NO: 45107 - RNA, 20 nt, Artificial Sequence
  LRRK2 RNA guide
ggcuuuaccaaaccuaaaua

SEQ ID NO: 45108 - RNA, 20 nt, Artificial Sequence
  LRRK2 RNA guide
gguggcuuuaccaaaccuaa

SEQ ID NO: 45109 - RNA, 20 nt, Artificial Sequence
  LRRK2 RNA guide
gguuugguaaagccaccaag

SEQ ID NO: 45110 - RNA, 20 nt, Artificial Sequence
  LRRK2 RNA guide
guggcuuuaccaaaccuaaa

SEQ ID NO: 45111 - RNA, 20 nt, Artificial Sequence
  LRRK2 RNA guide
guuugguaaagccaccaagg

SEQ ID NO: 45112 - RNA, 20 nt, Artificial Sequence
  LRRK2 RNA guide
uagguuugguaaagccacca

SEQ ID NO: 45113 - RNA, 20 nt, Artificial Sequence
  LRRK2 RNA guide
uauuuagguuugguaaagcc

SEQ ID NO: 45114 - RNA, 20 nt, Artificial Sequence
  LRRK2 RNA guide
uccuugguggcuuuaccaaa

SEQ ID NO: 45115 - RNA, 20 nt, Artificial Sequence
  LRRK2 RNA guide
uggcuuuaccaaaccuaaau

SEQ ID NO: 45116 - RNA, 20 nt, Artificial Sequence
  LRRK2 RNA guide
ugguggcuuuaccaaaccua

SEQ ID NO: 45117 - RNA, 20 nt, Artificial Sequence
  LRRK2 RNA guide
uuagguuugguaaagccacc

SEQ ID NO: 45118 - RNA, 20 nt, Artificial Sequence
  LRRK2 RNA guide
uuauuuagguuugguaaagc

SEQ ID NO: 45119 - RNA, 20 nt, Artificial Sequence
  LRRK2 RNA guide
uugguaaagccaccaaggau

SEQ ID NO: 45120 - RNA, 20 nt, Artificial Sequence
  LRRK2 RNA guide
uugguggcuuuaccaaaccu

SEQ ID NO: 45121 - RNA, 20 nt, Artificial Sequence
  LRRK2 RNA guide
uuuagguuugguaaagccac

SEQ ID NO: 45122 - RNA, 20 nt, Artificial Sequence
  LRRK2 RNA guide
uuugguaaagccaccaagga

SEQ ID NO: 45123 - RNA, 21 nt, Artificial Sequence
  LRRK2 RNA guide
agguuugguaaagccaccaag

SEQ ID NO: 45124 - RNA, 21 nt, Artificial Sequence
  LRRK2 RNA guide
auccuugguggcuuuaccaaa

SEQ ID NO: 45125 - RNA, 21 nt, Artificial Sequence
  LRRK2 RNA guide
auuuagguuugguaaagccac

SEQ ID NO: 45126 - RNA, 21 nt, Artificial Sequence
  LRRK2 RNA guide
ccuugguggcuuuaccaaacc

SEQ ID NO: 45127 - RNA, 21 nt, Artificial Sequence
  LRRK2 RNA guide
cuugguggcuuuaccaaaccu

SEQ ID NO: 45128 - RNA, 21 nt, Artificial Sequence
  LRRK2 RNA guide
gauccuugguggcuuuaccaa

SEQ ID NO: 45129 - RNA, 21 nt, Artificial Sequence
  LRRK2 RNA guide
ggcuuuaccaaaccuaaauaa

SEQ ID NO: 45130 - RNA, 21 nt, Artificial Sequence
  LRRK2 RNA guide
gguggcuuuaccaaaccuaaa

SEQ ID NO: 45131 - RNA, 21 nt, Artificial Sequence
  LRRK2 RNA guide
gguuugguaaagccaccaagg

SEQ ID NO: 45132 - RNA, 21 nt, Artificial Sequence
  LRRK2 RNA guide
guggcuuuaccaaaccuaaau

SEQ ID NO: 45133 - RNA, 21 nt, Artificial Sequence
  LRRK2 RNA guide
guuugguaaagccaccaagga

SEQ ID NO: 45134 - RNA, 21 nt, Artificial Sequence
  LRRK2 RNA guide
uagguuugguaaagccaccaa

SEQ ID NO: 45135 - RNA, 21 nt, Artificial Sequence
  LRRK2 RNA guide
uauuuagguuugguaaagcca

SEQ ID NO: 45136 - RNA, 21 nt, Artificial Sequence
  LRRK2 RNA guide
uccuugguggcuuuaccaaac

SEQ ID NO: 45137 - RNA, 21 nt, Artificial Sequence
  LRRK2 RNA guide
ugauccuugguggcuuuacca

SEQ ID NO: 45138 - RNA, 21 nt, Artificial Sequence
  LRRK2 RNA guide
uggcuuuaccaaaccuaaaua

SEQ ID NO: 45139 - RNA, 21 nt, Artificial Sequence
  LRRK2 RNA guide
ugguggcuuuaccaaaccuaa

SEQ ID NO: 45140 - RNA, 21 nt, Artificial Sequence
  LRRK2 RNA guide
uuagguuugguaaagccacca

SEQ ID NO: 45141 - RNA, 21 nt, Artificial Sequence
  LRRK2 RNA guide
uuauuuagguuugguaaagcc

SEQ ID NO: 45142 - RNA, 21 nt, Artificial Sequence
  LRRK2 RNA guide
uugguaaagccaccaaggauc

SEQ ID NO: 45143 - RNA, 21 nt, Artificial Sequence
  LRRK2 RNA guide
uugguggcuuuaccaaaccua

SEQ ID NO: 45144 - RNA, 21 nt, Artificial Sequence
  LRRK2 RNA guide
uuuagguuugguaaagccacc

SEQ ID NO: 45145 - RNA, 21 nt, Artificial Sequence
  LRRK2 RNA guide
uuugguaaagccaccaaggau

SEQ ID NO: 45146 - RNA, 22 nt, Artificial Sequence
  LRRK2 RNA guide
agguuugguaaagccaccaagg

SEQ ID NO: 45147 - RNA, 22 nt, Artificial Sequence
  LRRK2 RNA guide
auccuugguggcuuuaccaaac

SEQ ID NO: 45148 - RNA, 22 nt, Artificial Sequence
  LRRK2 RNA guide
augauccuugguggcuuuacca

SEQ ID NO: 45149 - RNA, 22 nt, Artificial Sequence
  LRRK2 RNA guide
auuauuuagguuugguaaagcc

SEQ ID NO: 45150 - RNA, 22 nt, Artificial Sequence
  LRRK2 RNA guide
auuuagguuugguaaagccacc

SEQ ID NO: 45151 - RNA, 22 nt, Artificial Sequence
  LRRK2 RNA guide
ccuugguggcuuuaccaaaccu

SEQ ID NO: 45152 - RNA, 22 nt, Artificial Sequence
  LRRK2 RNA guide
cuugguggcuuuaccaaaccua

SEQ ID NO: 45153 - RNA, 22 nt, Artificial Sequence
  LRRK2 RNA guide
gauccuugguggcuuuaccaaa

SEQ ID NO: 45154 - RNA, 22 nt, Artificial Sequence
  LRRK2 RNA guide
ggcuuuaccaaaccuaaauaau

SEQ ID NO: 45155 - RNA, 22 nt, Artificial Sequence
  LRRK2 RNA guide
gguggcuuuaccaaaccuaaau

SEQ ID NO: 45156 - RNA, 22 nt, Artificial Sequence
  LRRK2 RNA guide
gguuugguaaagccaccaagga

SEQ ID NO: 45157 - RNA, 22 nt, Artificial Sequence
  LRRK2 RNA guide
guggcuuuaccaaaccuaaaua

SEQ ID NO: 45158 - RNA, 22 nt, Artificial Sequence
  LRRK2 RNA guide
guuugguaaagccaccaaggau

SEQ ID NO: 45159 - RNA, 22 nt, Artificial Sequence
  LRRK2 RNA guide
uagguuugguaaagccaccaag

SEQ ID NO: 45160 - RNA, 22 nt, Artificial Sequence
  LRRK2 RNA guide
uauuuagguuugguaaagccac

SEQ ID NO: 45161 - RNA, 22 nt, Artificial Sequence
  LRRK2 RNA guide
uccuugguggcuuuaccaaacc

SEQ ID NO: 45162 - RNA, 22 nt, Artificial Sequence
  LRRK2 RNA guide
ugauccuugguggcuuuaccaa

SEQ ID NO: 45163 - RNA, 22 nt, Artificial Sequence
  LRRK2 RNA guide
uggcuuuaccaaaccuaaauaa

SEQ ID NO: 45164 - RNA, 22 nt, Artificial Sequence
  LRRK2 RNA guide
ugguggcuuuaccaaaccuaaa

SEQ ID NO: 45165 - RNA, 22 nt, Artificial Sequence
  LRRK2 RNA guide
uuagguuugguaaagccaccaa

SEQ ID NO: 45166 - RNA, 22 nt, Artificial Sequence
  LRRK2 RNA guide
uuauuuagguuugguaaagcca

SEQ ID NO: 45167 - RNA, 22 nt, Artificial Sequence
  LRRK2 RNA guide
uugguaaagccaccaaggauca

SEQ ID NO: 45168 - RNA, 22 nt, Artificial Sequence
  LRRK2 RNA guide
uugguggcuuuaccaaaccuaa

SEQ ID NO: 45169 - RNA, 22 nt, Artificial Sequence
  LRRK2 RNA guide
uuuagguuugguaaagccacca

SEQ ID NO: 45170 - RNA, 22 nt, Artificial Sequence
  LRRK2 RNA guide
uuugguaaagccaccaaggauc

SEQ ID NO: 45171 - RNA, 20 nt, Artificial Sequence
  LRRK2 RNA guide
aaaauaguugcuccgcuuua

SEQ ID NO: 45172 - RNA, 20 nt, Artificial Sequence
  LRRK2 RNA guide
aaagcggagcaacuauuuua

SEQ ID NO: 45173 - RNA, 20 nt, Artificial Sequence
  LRRK2 RNA guide
aaauaguugcuccgcuuuac

SEQ ID NO: 45174 - RNA, 20 nt, Artificial Sequence
  LRRK2 RNA guide
aagcggagcaacuauuuuaa

SEQ ID NO: 45175 - RNA, 20 nt, Artificial Sequence
  LRRK2 RNA guide
aauaguugcuccgcuuuacu

SEQ ID NO: 45176 - RNA, 20 nt, Artificial Sequence
  LRRK2 RNA guide
aauuaaaauaguugcuccgc

SEQ ID NO: 45177 - RNA, 20 nt, Artificial Sequence
  LRRK2 RNA guide
aauuaucuuuaguaaagcgg

SEQ ID NO: 45178 - RNA, 20 nt, Artificial Sequence
  LRRK2 RNA guide
acaauuaaaauaguugcucc

SEQ ID NO: 45179 - RNA, 20 nt, Artificial Sequence
  LRRK2 RNA guide
agcggagcaacuauuuuaau

SEQ ID NO: 45180 - RNA, 20 nt, Artificial Sequence
  LRRK2 RNA guide
aguaaagcggagcaacuauu

SEQ ID NO: 45181 - RNA, 20 nt, Artificial Sequence
  LRRK2 RNA guide
aguugcuccgcuuuacuaaa

SEQ ID NO: 45182 - RNA, 20 nt, Artificial Sequence
  LRRK2 RNA guide
auaguugcuccgcuuuacua

SEQ ID NO: 45183 - RNA, 20 nt, Artificial Sequence
  LRRK2 RNA guide
aucuuuaguaaagcggagca

SEQ ID NO: 45184 - RNA, 20 nt, Artificial Sequence
  LRRK2 RNA guide
auuaaaauaguugcuccgcu

SEQ ID NO: 45185 - RNA, 20 nt, Artificial Sequence
  LRRK2 RNA guide
auuaucuuuaguaaagcgga

SEQ ID NO: 45186 - RNA, 20 nt, Artificial Sequence
  LRRK2 RNA guide
caauuaaaauaguugcuccg

SEQ ID NO: 45187 - RNA, 20 nt, Artificial Sequence
  LRRK2 RNA guide
cggagcaacuauuuuaauug

SEQ ID NO: 45188 - RNA, 20 nt, Artificial Sequence
  LRRK2 RNA guide
cuuuaguaaagcggagcaac

SEQ ID NO: 45189 - RNA, 20 nt, Artificial Sequence
  LRRK2 RNA guide
gcaacaauuaaaauaguugc

SEQ ID NO: 45190 - RNA, 20 nt, Artificial Sequence
  LRRK2 RNA guide
gcaacuauuuuaauuguugc

SEQ ID NO: 45191 - RNA, 20 nt, Artificial Sequence
  LRRK2 RNA guide
gcaagcaacaauuaaaauag

SEQ ID NO: 45192 - RNA, 20 nt, Artificial Sequence
  LRRK2 RNA guide
gcggagcaacuauuuuaauu

SEQ ID NO: 45193 - RNA, 20 nt, Artificial Sequence
  LRRK2 RNA guide
ggagcaacuauuuuaauugu

SEQ ID NO: 45194 - RNA, 20 nt, Artificial Sequence
  LRRK2 RNA guide
guaaagcggagcaacuauuu

SEQ ID NO: 45195 - RNA, 20 nt, Artificial Sequence
  LRRK2 RNA guide
guugcuccgcuuuacuaaag

SEQ ID NO: 45196 - RNA, 20 nt, Artificial Sequence
  LRRK2 RNA guide
uaaaauaguugcuccgcuuu

SEQ ID NO: 45197 - RNA, 20 nt, Artificial Sequence
  LRRK2 RNA guide
uaaagcggagcaacuauuuu

SEQ ID NO: 45198 - RNA, 20 nt, Artificial Sequence
  LRRK2 RNA guide
uaguaaagcggagcaacuau

SEQ ID NO: 45199 - RNA, 20 nt, Artificial Sequence
  LRRK2 RNA guide
uaguugcuccgcuuuacuaa

SEQ ID NO: 45200 - RNA, 20 nt, Artificial Sequence
  LRRK2 RNA guide
uaucuuuaguaaagcggagc

SEQ ID NO: 45201 - RNA, 20 nt, Artificial Sequence
  LRRK2 RNA guide
ucuuuaguaaagcggagcaa

SEQ ID NO: 45202 - RNA, 20 nt, Artificial Sequence
  LRRK2 RNA guide
uuaaaauaguugcuccgcuu

SEQ ID NO: 45203 - RNA, 20 nt, Artificial Sequence
  LRRK2 RNA guide
uuaguaaagcggagcaacua

SEQ ID NO: 45204 - RNA, 20 nt, Artificial Sequence
  LRRK2 RNA guide
uuaucuuuaguaaagcggag

SEQ ID NO: 45205 - RNA, 20 nt, Artificial Sequence
  LRRK2 RNA guide
uugcuccgcuuuacuaaaga

SEQ ID NO: 45206 - RNA, 20 nt, Artificial Sequence
  LRRK2 RNA guide
uuuaguaaagcggagcaacu

SEQ ID NO: 45207 - RNA, 21 nt, Artificial Sequence
  LRRK2 RNA guide
aaaauaguugcuccgcuuuac

SEQ ID NO: 45208 - RNA, 21 nt, Artificial Sequence
  LRRK2 RNA guide
aaagcggagcaacuauuuuaa

SEQ ID NO: 45209 - RNA, 21 nt, Artificial Sequence
  LRRK2 RNA guide
aaauaguugcuccgcuuuacu

SEQ ID NO: 45210 - RNA, 21 nt, Artificial Sequence
  LRRK2 RNA guide
aagcggagcaacuauuuuaau

SEQ ID NO: 45211 - RNA, 21 nt, Artificial Sequence
  LRRK2 RNA guide
aauaguugcuccgcuuuacua

SEQ ID NO: 45212 - RNA, 21 nt, Artificial Sequence
  LRRK2 RNA guide
aauuaaaauaguugcuccgcu

SEQ ID NO: 45213 - RNA, 21 nt, Artificial Sequence
  LRRK2 RNA guide
acaauuaaaauaguugcuccg

SEQ ID NO: 45214 - RNA, 21 nt, Artificial Sequence
  LRRK2 RNA guide
agcggagcaacuauuuuaauu

SEQ ID NO: 45215 - RNA, 21 nt, Artificial Sequence
  LRRK2 RNA guide
aguaaagcggagcaacuauuu

SEQ ID NO: 45216 - RNA, 21 nt, Artificial Sequence
  LRRK2 RNA guide
aguugcuccgcuuuacuaaag

SEQ ID NO: 45217 - RNA, 21 nt, Artificial Sequence
  LRRK2 RNA guide
auaguugcuccgcuuuacuaa

SEQ ID NO: 45218 - RNA, 21 nt, Artificial Sequence
  LRRK2 RNA guide
aucuuuaguaaagcggagcaa

SEQ ID NO: 45219 - RNA, 21 nt, Artificial Sequence
  LRRK2 RNA guide
auuaaaauaguugcuccgcuu

SEQ ID NO: 45220 - RNA, 21 nt, Artificial Sequence
  LRRK2 RNA guide
auuaucuuuaguaaagcggag

SEQ ID NO: 45221 - RNA, 21 nt, Artificial Sequence
  LRRK2 RNA guide
caauuaaaauaguugcuccgc

SEQ ID NO: 45222 - RNA, 21 nt, Artificial Sequence
  LRRK2 RNA guide
cggagcaacuauuuuaauugu

SEQ ID NO: 45223 - RNA, 21 nt, Artificial Sequence
  LRRK2 RNA guide
cuuuaguaaagcggagcaacu

SEQ ID NO: 45224 - RNA, 21 nt, Artificial Sequence
  LRRK2 RNA guide
gcggagcaacuauuuuaauug

SEQ ID NO: 45225 - RNA, 21 nt, Artificial Sequence
  LRRK2 RNA guide
guaaagcggagcaacuauuuu

SEQ ID NO: 45226 - RNA, 21 nt, Artificial Sequence
  LRRK2 RNA guide
guugcuccgcuuuacuaaaga

SEQ ID NO: 45227 - RNA, 21 nt, Artificial Sequence
  LRRK2 RNA guide
uaaaauaguugcuccgcuuua

SEQ ID NO: 45228 - RNA, 21 nt, Artificial Sequence
  LRRK2 RNA guide
uaaagcggagcaacuauuuua

SEQ ID NO: 45229 - RNA, 21 nt, Artificial Sequence
  LRRK2 RNA guide
uaguaaagcggagcaacuauu

SEQ ID NO: 45230 - RNA, 21 nt, Artificial Sequence
  LRRK2 RNA guide
uaguugcuccgcuuuacuaaa

SEQ ID NO: 45231 - RNA, 21 nt, Artificial Sequence
  LRRK2 RNA guide
uaucuuuaguaaagcggagca

SEQ ID NO: 45232 - RNA, 21 nt, Artificial Sequence
  LRRK2 RNA guide
ucuuuaguaaagcggagcaac

SEQ ID NO: 45233 - RNA, 21 nt, Artificial Sequence
  LRRK2 RNA guide
uuaaaauaguugcuccgcuuu

SEQ ID NO: 45234 - RNA, 21 nt, Artificial Sequence
  LRRK2 RNA guide
uuaguaaagcggagcaacuau

SEQ ID NO: 45235 - RNA, 21 nt, Artificial Sequence
  LRRK2 RNA guide
uuaucuuuaguaaagcggagc

SEQ ID NO: 45236 - RNA, 21 nt, Artificial Sequence
  LRRK2 RNA guide
uugcuccgcuuuacuaaagau

SEQ ID NO: 45237 - RNA, 21 nt, Artificial Sequence
  LRRK2 RNA guide
uuuaguaaagcggagcaacua

SEQ ID NO: 45238 - RNA, 22 nt, Artificial Sequence
  LRRK2 RNA guide
aaaauaguugcuccgcuuuacu

SEQ ID NO: 45239 - RNA, 22 nt, Artificial Sequence
  LRRK2 RNA guide
aaagcggagcaacuauuuuaau

SEQ ID NO: 45240 - RNA, 22 nt, Artificial Sequence
  LRRK2 RNA guide
aaauaguugcuccgcuuuacua

SEQ ID NO: 45241 - RNA, 22 nt, Artificial Sequence
  LRRK2 RNA guide
aacaauuaaaauaguugcuccg

SEQ ID NO: 45242 - RNA, 22 nt, Artificial Sequence
  LRRK2 RNA guide
aagcggagcaacuauuuuaauu

SEQ ID NO: 45243 - RNA, 22 nt, Artificial Sequence
  LRRK2 RNA guide
aauaguugcuccgcuuuacuaa

SEQ ID NO: 45244 - RNA, 22 nt, Artificial Sequence
  LRRK2 RNA guide
aauuaaaauaguugcuccgcuu

SEQ ID NO: 45245 - RNA, 22 nt, Artificial Sequence
  LRRK2 RNA guide
aauuaucuuuaguaaagcggag

SEQ ID NO: 45246 - RNA, 22 nt, Artificial Sequence
  LRRK2 RNA guide
acaauuaaaauaguugcuccgc

SEQ ID NO: 45247 - RNA, 22 nt, Artificial Sequence
  LRRK2 RNA guide
agcggagcaacuauuuuaauug

SEQ ID NO: 45248 - RNA, 22 nt, Artificial Sequence
  LRRK2 RNA guide
aguaaagcggagcaacuauuuu

SEQ ID NO: 45249 - RNA, 22 nt, Artificial Sequence
  LRRK2 RNA guide
aguugcuccgcuuuacuaaaga

SEQ ID NO: 45250 - RNA, 22 nt, Artificial Sequence
  LRRK2 RNA guide
auaguugcuccgcuuuacuaaa

SEQ ID NO: 45251 - RNA, 22 nt, Artificial Sequence
  LRRK2 RNA guide
aucuuuaguaaagcggagcaac

SEQ ID NO: 45252 - RNA, 22 nt, Artificial Sequence
  LRRK2 RNA guide
auuaaaauaguugcuccgcuuu

SEQ ID NO: 45253 - RNA, 22 nt, Artificial Sequence
  LRRK2 RNA guide
auuaucuuuaguaaagcggagc

SEQ ID NO: 45254 - RNA, 22 nt, Artificial Sequence
  LRRK2 RNA guide
caacaauuaaaauaguugcucc

SEQ ID NO: 45255 - RNA, 22 nt, Artificial Sequence
  LRRK2 RNA guide
caauuaaaauaguugcuccgcu

SEQ ID NO: 45256 - RNA, 22 nt, Artificial Sequence
  LRRK2 RNA guide
cggagcaacuauuuuaauuguu

SEQ ID NO: 45257 - RNA, 22 nt, Artificial Sequence
  LRRK2 RNA guide
cuuuaguaaagcggagcaacua

SEQ ID NO: 45258 - RNA, 22 nt, Artificial Sequence
  LRRK2 RNA guide
gagcaacuauuuuaauuguugc

SEQ ID NO: 45259 - RNA, 22 nt, Artificial Sequence
  LRRK2 RNA guide
gcaacaauuaaaauaguugcuc

SEQ ID NO: 45260 - RNA, 22 nt, Artificial Sequence
  LRRK2 RNA guide
gcggagcaacuauuuuaauugu

SEQ ID NO: 45261 - RNA, 22 nt, Artificial Sequence
  LRRK2 RNA guide
ggagcaacuauuuuaauuguug

SEQ ID NO: 45262 - RNA, 22 nt, Artificial Sequence
  LRRK2 RNA guide
guaaagcggagcaacuauuuua

SEQ ID NO: 45263 - RNA, 22 nt, Artificial Sequence
  LRRK2 RNA guide
guugcuccgcuuuacuaaagau

SEQ ID NO: 45264 - RNA, 22 nt, Artificial Sequence
  LRRK2 RNA guide
uaaaauaguugcuccgcuuuac

SEQ ID NO: 45265 - RNA, 22 nt, Artificial Sequence
  LRRK2 RNA guide
uaaagcggagcaacuauuuuaa

SEQ ID NO: 45266 - RNA, 22 nt, Artificial Sequence
  LRRK2 RNA guide
uaguaaagcggagcaacuauuu

SEQ ID NO: 45267 - RNA, 22 nt, Artificial Sequence
  LRRK2 RNA guide
uaguugcuccgcuuuacuaaag

SEQ ID NO: 45268 - RNA, 22 nt, Artificial Sequence
  LRRK2 RNA guide
uaucuuuaguaaagcggagcaa

SEQ ID NO: 45269 - RNA, 22 nt, Artificial Sequence
  LRRK2 RNA guide
ucuuuaguaaagcggagcaacu

SEQ ID NO: 45270 - RNA, 22 nt, Artificial Sequence
  LRRK2 RNA guide
uuaaaauaguugcuccgcuuua

SEQ ID NO: 45271 - RNA, 22 nt, Artificial Sequence
  LRRK2 RNA guide
uuaguaaagcggagcaacuauu

SEQ ID NO: 45272 - RNA, 22 nt, Artificial Sequence
  LRRK2 RNA guide
uuaucuuuaguaaagcggagca

SEQ ID NO: 45273 - RNA, 22 nt, Artificial Sequence
  LRRK2 RNA guide
uugcuccgcuuuacuaaagaua

SEQ ID NO: 45274 - RNA, 22 nt, Artificial Sequence
  LRRK2 RNA guide
uuuaguaaagcggagcaacuau

SEQ ID NO: 45275 - RNA, 20 nt, Artificial Sequence
  LRRK2 RNA guide
aaaauaguagcuccgcuuua

SEQ ID NO: 45276 - RNA, 20 nt, Artificial Sequence
  LRRK2 RNA guide
aaagcggagcuacuauuuua

SEQ ID NO: 45277 - RNA, 20 nt, Artificial Sequence
  LRRK2 RNA guide
aaauaguagcuccgcuuuac

SEQ ID NO: 45278 - RNA, 20 nt, Artificial Sequence
  LRRK2 RNA guide
aagcggagcuacuauuuuaa

SEQ ID NO: 45279 - RNA, 20 nt, Artificial Sequence
  LRRK2 RNA guide
aauaguagcuccgcuuuacu

SEQ ID NO: 45280 - RNA, 20 nt, Artificial Sequence
  LRRK2 RNA guide
aauuaaaauaguagcuccgc

SEQ ID NO: 45281 - RNA, 20 nt, Artificial Sequence
  LRRK2 RNA guide
acaauuaaaauaguagcucc

SEQ ID NO: 45282 - RNA, 20 nt, Artificial Sequence
  LRRK2 RNA guide
agcggagcuacuauuuuaau

SEQ ID NO: 45283 - RNA, 20 nt, Artificial Sequence
  LRRK2 RNA guide
aguaaagcggagcuacuauu

SEQ ID NO: 45284 - RNA, 20 nt, Artificial Sequence
  LRRK2 RNA guide
aguagcuccgcuuuacuaaa

SEQ ID NO: 45285 - RNA, 20 nt, Artificial Sequence
  LRRK2 RNA guide
auaguagcuccgcuuuacua

SEQ ID NO: 45286 - RNA, 20 nt, Artificial Sequence
  LRRK2 RNA guide
aucuuuaguaaagcggagcu

SEQ ID NO: 45287 - RNA, 20 nt, Artificial Sequence
  LRRK2 RNA guide
auuaaaauaguagcuccgcu

SEQ ID NO: 45288 - RNA, 20 nt, Artificial Sequence
  LRRK2 RNA guide
caauuaaaauaguagcuccg

SEQ ID NO: 45289 - RNA, 20 nt, Artificial Sequence
  LRRK2 RNA guide
cggagcuacuauuuuaauug

SEQ ID NO: 45290 - RNA, 20 nt, Artificial Sequence
  LRRK2 RNA guide
cuuuaguaaagcggagcuac

SEQ ID NO: 45291 - RNA, 20 nt, Artificial Sequence
  LRRK2 RNA guide
gcaacaauuaaaauaguagc

SEQ ID NO: 45292 - RNA, 20 nt, Artificial Sequence
  LRRK2 RNA guide
gcggagcuacuauuuuaauu

SEQ ID NO: 45293 - RNA, 20 nt, Artificial Sequence
  LRRK2 RNA guide
gcuacuauuuuaauuguugc

SEQ ID NO: 45294 - RNA, 20 nt, Artificial Sequence
  LRRK2 RNA guide
ggagcuacuauuuuaauugu

SEQ ID NO: 45295 - RNA, 20 nt, Artificial Sequence
  LRRK2 RNA guide
guaaagcggagcuacuauuu

SEQ ID NO: 45296 - RNA, 20 nt, Artificial Sequence
  LRRK2 RNA guide
guagcuccgcuuuacuaaag

SEQ ID NO: 45297 - RNA, 20 nt, Artificial Sequence
  LRRK2 RNA guide
uaaaauaguagcuccgcuuu

SEQ ID NO: 45298 - RNA, 20 nt, Artificial Sequence
  LRRK2 RNA guide
uaaagcggagcuacuauuuu

SEQ ID NO: 45299 - RNA, 20 nt, Artificial Sequence
  LRRK2 RNA guide
uagcuccgcuuuacuaaaga

SEQ ID NO: 45300 - RNA, 20 nt, Artificial Sequence
  LRRK2 RNA guide
uaguaaagcggagcuacuau

SEQ ID NO: 45301 - RNA, 20 nt, Artificial Sequence
  LRRK2 RNA guide
uaguagcuccgcuuuacuaa

SEQ ID NO: 45302 - RNA, 20 nt, Artificial Sequence
  LRRK2 RNA guide
ucuuuaguaaagcggagcua

SEQ ID NO: 45303 - RNA, 20 nt, Artificial Sequence
  LRRK2 RNA guide
uuaaaauaguagcuccgcuu

SEQ ID NO: 45304 - RNA, 20 nt, Artificial Sequence
  LRRK2 RNA guide
uuaguaaagcggagcuacua

SEQ ID NO: 45305 - RNA, 20 nt, Artificial Sequence
  LRRK2 RNA guide
uuuaguaaagcggagcuacu

SEQ ID NO: 45306 - RNA, 21 nt, Artificial Sequence
  LRRK2 RNA guide
aaaauaguagcuccgcuuuac

SEQ ID NO: 45307 - RNA, 21 nt, Artificial Sequence
  LRRK2 RNA guide
aaagcggagcuacuauuuuaa

SEQ ID NO: 45308 - RNA, 21 nt, Artificial Sequence
  LRRK2 RNA guide
aaauaguagcuccgcuuuacu

SEQ ID NO: 45309 - RNA, 21 nt, Artificial Sequence
  LRRK2 RNA guide
aagcggagcuacuauuuuaau

SEQ ID NO: 45310 - RNA, 21 nt, Artificial Sequence
  LRRK2 RNA guide
aauaguagcuccgcuuuacua

SEQ ID NO: 45311 - RNA, 21 nt, Artificial Sequence
  LRRK2 RNA guide
aauuaaaauaguagcuccgcu

SEQ ID NO: 45312 - RNA, 21 nt, Artificial Sequence
  LRRK2 RNA guide
acaauuaaaauaguagcuccg

SEQ ID NO: 45313 - RNA, 21 nt, Artificial Sequence
  LRRK2 RNA guide
agcggagcuacuauuuuaauu

SEQ ID NO: 45314 - RNA, 21 nt, Artificial Sequence
  LRRK2 RNA guide
aguaaagcggagcuacuauuu

SEQ ID NO: 45315 - RNA, 21 nt, Artificial Sequence
  LRRK2 RNA guide
aguagcuccgcuuuacuaaag

SEQ ID NO: 45316 - RNA, 21 nt, Artificial Sequence
  LRRK2 RNA guide
auaguagcuccgcuuuacuaa

SEQ ID NO: 45317 - RNA, 21 nt, Artificial Sequence
  LRRK2 RNA guide
aucuuuaguaaagcggagcua

SEQ ID NO: 45318 - RNA, 21 nt, Artificial Sequence
  LRRK2 RNA guide
auuaaaauaguagcuccgcuu

SEQ ID NO: 45319 - RNA, 21 nt, Artificial Sequence
  LRRK2 RNA guide
caauuaaaauaguagcuccgc

SEQ ID NO: 45320 - RNA, 21 nt, Artificial Sequence
  LRRK2 RNA guide
cggagcuacuauuuuaauugu

SEQ ID NO: 45321 - RNA, 21 nt, Artificial Sequence
  LRRK2 RNA guide
cuuuaguaaagcggagcuacu

SEQ ID NO: 45322 - RNA, 21 nt, Artificial Sequence
  LRRK2 RNA guide
gcggagcuacuauuuuaauug

SEQ ID NO: 45323 - RNA, 21 nt, Artificial Sequence
  LRRK2 RNA guide
guaaagcggagcuacuauuuu

SEQ ID NO: 45324 - RNA, 21 nt, Artificial Sequence
  LRRK2 RNA guide
guagcuccgcuuuacuaaaga

SEQ ID NO: 45325 - RNA, 21 nt, Artificial Sequence
  LRRK2 RNA guide
uaaaauaguagcuccgcuuua

SEQ ID NO: 45326 - RNA, 21 nt, Artificial Sequence
  LRRK2 RNA guide
uaaagcggagcuacuauuuua

SEQ ID NO: 45327 - RNA, 21 nt, Artificial Sequence
  LRRK2 RNA guide
uagcuccgcuuuacuaaagau

SEQ ID NO: 45328 - RNA, 21 nt, Artificial Sequence
  LRRK2 RNA guide
uaguaaagcggagcuacuauu

SEQ ID NO: 45329 - RNA, 21 nt, Artificial Sequence
  LRRK2 RNA guide
uaguagcuccgcuuuacuaaa

SEQ ID NO: 45330 - RNA, 21 nt, Artificial Sequence
  LRRK2 RNA guide
uaucuuuaguaaagcggagcu

SEQ ID NO: 45331 - RNA, 21 nt, Artificial Sequence
  LRRK2 RNA guide
ucuuuaguaaagcggagcuac

SEQ ID NO: 45332 - RNA, 21 nt, Artificial Sequence
  LRRK2 RNA guide
uuaaaauaguagcuccgcuuu

SEQ ID NO: 45333 - RNA, 21 nt, Artificial Sequence
  LRRK2 RNA guide
uuaguaaagcggagcuacuau

SEQ ID NO: 45334 - RNA, 21 nt, Artificial Sequence
  LRRK2 RNA guide
uuuaguaaagcggagcuacua

SEQ ID NO: 45335 - RNA, 22 nt, Artificial Sequence
  LRRK2 RNA guide
aaaauaguagcuccgcuuuacu

SEQ ID NO: 45336 - RNA, 22 nt, Artificial Sequence
  LRRK2 RNA guide
aaagcggagcuacuauuuuaau

SEQ ID NO: 45337 - RNA, 22 nt, Artificial Sequence
  LRRK2 RNA guide
aaauaguagcuccgcuuuacua

SEQ ID NO: 45338 - RNA, 22 nt, Artificial Sequence
  LRRK2 RNA guide
aacaauuaaaauaguagcuccg

SEQ ID NO: 45339 - RNA, 22 nt, Artificial Sequence
  LRRK2 RNA guide
aagcggagcuacuauuuuaauu

SEQ ID NO: 45340 - RNA, 22 nt, Artificial Sequence
  LRRK2 RNA guide
aauaguagcuccgcuuuacuaa

SEQ ID NO: 45341 - RNA, 22 nt, Artificial Sequence
  LRRK2 RNA guide
aauuaaaauaguagcuccgcuu

SEQ ID NO: 45342 - RNA, 22 nt, Artificial Sequence
  LRRK2 RNA guide
acaauuaaaauaguagcuccgc

SEQ ID NO: 45343 - RNA, 22 nt, Artificial Sequence
  LRRK2 RNA guide
agcggagcuacuauuuuaauug

SEQ ID NO: 45344 - RNA, 22 nt, Artificial Sequence
  LRRK2 RNA guide
aguaaagcggagcuacuauuuu

SEQ ID NO: 45345 - RNA, 22 nt, Artificial Sequence
  LRRK2 RNA guide
aguagcuccgcuuuacuaaaga

SEQ ID NO: 45346 - RNA, 22 nt, Artificial Sequence
  LRRK2 RNA guide
auaguagcuccgcuuuacuaaa

SEQ ID NO: 45347 - RNA, 22 nt, Artificial Sequence
  LRRK2 RNA guide
aucuuuaguaaagcggagcuac

SEQ ID NO: 45348 - RNA, 22 nt, Artificial Sequence
  LRRK2 RNA guide
auuaaaauaguagcuccgcuuu

SEQ ID NO: 45349 - RNA, 22 nt, Artificial Sequence
  LRRK2 RNA guide
caacaauuaaaauaguagcucc

SEQ ID NO: 45350 - RNA, 22 nt, Artificial Sequence
  LRRK2 RNA guide
caauuaaaauaguagcuccgcu

SEQ ID NO: 45351 - RNA, 22 nt, Artificial Sequence
  LRRK2 RNA guide
cggagcuacuauuuuaauuguu

SEQ ID NO: 45352 - RNA, 22 nt, Artificial Sequence
  LRRK2 RNA guide
cuuuaguaaagcggagcuacua

SEQ ID NO: 45353 - RNA, 22 nt, Artificial Sequence
  LRRK2 RNA guide
gagcuacuauuuuaauuguugc

SEQ ID NO: 45354 - RNA, 22 nt, Artificial Sequence
  LRRK2 RNA guide
gcaacaauuaaaauaguagcuc

SEQ ID NO: 45355 - RNA, 22 nt, Artificial Sequence
  LRRK2 RNA guide
gcggagcuacuauuuuaauugu

SEQ ID NO: 45356 - RNA, 22 nt, Artificial Sequence
  LRRK2 RNA guide
ggagcuacuauuuuaauuguug

SEQ ID NO: 45357 - RNA, 22 nt, Artificial Sequence
  LRRK2 RNA guide
guaaagcggagcuacuauuuua

SEQ ID NO: 45358 - RNA, 22 nt, Artificial Sequence
  LRRK2 RNA guide
guagcuccgcuuuacuaaagau

SEQ ID NO: 45359 - RNA, 22 nt, Artificial Sequence
  LRRK2 RNA guide
uaaaauaguagcuccgcuuuac

SEQ ID NO: 45360 - RNA, 22 nt, Artificial Sequence
  LRRK2 RNA guide
uaaagcggagcuacuauuuuaa

SEQ ID NO: 45361 - RNA, 22 nt, Artificial Sequence
  LRRK2 RNA guide
uagcuccgcuuuacuaaagaua

SEQ ID NO: 45362 - RNA, 22 nt, Artificial Sequence
  LRRK2 RNA guide
uaguaaagcggagcuacuauuu

SEQ ID NO: 45363 - RNA, 22 nt, Artificial Sequence
  LRRK2 RNA guide
uaguagcuccgcuuuacuaaag

SEQ ID NO: 45364 - RNA, 22 nt, Artificial Sequence
  LRRK2 RNA guide
uaucuuuaguaaagcggagcua

SEQ ID NO: 45365 - RNA, 22 nt, Artificial Sequence
  LRRK2 RNA guide
ucuuuaguaaagcggagcuacu

SEQ ID NO: 45366 - RNA, 22 nt, Artificial Sequence
  LRRK2 RNA guide
uuaaaauaguagcuccgcuuua

SEQ ID NO: 45367 - RNA, 22 nt, Artificial Sequence
  LRRK2 RNA guide
uuaguaaagcggagcuacuauu

SEQ ID NO: 45368 - RNA, 22 nt, Artificial Sequence
  LRRK2 RNA guide
uuaucuuuaguaaagcggagcu

SEQ ID NO: 45369 - RNA, 22 nt, Artificial Sequence
  LRRK2 RNA guide
uuuaguaaagcggagcuacuau

SEQ ID NO: 45370 - RNA, 20 nt, Artificial Sequence
  LRRK2 RNA guide
aauaccgaagaacuaaaaag

SEQ ID NO: 45371 - RNA, 20 nt, Artificial Sequence
  LRRK2 RNA guide
aauugaaaauaccgaagaac

SEQ ID NO: 45372 - RNA, 20 nt, Artificial Sequence
  LRRK2 RNA guide
accgaagaacuaaaaagaaa

SEQ ID NO: 45373 - RNA, 20 nt, Artificial Sequence
  LRRK2 RNA guide
aggggaaguuucuuuuuagu

SEQ ID NO: 45374 - RNA, 20 nt, Artificial Sequence
  LRRK2 RNA guide
aguucuucgguauuuucaau

SEQ ID NO: 45375 - RNA, 20 nt, Artificial Sequence
  LRRK2 RNA guide
aguuucuuuuuaguucuucg

SEQ ID NO: 45376 - RNA, 20 nt, Artificial Sequence
  LRRK2 RNA guide
auaccgaagaacuaaaaaga

SEQ ID NO: 45377 - RNA, 20 nt, Artificial Sequence
  LRRK2 RNA guide
auugaaaauaccgaagaacu

SEQ ID NO: 45378 - RNA, 20 nt, Artificial Sequence
  LRRK2 RNA guide
ccgaagaacuaaaaagaaac

SEQ ID NO: 45379 - RNA, 20 nt, Artificial Sequence
  LRRK2 RNA guide
cgaagaacuaaaaagaaacu

SEQ ID NO: 45380 - RNA, 20 nt, Artificial Sequence
  LRRK2 RNA guide
cuuuuuaguucuucgguauu

SEQ ID NO: 45381 - RNA, 20 nt, Artificial Sequence
  LRRK2 RNA guide
gaaaauaccgaagaacuaaa

SEQ ID NO: 45382 - RNA, 20 nt, Artificial Sequence
  LRRK2 RNA guide
ggaaguuucuuuuuaguucu

SEQ ID NO: 45383 - RNA, 20 nt, Artificial Sequence
  LRRK2 RNA guide
gggaaguuucuuuuuaguuc

SEQ ID NO: 45384 - RNA, 20 nt, Artificial Sequence
  LRRK2 RNA guide
ggggaaguuucuuuuuaguu

SEQ ID NO: 45385 - RNA, 20 nt, Artificial Sequence
  LRRK2 RNA guide
guucuucgguauuuucaauu

SEQ ID NO: 45386 - RNA, 20 nt, Artificial Sequence
  LRRK2 RNA guide
guuucuuuuuaguucuucgg

SEQ ID NO: 45387 - RNA, 20 nt, Artificial Sequence
  LRRK2 RNA guide
uaccgaagaacuaaaaagaa

SEQ ID NO: 45388 - RNA, 20 nt, Artificial Sequence
  LRRK2 RNA guide
uaguucuucgguauuuucaa

SEQ ID NO: 45389 - RNA, 20 nt, Artificial Sequence
  LRRK2 RNA guide
ucuuuuuaguucuucgguau

SEQ ID NO: 45390 - RNA, 20 nt, Artificial Sequence
  LRRK2 RNA guide
ugaaaauaccgaagaacuaa

SEQ ID NO: 45391 - RNA, 20 nt, Artificial Sequence
  LRRK2 RNA guide
uuaguucuucgguauuuuca

SEQ ID NO: 45392 - RNA, 20 nt, Artificial Sequence
  LRRK2 RNA guide
uucuuuuuaguucuucggua

SEQ ID NO: 45393 - RNA, 20 nt, Artificial Sequence
  LRRK2 RNA guide
uugaaaauaccgaagaacua

SEQ ID NO: 45394 - RNA, 20 nt, Artificial Sequence
  LRRK2 RNA guide
uuuaguucuucgguauuuuc

SEQ ID NO: 45395 - RNA, 20 nt, Artificial Sequence
  LRRK2 RNA guide
uuucuuuuuaguucuucggu

SEQ ID NO: 45396 - RNA, 21 nt, Artificial Sequence
  LRRK2 RNA guide
aaggggaaguuucuuuuuagu

SEQ ID NO: 45397 - RNA, 21 nt, Artificial Sequence
  LRRK2 RNA guide
accgaagaacuaaaaagaaac

SEQ ID NO: 45398 - RNA, 21 nt, Artificial Sequence
  LRRK2 RNA guide
aggggaaguuucuuuuuaguu

SEQ ID NO: 45399 - RNA, 21 nt, Artificial Sequence
  LRRK2 RNA guide
aguuucuuuuuaguucuucgg

SEQ ID NO: 45400 - RNA, 21 nt, Artificial Sequence
  LRRK2 RNA guide
ccgaagaacuaaaaagaaacu

SEQ ID NO: 45401 - RNA, 21 nt, Artificial Sequence
  LRRK2 RNA guide
gggaaguuucuuuuuaguucu

SEQ ID NO: 45402 - RNA, 21 nt, Artificial Sequence
  LRRK2 RNA guide
ggggaaguuucuuuuuaguuc

SEQ ID NO: 45403 - RNA, 21 nt, Artificial Sequence
  LRRK2 RNA guide
guuucuuuuuaguucuucggu

SEQ ID NO: 45404 - RNA, 22 nt, Artificial Sequence
  LRRK2 RNA guide
aaggggaaguuucuuuuuaguu

SEQ ID NO: 45405 - RNA, 22 nt, Artificial Sequence
  LRRK2 RNA guide
aaguuucuuuuuaguucuucgg

SEQ ID NO: 45406 - RNA, 22 nt, Artificial Sequence
  LRRK2 RNA guide
accgaagaacuaaaaagaaacu

SEQ ID NO: 45407 - RNA, 22 nt, Artificial Sequence
  LRRK2 RNA guide
aggggaaguuucuuuuuaguuc

SEQ ID NO: 45408 - RNA, 22 nt, Artificial Sequence
  LRRK2 RNA guide
aguuucuuuuuaguucuucggu

SEQ ID NO: 45409 - RNA, 22 nt, Artificial Sequence
  LRRK2 RNA guide
ccgaagaacuaaaaagaaacuu

SEQ ID NO: 45410 - RNA, 22 nt, Artificial Sequence
  LRRK2 RNA guide
cgaagaacuaaaaagaaacuuc

SEQ ID NO: 45411 - RNA, 22 nt, Artificial Sequence
  LRRK2 RNA guide
gaaggggaaguuucuuuuuagu

SEQ ID NO: 45412 - RNA, 22 nt, Artificial Sequence
  LRRK2 RNA guide
gaaguuucuuuuuaguucuucg

SEQ ID NO: 45413 - RNA, 22 nt, Artificial Sequence
  LRRK2 RNA guide
ggaaguuucuuuuuaguucuuc

SEQ ID NO: 45414 - RNA, 22 nt, Artificial Sequence
  LRRK2 RNA guide
gggaaguuucuuuuuaguucuu

SEQ ID NO: 45415 - RNA, 22 nt, Artificial Sequence
  LRRK2 RNA guide
ggggaaguuucuuuuuaguucu

SEQ ID NO: 45416 - RNA, 22 nt, Artificial Sequence
  LRRK2 RNA guide
guuucuuuuuaguucuucggua

SEQ ID NO: 45417 - RNA, 22 nt, Artificial Sequence
  LRRK2 RNA guide
uaccgaagaacuaaaaagaaac

SEQ ID NO: 45418 - RNA, 20 nt, Artificial Sequence
  LRRK2 RNA guide
ccaaagaacuaaaaagaaac

SEQ ID NO: 45419 - RNA, 20 nt, Artificial Sequence
  LRRK2 RNA guide
guuucuuuuuaguucuuugg

SEQ ID NO: 45420 - RNA, 20 nt, Artificial Sequence
  LRRK2 RNA guide
agccaggaguucgagaccaa

SEQ ID NO: 45421 - RNA, 20 nt, Artificial Sequence
  LRRK2 RNA guide
cucaaguuggucucgaacuc

SEQ ID NO: 45422 - RNA, 20 nt, Artificial Sequence
  LRRK2 RNA guide
ucaaguuggucucgaacucc

SEQ ID NO: 45423 - RNA, 21 nt, Artificial Sequence
  LRRK2 RNA guide
agccaggaguucgagaccaac

SEQ ID NO: 45424 - RNA, 21 nt, Artificial Sequence
  LRRK2 RNA guide
cucaaguuggucucgaacucc

SEQ ID NO: 45425 - RNA, 21 nt, Artificial Sequence
  LRRK2 RNA guide
gagccaggaguucgagaccaa

SEQ ID NO: 45426 - RNA, 21 nt, Artificial Sequence
  LRRK2 RNA guide
ucaaguuggucucgaacuccu

SEQ ID NO: 45427 - RNA, 21 nt, Artificial Sequence
  LRRK2 RNA guide
ucucaaguuggucucgaacuc

SEQ ID NO: 45428 - RNA, 22 nt, Artificial Sequence
  LRRK2 RNA guide
agccaggaguucgagaccaacu

SEQ ID NO: 45429 - RNA, 22 nt, Artificial Sequence
  LRRK2 RNA guide
cucaaguuggucucgaacuccu

SEQ ID NO: 45430 - RNA, 22 nt, Artificial Sequence
  LRRK2 RNA guide
gagccaggaguucgagaccaac

SEQ ID NO: 45431 - RNA, 22 nt, Artificial Sequence
  LRRK2 RNA guide
ucaaguuggucucgaacuccug

SEQ ID NO: 45432 - RNA, 22 nt, Artificial Sequence
  LRRK2 RNA guide
ucucaaguuggucucgaacucc

SEQ ID NO: 45433 - RNA, 22 nt, Artificial Sequence
  LRRK2 RNA guide
ugagccaggaguucgagaccaa

SEQ ID NO: 45434 - RNA, 22 nt, Artificial Sequence
  LRRK2 RNA guide
uucucaaguuggucucgaacuc

SEQ ID NO: 45435 - RNA, 20 nt, Artificial Sequence
  LRRK2 RNA guide
aaguuggucucgaacuccug

SEQ ID NO: 45436 - RNA, 20 nt, Artificial Sequence
  LRRK2 RNA guide
acccaggaguucgagaccaa

SEQ ID NO: 45437 - RNA, 20 nt, Artificial Sequence
  LRRK2 RNA guide
acuugacccaggaguucgag

SEQ ID NO: 45438 - RNA, 20 nt, Artificial Sequence
  LRRK2 RNA guide
aguuggucucgaacuccugg

SEQ ID NO: 45439 - RNA, 20 nt, Artificial Sequence
  LRRK2 RNA guide
caaguuggucucgaacuccu

SEQ ID NO: 45440 - RNA, 20 nt, Artificial Sequence
  LRRK2 RNA guide
cuugacccaggaguucgaga

SEQ ID NO: 45441 - RNA, 20 nt, Artificial Sequence
  LRRK2 RNA guide
gacccaggaguucgagacca

SEQ ID NO: 45442 - RNA, 20 nt, Artificial Sequence
  LRRK2 RNA guide
guuggucucgaacuccuggg

SEQ ID NO: 45443 - RNA, 20 nt, Artificial Sequence
  LRRK2 RNA guide
ugacccaggaguucgagacc

SEQ ID NO: 45444 - RNA, 20 nt, Artificial Sequence
  LRRK2 RNA guide
uguugaggugggaggaucac

SEQ ID NO: 45445 - RNA, 20 nt, Artificial Sequence
  LRRK2 RNA guide
uugacccaggaguucgagac

SEQ ID NO: 45446 - RNA, 20 nt, Artificial Sequence
  LRRK2 RNA guide
uuggucucgaacuccugggu

SEQ ID NO: 45447 - RNA, 21 nt, Artificial Sequence
  LRRK2 RNA guide
aaguuggucucgaacuccugg

SEQ ID NO: 45448 - RNA, 21 nt, Artificial Sequence
  LRRK2 RNA guide
acccaggaguucgagaccaac

SEQ ID NO: 45449 - RNA, 21 nt, Artificial Sequence
  LRRK2 RNA guide
acuugacccaggaguucgaga

SEQ ID NO: 45450 - RNA, 21 nt, Artificial Sequence
  LRRK2 RNA guide
aguuggucucgaacuccuggg

SEQ ID NO: 45451 - RNA, 21 nt, Artificial Sequence
  LRRK2 RNA guide
auguugaggugggaggaucac

SEQ ID NO: 45452 - RNA, 21 nt, Artificial Sequence
  LRRK2 RNA guide
caaguuggucucgaacuccug

SEQ ID NO: 45453 - RNA, 21 nt, Artificial Sequence
  LRRK2 RNA guide
cacuugacccaggaguucgag

SEQ ID NO: 45454 - RNA, 21 nt, Artificial Sequence
  LRRK2 RNA guide
cuugacccaggaguucgagac

SEQ ID NO: 45455 - RNA, 21 nt, Artificial Sequence
  LRRK2 RNA guide
gacccaggaguucgagaccaa

SEQ ID NO: 45456 - RNA, 21 nt, Artificial Sequence
  LRRK2 RNA guide
ggucaagugauccucccaccu

SEQ ID NO: 45457 - RNA, 21 nt, Artificial Sequence
  LRRK2 RNA guide
guuggucucgaacuccugggu

SEQ ID NO: 45458 - RNA, 21 nt, Artificial Sequence
  LRRK2 RNA guide
ugacccaggaguucgagacca

SEQ ID NO: 45459 - RNA, 21 nt, Artificial Sequence
  LRRK2 RNA guide
uguugaggugggaggaucacu

SEQ ID NO: 45460 - RNA, 21 nt, Artificial Sequence
  LRRK2 RNA guide
uugacccaggaguucgagacc

SEQ ID NO: 45461 - RNA, 21 nt, Artificial Sequence
  LRRK2 RNA guide
uuggucucgaacuccuggguc

SEQ ID NO: 45462 - RNA, 22 nt, Artificial Sequence
  LRRK2 RNA guide
aaguuggucucgaacuccuggg

SEQ ID NO: 45463 - RNA, 22 nt, Artificial Sequence
  LRRK2 RNA guide
acccaggaguucgagaccaacu

SEQ ID NO: 45464 - RNA, 22 nt, Artificial Sequence
  LRRK2 RNA guide
acuugacccaggaguucgagac

SEQ ID NO: 45465 - RNA, 22 nt, Artificial Sequence
  LRRK2 RNA guide
aguuggucucgaacuccugggu

SEQ ID NO: 45466 - RNA, 22 nt, Artificial Sequence
  LRRK2 RNA guide
auguugaggugggaggaucacu

SEQ ID NO: 45467 - RNA, 22 nt, Artificial Sequence
  LRRK2 RNA guide
caaguuggucucgaacuccugg

SEQ ID NO: 45468 - RNA, 22 nt, Artificial Sequence
  LRRK2 RNA guide
cacuugacccaggaguucgaga

SEQ ID NO: 45469 - RNA, 22 nt, Artificial Sequence
  LRRK2 RNA guide
cgaacuccugggucaagugauc

SEQ ID NO: 45470 - RNA, 22 nt, Artificial Sequence
  LRRK2 RNA guide
cuugacccaggaguucgagacc

SEQ ID NO: 45471 - RNA, 22 nt, Artificial Sequence
  LRRK2 RNA guide
gaacuccugggucaagugaucc

SEQ ID NO: 45472 - RNA, 22 nt, Artificial Sequence
  LRRK2 RNA guide
gacccaggaguucgagaccaac

SEQ ID NO: 45473 - RNA, 22 nt, Artificial Sequence
  LRRK2 RNA guide
gauguugaggugggaggaucac

SEQ ID NO: 45474 - RNA, 22 nt, Artificial Sequence
  LRRK2 RNA guide
gggaggaucacuugacccagga

SEQ ID NO: 45475 - RNA, 22 nt, Artificial Sequence
  LRRK2 RNA guide
gggucaagugauccucccaccu

SEQ ID NO: 45476 - RNA, 22 nt, Artificial Sequence
  LRRK2 RNA guide
ggucaagugauccucccaccuc

SEQ ID NO: 45477 - RNA, 22 nt, Artificial Sequence
  LRRK2 RNA guide
guuggucucgaacuccuggguc

SEQ ID NO: 45478 - RNA, 22 nt, Artificial Sequence
  LRRK2 RNA guide
ucacuugacccaggaguucgag

SEQ ID NO: 45479 - RNA, 22 nt, Artificial Sequence
  LRRK2 RNA guide
ugacccaggaguucgagaccaa

SEQ ID NO: 45480 - RNA, 22 nt, Artificial Sequence
  LRRK2 RNA guide
ugggaggaucacuugacccagg

SEQ ID NO: 45481 - RNA, 22 nt, Artificial Sequence
  LRRK2 RNA guide
uguugaggugggaggaucacuu

SEQ ID NO: 45482 - RNA, 22 nt, Artificial Sequence
  LRRK2 RNA guide
uugacccaggaguucgagacca

SEQ ID NO: 45483 - RNA, 22 nt, Artificial Sequence
  LRRK2 RNA guide
uuggucucgaacuccuggguca

SEQ ID NO: 45484 - RNA, 20 nt, Artificial Sequence
  LRRK2 RNA guide
aacagagccagacccuguua

SEQ ID NO: 45485 - RNA, 20 nt, Artificial Sequence
  LRRK2 RNA guide
aacagggucuggcucuguug

SEQ ID NO: 45486 - RNA, 20 nt, Artificial Sequence
  LRRK2 RNA guide
agagccagacccuguuaaaa

SEQ ID NO: 45487 - RNA, 20 nt, Artificial Sequence
  LRRK2 RNA guide
agccagacccuguuaaaaua

SEQ ID NO: 45488 - RNA, 20 nt, Artificial Sequence
  LRRK2 RNA guide
aggcaacagagccagacccu

SEQ ID NO: 45489 - RNA, 20 nt, Artificial Sequence
  LRRK2 RNA guide
auuuuaacagggucuggcuc

SEQ ID NO: 45490 - RNA, 20 nt, Artificial Sequence
  LRRK2 RNA guide
caacagagccagacccuguu

SEQ ID NO: 45491 - RNA, 20 nt, Artificial Sequence
  LRRK2 RNA guide
cagacccuguuaaaauaaaa

SEQ ID NO: 45492 - RNA, 20 nt, Artificial Sequence
  LRRK2 RNA guide
ccagacccuguuaaaauaaa

SEQ ID NO: 45493 - RNA, 20 nt, Artificial Sequence
  LRRK2 RNA guide
cuaggcaacagagccagacc

SEQ ID NO: 45494 - RNA, 20 nt, Artificial Sequence
  LRRK2 RNA guide
gagccagacccuguuaaaau

SEQ ID NO: 45495 - RNA, 20 nt, Artificial Sequence
  LRRK2 RNA guide
gcaacagagccagacccugu

SEQ ID NO: 45496 - RNA, 20 nt, Artificial Sequence
  LRRK2 RNA guide
gccagacccuguuaaaauaa

SEQ ID NO: 45497 - RNA, 20 nt, Artificial Sequence
  LRRK2 RNA guide
ggcaacagagccagacccug

SEQ ID NO: 45498 - RNA, 20 nt, Artificial Sequence
  LRRK2 RNA guide
uaacagggucuggcucuguu

SEQ ID NO: 45499 - RNA, 20 nt, Artificial Sequence
  LRRK2 RNA guide
uaggcaacagagccagaccc

SEQ ID NO: 45500 - RNA, 20 nt, Artificial Sequence
  LRRK2 RNA guide
uauuuuaacagggucuggcu

SEQ ID NO: 45501 - RNA, 20 nt, Artificial Sequence
  LRRK2 RNA guide
uuaacagggucuggcucugu

SEQ ID NO: 45502 - RNA, 20 nt, Artificial Sequence
  LRRK2 RNA guide
uuuaacagggucuggcucug

SEQ ID NO: 45503 - RNA, 20 nt, Artificial Sequence
  LRRK2 RNA guide
uuuuaacagggucuggcucu

SEQ ID NO: 45504 - RNA, 20 nt, Artificial Sequence
  LRRK2 RNA guide
uuuuauuuuaacagggucug

SEQ ID NO: 45505 - RNA, 21 nt, Artificial Sequence
  LRRK2 RNA guide
aacagagccagacccuguuaa

SEQ ID NO: 45506 - RNA, 21 nt, Artificial Sequence
  LRRK2 RNA guide
aacagggucuggcucuguugc

SEQ ID NO: 45507 - RNA, 21 nt, Artificial Sequence
  LRRK2 RNA guide
agagccagacccuguuaaaau

SEQ ID NO: 45508 - RNA, 21 nt, Artificial Sequence
  LRRK2 RNA guide
agccagacccuguuaaaauaa

SEQ ID NO: 45509 - RNA, 21 nt, Artificial Sequence
  LRRK2 RNA guide
aggcaacagagccagacccug

SEQ ID NO: 45510 - RNA, 21 nt, Artificial Sequence
  LRRK2 RNA guide
auuuuaacagggucuggcucu

SEQ ID NO: 45511 - RNA, 21 nt, Artificial Sequence
  LRRK2 RNA guide
caacagagccagacccuguua

SEQ ID NO: 45512 - RNA, 21 nt, Artificial Sequence
  LRRK2 RNA guide
cagagccagacccuguuaaaa

SEQ ID NO: 45513 - RNA, 21 nt, Artificial Sequence
  LRRK2 RNA guide
ccagacccuguuaaaauaaaa

SEQ ID NO: 45514 - RNA, 21 nt, Artificial Sequence
  LRRK2 RNA guide
ccuaggcaacagagccagacc

SEQ ID NO: 45515 - RNA, 21 nt, Artificial Sequence
  LRRK2 RNA guide
cuaggcaacagagccagaccc

SEQ ID NO: 45516 - RNA, 21 nt, Artificial Sequence
  LRRK2 RNA guide
gagccagacccuguuaaaaua

SEQ ID NO: 45517 - RNA, 21 nt, Artificial Sequence
  LRRK2 RNA guide
gcaacagagccagacccuguu

SEQ ID NO: 45518 - RNA, 21 nt, Artificial Sequence
  LRRK2 RNA guide
gccagacccuguuaaaauaaa

SEQ ID NO: 45519 - RNA, 21 nt, Artificial Sequence
  LRRK2 RNA guide
ggcaacagagccagacccugu

SEQ ID NO: 45520 - RNA, 21 nt, Artificial Sequence
  LRRK2 RNA guide
uaacagggucuggcucuguug

SEQ ID NO: 45521 - RNA, 21 nt, Artificial Sequence
  LRRK2 RNA guide
uaggcaacagagccagacccu

SEQ ID NO: 45522 - RNA, 21 nt, Artificial Sequence
  LRRK2 RNA guide
uauuuuaacagggucuggcuc

SEQ ID NO: 45523 - RNA, 21 nt, Artificial Sequence
  LRRK2 RNA guide
uuaacagggucuggcucuguu

SEQ ID NO: 45524 - RNA, 21 nt, Artificial Sequence
  LRRK2 RNA guide
uuauuuuaacagggucuggcu

SEQ ID NO: 45525 - RNA, 21 nt, Artificial Sequence
  LRRK2 RNA guide
uuuaacagggucuggcucugu

SEQ ID NO: 45526 - RNA, 21 nt, Artificial Sequence
  LRRK2 RNA guide
uuuuaacagggucuggcucug

SEQ ID NO: 45527 - RNA, 21 nt, Artificial Sequence
  LRRK2 RNA guide
uuuuauuuuaacagggucugg

SEQ ID NO: 45528 - RNA, 22 nt, Artificial Sequence
  LRRK2 RNA guide
aacagagccagacccuguuaaa

SEQ ID NO: 45529 - RNA, 22 nt, Artificial Sequence
  LRRK2 RNA guide
aacagggucuggcucuguugcc

SEQ ID NO: 45530 - RNA, 22 nt, Artificial Sequence
  LRRK2 RNA guide
acagagccagacccuguuaaaa

SEQ ID NO: 45531 - RNA, 22 nt, Artificial Sequence
  LRRK2 RNA guide
agagccagacccuguuaaaaua

SEQ ID NO: 45532 - RNA, 22 nt, Artificial Sequence
  LRRK2 RNA guide
agccagacccuguuaaaauaaa

SEQ ID NO: 45533 - RNA, 22 nt, Artificial Sequence
  LRRK2 RNA guide
aggcaacagagccagacccugu

SEQ ID NO: 45534 - RNA, 22 nt, Artificial Sequence
  LRRK2 RNA guide
auuuuaacagggucuggcucug

SEQ ID NO: 45535 - RNA, 22 nt, Artificial Sequence
  LRRK2 RNA guide
auuuuauuuuaacagggucugg

SEQ ID NO: 45536 - RNA, 22 nt, Artificial Sequence
  LRRK2 RNA guide
caacagagccagacccuguuaa

SEQ ID NO: 45537 - RNA, 22 nt, Artificial Sequence
  LRRK2 RNA guide
cagagccagacccuguuaaaau

SEQ ID NO: 45538 - RNA, 22 nt, Artificial Sequence
  LRRK2 RNA guide
ccagacccuguuaaaauaaaau

SEQ ID NO: 45539 - RNA, 22 nt, Artificial Sequence
  LRRK2 RNA guide
ccuaggcaacagagccagaccc

SEQ ID NO: 45540 - RNA, 22 nt, Artificial Sequence
  LRRK2 RNA guide
cuaggcaacagagccagacccu

SEQ ID NO: 45541 - RNA, 22 nt, Artificial Sequence
  LRRK2 RNA guide
gagccagacccuguuaaaauaa

SEQ ID NO: 45542 - RNA, 22 nt, Artificial Sequence
  LRRK2 RNA guide
gcaacagagccagacccuguua

SEQ ID NO: 45543 - RNA, 22 nt, Artificial Sequence
  LRRK2 RNA guide
gccagacccuguuaaaauaaaa

SEQ ID NO: 45544 - RNA, 22 nt, Artificial Sequence
  LRRK2 RNA guide
gccuaggcaacagagccagacc

SEQ ID NO: 45545 - RNA, 22 nt, Artificial Sequence
  LRRK2 RNA guide
ggcaacagagccagacccuguu

SEQ ID NO: 45546 - RNA, 22 nt, Artificial Sequence
  LRRK2 RNA guide
uaacagggucuggcucuguugc

SEQ ID NO: 45547 - RNA, 22 nt, Artificial Sequence
  LRRK2 RNA guide
uaggcaacagagccagacccug

SEQ ID NO: 45548 - RNA, 22 nt, Artificial Sequence
  LRRK2 RNA guide
uauuuuaacagggucuggcucu

SEQ ID NO: 45549 - RNA, 22 nt, Artificial Sequence
  LRRK2 RNA guide
uuaacagggucuggcucuguug

SEQ ID NO: 45550 - RNA, 22 nt, Artificial Sequence
  LRRK2 RNA guide
uuauuuuaacagggucuggcuc

SEQ ID NO: 45551 - RNA, 22 nt, Artificial Sequence
  LRRK2 RNA guide
uuuaacagggucuggcucuguu

SEQ ID NO: 45552 - RNA, 22 nt, Artificial Sequence
  LRRK2 RNA guide
uuuauuuuaacagggucuggcu

SEQ ID NO: 45553 - RNA, 22 nt, Artificial Sequence
  LRRK2 RNA guide
uuuuaacagggucuggcucugu

SEQ ID NO: 45554 - RNA, 22 nt, Artificial Sequence
  LRRK2 RNA guide
uuuuauuuuaacagggucuggc

SEQ ID NO: 45555 - RNA, 20 nt, Artificial Sequence
  LRRK2 RNA guide
acagagccagacccuguuaa

SEQ ID NO: 45556 - RNA, 20 nt, Artificial Sequence
  LRRK2 RNA guide
agagccagacccuguuaaau

SEQ ID NO: 45557 - RNA, 20 nt, Artificial Sequence
  LRRK2 RNA guide
agccagacccuguuaaauaa

SEQ ID NO: 45558 - RNA, 20 nt, Artificial Sequence
  LRRK2 RNA guide
auuuaacagggucuggcucu

SEQ ID NO: 45559 - RNA, 20 nt, Artificial Sequence
  LRRK2 RNA guide
auuuuauuuaacagggucug

SEQ ID NO: 45560 - RNA, 20 nt, Artificial Sequence
  LRRK2 RNA guide
cagacccuguuaaauaaaau

SEQ ID NO: 45561 - RNA, 20 nt, Artificial Sequence
  LRRK2 RNA guide
cagagccagacccuguuaaa

SEQ ID NO: 45562 - RNA, 20 nt, Artificial Sequence
  LRRK2 RNA guide
ccagacccuguuaaauaaaa

SEQ ID NO: 45563 - RNA, 20 nt, Artificial Sequence
  LRRK2 RNA guide
gagccagacccuguuaaaua

SEQ ID NO: 45564 - RNA, 20 nt, Artificial Sequence
  LRRK2 RNA guide
gccagacccuguuaaauaaa

SEQ ID NO: 45565 - RNA, 20 nt, Artificial Sequence
  LRRK2 RNA guide
uauuuaacagggucuggcuc

SEQ ID NO: 45566 - RNA, 20 nt, Artificial Sequence
  LRRK2 RNA guide
uuauuuaacagggucuggcu

SEQ ID NO: 45567 - RNA, 20 nt, Artificial Sequence
  LRRK2 RNA guide
uuuauuuaacagggucuggc

SEQ ID NO: 45568 - RNA, 20 nt, Artificial Sequence
  LRRK2 RNA guide
uuuuauuuaacagggucugg

SEQ ID NO: 45569 - RNA, 21 nt, Artificial Sequence
  LRRK2 RNA guide
acagagccagacccuguuaaa

SEQ ID NO: 45570 - RNA, 21 nt, Artificial Sequence
  LRRK2 RNA guide
agagccagacccuguuaaaua

SEQ ID NO: 45571 - RNA, 21 nt, Artificial Sequence
  LRRK2 RNA guide
agccagacccuguuaaauaaa

SEQ ID NO: 45572 - RNA, 21 nt, Artificial Sequence
  LRRK2 RNA guide
auuuaacagggucuggcucug

SEQ ID NO: 45573 - RNA, 21 nt, Artificial Sequence
  LRRK2 RNA guide
auuuuauuuaacagggucugg

SEQ ID NO: 45574 - RNA, 21 nt, Artificial Sequence
  LRRK2 RNA guide
cagagccagacccuguuaaau

SEQ ID NO: 45575 - RNA, 21 nt, Artificial Sequence
  LRRK2 RNA guide
ccagacccuguuaaauaaaau

SEQ ID NO: 45576 - RNA, 21 nt, Artificial Sequence
  LRRK2 RNA guide
gagccagacccuguuaaauaa

SEQ ID NO: 45577 - RNA, 21 nt, Artificial Sequence
  LRRK2 RNA guide
gccagacccuguuaaauaaaa

SEQ ID NO: 45578 - RNA, 21 nt, Artificial Sequence
  LRRK2 RNA guide
uauuuaacagggucuggcucu

SEQ ID NO: 45579 - RNA, 21 nt, Artificial Sequence
  LRRK2 RNA guide
uuauuuaacagggucuggcuc

SEQ ID NO: 45580 - RNA, 21 nt, Artificial Sequence
  LRRK2 RNA guide
uuuauuuaacagggucuggcu

SEQ ID NO: 45581 - RNA, 21 nt, Artificial Sequence
  LRRK2 RNA guide
uuuuauuuaacagggucuggc

SEQ ID NO: 45582 - RNA, 22 nt, Artificial Sequence
  LRRK2 RNA guide
acagagccagacccuguuaaau

SEQ ID NO: 45583 - RNA, 22 nt, Artificial Sequence
  LRRK2 RNA guide
agagccagacccuguuaaauaa

SEQ ID NO: 45584 - RNA, 22 nt, Artificial Sequence
  LRRK2 RNA guide
agccagacccuguuaaauaaaa

SEQ ID NO: 45585 - RNA, 22 nt, Artificial Sequence
  LRRK2 RNA guide
auuuaacagggucuggcucugu

SEQ ID NO: 45586 - RNA, 22 nt, Artificial Sequence
  LRRK2 RNA guide
auuuuauuuaacagggucuggc

SEQ ID NO: 45587 - RNA, 22 nt, Artificial Sequence
  LRRK2 RNA guide
cagagccagacccuguuaaaua

SEQ ID NO: 45588 - RNA, 22 nt, Artificial Sequence
  LRRK2 RNA guide
ccagacccuguuaaauaaaaua

SEQ ID NO: 45589 - RNA, 22 nt, Artificial Sequence
  LRRK2 RNA guide
gagccagacccuguuaaauaaa

SEQ ID NO: 45590 - RNA, 22 nt, Artificial Sequence
  LRRK2 RNA guide
gccagacccuguuaaauaaaau

SEQ ID NO: 45591 - RNA, 22 nt, Artificial Sequence
  LRRK2 RNA guide
uauuuaacagggucuggcucug

SEQ ID NO: 45592 - RNA, 22 nt, Artificial Sequence
  LRRK2 RNA guide
uauuuuauuuaacagggucugg

SEQ ID NO: 45593 - RNA, 22 nt, Artificial Sequence
  LRRK2 RNA guide
uuauuuaacagggucuggcucu

SEQ ID NO: 45594 - RNA, 22 nt, Artificial Sequence
  LRRK2 RNA guide
uuuauuuaacagggucuggcuc

SEQ ID NO: 45595 - RNA, 22 nt, Artificial Sequence
  LRRK2 RNA guide
uuuuauuuaacagggucuggcu

SEQ ID NO: 45596 - RNA, 20 nt, Artificial Sequence
  LRRK2 RNA guide
aaaaccaaccggucgggugc

SEQ ID NO: 45597 - RNA, 20 nt, Artificial Sequence
  LRRK2 RNA guide
aaaccaaccggucgggugcg

SEQ ID NO: 45598 - RNA, 20 nt, Artificial Sequence
  LRRK2 RNA guide
aaccaaccggucgggugcgg

SEQ ID NO: 45599 - RNA, 20 nt, Artificial Sequence
  LRRK2 RNA guide
aaccggucgggugcgguggc

SEQ ID NO: 45600 - RNA, 20 nt, Artificial Sequence
  LRRK2 RNA guide
accaaccggucgggugcggu

SEQ ID NO: 45601 - RNA, 20 nt, Artificial Sequence
  LRRK2 RNA guide
accgcacccgaccgguuggu

SEQ ID NO: 45602 - RNA, 20 nt, Artificial Sequence
  LRRK2 RNA guide
agccaccgcacccgaccggu

SEQ ID NO: 45603 - RNA, 20 nt, Artificial Sequence
  LRRK2 RNA guide
caaaaccaaccggucgggug

SEQ ID NO: 45604 - RNA, 20 nt, Artificial Sequence
  LRRK2 RNA guide
caaccggucgggugcggugg

SEQ ID NO: 45605 - RNA, 20 nt, Artificial Sequence
  LRRK2 RNA guide
cacccgaccgguugguuuug

SEQ ID NO: 45606 - RNA, 20 nt, Artificial Sequence
  LRRK2 RNA guide
caccgcacccgaccgguugg

SEQ ID NO: 45607 - RNA, 20 nt, Artificial Sequence
  LRRK2 RNA guide
ccaaccggucgggugcggug

SEQ ID NO: 45608 - RNA, 20 nt, Artificial Sequence
  LRRK2 RNA guide
ccaccgcacccgaccgguug

SEQ ID NO: 45609 - RNA, 20 nt, Artificial Sequence
  LRRK2 RNA guide
ccgcacccgaccgguugguu

SEQ ID NO: 45610 - RNA, 20 nt, Artificial Sequence
  LRRK2 RNA guide
cgcacccgaccgguugguuu

SEQ ID NO: 45611 - RNA, 20 nt, Artificial Sequence
  LRRK2 RNA guide
cgugagccaccgcacccgac

SEQ ID NO: 45612 - RNA, 20 nt, Artificial Sequence
  LRRK2 RNA guide
cucaaaaccaaccggucggg

SEQ ID NO: 45613 - RNA, 20 nt, Artificial Sequence
  LRRK2 RNA guide
cugucucaaaaccaaccggu

SEQ ID NO: 45614 - RNA, 20 nt, Artificial Sequence
  LRRK2 RNA guide
gagccaccgcacccgaccgg

SEQ ID NO: 45615 - RNA, 20 nt, Artificial Sequence
  LRRK2 RNA guide
gcacccgaccgguugguuuu

SEQ ID NO: 45616 - RNA, 20 nt, Artificial Sequence
  LRRK2 RNA guide
gccaccgcacccgaccgguu

SEQ ID NO: 45617 - RNA, 20 nt, Artificial Sequence
  LRRK2 RNA guide
gucucaaaaccaaccggucg

SEQ ID NO: 45618 - RNA, 20 nt, Artificial Sequence
  LRRK2 RNA guide
gugagccaccgcacccgacc

SEQ ID NO: 45619 - RNA, 20 nt, Artificial Sequence
  LRRK2 RNA guide
ucaaaaccaaccggucgggu

SEQ ID NO: 45620 - RNA, 20 nt, Artificial Sequence
  LRRK2 RNA guide
ucucaaaaccaaccggucgg

SEQ ID NO: 45621 - RNA, 20 nt, Artificial Sequence
  LRRK2 RNA guide
ugagccaccgcacccgaccg

SEQ ID NO: 45622 - RNA, 20 nt, Artificial Sequence
  LRRK2 RNA guide
ugucucaaaaccaaccgguc

SEQ ID NO: 45623 - RNA, 21 nt, Artificial Sequence
  LRRK2 RNA guide
aaaaccaaccggucgggugcg

SEQ ID NO: 45624 - RNA, 21 nt, Artificial Sequence
  LRRK2 RNA guide
aaaccaaccggucgggugcgg

SEQ ID NO: 45625 - RNA, 21 nt, Artificial Sequence
  LRRK2 RNA guide
aaccaaccggucgggugcggu

SEQ ID NO: 45626 - RNA, 21 nt, Artificial Sequence
  LRRK2 RNA guide
aaccggucgggugcgguggcu

SEQ ID NO: 45627 - RNA, 21 nt, Artificial Sequence
  LRRK2 RNA guide
accaaccggucgggugcggug

SEQ ID NO: 45628 - RNA, 21 nt, Artificial Sequence
  LRRK2 RNA guide
accgcacccgaccgguugguu

SEQ ID NO: 45629 - RNA, 21 nt, Artificial Sequence
  LRRK2 RNA guide
agccaccgcacccgaccgguu

SEQ ID NO: 45630 - RNA, 21 nt, Artificial Sequence
  LRRK2 RNA guide
caaaaccaaccggucgggugc

SEQ ID NO: 45631 - RNA, 21 nt, Artificial Sequence
  LRRK2 RNA guide
caaccggucgggugcgguggc

SEQ ID NO: 45632 - RNA, 21 nt, Artificial Sequence
  LRRK2 RNA guide
cacccgaccgguugguuuuga

SEQ ID NO: 45633 - RNA, 21 nt, Artificial Sequence
  LRRK2 RNA guide
caccgcacccgaccgguuggu

SEQ ID NO: 45634 - RNA, 21 nt, Artificial Sequence
  LRRK2 RNA guide
ccaaccggucgggugcggugg

SEQ ID NO: 45635 - RNA, 21 nt, Artificial Sequence
  LRRK2 RNA guide
ccaccgcacccgaccgguugg

SEQ ID NO: 45636 - RNA, 21 nt, Artificial Sequence
  LRRK2 RNA guide
ccgcacccgaccgguugguuu

SEQ ID NO: 45637 - RNA, 21 nt, Artificial Sequence
  LRRK2 RNA guide
cgcacccgaccgguugguuuu

SEQ ID NO: 45638 - RNA, 21 nt, Artificial Sequence
  LRRK2 RNA guide
cgugagccaccgcacccgacc

SEQ ID NO: 45639 - RNA, 21 nt, Artificial Sequence
  LRRK2 RNA guide
cucaaaaccaaccggucgggu

SEQ ID NO: 45640 - RNA, 21 nt, Artificial Sequence
  LRRK2 RNA guide
cugucucaaaaccaaccgguc

SEQ ID NO: 45641 - RNA, 21 nt, Artificial Sequence
  LRRK2 RNA guide
gagccaccgcacccgaccggu

SEQ ID NO: 45642 - RNA, 21 nt, Artificial Sequence
  LRRK2 RNA guide
gcacccgaccgguugguuuug

SEQ ID NO: 45643 - RNA, 21 nt, Artificial Sequence
  LRRK2 RNA guide
gccaccgcacccgaccgguug

SEQ ID NO: 45644 - RNA, 21 nt, Artificial Sequence
  LRRK2 RNA guide
gcgugagccaccgcacccgac

SEQ ID NO: 45645 - RNA, 21 nt, Artificial Sequence
  LRRK2 RNA guide
gucucaaaaccaaccggucgg

SEQ ID NO: 45646 - RNA, 21 nt, Artificial Sequence
  LRRK2 RNA guide
gugagccaccgcacccgaccg

SEQ ID NO: 45647 - RNA, 21 nt, Artificial Sequence
  LRRK2 RNA guide
ucaaaaccaaccggucgggug

SEQ ID NO: 45648 - RNA, 21 nt, Artificial Sequence
  LRRK2 RNA guide
ucucaaaaccaaccggucggg

SEQ ID NO: 45649 - RNA, 21 nt, Artificial Sequence
  LRRK2 RNA guide
ucugucucaaaaccaaccggu

SEQ ID NO: 45650 - RNA, 21 nt, Artificial Sequence
  LRRK2 RNA guide
ugagccaccgcacccgaccgg

SEQ ID NO: 45651 - RNA, 21 nt, Artificial Sequence
  LRRK2 RNA guide
ugucucaaaaccaaccggucg

SEQ ID NO: 45652 - RNA, 22 nt, Artificial Sequence
  LRRK2 RNA guide
aaaaccaaccggucgggugcgg

SEQ ID NO: 45653 - RNA, 22 nt, Artificial Sequence
  LRRK2 RNA guide
aaaccaaccggucgggugcggu

SEQ ID NO: 45654 - RNA, 22 nt, Artificial Sequence
  LRRK2 RNA guide
aaccaaccggucgggugcggug

SEQ ID NO: 45655 - RNA, 22 nt, Artificial Sequence
  LRRK2 RNA guide
aaccggucgggugcgguggcuc

SEQ ID NO: 45656 - RNA, 22 nt, Artificial Sequence
  LRRK2 RNA guide
accaaccggucgggugcggugg

SEQ ID NO: 45657 - RNA, 22 nt, Artificial Sequence
  LRRK2 RNA guide
accgcacccgaccgguugguuu

SEQ ID NO: 45658 - RNA, 22 nt, Artificial Sequence
  LRRK2 RNA guide
agccaccgcacccgaccgguug

SEQ ID NO: 45659 - RNA, 22 nt, Artificial Sequence
  LRRK2 RNA guide
caaaaccaaccggucgggugcg

SEQ ID NO: 45660 - RNA, 22 nt, Artificial Sequence
  LRRK2 RNA guide
caaccggucgggugcgguggcu

SEQ ID NO: 45661 - RNA, 22 nt, Artificial Sequence
  LRRK2 RNA guide
cacccgaccgguugguuuugag

SEQ ID NO: 45662 - RNA, 22 nt, Artificial Sequence
  LRRK2 RNA guide
caccgcacccgaccgguugguu

SEQ ID NO: 45663 - RNA, 22 nt, Artificial Sequence
  LRRK2 RNA guide
ccaaccggucgggugcgguggc

SEQ ID NO: 45664 - RNA, 22 nt, Artificial Sequence
  LRRK2 RNA guide
ccaccgcacccgaccgguuggu

SEQ ID NO: 45665 - RNA, 22 nt, Artificial Sequence
  LRRK2 RNA guide
ccgcacccgaccgguugguuuu

SEQ ID NO: 45666 - RNA, 22 nt, Artificial Sequence
  LRRK2 RNA guide
cgcacccgaccgguugguuuug

SEQ ID NO: 45667 - RNA, 22 nt, Artificial Sequence
  LRRK2 RNA guide
cgugagccaccgcacccgaccg

SEQ ID NO: 45668 - RNA, 22 nt, Artificial Sequence
  LRRK2 RNA guide
cucaaaaccaaccggucgggug

SEQ ID NO: 45669 - RNA, 22 nt, Artificial Sequence
  LRRK2 RNA guide
cucugucucaaaaccaaccggu

SEQ ID NO: 45670 - RNA, 22 nt, Artificial Sequence
  LRRK2 RNA guide
cugucucaaaaccaaccggucg

SEQ ID NO: 45671 - RNA, 22 nt, Artificial Sequence
  LRRK2 RNA guide
gagccaccgcacccgaccgguu

SEQ ID NO: 45672 - RNA, 22 nt, Artificial Sequence
  LRRK2 RNA guide
gcacccgaccgguugguuuuga

SEQ ID NO: 45673 - RNA, 22 nt, Artificial Sequence
  LRRK2 RNA guide
gccaccgcacccgaccgguugg

SEQ ID NO: 45674 - RNA, 22 nt, Artificial Sequence
  LRRK2 RNA guide
gcgugagccaccgcacccgacc

SEQ ID NO: 45675 - RNA, 22 nt, Artificial Sequence
  LRRK2 RNA guide
ggcgugagccaccgcacccgac

SEQ ID NO: 45676 - RNA, 22 nt, Artificial Sequence
  LRRK2 RNA guide
gucucaaaaccaaccggucggg

SEQ ID NO: 45677 - RNA, 22 nt, Artificial Sequence
  LRRK2 RNA guide
gugagccaccgcacccgaccgg

SEQ ID NO: 45678 - RNA, 22 nt, Artificial Sequence
  LRRK2 RNA guide
ucaaaaccaaccggucgggugc

SEQ ID NO: 45679 - RNA, 22 nt, Artificial Sequence
  LRRK2 RNA guide
ucucaaaaccaaccggucgggu

SEQ ID NO: 45680 - RNA, 22 nt, Artificial Sequence
  LRRK2 RNA guide
ucugucucaaaaccaaccgguc

SEQ ID NO: 45681 - RNA, 22 nt, Artificial Sequence
  LRRK2 RNA guide
ugagccaccgcacccgaccggu

SEQ ID NO: 45682 - RNA, 22 nt, Artificial Sequence
  LRRK2 RNA guide
ugucucaaaaccaaccggucgg

SEQ ID NO: 45683 - RNA, 20 nt, Artificial Sequence
  LRRK2 RNA guide
aaaaccaaccggucgggcgc

SEQ ID NO: 45684 - RNA, 20 nt, Artificial Sequence
  LRRK2 RNA guide
aaaccaaccggucgggcgcg

SEQ ID NO: 45685 - RNA, 20 nt, Artificial Sequence
  LRRK2 RNA guide
aaccaaccggucgggcgcgg

SEQ ID NO: 45686 - RNA, 20 nt, Artificial Sequence
  LRRK2 RNA guide
aaccggucgggcgcgguggc

SEQ ID NO: 45687 - RNA, 20 nt, Artificial Sequence
  LRRK2 RNA guide
accaaccggucgggcgcggu

SEQ ID NO: 45688 - RNA, 20 nt, Artificial Sequence
  LRRK2 RNA guide
accgcgcccgaccgguuggu

SEQ ID NO: 45689 - RNA, 20 nt, Artificial Sequence
  LRRK2 RNA guide
agccaccgcgcccgaccggu

SEQ ID NO: 45690 - RNA, 20 nt, Artificial Sequence
  LRRK2 RNA guide
caaaaccaaccggucgggcg

SEQ ID NO: 45691 - RNA, 20 nt, Artificial Sequence
  LRRK2 RNA guide
caaccggucgggcgcggugg

SEQ ID NO: 45692 - RNA, 20 nt, Artificial Sequence
  LRRK2 RNA guide
caccgcgcccgaccgguugg

SEQ ID NO: 45693 - RNA, 20 nt, Artificial Sequence
  LRRK2 RNA guide
ccaaccggucgggcgcggug

SEQ ID NO: 45694 - RNA, 20 nt, Artificial Sequence
  LRRK2 RNA guide
ccaccgcgcccgaccgguug

SEQ ID NO: 45695 - RNA, 20 nt, Artificial Sequence
  LRRK2 RNA guide
ccgcgcccgaccgguugguu

SEQ ID NO: 45696 - RNA, 20 nt, Artificial Sequence
  LRRK2 RNA guide
cgcccgaccgguugguuuug

SEQ ID NO: 45697 - RNA, 20 nt, Artificial Sequence
  LRRK2 RNA guide
cgcgcccgaccgguugguuu

SEQ ID NO: 45698 - RNA, 20 nt, Artificial Sequence
  LRRK2 RNA guide
cgugagccaccgcgcccgac

SEQ ID NO: 45699 - RNA, 20 nt, Artificial Sequence
  LRRK2 RNA guide
gccaccgcgcccgaccgguu

SEQ ID NO: 45700 - RNA, 20 nt, Artificial Sequence
  LRRK2 RNA guide
gcgcccgaccgguugguuuu

SEQ ID NO: 45701 - RNA, 20 nt, Artificial Sequence
  LRRK2 RNA guide
gugagccaccgcgcccgacc

SEQ ID NO: 45702 - RNA, 20 nt, Artificial Sequence
  LRRK2 RNA guide
ucaaaaccaaccggucgggc

SEQ ID NO: 45703 - RNA, 20 nt, Artificial Sequence
  LRRK2 RNA guide
ugagccaccgcgcccgaccg

SEQ ID NO: 45704 - RNA, 21 nt, Artificial Sequence
  LRRK2 RNA guide
aaaaccaaccggucgggcgcg

SEQ ID NO: 45705 - RNA, 21 nt, Artificial Sequence
  LRRK2 RNA guide
aaaccaaccggucgggcgcgg

SEQ ID NO: 45706 - RNA, 21 nt, Artificial Sequence
  LRRK2 RNA guide
aaccaaccggucgggcgcggu

SEQ ID NO: 45707 - RNA, 21 nt, Artificial Sequence
  LRRK2 RNA guide
aaccggucgggcgcgguggcu

SEQ ID NO: 45708 - RNA, 21 nt, Artificial Sequence
  LRRK2 RNA guide
accaaccggucgggcgcggug

SEQ ID NO: 45709 - RNA, 21 nt, Artificial Sequence
  LRRK2 RNA guide
accgcgcccgaccgguugguu

SEQ ID NO: 45710 - RNA, 21 nt, Artificial Sequence
  LRRK2 RNA guide
agccaccgcgcccgaccgguu

SEQ ID NO: 45711 - RNA, 21 nt, Artificial Sequence
  LRRK2 RNA guide
caaaaccaaccggucgggcgc

SEQ ID NO: 45712 - RNA, 21 nt, Artificial Sequence
  LRRK2 RNA guide
caccgcgcccgaccgguuggu

SEQ ID NO: 45713 - RNA, 21 nt, Artificial Sequence
  LRRK2 RNA guide
ccgcgcccgaccgguugguuu

SEQ ID NO: 45714 - RNA, 21 nt, Artificial Sequence
  LRRK2 RNA guide
cgcccgaccgguugguuuuga

SEQ ID NO: 45715 - RNA, 21 nt, Artificial Sequence
  LRRK2 RNA guide
cgcgcccgaccgguugguuuu

SEQ ID NO: 45716 - RNA, 21 nt, Artificial Sequence
  LRRK2 RNA guide
cucaaaaccaaccggucgggc

SEQ ID NO: 45717 - RNA, 21 nt, Artificial Sequence
  LRRK2 RNA guide
gcgcccgaccgguugguuuug

SEQ ID NO: 45718 - RNA, 21 nt, Artificial Sequence
  LRRK2 RNA guide
ucaaaaccaaccggucgggcg

SEQ ID NO: 45719 - RNA, 22 nt, Artificial Sequence
  LRRK2 RNA guide
aaaaccaaccggucgggcgcgg

SEQ ID NO: 45720 - RNA, 22 nt, Artificial Sequence
  LRRK2 RNA guide
aaaccaaccggucgggcgcggu

SEQ ID NO: 45721 - RNA, 22 nt, Artificial Sequence
  LRRK2 RNA guide
aaccaaccggucgggcgcggug

SEQ ID NO: 45722 - RNA, 22 nt, Artificial Sequence
  LRRK2 RNA guide
aaccggucgggcgcgguggcuc

SEQ ID NO: 45723 - RNA, 22 nt, Artificial Sequence
  LRRK2 RNA guide
accaaccggucgggcgcggugg

SEQ ID NO: 45724 - RNA, 22 nt, Artificial Sequence
  LRRK2 RNA guide
accgcgcccgaccgguugguuu

SEQ ID NO: 45725 - RNA, 22 nt, Artificial Sequence
  LRRK2 RNA guide
agccaccgcgcccgaccgguug

SEQ ID NO: 45726 - RNA, 22 nt, Artificial Sequence
  LRRK2 RNA guide
caaaaccaaccggucgggcgcg

SEQ ID NO: 45727 - RNA, 22 nt, Artificial Sequence
  LRRK2 RNA guide
caaccggucgggcgcgguggcu

SEQ ID NO: 45728 - RNA, 22 nt, Artificial Sequence
  LRRK2 RNA guide
caccgcgcccgaccgguugguu

SEQ ID NO: 45729 - RNA, 22 nt, Artificial Sequence
  LRRK2 RNA guide
ccaccgcgcccgaccgguuggu

SEQ ID NO: 45730 - RNA, 22 nt, Artificial Sequence
  LRRK2 RNA guide
ccgcgcccgaccgguugguuuu

SEQ ID NO: 45731 - RNA, 22 nt, Artificial Sequence
  LRRK2 RNA guide
cgcccgaccgguugguuuugag

SEQ ID NO: 45732 - RNA, 22 nt, Artificial Sequence
  LRRK2 RNA guide
cgcgcccgaccgguugguuuug

SEQ ID NO: 45733 - RNA, 22 nt, Artificial Sequence
  LRRK2 RNA guide
cucaaaaccaaccggucgggcg

SEQ ID NO: 45734 - RNA, 22 nt, Artificial Sequence
  LRRK2 RNA guide
gagccaccgcgcccgaccgguu

SEQ ID NO: 45735 - RNA, 22 nt, Artificial Sequence
  LRRK2 RNA guide
gcgcccgaccgguugguuuuga

SEQ ID NO: 45736 - RNA, 22 nt, Artificial Sequence
  LRRK2 RNA guide
ucaaaaccaaccggucgggcgc

SEQ ID NO: 45737 - RNA, 22 nt, Artificial Sequence
  LRRK2 RNA guide
ucucaaaaccaaccggucgggc

SEQ ID NO: 45738 - RNA, 22 nt, Artificial Sequence
  LRRK2 RNA guide
ugagccaccgcgcccgaccggu

SEQ ID NO: 45739 - RNA, 20 nt, Artificial Sequence
  LRRK2 RNA guide
aaugggaauaacauuagaac

SEQ ID NO: 45740 - RNA, 20 nt, Artificial Sequence
  LRRK2 RNA guide
aauguuauucccauugugca

SEQ ID NO: 45741 - RNA, 20 nt, Artificial Sequence
  LRRK2 RNA guide
acaaugggaauaacauuaga

SEQ ID NO: 45742 - RNA, 20 nt, Artificial Sequence
  LRRK2 RNA guide
acuugcacaaugggaauaac

SEQ ID NO: 45743 - RNA, 20 nt, Artificial Sequence
  LRRK2 RNA guide
agcuucucacuugcacaaug

SEQ ID NO: 45744 - RNA, 20 nt, Artificial Sequence
  LRRK2 RNA guide
agguucuaauguuauuccca

SEQ ID NO: 45745 - RNA, 20 nt, Artificial Sequence
  LRRK2 RNA guide
aguagguucuaauguuauuc

SEQ ID NO: 45746 - RNA, 20 nt, Artificial Sequence
  LRRK2 RNA guide
augggaauaacauuagaacc

SEQ ID NO: 45747 - RNA, 20 nt, Artificial Sequence
  LRRK2 RNA guide
auguuauucccauugugcaa

SEQ ID NO: 45748 - RNA, 20 nt, Artificial Sequence
  LRRK2 RNA guide
auucccauugugcaagugag

SEQ ID NO: 45749 - RNA, 20 nt, Artificial Sequence
  LRRK2 RNA guide
caaugggaauaacauuagaa

SEQ ID NO: 45750 - RNA, 20 nt, Artificial Sequence
  LRRK2 RNA guide
cacaaugggaauaacauuag

SEQ ID NO: 45751 - RNA, 20 nt, Artificial Sequence
  LRRK2 RNA guide
cacuugcacaaugggaauaa

SEQ ID NO: 45752 - RNA, 20 nt, Artificial Sequence
  LRRK2 RNA guide
cagcuucucacuugcacaau

SEQ ID NO: 45753 - RNA, 20 nt, Artificial Sequence
  LRRK2 RNA guide
caguagguucuaauguuauu

SEQ ID NO: 45754 - RNA, 20 nt, Artificial Sequence
  LRRK2 RNA guide
cauugugcaagugagaagcu

SEQ ID NO: 45755 - RNA, 20 nt, Artificial Sequence
  LRRK2 RNA guide
ccaguagguucuaauguuau

SEQ ID NO: 45756 - RNA, 20 nt, Artificial Sequence
  LRRK2 RNA guide
ccauugugcaagugagaagc

SEQ ID NO: 45757 - RNA, 20 nt, Artificial Sequence
  LRRK2 RNA guide
cccauugugcaagugagaag

SEQ ID NO: 45758 - RNA, 20 nt, Artificial Sequence
  LRRK2 RNA guide
ccucagcuucucacuugcac

SEQ ID NO: 45759 - RNA, 20 nt, Artificial Sequence
  LRRK2 RNA guide
cuaauguuauucccauugug

SEQ ID NO: 45760 - RNA, 20 nt, Artificial Sequence
  LRRK2 RNA guide
cucacuugcacaaugggaau

SEQ ID NO: 45761 - RNA, 20 nt, Artificial Sequence
  LRRK2 RNA guide
cucagcuucucacuugcaca

SEQ ID NO: 45762 - RNA, 20 nt, Artificial Sequence
  LRRK2 RNA guide
cuucucacuugcacaauggg

SEQ ID NO: 45763 - RNA, 20 nt, Artificial Sequence
  LRRK2 RNA guide
cuugcacaaugggaauaaca

SEQ ID NO: 45764 - RNA, 20 nt, Artificial Sequence
  LRRK2 RNA guide
gcacaaugggaauaacauua

SEQ ID NO: 45765 - RNA, 20 nt, Artificial Sequence
  LRRK2 RNA guide
gccucagcuucucacuugca

SEQ ID NO: 45766 - RNA, 20 nt, Artificial Sequence
  LRRK2 RNA guide
gcuucucacuugcacaaugg

SEQ ID NO: 45767 - RNA, 20 nt, Artificial Sequence
  LRRK2 RNA guide
gguucuaauguuauucccau

SEQ ID NO: 45768 - RNA, 20 nt, Artificial Sequence
  LRRK2 RNA guide
guagguucuaauguuauucc

SEQ ID NO: 45769 - RNA, 20 nt, Artificial Sequence
  LRRK2 RNA guide
guuauucccauugugcaagu

SEQ ID NO: 45770 - RNA, 20 nt, Artificial Sequence
  LRRK2 RNA guide
guucuaauguuauucccauu

SEQ ID NO: 45771 - RNA, 20 nt, Artificial Sequence
  LRRK2 RNA guide
uaauguuauucccauugugc

SEQ ID NO: 45772 - RNA, 20 nt, Artificial Sequence
  LRRK2 RNA guide
uagguucuaauguuauuccc

SEQ ID NO: 45773 - RNA, 20 nt, Artificial Sequence
  LRRK2 RNA guide
uauucccauugugcaaguga

SEQ ID NO: 45774 - RNA, 20 nt, Artificial Sequence
  LRRK2 RNA guide
ucacuugcacaaugggaaua

SEQ ID NO: 45775 - RNA, 20 nt, Artificial Sequence
  LRRK2 RNA guide
ucagcuucucacuugcacaa

SEQ ID NO: 45776 - RNA, 20 nt, Artificial Sequence
  LRRK2 RNA guide
ucccauugugcaagugagaa

SEQ ID NO: 45777 - RNA, 20 nt, Artificial Sequence
  LRRK2 RNA guide
ucuaauguuauucccauugu

SEQ ID NO: 45778 - RNA, 20 nt, Artificial Sequence
  LRRK2 RNA guide
ucucacuugcacaaugggaa

SEQ ID NO: 45779 - RNA, 20 nt, Artificial Sequence
  LRRK2 RNA guide
ugcacaaugggaauaacauu

SEQ ID NO: 45780 - RNA, 20 nt, Artificial Sequence
  LRRK2 RNA guide
ugccucagcuucucacuugc

SEQ ID NO: 45781 - RNA, 20 nt, Artificial Sequence
  LRRK2 RNA guide
uguuauucccauugugcaag

SEQ ID NO: 45782 - RNA, 20 nt, Artificial Sequence
  LRRK2 RNA guide
uuauucccauugugcaagug

SEQ ID NO: 45783 - RNA, 20 nt, Artificial Sequence
  LRRK2 RNA guide
uucccauugugcaagugaga

SEQ ID NO: 45784 - RNA, 20 nt, Artificial Sequence
  LRRK2 RNA guide
uucuaauguuauucccauug

SEQ ID NO: 45785 - RNA, 20 nt, Artificial Sequence
  LRRK2 RNA guide
uucucacuugcacaauggga

SEQ ID NO: 45786 - RNA, 20 nt, Artificial Sequence
  LRRK2 RNA guide
uugcacaaugggaauaacau

SEQ ID NO: 45787 - RNA, 21 nt, Artificial Sequence
  LRRK2 RNA guide
aaugggaauaacauuagaacc

SEQ ID NO: 45788 - RNA, 21 nt, Artificial Sequence
  LRRK2 RNA guide
aauguuauucccauugugcaa

SEQ ID NO: 45789 - RNA, 21 nt, Artificial Sequence
  LRRK2 RNA guide
acuugcacaaugggaauaaca

SEQ ID NO: 45790 - RNA, 21 nt, Artificial Sequence
  LRRK2 RNA guide
agcuucucacuugcacaaugg

SEQ ID NO: 45791 - RNA, 21 nt, Artificial Sequence
  LRRK2 RNA guide
agguucuaauguuauucccau

SEQ ID NO: 45792 - RNA, 21 nt, Artificial Sequence
  LRRK2 RNA guide
aguagguucuaauguuauucc

SEQ ID NO: 45793 - RNA, 21 nt, Artificial Sequence
  LRRK2 RNA guide
augggaauaacauuagaaccu

SEQ ID NO: 45794 - RNA, 21 nt, Artificial Sequence
  LRRK2 RNA guide
auguuauucccauugugcaag

SEQ ID NO: 45795 - RNA, 21 nt, Artificial Sequence
  LRRK2 RNA guide
auucccauugugcaagugaga

SEQ ID NO: 45796 - RNA, 21 nt, Artificial Sequence
  LRRK2 RNA guide
caaugggaauaacauuagaac

SEQ ID NO: 45797 - RNA, 21 nt, Artificial Sequence
  LRRK2 RNA guide
cacaaugggaauaacauuaga

SEQ ID NO: 45798 - RNA, 21 nt, Artificial Sequence
  LRRK2 RNA guide
cacuugcacaaugggaauaac

SEQ ID NO: 45799 - RNA, 21 nt, Artificial Sequence
  LRRK2 RNA guide
cagcuucucacuugcacaaug

SEQ ID NO: 45800 - RNA, 21 nt, Artificial Sequence
  LRRK2 RNA guide
caguagguucuaauguuauuc

SEQ ID NO: 45801 - RNA, 21 nt, Artificial Sequence
  LRRK2 RNA guide
cauugugcaagugagaagcug

SEQ ID NO: 45802 - RNA, 21 nt, Artificial Sequence
  LRRK2 RNA guide
ccaguagguucuaauguuauu

SEQ ID NO: 45803 - RNA, 21 nt, Artificial Sequence
  LRRK2 RNA guide
ccauugugcaagugagaagcu

SEQ ID NO: 45804 - RNA, 21 nt, Artificial Sequence
  LRRK2 RNA guide
cccauugugcaagugagaagc

SEQ ID NO: 45805 - RNA, 21 nt, Artificial Sequence
  LRRK2 RNA guide
ccucagcuucucacuugcaca

SEQ ID NO: 45806 - RNA, 21 nt, Artificial Sequence
  LRRK2 RNA guide
cuaauguuauucccauugugc

SEQ ID NO: 45807 - RNA, 21 nt, Artificial Sequence
  LRRK2 RNA guide
cucacuugcacaaugggaaua

SEQ ID NO: 45808 - RNA, 21 nt, Artificial Sequence
  LRRK2 RNA guide
cucagcuucucacuugcacaa

SEQ ID NO: 45809 - RNA, 21 nt, Artificial Sequence
  LRRK2 RNA guide
cuucucacuugcacaauggga

SEQ ID NO: 45810 - RNA, 21 nt, Artificial Sequence
  LRRK2 RNA guide
cuugcacaaugggaauaacau

SEQ ID NO: 45811 - RNA, 21 nt, Artificial Sequence
  LRRK2 RNA guide
gcacaaugggaauaacauuag

SEQ ID NO: 45812 - RNA, 21 nt, Artificial Sequence
  LRRK2 RNA guide
gccucagcuucucacuugcac

SEQ ID NO: 45813 - RNA, 21 nt, Artificial Sequence
  LRRK2 RNA guide
gcuucucacuugcacaauggg

SEQ ID NO: 45814 - RNA, 21 nt, Artificial Sequence
  LRRK2 RNA guide
gguucuaauguuauucccauu

SEQ ID NO: 45815 - RNA, 21 nt, Artificial Sequence
  LRRK2 RNA guide
guagguucuaauguuauuccc

SEQ ID NO: 45816 - RNA, 21 nt, Artificial Sequence
  LRRK2 RNA guide
gugccucagcuucucacuugc

SEQ ID NO: 45817 - RNA, 21 nt, Artificial Sequence
  LRRK2 RNA guide
guuauucccauugugcaagug

SEQ ID NO: 45818 - RNA, 21 nt, Artificial Sequence
  LRRK2 RNA guide
guucuaauguuauucccauug

SEQ ID NO: 45819 - RNA, 21 nt, Artificial Sequence
  LRRK2 RNA guide
uaauguuauucccauugugca

SEQ ID NO: 45820 - RNA, 21 nt, Artificial Sequence
  LRRK2 RNA guide
uagguucuaauguuauuccca

SEQ ID NO: 45821 - RNA, 21 nt, Artificial Sequence
  LRRK2 RNA guide
uauucccauugugcaagugag

SEQ ID NO: 45822 - RNA, 21 nt, Artificial Sequence
  LRRK2 RNA guide
ucacuugcacaaugggaauaa

SEQ ID NO: 45823 - RNA, 21 nt, Artificial Sequence
  LRRK2 RNA guide
ucagcuucucacuugcacaau

SEQ ID NO: 45824 - RNA, 21 nt, Artificial Sequence
  LRRK2 RNA guide
uccaguagguucuaauguuau

SEQ ID NO: 45825 - RNA, 21 nt, Artificial Sequence
  LRRK2 RNA guide
ucccauugugcaagugagaag

SEQ ID NO: 45826 - RNA, 21 nt, Artificial Sequence
  LRRK2 RNA guide
ucuaauguuauucccauugug

SEQ ID NO: 45827 - RNA, 21 nt, Artificial Sequence
  LRRK2 RNA guide
ucucacuugcacaaugggaau

SEQ ID NO: 45828 - RNA, 21 nt, Artificial Sequence
  LRRK2 RNA guide
ugcacaaugggaauaacauua

SEQ ID NO: 45829 - RNA, 21 nt, Artificial Sequence
  LRRK2 RNA guide
ugccucagcuucucacuugca

SEQ ID NO: 45830 - RNA, 21 nt, Artificial Sequence
  LRRK2 RNA guide
uguuauucccauugugcaagu

SEQ ID NO: 45831 - RNA, 21 nt, Artificial Sequence
  LRRK2 RNA guide
uuauucccauugugcaaguga

SEQ ID NO: 45832 - RNA, 21 nt, Artificial Sequence
  LRRK2 RNA guide
uucccauugugcaagugagaa

SEQ ID NO: 45833 - RNA, 21 nt, Artificial Sequence
  LRRK2 RNA guide
uucucacuugcacaaugggaa

SEQ ID NO: 45834 - RNA, 21 nt, Artificial Sequence
  LRRK2 RNA guide
uugcacaaugggaauaacauu

SEQ ID NO: 45835 - RNA, 22 nt, Artificial Sequence
  LRRK2 RNA guide
aaugggaauaacauuagaaccu

SEQ ID NO: 45836 - RNA, 22 nt, Artificial Sequence
  LRRK2 RNA guide
aauguuauucccauugugcaag

SEQ ID NO: 45837 - RNA, 22 nt, Artificial Sequence
  LRRK2 RNA guide
acaaugggaauaacauuagaac

SEQ ID NO: 45838 - RNA, 22 nt, Artificial Sequence
  LRRK2 RNA guide
acuugcacaaugggaauaacau

SEQ ID NO: 45839 - RNA, 22 nt, Artificial Sequence
  LRRK2 RNA guide
agcuucucacuugcacaauggg

SEQ ID NO: 45840 - RNA, 22 nt, Artificial Sequence
  LRRK2 RNA guide
agguucuaauguuauucccauu

SEQ ID NO: 45841 - RNA, 22 nt, Artificial Sequence
  LRRK2 RNA guide
aguagguucuaauguuauuccc

SEQ ID NO: 45842 - RNA, 22 nt, Artificial Sequence
  LRRK2 RNA guide
agugccucagcuucucacuugc

SEQ ID NO: 45843 - RNA, 22 nt, Artificial Sequence
  LRRK2 RNA guide
augggaauaacauuagaaccua

SEQ ID NO: 45844 - RNA, 22 nt, Artificial Sequence
  LRRK2 RNA guide
auguuauucccauugugcaagu

SEQ ID NO: 45845 - RNA, 22 nt, Artificial Sequence
  LRRK2 RNA guide
auucccauugugcaagugagaa

SEQ ID NO: 45846 - RNA, 22 nt, Artificial Sequence
  LRRK2 RNA guide
caaugggaauaacauuagaacc

SEQ ID NO: 45847 - RNA, 22 nt, Artificial Sequence
  LRRK2 RNA guide
cacaaugggaauaacauuagaa

SEQ ID NO: 45848 - RNA, 22 nt, Artificial Sequence
  LRRK2 RNA guide
cacuugcacaaugggaauaaca

SEQ ID NO: 45849 - RNA, 22 nt, Artificial Sequence
  LRRK2 RNA guide
cagcuucucacuugcacaaugg

SEQ ID NO: 45850 - RNA, 22 nt, Artificial Sequence
  LRRK2 RNA guide
caguagguucuaauguuauucc

SEQ ID NO: 45851 - RNA, 22 nt, Artificial Sequence
  LRRK2 RNA guide
cauugugcaagugagaagcuga

SEQ ID NO: 45852 - RNA, 22 nt, Artificial Sequence
  LRRK2 RNA guide
ccaguagguucuaauguuauuc

SEQ ID NO: 45853 - RNA, 22 nt, Artificial Sequence
  LRRK2 RNA guide
ccauugugcaagugagaagcug

SEQ ID NO: 45854 - RNA, 22 nt, Artificial Sequence
  LRRK2 RNA guide
cccauugugcaagugagaagcu

SEQ ID NO: 45855 - RNA, 22 nt, Artificial Sequence
  LRRK2 RNA guide
ccucagcuucucacuugcacaa

SEQ ID NO: 45856 - RNA, 22 nt, Artificial Sequence
  LRRK2 RNA guide
cuaauguuauucccauugugca

SEQ ID NO: 45857 - RNA, 22 nt, Artificial Sequence
  LRRK2 RNA guide
cucacuugcacaaugggaauaa

SEQ ID NO: 45858 - RNA, 22 nt, Artificial Sequence
  LRRK2 RNA guide
cucagcuucucacuugcacaau

SEQ ID NO: 45859 - RNA, 22 nt, Artificial Sequence
  LRRK2 RNA guide
cuucucacuugcacaaugggaa

SEQ ID NO: 45860 - RNA, 22 nt, Artificial Sequence
  LRRK2 RNA guide
cuugcacaaugggaauaacauu

SEQ ID NO: 45861 - RNA, 22 nt, Artificial Sequence
  LRRK2 RNA guide
gcacaaugggaauaacauuaga

SEQ ID NO: 45862 - RNA, 22 nt, Artificial Sequence
  LRRK2 RNA guide
gccucagcuucucacuugcaca

SEQ ID NO: 45863 - RNA, 22 nt, Artificial Sequence
  LRRK2 RNA guide
gcuucucacuugcacaauggga

SEQ ID NO: 45864 - RNA, 22 nt, Artificial Sequence
  LRRK2 RNA guide
gguucuaauguuauucccauug

SEQ ID NO: 45865 - RNA, 22 nt, Artificial Sequence
  LRRK2 RNA guide
guagguucuaauguuauuccca

SEQ ID NO: 45866 - RNA, 22 nt, Artificial Sequence
  LRRK2 RNA guide
guccaguagguucuaauguuau

SEQ ID NO: 45867 - RNA, 22 nt, Artificial Sequence
  LRRK2 RNA guide
gugccucagcuucucacuugca

SEQ ID NO: 45868 - RNA, 22 nt, Artificial Sequence
  LRRK2 RNA guide
guuauucccauugugcaaguga

SEQ ID NO: 45869 - RNA, 22 nt, Artificial Sequence
  LRRK2 RNA guide
guucuaauguuauucccauugu

SEQ ID NO: 45870 - RNA, 22 nt, Artificial Sequence
  LRRK2 RNA guide
uaauguuauucccauugugcaa

SEQ ID NO: 45871 - RNA, 22 nt, Artificial Sequence
  LRRK2 RNA guide
uagguucuaauguuauucccau

SEQ ID NO: 45872 - RNA, 22 nt, Artificial Sequence
  LRRK2 RNA guide
uauucccauugugcaagugaga

SEQ ID NO: 45873 - RNA, 22 nt, Artificial Sequence
  LRRK2 RNA guide
ucacuugcacaaugggaauaac

SEQ ID NO: 45874 - RNA, 22 nt, Artificial Sequence
  LRRK2 RNA guide
ucagcuucucacuugcacaaug

SEQ ID NO: 45875 - RNA, 22 nt, Artificial Sequence
  LRRK2 RNA guide
uccaguagguucuaauguuauu

SEQ ID NO: 45876 - RNA, 22 nt, Artificial Sequence
  LRRK2 RNA guide
ucccauugugcaagugagaagc

SEQ ID NO: 45877 - RNA, 22 nt, Artificial Sequence
  LRRK2 RNA guide
ucuaauguuauucccauugugc

SEQ ID NO: 45878 - RNA, 22 nt, Artificial Sequence
  LRRK2 RNA guide
ucucacuugcacaaugggaaua

SEQ ID NO: 45879 - RNA, 22 nt, Artificial Sequence
  LRRK2 RNA guide
ugcacaaugggaauaacauuag

SEQ ID NO: 45880 - RNA, 22 nt, Artificial Sequence
  LRRK2 RNA guide
ugccucagcuucucacuugcac

SEQ ID NO: 45881 - RNA, 22 nt, Artificial Sequence
  LRRK2 RNA guide
uguuauucccauugugcaagug

SEQ ID NO: 45882 - RNA, 22 nt, Artificial Sequence
  LRRK2 RNA guide
uuauucccauugugcaagugag

SEQ ID NO: 45883 - RNA, 22 nt, Artificial Sequence
  LRRK2 RNA guide
uucccauugugcaagugagaag

SEQ ID NO: 45884 - RNA, 22 nt, Artificial Sequence
  LRRK2 RNA guide
uucuaauguuauucccauugug

SEQ ID NO: 45885 - RNA, 22 nt, Artificial Sequence
  LRRK2 RNA guide
uucucacuugcacaaugggaau

SEQ ID NO: 45886 - RNA, 22 nt, Artificial Sequence
  LRRK2 RNA guide
uugcacaaugggaauaacauua

SEQ ID NO: 45887 - RNA, 20 nt, Artificial Sequence
  LRRK2 RNA guide
aacgggaauaacauuagaac

SEQ ID NO: 45888 - RNA, 20 nt, Artificial Sequence
  LRRK2 RNA guide
aauguuauucccguugugca

SEQ ID NO: 45889 - RNA, 20 nt, Artificial Sequence
  LRRK2 RNA guide
acaacgggaauaacauuaga

SEQ ID NO: 45890 - RNA, 20 nt, Artificial Sequence
  LRRK2 RNA guide
acgggaauaacauuagaacc

SEQ ID NO: 45891 - RNA, 20 nt, Artificial Sequence
  LRRK2 RNA guide
acuugcacaacgggaauaac

SEQ ID NO: 45892 - RNA, 20 nt, Artificial Sequence
  LRRK2 RNA guide
agcuucucacuugcacaacg

SEQ ID NO: 45893 - RNA, 20 nt, Artificial Sequence
  LRRK2 RNA guide
agguucuaauguuauucccg

SEQ ID NO: 45894 - RNA, 20 nt, Artificial Sequence
  LRRK2 RNA guide
auguuauucccguugugcaa

SEQ ID NO: 45895 - RNA, 20 nt, Artificial Sequence
  LRRK2 RNA guide
auucccguugugcaagugag

SEQ ID NO: 45896 - RNA, 20 nt, Artificial Sequence
  LRRK2 RNA guide
caacgggaauaacauuagaa

SEQ ID NO: 45897 - RNA, 20 nt, Artificial Sequence
  LRRK2 RNA guide
cacaacgggaauaacauuag

SEQ ID NO: 45898 - RNA, 20 nt, Artificial Sequence
  LRRK2 RNA guide
cacuugcacaacgggaauaa

SEQ ID NO: 45899 - RNA, 20 nt, Artificial Sequence
  LRRK2 RNA guide
cagcuucucacuugcacaac

SEQ ID NO: 45900 - RNA, 20 nt, Artificial Sequence
  LRRK2 RNA guide
cccguugugcaagugagaag

SEQ ID NO: 45901 - RNA, 20 nt, Artificial Sequence
  LRRK2 RNA guide
ccguugugcaagugagaagc

SEQ ID NO: 45902 - RNA, 20 nt, Artificial Sequence
  LRRK2 RNA guide
cguugugcaagugagaagcu

SEQ ID NO: 45903 - RNA, 20 nt, Artificial Sequence
  LRRK2 RNA guide
cuaauguuauucccguugug

SEQ ID NO: 45904 - RNA, 20 nt, Artificial Sequence
  LRRK2 RNA guide
cucacuugcacaacgggaau

SEQ ID NO: 45905 - RNA, 20 nt, Artificial Sequence
  LRRK2 RNA guide
cuucucacuugcacaacggg

SEQ ID NO: 45906 - RNA, 20 nt, Artificial Sequence
  LRRK2 RNA guide
cuugcacaacgggaauaaca

SEQ ID NO: 45907 - RNA, 20 nt, Artificial Sequence
  LRRK2 RNA guide
gcacaacgggaauaacauua

SEQ ID NO: 45908 - RNA, 20 nt, Artificial Sequence
  LRRK2 RNA guide
gcuucucacuugcacaacgg

SEQ ID NO: 45909 - RNA, 20 nt, Artificial Sequence
  LRRK2 RNA guide
gguucuaauguuauucccgu

SEQ ID NO: 45910 - RNA, 20 nt, Artificial Sequence
  LRRK2 RNA guide
guuauucccguugugcaagu

SEQ ID NO: 45911 - RNA, 20 nt, Artificial Sequence
  LRRK2 RNA guide
guucuaauguuauucccguu

SEQ ID NO: 45912 - RNA, 20 nt, Artificial Sequence
  LRRK2 RNA guide
uaauguuauucccguugugc

SEQ ID NO: 45913 - RNA, 20 nt, Artificial Sequence
  LRRK2 RNA guide
uauucccguugugcaaguga

SEQ ID NO: 45914 - RNA, 20 nt, Artificial Sequence
  LRRK2 RNA guide
ucacuugcacaacgggaaua

SEQ ID NO: 45915 - RNA, 20 nt, Artificial Sequence
  LRRK2 RNA guide
ucccguugugcaagugagaa

SEQ ID NO: 45916 - RNA, 20 nt, Artificial Sequence
  LRRK2 RNA guide
ucuaauguuauucccguugu

SEQ ID NO: 45917 - RNA, 20 nt, Artificial Sequence
  LRRK2 RNA guide
ucucacuugcacaacgggaa

SEQ ID NO: 45918 - RNA, 20 nt, Artificial Sequence
  LRRK2 RNA guide
ugcacaacgggaauaacauu

SEQ ID NO: 45919 - RNA, 20 nt, Artificial Sequence
  LRRK2 RNA guide
uguuauucccguugugcaag

SEQ ID NO: 45920 - RNA, 20 nt, Artificial Sequence
  LRRK2 RNA guide
uuauucccguugugcaagug

SEQ ID NO: 45921 - RNA, 20 nt, Artificial Sequence
  LRRK2 RNA guide
uucccguugugcaagugaga

SEQ ID NO: 45922 - RNA, 20 nt, Artificial Sequence
  LRRK2 RNA guide
uucuaauguuauucccguug

SEQ ID NO: 45923 - RNA, 20 nt, Artificial Sequence
  LRRK2 RNA guide
uucucacuugcacaacggga

SEQ ID NO: 45924 - RNA, 20 nt, Artificial Sequence
  LRRK2 RNA guide
uugcacaacgggaauaacau

SEQ ID NO: 45925 - RNA, 21 nt, Artificial Sequence
  LRRK2 RNA guide
aacgggaauaacauuagaacc

SEQ ID NO: 45926 - RNA, 21 nt, Artificial Sequence
  LRRK2 RNA guide
aauguuauucccguugugcaa

SEQ ID NO: 45927 - RNA, 21 nt, Artificial Sequence
  LRRK2 RNA guide
acaacgggaauaacauuagaa

SEQ ID NO: 45928 - RNA, 21 nt, Artificial Sequence
  LRRK2 RNA guide
acgggaauaacauuagaaccu

SEQ ID NO: 45929 - RNA, 21 nt, Artificial Sequence
  LRRK2 RNA guide
acuugcacaacgggaauaaca

SEQ ID NO: 45930 - RNA, 21 nt, Artificial Sequence
  LRRK2 RNA guide
agcuucucacuugcacaacgg

SEQ ID NO: 45931 - RNA, 21 nt, Artificial Sequence
  LRRK2 RNA guide
agguucuaauguuauucccgu

SEQ ID NO: 45932 - RNA, 21 nt, Artificial Sequence
  LRRK2 RNA guide
auguuauucccguugugcaag

SEQ ID NO: 45933 - RNA, 21 nt, Artificial Sequence
  LRRK2 RNA guide
auucccguugugcaagugaga

SEQ ID NO: 45934 - RNA, 21 nt, Artificial Sequence
  LRRK2 RNA guide
caacgggaauaacauuagaac

SEQ ID NO: 45935 - RNA, 21 nt, Artificial Sequence
  LRRK2 RNA guide
cacaacgggaauaacauuaga

SEQ ID NO: 45936 - RNA, 21 nt, Artificial Sequence
  LRRK2 RNA guide
cacuugcacaacgggaauaac

SEQ ID NO: 45937 - RNA, 21 nt, Artificial Sequence
  LRRK2 RNA guide
cagcuucucacuugcacaacg

SEQ ID NO: 45938 - RNA, 21 nt, Artificial Sequence
  LRRK2 RNA guide
cccguugugcaagugagaagc

SEQ ID NO: 45939 - RNA, 21 nt, Artificial Sequence
  LRRK2 RNA guide
ccguugugcaagugagaagcu

SEQ ID NO: 45940 - RNA, 21 nt, Artificial Sequence
  LRRK2 RNA guide
cguugugcaagugagaagcug

SEQ ID NO: 45941 - RNA, 21 nt, Artificial Sequence
  LRRK2 RNA guide
cuaauguuauucccguugugc

SEQ ID NO: 45942 - RNA, 21 nt, Artificial Sequence
  LRRK2 RNA guide
cucacuugcacaacgggaaua

SEQ ID NO: 45943 - RNA, 21 nt, Artificial Sequence
  LRRK2 RNA guide
cuucucacuugcacaacggga

SEQ ID NO: 45944 - RNA, 21 nt, Artificial Sequence
  LRRK2 RNA guide
cuugcacaacgggaauaacau

SEQ ID NO: 45945 - RNA, 21 nt, Artificial Sequence
  LRRK2 RNA guide
gcacaacgggaauaacauuag

SEQ ID NO: 45946 - RNA, 21 nt, Artificial Sequence
  LRRK2 RNA guide
gcuucucacuugcacaacggg

SEQ ID NO: 45947 - RNA, 21 nt, Artificial Sequence
  LRRK2 RNA guide
gguucuaauguuauucccguu

SEQ ID NO: 45948 - RNA, 21 nt, Artificial Sequence
  LRRK2 RNA guide
guuauucccguugugcaagug

SEQ ID NO: 45949 - RNA, 21 nt, Artificial Sequence
  LRRK2 RNA guide
guucuaauguuauucccguug

SEQ ID NO: 45950 - RNA, 21 nt, Artificial Sequence
  LRRK2 RNA guide
uaauguuauucccguugugca

SEQ ID NO: 45951 - RNA, 21 nt, Artificial Sequence
  LRRK2 RNA guide
uagguucuaauguuauucccg

SEQ ID NO: 45952 - RNA, 21 nt, Artificial Sequence
  LRRK2 RNA guide
uauucccguugugcaagugag

SEQ ID NO: 45953 - RNA, 21 nt, Artificial Sequence
  LRRK2 RNA guide
ucacuugcacaacgggaauaa

SEQ ID NO: 45954 - RNA, 21 nt, Artificial Sequence
  LRRK2 RNA guide
ucagcuucucacuugcacaac

SEQ ID NO: 45955 - RNA, 21 nt, Artificial Sequence
  LRRK2 RNA guide
ucccguugugcaagugagaag

SEQ ID NO: 45956 - RNA, 21 nt, Artificial Sequence
  LRRK2 RNA guide
ucuaauguuauucccguugug

SEQ ID NO: 45957 - RNA, 21 nt, Artificial Sequence
  LRRK2 RNA guide
ucucacuugcacaacgggaau

SEQ ID NO: 45958 - RNA, 21 nt, Artificial Sequence
  LRRK2 RNA guide
ugcacaacgggaauaacauua

SEQ ID NO: 45959 - RNA, 21 nt, Artificial Sequence
  LRRK2 RNA guide
uguuauucccguugugcaagu

SEQ ID NO: 45960 - RNA, 21 nt, Artificial Sequence
  LRRK2 RNA guide
uuauucccguugugcaaguga

SEQ ID NO: 45961 - RNA, 21 nt, Artificial Sequence
  LRRK2 RNA guide
uucccguugugcaagugagaa

SEQ ID NO: 45962 - RNA, 21 nt, Artificial Sequence
  LRRK2 RNA guide
uucuaauguuauucccguugu

SEQ ID NO: 45963 - RNA, 21 nt, Artificial Sequence
  LRRK2 RNA guide
uucucacuugcacaacgggaa

SEQ ID NO: 45964 - RNA, 21 nt, Artificial Sequence
  LRRK2 RNA guide
uugcacaacgggaauaacauu

SEQ ID NO: 45965 - RNA, 22 nt, Artificial Sequence
  LRRK2 RNA guide
aacgggaauaacauuagaaccu

SEQ ID NO: 45966 - RNA, 22 nt, Artificial Sequence
  LRRK2 RNA guide
aauguuauucccguugugcaag

SEQ ID NO: 45967 - RNA, 22 nt, Artificial Sequence
  LRRK2 RNA guide
acaacgggaauaacauuagaac

SEQ ID NO: 45968 - RNA, 22 nt, Artificial Sequence
  LRRK2 RNA guide
acgggaauaacauuagaaccua

SEQ ID NO: 45969 - RNA, 22 nt, Artificial Sequence
  LRRK2 RNA guide
acuugcacaacgggaauaacau

SEQ ID NO: 45970 - RNA, 22 nt, Artificial Sequence
  LRRK2 RNA guide
agcuucucacuugcacaacggg

SEQ ID NO: 45971 - RNA, 22 nt, Artificial Sequence
  LRRK2 RNA guide
agguucuaauguuauucccguu

SEQ ID NO: 45972 - RNA, 22 nt, Artificial Sequence
  LRRK2 RNA guide
auguuauucccguugugcaagu

SEQ ID NO: 45973 - RNA, 22 nt, Artificial Sequence
  LRRK2 RNA guide
auucccguugugcaagugagaa

SEQ ID NO: 45974 - RNA, 22 nt, Artificial Sequence
  LRRK2 RNA guide
caacgggaauaacauuagaacc

SEQ ID NO: 45975 - RNA, 22 nt, Artificial Sequence
  LRRK2 RNA guide
cacaacgggaauaacauuagaa

SEQ ID NO: 45976 - RNA, 22 nt, Artificial Sequence
  LRRK2 RNA guide
cacuugcacaacgggaauaaca

SEQ ID NO: 45977 - RNA, 22 nt, Artificial Sequence
  LRRK2 RNA guide
cagcuucucacuugcacaacgg

SEQ ID NO: 45978 - RNA, 22 nt, Artificial Sequence
  LRRK2 RNA guide
cccguugugcaagugagaagcu

SEQ ID NO: 45979 - RNA, 22 nt, Artificial Sequence
  LRRK2 RNA guide
ccguugugcaagugagaagcug

SEQ ID NO: 45980 - RNA, 22 nt, Artificial Sequence
  LRRK2 RNA guide
cguugugcaagugagaagcuga

SEQ ID NO: 45981 - RNA, 22 nt, Artificial Sequence
  LRRK2 RNA guide
cuaauguuauucccguugugca

SEQ ID NO: 45982 - RNA, 22 nt, Artificial Sequence
  LRRK2 RNA guide
cucacuugcacaacgggaauaa

SEQ ID NO: 45983 - RNA, 22 nt, Artificial Sequence
  LRRK2 RNA guide
cucagcuucucacuugcacaac

SEQ ID NO: 45984 - RNA, 22 nt, Artificial Sequence
  LRRK2 RNA guide
cuucucacuugcacaacgggaa

SEQ ID NO: 45985 - RNA, 22 nt, Artificial Sequence
  LRRK2 RNA guide
cuugcacaacgggaauaacauu

SEQ ID NO: 45986 - RNA, 22 nt, Artificial Sequence
  LRRK2 RNA guide
gcacaacgggaauaacauuaga

SEQ ID NO: 45987 - RNA, 22 nt, Artificial Sequence
  LRRK2 RNA guide
gcuucucacuugcacaacggga

SEQ ID NO: 45988 - RNA, 22 nt, Artificial Sequence
  LRRK2 RNA guide
gguucuaauguuauucccguug

SEQ ID NO: 45989 - RNA, 22 nt, Artificial Sequence
  LRRK2 RNA guide
guagguucuaauguuauucccg

SEQ ID NO: 45990 - RNA, 22 nt, Artificial Sequence
  LRRK2 RNA guide
guuauucccguugugcaaguga

SEQ ID NO: 45991 - RNA, 22 nt, Artificial Sequence
  LRRK2 RNA guide
guucuaauguuauucccguugu

SEQ ID NO: 45992 - RNA, 22 nt, Artificial Sequence
  LRRK2 RNA guide
uaauguuauucccguugugcaa

SEQ ID NO: 45993 - RNA, 22 nt, Artificial Sequence
  LRRK2 RNA guide
uagguucuaauguuauucccgu

SEQ ID NO: 45994 - RNA, 22 nt, Artificial Sequence
  LRRK2 RNA guide
uauucccguugugcaagugaga

SEQ ID NO: 45995 - RNA, 22 nt, Artificial Sequence
  LRRK2 RNA guide
ucacuugcacaacgggaauaac

SEQ ID NO: 45996 - RNA, 22 nt, Artificial Sequence
  LRRK2 RNA guide
ucagcuucucacuugcacaacg

SEQ ID NO: 45997 - RNA, 22 nt, Artificial Sequence
  LRRK2 RNA guide
ucccguugugcaagugagaagc

SEQ ID NO: 45998 - RNA, 22 nt, Artificial Sequence
  LRRK2 RNA guide
ucuaauguuauucccguugugc

SEQ ID NO: 45999 - RNA, 22 nt, Artificial Sequence
  LRRK2 RNA guide
ucucacuugcacaacgggaaua

SEQ ID NO: 46000 - RNA, 22 nt, Artificial Sequence
  LRRK2 RNA guide
ugcacaacgggaauaacauuag

SEQ ID NO: 46001 - RNA, 22 nt, Artificial Sequence
  LRRK2 RNA guide
uguuauucccguugugcaagug

SEQ ID NO: 46002 - RNA, 22 nt, Artificial Sequence
  LRRK2 RNA guide
uuauucccguugugcaagugag

SEQ ID NO: 46003 - RNA, 22 nt, Artificial Sequence
  LRRK2 RNA guide
uucccguugugcaagugagaag

SEQ ID NO: 46004 - RNA, 22 nt, Artificial Sequence
  LRRK2 RNA guide
uucuaauguuauucccguugug

SEQ ID NO: 46005 - RNA, 22 nt, Artificial Sequence
  LRRK2 RNA guide
uucucacuugcacaacgggaau

SEQ ID NO: 46006 - RNA, 22 nt, Artificial Sequence
  LRRK2 RNA guide
uugcacaacgggaauaacauua

SEQ ID NO: 46007 - RNA, 20 nt, Artificial Sequence
  LRRK2 RNA guide
aaacaugugcagcacacagu

SEQ ID NO: 46008 - RNA, 20 nt, Artificial Sequence
  LRRK2 RNA guide
aacaugugcagcacacagug

SEQ ID NO: 46009 - RNA, 20 nt, Artificial Sequence
  LRRK2 RNA guide
aauuaucuagcacugugugc

SEQ ID NO: 46010 - RNA, 20 nt, Artificial Sequence
  LRRK2 RNA guide
acaaacaugugcagcacaca

SEQ ID NO: 46011 - RNA, 20 nt, Artificial Sequence
  LRRK2 RNA guide
acaugugcagcacacagugc

SEQ ID NO: 46012 - RNA, 20 nt, Artificial Sequence
  LRRK2 RNA guide
acugugugcugcacauguuu

SEQ ID NO: 46013 - RNA, 20 nt, Artificial Sequence
  LRRK2 RNA guide
agcacacagugcuagauaau

SEQ ID NO: 46014 - RNA, 20 nt, Artificial Sequence
  LRRK2 RNA guide
agcacugugugcugcacaug

SEQ ID NO: 46015 - RNA, 20 nt, Artificial Sequence
  LRRK2 RNA guide
aucuagcacugugugcugca

SEQ ID NO: 46016 - RNA, 20 nt, Artificial Sequence
  LRRK2 RNA guide
augugcagcacacagugcua

SEQ ID NO: 46017 - RNA, 20 nt, Artificial Sequence
  LRRK2 RNA guide
auuaauuaucuagcacugug

SEQ ID NO: 46018 - RNA, 20 nt, Artificial Sequence
  LRRK2 RNA guide
auuaucuagcacugugugcu

SEQ ID NO: 46019 - RNA, 20 nt, Artificial Sequence
  LRRK2 RNA guide
auuccuuccacaaacaugug

SEQ ID NO: 46020 - RNA, 20 nt, Artificial Sequence
  LRRK2 RNA guide
caaacaugugcagcacacag

SEQ ID NO: 46021 - RNA, 20 nt, Artificial Sequence
  LRRK2 RNA guide
cacaaacaugugcagcacac

SEQ ID NO: 46022 - RNA, 20 nt, Artificial Sequence
  LRRK2 RNA guide
cacacagugcuagauaauua

SEQ ID NO: 46023 - RNA, 20 nt, Artificial Sequence
  LRRK2 RNA guide
cacugugugcugcacauguu

SEQ ID NO: 46024 - RNA, 20 nt, Artificial Sequence
  LRRK2 RNA guide
cagcacacagugcuagauaa

SEQ ID NO: 46025 - RNA, 20 nt, Artificial Sequence
  LRRK2 RNA guide
caugugcagcacacagugcu

SEQ ID NO: 46026 - RNA, 20 nt, Artificial Sequence
  LRRK2 RNA guide
ccacaaacaugugcagcaca

SEQ ID NO: 46027 - RNA, 20 nt, Artificial Sequence
  LRRK2 RNA guide
ccuuccacaaacaugugcag

SEQ ID NO: 46028 - RNA, 20 nt, Artificial Sequence
  LRRK2 RNA guide
cuagcacugugugcugcaca

SEQ ID NO: 46029 - RNA, 20 nt, Artificial Sequence
  LRRK2 RNA guide
cuauuaauuaucuagcacug

SEQ ID NO: 46030 - RNA, 20 nt, Artificial Sequence
  LRRK2 RNA guide
cucuauuaauuaucuagcac

SEQ ID NO: 46031 - RNA, 20 nt, Artificial Sequence
  LRRK2 RNA guide
cugugugcugcacauguuug

SEQ ID NO: 46032 - RNA, 20 nt, Artificial Sequence
  LRRK2 RNA guide
cuuccacaaacaugugcagc

SEQ ID NO: 46033 - RNA, 20 nt, Artificial Sequence
  LRRK2 RNA guide
gcacacagugcuagauaauu

SEQ ID NO: 46034 - RNA, 20 nt, Artificial Sequence
  LRRK2 RNA guide
gcacugugugcugcacaugu

SEQ ID NO: 46035 - RNA, 20 nt, Artificial Sequence
  LRRK2 RNA guide
gcagcacacagugcuagaua

SEQ ID NO: 46036 - RNA, 20 nt, Artificial Sequence
  LRRK2 RNA guide
gugcagcacacagugcuaga

SEQ ID NO: 46037 - RNA, 20 nt, Artificial Sequence
  LRRK2 RNA guide
gugcugcacauguuugugga

SEQ ID NO: 46038 - RNA, 20 nt, Artificial Sequence
  LRRK2 RNA guide
gugugcugcacauguuugug

SEQ ID NO: 46039 - RNA, 20 nt, Artificial Sequence
  LRRK2 RNA guide
uaauuaucuagcacugugug

SEQ ID NO: 46040 - RNA, 20 nt, Artificial Sequence
  LRRK2 RNA guide
uagcacugugugcugcacau

SEQ ID NO: 46041 - RNA, 20 nt, Artificial Sequence
  LRRK2 RNA guide
uaucuagcacugugugcugc

SEQ ID NO: 46042 - RNA, 20 nt, Artificial Sequence
  LRRK2 RNA guide
uccacaaacaugugcagcac

SEQ ID NO: 46043 - RNA, 20 nt, Artificial Sequence
  LRRK2 RNA guide
uccuuccacaaacaugugca

SEQ ID NO: 46044 - RNA, 20 nt, Artificial Sequence
  LRRK2 RNA guide
ucuagcacugugugcugcac

SEQ ID NO: 46045 - RNA, 20 nt, Artificial Sequence
  LRRK2 RNA guide
ugcagcacacagugcuagau

SEQ ID NO: 46046 - RNA, 20 nt, Artificial Sequence
  LRRK2 RNA guide
ugugcagcacacagugcuag

SEQ ID NO: 46047 - RNA, 20 nt, Artificial Sequence
  LRRK2 RNA guide
ugugcugcacauguuugugg

SEQ ID NO: 46048 - RNA, 20 nt, Artificial Sequence
  LRRK2 RNA guide
ugugugcugcacauguuugu

SEQ ID NO: 46049 - RNA, 20 nt, Artificial Sequence
  LRRK2 RNA guide
uuaauuaucuagcacugugu

SEQ ID NO: 46050 - RNA, 20 nt, Artificial Sequence
  LRRK2 RNA guide
uuaucuagcacugugugcug

SEQ ID NO: 46051 - RNA, 20 nt, Artificial Sequence
  LRRK2 RNA guide
uuccacaaacaugugcagca

SEQ ID NO: 46052 - RNA, 20 nt, Artificial Sequence
  LRRK2 RNA guide
uuccuuccacaaacaugugc

SEQ ID NO: 46053 - RNA, 21 nt, Artificial Sequence
  LRRK2 RNA guide
aaacaugugcagcacacagug

SEQ ID NO: 46054 - RNA, 21 nt, Artificial Sequence
  LRRK2 RNA guide
aacaugugcagcacacagugc

SEQ ID NO: 46055 - RNA, 21 nt, Artificial Sequence
  LRRK2 RNA guide
aauuaucuagcacugugugcu

SEQ ID NO: 46056 - RNA, 21 nt, Artificial Sequence
  LRRK2 RNA guide
aauuccuuccacaaacaugug

SEQ ID NO: 46057 - RNA, 21 nt, Artificial Sequence
  LRRK2 RNA guide
acaaacaugugcagcacacag

SEQ ID NO: 46058 - RNA, 21 nt, Artificial Sequence
  LRRK2 RNA guide
acaugugcagcacacagugcu

SEQ ID NO: 46059 - RNA, 21 nt, Artificial Sequence
  LRRK2 RNA guide
acugugugcugcacauguuug

SEQ ID NO: 46060 - RNA, 21 nt, Artificial Sequence
  LRRK2 RNA guide
agcacacagugcuagauaauu

SEQ ID NO: 46061 - RNA, 21 nt, Artificial Sequence
  LRRK2 RNA guide
agcacugugugcugcacaugu

SEQ ID NO: 46062 - RNA, 21 nt, Artificial Sequence
  LRRK2 RNA guide
aucuagcacugugugcugcac

SEQ ID NO: 46063 - RNA, 21 nt, Artificial Sequence
  LRRK2 RNA guide
augugcagcacacagugcuag

SEQ ID NO: 46064 - RNA, 21 nt, Artificial Sequence
  LRRK2 RNA guide
auuaucuagcacugugugcug

SEQ ID NO: 46065 - RNA, 21 nt, Artificial Sequence
  LRRK2 RNA guide
auuccuuccacaaacaugugc

SEQ ID NO: 46066 - RNA, 21 nt, Artificial Sequence
  LRRK2 RNA guide
caaacaugugcagcacacagu

SEQ ID NO: 46067 - RNA, 21 nt, Artificial Sequence
  LRRK2 RNA guide
cacaaacaugugcagcacaca

SEQ ID NO: 46068 - RNA, 21 nt, Artificial Sequence
  LRRK2 RNA guide
cacacagugcuagauaauuaa

SEQ ID NO: 46069 - RNA, 21 nt, Artificial Sequence
  LRRK2 RNA guide
cacugugugcugcacauguuu

SEQ ID NO: 46070 - RNA, 21 nt, Artificial Sequence
  LRRK2 RNA guide
cagcacacagugcuagauaau

SEQ ID NO: 46071 - RNA, 21 nt, Artificial Sequence
  LRRK2 RNA guide
caugugcagcacacagugcua

SEQ ID NO: 46072 - RNA, 21 nt, Artificial Sequence
  LRRK2 RNA guide
ccacaaacaugugcagcacac

SEQ ID NO: 46073 - RNA, 21 nt, Artificial Sequence
  LRRK2 RNA guide
ccuuccacaaacaugugcagc

SEQ ID NO: 46074 - RNA, 21 nt, Artificial Sequence
  LRRK2 RNA guide
cuagcacugugugcugcacau

SEQ ID NO: 46075 - RNA, 21 nt, Artificial Sequence
  LRRK2 RNA guide
cugugugcugcacauguuugu

SEQ ID NO: 46076 - RNA, 21 nt, Artificial Sequence
  LRRK2 RNA guide
cuuccacaaacaugugcagca

SEQ ID NO: 46077 - RNA, 21 nt, Artificial Sequence
  LRRK2 RNA guide
gcacacagugcuagauaauua

SEQ ID NO: 46078 - RNA, 21 nt, Artificial Sequence
  LRRK2 RNA guide
gcacugugugcugcacauguu

SEQ ID NO: 46079 - RNA, 21 nt, Artificial Sequence
  LRRK2 RNA guide
gcagcacacagugcuagauaa

SEQ ID NO: 46080 - RNA, 21 nt, Artificial Sequence
  LRRK2 RNA guide
gugcagcacacagugcuagau

SEQ ID NO: 46081 - RNA, 21 nt, Artificial Sequence
  LRRK2 RNA guide
gugcugcacauguuuguggaa

SEQ ID NO: 46082 - RNA, 21 nt, Artificial Sequence
  LRRK2 RNA guide
gugugcugcacauguuugugg

SEQ ID NO: 46083 - RNA, 21 nt, Artificial Sequence
  LRRK2 RNA guide
uaauuaucuagcacugugugc

SEQ ID NO: 46084 - RNA, 21 nt, Artificial Sequence
  LRRK2 RNA guide
uagcacugugugcugcacaug

SEQ ID NO: 46085 - RNA, 21 nt, Artificial Sequence
  LRRK2 RNA guide
uaucuagcacugugugcugca

SEQ ID NO: 46086 - RNA, 21 nt, Artificial Sequence
  LRRK2 RNA guide
uccacaaacaugugcagcaca

SEQ ID NO: 46087 - RNA, 21 nt, Artificial Sequence
  LRRK2 RNA guide
uccuuccacaaacaugugcag

SEQ ID NO: 46088 - RNA, 21 nt, Artificial Sequence
  LRRK2 RNA guide
ucuagcacugugugcugcaca

SEQ ID NO: 46089 - RNA, 21 nt, Artificial Sequence
  LRRK2 RNA guide
ugcagcacacagugcuagaua

SEQ ID NO: 46090 - RNA, 21 nt, Artificial Sequence
  LRRK2 RNA guide
ugugcagcacacagugcuaga

SEQ ID NO: 46091 - RNA, 21 nt, Artificial Sequence
  LRRK2 RNA guide
ugugcugcacauguuugugga

SEQ ID NO: 46092 - RNA, 21 nt, Artificial Sequence
  LRRK2 RNA guide
ugugugcugcacauguuugug

SEQ ID NO: 46093 - RNA, 21 nt, Artificial Sequence
  LRRK2 RNA guide
uuaauuaucuagcacugugug

SEQ ID NO: 46094 - RNA, 21 nt, Artificial Sequence
  LRRK2 RNA guide
uuaucuagcacugugugcugc

SEQ ID NO: 46095 - RNA, 21 nt, Artificial Sequence
  LRRK2 RNA guide
uuccacaaacaugugcagcac

SEQ ID NO: 46096 - RNA, 21 nt, Artificial Sequence
  LRRK2 RNA guide
uuccuuccacaaacaugugca

SEQ ID NO: 46097 - RNA, 22 nt, Artificial Sequence
  LRRK2 RNA guide
aaacaugugcagcacacagugc

SEQ ID NO: 46098 - RNA, 22 nt, Artificial Sequence
  LRRK2 RNA guide
aaauuccuuccacaaacaugug

SEQ ID NO: 46099 - RNA, 22 nt, Artificial Sequence
  LRRK2 RNA guide
aacaugugcagcacacagugcu

SEQ ID NO: 46100 - RNA, 22 nt, Artificial Sequence
  LRRK2 RNA guide
aauuaucuagcacugugugcug

SEQ ID NO: 46101 - RNA, 22 nt, Artificial Sequence
  LRRK2 RNA guide
aauuccuuccacaaacaugugc

SEQ ID NO: 46102 - RNA, 22 nt, Artificial Sequence
  LRRK2 RNA guide
acaaacaugugcagcacacagu

SEQ ID NO: 46103 - RNA, 22 nt, Artificial Sequence
  LRRK2 RNA guide
acaugugcagcacacagugcua

SEQ ID NO: 46104 - RNA, 22 nt, Artificial Sequence
  LRRK2 RNA guide
acugugugcugcacauguuugu

SEQ ID NO: 46105 - RNA, 22 nt, Artificial Sequence
  LRRK2 RNA guide
agcacacagugcuagauaauua

SEQ ID NO: 46106 - RNA, 22 nt, Artificial Sequence
  LRRK2 RNA guide
agcacugugugcugcacauguu

SEQ ID NO: 46107 - RNA, 22 nt, Artificial Sequence
  LRRK2 RNA guide
aucuagcacugugugcugcaca

SEQ ID NO: 46108 - RNA, 22 nt, Artificial Sequence
  LRRK2 RNA guide
augugcagcacacagugcuaga

SEQ ID NO: 46109 - RNA, 22 nt, Artificial Sequence
  LRRK2 RNA guide
auuaauuaucuagcacugugug

SEQ ID NO: 46110 - RNA, 22 nt, Artificial Sequence
  LRRK2 RNA guide
auuaucuagcacugugugcugc

SEQ ID NO: 46111 - RNA, 22 nt, Artificial Sequence
  LRRK2 RNA guide
auuccuuccacaaacaugugca

SEQ ID NO: 46112 - RNA, 22 nt, Artificial Sequence
  LRRK2 RNA guide
caaacaugugcagcacacagug

SEQ ID NO: 46113 - RNA, 22 nt, Artificial Sequence
  LRRK2 RNA guide
cacaaacaugugcagcacacag

SEQ ID NO: 46114 - RNA, 22 nt, Artificial Sequence
  LRRK2 RNA guide
cacacagugcuagauaauuaau

SEQ ID NO: 46115 - RNA, 22 nt, Artificial Sequence
  LRRK2 RNA guide
cacugugugcugcacauguuug

SEQ ID NO: 46116 - RNA, 22 nt, Artificial Sequence
  LRRK2 RNA guide
cagcacacagugcuagauaauu

SEQ ID NO: 46117 - RNA, 22 nt, Artificial Sequence
  LRRK2 RNA guide
caugugcagcacacagugcuag

SEQ ID NO: 46118 - RNA, 22 nt, Artificial Sequence
  LRRK2 RNA guide
ccacaaacaugugcagcacaca

SEQ ID NO: 46119 - RNA, 22 nt, Artificial Sequence
  LRRK2 RNA guide
ccuuccacaaacaugugcagca

SEQ ID NO: 46120 - RNA, 22 nt, Artificial Sequence
  LRRK2 RNA guide
cuagcacugugugcugcacaug

SEQ ID NO: 46121 - RNA, 22 nt, Artificial Sequence
  LRRK2 RNA guide
cuauuaauuaucuagcacugug

SEQ ID NO: 46122 - RNA, 22 nt, Artificial Sequence
  LRRK2 RNA guide
cucuauuaauuaucuagcacug

SEQ ID NO: 46123 - RNA, 22 nt, Artificial Sequence
  LRRK2 RNA guide
cugugugcugcacauguuugug

SEQ ID NO: 46124 - RNA, 22 nt, Artificial Sequence
  LRRK2 RNA guide
cuuccacaaacaugugcagcac

SEQ ID NO: 46125 - RNA, 22 nt, Artificial Sequence
  LRRK2 RNA guide
gcacacagugcuagauaauuaa

SEQ ID NO: 46126 - RNA, 22 nt, Artificial Sequence
  LRRK2 RNA guide
gcacugugugcugcacauguuu

SEQ ID NO: 46127 - RNA, 22 nt, Artificial Sequence
  LRRK2 RNA guide
gcagcacacagugcuagauaau

SEQ ID NO: 46128 - RNA, 22 nt, Artificial Sequence
  LRRK2 RNA guide
gugcagcacacagugcuagaua

SEQ ID NO: 46129 - RNA, 22 nt, Artificial Sequence
  LRRK2 RNA guide
gugcugcacauguuuguggaag

SEQ ID NO: 46130 - RNA, 22 nt, Artificial Sequence
  LRRK2 RNA guide
gugugcugcacauguuugugga

SEQ ID NO: 46131 - RNA, 22 nt, Artificial Sequence
  LRRK2 RNA guide
uaauuaucuagcacugugugcu

SEQ ID NO: 46132 - RNA, 22 nt, Artificial Sequence
  LRRK2 RNA guide
uagcacugugugcugcacaugu

SEQ ID NO: 46133 - RNA, 22 nt, Artificial Sequence
  LRRK2 RNA guide
uaucuagcacugugugcugcac

SEQ ID NO: 46134 - RNA, 22 nt, Artificial Sequence
  LRRK2 RNA guide
uccacaaacaugugcagcacac

SEQ ID NO: 46135 - RNA, 22 nt, Artificial Sequence
  LRRK2 RNA guide
uccuuccacaaacaugugcagc

SEQ ID NO: 46136 - RNA, 22 nt, Artificial Sequence
  LRRK2 RNA guide
ucuagcacugugugcugcacau

SEQ ID NO: 46137 - RNA, 22 nt, Artificial Sequence
  LRRK2 RNA guide
ugcagcacacagugcuagauaa

SEQ ID NO: 46138 - RNA, 22 nt, Artificial Sequence
  LRRK2 RNA guide
ugugcagcacacagugcuagau

SEQ ID NO: 46139 - RNA, 22 nt, Artificial Sequence
  LRRK2 RNA guide
ugugcugcacauguuuguggaa

SEQ ID NO: 46140 - RNA, 22 nt, Artificial Sequence
  LRRK2 RNA guide
ugugugcugcacauguuugugg

SEQ ID NO: 46141 - RNA, 22 nt, Artificial Sequence
  LRRK2 RNA guide
uuaauuaucuagcacugugugc

SEQ ID NO: 46142 - RNA, 22 nt, Artificial Sequence
  LRRK2 RNA guide
uuaucuagcacugugugcugca

SEQ ID NO: 46143 - RNA, 22 nt, Artificial Sequence
  LRRK2 RNA guide
uuccacaaacaugugcagcaca

SEQ ID NO: 46144 - RNA, 22 nt, Artificial Sequence
  LRRK2 RNA guide
uuccuuccacaaacaugugcag

SEQ ID NO: 46145 - RNA, 20 nt, Artificial Sequence
  LRRK2 RNA guide
aaacaugugcagcgcacagu

SEQ ID NO: 46146 - RNA, 20 nt, Artificial Sequence
  LRRK2 RNA guide
aacaugugcagcgcacagug

SEQ ID NO: 46147 - RNA, 20 nt, Artificial Sequence
  LRRK2 RNA guide
aauuaucuagcacugugcgc

SEQ ID NO: 46148 - RNA, 20 nt, Artificial Sequence
  LRRK2 RNA guide
acaaacaugugcagcgcaca

SEQ ID NO: 46149 - RNA, 20 nt, Artificial Sequence
  LRRK2 RNA guide
acaugugcagcgcacagugc

SEQ ID NO: 46150 - RNA, 20 nt, Artificial Sequence
  LRRK2 RNA guide
acugugcgcugcacauguuu

SEQ ID NO: 46151 - RNA, 20 nt, Artificial Sequence
  LRRK2 RNA guide
agcacugugcgcugcacaug

SEQ ID NO: 46152 - RNA, 20 nt, Artificial Sequence
  LRRK2 RNA guide
agcgcacagugcuagauaau

SEQ ID NO: 46153 - RNA, 20 nt, Artificial Sequence
  LRRK2 RNA guide
aucuagcacugugcgcugca

SEQ ID NO: 46154 - RNA, 20 nt, Artificial Sequence
  LRRK2 RNA guide
augugcagcgcacagugcua

SEQ ID NO: 46155 - RNA, 20 nt, Artificial Sequence
  LRRK2 RNA guide
auuaucuagcacugugcgcu

SEQ ID NO: 46156 - RNA, 20 nt, Artificial Sequence
  LRRK2 RNA guide
caaacaugugcagcgcacag

SEQ ID NO: 46157 - RNA, 20 nt, Artificial Sequence
  LRRK2 RNA guide
cacaaacaugugcagcgcac

SEQ ID NO: 46158 - RNA, 20 nt, Artificial Sequence
  LRRK2 RNA guide
cacugugcgcugcacauguu

SEQ ID NO: 46159 - RNA, 20 nt, Artificial Sequence
  LRRK2 RNA guide
cagcgcacagugcuagauaa

SEQ ID NO: 46160 - RNA, 20 nt, Artificial Sequence
  LRRK2 RNA guide
caugugcagcgcacagugcu

SEQ ID NO: 46161 - RNA, 20 nt, Artificial Sequence
  LRRK2 RNA guide
ccacaaacaugugcagcgca

SEQ ID NO: 46162 - RNA, 20 nt, Artificial Sequence
  LRRK2 RNA guide
cgcacagugcuagauaauua

SEQ ID NO: 46163 - RNA, 20 nt, Artificial Sequence
  LRRK2 RNA guide
cuagcacugugcgcugcaca

SEQ ID NO: 46164 - RNA, 20 nt, Artificial Sequence
  LRRK2 RNA guide
cugugcgcugcacauguuug

SEQ ID NO: 46165 - RNA, 20 nt, Artificial Sequence
  LRRK2 RNA guide
gcacugugcgcugcacaugu

SEQ ID NO: 46166 - RNA, 20 nt, Artificial Sequence
  LRRK2 RNA guide
gcagcgcacagugcuagaua

SEQ ID NO: 46167 - RNA, 20 nt, Artificial Sequence
  LRRK2 RNA guide
gcgcacagugcuagauaauu

SEQ ID NO: 46168 - RNA, 20 nt, Artificial Sequence
  LRRK2 RNA guide
gcgcugcacauguuugugga

SEQ ID NO: 46169 - RNA, 20 nt, Artificial Sequence
  LRRK2 RNA guide
gugcagcgcacagugcuaga

SEQ ID NO: 46170 - RNA, 20 nt, Artificial Sequence
  LRRK2 RNA guide
gugcgcugcacauguuugug

SEQ ID NO: 46171 - RNA, 20 nt, Artificial Sequence
  LRRK2 RNA guide
uaauuaucuagcacugugcg

SEQ ID NO: 46172 - RNA, 20 nt, Artificial Sequence
  LRRK2 RNA guide
uagcacugugcgcugcacau

SEQ ID NO: 46173 - RNA, 20 nt, Artificial Sequence
  LRRK2 RNA guide
uaucuagcacugugcgcugc

SEQ ID NO: 46174 - RNA, 20 nt, Artificial Sequence
  LRRK2 RNA guide
uccacaaacaugugcagcgc

SEQ ID NO: 46175 - RNA, 20 nt, Artificial Sequence
  LRRK2 RNA guide
ucuagcacugugcgcugcac

SEQ ID NO: 46176 - RNA, 20 nt, Artificial Sequence
  LRRK2 RNA guide
ugcagcgcacagugcuagau

SEQ ID NO: 46177 - RNA, 20 nt, Artificial Sequence
  LRRK2 RNA guide
ugcgcugcacauguuugugg

SEQ ID NO: 46178 - RNA, 20 nt, Artificial Sequence
  LRRK2 RNA guide
ugugcagcgcacagugcuag

SEQ ID NO: 46179 - RNA, 20 nt, Artificial Sequence
  LRRK2 RNA guide
ugugcgcugcacauguuugu

SEQ ID NO: 46180 - RNA, 20 nt, Artificial Sequence
  LRRK2 RNA guide
uuaauuaucuagcacugugc

SEQ ID NO: 46181 - RNA, 20 nt, Artificial Sequence
  LRRK2 RNA guide
uuaucuagcacugugcgcug

SEQ ID NO: 46182 - RNA, 20 nt, Artificial Sequence
  LRRK2 RNA guide
uuccacaaacaugugcagcg

SEQ ID NO: 46183 - RNA, 21 nt, Artificial Sequence
  LRRK2 RNA guide
aaacaugugcagcgcacagug

SEQ ID NO: 46184 - RNA, 21 nt, Artificial Sequence
  LRRK2 RNA guide
aacaugugcagcgcacagugc

SEQ ID NO: 46185 - RNA, 21 nt, Artificial Sequence
  LRRK2 RNA guide
aauuaucuagcacugugcgcu

SEQ ID NO: 46186 - RNA, 21 nt, Artificial Sequence
  LRRK2 RNA guide
acaaacaugugcagcgcacag

SEQ ID NO: 46187 - RNA, 21 nt, Artificial Sequence
  LRRK2 RNA guide
acaugugcagcgcacagugcu

SEQ ID NO: 46188 - RNA, 21 nt, Artificial Sequence
  LRRK2 RNA guide
acugugcgcugcacauguuug

SEQ ID NO: 46189 - RNA, 21 nt, Artificial Sequence
  LRRK2 RNA guide
agcacugugcgcugcacaugu

SEQ ID NO: 46190 - RNA, 21 nt, Artificial Sequence
  LRRK2 RNA guide
agcgcacagugcuagauaauu

SEQ ID NO: 46191 - RNA, 21 nt, Artificial Sequence
  LRRK2 RNA guide
aucuagcacugugcgcugcac

SEQ ID NO: 46192 - RNA, 21 nt, Artificial Sequence
  LRRK2 RNA guide
augugcagcgcacagugcuag

SEQ ID NO: 46193 - RNA, 21 nt, Artificial Sequence
  LRRK2 RNA guide
auuaauuaucuagcacugugc

SEQ ID NO: 46194 - RNA, 21 nt, Artificial Sequence
  LRRK2 RNA guide
auuaucuagcacugugcgcug

SEQ ID NO: 46195 - RNA, 21 nt, Artificial Sequence
  LRRK2 RNA guide
caaacaugugcagcgcacagu

SEQ ID NO: 46196 - RNA, 21 nt, Artificial Sequence
  LRRK2 RNA guide
cacaaacaugugcagcgcaca

SEQ ID NO: 46197 - RNA, 21 nt, Artificial Sequence
  LRRK2 RNA guide
cacugugcgcugcacauguuu

SEQ ID NO: 46198 - RNA, 21 nt, Artificial Sequence
  LRRK2 RNA guide
cagcgcacagugcuagauaau

SEQ ID NO: 46199 - RNA, 21 nt, Artificial Sequence
  LRRK2 RNA guide
caugugcagcgcacagugcua

SEQ ID NO: 46200 - RNA, 21 nt, Artificial Sequence
  LRRK2 RNA guide
ccacaaacaugugcagcgcac

SEQ ID NO: 46201 - RNA, 21 nt, Artificial Sequence
  LRRK2 RNA guide
cgcacagugcuagauaauuaa

SEQ ID NO: 46202 - RNA, 21 nt, Artificial Sequence
  LRRK2 RNA guide
cuagcacugugcgcugcacau

SEQ ID NO: 46203 - RNA, 21 nt, Artificial Sequence
  LRRK2 RNA guide
cugugcgcugcacauguuugu

SEQ ID NO: 46204 - RNA, 21 nt, Artificial Sequence
  LRRK2 RNA guide
cuuccacaaacaugugcagcg

SEQ ID NO: 46205 - RNA, 21 nt, Artificial Sequence
  LRRK2 RNA guide
gcacugugcgcugcacauguu

SEQ ID NO: 46206 - RNA, 21 nt, Artificial Sequence
  LRRK2 RNA guide
gcagcgcacagugcuagauaa

SEQ ID NO: 46207 - RNA, 21 nt, Artificial Sequence
  LRRK2 RNA guide
gcgcacagugcuagauaauua

SEQ ID NO: 46208 - RNA, 21 nt, Artificial Sequence
  LRRK2 RNA guide
gcgcugcacauguuuguggaa

SEQ ID NO: 46209 - RNA, 21 nt, Artificial Sequence
  LRRK2 RNA guide
gugcagcgcacagugcuagau

SEQ ID NO: 46210 - RNA, 21 nt, Artificial Sequence
  LRRK2 RNA guide
gugcgcugcacauguuugugg

SEQ ID NO: 46211 - RNA, 21 nt, Artificial Sequence
  LRRK2 RNA guide
uaauuaucuagcacugugcgc

SEQ ID NO: 46212 - RNA, 21 nt, Artificial Sequence
  LRRK2 RNA guide
uagcacugugcgcugcacaug

SEQ ID NO: 46213 - RNA, 21 nt, Artificial Sequence
  LRRK2 RNA guide
uaucuagcacugugcgcugca

SEQ ID NO: 46214 - RNA, 21 nt, Artificial Sequence
  LRRK2 RNA guide
uccacaaacaugugcagcgca

SEQ ID NO: 46215 - RNA, 21 nt, Artificial Sequence
  LRRK2 RNA guide
ucuagcacugugcgcugcaca

SEQ ID NO: 46216 - RNA, 21 nt, Artificial Sequence
  LRRK2 RNA guide
ugcagcgcacagugcuagaua

SEQ ID NO: 46217 - RNA, 21 nt, Artificial Sequence
  LRRK2 RNA guide
ugcgcugcacauguuugugga

SEQ ID NO: 46218 - RNA, 21 nt, Artificial Sequence
  LRRK2 RNA guide
ugugcagcgcacagugcuaga

SEQ ID NO: 46219 - RNA, 21 nt, Artificial Sequence
  LRRK2 RNA guide
ugugcgcugcacauguuugug

SEQ ID NO: 46220 - RNA, 21 nt, Artificial Sequence
  LRRK2 RNA guide
uuaauuaucuagcacugugcg

SEQ ID NO: 46221 - RNA, 21 nt, Artificial Sequence
  LRRK2 RNA guide
uuaucuagcacugugcgcugc

SEQ ID NO: 46222 - RNA, 21 nt, Artificial Sequence
  LRRK2 RNA guide
uuccacaaacaugugcagcgc

SEQ ID NO: 46223 - RNA, 22 nt, Artificial Sequence
  LRRK2 RNA guide
aaacaugugcagcgcacagugc

SEQ ID NO: 46224 - RNA, 22 nt, Artificial Sequence
  LRRK2 RNA guide
aacaugugcagcgcacagugcu

SEQ ID NO: 46225 - RNA, 22 nt, Artificial Sequence
  LRRK2 RNA guide
aauuaucuagcacugugcgcug

SEQ ID NO: 46226 - RNA, 22 nt, Artificial Sequence
  LRRK2 RNA guide
acaaacaugugcagcgcacagu

SEQ ID NO: 46227 - RNA, 22 nt, Artificial Sequence
  LRRK2 RNA guide
acaugugcagcgcacagugcua

SEQ ID NO: 46228 - RNA, 22 nt, Artificial Sequence
  LRRK2 RNA guide
acugugcgcugcacauguuugu

SEQ ID NO: 46229 - RNA, 22 nt, Artificial Sequence
  LRRK2 RNA guide
agcacugugcgcugcacauguu

SEQ ID NO: 46230 - RNA, 22 nt, Artificial Sequence
  LRRK2 RNA guide
agcgcacagugcuagauaauua

SEQ ID NO: 46231 - RNA, 22 nt, Artificial Sequence
  LRRK2 RNA guide
aucuagcacugugcgcugcaca

SEQ ID NO: 46232 - RNA, 22 nt, Artificial Sequence
  LRRK2 RNA guide
augugcagcgcacagugcuaga

SEQ ID NO: 46233 - RNA, 22 nt, Artificial Sequence
  LRRK2 RNA guide
auuaauuaucuagcacugugcg

SEQ ID NO: 46234 - RNA, 22 nt, Artificial Sequence
  LRRK2 RNA guide
auuaucuagcacugugcgcugc

SEQ ID NO: 46235 - RNA, 22 nt, Artificial Sequence
  LRRK2 RNA guide
caaacaugugcagcgcacagug

SEQ ID NO: 46236 - RNA, 22 nt, Artificial Sequence
  LRRK2 RNA guide
cacaaacaugugcagcgcacag

SEQ ID NO: 46237 - RNA, 22 nt, Artificial Sequence
  LRRK2 RNA guide
cacugugcgcugcacauguuug

SEQ ID NO: 46238 - RNA, 22 nt, Artificial Sequence
  LRRK2 RNA guide
cagcgcacagugcuagauaauu

SEQ ID NO: 46239 - RNA, 22 nt, Artificial Sequence
  LRRK2 RNA guide
caugugcagcgcacagugcuag

SEQ ID NO: 46240 - RNA, 22 nt, Artificial Sequence
  LRRK2 RNA guide
ccacaaacaugugcagcgcaca

SEQ ID NO: 46241 - RNA, 22 nt, Artificial Sequence
  LRRK2 RNA guide
ccuuccacaaacaugugcagcg

SEQ ID NO: 46242 - RNA, 22 nt, Artificial Sequence
  LRRK2 RNA guide
cgcacagugcuagauaauuaau

SEQ ID NO: 46243 - RNA, 22 nt, Artificial Sequence
  LRRK2 RNA guide
cuagcacugugcgcugcacaug

SEQ ID NO: 46244 - RNA, 22 nt, Artificial Sequence
  LRRK2 RNA guide
cugugcgcugcacauguuugug

SEQ ID NO: 46245 - RNA, 22 nt, Artificial Sequence
  LRRK2 RNA guide
cuuccacaaacaugugcagcgc

SEQ ID NO: 46246 - RNA, 22 nt, Artificial Sequence
  LRRK2 RNA guide
gcacugugcgcugcacauguuu

SEQ ID NO: 46247 - RNA, 22 nt, Artificial Sequence
  LRRK2 RNA guide
gcagcgcacagugcuagauaau

SEQ ID NO: 46248 - RNA, 22 nt, Artificial Sequence
  LRRK2 RNA guide
gcgcacagugcuagauaauuaa

SEQ ID NO: 46249 - RNA, 22 nt, Artificial Sequence
  LRRK2 RNA guide
gcgcugcacauguuuguggaag

SEQ ID NO: 46250 - RNA, 22 nt, Artificial Sequence
  LRRK2 RNA guide
gugcagcgcacagugcuagaua

SEQ ID NO: 46251 - RNA, 22 nt, Artificial Sequence
  LRRK2 RNA guide
gugcgcugcacauguuugugga

SEQ ID NO: 46252 - RNA, 22 nt, Artificial Sequence
  LRRK2 RNA guide
uaauuaucuagcacugugcgcu

SEQ ID NO: 46253 - RNA, 22 nt, Artificial Sequence
  LRRK2 RNA guide
uagcacugugcgcugcacaugu

SEQ ID NO: 46254 - RNA, 22 nt, Artificial Sequence
  LRRK2 RNA guide
uaucuagcacugugcgcugcac

SEQ ID NO: 46255 - RNA, 22 nt, Artificial Sequence
  LRRK2 RNA guide
uauuaauuaucuagcacugugc

SEQ ID NO: 46256 - RNA, 22 nt, Artificial Sequence
  LRRK2 RNA guide
uccacaaacaugugcagcgcac

SEQ ID NO: 46257 - RNA, 22 nt, Artificial Sequence
  LRRK2 RNA guide
ucuagcacugugcgcugcacau

SEQ ID NO: 46258 - RNA, 22 nt, Artificial Sequence
  LRRK2 RNA guide
ugcagcgcacagugcuagauaa

SEQ ID NO: 46259 - RNA, 22 nt, Artificial Sequence
  LRRK2 RNA guide
ugcgcugcacauguuuguggaa

SEQ ID NO: 46260 - RNA, 22 nt, Artificial Sequence
  LRRK2 RNA guide
ugugcagcgcacagugcuagau

SEQ ID NO: 46261 - RNA, 22 nt, Artificial Sequence
  LRRK2 RNA guide
ugugcgcugcacauguuugugg

SEQ ID NO: 46262 - RNA, 22 nt, Artificial Sequence
  LRRK2 RNA guide
uuaauuaucuagcacugugcgc

SEQ ID NO: 46263 - RNA, 22 nt, Artificial Sequence
  LRRK2 RNA guide
uuaucuagcacugugcgcugca

SEQ ID NO: 46264 - RNA, 22 nt, Artificial Sequence
  LRRK2 RNA guide
uuccacaaacaugugcagcgca

SEQ ID NO: 46265 - RNA, 20 nt, Artificial Sequence
  LRRK2 RNA guide
aagcggggagggagggaaaa

SEQ ID NO: 46266 - RNA, 20 nt, Artificial Sequence
  LRRK2 RNA guide
aagggaagcggggagggagg

SEQ ID NO: 46267 - RNA, 20 nt, Artificial Sequence
  LRRK2 RNA guide
aagggaagggaagcggggag

SEQ ID NO: 46268 - RNA, 20 nt, Artificial Sequence
  LRRK2 RNA guide
aagggaagggaagggaagcg

SEQ ID NO: 46269 - RNA, 20 nt, Artificial Sequence
  LRRK2 RNA guide
agcggggagggagggaaaaa

SEQ ID NO: 46270 - RNA, 20 nt, Artificial Sequence
  LRRK2 RNA guide
agggaagcggggagggaggg

SEQ ID NO: 46271 - RNA, 20 nt, Artificial Sequence
  LRRK2 RNA guide
agggaagggaagcggggagg

SEQ ID NO: 46272 - RNA, 20 nt, Artificial Sequence
  LRRK2 RNA guide
agggaagggaagggaagcgg

SEQ ID NO: 46273 - RNA, 20 nt, Artificial Sequence
  LRRK2 RNA guide
aguuuuucccucccuccccg

SEQ ID NO: 46274 - RNA, 20 nt, Artificial Sequence
  LRRK2 RNA guide
ccccgcuucccuucccuucc

SEQ ID NO: 46275 - RNA, 20 nt, Artificial Sequence
  LRRK2 RNA guide
cccuccccgcuucccuuccc

SEQ ID NO: 46276 - RNA, 20 nt, Artificial Sequence
  LRRK2 RNA guide
cccucccuccccgcuucccu

SEQ ID NO: 46277 - RNA, 20 nt, Artificial Sequence
  LRRK2 RNA guide
ccuccccgcuucccuucccu

SEQ ID NO: 46278 - RNA, 20 nt, Artificial Sequence
  LRRK2 RNA guide
ccucccuccccgcuucccuu

SEQ ID NO: 46279 - RNA, 20 nt, Artificial Sequence
  LRRK2 RNA guide
cuccccgcuucccuucccuu

SEQ ID NO: 46280 - RNA, 20 nt, Artificial Sequence
  LRRK2 RNA guide
cucccuccccgcuucccuuc

SEQ ID NO: 46281 - RNA, 20 nt, Artificial Sequence
  LRRK2 RNA guide
gaagcggggagggagggaaa

SEQ ID NO: 46282 - RNA, 20 nt, Artificial Sequence
  LRRK2 RNA guide
gaagggaagggaagcgggga

SEQ ID NO: 46283 - RNA, 20 nt, Artificial Sequence
  LRRK2 RNA guide
gaagggaagggaagggaagc

SEQ ID NO: 46284 - RNA, 20 nt, Artificial Sequence
  LRRK2 RNA guide
gaguuuuucccucccucccc

SEQ ID NO: 46285 - RNA, 20 nt, Artificial Sequence
  LRRK2 RNA guide
gcggggagggagggaaaaac

SEQ ID NO: 46286 - RNA, 20 nt, Artificial Sequence
  LRRK2 RNA guide
ggaagcggggagggagggaa

SEQ ID NO: 46287 - RNA, 20 nt, Artificial Sequence
  LRRK2 RNA guide
ggaagggaagggaagcgggg

SEQ ID NO: 46288 - RNA, 20 nt, Artificial Sequence
  LRRK2 RNA guide
gggaagcggggagggaggga

SEQ ID NO: 46289 - RNA, 20 nt, Artificial Sequence
  LRRK2 RNA guide
gggaagggaagggaagcggg

SEQ ID NO: 46290 - RNA, 20 nt, Artificial Sequence
  LRRK2 RNA guide
gugaguuuuucccucccucc

SEQ ID NO: 46291 - RNA, 20 nt, Artificial Sequence
  LRRK2 RNA guide
guuuuucccucccuccccgc

SEQ ID NO: 46292 - RNA, 20 nt, Artificial Sequence
  LRRK2 RNA guide
uccccgcuucccuucccuuc

SEQ ID NO: 46293 - RNA, 20 nt, Artificial Sequence
  LRRK2 RNA guide
ucccuccccgcuucccuucc

SEQ ID NO: 46294 - RNA, 20 nt, Artificial Sequence
  LRRK2 RNA guide
ugaguuuuucccucccuccc

SEQ ID NO: 46295 - RNA, 20 nt, Artificial Sequence
  LRRK2 RNA guide
ugugaguuuuucccucccuc

SEQ ID NO: 46296 - RNA, 20 nt, Artificial Sequence
  LRRK2 RNA guide
uugugaguuuuucccucccu

SEQ ID NO: 46297 - RNA, 20 nt, Artificial Sequence
  LRRK2 RNA guide
uuuucccucccuccccgcuu

SEQ ID NO: 46298 - RNA, 20 nt, Artificial Sequence
  LRRK2 RNA guide
uuuuucccucccuccccgcu

SEQ ID NO: 46299 - RNA, 21 nt, Artificial Sequence
  LRRK2 RNA guide
aagcggggagggagggaaaaa

SEQ ID NO: 46300 - RNA, 21 nt, Artificial Sequence
  LRRK2 RNA guide
aagggaagcggggagggaggg

SEQ ID NO: 46301 - RNA, 21 nt, Artificial Sequence
  LRRK2 RNA guide
aagggaagggaagcggggagg

SEQ ID NO: 46302 - RNA, 21 nt, Artificial Sequence
  LRRK2 RNA guide
aagggaagggaagggaagcgg

SEQ ID NO: 46303 - RNA, 21 nt, Artificial Sequence
  LRRK2 RNA guide
agcggggagggagggaaaaac

SEQ ID NO: 46304 - RNA, 21 nt, Artificial Sequence
  LRRK2 RNA guide
agggaagcggggagggaggga

SEQ ID NO: 46305 - RNA, 21 nt, Artificial Sequence
  LRRK2 RNA guide
agggaagggaagcggggaggg

SEQ ID NO: 46306 - RNA, 21 nt, Artificial Sequence
  LRRK2 RNA guide
agggaagggaagggaagcggg

SEQ ID NO: 46307 - RNA, 21 nt, Artificial Sequence
  LRRK2 RNA guide
aguuuuucccucccuccccgc

SEQ ID NO: 46308 - RNA, 21 nt, Artificial Sequence
  LRRK2 RNA guide
ccccgcuucccuucccuuccc

SEQ ID NO: 46309 - RNA, 21 nt, Artificial Sequence
  LRRK2 RNA guide
cccuccccgcuucccuucccu

SEQ ID NO: 46310 - RNA, 21 nt, Artificial Sequence
  LRRK2 RNA guide
cccucccuccccgcuucccuu

SEQ ID NO: 46311 - RNA, 21 nt, Artificial Sequence
  LRRK2 RNA guide
ccuccccgcuucccuucccuu

SEQ ID NO: 46312 - RNA, 21 nt, Artificial Sequence
  LRRK2 RNA guide
ccucccuccccgcuucccuuc

SEQ ID NO: 46313 - RNA, 21 nt, Artificial Sequence
  LRRK2 RNA guide
cuccccgcuucccuucccuuc

SEQ ID NO: 46314 - RNA, 21 nt, Artificial Sequence
  LRRK2 RNA guide
cucccuccccgcuucccuucc

SEQ ID NO: 46315 - RNA, 21 nt, Artificial Sequence
  LRRK2 RNA guide
gaagcggggagggagggaaaa

SEQ ID NO: 46316 - RNA, 21 nt, Artificial Sequence
  LRRK2 RNA guide
gaagggaagcggggagggagg

SEQ ID NO: 46317 - RNA, 21 nt, Artificial Sequence
  LRRK2 RNA guide
gaagggaagggaagcggggag

SEQ ID NO: 46318 - RNA, 21 nt, Artificial Sequence
  LRRK2 RNA guide
gaagggaagggaagggaagcg

SEQ ID NO: 46319 - RNA, 21 nt, Artificial Sequence
  LRRK2 RNA guide
gaguuuuucccucccuccccg

SEQ ID NO: 46320 - RNA, 21 nt, Artificial Sequence
  LRRK2 RNA guide
gcggggagggagggaaaaacu

SEQ ID NO: 46321 - RNA, 21 nt, Artificial Sequence
  LRRK2 RNA guide
ggaagcggggagggagggaaa

SEQ ID NO: 46322 - RNA, 21 nt, Artificial Sequence
  LRRK2 RNA guide
ggaagggaagggaagcgggga

SEQ ID NO: 46323 - RNA, 21 nt, Artificial Sequence
  LRRK2 RNA guide
ggaagggaagggaagggaagc

SEQ ID NO: 46324 - RNA, 21 nt, Artificial Sequence
  LRRK2 RNA guide
gggaagcggggagggagggaa

SEQ ID NO: 46325 - RNA, 21 nt, Artificial Sequence
  LRRK2 RNA guide
gggaagggaagcggggaggga

SEQ ID NO: 46326 - RNA, 21 nt, Artificial Sequence
  LRRK2 RNA guide
gggaagggaagggaagcgggg

SEQ ID NO: 46327 - RNA, 21 nt, Artificial Sequence
  LRRK2 RNA guide
gugaguuuuucccucccuccc

SEQ ID NO: 46328 - RNA, 21 nt, Artificial Sequence
  LRRK2 RNA guide
guuuuucccucccuccccgcu

SEQ ID NO: 46329 - RNA, 21 nt, Artificial Sequence
  LRRK2 RNA guide
uccccgcuucccuucccuucc

SEQ ID NO: 46330 - RNA, 21 nt, Artificial Sequence
  LRRK2 RNA guide
ucccuccccgcuucccuuccc

SEQ ID NO: 46331 - RNA, 21 nt, Artificial Sequence
  LRRK2 RNA guide
ucccucccuccccgcuucccu

SEQ ID NO: 46332 - RNA, 21 nt, Artificial Sequence
  LRRK2 RNA guide
ugaguuuuucccucccucccc

SEQ ID NO: 46333 - RNA, 21 nt, Artificial Sequence
  LRRK2 RNA guide
ugugaguuuuucccucccucc

SEQ ID NO: 46334 - RNA, 21 nt, Artificial Sequence
  LRRK2 RNA guide
uucccucccuccccgcuuccc

SEQ ID NO: 46335 - RNA, 21 nt, Artificial Sequence
  LRRK2 RNA guide
uugugaguuuuucccucccuc

SEQ ID NO: 46336 - RNA, 21 nt, Artificial Sequence
  LRRK2 RNA guide
uuugugaguuuuucccucccu

SEQ ID NO: 46337 - RNA, 21 nt, Artificial Sequence
  LRRK2 RNA guide
uuuucccucccuccccgcuuc

SEQ ID NO: 46338 - RNA, 21 nt, Artificial Sequence
  LRRK2 RNA guide
uuuuucccucccuccccgcuu

SEQ ID NO: 46339 - RNA, 22 nt, Artificial Sequence
  LRRK2 RNA guide
aagcggggagggagggaaaaac

SEQ ID NO: 46340 - RNA, 22 nt, Artificial Sequence
  LRRK2 RNA guide
aagggaagcggggagggaggga

SEQ ID NO: 46341 - RNA, 22 nt, Artificial Sequence
  LRRK2 RNA guide
aagggaagggaagcggggaggg

SEQ ID NO: 46342 - RNA, 22 nt, Artificial Sequence
  LRRK2 RNA guide
aagggaagggaagggaagcggg

SEQ ID NO: 46343 - RNA, 22 nt, Artificial Sequence
  LRRK2 RNA guide
agcggggagggagggaaaaacu

SEQ ID NO: 46344 - RNA, 22 nt, Artificial Sequence
  LRRK2 RNA guide
agggaagcggggagggagggaa

SEQ ID NO: 46345 - RNA, 22 nt, Artificial Sequence
  LRRK2 RNA guide
agggaagggaagcggggaggga

SEQ ID NO: 46346 - RNA, 22 nt, Artificial Sequence
  LRRK2 RNA guide
agggaagggaagggaagcgggg

SEQ ID NO: 46347 - RNA, 22 nt, Artificial Sequence
  LRRK2 RNA guide
aguuuuucccucccuccccgcu

SEQ ID NO: 46348 - RNA, 22 nt, Artificial Sequence
  LRRK2 RNA guide
auuugugaguuuuucccucccu

SEQ ID NO: 46349 - RNA, 22 nt, Artificial Sequence
  LRRK2 RNA guide
ccccgcuucccuucccuucccu

SEQ ID NO: 46350 - RNA, 22 nt, Artificial Sequence
  LRRK2 RNA guide
cccuccccgcuucccuucccuu

SEQ ID NO: 46351 - RNA, 22 nt, Artificial Sequence
  LRRK2 RNA guide
cccucccuccccgcuucccuuc

SEQ ID NO: 46352 - RNA, 22 nt, Artificial Sequence
  LRRK2 RNA guide
ccuccccgcuucccuucccuuc

SEQ ID NO: 46353 - RNA, 22 nt, Artificial Sequence
  LRRK2 RNA guide
ccucccuccccgcuucccuucc

SEQ ID NO: 46354 - RNA, 22 nt, Artificial Sequence
  LRRK2 RNA guide
cuccccgcuucccuucccuucc

SEQ ID NO: 46355 - RNA, 22 nt, Artificial Sequence
  LRRK2 RNA guide
cucccuccccgcuucccuuccc

SEQ ID NO: 46356 - RNA, 22 nt, Artificial Sequence
  LRRK2 RNA guide
gaagcggggagggagggaaaaa

SEQ ID NO: 46357 - RNA, 22 nt, Artificial Sequence
  LRRK2 RNA guide
gaagggaagcggggagggaggg

SEQ ID NO: 46358 - RNA, 22 nt, Artificial Sequence
  LRRK2 RNA guide
gaagggaagggaagcggggagg

SEQ ID NO: 46359 - RNA, 22 nt, Artificial Sequence
  LRRK2 RNA guide
gaagggaagggaagggaagcgg

SEQ ID NO: 46360 - RNA, 22 nt, Artificial Sequence
  LRRK2 RNA guide
gaguuuuucccucccuccccgc

SEQ ID NO: 46361 - RNA, 22 nt, Artificial Sequence
  LRRK2 RNA guide
gcggggagggagggaaaaacuc

SEQ ID NO: 46362 - RNA, 22 nt, Artificial Sequence
  LRRK2 RNA guide
ggaagcggggagggagggaaaa

SEQ ID NO: 46363 - RNA, 22 nt, Artificial Sequence
  LRRK2 RNA guide
ggaagggaagcggggagggagg

SEQ ID NO: 46364 - RNA, 22 nt, Artificial Sequence
  LRRK2 RNA guide
ggaagggaagggaagcggggag

SEQ ID NO: 46365 - RNA, 22 nt, Artificial Sequence
  LRRK2 RNA guide
ggaagggaagggaagggaagcg

SEQ ID NO: 46366 - RNA, 22 nt, Artificial Sequence
  LRRK2 RNA guide
gggaagcggggagggagggaaa

SEQ ID NO: 46367 - RNA, 22 nt, Artificial Sequence
  LRRK2 RNA guide
gggaagggaagcggggagggag

SEQ ID NO: 46368 - RNA, 22 nt, Artificial Sequence
  LRRK2 RNA guide
gggaagggaagggaagcgggga

SEQ ID NO: 46369 - RNA, 22 nt, Artificial Sequence
  LRRK2 RNA guide
gggaagggaagggaagggaagc

SEQ ID NO: 46370 - RNA, 22 nt, Artificial Sequence
  LRRK2 RNA guide
gugaguuuuucccucccucccc

SEQ ID NO: 46371 - RNA, 22 nt, Artificial Sequence
  LRRK2 RNA guide
guuuuucccucccuccccgcuu

SEQ ID NO: 46372 - RNA, 22 nt, Artificial Sequence
  LRRK2 RNA guide
uccccgcuucccuucccuuccc

SEQ ID NO: 46373 - RNA, 22 nt, Artificial Sequence
  LRRK2 RNA guide
ucccuccccgcuucccuucccu

SEQ ID NO: 46374 - RNA, 22 nt, Artificial Sequence
  LRRK2 RNA guide
ucccucccuccccgcuucccuu

SEQ ID NO: 46375 - RNA, 22 nt, Artificial Sequence
  LRRK2 RNA guide
ugaguuuuucccucccuccccg

SEQ ID NO: 46376 - RNA, 22 nt, Artificial Sequence
  LRRK2 RNA guide
ugugaguuuuucccucccuccc

SEQ ID NO: 46377 - RNA, 22 nt, Artificial Sequence
  LRRK2 RNA guide
uucccucccuccccgcuucccu

SEQ ID NO: 46378 - RNA, 22 nt, Artificial Sequence
  LRRK2 RNA guide
uugugaguuuuucccucccucc

SEQ ID NO: 46379 - RNA, 22 nt, Artificial Sequence
  LRRK2 RNA guide
uuucccucccuccccgcuuccc

SEQ ID NO: 46380 - RNA, 22 nt, Artificial Sequence
  LRRK2 RNA guide
uuugugaguuuuucccucccuc

SEQ ID NO: 46381 - RNA, 22 nt, Artificial Sequence
  LRRK2 RNA guide
uuuucccucccuccccgcuucc

SEQ ID NO: 46382 - RNA, 22 nt, Artificial Sequence
  LRRK2 RNA guide
uuuuucccucccuccccgcuuc

SEQ ID NO: 46383 - RNA, 21 nt, Artificial Sequence
  LRRK2 RNA guide
gagggaagagaaggggagggg

SEQ ID NO: 46384 - RNA, 22 nt, Artificial Sequence
  LRRK2 RNA guide
agggaagagaaggggaggggag

SEQ ID NO: 46385 - RNA, 22 nt, Artificial Sequence
  LRRK2 RNA guide
ccuuccccuccccuccccuucu

SEQ ID NO: 46386 - RNA, 22 nt, Artificial Sequence
  LRRK2 RNA guide
gagggaagagaaggggagggga

SEQ ID NO: 46387 - RNA, 22 nt, Artificial Sequence
  LRRK2 RNA guide
ggaagagaaggggaggggaggg

SEQ ID NO: 46388 - RNA, 22 nt, Artificial Sequence
  LRRK2 RNA guide
ggagggaagagaaggggagggg

SEQ ID NO: 46389 - RNA, 22 nt, Artificial Sequence
  LRRK2 RNA guide
uccccuccccuccccuucucuu

SEQ ID NO: 46390 - RNA, 22 nt, Artificial Sequence
  LRRK2 RNA guide
uuccccuccccuccccuucucu

SEQ ID NO: 46391 - RNA, 20 nt, Artificial Sequence
  LRRK2 RNA guide
agggaagagaaggggagggg

SEQ ID NO: 46392 - RNA, 20 nt, Artificial Sequence
  LRRK2 RNA guide
cccuccccuccccuucucuu

SEQ ID NO: 46393 - RNA, 20 nt, Artificial Sequence
  LRRK2 RNA guide
cucuucccuccccuccccuu

SEQ ID NO: 46394 - RNA, 20 nt, Artificial Sequence
  LRRK2 RNA guide
cuucccuccccuccccuucu

SEQ ID NO: 46395 - RNA, 20 nt, Artificial Sequence
  LRRK2 RNA guide
gaagagaaggggaggggagg

SEQ ID NO: 46396 - RNA, 20 nt, Artificial Sequence
  LRRK2 RNA guide
gagggaagagaaggggaggg

SEQ ID NO: 46397 - RNA, 20 nt, Artificial Sequence
  LRRK2 RNA guide
ggaagagaaggggaggggag

SEQ ID NO: 46398 - RNA, 20 nt, Artificial Sequence
  LRRK2 RNA guide
gggaagagaaggggagggga

SEQ ID NO: 46399 - RNA, 20 nt, Artificial Sequence
  LRRK2 RNA guide
ucccuccccuccccuucucu

SEQ ID NO: 46400 - RNA, 20 nt, Artificial Sequence
  LRRK2 RNA guide
ucuucccuccccuccccuuc

SEQ ID NO: 46401 - RNA, 20 nt, Artificial Sequence
  LRRK2 RNA guide
uucccuccccuccccuucuc

SEQ ID NO: 46402 - RNA, 21 nt, Artificial Sequence
  LRRK2 RNA guide
agggaagagaaggggagggga

SEQ ID NO: 46403 - RNA, 21 nt, Artificial Sequence
  LRRK2 RNA guide
ccccuucucuucccuccccuc

SEQ ID NO: 46404 - RNA, 21 nt, Artificial Sequence
  LRRK2 RNA guide
cccuccccuccccuucucuuc

SEQ ID NO: 46405 - RNA, 21 nt, Artificial Sequence
  LRRK2 RNA guide
cucuucccuccccuccccuuc

SEQ ID NO: 46406 - RNA, 21 nt, Artificial Sequence
  LRRK2 RNA guide
cuucccuccccuccccuucuc

SEQ ID NO: 46407 - RNA, 21 nt, Artificial Sequence
  LRRK2 RNA guide
gaagagaaggggaggggaggg

SEQ ID NO: 46408 - RNA, 21 nt, Artificial Sequence
  LRRK2 RNA guide
gaggggaggggagggaagaga

SEQ ID NO: 46409 - RNA, 21 nt, Artificial Sequence
  LRRK2 RNA guide
ggaagagaaggggaggggagg

SEQ ID NO: 46410 - RNA, 21 nt, Artificial Sequence
  LRRK2 RNA guide
ggagggaagagaaggggaggg

SEQ ID NO: 46411 - RNA, 21 nt, Artificial Sequence
  LRRK2 RNA guide
gggaagagaaggggaggggag

SEQ ID NO: 46412 - RNA, 21 nt, Artificial Sequence
  LRRK2 RNA guide
ucccuccccuccccuucucuu

SEQ ID NO: 46413 - RNA, 21 nt, Artificial Sequence
  LRRK2 RNA guide
ucucuucccuccccuccccuu

SEQ ID NO: 46414 - RNA, 21 nt, Artificial Sequence
  LRRK2 RNA guide
ucuucccuccccuccccuucu

SEQ ID NO: 46415 - RNA, 21 nt, Artificial Sequence
  LRRK2 RNA guide
uucccuccccuccccuucucu

SEQ ID NO: 46416 - RNA, 22 nt, Artificial Sequence
  LRRK2 RNA guide
ccccuucucuucccuccccucc

SEQ ID NO: 46417 - RNA, 22 nt, Artificial Sequence
  LRRK2 RNA guide
cccuccccuccccuucucuucc

SEQ ID NO: 46418 - RNA, 22 nt, Artificial Sequence
  LRRK2 RNA guide
cccuucucuucccuccccuccc

SEQ ID NO: 46419 - RNA, 22 nt, Artificial Sequence
  LRRK2 RNA guide
cucuucccuccccuccccuucu

SEQ ID NO: 46420 - RNA, 22 nt, Artificial Sequence
  LRRK2 RNA guide
cuucccuccccuccccuucucu

SEQ ID NO: 46421 - RNA, 22 nt, Artificial Sequence
  LRRK2 RNA guide
gaagagaaggggaggggaggga

SEQ ID NO: 46422 - RNA, 22 nt, Artificial Sequence
  LRRK2 RNA guide
gaggggaggggagggaagagaa

SEQ ID NO: 46423 - RNA, 22 nt, Artificial Sequence
  LRRK2 RNA guide
ggaggggaggggagggaagaga

SEQ ID NO: 46424 - RNA, 22 nt, Artificial Sequence
  LRRK2 RNA guide
gggaagagaaggggaggggagg

SEQ ID NO: 46425 - RNA, 22 nt, Artificial Sequence
  LRRK2 RNA guide
gggagggaagagaaggggaggg

SEQ ID NO: 46426 - RNA, 22 nt, Artificial Sequence
  LRRK2 RNA guide
gggaggggaggggagggaagag

SEQ ID NO: 46427 - RNA, 22 nt, Artificial Sequence
  LRRK2 RNA guide
uccccuucucuucccuccccuc

SEQ ID NO: 46428 - RNA, 22 nt, Artificial Sequence
  LRRK2 RNA guide
ucccuccccuccccuucucuuc

SEQ ID NO: 46429 - RNA, 22 nt, Artificial Sequence
  LRRK2 RNA guide
ucucuucccuccccuccccuuc

SEQ ID NO: 46430 - RNA, 22 nt, Artificial Sequence
  LRRK2 RNA guide
ucuucccuccccuccccuucuc

SEQ ID NO: 46431 - RNA, 22 nt, Artificial Sequence
  LRRK2 RNA guide
uucccuccccuccccuucucuu

SEQ ID NO: 46432 - RNA, 22 nt, Artificial Sequence
  LRRK2 RNA guide
uucucuucccuccccuccccuu

SEQ ID NO: 46433 - RNA, 20 nt, Artificial Sequence
  LRRK2 RNA guide
aauguagcacugagcaaaca

SEQ ID NO: 46434 - RNA, 20 nt, Artificial Sequence
  LRRK2 RNA guide
agcacugagcaaacauacau

SEQ ID NO: 46435 - RNA, 20 nt, Artificial Sequence
  LRRK2 RNA guide
auggguauguauguuugcuc

SEQ ID NO: 46436 - RNA, 20 nt, Artificial Sequence
  LRRK2 RNA guide
auguagcacugagcaaacau

SEQ ID NO: 46437 - RNA, 20 nt, Artificial Sequence
  LRRK2 RNA guide
auguauguuugcucagugcu

SEQ ID NO: 46438 - RNA, 20 nt, Artificial Sequence
  LRRK2 RNA guide
auguuugcucagugcuacau

SEQ ID NO: 46439 - RNA, 20 nt, Artificial Sequence
  LRRK2 RNA guide
auuuaauguagcacugagca

SEQ ID NO: 46440 - RNA, 20 nt, Artificial Sequence
  LRRK2 RNA guide
cagugcuacauuaaaugaaa

SEQ ID NO: 46441 - RNA, 20 nt, Artificial Sequence
  LRRK2 RNA guide
cauuuaauguagcacugagc

SEQ ID NO: 46442 - RNA, 20 nt, Artificial Sequence
  LRRK2 RNA guide
cauuucauuuaauguagcac

SEQ ID NO: 46443 - RNA, 20 nt, Artificial Sequence
  LRRK2 RNA guide
ccauccauuucauuuaaugu

SEQ ID NO: 46444 - RNA, 20 nt, Artificial Sequence
  LRRK2 RNA guide
ccauuucauuuaauguagca

SEQ ID NO: 46445 - RNA, 20 nt, Artificial Sequence
  LRRK2 RNA guide
cccauccauuucauuuaaug

SEQ ID NO: 46446 - RNA, 20 nt, Artificial Sequence
  LRRK2 RNA guide
cucagugcuacauuaaauga

SEQ ID NO: 46447 - RNA, 20 nt, Artificial Sequence
  LRRK2 RNA guide
gauggguauguauguuugcu

SEQ ID NO: 46448 - RNA, 20 nt, Artificial Sequence
  LRRK2 RNA guide
gcacugagcaaacauacaua

SEQ ID NO: 46449 - RNA, 20 nt, Artificial Sequence
  LRRK2 RNA guide
gcucagugcuacauuaaaug

SEQ ID NO: 46450 - RNA, 20 nt, Artificial Sequence
  LRRK2 RNA guide
ggguauguauguuugcucag

SEQ ID NO: 46451 - RNA, 20 nt, Artificial Sequence
  LRRK2 RNA guide
gguauguauguuugcucagu

SEQ ID NO: 46452 - RNA, 20 nt, Artificial Sequence
  LRRK2 RNA guide
guagcacugagcaaacauac

SEQ ID NO: 46453 - RNA, 20 nt, Artificial Sequence
  LRRK2 RNA guide
guauguauguuugcucagug

SEQ ID NO: 46454 - RNA, 20 nt, Artificial Sequence
  LRRK2 RNA guide
guauguuugcucagugcuac

SEQ ID NO: 46455 - RNA, 20 nt, Artificial Sequence
  LRRK2 RNA guide
gugcuacauuaaaugaaaug

SEQ ID NO: 46456 - RNA, 20 nt, Artificial Sequence
  LRRK2 RNA guide
guuugcucagugcuacauua

SEQ ID NO: 46457 - RNA, 20 nt, Artificial Sequence
  LRRK2 RNA guide
uaauguagcacugagcaaac

SEQ ID NO: 46458 - RNA, 20 nt, Artificial Sequence
  LRRK2 RNA guide
uagcacugagcaaacauaca

SEQ ID NO: 46459 - RNA, 20 nt, Artificial Sequence
  LRRK2 RNA guide
uauguauguuugcucagugc

SEQ ID NO: 46460 - RNA, 20 nt, Artificial Sequence
  LRRK2 RNA guide
uauguuugcucagugcuaca

SEQ ID NO: 46461 - RNA, 20 nt, Artificial Sequence
  LRRK2 RNA guide
ucagugcuacauuaaaugaa

SEQ ID NO: 46462 - RNA, 20 nt, Artificial Sequence
  LRRK2 RNA guide
ucauuuaauguagcacugag

SEQ ID NO: 46463 - RNA, 20 nt, Artificial Sequence
  LRRK2 RNA guide
uccauuucauuuaauguagc

SEQ ID NO: 46464 - RNA, 20 nt, Artificial Sequence
  LRRK2 RNA guide
ucccauccauuucauuuaau

SEQ ID NO: 46465 - RNA, 20 nt, Artificial Sequence
  LRRK2 RNA guide
ugcuacauuaaaugaaaugg

SEQ ID NO: 46466 - RNA, 20 nt, Artificial Sequence
  LRRK2 RNA guide
ugcucagugcuacauuaaau

SEQ ID NO: 46467 - RNA, 20 nt, Artificial Sequence
  LRRK2 RNA guide
uggguauguauguuugcuca

SEQ ID NO: 46468 - RNA, 20 nt, Artificial Sequence
  LRRK2 RNA guide
uguagcacugagcaaacaua

SEQ ID NO: 46469 - RNA, 20 nt, Artificial Sequence
  LRRK2 RNA guide
uguauguuugcucagugcua

SEQ ID NO: 46470 - RNA, 20 nt, Artificial Sequence
  LRRK2 RNA guide
uguuugcucagugcuacauu

SEQ ID NO: 46471 - RNA, 20 nt, Artificial Sequence
  LRRK2 RNA guide
uuaauguagcacugagcaaa

SEQ ID NO: 46472 - RNA, 20 nt, Artificial Sequence
  LRRK2 RNA guide
uucauuuaauguagcacuga

SEQ ID NO: 46473 - RNA, 20 nt, Artificial Sequence
  LRRK2 RNA guide
uugcucagugcuacauuaaa

SEQ ID NO: 46474 - RNA, 20 nt, Artificial Sequence
  LRRK2 RNA guide
uuuaauguagcacugagcaa

SEQ ID NO: 46475 - RNA, 20 nt, Artificial Sequence
  LRRK2 RNA guide
uuugcucagugcuacauuaa

SEQ ID NO: 46476 - RNA, 21 nt, Artificial Sequence
  LRRK2 RNA guide
aauguagcacugagcaaacau

SEQ ID NO: 46477 - RNA, 21 nt, Artificial Sequence
  LRRK2 RNA guide
agauggguauguauguuugcu

SEQ ID NO: 46478 - RNA, 21 nt, Artificial Sequence
  LRRK2 RNA guide
agcacugagcaaacauacaua

SEQ ID NO: 46479 - RNA, 21 nt, Artificial Sequence
  LRRK2 RNA guide
auggguauguauguuugcuca

SEQ ID NO: 46480 - RNA, 21 nt, Artificial Sequence
  LRRK2 RNA guide
auguagcacugagcaaacaua

SEQ ID NO: 46481 - RNA, 21 nt, Artificial Sequence
  LRRK2 RNA guide
auguauguuugcucagugcua

SEQ ID NO: 46482 - RNA, 21 nt, Artificial Sequence
  LRRK2 RNA guide
auguuugcucagugcuacauu

SEQ ID NO: 46483 - RNA, 21 nt, Artificial Sequence
  LRRK2 RNA guide
auuuaauguagcacugagcaa

SEQ ID NO: 46484 - RNA, 21 nt, Artificial Sequence
  LRRK2 RNA guide
cauuuaauguagcacugagca

SEQ ID NO: 46485 - RNA, 21 nt, Artificial Sequence
  LRRK2 RNA guide
ccauuucauuuaauguagcac

SEQ ID NO: 46486 - RNA, 21 nt, Artificial Sequence
  LRRK2 RNA guide
cccauccauuucauuuaaugu

SEQ ID NO: 46487 - RNA, 21 nt, Artificial Sequence
  LRRK2 RNA guide
cucagugcuacauuaaaugaa

SEQ ID NO: 46488 - RNA, 21 nt, Artificial Sequence
  LRRK2 RNA guide
cucccauccauuucauuuaau

SEQ ID NO: 46489 - RNA, 21 nt, Artificial Sequence
  LRRK2 RNA guide
gauggguauguauguuugcuc

SEQ ID NO: 46490 - RNA, 21 nt, Artificial Sequence
  LRRK2 RNA guide
gcacugagcaaacauacauac

SEQ ID NO: 46491 - RNA, 21 nt, Artificial Sequence
  LRRK2 RNA guide
gcucagugcuacauuaaauga

SEQ ID NO: 46492 - RNA, 21 nt, Artificial Sequence
  LRRK2 RNA guide
ggguauguauguuugcucagu

SEQ ID NO: 46493 - RNA, 21 nt, Artificial Sequence
  LRRK2 RNA guide
gguauguauguuugcucagug

SEQ ID NO: 46494 - RNA, 21 nt, Artificial Sequence
  LRRK2 RNA guide
guagcacugagcaaacauaca

SEQ ID NO: 46495 - RNA, 21 nt, Artificial Sequence
  LRRK2 RNA guide
guauguauguuugcucagugc

SEQ ID NO: 46496 - RNA, 21 nt, Artificial Sequence
  LRRK2 RNA guide
guauguuugcucagugcuaca

SEQ ID NO: 46497 - RNA, 21 nt, Artificial Sequence
  LRRK2 RNA guide
gugcuacauuaaaugaaaugg

SEQ ID NO: 46498 - RNA, 21 nt, Artificial Sequence
  LRRK2 RNA guide
guuugcucagugcuacauuaa

SEQ ID NO: 46499 - RNA, 21 nt, Artificial Sequence
  LRRK2 RNA guide
uaauguagcacugagcaaaca

SEQ ID NO: 46500 - RNA, 21 nt, Artificial Sequence
  LRRK2 RNA guide
uagcacugagcaaacauacau

SEQ ID NO: 46501 - RNA, 21 nt, Artificial Sequence
  LRRK2 RNA guide
uauguauguuugcucagugcu

SEQ ID NO: 46502 - RNA, 21 nt, Artificial Sequence
  LRRK2 RNA guide
uauguuugcucagugcuacau

SEQ ID NO: 46503 - RNA, 21 nt, Artificial Sequence
  LRRK2 RNA guide
ucauuuaauguagcacugagc

SEQ ID NO: 46504 - RNA, 21 nt, Artificial Sequence
  LRRK2 RNA guide
ucccauccauuucauuuaaug

SEQ ID NO: 46505 - RNA, 21 nt, Artificial Sequence
  LRRK2 RNA guide
ugcucagugcuacauuaaaug

SEQ ID NO: 46506 - RNA, 21 nt, Artificial Sequence
  LRRK2 RNA guide
uggguauguauguuugcucag

SEQ ID NO: 46507 - RNA, 21 nt, Artificial Sequence
  LRRK2 RNA guide
uguagcacugagcaaacauac

SEQ ID NO: 46508 - RNA, 21 nt, Artificial Sequence
  LRRK2 RNA guide
uguauguuugcucagugcuac

SEQ ID NO: 46509 - RNA, 21 nt, Artificial Sequence
  LRRK2 RNA guide
uguuugcucagugcuacauua

SEQ ID NO: 46510 - RNA, 21 nt, Artificial Sequence
  LRRK2 RNA guide
uuaauguagcacugagcaaac

SEQ ID NO: 46511 - RNA, 21 nt, Artificial Sequence
  LRRK2 RNA guide
uucauuuaauguagcacugag

SEQ ID NO: 46512 - RNA, 21 nt, Artificial Sequence
  LRRK2 RNA guide
uugcucagugcuacauuaaau

SEQ ID NO: 46513 - RNA, 21 nt, Artificial Sequence
  LRRK2 RNA guide
uuuaauguagcacugagcaaa

SEQ ID NO: 46514 - RNA, 21 nt, Artificial Sequence
  LRRK2 RNA guide
uuugcucagugcuacauuaaa

SEQ ID NO: 46515 - RNA, 22 nt, Artificial Sequence
  LRRK2 RNA guide
aauguagcacugagcaaacaua

SEQ ID NO: 46516 - RNA, 22 nt, Artificial Sequence
  LRRK2 RNA guide
agauggguauguauguuugcuc

SEQ ID NO: 46517 - RNA, 22 nt, Artificial Sequence
  LRRK2 RNA guide
agcacugagcaaacauacauac

SEQ ID NO: 46518 - RNA, 22 nt, Artificial Sequence
  LRRK2 RNA guide
agugcuacauuaaaugaaaugg

SEQ ID NO: 46519 - RNA, 22 nt, Artificial Sequence
  LRRK2 RNA guide
auggguauguauguuugcucag

SEQ ID NO: 46520 - RNA, 22 nt, Artificial Sequence
  LRRK2 RNA guide
auguagcacugagcaaacauac

SEQ ID NO: 46521 - RNA, 22 nt, Artificial Sequence
  LRRK2 RNA guide
auguauguuugcucagugcuac

SEQ ID NO: 46522 - RNA, 22 nt, Artificial Sequence
  LRRK2 RNA guide
auguuugcucagugcuacauua

SEQ ID NO: 46523 - RNA, 22 nt, Artificial Sequence
  LRRK2 RNA guide
auuuaauguagcacugagcaaa

SEQ ID NO: 46524 - RNA, 22 nt, Artificial Sequence
  LRRK2 RNA guide
cagauggguauguauguuugcu

SEQ ID NO: 46525 - RNA, 22 nt, Artificial Sequence
  LRRK2 RNA guide
cagugcuacauuaaaugaaaug

SEQ ID NO: 46526 - RNA, 22 nt, Artificial Sequence
  LRRK2 RNA guide
cauccauuucauuuaauguagc

SEQ ID NO: 46527 - RNA, 22 nt, Artificial Sequence
  LRRK2 RNA guide
cauuuaauguagcacugagcaa

SEQ ID NO: 46528 - RNA, 22 nt, Artificial Sequence
  LRRK2 RNA guide
cauuucauuuaauguagcacug

SEQ ID NO: 46529 - RNA, 22 nt, Artificial Sequence
  LRRK2 RNA guide
ccauccauuucauuuaauguag

SEQ ID NO: 46530 - RNA, 22 nt, Artificial Sequence
  LRRK2 RNA guide
ccauuucauuuaauguagcacu

SEQ ID NO: 46531 - RNA, 22 nt, Artificial Sequence
  LRRK2 RNA guide
cccauccauuucauuuaaugua

SEQ ID NO: 46532 - RNA, 22 nt, Artificial Sequence
  LRRK2 RNA guide
cucagugcuacauuaaaugaaa

SEQ ID NO: 46533 - RNA, 22 nt, Artificial Sequence
  LRRK2 RNA guide
cucccauccauuucauuuaaug

SEQ ID NO: 46534 - RNA, 22 nt, Artificial Sequence
  LRRK2 RNA guide
gauggguauguauguuugcuca

SEQ ID NO: 46535 - RNA, 22 nt, Artificial Sequence
  LRRK2 RNA guide
gcacugagcaaacauacauacc

SEQ ID NO: 46536 - RNA, 22 nt, Artificial Sequence
  LRRK2 RNA guide
gcucagugcuacauuaaaugaa

SEQ ID NO: 46537 - RNA, 22 nt, Artificial Sequence
  LRRK2 RNA guide
gcucccauccauuucauuuaau

SEQ ID NO: 46538 - RNA, 22 nt, Artificial Sequence
  LRRK2 RNA guide
ggguauguauguuugcucagug

SEQ ID NO: 46539 - RNA, 22 nt, Artificial Sequence
  LRRK2 RNA guide
gguauguauguuugcucagugc

SEQ ID NO: 46540 - RNA, 22 nt, Artificial Sequence
  LRRK2 RNA guide
guagcacugagcaaacauacau

SEQ ID NO: 46541 - RNA, 22 nt, Artificial Sequence
  LRRK2 RNA guide
guauguauguuugcucagugcu

SEQ ID NO: 46542 - RNA, 22 nt, Artificial Sequence
  LRRK2 RNA guide
guauguuugcucagugcuacau

SEQ ID NO: 46543 - RNA, 22 nt, Artificial Sequence
  LRRK2 RNA guide
gugcuacauuaaaugaaaugga

SEQ ID NO: 46544 - RNA, 22 nt, Artificial Sequence
  LRRK2 RNA guide
guuugcucagugcuacauuaaa

SEQ ID NO: 46545 - RNA, 22 nt, Artificial Sequence
  LRRK2 RNA guide
uaauguagcacugagcaaacau

SEQ ID NO: 46546 - RNA, 22 nt, Artificial Sequence
  LRRK2 RNA guide
uagcacugagcaaacauacaua

SEQ ID NO: 46547 - RNA, 22 nt, Artificial Sequence
  LRRK2 RNA guide
uauguauguuugcucagugcua

SEQ ID NO: 46548 - RNA, 22 nt, Artificial Sequence
  LRRK2 RNA guide
uauguuugcucagugcuacauu

SEQ ID NO: 46549 - RNA, 22 nt, Artificial Sequence
  LRRK2 RNA guide
ucauuuaauguagcacugagca

SEQ ID NO: 46550 - RNA, 22 nt, Artificial Sequence
  LRRK2 RNA guide
uccauuucauuuaauguagcac

SEQ ID NO: 46551 - RNA, 22 nt, Artificial Sequence
  LRRK2 RNA guide
ucccauccauuucauuuaaugu

SEQ ID NO: 46552 - RNA, 22 nt, Artificial Sequence
  LRRK2 RNA guide
ugcucagugcuacauuaaauga

SEQ ID NO: 46553 - RNA, 22 nt, Artificial Sequence
  LRRK2 RNA guide
uggguauguauguuugcucagu

SEQ ID NO: 46554 - RNA, 22 nt, Artificial Sequence
  LRRK2 RNA guide
uguagcacugagcaaacauaca

SEQ ID NO: 46555 - RNA, 22 nt, Artificial Sequence
  LRRK2 RNA guide
uguauguuugcucagugcuaca

SEQ ID NO: 46556 - RNA, 22 nt, Artificial Sequence
  LRRK2 RNA guide
uguuugcucagugcuacauuaa

SEQ ID NO: 46557 - RNA, 22 nt, Artificial Sequence
  LRRK2 RNA guide
uuaauguagcacugagcaaaca

SEQ ID NO: 46558 - RNA, 22 nt, Artificial Sequence
  LRRK2 RNA guide
uucauuuaauguagcacugagc

SEQ ID NO: 46559 - RNA, 22 nt, Artificial Sequence
  LRRK2 RNA guide
uugcucagugcuacauuaaaug

SEQ ID NO: 46560 - RNA, 22 nt, Artificial Sequence
  LRRK2 RNA guide
uuuaauguagcacugagcaaac

SEQ ID NO: 46561 - RNA, 22 nt, Artificial Sequence
  LRRK2 RNA guide
uuucauuuaauguagcacugag

SEQ ID NO: 46562 - RNA, 22 nt, Artificial Sequence
  LRRK2 RNA guide
uuugcucagugcuacauuaaau

SEQ ID NO: 46563 - RNA, 20 nt, Artificial Sequence
  LRRK2 RNA guide
aauguagaacugagcaaaca

SEQ ID NO: 46564 - RNA, 20 nt, Artificial Sequence
  LRRK2 RNA guide
agaacugagcaaacauacau

SEQ ID NO: 46565 - RNA, 20 nt, Artificial Sequence
  LRRK2 RNA guide
auguagaacugagcaaacau

SEQ ID NO: 46566 - RNA, 20 nt, Artificial Sequence
  LRRK2 RNA guide
auguauguuugcucaguucu

SEQ ID NO: 46567 - RNA, 20 nt, Artificial Sequence
  LRRK2 RNA guide
auguuugcucaguucuacau

SEQ ID NO: 46568 - RNA, 20 nt, Artificial Sequence
  LRRK2 RNA guide
auuuaauguagaacugagca

SEQ ID NO: 46569 - RNA, 20 nt, Artificial Sequence
  LRRK2 RNA guide
cauuuaauguagaacugagc

SEQ ID NO: 46570 - RNA, 20 nt, Artificial Sequence
  LRRK2 RNA guide
cucaguucuacauuaaauga

SEQ ID NO: 46571 - RNA, 20 nt, Artificial Sequence
  LRRK2 RNA guide
gaacugagcaaacauacaua

SEQ ID NO: 46572 - RNA, 20 nt, Artificial Sequence
  LRRK2 RNA guide
gcucaguucuacauuaaaug

SEQ ID NO: 46573 - RNA, 20 nt, Artificial Sequence
  LRRK2 RNA guide
guagaacugagcaaacauac

SEQ ID NO: 46574 - RNA, 20 nt, Artificial Sequence
  LRRK2 RNA guide
guauguauguuugcucaguu

SEQ ID NO: 46575 - RNA, 20 nt, Artificial Sequence
  LRRK2 RNA guide
guauguuugcucaguucuac

SEQ ID NO: 46576 - RNA, 20 nt, Artificial Sequence
  LRRK2 RNA guide
guuugcucaguucuacauua

SEQ ID NO: 46577 - RNA, 20 nt, Artificial Sequence
  LRRK2 RNA guide
uaauguagaacugagcaaac

SEQ ID NO: 46578 - RNA, 20 nt, Artificial Sequence
  LRRK2 RNA guide
uagaacugagcaaacauaca

SEQ ID NO: 46579 - RNA, 20 nt, Artificial Sequence
  LRRK2 RNA guide
uauguauguuugcucaguuc

SEQ ID NO: 46580 - RNA, 20 nt, Artificial Sequence
  LRRK2 RNA guide
uauguuugcucaguucuaca

SEQ ID NO: 46581 - RNA, 20 nt, Artificial Sequence
  LRRK2 RNA guide
ucauuuaauguagaacugag

SEQ ID NO: 46582 - RNA, 20 nt, Artificial Sequence
  LRRK2 RNA guide
ugcucaguucuacauuaaau

SEQ ID NO: 46583 - RNA, 20 nt, Artificial Sequence
  LRRK2 RNA guide
uguagaacugagcaaacaua

SEQ ID NO: 46584 - RNA, 20 nt, Artificial Sequence
  LRRK2 RNA guide
uguauguuugcucaguucua

SEQ ID NO: 46585 - RNA, 20 nt, Artificial Sequence
  LRRK2 RNA guide
uguuugcucaguucuacauu

SEQ ID NO: 46586 - RNA, 20 nt, Artificial Sequence
  LRRK2 RNA guide
uuaauguagaacugagcaaa

SEQ ID NO: 46587 - RNA, 20 nt, Artificial Sequence
  LRRK2 RNA guide
uugcucaguucuacauuaaa

SEQ ID NO: 46588 - RNA, 20 nt, Artificial Sequence
  LRRK2 RNA guide
uuuaauguagaacugagcaa

SEQ ID NO: 46589 - RNA, 20 nt, Artificial Sequence
  LRRK2 RNA guide
uuugcucaguucuacauuaa

SEQ ID NO: 46590 - RNA, 21 nt, Artificial Sequence
  LRRK2 RNA guide
aauguagaacugagcaaacau

SEQ ID NO: 46591 - RNA, 21 nt, Artificial Sequence
  LRRK2 RNA guide
agaacugagcaaacauacaua

SEQ ID NO: 46592 - RNA, 21 nt, Artificial Sequence
  LRRK2 RNA guide
auguagaacugagcaaacaua

SEQ ID NO: 46593 - RNA, 21 nt, Artificial Sequence
  LRRK2 RNA guide
auguauguuugcucaguucua

SEQ ID NO: 46594 - RNA, 21 nt, Artificial Sequence
  LRRK2 RNA guide
auguuugcucaguucuacauu

SEQ ID NO: 46595 - RNA, 21 nt, Artificial Sequence
  LRRK2 RNA guide
cauuuaauguagaacugagca

SEQ ID NO: 46596 - RNA, 21 nt, Artificial Sequence
  LRRK2 RNA guide
gaacugagcaaacauacauac

SEQ ID NO: 46597 - RNA, 21 nt, Artificial Sequence
  LRRK2 RNA guide
gcucaguucuacauuaaauga

SEQ ID NO: 46598 - RNA, 21 nt, Artificial Sequence
  LRRK2 RNA guide
gguauguauguuugcucaguu

SEQ ID NO: 46599 - RNA, 21 nt, Artificial Sequence
  LRRK2 RNA guide
guagaacugagcaaacauaca

SEQ ID NO: 46600 - RNA, 21 nt, Artificial Sequence
  LRRK2 RNA guide
guauguauguuugcucaguuc

SEQ ID NO: 46601 - RNA, 21 nt, Artificial Sequence
  LRRK2 RNA guide
guauguuugcucaguucuaca

SEQ ID NO: 46602 - RNA, 21 nt, Artificial Sequence
  LRRK2 RNA guide
guuugcucaguucuacauuaa

SEQ ID NO: 46603 - RNA, 21 nt, Artificial Sequence
  LRRK2 RNA guide
uaauguagaacugagcaaaca

SEQ ID NO: 46604 - RNA, 21 nt, Artificial Sequence
  LRRK2 RNA guide
uagaacugagcaaacauacau

SEQ ID NO: 46605 - RNA, 21 nt, Artificial Sequence
  LRRK2 RNA guide
uauguauguuugcucaguucu

SEQ ID NO: 46606 - RNA, 21 nt, Artificial Sequence
  LRRK2 RNA guide
uauguuugcucaguucuacau

SEQ ID NO: 46607 - RNA, 21 nt, Artificial Sequence
  LRRK2 RNA guide
ucauuuaauguagaacugagc

SEQ ID NO: 46608 - RNA, 21 nt, Artificial Sequence
  LRRK2 RNA guide
ugcucaguucuacauuaaaug

SEQ ID NO: 46609 - RNA, 21 nt, Artificial Sequence
  LRRK2 RNA guide
uguagaacugagcaaacauac

SEQ ID NO: 46610 - RNA, 21 nt, Artificial Sequence
  LRRK2 RNA guide
uguauguuugcucaguucuac

SEQ ID NO: 46611 - RNA, 21 nt, Artificial Sequence
  LRRK2 RNA guide
uguuugcucaguucuacauua

SEQ ID NO: 46612 - RNA, 21 nt, Artificial Sequence
  LRRK2 RNA guide
uuaauguagaacugagcaaac

SEQ ID NO: 46613 - RNA, 22 nt, Artificial Sequence
  LRRK2 RNA guide
aauguagaacugagcaaacaua

SEQ ID NO: 46614 - RNA, 22 nt, Artificial Sequence
  LRRK2 RNA guide
agaacugagcaaacauacauac

SEQ ID NO: 46615 - RNA, 22 nt, Artificial Sequence
  LRRK2 RNA guide
auguagaacugagcaaacauac

SEQ ID NO: 46616 - RNA, 22 nt, Artificial Sequence
  LRRK2 RNA guide
auguauguuugcucaguucuac

SEQ ID NO: 46617 - RNA, 22 nt, Artificial Sequence
  LRRK2 RNA guide
auguuugcucaguucuacauua

SEQ ID NO: 46618 - RNA, 22 nt, Artificial Sequence
  LRRK2 RNA guide
cauuuaauguagaacugagcaa

SEQ ID NO: 46619 - RNA, 22 nt, Artificial Sequence
  LRRK2 RNA guide
gaacugagcaaacauacauacc

SEQ ID NO: 46620 - RNA, 22 nt, Artificial Sequence
  LRRK2 RNA guide
gcucaguucuacauuaaaugaa

SEQ ID NO: 46621 - RNA, 22 nt, Artificial Sequence
  LRRK2 RNA guide
ggguauguauguuugcucaguu

SEQ ID NO: 46622 - RNA, 22 nt, Artificial Sequence
  LRRK2 RNA guide
gguauguauguuugcucaguuc

SEQ ID NO: 46623 - RNA, 22 nt, Artificial Sequence
  LRRK2 RNA guide
guagaacugagcaaacauacau

SEQ ID NO: 46624 - RNA, 22 nt, Artificial Sequence
  LRRK2 RNA guide
guauguauguuugcucaguucu

SEQ ID NO: 46625 - RNA, 22 nt, Artificial Sequence
  LRRK2 RNA guide
guauguuugcucaguucuacau

SEQ ID NO: 46626 - RNA, 22 nt, Artificial Sequence
  LRRK2 RNA guide
guuugcucaguucuacauuaaa

SEQ ID NO: 46627 - RNA, 22 nt, Artificial Sequence
  LRRK2 RNA guide
uaauguagaacugagcaaacau

SEQ ID NO: 46628 - RNA, 22 nt, Artificial Sequence
  LRRK2 RNA guide
uagaacugagcaaacauacaua

SEQ ID NO: 46629 - RNA, 22 nt, Artificial Sequence
  LRRK2 RNA guide
uauguauguuugcucaguucua

SEQ ID NO: 46630 - RNA, 22 nt, Artificial Sequence
  LRRK2 RNA guide
uauguuugcucaguucuacauu

SEQ ID NO: 46631 - RNA, 22 nt, Artificial Sequence
  LRRK2 RNA guide
ucauuuaauguagaacugagca

SEQ ID NO: 46632 - RNA, 22 nt, Artificial Sequence
  LRRK2 RNA guide
ugcucaguucuacauuaaauga

SEQ ID NO: 46633 - RNA, 22 nt, Artificial Sequence
  LRRK2 RNA guide
uguagaacugagcaaacauaca

SEQ ID NO: 46634 - RNA, 22 nt, Artificial Sequence
  LRRK2 RNA guide
uguauguuugcucaguucuaca

SEQ ID NO: 46635 - RNA, 22 nt, Artificial Sequence
  LRRK2 RNA guide
uguuugcucaguucuacauuaa

SEQ ID NO: 46636 - RNA, 22 nt, Artificial Sequence
  LRRK2 RNA guide
uuaauguagaacugagcaaaca

SEQ ID NO: 46637 - RNA, 22 nt, Artificial Sequence
  LRRK2 RNA guide
uucauuuaauguagaacugagc

SEQ ID NO: 46638 - RNA, 22 nt, Artificial Sequence
  LRRK2 RNA guide
uugcucaguucuacauuaaaug

SEQ ID NO: 46639 - RNA, 22 nt, Artificial Sequence
  LRRK2 RNA guide
uuuaauguagaacugagcaaac

SEQ ID NO: 46640 - RNA, 20 nt, Artificial Sequence
  LRRK2 RNA guide
aauugcuauggcauaggauu

SEQ ID NO: 46641 - RNA, 20 nt, Artificial Sequence
  LRRK2 RNA guide
auugcuauggcauaggauuu

SEQ ID NO: 46642 - RNA, 20 nt, Artificial Sequence
  LRRK2 RNA guide
gcuauggcauaggauuuuuu

SEQ ID NO: 46643 - RNA, 20 nt, Artificial Sequence
  LRRK2 RNA guide
ugcuauggcauaggauuuuu

SEQ ID NO: 46644 - RNA, 20 nt, Artificial Sequence
  LRRK2 RNA guide
uugcuauggcauaggauuuu

SEQ ID NO: 46645 - RNA, 21 nt, Artificial Sequence
  LRRK2 RNA guide
aauugcuauggcauaggauuu

SEQ ID NO: 46646 - RNA, 21 nt, Artificial Sequence
  LRRK2 RNA guide
auugcuauggcauaggauuuu

SEQ ID NO: 46647 - RNA, 21 nt, Artificial Sequence
  LRRK2 RNA guide
uaauugcuauggcauaggauu

SEQ ID NO: 46648 - RNA, 21 nt, Artificial Sequence
  LRRK2 RNA guide
ugcuauggcauaggauuuuuu

SEQ ID NO: 46649 - RNA, 21 nt, Artificial Sequence
  LRRK2 RNA guide
uugcuauggcauaggauuuuu

SEQ ID NO: 46650 - RNA, 22 nt, Artificial Sequence
  LRRK2 RNA guide
aauugcuauggcauaggauuuu

SEQ ID NO: 46651 - RNA, 22 nt, Artificial Sequence
  LRRK2 RNA guide
auaauugcuauggcauaggauu

SEQ ID NO: 46652 - RNA, 22 nt, Artificial Sequence
  LRRK2 RNA guide
auugcuauggcauaggauuuuu

SEQ ID NO: 46653 - RNA, 22 nt, Artificial Sequence
  LRRK2 RNA guide
uaauugcuauggcauaggauuu

SEQ ID NO: 46654 - RNA, 22 nt, Artificial Sequence
  LRRK2 RNA guide
uugcuauggcauaggauuuuuu

SEQ ID NO: 46655 - RNA, 20 nt, Artificial Sequence
  LRRK2 RNA guide
aagccuuagcaagcuguggc

SEQ ID NO: 46656 - RNA, 20 nt, Artificial Sequence
  LRRK2 RNA guide
aagcuguggcacugcaugcu

SEQ ID NO: 46657 - RNA, 20 nt, Artificial Sequence
  LRRK2 RNA guide
aauccaggagaagccuuagc

SEQ ID NO: 46658 - RNA, 20 nt, Artificial Sequence
  LRRK2 RNA guide
acagcuugcuaaggcuucuc

SEQ ID NO: 46659 - RNA, 20 nt, Artificial Sequence
  LRRK2 RNA guide
agaagccuuagcaagcugug

SEQ ID NO: 46660 - RNA, 20 nt, Artificial Sequence
  LRRK2 RNA guide
agcaagcuguggcacugcau

SEQ ID NO: 46661 - RNA, 20 nt, Artificial Sequence
  LRRK2 RNA guide
agcaugcagugccacagcuu

SEQ ID NO: 46662 - RNA, 20 nt, Artificial Sequence
  LRRK2 RNA guide
agccuuagcaagcuguggca

SEQ ID NO: 46663 - RNA, 20 nt, Artificial Sequence
  LRRK2 RNA guide
agcuguggcacugcaugcug

SEQ ID NO: 46664 - RNA, 20 nt, Artificial Sequence
  LRRK2 RNA guide
agcuugcuaaggcuucuccu

SEQ ID NO: 46665 - RNA, 20 nt, Artificial Sequence
  LRRK2 RNA guide
aggagaagccuuagcaagcu

SEQ ID NO: 46666 - RNA, 20 nt, Artificial Sequence
  LRRK2 RNA guide
agggccagcaugcagugcca

SEQ ID NO: 46667 - RNA, 20 nt, Artificial Sequence
  LRRK2 RNA guide
agugccacagcuugcuaagg

SEQ ID NO: 46668 - RNA, 20 nt, Artificial Sequence
  LRRK2 RNA guide
auccaggagaagccuuagca

SEQ ID NO: 46669 - RNA, 20 nt, Artificial Sequence
  LRRK2 RNA guide
augcagugccacagcuugcu

SEQ ID NO: 46670 - RNA, 20 nt, Artificial Sequence
  LRRK2 RNA guide
caagcuguggcacugcaugc

SEQ ID NO: 46671 - RNA, 20 nt, Artificial Sequence
  LRRK2 RNA guide
caauccaggagaagccuuag

SEQ ID NO: 46672 - RNA, 20 nt, Artificial Sequence
  LRRK2 RNA guide
cacagcuugcuaaggcuucu

SEQ ID NO: 46673 - RNA, 20 nt, Artificial Sequence
  LRRK2 RNA guide
cagcaugcagugccacagcu

SEQ ID NO: 46674 - RNA, 20 nt, Artificial Sequence
  LRRK2 RNA guide
cagcuugcuaaggcuucucc

SEQ ID NO: 46675 - RNA, 20 nt, Artificial Sequence
  LRRK2 RNA guide
caggagaagccuuagcaagc

SEQ ID NO: 46676 - RNA, 20 nt, Artificial Sequence
  LRRK2 RNA guide
cagugccacagcuugcuaag

SEQ ID NO: 46677 - RNA, 20 nt, Artificial Sequence
  LRRK2 RNA guide
caugcagugccacagcuugc

SEQ ID NO: 46678 - RNA, 20 nt, Artificial Sequence
  LRRK2 RNA guide
ccacagcuugcuaaggcuuc

SEQ ID NO: 46679 - RNA, 20 nt, Artificial Sequence
  LRRK2 RNA guide
ccagcaugcagugccacagc

SEQ ID NO: 46680 - RNA, 20 nt, Artificial Sequence
  LRRK2 RNA guide
ccaggagaagccuuagcaag

SEQ ID NO: 46681 - RNA, 20 nt, Artificial Sequence
  LRRK2 RNA guide
ccuuagcaagcuguggcacu

SEQ ID NO: 46682 - RNA, 20 nt, Artificial Sequence
  LRRK2 RNA guide
cuuagcaagcuguggcacug

SEQ ID NO: 46683 - RNA, 20 nt, Artificial Sequence
  LRRK2 RNA guide
gaagccuuagcaagcugugg

SEQ ID NO: 46684 - RNA, 20 nt, Artificial Sequence
  LRRK2 RNA guide
gagaagccuuagcaagcugu

SEQ ID NO: 46685 - RNA, 20 nt, Artificial Sequence
  LRRK2 RNA guide
gcaagcuguggcacugcaug

SEQ ID NO: 46686 - RNA, 20 nt, Artificial Sequence
  LRRK2 RNA guide
gcagugccacagcuugcuaa

SEQ ID NO: 46687 - RNA, 20 nt, Artificial Sequence
  LRRK2 RNA guide
gcaugcagugccacagcuug

SEQ ID NO: 46688 - RNA, 20 nt, Artificial Sequence
  LRRK2 RNA guide
gccacagcuugcuaaggcuu

SEQ ID NO: 46689 - RNA, 20 nt, Artificial Sequence
  LRRK2 RNA guide
gccagcaugcagugccacag

SEQ ID NO: 46690 - RNA, 20 nt, Artificial Sequence
  LRRK2 RNA guide
gccuuagcaagcuguggcac

SEQ ID NO: 46691 - RNA, 20 nt, Artificial Sequence
  LRRK2 RNA guide
gcuguggcacugcaugcugg

SEQ ID NO: 46692 - RNA, 20 nt, Artificial Sequence
  LRRK2 RNA guide
ggagaagccuuagcaagcug

SEQ ID NO: 46693 - RNA, 20 nt, Artificial Sequence
  LRRK2 RNA guide
ggccagcaugcagugccaca

SEQ ID NO: 46694 - RNA, 20 nt, Artificial Sequence
  LRRK2 RNA guide
gggccagcaugcagugccac

SEQ ID NO: 46695 - RNA, 20 nt, Artificial Sequence
  LRRK2 RNA guide
guagggccagcaugcagugc

SEQ ID NO: 46696 - RNA, 20 nt, Artificial Sequence
  LRRK2 RNA guide
gugccacagcuugcuaaggc

SEQ ID NO: 46697 - RNA, 20 nt, Artificial Sequence
  LRRK2 RNA guide
uagcaagcuguggcacugca

SEQ ID NO: 46698 - RNA, 20 nt, Artificial Sequence
  LRRK2 RNA guide
uagggccagcaugcagugcc

SEQ ID NO: 46699 - RNA, 20 nt, Artificial Sequence
  LRRK2 RNA guide
uccaggagaagccuuagcaa

SEQ ID NO: 46700 - RNA, 20 nt, Artificial Sequence
  LRRK2 RNA guide
ugcagugccacagcuugcua

SEQ ID NO: 46701 - RNA, 20 nt, Artificial Sequence
  LRRK2 RNA guide
ugccacagcuugcuaaggcu

SEQ ID NO: 46702 - RNA, 20 nt, Artificial Sequence
  LRRK2 RNA guide
uuagcaagcuguggcacugc

SEQ ID NO: 46703 - RNA, 21 nt, Artificial Sequence
  LRRK2 RNA guide
aagccuuagcaagcuguggca

SEQ ID NO: 46704 - RNA, 21 nt, Artificial Sequence
  LRRK2 RNA guide
aagcuguggcacugcaugcug

SEQ ID NO: 46705 - RNA, 21 nt, Artificial Sequence
  LRRK2 RNA guide
aauccaggagaagccuuagca

SEQ ID NO: 46706 - RNA, 21 nt, Artificial Sequence
  LRRK2 RNA guide
acagcuugcuaaggcuucucc

SEQ ID NO: 46707 - RNA, 21 nt, Artificial Sequence
  LRRK2 RNA guide
agaagccuuagcaagcugugg

SEQ ID NO: 46708 - RNA, 21 nt, Artificial Sequence
  LRRK2 RNA guide
agcaagcuguggcacugcaug

SEQ ID NO: 46709 - RNA, 21 nt, Artificial Sequence
  LRRK2 RNA guide
agcaugcagugccacagcuug

SEQ ID NO: 46710 - RNA, 21 nt, Artificial Sequence
  LRRK2 RNA guide
agccuuagcaagcuguggcac

SEQ ID NO: 46711 - RNA, 21 nt, Artificial Sequence
  LRRK2 RNA guide
agcuguggcacugcaugcugg

SEQ ID NO: 46712 - RNA, 21 nt, Artificial Sequence
  LRRK2 RNA guide
agcuugcuaaggcuucuccug

SEQ ID NO: 46713 - RNA, 21 nt, Artificial Sequence
  LRRK2 RNA guide
aggagaagccuuagcaagcug

SEQ ID NO: 46714 - RNA, 21 nt, Artificial Sequence
  LRRK2 RNA guide
agggccagcaugcagugccac

SEQ ID NO: 46715 - RNA, 21 nt, Artificial Sequence
  LRRK2 RNA guide
aguagggccagcaugcagugc

SEQ ID NO: 46716 - RNA, 21 nt, Artificial Sequence
  LRRK2 RNA guide
agugccacagcuugcuaaggc

SEQ ID NO: 46717 - RNA, 21 nt, Artificial Sequence
  LRRK2 RNA guide
auccaggagaagccuuagcaa

SEQ ID NO: 46718 - RNA, 21 nt, Artificial Sequence
  LRRK2 RNA guide
augcagugccacagcuugcua

SEQ ID NO: 46719 - RNA, 21 nt, Artificial Sequence
  LRRK2 RNA guide
caagcuguggcacugcaugcu

SEQ ID NO: 46720 - RNA, 21 nt, Artificial Sequence
  LRRK2 RNA guide
caauccaggagaagccuuagc

SEQ ID NO: 46721 - RNA, 21 nt, Artificial Sequence
  LRRK2 RNA guide
cacagcuugcuaaggcuucuc

SEQ ID NO: 46722 - RNA, 21 nt, Artificial Sequence
  LRRK2 RNA guide
cagcaugcagugccacagcuu

SEQ ID NO: 46723 - RNA, 21 nt, Artificial Sequence
  LRRK2 RNA guide
cagcuugcuaaggcuucuccu

SEQ ID NO: 46724 - RNA, 21 nt, Artificial Sequence
  LRRK2 RNA guide
caggagaagccuuagcaagcu

SEQ ID NO: 46725 - RNA, 21 nt, Artificial Sequence
  LRRK2 RNA guide
cagugccacagcuugcuaagg

SEQ ID NO: 46726 - RNA, 21 nt, Artificial Sequence
  LRRK2 RNA guide
caugcagugccacagcuugcu

SEQ ID NO: 46727 - RNA, 21 nt, Artificial Sequence
  LRRK2 RNA guide
ccacagcuugcuaaggcuucu

SEQ ID NO: 46728 - RNA, 21 nt, Artificial Sequence
  LRRK2 RNA guide
ccagcaugcagugccacagcu

SEQ ID NO: 46729 - RNA, 21 nt, Artificial Sequence
  LRRK2 RNA guide
ccaggagaagccuuagcaagc

SEQ ID NO: 46730 - RNA, 21 nt, Artificial Sequence
  LRRK2 RNA guide
ccuuagcaagcuguggcacug

SEQ ID NO: 46731 - RNA, 21 nt, Artificial Sequence
  LRRK2 RNA guide
cuuagcaagcuguggcacugc

SEQ ID NO: 46732 - RNA, 21 nt, Artificial Sequence
  LRRK2 RNA guide
gaagccuuagcaagcuguggc

SEQ ID NO: 46733 - RNA, 21 nt, Artificial Sequence
  LRRK2 RNA guide
gagaagccuuagcaagcugug

SEQ ID NO: 46734 - RNA, 21 nt, Artificial Sequence
  LRRK2 RNA guide
gcaagcuguggcacugcaugc

SEQ ID NO: 46735 - RNA, 21 nt, Artificial Sequence
  LRRK2 RNA guide
gcaauccaggagaagccuuag

SEQ ID NO: 46736 - RNA, 21 nt, Artificial Sequence
  LRRK2 RNA guide
gcagugccacagcuugcuaag

SEQ ID NO: 46737 - RNA, 21 nt, Artificial Sequence
  LRRK2 RNA guide
gcaugcagugccacagcuugc

SEQ ID NO: 46738 - RNA, 21 nt, Artificial Sequence
  LRRK2 RNA guide
gccacagcuugcuaaggcuuc

SEQ ID NO: 46739 - RNA, 21 nt, Artificial Sequence
  LRRK2 RNA guide
gccagcaugcagugccacagc

SEQ ID NO: 46740 - RNA, 21 nt, Artificial Sequence
  LRRK2 RNA guide
gccuuagcaagcuguggcacu

SEQ ID NO: 46741 - RNA, 21 nt, Artificial Sequence
  LRRK2 RNA guide
gcuguggcacugcaugcuggc

SEQ ID NO: 46742 - RNA, 21 nt, Artificial Sequence
  LRRK2 RNA guide
ggagaagccuuagcaagcugu

SEQ ID NO: 46743 - RNA, 21 nt, Artificial Sequence
  LRRK2 RNA guide
ggccagcaugcagugccacag

SEQ ID NO: 46744 - RNA, 21 nt, Artificial Sequence
  LRRK2 RNA guide
gggccagcaugcagugccaca

SEQ ID NO: 46745 - RNA, 21 nt, Artificial Sequence
  LRRK2 RNA guide
guagggccagcaugcagugcc

SEQ ID NO: 46746 - RNA, 21 nt, Artificial Sequence
  LRRK2 RNA guide
gugccacagcuugcuaaggcu

SEQ ID NO: 46747 - RNA, 21 nt, Artificial Sequence
  LRRK2 RNA guide
uagcaagcuguggcacugcau

SEQ ID NO: 46748 - RNA, 21 nt, Artificial Sequence
  LRRK2 RNA guide
uagggccagcaugcagugcca

SEQ ID NO: 46749 - RNA, 21 nt, Artificial Sequence
  LRRK2 RNA guide
uccaggagaagccuuagcaag

SEQ ID NO: 46750 - RNA, 21 nt, Artificial Sequence
  LRRK2 RNA guide
ugcagugccacagcuugcuaa

SEQ ID NO: 46751 - RNA, 21 nt, Artificial Sequence
  LRRK2 RNA guide
ugccacagcuugcuaaggcuu

SEQ ID NO: 46752 - RNA, 21 nt, Artificial Sequence
  LRRK2 RNA guide
uuagcaagcuguggcacugca

SEQ ID NO: 46753 - RNA, 22 nt, Artificial Sequence
  LRRK2 RNA guide
aagccuuagcaagcuguggcac

SEQ ID NO: 46754 - RNA, 22 nt, Artificial Sequence
  LRRK2 RNA guide
aagcuguggcacugcaugcugg

SEQ ID NO: 46755 - RNA, 22 nt, Artificial Sequence
  LRRK2 RNA guide
aauccaggagaagccuuagcaa

SEQ ID NO: 46756 - RNA, 22 nt, Artificial Sequence
  LRRK2 RNA guide
acagcuugcuaaggcuucuccu

SEQ ID NO: 46757 - RNA, 22 nt, Artificial Sequence
  LRRK2 RNA guide
agaagccuuagcaagcuguggc

SEQ ID NO: 46758 - RNA, 22 nt, Artificial Sequence
  LRRK2 RNA guide
agcaagcuguggcacugcaugc

SEQ ID NO: 46759 - RNA, 22 nt, Artificial Sequence
  LRRK2 RNA guide
agcaauccaggagaagccuuag

SEQ ID NO: 46760 - RNA, 22 nt, Artificial Sequence
  LRRK2 RNA guide
agcaugcagugccacagcuugc

SEQ ID NO: 46761 - RNA, 22 nt, Artificial Sequence
  LRRK2 RNA guide
agccuuagcaagcuguggcacu

SEQ ID NO: 46762 - RNA, 22 nt, Artificial Sequence
  LRRK2 RNA guide
agcuguggcacugcaugcuggc

SEQ ID NO: 46763 - RNA, 22 nt, Artificial Sequence
  LRRK2 RNA guide
agcuugcuaaggcuucuccugg

SEQ ID NO: 46764 - RNA, 22 nt, Artificial Sequence
  LRRK2 RNA guide
aggagaagccuuagcaagcugu

SEQ ID NO: 46765 - RNA, 22 nt, Artificial Sequence
  LRRK2 RNA guide
agggccagcaugcagugccaca

SEQ ID NO: 46766 - RNA, 22 nt, Artificial Sequence
  LRRK2 RNA guide
aguagggccagcaugcagugcc

SEQ ID NO: 46767 - RNA, 22 nt, Artificial Sequence
  LRRK2 RNA guide
agugccacagcuugcuaaggcu

SEQ ID NO: 46768 - RNA, 22 nt, Artificial Sequence
  LRRK2 RNA guide
auccaggagaagccuuagcaag

SEQ ID NO: 46769 - RNA, 22 nt, Artificial Sequence
  LRRK2 RNA guide
augcagugccacagcuugcuaa

SEQ ID NO: 46770 - RNA, 22 nt, Artificial Sequence
  LRRK2 RNA guide
caagcuguggcacugcaugcug

SEQ ID NO: 46771 - RNA, 22 nt, Artificial Sequence
  LRRK2 RNA guide
caauccaggagaagccuuagca

SEQ ID NO: 46772 - RNA, 22 nt, Artificial Sequence
  LRRK2 RNA guide
cacagcuugcuaaggcuucucc

SEQ ID NO: 46773 - RNA, 22 nt, Artificial Sequence
  LRRK2 RNA guide
cagcaugcagugccacagcuug

SEQ ID NO: 46774 - RNA, 22 nt, Artificial Sequence
  LRRK2 RNA guide
cagcuugcuaaggcuucuccug

SEQ ID NO: 46775 - RNA, 22 nt, Artificial Sequence
  LRRK2 RNA guide
caggagaagccuuagcaagcug

SEQ ID NO: 46776 - RNA, 22 nt, Artificial Sequence
  LRRK2 RNA guide
cagugccacagcuugcuaaggc

SEQ ID NO: 46777 - RNA, 22 nt, Artificial Sequence
  LRRK2 RNA guide
caugcagugccacagcuugcua

SEQ ID NO: 46778 - RNA, 22 nt, Artificial Sequence
  LRRK2 RNA guide
ccacagcuugcuaaggcuucuc

SEQ ID NO: 46779 - RNA, 22 nt, Artificial Sequence
  LRRK2 RNA guide
ccagcaugcagugccacagcuu

SEQ ID NO: 46780 - RNA, 22 nt, Artificial Sequence
  LRRK2 RNA guide
ccaggagaagccuuagcaagcu

SEQ ID NO: 46781 - RNA, 22 nt, Artificial Sequence
  LRRK2 RNA guide
ccuuagcaagcuguggcacugc

SEQ ID NO: 46782 - RNA, 22 nt, Artificial Sequence
  LRRK2 RNA guide
cuuagcaagcuguggcacugca

SEQ ID NO: 46783 - RNA, 22 nt, Artificial Sequence
  LRRK2 RNA guide
gaagccuuagcaagcuguggca

SEQ ID NO: 46784 - RNA, 22 nt, Artificial Sequence
  LRRK2 RNA guide
gagaagccuuagcaagcugugg

SEQ ID NO: 46785 - RNA, 22 nt, Artificial Sequence
  LRRK2 RNA guide
gaguagggccagcaugcagugc

SEQ ID NO: 46786 - RNA, 22 nt, Artificial Sequence
  LRRK2 RNA guide
gcaagcuguggcacugcaugcu

SEQ ID NO: 46787 - RNA, 22 nt, Artificial Sequence
  LRRK2 RNA guide
gcaauccaggagaagccuuagc

SEQ ID NO: 46788 - RNA, 22 nt, Artificial Sequence
  LRRK2 RNA guide
gcagugccacagcuugcuaagg

SEQ ID NO: 46789 - RNA, 22 nt, Artificial Sequence
  LRRK2 RNA guide
gcaugcagugccacagcuugcu

SEQ ID NO: 46790 - RNA, 22 nt, Artificial Sequence
  LRRK2 RNA guide
gccacagcuugcuaaggcuucu

SEQ ID NO: 46791 - RNA, 22 nt, Artificial Sequence
  LRRK2 RNA guide
gccagcaugcagugccacagcu

SEQ ID NO: 46792 - RNA, 22 nt, Artificial Sequence
  LRRK2 RNA guide
gccuuagcaagcuguggcacug

SEQ ID NO: 46793 - RNA, 22 nt, Artificial Sequence
  LRRK2 RNA guide
gcuguggcacugcaugcuggcc

SEQ ID NO: 46794 - RNA, 22 nt, Artificial Sequence
  LRRK2 RNA guide
ggagaagccuuagcaagcugug

SEQ ID NO: 46795 - RNA, 22 nt, Artificial Sequence
  LRRK2 RNA guide
ggccagcaugcagugccacagc

SEQ ID NO: 46796 - RNA, 22 nt, Artificial Sequence
  LRRK2 RNA guide
gggccagcaugcagugccacag

SEQ ID NO: 46797 - RNA, 22 nt, Artificial Sequence
  LRRK2 RNA guide
guagggccagcaugcagugcca

SEQ ID NO: 46798 - RNA, 22 nt, Artificial Sequence
  LRRK2 RNA guide
gugccacagcuugcuaaggcuu

SEQ ID NO: 46799 - RNA, 22 nt, Artificial Sequence
  LRRK2 RNA guide
uagcaagcuguggcacugcaug

SEQ ID NO: 46800 - RNA, 22 nt, Artificial Sequence
  LRRK2 RNA guide
uagggccagcaugcagugccac

SEQ ID NO: 46801 - RNA, 22 nt, Artificial Sequence
  LRRK2 RNA guide
uccaggagaagccuuagcaagc

SEQ ID NO: 46802 - RNA, 22 nt, Artificial Sequence
  LRRK2 RNA guide
ugcagugccacagcuugcuaag

SEQ ID NO: 46803 - RNA, 22 nt, Artificial Sequence
  LRRK2 RNA guide
ugccacagcuugcuaaggcuuc

SEQ ID NO: 46804 - RNA, 22 nt, Artificial Sequence
  LRRK2 RNA guide
uuagcaagcuguggcacugcau

SEQ ID NO: 46805 - RNA, 20 nt, Artificial Sequence
  LRRK2 RNA guide
aacuugcuaaggcuucuccu

SEQ ID NO: 46806 - RNA, 20 nt, Artificial Sequence
  LRRK2 RNA guide
aagccuuagcaaguuguggc

SEQ ID NO: 46807 - RNA, 20 nt, Artificial Sequence
  LRRK2 RNA guide
aaguuguggcacugcaugcu

SEQ ID NO: 46808 - RNA, 20 nt, Artificial Sequence
  LRRK2 RNA guide
acaacuugcuaaggcuucuc

SEQ ID NO: 46809 - RNA, 20 nt, Artificial Sequence
  LRRK2 RNA guide
agaagccuuagcaaguugug

SEQ ID NO: 46810 - RNA, 20 nt, Artificial Sequence
  LRRK2 RNA guide
agcaaguuguggcacugcau

SEQ ID NO: 46811 - RNA, 20 nt, Artificial Sequence
  LRRK2 RNA guide
agcaugcagugccacaacuu

SEQ ID NO: 46812 - RNA, 20 nt, Artificial Sequence
  LRRK2 RNA guide
agccuuagcaaguuguggca

SEQ ID NO: 46813 - RNA, 20 nt, Artificial Sequence
  LRRK2 RNA guide
aggagaagccuuagcaaguu

SEQ ID NO: 46814 - RNA, 20 nt, Artificial Sequence
  LRRK2 RNA guide
agugccacaacuugcuaagg

SEQ ID NO: 46815 - RNA, 20 nt, Artificial Sequence
  LRRK2 RNA guide
aguuguggcacugcaugcug

SEQ ID NO: 46816 - RNA, 20 nt, Artificial Sequence
  LRRK2 RNA guide
augcagugccacaacuugcu

SEQ ID NO: 46817 - RNA, 20 nt, Artificial Sequence
  LRRK2 RNA guide
caacuugcuaaggcuucucc

SEQ ID NO: 46818 - RNA, 20 nt, Artificial Sequence
  LRRK2 RNA guide
caaguuguggcacugcaugc

SEQ ID NO: 46819 - RNA, 20 nt, Artificial Sequence
  LRRK2 RNA guide
cacaacuugcuaaggcuucu

SEQ ID NO: 46820 - RNA, 20 nt, Artificial Sequence
  LRRK2 RNA guide
cagcaugcagugccacaacu

SEQ ID NO: 46821 - RNA, 20 nt, Artificial Sequence
  LRRK2 RNA guide
caggagaagccuuagcaagu

SEQ ID NO: 46822 - RNA, 20 nt, Artificial Sequence
  LRRK2 RNA guide
cagugccacaacuugcuaag

SEQ ID NO: 46823 - RNA, 20 nt, Artificial Sequence
  LRRK2 RNA guide
caugcagugccacaacuugc

SEQ ID NO: 46824 - RNA, 20 nt, Artificial Sequence
  LRRK2 RNA guide
ccacaacuugcuaaggcuuc

SEQ ID NO: 46825 - RNA, 20 nt, Artificial Sequence
  LRRK2 RNA guide
ccagcaugcagugccacaac

SEQ ID NO: 46826 - RNA, 20 nt, Artificial Sequence
  LRRK2 RNA guide
ccuuagcaaguuguggcacu

SEQ ID NO: 46827 - RNA, 20 nt, Artificial Sequence
  LRRK2 RNA guide
cuuagcaaguuguggcacug

SEQ ID NO: 46828 - RNA, 20 nt, Artificial Sequence
  LRRK2 RNA guide
gaagccuuagcaaguugugg

SEQ ID NO: 46829 - RNA, 20 nt, Artificial Sequence
  LRRK2 RNA guide
gagaagccuuagcaaguugu

SEQ ID NO: 46830 - RNA, 20 nt, Artificial Sequence
  LRRK2 RNA guide
gcaaguuguggcacugcaug

SEQ ID NO: 46831 - RNA, 20 nt, Artificial Sequence
  LRRK2 RNA guide
gcagugccacaacuugcuaa

SEQ ID NO: 46832 - RNA, 20 nt, Artificial Sequence
  LRRK2 RNA guide
gcaugcagugccacaacuug

SEQ ID NO: 46833 - RNA, 20 nt, Artificial Sequence
  LRRK2 RNA guide
gccacaacuugcuaaggcuu

SEQ ID NO: 46834 - RNA, 20 nt, Artificial Sequence
  LRRK2 RNA guide
gccagcaugcagugccacaa

SEQ ID NO: 46835 - RNA, 20 nt, Artificial Sequence
  LRRK2 RNA guide
gccuuagcaaguuguggcac

SEQ ID NO: 46836 - RNA, 20 nt, Artificial Sequence
  LRRK2 RNA guide
ggagaagccuuagcaaguug

SEQ ID NO: 46837 - RNA, 20 nt, Artificial Sequence
  LRRK2 RNA guide
gugccacaacuugcuaaggc

SEQ ID NO: 46838 - RNA, 20 nt, Artificial Sequence
  LRRK2 RNA guide
guuguggcacugcaugcugg

SEQ ID NO: 46839 - RNA, 20 nt, Artificial Sequence
  LRRK2 RNA guide
uagcaaguuguggcacugca

SEQ ID NO: 46840 - RNA, 20 nt, Artificial Sequence
  LRRK2 RNA guide
ugcagugccacaacuugcua

SEQ ID NO: 46841 - RNA, 20 nt, Artificial Sequence
  LRRK2 RNA guide
ugccacaacuugcuaaggcu

SEQ ID NO: 46842 - RNA, 20 nt, Artificial Sequence
  LRRK2 RNA guide
uuagcaaguuguggcacugc

SEQ ID NO: 46843 - RNA, 21 nt, Artificial Sequence
  LRRK2 RNA guide
aacuugcuaaggcuucuccug

SEQ ID NO: 46844 - RNA, 21 nt, Artificial Sequence
  LRRK2 RNA guide
aagccuuagcaaguuguggca

SEQ ID NO: 46845 - RNA, 21 nt, Artificial Sequence
  LRRK2 RNA guide
aaguuguggcacugcaugcug

SEQ ID NO: 46846 - RNA, 21 nt, Artificial Sequence
  LRRK2 RNA guide
acaacuugcuaaggcuucucc

SEQ ID NO: 46847 - RNA, 21 nt, Artificial Sequence
  LRRK2 RNA guide
agaagccuuagcaaguugugg

SEQ ID NO: 46848 - RNA, 21 nt, Artificial Sequence
  LRRK2 RNA guide
agcaaguuguggcacugcaug

SEQ ID NO: 46849 - RNA, 21 nt, Artificial Sequence
  LRRK2 RNA guide
agcaugcagugccacaacuug

SEQ ID NO: 46850 - RNA, 21 nt, Artificial Sequence
  LRRK2 RNA guide
agccuuagcaaguuguggcac

SEQ ID NO: 46851 - RNA, 21 nt, Artificial Sequence
  LRRK2 RNA guide
aggagaagccuuagcaaguug

SEQ ID NO: 46852 - RNA, 21 nt, Artificial Sequence
  LRRK2 RNA guide
agugccacaacuugcuaaggc

SEQ ID NO: 46853 - RNA, 21 nt, Artificial Sequence
  LRRK2 RNA guide
aguuguggcacugcaugcugg

SEQ ID NO: 46854 - RNA, 21 nt, Artificial Sequence
  LRRK2 RNA guide
augcagugccacaacuugcua

SEQ ID NO: 46855 - RNA, 21 nt, Artificial Sequence
  LRRK2 RNA guide
caacuugcuaaggcuucuccu

SEQ ID NO: 46856 - RNA, 21 nt, Artificial Sequence
  LRRK2 RNA guide
caaguuguggcacugcaugcu

SEQ ID NO: 46857 - RNA, 21 nt, Artificial Sequence
  LRRK2 RNA guide
cacaacuugcuaaggcuucuc

SEQ ID NO: 46858 - RNA, 21 nt, Artificial Sequence
  LRRK2 RNA guide
cagcaugcagugccacaacuu

SEQ ID NO: 46859 - RNA, 21 nt, Artificial Sequence
  LRRK2 RNA guide
caggagaagccuuagcaaguu

SEQ ID NO: 46860 - RNA, 21 nt, Artificial Sequence
  LRRK2 RNA guide
cagugccacaacuugcuaagg

SEQ ID NO: 46861 - RNA, 21 nt, Artificial Sequence
  LRRK2 RNA guide
caugcagugccacaacuugcu

SEQ ID NO: 46862 - RNA, 21 nt, Artificial Sequence
  LRRK2 RNA guide
ccacaacuugcuaaggcuucu

SEQ ID NO: 46863 - RNA, 21 nt, Artificial Sequence
  LRRK2 RNA guide
ccagcaugcagugccacaacu

SEQ ID NO: 46864 - RNA, 21 nt, Artificial Sequence
  LRRK2 RNA guide
ccaggagaagccuuagcaagu

SEQ ID NO: 46865 - RNA, 21 nt, Artificial Sequence
  LRRK2 RNA guide
ccuuagcaaguuguggcacug

SEQ ID NO: 46866 - RNA, 21 nt, Artificial Sequence
  LRRK2 RNA guide
cuuagcaaguuguggcacugc

SEQ ID NO: 46867 - RNA, 21 nt, Artificial Sequence
  LRRK2 RNA guide
gaagccuuagcaaguuguggc

SEQ ID NO: 46868 - RNA, 21 nt, Artificial Sequence
  LRRK2 RNA guide
gagaagccuuagcaaguugug

SEQ ID NO: 46869 - RNA, 21 nt, Artificial Sequence
  LRRK2 RNA guide
gcaaguuguggcacugcaugc

SEQ ID NO: 46870 - RNA, 21 nt, Artificial Sequence
  LRRK2 RNA guide
gcagugccacaacuugcuaag

SEQ ID NO: 46871 - RNA, 21 nt, Artificial Sequence
  LRRK2 RNA guide
gcaugcagugccacaacuugc

SEQ ID NO: 46872 - RNA, 21 nt, Artificial Sequence
  LRRK2 RNA guide
gccacaacuugcuaaggcuuc

SEQ ID NO: 46873 - RNA, 21 nt, Artificial Sequence
  LRRK2 RNA guide
gccagcaugcagugccacaac

SEQ ID NO: 46874 - RNA, 21 nt, Artificial Sequence
  LRRK2 RNA guide
gccuuagcaaguuguggcacu

SEQ ID NO: 46875 - RNA, 21 nt, Artificial Sequence
  LRRK2 RNA guide
ggagaagccuuagcaaguugu

SEQ ID NO: 46876 - RNA, 21 nt, Artificial Sequence
  LRRK2 RNA guide
ggccagcaugcagugccacaa

SEQ ID NO: 46877 - RNA, 21 nt, Artificial Sequence
  LRRK2 RNA guide
gugccacaacuugcuaaggcu

SEQ ID NO: 46878 - RNA, 21 nt, Artificial Sequence
  LRRK2 RNA guide
guuguggcacugcaugcuggc

SEQ ID NO: 46879 - RNA, 21 nt, Artificial Sequence
  LRRK2 RNA guide
uagcaaguuguggcacugcau

SEQ ID NO: 46880 - RNA, 21 nt, Artificial Sequence
  LRRK2 RNA guide
ugcagugccacaacuugcuaa

SEQ ID NO: 46881 - RNA, 21 nt, Artificial Sequence
  LRRK2 RNA guide
ugccacaacuugcuaaggcuu

SEQ ID NO: 46882 - RNA, 21 nt, Artificial Sequence
  LRRK2 RNA guide
uuagcaaguuguggcacugca

SEQ ID NO: 46883 - RNA, 22 nt, Artificial Sequence
  LRRK2 RNA guide
aacuugcuaaggcuucuccugg

SEQ ID NO: 46884 - RNA, 22 nt, Artificial Sequence
  LRRK2 RNA guide
aagccuuagcaaguuguggcac

SEQ ID NO: 46885 - RNA, 22 nt, Artificial Sequence
  LRRK2 RNA guide
aaguuguggcacugcaugcugg

SEQ ID NO: 46886 - RNA, 22 nt, Artificial Sequence
  LRRK2 RNA guide
acaacuugcuaaggcuucuccu

SEQ ID NO: 46887 - RNA, 22 nt, Artificial Sequence
  LRRK2 RNA guide
agaagccuuagcaaguuguggc

SEQ ID NO: 46888 - RNA, 22 nt, Artificial Sequence
  LRRK2 RNA guide
agcaaguuguggcacugcaugc

SEQ ID NO: 46889 - RNA, 22 nt, Artificial Sequence
  LRRK2 RNA guide
agcaugcagugccacaacuugc

SEQ ID NO: 46890 - RNA, 22 nt, Artificial Sequence
  LRRK2 RNA guide
agccuuagcaaguuguggcacu

SEQ ID NO: 46891 - RNA, 22 nt, Artificial Sequence
  LRRK2 RNA guide
aggagaagccuuagcaaguugu

SEQ ID NO: 46892 - RNA, 22 nt, Artificial Sequence
  LRRK2 RNA guide
agugccacaacuugcuaaggcu

SEQ ID NO: 46893 - RNA, 22 nt, Artificial Sequence
  LRRK2 RNA guide
aguuguggcacugcaugcuggc

SEQ ID NO: 46894 - RNA, 22 nt, Artificial Sequence
  LRRK2 RNA guide
augcagugccacaacuugcuaa

SEQ ID NO: 46895 - RNA, 22 nt, Artificial Sequence
  LRRK2 RNA guide
caacuugcuaaggcuucuccug

SEQ ID NO: 46896 - RNA, 22 nt, Artificial Sequence
  LRRK2 RNA guide
caaguuguggcacugcaugcug

SEQ ID NO: 46897 - RNA, 22 nt, Artificial Sequence
  LRRK2 RNA guide
cacaacuugcuaaggcuucucc

SEQ ID NO: 46898 - RNA, 22 nt, Artificial Sequence
  LRRK2 RNA guide
cagcaugcagugccacaacuug

SEQ ID NO: 46899 - RNA, 22 nt, Artificial Sequence
  LRRK2 RNA guide
caggagaagccuuagcaaguug

SEQ ID NO: 46900 - RNA, 22 nt, Artificial Sequence
  LRRK2 RNA guide
cagugccacaacuugcuaaggc

SEQ ID NO: 46901 - RNA, 22 nt, Artificial Sequence
  LRRK2 RNA guide
caugcagugccacaacuugcua

SEQ ID NO: 46902 - RNA, 22 nt, Artificial Sequence
  LRRK2 RNA guide
ccacaacuugcuaaggcuucuc

SEQ ID NO: 46903 - RNA, 22 nt, Artificial Sequence
  LRRK2 RNA guide
ccagcaugcagugccacaacuu

SEQ ID NO: 46904 - RNA, 22 nt, Artificial Sequence
  LRRK2 RNA guide
ccaggagaagccuuagcaaguu

SEQ ID NO: 46905 - RNA, 22 nt, Artificial Sequence
  LRRK2 RNA guide
ccuuagcaaguuguggcacugc

SEQ ID NO: 46906 - RNA, 22 nt, Artificial Sequence
  LRRK2 RNA guide
cuuagcaaguuguggcacugca

SEQ ID NO: 46907 - RNA, 22 nt, Artificial Sequence
  LRRK2 RNA guide
gaagccuuagcaaguuguggca

SEQ ID NO: 46908 - RNA, 22 nt, Artificial Sequence
  LRRK2 RNA guide
gagaagccuuagcaaguugugg

SEQ ID NO: 46909 - RNA, 22 nt, Artificial Sequence
  LRRK2 RNA guide
gcaaguuguggcacugcaugcu

SEQ ID NO: 46910 - RNA, 22 nt, Artificial Sequence
  LRRK2 RNA guide
gcagugccacaacuugcuaagg

SEQ ID NO: 46911 - RNA, 22 nt, Artificial Sequence
  LRRK2 RNA guide
gcaugcagugccacaacuugcu

SEQ ID NO: 46912 - RNA, 22 nt, Artificial Sequence
  LRRK2 RNA guide
gccacaacuugcuaaggcuucu

SEQ ID NO: 46913 - RNA, 22 nt, Artificial Sequence
  LRRK2 RNA guide
gccagcaugcagugccacaacu

SEQ ID NO: 46914 - RNA, 22 nt, Artificial Sequence
  LRRK2 RNA guide
gccuuagcaaguuguggcacug

SEQ ID NO: 46915 - RNA, 22 nt, Artificial Sequence
  LRRK2 RNA guide
ggagaagccuuagcaaguugug

SEQ ID NO: 46916 - RNA, 22 nt, Artificial Sequence
  LRRK2 RNA guide
ggccagcaugcagugccacaac

SEQ ID NO: 46917 - RNA, 22 nt, Artificial Sequence
  LRRK2 RNA guide
gggccagcaugcagugccacaa

SEQ ID NO: 46918 - RNA, 22 nt, Artificial Sequence
  LRRK2 RNA guide
gugccacaacuugcuaaggcuu

SEQ ID NO: 46919 - RNA, 22 nt, Artificial Sequence
  LRRK2 RNA guide
guuguggcacugcaugcuggcc

SEQ ID NO: 46920 - RNA, 22 nt, Artificial Sequence
  LRRK2 RNA guide
uagcaaguuguggcacugcaug

SEQ ID NO: 46921 - RNA, 22 nt, Artificial Sequence
  LRRK2 RNA guide
uccaggagaagccuuagcaagu

SEQ ID NO: 46922 - RNA, 22 nt, Artificial Sequence
  LRRK2 RNA guide
ugcagugccacaacuugcuaag

SEQ ID NO: 46923 - RNA, 22 nt, Artificial Sequence
  LRRK2 RNA guide
ugccacaacuugcuaaggcuuc

SEQ ID NO: 46924 - RNA, 22 nt, Artificial Sequence
  LRRK2 RNA guide
uuagcaaguuguggcacugcau

SEQ ID NO: 46925 - RNA, 20 nt, Artificial Sequence
  LRRK2 RNA guide
aaaaacuagaacaacucagc

SEQ ID NO: 46926 - RNA, 20 nt, Artificial Sequence
  LRRK2 RNA guide
aaaacuagaacaacucagca

SEQ ID NO: 46927 - RNA, 20 nt, Artificial Sequence
  LRRK2 RNA guide
aaacuagaacaacucagcaa

SEQ ID NO: 46928 - RNA, 20 nt, Artificial Sequence
  LRRK2 RNA guide
aacaacucagcaauccagga

SEQ ID NO: 46929 - RNA, 20 nt, Artificial Sequence
  LRRK2 RNA guide
aacuagaacaacucagcaau

SEQ ID NO: 46930 - RNA, 20 nt, Artificial Sequence
  LRRK2 RNA guide
aacucagcaauccaggagaa

SEQ ID NO: 46931 - RNA, 20 nt, Artificial Sequence
  LRRK2 RNA guide
aaggcuucuccuggauugcu

SEQ ID NO: 46932 - RNA, 20 nt, Artificial Sequence
  LRRK2 RNA guide
acaaaaacuagaacaacuca

SEQ ID NO: 46933 - RNA, 20 nt, Artificial Sequence
  LRRK2 RNA guide
acaacucagcaauccaggag

SEQ ID NO: 46934 - RNA, 20 nt, Artificial Sequence
  LRRK2 RNA guide
acuagaacaacucagcaauc

SEQ ID NO: 46935 - RNA, 20 nt, Artificial Sequence
  LRRK2 RNA guide
acucagcaauccaggagaag

SEQ ID NO: 46936 - RNA, 20 nt, Artificial Sequence
  LRRK2 RNA guide
agaacaacucagcaauccag

SEQ ID NO: 46937 - RNA, 20 nt, Artificial Sequence
  LRRK2 RNA guide
agcaauccaggagaagccuu

SEQ ID NO: 46938 - RNA, 20 nt, Artificial Sequence
  LRRK2 RNA guide
aggcuucuccuggauugcug

SEQ ID NO: 46939 - RNA, 20 nt, Artificial Sequence
  LRRK2 RNA guide
caaaaacuagaacaacucag

SEQ ID NO: 46940 - RNA, 20 nt, Artificial Sequence
  LRRK2 RNA guide
caacucagcaauccaggaga

SEQ ID NO: 46941 - RNA, 20 nt, Artificial Sequence
  LRRK2 RNA guide
cagcaauccaggagaagccu

SEQ ID NO: 46942 - RNA, 20 nt, Artificial Sequence
  LRRK2 RNA guide
ccuggauugcugaguuguuc

SEQ ID NO: 46943 - RNA, 20 nt, Artificial Sequence
  LRRK2 RNA guide
cuaaggcuucuccuggauug

SEQ ID NO: 46944 - RNA, 20 nt, Artificial Sequence
  LRRK2 RNA guide
cuagaacaacucagcaaucc

SEQ ID NO: 46945 - RNA, 20 nt, Artificial Sequence
  LRRK2 RNA guide
cucagcaauccaggagaagc

SEQ ID NO: 46946 - RNA, 20 nt, Artificial Sequence
  LRRK2 RNA guide
cuccuggauugcugaguugu

SEQ ID NO: 46947 - RNA, 20 nt, Artificial Sequence
  LRRK2 RNA guide
cuggauugcugaguuguucu

SEQ ID NO: 46948 - RNA, 20 nt, Artificial Sequence
  LRRK2 RNA guide
cuucuccuggauugcugagu

SEQ ID NO: 46949 - RNA, 20 nt, Artificial Sequence
  LRRK2 RNA guide
cuugcuaaggcuucuccugg

SEQ ID NO: 46950 - RNA, 20 nt, Artificial Sequence
  LRRK2 RNA guide
gaacaacucagcaauccagg

SEQ ID NO: 46951 - RNA, 20 nt, Artificial Sequence
  LRRK2 RNA guide
gauugcugaguuguucuagu

SEQ ID NO: 46952 - RNA, 20 nt, Artificial Sequence
  LRRK2 RNA guide
gcaauccaggagaagccuua

SEQ ID NO: 46953 - RNA, 20 nt, Artificial Sequence
  LRRK2 RNA guide
gcuaaggcuucuccuggauu

SEQ ID NO: 46954 - RNA, 20 nt, Artificial Sequence
  LRRK2 RNA guide
gcuucuccuggauugcugag

SEQ ID NO: 46955 - RNA, 20 nt, Artificial Sequence
  LRRK2 RNA guide
gcuugcuaaggcuucuccug

SEQ ID NO: 46956 - RNA, 20 nt, Artificial Sequence
  LRRK2 RNA guide
ggauugcugaguuguucuag

SEQ ID NO: 46957 - RNA, 20 nt, Artificial Sequence
  LRRK2 RNA guide
ggcuucuccuggauugcuga

SEQ ID NO: 46958 - RNA, 20 nt, Artificial Sequence
  LRRK2 RNA guide
uaaggcuucuccuggauugc

SEQ ID NO: 46959 - RNA, 20 nt, Artificial Sequence
  LRRK2 RNA guide
uagaacaacucagcaaucca

SEQ ID NO: 46960 - RNA, 20 nt, Artificial Sequence
  LRRK2 RNA guide
ucagcaauccaggagaagcc

SEQ ID NO: 46961 - RNA, 20 nt, Artificial Sequence
  LRRK2 RNA guide
uccuggauugcugaguuguu

SEQ ID NO: 46962 - RNA, 20 nt, Artificial Sequence
  LRRK2 RNA guide
ucuccuggauugcugaguug

SEQ ID NO: 46963 - RNA, 20 nt, Artificial Sequence
  LRRK2 RNA guide
ugcuaaggcuucuccuggau

SEQ ID NO: 46964 - RNA, 20 nt, Artificial Sequence
  LRRK2 RNA guide
uggauugcugaguuguucua

SEQ ID NO: 46965 - RNA, 20 nt, Artificial Sequence
  LRRK2 RNA guide
uucuccuggauugcugaguu

SEQ ID NO: 46966 - RNA, 20 nt, Artificial Sequence
  LRRK2 RNA guide
uugcuaaggcuucuccugga

SEQ ID NO: 46967 - RNA, 21 nt, Artificial Sequence
  LRRK2 RNA guide
aaaaacuagaacaacucagca

SEQ ID NO: 46968 - RNA, 21 nt, Artificial Sequence
  LRRK2 RNA guide
aaaacuagaacaacucagcaa

SEQ ID NO: 46969 - RNA, 21 nt, Artificial Sequence
  LRRK2 RNA guide
aaacuagaacaacucagcaau

SEQ ID NO: 46970 - RNA, 21 nt, Artificial Sequence
  LRRK2 RNA guide
aacaacucagcaauccaggag

SEQ ID NO: 46971 - RNA, 21 nt, Artificial Sequence
  LRRK2 RNA guide
aacuagaacaacucagcaauc

SEQ ID NO: 46972 - RNA, 21 nt, Artificial Sequence
  LRRK2 RNA guide
aacucagcaauccaggagaag

SEQ ID NO: 46973 - RNA, 21 nt, Artificial Sequence
  LRRK2 RNA guide
aaggcuucuccuggauugcug

SEQ ID NO: 46974 - RNA, 21 nt, Artificial Sequence
  LRRK2 RNA guide
acaaaaacuagaacaacucag

SEQ ID NO: 46975 - RNA, 21 nt, Artificial Sequence
  LRRK2 RNA guide
acaacucagcaauccaggaga

SEQ ID NO: 46976 - RNA, 21 nt, Artificial Sequence
  LRRK2 RNA guide
acuagaacaacucagcaaucc

SEQ ID NO: 46977 - RNA, 21 nt, Artificial Sequence
  LRRK2 RNA guide
acucagcaauccaggagaagc

SEQ ID NO: 46978 - RNA, 21 nt, Artificial Sequence
  LRRK2 RNA guide
agaacaacucagcaauccagg

SEQ ID NO: 46979 - RNA, 21 nt, Artificial Sequence
  LRRK2 RNA guide
agcaauccaggagaagccuua

SEQ ID NO: 46980 - RNA, 21 nt, Artificial Sequence
  LRRK2 RNA guide
aggcuucuccuggauugcuga

SEQ ID NO: 46981 - RNA, 21 nt, Artificial Sequence
  LRRK2 RNA guide
caaaaacuagaacaacucagc

SEQ ID NO: 46982 - RNA, 21 nt, Artificial Sequence
  LRRK2 RNA guide
caacucagcaauccaggagaa

SEQ ID NO: 46983 - RNA, 21 nt, Artificial Sequence
  LRRK2 RNA guide
cacaaaaacuagaacaacuca

SEQ ID NO: 46984 - RNA, 21 nt, Artificial Sequence
  LRRK2 RNA guide
cagcaauccaggagaagccuu

SEQ ID NO: 46985 - RNA, 21 nt, Artificial Sequence
  LRRK2 RNA guide
ccuggauugcugaguuguucu

SEQ ID NO: 46986 - RNA, 21 nt, Artificial Sequence
  LRRK2 RNA guide
cuaaggcuucuccuggauugc

SEQ ID NO: 46987 - RNA, 21 nt, Artificial Sequence
  LRRK2 RNA guide
cuagaacaacucagcaaucca

SEQ ID NO: 46988 - RNA, 21 nt, Artificial Sequence
  LRRK2 RNA guide
cucagcaauccaggagaagcc

SEQ ID NO: 46989 - RNA, 21 nt, Artificial Sequence
  LRRK2 RNA guide
cuccuggauugcugaguuguu

SEQ ID NO: 46990 - RNA, 21 nt, Artificial Sequence
  LRRK2 RNA guide
cuggauugcugaguuguucua

SEQ ID NO: 46991 - RNA, 21 nt, Artificial Sequence
  LRRK2 RNA guide
cuucuccuggauugcugaguu

SEQ ID NO: 46992 - RNA, 21 nt, Artificial Sequence
  LRRK2 RNA guide
cuugcuaaggcuucuccugga

SEQ ID NO: 46993 - RNA, 21 nt, Artificial Sequence
  LRRK2 RNA guide
gaacaacucagcaauccagga

SEQ ID NO: 46994 - RNA, 21 nt, Artificial Sequence
  LRRK2 RNA guide
gauugcugaguuguucuaguu

SEQ ID NO: 46995 - RNA, 21 nt, Artificial Sequence
  LRRK2 RNA guide
gcuaaggcuucuccuggauug

SEQ ID NO: 46996 - RNA, 21 nt, Artificial Sequence
  LRRK2 RNA guide
gcuucuccuggauugcugagu

SEQ ID NO: 46997 - RNA, 21 nt, Artificial Sequence
  LRRK2 RNA guide
gcuugcuaaggcuucuccugg

SEQ ID NO: 46998 - RNA, 21 nt, Artificial Sequence
  LRRK2 RNA guide
ggauugcugaguuguucuagu

SEQ ID NO: 46999 - RNA, 21 nt, Artificial Sequence
  LRRK2 RNA guide
ggcuucuccuggauugcugag

SEQ ID NO: 47000 - RNA, 21 nt, Artificial Sequence
  LRRK2 RNA guide
uaaggcuucuccuggauugcu

SEQ ID NO: 47001 - RNA, 21 nt, Artificial Sequence
  LRRK2 RNA guide
uagaacaacucagcaauccag

SEQ ID NO: 47002 - RNA, 21 nt, Artificial Sequence
  LRRK2 RNA guide
ucagcaauccaggagaagccu

SEQ ID NO: 47003 - RNA, 21 nt, Artificial Sequence
  LRRK2 RNA guide
uccuggauugcugaguuguuc

SEQ ID NO: 47004 - RNA, 21 nt, Artificial Sequence
  LRRK2 RNA guide
ucuccuggauugcugaguugu

SEQ ID NO: 47005 - RNA, 21 nt, Artificial Sequence
  LRRK2 RNA guide
ugcuaaggcuucuccuggauu

SEQ ID NO: 47006 - RNA, 21 nt, Artificial Sequence
  LRRK2 RNA guide
uggauugcugaguuguucuag

SEQ ID NO: 47007 - RNA, 21 nt, Artificial Sequence
  LRRK2 RNA guide
uucuccuggauugcugaguug

SEQ ID NO: 47008 - RNA, 21 nt, Artificial Sequence
  LRRK2 RNA guide
uugcuaaggcuucuccuggau

SEQ ID NO: 47009 - RNA, 22 nt, Artificial Sequence
  LRRK2 RNA guide
aaaaacuagaacaacucagcaa

SEQ ID NO: 47010 - RNA, 22 nt, Artificial Sequence
  LRRK2 RNA guide
aaaacuagaacaacucagcaau

SEQ ID NO: 47011 - RNA, 22 nt, Artificial Sequence
  LRRK2 RNA guide
aaacuagaacaacucagcaauc

SEQ ID NO: 47012 - RNA, 22 nt, Artificial Sequence
  LRRK2 RNA guide
aacaacucagcaauccaggaga

SEQ ID NO: 47013 - RNA, 22 nt, Artificial Sequence
  LRRK2 RNA guide
aacuagaacaacucagcaaucc

SEQ ID NO: 47014 - RNA, 22 nt, Artificial Sequence
  LRRK2 RNA guide
aacucagcaauccaggagaagc

SEQ ID NO: 47015 - RNA, 22 nt, Artificial Sequence
  LRRK2 RNA guide
aaggcuucuccuggauugcuga

SEQ ID NO: 47016 - RNA, 22 nt, Artificial Sequence
  LRRK2 RNA guide
acaaaaacuagaacaacucagc

SEQ ID NO: 47017 - RNA, 22 nt, Artificial Sequence
  LRRK2 RNA guide
acaacucagcaauccaggagaa

SEQ ID NO: 47018 - RNA, 22 nt, Artificial Sequence
  LRRK2 RNA guide
acuagaacaacucagcaaucca

SEQ ID NO: 47019 - RNA, 22 nt, Artificial Sequence
  LRRK2 RNA guide
acucagcaauccaggagaagcc

SEQ ID NO: 47020 - RNA, 22 nt, Artificial Sequence
  LRRK2 RNA guide
agaacaacucagcaauccagga

SEQ ID NO: 47021 - RNA, 22 nt, Artificial Sequence
  LRRK2 RNA guide
aggcuucuccuggauugcugag

SEQ ID NO: 47022 - RNA, 22 nt, Artificial Sequence
  LRRK2 RNA guide
caaaaacuagaacaacucagca

SEQ ID NO: 47023 - RNA, 22 nt, Artificial Sequence
  LRRK2 RNA guide
caacucagcaauccaggagaag

SEQ ID NO: 47024 - RNA, 22 nt, Artificial Sequence
  LRRK2 RNA guide
cacaaaaacuagaacaacucag

SEQ ID NO: 47025 - RNA, 22 nt, Artificial Sequence
  LRRK2 RNA guide
cagcaauccaggagaagccuua

SEQ ID NO: 47026 - RNA, 22 nt, Artificial Sequence
  LRRK2 RNA guide
ccacaaaaacuagaacaacuca

SEQ ID NO: 47027 - RNA, 22 nt, Artificial Sequence
  LRRK2 RNA guide
ccuggauugcugaguuguucua

SEQ ID NO: 47028 - RNA, 22 nt, Artificial Sequence
  LRRK2 RNA guide
cuaaggcuucuccuggauugcu

SEQ ID NO: 47029 - RNA, 22 nt, Artificial Sequence
  LRRK2 RNA guide
cuagaacaacucagcaauccag

SEQ ID NO: 47030 - RNA, 22 nt, Artificial Sequence
  LRRK2 RNA guide
cucagcaauccaggagaagccu

SEQ ID NO: 47031 - RNA, 22 nt, Artificial Sequence
  LRRK2 RNA guide
cuccuggauugcugaguuguuc

SEQ ID NO: 47032 - RNA, 22 nt, Artificial Sequence
  LRRK2 RNA guide
cuggauugcugaguuguucuag

SEQ ID NO: 47033 - RNA, 22 nt, Artificial Sequence
  LRRK2 RNA guide
cuucuccuggauugcugaguug

SEQ ID NO: 47034 - RNA, 22 nt, Artificial Sequence
  LRRK2 RNA guide
cuugcuaaggcuucuccuggau

SEQ ID NO: 47035 - RNA, 22 nt, Artificial Sequence
  LRRK2 RNA guide
gaacaacucagcaauccaggag

SEQ ID NO: 47036 - RNA, 22 nt, Artificial Sequence
  LRRK2 RNA guide
gauugcugaguuguucuaguuu

SEQ ID NO: 47037 - RNA, 22 nt, Artificial Sequence
  LRRK2 RNA guide
gcuaaggcuucuccuggauugc

SEQ ID NO: 47038 - RNA, 22 nt, Artificial Sequence
  LRRK2 RNA guide
gcuucuccuggauugcugaguu

SEQ ID NO: 47039 - RNA, 22 nt, Artificial Sequence
  LRRK2 RNA guide
gcuugcuaaggcuucuccugga

SEQ ID NO: 47040 - RNA, 22 nt, Artificial Sequence
  LRRK2 RNA guide
ggauugcugaguuguucuaguu

SEQ ID NO: 47041 - RNA, 22 nt, Artificial Sequence
  LRRK2 RNA guide
ggcuucuccuggauugcugagu

SEQ ID NO: 47042 - RNA, 22 nt, Artificial Sequence
  LRRK2 RNA guide
uaaggcuucuccuggauugcug

SEQ ID NO: 47043 - RNA, 22 nt, Artificial Sequence
  LRRK2 RNA guide
uagaacaacucagcaauccagg

SEQ ID NO: 47044 - RNA, 22 nt, Artificial Sequence
  LRRK2 RNA guide
ucagcaauccaggagaagccuu

SEQ ID NO: 47045 - RNA, 22 nt, Artificial Sequence
  LRRK2 RNA guide
uccuggauugcugaguuguucu

SEQ ID NO: 47046 - RNA, 22 nt, Artificial Sequence
  LRRK2 RNA guide
ucuccuggauugcugaguuguu

SEQ ID NO: 47047 - RNA, 22 nt, Artificial Sequence
  LRRK2 RNA guide
ugcuaaggcuucuccuggauug

SEQ ID NO: 47048 - RNA, 22 nt, Artificial Sequence
  LRRK2 RNA guide
uggauugcugaguuguucuagu

SEQ ID NO: 47049 - RNA, 22 nt, Artificial Sequence
  LRRK2 RNA guide
uucuccuggauugcugaguugu

SEQ ID NO: 47050 - RNA, 22 nt, Artificial Sequence
  LRRK2 RNA guide
uugcuaaggcuucuccuggauu

SEQ ID NO: 47051 - RNA, 20 nt, Artificial Sequence
  LRRK2 RNA guide
aacaacucagcaagccagga

SEQ ID NO: 47052 - RNA, 20 nt, Artificial Sequence
  LRRK2 RNA guide
aacuagaacaacucagcaag

SEQ ID NO: 47053 - RNA, 20 nt, Artificial Sequence
  LRRK2 RNA guide
aacucagcaagccaggagaa

SEQ ID NO: 47054 - RNA, 20 nt, Artificial Sequence
  LRRK2 RNA guide
aagccaggagaagccuuagc

SEQ ID NO: 47055 - RNA, 20 nt, Artificial Sequence
  LRRK2 RNA guide
aaggcuucuccuggcuugcu

SEQ ID NO: 47056 - RNA, 20 nt, Artificial Sequence
  LRRK2 RNA guide
acaacucagcaagccaggag

SEQ ID NO: 47057 - RNA, 20 nt, Artificial Sequence
  LRRK2 RNA guide
acuagaacaacucagcaagc

SEQ ID NO: 47058 - RNA, 20 nt, Artificial Sequence
  LRRK2 RNA guide
acucagcaagccaggagaag

SEQ ID NO: 47059 - RNA, 20 nt, Artificial Sequence
  LRRK2 RNA guide
agaacaacucagcaagccag

SEQ ID NO: 47060 - RNA, 20 nt, Artificial Sequence
  LRRK2 RNA guide
agcaagccaggagaagccuu

SEQ ID NO: 47061 - RNA, 20 nt, Artificial Sequence
  LRRK2 RNA guide
agccaggagaagccuuagca

SEQ ID NO: 47062 - RNA, 20 nt, Artificial Sequence
  LRRK2 RNA guide
aggcuucuccuggcuugcug

SEQ ID NO: 47063 - RNA, 20 nt, Artificial Sequence
  LRRK2 RNA guide
caacucagcaagccaggaga

SEQ ID NO: 47064 - RNA, 20 nt, Artificial Sequence
  LRRK2 RNA guide
caagccaggagaagccuuag

SEQ ID NO: 47065 - RNA, 20 nt, Artificial Sequence
  LRRK2 RNA guide
cagcaagccaggagaagccu

SEQ ID NO: 47066 - RNA, 20 nt, Artificial Sequence
  LRRK2 RNA guide
ccuggcuugcugaguuguuc

SEQ ID NO: 47067 - RNA, 20 nt, Artificial Sequence
  LRRK2 RNA guide
cuaaggcuucuccuggcuug

SEQ ID NO: 47068 - RNA, 20 nt, Artificial Sequence
  LRRK2 RNA guide
cuagaacaacucagcaagcc

SEQ ID NO: 47069 - RNA, 20 nt, Artificial Sequence
  LRRK2 RNA guide
cucagcaagccaggagaagc

SEQ ID NO: 47070 - RNA, 20 nt, Artificial Sequence
  LRRK2 RNA guide
cuccuggcuugcugaguugu

SEQ ID NO: 47071 - RNA, 20 nt, Artificial Sequence
  LRRK2 RNA guide
cuggcuugcugaguuguucu

SEQ ID NO: 47072 - RNA, 20 nt, Artificial Sequence
  LRRK2 RNA guide
cuucuccuggcuugcugagu

SEQ ID NO: 47073 - RNA, 20 nt, Artificial Sequence
  LRRK2 RNA guide
gaacaacucagcaagccagg

SEQ ID NO: 47074 - RNA, 20 nt, Artificial Sequence
  LRRK2 RNA guide
gcaagccaggagaagccuua

SEQ ID NO: 47075 - RNA, 20 nt, Artificial Sequence
  LRRK2 RNA guide
gcuaaggcuucuccuggcuu

SEQ ID NO: 47076 - RNA, 20 nt, Artificial Sequence
  LRRK2 RNA guide
gcuucuccuggcuugcugag

SEQ ID NO: 47077 - RNA, 20 nt, Artificial Sequence
  LRRK2 RNA guide
gcuugcugaguuguucuagu

SEQ ID NO: 47078 - RNA, 20 nt, Artificial Sequence
  LRRK2 RNA guide
ggcuucuccuggcuugcuga

SEQ ID NO: 47079 - RNA, 20 nt, Artificial Sequence
  LRRK2 RNA guide
ggcuugcugaguuguucuag

SEQ ID NO: 47080 - RNA, 20 nt, Artificial Sequence
  LRRK2 RNA guide
uaaggcuucuccuggcuugc

SEQ ID NO: 47081 - RNA, 20 nt, Artificial Sequence
  LRRK2 RNA guide
uagaacaacucagcaagcca

SEQ ID NO: 47082 - RNA, 20 nt, Artificial Sequence
  LRRK2 RNA guide
ucagcaagccaggagaagcc

SEQ ID NO: 47083 - RNA, 20 nt, Artificial Sequence
  LRRK2 RNA guide
uccuggcuugcugaguuguu

SEQ ID NO: 47084 - RNA, 20 nt, Artificial Sequence
  LRRK2 RNA guide
ucuccuggcuugcugaguug

SEQ ID NO: 47085 - RNA, 20 nt, Artificial Sequence
  LRRK2 RNA guide
ugcuaaggcuucuccuggcu

SEQ ID NO: 47086 - RNA, 20 nt, Artificial Sequence
  LRRK2 RNA guide
uggcuugcugaguuguucua

SEQ ID NO: 47087 - RNA, 20 nt, Artificial Sequence
  LRRK2 RNA guide
uucuccuggcuugcugaguu

SEQ ID NO: 47088 - RNA, 20 nt, Artificial Sequence
  LRRK2 RNA guide
uugcuaaggcuucuccuggc

SEQ ID NO: 47089 - RNA, 21 nt, Artificial Sequence
  LRRK2 RNA guide
aaacuagaacaacucagcaag

SEQ ID NO: 47090 - RNA, 21 nt, Artificial Sequence
  LRRK2 RNA guide
aacaacucagcaagccaggag

SEQ ID NO: 47091 - RNA, 21 nt, Artificial Sequence
  LRRK2 RNA guide
aacuagaacaacucagcaagc

SEQ ID NO: 47092 - RNA, 21 nt, Artificial Sequence
  LRRK2 RNA guide
aacucagcaagccaggagaag

SEQ ID NO: 47093 - RNA, 21 nt, Artificial Sequence
  LRRK2 RNA guide
aagccaggagaagccuuagca

SEQ ID NO: 47094 - RNA, 21 nt, Artificial Sequence
  LRRK2 RNA guide
aaggcuucuccuggcuugcug

SEQ ID NO: 47095 - RNA, 21 nt, Artificial Sequence
  LRRK2 RNA guide
acaacucagcaagccaggaga

SEQ ID NO: 47096 - RNA, 21 nt, Artificial Sequence
  LRRK2 RNA guide
acuagaacaacucagcaagcc

SEQ ID NO: 47097 - RNA, 21 nt, Artificial Sequence
  LRRK2 RNA guide
acucagcaagccaggagaagc

SEQ ID NO: 47098 - RNA, 21 nt, Artificial Sequence
  LRRK2 RNA guide
agaacaacucagcaagccagg

SEQ ID NO: 47099 - RNA, 21 nt, Artificial Sequence
  LRRK2 RNA guide
agcaagccaggagaagccuua

SEQ ID NO: 47100 - RNA, 21 nt, Artificial Sequence
  LRRK2 RNA guide
agccaggagaagccuuagcaa

SEQ ID NO: 47101 - RNA, 21 nt, Artificial Sequence
  LRRK2 RNA guide
aggcuucuccuggcuugcuga

SEQ ID NO: 47102 - RNA, 21 nt, Artificial Sequence
  LRRK2 RNA guide
caacucagcaagccaggagaa

SEQ ID NO: 47103 - RNA, 21 nt, Artificial Sequence
  LRRK2 RNA guide
caagccaggagaagccuuagc

SEQ ID NO: 47104 - RNA, 21 nt, Artificial Sequence
  LRRK2 RNA guide
cagcaagccaggagaagccuu

SEQ ID NO: 47105 - RNA, 21 nt, Artificial Sequence
  LRRK2 RNA guide
ccuggcuugcugaguuguucu

SEQ ID NO: 47106 - RNA, 21 nt, Artificial Sequence
  LRRK2 RNA guide
cuaaggcuucuccuggcuugc

SEQ ID NO: 47107 - RNA, 21 nt, Artificial Sequence
  LRRK2 RNA guide
cuagaacaacucagcaagcca

SEQ ID NO: 47108 - RNA, 21 nt, Artificial Sequence
  LRRK2 RNA guide
cucagcaagccaggagaagcc

SEQ ID NO: 47109 - RNA, 21 nt, Artificial Sequence
  LRRK2 RNA guide
cuccuggcuugcugaguuguu

SEQ ID NO: 47110 - RNA, 21 nt, Artificial Sequence
  LRRK2 RNA guide
cuggcuugcugaguuguucua

SEQ ID NO: 47111 - RNA, 21 nt, Artificial Sequence
  LRRK2 RNA guide
cuucuccuggcuugcugaguu

SEQ ID NO: 47112 - RNA, 21 nt, Artificial Sequence
  LRRK2 RNA guide
cuugcuaaggcuucuccuggc

SEQ ID NO: 47113 - RNA, 21 nt, Artificial Sequence
  LRRK2 RNA guide
gaacaacucagcaagccagga

SEQ ID NO: 47114 - RNA, 21 nt, Artificial Sequence
  LRRK2 RNA guide
gcaagccaggagaagccuuag

SEQ ID NO: 47115 - RNA, 21 nt, Artificial Sequence
  LRRK2 RNA guide
gcuaaggcuucuccuggcuug

SEQ ID NO: 47116 - RNA, 21 nt, Artificial Sequence
  LRRK2 RNA guide
gcuucuccuggcuugcugagu

SEQ ID NO: 47117 - RNA, 21 nt, Artificial Sequence
  LRRK2 RNA guide
gcuugcugaguuguucuaguu

SEQ ID NO: 47118 - RNA, 21 nt, Artificial Sequence
  LRRK2 RNA guide
ggcuucuccuggcuugcugag

SEQ ID NO: 47119 - RNA, 21 nt, Artificial Sequence
  LRRK2 RNA guide
ggcuugcugaguuguucuagu

SEQ ID NO: 47120 - RNA, 21 nt, Artificial Sequence
  LRRK2 RNA guide
uaaggcuucuccuggcuugcu

SEQ ID NO: 47121 - RNA, 21 nt, Artificial Sequence
  LRRK2 RNA guide
uagaacaacucagcaagccag

SEQ ID NO: 47122 - RNA, 21 nt, Artificial Sequence
  LRRK2 RNA guide
ucagcaagccaggagaagccu

SEQ ID NO: 47123 - RNA, 21 nt, Artificial Sequence
  LRRK2 RNA guide
uccuggcuugcugaguuguuc

SEQ ID NO: 47124 - RNA, 21 nt, Artificial Sequence
  LRRK2 RNA guide
ucuccuggcuugcugaguugu

SEQ ID NO: 47125 - RNA, 21 nt, Artificial Sequence
  LRRK2 RNA guide
ugcuaaggcuucuccuggcuu

SEQ ID NO: 47126 - RNA, 21 nt, Artificial Sequence
  LRRK2 RNA guide
uggcuugcugaguuguucuag

SEQ ID NO: 47127 - RNA, 21 nt, Artificial Sequence
  LRRK2 RNA guide
uucuccuggcuugcugaguug

SEQ ID NO: 47128 - RNA, 21 nt, Artificial Sequence
  LRRK2 RNA guide
uugcuaaggcuucuccuggcu

SEQ ID NO: 47129 - RNA, 22 nt, Artificial Sequence
  LRRK2 RNA guide
aaaacuagaacaacucagcaag

SEQ ID NO: 47130 - RNA, 22 nt, Artificial Sequence
  LRRK2 RNA guide
aaacuagaacaacucagcaagc

SEQ ID NO: 47131 - RNA, 22 nt, Artificial Sequence
  LRRK2 RNA guide
aacaacucagcaagccaggaga

SEQ ID NO: 47132 - RNA, 22 nt, Artificial Sequence
  LRRK2 RNA guide
aacuagaacaacucagcaagcc

SEQ ID NO: 47133 - RNA, 22 nt, Artificial Sequence
  LRRK2 RNA guide
aacucagcaagccaggagaagc

SEQ ID NO: 47134 - RNA, 22 nt, Artificial Sequence
  LRRK2 RNA guide
aagccaggagaagccuuagcaa

SEQ ID NO: 47135 - RNA, 22 nt, Artificial Sequence
  LRRK2 RNA guide
aaggcuucuccuggcuugcuga

SEQ ID NO: 47136 - RNA, 22 nt, Artificial Sequence
  LRRK2 RNA guide
acaacucagcaagccaggagaa

SEQ ID NO: 47137 - RNA, 22 nt, Artificial Sequence
  LRRK2 RNA guide
acuagaacaacucagcaagcca

SEQ ID NO: 47138 - RNA, 22 nt, Artificial Sequence
  LRRK2 RNA guide
acucagcaagccaggagaagcc

SEQ ID NO: 47139 - RNA, 22 nt, Artificial Sequence
  LRRK2 RNA guide
agaacaacucagcaagccagga

SEQ ID NO: 47140 - RNA, 22 nt, Artificial Sequence
  LRRK2 RNA guide
agcaagccaggagaagccuuag

SEQ ID NO: 47141 - RNA, 22 nt, Artificial Sequence
  LRRK2 RNA guide
agccaggagaagccuuagcaag

SEQ ID NO: 47142 - RNA, 22 nt, Artificial Sequence
  LRRK2 RNA guide
aggcuucuccuggcuugcugag

SEQ ID NO: 47143 - RNA, 22 nt, Artificial Sequence
  LRRK2 RNA guide
caacucagcaagccaggagaag

SEQ ID NO: 47144 - RNA, 22 nt, Artificial Sequence
  LRRK2 RNA guide
caagccaggagaagccuuagca

SEQ ID NO: 47145 - RNA, 22 nt, Artificial Sequence
  LRRK2 RNA guide
cagcaagccaggagaagccuua

SEQ ID NO: 47146 - RNA, 22 nt, Artificial Sequence
  LRRK2 RNA guide
ccuggcuugcugaguuguucua

SEQ ID NO: 47147 - RNA, 22 nt, Artificial Sequence
  LRRK2 RNA guide
cuaaggcuucuccuggcuugcu

SEQ ID NO: 47148 - RNA, 22 nt, Artificial Sequence
  LRRK2 RNA guide
cuagaacaacucagcaagccag

SEQ ID NO: 47149 - RNA, 22 nt, Artificial Sequence
  LRRK2 RNA guide
cucagcaagccaggagaagccu

SEQ ID NO: 47150 - RNA, 22 nt, Artificial Sequence
  LRRK2 RNA guide
cuccuggcuugcugaguuguuc

SEQ ID NO: 47151 - RNA, 22 nt, Artificial Sequence
  LRRK2 RNA guide
cuggcuugcugaguuguucuag

SEQ ID NO: 47152 - RNA, 22 nt, Artificial Sequence
  LRRK2 RNA guide
cuucuccuggcuugcugaguug

SEQ ID NO: 47153 - RNA, 22 nt, Artificial Sequence
  LRRK2 RNA guide
cuugcuaaggcuucuccuggcu

SEQ ID NO: 47154 - RNA, 22 nt, Artificial Sequence
  LRRK2 RNA guide
gaacaacucagcaagccaggag

SEQ ID NO: 47155 - RNA, 22 nt, Artificial Sequence
  LRRK2 RNA guide
gcaagccaggagaagccuuagc

SEQ ID NO: 47156 - RNA, 22 nt, Artificial Sequence
  LRRK2 RNA guide
gcuaaggcuucuccuggcuugc

SEQ ID NO: 47157 - RNA, 22 nt, Artificial Sequence
  LRRK2 RNA guide
gcuucuccuggcuugcugaguu

SEQ ID NO: 47158 - RNA, 22 nt, Artificial Sequence
  LRRK2 RNA guide
gcuugcuaaggcuucuccuggc

SEQ ID NO: 47159 - RNA, 22 nt, Artificial Sequence
  LRRK2 RNA guide
gcuugcugaguuguucuaguuu

SEQ ID NO: 47160 - RNA, 22 nt, Artificial Sequence
  LRRK2 RNA guide
ggcuucuccuggcuugcugagu

SEQ ID NO: 47161 - RNA, 22 nt, Artificial Sequence
  LRRK2 RNA guide
ggcuugcugaguuguucuaguu

SEQ ID NO: 47162 - RNA, 22 nt, Artificial Sequence
  LRRK2 RNA guide
uaaggcuucuccuggcuugcug

SEQ ID NO: 47163 - RNA, 22 nt, Artificial Sequence
  LRRK2 RNA guide
uagaacaacucagcaagccagg

SEQ ID NO: 47164 - RNA, 22 nt, Artificial Sequence
  LRRK2 RNA guide
ucagcaagccaggagaagccuu

SEQ ID NO: 47165 - RNA, 22 nt, Artificial Sequence
  LRRK2 RNA guide
uccuggcuugcugaguuguucu

SEQ ID NO: 47166 - RNA, 22 nt, Artificial Sequence
  LRRK2 RNA guide
ucuccuggcuugcugaguuguu

SEQ ID NO: 47167 - RNA, 22 nt, Artificial Sequence
  LRRK2 RNA guide
ugcuaaggcuucuccuggcuug

SEQ ID NO: 47168 - RNA, 22 nt, Artificial Sequence
  LRRK2 RNA guide
uggcuugcugaguuguucuagu

SEQ ID NO: 47169 - RNA, 22 nt, Artificial Sequence
  LRRK2 RNA guide
uucuccuggcuugcugaguugu

SEQ ID NO: 47170 - RNA, 22 nt, Artificial Sequence
  LRRK2 RNA guide
uugcuaaggcuucuccuggcuu

SEQ ID NO: 47171 - RNA, 20 nt, Artificial Sequence
  LRRK2 RNA guide
aaauuggagauguagagaaa

SEQ ID NO: 47172 - RNA, 20 nt, Artificial Sequence
  LRRK2 RNA guide
aacuucaugugauuuuucuc

SEQ ID NO: 47173 - RNA, 20 nt, Artificial Sequence
  LRRK2 RNA guide
aauuggagauguagagaaaa

SEQ ID NO: 47174 - RNA, 20 nt, Artificial Sequence
  LRRK2 RNA guide
acaucuccaauuuggaauga

SEQ ID NO: 47175 - RNA, 20 nt, Artificial Sequence
  LRRK2 RNA guide
acuucaugugauuuuucucu

SEQ ID NO: 47176 - RNA, 20 nt, Artificial Sequence
  LRRK2 RNA guide
agauguagagaaaaaucaca

SEQ ID NO: 47177 - RNA, 20 nt, Artificial Sequence
  LRRK2 RNA guide
auguagagaaaaaucacaug

SEQ ID NO: 47178 - RNA, 20 nt, Artificial Sequence
  LRRK2 RNA guide
augugauuuuucucuacauc

SEQ ID NO: 47179 - RNA, 20 nt, Artificial Sequence
  LRRK2 RNA guide
auuccaaauuggagauguag

SEQ ID NO: 47180 - RNA, 20 nt, Artificial Sequence
  LRRK2 RNA guide
auuggagauguagagaaaaa

SEQ ID NO: 47181 - RNA, 20 nt, Artificial Sequence
  LRRK2 RNA guide
auuuuucucuacaucuccaa

SEQ ID NO: 47182 - RNA, 20 nt, Artificial Sequence
  LRRK2 RNA guide
caaacuucaugugauuuuuc

SEQ ID NO: 47183 - RNA, 20 nt, Artificial Sequence
  LRRK2 RNA guide
caaauuggagauguagagaa

SEQ ID NO: 47184 - RNA, 20 nt, Artificial Sequence
  LRRK2 RNA guide
caugugauuuuucucuacau

SEQ ID NO: 47185 - RNA, 20 nt, Artificial Sequence
  LRRK2 RNA guide
cauuccaaauuggagaugua

SEQ ID NO: 47186 - RNA, 20 nt, Artificial Sequence
  LRRK2 RNA guide
ccaaauuggagauguagaga

SEQ ID NO: 47187 - RNA, 20 nt, Artificial Sequence
  LRRK2 RNA guide
cuacaucuccaauuuggaau

SEQ ID NO: 47188 - RNA, 20 nt, Artificial Sequence
  LRRK2 RNA guide
cucuacaucuccaauuugga

SEQ ID NO: 47189 - RNA, 20 nt, Artificial Sequence
  LRRK2 RNA guide
cuucaugugauuuuucucua

SEQ ID NO: 47190 - RNA, 20 nt, Artificial Sequence
  LRRK2 RNA guide
gagauguagagaaaaaucac

SEQ ID NO: 47191 - RNA, 20 nt, Artificial Sequence
  LRRK2 RNA guide
gauguagagaaaaaucacau

SEQ ID NO: 47192 - RNA, 20 nt, Artificial Sequence
  LRRK2 RNA guide
gauuuuucucuacaucucca

SEQ ID NO: 47193 - RNA, 20 nt, Artificial Sequence
  LRRK2 RNA guide
ggagauguagagaaaaauca

SEQ ID NO: 47194 - RNA, 20 nt, Artificial Sequence
  LRRK2 RNA guide
gugauuuuucucuacaucuc

SEQ ID NO: 47195 - RNA, 20 nt, Artificial Sequence
  LRRK2 RNA guide
guuucauuccaaauuggaga

SEQ ID NO: 47196 - RNA, 20 nt, Artificial Sequence
  LRRK2 RNA guide
uacaucuccaauuuggaaug

SEQ ID NO: 47197 - RNA, 20 nt, Artificial Sequence
  LRRK2 RNA guide
ucaugugauuuuucucuaca

SEQ ID NO: 47198 - RNA, 20 nt, Artificial Sequence
  LRRK2 RNA guide
ucauuccaaauuggagaugu

SEQ ID NO: 47199 - RNA, 20 nt, Artificial Sequence
  LRRK2 RNA guide
uccaaauuggagauguagag

SEQ ID NO: 47200 - RNA, 20 nt, Artificial Sequence
  LRRK2 RNA guide
ucuacaucuccaauuuggaa

SEQ ID NO: 47201 - RNA, 20 nt, Artificial Sequence
  LRRK2 RNA guide
ucucuacaucuccaauuugg

SEQ ID NO: 47202 - RNA, 20 nt, Artificial Sequence
  LRRK2 RNA guide
ugauuuuucucuacaucucc

SEQ ID NO: 47203 - RNA, 20 nt, Artificial Sequence
  LRRK2 RNA guide
uggagauguagagaaaaauc

SEQ ID NO: 47204 - RNA, 20 nt, Artificial Sequence
  LRRK2 RNA guide
uguagagaaaaaucacauga

SEQ ID NO: 47205 - RNA, 20 nt, Artificial Sequence
  LRRK2 RNA guide
ugugauuuuucucuacaucu

SEQ ID NO: 47206 - RNA, 20 nt, Artificial Sequence
  LRRK2 RNA guide
uguuucauuccaaauuggag

SEQ ID NO: 47207 - RNA, 20 nt, Artificial Sequence
  LRRK2 RNA guide
uucaugugauuuuucucuac

SEQ ID NO: 47208 - RNA, 20 nt, Artificial Sequence
  LRRK2 RNA guide
uucauuccaaauuggagaug

SEQ ID NO: 47209 - RNA, 20 nt, Artificial Sequence
  LRRK2 RNA guide
uuccaaauuggagauguaga

SEQ ID NO: 47210 - RNA, 20 nt, Artificial Sequence
  LRRK2 RNA guide
uucucuacaucuccaauuug

SEQ ID NO: 47211 - RNA, 20 nt, Artificial Sequence
  LRRK2 RNA guide
uuggagauguagagaaaaau

SEQ ID NO: 47212 - RNA, 20 nt, Artificial Sequence
  LRRK2 RNA guide
uuguuucauuccaaauugga

SEQ ID NO: 47213 - RNA, 20 nt, Artificial Sequence
  LRRK2 RNA guide
uuucauuccaaauuggagau

SEQ ID NO: 47214 - RNA, 20 nt, Artificial Sequence
  LRRK2 RNA guide
uuucucuacaucuccaauuu

SEQ ID NO: 47215 - RNA, 20 nt, Artificial Sequence
  LRRK2 RNA guide
uuuguuucauuccaaauugg

SEQ ID NO: 47216 - RNA, 20 nt, Artificial Sequence
  LRRK2 RNA guide
uuuucucuacaucuccaauu

SEQ ID NO: 47217 - RNA, 20 nt, Artificial Sequence
  LRRK2 RNA guide
uuuuucucuacaucuccaau

SEQ ID NO: 47218 - RNA, 21 nt, Artificial Sequence
  LRRK2 RNA guide
acaucuccaauuuggaaugaa

SEQ ID NO: 47219 - RNA, 21 nt, Artificial Sequence
  LRRK2 RNA guide
auuccaaauuggagauguaga

SEQ ID NO: 47220 - RNA, 21 nt, Artificial Sequence
  LRRK2 RNA guide
caaauuggagauguagagaaa

SEQ ID NO: 47221 - RNA, 21 nt, Artificial Sequence
  LRRK2 RNA guide
caugugauuuuucucuacauc

SEQ ID NO: 47222 - RNA, 21 nt, Artificial Sequence
  LRRK2 RNA guide
cauuccaaauuggagauguag

SEQ ID NO: 47223 - RNA, 21 nt, Artificial Sequence
  LRRK2 RNA guide
ccaaauuggagauguagagaa

SEQ ID NO: 47224 - RNA, 21 nt, Artificial Sequence
  LRRK2 RNA guide
cuacaucuccaauuuggaaug

SEQ ID NO: 47225 - RNA, 21 nt, Artificial Sequence
  LRRK2 RNA guide
cucuacaucuccaauuuggaa

SEQ ID NO: 47226 - RNA, 21 nt, Artificial Sequence
  LRRK2 RNA guide
cuucaugugauuuuucucuac

SEQ ID NO: 47227 - RNA, 21 nt, Artificial Sequence
  LRRK2 RNA guide
gagauguagagaaaaaucaca

SEQ ID NO: 47228 - RNA, 21 nt, Artificial Sequence
  LRRK2 RNA guide
gauguagagaaaaaucacaug

SEQ ID NO: 47229 - RNA, 21 nt, Artificial Sequence
  LRRK2 RNA guide
gauuuuucucuacaucuccaa

SEQ ID NO: 47230 - RNA, 21 nt, Artificial Sequence
  LRRK2 RNA guide
ggagauguagagaaaaaucac

SEQ ID NO: 47231 - RNA, 21 nt, Artificial Sequence
  LRRK2 RNA guide
gugauuuuucucuacaucucc

SEQ ID NO: 47232 - RNA, 21 nt, Artificial Sequence
  LRRK2 RNA guide
guuucauuccaaauuggagau

SEQ ID NO: 47233 - RNA, 21 nt, Artificial Sequence
  LRRK2 RNA guide
uacaucuccaauuuggaauga

SEQ ID NO: 47234 - RNA, 21 nt, Artificial Sequence
  LRRK2 RNA guide
ucauuccaaauuggagaugua

SEQ ID NO: 47235 - RNA, 21 nt, Artificial Sequence
  LRRK2 RNA guide
uccaaauuggagauguagaga

SEQ ID NO: 47236 - RNA, 21 nt, Artificial Sequence
  LRRK2 RNA guide
ucuacaucuccaauuuggaau

SEQ ID NO: 47237 - RNA, 21 nt, Artificial Sequence
  LRRK2 RNA guide
ucucuacaucuccaauuugga

SEQ ID NO: 47238 - RNA, 21 nt, Artificial Sequence
  LRRK2 RNA guide
ugauuuuucucuacaucucca

SEQ ID NO: 47239 - RNA, 21 nt, Artificial Sequence
  LRRK2 RNA guide
uggagauguagagaaaaauca

SEQ ID NO: 47240 - RNA, 21 nt, Artificial Sequence
  LRRK2 RNA guide
ugugauuuuucucuacaucuc

SEQ ID NO: 47241 - RNA, 21 nt, Artificial Sequence
  LRRK2 RNA guide
uguuucauuccaaauuggaga

SEQ ID NO: 47242 - RNA, 21 nt, Artificial Sequence
  LRRK2 RNA guide
uucauuccaaauuggagaugu

SEQ ID NO: 47243 - RNA, 21 nt, Artificial Sequence
  LRRK2 RNA guide
uuccaaauuggagauguagag

SEQ ID NO: 47244 - RNA, 21 nt, Artificial Sequence
  LRRK2 RNA guide
uucucuacaucuccaauuugg

SEQ ID NO: 47245 - RNA, 21 nt, Artificial Sequence
  LRRK2 RNA guide
uuggagauguagagaaaaauc

SEQ ID NO: 47246 - RNA, 21 nt, Artificial Sequence
  LRRK2 RNA guide
uuguuucauuccaaauuggag

SEQ ID NO: 47247 - RNA, 21 nt, Artificial Sequence
  LRRK2 RNA guide
uuucauuccaaauuggagaug

SEQ ID NO: 47248 - RNA, 21 nt, Artificial Sequence
  LRRK2 RNA guide
uuucucuacaucuccaauuug

SEQ ID NO: 47249 - RNA, 22 nt, Artificial Sequence
  LRRK2 RNA guide
acaucuccaauuuggaaugaaa

SEQ ID NO: 47250 - RNA, 22 nt, Artificial Sequence
  LRRK2 RNA guide
acuucaugugauuuuucucuac

SEQ ID NO: 47251 - RNA, 22 nt, Artificial Sequence
  LRRK2 RNA guide
agauguagagaaaaaucacaug

SEQ ID NO: 47252 - RNA, 22 nt, Artificial Sequence
  LRRK2 RNA guide
augugauuuuucucuacaucuc

SEQ ID NO: 47253 - RNA, 22 nt, Artificial Sequence
  LRRK2 RNA guide
auuccaaauuggagauguagag

SEQ ID NO: 47254 - RNA, 22 nt, Artificial Sequence
  LRRK2 RNA guide
auuggagauguagagaaaaauc

SEQ ID NO: 47255 - RNA, 22 nt, Artificial Sequence
  LRRK2 RNA guide
caaacuucaugugauuuuucuc

SEQ ID NO: 47256 - RNA, 22 nt, Artificial Sequence
  LRRK2 RNA guide
caaauuggagauguagagaaaa

SEQ ID NO: 47257 - RNA, 22 nt, Artificial Sequence
  LRRK2 RNA guide
caugugauuuuucucuacaucu

SEQ ID NO: 47258 - RNA, 22 nt, Artificial Sequence
  LRRK2 RNA guide
cauuccaaauuggagauguaga

SEQ ID NO: 47259 - RNA, 22 nt, Artificial Sequence
  LRRK2 RNA guide
ccaaauuggagauguagagaaa

SEQ ID NO: 47260 - RNA, 22 nt, Artificial Sequence
  LRRK2 RNA guide
cuacaucuccaauuuggaauga

SEQ ID NO: 47261 - RNA, 22 nt, Artificial Sequence
  LRRK2 RNA guide
cucuacaucuccaauuuggaau

SEQ ID NO: 47262 - RNA, 22 nt, Artificial Sequence
  LRRK2 RNA guide
cuucaugugauuuuucucuaca

SEQ ID NO: 47263 - RNA, 22 nt, Artificial Sequence
  LRRK2 RNA guide
gagauguagagaaaaaucacau

SEQ ID NO: 47264 - RNA, 22 nt, Artificial Sequence
  LRRK2 RNA guide
gauguagagaaaaaucacauga

SEQ ID NO: 47265 - RNA, 22 nt, Artificial Sequence
  LRRK2 RNA guide
gauuuuucucuacaucuccaau

SEQ ID NO: 47266 - RNA, 22 nt, Artificial Sequence
  LRRK2 RNA guide
ggagauguagagaaaaaucaca

SEQ ID NO: 47267 - RNA, 22 nt, Artificial Sequence
  LRRK2 RNA guide
gugauuuuucucuacaucucca

SEQ ID NO: 47268 - RNA, 22 nt, Artificial Sequence
  LRRK2 RNA guide
guuucauuccaaauuggagaug

SEQ ID NO: 47269 - RNA, 22 nt, Artificial Sequence
  LRRK2 RNA guide
uacaucuccaauuuggaaugaa

SEQ ID NO: 47270 - RNA, 22 nt, Artificial Sequence
  LRRK2 RNA guide
ucaugugauuuuucucuacauc

SEQ ID NO: 47271 - RNA, 22 nt, Artificial Sequence
  LRRK2 RNA guide
ucauuccaaauuggagauguag

SEQ ID NO: 47272 - RNA, 22 nt, Artificial Sequence
  LRRK2 RNA guide
uccaaauuggagauguagagaa

SEQ ID NO: 47273 - RNA, 22 nt, Artificial Sequence
  LRRK2 RNA guide
ucuacaucuccaauuuggaaug

SEQ ID NO: 47274 - RNA, 22 nt, Artificial Sequence
  LRRK2 RNA guide
ucucuacaucuccaauuuggaa

SEQ ID NO: 47275 - RNA, 22 nt, Artificial Sequence
  LRRK2 RNA guide
ugauuuuucucuacaucuccaa

SEQ ID NO: 47276 - RNA, 22 nt, Artificial Sequence
  LRRK2 RNA guide
uggagauguagagaaaaaucac

SEQ ID NO: 47277 - RNA, 22 nt, Artificial Sequence
  LRRK2 RNA guide
uguagagaaaaaucacaugaag

SEQ ID NO: 47278 - RNA, 22 nt, Artificial Sequence
  LRRK2 RNA guide
ugugauuuuucucuacaucucc

SEQ ID NO: 47279 - RNA, 22 nt, Artificial Sequence
  LRRK2 RNA guide
uguuucauuccaaauuggagau

SEQ ID NO: 47280 - RNA, 22 nt, Artificial Sequence
  LRRK2 RNA guide
uucauuccaaauuggagaugua

SEQ ID NO: 47281 - RNA, 22 nt, Artificial Sequence
  LRRK2 RNA guide
uuccaaauuggagauguagaga

SEQ ID NO: 47282 - RNA, 22 nt, Artificial Sequence
  LRRK2 RNA guide
uucucuacaucuccaauuugga

SEQ ID NO: 47283 - RNA, 22 nt, Artificial Sequence
  LRRK2 RNA guide
uuggagauguagagaaaaauca

SEQ ID NO: 47284 - RNA, 22 nt, Artificial Sequence
  LRRK2 RNA guide
uuguuucauuccaaauuggaga

SEQ ID NO: 47285 - RNA, 22 nt, Artificial Sequence
  LRRK2 RNA guide
uuucauuccaaauuggagaugu

SEQ ID NO: 47286 - RNA, 22 nt, Artificial Sequence
  LRRK2 RNA guide
uuucucuacaucuccaauuugg

SEQ ID NO: 47287 - RNA, 22 nt, Artificial Sequence
  LRRK2 RNA guide
uuuguuucauuccaaauuggag

SEQ ID NO: 47288 - RNA, 22 nt, Artificial Sequence
  LRRK2 RNA guide
uuuucucuacaucuccaauuug

SEQ ID NO: 47289 - RNA, 20 nt, Artificial Sequence
  LRRK2 RNA guide
aaaucuccaauuuggaauga

SEQ ID NO: 47290 - RNA, 20 nt, Artificial Sequence
  LRRK2 RNA guide
auuccaaauuggagauuuag

SEQ ID NO: 47291 - RNA, 20 nt, Artificial Sequence
  LRRK2 RNA guide
caaauuggagauuuagagaa

SEQ ID NO: 47292 - RNA, 20 nt, Artificial Sequence
  LRRK2 RNA guide
cauuccaaauuggagauuua

SEQ ID NO: 47293 - RNA, 20 nt, Artificial Sequence
  LRRK2 RNA guide
ccaaauuggagauuuagaga

SEQ ID NO: 47294 - RNA, 20 nt, Artificial Sequence
  LRRK2 RNA guide
cuaaaucuccaauuuggaau

SEQ ID NO: 47295 - RNA, 20 nt, Artificial Sequence
  LRRK2 RNA guide
cucuaaaucuccaauuugga

SEQ ID NO: 47296 - RNA, 20 nt, Artificial Sequence
  LRRK2 RNA guide
gagauuuagagaaaaaucac

SEQ ID NO: 47297 - RNA, 20 nt, Artificial Sequence
  LRRK2 RNA guide
gauuuuucucuaaaucucca

SEQ ID NO: 47298 - RNA, 20 nt, Artificial Sequence
  LRRK2 RNA guide
ggagauuuagagaaaaauca

SEQ ID NO: 47299 - RNA, 20 nt, Artificial Sequence
  LRRK2 RNA guide
gugauuuuucucuaaaucuc

SEQ ID NO: 47300 - RNA, 20 nt, Artificial Sequence
  LRRK2 RNA guide
uaaaucuccaauuuggaaug

SEQ ID NO: 47301 - RNA, 20 nt, Artificial Sequence
  LRRK2 RNA guide
ucauuccaaauuggagauuu

SEQ ID NO: 47302 - RNA, 20 nt, Artificial Sequence
  LRRK2 RNA guide
uccaaauuggagauuuagag

SEQ ID NO: 47303 - RNA, 20 nt, Artificial Sequence
  LRRK2 RNA guide
ucuaaaucuccaauuuggaa

SEQ ID NO: 47304 - RNA, 20 nt, Artificial Sequence
  LRRK2 RNA guide
ucucuaaaucuccaauuugg

SEQ ID NO: 47305 - RNA, 20 nt, Artificial Sequence
  LRRK2 RNA guide
ugauuuuucucuaaaucucc

SEQ ID NO: 47306 - RNA, 20 nt, Artificial Sequence
  LRRK2 RNA guide
uggagauuuagagaaaaauc

SEQ ID NO: 47307 - RNA, 20 nt, Artificial Sequence
  LRRK2 RNA guide
uucauuccaaauuggagauu

SEQ ID NO: 47308 - RNA, 20 nt, Artificial Sequence
  LRRK2 RNA guide
uuccaaauuggagauuuaga

SEQ ID NO: 47309 - RNA, 20 nt, Artificial Sequence
  LRRK2 RNA guide
uucucuaaaucuccaauuug

SEQ ID NO: 47310 - RNA, 21 nt, Artificial Sequence
  LRRK2 RNA guide
cauuccaaauuggagauuuag

SEQ ID NO: 47311 - RNA, 21 nt, Artificial Sequence
  LRRK2 RNA guide
ccaaauuggagauuuagagaa

SEQ ID NO: 47312 - RNA, 21 nt, Artificial Sequence
  LRRK2 RNA guide
cuaaaucuccaauuuggaaug

SEQ ID NO: 47313 - RNA, 21 nt, Artificial Sequence
  LRRK2 RNA guide
cucuaaaucuccaauuuggaa

SEQ ID NO: 47314 - RNA, 21 nt, Artificial Sequence
  LRRK2 RNA guide
ggagauuuagagaaaaaucac

SEQ ID NO: 47315 - RNA, 21 nt, Artificial Sequence
  LRRK2 RNA guide
gugauuuuucucuaaaucucc

SEQ ID NO: 47316 - RNA, 21 nt, Artificial Sequence
  LRRK2 RNA guide
uccaaauuggagauuuagaga

SEQ ID NO: 47317 - RNA, 21 nt, Artificial Sequence
  LRRK2 RNA guide
ucucuaaaucuccaauuugga

SEQ ID NO: 47318 - RNA, 21 nt, Artificial Sequence
  LRRK2 RNA guide
uuccaaauuggagauuuagag

SEQ ID NO: 47319 - RNA, 21 nt, Artificial Sequence
  LRRK2 RNA guide
uucucuaaaucuccaauuugg

SEQ ID NO: 47320 - RNA, 22 nt, Artificial Sequence
  LRRK2 RNA guide
auuccaaauuggagauuuagag

SEQ ID NO: 47321 - RNA, 22 nt, Artificial Sequence
  LRRK2 RNA guide
cauuccaaauuggagauuuaga

SEQ ID NO: 47322 - RNA, 22 nt, Artificial Sequence
  LRRK2 RNA guide
ccaaauuggagauuuagagaaa

SEQ ID NO: 47323 - RNA, 22 nt, Artificial Sequence
  LRRK2 RNA guide
cuaaaucuccaauuuggaauga

SEQ ID NO: 47324 - RNA, 22 nt, Artificial Sequence
  LRRK2 RNA guide
cucuaaaucuccaauuuggaau

SEQ ID NO: 47325 - RNA, 22 nt, Artificial Sequence
  LRRK2 RNA guide
ggagauuuagagaaaaaucaca

SEQ ID NO: 47326 - RNA, 22 nt, Artificial Sequence
  LRRK2 RNA guide
gugauuuuucucuaaaucucca

SEQ ID NO: 47327 - RNA, 22 nt, Artificial Sequence
  LRRK2 RNA guide
guuucauuccaaauuggagauu

SEQ ID NO: 47328 - RNA, 22 nt, Artificial Sequence
  LRRK2 RNA guide
ucauuccaaauuggagauuuag

SEQ ID NO: 47329 - RNA, 22 nt, Artificial Sequence
  LRRK2 RNA guide
uccaaauuggagauuuagagaa

SEQ ID NO: 47330 - RNA, 22 nt, Artificial Sequence
  LRRK2 RNA guide
ucuaaaucuccaauuuggaaug

SEQ ID NO: 47331 - RNA, 22 nt, Artificial Sequence
  LRRK2 RNA guide
ucucuaaaucuccaauuuggaa

SEQ ID NO: 47332 - RNA, 22 nt, Artificial Sequence
  LRRK2 RNA guide
uggagauuuagagaaaaaucac

SEQ ID NO: 47333 - RNA, 22 nt, Artificial Sequence
  LRRK2 RNA guide
ugugauuuuucucuaaaucucc

SEQ ID NO: 47334 - RNA, 22 nt, Artificial Sequence
  LRRK2 RNA guide
uuccaaauuggagauuuagaga

SEQ ID NO: 47335 - RNA, 22 nt, Artificial Sequence
  LRRK2 RNA guide
uucucuaaaucuccaauuugga

SEQ ID NO: 47336 - RNA, 22 nt, Artificial Sequence
  LRRK2 RNA guide
uuucucuaaaucuccaauuugg

SEQ ID NO: 47337 - RNA, 20 nt, Artificial Sequence
  LRRK2 RNA guide
aaaaaauccaaaccuuugca

SEQ ID NO: 47338 - RNA, 20 nt, Artificial Sequence
  LRRK2 RNA guide
aaaaauccaaaccuuugcaa

SEQ ID NO: 47339 - RNA, 20 nt, Artificial Sequence
  LRRK2 RNA guide
aaaauccaaaccuuugcaau

SEQ ID NO: 47340 - RNA, 20 nt, Artificial Sequence
  LRRK2 RNA guide
aaagauauugcaaagguuug

SEQ ID NO: 47341 - RNA, 20 nt, Artificial Sequence
  LRRK2 RNA guide
aaauccaaaccuuugcaaua

SEQ ID NO: 47342 - RNA, 20 nt, Artificial Sequence
  LRRK2 RNA guide
aagauauugcaaagguuugg

SEQ ID NO: 47343 - RNA, 20 nt, Artificial Sequence
  LRRK2 RNA guide
aauccaaaccuuugcaauau

SEQ ID NO: 47344 - RNA, 20 nt, Artificial Sequence
  LRRK2 RNA guide
agauauugcaaagguuugga

SEQ ID NO: 47345 - RNA, 20 nt, Artificial Sequence
  LRRK2 RNA guide
auauugcaaagguuuggauu

SEQ ID NO: 47346 - RNA, 20 nt, Artificial Sequence
  LRRK2 RNA guide
auccaaaccuuugcaauauc

SEQ ID NO: 47347 - RNA, 20 nt, Artificial Sequence
  LRRK2 RNA guide
auugcaaagguuuggauuuu

SEQ ID NO: 47348 - RNA, 20 nt, Artificial Sequence
  LRRK2 RNA guide
caaagauauugcaaagguuu

SEQ ID NO: 47349 - RNA, 20 nt, Artificial Sequence
  LRRK2 RNA guide
ccaaagauauugcaaagguu

SEQ ID NO: 47350 - RNA, 20 nt, Artificial Sequence
  LRRK2 RNA guide
gauauugcaaagguuuggau

SEQ ID NO: 47351 - RNA, 20 nt, Artificial Sequence
  LRRK2 RNA guide
gccaaagauauugcaaaggu

SEQ ID NO: 47352 - RNA, 20 nt, Artificial Sequence
  LRRK2 RNA guide
uauugcaaagguuuggauuu

SEQ ID NO: 47353 - RNA, 20 nt, Artificial Sequence
  LRRK2 RNA guide
ugcaaagguuuggauuuuuu

SEQ ID NO: 47354 - RNA, 20 nt, Artificial Sequence
  LRRK2 RNA guide
uugcaaagguuuggauuuuu

SEQ ID NO: 47355 - RNA, 21 nt, Artificial Sequence
  LRRK2 RNA guide
aaagauauugcaaagguuugg

SEQ ID NO: 47356 - RNA, 21 nt, Artificial Sequence
  LRRK2 RNA guide
aagauauugcaaagguuugga

SEQ ID NO: 47357 - RNA, 21 nt, Artificial Sequence
  LRRK2 RNA guide
aauccaaaccuuugcaauauc

SEQ ID NO: 47358 - RNA, 21 nt, Artificial Sequence
  LRRK2 RNA guide
agauauugcaaagguuuggau

SEQ ID NO: 47359 - RNA, 21 nt, Artificial Sequence
  LRRK2 RNA guide
agccaaagauauugcaaaggu

SEQ ID NO: 47360 - RNA, 21 nt, Artificial Sequence
  LRRK2 RNA guide
auccaaaccuuugcaauaucu

SEQ ID NO: 47361 - RNA, 21 nt, Artificial Sequence
  LRRK2 RNA guide
caaagauauugcaaagguuug

SEQ ID NO: 47362 - RNA, 21 nt, Artificial Sequence
  LRRK2 RNA guide
ccaaagauauugcaaagguuu

SEQ ID NO: 47363 - RNA, 21 nt, Artificial Sequence
  LRRK2 RNA guide
gauauugcaaagguuuggauu

SEQ ID NO: 47364 - RNA, 21 nt, Artificial Sequence
  LRRK2 RNA guide
gccaaagauauugcaaagguu

SEQ ID NO: 47365 - RNA, 22 nt, Artificial Sequence
  LRRK2 RNA guide
aaagauauugcaaagguuugga

SEQ ID NO: 47366 - RNA, 22 nt, Artificial Sequence
  LRRK2 RNA guide
aaauccaaaccuuugcaauauc

SEQ ID NO: 47367 - RNA, 22 nt, Artificial Sequence
  LRRK2 RNA guide
aagauauugcaaagguuuggau

SEQ ID NO: 47368 - RNA, 22 nt, Artificial Sequence
  LRRK2 RNA guide
aagccaaagauauugcaaaggu

SEQ ID NO: 47369 - RNA, 22 nt, Artificial Sequence
  LRRK2 RNA guide
aauccaaaccuuugcaauaucu

SEQ ID NO: 47370 - RNA, 22 nt, Artificial Sequence
  LRRK2 RNA guide
agauauugcaaagguuuggauu

SEQ ID NO: 47371 - RNA, 22 nt, Artificial Sequence
  LRRK2 RNA guide
agccaaagauauugcaaagguu

SEQ ID NO: 47372 - RNA, 22 nt, Artificial Sequence
  LRRK2 RNA guide
auccaaaccuuugcaauaucuu

SEQ ID NO: 47373 - RNA, 22 nt, Artificial Sequence
  LRRK2 RNA guide
caaagauauugcaaagguuugg

SEQ ID NO: 47374 - RNA, 22 nt, Artificial Sequence
  LRRK2 RNA guide
ccaaagauauugcaaagguuug

SEQ ID NO: 47375 - RNA, 22 nt, Artificial Sequence
  LRRK2 RNA guide
gauauugcaaagguuuggauuu

SEQ ID NO: 47376 - RNA, 22 nt, Artificial Sequence
  LRRK2 RNA guide
gccaaagauauugcaaagguuu

SEQ ID NO: 47377 - RNA, 20 nt, Artificial Sequence
  LRRK2 RNA guide
acauacauuugaaugcauag

SEQ ID NO: 47378 - RNA, 20 nt, Artificial Sequence
  LRRK2 RNA guide
acauguaccuaugcauucaa

SEQ ID NO: 47379 - RNA, 20 nt, Artificial Sequence
  LRRK2 RNA guide
acauuugaaugcauagguac

SEQ ID NO: 47380 - RNA, 20 nt, Artificial Sequence
  LRRK2 RNA guide
accuaugcauucaaauguau

SEQ ID NO: 47381 - RNA, 20 nt, Artificial Sequence
  LRRK2 RNA guide
auacauuugaaugcauaggu

SEQ ID NO: 47382 - RNA, 20 nt, Artificial Sequence
  LRRK2 RNA guide
augcuuacauguaccuaugc

SEQ ID NO: 47383 - RNA, 20 nt, Artificial Sequence
  LRRK2 RNA guide
auguaccuaugcauucaaau

SEQ ID NO: 47384 - RNA, 20 nt, Artificial Sequence
  LRRK2 RNA guide
auuugaaugcauagguacau

SEQ ID NO: 47385 - RNA, 20 nt, Artificial Sequence
  LRRK2 RNA guide
cauacauuugaaugcauagg

SEQ ID NO: 47386 - RNA, 20 nt, Artificial Sequence
  LRRK2 RNA guide
cauguaccuaugcauucaaa

SEQ ID NO: 47387 - RNA, 20 nt, Artificial Sequence
  LRRK2 RNA guide
cauuugaaugcauagguaca

SEQ ID NO: 47388 - RNA, 20 nt, Artificial Sequence
  LRRK2 RNA guide
ccuaugcauucaaauguaug

SEQ ID NO: 47389 - RNA, 20 nt, Artificial Sequence
  LRRK2 RNA guide
cuaugcauucaaauguaugu

SEQ ID NO: 47390 - RNA, 20 nt, Artificial Sequence
  LRRK2 RNA guide
cuuacauguaccuaugcauu

SEQ ID NO: 47391 - RNA, 20 nt, Artificial Sequence
  LRRK2 RNA guide
gcuuacauguaccuaugcau

SEQ ID NO: 47392 - RNA, 20 nt, Artificial Sequence
  LRRK2 RNA guide
guaccuaugcauucaaaugu

SEQ ID NO: 47393 - RNA, 20 nt, Artificial Sequence
  LRRK2 RNA guide
guguaugcuuuuacauacau

SEQ ID NO: 47394 - RNA, 20 nt, Artificial Sequence
  LRRK2 RNA guide
guguguaugcuuuuacauac

SEQ ID NO: 47395 - RNA, 20 nt, Artificial Sequence
  LRRK2 RNA guide
uacauguaccuaugcauuca

SEQ ID NO: 47396 - RNA, 20 nt, Artificial Sequence
  LRRK2 RNA guide
uacauuugaaugcauaggua

SEQ ID NO: 47397 - RNA, 20 nt, Artificial Sequence
  LRRK2 RNA guide
uaccuaugcauucaaaugua

SEQ ID NO: 47398 - RNA, 20 nt, Artificial Sequence
  LRRK2 RNA guide
uaugcuuacauguaccuaug

SEQ ID NO: 47399 - RNA, 20 nt, Artificial Sequence
  LRRK2 RNA guide
ugaaugcauagguacaugua

SEQ ID NO: 47400 - RNA, 20 nt, Artificial Sequence
  LRRK2 RNA guide
ugcuuacauguaccuaugca

SEQ ID NO: 47401 - RNA, 20 nt, Artificial Sequence
  LRRK2 RNA guide
uguaccuaugcauucaaaug

SEQ ID NO: 47402 - RNA, 20 nt, Artificial Sequence
  LRRK2 RNA guide
uguguaugcuuuuacauaca

SEQ ID NO: 47403 - RNA, 20 nt, Artificial Sequence
  LRRK2 RNA guide
uuacauguaccuaugcauuc

SEQ ID NO: 47404 - RNA, 20 nt, Artificial Sequence
  LRRK2 RNA guide
uugaaugcauagguacaugu

SEQ ID NO: 47405 - RNA, 20 nt, Artificial Sequence
  LRRK2 RNA guide
uuugaaugcauagguacaug

SEQ ID NO: 47406 - RNA, 21 nt, Artificial Sequence
  LRRK2 RNA guide
acauacauuugaaugcauagg

SEQ ID NO: 47407 - RNA, 21 nt, Artificial Sequence
  LRRK2 RNA guide
acauguaccuaugcauucaaa

SEQ ID NO: 47408 - RNA, 21 nt, Artificial Sequence
  LRRK2 RNA guide
acauuugaaugcauagguaca

SEQ ID NO: 47409 - RNA, 21 nt, Artificial Sequence
  LRRK2 RNA guide
accuaugcauucaaauguaug

SEQ ID NO: 47410 - RNA, 21 nt, Artificial Sequence
  LRRK2 RNA guide
auaugcuuacauguaccuaug

SEQ ID NO: 47411 - RNA, 21 nt, Artificial Sequence
  LRRK2 RNA guide
augcuuacauguaccuaugca

SEQ ID NO: 47412 - RNA, 21 nt, Artificial Sequence
  LRRK2 RNA guide
auguaccuaugcauucaaaug

SEQ ID NO: 47413 - RNA, 21 nt, Artificial Sequence
  LRRK2 RNA guide
auuugaaugcauagguacaug

SEQ ID NO: 47414 - RNA, 21 nt, Artificial Sequence
  LRRK2 RNA guide
cauacauuugaaugcauaggu

SEQ ID NO: 47415 - RNA, 21 nt, Artificial Sequence
  LRRK2 RNA guide
cauguaccuaugcauucaaau

SEQ ID NO: 47416 - RNA, 21 nt, Artificial Sequence
  LRRK2 RNA guide
cauuugaaugcauagguacau

SEQ ID NO: 47417 - RNA, 21 nt, Artificial Sequence
  LRRK2 RNA guide
ccuaugcauucaaauguaugu

SEQ ID NO: 47418 - RNA, 21 nt, Artificial Sequence
  LRRK2 RNA guide
cuuacauguaccuaugcauuc

SEQ ID NO: 47419 - RNA, 21 nt, Artificial Sequence
  LRRK2 RNA guide
gcuuacauguaccuaugcauu

SEQ ID NO: 47420 - RNA, 21 nt, Artificial Sequence
  LRRK2 RNA guide
guaccuaugcauucaaaugua

SEQ ID NO: 47421 - RNA, 21 nt, Artificial Sequence
  LRRK2 RNA guide
guguguaugcuuuuacauaca

SEQ ID NO: 47422 - RNA, 21 nt, Artificial Sequence
  LRRK2 RNA guide
uacauguaccuaugcauucaa

SEQ ID NO: 47423 - RNA, 21 nt, Artificial Sequence
  LRRK2 RNA guide
uacauuugaaugcauagguac

SEQ ID NO: 47424 - RNA, 21 nt, Artificial Sequence
  LRRK2 RNA guide
uaugcuuacauguaccuaugc

SEQ ID NO: 47425 - RNA, 21 nt, Artificial Sequence
  LRRK2 RNA guide
ugaaugcauagguacauguaa

SEQ ID NO: 47426 - RNA, 21 nt, Artificial Sequence
  LRRK2 RNA guide
ugcuuacauguaccuaugcau

SEQ ID NO: 47427 - RNA, 21 nt, Artificial Sequence
  LRRK2 RNA guide
uguaccuaugcauucaaaugu

SEQ ID NO: 47428 - RNA, 21 nt, Artificial Sequence
  LRRK2 RNA guide
uguguguaugcuuuuacauac

SEQ ID NO: 47429 - RNA, 21 nt, Artificial Sequence
  LRRK2 RNA guide
uuacauguaccuaugcauuca

SEQ ID NO: 47430 - RNA, 21 nt, Artificial Sequence
  LRRK2 RNA guide
uugaaugcauagguacaugua

SEQ ID NO: 47431 - RNA, 21 nt, Artificial Sequence
  LRRK2 RNA guide
uuugaaugcauagguacaugu

SEQ ID NO: 47432 - RNA, 22 nt, Artificial Sequence
  LRRK2 RNA guide
acauacauuugaaugcauaggu

SEQ ID NO: 47433 - RNA, 22 nt, Artificial Sequence
  LRRK2 RNA guide
acauguaccuaugcauucaaau

SEQ ID NO: 47434 - RNA, 22 nt, Artificial Sequence
  LRRK2 RNA guide
acauuugaaugcauagguacau

SEQ ID NO: 47435 - RNA, 22 nt, Artificial Sequence
  LRRK2 RNA guide
accuaugcauucaaauguaugu

SEQ ID NO: 47436 - RNA, 22 nt, Artificial Sequence
  LRRK2 RNA guide
auacauuugaaugcauagguac

SEQ ID NO: 47437 - RNA, 22 nt, Artificial Sequence
  LRRK2 RNA guide
auaugcuuacauguaccuaugc

SEQ ID NO: 47438 - RNA, 22 nt, Artificial Sequence
  LRRK2 RNA guide
augcuuacauguaccuaugcau

SEQ ID NO: 47439 - RNA, 22 nt, Artificial Sequence
  LRRK2 RNA guide
auguaccuaugcauucaaaugu

SEQ ID NO: 47440 - RNA, 22 nt, Artificial Sequence
  LRRK2 RNA guide
auguguguaugcuuuuacauac

SEQ ID NO: 47441 - RNA, 22 nt, Artificial Sequence
  LRRK2 RNA guide
auuugaaugcauagguacaugu

SEQ ID NO: 47442 - RNA, 22 nt, Artificial Sequence
  LRRK2 RNA guide
cauacauuugaaugcauaggua

SEQ ID NO: 47443 - RNA, 22 nt, Artificial Sequence
  LRRK2 RNA guide
cauguaccuaugcauucaaaug

SEQ ID NO: 47444 - RNA, 22 nt, Artificial Sequence
  LRRK2 RNA guide
cauuugaaugcauagguacaug

SEQ ID NO: 47445 - RNA, 22 nt, Artificial Sequence
  LRRK2 RNA guide
ccuaugcauucaaauguaugua

SEQ ID NO: 47446 - RNA, 22 nt, Artificial Sequence
  LRRK2 RNA guide
cuuacauguaccuaugcauuca

SEQ ID NO: 47447 - RNA, 22 nt, Artificial Sequence
  LRRK2 RNA guide
gcauucaaauguauguaaaagc

SEQ ID NO: 47448 - RNA, 22 nt, Artificial Sequence
  LRRK2 RNA guide
gcuuacauguaccuaugcauuc

SEQ ID NO: 47449 - RNA, 22 nt, Artificial Sequence
  LRRK2 RNA guide
gcuuuuacauacauuugaaugc

SEQ ID NO: 47450 - RNA, 22 nt, Artificial Sequence
  LRRK2 RNA guide
guaccuaugcauucaaauguau

SEQ ID NO: 47451 - RNA, 22 nt, Artificial Sequence
  LRRK2 RNA guide
guguguaugcuuuuacauacau

SEQ ID NO: 47452 - RNA, 22 nt, Artificial Sequence
  LRRK2 RNA guide
uacauacauuugaaugcauagg

SEQ ID NO: 47453 - RNA, 22 nt, Artificial Sequence
  LRRK2 RNA guide
uacauguaccuaugcauucaaa

SEQ ID NO: 47454 - RNA, 22 nt, Artificial Sequence
  LRRK2 RNA guide
uacauuugaaugcauagguaca

SEQ ID NO: 47455 - RNA, 22 nt, Artificial Sequence
  LRRK2 RNA guide
uaccuaugcauucaaauguaug

SEQ ID NO: 47456 - RNA, 22 nt, Artificial Sequence
  LRRK2 RNA guide
uauaugcuuacauguaccuaug

SEQ ID NO: 47457 - RNA, 22 nt, Artificial Sequence
  LRRK2 RNA guide
uaugcuuacauguaccuaugca

SEQ ID NO: 47458 - RNA, 22 nt, Artificial Sequence
  LRRK2 RNA guide
ugaaugcauagguacauguaag

SEQ ID NO: 47459 - RNA, 22 nt, Artificial Sequence
  LRRK2 RNA guide
ugcuuacauguaccuaugcauu

SEQ ID NO: 47460 - RNA, 22 nt, Artificial Sequence
  LRRK2 RNA guide
uguaccuaugcauucaaaugua

SEQ ID NO: 47461 - RNA, 22 nt, Artificial Sequence
  LRRK2 RNA guide
uguguguaugcuuuuacauaca

SEQ ID NO: 47462 - RNA, 22 nt, Artificial Sequence
  LRRK2 RNA guide
uuacauguaccuaugcauucaa

SEQ ID NO: 47463 - RNA, 22 nt, Artificial Sequence
  LRRK2 RNA guide
uugaaugcauagguacauguaa

SEQ ID NO: 47464 - RNA, 22 nt, Artificial Sequence
  LRRK2 RNA guide
uuugaaugcauagguacaugua

SEQ ID NO: 47465 - RNA, 20 nt, Artificial Sequence
  LRRK2 RNA guide
acauguaccuaugcauuuaa

SEQ ID NO: 47466 - RNA, 20 nt, Artificial Sequence
  LRRK2 RNA guide
acauuuaaaugcauagguac

SEQ ID NO: 47467 - RNA, 20 nt, Artificial Sequence
  LRRK2 RNA guide
cauacauuuaaaugcauagg

SEQ ID NO: 47468 - RNA, 20 nt, Artificial Sequence
  LRRK2 RNA guide
cauguaccuaugcauuuaaa

SEQ ID NO: 47469 - RNA, 20 nt, Artificial Sequence
  LRRK2 RNA guide
cauuuaaaugcauagguaca

SEQ ID NO: 47470 - RNA, 20 nt, Artificial Sequence
  LRRK2 RNA guide
ccuaugcauuuaaauguaug

SEQ ID NO: 47471 - RNA, 20 nt, Artificial Sequence
  LRRK2 RNA guide
guaccuaugcauuuaaaugu

SEQ ID NO: 47472 - RNA, 20 nt, Artificial Sequence
  LRRK2 RNA guide
uaaaugcauagguacaugua

SEQ ID NO: 47473 - RNA, 20 nt, Artificial Sequence
  LRRK2 RNA guide
uacauguaccuaugcauuua

SEQ ID NO: 47474 - RNA, 20 nt, Artificial Sequence
  LRRK2 RNA guide
uguaccuaugcauuuaaaug

SEQ ID NO: 47475 - RNA, 20 nt, Artificial Sequence
  LRRK2 RNA guide
uuaaaugcauagguacaugu

SEQ ID NO: 47476 - RNA, 20 nt, Artificial Sequence
  LRRK2 RNA guide
uuacauguaccuaugcauuu

SEQ ID NO: 47477 - RNA, 20 nt, Artificial Sequence
  LRRK2 RNA guide
uuuaaaugcauagguacaug

SEQ ID NO: 47478 - RNA, 21 nt, Artificial Sequence
  LRRK2 RNA guide
cuuacauguaccuaugcauuu

SEQ ID NO: 47479 - RNA, 22 nt, Artificial Sequence
  LRRK2 RNA guide
cauguaccuaugcauuuaaaug

SEQ ID NO: 47480 - RNA, 22 nt, Artificial Sequence
  LRRK2 RNA guide
cauuuaaaugcauagguacaug

SEQ ID NO: 47481 - RNA, 22 nt, Artificial Sequence
  LRRK2 RNA guide
cuuacauguaccuaugcauuua

SEQ ID NO: 47482 - RNA, 22 nt, Artificial Sequence
  LRRK2 RNA guide
gcuuacauguaccuaugcauuu

SEQ ID NO: 47483 - RNA, 22 nt, Artificial Sequence
  LRRK2 RNA guide
uaaaugcauagguacauguaag

SEQ ID NO: 47484 - RNA, 20 nt, Artificial Sequence
  LRRK2 RNA guide
aagcauguguggaaacaugc

SEQ ID NO: 47485 - RNA, 20 nt, Artificial Sequence
  LRRK2 RNA guide
aagcauguuuccacacaugc

SEQ ID NO: 47486 - RNA, 20 nt, Artificial Sequence
  LRRK2 RNA guide
acacaugcuuaucaacauaa

SEQ ID NO: 47487 - RNA, 20 nt, Artificial Sequence
  LRRK2 RNA guide
acaugcuuaucaacauaaug

SEQ ID NO: 47488 - RNA, 20 nt, Artificial Sequence
  LRRK2 RNA guide
acauuauguugauaagcaug

SEQ ID NO: 47489 - RNA, 20 nt, Artificial Sequence
  LRRK2 RNA guide
agcauguguggaaacaugcu

SEQ ID NO: 47490 - RNA, 20 nt, Artificial Sequence
  LRRK2 RNA guide
agcauguuuccacacaugcu

SEQ ID NO: 47491 - RNA, 20 nt, Artificial Sequence
  LRRK2 RNA guide
auaagcauguguggaaacau

SEQ ID NO: 47492 - RNA, 20 nt, Artificial Sequence
  LRRK2 RNA guide
auaugaagcauguuuccaca

SEQ ID NO: 47493 - RNA, 20 nt, Artificial Sequence
  LRRK2 RNA guide
augaagcauguuuccacaca

SEQ ID NO: 47494 - RNA, 20 nt, Artificial Sequence
  LRRK2 RNA guide
auguugauaagcaugugugg

SEQ ID NO: 47495 - RNA, 20 nt, Artificial Sequence
  LRRK2 RNA guide
auguuuccacacaugcuuau

SEQ ID NO: 47496 - RNA, 20 nt, Artificial Sequence
  LRRK2 RNA guide
auuauguugauaagcaugug

SEQ ID NO: 47497 - RNA, 20 nt, Artificial Sequence
  LRRK2 RNA guide
cacacaugcuuaucaacaua

SEQ ID NO: 47498 - RNA, 20 nt, Artificial Sequence
  LRRK2 RNA guide
cacaugcuuaucaacauaau

SEQ ID NO: 47499 - RNA, 20 nt, Artificial Sequence
  LRRK2 RNA guide
caugcuuaucaacauaaugu

SEQ ID NO: 47500 - RNA, 20 nt, Artificial Sequence
  LRRK2 RNA guide
cauguuuccacacaugcuua

SEQ ID NO: 47501 - RNA, 20 nt, Artificial Sequence
  LRRK2 RNA guide
cauuauguugauaagcaugu

SEQ ID NO: 47502 - RNA, 20 nt, Artificial Sequence
  LRRK2 RNA guide
ccacacaugcuuaucaacau

SEQ ID NO: 47503 - RNA, 20 nt, Artificial Sequence
  LRRK2 RNA guide
gaagcauguuuccacacaug

SEQ ID NO: 47504 - RNA, 20 nt, Artificial Sequence
  LRRK2 RNA guide
gauaagcauguguggaaaca

SEQ ID NO: 47505 - RNA, 20 nt, Artificial Sequence
  LRRK2 RNA guide
gcauguuuccacacaugcuu

SEQ ID NO: 47506 - RNA, 20 nt, Artificial Sequence
  LRRK2 RNA guide
guugauaagcauguguggaa

SEQ ID NO: 47507 - RNA, 20 nt, Artificial Sequence
  LRRK2 RNA guide
guuuccacacaugcuuauca

SEQ ID NO: 47508 - RNA, 20 nt, Artificial Sequence
  LRRK2 RNA guide
uaagcauguguggaaacaug

SEQ ID NO: 47509 - RNA, 20 nt, Artificial Sequence
  LRRK2 RNA guide
uaugaagcauguuuccacac

SEQ ID NO: 47510 - RNA, 20 nt, Artificial Sequence
  LRRK2 RNA guide
uauguugauaagcaugugug

SEQ ID NO: 47511 - RNA, 20 nt, Artificial Sequence
  LRRK2 RNA guide
uccacacaugcuuaucaaca

SEQ ID NO: 47512 - RNA, 20 nt, Artificial Sequence
  LRRK2 RNA guide
ugaagcauguuuccacacau

SEQ ID NO: 47513 - RNA, 20 nt, Artificial Sequence
  LRRK2 RNA guide
ugauaagcauguguggaaac

SEQ ID NO: 47514 - RNA, 20 nt, Artificial Sequence
  LRRK2 RNA guide
uguugauaagcaugugugga

SEQ ID NO: 47515 - RNA, 20 nt, Artificial Sequence
  LRRK2 RNA guide
uguuuccacacaugcuuauc

SEQ ID NO: 47516 - RNA, 20 nt, Artificial Sequence
  LRRK2 RNA guide
uuauguugauaagcaugugu

SEQ ID NO: 47517 - RNA, 20 nt, Artificial Sequence
  LRRK2 RNA guide
uuccacacaugcuuaucaac

SEQ ID NO: 47518 - RNA, 20 nt, Artificial Sequence
  LRRK2 RNA guide
uugauaagcauguguggaaa

SEQ ID NO: 47519 - RNA, 20 nt, Artificial Sequence
  LRRK2 RNA guide
uuuccacacaugcuuaucaa

SEQ ID NO: 47520 - RNA, 21 nt, Artificial Sequence
  LRRK2 RNA guide
aagcauguguggaaacaugcu

SEQ ID NO: 47521 - RNA, 21 nt, Artificial Sequence
  LRRK2 RNA guide
aagcauguuuccacacaugcu

SEQ ID NO: 47522 - RNA, 21 nt, Artificial Sequence
  LRRK2 RNA guide
agcauguguggaaacaugcuu

SEQ ID NO: 47523 - RNA, 21 nt, Artificial Sequence
  LRRK2 RNA guide
agcauguuuccacacaugcuu

SEQ ID NO: 47524 - RNA, 21 nt, Artificial Sequence
  LRRK2 RNA guide
auaagcauguguggaaacaug

SEQ ID NO: 47525 - RNA, 21 nt, Artificial Sequence
  LRRK2 RNA guide
auaugaagcauguuuccacac

SEQ ID NO: 47526 - RNA, 21 nt, Artificial Sequence
  LRRK2 RNA guide
augaagcauguuuccacacau

SEQ ID NO: 47527 - RNA, 21 nt, Artificial Sequence
  LRRK2 RNA guide
auguugauaagcaugugugga

SEQ ID NO: 47528 - RNA, 21 nt, Artificial Sequence
  LRRK2 RNA guide
auguuuccacacaugcuuauc

SEQ ID NO: 47529 - RNA, 21 nt, Artificial Sequence
  LRRK2 RNA guide
cacacaugcuuaucaacauaa

SEQ ID NO: 47530 - RNA, 21 nt, Artificial Sequence
  LRRK2 RNA guide
cacaugcuuaucaacauaaug

SEQ ID NO: 47531 - RNA, 21 nt, Artificial Sequence
  LRRK2 RNA guide
cauguuuccacacaugcuuau

SEQ ID NO: 47532 - RNA, 21 nt, Artificial Sequence
  LRRK2 RNA guide
cauuauguugauaagcaugug

SEQ ID NO: 47533 - RNA, 21 nt, Artificial Sequence
  LRRK2 RNA guide
ccacacaugcuuaucaacaua

SEQ ID NO: 47534 - RNA, 21 nt, Artificial Sequence
  LRRK2 RNA guide
gaagcauguuuccacacaugc

SEQ ID NO: 47535 - RNA, 21 nt, Artificial Sequence
  LRRK2 RNA guide
gauaagcauguguggaaacau

SEQ ID NO: 47536 - RNA, 21 nt, Artificial Sequence
  LRRK2 RNA guide
gcauguuuccacacaugcuua

SEQ ID NO: 47537 - RNA, 21 nt, Artificial Sequence
  LRRK2 RNA guide
guugauaagcauguguggaaa

SEQ ID NO: 47538 - RNA, 21 nt, Artificial Sequence
  LRRK2 RNA guide
guuuccacacaugcuuaucaa

SEQ ID NO: 47539 - RNA, 21 nt, Artificial Sequence
  LRRK2 RNA guide
uaagcauguguggaaacaugc

SEQ ID NO: 47540 - RNA, 21 nt, Artificial Sequence
  LRRK2 RNA guide
uauaugaagcauguuuccaca

SEQ ID NO: 47541 - RNA, 21 nt, Artificial Sequence
  LRRK2 RNA guide
uaugaagcauguuuccacaca

SEQ ID NO: 47542 - RNA, 21 nt, Artificial Sequence
  LRRK2 RNA guide
uauguugauaagcaugugugg

SEQ ID NO: 47543 - RNA, 21 nt, Artificial Sequence
  LRRK2 RNA guide
uccacacaugcuuaucaacau

SEQ ID NO: 47544 - RNA, 21 nt, Artificial Sequence
  LRRK2 RNA guide
ugaagcauguuuccacacaug

SEQ ID NO: 47545 - RNA, 21 nt, Artificial Sequence
  LRRK2 RNA guide
ugauaagcauguguggaaaca

SEQ ID NO: 47546 - RNA, 21 nt, Artificial Sequence
  LRRK2 RNA guide
uguugauaagcauguguggaa

SEQ ID NO: 47547 - RNA, 21 nt, Artificial Sequence
  LRRK2 RNA guide
uguuuccacacaugcuuauca

SEQ ID NO: 47548 - RNA, 21 nt, Artificial Sequence
  LRRK2 RNA guide
uuauguugauaagcaugugug

SEQ ID NO: 47549 - RNA, 21 nt, Artificial Sequence
  LRRK2 RNA guide
uuccacacaugcuuaucaaca

SEQ ID NO: 47550 - RNA, 21 nt, Artificial Sequence
  LRRK2 RNA guide
uugauaagcauguguggaaac

SEQ ID NO: 47551 - RNA, 21 nt, Artificial Sequence
  LRRK2 RNA guide
uuuccacacaugcuuaucaac

SEQ ID NO: 47552 - RNA, 22 nt, Artificial Sequence
  LRRK2 RNA guide
aagcauguguggaaacaugcuu

SEQ ID NO: 47553 - RNA, 22 nt, Artificial Sequence
  LRRK2 RNA guide
aagcauguuuccacacaugcuu

SEQ ID NO: 47554 - RNA, 22 nt, Artificial Sequence
  LRRK2 RNA guide
acacaugcuuaucaacauaaug

SEQ ID NO: 47555 - RNA, 22 nt, Artificial Sequence
  LRRK2 RNA guide
acauuauguugauaagcaugug

SEQ ID NO: 47556 - RNA, 22 nt, Artificial Sequence
  LRRK2 RNA guide
agcauguguggaaacaugcuuc

SEQ ID NO: 47557 - RNA, 22 nt, Artificial Sequence
  LRRK2 RNA guide
agcauguuuccacacaugcuua

SEQ ID NO: 47558 - RNA, 22 nt, Artificial Sequence
  LRRK2 RNA guide
auaagcauguguggaaacaugc

SEQ ID NO: 47559 - RNA, 22 nt, Artificial Sequence
  LRRK2 RNA guide
auauaugaagcauguuuccaca

SEQ ID NO: 47560 - RNA, 22 nt, Artificial Sequence
  LRRK2 RNA guide
auaugaagcauguuuccacaca

SEQ ID NO: 47561 - RNA, 22 nt, Artificial Sequence
  LRRK2 RNA guide
augaagcauguuuccacacaug

SEQ ID NO: 47562 - RNA, 22 nt, Artificial Sequence
  LRRK2 RNA guide
auguugauaagcauguguggaa

SEQ ID NO: 47563 - RNA, 22 nt, Artificial Sequence
  LRRK2 RNA guide
auguuuccacacaugcuuauca

SEQ ID NO: 47564 - RNA, 22 nt, Artificial Sequence
  LRRK2 RNA guide
auuauguugauaagcaugugug

SEQ ID NO: 47565 - RNA, 22 nt, Artificial Sequence
  LRRK2 RNA guide
cacacaugcuuaucaacauaau

SEQ ID NO: 47566 - RNA, 22 nt, Artificial Sequence
  LRRK2 RNA guide
cacaugcuuaucaacauaaugu

SEQ ID NO: 47567 - RNA, 22 nt, Artificial Sequence
  LRRK2 RNA guide
cauguuuccacacaugcuuauc

SEQ ID NO: 47568 - RNA, 22 nt, Artificial Sequence
  LRRK2 RNA guide
cauuauguugauaagcaugugu

SEQ ID NO: 47569 - RNA, 22 nt, Artificial Sequence
  LRRK2 RNA guide
ccacacaugcuuaucaacauaa

SEQ ID NO: 47570 - RNA, 22 nt, Artificial Sequence
  LRRK2 RNA guide
gaagcauguuuccacacaugcu

SEQ ID NO: 47571 - RNA, 22 nt, Artificial Sequence
  LRRK2 RNA guide
gauaagcauguguggaaacaug

SEQ ID NO: 47572 - RNA, 22 nt, Artificial Sequence
  LRRK2 RNA guide
gcauguuuccacacaugcuuau

SEQ ID NO: 47573 - RNA, 22 nt, Artificial Sequence
  LRRK2 RNA guide
guugauaagcauguguggaaac

SEQ ID NO: 47574 - RNA, 22 nt, Artificial Sequence
  LRRK2 RNA guide
guuuccacacaugcuuaucaac

SEQ ID NO: 47575 - RNA, 22 nt, Artificial Sequence
  LRRK2 RNA guide
uaagcauguguggaaacaugcu

SEQ ID NO: 47576 - RNA, 22 nt, Artificial Sequence
  LRRK2 RNA guide
uauaugaagcauguuuccacac

SEQ ID NO: 47577 - RNA, 22 nt, Artificial Sequence
  LRRK2 RNA guide
uaugaagcauguuuccacacau

SEQ ID NO: 47578 - RNA, 22 nt, Artificial Sequence
  LRRK2 RNA guide
uauguugauaagcaugugugga

SEQ ID NO: 47579 - RNA, 22 nt, Artificial Sequence
  LRRK2 RNA guide
uccacacaugcuuaucaacaua

SEQ ID NO: 47580 - RNA, 22 nt, Artificial Sequence
  LRRK2 RNA guide
ugaagcauguuuccacacaugc

SEQ ID NO: 47581 - RNA, 22 nt, Artificial Sequence
  LRRK2 RNA guide
ugauaagcauguguggaaacau

SEQ ID NO: 47582 - RNA, 22 nt, Artificial Sequence
  LRRK2 RNA guide
uguugauaagcauguguggaaa

SEQ ID NO: 47583 - RNA, 22 nt, Artificial Sequence
  LRRK2 RNA guide
uguuuccacacaugcuuaucaa

SEQ ID NO: 47584 - RNA, 22 nt, Artificial Sequence
  LRRK2 RNA guide
uuauguugauaagcaugugugg

SEQ ID NO: 47585 - RNA, 22 nt, Artificial Sequence
  LRRK2 RNA guide
uuccacacaugcuuaucaacau

SEQ ID NO: 47586 - RNA, 22 nt, Artificial Sequence
  LRRK2 RNA guide
uugauaagcauguguggaaaca

SEQ ID NO: 47587 - RNA, 22 nt, Artificial Sequence
  LRRK2 RNA guide
uuuccacacaugcuuaucaaca

SEQ ID NO: 47588 - RNA, 20 nt, Artificial Sequence
  LRRK2 RNA guide
aaacauguguggaaacaugc

SEQ ID NO: 47589 - RNA, 20 nt, Artificial Sequence
  LRRK2 RNA guide
aacauguguggaaacaugcu

SEQ ID NO: 47590 - RNA, 20 nt, Artificial Sequence
  LRRK2 RNA guide
aagcauguuuccacacaugu

SEQ ID NO: 47591 - RNA, 20 nt, Artificial Sequence
  LRRK2 RNA guide
agcauguuuccacacauguu

SEQ ID NO: 47592 - RNA, 20 nt, Artificial Sequence
  LRRK2 RNA guide
auaaacauguguggaaacau

SEQ ID NO: 47593 - RNA, 20 nt, Artificial Sequence
  LRRK2 RNA guide
auguugauaaacaugugugg

SEQ ID NO: 47594 - RNA, 20 nt, Artificial Sequence
  LRRK2 RNA guide
auguuuccacacauguuuau

SEQ ID NO: 47595 - RNA, 20 nt, Artificial Sequence
  LRRK2 RNA guide
cacacauguuuaucaacaua

SEQ ID NO: 47596 - RNA, 20 nt, Artificial Sequence
  LRRK2 RNA guide
cauguuuccacacauguuua

SEQ ID NO: 47597 - RNA, 20 nt, Artificial Sequence
  LRRK2 RNA guide
ccacacauguuuaucaacau

SEQ ID NO: 47598 - RNA, 20 nt, Artificial Sequence
  LRRK2 RNA guide
gauaaacauguguggaaaca

SEQ ID NO: 47599 - RNA, 20 nt, Artificial Sequence
  LRRK2 RNA guide
gcauguuuccacacauguuu

SEQ ID NO: 47600 - RNA, 20 nt, Artificial Sequence
  LRRK2 RNA guide
guugauaaacauguguggaa

SEQ ID NO: 47601 - RNA, 20 nt, Artificial Sequence
  LRRK2 RNA guide
guuuccacacauguuuauca

SEQ ID NO: 47602 - RNA, 20 nt, Artificial Sequence
  LRRK2 RNA guide
uaaacauguguggaaacaug

SEQ ID NO: 47603 - RNA, 20 nt, Artificial Sequence
  LRRK2 RNA guide
uauguugauaaacaugugug

SEQ ID NO: 47604 - RNA, 20 nt, Artificial Sequence
  LRRK2 RNA guide
uccacacauguuuaucaaca

SEQ ID NO: 47605 - RNA, 20 nt, Artificial Sequence
  LRRK2 RNA guide
ugauaaacauguguggaaac

SEQ ID NO: 47606 - RNA, 20 nt, Artificial Sequence
  LRRK2 RNA guide
uguugauaaacaugugugga

SEQ ID NO: 47607 - RNA, 20 nt, Artificial Sequence
  LRRK2 RNA guide
uguuuccacacauguuuauc

SEQ ID NO: 47608 - RNA, 20 nt, Artificial Sequence
  LRRK2 RNA guide
uuccacacauguuuaucaac

SEQ ID NO: 47609 - RNA, 20 nt, Artificial Sequence
  LRRK2 RNA guide
uugauaaacauguguggaaa

SEQ ID NO: 47610 - RNA, 20 nt, Artificial Sequence
  LRRK2 RNA guide
uuuccacacauguuuaucaa

SEQ ID NO: 47611 - RNA, 21 nt, Artificial Sequence
  LRRK2 RNA guide
aaacauguguggaaacaugcu

SEQ ID NO: 47612 - RNA, 21 nt, Artificial Sequence
  LRRK2 RNA guide
aacauguguggaaacaugcuu

SEQ ID NO: 47613 - RNA, 21 nt, Artificial Sequence
  LRRK2 RNA guide
aagcauguuuccacacauguu

SEQ ID NO: 47614 - RNA, 21 nt, Artificial Sequence
  LRRK2 RNA guide
agcauguuuccacacauguuu

SEQ ID NO: 47615 - RNA, 21 nt, Artificial Sequence
  LRRK2 RNA guide
auaaacauguguggaaacaug

SEQ ID NO: 47616 - RNA, 21 nt, Artificial Sequence
  LRRK2 RNA guide
auguugauaaacaugugugga

SEQ ID NO: 47617 - RNA, 21 nt, Artificial Sequence
  LRRK2 RNA guide
auguuuccacacauguuuauc

SEQ ID NO: 47618 - RNA, 21 nt, Artificial Sequence
  LRRK2 RNA guide
cauguuuccacacauguuuau

SEQ ID NO: 47619 - RNA, 21 nt, Artificial Sequence
  LRRK2 RNA guide
ccacacauguuuaucaacaua

SEQ ID NO: 47620 - RNA, 21 nt, Artificial Sequence
  LRRK2 RNA guide
gaagcauguuuccacacaugu

SEQ ID NO: 47621 - RNA, 21 nt, Artificial Sequence
  LRRK2 RNA guide
gauaaacauguguggaaacau

SEQ ID NO: 47622 - RNA, 21 nt, Artificial Sequence
  LRRK2 RNA guide
gcauguuuccacacauguuua

SEQ ID NO: 47623 - RNA, 21 nt, Artificial Sequence
  LRRK2 RNA guide
guugauaaacauguguggaaa

SEQ ID NO: 47624 - RNA, 21 nt, Artificial Sequence
  LRRK2 RNA guide
guuuccacacauguuuaucaa

SEQ ID NO: 47625 - RNA, 21 nt, Artificial Sequence
  LRRK2 RNA guide
uaaacauguguggaaacaugc

SEQ ID NO: 47626 - RNA, 21 nt, Artificial Sequence
  LRRK2 RNA guide
uauguugauaaacaugugugg

SEQ ID NO: 47627 - RNA, 21 nt, Artificial Sequence
  LRRK2 RNA guide
uccacacauguuuaucaacau

SEQ ID NO: 47628 - RNA, 21 nt, Artificial Sequence
  LRRK2 RNA guide
ugauaaacauguguggaaaca

SEQ ID NO: 47629 - RNA, 21 nt, Artificial Sequence
  LRRK2 RNA guide
uguugauaaacauguguggaa

SEQ ID NO: 47630 - RNA, 21 nt, Artificial Sequence
  LRRK2 RNA guide
uguuuccacacauguuuauca

SEQ ID NO: 47631 - RNA, 21 nt, Artificial Sequence
  LRRK2 RNA guide
uuccacacauguuuaucaaca

SEQ ID NO: 47632 - RNA, 21 nt, Artificial Sequence
  LRRK2 RNA guide
uugauaaacauguguggaaac

SEQ ID NO: 47633 - RNA, 21 nt, Artificial Sequence
  LRRK2 RNA guide
uuuccacacauguuuaucaac

SEQ ID NO: 47634 - RNA, 22 nt, Artificial Sequence
  LRRK2 RNA guide
aaacauguguggaaacaugcuu

SEQ ID NO: 47635 - RNA, 22 nt, Artificial Sequence
  LRRK2 RNA guide
aacauguguggaaacaugcuuc

SEQ ID NO: 47636 - RNA, 22 nt, Artificial Sequence
  LRRK2 RNA guide
aagcauguuuccacacauguuu

SEQ ID NO: 47637 - RNA, 22 nt, Artificial Sequence
  LRRK2 RNA guide
agcauguuuccacacauguuua

SEQ ID NO: 47638 - RNA, 22 nt, Artificial Sequence
  LRRK2 RNA guide
auaaacauguguggaaacaugc

SEQ ID NO: 47639 - RNA, 22 nt, Artificial Sequence
  LRRK2 RNA guide
auguugauaaacauguguggaa

SEQ ID NO: 47640 - RNA, 22 nt, Artificial Sequence
  LRRK2 RNA guide
auguuuccacacauguuuauca

SEQ ID NO: 47641 - RNA, 22 nt, Artificial Sequence
  LRRK2 RNA guide
cauguuuccacacauguuuauc

SEQ ID NO: 47642 - RNA, 22 nt, Artificial Sequence
  LRRK2 RNA guide
ccacacauguuuaucaacauaa

SEQ ID NO: 47643 - RNA, 22 nt, Artificial Sequence
  LRRK2 RNA guide
gaagcauguuuccacacauguu

SEQ ID NO: 47644 - RNA, 22 nt, Artificial Sequence
  LRRK2 RNA guide
gauaaacauguguggaaacaug

SEQ ID NO: 47645 - RNA, 22 nt, Artificial Sequence
  LRRK2 RNA guide
gcauguuuccacacauguuuau

SEQ ID NO: 47646 - RNA, 22 nt, Artificial Sequence
  LRRK2 RNA guide
guugauaaacauguguggaaac

SEQ ID NO: 47647 - RNA, 22 nt, Artificial Sequence
  LRRK2 RNA guide
guuuccacacauguuuaucaac

SEQ ID NO: 47648 - RNA, 22 nt, Artificial Sequence
  LRRK2 RNA guide
uaaacauguguggaaacaugcu

SEQ ID NO: 47649 - RNA, 22 nt, Artificial Sequence
  LRRK2 RNA guide
uauguugauaaacaugugugga

SEQ ID NO: 47650 - RNA, 22 nt, Artificial Sequence
  LRRK2 RNA guide
uccacacauguuuaucaacaua

SEQ ID NO: 47651 - RNA, 22 nt, Artificial Sequence
  LRRK2 RNA guide
ugaagcauguuuccacacaugu

SEQ ID NO: 47652 - RNA, 22 nt, Artificial Sequence
  LRRK2 RNA guide
ugauaaacauguguggaaacau

SEQ ID NO: 47653 - RNA, 22 nt, Artificial Sequence
  LRRK2 RNA guide
uguugauaaacauguguggaaa

SEQ ID NO: 47654 - RNA, 22 nt, Artificial Sequence
  LRRK2 RNA guide
uguuuccacacauguuuaucaa

SEQ ID NO: 47655 - RNA, 22 nt, Artificial Sequence
  LRRK2 RNA guide
uuauguugauaaacaugugugg

SEQ ID NO: 47656 - RNA, 22 nt, Artificial Sequence
  LRRK2 RNA guide
uuccacacauguuuaucaacau

SEQ ID NO: 47657 - RNA, 22 nt, Artificial Sequence
  LRRK2 RNA guide
uugauaaacauguguggaaaca

SEQ ID NO: 47658 - RNA, 22 nt, Artificial Sequence
  LRRK2 RNA guide
uuuccacacauguuuaucaaca

SEQ ID NO: 47659 - RNA, 20 nt, Artificial Sequence
  LRRK2 RNA guide
aauauaugaagcauguuucc

SEQ ID NO: 47660 - RNA, 20 nt, Artificial Sequence
  LRRK2 RNA guide
auauaugaagcauguuucca

SEQ ID NO: 47661 - RNA, 20 nt, Artificial Sequence
  LRRK2 RNA guide
auguguggaaacaugcuuca

SEQ ID NO: 47662 - RNA, 20 nt, Artificial Sequence
  LRRK2 RNA guide
caauauaugaagcauguuuc

SEQ ID NO: 47663 - RNA, 20 nt, Artificial Sequence
  LRRK2 RNA guide
cauguguggaaacaugcuuc

SEQ ID NO: 47664 - RNA, 20 nt, Artificial Sequence
  LRRK2 RNA guide
gaaacaugcuucauauauug

SEQ ID NO: 47665 - RNA, 20 nt, Artificial Sequence
  LRRK2 RNA guide
gcauguguggaaacaugcuu

SEQ ID NO: 47666 - RNA, 20 nt, Artificial Sequence
  LRRK2 RNA guide
ggaaacaugcuucauauauu

SEQ ID NO: 47667 - RNA, 20 nt, Artificial Sequence
  LRRK2 RNA guide
guggaaacaugcuucauaua

SEQ ID NO: 47668 - RNA, 20 nt, Artificial Sequence
  LRRK2 RNA guide
guguggaaacaugcuucaua

SEQ ID NO: 47669 - RNA, 20 nt, Artificial Sequence
  LRRK2 RNA guide
uauaugaagcauguuuccac

SEQ ID NO: 47670 - RNA, 20 nt, Artificial Sequence
  LRRK2 RNA guide
uggaaacaugcuucauauau

SEQ ID NO: 47671 - RNA, 20 nt, Artificial Sequence
  LRRK2 RNA guide
uguggaaacaugcuucauau

SEQ ID NO: 47672 - RNA, 20 nt, Artificial Sequence
  LRRK2 RNA guide
uguguggaaacaugcuucau

SEQ ID NO: 47673 - RNA, 21 nt, Artificial Sequence
  LRRK2 RNA guide
auauaugaagcauguuuccac

SEQ ID NO: 47674 - RNA, 21 nt, Artificial Sequence
  LRRK2 RNA guide
auguguggaaacaugcuucau

SEQ ID NO: 47675 - RNA, 21 nt, Artificial Sequence
  LRRK2 RNA guide
caauauaugaagcauguuucc

SEQ ID NO: 47676 - RNA, 21 nt, Artificial Sequence
  LRRK2 RNA guide
cauguguggaaacaugcuuca

SEQ ID NO: 47677 - RNA, 21 nt, Artificial Sequence
  LRRK2 RNA guide
gcauguguggaaacaugcuuc

SEQ ID NO: 47678 - RNA, 21 nt, Artificial Sequence
  LRRK2 RNA guide
ggaaacaugcuucauauauug

SEQ ID NO: 47679 - RNA, 21 nt, Artificial Sequence
  LRRK2 RNA guide
guggaaacaugcuucauauau

SEQ ID NO: 47680 - RNA, 21 nt, Artificial Sequence
  LRRK2 RNA guide
guguggaaacaugcuucauau

SEQ ID NO: 47681 - RNA, 21 nt, Artificial Sequence
  LRRK2 RNA guide
uguggaaacaugcuucauaua

SEQ ID NO: 47682 - RNA, 21 nt, Artificial Sequence
  LRRK2 RNA guide
uguguggaaacaugcuucaua

SEQ ID NO: 47683 - RNA, 22 nt, Artificial Sequence
  LRRK2 RNA guide
aauauaugaagcauguuuccac

SEQ ID NO: 47684 - RNA, 22 nt, Artificial Sequence
  LRRK2 RNA guide
auguguggaaacaugcuucaua

SEQ ID NO: 47685 - RNA, 22 nt, Artificial Sequence
  LRRK2 RNA guide
caauauaugaagcauguuucca

SEQ ID NO: 47686 - RNA, 22 nt, Artificial Sequence
  LRRK2 RNA guide
cauguguggaaacaugcuucau

SEQ ID NO: 47687 - RNA, 22 nt, Artificial Sequence
  LRRK2 RNA guide
gcauguguggaaacaugcuuca

SEQ ID NO: 47688 - RNA, 22 nt, Artificial Sequence
  LRRK2 RNA guide
ggaaacaugcuucauauauuga

SEQ ID NO: 47689 - RNA, 22 nt, Artificial Sequence
  LRRK2 RNA guide
guggaaacaugcuucauauauu

SEQ ID NO: 47690 - RNA, 22 nt, Artificial Sequence
  LRRK2 RNA guide
guguggaaacaugcuucauaua

SEQ ID NO: 47691 - RNA, 22 nt, Artificial Sequence
  LRRK2 RNA guide
ucaauauaugaagcauguuucc

SEQ ID NO: 47692 - RNA, 22 nt, Artificial Sequence
  LRRK2 RNA guide
uggaaacaugcuucauauauug

SEQ ID NO: 47693 - RNA, 22 nt, Artificial Sequence
  LRRK2 RNA guide
uguggaaacaugcuucauauau

SEQ ID NO: 47694 - RNA, 22 nt, Artificial Sequence
  LRRK2 RNA guide
uguguggaaacaugcuucauau

SEQ ID NO: 47695 - RNA, 20 nt, Artificial Sequence
  LRRK2 RNA guide
aagcauguguggaaacaagc

SEQ ID NO: 47696 - RNA, 20 nt, Artificial Sequence
  LRRK2 RNA guide
aagcuuguuuccacacaugc

SEQ ID NO: 47697 - RNA, 20 nt, Artificial Sequence
  LRRK2 RNA guide
aauauaugaagcuuguuucc

SEQ ID NO: 47698 - RNA, 20 nt, Artificial Sequence
  LRRK2 RNA guide
agcauguguggaaacaagcu

SEQ ID NO: 47699 - RNA, 20 nt, Artificial Sequence
  LRRK2 RNA guide
agcuuguuuccacacaugcu

SEQ ID NO: 47700 - RNA, 20 nt, Artificial Sequence
  LRRK2 RNA guide
auaagcauguguggaaacaa

SEQ ID NO: 47701 - RNA, 20 nt, Artificial Sequence
  LRRK2 RNA guide
auauaugaagcuuguuucca

SEQ ID NO: 47702 - RNA, 20 nt, Artificial Sequence
  LRRK2 RNA guide
auaugaagcuuguuuccaca

SEQ ID NO: 47703 - RNA, 20 nt, Artificial Sequence
  LRRK2 RNA guide
augaagcuuguuuccacaca

SEQ ID NO: 47704 - RNA, 20 nt, Artificial Sequence
  LRRK2 RNA guide
auguguggaaacaagcuuca

SEQ ID NO: 47705 - RNA, 20 nt, Artificial Sequence
  LRRK2 RNA guide
caauauaugaagcuuguuuc

SEQ ID NO: 47706 - RNA, 20 nt, Artificial Sequence
  LRRK2 RNA guide
cauguguggaaacaagcuuc

SEQ ID NO: 47707 - RNA, 20 nt, Artificial Sequence
  LRRK2 RNA guide
cuuguuuccacacaugcuua

SEQ ID NO: 47708 - RNA, 20 nt, Artificial Sequence
  LRRK2 RNA guide
gaaacaagcuucauauauug

SEQ ID NO: 47709 - RNA, 20 nt, Artificial Sequence
  LRRK2 RNA guide
gaagcuuguuuccacacaug

SEQ ID NO: 47710 - RNA, 20 nt, Artificial Sequence
  LRRK2 RNA guide
gcauguguggaaacaagcuu

SEQ ID NO: 47711 - RNA, 20 nt, Artificial Sequence
  LRRK2 RNA guide
gcuuguuuccacacaugcuu

SEQ ID NO: 47712 - RNA, 20 nt, Artificial Sequence
  LRRK2 RNA guide
ggaaacaagcuucauauauu

SEQ ID NO: 47713 - RNA, 20 nt, Artificial Sequence
  LRRK2 RNA guide
guggaaacaagcuucauaua

SEQ ID NO: 47714 - RNA, 20 nt, Artificial Sequence
  LRRK2 RNA guide
guguggaaacaagcuucaua

SEQ ID NO: 47715 - RNA, 20 nt, Artificial Sequence
  LRRK2 RNA guide
uaagcauguguggaaacaag

SEQ ID NO: 47716 - RNA, 20 nt, Artificial Sequence
  LRRK2 RNA guide
uauaugaagcuuguuuccac

SEQ ID NO: 47717 - RNA, 20 nt, Artificial Sequence
  LRRK2 RNA guide
uaugaagcuuguuuccacac

SEQ ID NO: 47718 - RNA, 20 nt, Artificial Sequence
  LRRK2 RNA guide
ugaagcuuguuuccacacau

SEQ ID NO: 47719 - RNA, 20 nt, Artificial Sequence
  LRRK2 RNA guide
uggaaacaagcuucauauau

SEQ ID NO: 47720 - RNA, 20 nt, Artificial Sequence
  LRRK2 RNA guide
uguggaaacaagcuucauau

SEQ ID NO: 47721 - RNA, 20 nt, Artificial Sequence
  LRRK2 RNA guide
uguguggaaacaagcuucau

SEQ ID NO: 47722 - RNA, 21 nt, Artificial Sequence
  LRRK2 RNA guide
aagcauguguggaaacaagcu

SEQ ID NO: 47723 - RNA, 21 nt, Artificial Sequence
  LRRK2 RNA guide
aagcuuguuuccacacaugcu

SEQ ID NO: 47724 - RNA, 21 nt, Artificial Sequence
  LRRK2 RNA guide
agcauguguggaaacaagcuu

SEQ ID NO: 47725 - RNA, 21 nt, Artificial Sequence
  LRRK2 RNA guide
agcuuguuuccacacaugcuu

SEQ ID NO: 47726 - RNA, 21 nt, Artificial Sequence
  LRRK2 RNA guide
auaagcauguguggaaacaag

SEQ ID NO: 47727 - RNA, 21 nt, Artificial Sequence
  LRRK2 RNA guide
auauaugaagcuuguuuccac

SEQ ID NO: 47728 - RNA, 21 nt, Artificial Sequence
  LRRK2 RNA guide
auaugaagcuuguuuccacac

SEQ ID NO: 47729 - RNA, 21 nt, Artificial Sequence
  LRRK2 RNA guide
augaagcuuguuuccacacau

SEQ ID NO: 47730 - RNA, 21 nt, Artificial Sequence
  LRRK2 RNA guide
auguguggaaacaagcuucau

SEQ ID NO: 47731 - RNA, 21 nt, Artificial Sequence
  LRRK2 RNA guide
caauauaugaagcuuguuucc

SEQ ID NO: 47732 - RNA, 21 nt, Artificial Sequence
  LRRK2 RNA guide
cauguguggaaacaagcuuca

SEQ ID NO: 47733 - RNA, 21 nt, Artificial Sequence
  LRRK2 RNA guide
cuuguuuccacacaugcuuau

SEQ ID NO: 47734 - RNA, 21 nt, Artificial Sequence
  LRRK2 RNA guide
gaagcuuguuuccacacaugc

SEQ ID NO: 47735 - RNA, 21 nt, Artificial Sequence
  LRRK2 RNA guide
gauaagcauguguggaaacaa

SEQ ID NO: 47736 - RNA, 21 nt, Artificial Sequence
  LRRK2 RNA guide
gcauguguggaaacaagcuuc

SEQ ID NO: 47737 - RNA, 21 nt, Artificial Sequence
  LRRK2 RNA guide
gcuuguuuccacacaugcuua

SEQ ID NO: 47738 - RNA, 21 nt, Artificial Sequence
  LRRK2 RNA guide
ggaaacaagcuucauauauug

SEQ ID NO: 47739 - RNA, 21 nt, Artificial Sequence
  LRRK2 RNA guide
guggaaacaagcuucauauau

SEQ ID NO: 47740 - RNA, 21 nt, Artificial Sequence
  LRRK2 RNA guide
guguggaaacaagcuucauau

SEQ ID NO: 47741 - RNA, 21 nt, Artificial Sequence
  LRRK2 RNA guide
uaagcauguguggaaacaagc

SEQ ID NO: 47742 - RNA, 21 nt, Artificial Sequence
  LRRK2 RNA guide
uauaugaagcuuguuuccaca

SEQ ID NO: 47743 - RNA, 21 nt, Artificial Sequence
  LRRK2 RNA guide
uaugaagcuuguuuccacaca

SEQ ID NO: 47744 - RNA, 21 nt, Artificial Sequence
  LRRK2 RNA guide
ugaagcuuguuuccacacaug

SEQ ID NO: 47745 - RNA, 21 nt, Artificial Sequence
  LRRK2 RNA guide
uguggaaacaagcuucauaua

SEQ ID NO: 47746 - RNA, 21 nt, Artificial Sequence
  LRRK2 RNA guide
uguguggaaacaagcuucaua

SEQ ID NO: 47747 - RNA, 22 nt, Artificial Sequence
  LRRK2 RNA guide
aagcauguguggaaacaagcuu

SEQ ID NO: 47748 - RNA, 22 nt, Artificial Sequence
  LRRK2 RNA guide
aagcuuguuuccacacaugcuu

SEQ ID NO: 47749 - RNA, 22 nt, Artificial Sequence
  LRRK2 RNA guide
aauauaugaagcuuguuuccac

SEQ ID NO: 47750 - RNA, 22 nt, Artificial Sequence
  LRRK2 RNA guide
agcauguguggaaacaagcuuc

SEQ ID NO: 47751 - RNA, 22 nt, Artificial Sequence
  LRRK2 RNA guide
agcuuguuuccacacaugcuua

SEQ ID NO: 47752 - RNA, 22 nt, Artificial Sequence
  LRRK2 RNA guide
auaagcauguguggaaacaagc

SEQ ID NO: 47753 - RNA, 22 nt, Artificial Sequence
  LRRK2 RNA guide
auauaugaagcuuguuuccaca

SEQ ID NO: 47754 - RNA, 22 nt, Artificial Sequence
  LRRK2 RNA guide
auaugaagcuuguuuccacaca

SEQ ID NO: 47755 - RNA, 22 nt, Artificial Sequence
  LRRK2 RNA guide
augaagcuuguuuccacacaug

SEQ ID NO: 47756 - RNA, 22 nt, Artificial Sequence
  LRRK2 RNA guide
auguguggaaacaagcuucaua

SEQ ID NO: 47757 - RNA, 22 nt, Artificial Sequence
  LRRK2 RNA guide
caauauaugaagcuuguuucca

SEQ ID NO: 47758 - RNA, 22 nt, Artificial Sequence
  LRRK2 RNA guide
cauguguggaaacaagcuucau

SEQ ID NO: 47759 - RNA, 22 nt, Artificial Sequence
  LRRK2 RNA guide
cuuguuuccacacaugcuuauc

SEQ ID NO: 47760 - RNA, 22 nt, Artificial Sequence
  LRRK2 RNA guide
gaagcuuguuuccacacaugcu

SEQ ID NO: 47761 - RNA, 22 nt, Artificial Sequence
  LRRK2 RNA guide
gauaagcauguguggaaacaag

SEQ ID NO: 47762 - RNA, 22 nt, Artificial Sequence
  LRRK2 RNA guide
gcauguguggaaacaagcuuca

SEQ ID NO: 47763 - RNA, 22 nt, Artificial Sequence
  LRRK2 RNA guide
gcuuguuuccacacaugcuuau

SEQ ID NO: 47764 - RNA, 22 nt, Artificial Sequence
  LRRK2 RNA guide
ggaaacaagcuucauauauuga

SEQ ID NO: 47765 - RNA, 22 nt, Artificial Sequence
  LRRK2 RNA guide
guggaaacaagcuucauauauu

SEQ ID NO: 47766 - RNA, 22 nt, Artificial Sequence
  LRRK2 RNA guide
guguggaaacaagcuucauaua

SEQ ID NO: 47767 - RNA, 22 nt, Artificial Sequence
  LRRK2 RNA guide
uaagcauguguggaaacaagcu

SEQ ID NO: 47768 - RNA, 22 nt, Artificial Sequence
  LRRK2 RNA guide
uauaugaagcuuguuuccacac

SEQ ID NO: 47769 - RNA, 22 nt, Artificial Sequence
  LRRK2 RNA guide
uaugaagcuuguuuccacacau

SEQ ID NO: 47770 - RNA, 22 nt, Artificial Sequence
  LRRK2 RNA guide
ucaauauaugaagcuuguuucc

SEQ ID NO: 47771 - RNA, 22 nt, Artificial Sequence
  LRRK2 RNA guide
ugaagcuuguuuccacacaugc

SEQ ID NO: 47772 - RNA, 22 nt, Artificial Sequence
  LRRK2 RNA guide
ugauaagcauguguggaaacaa

SEQ ID NO: 47773 - RNA, 22 nt, Artificial Sequence
  LRRK2 RNA guide
uggaaacaagcuucauauauug

SEQ ID NO: 47774 - RNA, 22 nt, Artificial Sequence
  LRRK2 RNA guide
uguggaaacaagcuucauauau

SEQ ID NO: 47775 - RNA, 22 nt, Artificial Sequence
  LRRK2 RNA guide
uguguggaaacaagcuucauau

SEQ ID NO: 47776 - RNA, 20 nt, Artificial Sequence
  LRRK2 RNA guide
aaaucucccucugucccucu

SEQ ID NO: 47777 - RNA, 20 nt, Artificial Sequence
  LRRK2 RNA guide
aaucucccucugucccucuc

SEQ ID NO: 47778 - RNA, 20 nt, Artificial Sequence
  LRRK2 RNA guide
aaugauaaaucucccucugu

SEQ ID NO: 47779 - RNA, 20 nt, Artificial Sequence
  LRRK2 RNA guide
acagagggagauuuaucauu

SEQ ID NO: 47780 - RNA, 20 nt, Artificial Sequence
  LRRK2 RNA guide
agagggacagagggagauuu

SEQ ID NO: 47781 - RNA, 20 nt, Artificial Sequence
  LRRK2 RNA guide
agggacagagggagauuuau

SEQ ID NO: 47782 - RNA, 20 nt, Artificial Sequence
  LRRK2 RNA guide
agugaaugauaaaucucccu

SEQ ID NO: 47783 - RNA, 20 nt, Artificial Sequence
  LRRK2 RNA guide
auaaaucucccucugucccu

SEQ ID NO: 47784 - RNA, 20 nt, Artificial Sequence
  LRRK2 RNA guide
auagugaaugauaaaucucc

SEQ ID NO: 47785 - RNA, 20 nt, Artificial Sequence
  LRRK2 RNA guide
aucucccucugucccucucc

SEQ ID NO: 47786 - RNA, 20 nt, Artificial Sequence
  LRRK2 RNA guide
augauaaaucucccucuguc

SEQ ID NO: 47787 - RNA, 20 nt, Artificial Sequence
  LRRK2 RNA guide
auuggagagggacagaggga

SEQ ID NO: 47788 - RNA, 20 nt, Artificial Sequence
  LRRK2 RNA guide
auugugggcccauuggagag

SEQ ID NO: 47789 - RNA, 20 nt, Artificial Sequence
  LRRK2 RNA guide
cagagggagauuuaucauuc

SEQ ID NO: 47790 - RNA, 20 nt, Artificial Sequence
  LRRK2 RNA guide
cauuggagagggacagaggg

SEQ ID NO: 47791 - RNA, 20 nt, Artificial Sequence
  LRRK2 RNA guide
ccauuggagagggacagagg

SEQ ID NO: 47792 - RNA, 20 nt, Artificial Sequence
  LRRK2 RNA guide
cccauuggagagggacagag

SEQ ID NO: 47793 - RNA, 20 nt, Artificial Sequence
  LRRK2 RNA guide
cccucugucccucuccaaug

SEQ ID NO: 47794 - RNA, 20 nt, Artificial Sequence
  LRRK2 RNA guide
ccucugucccucuccaaugg

SEQ ID NO: 47795 - RNA, 20 nt, Artificial Sequence
  LRRK2 RNA guide
cucccucugucccucuccaa

SEQ ID NO: 47796 - RNA, 20 nt, Artificial Sequence
  LRRK2 RNA guide
cucugucccucuccaauggg

SEQ ID NO: 47797 - RNA, 20 nt, Artificial Sequence
  LRRK2 RNA guide
cugucccucuccaaugggcc

SEQ ID NO: 47798 - RNA, 20 nt, Artificial Sequence
  LRRK2 RNA guide
gaaugauaaaucucccucug

SEQ ID NO: 47799 - RNA, 20 nt, Artificial Sequence
  LRRK2 RNA guide
gacagagggagauuuaucau

SEQ ID NO: 47800 - RNA, 20 nt, Artificial Sequence
  LRRK2 RNA guide
gagagggacagagggagauu

SEQ ID NO: 47801 - RNA, 20 nt, Artificial Sequence
  LRRK2 RNA guide
gagggacagagggagauuua

SEQ ID NO: 47802 - RNA, 20 nt, Artificial Sequence
  LRRK2 RNA guide
gauaaaucucccucuguccc

SEQ ID NO: 47803 - RNA, 20 nt, Artificial Sequence
  LRRK2 RNA guide
gcccauuggagagggacaga

SEQ ID NO: 47804 - RNA, 20 nt, Artificial Sequence
  LRRK2 RNA guide
ggacagagggagauuuauca

SEQ ID NO: 47805 - RNA, 20 nt, Artificial Sequence
  LRRK2 RNA guide
ggagagggacagagggagau

SEQ ID NO: 47806 - RNA, 20 nt, Artificial Sequence
  LRRK2 RNA guide
ggcccauuggagagggacag

SEQ ID NO: 47807 - RNA, 20 nt, Artificial Sequence
  LRRK2 RNA guide
gggacagagggagauuuauc

SEQ ID NO: 47808 - RNA, 20 nt, Artificial Sequence
  LRRK2 RNA guide
gggcccauuggagagggaca

SEQ ID NO: 47809 - RNA, 20 nt, Artificial Sequence
  LRRK2 RNA guide
gugaaugauaaaucucccuc

SEQ ID NO: 47810 - RNA, 20 nt, Artificial Sequence
  LRRK2 RNA guide
gugggcccauuggagaggga

SEQ ID NO: 47811 - RNA, 20 nt, Artificial Sequence
  LRRK2 RNA guide
uaaaucucccucugucccuc

SEQ ID NO: 47812 - RNA, 20 nt, Artificial Sequence
  LRRK2 RNA guide
uagugaaugauaaaucuccc

SEQ ID NO: 47813 - RNA, 20 nt, Artificial Sequence
  LRRK2 RNA guide
ucccucugucccucuccaau

SEQ ID NO: 47814 - RNA, 20 nt, Artificial Sequence
  LRRK2 RNA guide
ucucccucugucccucucca

SEQ ID NO: 47815 - RNA, 20 nt, Artificial Sequence
  LRRK2 RNA guide
ucugucccucuccaaugggc

SEQ ID NO: 47816 - RNA, 20 nt, Artificial Sequence
  LRRK2 RNA guide
ugaaugauaaaucucccucu

SEQ ID NO: 47817 - RNA, 20 nt, Artificial Sequence
  LRRK2 RNA guide
ugauaaaucucccucugucc

SEQ ID NO: 47818 - RNA, 20 nt, Artificial Sequence
  LRRK2 RNA guide
uggagagggacagagggaga

SEQ ID NO: 47819 - RNA, 20 nt, Artificial Sequence
  LRRK2 RNA guide
ugggcccauuggagagggac

SEQ ID NO: 47820 - RNA, 20 nt, Artificial Sequence
  LRRK2 RNA guide
ugugggcccauuggagaggg

SEQ ID NO: 47821 - RNA, 20 nt, Artificial Sequence
  LRRK2 RNA guide
uuggagagggacagagggag

SEQ ID NO: 47822 - RNA, 20 nt, Artificial Sequence
  LRRK2 RNA guide
uugugggcccauuggagagg

SEQ ID NO: 47823 - RNA, 21 nt, Artificial Sequence
  LRRK2 RNA guide
aaaucucccucugucccucuc

SEQ ID NO: 47824 - RNA, 21 nt, Artificial Sequence
  LRRK2 RNA guide
aaucucccucugucccucucc

SEQ ID NO: 47825 - RNA, 21 nt, Artificial Sequence
  LRRK2 RNA guide
aaugauaaaucucccucuguc

SEQ ID NO: 47826 - RNA, 21 nt, Artificial Sequence
  LRRK2 RNA guide
aauugugggcccauuggagag

SEQ ID NO: 47827 - RNA, 21 nt, Artificial Sequence
  LRRK2 RNA guide
acagagggagauuuaucauuc

SEQ ID NO: 47828 - RNA, 21 nt, Artificial Sequence
  LRRK2 RNA guide
agagggacagagggagauuua

SEQ ID NO: 47829 - RNA, 21 nt, Artificial Sequence
  LRRK2 RNA guide
agggacagagggagauuuauc

SEQ ID NO: 47830 - RNA, 21 nt, Artificial Sequence
  LRRK2 RNA guide
agugaaugauaaaucucccuc

SEQ ID NO: 47831 - RNA, 21 nt, Artificial Sequence
  LRRK2 RNA guide
auaaaucucccucugucccuc

SEQ ID NO: 47832 - RNA, 21 nt, Artificial Sequence
  LRRK2 RNA guide
auagugaaugauaaaucuccc

SEQ ID NO: 47833 - RNA, 21 nt, Artificial Sequence
  LRRK2 RNA guide
aucucccucugucccucucca

SEQ ID NO: 47834 - RNA, 21 nt, Artificial Sequence
  LRRK2 RNA guide
augauaaaucucccucugucc

SEQ ID NO: 47835 - RNA, 21 nt, Artificial Sequence
  LRRK2 RNA guide
auuggagagggacagagggag

SEQ ID NO: 47836 - RNA, 21 nt, Artificial Sequence
  LRRK2 RNA guide
auugugggcccauuggagagg

SEQ ID NO: 47837 - RNA, 21 nt, Artificial Sequence
  LRRK2 RNA guide
cagagggagauuuaucauuca

SEQ ID NO: 47838 - RNA, 21 nt, Artificial Sequence
  LRRK2 RNA guide
cauuggagagggacagaggga

SEQ ID NO: 47839 - RNA, 21 nt, Artificial Sequence
  LRRK2 RNA guide
ccauuggagagggacagaggg

SEQ ID NO: 47840 - RNA, 21 nt, Artificial Sequence
  LRRK2 RNA guide
cccauuggagagggacagagg

SEQ ID NO: 47841 - RNA, 21 nt, Artificial Sequence
  LRRK2 RNA guide
cccucugucccucuccaaugg

SEQ ID NO: 47842 - RNA, 21 nt, Artificial Sequence
  LRRK2 RNA guide
ccucugucccucuccaauggg

SEQ ID NO: 47843 - RNA, 21 nt, Artificial Sequence
  LRRK2 RNA guide
cucccucugucccucuccaau

SEQ ID NO: 47844 - RNA, 21 nt, Artificial Sequence
  LRRK2 RNA guide
cucugucccucuccaaugggc

SEQ ID NO: 47845 - RNA, 21 nt, Artificial Sequence
  LRRK2 RNA guide
cugucccucuccaaugggccc

SEQ ID NO: 47846 - RNA, 21 nt, Artificial Sequence
  LRRK2 RNA guide
gaaugauaaaucucccucugu

SEQ ID NO: 47847 - RNA, 21 nt, Artificial Sequence
  LRRK2 RNA guide
gacagagggagauuuaucauu

SEQ ID NO: 47848 - RNA, 21 nt, Artificial Sequence
  LRRK2 RNA guide
gagagggacagagggagauuu

SEQ ID NO: 47849 - RNA, 21 nt, Artificial Sequence
  LRRK2 RNA guide
gagggacagagggagauuuau

SEQ ID NO: 47850 - RNA, 21 nt, Artificial Sequence
  LRRK2 RNA guide
gauaaaucucccucugucccu

SEQ ID NO: 47851 - RNA, 21 nt, Artificial Sequence
  LRRK2 RNA guide
gcccauuggagagggacagag

SEQ ID NO: 47852 - RNA, 21 nt, Artificial Sequence
  LRRK2 RNA guide
ggacagagggagauuuaucau

SEQ ID NO: 47853 - RNA, 21 nt, Artificial Sequence
  LRRK2 RNA guide
ggagagggacagagggagauu

SEQ ID NO: 47854 - RNA, 21 nt, Artificial Sequence
  LRRK2 RNA guide
ggcccauuggagagggacaga

SEQ ID NO: 47855 - RNA, 21 nt, Artificial Sequence
  LRRK2 RNA guide
gggacagagggagauuuauca

SEQ ID NO: 47856 - RNA, 21 nt, Artificial Sequence
  LRRK2 RNA guide
gggcccauuggagagggacag

SEQ ID NO: 47857 - RNA, 21 nt, Artificial Sequence
  LRRK2 RNA guide
gugaaugauaaaucucccucu

SEQ ID NO: 47858 - RNA, 21 nt, Artificial Sequence
  LRRK2 RNA guide
gugggcccauuggagagggac

SEQ ID NO: 47859 - RNA, 21 nt, Artificial Sequence
  LRRK2 RNA guide
uaaaucucccucugucccucu

SEQ ID NO: 47860 - RNA, 21 nt, Artificial Sequence
  LRRK2 RNA guide
uagugaaugauaaaucucccu

SEQ ID NO: 47861 - RNA, 21 nt, Artificial Sequence
  LRRK2 RNA guide
ucccucugucccucuccaaug

SEQ ID NO: 47862 - RNA, 21 nt, Artificial Sequence
  LRRK2 RNA guide
ucucccucugucccucuccaa

SEQ ID NO: 47863 - RNA, 21 nt, Artificial Sequence
  LRRK2 RNA guide
ucugucccucuccaaugggcc

SEQ ID NO: 47864 - RNA, 21 nt, Artificial Sequence
  LRRK2 RNA guide
ugaaugauaaaucucccucug

SEQ ID NO: 47865 - RNA, 21 nt, Artificial Sequence
  LRRK2 RNA guide
ugauaaaucucccucuguccc

SEQ ID NO: 47866 - RNA, 21 nt, Artificial Sequence
  LRRK2 RNA guide
uggagagggacagagggagau

SEQ ID NO: 47867 - RNA, 21 nt, Artificial Sequence
  LRRK2 RNA guide
ugggcccauuggagagggaca

SEQ ID NO: 47868 - RNA, 21 nt, Artificial Sequence
  LRRK2 RNA guide
ugugggcccauuggagaggga

SEQ ID NO: 47869 - RNA, 21 nt, Artificial Sequence
  LRRK2 RNA guide
uuggagagggacagagggaga

SEQ ID NO: 47870 - RNA, 21 nt, Artificial Sequence
  LRRK2 RNA guide
uugugggcccauuggagaggg

SEQ ID NO: 47871 - RNA, 22 nt, Artificial Sequence
  LRRK2 RNA guide
aaaucucccucugucccucucc

SEQ ID NO: 47872 - RNA, 22 nt, Artificial Sequence
  LRRK2 RNA guide
aaucucccucugucccucucca

SEQ ID NO: 47873 - RNA, 22 nt, Artificial Sequence
  LRRK2 RNA guide
aaugauaaaucucccucugucc

SEQ ID NO: 47874 - RNA, 22 nt, Artificial Sequence
  LRRK2 RNA guide
aauugugggcccauuggagagg

SEQ ID NO: 47875 - RNA, 22 nt, Artificial Sequence
  LRRK2 RNA guide
acagagggagauuuaucauuca

SEQ ID NO: 47876 - RNA, 22 nt, Artificial Sequence
  LRRK2 RNA guide
agagggacagagggagauuuau

SEQ ID NO: 47877 - RNA, 22 nt, Artificial Sequence
  LRRK2 RNA guide
agggacagagggagauuuauca

SEQ ID NO: 47878 - RNA, 22 nt, Artificial Sequence
  LRRK2 RNA guide
agugaaugauaaaucucccucu

SEQ ID NO: 47879 - RNA, 22 nt, Artificial Sequence
  LRRK2 RNA guide
auaaaucucccucugucccucu

SEQ ID NO: 47880 - RNA, 22 nt, Artificial Sequence
  LRRK2 RNA guide
auagugaaugauaaaucucccu

SEQ ID NO: 47881 - RNA, 22 nt, Artificial Sequence
  LRRK2 RNA guide
aucucccucugucccucuccaa

SEQ ID NO: 47882 - RNA, 22 nt, Artificial Sequence
  LRRK2 RNA guide
augauaaaucucccucuguccc

SEQ ID NO: 47883 - RNA, 22 nt, Artificial Sequence
  LRRK2 RNA guide
auuggagagggacagagggaga

SEQ ID NO: 47884 - RNA, 22 nt, Artificial Sequence
  LRRK2 RNA guide
auugugggcccauuggagaggg

SEQ ID NO: 47885 - RNA, 22 nt, Artificial Sequence
  LRRK2 RNA guide
cagagggagauuuaucauucac

SEQ ID NO: 47886 - RNA, 22 nt, Artificial Sequence
  LRRK2 RNA guide
cauuggagagggacagagggag

SEQ ID NO: 47887 - RNA, 22 nt, Artificial Sequence
  LRRK2 RNA guide
ccauuggagagggacagaggga

SEQ ID NO: 47888 - RNA, 22 nt, Artificial Sequence
  LRRK2 RNA guide
cccauuggagagggacagaggg

SEQ ID NO: 47889 - RNA, 22 nt, Artificial Sequence
  LRRK2 RNA guide
cccucugucccucuccaauggg

SEQ ID NO: 47890 - RNA, 22 nt, Artificial Sequence
  LRRK2 RNA guide
ccucugucccucuccaaugggc

SEQ ID NO: 47891 - RNA, 22 nt, Artificial Sequence
  LRRK2 RNA guide
cucccucugucccucuccaaug

SEQ ID NO: 47892 - RNA, 22 nt, Artificial Sequence
  LRRK2 RNA guide
cucugucccucuccaaugggcc

SEQ ID NO: 47893 - RNA, 22 nt, Artificial Sequence
  LRRK2 RNA guide
cugucccucuccaaugggccca

SEQ ID NO: 47894 - RNA, 22 nt, Artificial Sequence
  LRRK2 RNA guide
gaaugauaaaucucccucuguc

SEQ ID NO: 47895 - RNA, 22 nt, Artificial Sequence
  LRRK2 RNA guide
gaauugugggcccauuggagag

SEQ ID NO: 47896 - RNA, 22 nt, Artificial Sequence
  LRRK2 RNA guide
gacagagggagauuuaucauuc

SEQ ID NO: 47897 - RNA, 22 nt, Artificial Sequence
  LRRK2 RNA guide
gagagggacagagggagauuua

SEQ ID NO: 47898 - RNA, 22 nt, Artificial Sequence
  LRRK2 RNA guide
gagggacagagggagauuuauc

SEQ ID NO: 47899 - RNA, 22 nt, Artificial Sequence
  LRRK2 RNA guide
gauaaaucucccucugucccuc

SEQ ID NO: 47900 - RNA, 22 nt, Artificial Sequence
  LRRK2 RNA guide
gcccauuggagagggacagagg

SEQ ID NO: 47901 - RNA, 22 nt, Artificial Sequence
  LRRK2 RNA guide
ggacagagggagauuuaucauu

SEQ ID NO: 47902 - RNA, 22 nt, Artificial Sequence
  LRRK2 RNA guide
ggagagggacagagggagauuu

SEQ ID NO: 47903 - RNA, 22 nt, Artificial Sequence
  LRRK2 RNA guide
ggcccauuggagagggacagag

SEQ ID NO: 47904 - RNA, 22 nt, Artificial Sequence
  LRRK2 RNA guide
gggacagagggagauuuaucau

SEQ ID NO: 47905 - RNA, 22 nt, Artificial Sequence
  LRRK2 RNA guide
gggcccauuggagagggacaga

SEQ ID NO: 47906 - RNA, 22 nt, Artificial Sequence
  LRRK2 RNA guide
gugaaugauaaaucucccucug

SEQ ID NO: 47907 - RNA, 22 nt, Artificial Sequence
  LRRK2 RNA guide
gugggcccauuggagagggaca

SEQ ID NO: 47908 - RNA, 22 nt, Artificial Sequence
  LRRK2 RNA guide
uaaaucucccucugucccucuc

SEQ ID NO: 47909 - RNA, 22 nt, Artificial Sequence
  LRRK2 RNA guide
uagugaaugauaaaucucccuc

SEQ ID NO: 47910 - RNA, 22 nt, Artificial Sequence
  LRRK2 RNA guide
uauagugaaugauaaaucuccc

SEQ ID NO: 47911 - RNA, 22 nt, Artificial Sequence
  LRRK2 RNA guide
ucccucugucccucuccaaugg

SEQ ID NO: 47912 - RNA, 22 nt, Artificial Sequence
  LRRK2 RNA guide
ucucccucugucccucuccaau

SEQ ID NO: 47913 - RNA, 22 nt, Artificial Sequence
  LRRK2 RNA guide
ucugucccucuccaaugggccc

SEQ ID NO: 47914 - RNA, 22 nt, Artificial Sequence
  LRRK2 RNA guide
ugaaugauaaaucucccucugu

SEQ ID NO: 47915 - RNA, 22 nt, Artificial Sequence
  LRRK2 RNA guide
ugauaaaucucccucugucccu

SEQ ID NO: 47916 - RNA, 22 nt, Artificial Sequence
  LRRK2 RNA guide
uggagagggacagagggagauu

SEQ ID NO: 47917 - RNA, 22 nt, Artificial Sequence
  LRRK2 RNA guide
ugggcccauuggagagggacag

SEQ ID NO: 47918 - RNA, 22 nt, Artificial Sequence
  LRRK2 RNA guide
ugugggcccauuggagagggac

SEQ ID NO: 47919 - RNA, 22 nt, Artificial Sequence
  LRRK2 RNA guide
uuggagagggacagagggagau

SEQ ID NO: 47920 - RNA, 22 nt, Artificial Sequence
  LRRK2 RNA guide
uugugggcccauuggagaggga

SEQ ID NO: 47921 - RNA, 20 nt, Artificial Sequence
  LRRK2 RNA guide
aaaucucccuccgucccucu

SEQ ID NO: 47922 - RNA, 20 nt, Artificial Sequence
  LRRK2 RNA guide
aaucucccuccgucccucuc

SEQ ID NO: 47923 - RNA, 20 nt, Artificial Sequence
  LRRK2 RNA guide
aaugauaaaucucccuccgu

SEQ ID NO: 47924 - RNA, 20 nt, Artificial Sequence
  LRRK2 RNA guide
acggagggagauuuaucauu

SEQ ID NO: 47925 - RNA, 20 nt, Artificial Sequence
  LRRK2 RNA guide
agagggacggagggagauuu

SEQ ID NO: 47926 - RNA, 20 nt, Artificial Sequence
  LRRK2 RNA guide
agggacggagggagauuuau

SEQ ID NO: 47927 - RNA, 20 nt, Artificial Sequence
  LRRK2 RNA guide
auaaaucucccuccgucccu

SEQ ID NO: 47928 - RNA, 20 nt, Artificial Sequence
  LRRK2 RNA guide
aucucccuccgucccucucc

SEQ ID NO: 47929 - RNA, 20 nt, Artificial Sequence
  LRRK2 RNA guide
augauaaaucucccuccguc

SEQ ID NO: 47930 - RNA, 20 nt, Artificial Sequence
  LRRK2 RNA guide
auuggagagggacggaggga

SEQ ID NO: 47931 - RNA, 20 nt, Artificial Sequence
  LRRK2 RNA guide
cauuggagagggacggaggg

SEQ ID NO: 47932 - RNA, 20 nt, Artificial Sequence
  LRRK2 RNA guide
ccauuggagagggacggagg

SEQ ID NO: 47933 - RNA, 20 nt, Artificial Sequence
  LRRK2 RNA guide
cccauuggagagggacggag

SEQ ID NO: 47934 - RNA, 20 nt, Artificial Sequence
  LRRK2 RNA guide
cccuccgucccucuccaaug

SEQ ID NO: 47935 - RNA, 20 nt, Artificial Sequence
  LRRK2 RNA guide
ccgucccucuccaaugggcc

SEQ ID NO: 47936 - RNA, 20 nt, Artificial Sequence
  LRRK2 RNA guide
ccuccgucccucuccaaugg

SEQ ID NO: 47937 - RNA, 20 nt, Artificial Sequence
  LRRK2 RNA guide
cggagggagauuuaucauuc

SEQ ID NO: 47938 - RNA, 20 nt, Artificial Sequence
  LRRK2 RNA guide
cucccuccgucccucuccaa

SEQ ID NO: 47939 - RNA, 20 nt, Artificial Sequence
  LRRK2 RNA guide
cuccgucccucuccaauggg

SEQ ID NO: 47940 - RNA, 20 nt, Artificial Sequence
  LRRK2 RNA guide
gaaugauaaaucucccuccg

SEQ ID NO: 47941 - RNA, 20 nt, Artificial Sequence
  LRRK2 RNA guide
gacggagggagauuuaucau

SEQ ID NO: 47942 - RNA, 20 nt, Artificial Sequence
  LRRK2 RNA guide
gagagggacggagggagauu

SEQ ID NO: 47943 - RNA, 20 nt, Artificial Sequence
  LRRK2 RNA guide
gagggacggagggagauuua

SEQ ID NO: 47944 - RNA, 20 nt, Artificial Sequence
  LRRK2 RNA guide
gauaaaucucccuccguccc

SEQ ID NO: 47945 - RNA, 20 nt, Artificial Sequence
  LRRK2 RNA guide
gcccauuggagagggacgga

SEQ ID NO: 47946 - RNA, 20 nt, Artificial Sequence
  LRRK2 RNA guide
ggacggagggagauuuauca

SEQ ID NO: 47947 - RNA, 20 nt, Artificial Sequence
  LRRK2 RNA guide
ggagagggacggagggagau

SEQ ID NO: 47948 - RNA, 20 nt, Artificial Sequence
  LRRK2 RNA guide
ggcccauuggagagggacgg

SEQ ID NO: 47949 - RNA, 20 nt, Artificial Sequence
  LRRK2 RNA guide
gggacggagggagauuuauc

SEQ ID NO: 47950 - RNA, 20 nt, Artificial Sequence
  LRRK2 RNA guide
gggcccauuggagagggacg

SEQ ID NO: 47951 - RNA, 20 nt, Artificial Sequence
  LRRK2 RNA guide
uaaaucucccuccgucccuc

SEQ ID NO: 47952 - RNA, 20 nt, Artificial Sequence
  LRRK2 RNA guide
ucccuccgucccucuccaau

SEQ ID NO: 47953 - RNA, 20 nt, Artificial Sequence
  LRRK2 RNA guide
uccgucccucuccaaugggc

SEQ ID NO: 47954 - RNA, 20 nt, Artificial Sequence
  LRRK2 RNA guide
ucucccuccgucccucucca

SEQ ID NO: 47955 - RNA, 20 nt, Artificial Sequence
  LRRK2 RNA guide
ugaaugauaaaucucccucc

SEQ ID NO: 47956 - RNA, 20 nt, Artificial Sequence
  LRRK2 RNA guide
ugauaaaucucccuccgucc

SEQ ID NO: 47957 - RNA, 20 nt, Artificial Sequence
  LRRK2 RNA guide
uggagagggacggagggaga

SEQ ID NO: 47958 - RNA, 20 nt, Artificial Sequence
  LRRK2 RNA guide
uuggagagggacggagggag

SEQ ID NO: 47959 - RNA, 21 nt, Artificial Sequence
  LRRK2 RNA guide
aaaucucccuccgucccucuc

SEQ ID NO: 47960 - RNA, 21 nt, Artificial Sequence
  LRRK2 RNA guide
aaucucccuccgucccucucc

SEQ ID NO: 47961 - RNA, 21 nt, Artificial Sequence
  LRRK2 RNA guide
aaugauaaaucucccuccguc

SEQ ID NO: 47962 - RNA, 21 nt, Artificial Sequence
  LRRK2 RNA guide
acggagggagauuuaucauuc

SEQ ID NO: 47963 - RNA, 21 nt, Artificial Sequence
  LRRK2 RNA guide
agagggacggagggagauuua

SEQ ID NO: 47964 - RNA, 21 nt, Artificial Sequence
  LRRK2 RNA guide
agggacggagggagauuuauc

SEQ ID NO: 47965 - RNA, 21 nt, Artificial Sequence
  LRRK2 RNA guide
auaaaucucccuccgucccuc

SEQ ID NO: 47966 - RNA, 21 nt, Artificial Sequence
  LRRK2 RNA guide
aucucccuccgucccucucca

SEQ ID NO: 47967 - RNA, 21 nt, Artificial Sequence
  LRRK2 RNA guide
augauaaaucucccuccgucc

SEQ ID NO: 47968 - RNA, 21 nt, Artificial Sequence
  LRRK2 RNA guide
auuggagagggacggagggag

SEQ ID NO: 47969 - RNA, 21 nt, Artificial Sequence
  LRRK2 RNA guide
cauuggagagggacggaggga

SEQ ID NO: 47970 - RNA, 21 nt, Artificial Sequence
  LRRK2 RNA guide
ccauuggagagggacggaggg

SEQ ID NO: 47971 - RNA, 21 nt, Artificial Sequence
  LRRK2 RNA guide
cccauuggagagggacggagg

SEQ ID NO: 47972 - RNA, 21 nt, Artificial Sequence
  LRRK2 RNA guide
cccuccgucccucuccaaugg

SEQ ID NO: 47973 - RNA, 21 nt, Artificial Sequence
  LRRK2 RNA guide
ccgucccucuccaaugggccc

SEQ ID NO: 47974 - RNA, 21 nt, Artificial Sequence
  LRRK2 RNA guide
ccuccgucccucuccaauggg

SEQ ID NO: 47975 - RNA, 21 nt, Artificial Sequence
  LRRK2 RNA guide
cggagggagauuuaucauuca

SEQ ID NO: 47976 - RNA, 21 nt, Artificial Sequence
  LRRK2 RNA guide
cucccuccgucccucuccaau

SEQ ID NO: 47977 - RNA, 21 nt, Artificial Sequence
  LRRK2 RNA guide
cuccgucccucuccaaugggc

SEQ ID NO: 47978 - RNA, 21 nt, Artificial Sequence
  LRRK2 RNA guide
gaaugauaaaucucccuccgu

SEQ ID NO: 47979 - RNA, 21 nt, Artificial Sequence
  LRRK2 RNA guide
gacggagggagauuuaucauu

SEQ ID NO: 47980 - RNA, 21 nt, Artificial Sequence
  LRRK2 RNA guide
gagagggacggagggagauuu

SEQ ID NO: 47981 - RNA, 21 nt, Artificial Sequence
  LRRK2 RNA guide
gagggacggagggagauuuau

SEQ ID NO: 47982 - RNA, 21 nt, Artificial Sequence
  LRRK2 RNA guide
gauaaaucucccuccgucccu

SEQ ID NO: 47983 - RNA, 21 nt, Artificial Sequence
  LRRK2 RNA guide
gcccauuggagagggacggag

SEQ ID NO: 47984 - RNA, 21 nt, Artificial Sequence
  LRRK2 RNA guide
ggacggagggagauuuaucau

SEQ ID NO: 47985 - RNA, 21 nt, Artificial Sequence
  LRRK2 RNA guide
ggagagggacggagggagauu

SEQ ID NO: 47986 - RNA, 21 nt, Artificial Sequence
  LRRK2 RNA guide
ggcccauuggagagggacgga

SEQ ID NO: 47987 - RNA, 21 nt, Artificial Sequence
  LRRK2 RNA guide
gggacggagggagauuuauca

SEQ ID NO: 47988 - RNA, 21 nt, Artificial Sequence
  LRRK2 RNA guide
gggcccauuggagagggacgg

SEQ ID NO: 47989 - RNA, 21 nt, Artificial Sequence
  LRRK2 RNA guide
gugaaugauaaaucucccucc

SEQ ID NO: 47990 - RNA, 21 nt, Artificial Sequence
  LRRK2 RNA guide
uaaaucucccuccgucccucu

SEQ ID NO: 47991 - RNA, 21 nt, Artificial Sequence
  LRRK2 RNA guide
ucccuccgucccucuccaaug

SEQ ID NO: 47992 - RNA, 21 nt, Artificial Sequence
  LRRK2 RNA guide
uccgucccucuccaaugggcc

SEQ ID NO: 47993 - RNA, 21 nt, Artificial Sequence
  LRRK2 RNA guide
ucucccuccgucccucuccaa

SEQ ID NO: 47994 - RNA, 21 nt, Artificial Sequence
  LRRK2 RNA guide
ugaaugauaaaucucccuccg

SEQ ID NO: 47995 - RNA, 21 nt, Artificial Sequence
  LRRK2 RNA guide
ugauaaaucucccuccguccc

SEQ ID NO: 47996 - RNA, 21 nt, Artificial Sequence
  LRRK2 RNA guide
uggagagggacggagggagau

SEQ ID NO: 47997 - RNA, 21 nt, Artificial Sequence
  LRRK2 RNA guide
ugggcccauuggagagggacg

SEQ ID NO: 47998 - RNA, 21 nt, Artificial Sequence
  LRRK2 RNA guide
uuggagagggacggagggaga

SEQ ID NO: 47999 - RNA, 22 nt, Artificial Sequence
  LRRK2 RNA guide
aaaucucccuccgucccucucc

SEQ ID NO: 48000 - RNA, 22 nt, Artificial Sequence
  LRRK2 RNA guide
aaucucccuccgucccucucca

SEQ ID NO: 48001 - RNA, 22 nt, Artificial Sequence
  LRRK2 RNA guide
aaugauaaaucucccuccgucc

SEQ ID NO: 48002 - RNA, 22 nt, Artificial Sequence
  LRRK2 RNA guide
acggagggagauuuaucauuca

SEQ ID NO: 48003 - RNA, 22 nt, Artificial Sequence
  LRRK2 RNA guide
agagggacggagggagauuuau

SEQ ID NO: 48004 - RNA, 22 nt, Artificial Sequence
  LRRK2 RNA guide
agggacggagggagauuuauca

SEQ ID NO: 48005 - RNA, 22 nt, Artificial Sequence
  LRRK2 RNA guide
agugaaugauaaaucucccucc

SEQ ID NO: 48006 - RNA, 22 nt, Artificial Sequence
  LRRK2 RNA guide
auaaaucucccuccgucccucu

SEQ ID NO: 48007 - RNA, 22 nt, Artificial Sequence
  LRRK2 RNA guide
aucucccuccgucccucuccaa

SEQ ID NO: 48008 - RNA, 22 nt, Artificial Sequence
  LRRK2 RNA guide
augauaaaucucccuccguccc

SEQ ID NO: 48009 - RNA, 22 nt, Artificial Sequence
  LRRK2 RNA guide
auuggagagggacggagggaga

SEQ ID NO: 48010 - RNA, 22 nt, Artificial Sequence
  LRRK2 RNA guide
cauuggagagggacggagggag

SEQ ID NO: 48011 - RNA, 22 nt, Artificial Sequence
  LRRK2 RNA guide
ccauuggagagggacggaggga

SEQ ID NO: 48012 - RNA, 22 nt, Artificial Sequence
  LRRK2 RNA guide
cccauuggagagggacggaggg

SEQ ID NO: 48013 - RNA, 22 nt, Artificial Sequence
  LRRK2 RNA guide
cccuccgucccucuccaauggg

SEQ ID NO: 48014 - RNA, 22 nt, Artificial Sequence
  LRRK2 RNA guide
ccgucccucuccaaugggccca

SEQ ID NO: 48015 - RNA, 22 nt, Artificial Sequence
  LRRK2 RNA guide
ccuccgucccucuccaaugggc

SEQ ID NO: 48016 - RNA, 22 nt, Artificial Sequence
  LRRK2 RNA guide
cggagggagauuuaucauucac

SEQ ID NO: 48017 - RNA, 22 nt, Artificial Sequence
  LRRK2 RNA guide
cucccuccgucccucuccaaug

SEQ ID NO: 48018 - RNA, 22 nt, Artificial Sequence
  LRRK2 RNA guide
cuccgucccucuccaaugggcc

SEQ ID NO: 48019 - RNA, 22 nt, Artificial Sequence
  LRRK2 RNA guide
gaaugauaaaucucccuccguc

SEQ ID NO: 48020 - RNA, 22 nt, Artificial Sequence
  LRRK2 RNA guide
gacggagggagauuuaucauuc

SEQ ID NO: 48021 - RNA, 22 nt, Artificial Sequence
  LRRK2 RNA guide
gagagggacggagggagauuua

SEQ ID NO: 48022 - RNA, 22 nt, Artificial Sequence
  LRRK2 RNA guide
gagggacggagggagauuuauc

SEQ ID NO: 48023 - RNA, 22 nt, Artificial Sequence
  LRRK2 RNA guide
gauaaaucucccuccgucccuc

SEQ ID NO: 48024 - RNA, 22 nt, Artificial Sequence
  LRRK2 RNA guide
gcccauuggagagggacggagg

SEQ ID NO: 48025 - RNA, 22 nt, Artificial Sequence
  LRRK2 RNA guide
ggacggagggagauuuaucauu

SEQ ID NO: 48026 - RNA, 22 nt, Artificial Sequence
  LRRK2 RNA guide
ggagagggacggagggagauuu

SEQ ID NO: 48027 - RNA, 22 nt, Artificial Sequence
  LRRK2 RNA guide
ggcccauuggagagggacggag

SEQ ID NO: 48028 - RNA, 22 nt, Artificial Sequence
  LRRK2 RNA guide
gggacggagggagauuuaucau

SEQ ID NO: 48029 - RNA, 22 nt, Artificial Sequence
  LRRK2 RNA guide
gggcccauuggagagggacgga

SEQ ID NO: 48030 - RNA, 22 nt, Artificial Sequence
  LRRK2 RNA guide
gugaaugauaaaucucccuccg

SEQ ID NO: 48031 - RNA, 22 nt, Artificial Sequence
  LRRK2 RNA guide
gugggcccauuggagagggacg

SEQ ID NO: 48032 - RNA, 22 nt, Artificial Sequence
  LRRK2 RNA guide
uaaaucucccuccgucccucuc

SEQ ID NO: 48033 - RNA, 22 nt, Artificial Sequence
  LRRK2 RNA guide
ucccuccgucccucuccaaugg

SEQ ID NO: 48034 - RNA, 22 nt, Artificial Sequence
  LRRK2 RNA guide
uccgucccucuccaaugggccc

SEQ ID NO: 48035 - RNA, 22 nt, Artificial Sequence
  LRRK2 RNA guide
ucucccuccgucccucuccaau

SEQ ID NO: 48036 - RNA, 22 nt, Artificial Sequence
  LRRK2 RNA guide
ugaaugauaaaucucccuccgu

SEQ ID NO: 48037 - RNA, 22 nt, Artificial Sequence
  LRRK2 RNA guide
ugauaaaucucccuccgucccu

SEQ ID NO: 48038 - RNA, 22 nt, Artificial Sequence
  LRRK2 RNA guide
uggagagggacggagggagauu

SEQ ID NO: 48039 - RNA, 22 nt, Artificial Sequence
  LRRK2 RNA guide
ugggcccauuggagagggacgg

SEQ ID NO: 48040 - RNA, 22 nt, Artificial Sequence
  LRRK2 RNA guide
uuggagagggacggagggagau

SEQ ID NO: 48041 - RNA, 20 nt, Artificial Sequence
  LRRK2 RNA guide
aaaacugaaucucuauggaa

SEQ ID NO: 48042 - RNA, 20 nt, Artificial Sequence
  LRRK2 RNA guide
aaacugaaucucuauggaac

SEQ ID NO: 48043 - RNA, 20 nt, Artificial Sequence
  LRRK2 RNA guide
aaaguuaguuccauagagau

SEQ ID NO: 48044 - RNA, 20 nt, Artificial Sequence
  LRRK2 RNA guide
aacugaaucucuauggaacu

SEQ ID NO: 48045 - RNA, 20 nt, Artificial Sequence
  LRRK2 RNA guide
aaguuaguuccauagagauu

SEQ ID NO: 48046 - RNA, 20 nt, Artificial Sequence
  LRRK2 RNA guide
aaucucuauggaacuaacuu

SEQ ID NO: 48047 - RNA, 20 nt, Artificial Sequence
  LRRK2 RNA guide
acagcaaaacugaaucucua

SEQ ID NO: 48048 - RNA, 20 nt, Artificial Sequence
  LRRK2 RNA guide
acugaaucucuauggaacua

SEQ ID NO: 48049 - RNA, 20 nt, Artificial Sequence
  LRRK2 RNA guide
agacagcaaaacugaaucuc

SEQ ID NO: 48050 - RNA, 20 nt, Artificial Sequence
  LRRK2 RNA guide
agcaaaacugaaucucuaug

SEQ ID NO: 48051 - RNA, 20 nt, Artificial Sequence
  LRRK2 RNA guide
aguuaguuccauagagauuc

SEQ ID NO: 48052 - RNA, 20 nt, Artificial Sequence
  LRRK2 RNA guide
aguuccauagagauucaguu

SEQ ID NO: 48053 - RNA, 20 nt, Artificial Sequence
  LRRK2 RNA guide
auaaaguuaguuccauagag

SEQ ID NO: 48054 - RNA, 20 nt, Artificial Sequence
  LRRK2 RNA guide
auagagauucaguuuugcug

SEQ ID NO: 48055 - RNA, 20 nt, Artificial Sequence
  LRRK2 RNA guide
aucucuauggaacuaacuuu

SEQ ID NO: 48056 - RNA, 20 nt, Artificial Sequence
  LRRK2 RNA guide
caaaacugaaucucuaugga

SEQ ID NO: 48057 - RNA, 20 nt, Artificial Sequence
  LRRK2 RNA guide
cagcaaaacugaaucucuau

SEQ ID NO: 48058 - RNA, 20 nt, Artificial Sequence
  LRRK2 RNA guide
cauagagauucaguuuugcu

SEQ ID NO: 48059 - RNA, 20 nt, Artificial Sequence
  LRRK2 RNA guide
ccauagagauucaguuuugc

SEQ ID NO: 48060 - RNA, 20 nt, Artificial Sequence
  LRRK2 RNA guide
ccugaauaaaguuaguucca

SEQ ID NO: 48061 - RNA, 20 nt, Artificial Sequence
  LRRK2 RNA guide
cuauggaacuaacuuuauuc

SEQ ID NO: 48062 - RNA, 20 nt, Artificial Sequence
  LRRK2 RNA guide
cucuauggaacuaacuuuau

SEQ ID NO: 48063 - RNA, 20 nt, Artificial Sequence
  LRRK2 RNA guide
cugaauaaaguuaguuccau

SEQ ID NO: 48064 - RNA, 20 nt, Artificial Sequence
  LRRK2 RNA guide
cugaaucucuauggaacuaa

SEQ ID NO: 48065 - RNA, 20 nt, Artificial Sequence
  LRRK2 RNA guide
gaauaaaguuaguuccauag

SEQ ID NO: 48066 - RNA, 20 nt, Artificial Sequence
  LRRK2 RNA guide
gaaucucuauggaacuaacu

SEQ ID NO: 48067 - RNA, 20 nt, Artificial Sequence
  LRRK2 RNA guide
gacagcaaaacugaaucucu

SEQ ID NO: 48068 - RNA, 20 nt, Artificial Sequence
  LRRK2 RNA guide
gcaaaacugaaucucuaugg

SEQ ID NO: 48069 - RNA, 20 nt, Artificial Sequence
  LRRK2 RNA guide
guagacagcaaaacugaauc

SEQ ID NO: 48070 - RNA, 20 nt, Artificial Sequence
  LRRK2 RNA guide
guuaguuccauagagauuca

SEQ ID NO: 48071 - RNA, 20 nt, Artificial Sequence
  LRRK2 RNA guide
guuccauagagauucaguuu

SEQ ID NO: 48072 - RNA, 20 nt, Artificial Sequence
  LRRK2 RNA guide
uaaaguuaguuccauagaga

SEQ ID NO: 48073 - RNA, 20 nt, Artificial Sequence
  LRRK2 RNA guide
uagacagcaaaacugaaucu

SEQ ID NO: 48074 - RNA, 20 nt, Artificial Sequence
  LRRK2 RNA guide
uaguuccauagagauucagu

SEQ ID NO: 48075 - RNA, 20 nt, Artificial Sequence
  LRRK2 RNA guide
uccauagagauucaguuuug

SEQ ID NO: 48076 - RNA, 20 nt, Artificial Sequence
  LRRK2 RNA guide
uccugaauaaaguuaguucc

SEQ ID NO: 48077 - RNA, 20 nt, Artificial Sequence
  LRRK2 RNA guide
ucucuauggaacuaacuuua

SEQ ID NO: 48078 - RNA, 20 nt, Artificial Sequence
  LRRK2 RNA guide
ugaaucucuauggaacuaac

SEQ ID NO: 48079 - RNA, 20 nt, Artificial Sequence
  LRRK2 RNA guide
uguagacagcaaaacugaau

SEQ ID NO: 48080 - RNA, 20 nt, Artificial Sequence
  LRRK2 RNA guide
uuaguuccauagagauucag

SEQ ID NO: 48081 - RNA, 20 nt, Artificial Sequence
  LRRK2 RNA guide
uuccauagagauucaguuuu

SEQ ID NO: 48082 - RNA, 20 nt, Artificial Sequence
  LRRK2 RNA guide
uuccugaauaaaguuaguuc

SEQ ID NO: 48083 - RNA, 21 nt, Artificial Sequence
  LRRK2 RNA guide
aaaacugaaucucuauggaac

SEQ ID NO: 48084 - RNA, 21 nt, Artificial Sequence
  LRRK2 RNA guide
aaacugaaucucuauggaacu

SEQ ID NO: 48085 - RNA, 21 nt, Artificial Sequence
  LRRK2 RNA guide
aacugaaucucuauggaacua

SEQ ID NO: 48086 - RNA, 21 nt, Artificial Sequence
  LRRK2 RNA guide
aaguuaguuccauagagauuc

SEQ ID NO: 48087 - RNA, 21 nt, Artificial Sequence
  LRRK2 RNA guide
acagcaaaacugaaucucuau

SEQ ID NO: 48088 - RNA, 21 nt, Artificial Sequence
  LRRK2 RNA guide
acugaaucucuauggaacuaa

SEQ ID NO: 48089 - RNA, 21 nt, Artificial Sequence
  LRRK2 RNA guide
agacagcaaaacugaaucucu

SEQ ID NO: 48090 - RNA, 21 nt, Artificial Sequence
  LRRK2 RNA guide
agcaaaacugaaucucuaugg

SEQ ID NO: 48091 - RNA, 21 nt, Artificial Sequence
  LRRK2 RNA guide
aguuaguuccauagagauuca

SEQ ID NO: 48092 - RNA, 21 nt, Artificial Sequence
  LRRK2 RNA guide
aguuccauagagauucaguuu

SEQ ID NO: 48093 - RNA, 21 nt, Artificial Sequence
  LRRK2 RNA guide
auagagauucaguuuugcugu

SEQ ID NO: 48094 - RNA, 21 nt, Artificial Sequence
  LRRK2 RNA guide
auguagacagcaaaacugaau

SEQ ID NO: 48095 - RNA, 21 nt, Artificial Sequence
  LRRK2 RNA guide
caaaacugaaucucuauggaa

SEQ ID NO: 48096 - RNA, 21 nt, Artificial Sequence
  LRRK2 RNA guide
cagcaaaacugaaucucuaug

SEQ ID NO: 48097 - RNA, 21 nt, Artificial Sequence
  LRRK2 RNA guide
cauagagauucaguuuugcug

SEQ ID NO: 48098 - RNA, 21 nt, Artificial Sequence
  LRRK2 RNA guide
ccauagagauucaguuuugcu

SEQ ID NO: 48099 - RNA, 21 nt, Artificial Sequence
  LRRK2 RNA guide
ccugaauaaaguuaguuccau

SEQ ID NO: 48100 - RNA, 21 nt, Artificial Sequence
  LRRK2 RNA guide
cugaaucucuauggaacuaac

SEQ ID NO: 48101 - RNA, 21 nt, Artificial Sequence
  LRRK2 RNA guide
gaaucucuauggaacuaacuu

SEQ ID NO: 48102 - RNA, 21 nt, Artificial Sequence
  LRRK2 RNA guide
gacagcaaaacugaaucucua

SEQ ID NO: 48103 - RNA, 21 nt, Artificial Sequence
  LRRK2 RNA guide
gcaaaacugaaucucuaugga

SEQ ID NO: 48104 - RNA, 21 nt, Artificial Sequence
  LRRK2 RNA guide
guagacagcaaaacugaaucu

SEQ ID NO: 48105 - RNA, 21 nt, Artificial Sequence
  LRRK2 RNA guide
guuaguuccauagagauucag

SEQ ID NO: 48106 - RNA, 21 nt, Artificial Sequence
  LRRK2 RNA guide
guuccauagagauucaguuuu

SEQ ID NO: 48107 - RNA, 21 nt, Artificial Sequence
  LRRK2 RNA guide
uagacagcaaaacugaaucuc

SEQ ID NO: 48108 - RNA, 21 nt, Artificial Sequence
  LRRK2 RNA guide
uaguuccauagagauucaguu

SEQ ID NO: 48109 - RNA, 21 nt, Artificial Sequence
  LRRK2 RNA guide
uccauagagauucaguuuugc

SEQ ID NO: 48110 - RNA, 21 nt, Artificial Sequence
  LRRK2 RNA guide
uccugaauaaaguuaguucca

SEQ ID NO: 48111 - RNA, 21 nt, Artificial Sequence
  LRRK2 RNA guide
ugaaucucuauggaacuaacu

SEQ ID NO: 48112 - RNA, 21 nt, Artificial Sequence
  LRRK2 RNA guide
uguagacagcaaaacugaauc

SEQ ID NO: 48113 - RNA, 21 nt, Artificial Sequence
  LRRK2 RNA guide
uuaguuccauagagauucagu

SEQ ID NO: 48114 - RNA, 21 nt, Artificial Sequence
  LRRK2 RNA guide
uuccauagagauucaguuuug

SEQ ID NO: 48115 - RNA, 21 nt, Artificial Sequence
  LRRK2 RNA guide
uuccugaauaaaguuaguucc

SEQ ID NO: 48116 - RNA, 22 nt, Artificial Sequence
  LRRK2 RNA guide
aaaacugaaucucuauggaacu

SEQ ID NO: 48117 - RNA, 22 nt, Artificial Sequence
  LRRK2 RNA guide
aaacugaaucucuauggaacua

SEQ ID NO: 48118 - RNA, 22 nt, Artificial Sequence
  LRRK2 RNA guide
aaaguuaguuccauagagauuc

SEQ ID NO: 48119 - RNA, 22 nt, Artificial Sequence
  LRRK2 RNA guide
aacugaaucucuauggaacuaa

SEQ ID NO: 48120 - RNA, 22 nt, Artificial Sequence
  LRRK2 RNA guide
aaguuaguuccauagagauuca

SEQ ID NO: 48121 - RNA, 22 nt, Artificial Sequence
  LRRK2 RNA guide
acagcaaaacugaaucucuaug

SEQ ID NO: 48122 - RNA, 22 nt, Artificial Sequence
  LRRK2 RNA guide
acugaaucucuauggaacuaac

SEQ ID NO: 48123 - RNA, 22 nt, Artificial Sequence
  LRRK2 RNA guide
agacagcaaaacugaaucucua

SEQ ID NO: 48124 - RNA, 22 nt, Artificial Sequence
  LRRK2 RNA guide
agcaaaacugaaucucuaugga

SEQ ID NO: 48125 - RNA, 22 nt, Artificial Sequence
  LRRK2 RNA guide
aguuaguuccauagagauucag

SEQ ID NO: 48126 - RNA, 22 nt, Artificial Sequence
  LRRK2 RNA guide
aguuccauagagauucaguuuu

SEQ ID NO: 48127 - RNA, 22 nt, Artificial Sequence
  LRRK2 RNA guide
auagagauucaguuuugcuguc

SEQ ID NO: 48128 - RNA, 22 nt, Artificial Sequence
  LRRK2 RNA guide
auguagacagcaaaacugaauc

SEQ ID NO: 48129 - RNA, 22 nt, Artificial Sequence
  LRRK2 RNA guide
caaaacugaaucucuauggaac

SEQ ID NO: 48130 - RNA, 22 nt, Artificial Sequence
  LRRK2 RNA guide
cagcaaaacugaaucucuaugg

SEQ ID NO: 48131 - RNA, 22 nt, Artificial Sequence
  LRRK2 RNA guide
cauagagauucaguuuugcugu

SEQ ID NO: 48132 - RNA, 22 nt, Artificial Sequence
  LRRK2 RNA guide
cauguagacagcaaaacugaau

SEQ ID NO: 48133 - RNA, 22 nt, Artificial Sequence
  LRRK2 RNA guide
ccauagagauucaguuuugcug

SEQ ID NO: 48134 - RNA, 22 nt, Artificial Sequence
  LRRK2 RNA guide
ccugaauaaaguuaguuccaua

SEQ ID NO: 48135 - RNA, 22 nt, Artificial Sequence
  LRRK2 RNA guide
ccuuuuccugaauaaaguuagu

SEQ ID NO: 48136 - RNA, 22 nt, Artificial Sequence
  LRRK2 RNA guide
cuauggaacuaacuuuauucag

SEQ ID NO: 48137 - RNA, 22 nt, Artificial Sequence
  LRRK2 RNA guide
cucuauggaacuaacuuuauuc

SEQ ID NO: 48138 - RNA, 22 nt, Artificial Sequence
  LRRK2 RNA guide
cugaauaaaguuaguuccauag

SEQ ID NO: 48139 - RNA, 22 nt, Artificial Sequence
  LRRK2 RNA guide
cugaaucucuauggaacuaacu

SEQ ID NO: 48140 - RNA, 22 nt, Artificial Sequence
  LRRK2 RNA guide
gaauaaaguuaguuccauagag

SEQ ID NO: 48141 - RNA, 22 nt, Artificial Sequence
  LRRK2 RNA guide
gaaucucuauggaacuaacuuu

SEQ ID NO: 48142 - RNA, 22 nt, Artificial Sequence
  LRRK2 RNA guide
gacagcaaaacugaaucucuau

SEQ ID NO: 48143 - RNA, 22 nt, Artificial Sequence
  LRRK2 RNA guide
gcaaaacugaaucucuauggaa

SEQ ID NO: 48144 - RNA, 22 nt, Artificial Sequence
  LRRK2 RNA guide
guagacagcaaaacugaaucuc

SEQ ID NO: 48145 - RNA, 22 nt, Artificial Sequence
  LRRK2 RNA guide
guuaguuccauagagauucagu

SEQ ID NO: 48146 - RNA, 22 nt, Artificial Sequence
  LRRK2 RNA guide
guuccauagagauucaguuuug

SEQ ID NO: 48147 - RNA, 22 nt, Artificial Sequence
  LRRK2 RNA guide
uagacagcaaaacugaaucucu

SEQ ID NO: 48148 - RNA, 22 nt, Artificial Sequence
  LRRK2 RNA guide
uaguuccauagagauucaguuu

SEQ ID NO: 48149 - RNA, 22 nt, Artificial Sequence
  LRRK2 RNA guide
uauggaacuaacuuuauucagg

SEQ ID NO: 48150 - RNA, 22 nt, Artificial Sequence
  LRRK2 RNA guide
uccauagagauucaguuuugcu

SEQ ID NO: 48151 - RNA, 22 nt, Artificial Sequence
  LRRK2 RNA guide
uccugaauaaaguuaguuccau

SEQ ID NO: 48152 - RNA, 22 nt, Artificial Sequence
  LRRK2 RNA guide
ugaaucucuauggaacuaacuu

SEQ ID NO: 48153 - RNA, 22 nt, Artificial Sequence
  LRRK2 RNA guide
uguagacagcaaaacugaaucu

SEQ ID NO: 48154 - RNA, 22 nt, Artificial Sequence
  LRRK2 RNA guide
uuaguuccauagagauucaguu

SEQ ID NO: 48155 - RNA, 22 nt, Artificial Sequence
  LRRK2 RNA guide
uuccauagagauucaguuuugc

SEQ ID NO: 48156 - RNA, 22 nt, Artificial Sequence
  LRRK2 RNA guide
uuccugaauaaaguuaguucca

SEQ ID NO: 48157 - RNA, 22 nt, Artificial Sequence
  LRRK2 RNA guide
uuuccugaauaaaguuaguucc

SEQ ID NO: 48158 - RNA, 20 nt, Artificial Sequence
  LRRK2 RNA guide
aaaacugaaucucuguggaa

SEQ ID NO: 48159 - RNA, 20 nt, Artificial Sequence
  LRRK2 RNA guide
aaacugaaucucuguggaac

SEQ ID NO: 48160 - RNA, 20 nt, Artificial Sequence
  LRRK2 RNA guide
aaaguuaguuccacagagau

SEQ ID NO: 48161 - RNA, 20 nt, Artificial Sequence
  LRRK2 RNA guide
aacugaaucucuguggaacu

SEQ ID NO: 48162 - RNA, 20 nt, Artificial Sequence
  LRRK2 RNA guide
aaguuaguuccacagagauu

SEQ ID NO: 48163 - RNA, 20 nt, Artificial Sequence
  LRRK2 RNA guide
aauaaaguuaguuccacaga

SEQ ID NO: 48164 - RNA, 20 nt, Artificial Sequence
  LRRK2 RNA guide
aaucucuguggaacuaacuu

SEQ ID NO: 48165 - RNA, 20 nt, Artificial Sequence
  LRRK2 RNA guide
acagagauucaguuuugcug

SEQ ID NO: 48166 - RNA, 20 nt, Artificial Sequence
  LRRK2 RNA guide
acagcaaaacugaaucucug

SEQ ID NO: 48167 - RNA, 20 nt, Artificial Sequence
  LRRK2 RNA guide
acugaaucucuguggaacua

SEQ ID NO: 48168 - RNA, 20 nt, Artificial Sequence
  LRRK2 RNA guide
agcaaaacugaaucucugug

SEQ ID NO: 48169 - RNA, 20 nt, Artificial Sequence
  LRRK2 RNA guide
aguuaguuccacagagauuc

SEQ ID NO: 48170 - RNA, 20 nt, Artificial Sequence
  LRRK2 RNA guide
aguuccacagagauucaguu

SEQ ID NO: 48171 - RNA, 20 nt, Artificial Sequence
  LRRK2 RNA guide
auaaaguuaguuccacagag

SEQ ID NO: 48172 - RNA, 20 nt, Artificial Sequence
  LRRK2 RNA guide
aucucuguggaacuaacuuu

SEQ ID NO: 48173 - RNA, 20 nt, Artificial Sequence
  LRRK2 RNA guide
caaaacugaaucucugugga

SEQ ID NO: 48174 - RNA, 20 nt, Artificial Sequence
  LRRK2 RNA guide
cacagagauucaguuuugcu

SEQ ID NO: 48175 - RNA, 20 nt, Artificial Sequence
  LRRK2 RNA guide
cagcaaaacugaaucucugu

SEQ ID NO: 48176 - RNA, 20 nt, Artificial Sequence
  LRRK2 RNA guide
ccacagagauucaguuuugc

SEQ ID NO: 48177 - RNA, 20 nt, Artificial Sequence
  LRRK2 RNA guide
cucuguggaacuaacuuuau

SEQ ID NO: 48178 - RNA, 20 nt, Artificial Sequence
  LRRK2 RNA guide
cugaauaaaguuaguuccac

SEQ ID NO: 48179 - RNA, 20 nt, Artificial Sequence
  LRRK2 RNA guide
cugaaucucuguggaacuaa

SEQ ID NO: 48180 - RNA, 20 nt, Artificial Sequence
  LRRK2 RNA guide
cuguggaacuaacuuuauuc

SEQ ID NO: 48181 - RNA, 20 nt, Artificial Sequence
  LRRK2 RNA guide
gaauaaaguuaguuccacag

SEQ ID NO: 48182 - RNA, 20 nt, Artificial Sequence
  LRRK2 RNA guide
gaaucucuguggaacuaacu

SEQ ID NO: 48183 - RNA, 20 nt, Artificial Sequence
  LRRK2 RNA guide
gcaaaacugaaucucugugg

SEQ ID NO: 48184 - RNA, 20 nt, Artificial Sequence
  LRRK2 RNA guide
guuaguuccacagagauuca

SEQ ID NO: 48185 - RNA, 20 nt, Artificial Sequence
  LRRK2 RNA guide
guuccacagagauucaguuu

SEQ ID NO: 48186 - RNA, 20 nt, Artificial Sequence
  LRRK2 RNA guide
uaaaguuaguuccacagaga

SEQ ID NO: 48187 - RNA, 20 nt, Artificial Sequence
  LRRK2 RNA guide
uaguuccacagagauucagu

SEQ ID NO: 48188 - RNA, 20 nt, Artificial Sequence
  LRRK2 RNA guide
uccacagagauucaguuuug

SEQ ID NO: 48189 - RNA, 20 nt, Artificial Sequence
  LRRK2 RNA guide
ucucuguggaacuaacuuua

SEQ ID NO: 48190 - RNA, 20 nt, Artificial Sequence
  LRRK2 RNA guide
ucuguggaacuaacuuuauu

SEQ ID NO: 48191 - RNA, 20 nt, Artificial Sequence
  LRRK2 RNA guide
ugaauaaaguuaguuccaca

SEQ ID NO: 48192 - RNA, 20 nt, Artificial Sequence
  LRRK2 RNA guide
ugaaucucuguggaacuaac

SEQ ID NO: 48193 - RNA, 20 nt, Artificial Sequence
  LRRK2 RNA guide
uguggaacuaacuuuauuca

SEQ ID NO: 48194 - RNA, 20 nt, Artificial Sequence
  LRRK2 RNA guide
uuaguuccacagagauucag

SEQ ID NO: 48195 - RNA, 20 nt, Artificial Sequence
  LRRK2 RNA guide
uuccacagagauucaguuuu

SEQ ID NO: 48196 - RNA, 21 nt, Artificial Sequence
  LRRK2 RNA guide
aaaacugaaucucuguggaac

SEQ ID NO: 48197 - RNA, 21 nt, Artificial Sequence
  LRRK2 RNA guide
aaacugaaucucuguggaacu

SEQ ID NO: 48198 - RNA, 21 nt, Artificial Sequence
  LRRK2 RNA guide
aaaguuaguuccacagagauu

SEQ ID NO: 48199 - RNA, 21 nt, Artificial Sequence
  LRRK2 RNA guide
aacugaaucucuguggaacua

SEQ ID NO: 48200 - RNA, 21 nt, Artificial Sequence
  LRRK2 RNA guide
aaguuaguuccacagagauuc

SEQ ID NO: 48201 - RNA, 21 nt, Artificial Sequence
  LRRK2 RNA guide
aauaaaguuaguuccacagag

SEQ ID NO: 48202 - RNA, 21 nt, Artificial Sequence
  LRRK2 RNA guide
aaucucuguggaacuaacuuu

SEQ ID NO: 48203 - RNA, 21 nt, Artificial Sequence
  LRRK2 RNA guide
acagagauucaguuuugcugu

SEQ ID NO: 48204 - RNA, 21 nt, Artificial Sequence
  LRRK2 RNA guide
acagcaaaacugaaucucugu

SEQ ID NO: 48205 - RNA, 21 nt, Artificial Sequence
  LRRK2 RNA guide
acugaaucucuguggaacuaa

SEQ ID NO: 48206 - RNA, 21 nt, Artificial Sequence
  LRRK2 RNA guide
agcaaaacugaaucucugugg

SEQ ID NO: 48207 - RNA, 21 nt, Artificial Sequence
  LRRK2 RNA guide
aguuaguuccacagagauuca

SEQ ID NO: 48208 - RNA, 21 nt, Artificial Sequence
  LRRK2 RNA guide
aguuccacagagauucaguuu

SEQ ID NO: 48209 - RNA, 21 nt, Artificial Sequence
  LRRK2 RNA guide
auaaaguuaguuccacagaga

SEQ ID NO: 48210 - RNA, 21 nt, Artificial Sequence
  LRRK2 RNA guide
aucucuguggaacuaacuuua

SEQ ID NO: 48211 - RNA, 21 nt, Artificial Sequence
  LRRK2 RNA guide
caaaacugaaucucuguggaa

SEQ ID NO: 48212 - RNA, 21 nt, Artificial Sequence
  LRRK2 RNA guide
cacagagauucaguuuugcug

SEQ ID NO: 48213 - RNA, 21 nt, Artificial Sequence
  LRRK2 RNA guide
cagcaaaacugaaucucugug

SEQ ID NO: 48214 - RNA, 21 nt, Artificial Sequence
  LRRK2 RNA guide
ccacagagauucaguuuugcu

SEQ ID NO: 48215 - RNA, 21 nt, Artificial Sequence
  LRRK2 RNA guide
ccugaauaaaguuaguuccac

SEQ ID NO: 48216 - RNA, 21 nt, Artificial Sequence
  LRRK2 RNA guide
cucuguggaacuaacuuuauu

SEQ ID NO: 48217 - RNA, 21 nt, Artificial Sequence
  LRRK2 RNA guide
cugaauaaaguuaguuccaca

SEQ ID NO: 48218 - RNA, 21 nt, Artificial Sequence
  LRRK2 RNA guide
cugaaucucuguggaacuaac

SEQ ID NO: 48219 - RNA, 21 nt, Artificial Sequence
  LRRK2 RNA guide
cuguggaacuaacuuuauuca

SEQ ID NO: 48220 - RNA, 21 nt, Artificial Sequence
  LRRK2 RNA guide
gaauaaaguuaguuccacaga

SEQ ID NO: 48221 - RNA, 21 nt, Artificial Sequence
  LRRK2 RNA guide
gaaucucuguggaacuaacuu

SEQ ID NO: 48222 - RNA, 21 nt, Artificial Sequence
  LRRK2 RNA guide
gacagcaaaacugaaucucug

SEQ ID NO: 48223 - RNA, 21 nt, Artificial Sequence
  LRRK2 RNA guide
gcaaaacugaaucucugugga

SEQ ID NO: 48224 - RNA, 21 nt, Artificial Sequence
  LRRK2 RNA guide
guuaguuccacagagauucag

SEQ ID NO: 48225 - RNA, 21 nt, Artificial Sequence
  LRRK2 RNA guide
guuccacagagauucaguuuu

SEQ ID NO: 48226 - RNA, 21 nt, Artificial Sequence
  LRRK2 RNA guide
uaaaguuaguuccacagagau

SEQ ID NO: 48227 - RNA, 21 nt, Artificial Sequence
  LRRK2 RNA guide
uaguuccacagagauucaguu

SEQ ID NO: 48228 - RNA, 21 nt, Artificial Sequence
  LRRK2 RNA guide
uccacagagauucaguuuugc

SEQ ID NO: 48229 - RNA, 21 nt, Artificial Sequence
  LRRK2 RNA guide
ucucuguggaacuaacuuuau

SEQ ID NO: 48230 - RNA, 21 nt, Artificial Sequence
  LRRK2 RNA guide
ucuguggaacuaacuuuauuc

SEQ ID NO: 48231 - RNA, 21 nt, Artificial Sequence
  LRRK2 RNA guide
ugaauaaaguuaguuccacag

SEQ ID NO: 48232 - RNA, 21 nt, Artificial Sequence
  LRRK2 RNA guide
ugaaucucuguggaacuaacu

SEQ ID NO: 48233 - RNA, 21 nt, Artificial Sequence
  LRRK2 RNA guide
uguggaacuaacuuuauucag

SEQ ID NO: 48234 - RNA, 21 nt, Artificial Sequence
  LRRK2 RNA guide
uuaguuccacagagauucagu

SEQ ID NO: 48235 - RNA, 21 nt, Artificial Sequence
  LRRK2 RNA guide
uuccacagagauucaguuuug

SEQ ID NO: 48236 - RNA, 22 nt, Artificial Sequence
  LRRK2 RNA guide
aaaacugaaucucuguggaacu

SEQ ID NO: 48237 - RNA, 22 nt, Artificial Sequence
  LRRK2 RNA guide
aaacugaaucucuguggaacua

SEQ ID NO: 48238 - RNA, 22 nt, Artificial Sequence
  LRRK2 RNA guide
aaaguuaguuccacagagauuc

SEQ ID NO: 48239 - RNA, 22 nt, Artificial Sequence
  LRRK2 RNA guide
aacugaaucucuguggaacuaa

SEQ ID NO: 48240 - RNA, 22 nt, Artificial Sequence
  LRRK2 RNA guide
aaguuaguuccacagagauuca

SEQ ID NO: 48241 - RNA, 22 nt, Artificial Sequence
  LRRK2 RNA guide
aauaaaguuaguuccacagaga

SEQ ID NO: 48242 - RNA, 22 nt, Artificial Sequence
  LRRK2 RNA guide
aaucucuguggaacuaacuuua

SEQ ID NO: 48243 - RNA, 22 nt, Artificial Sequence
  LRRK2 RNA guide
acagagauucaguuuugcuguc

SEQ ID NO: 48244 - RNA, 22 nt, Artificial Sequence
  LRRK2 RNA guide
acagcaaaacugaaucucugug

SEQ ID NO: 48245 - RNA, 22 nt, Artificial Sequence
  LRRK2 RNA guide
acugaaucucuguggaacuaac

SEQ ID NO: 48246 - RNA, 22 nt, Artificial Sequence
  LRRK2 RNA guide
agacagcaaaacugaaucucug

SEQ ID NO: 48247 - RNA, 22 nt, Artificial Sequence
  LRRK2 RNA guide
agcaaaacugaaucucugugga

SEQ ID NO: 48248 - RNA, 22 nt, Artificial Sequence
  LRRK2 RNA guide
aguuaguuccacagagauucag

SEQ ID NO: 48249 - RNA, 22 nt, Artificial Sequence
  LRRK2 RNA guide
aguuccacagagauucaguuuu

SEQ ID NO: 48250 - RNA, 22 nt, Artificial Sequence
  LRRK2 RNA guide
auaaaguuaguuccacagagau

SEQ ID NO: 48251 - RNA, 22 nt, Artificial Sequence
  LRRK2 RNA guide
aucucuguggaacuaacuuuau

SEQ ID NO: 48252 - RNA, 22 nt, Artificial Sequence
  LRRK2 RNA guide
caaaacugaaucucuguggaac

SEQ ID NO: 48253 - RNA, 22 nt, Artificial Sequence
  LRRK2 RNA guide
cacagagauucaguuuugcugu

SEQ ID NO: 48254 - RNA, 22 nt, Artificial Sequence
  LRRK2 RNA guide
cagcaaaacugaaucucugugg

SEQ ID NO: 48255 - RNA, 22 nt, Artificial Sequence
  LRRK2 RNA guide
ccacagagauucaguuuugcug

SEQ ID NO: 48256 - RNA, 22 nt, Artificial Sequence
  LRRK2 RNA guide
ccugaauaaaguuaguuccaca

SEQ ID NO: 48257 - RNA, 22 nt, Artificial Sequence
  LRRK2 RNA guide
cucuguggaacuaacuuuauuc

SEQ ID NO: 48258 - RNA, 22 nt, Artificial Sequence
  LRRK2 RNA guide
cugaauaaaguuaguuccacag

SEQ ID NO: 48259 - RNA, 22 nt, Artificial Sequence
  LRRK2 RNA guide
cugaaucucuguggaacuaacu

SEQ ID NO: 48260 - RNA, 22 nt, Artificial Sequence
  LRRK2 RNA guide
cuguggaacuaacuuuauucag

SEQ ID NO: 48261 - RNA, 22 nt, Artificial Sequence
  LRRK2 RNA guide
gaauaaaguuaguuccacagag

SEQ ID NO: 48262 - RNA, 22 nt, Artificial Sequence
  LRRK2 RNA guide
gaaucucuguggaacuaacuuu

SEQ ID NO: 48263 - RNA, 22 nt, Artificial Sequence
  LRRK2 RNA guide
gacagcaaaacugaaucucugu

SEQ ID NO: 48264 - RNA, 22 nt, Artificial Sequence
  LRRK2 RNA guide
gcaaaacugaaucucuguggaa

SEQ ID NO: 48265 - RNA, 22 nt, Artificial Sequence
  LRRK2 RNA guide
guuaguuccacagagauucagu

SEQ ID NO: 48266 - RNA, 22 nt, Artificial Sequence
  LRRK2 RNA guide
guuccacagagauucaguuuug

SEQ ID NO: 48267 - RNA, 22 nt, Artificial Sequence
  LRRK2 RNA guide
uaaaguuaguuccacagagauu

SEQ ID NO: 48268 - RNA, 22 nt, Artificial Sequence
  LRRK2 RNA guide
uaguuccacagagauucaguuu

SEQ ID NO: 48269 - RNA, 22 nt, Artificial Sequence
  LRRK2 RNA guide
uccacagagauucaguuuugcu

SEQ ID NO: 48270 - RNA, 22 nt, Artificial Sequence
  LRRK2 RNA guide
uccugaauaaaguuaguuccac

SEQ ID NO: 48271 - RNA, 22 nt, Artificial Sequence
  LRRK2 RNA guide
ucucuguggaacuaacuuuauu

SEQ ID NO: 48272 - RNA, 22 nt, Artificial Sequence
  LRRK2 RNA guide
ucuguggaacuaacuuuauuca

SEQ ID NO: 48273 - RNA, 22 nt, Artificial Sequence
  LRRK2 RNA guide
ugaauaaaguuaguuccacaga

SEQ ID NO: 48274 - RNA, 22 nt, Artificial Sequence
  LRRK2 RNA guide
ugaaucucuguggaacuaacuu

SEQ ID NO: 48275 - RNA, 22 nt, Artificial Sequence
  LRRK2 RNA guide
uguggaacuaacuuuauucagg

SEQ ID NO: 48276 - RNA, 22 nt, Artificial Sequence
  LRRK2 RNA guide
uuaguuccacagagauucaguu

SEQ ID NO: 48277 - RNA, 22 nt, Artificial Sequence
  LRRK2 RNA guide
uuccacagagauucaguuuugc

SEQ ID NO: 48278 - RNA, 20 nt, Artificial Sequence
  LRRK2 RNA guide
aaccauguacacaaugcuuu

SEQ ID NO: 48279 - RNA, 20 nt, Artificial Sequence
  LRRK2 RNA guide
aaugcuuucauguagacagc

SEQ ID NO: 48280 - RNA, 20 nt, Artificial Sequence
  LRRK2 RNA guide
acaaugcuuucauguagaca

SEQ ID NO: 48281 - RNA, 20 nt, Artificial Sequence
  LRRK2 RNA guide
acacaaugcuuucauguaga

SEQ ID NO: 48282 - RNA, 20 nt, Artificial Sequence
  LRRK2 RNA guide
acaugaaagcauuguguaca

SEQ ID NO: 48283 - RNA, 20 nt, Artificial Sequence
  LRRK2 RNA guide
accauguacacaaugcuuuc

SEQ ID NO: 48284 - RNA, 20 nt, Artificial Sequence
  LRRK2 RNA guide
agagauucaguuuugcuguc

SEQ ID NO: 48285 - RNA, 20 nt, Artificial Sequence
  LRRK2 RNA guide
agauucaguuuugcugucua

SEQ ID NO: 48286 - RNA, 20 nt, Artificial Sequence
  LRRK2 RNA guide
aguuuugcugucuacaugaa

SEQ ID NO: 48287 - RNA, 20 nt, Artificial Sequence
  LRRK2 RNA guide
auaaccauguacacaaugcu

SEQ ID NO: 48288 - RNA, 20 nt, Artificial Sequence
  LRRK2 RNA guide
augcuuucauguagacagca

SEQ ID NO: 48289 - RNA, 20 nt, Artificial Sequence
  LRRK2 RNA guide
auguacacaaugcuuucaug

SEQ ID NO: 48290 - RNA, 20 nt, Artificial Sequence
  LRRK2 RNA guide
auguagacagcaaaacugaa

SEQ ID NO: 48291 - RNA, 20 nt, Artificial Sequence
  LRRK2 RNA guide
auucaguuuugcugucuaca

SEQ ID NO: 48292 - RNA, 20 nt, Artificial Sequence
  LRRK2 RNA guide
caaugcuuucauguagacag

SEQ ID NO: 48293 - RNA, 20 nt, Artificial Sequence
  LRRK2 RNA guide
cacaaugcuuucauguagac

SEQ ID NO: 48294 - RNA, 20 nt, Artificial Sequence
  LRRK2 RNA guide
caguuuugcugucuacauga

SEQ ID NO: 48295 - RNA, 20 nt, Artificial Sequence
  LRRK2 RNA guide
caugaaagcauuguguacau

SEQ ID NO: 48296 - RNA, 20 nt, Artificial Sequence
  LRRK2 RNA guide
cauguacacaaugcuuucau

SEQ ID NO: 48297 - RNA, 20 nt, Artificial Sequence
  LRRK2 RNA guide
cauguagacagcaaaacuga

SEQ ID NO: 48298 - RNA, 20 nt, Artificial Sequence
  LRRK2 RNA guide
ccauguacacaaugcuuuca

SEQ ID NO: 48299 - RNA, 20 nt, Artificial Sequence
  LRRK2 RNA guide
cuacaugaaagcauugugua

SEQ ID NO: 48300 - RNA, 20 nt, Artificial Sequence
  LRRK2 RNA guide
cugucuacaugaaagcauug

SEQ ID NO: 48301 - RNA, 20 nt, Artificial Sequence
  LRRK2 RNA guide
cuuucauguagacagcaaaa

SEQ ID NO: 48302 - RNA, 20 nt, Artificial Sequence
  LRRK2 RNA guide
gagauucaguuuugcugucu

SEQ ID NO: 48303 - RNA, 20 nt, Artificial Sequence
  LRRK2 RNA guide
gauucaguuuugcugucuac

SEQ ID NO: 48304 - RNA, 20 nt, Artificial Sequence
  LRRK2 RNA guide
gcugucuacaugaaagcauu

SEQ ID NO: 48305 - RNA, 20 nt, Artificial Sequence
  LRRK2 RNA guide
gcuuucauguagacagcaaa

SEQ ID NO: 48306 - RNA, 20 nt, Artificial Sequence
  LRRK2 RNA guide
guacacaaugcuuucaugua

SEQ ID NO: 48307 - RNA, 20 nt, Artificial Sequence
  LRRK2 RNA guide
gucuacaugaaagcauugug

SEQ ID NO: 48308 - RNA, 20 nt, Artificial Sequence
  LRRK2 RNA guide
guuuugcugucuacaugaaa

SEQ ID NO: 48309 - RNA, 20 nt, Artificial Sequence
  LRRK2 RNA guide
uaaccauguacacaaugcuu

SEQ ID NO: 48310 - RNA, 20 nt, Artificial Sequence
  LRRK2 RNA guide
uacacaaugcuuucauguag

SEQ ID NO: 48311 - RNA, 20 nt, Artificial Sequence
  LRRK2 RNA guide
uacaugaaagcauuguguac

SEQ ID NO: 48312 - RNA, 20 nt, Artificial Sequence
  LRRK2 RNA guide
uagagauucaguuuugcugu

SEQ ID NO: 48313 - RNA, 20 nt, Artificial Sequence
  LRRK2 RNA guide
ucaguuuugcugucuacaug

SEQ ID NO: 48314 - RNA, 20 nt, Artificial Sequence
  LRRK2 RNA guide
ucauguagacagcaaaacug

SEQ ID NO: 48315 - RNA, 20 nt, Artificial Sequence
  LRRK2 RNA guide
ucuacaugaaagcauugugu

SEQ ID NO: 48316 - RNA, 20 nt, Artificial Sequence
  LRRK2 RNA guide
ugcugucuacaugaaagcau

SEQ ID NO: 48317 - RNA, 20 nt, Artificial Sequence
  LRRK2 RNA guide
ugcuuucauguagacagcaa

SEQ ID NO: 48318 - RNA, 20 nt, Artificial Sequence
  LRRK2 RNA guide
uguacacaaugcuuucaugu

SEQ ID NO: 48319 - RNA, 20 nt, Artificial Sequence
  LRRK2 RNA guide
ugucuacaugaaagcauugu

SEQ ID NO: 48320 - RNA, 20 nt, Artificial Sequence
  LRRK2 RNA guide
uucaguuuugcugucuacau

SEQ ID NO: 48321 - RNA, 20 nt, Artificial Sequence
  LRRK2 RNA guide
uucauguagacagcaaaacu

SEQ ID NO: 48322 - RNA, 20 nt, Artificial Sequence
  LRRK2 RNA guide
uugcugucuacaugaaagca

SEQ ID NO: 48323 - RNA, 20 nt, Artificial Sequence
  LRRK2 RNA guide
uuucauguagacagcaaaac

SEQ ID NO: 48324 - RNA, 20 nt, Artificial Sequence
  LRRK2 RNA guide
uuugcugucuacaugaaagc

SEQ ID NO: 48325 - RNA, 20 nt, Artificial Sequence
  LRRK2 RNA guide
uuuugcugucuacaugaaag

SEQ ID NO: 48326 - RNA, 21 nt, Artificial Sequence
  LRRK2 RNA guide
aaccauguacacaaugcuuuc

SEQ ID NO: 48327 - RNA, 21 nt, Artificial Sequence
  LRRK2 RNA guide
aaugcuuucauguagacagca

SEQ ID NO: 48328 - RNA, 21 nt, Artificial Sequence
  LRRK2 RNA guide
acaaugcuuucauguagacag

SEQ ID NO: 48329 - RNA, 21 nt, Artificial Sequence
  LRRK2 RNA guide
acacaaugcuuucauguagac

SEQ ID NO: 48330 - RNA, 21 nt, Artificial Sequence
  LRRK2 RNA guide
acaugaaagcauuguguacau

SEQ ID NO: 48331 - RNA, 21 nt, Artificial Sequence
  LRRK2 RNA guide
accauguacacaaugcuuuca

SEQ ID NO: 48332 - RNA, 21 nt, Artificial Sequence
  LRRK2 RNA guide
agagauucaguuuugcugucu

SEQ ID NO: 48333 - RNA, 21 nt, Artificial Sequence
  LRRK2 RNA guide
agauucaguuuugcugucuac

SEQ ID NO: 48334 - RNA, 21 nt, Artificial Sequence
  LRRK2 RNA guide
aguuuugcugucuacaugaaa

SEQ ID NO: 48335 - RNA, 21 nt, Artificial Sequence
  LRRK2 RNA guide
auaaccauguacacaaugcuu

SEQ ID NO: 48336 - RNA, 21 nt, Artificial Sequence
  LRRK2 RNA guide
augcuuucauguagacagcaa

SEQ ID NO: 48337 - RNA, 21 nt, Artificial Sequence
  LRRK2 RNA guide
auguacacaaugcuuucaugu

SEQ ID NO: 48338 - RNA, 21 nt, Artificial Sequence
  LRRK2 RNA guide
auucaguuuugcugucuacau

SEQ ID NO: 48339 - RNA, 21 nt, Artificial Sequence
  LRRK2 RNA guide
caaugcuuucauguagacagc

SEQ ID NO: 48340 - RNA, 21 nt, Artificial Sequence
  LRRK2 RNA guide
cacaaugcuuucauguagaca

SEQ ID NO: 48341 - RNA, 21 nt, Artificial Sequence
  LRRK2 RNA guide
caguuuugcugucuacaugaa

SEQ ID NO: 48342 - RNA, 21 nt, Artificial Sequence
  LRRK2 RNA guide
cauaaccauguacacaaugcu

SEQ ID NO: 48343 - RNA, 21 nt, Artificial Sequence
  LRRK2 RNA guide
caugaaagcauuguguacaug

SEQ ID NO: 48344 - RNA, 21 nt, Artificial Sequence
  LRRK2 RNA guide
cauguacacaaugcuuucaug

SEQ ID NO: 48345 - RNA, 21 nt, Artificial Sequence
  LRRK2 RNA guide
cauguagacagcaaaacugaa

SEQ ID NO: 48346 - RNA, 21 nt, Artificial Sequence
  LRRK2 RNA guide
ccauguacacaaugcuuucau

SEQ ID NO: 48347 - RNA, 21 nt, Artificial Sequence
  LRRK2 RNA guide
cuacaugaaagcauuguguac

SEQ ID NO: 48348 - RNA, 21 nt, Artificial Sequence
  LRRK2 RNA guide
cugucuacaugaaagcauugu

SEQ ID NO: 48349 - RNA, 21 nt, Artificial Sequence
  LRRK2 RNA guide
cuuucauguagacagcaaaac

SEQ ID NO: 48350 - RNA, 21 nt, Artificial Sequence
  LRRK2 RNA guide
gagauucaguuuugcugucua

SEQ ID NO: 48351 - RNA, 21 nt, Artificial Sequence
  LRRK2 RNA guide
gauucaguuuugcugucuaca

SEQ ID NO: 48352 - RNA, 21 nt, Artificial Sequence
  LRRK2 RNA guide
gcugucuacaugaaagcauug

SEQ ID NO: 48353 - RNA, 21 nt, Artificial Sequence
  LRRK2 RNA guide
gcuuucauguagacagcaaaa

SEQ ID NO: 48354 - RNA, 21 nt, Artificial Sequence
  LRRK2 RNA guide
guacacaaugcuuucauguag

SEQ ID NO: 48355 - RNA, 21 nt, Artificial Sequence
  LRRK2 RNA guide
gucuacaugaaagcauugugu

SEQ ID NO: 48356 - RNA, 21 nt, Artificial Sequence
  LRRK2 RNA guide
guuuugcugucuacaugaaag

SEQ ID NO: 48357 - RNA, 21 nt, Artificial Sequence
  LRRK2 RNA guide
uaaccauguacacaaugcuuu

SEQ ID NO: 48358 - RNA, 21 nt, Artificial Sequence
  LRRK2 RNA guide
uacacaaugcuuucauguaga

SEQ ID NO: 48359 - RNA, 21 nt, Artificial Sequence
  LRRK2 RNA guide
uacaugaaagcauuguguaca

SEQ ID NO: 48360 - RNA, 21 nt, Artificial Sequence
  LRRK2 RNA guide
uagagauucaguuuugcuguc

SEQ ID NO: 48361 - RNA, 21 nt, Artificial Sequence
  LRRK2 RNA guide
ucaguuuugcugucuacauga

SEQ ID NO: 48362 - RNA, 21 nt, Artificial Sequence
  LRRK2 RNA guide
ucauguagacagcaaaacuga

SEQ ID NO: 48363 - RNA, 21 nt, Artificial Sequence
  LRRK2 RNA guide
ucuacaugaaagcauugugua

SEQ ID NO: 48364 - RNA, 21 nt, Artificial Sequence
  LRRK2 RNA guide
ugcugucuacaugaaagcauu

SEQ ID NO: 48365 - RNA, 21 nt, Artificial Sequence
  LRRK2 RNA guide
ugcuuucauguagacagcaaa

SEQ ID NO: 48366 - RNA, 21 nt, Artificial Sequence
  LRRK2 RNA guide
uguacacaaugcuuucaugua

SEQ ID NO: 48367 - RNA, 21 nt, Artificial Sequence
  LRRK2 RNA guide
ugucuacaugaaagcauugug

SEQ ID NO: 48368 - RNA, 21 nt, Artificial Sequence
  LRRK2 RNA guide
uucaguuuugcugucuacaug

SEQ ID NO: 48369 - RNA, 21 nt, Artificial Sequence
  LRRK2 RNA guide
uucauguagacagcaaaacug

SEQ ID NO: 48370 - RNA, 21 nt, Artificial Sequence
  LRRK2 RNA guide
uugcugucuacaugaaagcau

SEQ ID NO: 48371 - RNA, 21 nt, Artificial Sequence
  LRRK2 RNA guide
uuucauguagacagcaaaacu

SEQ ID NO: 48372 - RNA, 21 nt, Artificial Sequence
  LRRK2 RNA guide
uuugcugucuacaugaaagca

SEQ ID NO: 48373 - RNA, 21 nt, Artificial Sequence
  LRRK2 RNA guide
uuuugcugucuacaugaaagc

SEQ ID NO: 48374 - RNA, 22 nt, Artificial Sequence
  LRRK2 RNA guide
aaccauguacacaaugcuuuca

SEQ ID NO: 48375 - RNA, 22 nt, Artificial Sequence
  LRRK2 RNA guide
aaugcuuucauguagacagcaa

SEQ ID NO: 48376 - RNA, 22 nt, Artificial Sequence
  LRRK2 RNA guide
acaaugcuuucauguagacagc

SEQ ID NO: 48377 - RNA, 22 nt, Artificial Sequence
  LRRK2 RNA guide
acacaaugcuuucauguagaca

SEQ ID NO: 48378 - RNA, 22 nt, Artificial Sequence
  LRRK2 RNA guide
acauaaccauguacacaaugcu

SEQ ID NO: 48379 - RNA, 22 nt, Artificial Sequence
  LRRK2 RNA guide
acaugaaagcauuguguacaug

SEQ ID NO: 48380 - RNA, 22 nt, Artificial Sequence
  LRRK2 RNA guide
accauguacacaaugcuuucau

SEQ ID NO: 48381 - RNA, 22 nt, Artificial Sequence
  LRRK2 RNA guide
agagauucaguuuugcugucua

SEQ ID NO: 48382 - RNA, 22 nt, Artificial Sequence
  LRRK2 RNA guide
agauucaguuuugcugucuaca

SEQ ID NO: 48383 - RNA, 22 nt, Artificial Sequence
  LRRK2 RNA guide
aguuuugcugucuacaugaaag

SEQ ID NO: 48384 - RNA, 22 nt, Artificial Sequence
  LRRK2 RNA guide
auaaccauguacacaaugcuuu

SEQ ID NO: 48385 - RNA, 22 nt, Artificial Sequence
  LRRK2 RNA guide
augcuuucauguagacagcaaa

SEQ ID NO: 48386 - RNA, 22 nt, Artificial Sequence
  LRRK2 RNA guide
auguacacaaugcuuucaugua

SEQ ID NO: 48387 - RNA, 22 nt, Artificial Sequence
  LRRK2 RNA guide
auucaguuuugcugucuacaug

SEQ ID NO: 48388 - RNA, 22 nt, Artificial Sequence
  LRRK2 RNA guide
caaugcuuucauguagacagca

SEQ ID NO: 48389 - RNA, 22 nt, Artificial Sequence
  LRRK2 RNA guide
cacaaugcuuucauguagacag

SEQ ID NO: 48390 - RNA, 22 nt, Artificial Sequence
  LRRK2 RNA guide
caguuuugcugucuacaugaaa

SEQ ID NO: 48391 - RNA, 22 nt, Artificial Sequence
  LRRK2 RNA guide
cauaaccauguacacaaugcuu

SEQ ID NO: 48392 - RNA, 22 nt, Artificial Sequence
  LRRK2 RNA guide
caugaaagcauuguguacaugg

SEQ ID NO: 48393 - RNA, 22 nt, Artificial Sequence
  LRRK2 RNA guide
cauguacacaaugcuuucaugu

SEQ ID NO: 48394 - RNA, 22 nt, Artificial Sequence
  LRRK2 RNA guide
ccauguacacaaugcuuucaug

SEQ ID NO: 48395 - RNA, 22 nt, Artificial Sequence
  LRRK2 RNA guide
cuacaugaaagcauuguguaca

SEQ ID NO: 48396 - RNA, 22 nt, Artificial Sequence
  LRRK2 RNA guide
cugucuacaugaaagcauugug

SEQ ID NO: 48397 - RNA, 22 nt, Artificial Sequence
  LRRK2 RNA guide
cuuucauguagacagcaaaacu

SEQ ID NO: 48398 - RNA, 22 nt, Artificial Sequence
  LRRK2 RNA guide
gagauucaguuuugcugucuac

SEQ ID NO: 48399 - RNA, 22 nt, Artificial Sequence
  LRRK2 RNA guide
gauucaguuuugcugucuacau

SEQ ID NO: 48400 - RNA, 22 nt, Artificial Sequence
  LRRK2 RNA guide
gcugucuacaugaaagcauugu

SEQ ID NO: 48401 - RNA, 22 nt, Artificial Sequence
  LRRK2 RNA guide
gcuuucauguagacagcaaaac

SEQ ID NO: 48402 - RNA, 22 nt, Artificial Sequence
  LRRK2 RNA guide
guacacaaugcuuucauguaga

SEQ ID NO: 48403 - RNA, 22 nt, Artificial Sequence
  LRRK2 RNA guide
gucuacaugaaagcauugugua

SEQ ID NO: 48404 - RNA, 22 nt, Artificial Sequence
  LRRK2 RNA guide
guuuugcugucuacaugaaagc

SEQ ID NO: 48405 - RNA, 22 nt, Artificial Sequence
  LRRK2 RNA guide
uaaccauguacacaaugcuuuc

SEQ ID NO: 48406 - RNA, 22 nt, Artificial Sequence
  LRRK2 RNA guide
uacacaaugcuuucauguagac

SEQ ID NO: 48407 - RNA, 22 nt, Artificial Sequence
  LRRK2 RNA guide
uacaugaaagcauuguguacau

SEQ ID NO: 48408 - RNA, 22 nt, Artificial Sequence
  LRRK2 RNA guide
uagagauucaguuuugcugucu

SEQ ID NO: 48409 - RNA, 22 nt, Artificial Sequence
  LRRK2 RNA guide
ucaguuuugcugucuacaugaa

SEQ ID NO: 48410 - RNA, 22 nt, Artificial Sequence
  LRRK2 RNA guide
ucauguagacagcaaaacugaa

SEQ ID NO: 48411 - RNA, 22 nt, Artificial Sequence
  LRRK2 RNA guide
ucuacaugaaagcauuguguac

SEQ ID NO: 48412 - RNA, 22 nt, Artificial Sequence
  LRRK2 RNA guide
ugcugucuacaugaaagcauug

SEQ ID NO: 48413 - RNA, 22 nt, Artificial Sequence
  LRRK2 RNA guide
ugcuuucauguagacagcaaaa

SEQ ID NO: 48414 - RNA, 22 nt, Artificial Sequence
  LRRK2 RNA guide
uguacacaaugcuuucauguag

SEQ ID NO: 48415 - RNA, 22 nt, Artificial Sequence
  LRRK2 RNA guide
ugucuacaugaaagcauugugu

SEQ ID NO: 48416 - RNA, 22 nt, Artificial Sequence
  LRRK2 RNA guide
uucaguuuugcugucuacauga

SEQ ID NO: 48417 - RNA, 22 nt, Artificial Sequence
  LRRK2 RNA guide
uucauguagacagcaaaacuga

SEQ ID NO: 48418 - RNA, 22 nt, Artificial Sequence
  LRRK2 RNA guide
uugcugucuacaugaaagcauu

SEQ ID NO: 48419 - RNA, 22 nt, Artificial Sequence
  LRRK2 RNA guide
uuucauguagacagcaaaacug

SEQ ID NO: 48420 - RNA, 22 nt, Artificial Sequence
  LRRK2 RNA guide
uuugcugucuacaugaaagcau

SEQ ID NO: 48421 - RNA, 22 nt, Artificial Sequence
  LRRK2 RNA guide
uuuugcugucuacaugaaagca

SEQ ID NO: 48422 - RNA, 20 nt, Artificial Sequence
  LRRK2 RNA guide
aaugcuuucacguagacagc

SEQ ID NO: 48423 - RNA, 20 nt, Artificial Sequence
  LRRK2 RNA guide
acaaugcuuucacguagaca

SEQ ID NO: 48424 - RNA, 20 nt, Artificial Sequence
  LRRK2 RNA guide
acacaaugcuuucacguaga

SEQ ID NO: 48425 - RNA, 20 nt, Artificial Sequence
  LRRK2 RNA guide
acguagacagcaaaacugaa

SEQ ID NO: 48426 - RNA, 20 nt, Artificial Sequence
  LRRK2 RNA guide
acgugaaagcauuguguaca

SEQ ID NO: 48427 - RNA, 20 nt, Artificial Sequence
  LRRK2 RNA guide
aguuuugcugucuacgugaa

SEQ ID NO: 48428 - RNA, 20 nt, Artificial Sequence
  LRRK2 RNA guide
augcuuucacguagacagca

SEQ ID NO: 48429 - RNA, 20 nt, Artificial Sequence
  LRRK2 RNA guide
auguacacaaugcuuucacg

SEQ ID NO: 48430 - RNA, 20 nt, Artificial Sequence
  LRRK2 RNA guide
auucaguuuugcugucuacg

SEQ ID NO: 48431 - RNA, 20 nt, Artificial Sequence
  LRRK2 RNA guide
caaugcuuucacguagacag

SEQ ID NO: 48432 - RNA, 20 nt, Artificial Sequence
  LRRK2 RNA guide
cacaaugcuuucacguagac

SEQ ID NO: 48433 - RNA, 20 nt, Artificial Sequence
  LRRK2 RNA guide
cacguagacagcaaaacuga

SEQ ID NO: 48434 - RNA, 20 nt, Artificial Sequence
  LRRK2 RNA guide
caguuuugcugucuacguga

SEQ ID NO: 48435 - RNA, 20 nt, Artificial Sequence
  LRRK2 RNA guide
cauguacacaaugcuuucac

SEQ ID NO: 48436 - RNA, 20 nt, Artificial Sequence
  LRRK2 RNA guide
cgugaaagcauuguguacau

SEQ ID NO: 48437 - RNA, 20 nt, Artificial Sequence
  LRRK2 RNA guide
cuacgugaaagcauugugua

SEQ ID NO: 48438 - RNA, 20 nt, Artificial Sequence
  LRRK2 RNA guide
cugucuacgugaaagcauug

SEQ ID NO: 48439 - RNA, 20 nt, Artificial Sequence
  LRRK2 RNA guide
cuuucacguagacagcaaaa

SEQ ID NO: 48440 - RNA, 20 nt, Artificial Sequence
  LRRK2 RNA guide
gcugucuacgugaaagcauu

SEQ ID NO: 48441 - RNA, 20 nt, Artificial Sequence
  LRRK2 RNA guide
gcuuucacguagacagcaaa

SEQ ID NO: 48442 - RNA, 20 nt, Artificial Sequence
  LRRK2 RNA guide
guacacaaugcuuucacgua

SEQ ID NO: 48443 - RNA, 20 nt, Artificial Sequence
  LRRK2 RNA guide
gucuacgugaaagcauugug

SEQ ID NO: 48444 - RNA, 20 nt, Artificial Sequence
  LRRK2 RNA guide
guuuugcugucuacgugaaa

SEQ ID NO: 48445 - RNA, 20 nt, Artificial Sequence
  LRRK2 RNA guide
uacacaaugcuuucacguag

SEQ ID NO: 48446 - RNA, 20 nt, Artificial Sequence
  LRRK2 RNA guide
uacgugaaagcauuguguac

SEQ ID NO: 48447 - RNA, 20 nt, Artificial Sequence
  LRRK2 RNA guide
ucacguagacagcaaaacug

SEQ ID NO: 48448 - RNA, 20 nt, Artificial Sequence
  LRRK2 RNA guide
ucaguuuugcugucuacgug

SEQ ID NO: 48449 - RNA, 20 nt, Artificial Sequence
  LRRK2 RNA guide
ucuacgugaaagcauugugu

SEQ ID NO: 48450 - RNA, 20 nt, Artificial Sequence
  LRRK2 RNA guide
ugcugucuacgugaaagcau

SEQ ID NO: 48451 - RNA, 20 nt, Artificial Sequence
  LRRK2 RNA guide
ugcuuucacguagacagcaa

SEQ ID NO: 48452 - RNA, 20 nt, Artificial Sequence
  LRRK2 RNA guide
uguacacaaugcuuucacgu

SEQ ID NO: 48453 - RNA, 20 nt, Artificial Sequence
  LRRK2 RNA guide
ugucuacgugaaagcauugu

SEQ ID NO: 48454 - RNA, 20 nt, Artificial Sequence
  LRRK2 RNA guide
uucacguagacagcaaaacu

SEQ ID NO: 48455 - RNA, 20 nt, Artificial Sequence
  LRRK2 RNA guide
uucaguuuugcugucuacgu

SEQ ID NO: 48456 - RNA, 20 nt, Artificial Sequence
  LRRK2 RNA guide
uugcugucuacgugaaagca

SEQ ID NO: 48457 - RNA, 20 nt, Artificial Sequence
  LRRK2 RNA guide
uuucacguagacagcaaaac

SEQ ID NO: 48458 - RNA, 20 nt, Artificial Sequence
  LRRK2 RNA guide
uuugcugucuacgugaaagc

SEQ ID NO: 48459 - RNA, 20 nt, Artificial Sequence
  LRRK2 RNA guide
uuuugcugucuacgugaaag

SEQ ID NO: 48460 - RNA, 21 nt, Artificial Sequence
  LRRK2 RNA guide
aaugcuuucacguagacagca

SEQ ID NO: 48461 - RNA, 21 nt, Artificial Sequence
  LRRK2 RNA guide
acaaugcuuucacguagacag

SEQ ID NO: 48462 - RNA, 21 nt, Artificial Sequence
  LRRK2 RNA guide
acacaaugcuuucacguagac

SEQ ID NO: 48463 - RNA, 21 nt, Artificial Sequence
  LRRK2 RNA guide
acguagacagcaaaacugaau

SEQ ID NO: 48464 - RNA, 21 nt, Artificial Sequence
  LRRK2 RNA guide
acgugaaagcauuguguacau

SEQ ID NO: 48465 - RNA, 21 nt, Artificial Sequence
  LRRK2 RNA guide
aguuuugcugucuacgugaaa

SEQ ID NO: 48466 - RNA, 21 nt, Artificial Sequence
  LRRK2 RNA guide
augcuuucacguagacagcaa

SEQ ID NO: 48467 - RNA, 21 nt, Artificial Sequence
  LRRK2 RNA guide
auguacacaaugcuuucacgu

SEQ ID NO: 48468 - RNA, 21 nt, Artificial Sequence
  LRRK2 RNA guide
auucaguuuugcugucuacgu

SEQ ID NO: 48469 - RNA, 21 nt, Artificial Sequence
  LRRK2 RNA guide
caaugcuuucacguagacagc

SEQ ID NO: 48470 - RNA, 21 nt, Artificial Sequence
  LRRK2 RNA guide
cacaaugcuuucacguagaca

SEQ ID NO: 48471 - RNA, 21 nt, Artificial Sequence
  LRRK2 RNA guide
cacguagacagcaaaacugaa

SEQ ID NO: 48472 - RNA, 21 nt, Artificial Sequence
  LRRK2 RNA guide
caguuuugcugucuacgugaa

SEQ ID NO: 48473 - RNA, 21 nt, Artificial Sequence
  LRRK2 RNA guide
cauguacacaaugcuuucacg

SEQ ID NO: 48474 - RNA, 21 nt, Artificial Sequence
  LRRK2 RNA guide
ccauguacacaaugcuuucac

SEQ ID NO: 48475 - RNA, 21 nt, Artificial Sequence
  LRRK2 RNA guide
cgugaaagcauuguguacaug

SEQ ID NO: 48476 - RNA, 21 nt, Artificial Sequence
  LRRK2 RNA guide
cuacgugaaagcauuguguac

SEQ ID NO: 48477 - RNA, 21 nt, Artificial Sequence
  LRRK2 RNA guide
cugucuacgugaaagcauugu

SEQ ID NO: 48478 - RNA, 21 nt, Artificial Sequence
  LRRK2 RNA guide
cuuucacguagacagcaaaac

SEQ ID NO: 48479 - RNA, 21 nt, Artificial Sequence
  LRRK2 RNA guide
gauucaguuuugcugucuacg

SEQ ID NO: 48480 - RNA, 21 nt, Artificial Sequence
  LRRK2 RNA guide
gcugucuacgugaaagcauug

SEQ ID NO: 48481 - RNA, 21 nt, Artificial Sequence
  LRRK2 RNA guide
gcuuucacguagacagcaaaa

SEQ ID NO: 48482 - RNA, 21 nt, Artificial Sequence
  LRRK2 RNA guide
guacacaaugcuuucacguag

SEQ ID NO: 48483 - RNA, 21 nt, Artificial Sequence
  LRRK2 RNA guide
gucuacgugaaagcauugugu

SEQ ID NO: 48484 - RNA, 21 nt, Artificial Sequence
  LRRK2 RNA guide
guuuugcugucuacgugaaag

SEQ ID NO: 48485 - RNA, 21 nt, Artificial Sequence
  LRRK2 RNA guide
uacacaaugcuuucacguaga

SEQ ID NO: 48486 - RNA, 21 nt, Artificial Sequence
  LRRK2 RNA guide
uacgugaaagcauuguguaca

SEQ ID NO: 48487 - RNA, 21 nt, Artificial Sequence
  LRRK2 RNA guide
ucacguagacagcaaaacuga

SEQ ID NO: 48488 - RNA, 21 nt, Artificial Sequence
  LRRK2 RNA guide
ucaguuuugcugucuacguga

SEQ ID NO: 48489 - RNA, 21 nt, Artificial Sequence
  LRRK2 RNA guide
ucuacgugaaagcauugugua

SEQ ID NO: 48490 - RNA, 21 nt, Artificial Sequence
  LRRK2 RNA guide
ugcugucuacgugaaagcauu

SEQ ID NO: 48491 - RNA, 21 nt, Artificial Sequence
  LRRK2 RNA guide
ugcuuucacguagacagcaaa

SEQ ID NO: 48492 - RNA, 21 nt, Artificial Sequence
  LRRK2 RNA guide
uguacacaaugcuuucacgua

SEQ ID NO: 48493 - RNA, 21 nt, Artificial Sequence
  LRRK2 RNA guide
ugucuacgugaaagcauugug

SEQ ID NO: 48494 - RNA, 21 nt, Artificial Sequence
  LRRK2 RNA guide
uucacguagacagcaaaacug

SEQ ID NO: 48495 - RNA, 21 nt, Artificial Sequence
  LRRK2 RNA guide
uucaguuuugcugucuacgug

SEQ ID NO: 48496 - RNA, 21 nt, Artificial Sequence
  LRRK2 RNA guide
uugcugucuacgugaaagcau

SEQ ID NO: 48497 - RNA, 21 nt, Artificial Sequence
  LRRK2 RNA guide
uuucacguagacagcaaaacu

SEQ ID NO: 48498 - RNA, 21 nt, Artificial Sequence
  LRRK2 RNA guide
uuugcugucuacgugaaagca

SEQ ID NO: 48499 - RNA, 21 nt, Artificial Sequence
  LRRK2 RNA guide
uuuugcugucuacgugaaagc

SEQ ID NO: 48500 - RNA, 22 nt, Artificial Sequence
  LRRK2 RNA guide
aaugcuuucacguagacagcaa

SEQ ID NO: 48501 - RNA, 22 nt, Artificial Sequence
  LRRK2 RNA guide
acaaugcuuucacguagacagc

SEQ ID NO: 48502 - RNA, 22 nt, Artificial Sequence
  LRRK2 RNA guide
acacaaugcuuucacguagaca

SEQ ID NO: 48503 - RNA, 22 nt, Artificial Sequence
  LRRK2 RNA guide
accauguacacaaugcuuucac

SEQ ID NO: 48504 - RNA, 22 nt, Artificial Sequence
  LRRK2 RNA guide
acguagacagcaaaacugaauc

SEQ ID NO: 48505 - RNA, 22 nt, Artificial Sequence
  LRRK2 RNA guide
acgugaaagcauuguguacaug

SEQ ID NO: 48506 - RNA, 22 nt, Artificial Sequence
  LRRK2 RNA guide
agauucaguuuugcugucuacg

SEQ ID NO: 48507 - RNA, 22 nt, Artificial Sequence
  LRRK2 RNA guide
aguuuugcugucuacgugaaag

SEQ ID NO: 48508 - RNA, 22 nt, Artificial Sequence
  LRRK2 RNA guide
augcuuucacguagacagcaaa

SEQ ID NO: 48509 - RNA, 22 nt, Artificial Sequence
  LRRK2 RNA guide
auguacacaaugcuuucacgua

SEQ ID NO: 48510 - RNA, 22 nt, Artificial Sequence
  LRRK2 RNA guide
auucaguuuugcugucuacgug

SEQ ID NO: 48511 - RNA, 22 nt, Artificial Sequence
  LRRK2 RNA guide
caaugcuuucacguagacagca

SEQ ID NO: 48512 - RNA, 22 nt, Artificial Sequence
  LRRK2 RNA guide
cacaaugcuuucacguagacag

SEQ ID NO: 48513 - RNA, 22 nt, Artificial Sequence
  LRRK2 RNA guide
cacguagacagcaaaacugaau

SEQ ID NO: 48514 - RNA, 22 nt, Artificial Sequence
  LRRK2 RNA guide
caguuuugcugucuacgugaaa

SEQ ID NO: 48515 - RNA, 22 nt, Artificial Sequence
  LRRK2 RNA guide
cauguacacaaugcuuucacgu

SEQ ID NO: 48516 - RNA, 22 nt, Artificial Sequence
  LRRK2 RNA guide
ccauguacacaaugcuuucacg

SEQ ID NO: 48517 - RNA, 22 nt, Artificial Sequence
  LRRK2 RNA guide
cgugaaagcauuguguacaugg

SEQ ID NO: 48518 - RNA, 22 nt, Artificial Sequence
  LRRK2 RNA guide
cuacgugaaagcauuguguaca

SEQ ID NO: 48519 - RNA, 22 nt, Artificial Sequence
  LRRK2 RNA guide
cugucuacgugaaagcauugug

SEQ ID NO: 48520 - RNA, 22 nt, Artificial Sequence
  LRRK2 RNA guide
cuuucacguagacagcaaaacu

SEQ ID NO: 48521 - RNA, 22 nt, Artificial Sequence
  LRRK2 RNA guide
gauucaguuuugcugucuacgu

SEQ ID NO: 48522 - RNA, 22 nt, Artificial Sequence
  LRRK2 RNA guide
gcugucuacgugaaagcauugu

SEQ ID NO: 48523 - RNA, 22 nt, Artificial Sequence
  LRRK2 RNA guide
gcuuucacguagacagcaaaac

SEQ ID NO: 48524 - RNA, 22 nt, Artificial Sequence
  LRRK2 RNA guide
guacacaaugcuuucacguaga

SEQ ID NO: 48525 - RNA, 22 nt, Artificial Sequence
  LRRK2 RNA guide
gucuacgugaaagcauugugua

SEQ ID NO: 48526 - RNA, 22 nt, Artificial Sequence
  LRRK2 RNA guide
guuuugcugucuacgugaaagc

SEQ ID NO: 48527 - RNA, 22 nt, Artificial Sequence
  LRRK2 RNA guide
uacacaaugcuuucacguagac

SEQ ID NO: 48528 - RNA, 22 nt, Artificial Sequence
  LRRK2 RNA guide
uacgugaaagcauuguguacau

SEQ ID NO: 48529 - RNA, 22 nt, Artificial Sequence
  LRRK2 RNA guide
ucacguagacagcaaaacugaa

SEQ ID NO: 48530 - RNA, 22 nt, Artificial Sequence
  LRRK2 RNA guide
ucaguuuugcugucuacgugaa

SEQ ID NO: 48531 - RNA, 22 nt, Artificial Sequence
  LRRK2 RNA guide
ucuacgugaaagcauuguguac

SEQ ID NO: 48532 - RNA, 22 nt, Artificial Sequence
  LRRK2 RNA guide
ugcugucuacgugaaagcauug

SEQ ID NO: 48533 - RNA, 22 nt, Artificial Sequence
  LRRK2 RNA guide
ugcuuucacguagacagcaaaa

SEQ ID NO: 48534 - RNA, 22 nt, Artificial Sequence
  LRRK2 RNA guide
uguacacaaugcuuucacguag

SEQ ID NO: 48535 - RNA, 22 nt, Artificial Sequence
  LRRK2 RNA guide
ugucuacgugaaagcauugugu

SEQ ID NO: 48536 - RNA, 22 nt, Artificial Sequence
  LRRK2 RNA guide
uucacguagacagcaaaacuga

SEQ ID NO: 48537 - RNA, 22 nt, Artificial Sequence
  LRRK2 RNA guide
uucaguuuugcugucuacguga

SEQ ID NO: 48538 - RNA, 22 nt, Artificial Sequence
  LRRK2 RNA guide
uugcugucuacgugaaagcauu

SEQ ID NO: 48539 - RNA, 22 nt, Artificial Sequence
  LRRK2 RNA guide
uuucacguagacagcaaaacug

SEQ ID NO: 48540 - RNA, 22 nt, Artificial Sequence
  LRRK2 RNA guide
uuugcugucuacgugaaagcau

SEQ ID NO: 48541 - RNA, 22 nt, Artificial Sequence
  LRRK2 RNA guide
uuuugcugucuacgugaaagca

SEQ ID NO: 48542 - RNA, 20 nt, Artificial Sequence
  LRRK2 RNA guide
aaauauucuccagaagcaua

SEQ ID NO: 48543 - RNA, 20 nt, Artificial Sequence
  LRRK2 RNA guide
aauauucuccagaagcauag

SEQ ID NO: 48544 - RNA, 20 nt, Artificial Sequence
  LRRK2 RNA guide
acguauugcuaugcuucugg

SEQ ID NO: 48545 - RNA, 20 nt, Artificial Sequence
  LRRK2 RNA guide
agaaauauucuccagaagca

SEQ ID NO: 48546 - RNA, 20 nt, Artificial Sequence
  LRRK2 RNA guide
auagaaauauucuccagaag

SEQ ID NO: 48547 - RNA, 20 nt, Artificial Sequence
  LRRK2 RNA guide
auauucuccagaagcauagc

SEQ ID NO: 48548 - RNA, 20 nt, Artificial Sequence
  LRRK2 RNA guide
augcuucuggagaauauuuc

SEQ ID NO: 48549 - RNA, 20 nt, Artificial Sequence
  LRRK2 RNA guide
auucuccagaagcauagcaa

SEQ ID NO: 48550 - RNA, 20 nt, Artificial Sequence
  LRRK2 RNA guide
auugcuaugcuucuggagaa

SEQ ID NO: 48551 - RNA, 20 nt, Artificial Sequence
  LRRK2 RNA guide
ccagaagcauagcaauacgu

SEQ ID NO: 48552 - RNA, 20 nt, Artificial Sequence
  LRRK2 RNA guide
cguauugcuaugcuucugga

SEQ ID NO: 48553 - RNA, 20 nt, Artificial Sequence
  LRRK2 RNA guide
cuaugcuucuggagaauauu

SEQ ID NO: 48554 - RNA, 20 nt, Artificial Sequence
  LRRK2 RNA guide
cuccagaagcauagcaauac

SEQ ID NO: 48555 - RNA, 20 nt, Artificial Sequence
  LRRK2 RNA guide
cuuacguauugcuaugcuuc

SEQ ID NO: 48556 - RNA, 20 nt, Artificial Sequence
  LRRK2 RNA guide
cuucuggagaauauuucuau

SEQ ID NO: 48557 - RNA, 20 nt, Artificial Sequence
  LRRK2 RNA guide
gaaauauucuccagaagcau

SEQ ID NO: 48558 - RNA, 20 nt, Artificial Sequence
  LRRK2 RNA guide
gcuaugcuucuggagaauau

SEQ ID NO: 48559 - RNA, 20 nt, Artificial Sequence
  LRRK2 RNA guide
gcuucuggagaauauuucua

SEQ ID NO: 48560 - RNA, 20 nt, Artificial Sequence
  LRRK2 RNA guide
guauugcuaugcuucuggag

SEQ ID NO: 48561 - RNA, 20 nt, Artificial Sequence
  LRRK2 RNA guide
guucuuacguauugcuaugc

SEQ ID NO: 48562 - RNA, 20 nt, Artificial Sequence
  LRRK2 RNA guide
uacguauugcuaugcuucug

SEQ ID NO: 48563 - RNA, 20 nt, Artificial Sequence
  LRRK2 RNA guide
uagaaauauucuccagaagc

SEQ ID NO: 48564 - RNA, 20 nt, Artificial Sequence
  LRRK2 RNA guide
uaugcuucuggagaauauuu

SEQ ID NO: 48565 - RNA, 20 nt, Artificial Sequence
  LRRK2 RNA guide
uauucuccagaagcauagca

SEQ ID NO: 48566 - RNA, 20 nt, Artificial Sequence
  LRRK2 RNA guide
uauugcuaugcuucuggaga

SEQ ID NO: 48567 - RNA, 20 nt, Artificial Sequence
  LRRK2 RNA guide
uccagaagcauagcaauacg

SEQ ID NO: 48568 - RNA, 20 nt, Artificial Sequence
  LRRK2 RNA guide
ucuccagaagcauagcaaua

SEQ ID NO: 48569 - RNA, 20 nt, Artificial Sequence
  LRRK2 RNA guide
ucuuacguauugcuaugcuu

SEQ ID NO: 48570 - RNA, 20 nt, Artificial Sequence
  LRRK2 RNA guide
ugcuaugcuucuggagaaua

SEQ ID NO: 48571 - RNA, 20 nt, Artificial Sequence
  LRRK2 RNA guide
ugcuucuggagaauauuucu

SEQ ID NO: 48572 - RNA, 20 nt, Artificial Sequence
  LRRK2 RNA guide
uuacguauugcuaugcuucu

SEQ ID NO: 48573 - RNA, 20 nt, Artificial Sequence
  LRRK2 RNA guide
uucuccagaagcauagcaau

SEQ ID NO: 48574 - RNA, 20 nt, Artificial Sequence
  LRRK2 RNA guide
uucuuacguauugcuaugcu

SEQ ID NO: 48575 - RNA, 20 nt, Artificial Sequence
  LRRK2 RNA guide
uugcuaugcuucuggagaau

SEQ ID NO: 48576 - RNA, 21 nt, Artificial Sequence
  LRRK2 RNA guide
aaauauucuccagaagcauag

SEQ ID NO: 48577 - RNA, 21 nt, Artificial Sequence
  LRRK2 RNA guide
aauauucuccagaagcauagc

SEQ ID NO: 48578 - RNA, 21 nt, Artificial Sequence
  LRRK2 RNA guide
acguauugcuaugcuucugga

SEQ ID NO: 48579 - RNA, 21 nt, Artificial Sequence
  LRRK2 RNA guide
agaaauauucuccagaagcau

SEQ ID NO: 48580 - RNA, 21 nt, Artificial Sequence
  LRRK2 RNA guide
aguucuuacguauugcuaugc

SEQ ID NO: 48581 - RNA, 21 nt, Artificial Sequence
  LRRK2 RNA guide
auagaaauauucuccagaagc

SEQ ID NO: 48582 - RNA, 21 nt, Artificial Sequence
  LRRK2 RNA guide
auauucuccagaagcauagca

SEQ ID NO: 48583 - RNA, 21 nt, Artificial Sequence
  LRRK2 RNA guide
augcuucuggagaauauuucu

SEQ ID NO: 48584 - RNA, 21 nt, Artificial Sequence
  LRRK2 RNA guide
auucuccagaagcauagcaau

SEQ ID NO: 48585 - RNA, 21 nt, Artificial Sequence
  LRRK2 RNA guide
auugcuaugcuucuggagaau

SEQ ID NO: 48586 - RNA, 21 nt, Artificial Sequence
  LRRK2 RNA guide
ccagaagcauagcaauacgua

SEQ ID NO: 48587 - RNA, 21 nt, Artificial Sequence
  LRRK2 RNA guide
cguauugcuaugcuucuggag

SEQ ID NO: 48588 - RNA, 21 nt, Artificial Sequence
  LRRK2 RNA guide
cuaugcuucuggagaauauuu

SEQ ID NO: 48589 - RNA, 21 nt, Artificial Sequence
  LRRK2 RNA guide
cuccagaagcauagcaauacg

SEQ ID NO: 48590 - RNA, 21 nt, Artificial Sequence
  LRRK2 RNA guide
cuuacguauugcuaugcuucu

SEQ ID NO: 48591 - RNA, 21 nt, Artificial Sequence
  LRRK2 RNA guide
gaaauauucuccagaagcaua

SEQ ID NO: 48592 - RNA, 21 nt, Artificial Sequence
  LRRK2 RNA guide
gcuaugcuucuggagaauauu

SEQ ID NO: 48593 - RNA, 21 nt, Artificial Sequence
  LRRK2 RNA guide
gcuucuggagaauauuucuau

SEQ ID NO: 48594 - RNA, 21 nt, Artificial Sequence
  LRRK2 RNA guide
guauugcuaugcuucuggaga

SEQ ID NO: 48595 - RNA, 21 nt, Artificial Sequence
  LRRK2 RNA guide
guucuuacguauugcuaugcu

SEQ ID NO: 48596 - RNA, 21 nt, Artificial Sequence
  LRRK2 RNA guide
uacguauugcuaugcuucugg

SEQ ID NO: 48597 - RNA, 21 nt, Artificial Sequence
  LRRK2 RNA guide
uagaaauauucuccagaagca

SEQ ID NO: 48598 - RNA, 21 nt, Artificial Sequence
  LRRK2 RNA guide
uaugcuucuggagaauauuuc

SEQ ID NO: 48599 - RNA, 21 nt, Artificial Sequence
  LRRK2 RNA guide
uauucuccagaagcauagcaa

SEQ ID NO: 48600 - RNA, 21 nt, Artificial Sequence
  LRRK2 RNA guide
uauugcuaugcuucuggagaa

SEQ ID NO: 48601 - RNA, 21 nt, Artificial Sequence
  LRRK2 RNA guide
uccagaagcauagcaauacgu

SEQ ID NO: 48602 - RNA, 21 nt, Artificial Sequence
  LRRK2 RNA guide
ucuccagaagcauagcaauac

SEQ ID NO: 48603 - RNA, 21 nt, Artificial Sequence
  LRRK2 RNA guide
ucuuacguauugcuaugcuuc

SEQ ID NO: 48604 - RNA, 21 nt, Artificial Sequence
  LRRK2 RNA guide
ugcuaugcuucuggagaauau

SEQ ID NO: 48605 - RNA, 21 nt, Artificial Sequence
  LRRK2 RNA guide
ugcuucuggagaauauuucua

SEQ ID NO: 48606 - RNA, 21 nt, Artificial Sequence
  LRRK2 RNA guide
uuacguauugcuaugcuucug

SEQ ID NO: 48607 - RNA, 21 nt, Artificial Sequence
  LRRK2 RNA guide
uucuccagaagcauagcaaua

SEQ ID NO: 48608 - RNA, 21 nt, Artificial Sequence
  LRRK2 RNA guide
uucuuacguauugcuaugcuu

SEQ ID NO: 48609 - RNA, 21 nt, Artificial Sequence
  LRRK2 RNA guide
uugcuaugcuucuggagaaua

SEQ ID NO: 48610 - RNA, 22 nt, Artificial Sequence
  LRRK2 RNA guide
aaauauucuccagaagcauagc

SEQ ID NO: 48611 - RNA, 22 nt, Artificial Sequence
  LRRK2 RNA guide
aaguucuuacguauugcuaugc

SEQ ID NO: 48612 - RNA, 22 nt, Artificial Sequence
  LRRK2 RNA guide
aauagaaauauucuccagaagc

SEQ ID NO: 48613 - RNA, 22 nt, Artificial Sequence
  LRRK2 RNA guide
aauauucuccagaagcauagca

SEQ ID NO: 48614 - RNA, 22 nt, Artificial Sequence
  LRRK2 RNA guide
acguauugcuaugcuucuggag

SEQ ID NO: 48615 - RNA, 22 nt, Artificial Sequence
  LRRK2 RNA guide
agaaauauucuccagaagcaua

SEQ ID NO: 48616 - RNA, 22 nt, Artificial Sequence
  LRRK2 RNA guide
aguucuuacguauugcuaugcu

SEQ ID NO: 48617 - RNA, 22 nt, Artificial Sequence
  LRRK2 RNA guide
auagaaauauucuccagaagca

SEQ ID NO: 48618 - RNA, 22 nt, Artificial Sequence
  LRRK2 RNA guide
auauucuccagaagcauagcaa

SEQ ID NO: 48619 - RNA, 22 nt, Artificial Sequence
  LRRK2 RNA guide
augcuucuggagaauauuucua

SEQ ID NO: 48620 - RNA, 22 nt, Artificial Sequence
  LRRK2 RNA guide
auucuccagaagcauagcaaua

SEQ ID NO: 48621 - RNA, 22 nt, Artificial Sequence
  LRRK2 RNA guide
auugcuaugcuucuggagaaua

SEQ ID NO: 48622 - RNA, 22 nt, Artificial Sequence
  LRRK2 RNA guide
ccagaagcauagcaauacguaa

SEQ ID NO: 48623 - RNA, 22 nt, Artificial Sequence
  LRRK2 RNA guide
cguauugcuaugcuucuggaga

SEQ ID NO: 48624 - RNA, 22 nt, Artificial Sequence
  LRRK2 RNA guide
cuaugcuucuggagaauauuuc

SEQ ID NO: 48625 - RNA, 22 nt, Artificial Sequence
  LRRK2 RNA guide
cuccagaagcauagcaauacgu

SEQ ID NO: 48626 - RNA, 22 nt, Artificial Sequence
  LRRK2 RNA guide
cuuacguauugcuaugcuucug

SEQ ID NO: 48627 - RNA, 22 nt, Artificial Sequence
  LRRK2 RNA guide
gaaauauucuccagaagcauag

SEQ ID NO: 48628 - RNA, 22 nt, Artificial Sequence
  LRRK2 RNA guide
gcuaugcuucuggagaauauuu

SEQ ID NO: 48629 - RNA, 22 nt, Artificial Sequence
  LRRK2 RNA guide
gcuucuggagaauauuucuauu

SEQ ID NO: 48630 - RNA, 22 nt, Artificial Sequence
  LRRK2 RNA guide
guauugcuaugcuucuggagaa

SEQ ID NO: 48631 - RNA, 22 nt, Artificial Sequence
  LRRK2 RNA guide
guucuuacguauugcuaugcuu

SEQ ID NO: 48632 - RNA, 22 nt, Artificial Sequence
  LRRK2 RNA guide
uacguauugcuaugcuucugga

SEQ ID NO: 48633 - RNA, 22 nt, Artificial Sequence
  LRRK2 RNA guide
uagaaauauucuccagaagcau

SEQ ID NO: 48634 - RNA, 22 nt, Artificial Sequence
  LRRK2 RNA guide
uaugcuucuggagaauauuucu

SEQ ID NO: 48635 - RNA, 22 nt, Artificial Sequence
  LRRK2 RNA guide
uauucuccagaagcauagcaau

SEQ ID NO: 48636 - RNA, 22 nt, Artificial Sequence
  LRRK2 RNA guide
uauugcuaugcuucuggagaau

SEQ ID NO: 48637 - RNA, 22 nt, Artificial Sequence
  LRRK2 RNA guide
uccagaagcauagcaauacgua

SEQ ID NO: 48638 - RNA, 22 nt, Artificial Sequence
  LRRK2 RNA guide
ucuccagaagcauagcaauacg

SEQ ID NO: 48639 - RNA, 22 nt, Artificial Sequence
  LRRK2 RNA guide
ucuuacguauugcuaugcuucu

SEQ ID NO: 48640 - RNA, 22 nt, Artificial Sequence
  LRRK2 RNA guide
ugcuaugcuucuggagaauauu

SEQ ID NO: 48641 - RNA, 22 nt, Artificial Sequence
  LRRK2 RNA guide
ugcuucuggagaauauuucuau

SEQ ID NO: 48642 - RNA, 22 nt, Artificial Sequence
  LRRK2 RNA guide
uuacguauugcuaugcuucugg

SEQ ID NO: 48643 - RNA, 22 nt, Artificial Sequence
  LRRK2 RNA guide
uucuccagaagcauagcaauac

SEQ ID NO: 48644 - RNA, 22 nt, Artificial Sequence
  LRRK2 RNA guide
uucuuacguauugcuaugcuuc

SEQ ID NO: 48645 - RNA, 22 nt, Artificial Sequence
  LRRK2 RNA guide
uugcuaugcuucuggagaauau

SEQ ID NO: 48646 - RNA, 20 nt, Artificial Sequence
  LRRK2 RNA guide
aauauucucuagaagcauag

SEQ ID NO: 48647 - RNA, 20 nt, Artificial Sequence
  LRRK2 RNA guide
acguauugcuaugcuucuag

SEQ ID NO: 48648 - RNA, 20 nt, Artificial Sequence
  LRRK2 RNA guide
agaaauauucucuagaagca

SEQ ID NO: 48649 - RNA, 20 nt, Artificial Sequence
  LRRK2 RNA guide
auauucucuagaagcauagc

SEQ ID NO: 48650 - RNA, 20 nt, Artificial Sequence
  LRRK2 RNA guide
augcuucuagagaauauuuc

SEQ ID NO: 48651 - RNA, 20 nt, Artificial Sequence
  LRRK2 RNA guide
auucucuagaagcauagcaa

SEQ ID NO: 48652 - RNA, 20 nt, Artificial Sequence
  LRRK2 RNA guide
auugcuaugcuucuagagaa

SEQ ID NO: 48653 - RNA, 20 nt, Artificial Sequence
  LRRK2 RNA guide
cguauugcuaugcuucuaga

SEQ ID NO: 48654 - RNA, 20 nt, Artificial Sequence
  LRRK2 RNA guide
cuagaagcauagcaauacgu

SEQ ID NO: 48655 - RNA, 20 nt, Artificial Sequence
  LRRK2 RNA guide
cuaugcuucuagagaauauu

SEQ ID NO: 48656 - RNA, 20 nt, Artificial Sequence
  LRRK2 RNA guide
cucuagaagcauagcaauac

SEQ ID NO: 48657 - RNA, 20 nt, Artificial Sequence
  LRRK2 RNA guide
gaaauauucucuagaagcau

SEQ ID NO: 48658 - RNA, 20 nt, Artificial Sequence
  LRRK2 RNA guide
gcuaugcuucuagagaauau

SEQ ID NO: 48659 - RNA, 20 nt, Artificial Sequence
  LRRK2 RNA guide
gcuucuagagaauauuucua

SEQ ID NO: 48660 - RNA, 20 nt, Artificial Sequence
  LRRK2 RNA guide
guauugcuaugcuucuagag

SEQ ID NO: 48661 - RNA, 20 nt, Artificial Sequence
  LRRK2 RNA guide
uacguauugcuaugcuucua

SEQ ID NO: 48662 - RNA, 20 nt, Artificial Sequence
  LRRK2 RNA guide
uagaaauauucucuagaagc

SEQ ID NO: 48663 - RNA, 20 nt, Artificial Sequence
  LRRK2 RNA guide
uauucucuagaagcauagca

SEQ ID NO: 48664 - RNA, 20 nt, Artificial Sequence
  LRRK2 RNA guide
uauugcuaugcuucuagaga

SEQ ID NO: 48665 - RNA, 20 nt, Artificial Sequence
  LRRK2 RNA guide
ucuagaagcauagcaauacg

SEQ ID NO: 48666 - RNA, 20 nt, Artificial Sequence
  LRRK2 RNA guide
ucucuagaagcauagcaaua

SEQ ID NO: 48667 - RNA, 20 nt, Artificial Sequence
  LRRK2 RNA guide
ugcuaugcuucuagagaaua

SEQ ID NO: 48668 - RNA, 20 nt, Artificial Sequence
  LRRK2 RNA guide
ugcuucuagagaauauuucu

SEQ ID NO: 48669 - RNA, 20 nt, Artificial Sequence
  LRRK2 RNA guide
uucucuagaagcauagcaau

SEQ ID NO: 48670 - RNA, 20 nt, Artificial Sequence
  LRRK2 RNA guide
uugcuaugcuucuagagaau

SEQ ID NO: 48671 - RNA, 21 nt, Artificial Sequence
  LRRK2 RNA guide
aauauucucuagaagcauagc

SEQ ID NO: 48672 - RNA, 21 nt, Artificial Sequence
  LRRK2 RNA guide
acguauugcuaugcuucuaga

SEQ ID NO: 48673 - RNA, 21 nt, Artificial Sequence
  LRRK2 RNA guide
auauucucuagaagcauagca

SEQ ID NO: 48674 - RNA, 21 nt, Artificial Sequence
  LRRK2 RNA guide
auucucuagaagcauagcaau

SEQ ID NO: 48675 - RNA, 21 nt, Artificial Sequence
  LRRK2 RNA guide
auugcuaugcuucuagagaau

SEQ ID NO: 48676 - RNA, 21 nt, Artificial Sequence
  LRRK2 RNA guide
cguauugcuaugcuucuagag

SEQ ID NO: 48677 - RNA, 21 nt, Artificial Sequence
  LRRK2 RNA guide
cuagaagcauagcaauacgua

SEQ ID NO: 48678 - RNA, 21 nt, Artificial Sequence
  LRRK2 RNA guide
cucuagaagcauagcaauacg

SEQ ID NO: 48679 - RNA, 21 nt, Artificial Sequence
  LRRK2 RNA guide
gcuaugcuucuagagaauauu

SEQ ID NO: 48680 - RNA, 21 nt, Artificial Sequence
  LRRK2 RNA guide
guauugcuaugcuucuagaga

SEQ ID NO: 48681 - RNA, 21 nt, Artificial Sequence
  LRRK2 RNA guide
uacguauugcuaugcuucuag

SEQ ID NO: 48682 - RNA, 21 nt, Artificial Sequence
  LRRK2 RNA guide
uauucucuagaagcauagcaa

SEQ ID NO: 48683 - RNA, 21 nt, Artificial Sequence
  LRRK2 RNA guide
uauugcuaugcuucuagagaa

SEQ ID NO: 48684 - RNA, 21 nt, Artificial Sequence
  LRRK2 RNA guide
ucuagaagcauagcaauacgu

SEQ ID NO: 48685 - RNA, 21 nt, Artificial Sequence
  LRRK2 RNA guide
ucucuagaagcauagcaauac

SEQ ID NO: 48686 - RNA, 21 nt, Artificial Sequence
  LRRK2 RNA guide
ugcuaugcuucuagagaauau

SEQ ID NO: 48687 - RNA, 21 nt, Artificial Sequence
  LRRK2 RNA guide
uuacguauugcuaugcuucua

SEQ ID NO: 48688 - RNA, 21 nt, Artificial Sequence
  LRRK2 RNA guide
uucucuagaagcauagcaaua

SEQ ID NO: 48689 - RNA, 21 nt, Artificial Sequence
  LRRK2 RNA guide
uugcuaugcuucuagagaaua

SEQ ID NO: 48690 - RNA, 22 nt, Artificial Sequence
  LRRK2 RNA guide
aaauauucucuagaagcauagc

SEQ ID NO: 48691 - RNA, 22 nt, Artificial Sequence
  LRRK2 RNA guide
aauauucucuagaagcauagca

SEQ ID NO: 48692 - RNA, 22 nt, Artificial Sequence
  LRRK2 RNA guide
acguauugcuaugcuucuagag

SEQ ID NO: 48693 - RNA, 22 nt, Artificial Sequence
  LRRK2 RNA guide
auauucucuagaagcauagcaa

SEQ ID NO: 48694 - RNA, 22 nt, Artificial Sequence
  LRRK2 RNA guide
auucucuagaagcauagcaaua

SEQ ID NO: 48695 - RNA, 22 nt, Artificial Sequence
  LRRK2 RNA guide
auugcuaugcuucuagagaaua

SEQ ID NO: 48696 - RNA, 22 nt, Artificial Sequence
  LRRK2 RNA guide
cguauugcuaugcuucuagaga

SEQ ID NO: 48697 - RNA, 22 nt, Artificial Sequence
  LRRK2 RNA guide
cuagaagcauagcaauacguaa

SEQ ID NO: 48698 - RNA, 22 nt, Artificial Sequence
  LRRK2 RNA guide
cuaugcuucuagagaauauuuc

SEQ ID NO: 48699 - RNA, 22 nt, Artificial Sequence
  LRRK2 RNA guide
cucuagaagcauagcaauacgu

SEQ ID NO: 48700 - RNA, 22 nt, Artificial Sequence
  LRRK2 RNA guide
cuuacguauugcuaugcuucua

SEQ ID NO: 48701 - RNA, 22 nt, Artificial Sequence
  LRRK2 RNA guide
gaaauauucucuagaagcauag

SEQ ID NO: 48702 - RNA, 22 nt, Artificial Sequence
  LRRK2 RNA guide
gcuaugcuucuagagaauauuu

SEQ ID NO: 48703 - RNA, 22 nt, Artificial Sequence
  LRRK2 RNA guide
guauugcuaugcuucuagagaa

SEQ ID NO: 48704 - RNA, 22 nt, Artificial Sequence
  LRRK2 RNA guide
uacguauugcuaugcuucuaga

SEQ ID NO: 48705 - RNA, 22 nt, Artificial Sequence
  LRRK2 RNA guide
uauucucuagaagcauagcaau

SEQ ID NO: 48706 - RNA, 22 nt, Artificial Sequence
  LRRK2 RNA guide
uauugcuaugcuucuagagaau

SEQ ID NO: 48707 - RNA, 22 nt, Artificial Sequence
  LRRK2 RNA guide
ucuagaagcauagcaauacgua

SEQ ID NO: 48708 - RNA, 22 nt, Artificial Sequence
  LRRK2 RNA guide
ucucuagaagcauagcaauacg

SEQ ID NO: 48709 - RNA, 22 nt, Artificial Sequence
  LRRK2 RNA guide
ugcuaugcuucuagagaauauu

SEQ ID NO: 48710 - RNA, 22 nt, Artificial Sequence
  LRRK2 RNA guide
uuacguauugcuaugcuucuag

SEQ ID NO: 48711 - RNA, 22 nt, Artificial Sequence
  LRRK2 RNA guide
uucucuagaagcauagcaauac

SEQ ID NO: 48712 - RNA, 22 nt, Artificial Sequence
  LRRK2 RNA guide
uugcuaugcuucuagagaauau

SEQ ID NO: 48713 - RNA, 20 nt, Artificial Sequence
  LRRK2 RNA guide
aaaauaagagauacaccagc

SEQ ID NO: 48714 - RNA, 20 nt, Artificial Sequence
  LRRK2 RNA guide
aaauaagagauacaccagca

SEQ ID NO: 48715 - RNA, 20 nt, Artificial Sequence
  LRRK2 RNA guide
aagagauacaccagcaacuu

SEQ ID NO: 48716 - RNA, 20 nt, Artificial Sequence
  LRRK2 RNA guide
aaguugcugguguaucucuu

SEQ ID NO: 48717 - RNA, 20 nt, Artificial Sequence
  LRRK2 RNA guide
aauaagagauacaccagcaa

SEQ ID NO: 48718 - RNA, 20 nt, Artificial Sequence
  LRRK2 RNA guide
agagauacaccagcaacuua

SEQ ID NO: 48719 - RNA, 20 nt, Artificial Sequence
  LRRK2 RNA guide
aguugcugguguaucucuua

SEQ ID NO: 48720 - RNA, 20 nt, Artificial Sequence
  LRRK2 RNA guide
auaagagauacaccagcaac

SEQ ID NO: 48721 - RNA, 20 nt, Artificial Sequence
  LRRK2 RNA guide
auuucuaaguugcuggugua

SEQ ID NO: 48722 - RNA, 20 nt, Artificial Sequence
  LRRK2 RNA guide
cuaaguugcugguguaucuc

SEQ ID NO: 48723 - RNA, 20 nt, Artificial Sequence
  LRRK2 RNA guide
cucuuauuuucagauauagc

SEQ ID NO: 48724 - RNA, 20 nt, Artificial Sequence
  LRRK2 RNA guide
cugaaaauaagagauacacc

SEQ ID NO: 48725 - RNA, 20 nt, Artificial Sequence
  LRRK2 RNA guide
cugguguaucucuuauuuuc

SEQ ID NO: 48726 - RNA, 20 nt, Artificial Sequence
  LRRK2 RNA guide
gaaaauaagagauacaccag

SEQ ID NO: 48727 - RNA, 20 nt, Artificial Sequence
  LRRK2 RNA guide
gauuucuaaguugcuggugu

SEQ ID NO: 48728 - RNA, 20 nt, Artificial Sequence
  LRRK2 RNA guide
gcuauaucugaaaauaagag

SEQ ID NO: 48729 - RNA, 20 nt, Artificial Sequence
  LRRK2 RNA guide
gcugguguaucucuuauuuu

SEQ ID NO: 48730 - RNA, 20 nt, Artificial Sequence
  LRRK2 RNA guide
gguguaucucuuauuuucag

SEQ ID NO: 48731 - RNA, 20 nt, Artificial Sequence
  LRRK2 RNA guide
guagaugcuauaucugaaaa

SEQ ID NO: 48732 - RNA, 20 nt, Artificial Sequence
  LRRK2 RNA guide
guguaucucuuauuuucaga

SEQ ID NO: 48733 - RNA, 20 nt, Artificial Sequence
  LRRK2 RNA guide
guugcugguguaucucuuau

SEQ ID NO: 48734 - RNA, 20 nt, Artificial Sequence
  LRRK2 RNA guide
uaaguugcugguguaucucu

SEQ ID NO: 48735 - RNA, 20 nt, Artificial Sequence
  LRRK2 RNA guide
ucuaaguugcugguguaucu

SEQ ID NO: 48736 - RNA, 20 nt, Artificial Sequence
  LRRK2 RNA guide
ucugaaaauaagagauacac

SEQ ID NO: 48737 - RNA, 20 nt, Artificial Sequence
  LRRK2 RNA guide
ugaaaauaagagauacacca

SEQ ID NO: 48738 - RNA, 20 nt, Artificial Sequence
  LRRK2 RNA guide
ugcugguguaucucuuauuu

SEQ ID NO: 48739 - RNA, 20 nt, Artificial Sequence
  LRRK2 RNA guide
ugguguaucucuuauuuuca

SEQ ID NO: 48740 - RNA, 20 nt, Artificial Sequence
  LRRK2 RNA guide
uguagaugcuauaucugaaa

SEQ ID NO: 48741 - RNA, 20 nt, Artificial Sequence
  LRRK2 RNA guide
uucuaaguugcugguguauc

SEQ ID NO: 48742 - RNA, 20 nt, Artificial Sequence
  LRRK2 RNA guide
uugcugguguaucucuuauu

SEQ ID NO: 48743 - RNA, 20 nt, Artificial Sequence
  LRRK2 RNA guide
uuucuaaguugcugguguau

SEQ ID NO: 48744 - RNA, 21 nt, Artificial Sequence
  LRRK2 RNA guide
aaaauaagagauacaccagca

SEQ ID NO: 48745 - RNA, 21 nt, Artificial Sequence
  LRRK2 RNA guide
aaauaagagauacaccagcaa

SEQ ID NO: 48746 - RNA, 21 nt, Artificial Sequence
  LRRK2 RNA guide
aagagauacaccagcaacuua

SEQ ID NO: 48747 - RNA, 21 nt, Artificial Sequence
  LRRK2 RNA guide
aaguugcugguguaucucuua

SEQ ID NO: 48748 - RNA, 21 nt, Artificial Sequence
  LRRK2 RNA guide
aauaagagauacaccagcaac

SEQ ID NO: 48749 - RNA, 21 nt, Artificial Sequence
  LRRK2 RNA guide
agagauacaccagcaacuuag

SEQ ID NO: 48750 - RNA, 21 nt, Artificial Sequence
  LRRK2 RNA guide
aguugcugguguaucucuuau

SEQ ID NO: 48751 - RNA, 21 nt, Artificial Sequence
  LRRK2 RNA guide
auaagagauacaccagcaacu

SEQ ID NO: 48752 - RNA, 21 nt, Artificial Sequence
  LRRK2 RNA guide
auuucuaaguugcugguguau

SEQ ID NO: 48753 - RNA, 21 nt, Artificial Sequence
  LRRK2 RNA guide
cuaaguugcugguguaucucu

SEQ ID NO: 48754 - RNA, 21 nt, Artificial Sequence
  LRRK2 RNA guide
cugaaaauaagagauacacca

SEQ ID NO: 48755 - RNA, 21 nt, Artificial Sequence
  LRRK2 RNA guide
cugguguaucucuuauuuuca

SEQ ID NO: 48756 - RNA, 21 nt, Artificial Sequence
  LRRK2 RNA guide
gaaaauaagagauacaccagc

SEQ ID NO: 48757 - RNA, 21 nt, Artificial Sequence
  LRRK2 RNA guide
gauuucuaaguugcuggugua

SEQ ID NO: 48758 - RNA, 21 nt, Artificial Sequence
  LRRK2 RNA guide
gcugguguaucucuuauuuuc

SEQ ID NO: 48759 - RNA, 21 nt, Artificial Sequence
  LRRK2 RNA guide
gguguaucucuuauuuucaga

SEQ ID NO: 48760 - RNA, 21 nt, Artificial Sequence
  LRRK2 RNA guide
guguagaugcuauaucugaaa

SEQ ID NO: 48761 - RNA, 21 nt, Artificial Sequence
  LRRK2 RNA guide
guugcugguguaucucuuauu

SEQ ID NO: 48762 - RNA, 21 nt, Artificial Sequence
  LRRK2 RNA guide
uaagagauacaccagcaacuu

SEQ ID NO: 48763 - RNA, 21 nt, Artificial Sequence
  LRRK2 RNA guide
uaaguugcugguguaucucuu

SEQ ID NO: 48764 - RNA, 21 nt, Artificial Sequence
  LRRK2 RNA guide
ucuaaguugcugguguaucuc

SEQ ID NO: 48765 - RNA, 21 nt, Artificial Sequence
  LRRK2 RNA guide
ucugaaaauaagagauacacc

SEQ ID NO: 48766 - RNA, 21 nt, Artificial Sequence
  LRRK2 RNA guide
ugaaaauaagagauacaccag

SEQ ID NO: 48767 - RNA, 21 nt, Artificial Sequence
  LRRK2 RNA guide
ugauuucuaaguugcuggugu

SEQ ID NO: 48768 - RNA, 21 nt, Artificial Sequence
  LRRK2 RNA guide
ugcugguguaucucuuauuuu

SEQ ID NO: 48769 - RNA, 21 nt, Artificial Sequence
  LRRK2 RNA guide
ugguguaucucuuauuuucag

SEQ ID NO: 48770 - RNA, 21 nt, Artificial Sequence
  LRRK2 RNA guide
uucuaaguugcugguguaucu

SEQ ID NO: 48771 - RNA, 21 nt, Artificial Sequence
  LRRK2 RNA guide
uugcugguguaucucuuauuu

SEQ ID NO: 48772 - RNA, 21 nt, Artificial Sequence
  LRRK2 RNA guide
uuucuaaguugcugguguauc

SEQ ID NO: 48773 - RNA, 22 nt, Artificial Sequence
  LRRK2 RNA guide
aaaauaagagauacaccagcaa

SEQ ID NO: 48774 - RNA, 22 nt, Artificial Sequence
  LRRK2 RNA guide
aaauaagagauacaccagcaac

SEQ ID NO: 48775 - RNA, 22 nt, Artificial Sequence
  LRRK2 RNA guide
aagagauacaccagcaacuuag

SEQ ID NO: 48776 - RNA, 22 nt, Artificial Sequence
  LRRK2 RNA guide
aaguugcugguguaucucuuau

SEQ ID NO: 48777 - RNA, 22 nt, Artificial Sequence
  LRRK2 RNA guide
aauaagagauacaccagcaacu

SEQ ID NO: 48778 - RNA, 22 nt, Artificial Sequence
  LRRK2 RNA guide
agagauacaccagcaacuuaga

SEQ ID NO: 48779 - RNA, 22 nt, Artificial Sequence
  LRRK2 RNA guide
aguguagaugcuauaucugaaa

SEQ ID NO: 48780 - RNA, 22 nt, Artificial Sequence
  LRRK2 RNA guide
aguugcugguguaucucuuauu

SEQ ID NO: 48781 - RNA, 22 nt, Artificial Sequence
  LRRK2 RNA guide
auaagagauacaccagcaacuu

SEQ ID NO: 48782 - RNA, 22 nt, Artificial Sequence
  LRRK2 RNA guide
aucugaaaauaagagauacacc

SEQ ID NO: 48783 - RNA, 22 nt, Artificial Sequence
  LRRK2 RNA guide
auuucuaaguugcugguguauc

SEQ ID NO: 48784 - RNA, 22 nt, Artificial Sequence
  LRRK2 RNA guide
cuaaguugcugguguaucucuu

SEQ ID NO: 48785 - RNA, 22 nt, Artificial Sequence
  LRRK2 RNA guide
cugaaaauaagagauacaccag

SEQ ID NO: 48786 - RNA, 22 nt, Artificial Sequence
  LRRK2 RNA guide
cugguguaucucuuauuuucag

SEQ ID NO: 48787 - RNA, 22 nt, Artificial Sequence
  LRRK2 RNA guide
gaaaauaagagauacaccagca

SEQ ID NO: 48788 - RNA, 22 nt, Artificial Sequence
  LRRK2 RNA guide
gauuucuaaguugcugguguau

SEQ ID NO: 48789 - RNA, 22 nt, Artificial Sequence
  LRRK2 RNA guide
gcugguguaucucuuauuuuca

SEQ ID NO: 48790 - RNA, 22 nt, Artificial Sequence
  LRRK2 RNA guide
gguguaucucuuauuuucagau

SEQ ID NO: 48791 - RNA, 22 nt, Artificial Sequence
  LRRK2 RNA guide
guguagaugcuauaucugaaaa

SEQ ID NO: 48792 - RNA, 22 nt, Artificial Sequence
  LRRK2 RNA guide
guugcugguguaucucuuauuu

SEQ ID NO: 48793 - RNA, 22 nt, Artificial Sequence
  LRRK2 RNA guide
uaagagauacaccagcaacuua

SEQ ID NO: 48794 - RNA, 22 nt, Artificial Sequence
  LRRK2 RNA guide
uaaguugcugguguaucucuua

SEQ ID NO: 48795 - RNA, 22 nt, Artificial Sequence
  LRRK2 RNA guide
ucuaaguugcugguguaucucu

SEQ ID NO: 48796 - RNA, 22 nt, Artificial Sequence
  LRRK2 RNA guide
ucugaaaauaagagauacacca

SEQ ID NO: 48797 - RNA, 22 nt, Artificial Sequence
  LRRK2 RNA guide
ugaaaauaagagauacaccagc

SEQ ID NO: 48798 - RNA, 22 nt, Artificial Sequence
  LRRK2 RNA guide
ugauuucuaaguugcuggugua

SEQ ID NO: 48799 - RNA, 22 nt, Artificial Sequence
  LRRK2 RNA guide
ugcugguguaucucuuauuuuc

SEQ ID NO: 48800 - RNA, 22 nt, Artificial Sequence
  LRRK2 RNA guide
ugguguaucucuuauuuucaga

SEQ ID NO: 48801 - RNA, 22 nt, Artificial Sequence
  LRRK2 RNA guide
uucuaaguugcugguguaucuc

SEQ ID NO: 48802 - RNA, 22 nt, Artificial Sequence
  LRRK2 RNA guide
uugauuucuaaguugcuggugu

SEQ ID NO: 48803 - RNA, 22 nt, Artificial Sequence
  LRRK2 RNA guide
uugcugguguaucucuuauuuu

SEQ ID NO: 48804 - RNA, 22 nt, Artificial Sequence
  LRRK2 RNA guide
uuucuaaguugcugguguaucu

SEQ ID NO: 48805 - RNA, 20 nt, Artificial Sequence
  LRRK2 RNA guide
aaaauaaagagauacaccag

SEQ ID NO: 48806 - RNA, 20 nt, Artificial Sequence
  LRRK2 RNA guide
aaagagauacaccagcaacu

SEQ ID NO: 48807 - RNA, 20 nt, Artificial Sequence
  LRRK2 RNA guide
aaauaaagagauacaccagc

SEQ ID NO: 48808 - RNA, 20 nt, Artificial Sequence
  LRRK2 RNA guide
aauaaagagauacaccagca

SEQ ID NO: 48809 - RNA, 20 nt, Artificial Sequence
  LRRK2 RNA guide
aguugcugguguaucucuuu

SEQ ID NO: 48810 - RNA, 20 nt, Artificial Sequence
  LRRK2 RNA guide
auaaagagauacaccagcaa

SEQ ID NO: 48811 - RNA, 20 nt, Artificial Sequence
  LRRK2 RNA guide
cugaaaauaaagagauacac

SEQ ID NO: 48812 - RNA, 20 nt, Artificial Sequence
  LRRK2 RNA guide
cugguguaucucuuuauuuu

SEQ ID NO: 48813 - RNA, 20 nt, Artificial Sequence
  LRRK2 RNA guide
gaaaauaaagagauacacca

SEQ ID NO: 48814 - RNA, 20 nt, Artificial Sequence
  LRRK2 RNA guide
gcugguguaucucuuuauuu

SEQ ID NO: 48815 - RNA, 20 nt, Artificial Sequence
  LRRK2 RNA guide
gguguaucucuuuauuuuca

SEQ ID NO: 48816 - RNA, 20 nt, Artificial Sequence
  LRRK2 RNA guide
guguaucucuuuauuuucag

SEQ ID NO: 48817 - RNA, 20 nt, Artificial Sequence
  LRRK2 RNA guide
guugcugguguaucucuuua

SEQ ID NO: 48818 - RNA, 20 nt, Artificial Sequence
  LRRK2 RNA guide
uaaagagauacaccagcaac

SEQ ID NO: 48819 - RNA, 20 nt, Artificial Sequence
  LRRK2 RNA guide
ugaaaauaaagagauacacc

SEQ ID NO: 48820 - RNA, 20 nt, Artificial Sequence
  LRRK2 RNA guide
ugcugguguaucucuuuauu

SEQ ID NO: 48821 - RNA, 20 nt, Artificial Sequence
  LRRK2 RNA guide
ugguguaucucuuuauuuuc

SEQ ID NO: 48822 - RNA, 20 nt, Artificial Sequence
  LRRK2 RNA guide
uugcugguguaucucuuuau

SEQ ID NO: 48823 - RNA, 21 nt, Artificial Sequence
  LRRK2 RNA guide
aaaauaaagagauacaccagc

SEQ ID NO: 48824 - RNA, 21 nt, Artificial Sequence
  LRRK2 RNA guide
aaagagauacaccagcaacuu

SEQ ID NO: 48825 - RNA, 21 nt, Artificial Sequence
  LRRK2 RNA guide
aaauaaagagauacaccagca

SEQ ID NO: 48826 - RNA, 21 nt, Artificial Sequence
  LRRK2 RNA guide
aaguugcugguguaucucuuu

SEQ ID NO: 48827 - RNA, 21 nt, Artificial Sequence
  LRRK2 RNA guide
aauaaagagauacaccagcaa

SEQ ID NO: 48828 - RNA, 21 nt, Artificial Sequence
  LRRK2 RNA guide
aguugcugguguaucucuuua

SEQ ID NO: 48829 - RNA, 21 nt, Artificial Sequence
  LRRK2 RNA guide
auaaagagauacaccagcaac

SEQ ID NO: 48830 - RNA, 21 nt, Artificial Sequence
  LRRK2 RNA guide
cugaaaauaaagagauacacc

SEQ ID NO: 48831 - RNA, 21 nt, Artificial Sequence
  LRRK2 RNA guide
cugguguaucucuuuauuuuc

SEQ ID NO: 48832 - RNA, 21 nt, Artificial Sequence
  LRRK2 RNA guide
gaaaauaaagagauacaccag

SEQ ID NO: 48833 - RNA, 21 nt, Artificial Sequence
  LRRK2 RNA guide
gcugguguaucucuuuauuuu

SEQ ID NO: 48834 - RNA, 21 nt, Artificial Sequence
  LRRK2 RNA guide
gguguaucucuuuauuuucag

SEQ ID NO: 48835 - RNA, 21 nt, Artificial Sequence
  LRRK2 RNA guide
guugcugguguaucucuuuau

SEQ ID NO: 48836 - RNA, 21 nt, Artificial Sequence
  LRRK2 RNA guide
uaaagagauacaccagcaacu

SEQ ID NO: 48837 - RNA, 21 nt, Artificial Sequence
  LRRK2 RNA guide
ugcugguguaucucuuuauuu

SEQ ID NO: 48838 - RNA, 21 nt, Artificial Sequence
  LRRK2 RNA guide
uugcugguguaucucuuuauu

SEQ ID NO: 48839 - RNA, 22 nt, Artificial Sequence
  LRRK2 RNA guide
aaaauaaagagauacaccagca

SEQ ID NO: 48840 - RNA, 22 nt, Artificial Sequence
  LRRK2 RNA guide
aaagagauacaccagcaacuua

SEQ ID NO: 48841 - RNA, 22 nt, Artificial Sequence
  LRRK2 RNA guide
aaauaaagagauacaccagcaa

SEQ ID NO: 48842 - RNA, 22 nt, Artificial Sequence
  LRRK2 RNA guide
aaguugcugguguaucucuuua

SEQ ID NO: 48843 - RNA, 22 nt, Artificial Sequence
  LRRK2 RNA guide
aauaaagagauacaccagcaac

SEQ ID NO: 48844 - RNA, 22 nt, Artificial Sequence
  LRRK2 RNA guide
aguugcugguguaucucuuuau

SEQ ID NO: 48845 - RNA, 22 nt, Artificial Sequence
  LRRK2 RNA guide
auaaagagauacaccagcaacu

SEQ ID NO: 48846 - RNA, 22 nt, Artificial Sequence
  LRRK2 RNA guide
cugaaaauaaagagauacacca

SEQ ID NO: 48847 - RNA, 22 nt, Artificial Sequence
  LRRK2 RNA guide
cugguguaucucuuuauuuuca

SEQ ID NO: 48848 - RNA, 22 nt, Artificial Sequence
  LRRK2 RNA guide
gaaaauaaagagauacaccagc

SEQ ID NO: 48849 - RNA, 22 nt, Artificial Sequence
  LRRK2 RNA guide
gcugguguaucucuuuauuuuc

SEQ ID NO: 48850 - RNA, 22 nt, Artificial Sequence
  LRRK2 RNA guide
gguguaucucuuuauuuucaga

SEQ ID NO: 48851 - RNA, 22 nt, Artificial Sequence
  LRRK2 RNA guide
guugcugguguaucucuuuauu

SEQ ID NO: 48852 - RNA, 22 nt, Artificial Sequence
  LRRK2 RNA guide
uaaagagauacaccagcaacuu

SEQ ID NO: 48853 - RNA, 22 nt, Artificial Sequence
  LRRK2 RNA guide
uaaguugcugguguaucucuuu

SEQ ID NO: 48854 - RNA, 22 nt, Artificial Sequence
  LRRK2 RNA guide
ucugaaaauaaagagauacacc

SEQ ID NO: 48855 - RNA, 22 nt, Artificial Sequence
  LRRK2 RNA guide
ugaaaauaaagagauacaccag

SEQ ID NO: 48856 - RNA, 22 nt, Artificial Sequence
  LRRK2 RNA guide
ugcugguguaucucuuuauuuu

SEQ ID NO: 48857 - RNA, 22 nt, Artificial Sequence
  LRRK2 RNA guide
ugguguaucucuuuauuuucag

SEQ ID NO: 48858 - RNA, 22 nt, Artificial Sequence
  LRRK2 RNA guide
uugcugguguaucucuuuauuu

SEQ ID NO: 48859 - RNA, 20 nt, Artificial Sequence
  LRRK2 RNA guide
ccuggauagugaagguauuu

SEQ ID NO: 48860 - RNA, 20 nt, Artificial Sequence
  LRRK2 RNA guide
cuggauagugaagguauuua

SEQ ID NO: 48861 - RNA, 20 nt, Artificial Sequence
  LRRK2 RNA guide
ggauagugaagguauuuauu

SEQ ID NO: 48862 - RNA, 20 nt, Artificial Sequence
  LRRK2 RNA guide
uggauagugaagguauuuau

SEQ ID NO: 48863 - RNA, 21 nt, Artificial Sequence
  LRRK2 RNA guide
accuggauagugaagguauuu

SEQ ID NO: 48864 - RNA, 21 nt, Artificial Sequence
  LRRK2 RNA guide
ccuggauagugaagguauuua

SEQ ID NO: 48865 - RNA, 21 nt, Artificial Sequence
  LRRK2 RNA guide
cuggauagugaagguauuuau

SEQ ID NO: 48866 - RNA, 22 nt, Artificial Sequence
  LRRK2 RNA guide
accuggauagugaagguauuua

SEQ ID NO: 48867 - RNA, 22 nt, Artificial Sequence
  LRRK2 RNA guide
ccuggauagugaagguauuuau

SEQ ID NO: 48868 - RNA, 22 nt, Artificial Sequence
  LRRK2 RNA guide
cuggauagugaagguauuuauu

SEQ ID NO: 48869 - RNA, 22 nt, Artificial Sequence
  LRRK2 RNA guide
gaccuggauagugaagguauuu

SEQ ID NO: 48870 - RNA, 20 nt, Artificial Sequence
  LRRK2 RNA guide
acccaucacuuuaaccaaaa

SEQ ID NO: 48871 - RNA, 20 nt, Artificial Sequence
  LRRK2 RNA guide
aucgcaaacaguuaaguuua

SEQ ID NO: 48872 - RNA, 20 nt, Artificial Sequence
  LRRK2 RNA guide
ccaucacuuuaaccaaaauu

SEQ ID NO: 48873 - RNA, 20 nt, Artificial Sequence
  LRRK2 RNA guide
cccaucacuuuaaccaaaau

SEQ ID NO: 48874 - RNA, 20 nt, Artificial Sequence
  LRRK2 RNA guide
cgcaaacaguuaaguuuacu

SEQ ID NO: 48875 - RNA, 20 nt, Artificial Sequence
  LRRK2 RNA guide
gacccaucacuuuaaccaaa

SEQ ID NO: 48876 - RNA, 20 nt, Artificial Sequence
  LRRK2 RNA guide
gcaaacaguuaaguuuacua

SEQ ID NO: 48877 - RNA, 20 nt, Artificial Sequence
  LRRK2 RNA guide
uaucgcaaacaguuaaguuu

SEQ ID NO: 48878 - RNA, 20 nt, Artificial Sequence
  LRRK2 RNA guide
ucgcaaacaguuaaguuuac

SEQ ID NO: 48879 - RNA, 20 nt, Artificial Sequence
  LRRK2 RNA guide
ugacccaucacuuuaaccaa

SEQ ID NO: 48880 - RNA, 20 nt, Artificial Sequence
  LRRK2 RNA guide
uuaucgcaaacaguuaaguu

SEQ ID NO: 48881 - RNA, 20 nt, Artificial Sequence
  LRRK2 RNA guide
uugacccaucacuuuaacca

SEQ ID NO: 48882 - RNA, 21 nt, Artificial Sequence
  LRRK2 RNA guide
acccaucacuuuaaccaaaau

SEQ ID NO: 48883 - RNA, 21 nt, Artificial Sequence
  LRRK2 RNA guide
aucgcaaacaguuaaguuuac

SEQ ID NO: 48884 - RNA, 21 nt, Artificial Sequence
  LRRK2 RNA guide
cccaucacuuuaaccaaaauu

SEQ ID NO: 48885 - RNA, 21 nt, Artificial Sequence
  LRRK2 RNA guide
cgcaaacaguuaaguuuacua

SEQ ID NO: 48886 - RNA, 21 nt, Artificial Sequence
  LRRK2 RNA guide
cuugacccaucacuuuaacca

SEQ ID NO: 48887 - RNA, 21 nt, Artificial Sequence
  LRRK2 RNA guide
gacccaucacuuuaaccaaaa

SEQ ID NO: 48888 - RNA, 21 nt, Artificial Sequence
  LRRK2 RNA guide
ucgcaaacaguuaaguuuacu

SEQ ID NO: 48889 - RNA, 21 nt, Artificial Sequence
  LRRK2 RNA guide
ugacccaucacuuuaaccaaa

SEQ ID NO: 48890 - RNA, 21 nt, Artificial Sequence
  LRRK2 RNA guide
uugacccaucacuuuaaccaa

SEQ ID NO: 48891 - RNA, 22 nt, Artificial Sequence
  LRRK2 RNA guide
acccaucacuuuaaccaaaauu

SEQ ID NO: 48892 - RNA, 22 nt, Artificial Sequence
  LRRK2 RNA guide
aucgcaaacaguuaaguuuacu

SEQ ID NO: 48893 - RNA, 22 nt, Artificial Sequence
  LRRK2 RNA guide
ccaucacuuuaaccaaaauuag

SEQ ID NO: 48894 - RNA, 22 nt, Artificial Sequence
  LRRK2 RNA guide
cccaucacuuuaaccaaaauua

SEQ ID NO: 48895 - RNA, 22 nt, Artificial Sequence
  LRRK2 RNA guide
ccuugacccaucacuuuaacca

SEQ ID NO: 48896 - RNA, 22 nt, Artificial Sequence
  LRRK2 RNA guide
cgcaaacaguuaaguuuacuaa

SEQ ID NO: 48897 - RNA, 22 nt, Artificial Sequence
  LRRK2 RNA guide
cuaauuuugguuaaagugaugg

SEQ ID NO: 48898 - RNA, 22 nt, Artificial Sequence
  LRRK2 RNA guide
cuugacccaucacuuuaaccaa

SEQ ID NO: 48899 - RNA, 22 nt, Artificial Sequence
  LRRK2 RNA guide
gacccaucacuuuaaccaaaau

SEQ ID NO: 48900 - RNA, 22 nt, Artificial Sequence
  LRRK2 RNA guide
uaauuuugguuaaagugauggg

SEQ ID NO: 48901 - RNA, 22 nt, Artificial Sequence
  LRRK2 RNA guide
uaucgcaaacaguuaaguuuac

SEQ ID NO: 48902 - RNA, 22 nt, Artificial Sequence
  LRRK2 RNA guide
ucgcaaacaguuaaguuuacua

SEQ ID NO: 48903 - RNA, 22 nt, Artificial Sequence
  LRRK2 RNA guide
ugacccaucacuuuaaccaaaa

SEQ ID NO: 48904 - RNA, 22 nt, Artificial Sequence
  LRRK2 RNA guide
uuaguaaacuuaacuguuugcg

SEQ ID NO: 48905 - RNA, 22 nt, Artificial Sequence
  LRRK2 RNA guide
uugacccaucacuuuaaccaaa

SEQ ID NO: 48906 - RNA, 20 nt, Artificial Sequence
  LRRK2 RNA guide
acugauuuugguuaaaguga

SEQ ID NO: 48907 - RNA, 20 nt, Artificial Sequence
  LRRK2 RNA guide
aucacuuuaaccaaaaucag

SEQ ID NO: 48908 - RNA, 20 nt, Artificial Sequence
  LRRK2 RNA guide
caaacaguuaaguuuacuga

SEQ ID NO: 48909 - RNA, 20 nt, Artificial Sequence
  LRRK2 RNA guide
cacuuuaaccaaaaucagua

SEQ ID NO: 48910 - RNA, 20 nt, Artificial Sequence
  LRRK2 RNA guide
caucacuuuaaccaaaauca

SEQ ID NO: 48911 - RNA, 20 nt, Artificial Sequence
  LRRK2 RNA guide
ccaaaaucaguaaacuuaac

SEQ ID NO: 48912 - RNA, 20 nt, Artificial Sequence
  LRRK2 RNA guide
ccaucacuuuaaccaaaauc

SEQ ID NO: 48913 - RNA, 20 nt, Artificial Sequence
  LRRK2 RNA guide
cugauuuugguuaaagugau

SEQ ID NO: 48914 - RNA, 20 nt, Artificial Sequence
  LRRK2 RNA guide
gcaaacaguuaaguuuacug

SEQ ID NO: 48915 - RNA, 20 nt, Artificial Sequence
  LRRK2 RNA guide
guuaaguuuacugauuuugg

SEQ ID NO: 48916 - RNA, 20 nt, Artificial Sequence
  LRRK2 RNA guide
uacugauuuugguuaaagug

SEQ ID NO: 48917 - RNA, 20 nt, Artificial Sequence
  LRRK2 RNA guide
ucacuuuaaccaaaaucagu

SEQ ID NO: 48918 - RNA, 20 nt, Artificial Sequence
  LRRK2 RNA guide
ucaguaaacuuaacuguuug

SEQ ID NO: 48919 - RNA, 20 nt, Artificial Sequence
  LRRK2 RNA guide
ugauuuugguuaaagugaug

SEQ ID NO: 48920 - RNA, 21 nt, Artificial Sequence
  LRRK2 RNA guide
caucacuuuaaccaaaaucag

SEQ ID NO: 48921 - RNA, 21 nt, Artificial Sequence
  LRRK2 RNA guide
ccaucacuuuaaccaaaauca

SEQ ID NO: 48922 - RNA, 21 nt, Artificial Sequence
  LRRK2 RNA guide
cccaucacuuuaaccaaaauc

SEQ ID NO: 48923 - RNA, 21 nt, Artificial Sequence
  LRRK2 RNA guide
cgcaaacaguuaaguuuacug

SEQ ID NO: 48924 - RNA, 21 nt, Artificial Sequence
  LRRK2 RNA guide
cugauuuugguuaaagugaug

SEQ ID NO: 48925 - RNA, 21 nt, Artificial Sequence
  LRRK2 RNA guide
gcaaacaguuaaguuuacuga

SEQ ID NO: 48926 - RNA, 21 nt, Artificial Sequence
  LRRK2 RNA guide
ucaguaaacuuaacuguuugc

SEQ ID NO: 48927 - RNA, 21 nt, Artificial Sequence
  LRRK2 RNA guide
ugauuuugguuaaagugaugg

SEQ ID NO: 48928 - RNA, 22 nt, Artificial Sequence
  LRRK2 RNA guide
acccaucacuuuaaccaaaauc

SEQ ID NO: 48929 - RNA, 22 nt, Artificial Sequence
  LRRK2 RNA guide
acugauuuugguuaaagugaug

SEQ ID NO: 48930 - RNA, 22 nt, Artificial Sequence
  LRRK2 RNA guide
aucaguaaacuuaacuguuugc

SEQ ID NO: 48931 - RNA, 22 nt, Artificial Sequence
  LRRK2 RNA guide
caguuaaguuuacugauuuugg

SEQ ID NO: 48932 - RNA, 22 nt, Artificial Sequence
  LRRK2 RNA guide
caucacuuuaaccaaaaucagu

SEQ ID NO: 48933 - RNA, 22 nt, Artificial Sequence
  LRRK2 RNA guide
ccaaaaucaguaaacuuaacug

SEQ ID NO: 48934 - RNA, 22 nt, Artificial Sequence
  LRRK2 RNA guide
ccaucacuuuaaccaaaaucag

SEQ ID NO: 48935 - RNA, 22 nt, Artificial Sequence
  LRRK2 RNA guide
cccaucacuuuaaccaaaauca

SEQ ID NO: 48936 - RNA, 22 nt, Artificial Sequence
  LRRK2 RNA guide
cgcaaacaguuaaguuuacuga

SEQ ID NO: 48937 - RNA, 22 nt, Artificial Sequence
  LRRK2 RNA guide
cugauuuugguuaaagugaugg

SEQ ID NO: 48938 - RNA, 22 nt, Artificial Sequence
  LRRK2 RNA guide
gcaaacaguuaaguuuacugau

SEQ ID NO: 48939 - RNA, 22 nt, Artificial Sequence
  LRRK2 RNA guide
ucaguaaacuuaacuguuugcg

SEQ ID NO: 48940 - RNA, 22 nt, Artificial Sequence
  LRRK2 RNA guide
ucgcaaacaguuaaguuuacug

SEQ ID NO: 48941 - RNA, 22 nt, Artificial Sequence
  LRRK2 RNA guide
ugauuuugguuaaagugauggg

SEQ ID NO: 48942 - RNA, 20 nt, Artificial Sequence
  LRRK2 RNA guide
aaaaaaguuucuucaugccu

SEQ ID NO: 48943 - RNA, 20 nt, Artificial Sequence
  LRRK2 RNA guide
aaaaaguuucuucaugccuc

SEQ ID NO: 48944 - RNA, 20 nt, Artificial Sequence
  LRRK2 RNA guide
aaaaguuucuucaugccucu

SEQ ID NO: 48945 - RNA, 20 nt, Artificial Sequence
  LRRK2 RNA guide
aaaguuucuucaugccucuu

SEQ ID NO: 48946 - RNA, 20 nt, Artificial Sequence
  LRRK2 RNA guide
aagaggcaugaagaaacuuu

SEQ ID NO: 48947 - RNA, 20 nt, Artificial Sequence
  LRRK2 RNA guide
aaggggauguuuucagugaa

SEQ ID NO: 48948 - RNA, 20 nt, Artificial Sequence
  LRRK2 RNA guide
aaguuucuucaugccucuuc

SEQ ID NO: 48949 - RNA, 20 nt, Artificial Sequence
  LRRK2 RNA guide
agaggcaugaagaaacuuuu

SEQ ID NO: 48950 - RNA, 20 nt, Artificial Sequence
  LRRK2 RNA guide
aggcaugaagaaacuuuuuu

SEQ ID NO: 48951 - RNA, 20 nt, Artificial Sequence
  LRRK2 RNA guide
aggggauguuuucagugaag

SEQ ID NO: 48952 - RNA, 20 nt, Artificial Sequence
  LRRK2 RNA guide
agugaagaggcaugaagaaa

SEQ ID NO: 48953 - RNA, 20 nt, Artificial Sequence
  LRRK2 RNA guide
aguuucuucaugccucuuca

SEQ ID NO: 48954 - RNA, 20 nt, Artificial Sequence
  LRRK2 RNA guide
augccucuucacugaaaaca

SEQ ID NO: 48955 - RNA, 20 nt, Artificial Sequence
  LRRK2 RNA guide
auguuuucagugaagaggca

SEQ ID NO: 48956 - RNA, 20 nt, Artificial Sequence
  LRRK2 RNA guide
caaaaaaguuucuucaugcc

SEQ ID NO: 48957 - RNA, 20 nt, Artificial Sequence
  LRRK2 RNA guide
cagugaagaggcaugaagaa

SEQ ID NO: 48958 - RNA, 20 nt, Artificial Sequence
  LRRK2 RNA guide
caugccucuucacugaaaac

SEQ ID NO: 48959 - RNA, 20 nt, Artificial Sequence
  LRRK2 RNA guide
ccaaaaaaguuucuucaugc

SEQ ID NO: 48960 - RNA, 20 nt, Artificial Sequence
  LRRK2 RNA guide
ccucuucacugaaaacaucc

SEQ ID NO: 48961 - RNA, 20 nt, Artificial Sequence
  LRRK2 RNA guide
cuucaugccucuucacugaa

SEQ ID NO: 48962 - RNA, 20 nt, Artificial Sequence
  LRRK2 RNA guide
gaagaggcaugaagaaacuu

SEQ ID NO: 48963 - RNA, 20 nt, Artificial Sequence
  LRRK2 RNA guide
gaaggggauguuuucaguga

SEQ ID NO: 48964 - RNA, 20 nt, Artificial Sequence
  LRRK2 RNA guide
gaggcaugaagaaacuuuuu

SEQ ID NO: 48965 - RNA, 20 nt, Artificial Sequence
  LRRK2 RNA guide
gauguuuucagugaagaggc

SEQ ID NO: 48966 - RNA, 20 nt, Artificial Sequence
  LRRK2 RNA guide
gccucuucacugaaaacauc

SEQ ID NO: 48967 - RNA, 20 nt, Artificial Sequence
  LRRK2 RNA guide
ggaaggggauguuuucagug

SEQ ID NO: 48968 - RNA, 20 nt, Artificial Sequence
  LRRK2 RNA guide
ggauguuuucagugaagagg

SEQ ID NO: 48969 - RNA, 20 nt, Artificial Sequence
  LRRK2 RNA guide
gggauguuuucagugaagag

SEQ ID NO: 48970 - RNA, 20 nt, Artificial Sequence
  LRRK2 RNA guide
ggggauguuuucagugaaga

SEQ ID NO: 48971 - RNA, 20 nt, Artificial Sequence
  LRRK2 RNA guide
gugaagaggcaugaagaaac

SEQ ID NO: 48972 - RNA, 20 nt, Artificial Sequence
  LRRK2 RNA guide
guuucuucaugccucuucac

SEQ ID NO: 48973 - RNA, 20 nt, Artificial Sequence
  LRRK2 RNA guide
guuuucagugaagaggcaug

SEQ ID NO: 48974 - RNA, 20 nt, Artificial Sequence
  LRRK2 RNA guide
ucagugaagaggcaugaaga

SEQ ID NO: 48975 - RNA, 20 nt, Artificial Sequence
  LRRK2 RNA guide
ucaugccucuucacugaaaa

SEQ ID NO: 48976 - RNA, 20 nt, Artificial Sequence
  LRRK2 RNA guide
uccaaaaaaguuucuucaug

SEQ ID NO: 48977 - RNA, 20 nt, Artificial Sequence
  LRRK2 RNA guide
ucuucaugccucuucacuga

SEQ ID NO: 48978 - RNA, 20 nt, Artificial Sequence
  LRRK2 RNA guide
ugaagaggcaugaagaaacu

SEQ ID NO: 48979 - RNA, 20 nt, Artificial Sequence
  LRRK2 RNA guide
ugccucuucacugaaaacau

SEQ ID NO: 48980 - RNA, 20 nt, Artificial Sequence
  LRRK2 RNA guide
uguuuucagugaagaggcau

SEQ ID NO: 48981 - RNA, 20 nt, Artificial Sequence
  LRRK2 RNA guide
uucagugaagaggcaugaag

SEQ ID NO: 48982 - RNA, 20 nt, Artificial Sequence
  LRRK2 RNA guide
uucaugccucuucacugaaa

SEQ ID NO: 48983 - RNA, 20 nt, Artificial Sequence
  LRRK2 RNA guide
uucuucaugccucuucacug

SEQ ID NO: 48984 - RNA, 20 nt, Artificial Sequence
  LRRK2 RNA guide
uuucagugaagaggcaugaa

SEQ ID NO: 48985 - RNA, 20 nt, Artificial Sequence
  LRRK2 RNA guide
uuucuucaugccucuucacu

SEQ ID NO: 48986 - RNA, 20 nt, Artificial Sequence
  LRRK2 RNA guide
uuuucagugaagaggcauga

SEQ ID NO: 48987 - RNA, 21 nt, Artificial Sequence
  LRRK2 RNA guide
aaaaaaguuucuucaugccuc

SEQ ID NO: 48988 - RNA, 21 nt, Artificial Sequence
  LRRK2 RNA guide
aaaaaguuucuucaugccucu

SEQ ID NO: 48989 - RNA, 21 nt, Artificial Sequence
  LRRK2 RNA guide
aaaaguuucuucaugccucuu

SEQ ID NO: 48990 - RNA, 21 nt, Artificial Sequence
  LRRK2 RNA guide
aaaguuucuucaugccucuuc

SEQ ID NO: 48991 - RNA, 21 nt, Artificial Sequence
  LRRK2 RNA guide
aagaggcaugaagaaacuuuu

SEQ ID NO: 48992 - RNA, 21 nt, Artificial Sequence
  LRRK2 RNA guide
aaggggauguuuucagugaag

SEQ ID NO: 48993 - RNA, 21 nt, Artificial Sequence
  LRRK2 RNA guide
aaguuucuucaugccucuuca

SEQ ID NO: 48994 - RNA, 21 nt, Artificial Sequence
  LRRK2 RNA guide
agaggcaugaagaaacuuuuu

SEQ ID NO: 48995 - RNA, 21 nt, Artificial Sequence
  LRRK2 RNA guide
aggcaugaagaaacuuuuuug

SEQ ID NO: 48996 - RNA, 21 nt, Artificial Sequence
  LRRK2 RNA guide
aggggauguuuucagugaaga

SEQ ID NO: 48997 - RNA, 21 nt, Artificial Sequence
  LRRK2 RNA guide
agugaagaggcaugaagaaac

SEQ ID NO: 48998 - RNA, 21 nt, Artificial Sequence
  LRRK2 RNA guide
aguuucuucaugccucuucac

SEQ ID NO: 48999 - RNA, 21 nt, Artificial Sequence
  LRRK2 RNA guide
augccucuucacugaaaacau

SEQ ID NO: 49000 - RNA, 21 nt, Artificial Sequence
  LRRK2 RNA guide
auguuuucagugaagaggcau

SEQ ID NO: 49001 - RNA, 21 nt, Artificial Sequence
  LRRK2 RNA guide
caaaaaaguuucuucaugccu

SEQ ID NO: 49002 - RNA, 21 nt, Artificial Sequence
  LRRK2 RNA guide
cagugaagaggcaugaagaaa

SEQ ID NO: 49003 - RNA, 21 nt, Artificial Sequence
  LRRK2 RNA guide
caugccucuucacugaaaaca

SEQ ID NO: 49004 - RNA, 21 nt, Artificial Sequence
  LRRK2 RNA guide
ccaaaaaaguuucuucaugcc

SEQ ID NO: 49005 - RNA, 21 nt, Artificial Sequence
  LRRK2 RNA guide
ccucuucacugaaaacauccc

SEQ ID NO: 49006 - RNA, 21 nt, Artificial Sequence
  LRRK2 RNA guide
cuucaugccucuucacugaaa

SEQ ID NO: 49007 - RNA, 21 nt, Artificial Sequence
  LRRK2 RNA guide
gaagaggcaugaagaaacuuu

SEQ ID NO: 49008 - RNA, 21 nt, Artificial Sequence
  LRRK2 RNA guide
gaaggggauguuuucagugaa

SEQ ID NO: 49009 - RNA, 21 nt, Artificial Sequence
  LRRK2 RNA guide
gaggcaugaagaaacuuuuuu

SEQ ID NO: 49010 - RNA, 21 nt, Artificial Sequence
  LRRK2 RNA guide
gauguuuucagugaagaggca

SEQ ID NO: 49011 - RNA, 21 nt, Artificial Sequence
  LRRK2 RNA guide
gccucuucacugaaaacaucc

SEQ ID NO: 49012 - RNA, 21 nt, Artificial Sequence
  LRRK2 RNA guide
ggaaggggauguuuucaguga

SEQ ID NO: 49013 - RNA, 21 nt, Artificial Sequence
  LRRK2 RNA guide
ggauguuuucagugaagaggc

SEQ ID NO: 49014 - RNA, 21 nt, Artificial Sequence
  LRRK2 RNA guide
gggaaggggauguuuucagug

SEQ ID NO: 49015 - RNA, 21 nt, Artificial Sequence
  LRRK2 RNA guide
gggauguuuucagugaagagg

SEQ ID NO: 49016 - RNA, 21 nt, Artificial Sequence
  LRRK2 RNA guide
ggggauguuuucagugaagag

SEQ ID NO: 49017 - RNA, 21 nt, Artificial Sequence
  LRRK2 RNA guide
gugaagaggcaugaagaaacu

SEQ ID NO: 49018 - RNA, 21 nt, Artificial Sequence
  LRRK2 RNA guide
guuucuucaugccucuucacu

SEQ ID NO: 49019 - RNA, 21 nt, Artificial Sequence
  LRRK2 RNA guide
guuuucagugaagaggcauga

SEQ ID NO: 49020 - RNA, 21 nt, Artificial Sequence
  LRRK2 RNA guide
ucagugaagaggcaugaagaa

SEQ ID NO: 49021 - RNA, 21 nt, Artificial Sequence
  LRRK2 RNA guide
ucaugccucuucacugaaaac

SEQ ID NO: 49022 - RNA, 21 nt, Artificial Sequence
  LRRK2 RNA guide
uccaaaaaaguuucuucaugc

SEQ ID NO: 49023 - RNA, 21 nt, Artificial Sequence
  LRRK2 RNA guide
ucuucaugccucuucacugaa

SEQ ID NO: 49024 - RNA, 21 nt, Artificial Sequence
  LRRK2 RNA guide
ugaagaggcaugaagaaacuu

SEQ ID NO: 49025 - RNA, 21 nt, Artificial Sequence
  LRRK2 RNA guide
ugccucuucacugaaaacauc

SEQ ID NO: 49026 - RNA, 21 nt, Artificial Sequence
  LRRK2 RNA guide
uguuuucagugaagaggcaug

SEQ ID NO: 49027 - RNA, 21 nt, Artificial Sequence
  LRRK2 RNA guide
uucagugaagaggcaugaaga

SEQ ID NO: 49028 - RNA, 21 nt, Artificial Sequence
  LRRK2 RNA guide
uucaugccucuucacugaaaa

SEQ ID NO: 49029 - RNA, 21 nt, Artificial Sequence
  LRRK2 RNA guide
uucuucaugccucuucacuga

SEQ ID NO: 49030 - RNA, 21 nt, Artificial Sequence
  LRRK2 RNA guide
uuucagugaagaggcaugaag

SEQ ID NO: 49031 - RNA, 21 nt, Artificial Sequence
  LRRK2 RNA guide
uuucuucaugccucuucacug

SEQ ID NO: 49032 - RNA, 21 nt, Artificial Sequence
  LRRK2 RNA guide
uuuucagugaagaggcaugaa

SEQ ID NO: 49033 - RNA, 22 nt, Artificial Sequence
  LRRK2 RNA guide
aaaaaaguuucuucaugccucu

SEQ ID NO: 49034 - RNA, 22 nt, Artificial Sequence
  LRRK2 RNA guide
aaaaaguuucuucaugccucuu

SEQ ID NO: 49035 - RNA, 22 nt, Artificial Sequence
  LRRK2 RNA guide
aaaaguuucuucaugccucuuc

SEQ ID NO: 49036 - RNA, 22 nt, Artificial Sequence
  LRRK2 RNA guide
aaaguuucuucaugccucuuca

SEQ ID NO: 49037 - RNA, 22 nt, Artificial Sequence
  LRRK2 RNA guide
aagaggcaugaagaaacuuuuu

SEQ ID NO: 49038 - RNA, 22 nt, Artificial Sequence
  LRRK2 RNA guide
aaggggauguuuucagugaaga

SEQ ID NO: 49039 - RNA, 22 nt, Artificial Sequence
  LRRK2 RNA guide
aaguuucuucaugccucuucac

SEQ ID NO: 49040 - RNA, 22 nt, Artificial Sequence
  LRRK2 RNA guide
agaggcaugaagaaacuuuuuu

SEQ ID NO: 49041 - RNA, 22 nt, Artificial Sequence
  LRRK2 RNA guide
aggcaugaagaaacuuuuuugg

SEQ ID NO: 49042 - RNA, 22 nt, Artificial Sequence
  LRRK2 RNA guide
aggggauguuuucagugaagag

SEQ ID NO: 49043 - RNA, 22 nt, Artificial Sequence
  LRRK2 RNA guide
agugaagaggcaugaagaaacu

SEQ ID NO: 49044 - RNA, 22 nt, Artificial Sequence
  LRRK2 RNA guide
aguuucuucaugccucuucacu

SEQ ID NO: 49045 - RNA, 22 nt, Artificial Sequence
  LRRK2 RNA guide
auccaaaaaaguuucuucaugc

SEQ ID NO: 49046 - RNA, 22 nt, Artificial Sequence
  LRRK2 RNA guide
augccucuucacugaaaacauc

SEQ ID NO: 49047 - RNA, 22 nt, Artificial Sequence
  LRRK2 RNA guide
auguuuucagugaagaggcaug

SEQ ID NO: 49048 - RNA, 22 nt, Artificial Sequence
  LRRK2 RNA guide
caaaaaaguuucuucaugccuc

SEQ ID NO: 49049 - RNA, 22 nt, Artificial Sequence
  LRRK2 RNA guide
cagugaagaggcaugaagaaac

SEQ ID NO: 49050 - RNA, 22 nt, Artificial Sequence
  LRRK2 RNA guide
caugccucuucacugaaaacau

SEQ ID NO: 49051 - RNA, 22 nt, Artificial Sequence
  LRRK2 RNA guide
ccaaaaaaguuucuucaugccu

SEQ ID NO: 49052 - RNA, 22 nt, Artificial Sequence
  LRRK2 RNA guide
ccucuucacugaaaacaucccc

SEQ ID NO: 49053 - RNA, 22 nt, Artificial Sequence
  LRRK2 RNA guide
cuucaugccucuucacugaaaa

SEQ ID NO: 49054 - RNA, 22 nt, Artificial Sequence
  LRRK2 RNA guide
gaagaggcaugaagaaacuuuu

SEQ ID NO: 49055 - RNA, 22 nt, Artificial Sequence
  LRRK2 RNA guide
gaaggggauguuuucagugaag

SEQ ID NO: 49056 - RNA, 22 nt, Artificial Sequence
  LRRK2 RNA guide
gaggcaugaagaaacuuuuuug

SEQ ID NO: 49057 - RNA, 22 nt, Artificial Sequence
  LRRK2 RNA guide
gauguuuucagugaagaggcau

SEQ ID NO: 49058 - RNA, 22 nt, Artificial Sequence
  LRRK2 RNA guide
gccucuucacugaaaacauccc

SEQ ID NO: 49059 - RNA, 22 nt, Artificial Sequence
  LRRK2 RNA guide
ggaaggggauguuuucagugaa

SEQ ID NO: 49060 - RNA, 22 nt, Artificial Sequence
  LRRK2 RNA guide
ggauguuuucagugaagaggca

SEQ ID NO: 49061 - RNA, 22 nt, Artificial Sequence
  LRRK2 RNA guide
gggaaggggauguuuucaguga

SEQ ID NO: 49062 - RNA, 22 nt, Artificial Sequence
  LRRK2 RNA guide
gggauguuuucagugaagaggc

SEQ ID NO: 49063 - RNA, 22 nt, Artificial Sequence
  LRRK2 RNA guide
ggggaaggggauguuuucagug

SEQ ID NO: 49064 - RNA, 22 nt, Artificial Sequence
  LRRK2 RNA guide
ggggauguuuucagugaagagg

SEQ ID NO: 49065 - RNA, 22 nt, Artificial Sequence
  LRRK2 RNA guide
gugaagaggcaugaagaaacuu

SEQ ID NO: 49066 - RNA, 22 nt, Artificial Sequence
  LRRK2 RNA guide
guuucuucaugccucuucacug

SEQ ID NO: 49067 - RNA, 22 nt, Artificial Sequence
  LRRK2 RNA guide
guuuucagugaagaggcaugaa

SEQ ID NO: 49068 - RNA, 22 nt, Artificial Sequence
  LRRK2 RNA guide
ucagugaagaggcaugaagaaa

SEQ ID NO: 49069 - RNA, 22 nt, Artificial Sequence
  LRRK2 RNA guide
ucaugccucuucacugaaaaca

SEQ ID NO: 49070 - RNA, 22 nt, Artificial Sequence
  LRRK2 RNA guide
uccaaaaaaguuucuucaugcc

SEQ ID NO: 49071 - RNA, 22 nt, Artificial Sequence
  LRRK2 RNA guide
ucuucaugccucuucacugaaa

SEQ ID NO: 49072 - RNA, 22 nt, Artificial Sequence
  LRRK2 RNA guide
ugaagaggcaugaagaaacuuu

SEQ ID NO: 49073 - RNA, 22 nt, Artificial Sequence
  LRRK2 RNA guide
ugccucuucacugaaaacaucc

SEQ ID NO: 49074 - RNA, 22 nt, Artificial Sequence
  LRRK2 RNA guide
uguuuucagugaagaggcauga

SEQ ID NO: 49075 - RNA, 22 nt, Artificial Sequence
  LRRK2 RNA guide
uucagugaagaggcaugaagaa

SEQ ID NO: 49076 - RNA, 22 nt, Artificial Sequence
  LRRK2 RNA guide
uucaugccucuucacugaaaac

SEQ ID NO: 49077 - RNA, 22 nt, Artificial Sequence
  LRRK2 RNA guide
uucuucaugccucuucacugaa

SEQ ID NO: 49078 - RNA, 22 nt, Artificial Sequence
  LRRK2 RNA guide
uuucagugaagaggcaugaaga

SEQ ID NO: 49079 - RNA, 22 nt, Artificial Sequence
  LRRK2 RNA guide
uuucuucaugccucuucacuga

SEQ ID NO: 49080 - RNA, 22 nt, Artificial Sequence
  LRRK2 RNA guide
uuuucagugaagaggcaugaag

SEQ ID NO: 49081 - RNA, 20 nt, Artificial Sequence
  LRRK2 RNA guide
aaaaaaguuucuucaugcgu

SEQ ID NO: 49082 - RNA, 20 nt, Artificial Sequence
  LRRK2 RNA guide
aaaaaguuucuucaugcguc

SEQ ID NO: 49083 - RNA, 20 nt, Artificial Sequence
  LRRK2 RNA guide
aaaaguuucuucaugcgucu

SEQ ID NO: 49084 - RNA, 20 nt, Artificial Sequence
  LRRK2 RNA guide
aaaguuucuucaugcgucuu

SEQ ID NO: 49085 - RNA, 20 nt, Artificial Sequence
  LRRK2 RNA guide
aagacgcaugaagaaacuuu

SEQ ID NO: 49086 - RNA, 20 nt, Artificial Sequence
  LRRK2 RNA guide
aaguuucuucaugcgucuuc

SEQ ID NO: 49087 - RNA, 20 nt, Artificial Sequence
  LRRK2 RNA guide
acgcaugaagaaacuuuuuu

SEQ ID NO: 49088 - RNA, 20 nt, Artificial Sequence
  LRRK2 RNA guide
agacgcaugaagaaacuuuu

SEQ ID NO: 49089 - RNA, 20 nt, Artificial Sequence
  LRRK2 RNA guide
agugaagacgcaugaagaaa

SEQ ID NO: 49090 - RNA, 20 nt, Artificial Sequence
  LRRK2 RNA guide
aguuucuucaugcgucuuca

SEQ ID NO: 49091 - RNA, 20 nt, Artificial Sequence
  LRRK2 RNA guide
augcgucuucacugaaaaca

SEQ ID NO: 49092 - RNA, 20 nt, Artificial Sequence
  LRRK2 RNA guide
auguuuucagugaagacgca

SEQ ID NO: 49093 - RNA, 20 nt, Artificial Sequence
  LRRK2 RNA guide
caaaaaaguuucuucaugcg

SEQ ID NO: 49094 - RNA, 20 nt, Artificial Sequence
  LRRK2 RNA guide
cagugaagacgcaugaagaa

SEQ ID NO: 49095 - RNA, 20 nt, Artificial Sequence
  LRRK2 RNA guide
caugcgucuucacugaaaac

SEQ ID NO: 49096 - RNA, 20 nt, Artificial Sequence
  LRRK2 RNA guide
cgucuucacugaaaacaucc

SEQ ID NO: 49097 - RNA, 20 nt, Artificial Sequence
  LRRK2 RNA guide
cuucaugcgucuucacugaa

SEQ ID NO: 49098 - RNA, 20 nt, Artificial Sequence
  LRRK2 RNA guide
gaagacgcaugaagaaacuu

SEQ ID NO: 49099 - RNA, 20 nt, Artificial Sequence
  LRRK2 RNA guide
gacgcaugaagaaacuuuuu

SEQ ID NO: 49100 - RNA, 20 nt, Artificial Sequence
  LRRK2 RNA guide
gauguuuucagugaagacgc

SEQ ID NO: 49101 - RNA, 20 nt, Artificial Sequence
  LRRK2 RNA guide
gcgucuucacugaaaacauc

SEQ ID NO: 49102 - RNA, 20 nt, Artificial Sequence
  LRRK2 RNA guide
ggauguuuucagugaagacg

SEQ ID NO: 49103 - RNA, 20 nt, Artificial Sequence
  LRRK2 RNA guide
gggauguuuucagugaagac

SEQ ID NO: 49104 - RNA, 20 nt, Artificial Sequence
  LRRK2 RNA guide
gugaagacgcaugaagaaac

SEQ ID NO: 49105 - RNA, 20 nt, Artificial Sequence
  LRRK2 RNA guide
guuucuucaugcgucuucac

SEQ ID NO: 49106 - RNA, 20 nt, Artificial Sequence
  LRRK2 RNA guide
guuuucagugaagacgcaug

SEQ ID NO: 49107 - RNA, 20 nt, Artificial Sequence
  LRRK2 RNA guide
ucagugaagacgcaugaaga

SEQ ID NO: 49108 - RNA, 20 nt, Artificial Sequence
  LRRK2 RNA guide
ucaugcgucuucacugaaaa

SEQ ID NO: 49109 - RNA, 20 nt, Artificial Sequence
  LRRK2 RNA guide
ucuucaugcgucuucacuga

SEQ ID NO: 49110 - RNA, 20 nt, Artificial Sequence
  LRRK2 RNA guide
ugaagacgcaugaagaaacu

SEQ ID NO: 49111 - RNA, 20 nt, Artificial Sequence
  LRRK2 RNA guide
ugcgucuucacugaaaacau

SEQ ID NO: 49112 - RNA, 20 nt, Artificial Sequence
  LRRK2 RNA guide
uguuuucagugaagacgcau

SEQ ID NO: 49113 - RNA, 20 nt, Artificial Sequence
  LRRK2 RNA guide
uucagugaagacgcaugaag

SEQ ID NO: 49114 - RNA, 20 nt, Artificial Sequence
  LRRK2 RNA guide
uucaugcgucuucacugaaa

SEQ ID NO: 49115 - RNA, 20 nt, Artificial Sequence
  LRRK2 RNA guide
uucuucaugcgucuucacug

SEQ ID NO: 49116 - RNA, 20 nt, Artificial Sequence
  LRRK2 RNA guide
uuucagugaagacgcaugaa

SEQ ID NO: 49117 - RNA, 20 nt, Artificial Sequence
  LRRK2 RNA guide
uuucuucaugcgucuucacu

SEQ ID NO: 49118 - RNA, 20 nt, Artificial Sequence
  LRRK2 RNA guide
uuuucagugaagacgcauga

SEQ ID NO: 49119 - RNA, 21 nt, Artificial Sequence
  LRRK2 RNA guide
aaaaaaguuucuucaugcguc

SEQ ID NO: 49120 - RNA, 21 nt, Artificial Sequence
  LRRK2 RNA guide
aaaaaguuucuucaugcgucu

SEQ ID NO: 49121 - RNA, 21 nt, Artificial Sequence
  LRRK2 RNA guide
aaaaguuucuucaugcgucuu

SEQ ID NO: 49122 - RNA, 21 nt, Artificial Sequence
  LRRK2 RNA guide
aaaguuucuucaugcgucuuc

SEQ ID NO: 49123 - RNA, 21 nt, Artificial Sequence
  LRRK2 RNA guide
aagacgcaugaagaaacuuuu

SEQ ID NO: 49124 - RNA, 21 nt, Artificial Sequence
  LRRK2 RNA guide
aaguuucuucaugcgucuuca

SEQ ID NO: 49125 - RNA, 21 nt, Artificial Sequence
  LRRK2 RNA guide
acgcaugaagaaacuuuuuug

SEQ ID NO: 49126 - RNA, 21 nt, Artificial Sequence
  LRRK2 RNA guide
agacgcaugaagaaacuuuuu

SEQ ID NO: 49127 - RNA, 21 nt, Artificial Sequence
  LRRK2 RNA guide
agugaagacgcaugaagaaac

SEQ ID NO: 49128 - RNA, 21 nt, Artificial Sequence
  LRRK2 RNA guide
aguuucuucaugcgucuucac

SEQ ID NO: 49129 - RNA, 21 nt, Artificial Sequence
  LRRK2 RNA guide
augcgucuucacugaaaacau

SEQ ID NO: 49130 - RNA, 21 nt, Artificial Sequence
  LRRK2 RNA guide
auguuuucagugaagacgcau

SEQ ID NO: 49131 - RNA, 21 nt, Artificial Sequence
  LRRK2 RNA guide
caaaaaaguuucuucaugcgu

SEQ ID NO: 49132 - RNA, 21 nt, Artificial Sequence
  LRRK2 RNA guide
cagugaagacgcaugaagaaa

SEQ ID NO: 49133 - RNA, 21 nt, Artificial Sequence
  LRRK2 RNA guide
caugcgucuucacugaaaaca

SEQ ID NO: 49134 - RNA, 21 nt, Artificial Sequence
  LRRK2 RNA guide
ccaaaaaaguuucuucaugcg

SEQ ID NO: 49135 - RNA, 21 nt, Artificial Sequence
  LRRK2 RNA guide
cgucuucacugaaaacauccc

SEQ ID NO: 49136 - RNA, 21 nt, Artificial Sequence
  LRRK2 RNA guide
cuucaugcgucuucacugaaa

SEQ ID NO: 49137 - RNA, 21 nt, Artificial Sequence
  LRRK2 RNA guide
gaagacgcaugaagaaacuuu

SEQ ID NO: 49138 - RNA, 21 nt, Artificial Sequence
  LRRK2 RNA guide
gacgcaugaagaaacuuuuuu

SEQ ID NO: 49139 - RNA, 21 nt, Artificial Sequence
  LRRK2 RNA guide
gauguuuucagugaagacgca

SEQ ID NO: 49140 - RNA, 21 nt, Artificial Sequence
  LRRK2 RNA guide
gcgucuucacugaaaacaucc

SEQ ID NO: 49141 - RNA, 21 nt, Artificial Sequence
  LRRK2 RNA guide
ggauguuuucagugaagacgc

SEQ ID NO: 49142 - RNA, 21 nt, Artificial Sequence
  LRRK2 RNA guide
gggauguuuucagugaagacg

SEQ ID NO: 49143 - RNA, 21 nt, Artificial Sequence
  LRRK2 RNA guide
ggggauguuuucagugaagac

SEQ ID NO: 49144 - RNA, 21 nt, Artificial Sequence
  LRRK2 RNA guide
gugaagacgcaugaagaaacu

SEQ ID NO: 49145 - RNA, 21 nt, Artificial Sequence
  LRRK2 RNA guide
guuucuucaugcgucuucacu

SEQ ID NO: 49146 - RNA, 21 nt, Artificial Sequence
  LRRK2 RNA guide
guuuucagugaagacgcauga

SEQ ID NO: 49147 - RNA, 21 nt, Artificial Sequence
  LRRK2 RNA guide
ucagugaagacgcaugaagaa

SEQ ID NO: 49148 - RNA, 21 nt, Artificial Sequence
  LRRK2 RNA guide
ucaugcgucuucacugaaaac

SEQ ID NO: 49149 - RNA, 21 nt, Artificial Sequence
  LRRK2 RNA guide
ucuucaugcgucuucacugaa

SEQ ID NO: 49150 - RNA, 21 nt, Artificial Sequence
  LRRK2 RNA guide
ugaagacgcaugaagaaacuu

SEQ ID NO: 49151 - RNA, 21 nt, Artificial Sequence
  LRRK2 RNA guide
ugcgucuucacugaaaacauc

SEQ ID NO: 49152 - RNA, 21 nt, Artificial Sequence
  LRRK2 RNA guide
uguuuucagugaagacgcaug

SEQ ID NO: 49153 - RNA, 21 nt, Artificial Sequence
  LRRK2 RNA guide
uucagugaagacgcaugaaga

SEQ ID NO: 49154 - RNA, 21 nt, Artificial Sequence
  LRRK2 RNA guide
uucaugcgucuucacugaaaa

SEQ ID NO: 49155 - RNA, 21 nt, Artificial Sequence
  LRRK2 RNA guide
uucuucaugcgucuucacuga

SEQ ID NO: 49156 - RNA, 21 nt, Artificial Sequence
  LRRK2 RNA guide
uuucagugaagacgcaugaag

SEQ ID NO: 49157 - RNA, 21 nt, Artificial Sequence
  LRRK2 RNA guide
uuucuucaugcgucuucacug

SEQ ID NO: 49158 - RNA, 21 nt, Artificial Sequence
  LRRK2 RNA guide
uuuucagugaagacgcaugaa

SEQ ID NO: 49159 - RNA, 22 nt, Artificial Sequence
  LRRK2 RNA guide
aaaaaaguuucuucaugcgucu

SEQ ID NO: 49160 - RNA, 22 nt, Artificial Sequence
  LRRK2 RNA guide
aaaaaguuucuucaugcgucuu

SEQ ID NO: 49161 - RNA, 22 nt, Artificial Sequence
  LRRK2 RNA guide
aaaaguuucuucaugcgucuuc

SEQ ID NO: 49162 - RNA, 22 nt, Artificial Sequence
  LRRK2 RNA guide
aaaguuucuucaugcgucuuca

SEQ ID NO: 49163 - RNA, 22 nt, Artificial Sequence
  LRRK2 RNA guide
aagacgcaugaagaaacuuuuu

SEQ ID NO: 49164 - RNA, 22 nt, Artificial Sequence
  LRRK2 RNA guide
aaguuucuucaugcgucuucac

SEQ ID NO: 49165 - RNA, 22 nt, Artificial Sequence
  LRRK2 RNA guide
acgcaugaagaaacuuuuuugg

SEQ ID NO: 49166 - RNA, 22 nt, Artificial Sequence
  LRRK2 RNA guide
agacgcaugaagaaacuuuuuu

SEQ ID NO: 49167 - RNA, 22 nt, Artificial Sequence
  LRRK2 RNA guide
aggggauguuuucagugaagac

SEQ ID NO: 49168 - RNA, 22 nt, Artificial Sequence
  LRRK2 RNA guide
agugaagacgcaugaagaaacu

SEQ ID NO: 49169 - RNA, 22 nt, Artificial Sequence
  LRRK2 RNA guide
aguuucuucaugcgucuucacu

SEQ ID NO: 49170 - RNA, 22 nt, Artificial Sequence
  LRRK2 RNA guide
augcgucuucacugaaaacauc

SEQ ID NO: 49171 - RNA, 22 nt, Artificial Sequence
  LRRK2 RNA guide
auguuuucagugaagacgcaug

SEQ ID NO: 49172 - RNA, 22 nt, Artificial Sequence
  LRRK2 RNA guide
caaaaaaguuucuucaugcguc

SEQ ID NO: 49173 - RNA, 22 nt, Artificial Sequence
  LRRK2 RNA guide
cagugaagacgcaugaagaaac

SEQ ID NO: 49174 - RNA, 22 nt, Artificial Sequence
  LRRK2 RNA guide
caugcgucuucacugaaaacau

SEQ ID NO: 49175 - RNA, 22 nt, Artificial Sequence
  LRRK2 RNA guide
ccaaaaaaguuucuucaugcgu

SEQ ID NO: 49176 - RNA, 22 nt, Artificial Sequence
  LRRK2 RNA guide
cgucuucacugaaaacaucccc

SEQ ID NO: 49177 - RNA, 22 nt, Artificial Sequence
  LRRK2 RNA guide
cuucaugcgucuucacugaaaa

SEQ ID NO: 49178 - RNA, 22 nt, Artificial Sequence
  LRRK2 RNA guide
gaagacgcaugaagaaacuuuu

SEQ ID NO: 49179 - RNA, 22 nt, Artificial Sequence
  LRRK2 RNA guide
gacgcaugaagaaacuuuuuug

SEQ ID NO: 49180 - RNA, 22 nt, Artificial Sequence
  LRRK2 RNA guide
gauguuuucagugaagacgcau

SEQ ID NO: 49181 - RNA, 22 nt, Artificial Sequence
  LRRK2 RNA guide
gcgucuucacugaaaacauccc

SEQ ID NO: 49182 - RNA, 22 nt, Artificial Sequence
  LRRK2 RNA guide
ggauguuuucagugaagacgca

SEQ ID NO: 49183 - RNA, 22 nt, Artificial Sequence
  LRRK2 RNA guide
gggauguuuucagugaagacgc

SEQ ID NO: 49184 - RNA, 22 nt, Artificial Sequence
  LRRK2 RNA guide
ggggauguuuucagugaagacg

SEQ ID NO: 49185 - RNA, 22 nt, Artificial Sequence
  LRRK2 RNA guide
gugaagacgcaugaagaaacuu

SEQ ID NO: 49186 - RNA, 22 nt, Artificial Sequence
  LRRK2 RNA guide
guuucuucaugcgucuucacug

SEQ ID NO: 49187 - RNA, 22 nt, Artificial Sequence
  LRRK2 RNA guide
guuuucagugaagacgcaugaa

SEQ ID NO: 49188 - RNA, 22 nt, Artificial Sequence
  LRRK2 RNA guide
ucagugaagacgcaugaagaaa

SEQ ID NO: 49189 - RNA, 22 nt, Artificial Sequence
  LRRK2 RNA guide
ucaugcgucuucacugaaaaca

SEQ ID NO: 49190 - RNA, 22 nt, Artificial Sequence
  LRRK2 RNA guide
uccaaaaaaguuucuucaugcg

SEQ ID NO: 49191 - RNA, 22 nt, Artificial Sequence
  LRRK2 RNA guide
ucuucaugcgucuucacugaaa

SEQ ID NO: 49192 - RNA, 22 nt, Artificial Sequence
  LRRK2 RNA guide
ugaagacgcaugaagaaacuuu

SEQ ID NO: 49193 - RNA, 22 nt, Artificial Sequence
  LRRK2 RNA guide
ugcgucuucacugaaaacaucc

SEQ ID NO: 49194 - RNA, 22 nt, Artificial Sequence
  LRRK2 RNA guide
uguuuucagugaagacgcauga

SEQ ID NO: 49195 - RNA, 22 nt, Artificial Sequence
  LRRK2 RNA guide
uucagugaagacgcaugaagaa

SEQ ID NO: 49196 - RNA, 22 nt, Artificial Sequence
  LRRK2 RNA guide
uucaugcgucuucacugaaaac

SEQ ID NO: 49197 - RNA, 22 nt, Artificial Sequence
  LRRK2 RNA guide
uucuucaugcgucuucacugaa

SEQ ID NO: 49198 - RNA, 22 nt, Artificial Sequence
  LRRK2 RNA guide
uuucagugaagacgcaugaaga

SEQ ID NO: 49199 - RNA, 22 nt, Artificial Sequence
  LRRK2 RNA guide
uuucuucaugcgucuucacuga

SEQ ID NO: 49200 - RNA, 22 nt, Artificial Sequence
  LRRK2 RNA guide
uuuucagugaagacgcaugaag

SEQ ID NO: 49201 - RNA, 20 nt, Artificial Sequence
  LRRK2 RNA guide
cuagaauauacaaagaacuc

SEQ ID NO: 49202 - RNA, 20 nt, Artificial Sequence
  LRRK2 RNA guide
gaguucuuuguauauucuag

SEQ ID NO: 49203 - RNA, 20 nt, Artificial Sequence
  LRRK2 RNA guide
ggguugucuuauuauauaag

SEQ ID NO: 49204 - RNA, 22 nt, Artificial Sequence
  LRRK2 RNA guide
ggguugucuuauuauauaagag

SEQ ID NO: 49205 - RNA, 20 nt, Artificial Sequence
  LRRK2 RNA guide
aaaauaaguaaggaaaaggg

SEQ ID NO: 49206 - RNA, 20 nt, Artificial Sequence
  LRRK2 RNA guide
aaauaaguaaggaaaaggga

SEQ ID NO: 49207 - RNA, 20 nt, Artificial Sequence
  LRRK2 RNA guide
aaggaaaagggaacaauaaa

SEQ ID NO: 49208 - RNA, 20 nt, Artificial Sequence
  LRRK2 RNA guide
aagggaacaauaaagauaag

SEQ ID NO: 49209 - RNA, 20 nt, Artificial Sequence
  LRRK2 RNA guide
aaguaaggaaaagggaacaa

SEQ ID NO: 49210 - RNA, 20 nt, Artificial Sequence
  LRRK2 RNA guide
aauaaguaaggaaaagggaa

SEQ ID NO: 49211 - RNA, 20 nt, Artificial Sequence
  LRRK2 RNA guide
acggacuuuuguucuuaucu

SEQ ID NO: 49212 - RNA, 20 nt, Artificial Sequence
  LRRK2 RNA guide
aggaaaagggaacaauaaag

SEQ ID NO: 49213 - RNA, 20 nt, Artificial Sequence
  LRRK2 RNA guide
agggaacaauaaagauaaga

SEQ ID NO: 49214 - RNA, 20 nt, Artificial Sequence
  LRRK2 RNA guide
aguaaggaaaagggaacaau

SEQ ID NO: 49215 - RNA, 20 nt, Artificial Sequence
  LRRK2 RNA guide
auaaguaaggaaaagggaac

SEQ ID NO: 49216 - RNA, 20 nt, Artificial Sequence
  LRRK2 RNA guide
aucuuuauuguucccuuuuc

SEQ ID NO: 49217 - RNA, 20 nt, Artificial Sequence
  LRRK2 RNA guide
auuguucccuuuuccuuacu

SEQ ID NO: 49218 - RNA, 20 nt, Artificial Sequence
  LRRK2 RNA guide
cggacuuuuguucuuaucuu

SEQ ID NO: 49219 - RNA, 20 nt, Artificial Sequence
  LRRK2 RNA guide
cuuaucuuuauuguucccuu

SEQ ID NO: 49220 - RNA, 20 nt, Artificial Sequence
  LRRK2 RNA guide
cuuuauuguucccuuuuccu

SEQ ID NO: 49221 - RNA, 20 nt, Artificial Sequence
  LRRK2 RNA guide
gaaaagggaacaauaaagau

SEQ ID NO: 49222 - RNA, 20 nt, Artificial Sequence
  LRRK2 RNA guide
ggaaaagggaacaauaaaga

SEQ ID NO: 49223 - RNA, 20 nt, Artificial Sequence
  LRRK2 RNA guide
ggaacaauaaagauaagaac

SEQ ID NO: 49224 - RNA, 20 nt, Artificial Sequence
  LRRK2 RNA guide
ggacuuuuguucuuaucuuu

SEQ ID NO: 49225 - RNA, 20 nt, Artificial Sequence
  LRRK2 RNA guide
gggaacaauaaagauaagaa

SEQ ID NO: 49226 - RNA, 20 nt, Artificial Sequence
  LRRK2 RNA guide
guaaggaaaagggaacaaua

SEQ ID NO: 49227 - RNA, 20 nt, Artificial Sequence
  LRRK2 RNA guide
guucuuaucuuuauuguucc

SEQ ID NO: 49228 - RNA, 20 nt, Artificial Sequence
  LRRK2 RNA guide
uaaggaaaagggaacaauaa

SEQ ID NO: 49229 - RNA, 20 nt, Artificial Sequence
  LRRK2 RNA guide
uaaguaaggaaaagggaaca

SEQ ID NO: 49230 - RNA, 20 nt, Artificial Sequence
  LRRK2 RNA guide
uauuguucccuuuuccuuac

SEQ ID NO: 49231 - RNA, 20 nt, Artificial Sequence
  LRRK2 RNA guide
ucuuaucuuuauuguucccu

SEQ ID NO: 49232 - RNA, 20 nt, Artificial Sequence
  LRRK2 RNA guide
ucuuuauuguucccuuuucc

SEQ ID NO: 49233 - RNA, 20 nt, Artificial Sequence
  LRRK2 RNA guide
uuauuguucccuuuuccuua

SEQ ID NO: 49234 - RNA, 20 nt, Artificial Sequence
  LRRK2 RNA guide
uucuuaucuuuauuguuccc

SEQ ID NO: 49235 - RNA, 20 nt, Artificial Sequence
  LRRK2 RNA guide
uuguucccuuuuccuuacuu

SEQ ID NO: 49236 - RNA, 20 nt, Artificial Sequence
  LRRK2 RNA guide
uuuauuguucccuuuuccuu

SEQ ID NO: 49237 - RNA, 21 nt, Artificial Sequence
  LRRK2 RNA guide
aaggaaaagggaacaauaaag

SEQ ID NO: 49238 - RNA, 21 nt, Artificial Sequence
  LRRK2 RNA guide
aaguaaggaaaagggaacaau

SEQ ID NO: 49239 - RNA, 21 nt, Artificial Sequence
  LRRK2 RNA guide
aauaaguaaggaaaagggaac

SEQ ID NO: 49240 - RNA, 21 nt, Artificial Sequence
  LRRK2 RNA guide
acggacuuuuguucuuaucuu

SEQ ID NO: 49241 - RNA, 21 nt, Artificial Sequence
  LRRK2 RNA guide
aggaaaagggaacaauaaaga

SEQ ID NO: 49242 - RNA, 21 nt, Artificial Sequence
  LRRK2 RNA guide
aguaaggaaaagggaacaaua

SEQ ID NO: 49243 - RNA, 21 nt, Artificial Sequence
  LRRK2 RNA guide
auaaguaaggaaaagggaaca

SEQ ID NO: 49244 - RNA, 21 nt, Artificial Sequence
  LRRK2 RNA guide
aucuuuauuguucccuuuucc

SEQ ID NO: 49245 - RNA, 21 nt, Artificial Sequence
  LRRK2 RNA guide
auuguucccuuuuccuuacuu

SEQ ID NO: 49246 - RNA, 21 nt, Artificial Sequence
  LRRK2 RNA guide
cacggacuuuuguucuuaucu

SEQ ID NO: 49247 - RNA, 21 nt, Artificial Sequence
  LRRK2 RNA guide
cggacuuuuguucuuaucuuu

SEQ ID NO: 49248 - RNA, 21 nt, Artificial Sequence
  LRRK2 RNA guide
cuuuauuguucccuuuuccuu

SEQ ID NO: 49249 - RNA, 21 nt, Artificial Sequence
  LRRK2 RNA guide
ggaaaagggaacaauaaagau

SEQ ID NO: 49250 - RNA, 21 nt, Artificial Sequence
  LRRK2 RNA guide
gggaacaauaaagauaagaac

SEQ ID NO: 49251 - RNA, 21 nt, Artificial Sequence
  LRRK2 RNA guide
guaaggaaaagggaacaauaa

SEQ ID NO: 49252 - RNA, 21 nt, Artificial Sequence
  LRRK2 RNA guide
guucuuaucuuuauuguuccc

SEQ ID NO: 49253 - RNA, 21 nt, Artificial Sequence
  LRRK2 RNA guide
uaaguaaggaaaagggaacaa

SEQ ID NO: 49254 - RNA, 21 nt, Artificial Sequence
  LRRK2 RNA guide
uauuguucccuuuuccuuacu

SEQ ID NO: 49255 - RNA, 21 nt, Artificial Sequence
  LRRK2 RNA guide
ucuuuauuguucccuuuuccu

SEQ ID NO: 49256 - RNA, 21 nt, Artificial Sequence
  LRRK2 RNA guide
uuauuguucccuuuuccuuac

SEQ ID NO: 49257 - RNA, 21 nt, Artificial Sequence
  LRRK2 RNA guide
uuguucccuuuuccuuacuua

SEQ ID NO: 49258 - RNA, 22 nt, Artificial Sequence
  LRRK2 RNA guide
aaauaaguaaggaaaagggaac

SEQ ID NO: 49259 - RNA, 22 nt, Artificial Sequence
  LRRK2 RNA guide
aaggaaaagggaacaauaaaga

SEQ ID NO: 49260 - RNA, 22 nt, Artificial Sequence
  LRRK2 RNA guide
aaguaaggaaaagggaacaaua

SEQ ID NO: 49261 - RNA, 22 nt, Artificial Sequence
  LRRK2 RNA guide
aauaaguaaggaaaagggaaca

SEQ ID NO: 49262 - RNA, 22 nt, Artificial Sequence
  LRRK2 RNA guide
acggacuuuuguucuuaucuuu

SEQ ID NO: 49263 - RNA, 22 nt, Artificial Sequence
  LRRK2 RNA guide
aggaaaagggaacaauaaagau

SEQ ID NO: 49264 - RNA, 22 nt, Artificial Sequence
  LRRK2 RNA guide
agggaacaauaaagauaagaac

SEQ ID NO: 49265 - RNA, 22 nt, Artificial Sequence
  LRRK2 RNA guide
aguaaggaaaagggaacaauaa

SEQ ID NO: 49266 - RNA, 22 nt, Artificial Sequence
  LRRK2 RNA guide
auaaguaaggaaaagggaacaa

SEQ ID NO: 49267 - RNA, 22 nt, Artificial Sequence
  LRRK2 RNA guide
aucuuuauuguucccuuuuccu

SEQ ID NO: 49268 - RNA, 22 nt, Artificial Sequence
  LRRK2 RNA guide
auuguucccuuuuccuuacuua

SEQ ID NO: 49269 - RNA, 22 nt, Artificial Sequence
  LRRK2 RNA guide
cacggacuuuuguucuuaucuu

SEQ ID NO: 49270 - RNA, 22 nt, Artificial Sequence
  LRRK2 RNA guide
cggacuuuuguucuuaucuuua

SEQ ID NO: 49271 - RNA, 22 nt, Artificial Sequence
  LRRK2 RNA guide
cuuuauuguucccuuuuccuua

SEQ ID NO: 49272 - RNA, 22 nt, Artificial Sequence
  LRRK2 RNA guide
ggaaaagggaacaauaaagaua

SEQ ID NO: 49273 - RNA, 22 nt, Artificial Sequence
  LRRK2 RNA guide
gggaacaauaaagauaagaaca

SEQ ID NO: 49274 - RNA, 22 nt, Artificial Sequence
  LRRK2 RNA guide
guaaggaaaagggaacaauaaa

SEQ ID NO: 49275 - RNA, 22 nt, Artificial Sequence
  LRRK2 RNA guide
guucuuaucuuuauuguucccu

SEQ ID NO: 49276 - RNA, 22 nt, Artificial Sequence
  LRRK2 RNA guide
uaaggaaaagggaacaauaaag

SEQ ID NO: 49277 - RNA, 22 nt, Artificial Sequence
  LRRK2 RNA guide
uaaguaaggaaaagggaacaau

SEQ ID NO: 49278 - RNA, 22 nt, Artificial Sequence
  LRRK2 RNA guide
uaucuuuauuguucccuuuucc

SEQ ID NO: 49279 - RNA, 22 nt, Artificial Sequence
  LRRK2 RNA guide
uauuguucccuuuuccuuacuu

SEQ ID NO: 49280 - RNA, 22 nt, Artificial Sequence
  LRRK2 RNA guide
ucacggacuuuuguucuuaucu

SEQ ID NO: 49281 - RNA, 22 nt, Artificial Sequence
  LRRK2 RNA guide
ucuuuauuguucccuuuuccuu

SEQ ID NO: 49282 - RNA, 22 nt, Artificial Sequence
  LRRK2 RNA guide
uguucuuaucuuuauuguuccc

SEQ ID NO: 49283 - RNA, 22 nt, Artificial Sequence
  LRRK2 RNA guide
uuauuguucccuuuuccuuacu

SEQ ID NO: 49284 - RNA, 22 nt, Artificial Sequence
  LRRK2 RNA guide
uuguucccuuuuccuuacuuau

SEQ ID NO: 49285 - RNA, 22 nt, Artificial Sequence
  LRRK2 RNA guide
uuuauuguucccuuuuccuuac

SEQ ID NO: 49286 - RNA, 20 nt, Artificial Sequence
  LRRK2 RNA guide
aaaagggaaccauaaagaua

SEQ ID NO: 49287 - RNA, 20 nt, Artificial Sequence
  LRRK2 RNA guide
aaagggaaccauaaagauaa

SEQ ID NO: 49288 - RNA, 20 nt, Artificial Sequence
  LRRK2 RNA guide
aaggaaaagggaaccauaaa

SEQ ID NO: 49289 - RNA, 20 nt, Artificial Sequence
  LRRK2 RNA guide
aagggaaccauaaagauaag

SEQ ID NO: 49290 - RNA, 20 nt, Artificial Sequence
  LRRK2 RNA guide
aaguaaggaaaagggaacca

SEQ ID NO: 49291 - RNA, 20 nt, Artificial Sequence
  LRRK2 RNA guide
aggaaaagggaaccauaaag

SEQ ID NO: 49292 - RNA, 20 nt, Artificial Sequence
  LRRK2 RNA guide
agggaaccauaaagauaaga

SEQ ID NO: 49293 - RNA, 20 nt, Artificial Sequence
  LRRK2 RNA guide
aguaaggaaaagggaaccau

SEQ ID NO: 49294 - RNA, 20 nt, Artificial Sequence
  LRRK2 RNA guide
aucuuuaugguucccuuuuc

SEQ ID NO: 49295 - RNA, 20 nt, Artificial Sequence
  LRRK2 RNA guide
augguucccuuuuccuuacu

SEQ ID NO: 49296 - RNA, 20 nt, Artificial Sequence
  LRRK2 RNA guide
cuuaucuuuaugguucccuu

SEQ ID NO: 49297 - RNA, 20 nt, Artificial Sequence
  LRRK2 RNA guide
cuuuaugguucccuuuuccu

SEQ ID NO: 49298 - RNA, 20 nt, Artificial Sequence
  LRRK2 RNA guide
gaaaagggaaccauaaagau

SEQ ID NO: 49299 - RNA, 20 nt, Artificial Sequence
  LRRK2 RNA guide
gaaccauaaagauaagaaca

SEQ ID NO: 49300 - RNA, 20 nt, Artificial Sequence
  LRRK2 RNA guide
ggaaaagggaaccauaaaga

SEQ ID NO: 49301 - RNA, 20 nt, Artificial Sequence
  LRRK2 RNA guide
ggaaccauaaagauaagaac

SEQ ID NO: 49302 - RNA, 20 nt, Artificial Sequence
  LRRK2 RNA guide
gggaaccauaaagauaagaa

SEQ ID NO: 49303 - RNA, 20 nt, Artificial Sequence
  LRRK2 RNA guide
guaaggaaaagggaaccaua

SEQ ID NO: 49304 - RNA, 20 nt, Artificial Sequence
  LRRK2 RNA guide
guucuuaucuuuaugguucc

SEQ ID NO: 49305 - RNA, 20 nt, Artificial Sequence
  LRRK2 RNA guide
uaaggaaaagggaaccauaa

SEQ ID NO: 49306 - RNA, 20 nt, Artificial Sequence
  LRRK2 RNA guide
uaaguaaggaaaagggaacc

SEQ ID NO: 49307 - RNA, 20 nt, Artificial Sequence
  LRRK2 RNA guide
uaucuuuaugguucccuuuu

SEQ ID NO: 49308 - RNA, 20 nt, Artificial Sequence
  LRRK2 RNA guide
uaugguucccuuuuccuuac

SEQ ID NO: 49309 - RNA, 20 nt, Artificial Sequence
  LRRK2 RNA guide
ucuuaucuuuaugguucccu

SEQ ID NO: 49310 - RNA, 20 nt, Artificial Sequence
  LRRK2 RNA guide
ucuuuaugguucccuuuucc

SEQ ID NO: 49311 - RNA, 20 nt, Artificial Sequence
  LRRK2 RNA guide
ugguucccuuuuccuuacuu

SEQ ID NO: 49312 - RNA, 20 nt, Artificial Sequence
  LRRK2 RNA guide
uguucuuaucuuuaugguuc

SEQ ID NO: 49313 - RNA, 20 nt, Artificial Sequence
  LRRK2 RNA guide
uuaucuuuaugguucccuuu

SEQ ID NO: 49314 - RNA, 20 nt, Artificial Sequence
  LRRK2 RNA guide
uuaugguucccuuuuccuua

SEQ ID NO: 49315 - RNA, 20 nt, Artificial Sequence
  LRRK2 RNA guide
uucuuaucuuuaugguuccc

SEQ ID NO: 49316 - RNA, 20 nt, Artificial Sequence
  LRRK2 RNA guide
uuuaugguucccuuuuccuu

SEQ ID NO: 49317 - RNA, 21 nt, Artificial Sequence
  LRRK2 RNA guide
aaagggaaccauaaagauaag

SEQ ID NO: 49318 - RNA, 21 nt, Artificial Sequence
  LRRK2 RNA guide
aaggaaaagggaaccauaaag

SEQ ID NO: 49319 - RNA, 21 nt, Artificial Sequence
  LRRK2 RNA guide
aagggaaccauaaagauaaga

SEQ ID NO: 49320 - RNA, 21 nt, Artificial Sequence
  LRRK2 RNA guide
aaguaaggaaaagggaaccau

SEQ ID NO: 49321 - RNA, 21 nt, Artificial Sequence
  LRRK2 RNA guide
aggaaaagggaaccauaaaga

SEQ ID NO: 49322 - RNA, 21 nt, Artificial Sequence
  LRRK2 RNA guide
agggaaccauaaagauaagaa

SEQ ID NO: 49323 - RNA, 21 nt, Artificial Sequence
  LRRK2 RNA guide
aguaaggaaaagggaaccaua

SEQ ID NO: 49324 - RNA, 21 nt, Artificial Sequence
  LRRK2 RNA guide
auaaguaaggaaaagggaacc

SEQ ID NO: 49325 - RNA, 21 nt, Artificial Sequence
  LRRK2 RNA guide
aucuuuaugguucccuuuucc

SEQ ID NO: 49326 - RNA, 21 nt, Artificial Sequence
  LRRK2 RNA guide
augguucccuuuuccuuacuu

SEQ ID NO: 49327 - RNA, 21 nt, Artificial Sequence
  LRRK2 RNA guide
cuuaucuuuaugguucccuuu

SEQ ID NO: 49328 - RNA, 21 nt, Artificial Sequence
  LRRK2 RNA guide
cuuuaugguucccuuuuccuu

SEQ ID NO: 49329 - RNA, 21 nt, Artificial Sequence
  LRRK2 RNA guide
gaaaagggaaccauaaagaua

SEQ ID NO: 49330 - RNA, 21 nt, Artificial Sequence
  LRRK2 RNA guide
ggaaaagggaaccauaaagau

SEQ ID NO: 49331 - RNA, 21 nt, Artificial Sequence
  LRRK2 RNA guide
ggaaccauaaagauaagaaca

SEQ ID NO: 49332 - RNA, 21 nt, Artificial Sequence
  LRRK2 RNA guide
gggaaccauaaagauaagaac

SEQ ID NO: 49333 - RNA, 21 nt, Artificial Sequence
  LRRK2 RNA guide
guaaggaaaagggaaccauaa

SEQ ID NO: 49334 - RNA, 21 nt, Artificial Sequence
  LRRK2 RNA guide
guucuuaucuuuaugguuccc

SEQ ID NO: 49335 - RNA, 21 nt, Artificial Sequence
  LRRK2 RNA guide
uaaggaaaagggaaccauaaa

SEQ ID NO: 49336 - RNA, 21 nt, Artificial Sequence
  LRRK2 RNA guide
uaaguaaggaaaagggaacca

SEQ ID NO: 49337 - RNA, 21 nt, Artificial Sequence
  LRRK2 RNA guide
uaucuuuaugguucccuuuuc

SEQ ID NO: 49338 - RNA, 21 nt, Artificial Sequence
  LRRK2 RNA guide
uaugguucccuuuuccuuacu

SEQ ID NO: 49339 - RNA, 21 nt, Artificial Sequence
  LRRK2 RNA guide
ucuuaucuuuaugguucccuu

SEQ ID NO: 49340 - RNA, 21 nt, Artificial Sequence
  LRRK2 RNA guide
ucuuuaugguucccuuuuccu

SEQ ID NO: 49341 - RNA, 21 nt, Artificial Sequence
  LRRK2 RNA guide
ugguucccuuuuccuuacuua

SEQ ID NO: 49342 - RNA, 21 nt, Artificial Sequence
  LRRK2 RNA guide
uguucuuaucuuuaugguucc

SEQ ID NO: 49343 - RNA, 21 nt, Artificial Sequence
  LRRK2 RNA guide
uuaugguucccuuuuccuuac

SEQ ID NO: 49344 - RNA, 21 nt, Artificial Sequence
  LRRK2 RNA guide
uucuuaucuuuaugguucccu

SEQ ID NO: 49345 - RNA, 21 nt, Artificial Sequence
  LRRK2 RNA guide
uuuaugguucccuuuuccuua

SEQ ID NO: 49346 - RNA, 22 nt, Artificial Sequence
  LRRK2 RNA guide
aaaagggaaccauaaagauaag

SEQ ID NO: 49347 - RNA, 22 nt, Artificial Sequence
  LRRK2 RNA guide
aaagggaaccauaaagauaaga

SEQ ID NO: 49348 - RNA, 22 nt, Artificial Sequence
  LRRK2 RNA guide
aaggaaaagggaaccauaaaga

SEQ ID NO: 49349 - RNA, 22 nt, Artificial Sequence
  LRRK2 RNA guide
aagggaaccauaaagauaagaa

SEQ ID NO: 49350 - RNA, 22 nt, Artificial Sequence
  LRRK2 RNA guide
aaguaaggaaaagggaaccaua

SEQ ID NO: 49351 - RNA, 22 nt, Artificial Sequence
  LRRK2 RNA guide
aauaaguaaggaaaagggaacc

SEQ ID NO: 49352 - RNA, 22 nt, Artificial Sequence
  LRRK2 RNA guide
aggaaaagggaaccauaaagau

SEQ ID NO: 49353 - RNA, 22 nt, Artificial Sequence
  LRRK2 RNA guide
agggaaccauaaagauaagaac

SEQ ID NO: 49354 - RNA, 22 nt, Artificial Sequence
  LRRK2 RNA guide
aguaaggaaaagggaaccauaa

SEQ ID NO: 49355 - RNA, 22 nt, Artificial Sequence
  LRRK2 RNA guide
auaaguaaggaaaagggaacca

SEQ ID NO: 49356 - RNA, 22 nt, Artificial Sequence
  LRRK2 RNA guide
aucuuuaugguucccuuuuccu

SEQ ID NO: 49357 - RNA, 22 nt, Artificial Sequence
  LRRK2 RNA guide
augguucccuuuuccuuacuua

SEQ ID NO: 49358 - RNA, 22 nt, Artificial Sequence
  LRRK2 RNA guide
cuuaucuuuaugguucccuuuu

SEQ ID NO: 49359 - RNA, 22 nt, Artificial Sequence
  LRRK2 RNA guide
cuuuaugguucccuuuuccuua

SEQ ID NO: 49360 - RNA, 22 nt, Artificial Sequence
  LRRK2 RNA guide
gaaaagggaaccauaaagauaa

SEQ ID NO: 49361 - RNA, 22 nt, Artificial Sequence
  LRRK2 RNA guide
ggaaaagggaaccauaaagaua

SEQ ID NO: 49362 - RNA, 22 nt, Artificial Sequence
  LRRK2 RNA guide
ggaaccauaaagauaagaacaa

SEQ ID NO: 49363 - RNA, 22 nt, Artificial Sequence
  LRRK2 RNA guide
gggaaccauaaagauaagaaca

SEQ ID NO: 49364 - RNA, 22 nt, Artificial Sequence
  LRRK2 RNA guide
guaaggaaaagggaaccauaaa

SEQ ID NO: 49365 - RNA, 22 nt, Artificial Sequence
  LRRK2 RNA guide
guucuuaucuuuaugguucccu

SEQ ID NO: 49366 - RNA, 22 nt, Artificial Sequence
  LRRK2 RNA guide
uaaggaaaagggaaccauaaag

SEQ ID NO: 49367 - RNA, 22 nt, Artificial Sequence
  LRRK2 RNA guide
uaaguaaggaaaagggaaccau

SEQ ID NO: 49368 - RNA, 22 nt, Artificial Sequence
  LRRK2 RNA guide
uaucuuuaugguucccuuuucc

SEQ ID NO: 49369 - RNA, 22 nt, Artificial Sequence
  LRRK2 RNA guide
uaugguucccuuuuccuuacuu

SEQ ID NO: 49370 - RNA, 22 nt, Artificial Sequence
  LRRK2 RNA guide
ucuuaucuuuaugguucccuuu

SEQ ID NO: 49371 - RNA, 22 nt, Artificial Sequence
  LRRK2 RNA guide
ucuuuaugguucccuuuuccuu

SEQ ID NO: 49372 - RNA, 22 nt, Artificial Sequence
  LRRK2 RNA guide
ugguucccuuuuccuuacuuau

SEQ ID NO: 49373 - RNA, 22 nt, Artificial Sequence
  LRRK2 RNA guide
uguucuuaucuuuaugguuccc

SEQ ID NO: 49374 - RNA, 22 nt, Artificial Sequence
  LRRK2 RNA guide
uuaucuuuaugguucccuuuuc

SEQ ID NO: 49375 - RNA, 22 nt, Artificial Sequence
  LRRK2 RNA guide
uuaugguucccuuuuccuuacu

SEQ ID NO: 49376 - RNA, 22 nt, Artificial Sequence
  LRRK2 RNA guide
uucuuaucuuuaugguucccuu

SEQ ID NO: 49377 - RNA, 22 nt, Artificial Sequence
  LRRK2 RNA guide
uuguucuuaucuuuaugguucc

SEQ ID NO: 49378 - RNA, 22 nt, Artificial Sequence
  LRRK2 RNA guide
uuuaugguucccuuuuccuuac

SEQ ID NO: 49379 - RNA, 20 nt, Artificial Sequence
  LRRK2 RNA guide
auuaagaaaauguggcacau

SEQ ID NO: 49380 - RNA, 20 nt, Artificial Sequence
  LRRK2 RNA guide
gggguacaugugccacauuu

SEQ ID NO: 49381 - RNA, 20 nt, Artificial Sequence
  LRRK2 RNA guide
ggguacaugugccacauuuu

SEQ ID NO: 49382 - RNA, 20 nt, Artificial Sequence
  LRRK2 RNA guide
uaagaaaauguggcacaugu

SEQ ID NO: 49383 - RNA, 20 nt, Artificial Sequence
  LRRK2 RNA guide
uuaagaaaauguggcacaug

SEQ ID NO: 49384 - RNA, 21 nt, Artificial Sequence
  LRRK2 RNA guide
auuaagaaaauguggcacaug

SEQ ID NO: 49385 - RNA, 21 nt, Artificial Sequence
  LRRK2 RNA guide
gauuaagaaaauguggcacau

SEQ ID NO: 49386 - RNA, 21 nt, Artificial Sequence
  LRRK2 RNA guide
gggguacaugugccacauuuu

SEQ ID NO: 49387 - RNA, 21 nt, Artificial Sequence
  LRRK2 RNA guide
ggguacaugugccacauuuuc

SEQ ID NO: 49388 - RNA, 21 nt, Artificial Sequence
  LRRK2 RNA guide
uaagaaaauguggcacaugua

SEQ ID NO: 49389 - RNA, 21 nt, Artificial Sequence
  LRRK2 RNA guide
ugggguacaugugccacauuu

SEQ ID NO: 49390 - RNA, 21 nt, Artificial Sequence
  LRRK2 RNA guide
uuaagaaaauguggcacaugu

SEQ ID NO: 49391 - RNA, 22 nt, Artificial Sequence
  LRRK2 RNA guide
augggguacaugugccacauuu

SEQ ID NO: 49392 - RNA, 22 nt, Artificial Sequence
  LRRK2 RNA guide
auuaagaaaauguggcacaugu

SEQ ID NO: 49393 - RNA, 22 nt, Artificial Sequence
  LRRK2 RNA guide
ggauuaagaaaauguggcacau

SEQ ID NO: 49394 - RNA, 22 nt, Artificial Sequence
  LRRK2 RNA guide
gggguacaugugccacauuuuc

SEQ ID NO: 49395 - RNA, 22 nt, Artificial Sequence
  LRRK2 RNA guide
ggguacaugugccacauuuucu

SEQ ID NO: 49396 - RNA, 22 nt, Artificial Sequence
  LRRK2 RNA guide
uaagaaaauguggcacauguac

SEQ ID NO: 49397 - RNA, 22 nt, Artificial Sequence
  LRRK2 RNA guide
ugggguacaugugccacauuuu

SEQ ID NO: 49398 - RNA, 22 nt, Artificial Sequence
  LRRK2 RNA guide
uuaagaaaauguggcacaugua

SEQ ID NO: 49399 - RNA, 20 nt, Artificial Sequence
  LRRK2 RNA guide
aaauaacucgugaaucaaag

SEQ ID NO: 49400 - RNA, 20 nt, Artificial Sequence
  LRRK2 RNA guide
aaaugacagccuucuaaaua

SEQ ID NO: 49401 - RNA, 20 nt, Artificial Sequence
  LRRK2 RNA guide
aacucgugaaucaaagaagu

SEQ ID NO: 49402 - RNA, 20 nt, Artificial Sequence
  LRRK2 RNA guide
aauaacucgugaaucaaaga

SEQ ID NO: 49403 - RNA, 20 nt, Artificial Sequence
  LRRK2 RNA guide
aaugacagccuucuaaauaa

SEQ ID NO: 49404 - RNA, 20 nt, Artificial Sequence
  LRRK2 RNA guide
acagccuucuaaauaacucg

SEQ ID NO: 49405 - RNA, 20 nt, Artificial Sequence
  LRRK2 RNA guide
acgaguuauuuagaaggcug

SEQ ID NO: 49406 - RNA, 20 nt, Artificial Sequence
  LRRK2 RNA guide
acucgugaaucaaagaaguc

SEQ ID NO: 49407 - RNA, 20 nt, Artificial Sequence
  LRRK2 RNA guide
acuucuuugauucacgaguu

SEQ ID NO: 49408 - RNA, 20 nt, Artificial Sequence
  LRRK2 RNA guide
agccuucuaaauaacucgug

SEQ ID NO: 49409 - RNA, 20 nt, Artificial Sequence
  LRRK2 RNA guide
auaacucgugaaucaaagaa

SEQ ID NO: 49410 - RNA, 20 nt, Artificial Sequence
  LRRK2 RNA guide
augacagccuucuaaauaac

SEQ ID NO: 49411 - RNA, 20 nt, Artificial Sequence
  LRRK2 RNA guide
auucacgaguuauuuagaag

SEQ ID NO: 49412 - RNA, 20 nt, Artificial Sequence
  LRRK2 RNA guide
cacgaguuauuuagaaggcu

SEQ ID NO: 49413 - RNA, 20 nt, Artificial Sequence
  LRRK2 RNA guide
cagccuucuaaauaacucgu

SEQ ID NO: 49414 - RNA, 20 nt, Artificial Sequence
  LRRK2 RNA guide
ccuucuaaauaacucgugaa

SEQ ID NO: 49415 - RNA, 20 nt, Artificial Sequence
  LRRK2 RNA guide
ccuuugugacuucuuugauu

SEQ ID NO: 49416 - RNA, 20 nt, Artificial Sequence
  LRRK2 RNA guide
cgugaaucaaagaagucaca

SEQ ID NO: 49417 - RNA, 20 nt, Artificial Sequence
  LRRK2 RNA guide
cuaaauaacucgugaaucaa

SEQ ID NO: 49418 - RNA, 20 nt, Artificial Sequence
  LRRK2 RNA guide
cucgugaaucaaagaaguca

SEQ ID NO: 49419 - RNA, 20 nt, Artificial Sequence
  LRRK2 RNA guide
cuucuaaauaacucgugaau

SEQ ID NO: 49420 - RNA, 20 nt, Artificial Sequence
  LRRK2 RNA guide
cuucuuugauucacgaguua

SEQ ID NO: 49421 - RNA, 20 nt, Artificial Sequence
  LRRK2 RNA guide
cuuugauucacgaguuauuu

SEQ ID NO: 49422 - RNA, 20 nt, Artificial Sequence
  LRRK2 RNA guide
cuuugugacuucuuugauuc

SEQ ID NO: 49423 - RNA, 20 nt, Artificial Sequence
  LRRK2 RNA guide
gacagccuucuaaauaacuc

SEQ ID NO: 49424 - RNA, 20 nt, Artificial Sequence
  LRRK2 RNA guide
gacuucuuugauucacgagu

SEQ ID NO: 49425 - RNA, 20 nt, Artificial Sequence
  LRRK2 RNA guide
gauucacgaguuauuuagaa

SEQ ID NO: 49426 - RNA, 20 nt, Artificial Sequence
  LRRK2 RNA guide
gccuucuaaauaacucguga

SEQ ID NO: 49427 - RNA, 20 nt, Artificial Sequence
  LRRK2 RNA guide
gugacuucuuugauucacga

SEQ ID NO: 49428 - RNA, 20 nt, Artificial Sequence
  LRRK2 RNA guide
uaacucgugaaucaaagaag

SEQ ID NO: 49429 - RNA, 20 nt, Artificial Sequence
  LRRK2 RNA guide
ucacgaguuauuuagaaggc

SEQ ID NO: 49430 - RNA, 20 nt, Artificial Sequence
  LRRK2 RNA guide
uccuuugugacuucuuugau

SEQ ID NO: 49431 - RNA, 20 nt, Artificial Sequence
  LRRK2 RNA guide
ucgugaaucaaagaagucac

SEQ ID NO: 49432 - RNA, 20 nt, Artificial Sequence
  LRRK2 RNA guide
ucuaaauaacucgugaauca

SEQ ID NO: 49433 - RNA, 20 nt, Artificial Sequence
  LRRK2 RNA guide
ucuuugauucacgaguuauu

SEQ ID NO: 49434 - RNA, 20 nt, Artificial Sequence
  LRRK2 RNA guide
ugacagccuucuaaauaacu

SEQ ID NO: 49435 - RNA, 20 nt, Artificial Sequence
  LRRK2 RNA guide
ugacuucuuugauucacgag

SEQ ID NO: 49436 - RNA, 20 nt, Artificial Sequence
  LRRK2 RNA guide
ugauucacgaguuauuuaga

SEQ ID NO: 49437 - RNA, 20 nt, Artificial Sequence
  LRRK2 RNA guide
ugugacuucuuugauucacg

SEQ ID NO: 49438 - RNA, 20 nt, Artificial Sequence
  LRRK2 RNA guide
uucacgaguuauuuagaagg

SEQ ID NO: 49439 - RNA, 20 nt, Artificial Sequence
  LRRK2 RNA guide
uuccuuugugacuucuuuga

SEQ ID NO: 49440 - RNA, 20 nt, Artificial Sequence
  LRRK2 RNA guide
uucuaaauaacucgugaauc

SEQ ID NO: 49441 - RNA, 20 nt, Artificial Sequence
  LRRK2 RNA guide
uucuuugauucacgaguuau

SEQ ID NO: 49442 - RNA, 20 nt, Artificial Sequence
  LRRK2 RNA guide
uugauucacgaguuauuuag

SEQ ID NO: 49443 - RNA, 20 nt, Artificial Sequence
  LRRK2 RNA guide
uugugacuucuuugauucac

SEQ ID NO: 49444 - RNA, 20 nt, Artificial Sequence
  LRRK2 RNA guide
uuugugacuucuuugauuca

SEQ ID NO: 49445 - RNA, 21 nt, Artificial Sequence
  LRRK2 RNA guide
aacucgugaaucaaagaaguc

SEQ ID NO: 49446 - RNA, 21 nt, Artificial Sequence
  LRRK2 RNA guide
aaugacagccuucuaaauaac

SEQ ID NO: 49447 - RNA, 21 nt, Artificial Sequence
  LRRK2 RNA guide
acagccuucuaaauaacucgu

SEQ ID NO: 49448 - RNA, 21 nt, Artificial Sequence
  LRRK2 RNA guide
acgaguuauuuagaaggcugu

SEQ ID NO: 49449 - RNA, 21 nt, Artificial Sequence
  LRRK2 RNA guide
acucgugaaucaaagaaguca

SEQ ID NO: 49450 - RNA, 21 nt, Artificial Sequence
  LRRK2 RNA guide
acuucuuugauucacgaguua

SEQ ID NO: 49451 - RNA, 21 nt, Artificial Sequence
  LRRK2 RNA guide
agccuucuaaauaacucguga

SEQ ID NO: 49452 - RNA, 21 nt, Artificial Sequence
  LRRK2 RNA guide
auaacucgugaaucaaagaag

SEQ ID NO: 49453 - RNA, 21 nt, Artificial Sequence
  LRRK2 RNA guide
augacagccuucuaaauaacu

SEQ ID NO: 49454 - RNA, 21 nt, Artificial Sequence
  LRRK2 RNA guide
auucacgaguuauuuagaagg

SEQ ID NO: 49455 - RNA, 21 nt, Artificial Sequence
  LRRK2 RNA guide
cacgaguuauuuagaaggcug

SEQ ID NO: 49456 - RNA, 21 nt, Artificial Sequence
  LRRK2 RNA guide
cagccuucuaaauaacucgug

SEQ ID NO: 49457 - RNA, 21 nt, Artificial Sequence
  LRRK2 RNA guide
ccuucuaaauaacucgugaau

SEQ ID NO: 49458 - RNA, 21 nt, Artificial Sequence
  LRRK2 RNA guide
ccuuugugacuucuuugauuc

SEQ ID NO: 49459 - RNA, 21 nt, Artificial Sequence
  LRRK2 RNA guide
cgugaaucaaagaagucacaa

SEQ ID NO: 49460 - RNA, 21 nt, Artificial Sequence
  LRRK2 RNA guide
cucgugaaucaaagaagucac

SEQ ID NO: 49461 - RNA, 21 nt, Artificial Sequence
  LRRK2 RNA guide
cuucuaaauaacucgugaauc

SEQ ID NO: 49462 - RNA, 21 nt, Artificial Sequence
  LRRK2 RNA guide
cuucuuugauucacgaguuau

SEQ ID NO: 49463 - RNA, 21 nt, Artificial Sequence
  LRRK2 RNA guide
cuuugugacuucuuugauuca

SEQ ID NO: 49464 - RNA, 21 nt, Artificial Sequence
  LRRK2 RNA guide
gacagccuucuaaauaacucg

SEQ ID NO: 49465 - RNA, 21 nt, Artificial Sequence
  LRRK2 RNA guide
gacuucuuugauucacgaguu

SEQ ID NO: 49466 - RNA, 21 nt, Artificial Sequence
  LRRK2 RNA guide
gauucacgaguuauuuagaag

SEQ ID NO: 49467 - RNA, 21 nt, Artificial Sequence
  LRRK2 RNA guide
gccuucuaaauaacucgugaa

SEQ ID NO: 49468 - RNA, 21 nt, Artificial Sequence
  LRRK2 RNA guide
gugacuucuuugauucacgag

SEQ ID NO: 49469 - RNA, 21 nt, Artificial Sequence
  LRRK2 RNA guide
uaacucgugaaucaaagaagu

SEQ ID NO: 49470 - RNA, 21 nt, Artificial Sequence
  LRRK2 RNA guide
ucacgaguuauuuagaaggcu

SEQ ID NO: 49471 - RNA, 21 nt, Artificial Sequence
  LRRK2 RNA guide
uccuuugugacuucuuugauu

SEQ ID NO: 49472 - RNA, 21 nt, Artificial Sequence
  LRRK2 RNA guide
ucgugaaucaaagaagucaca

SEQ ID NO: 49473 - RNA, 21 nt, Artificial Sequence
  LRRK2 RNA guide
ugacagccuucuaaauaacuc

SEQ ID NO: 49474 - RNA, 21 nt, Artificial Sequence
  LRRK2 RNA guide
ugacuucuuugauucacgagu

SEQ ID NO: 49475 - RNA, 21 nt, Artificial Sequence
  LRRK2 RNA guide
ugugacuucuuugauucacga

SEQ ID NO: 49476 - RNA, 21 nt, Artificial Sequence
  LRRK2 RNA guide
uucacgaguuauuuagaaggc

SEQ ID NO: 49477 - RNA, 21 nt, Artificial Sequence
  LRRK2 RNA guide
uuccuuugugacuucuuugau

SEQ ID NO: 49478 - RNA, 21 nt, Artificial Sequence
  LRRK2 RNA guide
uugugacuucuuugauucacg

SEQ ID NO: 49479 - RNA, 21 nt, Artificial Sequence
  LRRK2 RNA guide
uuuccuuugugacuucuuuga

SEQ ID NO: 49480 - RNA, 21 nt, Artificial Sequence
  LRRK2 RNA guide
uuugugacuucuuugauucac

SEQ ID NO: 49481 - RNA, 22 nt, Artificial Sequence
  LRRK2 RNA guide
aaaugacagccuucuaaauaac

SEQ ID NO: 49482 - RNA, 22 nt, Artificial Sequence
  LRRK2 RNA guide
aacucgugaaucaaagaaguca

SEQ ID NO: 49483 - RNA, 22 nt, Artificial Sequence
  LRRK2 RNA guide
aauaacucgugaaucaaagaag

SEQ ID NO: 49484 - RNA, 22 nt, Artificial Sequence
  LRRK2 RNA guide
aaugacagccuucuaaauaacu

SEQ ID NO: 49485 - RNA, 22 nt, Artificial Sequence
  LRRK2 RNA guide
acagccuucuaaauaacucgug

SEQ ID NO: 49486 - RNA, 22 nt, Artificial Sequence
  LRRK2 RNA guide
acgaguuauuuagaaggcuguc

SEQ ID NO: 49487 - RNA, 22 nt, Artificial Sequence
  LRRK2 RNA guide
acucgugaaucaaagaagucac

SEQ ID NO: 49488 - RNA, 22 nt, Artificial Sequence
  LRRK2 RNA guide
acuucuuugauucacgaguuau

SEQ ID NO: 49489 - RNA, 22 nt, Artificial Sequence
  LRRK2 RNA guide
agccuucuaaauaacucgugaa

SEQ ID NO: 49490 - RNA, 22 nt, Artificial Sequence
  LRRK2 RNA guide
auaacucgugaaucaaagaagu

SEQ ID NO: 49491 - RNA, 22 nt, Artificial Sequence
  LRRK2 RNA guide
augacagccuucuaaauaacuc

SEQ ID NO: 49492 - RNA, 22 nt, Artificial Sequence
  LRRK2 RNA guide
auucacgaguuauuuagaaggc

SEQ ID NO: 49493 - RNA, 22 nt, Artificial Sequence
  LRRK2 RNA guide
auuuccuuugugacuucuuuga

SEQ ID NO: 49494 - RNA, 22 nt, Artificial Sequence
  LRRK2 RNA guide
cacgaguuauuuagaaggcugu

SEQ ID NO: 49495 - RNA, 22 nt, Artificial Sequence
  LRRK2 RNA guide
cagccuucuaaauaacucguga

SEQ ID NO: 49496 - RNA, 22 nt, Artificial Sequence
  LRRK2 RNA guide
ccuucuaaauaacucgugaauc

SEQ ID NO: 49497 - RNA, 22 nt, Artificial Sequence
  LRRK2 RNA guide
ccuuugugacuucuuugauuca

SEQ ID NO: 49498 - RNA, 22 nt, Artificial Sequence
  LRRK2 RNA guide
cgugaaucaaagaagucacaaa

SEQ ID NO: 49499 - RNA, 22 nt, Artificial Sequence
  LRRK2 RNA guide
cuaaauaacucgugaaucaaag

SEQ ID NO: 49500 - RNA, 22 nt, Artificial Sequence
  LRRK2 RNA guide
cucgugaaucaaagaagucaca

SEQ ID NO: 49501 - RNA, 22 nt, Artificial Sequence
  LRRK2 RNA guide
cuucuaaauaacucgugaauca

SEQ ID NO: 49502 - RNA, 22 nt, Artificial Sequence
  LRRK2 RNA guide
cuucuuugauucacgaguuauu

SEQ ID NO: 49503 - RNA, 22 nt, Artificial Sequence
  LRRK2 RNA guide
cuuugauucacgaguuauuuag

SEQ ID NO: 49504 - RNA, 22 nt, Artificial Sequence
  LRRK2 RNA guide
cuuugugacuucuuugauucac

SEQ ID NO: 49505 - RNA, 22 nt, Artificial Sequence
  LRRK2 RNA guide
gacagccuucuaaauaacucgu

SEQ ID NO: 49506 - RNA, 22 nt, Artificial Sequence
  LRRK2 RNA guide
gacuucuuugauucacgaguua

SEQ ID NO: 49507 - RNA, 22 nt, Artificial Sequence
  LRRK2 RNA guide
gauucacgaguuauuuagaagg

SEQ ID NO: 49508 - RNA, 22 nt, Artificial Sequence
  LRRK2 RNA guide
gccuucuaaauaacucgugaau

SEQ ID NO: 49509 - RNA, 22 nt, Artificial Sequence
  LRRK2 RNA guide
gugacuucuuugauucacgagu

SEQ ID NO: 49510 - RNA, 22 nt, Artificial Sequence
  LRRK2 RNA guide
uaacucgugaaucaaagaaguc

SEQ ID NO: 49511 - RNA, 22 nt, Artificial Sequence
  LRRK2 RNA guide
ucacgaguuauuuagaaggcug

SEQ ID NO: 49512 - RNA, 22 nt, Artificial Sequence
  LRRK2 RNA guide
uccuuugugacuucuuugauuc

SEQ ID NO: 49513 - RNA, 22 nt, Artificial Sequence
  LRRK2 RNA guide
ucgugaaucaaagaagucacaa

SEQ ID NO: 49514 - RNA, 22 nt, Artificial Sequence
  LRRK2 RNA guide
ugacagccuucuaaauaacucg

SEQ ID NO: 49515 - RNA, 22 nt, Artificial Sequence
  LRRK2 RNA guide
ugacuucuuugauucacgaguu

SEQ ID NO: 49516 - RNA, 22 nt, Artificial Sequence
  LRRK2 RNA guide
ugauucacgaguuauuuagaag

SEQ ID NO: 49517 - RNA, 22 nt, Artificial Sequence
  LRRK2 RNA guide
ugugacuucuuugauucacgag

SEQ ID NO: 49518 - RNA, 22 nt, Artificial Sequence
  LRRK2 RNA guide
uucacgaguuauuuagaaggcu

SEQ ID NO: 49519 - RNA, 22 nt, Artificial Sequence
  LRRK2 RNA guide
uuccuuugugacuucuuugauu

SEQ ID NO: 49520 - RNA, 22 nt, Artificial Sequence
  LRRK2 RNA guide
uugugacuucuuugauucacga

SEQ ID NO: 49521 - RNA, 22 nt, Artificial Sequence
  LRRK2 RNA guide
uuuccuuugugacuucuuugau

SEQ ID NO: 49522 - RNA, 22 nt, Artificial Sequence
  LRRK2 RNA guide
uuugugacuucuuugauucacg

SEQ ID NO: 49523 - RNA, 20 nt, Artificial Sequence
  LRRK2 RNA guide
aacucaugaaucaaagaagu

SEQ ID NO: 49524 - RNA, 20 nt, Artificial Sequence
  LRRK2 RNA guide
acagccuucuaaauaacuca

SEQ ID NO: 49525 - RNA, 20 nt, Artificial Sequence
  LRRK2 RNA guide
acucaugaaucaaagaaguc

SEQ ID NO: 49526 - RNA, 20 nt, Artificial Sequence
  LRRK2 RNA guide
acuucuuugauucaugaguu

SEQ ID NO: 49527 - RNA, 20 nt, Artificial Sequence
  LRRK2 RNA guide
agccuucuaaauaacucaug

SEQ ID NO: 49528 - RNA, 20 nt, Artificial Sequence
  LRRK2 RNA guide
augaguuauuuagaaggcug

SEQ ID NO: 49529 - RNA, 20 nt, Artificial Sequence
  LRRK2 RNA guide
cagccuucuaaauaacucau

SEQ ID NO: 49530 - RNA, 20 nt, Artificial Sequence
  LRRK2 RNA guide
caugaaucaaagaagucaca

SEQ ID NO: 49531 - RNA, 20 nt, Artificial Sequence
  LRRK2 RNA guide
caugaguuauuuagaaggcu

SEQ ID NO: 49532 - RNA, 20 nt, Artificial Sequence
  LRRK2 RNA guide
cucaugaaucaaagaaguca

SEQ ID NO: 49533 - RNA, 20 nt, Artificial Sequence
  LRRK2 RNA guide
cuucuuugauucaugaguua

SEQ ID NO: 49534 - RNA, 20 nt, Artificial Sequence
  LRRK2 RNA guide
gacuucuuugauucaugagu

SEQ ID NO: 49535 - RNA, 20 nt, Artificial Sequence
  LRRK2 RNA guide
gccuucuaaauaacucauga

SEQ ID NO: 49536 - RNA, 20 nt, Artificial Sequence
  LRRK2 RNA guide
gugacuucuuugauucauga

SEQ ID NO: 49537 - RNA, 20 nt, Artificial Sequence
  LRRK2 RNA guide
uaacucaugaaucaaagaag

SEQ ID NO: 49538 - RNA, 20 nt, Artificial Sequence
  LRRK2 RNA guide
ucaugaaucaaagaagucac

SEQ ID NO: 49539 - RNA, 20 nt, Artificial Sequence
  LRRK2 RNA guide
ucaugaguuauuuagaaggc

SEQ ID NO: 49540 - RNA, 20 nt, Artificial Sequence
  LRRK2 RNA guide
ugacuucuuugauucaugag

SEQ ID NO: 49541 - RNA, 20 nt, Artificial Sequence
  LRRK2 RNA guide
ugugacuucuuugauucaug

SEQ ID NO: 49542 - RNA, 20 nt, Artificial Sequence
  LRRK2 RNA guide
uucaugaguuauuuagaagg

SEQ ID NO: 49543 - RNA, 20 nt, Artificial Sequence
  LRRK2 RNA guide
uugugacuucuuugauucau

SEQ ID NO: 49544 - RNA, 21 nt, Artificial Sequence
  LRRK2 RNA guide
aacucaugaaucaaagaaguc

SEQ ID NO: 49545 - RNA, 21 nt, Artificial Sequence
  LRRK2 RNA guide
acagccuucuaaauaacucau

SEQ ID NO: 49546 - RNA, 21 nt, Artificial Sequence
  LRRK2 RNA guide
acucaugaaucaaagaaguca

SEQ ID NO: 49547 - RNA, 21 nt, Artificial Sequence
  LRRK2 RNA guide
agccuucuaaauaacucauga

SEQ ID NO: 49548 - RNA, 21 nt, Artificial Sequence
  LRRK2 RNA guide
augaguuauuuagaaggcugu

SEQ ID NO: 49549 - RNA, 21 nt, Artificial Sequence
  LRRK2 RNA guide
cagccuucuaaauaacucaug

SEQ ID NO: 49550 - RNA, 21 nt, Artificial Sequence
  LRRK2 RNA guide
caugaaucaaagaagucacaa

SEQ ID NO: 49551 - RNA, 21 nt, Artificial Sequence
  LRRK2 RNA guide
caugaguuauuuagaaggcug

SEQ ID NO: 49552 - RNA, 21 nt, Artificial Sequence
  LRRK2 RNA guide
cucaugaaucaaagaagucac

SEQ ID NO: 49553 - RNA, 21 nt, Artificial Sequence
  LRRK2 RNA guide
gacagccuucuaaauaacuca

SEQ ID NO: 49554 - RNA, 21 nt, Artificial Sequence
  LRRK2 RNA guide
gacuucuuugauucaugaguu

SEQ ID NO: 49555 - RNA, 21 nt, Artificial Sequence
  LRRK2 RNA guide
gccuucuaaauaacucaugaa

SEQ ID NO: 49556 - RNA, 21 nt, Artificial Sequence
  LRRK2 RNA guide
gugacuucuuugauucaugag

SEQ ID NO: 49557 - RNA, 21 nt, Artificial Sequence
  LRRK2 RNA guide
ucaugaaucaaagaagucaca

SEQ ID NO: 49558 - RNA, 21 nt, Artificial Sequence
  LRRK2 RNA guide
ucaugaguuauuuagaaggcu

SEQ ID NO: 49559 - RNA, 21 nt, Artificial Sequence
  LRRK2 RNA guide
ugacuucuuugauucaugagu

SEQ ID NO: 49560 - RNA, 21 nt, Artificial Sequence
  LRRK2 RNA guide
ugugacuucuuugauucauga

SEQ ID NO: 49561 - RNA, 21 nt, Artificial Sequence
  LRRK2 RNA guide
uucaugaguuauuuagaaggc

SEQ ID NO: 49562 - RNA, 21 nt, Artificial Sequence
  LRRK2 RNA guide
uugugacuucuuugauucaug

SEQ ID NO: 49563 - RNA, 22 nt, Artificial Sequence
  LRRK2 RNA guide
aacucaugaaucaaagaaguca

SEQ ID NO: 49564 - RNA, 22 nt, Artificial Sequence
  LRRK2 RNA guide
acagccuucuaaauaacucaug

SEQ ID NO: 49565 - RNA, 22 nt, Artificial Sequence
  LRRK2 RNA guide
acucaugaaucaaagaagucac

SEQ ID NO: 49566 - RNA, 22 nt, Artificial Sequence
  LRRK2 RNA guide
agccuucuaaauaacucaugaa

SEQ ID NO: 49567 - RNA, 22 nt, Artificial Sequence
  LRRK2 RNA guide
augaguuauuuagaaggcuguc

SEQ ID NO: 49568 - RNA, 22 nt, Artificial Sequence
  LRRK2 RNA guide
auucaugaguuauuuagaaggc

SEQ ID NO: 49569 - RNA, 22 nt, Artificial Sequence
  LRRK2 RNA guide
cagccuucuaaauaacucauga

SEQ ID NO: 49570 - RNA, 22 nt, Artificial Sequence
  LRRK2 RNA guide
caugaaucaaagaagucacaaa

SEQ ID NO: 49571 - RNA, 22 nt, Artificial Sequence
  LRRK2 RNA guide
caugaguuauuuagaaggcugu

SEQ ID NO: 49572 - RNA, 22 nt, Artificial Sequence
  LRRK2 RNA guide
ccuucuaaauaacucaugaauc

SEQ ID NO: 49573 - RNA, 22 nt, Artificial Sequence
  LRRK2 RNA guide
cucaugaaucaaagaagucaca

SEQ ID NO: 49574 - RNA, 22 nt, Artificial Sequence
  LRRK2 RNA guide
cuuugugacuucuuugauucau

SEQ ID NO: 49575 - RNA, 22 nt, Artificial Sequence
  LRRK2 RNA guide
gacagccuucuaaauaacucau

SEQ ID NO: 49576 - RNA, 22 nt, Artificial Sequence
  LRRK2 RNA guide
gacuucuuugauucaugaguua

SEQ ID NO: 49577 - RNA, 22 nt, Artificial Sequence
  LRRK2 RNA guide
gauucaugaguuauuuagaagg

SEQ ID NO: 49578 - RNA, 22 nt, Artificial Sequence
  LRRK2 RNA guide
gccuucuaaauaacucaugaau

SEQ ID NO: 49579 - RNA, 22 nt, Artificial Sequence
  LRRK2 RNA guide
gugacuucuuugauucaugagu

SEQ ID NO: 49580 - RNA, 22 nt, Artificial Sequence
  LRRK2 RNA guide
uaacucaugaaucaaagaaguc

SEQ ID NO: 49581 - RNA, 22 nt, Artificial Sequence
  LRRK2 RNA guide
ucaugaaucaaagaagucacaa

SEQ ID NO: 49582 - RNA, 22 nt, Artificial Sequence
  LRRK2 RNA guide
ucaugaguuauuuagaaggcug

SEQ ID NO: 49583 - RNA, 22 nt, Artificial Sequence
  LRRK2 RNA guide
ugacagccuucuaaauaacuca

SEQ ID NO: 49584 - RNA, 22 nt, Artificial Sequence
  LRRK2 RNA guide
ugacuucuuugauucaugaguu

SEQ ID NO: 49585 - RNA, 22 nt, Artificial Sequence
  LRRK2 RNA guide
ugugacuucuuugauucaugag

SEQ ID NO: 49586 - RNA, 22 nt, Artificial Sequence
  LRRK2 RNA guide
uucaugaguuauuuagaaggcu

SEQ ID NO: 49587 - RNA, 22 nt, Artificial Sequence
  LRRK2 RNA guide
uugugacuucuuugauucauga

SEQ ID NO: 49588 - RNA, 22 nt, Artificial Sequence
  LRRK2 RNA guide
uuugugacuucuuugauucaug

SEQ ID NO: 49589 - RNA, 20 nt, Artificial Sequence
  LRRK2 RNA guide
aaacccauaugcagauuacu

SEQ ID NO: 49590 - RNA, 20 nt, Artificial Sequence
  LRRK2 RNA guide
aaagugcuccaguaaucugc

SEQ ID NO: 49591 - RNA, 20 nt, Artificial Sequence
  LRRK2 RNA guide
aacccauaugcagauuacug

SEQ ID NO: 49592 - RNA, 20 nt, Artificial Sequence
  LRRK2 RNA guide
aagugcuccaguaaucugca

SEQ ID NO: 49593 - RNA, 20 nt, Artificial Sequence
  LRRK2 RNA guide
aaucugcauauggguuucug

SEQ ID NO: 49594 - RNA, 20 nt, Artificial Sequence
  LRRK2 RNA guide
acccauaugcagauuacugg

SEQ ID NO: 49595 - RNA, 20 nt, Artificial Sequence
  LRRK2 RNA guide
agaaacccauaugcagauua

SEQ ID NO: 49596 - RNA, 20 nt, Artificial Sequence
  LRRK2 RNA guide
agaucuuccagaaacccaua

SEQ ID NO: 49597 - RNA, 20 nt, Artificial Sequence
  LRRK2 RNA guide
agcgcagaucuuccagaaac

SEQ ID NO: 49598 - RNA, 20 nt, Artificial Sequence
  LRRK2 RNA guide
aguaaucugcauauggguuu

SEQ ID NO: 49599 - RNA, 20 nt, Artificial Sequence
  LRRK2 RNA guide
agugcuccaguaaucugcau

SEQ ID NO: 49600 - RNA, 20 nt, Artificial Sequence
  LRRK2 RNA guide
auauggguuucuggaagauc

SEQ ID NO: 49601 - RNA, 20 nt, Artificial Sequence
  LRRK2 RNA guide
aucugcauauggguuucugg

SEQ ID NO: 49602 - RNA, 20 nt, Artificial Sequence
  LRRK2 RNA guide
aucuuccagaaacccauaug

SEQ ID NO: 49603 - RNA, 20 nt, Artificial Sequence
  LRRK2 RNA guide
auggguuucuggaagaucug

SEQ ID NO: 49604 - RNA, 20 nt, Artificial Sequence
  LRRK2 RNA guide
cagaaacccauaugcagauu

SEQ ID NO: 49605 - RNA, 20 nt, Artificial Sequence
  LRRK2 RNA guide
cagaucuuccagaaacccau

SEQ ID NO: 49606 - RNA, 20 nt, Artificial Sequence
  LRRK2 RNA guide
caguaaucugcauauggguu

SEQ ID NO: 49607 - RNA, 20 nt, Artificial Sequence
  LRRK2 RNA guide
cauauggguuucuggaagau

SEQ ID NO: 49608 - RNA, 20 nt, Artificial Sequence
  LRRK2 RNA guide
ccagaaacccauaugcagau

SEQ ID NO: 49609 - RNA, 20 nt, Artificial Sequence
  LRRK2 RNA guide
ccaguaaucugcauaugggu

SEQ ID NO: 49610 - RNA, 20 nt, Artificial Sequence
  LRRK2 RNA guide
ccauaugcagauuacuggag

SEQ ID NO: 49611 - RNA, 20 nt, Artificial Sequence
  LRRK2 RNA guide
cccauaugcagauuacugga

SEQ ID NO: 49612 - RNA, 20 nt, Artificial Sequence
  LRRK2 RNA guide
cgcagaucuuccagaaaccc

SEQ ID NO: 49613 - RNA, 20 nt, Artificial Sequence
  LRRK2 RNA guide
cuagcgcagaucuuccagaa

SEQ ID NO: 49614 - RNA, 20 nt, Artificial Sequence
  LRRK2 RNA guide
cuccaguaaucugcauaugg

SEQ ID NO: 49615 - RNA, 20 nt, Artificial Sequence
  LRRK2 RNA guide
cugcauauggguuucuggaa

SEQ ID NO: 49616 - RNA, 20 nt, Artificial Sequence
  LRRK2 RNA guide
cuuccagaaacccauaugca

SEQ ID NO: 49617 - RNA, 20 nt, Artificial Sequence
  LRRK2 RNA guide
gaaacccauaugcagauuac

SEQ ID NO: 49618 - RNA, 20 nt, Artificial Sequence
  LRRK2 RNA guide
gaucuuccagaaacccauau

SEQ ID NO: 49619 - RNA, 20 nt, Artificial Sequence
  LRRK2 RNA guide
gcagaucuuccagaaaccca

SEQ ID NO: 49620 - RNA, 20 nt, Artificial Sequence
  LRRK2 RNA guide
gcauauggguuucuggaaga

SEQ ID NO: 49621 - RNA, 20 nt, Artificial Sequence
  LRRK2 RNA guide
gcgcagaucuuccagaaacc

SEQ ID NO: 49622 - RNA, 20 nt, Artificial Sequence
  LRRK2 RNA guide
gcuccaguaaucugcauaug

SEQ ID NO: 49623 - RNA, 20 nt, Artificial Sequence
  LRRK2 RNA guide
guaaucugcauauggguuuc

SEQ ID NO: 49624 - RNA, 20 nt, Artificial Sequence
  LRRK2 RNA guide
gugcuccaguaaucugcaua

SEQ ID NO: 49625 - RNA, 20 nt, Artificial Sequence
  LRRK2 RNA guide
uagcgcagaucuuccagaaa

SEQ ID NO: 49626 - RNA, 20 nt, Artificial Sequence
  LRRK2 RNA guide
uauggguuucuggaagaucu

SEQ ID NO: 49627 - RNA, 20 nt, Artificial Sequence
  LRRK2 RNA guide
uccagaaacccauaugcaga

SEQ ID NO: 49628 - RNA, 20 nt, Artificial Sequence
  LRRK2 RNA guide
uccaguaaucugcauauggg

SEQ ID NO: 49629 - RNA, 20 nt, Artificial Sequence
  LRRK2 RNA guide
ucuagcgcagaucuuccaga

SEQ ID NO: 49630 - RNA, 20 nt, Artificial Sequence
  LRRK2 RNA guide
ucugcauauggguuucugga

SEQ ID NO: 49631 - RNA, 20 nt, Artificial Sequence
  LRRK2 RNA guide
ucuuccagaaacccauaugc

SEQ ID NO: 49632 - RNA, 20 nt, Artificial Sequence
  LRRK2 RNA guide
ugcauauggguuucuggaag

SEQ ID NO: 49633 - RNA, 20 nt, Artificial Sequence
  LRRK2 RNA guide
ugcuccaguaaucugcauau

SEQ ID NO: 49634 - RNA, 20 nt, Artificial Sequence
  LRRK2 RNA guide
uggguuucuggaagaucugc

SEQ ID NO: 49635 - RNA, 20 nt, Artificial Sequence
  LRRK2 RNA guide
uuccagaaacccauaugcag

SEQ ID NO: 49636 - RNA, 21 nt, Artificial Sequence
  LRRK2 RNA guide
aaaagugcuccaguaaucugc

SEQ ID NO: 49637 - RNA, 21 nt, Artificial Sequence
  LRRK2 RNA guide
aaacccauaugcagauuacug

SEQ ID NO: 49638 - RNA, 21 nt, Artificial Sequence
  LRRK2 RNA guide
aaagugcuccaguaaucugca

SEQ ID NO: 49639 - RNA, 21 nt, Artificial Sequence
  LRRK2 RNA guide
aacccauaugcagauuacugg

SEQ ID NO: 49640 - RNA, 21 nt, Artificial Sequence
  LRRK2 RNA guide
aagugcuccaguaaucugcau

SEQ ID NO: 49641 - RNA, 21 nt, Artificial Sequence
  LRRK2 RNA guide
aaucugcauauggguuucugg

SEQ ID NO: 49642 - RNA, 21 nt, Artificial Sequence
  LRRK2 RNA guide
acccauaugcagauuacugga

SEQ ID NO: 49643 - RNA, 21 nt, Artificial Sequence
  LRRK2 RNA guide
agaaacccauaugcagauuac

SEQ ID NO: 49644 - RNA, 21 nt, Artificial Sequence
  LRRK2 RNA guide
agaucuuccagaaacccauau

SEQ ID NO: 49645 - RNA, 21 nt, Artificial Sequence
  LRRK2 RNA guide
agcgcagaucuuccagaaacc

SEQ ID NO: 49646 - RNA, 21 nt, Artificial Sequence
  LRRK2 RNA guide
aguaaucugcauauggguuuc

SEQ ID NO: 49647 - RNA, 21 nt, Artificial Sequence
  LRRK2 RNA guide
agugcuccaguaaucugcaua

SEQ ID NO: 49648 - RNA, 21 nt, Artificial Sequence
  LRRK2 RNA guide
auauggguuucuggaagaucu

SEQ ID NO: 49649 - RNA, 21 nt, Artificial Sequence
  LRRK2 RNA guide
aucugcauauggguuucugga

SEQ ID NO: 49650 - RNA, 21 nt, Artificial Sequence
  LRRK2 RNA guide
aucuuccagaaacccauaugc

SEQ ID NO: 49651 - RNA, 21 nt, Artificial Sequence
  LRRK2 RNA guide
auggguuucuggaagaucugc

SEQ ID NO: 49652 - RNA, 21 nt, Artificial Sequence
  LRRK2 RNA guide
cagaaacccauaugcagauua

SEQ ID NO: 49653 - RNA, 21 nt, Artificial Sequence
  LRRK2 RNA guide
cagaucuuccagaaacccaua

SEQ ID NO: 49654 - RNA, 21 nt, Artificial Sequence
  LRRK2 RNA guide
caguaaucugcauauggguuu

SEQ ID NO: 49655 - RNA, 21 nt, Artificial Sequence
  LRRK2 RNA guide
cauauggguuucuggaagauc

SEQ ID NO: 49656 - RNA, 21 nt, Artificial Sequence
  LRRK2 RNA guide
ccagaaacccauaugcagauu

SEQ ID NO: 49657 - RNA, 21 nt, Artificial Sequence
  LRRK2 RNA guide
ccaguaaucugcauauggguu

SEQ ID NO: 49658 - RNA, 21 nt, Artificial Sequence
  LRRK2 RNA guide
ccauaugcagauuacuggagc

SEQ ID NO: 49659 - RNA, 21 nt, Artificial Sequence
  LRRK2 RNA guide
cccauaugcagauuacuggag

SEQ ID NO: 49660 - RNA, 21 nt, Artificial Sequence
  LRRK2 RNA guide
cgcagaucuuccagaaaccca

SEQ ID NO: 49661 - RNA, 21 nt, Artificial Sequence
  LRRK2 RNA guide
cuagcgcagaucuuccagaaa

SEQ ID NO: 49662 - RNA, 21 nt, Artificial Sequence
  LRRK2 RNA guide
cuccaguaaucugcauauggg

SEQ ID NO: 49663 - RNA, 21 nt, Artificial Sequence
  LRRK2 RNA guide
cugcauauggguuucuggaag

SEQ ID NO: 49664 - RNA, 21 nt, Artificial Sequence
  LRRK2 RNA guide
cuuccagaaacccauaugcag

SEQ ID NO: 49665 - RNA, 21 nt, Artificial Sequence
  LRRK2 RNA guide
gaaacccauaugcagauuacu

SEQ ID NO: 49666 - RNA, 21 nt, Artificial Sequence
  LRRK2 RNA guide
gaucuuccagaaacccauaug

SEQ ID NO: 49667 - RNA, 21 nt, Artificial Sequence
  LRRK2 RNA guide
gcagaucuuccagaaacccau

SEQ ID NO: 49668 - RNA, 21 nt, Artificial Sequence
  LRRK2 RNA guide
gcauauggguuucuggaagau

SEQ ID NO: 49669 - RNA, 21 nt, Artificial Sequence
  LRRK2 RNA guide
gcgcagaucuuccagaaaccc

SEQ ID NO: 49670 - RNA, 21 nt, Artificial Sequence
  LRRK2 RNA guide
gcuccaguaaucugcauaugg

SEQ ID NO: 49671 - RNA, 21 nt, Artificial Sequence
  LRRK2 RNA guide
guaaucugcauauggguuucu

SEQ ID NO: 49672 - RNA, 21 nt, Artificial Sequence
  LRRK2 RNA guide
gugcuccaguaaucugcauau

SEQ ID NO: 49673 - RNA, 21 nt, Artificial Sequence
  LRRK2 RNA guide
uaaucugcauauggguuucug

SEQ ID NO: 49674 - RNA, 21 nt, Artificial Sequence
  LRRK2 RNA guide
uagcgcagaucuuccagaaac

SEQ ID NO: 49675 - RNA, 21 nt, Artificial Sequence
  LRRK2 RNA guide
uauggguuucuggaagaucug

SEQ ID NO: 49676 - RNA, 21 nt, Artificial Sequence
  LRRK2 RNA guide
uccagaaacccauaugcagau

SEQ ID NO: 49677 - RNA, 21 nt, Artificial Sequence
  LRRK2 RNA guide
uccaguaaucugcauaugggu

SEQ ID NO: 49678 - RNA, 21 nt, Artificial Sequence
  LRRK2 RNA guide
ucuagcgcagaucuuccagaa

SEQ ID NO: 49679 - RNA, 21 nt, Artificial Sequence
  LRRK2 RNA guide
ucugcauauggguuucuggaa

SEQ ID NO: 49680 - RNA, 21 nt, Artificial Sequence
  LRRK2 RNA guide
ucuuccagaaacccauaugca

SEQ ID NO: 49681 - RNA, 21 nt, Artificial Sequence
  LRRK2 RNA guide
ugcauauggguuucuggaaga

SEQ ID NO: 49682 - RNA, 21 nt, Artificial Sequence
  LRRK2 RNA guide
ugcuccaguaaucugcauaug

SEQ ID NO: 49683 - RNA, 21 nt, Artificial Sequence
  LRRK2 RNA guide
uggguuucuggaagaucugcg

SEQ ID NO: 49684 - RNA, 21 nt, Artificial Sequence
  LRRK2 RNA guide
uuccagaaacccauaugcaga

SEQ ID NO: 49685 - RNA, 21 nt, Artificial Sequence
  LRRK2 RNA guide
uucuagcgcagaucuuccaga

SEQ ID NO: 49686 - RNA, 22 nt, Artificial Sequence
  LRRK2 RNA guide
aaaaagugcuccaguaaucugc

SEQ ID NO: 49687 - RNA, 22 nt, Artificial Sequence
  LRRK2 RNA guide
aaaagugcuccaguaaucugca

SEQ ID NO: 49688 - RNA, 22 nt, Artificial Sequence
  LRRK2 RNA guide
aaacccauaugcagauuacugg

SEQ ID NO: 49689 - RNA, 22 nt, Artificial Sequence
  LRRK2 RNA guide
aaagugcuccaguaaucugcau

SEQ ID NO: 49690 - RNA, 22 nt, Artificial Sequence
  LRRK2 RNA guide
aacccauaugcagauuacugga

SEQ ID NO: 49691 - RNA, 22 nt, Artificial Sequence
  LRRK2 RNA guide
aagugcuccaguaaucugcaua

SEQ ID NO: 49692 - RNA, 22 nt, Artificial Sequence
  LRRK2 RNA guide
aaucugcauauggguuucugga

SEQ ID NO: 49693 - RNA, 22 nt, Artificial Sequence
  LRRK2 RNA guide
acccauaugcagauuacuggag

SEQ ID NO: 49694 - RNA, 22 nt, Artificial Sequence
  LRRK2 RNA guide
agaaacccauaugcagauuacu

SEQ ID NO: 49695 - RNA, 22 nt, Artificial Sequence
  LRRK2 RNA guide
agaucuuccagaaacccauaug

SEQ ID NO: 49696 - RNA, 22 nt, Artificial Sequence
  LRRK2 RNA guide
agcgcagaucuuccagaaaccc

SEQ ID NO: 49697 - RNA, 22 nt, Artificial Sequence
  LRRK2 RNA guide
aguaaucugcauauggguuucu

SEQ ID NO: 49698 - RNA, 22 nt, Artificial Sequence
  LRRK2 RNA guide
agugcuccaguaaucugcauau

SEQ ID NO: 49699 - RNA, 22 nt, Artificial Sequence
  LRRK2 RNA guide
auauggguuucuggaagaucug

SEQ ID NO: 49700 - RNA, 22 nt, Artificial Sequence
  LRRK2 RNA guide
aucugcauauggguuucuggaa

SEQ ID NO: 49701 - RNA, 22 nt, Artificial Sequence
  LRRK2 RNA guide
aucuuccagaaacccauaugca

SEQ ID NO: 49702 - RNA, 22 nt, Artificial Sequence
  LRRK2 RNA guide
auggguuucuggaagaucugcg

SEQ ID NO: 49703 - RNA, 22 nt, Artificial Sequence
  LRRK2 RNA guide
cagaaacccauaugcagauuac

SEQ ID NO: 49704 - RNA, 22 nt, Artificial Sequence
  LRRK2 RNA guide
cagaucuuccagaaacccauau

SEQ ID NO: 49705 - RNA, 22 nt, Artificial Sequence
  LRRK2 RNA guide
caguaaucugcauauggguuuc

SEQ ID NO: 49706 - RNA, 22 nt, Artificial Sequence
  LRRK2 RNA guide
cauauggguuucuggaagaucu

SEQ ID NO: 49707 - RNA, 22 nt, Artificial Sequence
  LRRK2 RNA guide
ccagaaacccauaugcagauua

SEQ ID NO: 49708 - RNA, 22 nt, Artificial Sequence
  LRRK2 RNA guide
ccaguaaucugcauauggguuu

SEQ ID NO: 49709 - RNA, 22 nt, Artificial Sequence
  LRRK2 RNA guide
ccauaugcagauuacuggagca

SEQ ID NO: 49710 - RNA, 22 nt, Artificial Sequence
  LRRK2 RNA guide
cccauaugcagauuacuggagc

SEQ ID NO: 49711 - RNA, 22 nt, Artificial Sequence
  LRRK2 RNA guide
cgcagaucuuccagaaacccau

SEQ ID NO: 49712 - RNA, 22 nt, Artificial Sequence
  LRRK2 RNA guide
cuagcgcagaucuuccagaaac

SEQ ID NO: 49713 - RNA, 22 nt, Artificial Sequence
  LRRK2 RNA guide
cuccaguaaucugcauaugggu

SEQ ID NO: 49714 - RNA, 22 nt, Artificial Sequence
  LRRK2 RNA guide
cugcauauggguuucuggaaga

SEQ ID NO: 49715 - RNA, 22 nt, Artificial Sequence
  LRRK2 RNA guide
cuuccagaaacccauaugcaga

SEQ ID NO: 49716 - RNA, 22 nt, Artificial Sequence
  LRRK2 RNA guide
gaaacccauaugcagauuacug

SEQ ID NO: 49717 - RNA, 22 nt, Artificial Sequence
  LRRK2 RNA guide
gaucuuccagaaacccauaugc

SEQ ID NO: 49718 - RNA, 22 nt, Artificial Sequence
  LRRK2 RNA guide
gcagaucuuccagaaacccaua

SEQ ID NO: 49719 - RNA, 22 nt, Artificial Sequence
  LRRK2 RNA guide
gcauauggguuucuggaagauc

SEQ ID NO: 49720 - RNA, 22 nt, Artificial Sequence
  LRRK2 RNA guide
gcgcagaucuuccagaaaccca

SEQ ID NO: 49721 - RNA, 22 nt, Artificial Sequence
  LRRK2 RNA guide
gcuccaguaaucugcauauggg

SEQ ID NO: 49722 - RNA, 22 nt, Artificial Sequence
  LRRK2 RNA guide
guaaucugcauauggguuucug

SEQ ID NO: 49723 - RNA, 22 nt, Artificial Sequence
  LRRK2 RNA guide
gugcuccaguaaucugcauaug

SEQ ID NO: 49724 - RNA, 22 nt, Artificial Sequence
  LRRK2 RNA guide
uaaucugcauauggguuucugg

SEQ ID NO: 49725 - RNA, 22 nt, Artificial Sequence
  LRRK2 RNA guide
uagcgcagaucuuccagaaacc

SEQ ID NO: 49726 - RNA, 22 nt, Artificial Sequence
  LRRK2 RNA guide
uauggguuucuggaagaucugc

SEQ ID NO: 49727 - RNA, 22 nt, Artificial Sequence
  LRRK2 RNA guide
uccagaaacccauaugcagauu

SEQ ID NO: 49728 - RNA, 22 nt, Artificial Sequence
  LRRK2 RNA guide
uccaguaaucugcauauggguu

SEQ ID NO: 49729 - RNA, 22 nt, Artificial Sequence
  LRRK2 RNA guide
ucuagcgcagaucuuccagaaa

SEQ ID NO: 49730 - RNA, 22 nt, Artificial Sequence
  LRRK2 RNA guide
ucugcauauggguuucuggaag

SEQ ID NO: 49731 - RNA, 22 nt, Artificial Sequence
  LRRK2 RNA guide
ucuuccagaaacccauaugcag

SEQ ID NO: 49732 - RNA, 22 nt, Artificial Sequence
  LRRK2 RNA guide
ugcauauggguuucuggaagau

SEQ ID NO: 49733 - RNA, 22 nt, Artificial Sequence
  LRRK2 RNA guide
ugcuccaguaaucugcauaugg

SEQ ID NO: 49734 - RNA, 22 nt, Artificial Sequence
  LRRK2 RNA guide
uggguuucuggaagaucugcgc

SEQ ID NO: 49735 - RNA, 22 nt, Artificial Sequence
  LRRK2 RNA guide
uuccagaaacccauaugcagau

SEQ ID NO: 49736 - RNA, 22 nt, Artificial Sequence
  LRRK2 RNA guide
uucuagcgcagaucuuccagaa

SEQ ID NO: 49737 - RNA, 22 nt, Artificial Sequence
  LRRK2 RNA guide
uuucuagcgcagaucuuccaga

SEQ ID NO: 49738 - RNA, 20 nt, Artificial Sequence
  LRRK2 RNA guide
aaaccuauaugcagauuacu

SEQ ID NO: 49739 - RNA, 20 nt, Artificial Sequence
  LRRK2 RNA guide
aaccuauaugcagauuacug

SEQ ID NO: 49740 - RNA, 20 nt, Artificial Sequence
  LRRK2 RNA guide
aaucugcauauagguuucug

SEQ ID NO: 49741 - RNA, 20 nt, Artificial Sequence
  LRRK2 RNA guide
accuauaugcagauuacugg

SEQ ID NO: 49742 - RNA, 20 nt, Artificial Sequence
  LRRK2 RNA guide
agaaaccuauaugcagauua

SEQ ID NO: 49743 - RNA, 20 nt, Artificial Sequence
  LRRK2 RNA guide
agaucuuccagaaaccuaua

SEQ ID NO: 49744 - RNA, 20 nt, Artificial Sequence
  LRRK2 RNA guide
aguaaucugcauauagguuu

SEQ ID NO: 49745 - RNA, 20 nt, Artificial Sequence
  LRRK2 RNA guide
auagguuucuggaagaucug

SEQ ID NO: 49746 - RNA, 20 nt, Artificial Sequence
  LRRK2 RNA guide
auauagguuucuggaagauc

SEQ ID NO: 49747 - RNA, 20 nt, Artificial Sequence
  LRRK2 RNA guide
aucugcauauagguuucugg

SEQ ID NO: 49748 - RNA, 20 nt, Artificial Sequence
  LRRK2 RNA guide
aucuuccagaaaccuauaug

SEQ ID NO: 49749 - RNA, 20 nt, Artificial Sequence
  LRRK2 RNA guide
cagaaaccuauaugcagauu

SEQ ID NO: 49750 - RNA, 20 nt, Artificial Sequence
  LRRK2 RNA guide
cagaucuuccagaaaccuau

SEQ ID NO: 49751 - RNA, 20 nt, Artificial Sequence
  LRRK2 RNA guide
caguaaucugcauauagguu

SEQ ID NO: 49752 - RNA, 20 nt, Artificial Sequence
  LRRK2 RNA guide
cauauagguuucuggaagau

SEQ ID NO: 49753 - RNA, 20 nt, Artificial Sequence
  LRRK2 RNA guide
ccagaaaccuauaugcagau

SEQ ID NO: 49754 - RNA, 20 nt, Artificial Sequence
  LRRK2 RNA guide
ccaguaaucugcauauaggu

SEQ ID NO: 49755 - RNA, 20 nt, Artificial Sequence
  LRRK2 RNA guide
ccuauaugcagauuacugga

SEQ ID NO: 49756 - RNA, 20 nt, Artificial Sequence
  LRRK2 RNA guide
cgcagaucuuccagaaaccu

SEQ ID NO: 49757 - RNA, 20 nt, Artificial Sequence
  LRRK2 RNA guide
cuauaugcagauuacuggag

SEQ ID NO: 49758 - RNA, 20 nt, Artificial Sequence
  LRRK2 RNA guide
cuccaguaaucugcauauag

SEQ ID NO: 49759 - RNA, 20 nt, Artificial Sequence
  LRRK2 RNA guide
cugcauauagguuucuggaa

SEQ ID NO: 49760 - RNA, 20 nt, Artificial Sequence
  LRRK2 RNA guide
cuuccagaaaccuauaugca

SEQ ID NO: 49761 - RNA, 20 nt, Artificial Sequence
  LRRK2 RNA guide
gaaaccuauaugcagauuac

SEQ ID NO: 49762 - RNA, 20 nt, Artificial Sequence
  LRRK2 RNA guide
gaucuuccagaaaccuauau

SEQ ID NO: 49763 - RNA, 20 nt, Artificial Sequence
  LRRK2 RNA guide
gcagaucuuccagaaaccua

SEQ ID NO: 49764 - RNA, 20 nt, Artificial Sequence
  LRRK2 RNA guide
gcauauagguuucuggaaga

SEQ ID NO: 49765 - RNA, 20 nt, Artificial Sequence
  LRRK2 RNA guide
gcuccaguaaucugcauaua

SEQ ID NO: 49766 - RNA, 20 nt, Artificial Sequence
  LRRK2 RNA guide
guaaucugcauauagguuuc

SEQ ID NO: 49767 - RNA, 20 nt, Artificial Sequence
  LRRK2 RNA guide
uaaucugcauauagguuucu

SEQ ID NO: 49768 - RNA, 20 nt, Artificial Sequence
  LRRK2 RNA guide
uagguuucuggaagaucugc

SEQ ID NO: 49769 - RNA, 20 nt, Artificial Sequence
  LRRK2 RNA guide
uauagguuucuggaagaucu

SEQ ID NO: 49770 - RNA, 20 nt, Artificial Sequence
  LRRK2 RNA guide
uccagaaaccuauaugcaga

SEQ ID NO: 49771 - RNA, 20 nt, Artificial Sequence
  LRRK2 RNA guide
uccaguaaucugcauauagg

SEQ ID NO: 49772 - RNA, 20 nt, Artificial Sequence
  LRRK2 RNA guide
ucugcauauagguuucugga

SEQ ID NO: 49773 - RNA, 20 nt, Artificial Sequence
  LRRK2 RNA guide
ucuuccagaaaccuauaugc

SEQ ID NO: 49774 - RNA, 20 nt, Artificial Sequence
  LRRK2 RNA guide
ugcauauagguuucuggaag

SEQ ID NO: 49775 - RNA, 20 nt, Artificial Sequence
  LRRK2 RNA guide
uuccagaaaccuauaugcag

SEQ ID NO: 49776 - RNA, 21 nt, Artificial Sequence
  LRRK2 RNA guide
aaaccuauaugcagauuacug

SEQ ID NO: 49777 - RNA, 21 nt, Artificial Sequence
  LRRK2 RNA guide
aaccuauaugcagauuacugg

SEQ ID NO: 49778 - RNA, 21 nt, Artificial Sequence
  LRRK2 RNA guide
aaucugcauauagguuucugg

SEQ ID NO: 49779 - RNA, 21 nt, Artificial Sequence
  LRRK2 RNA guide
accuauaugcagauuacugga

SEQ ID NO: 49780 - RNA, 21 nt, Artificial Sequence
  LRRK2 RNA guide
agaaaccuauaugcagauuac

SEQ ID NO: 49781 - RNA, 21 nt, Artificial Sequence
  LRRK2 RNA guide
agaucuuccagaaaccuauau

SEQ ID NO: 49782 - RNA, 21 nt, Artificial Sequence
  LRRK2 RNA guide
aguaaucugcauauagguuuc

SEQ ID NO: 49783 - RNA, 21 nt, Artificial Sequence
  LRRK2 RNA guide
auagguuucuggaagaucugc

SEQ ID NO: 49784 - RNA, 21 nt, Artificial Sequence
  LRRK2 RNA guide
auauagguuucuggaagaucu

SEQ ID NO: 49785 - RNA, 21 nt, Artificial Sequence
  LRRK2 RNA guide
aucugcauauagguuucugga

SEQ ID NO: 49786 - RNA, 21 nt, Artificial Sequence
  LRRK2 RNA guide
aucuuccagaaaccuauaugc

SEQ ID NO: 49787 - RNA, 21 nt, Artificial Sequence
  LRRK2 RNA guide
cagaaaccuauaugcagauua

SEQ ID NO: 49788 - RNA, 21 nt, Artificial Sequence
  LRRK2 RNA guide
cagaucuuccagaaaccuaua

SEQ ID NO: 49789 - RNA, 21 nt, Artificial Sequence
  LRRK2 RNA guide
caguaaucugcauauagguuu

SEQ ID NO: 49790 - RNA, 21 nt, Artificial Sequence
  LRRK2 RNA guide
cauauagguuucuggaagauc

SEQ ID NO: 49791 - RNA, 21 nt, Artificial Sequence
  LRRK2 RNA guide
ccagaaaccuauaugcagauu

SEQ ID NO: 49792 - RNA, 21 nt, Artificial Sequence
  LRRK2 RNA guide
ccaguaaucugcauauagguu

SEQ ID NO: 49793 - RNA, 21 nt, Artificial Sequence
  LRRK2 RNA guide
ccuauaugcagauuacuggag

SEQ ID NO: 49794 - RNA, 21 nt, Artificial Sequence
  LRRK2 RNA guide
cgcagaucuuccagaaaccua

SEQ ID NO: 49795 - RNA, 21 nt, Artificial Sequence
  LRRK2 RNA guide
cuauaugcagauuacuggagc

SEQ ID NO: 49796 - RNA, 21 nt, Artificial Sequence
  LRRK2 RNA guide
cuccaguaaucugcauauagg

SEQ ID NO: 49797 - RNA, 21 nt, Artificial Sequence
  LRRK2 RNA guide
cugcauauagguuucuggaag

SEQ ID NO: 49798 - RNA, 21 nt, Artificial Sequence
  LRRK2 RNA guide
cuuccagaaaccuauaugcag

SEQ ID NO: 49799 - RNA, 21 nt, Artificial Sequence
  LRRK2 RNA guide
gaaaccuauaugcagauuacu

SEQ ID NO: 49800 - RNA, 21 nt, Artificial Sequence
  LRRK2 RNA guide
gaucuuccagaaaccuauaug

SEQ ID NO: 49801 - RNA, 21 nt, Artificial Sequence
  LRRK2 RNA guide
gcagaucuuccagaaaccuau

SEQ ID NO: 49802 - RNA, 21 nt, Artificial Sequence
  LRRK2 RNA guide
gcauauagguuucuggaagau

SEQ ID NO: 49803 - RNA, 21 nt, Artificial Sequence
  LRRK2 RNA guide
gcgcagaucuuccagaaaccu

SEQ ID NO: 49804 - RNA, 21 nt, Artificial Sequence
  LRRK2 RNA guide
gcuccaguaaucugcauauag

SEQ ID NO: 49805 - RNA, 21 nt, Artificial Sequence
  LRRK2 RNA guide
guaaucugcauauagguuucu

SEQ ID NO: 49806 - RNA, 21 nt, Artificial Sequence
  LRRK2 RNA guide
uaaucugcauauagguuucug

SEQ ID NO: 49807 - RNA, 21 nt, Artificial Sequence
  LRRK2 RNA guide
uagguuucuggaagaucugcg

SEQ ID NO: 49808 - RNA, 21 nt, Artificial Sequence
  LRRK2 RNA guide
uauagguuucuggaagaucug

SEQ ID NO: 49809 - RNA, 21 nt, Artificial Sequence
  LRRK2 RNA guide
uccagaaaccuauaugcagau

SEQ ID NO: 49810 - RNA, 21 nt, Artificial Sequence
  LRRK2 RNA guide
uccaguaaucugcauauaggu

SEQ ID NO: 49811 - RNA, 21 nt, Artificial Sequence
  LRRK2 RNA guide
ucugcauauagguuucuggaa

SEQ ID NO: 49812 - RNA, 21 nt, Artificial Sequence
  LRRK2 RNA guide
ucuuccagaaaccuauaugca

SEQ ID NO: 49813 - RNA, 21 nt, Artificial Sequence
  LRRK2 RNA guide
ugcauauagguuucuggaaga

SEQ ID NO: 49814 - RNA, 21 nt, Artificial Sequence
  LRRK2 RNA guide
ugcuccaguaaucugcauaua

SEQ ID NO: 49815 - RNA, 21 nt, Artificial Sequence
  LRRK2 RNA guide
uuccagaaaccuauaugcaga

SEQ ID NO: 49816 - RNA, 22 nt, Artificial Sequence
  LRRK2 RNA guide
aaaccuauaugcagauuacugg

SEQ ID NO: 49817 - RNA, 22 nt, Artificial Sequence
  LRRK2 RNA guide
aaccuauaugcagauuacugga

SEQ ID NO: 49818 - RNA, 22 nt, Artificial Sequence
  LRRK2 RNA guide
aaucugcauauagguuucugga

SEQ ID NO: 49819 - RNA, 22 nt, Artificial Sequence
  LRRK2 RNA guide
accuauaugcagauuacuggag

SEQ ID NO: 49820 - RNA, 22 nt, Artificial Sequence
  LRRK2 RNA guide
agaaaccuauaugcagauuacu

SEQ ID NO: 49821 - RNA, 22 nt, Artificial Sequence
  LRRK2 RNA guide
agaucuuccagaaaccuauaug

SEQ ID NO: 49822 - RNA, 22 nt, Artificial Sequence
  LRRK2 RNA guide
agcgcagaucuuccagaaaccu

SEQ ID NO: 49823 - RNA, 22 nt, Artificial Sequence
  LRRK2 RNA guide
aguaaucugcauauagguuucu

SEQ ID NO: 49824 - RNA, 22 nt, Artificial Sequence
  LRRK2 RNA guide
auagguuucuggaagaucugcg

SEQ ID NO: 49825 - RNA, 22 nt, Artificial Sequence
  LRRK2 RNA guide
auauagguuucuggaagaucug

SEQ ID NO: 49826 - RNA, 22 nt, Artificial Sequence
  LRRK2 RNA guide
aucugcauauagguuucuggaa

SEQ ID NO: 49827 - RNA, 22 nt, Artificial Sequence
  LRRK2 RNA guide
aucuuccagaaaccuauaugca

SEQ ID NO: 49828 - RNA, 22 nt, Artificial Sequence
  LRRK2 RNA guide
cagaaaccuauaugcagauuac

SEQ ID NO: 49829 - RNA, 22 nt, Artificial Sequence
  LRRK2 RNA guide
cagaucuuccagaaaccuauau

SEQ ID NO: 49830 - RNA, 22 nt, Artificial Sequence
  LRRK2 RNA guide
caguaaucugcauauagguuuc

SEQ ID NO: 49831 - RNA, 22 nt, Artificial Sequence
  LRRK2 RNA guide
cauauagguuucuggaagaucu

SEQ ID NO: 49832 - RNA, 22 nt, Artificial Sequence
  LRRK2 RNA guide
ccagaaaccuauaugcagauua

SEQ ID NO: 49833 - RNA, 22 nt, Artificial Sequence
  LRRK2 RNA guide
ccaguaaucugcauauagguuu

SEQ ID NO: 49834 - RNA, 22 nt, Artificial Sequence
  LRRK2 RNA guide
ccuauaugcagauuacuggagc

SEQ ID NO: 49835 - RNA, 22 nt, Artificial Sequence
  LRRK2 RNA guide
cgcagaucuuccagaaaccuau

SEQ ID NO: 49836 - RNA, 22 nt, Artificial Sequence
  LRRK2 RNA guide
cuauaugcagauuacuggagca

SEQ ID NO: 49837 - RNA, 22 nt, Artificial Sequence
  LRRK2 RNA guide
cuccaguaaucugcauauaggu

SEQ ID NO: 49838 - RNA, 22 nt, Artificial Sequence
  LRRK2 RNA guide
cugcauauagguuucuggaaga

SEQ ID NO: 49839 - RNA, 22 nt, Artificial Sequence
  LRRK2 RNA guide
cuuccagaaaccuauaugcaga

SEQ ID NO: 49840 - RNA, 22 nt, Artificial Sequence
  LRRK2 RNA guide
gaaaccuauaugcagauuacug

SEQ ID NO: 49841 - RNA, 22 nt, Artificial Sequence
  LRRK2 RNA guide
gaucuuccagaaaccuauaugc

SEQ ID NO: 49842 - RNA, 22 nt, Artificial Sequence
  LRRK2 RNA guide
gcagaucuuccagaaaccuaua

SEQ ID NO: 49843 - RNA, 22 nt, Artificial Sequence
  LRRK2 RNA guide
gcauauagguuucuggaagauc

SEQ ID NO: 49844 - RNA, 22 nt, Artificial Sequence
  LRRK2 RNA guide
gcgcagaucuuccagaaaccua

SEQ ID NO: 49845 - RNA, 22 nt, Artificial Sequence
  LRRK2 RNA guide
gcuccaguaaucugcauauagg

SEQ ID NO: 49846 - RNA, 22 nt, Artificial Sequence
  LRRK2 RNA guide
guaaucugcauauagguuucug

SEQ ID NO: 49847 - RNA, 22 nt, Artificial Sequence
  LRRK2 RNA guide
gugcuccaguaaucugcauaua

SEQ ID NO: 49848 - RNA, 22 nt, Artificial Sequence
  LRRK2 RNA guide
uaaucugcauauagguuucugg

SEQ ID NO: 49849 - RNA, 22 nt, Artificial Sequence
  LRRK2 RNA guide
uagguuucuggaagaucugcgc

SEQ ID NO: 49850 - RNA, 22 nt, Artificial Sequence
  LRRK2 RNA guide
uauagguuucuggaagaucugc

SEQ ID NO: 49851 - RNA, 22 nt, Artificial Sequence
  LRRK2 RNA guide
uccagaaaccuauaugcagauu

SEQ ID NO: 49852 - RNA, 22 nt, Artificial Sequence
  LRRK2 RNA guide
uccaguaaucugcauauagguu

SEQ ID NO: 49853 - RNA, 22 nt, Artificial Sequence
  LRRK2 RNA guide
ucugcauauagguuucuggaag

SEQ ID NO: 49854 - RNA, 22 nt, Artificial Sequence
  LRRK2 RNA guide
ucuuccagaaaccuauaugcag

SEQ ID NO: 49855 - RNA, 22 nt, Artificial Sequence
  LRRK2 RNA guide
ugcauauagguuucuggaagau

SEQ ID NO: 49856 - RNA, 22 nt, Artificial Sequence
  LRRK2 RNA guide
ugcuccaguaaucugcauauag

SEQ ID NO: 49857 - RNA, 22 nt, Artificial Sequence
  LRRK2 RNA guide
uuccagaaaccuauaugcagau

SEQ ID NO: 49858 - RNA, 20 nt, Artificial Sequence
  LRRK2 RNA guide
aaacaaauuaugugagcccu

SEQ ID NO: 49859 - RNA, 20 nt, Artificial Sequence
  LRRK2 RNA guide
aacaaauuaugugagcccua

SEQ ID NO: 49860 - RNA, 20 nt, Artificial Sequence
  LRRK2 RNA guide
aagaagggaaacaaauuaug

SEQ ID NO: 49861 - RNA, 20 nt, Artificial Sequence
  LRRK2 RNA guide
aagggaaacaaauuauguga

SEQ ID NO: 49862 - RNA, 20 nt, Artificial Sequence
  LRRK2 RNA guide
aauacccgaaagaagggaaa

SEQ ID NO: 49863 - RNA, 20 nt, Artificial Sequence
  LRRK2 RNA guide
aauuuguuucccuucuuucg

SEQ ID NO: 49864 - RNA, 20 nt, Artificial Sequence
  LRRK2 RNA guide
acaaauuaugugagcccuau

SEQ ID NO: 49865 - RNA, 20 nt, Artificial Sequence
  LRRK2 RNA guide
acauaauuuguuucccuucu

SEQ ID NO: 49866 - RNA, 20 nt, Artificial Sequence
  LRRK2 RNA guide
acccgaaagaagggaaacaa

SEQ ID NO: 49867 - RNA, 20 nt, Artificial Sequence
  LRRK2 RNA guide
agaagggaaacaaauuaugu

SEQ ID NO: 49868 - RNA, 20 nt, Artificial Sequence
  LRRK2 RNA guide
agggaaacaaauuaugugag

SEQ ID NO: 49869 - RNA, 20 nt, Artificial Sequence
  LRRK2 RNA guide
agggcucacauaauuuguuu

SEQ ID NO: 49870 - RNA, 20 nt, Artificial Sequence
  LRRK2 RNA guide
auacccgaaagaagggaaac

SEQ ID NO: 49871 - RNA, 20 nt, Artificial Sequence
  LRRK2 RNA guide
auagggcucacauaauuugu

SEQ ID NO: 49872 - RNA, 20 nt, Artificial Sequence
  LRRK2 RNA guide
aucauagggcucacauaauu

SEQ ID NO: 49873 - RNA, 20 nt, Artificial Sequence
  LRRK2 RNA guide
auguaauacccgaaagaagg

SEQ ID NO: 49874 - RNA, 20 nt, Artificial Sequence
  LRRK2 RNA guide
auuuguuucccuucuuucgg

SEQ ID NO: 49875 - RNA, 20 nt, Artificial Sequence
  LRRK2 RNA guide
cacauaauuuguuucccuuc

SEQ ID NO: 49876 - RNA, 20 nt, Artificial Sequence
  LRRK2 RNA guide
cauaauuuguuucccuucuu

SEQ ID NO: 49877 - RNA, 20 nt, Artificial Sequence
  LRRK2 RNA guide
cauagggcucacauaauuug

SEQ ID NO: 49878 - RNA, 20 nt, Artificial Sequence
  LRRK2 RNA guide
cccgaaagaagggaaacaaa

SEQ ID NO: 49879 - RNA, 20 nt, Artificial Sequence
  LRRK2 RNA guide
ccgaaagaagggaaacaaau

SEQ ID NO: 49880 - RNA, 20 nt, Artificial Sequence
  LRRK2 RNA guide
cgaaagaagggaaacaaauu

SEQ ID NO: 49881 - RNA, 20 nt, Artificial Sequence
  LRRK2 RNA guide
cucacauaauuuguuucccu

SEQ ID NO: 49882 - RNA, 20 nt, Artificial Sequence
  LRRK2 RNA guide
gaaacaaauuaugugagccc

SEQ ID NO: 49883 - RNA, 20 nt, Artificial Sequence
  LRRK2 RNA guide
gaaagaagggaaacaaauua

SEQ ID NO: 49884 - RNA, 20 nt, Artificial Sequence
  LRRK2 RNA guide
gaagggaaacaaauuaugug

SEQ ID NO: 49885 - RNA, 20 nt, Artificial Sequence
  LRRK2 RNA guide
gaucauagggcucacauaau

SEQ ID NO: 49886 - RNA, 20 nt, Artificial Sequence
  LRRK2 RNA guide
gcucacauaauuuguuuccc

SEQ ID NO: 49887 - RNA, 20 nt, Artificial Sequence
  LRRK2 RNA guide
ggaaacaaauuaugugagcc

SEQ ID NO: 49888 - RNA, 20 nt, Artificial Sequence
  LRRK2 RNA guide
ggcucacauaauuuguuucc

SEQ ID NO: 49889 - RNA, 20 nt, Artificial Sequence
  LRRK2 RNA guide
gggaaacaaauuaugugagc

SEQ ID NO: 49890 - RNA, 20 nt, Artificial Sequence
  LRRK2 RNA guide
gggcucacauaauuuguuuc

SEQ ID NO: 49891 - RNA, 20 nt, Artificial Sequence
  LRRK2 RNA guide
gugaucauagggcucacaua

SEQ ID NO: 49892 - RNA, 20 nt, Artificial Sequence
  LRRK2 RNA guide
uaauacccgaaagaagggaa

SEQ ID NO: 49893 - RNA, 20 nt, Artificial Sequence
  LRRK2 RNA guide
uaauuuguuucccuucuuuc

SEQ ID NO: 49894 - RNA, 20 nt, Artificial Sequence
  LRRK2 RNA guide
uacccgaaagaagggaaaca

SEQ ID NO: 49895 - RNA, 20 nt, Artificial Sequence
  LRRK2 RNA guide
uagggcucacauaauuuguu

SEQ ID NO: 49896 - RNA, 20 nt, Artificial Sequence
  LRRK2 RNA guide
ucacauaauuuguuucccuu

SEQ ID NO: 49897 - RNA, 20 nt, Artificial Sequence
  LRRK2 RNA guide
ucauagggcucacauaauuu

SEQ ID NO: 49898 - RNA, 20 nt, Artificial Sequence
  LRRK2 RNA guide
ugaucauagggcucacauaa

SEQ ID NO: 49899 - RNA, 20 nt, Artificial Sequence
  LRRK2 RNA guide
uguaauacccgaaagaaggg

SEQ ID NO: 49900 - RNA, 20 nt, Artificial Sequence
  LRRK2 RNA guide
uguuucccuucuuucgggua

SEQ ID NO: 49901 - RNA, 20 nt, Artificial Sequence
  LRRK2 RNA guide
uuguuucccuucuuucgggu

SEQ ID NO: 49902 - RNA, 20 nt, Artificial Sequence
  LRRK2 RNA guide
uuuguuucccuucuuucggg

SEQ ID NO: 49903 - RNA, 21 nt, Artificial Sequence
  LRRK2 RNA guide
aaacaaauuaugugagcccua

SEQ ID NO: 49904 - RNA, 21 nt, Artificial Sequence
  LRRK2 RNA guide
aacaaauuaugugagcccuau

SEQ ID NO: 49905 - RNA, 21 nt, Artificial Sequence
  LRRK2 RNA guide
aagggaaacaaauuaugugag

SEQ ID NO: 49906 - RNA, 21 nt, Artificial Sequence
  LRRK2 RNA guide
aauacccgaaagaagggaaac

SEQ ID NO: 49907 - RNA, 21 nt, Artificial Sequence
  LRRK2 RNA guide
aauuuguuucccuucuuucgg

SEQ ID NO: 49908 - RNA, 21 nt, Artificial Sequence
  LRRK2 RNA guide
acaaauuaugugagcccuaug

SEQ ID NO: 49909 - RNA, 21 nt, Artificial Sequence
  LRRK2 RNA guide
acccgaaagaagggaaacaaa

SEQ ID NO: 49910 - RNA, 21 nt, Artificial Sequence
  LRRK2 RNA guide
agaagggaaacaaauuaugug

SEQ ID NO: 49911 - RNA, 21 nt, Artificial Sequence
  LRRK2 RNA guide
agggaaacaaauuaugugagc

SEQ ID NO: 49912 - RNA, 21 nt, Artificial Sequence
  LRRK2 RNA guide
agggcucacauaauuuguuuc

SEQ ID NO: 49913 - RNA, 21 nt, Artificial Sequence
  LRRK2 RNA guide
agugaucauagggcucacaua

SEQ ID NO: 49914 - RNA, 21 nt, Artificial Sequence
  LRRK2 RNA guide
auacccgaaagaagggaaaca

SEQ ID NO: 49915 - RNA, 21 nt, Artificial Sequence
  LRRK2 RNA guide
auagggcucacauaauuuguu

SEQ ID NO: 49916 - RNA, 21 nt, Artificial Sequence
  LRRK2 RNA guide
aucauagggcucacauaauuu

SEQ ID NO: 49917 - RNA, 21 nt, Artificial Sequence
  LRRK2 RNA guide
auguaauacccgaaagaaggg

SEQ ID NO: 49918 - RNA, 21 nt, Artificial Sequence
  LRRK2 RNA guide
auuuguuucccuucuuucggg

SEQ ID NO: 49919 - RNA, 21 nt, Artificial Sequence
  LRRK2 RNA guide
cacauaauuuguuucccuucu

SEQ ID NO: 49920 - RNA, 21 nt, Artificial Sequence
  LRRK2 RNA guide
cauagggcucacauaauuugu

SEQ ID NO: 49921 - RNA, 21 nt, Artificial Sequence
  LRRK2 RNA guide
cccgaaagaagggaaacaaau

SEQ ID NO: 49922 - RNA, 21 nt, Artificial Sequence
  LRRK2 RNA guide
ccgaaagaagggaaacaaauu

SEQ ID NO: 49923 - RNA, 21 nt, Artificial Sequence
  LRRK2 RNA guide
cgaaagaagggaaacaaauua

SEQ ID NO: 49924 - RNA, 21 nt, Artificial Sequence
  LRRK2 RNA guide
cucacauaauuuguuucccuu

SEQ ID NO: 49925 - RNA, 21 nt, Artificial Sequence
  LRRK2 RNA guide
gaaacaaauuaugugagcccu

SEQ ID NO: 49926 - RNA, 21 nt, Artificial Sequence
  LRRK2 RNA guide
gaagggaaacaaauuauguga

SEQ ID NO: 49927 - RNA, 21 nt, Artificial Sequence
  LRRK2 RNA guide
gaucauagggcucacauaauu

SEQ ID NO: 49928 - RNA, 21 nt, Artificial Sequence
  LRRK2 RNA guide
gcucacauaauuuguuucccu

SEQ ID NO: 49929 - RNA, 21 nt, Artificial Sequence
  LRRK2 RNA guide
ggaaacaaauuaugugagccc

SEQ ID NO: 49930 - RNA, 21 nt, Artificial Sequence
  LRRK2 RNA guide
ggcucacauaauuuguuuccc

SEQ ID NO: 49931 - RNA, 21 nt, Artificial Sequence
  LRRK2 RNA guide
gggaaacaaauuaugugagcc

SEQ ID NO: 49932 - RNA, 21 nt, Artificial Sequence
  LRRK2 RNA guide
gggcucacauaauuuguuucc

SEQ ID NO: 49933 - RNA, 21 nt, Artificial Sequence
  LRRK2 RNA guide
guaauacccgaaagaagggaa

SEQ ID NO: 49934 - RNA, 21 nt, Artificial Sequence
  LRRK2 RNA guide
gugaucauagggcucacauaa

SEQ ID NO: 49935 - RNA, 21 nt, Artificial Sequence
  LRRK2 RNA guide
uaauacccgaaagaagggaaa

SEQ ID NO: 49936 - RNA, 21 nt, Artificial Sequence
  LRRK2 RNA guide
uaauuuguuucccuucuuucg

SEQ ID NO: 49937 - RNA, 21 nt, Artificial Sequence
  LRRK2 RNA guide
uacccgaaagaagggaaacaa

SEQ ID NO: 49938 - RNA, 21 nt, Artificial Sequence
  LRRK2 RNA guide
uagggcucacauaauuuguuu

SEQ ID NO: 49939 - RNA, 21 nt, Artificial Sequence
  LRRK2 RNA guide
uauguaauacccgaaagaagg

SEQ ID NO: 49940 - RNA, 21 nt, Artificial Sequence
  LRRK2 RNA guide
ucacauaauuuguuucccuuc

SEQ ID NO: 49941 - RNA, 21 nt, Artificial Sequence
  LRRK2 RNA guide
ucauagggcucacauaauuug

SEQ ID NO: 49942 - RNA, 21 nt, Artificial Sequence
  LRRK2 RNA guide
ugaucauagggcucacauaau

SEQ ID NO: 49943 - RNA, 21 nt, Artificial Sequence
  LRRK2 RNA guide
uguaauacccgaaagaaggga

SEQ ID NO: 49944 - RNA, 21 nt, Artificial Sequence
  LRRK2 RNA guide
uguuucccuucuuucggguau

SEQ ID NO: 49945 - RNA, 21 nt, Artificial Sequence
  LRRK2 RNA guide
uuguuucccuucuuucgggua

SEQ ID NO: 49946 - RNA, 21 nt, Artificial Sequence
  LRRK2 RNA guide
uuuguuucccuucuuucgggu

SEQ ID NO: 49947 - RNA, 22 nt, Artificial Sequence
  LRRK2 RNA guide
aaacaaauuaugugagcccuau

SEQ ID NO: 49948 - RNA, 22 nt, Artificial Sequence
  LRRK2 RNA guide
aacaaauuaugugagcccuaug

SEQ ID NO: 49949 - RNA, 22 nt, Artificial Sequence
  LRRK2 RNA guide
aagaagggaaacaaauuaugug

SEQ ID NO: 49950 - RNA, 22 nt, Artificial Sequence
  LRRK2 RNA guide
aagggaaacaaauuaugugagc

SEQ ID NO: 49951 - RNA, 22 nt, Artificial Sequence
  LRRK2 RNA guide
aauacccgaaagaagggaaaca

SEQ ID NO: 49952 - RNA, 22 nt, Artificial Sequence
  LRRK2 RNA guide
aauuuguuucccuucuuucggg

SEQ ID NO: 49953 - RNA, 22 nt, Artificial Sequence
  LRRK2 RNA guide
acaaauuaugugagcccuauga

SEQ ID NO: 49954 - RNA, 22 nt, Artificial Sequence
  LRRK2 RNA guide
acccgaaagaagggaaacaaau

SEQ ID NO: 49955 - RNA, 22 nt, Artificial Sequence
  LRRK2 RNA guide
agaagggaaacaaauuauguga

SEQ ID NO: 49956 - RNA, 22 nt, Artificial Sequence
  LRRK2 RNA guide
agggaaacaaauuaugugagcc

SEQ ID NO: 49957 - RNA, 22 nt, Artificial Sequence
  LRRK2 RNA guide
agggcucacauaauuuguuucc

SEQ ID NO: 49958 - RNA, 22 nt, Artificial Sequence
  LRRK2 RNA guide
agugaucauagggcucacauaa

SEQ ID NO: 49959 - RNA, 22 nt, Artificial Sequence
  LRRK2 RNA guide
auaauuuguuucccuucuuucg

SEQ ID NO: 49960 - RNA, 22 nt, Artificial Sequence
  LRRK2 RNA guide
auacccgaaagaagggaaacaa

SEQ ID NO: 49961 - RNA, 22 nt, Artificial Sequence
  LRRK2 RNA guide
auagggcucacauaauuuguuu

SEQ ID NO: 49962 - RNA, 22 nt, Artificial Sequence
  LRRK2 RNA guide
aucauagggcucacauaauuug

SEQ ID NO: 49963 - RNA, 22 nt, Artificial Sequence
  LRRK2 RNA guide
auguaauacccgaaagaaggga

SEQ ID NO: 49964 - RNA, 22 nt, Artificial Sequence
  LRRK2 RNA guide
auuuguuucccuucuuucgggu

SEQ ID NO: 49965 - RNA, 22 nt, Artificial Sequence
  LRRK2 RNA guide
cacauaauuuguuucccuucuu

SEQ ID NO: 49966 - RNA, 22 nt, Artificial Sequence
  LRRK2 RNA guide
cauaauuuguuucccuucuuuc

SEQ ID NO: 49967 - RNA, 22 nt, Artificial Sequence
  LRRK2 RNA guide
cauagggcucacauaauuuguu

SEQ ID NO: 49968 - RNA, 22 nt, Artificial Sequence
  LRRK2 RNA guide
cccgaaagaagggaaacaaauu

SEQ ID NO: 49969 - RNA, 22 nt, Artificial Sequence
  LRRK2 RNA guide
ccgaaagaagggaaacaaauua

SEQ ID NO: 49970 - RNA, 22 nt, Artificial Sequence
  LRRK2 RNA guide
cgaaagaagggaaacaaauuau

SEQ ID NO: 49971 - RNA, 22 nt, Artificial Sequence
  LRRK2 RNA guide
cuauguaauacccgaaagaagg

SEQ ID NO: 49972 - RNA, 22 nt, Artificial Sequence
  LRRK2 RNA guide
cucacauaauuuguuucccuuc

SEQ ID NO: 49973 - RNA, 22 nt, Artificial Sequence
  LRRK2 RNA guide
gaaacaaauuaugugagcccua

SEQ ID NO: 49974 - RNA, 22 nt, Artificial Sequence
  LRRK2 RNA guide
gaaagaagggaaacaaauuaug

SEQ ID NO: 49975 - RNA, 22 nt, Artificial Sequence
  LRRK2 RNA guide
gaagggaaacaaauuaugugag

SEQ ID NO: 49976 - RNA, 22 nt, Artificial Sequence
  LRRK2 RNA guide
gagugaucauagggcucacaua

SEQ ID NO: 49977 - RNA, 22 nt, Artificial Sequence
  LRRK2 RNA guide
gaucauagggcucacauaauuu

SEQ ID NO: 49978 - RNA, 22 nt, Artificial Sequence
  LRRK2 RNA guide
gcucacauaauuuguuucccuu

SEQ ID NO: 49979 - RNA, 22 nt, Artificial Sequence
  LRRK2 RNA guide
ggaaacaaauuaugugagcccu

SEQ ID NO: 49980 - RNA, 22 nt, Artificial Sequence
  LRRK2 RNA guide
ggcucacauaauuuguuucccu

SEQ ID NO: 49981 - RNA, 22 nt, Artificial Sequence
  LRRK2 RNA guide
gggaaacaaauuaugugagccc

SEQ ID NO: 49982 - RNA, 22 nt, Artificial Sequence
  LRRK2 RNA guide
gggcucacauaauuuguuuccc

SEQ ID NO: 49983 - RNA, 22 nt, Artificial Sequence
  LRRK2 RNA guide
guaauacccgaaagaagggaaa

SEQ ID NO: 49984 - RNA, 22 nt, Artificial Sequence
  LRRK2 RNA guide
gugaucauagggcucacauaau

SEQ ID NO: 49985 - RNA, 22 nt, Artificial Sequence
  LRRK2 RNA guide
uaauacccgaaagaagggaaac

SEQ ID NO: 49986 - RNA, 22 nt, Artificial Sequence
  LRRK2 RNA guide
uaauuuguuucccuucuuucgg

SEQ ID NO: 49987 - RNA, 22 nt, Artificial Sequence
  LRRK2 RNA guide
uacccgaaagaagggaaacaaa

SEQ ID NO: 49988 - RNA, 22 nt, Artificial Sequence
  LRRK2 RNA guide
uagggcucacauaauuuguuuc

SEQ ID NO: 49989 - RNA, 22 nt, Artificial Sequence
  LRRK2 RNA guide
uauguaauacccgaaagaaggg

SEQ ID NO: 49990 - RNA, 22 nt, Artificial Sequence
  LRRK2 RNA guide
ucacauaauuuguuucccuucu

SEQ ID NO: 49991 - RNA, 22 nt, Artificial Sequence
  LRRK2 RNA guide
ucauagggcucacauaauuugu

SEQ ID NO: 49992 - RNA, 22 nt, Artificial Sequence
  LRRK2 RNA guide
ugaucauagggcucacauaauu

SEQ ID NO: 49993 - RNA, 22 nt, Artificial Sequence
  LRRK2 RNA guide
uguaauacccgaaagaagggaa

SEQ ID NO: 49994 - RNA, 22 nt, Artificial Sequence
  LRRK2 RNA guide
uguuucccuucuuucggguauu

SEQ ID NO: 49995 - RNA, 22 nt, Artificial Sequence
  LRRK2 RNA guide
uuguuucccuucuuucggguau

SEQ ID NO: 49996 - RNA, 22 nt, Artificial Sequence
  LRRK2 RNA guide
uuuguuucccuucuuucgggua

SEQ ID NO: 49997 - RNA, 20 nt, Artificial Sequence
  LRRK2 RNA guide
aaaaaauuaugugagcccua

SEQ ID NO: 49998 - RNA, 20 nt, Artificial Sequence
  LRRK2 RNA guide
aaaaauuaugugagcccuau

SEQ ID NO: 49999 - RNA, 20 nt, Artificial Sequence
  LRRK2 RNA guide
acccgaaagaagggaaaaaa

SEQ ID NO: 50000 - RNA, 20 nt, Artificial Sequence
  LRRK2 RNA guide
auacccgaaagaagggaaaa

SEQ ID NO: 50001 - RNA, 20 nt, Artificial Sequence
  LRRK2 RNA guide
auagggcucacauaauuuuu

SEQ ID NO: 50002 - RNA, 20 nt, Artificial Sequence
  LRRK2 RNA guide
cauagggcucacauaauuuu

SEQ ID NO: 50003 - RNA, 20 nt, Artificial Sequence
  LRRK2 RNA guide
uacccgaaagaagggaaaaa

SEQ ID NO: 50004 - RNA, 20 nt, Artificial Sequence
  LRRK2 RNA guide
uagggcucacauaauuuuuu

SEQ ID NO: 50005 - RNA, 20 nt, Artificial Sequence
  LRRK2 RNA guide
uuuuucccuucuuucgggua

SEQ ID NO: 50006 - RNA, 20 nt, Artificial Sequence
  LRRK2 RNA guide
uuuuuucccuucuuucgggu

SEQ ID NO: 50007 - RNA, 21 nt, Artificial Sequence
  LRRK2 RNA guide
aaaaauuaugugagcccuaug

SEQ ID NO: 50008 - RNA, 21 nt, Artificial Sequence
  LRRK2 RNA guide
aauacccgaaagaagggaaaa

SEQ ID NO: 50009 - RNA, 21 nt, Artificial Sequence
  LRRK2 RNA guide
auacccgaaagaagggaaaaa

SEQ ID NO: 50010 - RNA, 21 nt, Artificial Sequence
  LRRK2 RNA guide
cauagggcucacauaauuuuu

SEQ ID NO: 50011 - RNA, 21 nt, Artificial Sequence
  LRRK2 RNA guide
uacccgaaagaagggaaaaaa

SEQ ID NO: 50012 - RNA, 21 nt, Artificial Sequence
  LRRK2 RNA guide
ucauagggcucacauaauuuu

SEQ ID NO: 50013 - RNA, 21 nt, Artificial Sequence
  LRRK2 RNA guide
uuuuucccuucuuucggguau

SEQ ID NO: 50014 - RNA, 21 nt, Artificial Sequence
  LRRK2 RNA guide
uuuuuucccuucuuucgggua

SEQ ID NO: 50015 - RNA, 22 nt, Artificial Sequence
  LRRK2 RNA guide
aaaaaauuaugugagcccuaug

SEQ ID NO: 50016 - RNA, 22 nt, Artificial Sequence
  LRRK2 RNA guide
aaaaauuaugugagcccuauga

SEQ ID NO: 50017 - RNA, 22 nt, Artificial Sequence
  LRRK2 RNA guide
aauacccgaaagaagggaaaaa

SEQ ID NO: 50018 - RNA, 22 nt, Artificial Sequence
  LRRK2 RNA guide
auacccgaaagaagggaaaaaa

SEQ ID NO: 50019 - RNA, 22 nt, Artificial Sequence
  LRRK2 RNA guide
aucauagggcucacauaauuuu

SEQ ID NO: 50020 - RNA, 22 nt, Artificial Sequence
  LRRK2 RNA guide
cauagggcucacauaauuuuuu

SEQ ID NO: 50021 - RNA, 22 nt, Artificial Sequence
  LRRK2 RNA guide
uaauacccgaaagaagggaaaa

SEQ ID NO: 50022 - RNA, 22 nt, Artificial Sequence
  LRRK2 RNA guide
ucauagggcucacauaauuuuu

SEQ ID NO: 50023 - RNA, 22 nt, Artificial Sequence
  LRRK2 RNA guide
uuuuucccuucuuucggguauu

SEQ ID NO: 50024 - RNA, 22 nt, Artificial Sequence
  LRRK2 RNA guide
uuuuuucccuucuuucggguau

SEQ ID NO: 50025 - RNA, 20 nt, Artificial Sequence
  LRRK2 RNA guide
accauuccauaaaagaaacc

SEQ ID NO: 50026 - RNA, 20 nt, Artificial Sequence
  LRRK2 RNA guide
augguuucuuuuauggaaug

SEQ ID NO: 50027 - RNA, 20 nt, Artificial Sequence
  LRRK2 RNA guide
caugguuucuuuuauggaau

SEQ ID NO: 50028 - RNA, 20 nt, Artificial Sequence
  LRRK2 RNA guide
cauuccauaaaagaaaccau

SEQ ID NO: 50029 - RNA, 20 nt, Artificial Sequence
  LRRK2 RNA guide
ccauuccauaaaagaaacca

SEQ ID NO: 50030 - RNA, 20 nt, Artificial Sequence
  LRRK2 RNA guide
gguuucuuuuauggaauggu

SEQ ID NO: 50031 - RNA, 20 nt, Artificial Sequence
  LRRK2 RNA guide
guuucaugguuucuuuuaug

SEQ ID NO: 50032 - RNA, 20 nt, Artificial Sequence
  LRRK2 RNA guide
guuucuuuuauggaauggua

SEQ ID NO: 50033 - RNA, 20 nt, Artificial Sequence
  LRRK2 RNA guide
uaccauuccauaaaagaaac

SEQ ID NO: 50034 - RNA, 20 nt, Artificial Sequence
  LRRK2 RNA guide
ucaugguuucuuuuauggaa

SEQ ID NO: 50035 - RNA, 20 nt, Artificial Sequence
  LRRK2 RNA guide
ugguuucuuuuauggaaugg

SEQ ID NO: 50036 - RNA, 20 nt, Artificial Sequence
  LRRK2 RNA guide
uucaugguuucuuuuaugga

SEQ ID NO: 50037 - RNA, 20 nt, Artificial Sequence
  LRRK2 RNA guide
uuucaugguuucuuuuaugg

SEQ ID NO: 50038 - RNA, 21 nt, Artificial Sequence
  LRRK2 RNA guide
accauuccauaaaagaaacca

SEQ ID NO: 50039 - RNA, 21 nt, Artificial Sequence
  LRRK2 RNA guide
augguuucuuuuauggaaugg

SEQ ID NO: 50040 - RNA, 21 nt, Artificial Sequence
  LRRK2 RNA guide
caugguuucuuuuauggaaug

SEQ ID NO: 50041 - RNA, 21 nt, Artificial Sequence
  LRRK2 RNA guide
cauuccauaaaagaaaccaug

SEQ ID NO: 50042 - RNA, 21 nt, Artificial Sequence
  LRRK2 RNA guide
ccauuccauaaaagaaaccau

SEQ ID NO: 50043 - RNA, 21 nt, Artificial Sequence
  LRRK2 RNA guide
gguuucuuuuauggaauggua

SEQ ID NO: 50044 - RNA, 21 nt, Artificial Sequence
  LRRK2 RNA guide
guuucaugguuucuuuuaugg

SEQ ID NO: 50045 - RNA, 21 nt, Artificial Sequence
  LRRK2 RNA guide
uaccauuccauaaaagaaacc

SEQ ID NO: 50046 - RNA, 21 nt, Artificial Sequence
  LRRK2 RNA guide
ugguuucuuuuauggaauggu

SEQ ID NO: 50047 - RNA, 22 nt, Artificial Sequence
  LRRK2 RNA guide
accauuccauaaaagaaaccau

SEQ ID NO: 50048 - RNA, 22 nt, Artificial Sequence
  LRRK2 RNA guide
auaccauuccauaaaagaaacc

SEQ ID NO: 50049 - RNA, 22 nt, Artificial Sequence
  LRRK2 RNA guide
augguuucuuuuauggaauggu

SEQ ID NO: 50050 - RNA, 22 nt, Artificial Sequence
  LRRK2 RNA guide
caugguuucuuuuauggaaugg

SEQ ID NO: 50051 - RNA, 22 nt, Artificial Sequence
  LRRK2 RNA guide
cauuccauaaaagaaaccauga

SEQ ID NO: 50052 - RNA, 22 nt, Artificial Sequence
  LRRK2 RNA guide
ccauuccauaaaagaaaccaug

SEQ ID NO: 50053 - RNA, 22 nt, Artificial Sequence
  LRRK2 RNA guide
gguuucuuuuauggaaugguau

SEQ ID NO: 50054 - RNA, 22 nt, Artificial Sequence
  LRRK2 RNA guide
guuucaugguuucuuuuaugga

SEQ ID NO: 50055 - RNA, 22 nt, Artificial Sequence
  LRRK2 RNA guide
uaccauuccauaaaagaaacca

SEQ ID NO: 50056 - RNA, 22 nt, Artificial Sequence
  LRRK2 RNA guide
ucaugguuucuuuuauggaaug

SEQ ID NO: 50057 - RNA, 22 nt, Artificial Sequence
  LRRK2 RNA guide
ugguuucuuuuauggaauggua

SEQ ID NO: 50058 - RNA, 22 nt, Artificial Sequence
  LRRK2 RNA guide
uguuucaugguuucuuuuaugg

SEQ ID NO: 50059 - RNA, 20 nt, Artificial Sequence
  LRRK2 RNA guide
aauaccguuccauaaaagaa

SEQ ID NO: 50060 - RNA, 20 nt, Artificial Sequence
  LRRK2 RNA guide
accguuccauaaaagaaacc

SEQ ID NO: 50061 - RNA, 20 nt, Artificial Sequence
  LRRK2 RNA guide
auaccguuccauaaaagaaa

SEQ ID NO: 50062 - RNA, 20 nt, Artificial Sequence
  LRRK2 RNA guide
augguuucuuuuauggaacg

SEQ ID NO: 50063 - RNA, 20 nt, Artificial Sequence
  LRRK2 RNA guide
caugguuucuuuuauggaac

SEQ ID NO: 50064 - RNA, 20 nt, Artificial Sequence
  LRRK2 RNA guide
ccguuccauaaaagaaacca

SEQ ID NO: 50065 - RNA, 20 nt, Artificial Sequence
  LRRK2 RNA guide
cguuccauaaaagaaaccau

SEQ ID NO: 50066 - RNA, 20 nt, Artificial Sequence
  LRRK2 RNA guide
cuuuuauggaacgguauuaa

SEQ ID NO: 50067 - RNA, 20 nt, Artificial Sequence
  LRRK2 RNA guide
ggaacgguauuaaaauaaac

SEQ ID NO: 50068 - RNA, 20 nt, Artificial Sequence
  LRRK2 RNA guide
gguuucuuuuauggaacggu

SEQ ID NO: 50069 - RNA, 20 nt, Artificial Sequence
  LRRK2 RNA guide
guuuauuuuaauaccguucc

SEQ ID NO: 50070 - RNA, 20 nt, Artificial Sequence
  LRRK2 RNA guide
guuucuuuuauggaacggua

SEQ ID NO: 50071 - RNA, 20 nt, Artificial Sequence
  LRRK2 RNA guide
uaauaccguuccauaaaaga

SEQ ID NO: 50072 - RNA, 20 nt, Artificial Sequence
  LRRK2 RNA guide
uaccguuccauaaaagaaac

SEQ ID NO: 50073 - RNA, 20 nt, Artificial Sequence
  LRRK2 RNA guide
ucuuuuauggaacgguauua

SEQ ID NO: 50074 - RNA, 20 nt, Artificial Sequence
  LRRK2 RNA guide
ugguuucuuuuauggaacgg

SEQ ID NO: 50075 - RNA, 20 nt, Artificial Sequence
  LRRK2 RNA guide
uuaauaccguuccauaaaag

SEQ ID NO: 50076 - RNA, 20 nt, Artificial Sequence
  LRRK2 RNA guide
uucuuuuauggaacgguauu

SEQ ID NO: 50077 - RNA, 20 nt, Artificial Sequence
  LRRK2 RNA guide
uuucuuuuauggaacgguau

SEQ ID NO: 50078 - RNA, 21 nt, Artificial Sequence
  LRRK2 RNA guide
accguuccauaaaagaaacca

SEQ ID NO: 50079 - RNA, 21 nt, Artificial Sequence
  LRRK2 RNA guide
auaccguuccauaaaagaaac

SEQ ID NO: 50080 - RNA, 21 nt, Artificial Sequence
  LRRK2 RNA guide
augguuucuuuuauggaacgg

SEQ ID NO: 50081 - RNA, 21 nt, Artificial Sequence
  LRRK2 RNA guide
caugguuucuuuuauggaacg

SEQ ID NO: 50082 - RNA, 21 nt, Artificial Sequence
  LRRK2 RNA guide
ccguuccauaaaagaaaccau

SEQ ID NO: 50083 - RNA, 21 nt, Artificial Sequence
  LRRK2 RNA guide
cguuccauaaaagaaaccaug

SEQ ID NO: 50084 - RNA, 21 nt, Artificial Sequence
  LRRK2 RNA guide
gguuucuuuuauggaacggua

SEQ ID NO: 50085 - RNA, 21 nt, Artificial Sequence
  LRRK2 RNA guide
guuucuuuuauggaacgguau

SEQ ID NO: 50086 - RNA, 21 nt, Artificial Sequence
  LRRK2 RNA guide
uaccguuccauaaaagaaacc

SEQ ID NO: 50087 - RNA, 21 nt, Artificial Sequence
  LRRK2 RNA guide
ucaugguuucuuuuauggaac

SEQ ID NO: 50088 - RNA, 21 nt, Artificial Sequence
  LRRK2 RNA guide
ugguuucuuuuauggaacggu

SEQ ID NO: 50089 - RNA, 22 nt, Artificial Sequence
  LRRK2 RNA guide
aauaccguuccauaaaagaaac

SEQ ID NO: 50090 - RNA, 22 nt, Artificial Sequence
  LRRK2 RNA guide
accguuccauaaaagaaaccau

SEQ ID NO: 50091 - RNA, 22 nt, Artificial Sequence
  LRRK2 RNA guide
auaccguuccauaaaagaaacc

SEQ ID NO: 50092 - RNA, 22 nt, Artificial Sequence
  LRRK2 RNA guide
augguuucuuuuauggaacggu

SEQ ID NO: 50093 - RNA, 22 nt, Artificial Sequence
  LRRK2 RNA guide
caugguuucuuuuauggaacgg

SEQ ID NO: 50094 - RNA, 22 nt, Artificial Sequence
  LRRK2 RNA guide
ccguuccauaaaagaaaccaug

SEQ ID NO: 50095 - RNA, 22 nt, Artificial Sequence
  LRRK2 RNA guide
cguuccauaaaagaaaccauga

SEQ ID NO: 50096 - RNA, 22 nt, Artificial Sequence
  LRRK2 RNA guide
ggaacgguauuaaaauaaacac

SEQ ID NO: 50097 - RNA, 22 nt, Artificial Sequence
  LRRK2 RNA guide
gguuucuuuuauggaacgguau

SEQ ID NO: 50098 - RNA, 22 nt, Artificial Sequence
  LRRK2 RNA guide
guguuuauuuuaauaccguucc

SEQ ID NO: 50099 - RNA, 22 nt, Artificial Sequence
  LRRK2 RNA guide
guuucuuuuauggaacgguauu

SEQ ID NO: 50100 - RNA, 22 nt, Artificial Sequence
  LRRK2 RNA guide
uaccguuccauaaaagaaacca

SEQ ID NO: 50101 - RNA, 22 nt, Artificial Sequence
  LRRK2 RNA guide
ucaugguuucuuuuauggaacg

SEQ ID NO: 50102 - RNA, 22 nt, Artificial Sequence
  LRRK2 RNA guide
ugguuucuuuuauggaacggua

SEQ ID NO: 50103 - RNA, 22 nt, Artificial Sequence
  LRRK2 RNA guide
uucaugguuucuuuuauggaac

SEQ ID NO: 50104 - RNA, 20 nt, Artificial Sequence
  LRRK2 RNA guide
aacucccugaauuuuucuua

SEQ ID NO: 50105 - RNA, 20 nt, Artificial Sequence
  LRRK2 RNA guide
acucccugaauuuuucuuau

SEQ ID NO: 50106 - RNA, 20 nt, Artificial Sequence
  LRRK2 RNA guide
auaagaaaaauucagggagu

SEQ ID NO: 50107 - RNA, 20 nt, Artificial Sequence
  LRRK2 RNA guide
auuaacucccugaauuuuuc

SEQ ID NO: 50108 - RNA, 20 nt, Artificial Sequence
  LRRK2 RNA guide
cucccugaauuuuucuuaua

SEQ ID NO: 50109 - RNA, 20 nt, Artificial Sequence
  LRRK2 RNA guide
gauuaacucccugaauuuuu

SEQ ID NO: 50110 - RNA, 20 nt, Artificial Sequence
  LRRK2 RNA guide
ggauuaacucccugaauuuu

SEQ ID NO: 50111 - RNA, 20 nt, Artificial Sequence
  LRRK2 RNA guide
uaacucccugaauuuuucuu

SEQ ID NO: 50112 - RNA, 20 nt, Artificial Sequence
  LRRK2 RNA guide
uaagaaaaauucagggaguu

SEQ ID NO: 50113 - RNA, 20 nt, Artificial Sequence
  LRRK2 RNA guide
uauaagaaaaauucagggag

SEQ ID NO: 50114 - RNA, 20 nt, Artificial Sequence
  LRRK2 RNA guide
uggauuaacucccugaauuu

SEQ ID NO: 50115 - RNA, 20 nt, Artificial Sequence
  LRRK2 RNA guide
uuaacucccugaauuuuucu

SEQ ID NO: 50116 - RNA, 21 nt, Artificial Sequence
  LRRK2 RNA guide
gauuaacucccugaauuuuuc

SEQ ID NO: 50117 - RNA, 21 nt, Artificial Sequence
  LRRK2 RNA guide
ggauuaacucccugaauuuuu

SEQ ID NO: 50118 - RNA, 21 nt, Artificial Sequence
  LRRK2 RNA guide
guggauuaacucccugaauuu

SEQ ID NO: 50119 - RNA, 21 nt, Artificial Sequence
  LRRK2 RNA guide
uggauuaacucccugaauuuu

SEQ ID NO: 50120 - RNA, 22 nt, Artificial Sequence
  LRRK2 RNA guide
aguggauuaacucccugaauuu

SEQ ID NO: 50121 - RNA, 22 nt, Artificial Sequence
  LRRK2 RNA guide
gauuaacucccugaauuuuucu

SEQ ID NO: 50122 - RNA, 22 nt, Artificial Sequence
  LRRK2 RNA guide
ggauuaacucccugaauuuuuc

SEQ ID NO: 50123 - RNA, 22 nt, Artificial Sequence
  LRRK2 RNA guide
guggauuaacucccugaauuuu

SEQ ID NO: 50124 - RNA, 22 nt, Artificial Sequence
  LRRK2 RNA guide
uggauuaacucccugaauuuuu

SEQ ID NO: 50125 - RNA, 20 nt, Artificial Sequence
  LRRK2 RNA guide
aacucccugaauuuuucuca

SEQ ID NO: 50126 - RNA, 20 nt, Artificial Sequence
  LRRK2 RNA guide
acucccugaauuuuucucau

SEQ ID NO: 50127 - RNA, 20 nt, Artificial Sequence
  LRRK2 RNA guide
augagaaaaauucagggagu

SEQ ID NO: 50128 - RNA, 20 nt, Artificial Sequence
  LRRK2 RNA guide
cccugaauuuuucucauaaa

SEQ ID NO: 50129 - RNA, 20 nt, Artificial Sequence
  LRRK2 RNA guide
cucccugaauuuuucucaua

SEQ ID NO: 50130 - RNA, 20 nt, Artificial Sequence
  LRRK2 RNA guide
uaacucccugaauuuuucuc

SEQ ID NO: 50131 - RNA, 20 nt, Artificial Sequence
  LRRK2 RNA guide
uaugagaaaaauucagggag

SEQ ID NO: 50132 - RNA, 20 nt, Artificial Sequence
  LRRK2 RNA guide
ucccugaauuuuucucauaa

SEQ ID NO: 50133 - RNA, 20 nt, Artificial Sequence
  LRRK2 RNA guide
ugagaaaaauucagggaguu

SEQ ID NO: 50134 - RNA, 20 nt, Artificial Sequence
  LRRK2 RNA guide
uuaugagaaaaauucaggga

SEQ ID NO: 50135 - RNA, 20 nt, Artificial Sequence
  LRRK2 RNA guide
uuuaugagaaaaauucaggg

SEQ ID NO: 50136 - RNA, 21 nt, Artificial Sequence
  LRRK2 RNA guide
aacucccugaauuuuucucau

SEQ ID NO: 50137 - RNA, 21 nt, Artificial Sequence
  LRRK2 RNA guide
acucccugaauuuuucucaua

SEQ ID NO: 50138 - RNA, 21 nt, Artificial Sequence
  LRRK2 RNA guide
augagaaaaauucagggaguu

SEQ ID NO: 50139 - RNA, 21 nt, Artificial Sequence
  LRRK2 RNA guide
cucccugaauuuuucucauaa

SEQ ID NO: 50140 - RNA, 21 nt, Artificial Sequence
  LRRK2 RNA guide
uaacucccugaauuuuucuca

SEQ ID NO: 50141 - RNA, 21 nt, Artificial Sequence
  LRRK2 RNA guide
uaugagaaaaauucagggagu

SEQ ID NO: 50142 - RNA, 21 nt, Artificial Sequence
  LRRK2 RNA guide
ugagaaaaauucagggaguua

SEQ ID NO: 50143 - RNA, 21 nt, Artificial Sequence
  LRRK2 RNA guide
uuaacucccugaauuuuucuc

SEQ ID NO: 50144 - RNA, 21 nt, Artificial Sequence
  LRRK2 RNA guide
uuaugagaaaaauucagggag

SEQ ID NO: 50145 - RNA, 22 nt, Artificial Sequence
  LRRK2 RNA guide
aacucccugaauuuuucucaua

SEQ ID NO: 50146 - RNA, 22 nt, Artificial Sequence
  LRRK2 RNA guide
acucccugaauuuuucucauaa

SEQ ID NO: 50147 - RNA, 22 nt, Artificial Sequence
  LRRK2 RNA guide
augagaaaaauucagggaguua

SEQ ID NO: 50148 - RNA, 22 nt, Artificial Sequence
  LRRK2 RNA guide
auuaacucccugaauuuuucuc

SEQ ID NO: 50149 - RNA, 22 nt, Artificial Sequence
  LRRK2 RNA guide
cucccugaauuuuucucauaaa

SEQ ID NO: 50150 - RNA, 22 nt, Artificial Sequence
  LRRK2 RNA guide
uaacucccugaauuuuucucau

SEQ ID NO: 50151 - RNA, 22 nt, Artificial Sequence
  LRRK2 RNA guide
uaugagaaaaauucagggaguu

SEQ ID NO: 50152 - RNA, 22 nt, Artificial Sequence
  LRRK2 RNA guide
ugagaaaaauucagggaguuaa

SEQ ID NO: 50153 - RNA, 22 nt, Artificial Sequence
  LRRK2 RNA guide
uuaacucccugaauuuuucuca

SEQ ID NO: 50154 - RNA, 22 nt, Artificial Sequence
  LRRK2 RNA guide
uuaugagaaaaauucagggagu

SEQ ID NO: 50155 - RNA, 22 nt, Artificial Sequence
  LRRK2 RNA guide
uuuaugagaaaaauucagggag

SEQ ID NO: 50156 - RNA, 20 nt, Artificial Sequence
  LRRK2 RNA guide
acuaugagcuccucugagga

SEQ ID NO: 50157 - RNA, 20 nt, Artificial Sequence
  LRRK2 RNA guide
agaggagcucauaguccagc

SEQ ID NO: 50158 - RNA, 20 nt, Artificial Sequence
  LRRK2 RNA guide
agcucauaguccagcaggaa

SEQ ID NO: 50159 - RNA, 20 nt, Artificial Sequence
  LRRK2 RNA guide
aggagcucauaguccagcag

SEQ ID NO: 50160 - RNA, 20 nt, Artificial Sequence
  LRRK2 RNA guide
aguccagcaggaaaaagcca

SEQ ID NO: 50161 - RNA, 20 nt, Artificial Sequence
  LRRK2 RNA guide
aucuauuccucagaggagcu

SEQ ID NO: 50162 - RNA, 20 nt, Artificial Sequence
  LRRK2 RNA guide
auuccucagaggagcucaua

SEQ ID NO: 50163 - RNA, 20 nt, Artificial Sequence
  LRRK2 RNA guide
auuuggcuuuuuccugcugg

SEQ ID NO: 50164 - RNA, 20 nt, Artificial Sequence
  LRRK2 RNA guide
cagaggagcucauaguccag

SEQ ID NO: 50165 - RNA, 20 nt, Artificial Sequence
  LRRK2 RNA guide
cauaguccagcaggaaaaag

SEQ ID NO: 50166 - RNA, 20 nt, Artificial Sequence
  LRRK2 RNA guide
ccucagaggagcucauaguc

SEQ ID NO: 50167 - RNA, 20 nt, Artificial Sequence
  LRRK2 RNA guide
ccugcuggacuaugagcucc

SEQ ID NO: 50168 - RNA, 20 nt, Artificial Sequence
  LRRK2 RNA guide
cuauuccucagaggagcuca

SEQ ID NO: 50169 - RNA, 20 nt, Artificial Sequence
  LRRK2 RNA guide
cucagaggagcucauagucc

SEQ ID NO: 50170 - RNA, 20 nt, Artificial Sequence
  LRRK2 RNA guide
cucauaguccagcaggaaaa

SEQ ID NO: 50171 - RNA, 20 nt, Artificial Sequence
  LRRK2 RNA guide
cugcuggacuaugagcuccu

SEQ ID NO: 50172 - RNA, 20 nt, Artificial Sequence
  LRRK2 RNA guide
cuggacuaugagcuccucug

SEQ ID NO: 50173 - RNA, 20 nt, Artificial Sequence
  LRRK2 RNA guide
cuuuuuccugcuggacuaug

SEQ ID NO: 50174 - RNA, 20 nt, Artificial Sequence
  LRRK2 RNA guide
gacuaugagcuccucugagg

SEQ ID NO: 50175 - RNA, 20 nt, Artificial Sequence
  LRRK2 RNA guide
gagcucauaguccagcagga

SEQ ID NO: 50176 - RNA, 20 nt, Artificial Sequence
  LRRK2 RNA guide
gaggagcucauaguccagca

SEQ ID NO: 50177 - RNA, 20 nt, Artificial Sequence
  LRRK2 RNA guide
gauuuggcuuuuuccugcug

SEQ ID NO: 50178 - RNA, 20 nt, Artificial Sequence
  LRRK2 RNA guide
gcucauaguccagcaggaaa

SEQ ID NO: 50179 - RNA, 20 nt, Artificial Sequence
  LRRK2 RNA guide
gcuggacuaugagcuccucu

SEQ ID NO: 50180 - RNA, 20 nt, Artificial Sequence
  LRRK2 RNA guide
gcuuuuuccugcuggacuau

SEQ ID NO: 50181 - RNA, 20 nt, Artificial Sequence
  LRRK2 RNA guide
ggacuaugagcuccucugag

SEQ ID NO: 50182 - RNA, 20 nt, Artificial Sequence
  LRRK2 RNA guide
ggagcucauaguccagcagg

SEQ ID NO: 50183 - RNA, 20 nt, Artificial Sequence
  LRRK2 RNA guide
ggcuuuuuccugcuggacua

SEQ ID NO: 50184 - RNA, 20 nt, Artificial Sequence
  LRRK2 RNA guide
uaguccagcaggaaaaagcc

SEQ ID NO: 50185 - RNA, 20 nt, Artificial Sequence
  LRRK2 RNA guide
uauuccucagaggagcucau

SEQ ID NO: 50186 - RNA, 20 nt, Artificial Sequence
  LRRK2 RNA guide
ucagaggagcucauagucca

SEQ ID NO: 50187 - RNA, 20 nt, Artificial Sequence
  LRRK2 RNA guide
ucauaguccagcaggaaaaa

SEQ ID NO: 50188 - RNA, 20 nt, Artificial Sequence
  LRRK2 RNA guide
uccucagaggagcucauagu

SEQ ID NO: 50189 - RNA, 20 nt, Artificial Sequence
  LRRK2 RNA guide
uccugcuggacuaugagcuc

SEQ ID NO: 50190 - RNA, 20 nt, Artificial Sequence
  LRRK2 RNA guide
ucuauuccucagaggagcuc

SEQ ID NO: 50191 - RNA, 20 nt, Artificial Sequence
  LRRK2 RNA guide
ugauuuggcuuuuuccugcu

SEQ ID NO: 50192 - RNA, 20 nt, Artificial Sequence
  LRRK2 RNA guide
ugcuggacuaugagcuccuc

SEQ ID NO: 50193 - RNA, 20 nt, Artificial Sequence
  LRRK2 RNA guide
uggacuaugagcuccucuga

SEQ ID NO: 50194 - RNA, 20 nt, Artificial Sequence
  LRRK2 RNA guide
uggcuuuuuccugcuggacu

SEQ ID NO: 50195 - RNA, 20 nt, Artificial Sequence
  LRRK2 RNA guide
uuccucagaggagcucauag

SEQ ID NO: 50196 - RNA, 20 nt, Artificial Sequence
  LRRK2 RNA guide
uuccugcuggacuaugagcu

SEQ ID NO: 50197 - RNA, 20 nt, Artificial Sequence
  LRRK2 RNA guide
uugauuuggcuuuuuccugc

SEQ ID NO: 50198 - RNA, 20 nt, Artificial Sequence
  LRRK2 RNA guide
uuggcuuuuuccugcuggac

SEQ ID NO: 50199 - RNA, 20 nt, Artificial Sequence
  LRRK2 RNA guide
uuuccugcuggacuaugagc

SEQ ID NO: 50200 - RNA, 20 nt, Artificial Sequence
  LRRK2 RNA guide
uuuggcuuuuuccugcugga

SEQ ID NO: 50201 - RNA, 20 nt, Artificial Sequence
  LRRK2 RNA guide
uuuuccugcuggacuaugag

SEQ ID NO: 50202 - RNA, 20 nt, Artificial Sequence
  LRRK2 RNA guide
uuuuuccugcuggacuauga

SEQ ID NO: 50203 - RNA, 21 nt, Artificial Sequence
  LRRK2 RNA guide
aaucuauuccucagaggagcu

SEQ ID NO: 50204 - RNA, 21 nt, Artificial Sequence
  LRRK2 RNA guide
acuaugagcuccucugaggaa

SEQ ID NO: 50205 - RNA, 21 nt, Artificial Sequence
  LRRK2 RNA guide
agaggagcucauaguccagca

SEQ ID NO: 50206 - RNA, 21 nt, Artificial Sequence
  LRRK2 RNA guide
agcucauaguccagcaggaaa

SEQ ID NO: 50207 - RNA, 21 nt, Artificial Sequence
  LRRK2 RNA guide
aggagcucauaguccagcagg

SEQ ID NO: 50208 - RNA, 21 nt, Artificial Sequence
  LRRK2 RNA guide
aguccagcaggaaaaagccaa

SEQ ID NO: 50209 - RNA, 21 nt, Artificial Sequence
  LRRK2 RNA guide
auaguccagcaggaaaaagcc

SEQ ID NO: 50210 - RNA, 21 nt, Artificial Sequence
  LRRK2 RNA guide
aucuauuccucagaggagcuc

SEQ ID NO: 50211 - RNA, 21 nt, Artificial Sequence
  LRRK2 RNA guide
auuccucagaggagcucauag

SEQ ID NO: 50212 - RNA, 21 nt, Artificial Sequence
  LRRK2 RNA guide
auugauuuggcuuuuuccugc

SEQ ID NO: 50213 - RNA, 21 nt, Artificial Sequence
  LRRK2 RNA guide
auuuggcuuuuuccugcugga

SEQ ID NO: 50214 - RNA, 21 nt, Artificial Sequence
  LRRK2 RNA guide
cagaggagcucauaguccagc

SEQ ID NO: 50215 - RNA, 21 nt, Artificial Sequence
  LRRK2 RNA guide
cauaguccagcaggaaaaagc

SEQ ID NO: 50216 - RNA, 21 nt, Artificial Sequence
  LRRK2 RNA guide
ccucagaggagcucauagucc

SEQ ID NO: 50217 - RNA, 21 nt, Artificial Sequence
  LRRK2 RNA guide
ccugcuggacuaugagcuccu

SEQ ID NO: 50218 - RNA, 21 nt, Artificial Sequence
  LRRK2 RNA guide
cuauuccucagaggagcucau

SEQ ID NO: 50219 - RNA, 21 nt, Artificial Sequence
  LRRK2 RNA guide
cucagaggagcucauagucca

SEQ ID NO: 50220 - RNA, 21 nt, Artificial Sequence
  LRRK2 RNA guide
cucauaguccagcaggaaaaa

SEQ ID NO: 50221 - RNA, 21 nt, Artificial Sequence
  LRRK2 RNA guide
cugcuggacuaugagcuccuc

SEQ ID NO: 50222 - RNA, 21 nt, Artificial Sequence
  LRRK2 RNA guide
cuggacuaugagcuccucuga

SEQ ID NO: 50223 - RNA, 21 nt, Artificial Sequence
  LRRK2 RNA guide
cuuuuuccugcuggacuauga

SEQ ID NO: 50224 - RNA, 21 nt, Artificial Sequence
  LRRK2 RNA guide
gacuaugagcuccucugagga

SEQ ID NO: 50225 - RNA, 21 nt, Artificial Sequence
  LRRK2 RNA guide
gagcucauaguccagcaggaa

SEQ ID NO: 50226 - RNA, 21 nt, Artificial Sequence
  LRRK2 RNA guide
gaggagcucauaguccagcag

SEQ ID NO: 50227 - RNA, 21 nt, Artificial Sequence
  LRRK2 RNA guide
gauuuggcuuuuuccugcugg

SEQ ID NO: 50228 - RNA, 21 nt, Artificial Sequence
  LRRK2 RNA guide
gcucauaguccagcaggaaaa

SEQ ID NO: 50229 - RNA, 21 nt, Artificial Sequence
  LRRK2 RNA guide
gcuggacuaugagcuccucug

SEQ ID NO: 50230 - RNA, 21 nt, Artificial Sequence
  LRRK2 RNA guide
gcuuuuuccugcuggacuaug

SEQ ID NO: 50231 - RNA, 21 nt, Artificial Sequence
  LRRK2 RNA guide
ggacuaugagcuccucugagg

SEQ ID NO: 50232 - RNA, 21 nt, Artificial Sequence
  LRRK2 RNA guide
ggagcucauaguccagcagga

SEQ ID NO: 50233 - RNA, 21 nt, Artificial Sequence
  LRRK2 RNA guide
ggcuuuuuccugcuggacuau

SEQ ID NO: 50234 - RNA, 21 nt, Artificial Sequence
  LRRK2 RNA guide
uaguccagcaggaaaaagcca

SEQ ID NO: 50235 - RNA, 21 nt, Artificial Sequence
  LRRK2 RNA guide
uauuccucagaggagcucaua

SEQ ID NO: 50236 - RNA, 21 nt, Artificial Sequence
  LRRK2 RNA guide
ucagaggagcucauaguccag

SEQ ID NO: 50237 - RNA, 21 nt, Artificial Sequence
  LRRK2 RNA guide
ucauaguccagcaggaaaaag

SEQ ID NO: 50238 - RNA, 21 nt, Artificial Sequence
  LRRK2 RNA guide
uccucagaggagcucauaguc

SEQ ID NO: 50239 - RNA, 21 nt, Artificial Sequence
  LRRK2 RNA guide
uccugcuggacuaugagcucc

SEQ ID NO: 50240 - RNA, 21 nt, Artificial Sequence
  LRRK2 RNA guide
ucuauuccucagaggagcuca

SEQ ID NO: 50241 - RNA, 21 nt, Artificial Sequence
  LRRK2 RNA guide
ugauuuggcuuuuuccugcug

SEQ ID NO: 50242 - RNA, 21 nt, Artificial Sequence
  LRRK2 RNA guide
ugcuggacuaugagcuccucu

SEQ ID NO: 50243 - RNA, 21 nt, Artificial Sequence
  LRRK2 RNA guide
uggacuaugagcuccucugag

SEQ ID NO: 50244 - RNA, 21 nt, Artificial Sequence
  LRRK2 RNA guide
uggcuuuuuccugcuggacua

SEQ ID NO: 50245 - RNA, 21 nt, Artificial Sequence
  LRRK2 RNA guide
uuccucagaggagcucauagu

SEQ ID NO: 50246 - RNA, 21 nt, Artificial Sequence
  LRRK2 RNA guide
uuccugcuggacuaugagcuc

SEQ ID NO: 50247 - RNA, 21 nt, Artificial Sequence
  LRRK2 RNA guide
uugauuuggcuuuuuccugcu

SEQ ID NO: 50248 - RNA, 21 nt, Artificial Sequence
  LRRK2 RNA guide
uuggcuuuuuccugcuggacu

SEQ ID NO: 50249 - RNA, 21 nt, Artificial Sequence
  LRRK2 RNA guide
uuuccugcuggacuaugagcu

SEQ ID NO: 50250 - RNA, 21 nt, Artificial Sequence
  LRRK2 RNA guide
uuuggcuuuuuccugcuggac

SEQ ID NO: 50251 - RNA, 21 nt, Artificial Sequence
  LRRK2 RNA guide
uuuuccugcuggacuaugagc

SEQ ID NO: 50252 - RNA, 21 nt, Artificial Sequence
  LRRK2 RNA guide
uuuuuccugcuggacuaugag

SEQ ID NO: 50253 - RNA, 22 nt, Artificial Sequence
  LRRK2 RNA guide
aaaucuauuccucagaggagcu

SEQ ID NO: 50254 - RNA, 22 nt, Artificial Sequence
  LRRK2 RNA guide
aaucuauuccucagaggagcuc

SEQ ID NO: 50255 - RNA, 22 nt, Artificial Sequence
  LRRK2 RNA guide
acuaugagcuccucugaggaau

SEQ ID NO: 50256 - RNA, 22 nt, Artificial Sequence
  LRRK2 RNA guide
agaggagcucauaguccagcag

SEQ ID NO: 50257 - RNA, 22 nt, Artificial Sequence
  LRRK2 RNA guide
agcucauaguccagcaggaaaa

SEQ ID NO: 50258 - RNA, 22 nt, Artificial Sequence
  LRRK2 RNA guide
aggagcucauaguccagcagga

SEQ ID NO: 50259 - RNA, 22 nt, Artificial Sequence
  LRRK2 RNA guide
aguccagcaggaaaaagccaaa

SEQ ID NO: 50260 - RNA, 22 nt, Artificial Sequence
  LRRK2 RNA guide
auaguccagcaggaaaaagcca

SEQ ID NO: 50261 - RNA, 22 nt, Artificial Sequence
  LRRK2 RNA guide
aucuauuccucagaggagcuca

SEQ ID NO: 50262 - RNA, 22 nt, Artificial Sequence
  LRRK2 RNA guide
auuccucagaggagcucauagu

SEQ ID NO: 50263 - RNA, 22 nt, Artificial Sequence
  LRRK2 RNA guide
auugauuuggcuuuuuccugcu

SEQ ID NO: 50264 - RNA, 22 nt, Artificial Sequence
  LRRK2 RNA guide
auuuggcuuuuuccugcuggac

SEQ ID NO: 50265 - RNA, 22 nt, Artificial Sequence
  LRRK2 RNA guide
cagaggagcucauaguccagca

SEQ ID NO: 50266 - RNA, 22 nt, Artificial Sequence
  LRRK2 RNA guide
cauaguccagcaggaaaaagcc

SEQ ID NO: 50267 - RNA, 22 nt, Artificial Sequence
  LRRK2 RNA guide
ccucagaggagcucauagucca

SEQ ID NO: 50268 - RNA, 22 nt, Artificial Sequence
  LRRK2 RNA guide
ccugcuggacuaugagcuccuc

SEQ ID NO: 50269 - RNA, 22 nt, Artificial Sequence
  LRRK2 RNA guide
cuauuccucagaggagcucaua

SEQ ID NO: 50270 - RNA, 22 nt, Artificial Sequence
  LRRK2 RNA guide
cucagaggagcucauaguccag

SEQ ID NO: 50271 - RNA, 22 nt, Artificial Sequence
  LRRK2 RNA guide
cucauaguccagcaggaaaaag

SEQ ID NO: 50272 - RNA, 22 nt, Artificial Sequence
  LRRK2 RNA guide
cugcuggacuaugagcuccucu

SEQ ID NO: 50273 - RNA, 22 nt, Artificial Sequence
  LRRK2 RNA guide
cuggacuaugagcuccucugag

SEQ ID NO: 50274 - RNA, 22 nt, Artificial Sequence
  LRRK2 RNA guide
cuuuuuccugcuggacuaugag

SEQ ID NO: 50275 - RNA, 22 nt, Artificial Sequence
  LRRK2 RNA guide
gacuaugagcuccucugaggaa

SEQ ID NO: 50276 - RNA, 22 nt, Artificial Sequence
  LRRK2 RNA guide
gagcucauaguccagcaggaaa

SEQ ID NO: 50277 - RNA, 22 nt, Artificial Sequence
  LRRK2 RNA guide
gaggagcucauaguccagcagg

SEQ ID NO: 50278 - RNA, 22 nt, Artificial Sequence
  LRRK2 RNA guide
gauugauuuggcuuuuuccugc

SEQ ID NO: 50279 - RNA, 22 nt, Artificial Sequence
  LRRK2 RNA guide
gauuuggcuuuuuccugcugga

SEQ ID NO: 50280 - RNA, 22 nt, Artificial Sequence
  LRRK2 RNA guide
gcucauaguccagcaggaaaaa

SEQ ID NO: 50281 - RNA, 22 nt, Artificial Sequence
  LRRK2 RNA guide
gcuggacuaugagcuccucuga

SEQ ID NO: 50282 - RNA, 22 nt, Artificial Sequence
  LRRK2 RNA guide
gcuuuuuccugcuggacuauga

SEQ ID NO: 50283 - RNA, 22 nt, Artificial Sequence
  LRRK2 RNA guide
ggacuaugagcuccucugagga

SEQ ID NO: 50284 - RNA, 22 nt, Artificial Sequence
  LRRK2 RNA guide
ggagcucauaguccagcaggaa

SEQ ID NO: 50285 - RNA, 22 nt, Artificial Sequence
  LRRK2 RNA guide
ggcuuuuuccugcuggacuaug

SEQ ID NO: 50286 - RNA, 22 nt, Artificial Sequence
  LRRK2 RNA guide
uaguccagcaggaaaaagccaa

SEQ ID NO: 50287 - RNA, 22 nt, Artificial Sequence
  LRRK2 RNA guide
uauuccucagaggagcucauag

SEQ ID NO: 50288 - RNA, 22 nt, Artificial Sequence
  LRRK2 RNA guide
ucagaggagcucauaguccagc

SEQ ID NO: 50289 - RNA, 22 nt, Artificial Sequence
  LRRK2 RNA guide
ucauaguccagcaggaaaaagc

SEQ ID NO: 50290 - RNA, 22 nt, Artificial Sequence
  LRRK2 RNA guide
uccucagaggagcucauagucc

SEQ ID NO: 50291 - RNA, 22 nt, Artificial Sequence
  LRRK2 RNA guide
uccugcuggacuaugagcuccu

SEQ ID NO: 50292 - RNA, 22 nt, Artificial Sequence
  LRRK2 RNA guide
ucuauuccucagaggagcucau

SEQ ID NO: 50293 - RNA, 22 nt, Artificial Sequence
  LRRK2 RNA guide
ugauuuggcuuuuuccugcugg

SEQ ID NO: 50294 - RNA, 22 nt, Artificial Sequence
  LRRK2 RNA guide
ugcuggacuaugagcuccucug

SEQ ID NO: 50295 - RNA, 22 nt, Artificial Sequence
  LRRK2 RNA guide
uggacuaugagcuccucugagg

SEQ ID NO: 50296 - RNA, 22 nt, Artificial Sequence
  LRRK2 RNA guide
uggcuuuuuccugcuggacuau

SEQ ID NO: 50297 - RNA, 22 nt, Artificial Sequence
  LRRK2 RNA guide
uuccucagaggagcucauaguc

SEQ ID NO: 50298 - RNA, 22 nt, Artificial Sequence
  LRRK2 RNA guide
uuccugcuggacuaugagcucc

SEQ ID NO: 50299 - RNA, 22 nt, Artificial Sequence
  LRRK2 RNA guide
uugauuuggcuuuuuccugcug

SEQ ID NO: 50300 - RNA, 22 nt, Artificial Sequence
  LRRK2 RNA guide
uuggcuuuuuccugcuggacua

SEQ ID NO: 50301 - RNA, 22 nt, Artificial Sequence
  LRRK2 RNA guide
uuuccugcuggacuaugagcuc

SEQ ID NO: 50302 - RNA, 22 nt, Artificial Sequence
  LRRK2 RNA guide
uuuggcuuuuuccugcuggacu

SEQ ID NO: 50303 - RNA, 22 nt, Artificial Sequence
  LRRK2 RNA guide
uuuuccugcuggacuaugagcu

SEQ ID NO: 50304 - RNA, 22 nt, Artificial Sequence
  LRRK2 RNA guide
uuuuuccugcuggacuaugagc

SEQ ID NO: 50305 - RNA, 20 nt, Artificial Sequence
  LRRK2 RNA guide
aauccagcaggaaaaagcca

SEQ ID NO: 50306 - RNA, 20 nt, Artificial Sequence
  LRRK2 RNA guide
agaggagcucauaauccagc

SEQ ID NO: 50307 - RNA, 20 nt, Artificial Sequence
  LRRK2 RNA guide
agcucauaauccagcaggaa

SEQ ID NO: 50308 - RNA, 20 nt, Artificial Sequence
  LRRK2 RNA guide
aggagcucauaauccagcag

SEQ ID NO: 50309 - RNA, 20 nt, Artificial Sequence
  LRRK2 RNA guide
auaauccagcaggaaaaagc

SEQ ID NO: 50310 - RNA, 20 nt, Artificial Sequence
  LRRK2 RNA guide
auuaugagcuccucugagga

SEQ ID NO: 50311 - RNA, 20 nt, Artificial Sequence
  LRRK2 RNA guide
cagaggagcucauaauccag

SEQ ID NO: 50312 - RNA, 20 nt, Artificial Sequence
  LRRK2 RNA guide
cauaauccagcaggaaaaag

SEQ ID NO: 50313 - RNA, 20 nt, Artificial Sequence
  LRRK2 RNA guide
ccucagaggagcucauaauc

SEQ ID NO: 50314 - RNA, 20 nt, Artificial Sequence
  LRRK2 RNA guide
ccugcuggauuaugagcucc

SEQ ID NO: 50315 - RNA, 20 nt, Artificial Sequence
  LRRK2 RNA guide
cucagaggagcucauaaucc

SEQ ID NO: 50316 - RNA, 20 nt, Artificial Sequence
  LRRK2 RNA guide
cucauaauccagcaggaaaa

SEQ ID NO: 50317 - RNA, 20 nt, Artificial Sequence
  LRRK2 RNA guide
cugcuggauuaugagcuccu

SEQ ID NO: 50318 - RNA, 20 nt, Artificial Sequence
  LRRK2 RNA guide
cuggauuaugagcuccucug

SEQ ID NO: 50319 - RNA, 20 nt, Artificial Sequence
  LRRK2 RNA guide
cuuuuuccugcuggauuaug

SEQ ID NO: 50320 - RNA, 20 nt, Artificial Sequence
  LRRK2 RNA guide
gagcucauaauccagcagga

SEQ ID NO: 50321 - RNA, 20 nt, Artificial Sequence
  LRRK2 RNA guide
gaggagcucauaauccagca

SEQ ID NO: 50322 - RNA, 20 nt, Artificial Sequence
  LRRK2 RNA guide
gauuaugagcuccucugagg

SEQ ID NO: 50323 - RNA, 20 nt, Artificial Sequence
  LRRK2 RNA guide
gcucauaauccagcaggaaa

SEQ ID NO: 50324 - RNA, 20 nt, Artificial Sequence
  LRRK2 RNA guide
gcuggauuaugagcuccucu

SEQ ID NO: 50325 - RNA, 20 nt, Artificial Sequence
  LRRK2 RNA guide
gcuuuuuccugcuggauuau

SEQ ID NO: 50326 - RNA, 20 nt, Artificial Sequence
  LRRK2 RNA guide
ggagcucauaauccagcagg

SEQ ID NO: 50327 - RNA, 20 nt, Artificial Sequence
  LRRK2 RNA guide
ggauuaugagcuccucugag

SEQ ID NO: 50328 - RNA, 20 nt, Artificial Sequence
  LRRK2 RNA guide
ggcuuuuuccugcuggauua

SEQ ID NO: 50329 - RNA, 20 nt, Artificial Sequence
  LRRK2 RNA guide
uaauccagcaggaaaaagcc

SEQ ID NO: 50330 - RNA, 20 nt, Artificial Sequence
  LRRK2 RNA guide
ucagaggagcucauaaucca

SEQ ID NO: 50331 - RNA, 20 nt, Artificial Sequence
  LRRK2 RNA guide
ucauaauccagcaggaaaaa

SEQ ID NO: 50332 - RNA, 20 nt, Artificial Sequence
  LRRK2 RNA guide
uccucagaggagcucauaau

SEQ ID NO: 50333 - RNA, 20 nt, Artificial Sequence
  LRRK2 RNA guide
uccugcuggauuaugagcuc

SEQ ID NO: 50334 - RNA, 20 nt, Artificial Sequence
  LRRK2 RNA guide
ugcuggauuaugagcuccuc

SEQ ID NO: 50335 - RNA, 20 nt, Artificial Sequence
  LRRK2 RNA guide
uggauuaugagcuccucuga

SEQ ID NO: 50336 - RNA, 20 nt, Artificial Sequence
  LRRK2 RNA guide
uggcuuuuuccugcuggauu

SEQ ID NO: 50337 - RNA, 20 nt, Artificial Sequence
  LRRK2 RNA guide
uuccucagaggagcucauaa

SEQ ID NO: 50338 - RNA, 20 nt, Artificial Sequence
  LRRK2 RNA guide
uuccugcuggauuaugagcu

SEQ ID NO: 50339 - RNA, 20 nt, Artificial Sequence
  LRRK2 RNA guide
uuggcuuuuuccugcuggau

SEQ ID NO: 50340 - RNA, 20 nt, Artificial Sequence
  LRRK2 RNA guide
uuuccugcuggauuaugagc

SEQ ID NO: 50341 - RNA, 20 nt, Artificial Sequence
  LRRK2 RNA guide
uuuuccugcuggauuaugag

SEQ ID NO: 50342 - RNA, 20 nt, Artificial Sequence
  LRRK2 RNA guide
uuuuuccugcuggauuauga

SEQ ID NO: 50343 - RNA, 21 nt, Artificial Sequence
  LRRK2 RNA guide
aauccagcaggaaaaagccaa

SEQ ID NO: 50344 - RNA, 21 nt, Artificial Sequence
  LRRK2 RNA guide
agaggagcucauaauccagca

SEQ ID NO: 50345 - RNA, 21 nt, Artificial Sequence
  LRRK2 RNA guide
agcucauaauccagcaggaaa

SEQ ID NO: 50346 - RNA, 21 nt, Artificial Sequence
  LRRK2 RNA guide
aggagcucauaauccagcagg

SEQ ID NO: 50347 - RNA, 21 nt, Artificial Sequence
  LRRK2 RNA guide
auaauccagcaggaaaaagcc

SEQ ID NO: 50348 - RNA, 21 nt, Artificial Sequence
  LRRK2 RNA guide
auuaugagcuccucugaggaa

SEQ ID NO: 50349 - RNA, 21 nt, Artificial Sequence
  LRRK2 RNA guide
auuccucagaggagcucauaa

SEQ ID NO: 50350 - RNA, 21 nt, Artificial Sequence
  LRRK2 RNA guide
cagaggagcucauaauccagc

SEQ ID NO: 50351 - RNA, 21 nt, Artificial Sequence
  LRRK2 RNA guide
cauaauccagcaggaaaaagc

SEQ ID NO: 50352 - RNA, 21 nt, Artificial Sequence
  LRRK2 RNA guide
ccucagaggagcucauaaucc

SEQ ID NO: 50353 - RNA, 21 nt, Artificial Sequence
  LRRK2 RNA guide
ccugcuggauuaugagcuccu

SEQ ID NO: 50354 - RNA, 21 nt, Artificial Sequence
  LRRK2 RNA guide
cucagaggagcucauaaucca

SEQ ID NO: 50355 - RNA, 21 nt, Artificial Sequence
  LRRK2 RNA guide
cucauaauccagcaggaaaaa

SEQ ID NO: 50356 - RNA, 21 nt, Artificial Sequence
  LRRK2 RNA guide
cugcuggauuaugagcuccuc

SEQ ID NO: 50357 - RNA, 21 nt, Artificial Sequence
  LRRK2 RNA guide
cuggauuaugagcuccucuga

SEQ ID NO: 50358 - RNA, 21 nt, Artificial Sequence
  LRRK2 RNA guide
cuuuuuccugcuggauuauga

SEQ ID NO: 50359 - RNA, 21 nt, Artificial Sequence
  LRRK2 RNA guide
gagcucauaauccagcaggaa

SEQ ID NO: 50360 - RNA, 21 nt, Artificial Sequence
  LRRK2 RNA guide
gaggagcucauaauccagcag

SEQ ID NO: 50361 - RNA, 21 nt, Artificial Sequence
  LRRK2 RNA guide
gauuaugagcuccucugagga

SEQ ID NO: 50362 - RNA, 21 nt, Artificial Sequence
  LRRK2 RNA guide
gcucauaauccagcaggaaaa

SEQ ID NO: 50363 - RNA, 21 nt, Artificial Sequence
  LRRK2 RNA guide
gcuggauuaugagcuccucug

SEQ ID NO: 50364 - RNA, 21 nt, Artificial Sequence
  LRRK2 RNA guide
gcuuuuuccugcuggauuaug

SEQ ID NO: 50365 - RNA, 21 nt, Artificial Sequence
  LRRK2 RNA guide
ggagcucauaauccagcagga

SEQ ID NO: 50366 - RNA, 21 nt, Artificial Sequence
  LRRK2 RNA guide
ggauuaugagcuccucugagg

SEQ ID NO: 50367 - RNA, 21 nt, Artificial Sequence
  LRRK2 RNA guide
ggcuuuuuccugcuggauuau

SEQ ID NO: 50368 - RNA, 21 nt, Artificial Sequence
  LRRK2 RNA guide
uaauccagcaggaaaaagcca

SEQ ID NO: 50369 - RNA, 21 nt, Artificial Sequence
  LRRK2 RNA guide
ucagaggagcucauaauccag

SEQ ID NO: 50370 - RNA, 21 nt, Artificial Sequence
  LRRK2 RNA guide
ucauaauccagcaggaaaaag

SEQ ID NO: 50371 - RNA, 21 nt, Artificial Sequence
  LRRK2 RNA guide
uccucagaggagcucauaauc

SEQ ID NO: 50372 - RNA, 21 nt, Artificial Sequence
  LRRK2 RNA guide
uccugcuggauuaugagcucc

SEQ ID NO: 50373 - RNA, 21 nt, Artificial Sequence
  LRRK2 RNA guide
ugcuggauuaugagcuccucu

SEQ ID NO: 50374 - RNA, 21 nt, Artificial Sequence
  LRRK2 RNA guide
uggauuaugagcuccucugag

SEQ ID NO: 50375 - RNA, 21 nt, Artificial Sequence
  LRRK2 RNA guide
uggcuuuuuccugcuggauua

SEQ ID NO: 50376 - RNA, 21 nt, Artificial Sequence
  LRRK2 RNA guide
uuccucagaggagcucauaau

SEQ ID NO: 50377 - RNA, 21 nt, Artificial Sequence
  LRRK2 RNA guide
uuccugcuggauuaugagcuc

SEQ ID NO: 50378 - RNA, 21 nt, Artificial Sequence
  LRRK2 RNA guide
uuggcuuuuuccugcuggauu

SEQ ID NO: 50379 - RNA, 21 nt, Artificial Sequence
  LRRK2 RNA guide
uuuccugcuggauuaugagcu

SEQ ID NO: 50380 - RNA, 21 nt, Artificial Sequence
  LRRK2 RNA guide
uuuggcuuuuuccugcuggau

SEQ ID NO: 50381 - RNA, 21 nt, Artificial Sequence
  LRRK2 RNA guide
uuuuccugcuggauuaugagc

SEQ ID NO: 50382 - RNA, 21 nt, Artificial Sequence
  LRRK2 RNA guide
uuuuuccugcuggauuaugag

SEQ ID NO: 50383 - RNA, 22 nt, Artificial Sequence
  LRRK2 RNA guide
aauccagcaggaaaaagccaaa

SEQ ID NO: 50384 - RNA, 22 nt, Artificial Sequence
  LRRK2 RNA guide
agaggagcucauaauccagcag

SEQ ID NO: 50385 - RNA, 22 nt, Artificial Sequence
  LRRK2 RNA guide
agcucauaauccagcaggaaaa

SEQ ID NO: 50386 - RNA, 22 nt, Artificial Sequence
  LRRK2 RNA guide
aggagcucauaauccagcagga

SEQ ID NO: 50387 - RNA, 22 nt, Artificial Sequence
  LRRK2 RNA guide
auaauccagcaggaaaaagcca

SEQ ID NO: 50388 - RNA, 22 nt, Artificial Sequence
  LRRK2 RNA guide
auuaugagcuccucugaggaau

SEQ ID NO: 50389 - RNA, 22 nt, Artificial Sequence
  LRRK2 RNA guide
auuccucagaggagcucauaau

SEQ ID NO: 50390 - RNA, 22 nt, Artificial Sequence
  LRRK2 RNA guide
auuuggcuuuuuccugcuggau

SEQ ID NO: 50391 - RNA, 22 nt, Artificial Sequence
  LRRK2 RNA guide
cagaggagcucauaauccagca

SEQ ID NO: 50392 - RNA, 22 nt, Artificial Sequence
  LRRK2 RNA guide
cauaauccagcaggaaaaagcc

SEQ ID NO: 50393 - RNA, 22 nt, Artificial Sequence
  LRRK2 RNA guide
ccucagaggagcucauaaucca

SEQ ID NO: 50394 - RNA, 22 nt, Artificial Sequence
  LRRK2 RNA guide
ccugcuggauuaugagcuccuc

SEQ ID NO: 50395 - RNA, 22 nt, Artificial Sequence
  LRRK2 RNA guide
cucagaggagcucauaauccag

SEQ ID NO: 50396 - RNA, 22 nt, Artificial Sequence
  LRRK2 RNA guide
cucauaauccagcaggaaaaag

SEQ ID NO: 50397 - RNA, 22 nt, Artificial Sequence
  LRRK2 RNA guide
cugcuggauuaugagcuccucu

SEQ ID NO: 50398 - RNA, 22 nt, Artificial Sequence
  LRRK2 RNA guide
cuggauuaugagcuccucugag

SEQ ID NO: 50399 - RNA, 22 nt, Artificial Sequence
  LRRK2 RNA guide
cuuuuuccugcuggauuaugag

SEQ ID NO: 50400 - RNA, 22 nt, Artificial Sequence
  LRRK2 RNA guide
gagcucauaauccagcaggaaa

SEQ ID NO: 50401 - RNA, 22 nt, Artificial Sequence
  LRRK2 RNA guide
gaggagcucauaauccagcagg

SEQ ID NO: 50402 - RNA, 22 nt, Artificial Sequence
  LRRK2 RNA guide
gauuaugagcuccucugaggaa

SEQ ID NO: 50403 - RNA, 22 nt, Artificial Sequence
  LRRK2 RNA guide
gcucauaauccagcaggaaaaa

SEQ ID NO: 50404 - RNA, 22 nt, Artificial Sequence
  LRRK2 RNA guide
gcuggauuaugagcuccucuga

SEQ ID NO: 50405 - RNA, 22 nt, Artificial Sequence
  LRRK2 RNA guide
gcuuuuuccugcuggauuauga

SEQ ID NO: 50406 - RNA, 22 nt, Artificial Sequence
  LRRK2 RNA guide
ggagcucauaauccagcaggaa

SEQ ID NO: 50407 - RNA, 22 nt, Artificial Sequence
  LRRK2 RNA guide
ggauuaugagcuccucugagga

SEQ ID NO: 50408 - RNA, 22 nt, Artificial Sequence
  LRRK2 RNA guide
ggcuuuuuccugcuggauuaug

SEQ ID NO: 50409 - RNA, 22 nt, Artificial Sequence
  LRRK2 RNA guide
uaauccagcaggaaaaagccaa

SEQ ID NO: 50410 - RNA, 22 nt, Artificial Sequence
  LRRK2 RNA guide
uauuccucagaggagcucauaa

SEQ ID NO: 50411 - RNA, 22 nt, Artificial Sequence
  LRRK2 RNA guide
ucagaggagcucauaauccagc

SEQ ID NO: 50412 - RNA, 22 nt, Artificial Sequence
  LRRK2 RNA guide
ucauaauccagcaggaaaaagc

SEQ ID NO: 50413 - RNA, 22 nt, Artificial Sequence
  LRRK2 RNA guide
uccucagaggagcucauaaucc

SEQ ID NO: 50414 - RNA, 22 nt, Artificial Sequence
  LRRK2 RNA guide
uccugcuggauuaugagcuccu

SEQ ID NO: 50415 - RNA, 22 nt, Artificial Sequence
  LRRK2 RNA guide
ugcuggauuaugagcuccucug

SEQ ID NO: 50416 - RNA, 22 nt, Artificial Sequence
  LRRK2 RNA guide
uggauuaugagcuccucugagg

SEQ ID NO: 50417 - RNA, 22 nt, Artificial Sequence
  LRRK2 RNA guide
uggcuuuuuccugcuggauuau

SEQ ID NO: 50418 - RNA, 22 nt, Artificial Sequence
  LRRK2 RNA guide
uuccucagaggagcucauaauc

SEQ ID NO: 50419 - RNA, 22 nt, Artificial Sequence
  LRRK2 RNA guide
uuccugcuggauuaugagcucc

SEQ ID NO: 50420 - RNA, 22 nt, Artificial Sequence
  LRRK2 RNA guide
uuggcuuuuuccugcuggauua

SEQ ID NO: 50421 - RNA, 22 nt, Artificial Sequence
  LRRK2 RNA guide
uuuccugcuggauuaugagcuc

SEQ ID NO: 50422 - RNA, 22 nt, Artificial Sequence
  LRRK2 RNA guide
uuuggcuuuuuccugcuggauu

SEQ ID NO: 50423 - RNA, 22 nt, Artificial Sequence
  LRRK2 RNA guide
uuuuccugcuggauuaugagcu

SEQ ID NO: 50424 - RNA, 22 nt, Artificial Sequence
  LRRK2 RNA guide
uuuuuccugcuggauuaugagc

SEQ ID NO: 50425 - RNA, 20 nt, Artificial Sequence
  LRRK2 RNA guide
aagacuacaaaugugaauug

SEQ ID NO: 50426 - RNA, 20 nt, Artificial Sequence
  LRRK2 RNA guide
acaaaugugaauugagcaua

SEQ ID NO: 50427 - RNA, 20 nt, Artificial Sequence
  LRRK2 RNA guide
acauuuguagucuuuugagu

SEQ ID NO: 50428 - RNA, 20 nt, Artificial Sequence
  LRRK2 RNA guide
acuacaaaugugaauugagc

SEQ ID NO: 50429 - RNA, 20 nt, Artificial Sequence
  LRRK2 RNA guide
acucaaaagacuacaaaugu

SEQ ID NO: 50430 - RNA, 20 nt, Artificial Sequence
  LRRK2 RNA guide
agacuacaaaugugaauuga

SEQ ID NO: 50431 - RNA, 20 nt, Artificial Sequence
  LRRK2 RNA guide
augcucaauucacauuugua

SEQ ID NO: 50432 - RNA, 20 nt, Artificial Sequence
  LRRK2 RNA guide
caaaagacuacaaaugugaa

SEQ ID NO: 50433 - RNA, 20 nt, Artificial Sequence
  LRRK2 RNA guide
caaaugugaauugagcauaa

SEQ ID NO: 50434 - RNA, 20 nt, Artificial Sequence
  LRRK2 RNA guide
caauucacauuuguagucuu

SEQ ID NO: 50435 - RNA, 20 nt, Artificial Sequence
  LRRK2 RNA guide
cacauuuguagucuuuugag

SEQ ID NO: 50436 - RNA, 20 nt, Artificial Sequence
  LRRK2 RNA guide
cauacucaaaagacuacaaa

SEQ ID NO: 50437 - RNA, 20 nt, Artificial Sequence
  LRRK2 RNA guide
cauuuguagucuuuugagua

SEQ ID NO: 50438 - RNA, 20 nt, Artificial Sequence
  LRRK2 RNA guide
ccugcauacucaaaagacua

SEQ ID NO: 50439 - RNA, 20 nt, Artificial Sequence
  LRRK2 RNA guide
cuacaaaugugaauugagca

SEQ ID NO: 50440 - RNA, 20 nt, Artificial Sequence
  LRRK2 RNA guide
cucaaaagacuacaaaugug

SEQ ID NO: 50441 - RNA, 20 nt, Artificial Sequence
  LRRK2 RNA guide
cucaauucacauuuguaguc

SEQ ID NO: 50442 - RNA, 20 nt, Artificial Sequence
  LRRK2 RNA guide
cugcauacucaaaagacuac

SEQ ID NO: 50443 - RNA, 20 nt, Artificial Sequence
  LRRK2 RNA guide
gacuacaaaugugaauugag

SEQ ID NO: 50444 - RNA, 20 nt, Artificial Sequence
  LRRK2 RNA guide
gcauacucaaaagacuacaa

SEQ ID NO: 50445 - RNA, 20 nt, Artificial Sequence
  LRRK2 RNA guide
gcucaauucacauuuguagu

SEQ ID NO: 50446 - RNA, 20 nt, Artificial Sequence
  LRRK2 RNA guide
guaaauuaugcucaauucac

SEQ ID NO: 50447 - RNA, 20 nt, Artificial Sequence
  LRRK2 RNA guide
uacaaaugugaauugagcau

SEQ ID NO: 50448 - RNA, 20 nt, Artificial Sequence
  LRRK2 RNA guide
uacucaaaagacuacaaaug

SEQ ID NO: 50449 - RNA, 20 nt, Artificial Sequence
  LRRK2 RNA guide
uaugcucaauucacauuugu

SEQ ID NO: 50450 - RNA, 20 nt, Artificial Sequence
  LRRK2 RNA guide
ucaaaagacuacaaauguga

SEQ ID NO: 50451 - RNA, 20 nt, Artificial Sequence
  LRRK2 RNA guide
ucaauucacauuuguagucu

SEQ ID NO: 50452 - RNA, 20 nt, Artificial Sequence
  LRRK2 RNA guide
ucacauuuguagucuuuuga

SEQ ID NO: 50453 - RNA, 20 nt, Artificial Sequence
  LRRK2 RNA guide
ugcauacucaaaagacuaca

SEQ ID NO: 50454 - RNA, 20 nt, Artificial Sequence
  LRRK2 RNA guide
ugcucaauucacauuuguag

SEQ ID NO: 50455 - RNA, 20 nt, Artificial Sequence
  LRRK2 RNA guide
uuaugcucaauucacauuug

SEQ ID NO: 50456 - RNA, 20 nt, Artificial Sequence
  LRRK2 RNA guide
uucacauuuguagucuuuug

SEQ ID NO: 50457 - RNA, 21 nt, Artificial Sequence
  LRRK2 RNA guide
acuacaaaugugaauugagca

SEQ ID NO: 50458 - RNA, 21 nt, Artificial Sequence
  LRRK2 RNA guide
acucaaaagacuacaaaugug

SEQ ID NO: 50459 - RNA, 21 nt, Artificial Sequence
  LRRK2 RNA guide
agacuacaaaugugaauugag

SEQ ID NO: 50460 - RNA, 21 nt, Artificial Sequence
  LRRK2 RNA guide
augcucaauucacauuuguag

SEQ ID NO: 50461 - RNA, 21 nt, Artificial Sequence
  LRRK2 RNA guide
cacauuuguagucuuuugagu

SEQ ID NO: 50462 - RNA, 21 nt, Artificial Sequence
  LRRK2 RNA guide
cccugcauacucaaaagacua

SEQ ID NO: 50463 - RNA, 21 nt, Artificial Sequence
  LRRK2 RNA guide
ccugcauacucaaaagacuac

SEQ ID NO: 50464 - RNA, 21 nt, Artificial Sequence
  LRRK2 RNA guide
cuacaaaugugaauugagcau

SEQ ID NO: 50465 - RNA, 21 nt, Artificial Sequence
  LRRK2 RNA guide
cucaaaagacuacaaauguga

SEQ ID NO: 50466 - RNA, 21 nt, Artificial Sequence
  LRRK2 RNA guide
cucaauucacauuuguagucu

SEQ ID NO: 50467 - RNA, 21 nt, Artificial Sequence
  LRRK2 RNA guide
cugcauacucaaaagacuaca

SEQ ID NO: 50468 - RNA, 21 nt, Artificial Sequence
  LRRK2 RNA guide
gacuacaaaugugaauugagc

SEQ ID NO: 50469 - RNA, 21 nt, Artificial Sequence
  LRRK2 RNA guide
gcauacucaaaagacuacaaa

SEQ ID NO: 50470 - RNA, 21 nt, Artificial Sequence
  LRRK2 RNA guide
gcucaauucacauuuguaguc

SEQ ID NO: 50471 - RNA, 21 nt, Artificial Sequence
  LRRK2 RNA guide
ucacauuuguagucuuuugag

SEQ ID NO: 50472 - RNA, 21 nt, Artificial Sequence
  LRRK2 RNA guide
ugcauacucaaaagacuacaa

SEQ ID NO: 50473 - RNA, 21 nt, Artificial Sequence
  LRRK2 RNA guide
ugcucaauucacauuuguagu

SEQ ID NO: 50474 - RNA, 22 nt, Artificial Sequence
  LRRK2 RNA guide
aagacuacaaaugugaauugag

SEQ ID NO: 50475 - RNA, 22 nt, Artificial Sequence
  LRRK2 RNA guide
acccugcauacucaaaagacua

SEQ ID NO: 50476 - RNA, 22 nt, Artificial Sequence
  LRRK2 RNA guide
acuacaaaugugaauugagcau

SEQ ID NO: 50477 - RNA, 22 nt, Artificial Sequence
  LRRK2 RNA guide
acucaaaagacuacaaauguga

SEQ ID NO: 50478 - RNA, 22 nt, Artificial Sequence
  LRRK2 RNA guide
agacuacaaaugugaauugagc

SEQ ID NO: 50479 - RNA, 22 nt, Artificial Sequence
  LRRK2 RNA guide
augcucaauucacauuuguagu

SEQ ID NO: 50480 - RNA, 22 nt, Artificial Sequence
  LRRK2 RNA guide
cacauuuguagucuuuugagua

SEQ ID NO: 50481 - RNA, 22 nt, Artificial Sequence
  LRRK2 RNA guide
cauacucaaaagacuacaaaug

SEQ ID NO: 50482 - RNA, 22 nt, Artificial Sequence
  LRRK2 RNA guide
cauuuguagucuuuugaguaug

SEQ ID NO: 50483 - RNA, 22 nt, Artificial Sequence
  LRRK2 RNA guide
cccugcauacucaaaagacuac

SEQ ID NO: 50484 - RNA, 22 nt, Artificial Sequence
  LRRK2 RNA guide
ccugcauacucaaaagacuaca

SEQ ID NO: 50485 - RNA, 22 nt, Artificial Sequence
  LRRK2 RNA guide
cuacaaaugugaauugagcaua

SEQ ID NO: 50486 - RNA, 22 nt, Artificial Sequence
  LRRK2 RNA guide
cucaaaagacuacaaaugugaa

SEQ ID NO: 50487 - RNA, 22 nt, Artificial Sequence
  LRRK2 RNA guide
cucaauucacauuuguagucuu

SEQ ID NO: 50488 - RNA, 22 nt, Artificial Sequence
  LRRK2 RNA guide
cugcauacucaaaagacuacaa

SEQ ID NO: 50489 - RNA, 22 nt, Artificial Sequence
  LRRK2 RNA guide
gacuacaaaugugaauugagca

SEQ ID NO: 50490 - RNA, 22 nt, Artificial Sequence
  LRRK2 RNA guide
gcauacucaaaagacuacaaau

SEQ ID NO: 50491 - RNA, 22 nt, Artificial Sequence
  LRRK2 RNA guide
gcucaauucacauuuguagucu

SEQ ID NO: 50492 - RNA, 22 nt, Artificial Sequence
  LRRK2 RNA guide
uacucaaaagacuacaaaugug

SEQ ID NO: 50493 - RNA, 22 nt, Artificial Sequence
  LRRK2 RNA guide
uaugcucaauucacauuuguag

SEQ ID NO: 50494 - RNA, 22 nt, Artificial Sequence
  LRRK2 RNA guide
ucacauuuguagucuuuugagu

SEQ ID NO: 50495 - RNA, 22 nt, Artificial Sequence
  LRRK2 RNA guide
ugcauacucaaaagacuacaaa

SEQ ID NO: 50496 - RNA, 22 nt, Artificial Sequence
  LRRK2 RNA guide
ugcucaauucacauuuguaguc

SEQ ID NO: 50497 - RNA, 22 nt, Artificial Sequence
  LRRK2 RNA guide
uucacauuuguagucuuuugag

SEQ ID NO: 50498 - RNA, 20 nt, Artificial Sequence
  LRRK2 RNA guide
aaaagacuacaaacgugaau

SEQ ID NO: 50499 - RNA, 20 nt, Artificial Sequence
  LRRK2 RNA guide
aaacgugaauugagcauaau

SEQ ID NO: 50500 - RNA, 20 nt, Artificial Sequence
  LRRK2 RNA guide
aaagacuacaaacgugaauu

SEQ ID NO: 50501 - RNA, 20 nt, Artificial Sequence
  LRRK2 RNA guide
aaauuaugcucaauucacgu

SEQ ID NO: 50502 - RNA, 20 nt, Artificial Sequence
  LRRK2 RNA guide
aacgugaauugagcauaauu

SEQ ID NO: 50503 - RNA, 20 nt, Artificial Sequence
  LRRK2 RNA guide
aagacuacaaacgugaauug

SEQ ID NO: 50504 - RNA, 20 nt, Artificial Sequence
  LRRK2 RNA guide
aauuaugcucaauucacguu

SEQ ID NO: 50505 - RNA, 20 nt, Artificial Sequence
  LRRK2 RNA guide
aauucacguuuguagucuuu

SEQ ID NO: 50506 - RNA, 20 nt, Artificial Sequence
  LRRK2 RNA guide
acaaacgugaauugagcaua

SEQ ID NO: 50507 - RNA, 20 nt, Artificial Sequence
  LRRK2 RNA guide
acgugaauugagcauaauuu

SEQ ID NO: 50508 - RNA, 20 nt, Artificial Sequence
  LRRK2 RNA guide
acguuuguagucuuuugagu

SEQ ID NO: 50509 - RNA, 20 nt, Artificial Sequence
  LRRK2 RNA guide
acuacaaacgugaauugagc

SEQ ID NO: 50510 - RNA, 20 nt, Artificial Sequence
  LRRK2 RNA guide
acucaaaagacuacaaacgu

SEQ ID NO: 50511 - RNA, 20 nt, Artificial Sequence
  LRRK2 RNA guide
agacuacaaacgugaauuga

SEQ ID NO: 50512 - RNA, 20 nt, Artificial Sequence
  LRRK2 RNA guide
auacucaaaagacuacaaac

SEQ ID NO: 50513 - RNA, 20 nt, Artificial Sequence
  LRRK2 RNA guide
augcucaauucacguuugua

SEQ ID NO: 50514 - RNA, 20 nt, Artificial Sequence
  LRRK2 RNA guide
auuaugcucaauucacguuu

SEQ ID NO: 50515 - RNA, 20 nt, Artificial Sequence
  LRRK2 RNA guide
auucacguuuguagucuuuu

SEQ ID NO: 50516 - RNA, 20 nt, Artificial Sequence
  LRRK2 RNA guide
caaaagacuacaaacgugaa

SEQ ID NO: 50517 - RNA, 20 nt, Artificial Sequence
  LRRK2 RNA guide
caaacgugaauugagcauaa

SEQ ID NO: 50518 - RNA, 20 nt, Artificial Sequence
  LRRK2 RNA guide
caauucacguuuguagucuu

SEQ ID NO: 50519 - RNA, 20 nt, Artificial Sequence
  LRRK2 RNA guide
cacguuuguagucuuuugag

SEQ ID NO: 50520 - RNA, 20 nt, Artificial Sequence
  LRRK2 RNA guide
cguuuguagucuuuugagua

SEQ ID NO: 50521 - RNA, 20 nt, Artificial Sequence
  LRRK2 RNA guide
cuacaaacgugaauugagca

SEQ ID NO: 50522 - RNA, 20 nt, Artificial Sequence
  LRRK2 RNA guide
cucaaaagacuacaaacgug

SEQ ID NO: 50523 - RNA, 20 nt, Artificial Sequence
  LRRK2 RNA guide
cucaauucacguuuguaguc

SEQ ID NO: 50524 - RNA, 20 nt, Artificial Sequence
  LRRK2 RNA guide
gacuacaaacgugaauugag

SEQ ID NO: 50525 - RNA, 20 nt, Artificial Sequence
  LRRK2 RNA guide
gcucaauucacguuuguagu

SEQ ID NO: 50526 - RNA, 20 nt, Artificial Sequence
  LRRK2 RNA guide
uaaauuaugcucaauucacg

SEQ ID NO: 50527 - RNA, 20 nt, Artificial Sequence
  LRRK2 RNA guide
uacaaacgugaauugagcau

SEQ ID NO: 50528 - RNA, 20 nt, Artificial Sequence
  LRRK2 RNA guide
uacucaaaagacuacaaacg

SEQ ID NO: 50529 - RNA, 20 nt, Artificial Sequence
  LRRK2 RNA guide
uaugcucaauucacguuugu

SEQ ID NO: 50530 - RNA, 20 nt, Artificial Sequence
  LRRK2 RNA guide
ucaaaagacuacaaacguga

SEQ ID NO: 50531 - RNA, 20 nt, Artificial Sequence
  LRRK2 RNA guide
ucaauucacguuuguagucu

SEQ ID NO: 50532 - RNA, 20 nt, Artificial Sequence
  LRRK2 RNA guide
ucacguuuguagucuuuuga

SEQ ID NO: 50533 - RNA, 20 nt, Artificial Sequence
  LRRK2 RNA guide
ugcucaauucacguuuguag

SEQ ID NO: 50534 - RNA, 20 nt, Artificial Sequence
  LRRK2 RNA guide
uuaugcucaauucacguuug

SEQ ID NO: 50535 - RNA, 20 nt, Artificial Sequence
  LRRK2 RNA guide
uucacguuuguagucuuuug

SEQ ID NO: 50536 - RNA, 21 nt, Artificial Sequence
  LRRK2 RNA guide
aaagacuacaaacgugaauug

SEQ ID NO: 50537 - RNA, 21 nt, Artificial Sequence
  LRRK2 RNA guide
aagacuacaaacgugaauuga

SEQ ID NO: 50538 - RNA, 21 nt, Artificial Sequence
  LRRK2 RNA guide
acaaacgugaauugagcauaa

SEQ ID NO: 50539 - RNA, 21 nt, Artificial Sequence
  LRRK2 RNA guide
acguuuguagucuuuugagua

SEQ ID NO: 50540 - RNA, 21 nt, Artificial Sequence
  LRRK2 RNA guide
acuacaaacgugaauugagca

SEQ ID NO: 50541 - RNA, 21 nt, Artificial Sequence
  LRRK2 RNA guide
acucaaaagacuacaaacgug

SEQ ID NO: 50542 - RNA, 21 nt, Artificial Sequence
  LRRK2 RNA guide
agacuacaaacgugaauugag

SEQ ID NO: 50543 - RNA, 21 nt, Artificial Sequence
  LRRK2 RNA guide
auacucaaaagacuacaaacg

SEQ ID NO: 50544 - RNA, 21 nt, Artificial Sequence
  LRRK2 RNA guide
augcucaauucacguuuguag

SEQ ID NO: 50545 - RNA, 21 nt, Artificial Sequence
  LRRK2 RNA guide
auuaugcucaauucacguuug

SEQ ID NO: 50546 - RNA, 21 nt, Artificial Sequence
  LRRK2 RNA guide
auucacguuuguagucuuuug

SEQ ID NO: 50547 - RNA, 21 nt, Artificial Sequence
  LRRK2 RNA guide
caaaagacuacaaacgugaau

SEQ ID NO: 50548 - RNA, 21 nt, Artificial Sequence
  LRRK2 RNA guide
caaacgugaauugagcauaau

SEQ ID NO: 50549 - RNA, 21 nt, Artificial Sequence
  LRRK2 RNA guide
caauucacguuuguagucuuu

SEQ ID NO: 50550 - RNA, 21 nt, Artificial Sequence
  LRRK2 RNA guide
cacguuuguagucuuuugagu

SEQ ID NO: 50551 - RNA, 21 nt, Artificial Sequence
  LRRK2 RNA guide
cauacucaaaagacuacaaac

SEQ ID NO: 50552 - RNA, 21 nt, Artificial Sequence
  LRRK2 RNA guide
cguuuguagucuuuugaguau

SEQ ID NO: 50553 - RNA, 21 nt, Artificial Sequence
  LRRK2 RNA guide
cuacaaacgugaauugagcau

SEQ ID NO: 50554 - RNA, 21 nt, Artificial Sequence
  LRRK2 RNA guide
cucaaaagacuacaaacguga

SEQ ID NO: 50555 - RNA, 21 nt, Artificial Sequence
  LRRK2 RNA guide
cucaauucacguuuguagucu

SEQ ID NO: 50556 - RNA, 21 nt, Artificial Sequence
  LRRK2 RNA guide
gacuacaaacgugaauugagc

SEQ ID NO: 50557 - RNA, 21 nt, Artificial Sequence
  LRRK2 RNA guide
gcucaauucacguuuguaguc

SEQ ID NO: 50558 - RNA, 21 nt, Artificial Sequence
  LRRK2 RNA guide
guaaauuaugcucaauucacg

SEQ ID NO: 50559 - RNA, 21 nt, Artificial Sequence
  LRRK2 RNA guide
uacaaacgugaauugagcaua

SEQ ID NO: 50560 - RNA, 21 nt, Artificial Sequence
  LRRK2 RNA guide
uacucaaaagacuacaaacgu

SEQ ID NO: 50561 - RNA, 21 nt, Artificial Sequence
  LRRK2 RNA guide
uaugcucaauucacguuugua

SEQ ID NO: 50562 - RNA, 21 nt, Artificial Sequence
  LRRK2 RNA guide
ucaaaagacuacaaacgugaa

SEQ ID NO: 50563 - RNA, 21 nt, Artificial Sequence
  LRRK2 RNA guide
ucaauucacguuuguagucuu

SEQ ID NO: 50564 - RNA, 21 nt, Artificial Sequence
  LRRK2 RNA guide
ucacguuuguagucuuuugag

SEQ ID NO: 50565 - RNA, 21 nt, Artificial Sequence
  LRRK2 RNA guide
ugcucaauucacguuuguagu

SEQ ID NO: 50566 - RNA, 21 nt, Artificial Sequence
  LRRK2 RNA guide
uuaugcucaauucacguuugu

SEQ ID NO: 50567 - RNA, 21 nt, Artificial Sequence
  LRRK2 RNA guide
uucacguuuguagucuuuuga

SEQ ID NO: 50568 - RNA, 22 nt, Artificial Sequence
  LRRK2 RNA guide
aaaagacuacaaacgugaauug

SEQ ID NO: 50569 - RNA, 22 nt, Artificial Sequence
  LRRK2 RNA guide
aaagacuacaaacgugaauuga

SEQ ID NO: 50570 - RNA, 22 nt, Artificial Sequence
  LRRK2 RNA guide
aagacuacaaacgugaauugag

SEQ ID NO: 50571 - RNA, 22 nt, Artificial Sequence
  LRRK2 RNA guide
aauuaugcucaauucacguuug

SEQ ID NO: 50572 - RNA, 22 nt, Artificial Sequence
  LRRK2 RNA guide
aauucacguuuguagucuuuug

SEQ ID NO: 50573 - RNA, 22 nt, Artificial Sequence
  LRRK2 RNA guide
acaaacgugaauugagcauaau

SEQ ID NO: 50574 - RNA, 22 nt, Artificial Sequence
  LRRK2 RNA guide
acgugaauugagcauaauuuac

SEQ ID NO: 50575 - RNA, 22 nt, Artificial Sequence
  LRRK2 RNA guide
acguuuguagucuuuugaguau

SEQ ID NO: 50576 - RNA, 22 nt, Artificial Sequence
  LRRK2 RNA guide
acuacaaacgugaauugagcau

SEQ ID NO: 50577 - RNA, 22 nt, Artificial Sequence
  LRRK2 RNA guide
acucaaaagacuacaaacguga

SEQ ID NO: 50578 - RNA, 22 nt, Artificial Sequence
  LRRK2 RNA guide
agacuacaaacgugaauugagc

SEQ ID NO: 50579 - RNA, 22 nt, Artificial Sequence
  LRRK2 RNA guide
auacucaaaagacuacaaacgu

SEQ ID NO: 50580 - RNA, 22 nt, Artificial Sequence
  LRRK2 RNA guide
augcucaauucacguuuguagu

SEQ ID NO: 50581 - RNA, 22 nt, Artificial Sequence
  LRRK2 RNA guide
auuaugcucaauucacguuugu

SEQ ID NO: 50582 - RNA, 22 nt, Artificial Sequence
  LRRK2 RNA guide
auucacguuuguagucuuuuga

SEQ ID NO: 50583 - RNA, 22 nt, Artificial Sequence
  LRRK2 RNA guide
caaaagacuacaaacgugaauu

SEQ ID NO: 50584 - RNA, 22 nt, Artificial Sequence
  LRRK2 RNA guide
caaacgugaauugagcauaauu

SEQ ID NO: 50585 - RNA, 22 nt, Artificial Sequence
  LRRK2 RNA guide
caauucacguuuguagucuuuu

SEQ ID NO: 50586 - RNA, 22 nt, Artificial Sequence
  LRRK2 RNA guide
cacguuuguagucuuuugagua

SEQ ID NO: 50587 - RNA, 22 nt, Artificial Sequence
  LRRK2 RNA guide
cauacucaaaagacuacaaacg

SEQ ID NO: 50588 - RNA, 22 nt, Artificial Sequence
  LRRK2 RNA guide
cguuuguagucuuuugaguaug

SEQ ID NO: 50589 - RNA, 22 nt, Artificial Sequence
  LRRK2 RNA guide
cuacaaacgugaauugagcaua

SEQ ID NO: 50590 - RNA, 22 nt, Artificial Sequence
  LRRK2 RNA guide
cucaaaagacuacaaacgugaa

SEQ ID NO: 50591 - RNA, 22 nt, Artificial Sequence
  LRRK2 RNA guide
cucaauucacguuuguagucuu

SEQ ID NO: 50592 - RNA, 22 nt, Artificial Sequence
  LRRK2 RNA guide
gacuacaaacgugaauugagca

SEQ ID NO: 50593 - RNA, 22 nt, Artificial Sequence
  LRRK2 RNA guide
gcauacucaaaagacuacaaac

SEQ ID NO: 50594 - RNA, 22 nt, Artificial Sequence
  LRRK2 RNA guide
gcucaauucacguuuguagucu

SEQ ID NO: 50595 - RNA, 22 nt, Artificial Sequence
  LRRK2 RNA guide
guaaauuaugcucaauucacgu

SEQ ID NO: 50596 - RNA, 22 nt, Artificial Sequence
  LRRK2 RNA guide
uacaaacgugaauugagcauaa

SEQ ID NO: 50597 - RNA, 22 nt, Artificial Sequence
  LRRK2 RNA guide
uacucaaaagacuacaaacgug

SEQ ID NO: 50598 - RNA, 22 nt, Artificial Sequence
  LRRK2 RNA guide
uaugcucaauucacguuuguag

SEQ ID NO: 50599 - RNA, 22 nt, Artificial Sequence
  LRRK2 RNA guide
ucaaaagacuacaaacgugaau

SEQ ID NO: 50600 - RNA, 22 nt, Artificial Sequence
  LRRK2 RNA guide
ucaauucacguuuguagucuuu

SEQ ID NO: 50601 - RNA, 22 nt, Artificial Sequence
  LRRK2 RNA guide
ucacguuuguagucuuuugagu

SEQ ID NO: 50602 - RNA, 22 nt, Artificial Sequence
  LRRK2 RNA guide
ugcucaauucacguuuguaguc

SEQ ID NO: 50603 - RNA, 22 nt, Artificial Sequence
  LRRK2 RNA guide
uguaaauuaugcucaauucacg

SEQ ID NO: 50604 - RNA, 22 nt, Artificial Sequence
  LRRK2 RNA guide
uuaugcucaauucacguuugua

SEQ ID NO: 50605 - RNA, 22 nt, Artificial Sequence
  LRRK2 RNA guide
uucacguuuguagucuuuugag

SEQ ID NO: 50606 - RNA, 20 nt, Artificial Sequence
  LRRK2 RNA guide
aauuuuuuggggcacauaua

SEQ ID NO: 50607 - RNA, 20 nt, Artificial Sequence
  LRRK2 RNA guide
aggguaugaauuuuuugggg

SEQ ID NO: 50608 - RNA, 20 nt, Artificial Sequence
  LRRK2 RNA guide
auauauauaugugccccaaa

SEQ ID NO: 50609 - RNA, 20 nt, Artificial Sequence
  LRRK2 RNA guide
auauauaugugccccaaaaa

SEQ ID NO: 50610 - RNA, 20 nt, Artificial Sequence
  LRRK2 RNA guide
auauaugugccccaaaaaau

SEQ ID NO: 50611 - RNA, 20 nt, Artificial Sequence
  LRRK2 RNA guide
auaugugccccaaaaaauuc

SEQ ID NO: 50612 - RNA, 20 nt, Artificial Sequence
  LRRK2 RNA guide
augaauuuuuuggggcacau

SEQ ID NO: 50613 - RNA, 20 nt, Artificial Sequence
  LRRK2 RNA guide
augcaggguaugaauuuuuu

SEQ ID NO: 50614 - RNA, 20 nt, Artificial Sequence
  LRRK2 RNA guide
augugccccaaaaaauucau

SEQ ID NO: 50615 - RNA, 20 nt, Artificial Sequence
  LRRK2 RNA guide
auuuuuuggggcacauauau

SEQ ID NO: 50616 - RNA, 20 nt, Artificial Sequence
  LRRK2 RNA guide
caggguaugaauuuuuuggg

SEQ ID NO: 50617 - RNA, 20 nt, Artificial Sequence
  LRRK2 RNA guide
gaauuuuuuggggcacauau

SEQ ID NO: 50618 - RNA, 20 nt, Artificial Sequence
  LRRK2 RNA guide
gcaggguaugaauuuuuugg

SEQ ID NO: 50619 - RNA, 20 nt, Artificial Sequence
  LRRK2 RNA guide
gccccaaaaaauucauaccc

SEQ ID NO: 50620 - RNA, 20 nt, Artificial Sequence
  LRRK2 RNA guide
ggguaugaauuuuuuggggc

SEQ ID NO: 50621 - RNA, 20 nt, Artificial Sequence
  LRRK2 RNA guide
gguaugaauuuuuuggggca

SEQ ID NO: 50622 - RNA, 20 nt, Artificial Sequence
  LRRK2 RNA guide
guaugaauuuuuuggggcac

SEQ ID NO: 50623 - RNA, 20 nt, Artificial Sequence
  LRRK2 RNA guide
gugccccaaaaaauucauac

SEQ ID NO: 50624 - RNA, 20 nt, Artificial Sequence
  LRRK2 RNA guide
uauauauauaugugccccaa

SEQ ID NO: 50625 - RNA, 20 nt, Artificial Sequence
  LRRK2 RNA guide
uauauauaugugccccaaaa

SEQ ID NO: 50626 - RNA, 20 nt, Artificial Sequence
  LRRK2 RNA guide
uauauaugugccccaaaaaa

SEQ ID NO: 50627 - RNA, 20 nt, Artificial Sequence
  LRRK2 RNA guide
uauaugugccccaaaaaauu

SEQ ID NO: 50628 - RNA, 20 nt, Artificial Sequence
  LRRK2 RNA guide
uaugaauuuuuuggggcaca

SEQ ID NO: 50629 - RNA, 20 nt, Artificial Sequence
  LRRK2 RNA guide
uaugcaggguaugaauuuuu

SEQ ID NO: 50630 - RNA, 20 nt, Artificial Sequence
  LRRK2 RNA guide
uaugugccccaaaaaauuca

SEQ ID NO: 50631 - RNA, 20 nt, Artificial Sequence
  LRRK2 RNA guide
ugaauuuuuuggggcacaua

SEQ ID NO: 50632 - RNA, 20 nt, Artificial Sequence
  LRRK2 RNA guide
ugcaggguaugaauuuuuug

SEQ ID NO: 50633 - RNA, 20 nt, Artificial Sequence
  LRRK2 RNA guide
ugccccaaaaaauucauacc

SEQ ID NO: 50634 - RNA, 20 nt, Artificial Sequence
  LRRK2 RNA guide
ugugccccaaaaaauucaua

SEQ ID NO: 50635 - RNA, 20 nt, Artificial Sequence
  LRRK2 RNA guide
uuggggcacauauauauaua

SEQ ID NO: 50636 - RNA, 20 nt, Artificial Sequence
  LRRK2 RNA guide
uuuggggcacauauauauau

SEQ ID NO: 50637 - RNA, 20 nt, Artificial Sequence
  LRRK2 RNA guide
uuuuggggcacauauauaua

SEQ ID NO: 50638 - RNA, 20 nt, Artificial Sequence
  LRRK2 RNA guide
uuuuuggggcacauauauau

SEQ ID NO: 50639 - RNA, 20 nt, Artificial Sequence
  LRRK2 RNA guide
uuuuuuggggcacauauaua

SEQ ID NO: 50640 - RNA, 21 nt, Artificial Sequence
  LRRK2 RNA guide
aggguaugaauuuuuuggggc

SEQ ID NO: 50641 - RNA, 21 nt, Artificial Sequence
  LRRK2 RNA guide
auaugugccccaaaaaauuca

SEQ ID NO: 50642 - RNA, 21 nt, Artificial Sequence
  LRRK2 RNA guide
augaauuuuuuggggcacaua

SEQ ID NO: 50643 - RNA, 21 nt, Artificial Sequence
  LRRK2 RNA guide
augcaggguaugaauuuuuug

SEQ ID NO: 50644 - RNA, 21 nt, Artificial Sequence
  LRRK2 RNA guide
augugccccaaaaaauucaua

SEQ ID NO: 50645 - RNA, 21 nt, Artificial Sequence
  LRRK2 RNA guide
caggguaugaauuuuuugggg

SEQ ID NO: 50646 - RNA, 21 nt, Artificial Sequence
  LRRK2 RNA guide
gaauuuuuuggggcacauaua

SEQ ID NO: 50647 - RNA, 21 nt, Artificial Sequence
  LRRK2 RNA guide
gcaggguaugaauuuuuuggg

SEQ ID NO: 50648 - RNA, 21 nt, Artificial Sequence
  LRRK2 RNA guide
gccccaaaaaauucauacccu

SEQ ID NO: 50649 - RNA, 21 nt, Artificial Sequence
  LRRK2 RNA guide
ggguaugaauuuuuuggggca

SEQ ID NO: 50650 - RNA, 21 nt, Artificial Sequence
  LRRK2 RNA guide
gguaugaauuuuuuggggcac

SEQ ID NO: 50651 - RNA, 21 nt, Artificial Sequence
  LRRK2 RNA guide
guaugaauuuuuuggggcaca

SEQ ID NO: 50652 - RNA, 21 nt, Artificial Sequence
  LRRK2 RNA guide
guaugcaggguaugaauuuuu

SEQ ID NO: 50653 - RNA, 21 nt, Artificial Sequence
  LRRK2 RNA guide
gugccccaaaaaauucauacc

SEQ ID NO: 50654 - RNA, 21 nt, Artificial Sequence
  LRRK2 RNA guide
uauaugugccccaaaaaauuc

SEQ ID NO: 50655 - RNA, 21 nt, Artificial Sequence
  LRRK2 RNA guide
uaugaauuuuuuggggcacau

SEQ ID NO: 50656 - RNA, 21 nt, Artificial Sequence
  LRRK2 RNA guide
uaugugccccaaaaaauucau

SEQ ID NO: 50657 - RNA, 21 nt, Artificial Sequence
  LRRK2 RNA guide
ugaauuuuuuggggcacauau

SEQ ID NO: 50658 - RNA, 21 nt, Artificial Sequence
  LRRK2 RNA guide
ugcaggguaugaauuuuuugg

SEQ ID NO: 50659 - RNA, 21 nt, Artificial Sequence
  LRRK2 RNA guide
ugccccaaaaaauucauaccc

SEQ ID NO: 50660 - RNA, 21 nt, Artificial Sequence
  LRRK2 RNA guide
ugugccccaaaaaauucauac

SEQ ID NO: 50661 - RNA, 22 nt, Artificial Sequence
  LRRK2 RNA guide
aggguaugaauuuuuuggggca

SEQ ID NO: 50662 - RNA, 22 nt, Artificial Sequence
  LRRK2 RNA guide
aguaugcaggguaugaauuuuu

SEQ ID NO: 50663 - RNA, 22 nt, Artificial Sequence
  LRRK2 RNA guide
auauaugugccccaaaaaauuc

SEQ ID NO: 50664 - RNA, 22 nt, Artificial Sequence
  LRRK2 RNA guide
auaugugccccaaaaaauucau

SEQ ID NO: 50665 - RNA, 22 nt, Artificial Sequence
  LRRK2 RNA guide
augaauuuuuuggggcacauau

SEQ ID NO: 50666 - RNA, 22 nt, Artificial Sequence
  LRRK2 RNA guide
augcaggguaugaauuuuuugg

SEQ ID NO: 50667 - RNA, 22 nt, Artificial Sequence
  LRRK2 RNA guide
augugccccaaaaaauucauac

SEQ ID NO: 50668 - RNA, 22 nt, Artificial Sequence
  LRRK2 RNA guide
caggguaugaauuuuuuggggc

SEQ ID NO: 50669 - RNA, 22 nt, Artificial Sequence
  LRRK2 RNA guide
gaauuuuuuggggcacauauau

SEQ ID NO: 50670 - RNA, 22 nt, Artificial Sequence
  LRRK2 RNA guide
gcaggguaugaauuuuuugggg

SEQ ID NO: 50671 - RNA, 22 nt, Artificial Sequence
  LRRK2 RNA guide
gccccaaaaaauucauacccug

SEQ ID NO: 50672 - RNA, 22 nt, Artificial Sequence
  LRRK2 RNA guide
ggguaugaauuuuuuggggcac

SEQ ID NO: 50673 - RNA, 22 nt, Artificial Sequence
  LRRK2 RNA guide
gguaugaauuuuuuggggcaca

SEQ ID NO: 50674 - RNA, 22 nt, Artificial Sequence
  LRRK2 RNA guide
guaugaauuuuuuggggcacau

SEQ ID NO: 50675 - RNA, 22 nt, Artificial Sequence
  LRRK2 RNA guide
guaugcaggguaugaauuuuuu

SEQ ID NO: 50676 - RNA, 22 nt, Artificial Sequence
  LRRK2 RNA guide
gugccccaaaaaauucauaccc

SEQ ID NO: 50677 - RNA, 22 nt, Artificial Sequence
  LRRK2 RNA guide
uauaugugccccaaaaaauuca

SEQ ID NO: 50678 - RNA, 22 nt, Artificial Sequence
  LRRK2 RNA guide
uaugaauuuuuuggggcacaua

SEQ ID NO: 50679 - RNA, 22 nt, Artificial Sequence
  LRRK2 RNA guide
uaugcaggguaugaauuuuuug

SEQ ID NO: 50680 - RNA, 22 nt, Artificial Sequence
  LRRK2 RNA guide
uaugugccccaaaaaauucaua

SEQ ID NO: 50681 - RNA, 22 nt, Artificial Sequence
  LRRK2 RNA guide
ugaauuuuuuggggcacauaua

SEQ ID NO: 50682 - RNA, 22 nt, Artificial Sequence
  LRRK2 RNA guide
ugcaggguaugaauuuuuuggg

SEQ ID NO: 50683 - RNA, 22 nt, Artificial Sequence
  LRRK2 RNA guide
ugccccaaaaaauucauacccu

SEQ ID NO: 50684 - RNA, 22 nt, Artificial Sequence
  LRRK2 RNA guide
ugugccccaaaaaauucauacc

SEQ ID NO: 50685 - RNA, 20 nt, Artificial Sequence
  LRRK2 RNA guide
auauaugccccaaaaaauuc

SEQ ID NO: 50686 - RNA, 20 nt, Artificial Sequence
  LRRK2 RNA guide
auaugccccaaaaaauucau

SEQ ID NO: 50687 - RNA, 20 nt, Artificial Sequence
  LRRK2 RNA guide
augaauuuuuuggggcauau

SEQ ID NO: 50688 - RNA, 20 nt, Artificial Sequence
  LRRK2 RNA guide
augccccaaaaaauucauac

SEQ ID NO: 50689 - RNA, 20 nt, Artificial Sequence
  LRRK2 RNA guide
gaauuuuuuggggcauauau

SEQ ID NO: 50690 - RNA, 20 nt, Artificial Sequence
  LRRK2 RNA guide
guaugaauuuuuuggggcau

SEQ ID NO: 50691 - RNA, 20 nt, Artificial Sequence
  LRRK2 RNA guide
uauaugccccaaaaaauuca

SEQ ID NO: 50692 - RNA, 20 nt, Artificial Sequence
  LRRK2 RNA guide
uaugaauuuuuuggggcaua

SEQ ID NO: 50693 - RNA, 20 nt, Artificial Sequence
  LRRK2 RNA guide
uaugccccaaaaaauucaua

SEQ ID NO: 50694 - RNA, 20 nt, Artificial Sequence
  LRRK2 RNA guide
ugaauuuuuuggggcauaua

SEQ ID NO: 50695 - RNA, 21 nt, Artificial Sequence
  LRRK2 RNA guide
augccccaaaaaauucauacc

SEQ ID NO: 50696 - RNA, 21 nt, Artificial Sequence
  LRRK2 RNA guide
gguaugaauuuuuuggggcau

SEQ ID NO: 50697 - RNA, 21 nt, Artificial Sequence
  LRRK2 RNA guide
guaugaauuuuuuggggcaua

SEQ ID NO: 50698 - RNA, 21 nt, Artificial Sequence
  LRRK2 RNA guide
uaugccccaaaaaauucauac

SEQ ID NO: 50699 - RNA, 22 nt, Artificial Sequence
  LRRK2 RNA guide
auaugccccaaaaaauucauac

SEQ ID NO: 50700 - RNA, 22 nt, Artificial Sequence
  LRRK2 RNA guide
augccccaaaaaauucauaccc

SEQ ID NO: 50701 - RNA, 22 nt, Artificial Sequence
  LRRK2 RNA guide
ggguaugaauuuuuuggggcau

SEQ ID NO: 50702 - RNA, 22 nt, Artificial Sequence
  LRRK2 RNA guide
gguaugaauuuuuuggggcaua

SEQ ID NO: 50703 - RNA, 22 nt, Artificial Sequence
  LRRK2 RNA guide
guaugaauuuuuuggggcauau

SEQ ID NO: 50704 - RNA, 22 nt, Artificial Sequence
  LRRK2 RNA guide
uaugccccaaaaaauucauacc

SEQ ID NO: 50705 - RNA, 20 nt, Artificial Sequence
  LRRK2 RNA guide
aauuuuuuggggcauacaua

SEQ ID NO: 50706 - RNA, 20 nt, Artificial Sequence
  LRRK2 RNA guide
auauauauauguaugcccca

SEQ ID NO: 50707 - RNA, 20 nt, Artificial Sequence
  LRRK2 RNA guide
auauauauguaugccccaaa

SEQ ID NO: 50708 - RNA, 20 nt, Artificial Sequence
  LRRK2 RNA guide
auauauguaugccccaaaaa

SEQ ID NO: 50709 - RNA, 20 nt, Artificial Sequence
  LRRK2 RNA guide
auauguaugccccaaaaaau

SEQ ID NO: 50710 - RNA, 20 nt, Artificial Sequence
  LRRK2 RNA guide
augaauuuuuuggggcauac

SEQ ID NO: 50711 - RNA, 20 nt, Artificial Sequence
  LRRK2 RNA guide
auguaugccccaaaaaauuc

SEQ ID NO: 50712 - RNA, 20 nt, Artificial Sequence
  LRRK2 RNA guide
auuuuuuggggcauacauau

SEQ ID NO: 50713 - RNA, 20 nt, Artificial Sequence
  LRRK2 RNA guide
gaauuuuuuggggcauacau

SEQ ID NO: 50714 - RNA, 20 nt, Artificial Sequence
  LRRK2 RNA guide
ggggcauacauauauauaua

SEQ ID NO: 50715 - RNA, 20 nt, Artificial Sequence
  LRRK2 RNA guide
guaugccccaaaaaauucau

SEQ ID NO: 50716 - RNA, 20 nt, Artificial Sequence
  LRRK2 RNA guide
uauauauauauguaugcccc

SEQ ID NO: 50717 - RNA, 20 nt, Artificial Sequence
  LRRK2 RNA guide
uauauauauguaugccccaa

SEQ ID NO: 50718 - RNA, 20 nt, Artificial Sequence
  LRRK2 RNA guide
uauauauguaugccccaaaa

SEQ ID NO: 50719 - RNA, 20 nt, Artificial Sequence
  LRRK2 RNA guide
uauauguaugccccaaaaaa

SEQ ID NO: 50720 - RNA, 20 nt, Artificial Sequence
  LRRK2 RNA guide
uauguaugccccaaaaaauu

SEQ ID NO: 50721 - RNA, 20 nt, Artificial Sequence
  LRRK2 RNA guide
ugaauuuuuuggggcauaca

SEQ ID NO: 50722 - RNA, 20 nt, Artificial Sequence
  LRRK2 RNA guide
uggggcauacauauauauau

SEQ ID NO: 50723 - RNA, 20 nt, Artificial Sequence
  LRRK2 RNA guide
uguaugccccaaaaaauuca

SEQ ID NO: 50724 - RNA, 20 nt, Artificial Sequence
  LRRK2 RNA guide
uuggggcauacauauauaua

SEQ ID NO: 50725 - RNA, 20 nt, Artificial Sequence
  LRRK2 RNA guide
uuuggggcauacauauauau

SEQ ID NO: 50726 - RNA, 20 nt, Artificial Sequence
  LRRK2 RNA guide
uuuuggggcauacauauaua

SEQ ID NO: 50727 - RNA, 20 nt, Artificial Sequence
  LRRK2 RNA guide
uuuuuggggcauacauauau

SEQ ID NO: 50728 - RNA, 20 nt, Artificial Sequence
  LRRK2 RNA guide
uuuuuuggggcauacauaua

SEQ ID NO: 50729 - RNA, 21 nt, Artificial Sequence
  LRRK2 RNA guide
augaauuuuuuggggcauaca

SEQ ID NO: 50730 - RNA, 21 nt, Artificial Sequence
  LRRK2 RNA guide
auguaugccccaaaaaauuca

SEQ ID NO: 50731 - RNA, 21 nt, Artificial Sequence
  LRRK2 RNA guide
gaauuuuuuggggcauacaua

SEQ ID NO: 50732 - RNA, 21 nt, Artificial Sequence
  LRRK2 RNA guide
guaugccccaaaaaauucaua

SEQ ID NO: 50733 - RNA, 21 nt, Artificial Sequence
  LRRK2 RNA guide
uaugaauuuuuuggggcauac

SEQ ID NO: 50734 - RNA, 21 nt, Artificial Sequence
  LRRK2 RNA guide
uauguaugccccaaaaaauuc

SEQ ID NO: 50735 - RNA, 21 nt, Artificial Sequence
  LRRK2 RNA guide
ugaauuuuuuggggcauacau

SEQ ID NO: 50736 - RNA, 21 nt, Artificial Sequence
  LRRK2 RNA guide
uguaugccccaaaaaauucau

SEQ ID NO: 50737 - RNA, 22 nt, Artificial Sequence
  LRRK2 RNA guide
auauguaugccccaaaaaauuc

SEQ ID NO: 50738 - RNA, 22 nt, Artificial Sequence
  LRRK2 RNA guide
augaauuuuuuggggcauacau

SEQ ID NO: 50739 - RNA, 22 nt, Artificial Sequence
  LRRK2 RNA guide
auguaugccccaaaaaauucau

SEQ ID NO: 50740 - RNA, 22 nt, Artificial Sequence
  LRRK2 RNA guide
gaauuuuuuggggcauacauau

SEQ ID NO: 50741 - RNA, 22 nt, Artificial Sequence
  LRRK2 RNA guide
guaugaauuuuuuggggcauac

SEQ ID NO: 50742 - RNA, 22 nt, Artificial Sequence
  LRRK2 RNA guide
guaugccccaaaaaauucauac

SEQ ID NO: 50743 - RNA, 22 nt, Artificial Sequence
  LRRK2 RNA guide
uaugaauuuuuuggggcauaca

SEQ ID NO: 50744 - RNA, 22 nt, Artificial Sequence
  LRRK2 RNA guide
uauguaugccccaaaaaauuca

SEQ ID NO: 50745 - RNA, 22 nt, Artificial Sequence
  LRRK2 RNA guide
ugaauuuuuuggggcauacaua

SEQ ID NO: 50746 - RNA, 22 nt, Artificial Sequence
  LRRK2 RNA guide
uguaugccccaaaaaauucaua

SEQ ID NO: 50747 - RNA, 20 nt, Artificial Sequence
  LRRK2 RNA guide
agaugauagauagauagaug

SEQ ID NO: 50748 - RNA, 20 nt, Artificial Sequence
  LRRK2 RNA guide
cauuguucaucuaucuaucu

SEQ ID NO: 50749 - RNA, 20 nt, Artificial Sequence
  LRRK2 RNA guide
gaugauagauagauagauga

SEQ ID NO: 50750 - RNA, 20 nt, Artificial Sequence
  LRRK2 RNA guide
guucaucuaucuaucuauca

SEQ ID NO: 50751 - RNA, 20 nt, Artificial Sequence
  LRRK2 RNA guide
ucauuguucaucuaucuauc

SEQ ID NO: 50752 - RNA, 20 nt, Artificial Sequence
  LRRK2 RNA guide
ugauagauagauagaugaac

SEQ ID NO: 50753 - RNA, 20 nt, Artificial Sequence
  LRRK2 RNA guide
uguucaucuaucuaucuauc

SEQ ID NO: 50754 - RNA, 22 nt, Artificial Sequence
  LRRK2 RNA guide
gaugauagauagauagaugaac

SEQ ID NO: 50755 - RNA, 22 nt, Artificial Sequence
  LRRK2 RNA guide
guucaucuaucuaucuaucauc

SEQ ID NO: 50756 - RNA, 20 nt, Artificial Sequence
  LRRK2 RNA guide
aaauaugccauaguccuucc

SEQ ID NO: 50757 - RNA, 20 nt, Artificial Sequence
  LRRK2 RNA guide
aaccucuugucuguuuugga

SEQ ID NO: 50758 - RNA, 20 nt, Artificial Sequence
  LRRK2 RNA guide
aacuauggaaggacuauggc

SEQ ID NO: 50759 - RNA, 20 nt, Artificial Sequence
  LRRK2 RNA guide
aauaugccauaguccuucca

SEQ ID NO: 50760 - RNA, 20 nt, Artificial Sequence
  LRRK2 RNA guide
accucuugucuguuuuggaa

SEQ ID NO: 50761 - RNA, 20 nt, Artificial Sequence
  LRRK2 RNA guide
acuauggaaggacuauggca

SEQ ID NO: 50762 - RNA, 20 nt, Artificial Sequence
  LRRK2 RNA guide
aguccuuccauaguuccaaa

SEQ ID NO: 50763 - RNA, 20 nt, Artificial Sequence
  LRRK2 RNA guide
auaguccuuccauaguucca

SEQ ID NO: 50764 - RNA, 20 nt, Artificial Sequence
  LRRK2 RNA guide
auaguuccaaaacagacaag

SEQ ID NO: 50765 - RNA, 20 nt, Artificial Sequence
  LRRK2 RNA guide
auaugccauaguccuuccau

SEQ ID NO: 50766 - RNA, 20 nt, Artificial Sequence
  LRRK2 RNA guide
augccauaguccuuccauag

SEQ ID NO: 50767 - RNA, 20 nt, Artificial Sequence
  LRRK2 RNA guide
caaauaugccauaguccuuc

SEQ ID NO: 50768 - RNA, 20 nt, Artificial Sequence
  LRRK2 RNA guide
caaccucuugucuguuuugg

SEQ ID NO: 50769 - RNA, 20 nt, Artificial Sequence
  LRRK2 RNA guide
cauaguccuuccauaguucc

SEQ ID NO: 50770 - RNA, 20 nt, Artificial Sequence
  LRRK2 RNA guide
cauaguuccaaaacagacaa

SEQ ID NO: 50771 - RNA, 20 nt, Artificial Sequence
  LRRK2 RNA guide
ccauaguccuuccauaguuc

SEQ ID NO: 50772 - RNA, 20 nt, Artificial Sequence
  LRRK2 RNA guide
ccauaguuccaaaacagaca

SEQ ID NO: 50773 - RNA, 20 nt, Artificial Sequence
  LRRK2 RNA guide
ccucuugucuguuuuggaac

SEQ ID NO: 50774 - RNA, 20 nt, Artificial Sequence
  LRRK2 RNA guide
ccuuccauaguuccaaaaca

SEQ ID NO: 50775 - RNA, 20 nt, Artificial Sequence
  LRRK2 RNA guide
cuauggaaggacuauggcau

SEQ ID NO: 50776 - RNA, 20 nt, Artificial Sequence
  LRRK2 RNA guide
cucuugucuguuuuggaacu

SEQ ID NO: 50777 - RNA, 20 nt, Artificial Sequence
  LRRK2 RNA guide
cuguuuuggaacuauggaag

SEQ ID NO: 50778 - RNA, 20 nt, Artificial Sequence
  LRRK2 RNA guide
cuuccauaguuccaaaacag

SEQ ID NO: 50779 - RNA, 20 nt, Artificial Sequence
  LRRK2 RNA guide
cuugucuguuuuggaacuau

SEQ ID NO: 50780 - RNA, 20 nt, Artificial Sequence
  LRRK2 RNA guide
gaacuauggaaggacuaugg

SEQ ID NO: 50781 - RNA, 20 nt, Artificial Sequence
  LRRK2 RNA guide
gcaaauaugccauaguccuu

SEQ ID NO: 50782 - RNA, 20 nt, Artificial Sequence
  LRRK2 RNA guide
gccauaguccuuccauaguu

SEQ ID NO: 50783 - RNA, 20 nt, Artificial Sequence
  LRRK2 RNA guide
ggaacuauggaaggacuaug

SEQ ID NO: 50784 - RNA, 20 nt, Artificial Sequence
  LRRK2 RNA guide
guccuuccauaguuccaaaa

SEQ ID NO: 50785 - RNA, 20 nt, Artificial Sequence
  LRRK2 RNA guide
gucuguuuuggaacuaugga

SEQ ID NO: 50786 - RNA, 20 nt, Artificial Sequence
  LRRK2 RNA guide
guuuuggaacuauggaagga

SEQ ID NO: 50787 - RNA, 20 nt, Artificial Sequence
  LRRK2 RNA guide
uaguccuuccauaguuccaa

SEQ ID NO: 50788 - RNA, 20 nt, Artificial Sequence
  LRRK2 RNA guide
uaugccauaguccuuccaua

SEQ ID NO: 50789 - RNA, 20 nt, Artificial Sequence
  LRRK2 RNA guide
uauggaaggacuauggcaua

SEQ ID NO: 50790 - RNA, 20 nt, Artificial Sequence
  LRRK2 RNA guide
uccuuccauaguuccaaaac

SEQ ID NO: 50791 - RNA, 20 nt, Artificial Sequence
  LRRK2 RNA guide
ucuguuuuggaacuauggaa

SEQ ID NO: 50792 - RNA, 20 nt, Artificial Sequence
  LRRK2 RNA guide
ucuugucuguuuuggaacua

SEQ ID NO: 50793 - RNA, 20 nt, Artificial Sequence
  LRRK2 RNA guide
ugcaaauaugccauaguccu

SEQ ID NO: 50794 - RNA, 20 nt, Artificial Sequence
  LRRK2 RNA guide
ugccauaguccuuccauagu

SEQ ID NO: 50795 - RNA, 20 nt, Artificial Sequence
  LRRK2 RNA guide
uggaacuauggaaggacuau

SEQ ID NO: 50796 - RNA, 20 nt, Artificial Sequence
  LRRK2 RNA guide
ugucuguuuuggaacuaugg

SEQ ID NO: 50797 - RNA, 20 nt, Artificial Sequence
  LRRK2 RNA guide
uguuuuggaacuauggaagg

SEQ ID NO: 50798 - RNA, 20 nt, Artificial Sequence
  LRRK2 RNA guide
uuccauaguuccaaaacaga

SEQ ID NO: 50799 - RNA, 20 nt, Artificial Sequence
  LRRK2 RNA guide
uuggaacuauggaaggacua

SEQ ID NO: 50800 - RNA, 20 nt, Artificial Sequence
  LRRK2 RNA guide
uugucuguuuuggaacuaug

SEQ ID NO: 50801 - RNA, 20 nt, Artificial Sequence
  LRRK2 RNA guide
uuuggaacuauggaaggacu

SEQ ID NO: 50802 - RNA, 20 nt, Artificial Sequence
  LRRK2 RNA guide
uuuuggaacuauggaaggac

SEQ ID NO: 50803 - RNA, 21 nt, Artificial Sequence
  LRRK2 RNA guide
aaauaugccauaguccuucca

SEQ ID NO: 50804 - RNA, 21 nt, Artificial Sequence
  LRRK2 RNA guide
aaccucuugucuguuuuggaa

SEQ ID NO: 50805 - RNA, 21 nt, Artificial Sequence
  LRRK2 RNA guide
aacuauggaaggacuauggca

SEQ ID NO: 50806 - RNA, 21 nt, Artificial Sequence
  LRRK2 RNA guide
aauaugccauaguccuuccau

SEQ ID NO: 50807 - RNA, 21 nt, Artificial Sequence
  LRRK2 RNA guide
accucuugucuguuuuggaac

SEQ ID NO: 50808 - RNA, 21 nt, Artificial Sequence
  LRRK2 RNA guide
acuauggaaggacuauggcau

SEQ ID NO: 50809 - RNA, 21 nt, Artificial Sequence
  LRRK2 RNA guide
aguccuuccauaguuccaaaa

SEQ ID NO: 50810 - RNA, 21 nt, Artificial Sequence
  LRRK2 RNA guide
auaguccuuccauaguuccaa

SEQ ID NO: 50811 - RNA, 21 nt, Artificial Sequence
  LRRK2 RNA guide
auaguuccaaaacagacaaga

SEQ ID NO: 50812 - RNA, 21 nt, Artificial Sequence
  LRRK2 RNA guide
auaugccauaguccuuccaua

SEQ ID NO: 50813 - RNA, 21 nt, Artificial Sequence
  LRRK2 RNA guide
augcaaauaugccauaguccu

SEQ ID NO: 50814 - RNA, 21 nt, Artificial Sequence
  LRRK2 RNA guide
augccauaguccuuccauagu

SEQ ID NO: 50815 - RNA, 21 nt, Artificial Sequence
  LRRK2 RNA guide
caaauaugccauaguccuucc

SEQ ID NO: 50816 - RNA, 21 nt, Artificial Sequence
  LRRK2 RNA guide
caaccucuugucuguuuugga

SEQ ID NO: 50817 - RNA, 21 nt, Artificial Sequence
  LRRK2 RNA guide
cauaguccuuccauaguucca

SEQ ID NO: 50818 - RNA, 21 nt, Artificial Sequence
  LRRK2 RNA guide
cauaguuccaaaacagacaag

SEQ ID NO: 50819 - RNA, 21 nt, Artificial Sequence
  LRRK2 RNA guide
ccauaguccuuccauaguucc

SEQ ID NO: 50820 - RNA, 21 nt, Artificial Sequence
  LRRK2 RNA guide
ccauaguuccaaaacagacaa

SEQ ID NO: 50821 - RNA, 21 nt, Artificial Sequence
  LRRK2 RNA guide
ccucuugucuguuuuggaacu

SEQ ID NO: 50822 - RNA, 21 nt, Artificial Sequence
  LRRK2 RNA guide
ccuuccauaguuccaaaacag

SEQ ID NO: 50823 - RNA, 21 nt, Artificial Sequence
  LRRK2 RNA guide
cuauggaaggacuauggcaua

SEQ ID NO: 50824 - RNA, 21 nt, Artificial Sequence
  LRRK2 RNA guide
cucuugucuguuuuggaacua

SEQ ID NO: 50825 - RNA, 21 nt, Artificial Sequence
  LRRK2 RNA guide
cuguuuuggaacuauggaagg

SEQ ID NO: 50826 - RNA, 21 nt, Artificial Sequence
  LRRK2 RNA guide
cuuccauaguuccaaaacaga

SEQ ID NO: 50827 - RNA, 21 nt, Artificial Sequence
  LRRK2 RNA guide
cuugucuguuuuggaacuaug

SEQ ID NO: 50828 - RNA, 21 nt, Artificial Sequence
  LRRK2 RNA guide
gaacuauggaaggacuauggc

SEQ ID NO: 50829 - RNA, 21 nt, Artificial Sequence
  LRRK2 RNA guide
gcaaauaugccauaguccuuc

SEQ ID NO: 50830 - RNA, 21 nt, Artificial Sequence
  LRRK2 RNA guide
gccauaguccuuccauaguuc

SEQ ID NO: 50831 - RNA, 21 nt, Artificial Sequence
  LRRK2 RNA guide
ggaacuauggaaggacuaugg

SEQ ID NO: 50832 - RNA, 21 nt, Artificial Sequence
  LRRK2 RNA guide
guccuuccauaguuccaaaac

SEQ ID NO: 50833 - RNA, 21 nt, Artificial Sequence
  LRRK2 RNA guide
gucuguuuuggaacuauggaa

SEQ ID NO: 50834 - RNA, 21 nt, Artificial Sequence
  LRRK2 RNA guide
guuuuggaacuauggaaggac

SEQ ID NO: 50835 - RNA, 21 nt, Artificial Sequence
  LRRK2 RNA guide
uaguccuuccauaguuccaaa

SEQ ID NO: 50836 - RNA, 21 nt, Artificial Sequence
  LRRK2 RNA guide
uaugccauaguccuuccauag

SEQ ID NO: 50837 - RNA, 21 nt, Artificial Sequence
  LRRK2 RNA guide
uauggaaggacuauggcauau

SEQ ID NO: 50838 - RNA, 21 nt, Artificial Sequence
  LRRK2 RNA guide
ucaaccucuugucuguuuugg

SEQ ID NO: 50839 - RNA, 21 nt, Artificial Sequence
  LRRK2 RNA guide
uccauaguuccaaaacagaca

SEQ ID NO: 50840 - RNA, 21 nt, Artificial Sequence
  LRRK2 RNA guide
uccuuccauaguuccaaaaca

SEQ ID NO: 50841 - RNA, 21 nt, Artificial Sequence
  LRRK2 RNA guide
ucuguuuuggaacuauggaag

SEQ ID NO: 50842 - RNA, 21 nt, Artificial Sequence
  LRRK2 RNA guide
ucuugucuguuuuggaacuau

SEQ ID NO: 50843 - RNA, 21 nt, Artificial Sequence
  LRRK2 RNA guide
ugcaaauaugccauaguccuu

SEQ ID NO: 50844 - RNA, 21 nt, Artificial Sequence
  LRRK2 RNA guide
ugccauaguccuuccauaguu

SEQ ID NO: 50845 - RNA, 21 nt, Artificial Sequence
  LRRK2 RNA guide
uggaacuauggaaggacuaug

SEQ ID NO: 50846 - RNA, 21 nt, Artificial Sequence
  LRRK2 RNA guide
ugucuguuuuggaacuaugga

SEQ ID NO: 50847 - RNA, 21 nt, Artificial Sequence
  LRRK2 RNA guide
uguuuuggaacuauggaagga

SEQ ID NO: 50848 - RNA, 21 nt, Artificial Sequence
  LRRK2 RNA guide
uuccauaguuccaaaacagac

SEQ ID NO: 50849 - RNA, 21 nt, Artificial Sequence
  LRRK2 RNA guide
uuggaacuauggaaggacuau

SEQ ID NO: 50850 - RNA, 21 nt, Artificial Sequence
  LRRK2 RNA guide
uugucuguuuuggaacuaugg

SEQ ID NO: 50851 - RNA, 21 nt, Artificial Sequence
  LRRK2 RNA guide
uuuggaacuauggaaggacua

SEQ ID NO: 50852 - RNA, 21 nt, Artificial Sequence
  LRRK2 RNA guide
uuuuggaacuauggaaggacu

SEQ ID NO: 50853 - RNA, 22 nt, Artificial Sequence
  LRRK2 RNA guide
aaauaugccauaguccuuccau

SEQ ID NO: 50854 - RNA, 22 nt, Artificial Sequence
  LRRK2 RNA guide
aaccucuugucuguuuuggaac

SEQ ID NO: 50855 - RNA, 22 nt, Artificial Sequence
  LRRK2 RNA guide
aacuauggaaggacuauggcau

SEQ ID NO: 50856 - RNA, 22 nt, Artificial Sequence
  LRRK2 RNA guide
aauaugccauaguccuuccaua

SEQ ID NO: 50857 - RNA, 22 nt, Artificial Sequence
  LRRK2 RNA guide
accucuugucuguuuuggaacu

SEQ ID NO: 50858 - RNA, 22 nt, Artificial Sequence
  LRRK2 RNA guide
acuauggaaggacuauggcaua

SEQ ID NO: 50859 - RNA, 22 nt, Artificial Sequence
  LRRK2 RNA guide
aguccuuccauaguuccaaaac

SEQ ID NO: 50860 - RNA, 22 nt, Artificial Sequence
  LRRK2 RNA guide
auaguccuuccauaguuccaaa

SEQ ID NO: 50861 - RNA, 22 nt, Artificial Sequence
  LRRK2 RNA guide
auaguuccaaaacagacaagag

SEQ ID NO: 50862 - RNA, 22 nt, Artificial Sequence
  LRRK2 RNA guide
auaugccauaguccuuccauag

SEQ ID NO: 50863 - RNA, 22 nt, Artificial Sequence
  LRRK2 RNA guide
augcaaauaugccauaguccuu

SEQ ID NO: 50864 - RNA, 22 nt, Artificial Sequence
  LRRK2 RNA guide
augccauaguccuuccauaguu

SEQ ID NO: 50865 - RNA, 22 nt, Artificial Sequence
  LRRK2 RNA guide
caaauaugccauaguccuucca

SEQ ID NO: 50866 - RNA, 22 nt, Artificial Sequence
  LRRK2 RNA guide
caaccucuugucuguuuuggaa

SEQ ID NO: 50867 - RNA, 22 nt, Artificial Sequence
  LRRK2 RNA guide
cauaguccuuccauaguuccaa

SEQ ID NO: 50868 - RNA, 22 nt, Artificial Sequence
  LRRK2 RNA guide
cauaguuccaaaacagacaaga

SEQ ID NO: 50869 - RNA, 22 nt, Artificial Sequence
  LRRK2 RNA guide
caugcaaauaugccauaguccu

SEQ ID NO: 50870 - RNA, 22 nt, Artificial Sequence
  LRRK2 RNA guide
ccauaguccuuccauaguucca

SEQ ID NO: 50871 - RNA, 22 nt, Artificial Sequence
  LRRK2 RNA guide
ccauaguuccaaaacagacaag

SEQ ID NO: 50872 - RNA, 22 nt, Artificial Sequence
  LRRK2 RNA guide
ccucuugucuguuuuggaacua

SEQ ID NO: 50873 - RNA, 22 nt, Artificial Sequence
  LRRK2 RNA guide
ccuuccauaguuccaaaacaga

SEQ ID NO: 50874 - RNA, 22 nt, Artificial Sequence
  LRRK2 RNA guide
cuauggaaggacuauggcauau

SEQ ID NO: 50875 - RNA, 22 nt, Artificial Sequence
  LRRK2 RNA guide
cucuugucuguuuuggaacuau

SEQ ID NO: 50876 - RNA, 22 nt, Artificial Sequence
  LRRK2 RNA guide
cuguuuuggaacuauggaagga

SEQ ID NO: 50877 - RNA, 22 nt, Artificial Sequence
  LRRK2 RNA guide
cuuccauaguuccaaaacagac

SEQ ID NO: 50878 - RNA, 22 nt, Artificial Sequence
  LRRK2 RNA guide
cuugucuguuuuggaacuaugg

SEQ ID NO: 50879 - RNA, 22 nt, Artificial Sequence
  LRRK2 RNA guide
gaacuauggaaggacuauggca

SEQ ID NO: 50880 - RNA, 22 nt, Artificial Sequence
  LRRK2 RNA guide
gcaaauaugccauaguccuucc

SEQ ID NO: 50881 - RNA, 22 nt, Artificial Sequence
  LRRK2 RNA guide
ggaacuauggaaggacuauggc

SEQ ID NO: 50882 - RNA, 22 nt, Artificial Sequence
  LRRK2 RNA guide
guccuuccauaguuccaaaaca

SEQ ID NO: 50883 - RNA, 22 nt, Artificial Sequence
  LRRK2 RNA guide
gucuguuuuggaacuauggaag

SEQ ID NO: 50884 - RNA, 22 nt, Artificial Sequence
  LRRK2 RNA guide
guuuuggaacuauggaaggacu

SEQ ID NO: 50885 - RNA, 22 nt, Artificial Sequence
  LRRK2 RNA guide
uaguccuuccauaguuccaaaa

SEQ ID NO: 50886 - RNA, 22 nt, Artificial Sequence
  LRRK2 RNA guide
uaugccauaguccuuccauagu

SEQ ID NO: 50887 - RNA, 22 nt, Artificial Sequence
  LRRK2 RNA guide
uauggaaggacuauggcauauu

SEQ ID NO: 50888 - RNA, 22 nt, Artificial Sequence
  LRRK2 RNA guide
ucaaccucuugucuguuuugga

SEQ ID NO: 50889 - RNA, 22 nt, Artificial Sequence
  LRRK2 RNA guide
uccauaguuccaaaacagacaa

SEQ ID NO: 50890 - RNA, 22 nt, Artificial Sequence
  LRRK2 RNA guide
uccuuccauaguuccaaaacag

SEQ ID NO: 50891 - RNA, 22 nt, Artificial Sequence
  LRRK2 RNA guide
ucuguuuuggaacuauggaagg

SEQ ID NO: 50892 - RNA, 22 nt, Artificial Sequence
  LRRK2 RNA guide
ucuugucuguuuuggaacuaug

SEQ ID NO: 50893 - RNA, 22 nt, Artificial Sequence
  LRRK2 RNA guide
ugcaaauaugccauaguccuuc

SEQ ID NO: 50894 - RNA, 22 nt, Artificial Sequence
  LRRK2 RNA guide
ugccauaguccuuccauaguuc

SEQ ID NO: 50895 - RNA, 22 nt, Artificial Sequence
  LRRK2 RNA guide
uggaacuauggaaggacuaugg

SEQ ID NO: 50896 - RNA, 22 nt, Artificial Sequence
  LRRK2 RNA guide
ugucuguuuuggaacuauggaa

SEQ ID NO: 50897 - RNA, 22 nt, Artificial Sequence
  LRRK2 RNA guide
uguuuuggaacuauggaaggac

SEQ ID NO: 50898 - RNA, 22 nt, Artificial Sequence
  LRRK2 RNA guide
uucaaccucuugucuguuuugg

SEQ ID NO: 50899 - RNA, 22 nt, Artificial Sequence
  LRRK2 RNA guide
uuccauaguuccaaaacagaca

SEQ ID NO: 50900 - RNA, 22 nt, Artificial Sequence
  LRRK2 RNA guide
uuggaacuauggaaggacuaug

SEQ ID NO: 50901 - RNA, 22 nt, Artificial Sequence
  LRRK2 RNA guide
uugucuguuuuggaacuaugga

SEQ ID NO: 50902 - RNA, 22 nt, Artificial Sequence
  LRRK2 RNA guide
uuuggaacuauggaaggacuau

SEQ ID NO: 50903 - RNA, 22 nt, Artificial Sequence
  LRRK2 RNA guide
uuuuggaacuauggaaggacua

SEQ ID NO: 50904 - RNA, 20 nt, Artificial Sequence
  LRRK2 RNA guide
aacuguggaaggacuauggc

SEQ ID NO: 50905 - RNA, 20 nt, Artificial Sequence
  LRRK2 RNA guide
acaguuccaaaacagacaag

SEQ ID NO: 50906 - RNA, 20 nt, Artificial Sequence
  LRRK2 RNA guide
acuguggaaggacuauggca

SEQ ID NO: 50907 - RNA, 20 nt, Artificial Sequence
  LRRK2 RNA guide
aguccuuccacaguuccaaa

SEQ ID NO: 50908 - RNA, 20 nt, Artificial Sequence
  LRRK2 RNA guide
auaguccuuccacaguucca

SEQ ID NO: 50909 - RNA, 20 nt, Artificial Sequence
  LRRK2 RNA guide
auaugccauaguccuuccac

SEQ ID NO: 50910 - RNA, 20 nt, Artificial Sequence
  LRRK2 RNA guide
augccauaguccuuccacag

SEQ ID NO: 50911 - RNA, 20 nt, Artificial Sequence
  LRRK2 RNA guide
cacaguuccaaaacagacaa

SEQ ID NO: 50912 - RNA, 20 nt, Artificial Sequence
  LRRK2 RNA guide
cauaguccuuccacaguucc

SEQ ID NO: 50913 - RNA, 20 nt, Artificial Sequence
  LRRK2 RNA guide
ccacaguuccaaaacagaca

SEQ ID NO: 50914 - RNA, 20 nt, Artificial Sequence
  LRRK2 RNA guide
ccauaguccuuccacaguuc

SEQ ID NO: 50915 - RNA, 20 nt, Artificial Sequence
  LRRK2 RNA guide
ccuuccacaguuccaaaaca

SEQ ID NO: 50916 - RNA, 20 nt, Artificial Sequence
  LRRK2 RNA guide
cuguggaaggacuauggcau

SEQ ID NO: 50917 - RNA, 20 nt, Artificial Sequence
  LRRK2 RNA guide
cuguuuuggaacuguggaag

SEQ ID NO: 50918 - RNA, 20 nt, Artificial Sequence
  LRRK2 RNA guide
cuuccacaguuccaaaacag

SEQ ID NO: 50919 - RNA, 20 nt, Artificial Sequence
  LRRK2 RNA guide
cuugucuguuuuggaacugu

SEQ ID NO: 50920 - RNA, 20 nt, Artificial Sequence
  LRRK2 RNA guide
gaacuguggaaggacuaugg

SEQ ID NO: 50921 - RNA, 20 nt, Artificial Sequence
  LRRK2 RNA guide
gccauaguccuuccacaguu

SEQ ID NO: 50922 - RNA, 20 nt, Artificial Sequence
  LRRK2 RNA guide
ggaacuguggaaggacuaug

SEQ ID NO: 50923 - RNA, 20 nt, Artificial Sequence
  LRRK2 RNA guide
guccuuccacaguuccaaaa

SEQ ID NO: 50924 - RNA, 20 nt, Artificial Sequence
  LRRK2 RNA guide
gucuguuuuggaacugugga

SEQ ID NO: 50925 - RNA, 20 nt, Artificial Sequence
  LRRK2 RNA guide
guuuuggaacuguggaagga

SEQ ID NO: 50926 - RNA, 20 nt, Artificial Sequence
  LRRK2 RNA guide
uaguccuuccacaguuccaa

SEQ ID NO: 50927 - RNA, 20 nt, Artificial Sequence
  LRRK2 RNA guide
uaugccauaguccuuccaca

SEQ ID NO: 50928 - RNA, 20 nt, Artificial Sequence
  LRRK2 RNA guide
uccacaguuccaaaacagac

SEQ ID NO: 50929 - RNA, 20 nt, Artificial Sequence
  LRRK2 RNA guide
uccuuccacaguuccaaaac

SEQ ID NO: 50930 - RNA, 20 nt, Artificial Sequence
  LRRK2 RNA guide
ucuguuuuggaacuguggaa

SEQ ID NO: 50931 - RNA, 20 nt, Artificial Sequence
  LRRK2 RNA guide
ucuugucuguuuuggaacug

SEQ ID NO: 50932 - RNA, 20 nt, Artificial Sequence
  LRRK2 RNA guide
ugccauaguccuuccacagu

SEQ ID NO: 50933 - RNA, 20 nt, Artificial Sequence
  LRRK2 RNA guide
uggaacuguggaaggacuau

SEQ ID NO: 50934 - RNA, 20 nt, Artificial Sequence
  LRRK2 RNA guide
ugucuguuuuggaacugugg

SEQ ID NO: 50935 - RNA, 20 nt, Artificial Sequence
  LRRK2 RNA guide
uguggaaggacuauggcaua

SEQ ID NO: 50936 - RNA, 20 nt, Artificial Sequence
  LRRK2 RNA guide
uguuuuggaacuguggaagg

SEQ ID NO: 50937 - RNA, 20 nt, Artificial Sequence
  LRRK2 RNA guide
uuccacaguuccaaaacaga

SEQ ID NO: 50938 - RNA, 20 nt, Artificial Sequence
  LRRK2 RNA guide
uuggaacuguggaaggacua

SEQ ID NO: 50939 - RNA, 20 nt, Artificial Sequence
  LRRK2 RNA guide
uugucuguuuuggaacugug

SEQ ID NO: 50940 - RNA, 20 nt, Artificial Sequence
  LRRK2 RNA guide
uuuggaacuguggaaggacu

SEQ ID NO: 50941 - RNA, 20 nt, Artificial Sequence
  LRRK2 RNA guide
uuuuggaacuguggaaggac

SEQ ID NO: 50942 - RNA, 21 nt, Artificial Sequence
  LRRK2 RNA guide
aacuguggaaggacuauggca

SEQ ID NO: 50943 - RNA, 21 nt, Artificial Sequence
  LRRK2 RNA guide
aauaugccauaguccuuccac

SEQ ID NO: 50944 - RNA, 21 nt, Artificial Sequence
  LRRK2 RNA guide
acaguuccaaaacagacaaga

SEQ ID NO: 50945 - RNA, 21 nt, Artificial Sequence
  LRRK2 RNA guide
acuguggaaggacuauggcau

SEQ ID NO: 50946 - RNA, 21 nt, Artificial Sequence
  LRRK2 RNA guide
aguccuuccacaguuccaaaa

SEQ ID NO: 50947 - RNA, 21 nt, Artificial Sequence
  LRRK2 RNA guide
auaguccuuccacaguuccaa

SEQ ID NO: 50948 - RNA, 21 nt, Artificial Sequence
  LRRK2 RNA guide
auaugccauaguccuuccaca

SEQ ID NO: 50949 - RNA, 21 nt, Artificial Sequence
  LRRK2 RNA guide
augccauaguccuuccacagu

SEQ ID NO: 50950 - RNA, 21 nt, Artificial Sequence
  LRRK2 RNA guide
cacaguuccaaaacagacaag

SEQ ID NO: 50951 - RNA, 21 nt, Artificial Sequence
  LRRK2 RNA guide
cauaguccuuccacaguucca

SEQ ID NO: 50952 - RNA, 21 nt, Artificial Sequence
  LRRK2 RNA guide
ccacaguuccaaaacagacaa

SEQ ID NO: 50953 - RNA, 21 nt, Artificial Sequence
  LRRK2 RNA guide
ccauaguccuuccacaguucc

SEQ ID NO: 50954 - RNA, 21 nt, Artificial Sequence
  LRRK2 RNA guide
ccuuccacaguuccaaaacag

SEQ ID NO: 50955 - RNA, 21 nt, Artificial Sequence
  LRRK2 RNA guide
cucuugucuguuuuggaacug

SEQ ID NO: 50956 - RNA, 21 nt, Artificial Sequence
  LRRK2 RNA guide
cuguggaaggacuauggcaua

SEQ ID NO: 50957 - RNA, 21 nt, Artificial Sequence
  LRRK2 RNA guide
cuguuuuggaacuguggaagg

SEQ ID NO: 50958 - RNA, 21 nt, Artificial Sequence
  LRRK2 RNA guide
cuuccacaguuccaaaacaga

SEQ ID NO: 50959 - RNA, 21 nt, Artificial Sequence
  LRRK2 RNA guide
cuugucuguuuuggaacugug

SEQ ID NO: 50960 - RNA, 21 nt, Artificial Sequence
  LRRK2 RNA guide
gaacuguggaaggacuauggc

SEQ ID NO: 50961 - RNA, 21 nt, Artificial Sequence
  LRRK2 RNA guide
gccauaguccuuccacaguuc

SEQ ID NO: 50962 - RNA, 21 nt, Artificial Sequence
  LRRK2 RNA guide
ggaacuguggaaggacuaugg

SEQ ID NO: 50963 - RNA, 21 nt, Artificial Sequence
  LRRK2 RNA guide
guccuuccacaguuccaaaac

SEQ ID NO: 50964 - RNA, 21 nt, Artificial Sequence
  LRRK2 RNA guide
gucuguuuuggaacuguggaa

SEQ ID NO: 50965 - RNA, 21 nt, Artificial Sequence
  LRRK2 RNA guide
guuuuggaacuguggaaggac

SEQ ID NO: 50966 - RNA, 21 nt, Artificial Sequence
  LRRK2 RNA guide
uaguccuuccacaguuccaaa

SEQ ID NO: 50967 - RNA, 21 nt, Artificial Sequence
  LRRK2 RNA guide
uaugccauaguccuuccacag

SEQ ID NO: 50968 - RNA, 21 nt, Artificial Sequence
  LRRK2 RNA guide
uccacaguuccaaaacagaca

SEQ ID NO: 50969 - RNA, 21 nt, Artificial Sequence
  LRRK2 RNA guide
uccuuccacaguuccaaaaca

SEQ ID NO: 50970 - RNA, 21 nt, Artificial Sequence
  LRRK2 RNA guide
ucuguuuuggaacuguggaag

SEQ ID NO: 50971 - RNA, 21 nt, Artificial Sequence
  LRRK2 RNA guide
ucuugucuguuuuggaacugu

SEQ ID NO: 50972 - RNA, 21 nt, Artificial Sequence
  LRRK2 RNA guide
ugccauaguccuuccacaguu

SEQ ID NO: 50973 - RNA, 21 nt, Artificial Sequence
  LRRK2 RNA guide
uggaacuguggaaggacuaug

SEQ ID NO: 50974 - RNA, 21 nt, Artificial Sequence
  LRRK2 RNA guide
ugucuguuuuggaacugugga

SEQ ID NO: 50975 - RNA, 21 nt, Artificial Sequence
  LRRK2 RNA guide
uguggaaggacuauggcauau

SEQ ID NO: 50976 - RNA, 21 nt, Artificial Sequence
  LRRK2 RNA guide
uguuuuggaacuguggaagga

SEQ ID NO: 50977 - RNA, 21 nt, Artificial Sequence
  LRRK2 RNA guide
uuccacaguuccaaaacagac

SEQ ID NO: 50978 - RNA, 21 nt, Artificial Sequence
  LRRK2 RNA guide
uuggaacuguggaaggacuau

SEQ ID NO: 50979 - RNA, 21 nt, Artificial Sequence
  LRRK2 RNA guide
uugucuguuuuggaacugugg

SEQ ID NO: 50980 - RNA, 21 nt, Artificial Sequence
  LRRK2 RNA guide
uuuggaacuguggaaggacua

SEQ ID NO: 50981 - RNA, 21 nt, Artificial Sequence
  LRRK2 RNA guide
uuuuggaacuguggaaggacu

SEQ ID NO: 50982 - RNA, 22 nt, Artificial Sequence
  LRRK2 RNA guide
aaauaugccauaguccuuccac

SEQ ID NO: 50983 - RNA, 22 nt, Artificial Sequence
  LRRK2 RNA guide
aacuguggaaggacuauggcau

SEQ ID NO: 50984 - RNA, 22 nt, Artificial Sequence
  LRRK2 RNA guide
aauaugccauaguccuuccaca

SEQ ID NO: 50985 - RNA, 22 nt, Artificial Sequence
  LRRK2 RNA guide
acaguuccaaaacagacaagag

SEQ ID NO: 50986 - RNA, 22 nt, Artificial Sequence
  LRRK2 RNA guide
acuguggaaggacuauggcaua

SEQ ID NO: 50987 - RNA, 22 nt, Artificial Sequence
  LRRK2 RNA guide
aguccuuccacaguuccaaaac

SEQ ID NO: 50988 - RNA, 22 nt, Artificial Sequence
  LRRK2 RNA guide
auaguccuuccacaguuccaaa

SEQ ID NO: 50989 - RNA, 22 nt, Artificial Sequence
  LRRK2 RNA guide
auaugccauaguccuuccacag

SEQ ID NO: 50990 - RNA, 22 nt, Artificial Sequence
  LRRK2 RNA guide
augccauaguccuuccacaguu

SEQ ID NO: 50991 - RNA, 22 nt, Artificial Sequence
  LRRK2 RNA guide
cacaguuccaaaacagacaaga

SEQ ID NO: 50992 - RNA, 22 nt, Artificial Sequence
  LRRK2 RNA guide
cauaguccuuccacaguuccaa

SEQ ID NO: 50993 - RNA, 22 nt, Artificial Sequence
  LRRK2 RNA guide
ccacaguuccaaaacagacaag

SEQ ID NO: 50994 - RNA, 22 nt, Artificial Sequence
  LRRK2 RNA guide
ccauaguccuuccacaguucca

SEQ ID NO: 50995 - RNA, 22 nt, Artificial Sequence
  LRRK2 RNA guide
ccucuugucuguuuuggaacug

SEQ ID NO: 50996 - RNA, 22 nt, Artificial Sequence
  LRRK2 RNA guide
ccuuccacaguuccaaaacaga

SEQ ID NO: 50997 - RNA, 22 nt, Artificial Sequence
  LRRK2 RNA guide
cucuugucuguuuuggaacugu

SEQ ID NO: 50998 - RNA, 22 nt, Artificial Sequence
  LRRK2 RNA guide
cuguggaaggacuauggcauau

SEQ ID NO: 50999 - RNA, 22 nt, Artificial Sequence
  LRRK2 RNA guide
cuguuuuggaacuguggaagga

SEQ ID NO: 51000 - RNA, 22 nt, Artificial Sequence
  LRRK2 RNA guide
cuuccacaguuccaaaacagac

SEQ ID NO: 51001 - RNA, 22 nt, Artificial Sequence
  LRRK2 RNA guide
cuugucuguuuuggaacugugg

SEQ ID NO: 51002 - RNA, 22 nt, Artificial Sequence
  LRRK2 RNA guide
gaacuguggaaggacuauggca

SEQ ID NO: 51003 - RNA, 22 nt, Artificial Sequence
  LRRK2 RNA guide
gccauaguccuuccacaguucc

SEQ ID NO: 51004 - RNA, 22 nt, Artificial Sequence
  LRRK2 RNA guide
ggaacuguggaaggacuauggc

SEQ ID NO: 51005 - RNA, 22 nt, Artificial Sequence
  LRRK2 RNA guide
guccuuccacaguuccaaaaca

SEQ ID NO: 51006 - RNA, 22 nt, Artificial Sequence
  LRRK2 RNA guide
gucuguuuuggaacuguggaag

SEQ ID NO: 51007 - RNA, 22 nt, Artificial Sequence
  LRRK2 RNA guide
guuuuggaacuguggaaggacu

SEQ ID NO: 51008 - RNA, 22 nt, Artificial Sequence
  LRRK2 RNA guide
uaguccuuccacaguuccaaaa

SEQ ID NO: 51009 - RNA, 22 nt, Artificial Sequence
  LRRK2 RNA guide
uaugccauaguccuuccacagu

SEQ ID NO: 51010 - RNA, 22 nt, Artificial Sequence
  LRRK2 RNA guide
uccacaguuccaaaacagacaa

SEQ ID NO: 51011 - RNA, 22 nt, Artificial Sequence
  LRRK2 RNA guide
uccuuccacaguuccaaaacag

SEQ ID NO: 51012 - RNA, 22 nt, Artificial Sequence
  LRRK2 RNA guide
ucuguuuuggaacuguggaagg

SEQ ID NO: 51013 - RNA, 22 nt, Artificial Sequence
  LRRK2 RNA guide
ucuugucuguuuuggaacugug

SEQ ID NO: 51014 - RNA, 22 nt, Artificial Sequence
  LRRK2 RNA guide
ugccauaguccuuccacaguuc

SEQ ID NO: 51015 - RNA, 22 nt, Artificial Sequence
  LRRK2 RNA guide
uggaacuguggaaggacuaugg

SEQ ID NO: 51016 - RNA, 22 nt, Artificial Sequence
  LRRK2 RNA guide
ugucuguuuuggaacuguggaa

SEQ ID NO: 51017 - RNA, 22 nt, Artificial Sequence
  LRRK2 RNA guide
uguggaaggacuauggcauauu

SEQ ID NO: 51018 - RNA, 22 nt, Artificial Sequence
  LRRK2 RNA guide
uguuuuggaacuguggaaggac

SEQ ID NO: 51019 - RNA, 22 nt, Artificial Sequence
  LRRK2 RNA guide
uuccacaguuccaaaacagaca

SEQ ID NO: 51020 - RNA, 22 nt, Artificial Sequence
  LRRK2 RNA guide
uuggaacuguggaaggacuaug

SEQ ID NO: 51021 - RNA, 22 nt, Artificial Sequence
  LRRK2 RNA guide
uugucuguuuuggaacugugga

SEQ ID NO: 51022 - RNA, 22 nt, Artificial Sequence
  LRRK2 RNA guide
uuuggaacuguggaaggacuau

SEQ ID NO: 51023 - RNA, 22 nt, Artificial Sequence
  LRRK2 RNA guide
uuuuggaacuguggaaggacua

SEQ ID NO: 51024 - RNA, 20 nt, Artificial Sequence
  LRRK2 RNA guide
acugaagcgaaaaagaaaaa

SEQ ID NO: 51025 - RNA, 20 nt, Artificial Sequence
  LRRK2 RNA guide
acugagugaaucaucugaag

SEQ ID NO: 51026 - RNA, 20 nt, Artificial Sequence
  LRRK2 RNA guide
agugaaucaucugaagauaa

SEQ ID NO: 51027 - RNA, 20 nt, Artificial Sequence
  LRRK2 RNA guide
auuaucuucagaugauucac

SEQ ID NO: 51028 - RNA, 20 nt, Artificial Sequence
  LRRK2 RNA guide
cugaagcgaaaaagaaaaau

SEQ ID NO: 51029 - RNA, 20 nt, Artificial Sequence
  LRRK2 RNA guide
cugagugaaucaucugaaga

SEQ ID NO: 51030 - RNA, 20 nt, Artificial Sequence
  LRRK2 RNA guide
gagugaaucaucugaagaua

SEQ ID NO: 51031 - RNA, 20 nt, Artificial Sequence
  LRRK2 RNA guide
uacugaagcgaaaaagaaaa

SEQ ID NO: 51032 - RNA, 20 nt, Artificial Sequence
  LRRK2 RNA guide
uacugagugaaucaucugaa

SEQ ID NO: 51033 - RNA, 20 nt, Artificial Sequence
  LRRK2 RNA guide
ugagugaaucaucugaagau

SEQ ID NO: 51034 - RNA, 20 nt, Artificial Sequence
  LRRK2 RNA guide
uuacugaagcgaaaaagaaa

SEQ ID NO: 51035 - RNA, 21 nt, Artificial Sequence
  LRRK2 RNA guide
acugagugaaucaucugaaga

SEQ ID NO: 51036 - RNA, 21 nt, Artificial Sequence
  LRRK2 RNA guide
cugagugaaucaucugaagau

SEQ ID NO: 51037 - RNA, 21 nt, Artificial Sequence
  LRRK2 RNA guide
gagugaaucaucugaagauaa

SEQ ID NO: 51038 - RNA, 21 nt, Artificial Sequence
  LRRK2 RNA guide
uacugagugaaucaucugaag

SEQ ID NO: 51039 - RNA, 21 nt, Artificial Sequence
  LRRK2 RNA guide
ugagugaaucaucugaagaua

SEQ ID NO: 51040 - RNA, 21 nt, Artificial Sequence
  LRRK2 RNA guide
uuacugagugaaucaucugaa

SEQ ID NO: 51041 - RNA, 22 nt, Artificial Sequence
  LRRK2 RNA guide
acugagugaaucaucugaagau

SEQ ID NO: 51042 - RNA, 22 nt, Artificial Sequence
  LRRK2 RNA guide
auuaucuucagaugauucacuc

SEQ ID NO: 51043 - RNA, 22 nt, Artificial Sequence
  LRRK2 RNA guide
cugagugaaucaucugaagaua

SEQ ID NO: 51044 - RNA, 22 nt, Artificial Sequence
  LRRK2 RNA guide
cuuacugagugaaucaucugaa

SEQ ID NO: 51045 - RNA, 22 nt, Artificial Sequence
  LRRK2 RNA guide
gagugaaucaucugaagauaau

SEQ ID NO: 51046 - RNA, 22 nt, Artificial Sequence
  LRRK2 RNA guide
uacugagugaaucaucugaaga

SEQ ID NO: 51047 - RNA, 22 nt, Artificial Sequence
  LRRK2 RNA guide
ugagugaaucaucugaagauaa

SEQ ID NO: 51048 - RNA, 22 nt, Artificial Sequence
  LRRK2 RNA guide
uuacugagugaaucaucugaag

SEQ ID NO: 51049 - RNA, 20 nt, Artificial Sequence
  LRRK2 RNA guide
acuaucuucagaugauucac

SEQ ID NO: 51050 - RNA, 20 nt, Artificial Sequence
  LRRK2 RNA guide
agugaaucaucugaagauag

SEQ ID NO: 51051 - RNA, 20 nt, Artificial Sequence
  LRRK2 RNA guide
auacuaucuucagaugauuc

SEQ ID NO: 51052 - RNA, 20 nt, Artificial Sequence
  LRRK2 RNA guide
gaagcgaaaaagaaaaauac

SEQ ID NO: 51053 - RNA, 20 nt, Artificial Sequence
  LRRK2 RNA guide
gaaucaucugaagauaguau

SEQ ID NO: 51054 - RNA, 20 nt, Artificial Sequence
  LRRK2 RNA guide
gugaaucaucugaagauagu

SEQ ID NO: 51055 - RNA, 20 nt, Artificial Sequence
  LRRK2 RNA guide
uacuaucuucagaugauuca

SEQ ID NO: 51056 - RNA, 20 nt, Artificial Sequence
  LRRK2 RNA guide
ugaaucaucugaagauagua

SEQ ID NO: 51057 - RNA, 21 nt, Artificial Sequence
  LRRK2 RNA guide
acuaucuucagaugauucacu

SEQ ID NO: 51058 - RNA, 21 nt, Artificial Sequence
  LRRK2 RNA guide
agugaaucaucugaagauagu

SEQ ID NO: 51059 - RNA, 21 nt, Artificial Sequence
  LRRK2 RNA guide
gagugaaucaucugaagauag

SEQ ID NO: 51060 - RNA, 21 nt, Artificial Sequence
  LRRK2 RNA guide
gugaaucaucugaagauagua

SEQ ID NO: 51061 - RNA, 21 nt, Artificial Sequence
  LRRK2 RNA guide
uacuaucuucagaugauucac

SEQ ID NO: 51062 - RNA, 22 nt, Artificial Sequence
  LRRK2 RNA guide
acuaucuucagaugauucacuc

SEQ ID NO: 51063 - RNA, 22 nt, Artificial Sequence
  LRRK2 RNA guide
agugaaucaucugaagauagua

SEQ ID NO: 51064 - RNA, 22 nt, Artificial Sequence
  LRRK2 RNA guide
auacuaucuucagaugauucac

SEQ ID NO: 51065 - RNA, 22 nt, Artificial Sequence
  LRRK2 RNA guide
cugaagcgaaaaagaaaaauac

SEQ ID NO: 51066 - RNA, 22 nt, Artificial Sequence
  LRRK2 RNA guide
gagugaaucaucugaagauagu

SEQ ID NO: 51067 - RNA, 22 nt, Artificial Sequence
  LRRK2 RNA guide
gugaaucaucugaagauaguau

SEQ ID NO: 51068 - RNA, 22 nt, Artificial Sequence
  LRRK2 RNA guide
uacuaucuucagaugauucacu

SEQ ID NO: 51069 - RNA, 22 nt, Artificial Sequence
  LRRK2 RNA guide
ugagugaaucaucugaagauag

SEQ ID NO: 51070 - RNA, 20 nt, Artificial Sequence
  LRRK2 RNA guide
aaaaaagacuaaugugcucu

SEQ ID NO: 51071 - RNA, 20 nt, Artificial Sequence
  LRRK2 RNA guide
aaaaagacuaaugugcucua

SEQ ID NO: 51072 - RNA, 20 nt, Artificial Sequence
  LRRK2 RNA guide
aaaagacuaaugugcucuau

SEQ ID NO: 51073 - RNA, 20 nt, Artificial Sequence
  LRRK2 RNA guide
aaagacuaaugugcucuaua

SEQ ID NO: 51074 - RNA, 20 nt, Artificial Sequence
  LRRK2 RNA guide
aagacuaaugugcucuauaa

SEQ ID NO: 51075 - RNA, 20 nt, Artificial Sequence
  LRRK2 RNA guide
agacuaaugugcucuauaau

SEQ ID NO: 51076 - RNA, 20 nt, Artificial Sequence
  LRRK2 RNA guide
agagcacauuagucuuuuuu

SEQ ID NO: 51077 - RNA, 20 nt, Artificial Sequence
  LRRK2 RNA guide
auagagcacauuagucuuuu

SEQ ID NO: 51078 - RNA, 20 nt, Artificial Sequence
  LRRK2 RNA guide
auuauagagcacauuagucu

SEQ ID NO: 51079 - RNA, 20 nt, Artificial Sequence
  LRRK2 RNA guide
cuugaauauuauagagcaca

SEQ ID NO: 51080 - RNA, 20 nt, Artificial Sequence
  LRRK2 RNA guide
gacuaaugugcucuauaaua

SEQ ID NO: 51081 - RNA, 20 nt, Artificial Sequence
  LRRK2 RNA guide
gugcucuauaauauucaaga

SEQ ID NO: 51082 - RNA, 20 nt, Artificial Sequence
  LRRK2 RNA guide
uagagcacauuagucuuuuu

SEQ ID NO: 51083 - RNA, 20 nt, Artificial Sequence
  LRRK2 RNA guide
uauagagcacauuagucuuu

SEQ ID NO: 51084 - RNA, 20 nt, Artificial Sequence
  LRRK2 RNA guide
uauuauagagcacauuaguc

SEQ ID NO: 51085 - RNA, 20 nt, Artificial Sequence
  LRRK2 RNA guide
ucuugaauauuauagagcac

SEQ ID NO: 51086 - RNA, 20 nt, Artificial Sequence
  LRRK2 RNA guide
ugugcucuauaauauucaag

SEQ ID NO: 51087 - RNA, 20 nt, Artificial Sequence
  LRRK2 RNA guide
uuauagagcacauuagucuu

SEQ ID NO: 51088 - RNA, 22 nt, Artificial Sequence
  LRRK2 RNA guide
ccuuucuugaauauuauagagc

SEQ ID NO: 51089 - RNA, 22 nt, Artificial Sequence
  LRRK2 RNA guide
gcucuauaauauucaagaaagg

SEQ ID NO: 51090 - RNA, 20 nt, Artificial Sequence
  LRRK2 RNA guide
aagauaugugugcaaaaacc

SEQ ID NO: 51091 - RNA, 20 nt, Artificial Sequence
  LRRK2 RNA guide
acacagacuaagauaugugu

SEQ ID NO: 51092 - RNA, 20 nt, Artificial Sequence
  LRRK2 RNA guide
acagacuaagauaugugugc

SEQ ID NO: 51093 - RNA, 20 nt, Artificial Sequence
  LRRK2 RNA guide
acuaagauaugugugcaaaa

SEQ ID NO: 51094 - RNA, 20 nt, Artificial Sequence
  LRRK2 RNA guide
agacuaagauaugugugcaa

SEQ ID NO: 51095 - RNA, 20 nt, Artificial Sequence
  LRRK2 RNA guide
agauaugugugcaaaaacca

SEQ ID NO: 51096 - RNA, 20 nt, Artificial Sequence
  LRRK2 RNA guide
agucccccgugccucugguu

SEQ ID NO: 51097 - RNA, 20 nt, Artificial Sequence
  LRRK2 RNA guide
auaugugugcaaaaaccaga

SEQ ID NO: 51098 - RNA, 20 nt, Artificial Sequence
  LRRK2 RNA guide
aucacacagacuaagauaug

SEQ ID NO: 51099 - RNA, 20 nt, Artificial Sequence
  LRRK2 RNA guide
augugugcaaaaaccagagg

SEQ ID NO: 51100 - RNA, 20 nt, Artificial Sequence
  LRRK2 RNA guide
cacacagacuaagauaugug

SEQ ID NO: 51101 - RNA, 20 nt, Artificial Sequence
  LRRK2 RNA guide
cacagacuaagauaugugug

SEQ ID NO: 51102 - RNA, 20 nt, Artificial Sequence
  LRRK2 RNA guide
cagacuaagauaugugugca

SEQ ID NO: 51103 - RNA, 20 nt, Artificial Sequence
  LRRK2 RNA guide
caucacacagacuaagauau

SEQ ID NO: 51104 - RNA, 20 nt, Artificial Sequence
  LRRK2 RNA guide
cccccgugccucugguuuuu

SEQ ID NO: 51105 - RNA, 20 nt, Artificial Sequence
  LRRK2 RNA guide
ccccgugccucugguuuuug

SEQ ID NO: 51106 - RNA, 20 nt, Artificial Sequence
  LRRK2 RNA guide
cccgugccucugguuuuugc

SEQ ID NO: 51107 - RNA, 20 nt, Artificial Sequence
  LRRK2 RNA guide
ccgugccucugguuuuugca

SEQ ID NO: 51108 - RNA, 20 nt, Artificial Sequence
  LRRK2 RNA guide
ccucugguuuuugcacacau

SEQ ID NO: 51109 - RNA, 20 nt, Artificial Sequence
  LRRK2 RNA guide
cgugccucugguuuuugcac

SEQ ID NO: 51110 - RNA, 20 nt, Artificial Sequence
  LRRK2 RNA guide
cuaagauaugugugcaaaaa

SEQ ID NO: 51111 - RNA, 20 nt, Artificial Sequence
  LRRK2 RNA guide
cucugguuuuugcacacaua

SEQ ID NO: 51112 - RNA, 20 nt, Artificial Sequence
  LRRK2 RNA guide
cugguuuuugcacacauauc

SEQ ID NO: 51113 - RNA, 20 nt, Artificial Sequence
  LRRK2 RNA guide
gacuaagauaugugugcaaa

SEQ ID NO: 51114 - RNA, 20 nt, Artificial Sequence
  LRRK2 RNA guide
gauaugugugcaaaaaccag

SEQ ID NO: 51115 - RNA, 20 nt, Artificial Sequence
  LRRK2 RNA guide
gcacacauaucuuagucugu

SEQ ID NO: 51116 - RNA, 20 nt, Artificial Sequence
  LRRK2 RNA guide
gccucugguuuuugcacaca

SEQ ID NO: 51117 - RNA, 20 nt, Artificial Sequence
  LRRK2 RNA guide
gguuuuugcacacauaucuu

SEQ ID NO: 51118 - RNA, 20 nt, Artificial Sequence
  LRRK2 RNA guide
gucccccgugccucugguuu

SEQ ID NO: 51119 - RNA, 20 nt, Artificial Sequence
  LRRK2 RNA guide
gugcaaaaaccagaggcacg

SEQ ID NO: 51120 - RNA, 20 nt, Artificial Sequence
  LRRK2 RNA guide
gugccucugguuuuugcaca

SEQ ID NO: 51121 - RNA, 20 nt, Artificial Sequence
  LRRK2 RNA guide
gugugcaaaaaccagaggca

SEQ ID NO: 51122 - RNA, 20 nt, Artificial Sequence
  LRRK2 RNA guide
guuuuugcacacauaucuua

SEQ ID NO: 51123 - RNA, 20 nt, Artificial Sequence
  LRRK2 RNA guide
uaagauaugugugcaaaaac

SEQ ID NO: 51124 - RNA, 20 nt, Artificial Sequence
  LRRK2 RNA guide
uaugugugcaaaaaccagag

SEQ ID NO: 51125 - RNA, 20 nt, Artificial Sequence
  LRRK2 RNA guide
ucacacagacuaagauaugu

SEQ ID NO: 51126 - RNA, 20 nt, Artificial Sequence
  LRRK2 RNA guide
ucccccgugccucugguuuu

SEQ ID NO: 51127 - RNA, 20 nt, Artificial Sequence
  LRRK2 RNA guide
ucugguuuuugcacacauau

SEQ ID NO: 51128 - RNA, 20 nt, Artificial Sequence
  LRRK2 RNA guide
ugcacacauaucuuagucug

SEQ ID NO: 51129 - RNA, 20 nt, Artificial Sequence
  LRRK2 RNA guide
ugccucugguuuuugcacac

SEQ ID NO: 51130 - RNA, 20 nt, Artificial Sequence
  LRRK2 RNA guide
ugguuuuugcacacauaucu

SEQ ID NO: 51131 - RNA, 20 nt, Artificial Sequence
  LRRK2 RNA guide
ugugcaaaaaccagaggcac

SEQ ID NO: 51132 - RNA, 20 nt, Artificial Sequence
  LRRK2 RNA guide
ugugugcaaaaaccagaggc

SEQ ID NO: 51133 - RNA, 20 nt, Artificial Sequence
  LRRK2 RNA guide
uugcacacauaucuuagucu

SEQ ID NO: 51134 - RNA, 20 nt, Artificial Sequence
  LRRK2 RNA guide
uuugcacacauaucuuaguc

SEQ ID NO: 51135 - RNA, 20 nt, Artificial Sequence
  LRRK2 RNA guide
uuuugcacacauaucuuagu

SEQ ID NO: 51136 - RNA, 20 nt, Artificial Sequence
  LRRK2 RNA guide
uuuuugcacacauaucuuag

SEQ ID NO: 51137 - RNA, 21 nt, Artificial Sequence
  LRRK2 RNA guide
aagauaugugugcaaaaacca

SEQ ID NO: 51138 - RNA, 21 nt, Artificial Sequence
  LRRK2 RNA guide
aagucccccgugccucugguu

SEQ ID NO: 51139 - RNA, 21 nt, Artificial Sequence
  LRRK2 RNA guide
acacagacuaagauaugugug

SEQ ID NO: 51140 - RNA, 21 nt, Artificial Sequence
  LRRK2 RNA guide
acagacuaagauaugugugca

SEQ ID NO: 51141 - RNA, 21 nt, Artificial Sequence
  LRRK2 RNA guide
acaucacacagacuaagauau

SEQ ID NO: 51142 - RNA, 21 nt, Artificial Sequence
  LRRK2 RNA guide
agacuaagauaugugugcaaa

SEQ ID NO: 51143 - RNA, 21 nt, Artificial Sequence
  LRRK2 RNA guide
agauaugugugcaaaaaccag

SEQ ID NO: 51144 - RNA, 21 nt, Artificial Sequence
  LRRK2 RNA guide
agucccccgugccucugguuu

SEQ ID NO: 51145 - RNA, 21 nt, Artificial Sequence
  LRRK2 RNA guide
auaugugugcaaaaaccagag

SEQ ID NO: 51146 - RNA, 21 nt, Artificial Sequence
  LRRK2 RNA guide
aucacacagacuaagauaugu

SEQ ID NO: 51147 - RNA, 21 nt, Artificial Sequence
  LRRK2 RNA guide
augugugcaaaaaccagaggc

SEQ ID NO: 51148 - RNA, 21 nt, Artificial Sequence
  LRRK2 RNA guide
cacacagacuaagauaugugu

SEQ ID NO: 51149 - RNA, 21 nt, Artificial Sequence
  LRRK2 RNA guide
cacagacuaagauaugugugc

SEQ ID NO: 51150 - RNA, 21 nt, Artificial Sequence
  LRRK2 RNA guide
cagacuaagauaugugugcaa

SEQ ID NO: 51151 - RNA, 21 nt, Artificial Sequence
  LRRK2 RNA guide
caucacacagacuaagauaug

SEQ ID NO: 51152 - RNA, 21 nt, Artificial Sequence
  LRRK2 RNA guide
cccccgugccucugguuuuug

SEQ ID NO: 51153 - RNA, 21 nt, Artificial Sequence
  LRRK2 RNA guide
ccccgugccucugguuuuugc

SEQ ID NO: 51154 - RNA, 21 nt, Artificial Sequence
  LRRK2 RNA guide
cccgugccucugguuuuugca

SEQ ID NO: 51155 - RNA, 21 nt, Artificial Sequence
  LRRK2 RNA guide
ccgugccucugguuuuugcac

SEQ ID NO: 51156 - RNA, 21 nt, Artificial Sequence
  LRRK2 RNA guide
ccucugguuuuugcacacaua

SEQ ID NO: 51157 - RNA, 21 nt, Artificial Sequence
  LRRK2 RNA guide
cgugccucugguuuuugcaca

SEQ ID NO: 51158 - RNA, 21 nt, Artificial Sequence
  LRRK2 RNA guide
cuaagauaugugugcaaaaac

SEQ ID NO: 51159 - RNA, 21 nt, Artificial Sequence
  LRRK2 RNA guide
cucugguuuuugcacacauau

SEQ ID NO: 51160 - RNA, 21 nt, Artificial Sequence
  LRRK2 RNA guide
cugguuuuugcacacauaucu

SEQ ID NO: 51161 - RNA, 21 nt, Artificial Sequence
  LRRK2 RNA guide
gacuaagauaugugugcaaaa

SEQ ID NO: 51162 - RNA, 21 nt, Artificial Sequence
  LRRK2 RNA guide
gauaugugugcaaaaaccaga

SEQ ID NO: 51163 - RNA, 21 nt, Artificial Sequence
  LRRK2 RNA guide
gcacacauaucuuagucugug

SEQ ID NO: 51164 - RNA, 21 nt, Artificial Sequence
  LRRK2 RNA guide
gccucugguuuuugcacacau

SEQ ID NO: 51165 - RNA, 21 nt, Artificial Sequence
  LRRK2 RNA guide
gguuuuugcacacauaucuua

SEQ ID NO: 51166 - RNA, 21 nt, Artificial Sequence
  LRRK2 RNA guide
gucccccgugccucugguuuu

SEQ ID NO: 51167 - RNA, 21 nt, Artificial Sequence
  LRRK2 RNA guide
gugcaaaaaccagaggcacgg

SEQ ID NO: 51168 - RNA, 21 nt, Artificial Sequence
  LRRK2 RNA guide
gugccucugguuuuugcacac

SEQ ID NO: 51169 - RNA, 21 nt, Artificial Sequence
  LRRK2 RNA guide
gugugcaaaaaccagaggcac

SEQ ID NO: 51170 - RNA, 21 nt, Artificial Sequence
  LRRK2 RNA guide
guuuuugcacacauaucuuag

SEQ ID NO: 51171 - RNA, 21 nt, Artificial Sequence
  LRRK2 RNA guide
uaagauaugugugcaaaaacc

SEQ ID NO: 51172 - RNA, 21 nt, Artificial Sequence
  LRRK2 RNA guide
uaugugugcaaaaaccagagg

SEQ ID NO: 51173 - RNA, 21 nt, Artificial Sequence
  LRRK2 RNA guide
ucacacagacuaagauaugug

SEQ ID NO: 51174 - RNA, 21 nt, Artificial Sequence
  LRRK2 RNA guide
ucccccgugccucugguuuuu

SEQ ID NO: 51175 - RNA, 21 nt, Artificial Sequence
  LRRK2 RNA guide
ucugguuuuugcacacauauc

SEQ ID NO: 51176 - RNA, 21 nt, Artificial Sequence
  LRRK2 RNA guide
ugcaaaaaccagaggcacggg

SEQ ID NO: 51177 - RNA, 21 nt, Artificial Sequence
  LRRK2 RNA guide
ugcacacauaucuuagucugu

SEQ ID NO: 51178 - RNA, 21 nt, Artificial Sequence
  LRRK2 RNA guide
ugccucugguuuuugcacaca

SEQ ID NO: 51179 - RNA, 21 nt, Artificial Sequence
  LRRK2 RNA guide
ugguuuuugcacacauaucuu

SEQ ID NO: 51180 - RNA, 21 nt, Artificial Sequence
  LRRK2 RNA guide
ugugcaaaaaccagaggcacg

SEQ ID NO: 51181 - RNA, 21 nt, Artificial Sequence
  LRRK2 RNA guide
ugugugcaaaaaccagaggca

SEQ ID NO: 51182 - RNA, 21 nt, Artificial Sequence
  LRRK2 RNA guide
uugcacacauaucuuagucug

SEQ ID NO: 51183 - RNA, 21 nt, Artificial Sequence
  LRRK2 RNA guide
uuugcacacauaucuuagucu

SEQ ID NO: 51184 - RNA, 21 nt, Artificial Sequence
  LRRK2 RNA guide
uuuugcacacauaucuuaguc

SEQ ID NO: 51185 - RNA, 22 nt, Artificial Sequence
  LRRK2 RNA guide
aacaucacacagacuaagauau

SEQ ID NO: 51186 - RNA, 22 nt, Artificial Sequence
  LRRK2 RNA guide
aagauaugugugcaaaaaccag

SEQ ID NO: 51187 - RNA, 22 nt, Artificial Sequence
  LRRK2 RNA guide
aagucccccgugccucugguuu

SEQ ID NO: 51188 - RNA, 22 nt, Artificial Sequence
  LRRK2 RNA guide
acacagacuaagauaugugugc

SEQ ID NO: 51189 - RNA, 22 nt, Artificial Sequence
  LRRK2 RNA guide
acagacuaagauaugugugcaa

SEQ ID NO: 51190 - RNA, 22 nt, Artificial Sequence
  LRRK2 RNA guide
acaucacacagacuaagauaug

SEQ ID NO: 51191 - RNA, 22 nt, Artificial Sequence
  LRRK2 RNA guide
acuaagauaugugugcaaaaac

SEQ ID NO: 51192 - RNA, 22 nt, Artificial Sequence
  LRRK2 RNA guide
agacuaagauaugugugcaaaa

SEQ ID NO: 51193 - RNA, 22 nt, Artificial Sequence
  LRRK2 RNA guide
agauaugugugcaaaaaccaga

SEQ ID NO: 51194 - RNA, 22 nt, Artificial Sequence
  LRRK2 RNA guide
agucccccgugccucugguuuu

SEQ ID NO: 51195 - RNA, 22 nt, Artificial Sequence
  LRRK2 RNA guide
auaugugugcaaaaaccagagg

SEQ ID NO: 51196 - RNA, 22 nt, Artificial Sequence
  LRRK2 RNA guide
aucacacagacuaagauaugug

SEQ ID NO: 51197 - RNA, 22 nt, Artificial Sequence
  LRRK2 RNA guide
augugugcaaaaaccagaggca

SEQ ID NO: 51198 - RNA, 22 nt, Artificial Sequence
  LRRK2 RNA guide
cacacagacuaagauaugugug

SEQ ID NO: 51199 - RNA, 22 nt, Artificial Sequence
  LRRK2 RNA guide
cacagacuaagauaugugugca

SEQ ID NO: 51200 - RNA, 22 nt, Artificial Sequence
  LRRK2 RNA guide
cagacuaagauaugugugcaaa

SEQ ID NO: 51201 - RNA, 22 nt, Artificial Sequence
  LRRK2 RNA guide
caucacacagacuaagauaugu

SEQ ID NO: 51202 - RNA, 22 nt, Artificial Sequence
  LRRK2 RNA guide
cccccgugccucugguuuuugc

SEQ ID NO: 51203 - RNA, 22 nt, Artificial Sequence
  LRRK2 RNA guide
ccccgugccucugguuuuugca

SEQ ID NO: 51204 - RNA, 22 nt, Artificial Sequence
  LRRK2 RNA guide
cccgugccucugguuuuugcac

SEQ ID NO: 51205 - RNA, 22 nt, Artificial Sequence
  LRRK2 RNA guide
ccgugccucugguuuuugcaca

SEQ ID NO: 51206 - RNA, 22 nt, Artificial Sequence
  LRRK2 RNA guide
ccucugguuuuugcacacauau

SEQ ID NO: 51207 - RNA, 22 nt, Artificial Sequence
  LRRK2 RNA guide
cgugccucugguuuuugcacac

SEQ ID NO: 51208 - RNA, 22 nt, Artificial Sequence
  LRRK2 RNA guide
cuaagauaugugugcaaaaacc

SEQ ID NO: 51209 - RNA, 22 nt, Artificial Sequence
  LRRK2 RNA guide
cucugguuuuugcacacauauc

SEQ ID NO: 51210 - RNA, 22 nt, Artificial Sequence
  LRRK2 RNA guide
cugguuuuugcacacauaucuu

SEQ ID NO: 51211 - RNA, 22 nt, Artificial Sequence
  LRRK2 RNA guide
gacuaagauaugugugcaaaaa

SEQ ID NO: 51212 - RNA, 22 nt, Artificial Sequence
  LRRK2 RNA guide
gauaugugugcaaaaaccagag

SEQ ID NO: 51213 - RNA, 22 nt, Artificial Sequence
  LRRK2 RNA guide
gcacacauaucuuagucugugu

SEQ ID NO: 51214 - RNA, 22 nt, Artificial Sequence
  LRRK2 RNA guide
gccucugguuuuugcacacaua

SEQ ID NO: 51215 - RNA, 22 nt, Artificial Sequence
  LRRK2 RNA guide
gguuuuugcacacauaucuuag

SEQ ID NO: 51216 - RNA, 22 nt, Artificial Sequence
  LRRK2 RNA guide
gucccccgugccucugguuuuu

SEQ ID NO: 51217 - RNA, 22 nt, Artificial Sequence
  LRRK2 RNA guide
gugcaaaaaccagaggcacggg

SEQ ID NO: 51218 - RNA, 22 nt, Artificial Sequence
  LRRK2 RNA guide
gugccucugguuuuugcacaca

SEQ ID NO: 51219 - RNA, 22 nt, Artificial Sequence
  LRRK2 RNA guide
gugugcaaaaaccagaggcacg

SEQ ID NO: 51220 - RNA, 22 nt, Artificial Sequence
  LRRK2 RNA guide
guuuuugcacacauaucuuagu

SEQ ID NO: 51221 - RNA, 22 nt, Artificial Sequence
  LRRK2 RNA guide
uaagauaugugugcaaaaacca

SEQ ID NO: 51222 - RNA, 22 nt, Artificial Sequence
  LRRK2 RNA guide
uaagucccccgugccucugguu

SEQ ID NO: 51223 - RNA, 22 nt, Artificial Sequence
  LRRK2 RNA guide
uaugugugcaaaaaccagaggc

SEQ ID NO: 51224 - RNA, 22 nt, Artificial Sequence
  LRRK2 RNA guide
ucacacagacuaagauaugugu

SEQ ID NO: 51225 - RNA, 22 nt, Artificial Sequence
  LRRK2 RNA guide
ucccccgugccucugguuuuug

SEQ ID NO: 51226 - RNA, 22 nt, Artificial Sequence
  LRRK2 RNA guide
ucugguuuuugcacacauaucu

SEQ ID NO: 51227 - RNA, 22 nt, Artificial Sequence
  LRRK2 RNA guide
ugcaaaaaccagaggcacgggg

SEQ ID NO: 51228 - RNA, 22 nt, Artificial Sequence
  LRRK2 RNA guide
ugcacacauaucuuagucugug

SEQ ID NO: 51229 - RNA, 22 nt, Artificial Sequence
  LRRK2 RNA guide
ugccucugguuuuugcacacau

SEQ ID NO: 51230 - RNA, 22 nt, Artificial Sequence
  LRRK2 RNA guide
ugguuuuugcacacauaucuua

SEQ ID NO: 51231 - RNA, 22 nt, Artificial Sequence
  LRRK2 RNA guide
ugugcaaaaaccagaggcacgg

SEQ ID NO: 51232 - RNA, 22 nt, Artificial Sequence
  LRRK2 RNA guide
ugugugcaaaaaccagaggcac

SEQ ID NO: 51233 - RNA, 22 nt, Artificial Sequence
  LRRK2 RNA guide
uugcacacauaucuuagucugu

SEQ ID NO: 51234 - RNA, 22 nt, Artificial Sequence
  LRRK2 RNA guide
uuugcacacauaucuuagucug

SEQ ID NO: 51235 - RNA, 22 nt, Artificial Sequence
  LRRK2 RNA guide
uuuugcacacauaucuuagucu

SEQ ID NO: 51236 - RNA, 22 nt, Artificial Sequence
  LRRK2 RNA guide
uuuuugcacacauaucuuaguc

SEQ ID NO: 51237 - RNA, 20 nt, Artificial Sequence
  LRRK2 RNA guide
aagauauguguacaaaaacc

SEQ ID NO: 51238 - RNA, 20 nt, Artificial Sequence
  LRRK2 RNA guide
acagacuaagauauguguac

SEQ ID NO: 51239 - RNA, 20 nt, Artificial Sequence
  LRRK2 RNA guide
agacuaagauauguguacaa

SEQ ID NO: 51240 - RNA, 20 nt, Artificial Sequence
  LRRK2 RNA guide
agauauguguacaaaaacca

SEQ ID NO: 51241 - RNA, 20 nt, Artificial Sequence
  LRRK2 RNA guide
auauguguacaaaaaccaga

SEQ ID NO: 51242 - RNA, 20 nt, Artificial Sequence
  LRRK2 RNA guide
auguguacaaaaaccagagg

SEQ ID NO: 51243 - RNA, 20 nt, Artificial Sequence
  LRRK2 RNA guide
cacagacuaagauaugugua

SEQ ID NO: 51244 - RNA, 20 nt, Artificial Sequence
  LRRK2 RNA guide
cagacuaagauauguguaca

SEQ ID NO: 51245 - RNA, 20 nt, Artificial Sequence
  LRRK2 RNA guide
cccgugccucugguuuuugu

SEQ ID NO: 51246 - RNA, 20 nt, Artificial Sequence
  LRRK2 RNA guide
ccgugccucugguuuuugua

SEQ ID NO: 51247 - RNA, 20 nt, Artificial Sequence
  LRRK2 RNA guide
ccucugguuuuuguacacau

SEQ ID NO: 51248 - RNA, 20 nt, Artificial Sequence
  LRRK2 RNA guide
cgugccucugguuuuuguac

SEQ ID NO: 51249 - RNA, 20 nt, Artificial Sequence
  LRRK2 RNA guide
cucugguuuuuguacacaua

SEQ ID NO: 51250 - RNA, 20 nt, Artificial Sequence
  LRRK2 RNA guide
cugguuuuuguacacauauc

SEQ ID NO: 51251 - RNA, 20 nt, Artificial Sequence
  LRRK2 RNA guide
gacuaagauauguguacaaa

SEQ ID NO: 51252 - RNA, 20 nt, Artificial Sequence
  LRRK2 RNA guide
gauauguguacaaaaaccag

SEQ ID NO: 51253 - RNA, 20 nt, Artificial Sequence
  LRRK2 RNA guide
gccucugguuuuuguacaca

SEQ ID NO: 51254 - RNA, 20 nt, Artificial Sequence
  LRRK2 RNA guide
gguuuuuguacacauaucuu

SEQ ID NO: 51255 - RNA, 20 nt, Artificial Sequence
  LRRK2 RNA guide
guacaaaaaccagaggcacg

SEQ ID NO: 51256 - RNA, 20 nt, Artificial Sequence
  LRRK2 RNA guide
guacacauaucuuagucugu

SEQ ID NO: 51257 - RNA, 20 nt, Artificial Sequence
  LRRK2 RNA guide
gugccucugguuuuuguaca

SEQ ID NO: 51258 - RNA, 20 nt, Artificial Sequence
  LRRK2 RNA guide
guguacaaaaaccagaggca

SEQ ID NO: 51259 - RNA, 20 nt, Artificial Sequence
  LRRK2 RNA guide
uacaaaaaccagaggcacgg

SEQ ID NO: 51260 - RNA, 20 nt, Artificial Sequence
  LRRK2 RNA guide
uauguguacaaaaaccagag

SEQ ID NO: 51261 - RNA, 20 nt, Artificial Sequence
  LRRK2 RNA guide
ucugguuuuuguacacauau

SEQ ID NO: 51262 - RNA, 20 nt, Artificial Sequence
  LRRK2 RNA guide
ugccucugguuuuuguacac

SEQ ID NO: 51263 - RNA, 20 nt, Artificial Sequence
  LRRK2 RNA guide
ugguuuuuguacacauaucu

SEQ ID NO: 51264 - RNA, 20 nt, Artificial Sequence
  LRRK2 RNA guide
uguacaaaaaccagaggcac

SEQ ID NO: 51265 - RNA, 20 nt, Artificial Sequence
  LRRK2 RNA guide
uguacacauaucuuagucug

SEQ ID NO: 51266 - RNA, 20 nt, Artificial Sequence
  LRRK2 RNA guide
uguguacaaaaaccagaggc

SEQ ID NO: 51267 - RNA, 20 nt, Artificial Sequence
  LRRK2 RNA guide
uuguacacauaucuuagucu

SEQ ID NO: 51268 - RNA, 20 nt, Artificial Sequence
  LRRK2 RNA guide
uuuguacacauaucuuaguc

SEQ ID NO: 51269 - RNA, 21 nt, Artificial Sequence
  LRRK2 RNA guide
acacagacuaagauaugugua

SEQ ID NO: 51270 - RNA, 21 nt, Artificial Sequence
  LRRK2 RNA guide
acagacuaagauauguguaca

SEQ ID NO: 51271 - RNA, 21 nt, Artificial Sequence
  LRRK2 RNA guide
agauauguguacaaaaaccag

SEQ ID NO: 51272 - RNA, 21 nt, Artificial Sequence
  LRRK2 RNA guide
auauguguacaaaaaccagag

SEQ ID NO: 51273 - RNA, 21 nt, Artificial Sequence
  LRRK2 RNA guide
auguguacaaaaaccagaggc

SEQ ID NO: 51274 - RNA, 21 nt, Artificial Sequence
  LRRK2 RNA guide
cacagacuaagauauguguac

SEQ ID NO: 51275 - RNA, 21 nt, Artificial Sequence
  LRRK2 RNA guide
cagacuaagauauguguacaa

SEQ ID NO: 51276 - RNA, 21 nt, Artificial Sequence
  LRRK2 RNA guide
ccccgugccucugguuuuugu

SEQ ID NO: 51277 - RNA, 21 nt, Artificial Sequence
  LRRK2 RNA guide
cccgugccucugguuuuugua

SEQ ID NO: 51278 - RNA, 21 nt, Artificial Sequence
  LRRK2 RNA guide
ccgugccucugguuuuuguac

SEQ ID NO: 51279 - RNA, 21 nt, Artificial Sequence
  LRRK2 RNA guide
ccucugguuuuuguacacaua

SEQ ID NO: 51280 - RNA, 21 nt, Artificial Sequence
  LRRK2 RNA guide
cgugccucugguuuuuguaca

SEQ ID NO: 51281 - RNA, 21 nt, Artificial Sequence
  LRRK2 RNA guide
cucugguuuuuguacacauau

SEQ ID NO: 51282 - RNA, 21 nt, Artificial Sequence
  LRRK2 RNA guide
cugguuuuuguacacauaucu

SEQ ID NO: 51283 - RNA, 21 nt, Artificial Sequence
  LRRK2 RNA guide
gauauguguacaaaaaccaga

SEQ ID NO: 51284 - RNA, 21 nt, Artificial Sequence
  LRRK2 RNA guide
gccucugguuuuuguacacau

SEQ ID NO: 51285 - RNA, 21 nt, Artificial Sequence
  LRRK2 RNA guide
guacaaaaaccagaggcacgg

SEQ ID NO: 51286 - RNA, 21 nt, Artificial Sequence
  LRRK2 RNA guide
guacacauaucuuagucugug

SEQ ID NO: 51287 - RNA, 21 nt, Artificial Sequence
  LRRK2 RNA guide
gugccucugguuuuuguacac

SEQ ID NO: 51288 - RNA, 21 nt, Artificial Sequence
  LRRK2 RNA guide
guguacaaaaaccagaggcac

SEQ ID NO: 51289 - RNA, 21 nt, Artificial Sequence
  LRRK2 RNA guide
uacaaaaaccagaggcacggg

SEQ ID NO: 51290 - RNA, 21 nt, Artificial Sequence
  LRRK2 RNA guide
uauguguacaaaaaccagagg

SEQ ID NO: 51291 - RNA, 21 nt, Artificial Sequence
  LRRK2 RNA guide
ucugguuuuuguacacauauc

SEQ ID NO: 51292 - RNA, 21 nt, Artificial Sequence
  LRRK2 RNA guide
ugccucugguuuuuguacaca

SEQ ID NO: 51293 - RNA, 21 nt, Artificial Sequence
  LRRK2 RNA guide
uguacaaaaaccagaggcacg

SEQ ID NO: 51294 - RNA, 21 nt, Artificial Sequence
  LRRK2 RNA guide
uguacacauaucuuagucugu

SEQ ID NO: 51295 - RNA, 21 nt, Artificial Sequence
  LRRK2 RNA guide
uguguacaaaaaccagaggca

SEQ ID NO: 51296 - RNA, 21 nt, Artificial Sequence
  LRRK2 RNA guide
uuguacacauaucuuagucug

SEQ ID NO: 51297 - RNA, 22 nt, Artificial Sequence
  LRRK2 RNA guide
aagauauguguacaaaaaccag

SEQ ID NO: 51298 - RNA, 22 nt, Artificial Sequence
  LRRK2 RNA guide
acacagacuaagauauguguac

SEQ ID NO: 51299 - RNA, 22 nt, Artificial Sequence
  LRRK2 RNA guide
acagacuaagauauguguacaa

SEQ ID NO: 51300 - RNA, 22 nt, Artificial Sequence
  LRRK2 RNA guide
agauauguguacaaaaaccaga

SEQ ID NO: 51301 - RNA, 22 nt, Artificial Sequence
  LRRK2 RNA guide
auauguguacaaaaaccagagg

SEQ ID NO: 51302 - RNA, 22 nt, Artificial Sequence
  LRRK2 RNA guide
auguguacaaaaaccagaggca

SEQ ID NO: 51303 - RNA, 22 nt, Artificial Sequence
  LRRK2 RNA guide
cacacagacuaagauaugugua

SEQ ID NO: 51304 - RNA, 22 nt, Artificial Sequence
  LRRK2 RNA guide
cacagacuaagauauguguaca

SEQ ID NO: 51305 - RNA, 22 nt, Artificial Sequence
  LRRK2 RNA guide
cagacuaagauauguguacaaa

SEQ ID NO: 51306 - RNA, 22 nt, Artificial Sequence
  LRRK2 RNA guide
cccccgugccucugguuuuugu

SEQ ID NO: 51307 - RNA, 22 nt, Artificial Sequence
  LRRK2 RNA guide
ccccgugccucugguuuuugua

SEQ ID NO: 51308 - RNA, 22 nt, Artificial Sequence
  LRRK2 RNA guide
cccgugccucugguuuuuguac

SEQ ID NO: 51309 - RNA, 22 nt, Artificial Sequence
  LRRK2 RNA guide
ccgugccucugguuuuuguaca

SEQ ID NO: 51310 - RNA, 22 nt, Artificial Sequence
  LRRK2 RNA guide
ccucugguuuuuguacacauau

SEQ ID NO: 51311 - RNA, 22 nt, Artificial Sequence
  LRRK2 RNA guide
cgugccucugguuuuuguacac

SEQ ID NO: 51312 - RNA, 22 nt, Artificial Sequence
  LRRK2 RNA guide
cuaagauauguguacaaaaacc

SEQ ID NO: 51313 - RNA, 22 nt, Artificial Sequence
  LRRK2 RNA guide
cucugguuuuuguacacauauc

SEQ ID NO: 51314 - RNA, 22 nt, Artificial Sequence
  LRRK2 RNA guide
cugguuuuuguacacauaucuu

SEQ ID NO: 51315 - RNA, 22 nt, Artificial Sequence
  LRRK2 RNA guide
gauauguguacaaaaaccagag

SEQ ID NO: 51316 - RNA, 22 nt, Artificial Sequence
  LRRK2 RNA guide
gccucugguuuuuguacacaua

SEQ ID NO: 51317 - RNA, 22 nt, Artificial Sequence
  LRRK2 RNA guide
gguuuuuguacacauaucuuag

SEQ ID NO: 51318 - RNA, 22 nt, Artificial Sequence
  LRRK2 RNA guide
guacaaaaaccagaggcacggg

SEQ ID NO: 51319 - RNA, 22 nt, Artificial Sequence
  LRRK2 RNA guide
guacacauaucuuagucugugu

SEQ ID NO: 51320 - RNA, 22 nt, Artificial Sequence
  LRRK2 RNA guide
gugccucugguuuuuguacaca

SEQ ID NO: 51321 - RNA, 22 nt, Artificial Sequence
  LRRK2 RNA guide
guguacaaaaaccagaggcacg

SEQ ID NO: 51322 - RNA, 22 nt, Artificial Sequence
  LRRK2 RNA guide
uacaaaaaccagaggcacgggg

SEQ ID NO: 51323 - RNA, 22 nt, Artificial Sequence
  LRRK2 RNA guide
uauguguacaaaaaccagaggc

SEQ ID NO: 51324 - RNA, 22 nt, Artificial Sequence
  LRRK2 RNA guide
ucugguuuuuguacacauaucu

SEQ ID NO: 51325 - RNA, 22 nt, Artificial Sequence
  LRRK2 RNA guide
ugccucugguuuuuguacacau

SEQ ID NO: 51326 - RNA, 22 nt, Artificial Sequence
  LRRK2 RNA guide
uguacaaaaaccagaggcacgg

SEQ ID NO: 51327 - RNA, 22 nt, Artificial Sequence
  LRRK2 RNA guide
uguacacauaucuuagucugug

SEQ ID NO: 51328 - RNA, 22 nt, Artificial Sequence
  LRRK2 RNA guide
uguguacaaaaaccagaggcac

SEQ ID NO: 51329 - RNA, 22 nt, Artificial Sequence
  LRRK2 RNA guide
uuguacacauaucuuagucugu

SEQ ID NO: 51330 - RNA, 22 nt, Artificial Sequence
  LRRK2 RNA guide
uuuguacacauaucuuagucug

SEQ ID NO: 51331 - RNA, 20 nt, Artificial Sequence
  LRRK2 RNA guide
aaucucuauuucacagauga

SEQ ID NO: 51332 - RNA, 20 nt, Artificial Sequence
  LRRK2 RNA guide
aguugaaucucuauuucaca

SEQ ID NO: 51333 - RNA, 20 nt, Artificial Sequence
  LRRK2 RNA guide
aucugugaaauagagauuca

SEQ ID NO: 51334 - RNA, 20 nt, Artificial Sequence
  LRRK2 RNA guide
caucugugaaauagagauuc

SEQ ID NO: 51335 - RNA, 20 nt, Artificial Sequence
  LRRK2 RNA guide
ccuucauuuucucaucugug

SEQ ID NO: 51336 - RNA, 20 nt, Artificial Sequence
  LRRK2 RNA guide
cuauuucacagaugagaaaa

SEQ ID NO: 51337 - RNA, 20 nt, Artificial Sequence
  LRRK2 RNA guide
cucaucugugaaauagagau

SEQ ID NO: 51338 - RNA, 20 nt, Artificial Sequence
  LRRK2 RNA guide
cucuauuucacagaugagaa

SEQ ID NO: 51339 - RNA, 20 nt, Artificial Sequence
  LRRK2 RNA guide
cugugaaauagagauucaac

SEQ ID NO: 51340 - RNA, 20 nt, Artificial Sequence
  LRRK2 RNA guide
cuucauuuucucaucuguga

SEQ ID NO: 51341 - RNA, 20 nt, Artificial Sequence
  LRRK2 RNA guide
gaaucucuauuucacagaug

SEQ ID NO: 51342 - RNA, 20 nt, Artificial Sequence
  LRRK2 RNA guide
gugaaauagagauucaacua

SEQ ID NO: 51343 - RNA, 20 nt, Artificial Sequence
  LRRK2 RNA guide
guugaaucucuauuucacag

SEQ ID NO: 51344 - RNA, 20 nt, Artificial Sequence
  LRRK2 RNA guide
uaguugaaucucuauuucac

SEQ ID NO: 51345 - RNA, 20 nt, Artificial Sequence
  LRRK2 RNA guide
ucaucugugaaauagagauu

SEQ ID NO: 51346 - RNA, 20 nt, Artificial Sequence
  LRRK2 RNA guide
ucauuuucucaucugugaaa

SEQ ID NO: 51347 - RNA, 20 nt, Artificial Sequence
  LRRK2 RNA guide
uccuucauuuucucaucugu

SEQ ID NO: 51348 - RNA, 20 nt, Artificial Sequence
  LRRK2 RNA guide
ucuauuucacagaugagaaa

SEQ ID NO: 51349 - RNA, 20 nt, Artificial Sequence
  LRRK2 RNA guide
ucucaucugugaaauagaga

SEQ ID NO: 51350 - RNA, 20 nt, Artificial Sequence
  LRRK2 RNA guide
ucugugaaauagagauucaa

SEQ ID NO: 51351 - RNA, 20 nt, Artificial Sequence
  LRRK2 RNA guide
ugaaucucuauuucacagau

SEQ ID NO: 51352 - RNA, 20 nt, Artificial Sequence
  LRRK2 RNA guide
ugugaaauagagauucaacu

SEQ ID NO: 51353 - RNA, 20 nt, Artificial Sequence
  LRRK2 RNA guide
uucauuuucucaucugugaa

SEQ ID NO: 51354 - RNA, 20 nt, Artificial Sequence
  LRRK2 RNA guide
uucucaucugugaaauagag

SEQ ID NO: 51355 - RNA, 20 nt, Artificial Sequence
  LRRK2 RNA guide
uugaaucucuauuucacaga

SEQ ID NO: 51356 - RNA, 20 nt, Artificial Sequence
  LRRK2 RNA guide
uuucucaucugugaaauaga

SEQ ID NO: 51357 - RNA, 20 nt, Artificial Sequence
  LRRK2 RNA guide
uuuucucaucugugaaauag

SEQ ID NO: 51358 - RNA, 21 nt, Artificial Sequence
  LRRK2 RNA guide
aaucucuauuucacagaugag

SEQ ID NO: 51359 - RNA, 21 nt, Artificial Sequence
  LRRK2 RNA guide
aguugaaucucuauuucacag

SEQ ID NO: 51360 - RNA, 21 nt, Artificial Sequence
  LRRK2 RNA guide
auccuucauuuucucaucugu

SEQ ID NO: 51361 - RNA, 21 nt, Artificial Sequence
  LRRK2 RNA guide
caucugugaaauagagauuca

SEQ ID NO: 51362 - RNA, 21 nt, Artificial Sequence
  LRRK2 RNA guide
ccuucauuuucucaucuguga

SEQ ID NO: 51363 - RNA, 21 nt, Artificial Sequence
  LRRK2 RNA guide
cucaucugugaaauagagauu

SEQ ID NO: 51364 - RNA, 21 nt, Artificial Sequence
  LRRK2 RNA guide
cucuauuucacagaugagaaa

SEQ ID NO: 51365 - RNA, 21 nt, Artificial Sequence
  LRRK2 RNA guide
cugugaaauagagauucaacu

SEQ ID NO: 51366 - RNA, 21 nt, Artificial Sequence
  LRRK2 RNA guide
cuucauuuucucaucugugaa

SEQ ID NO: 51367 - RNA, 21 nt, Artificial Sequence
  LRRK2 RNA guide
gaaucucuauuucacagauga

SEQ ID NO: 51368 - RNA, 21 nt, Artificial Sequence
  LRRK2 RNA guide
guugaaucucuauuucacaga

SEQ ID NO: 51369 - RNA, 21 nt, Artificial Sequence
  LRRK2 RNA guide
ucaucugugaaauagagauuc

SEQ ID NO: 51370 - RNA, 21 nt, Artificial Sequence
  LRRK2 RNA guide
uccuucauuuucucaucugug

SEQ ID NO: 51371 - RNA, 21 nt, Artificial Sequence
  LRRK2 RNA guide
ucucaucugugaaauagagau

SEQ ID NO: 51372 - RNA, 21 nt, Artificial Sequence
  LRRK2 RNA guide
ucucuauuucacagaugagaa

SEQ ID NO: 51373 - RNA, 21 nt, Artificial Sequence
  LRRK2 RNA guide
ucugugaaauagagauucaac

SEQ ID NO: 51374 - RNA, 21 nt, Artificial Sequence
  LRRK2 RNA guide
ugaaucucuauuucacagaug

SEQ ID NO: 51375 - RNA, 21 nt, Artificial Sequence
  LRRK2 RNA guide
uucucaucugugaaauagaga

SEQ ID NO: 51376 - RNA, 21 nt, Artificial Sequence
  LRRK2 RNA guide
uuucucaucugugaaauagag

SEQ ID NO: 51377 - RNA, 22 nt, Artificial Sequence
  LRRK2 RNA guide
aauccuucauuuucucaucugu

SEQ ID NO: 51378 - RNA, 22 nt, Artificial Sequence
  LRRK2 RNA guide
aaucucuauuucacagaugaga

SEQ ID NO: 51379 - RNA, 22 nt, Artificial Sequence
  LRRK2 RNA guide
aguugaaucucuauuucacaga

SEQ ID NO: 51380 - RNA, 22 nt, Artificial Sequence
  LRRK2 RNA guide
auccuucauuuucucaucugug

SEQ ID NO: 51381 - RNA, 22 nt, Artificial Sequence
  LRRK2 RNA guide
aucucuauuucacagaugagaa

SEQ ID NO: 51382 - RNA, 22 nt, Artificial Sequence
  LRRK2 RNA guide
aucugugaaauagagauucaac

SEQ ID NO: 51383 - RNA, 22 nt, Artificial Sequence
  LRRK2 RNA guide
caucugugaaauagagauucaa

SEQ ID NO: 51384 - RNA, 22 nt, Artificial Sequence
  LRRK2 RNA guide
cauuuucucaucugugaaauag

SEQ ID NO: 51385 - RNA, 22 nt, Artificial Sequence
  LRRK2 RNA guide
ccuucauuuucucaucugugaa

SEQ ID NO: 51386 - RNA, 22 nt, Artificial Sequence
  LRRK2 RNA guide
cuauuucacagaugagaaaaug

SEQ ID NO: 51387 - RNA, 22 nt, Artificial Sequence
  LRRK2 RNA guide
cucaucugugaaauagagauuc

SEQ ID NO: 51388 - RNA, 22 nt, Artificial Sequence
  LRRK2 RNA guide
cucuauuucacagaugagaaaa

SEQ ID NO: 51389 - RNA, 22 nt, Artificial Sequence
  LRRK2 RNA guide
cugugaaauagagauucaacua

SEQ ID NO: 51390 - RNA, 22 nt, Artificial Sequence
  LRRK2 RNA guide
cuucauuuucucaucugugaaa

SEQ ID NO: 51391 - RNA, 22 nt, Artificial Sequence
  LRRK2 RNA guide
gaaucucuauuucacagaugag

SEQ ID NO: 51392 - RNA, 22 nt, Artificial Sequence
  LRRK2 RNA guide
guugaaucucuauuucacagau

SEQ ID NO: 51393 - RNA, 22 nt, Artificial Sequence
  LRRK2 RNA guide
uaguugaaucucuauuucacag

SEQ ID NO: 51394 - RNA, 22 nt, Artificial Sequence
  LRRK2 RNA guide
ucaucugugaaauagagauuca

SEQ ID NO: 51395 - RNA, 22 nt, Artificial Sequence
  LRRK2 RNA guide
uccuucauuuucucaucuguga

SEQ ID NO: 51396 - RNA, 22 nt, Artificial Sequence
  LRRK2 RNA guide
ucucaucugugaaauagagauu

SEQ ID NO: 51397 - RNA, 22 nt, Artificial Sequence
  LRRK2 RNA guide
ucucuauuucacagaugagaaa

SEQ ID NO: 51398 - RNA, 22 nt, Artificial Sequence
  LRRK2 RNA guide
ucugugaaauagagauucaacu

SEQ ID NO: 51399 - RNA, 22 nt, Artificial Sequence
  LRRK2 RNA guide
ugaaucucuauuucacagauga

SEQ ID NO: 51400 - RNA, 22 nt, Artificial Sequence
  LRRK2 RNA guide
uucucaucugugaaauagagau

SEQ ID NO: 51401 - RNA, 22 nt, Artificial Sequence
  LRRK2 RNA guide
uugaaucucuauuucacagaug

SEQ ID NO: 51402 - RNA, 22 nt, Artificial Sequence
  LRRK2 RNA guide
uuucucaucugugaaauagaga

SEQ ID NO: 51403 - RNA, 22 nt, Artificial Sequence
  LRRK2 RNA guide
uuuucucaucugugaaauagag

SEQ ID NO: 51404 - RNA, 20 nt, Artificial Sequence
  LRRK2 RNA guide
aacagagauucaacuaaaug

SEQ ID NO: 51405 - RNA, 20 nt, Artificial Sequence
  LRRK2 RNA guide
aaucucuguuucacagauga

SEQ ID NO: 51406 - RNA, 20 nt, Artificial Sequence
  LRRK2 RNA guide
acagagauucaacuaaauga

SEQ ID NO: 51407 - RNA, 20 nt, Artificial Sequence
  LRRK2 RNA guide
aguugaaucucuguuucaca

SEQ ID NO: 51408 - RNA, 20 nt, Artificial Sequence
  LRRK2 RNA guide
aucauuuaguugaaucucug

SEQ ID NO: 51409 - RNA, 20 nt, Artificial Sequence
  LRRK2 RNA guide
aucugugaaacagagauuca

SEQ ID NO: 51410 - RNA, 20 nt, Artificial Sequence
  LRRK2 RNA guide
caucugugaaacagagauuc

SEQ ID NO: 51411 - RNA, 20 nt, Artificial Sequence
  LRRK2 RNA guide
cauuuaguugaaucucuguu

SEQ ID NO: 51412 - RNA, 20 nt, Artificial Sequence
  LRRK2 RNA guide
cauuuucucaucugugaaac

SEQ ID NO: 51413 - RNA, 20 nt, Artificial Sequence
  LRRK2 RNA guide
cucaucugugaaacagagau

SEQ ID NO: 51414 - RNA, 20 nt, Artificial Sequence
  LRRK2 RNA guide
cucuguuucacagaugagaa

SEQ ID NO: 51415 - RNA, 20 nt, Artificial Sequence
  LRRK2 RNA guide
cugugaaacagagauucaac

SEQ ID NO: 51416 - RNA, 20 nt, Artificial Sequence
  LRRK2 RNA guide
cuguuucacagaugagaaaa

SEQ ID NO: 51417 - RNA, 20 nt, Artificial Sequence
  LRRK2 RNA guide
gaaacagagauucaacuaaa

SEQ ID NO: 51418 - RNA, 20 nt, Artificial Sequence
  LRRK2 RNA guide
gaaucucuguuucacagaug

SEQ ID NO: 51419 - RNA, 20 nt, Artificial Sequence
  LRRK2 RNA guide
gugaaacagagauucaacua

SEQ ID NO: 51420 - RNA, 20 nt, Artificial Sequence
  LRRK2 RNA guide
guugaaucucuguuucacag

SEQ ID NO: 51421 - RNA, 20 nt, Artificial Sequence
  LRRK2 RNA guide
uaguugaaucucuguuucac

SEQ ID NO: 51422 - RNA, 20 nt, Artificial Sequence
  LRRK2 RNA guide
ucaucugugaaacagagauu

SEQ ID NO: 51423 - RNA, 20 nt, Artificial Sequence
  LRRK2 RNA guide
ucauuuaguugaaucucugu

SEQ ID NO: 51424 - RNA, 20 nt, Artificial Sequence
  LRRK2 RNA guide
ucucaucugugaaacagaga

SEQ ID NO: 51425 - RNA, 20 nt, Artificial Sequence
  LRRK2 RNA guide
ucucuguuucacagaugaga

SEQ ID NO: 51426 - RNA, 20 nt, Artificial Sequence
  LRRK2 RNA guide
ucugugaaacagagauucaa

SEQ ID NO: 51427 - RNA, 20 nt, Artificial Sequence
  LRRK2 RNA guide
ucuguuucacagaugagaaa

SEQ ID NO: 51428 - RNA, 20 nt, Artificial Sequence
  LRRK2 RNA guide
ugaaacagagauucaacuaa

SEQ ID NO: 51429 - RNA, 20 nt, Artificial Sequence
  LRRK2 RNA guide
ugaaucucuguuucacagau

SEQ ID NO: 51430 - RNA, 20 nt, Artificial Sequence
  LRRK2 RNA guide
ugugaaacagagauucaacu

SEQ ID NO: 51431 - RNA, 20 nt, Artificial Sequence
  LRRK2 RNA guide
uguuucacagaugagaaaau

SEQ ID NO: 51432 - RNA, 20 nt, Artificial Sequence
  LRRK2 RNA guide
uuaguugaaucucuguuuca

SEQ ID NO: 51433 - RNA, 20 nt, Artificial Sequence
  LRRK2 RNA guide
uucucaucugugaaacagag

SEQ ID NO: 51434 - RNA, 20 nt, Artificial Sequence
  LRRK2 RNA guide
uugaaucucuguuucacaga

SEQ ID NO: 51435 - RNA, 20 nt, Artificial Sequence
  LRRK2 RNA guide
uuuaguugaaucucuguuuc

SEQ ID NO: 51436 - RNA, 20 nt, Artificial Sequence
  LRRK2 RNA guide
uuucucaucugugaaacaga

SEQ ID NO: 51437 - RNA, 20 nt, Artificial Sequence
  LRRK2 RNA guide
uuuucucaucugugaaacag

SEQ ID NO: 51438 - RNA, 21 nt, Artificial Sequence
  LRRK2 RNA guide
aaucucuguuucacagaugag

SEQ ID NO: 51439 - RNA, 21 nt, Artificial Sequence
  LRRK2 RNA guide
aguugaaucucuguuucacag

SEQ ID NO: 51440 - RNA, 21 nt, Artificial Sequence
  LRRK2 RNA guide
aucucuguuucacagaugaga

SEQ ID NO: 51441 - RNA, 21 nt, Artificial Sequence
  LRRK2 RNA guide
aucugugaaacagagauucaa

SEQ ID NO: 51442 - RNA, 21 nt, Artificial Sequence
  LRRK2 RNA guide
auuuucucaucugugaaacag

SEQ ID NO: 51443 - RNA, 21 nt, Artificial Sequence
  LRRK2 RNA guide
caucugugaaacagagauuca

SEQ ID NO: 51444 - RNA, 21 nt, Artificial Sequence
  LRRK2 RNA guide
cauuuucucaucugugaaaca

SEQ ID NO: 51445 - RNA, 21 nt, Artificial Sequence
  LRRK2 RNA guide
cucaucugugaaacagagauu

SEQ ID NO: 51446 - RNA, 21 nt, Artificial Sequence
  LRRK2 RNA guide
cucuguuucacagaugagaaa

SEQ ID NO: 51447 - RNA, 21 nt, Artificial Sequence
  LRRK2 RNA guide
cugugaaacagagauucaacu

SEQ ID NO: 51448 - RNA, 21 nt, Artificial Sequence
  LRRK2 RNA guide
cuguuucacagaugagaaaau

SEQ ID NO: 51449 - RNA, 21 nt, Artificial Sequence
  LRRK2 RNA guide
gaaucucuguuucacagauga

SEQ ID NO: 51450 - RNA, 21 nt, Artificial Sequence
  LRRK2 RNA guide
gugaaacagagauucaacuaa

SEQ ID NO: 51451 - RNA, 21 nt, Artificial Sequence
  LRRK2 RNA guide
guugaaucucuguuucacaga

SEQ ID NO: 51452 - RNA, 21 nt, Artificial Sequence
  LRRK2 RNA guide
uaguugaaucucuguuucaca

SEQ ID NO: 51453 - RNA, 21 nt, Artificial Sequence
  LRRK2 RNA guide
ucaucugugaaacagagauuc

SEQ ID NO: 51454 - RNA, 21 nt, Artificial Sequence
  LRRK2 RNA guide
ucauuuucucaucugugaaac

SEQ ID NO: 51455 - RNA, 21 nt, Artificial Sequence
  LRRK2 RNA guide
ucucaucugugaaacagagau

SEQ ID NO: 51456 - RNA, 21 nt, Artificial Sequence
  LRRK2 RNA guide
ucucuguuucacagaugagaa

SEQ ID NO: 51457 - RNA, 21 nt, Artificial Sequence
  LRRK2 RNA guide
ucugugaaacagagauucaac

SEQ ID NO: 51458 - RNA, 21 nt, Artificial Sequence
  LRRK2 RNA guide
ucuguuucacagaugagaaaa

SEQ ID NO: 51459 - RNA, 21 nt, Artificial Sequence
  LRRK2 RNA guide
ugaaucucuguuucacagaug

SEQ ID NO: 51460 - RNA, 21 nt, Artificial Sequence
  LRRK2 RNA guide
ugugaaacagagauucaacua

SEQ ID NO: 51461 - RNA, 21 nt, Artificial Sequence
  LRRK2 RNA guide
uguuucacagaugagaaaaug

SEQ ID NO: 51462 - RNA, 21 nt, Artificial Sequence
  LRRK2 RNA guide
uuaguugaaucucuguuucac

SEQ ID NO: 51463 - RNA, 21 nt, Artificial Sequence
  LRRK2 RNA guide
uucucaucugugaaacagaga

SEQ ID NO: 51464 - RNA, 21 nt, Artificial Sequence
  LRRK2 RNA guide
uugaaucucuguuucacagau

SEQ ID NO: 51465 - RNA, 21 nt, Artificial Sequence
  LRRK2 RNA guide
uuucucaucugugaaacagag

SEQ ID NO: 51466 - RNA, 21 nt, Artificial Sequence
  LRRK2 RNA guide
uuuucucaucugugaaacaga

SEQ ID NO: 51467 - RNA, 22 nt, Artificial Sequence
  LRRK2 RNA guide
aaucucuguuucacagaugaga

SEQ ID NO: 51468 - RNA, 22 nt, Artificial Sequence
  LRRK2 RNA guide
aguugaaucucuguuucacaga

SEQ ID NO: 51469 - RNA, 22 nt, Artificial Sequence
  LRRK2 RNA guide
aucucuguuucacagaugagaa

SEQ ID NO: 51470 - RNA, 22 nt, Artificial Sequence
  LRRK2 RNA guide
aucugugaaacagagauucaac

SEQ ID NO: 51471 - RNA, 22 nt, Artificial Sequence
  LRRK2 RNA guide
auuuucucaucugugaaacaga

SEQ ID NO: 51472 - RNA, 22 nt, Artificial Sequence
  LRRK2 RNA guide
caucugugaaacagagauucaa

SEQ ID NO: 51473 - RNA, 22 nt, Artificial Sequence
  LRRK2 RNA guide
cauuuaguugaaucucuguuuc

SEQ ID NO: 51474 - RNA, 22 nt, Artificial Sequence
  LRRK2 RNA guide
cauuuucucaucugugaaacag

SEQ ID NO: 51475 - RNA, 22 nt, Artificial Sequence
  LRRK2 RNA guide
cucaucugugaaacagagauuc

SEQ ID NO: 51476 - RNA, 22 nt, Artificial Sequence
  LRRK2 RNA guide
cucuguuucacagaugagaaaa

SEQ ID NO: 51477 - RNA, 22 nt, Artificial Sequence
  LRRK2 RNA guide
cugugaaacagagauucaacua

SEQ ID NO: 51478 - RNA, 22 nt, Artificial Sequence
  LRRK2 RNA guide
cuguuucacagaugagaaaaug

SEQ ID NO: 51479 - RNA, 22 nt, Artificial Sequence
  LRRK2 RNA guide
gaaacagagauucaacuaaaug

SEQ ID NO: 51480 - RNA, 22 nt, Artificial Sequence
  LRRK2 RNA guide
gaaucucuguuucacagaugag

SEQ ID NO: 51481 - RNA, 22 nt, Artificial Sequence
  LRRK2 RNA guide
gugaaacagagauucaacuaaa

SEQ ID NO: 51482 - RNA, 22 nt, Artificial Sequence
  LRRK2 RNA guide
guugaaucucuguuucacagau

SEQ ID NO: 51483 - RNA, 22 nt, Artificial Sequence
  LRRK2 RNA guide
uaguugaaucucuguuucacag

SEQ ID NO: 51484 - RNA, 22 nt, Artificial Sequence
  LRRK2 RNA guide
ucaucugugaaacagagauuca

SEQ ID NO: 51485 - RNA, 22 nt, Artificial Sequence
  LRRK2 RNA guide
ucauuuucucaucugugaaaca

SEQ ID NO: 51486 - RNA, 22 nt, Artificial Sequence
  LRRK2 RNA guide
ucucaucugugaaacagagauu

SEQ ID NO: 51487 - RNA, 22 nt, Artificial Sequence
  LRRK2 RNA guide
ucucuguuucacagaugagaaa

SEQ ID NO: 51488 - RNA, 22 nt, Artificial Sequence
  LRRK2 RNA guide
ucugugaaacagagauucaacu

SEQ ID NO: 51489 - RNA, 22 nt, Artificial Sequence
  LRRK2 RNA guide
ucuguuucacagaugagaaaau

SEQ ID NO: 51490 - RNA, 22 nt, Artificial Sequence
  LRRK2 RNA guide
ugaaucucuguuucacagauga

SEQ ID NO: 51491 - RNA, 22 nt, Artificial Sequence
  LRRK2 RNA guide
ugugaaacagagauucaacuaa

SEQ ID NO: 51492 - RNA, 22 nt, Artificial Sequence
  LRRK2 RNA guide
uguuucacagaugagaaaauga

SEQ ID NO: 51493 - RNA, 22 nt, Artificial Sequence
  LRRK2 RNA guide
uuaguugaaucucuguuucaca

SEQ ID NO: 51494 - RNA, 22 nt, Artificial Sequence
  LRRK2 RNA guide
uucauuuucucaucugugaaac

SEQ ID NO: 51495 - RNA, 22 nt, Artificial Sequence
  LRRK2 RNA guide
uucucaucugugaaacagagau

SEQ ID NO: 51496 - RNA, 22 nt, Artificial Sequence
  LRRK2 RNA guide
uugaaucucuguuucacagaug

SEQ ID NO: 51497 - RNA, 22 nt, Artificial Sequence
  LRRK2 RNA guide
uuuaguugaaucucuguuucac

SEQ ID NO: 51498 - RNA, 22 nt, Artificial Sequence
  LRRK2 RNA guide
uuucucaucugugaaacagaga

SEQ ID NO: 51499 - RNA, 22 nt, Artificial Sequence
  LRRK2 RNA guide
uuuucucaucugugaaacagag

SEQ ID NO: 51500 - RNA, 20 nt, Artificial Sequence
  LRRK2 RNA guide
aaaguuccugucuuguaaga

SEQ ID NO: 51501 - RNA, 20 nt, Artificial Sequence
  LRRK2 RNA guide
aagacaggaacuuugaccaa

SEQ ID NO: 51502 - RNA, 20 nt, Artificial Sequence
  LRRK2 RNA guide
aaguuccugucuuguaagaa

SEQ ID NO: 51503 - RNA, 20 nt, Artificial Sequence
  LRRK2 RNA guide
aauucuuacaagacaggaac

SEQ ID NO: 51504 - RNA, 20 nt, Artificial Sequence
  LRRK2 RNA guide
acaagacaggaacuuugacc

SEQ ID NO: 51505 - RNA, 20 nt, Artificial Sequence
  LRRK2 RNA guide
agacaggaacuuugaccaaa

SEQ ID NO: 51506 - RNA, 20 nt, Artificial Sequence
  LRRK2 RNA guide
aguuccugucuuguaagaau

SEQ ID NO: 51507 - RNA, 20 nt, Artificial Sequence
  LRRK2 RNA guide
auucuuacaagacaggaacu

SEQ ID NO: 51508 - RNA, 20 nt, Artificial Sequence
  LRRK2 RNA guide
caaaguuccugucuuguaag

SEQ ID NO: 51509 - RNA, 20 nt, Artificial Sequence
  LRRK2 RNA guide
caagacaggaacuuugacca

SEQ ID NO: 51510 - RNA, 20 nt, Artificial Sequence
  LRRK2 RNA guide
ccugucuuguaagaauuaaa

SEQ ID NO: 51511 - RNA, 20 nt, Artificial Sequence
  LRRK2 RNA guide
cugucuuguaagaauuaaag

SEQ ID NO: 51512 - RNA, 20 nt, Artificial Sequence
  LRRK2 RNA guide
cuuacaagacaggaacuuug

SEQ ID NO: 51513 - RNA, 20 nt, Artificial Sequence
  LRRK2 RNA guide
cuuuaauucuuacaagacag

SEQ ID NO: 51514 - RNA, 20 nt, Artificial Sequence
  LRRK2 RNA guide
cuuuuuggucaaaguuccug

SEQ ID NO: 51515 - RNA, 20 nt, Artificial Sequence
  LRRK2 RNA guide
gacaggaacuuugaccaaaa

SEQ ID NO: 51516 - RNA, 20 nt, Artificial Sequence
  LRRK2 RNA guide
ggucaaaguuccugucuugu

SEQ ID NO: 51517 - RNA, 20 nt, Artificial Sequence
  LRRK2 RNA guide
gucaaaguuccugucuugua

SEQ ID NO: 51518 - RNA, 20 nt, Artificial Sequence
  LRRK2 RNA guide
guuccugucuuguaagaauu

SEQ ID NO: 51519 - RNA, 20 nt, Artificial Sequence
  LRRK2 RNA guide
uaauucuuacaagacaggaa

SEQ ID NO: 51520 - RNA, 20 nt, Artificial Sequence
  LRRK2 RNA guide
uacaagacaggaacuuugac

SEQ ID NO: 51521 - RNA, 20 nt, Artificial Sequence
  LRRK2 RNA guide
ucaaaguuccugucuuguaa

SEQ ID NO: 51522 - RNA, 20 nt, Artificial Sequence
  LRRK2 RNA guide
uccugucuuguaagaauuaa

SEQ ID NO: 51523 - RNA, 20 nt, Artificial Sequence
  LRRK2 RNA guide
ucuuacaagacaggaacuuu

SEQ ID NO: 51524 - RNA, 20 nt, Artificial Sequence
  LRRK2 RNA guide
ucuuuuuggucaaaguuccu

SEQ ID NO: 51525 - RNA, 20 nt, Artificial Sequence
  LRRK2 RNA guide
uggucaaaguuccugucuug

SEQ ID NO: 51526 - RNA, 20 nt, Artificial Sequence
  LRRK2 RNA guide
uuaauucuuacaagacagga

SEQ ID NO: 51527 - RNA, 20 nt, Artificial Sequence
  LRRK2 RNA guide
uuacaagacaggaacuuuga

SEQ ID NO: 51528 - RNA, 20 nt, Artificial Sequence
  LRRK2 RNA guide
uuccugucuuguaagaauua

SEQ ID NO: 51529 - RNA, 20 nt, Artificial Sequence
  LRRK2 RNA guide
uucuuacaagacaggaacuu

SEQ ID NO: 51530 - RNA, 20 nt, Artificial Sequence
  LRRK2 RNA guide
uucuuuuuggucaaaguucc

SEQ ID NO: 51531 - RNA, 20 nt, Artificial Sequence
  LRRK2 RNA guide
uuggucaaaguuccugucuu

SEQ ID NO: 51532 - RNA, 20 nt, Artificial Sequence
  LRRK2 RNA guide
uuuaauucuuacaagacagg

SEQ ID NO: 51533 - RNA, 20 nt, Artificial Sequence
  LRRK2 RNA guide
uuucuuuuuggucaaaguuc

SEQ ID NO: 51534 - RNA, 20 nt, Artificial Sequence
  LRRK2 RNA guide
uuuggucaaaguuccugucu

SEQ ID NO: 51535 - RNA, 20 nt, Artificial Sequence
  LRRK2 RNA guide
uuuuggucaaaguuccuguc

SEQ ID NO: 51536 - RNA, 20 nt, Artificial Sequence
  LRRK2 RNA guide
uuuuuggucaaaguuccugu

SEQ ID NO: 51537 - RNA, 21 nt, Artificial Sequence
  LRRK2 RNA guide
aaaguuccugucuuguaagaa

SEQ ID NO: 51538 - RNA, 21 nt, Artificial Sequence
  LRRK2 RNA guide
aagacaggaacuuugaccaaa

SEQ ID NO: 51539 - RNA, 21 nt, Artificial Sequence
  LRRK2 RNA guide
aaguuccugucuuguaagaau

SEQ ID NO: 51540 - RNA, 21 nt, Artificial Sequence
  LRRK2 RNA guide
aauucuuacaagacaggaacu

SEQ ID NO: 51541 - RNA, 21 nt, Artificial Sequence
  LRRK2 RNA guide
acaagacaggaacuuugacca

SEQ ID NO: 51542 - RNA, 21 nt, Artificial Sequence
  LRRK2 RNA guide
agacaggaacuuugaccaaaa

SEQ ID NO: 51543 - RNA, 21 nt, Artificial Sequence
  LRRK2 RNA guide
aguuccugucuuguaagaauu

SEQ ID NO: 51544 - RNA, 21 nt, Artificial Sequence
  LRRK2 RNA guide
auucuuacaagacaggaacuu

SEQ ID NO: 51545 - RNA, 21 nt, Artificial Sequence
  LRRK2 RNA guide
caaaguuccugucuuguaaga

SEQ ID NO: 51546 - RNA, 21 nt, Artificial Sequence
  LRRK2 RNA guide
caagacaggaacuuugaccaa

SEQ ID NO: 51547 - RNA, 21 nt, Artificial Sequence
  LRRK2 RNA guide
ccugucuuguaagaauuaaag

SEQ ID NO: 51548 - RNA, 21 nt, Artificial Sequence
  LRRK2 RNA guide
cuuacaagacaggaacuuuga

SEQ ID NO: 51549 - RNA, 21 nt, Artificial Sequence
  LRRK2 RNA guide
cuuuaauucuuacaagacagg

SEQ ID NO: 51550 - RNA, 21 nt, Artificial Sequence
  LRRK2 RNA guide
cuuuuuggucaaaguuccugu

SEQ ID NO: 51551 - RNA, 21 nt, Artificial Sequence
  LRRK2 RNA guide
gacaggaacuuugaccaaaaa

SEQ ID NO: 51552 - RNA, 21 nt, Artificial Sequence
  LRRK2 RNA guide
ggucaaaguuccugucuugua

SEQ ID NO: 51553 - RNA, 21 nt, Artificial Sequence
  LRRK2 RNA guide
gucaaaguuccugucuuguaa

SEQ ID NO: 51554 - RNA, 21 nt, Artificial Sequence
  LRRK2 RNA guide
guuccugucuuguaagaauua

SEQ ID NO: 51555 - RNA, 21 nt, Artificial Sequence
  LRRK2 RNA guide
uaauucuuacaagacaggaac

SEQ ID NO: 51556 - RNA, 21 nt, Artificial Sequence
  LRRK2 RNA guide
uacaagacaggaacuuugacc

SEQ ID NO: 51557 - RNA, 21 nt, Artificial Sequence
  LRRK2 RNA guide
ucaaaguuccugucuuguaag

SEQ ID NO: 51558 - RNA, 21 nt, Artificial Sequence
  LRRK2 RNA guide
ucuuacaagacaggaacuuug

SEQ ID NO: 51559 - RNA, 21 nt, Artificial Sequence
  LRRK2 RNA guide
ucuuuuuggucaaaguuccug

SEQ ID NO: 51560 - RNA, 21 nt, Artificial Sequence
  LRRK2 RNA guide
uggucaaaguuccugucuugu

SEQ ID NO: 51561 - RNA, 21 nt, Artificial Sequence
  LRRK2 RNA guide
uuacaagacaggaacuuugac

SEQ ID NO: 51562 - RNA, 21 nt, Artificial Sequence
  LRRK2 RNA guide
uucuuacaagacaggaacuuu

SEQ ID NO: 51563 - RNA, 21 nt, Artificial Sequence
  LRRK2 RNA guide
uucuuuuuggucaaaguuccu

SEQ ID NO: 51564 - RNA, 21 nt, Artificial Sequence
  LRRK2 RNA guide
uuggucaaaguuccugucuug

SEQ ID NO: 51565 - RNA, 21 nt, Artificial Sequence
  LRRK2 RNA guide
uuucuuuuuggucaaaguucc

SEQ ID NO: 51566 - RNA, 21 nt, Artificial Sequence
  LRRK2 RNA guide
uuuggucaaaguuccugucuu

SEQ ID NO: 51567 - RNA, 21 nt, Artificial Sequence
  LRRK2 RNA guide
uuuuggucaaaguuccugucu

SEQ ID NO: 51568 - RNA, 21 nt, Artificial Sequence
  LRRK2 RNA guide
uuuuuggucaaaguuccuguc

SEQ ID NO: 51569 - RNA, 22 nt, Artificial Sequence
  LRRK2 RNA guide
aaaguuccugucuuguaagaau

SEQ ID NO: 51570 - RNA, 22 nt, Artificial Sequence
  LRRK2 RNA guide
aagacaggaacuuugaccaaaa

SEQ ID NO: 51571 - RNA, 22 nt, Artificial Sequence
  LRRK2 RNA guide
aaguuccugucuuguaagaauu

SEQ ID NO: 51572 - RNA, 22 nt, Artificial Sequence
  LRRK2 RNA guide
aauucuuacaagacaggaacuu

SEQ ID NO: 51573 - RNA, 22 nt, Artificial Sequence
  LRRK2 RNA guide
acaagacaggaacuuugaccaa

SEQ ID NO: 51574 - RNA, 22 nt, Artificial Sequence
  LRRK2 RNA guide
acuuuaauucuuacaagacagg

SEQ ID NO: 51575 - RNA, 22 nt, Artificial Sequence
  LRRK2 RNA guide
agacaggaacuuugaccaaaaa

SEQ ID NO: 51576 - RNA, 22 nt, Artificial Sequence
  LRRK2 RNA guide
aguuccugucuuguaagaauua

SEQ ID NO: 51577 - RNA, 22 nt, Artificial Sequence
  LRRK2 RNA guide
auucuuacaagacaggaacuuu

SEQ ID NO: 51578 - RNA, 22 nt, Artificial Sequence
  LRRK2 RNA guide
caaaguuccugucuuguaagaa

SEQ ID NO: 51579 - RNA, 22 nt, Artificial Sequence
  LRRK2 RNA guide
caagacaggaacuuugaccaaa

SEQ ID NO: 51580 - RNA, 22 nt, Artificial Sequence
  LRRK2 RNA guide
ccugucuuguaagaauuaaagu

SEQ ID NO: 51581 - RNA, 22 nt, Artificial Sequence
  LRRK2 RNA guide
cuuacaagacaggaacuuugac

SEQ ID NO: 51582 - RNA, 22 nt, Artificial Sequence
  LRRK2 RNA guide
cuuuaauucuuacaagacagga

SEQ ID NO: 51583 - RNA, 22 nt, Artificial Sequence
  LRRK2 RNA guide
cuuuuuggucaaaguuccuguc

SEQ ID NO: 51584 - RNA, 22 nt, Artificial Sequence
  LRRK2 RNA guide
gacaggaacuuugaccaaaaag

SEQ ID NO: 51585 - RNA, 22 nt, Artificial Sequence
  LRRK2 RNA guide
ggucaaaguuccugucuuguaa

SEQ ID NO: 51586 - RNA, 22 nt, Artificial Sequence
  LRRK2 RNA guide
gucaaaguuccugucuuguaag

SEQ ID NO: 51587 - RNA, 22 nt, Artificial Sequence
  LRRK2 RNA guide
guuccugucuuguaagaauuaa

SEQ ID NO: 51588 - RNA, 22 nt, Artificial Sequence
  LRRK2 RNA guide
uaauucuuacaagacaggaacu

SEQ ID NO: 51589 - RNA, 22 nt, Artificial Sequence
  LRRK2 RNA guide
uacaagacaggaacuuugacca

SEQ ID NO: 51590 - RNA, 22 nt, Artificial Sequence
  LRRK2 RNA guide
ucaaaguuccugucuuguaaga

SEQ ID NO: 51591 - RNA, 22 nt, Artificial Sequence
  LRRK2 RNA guide
uccugucuuguaagaauuaaag

SEQ ID NO: 51592 - RNA, 22 nt, Artificial Sequence
  LRRK2 RNA guide
ucuuacaagacaggaacuuuga

SEQ ID NO: 51593 - RNA, 22 nt, Artificial Sequence
  LRRK2 RNA guide
ucuuuuuggucaaaguuccugu

SEQ ID NO: 51594 - RNA, 22 nt, Artificial Sequence
  LRRK2 RNA guide
uggucaaaguuccugucuugua

SEQ ID NO: 51595 - RNA, 22 nt, Artificial Sequence
  LRRK2 RNA guide
uuaauucuuacaagacaggaac

SEQ ID NO: 51596 - RNA, 22 nt, Artificial Sequence
  LRRK2 RNA guide
uuacaagacaggaacuuugacc

SEQ ID NO: 51597 - RNA, 22 nt, Artificial Sequence
  LRRK2 RNA guide
uucuuacaagacaggaacuuug

SEQ ID NO: 51598 - RNA, 22 nt, Artificial Sequence
  LRRK2 RNA guide
uucuuuuuggucaaaguuccug

SEQ ID NO: 51599 - RNA, 22 nt, Artificial Sequence
  LRRK2 RNA guide
uuggucaaaguuccugucuugu

SEQ ID NO: 51600 - RNA, 22 nt, Artificial Sequence
  LRRK2 RNA guide
uuucuuuuuggucaaaguuccu

SEQ ID NO: 51601 - RNA, 22 nt, Artificial Sequence
  LRRK2 RNA guide
uuuggucaaaguuccugucuug

SEQ ID NO: 51602 - RNA, 22 nt, Artificial Sequence
  LRRK2 RNA guide
uuuucuuuuuggucaaaguucc

SEQ ID NO: 51603 - RNA, 22 nt, Artificial Sequence
  LRRK2 RNA guide
uuuuggucaaaguuccugucuu

SEQ ID NO: 51604 - RNA, 22 nt, Artificial Sequence
  LRRK2 RNA guide
uuuuuggucaaaguuccugucu

SEQ ID NO: 51605 - RNA, 20 nt, Artificial Sequence
  LRRK2 RNA guide
aaaguuccugccuuguaaga

SEQ ID NO: 51606 - RNA, 20 nt, Artificial Sequence
  LRRK2 RNA guide
aaggcaggaacuuugaccaa

SEQ ID NO: 51607 - RNA, 20 nt, Artificial Sequence
  LRRK2 RNA guide
aaguuccugccuuguaagaa

SEQ ID NO: 51608 - RNA, 20 nt, Artificial Sequence
  LRRK2 RNA guide
aauucuuacaaggcaggaac

SEQ ID NO: 51609 - RNA, 20 nt, Artificial Sequence
  LRRK2 RNA guide
acaaggcaggaacuuugacc

SEQ ID NO: 51610 - RNA, 20 nt, Artificial Sequence
  LRRK2 RNA guide
acuuuaauucuuacaaggca

SEQ ID NO: 51611 - RNA, 20 nt, Artificial Sequence
  LRRK2 RNA guide
aggcaggaacuuugaccaaa

SEQ ID NO: 51612 - RNA, 20 nt, Artificial Sequence
  LRRK2 RNA guide
aguuccugccuuguaagaau

SEQ ID NO: 51613 - RNA, 20 nt, Artificial Sequence
  LRRK2 RNA guide
auucuuacaaggcaggaacu

SEQ ID NO: 51614 - RNA, 20 nt, Artificial Sequence
  LRRK2 RNA guide
caaaguuccugccuuguaag

SEQ ID NO: 51615 - RNA, 20 nt, Artificial Sequence
  LRRK2 RNA guide
caaggcaggaacuuugacca

SEQ ID NO: 51616 - RNA, 20 nt, Artificial Sequence
  LRRK2 RNA guide
ccugccuuguaagaauuaaa

SEQ ID NO: 51617 - RNA, 20 nt, Artificial Sequence
  LRRK2 RNA guide
cugccuuguaagaauuaaag

SEQ ID NO: 51618 - RNA, 20 nt, Artificial Sequence
  LRRK2 RNA guide
cuuacaaggcaggaacuuug

SEQ ID NO: 51619 - RNA, 20 nt, Artificial Sequence
  LRRK2 RNA guide
cuuuaauucuuacaaggcag

SEQ ID NO: 51620 - RNA, 20 nt, Artificial Sequence
  LRRK2 RNA guide
gccuuguaagaauuaaagua

SEQ ID NO: 51621 - RNA, 20 nt, Artificial Sequence
  LRRK2 RNA guide
ggcaggaacuuugaccaaaa

SEQ ID NO: 51622 - RNA, 20 nt, Artificial Sequence
  LRRK2 RNA guide
ggucaaaguuccugccuugu

SEQ ID NO: 51623 - RNA, 20 nt, Artificial Sequence
  LRRK2 RNA guide
gucaaaguuccugccuugua

SEQ ID NO: 51624 - RNA, 20 nt, Artificial Sequence
  LRRK2 RNA guide
guuccugccuuguaagaauu

SEQ ID NO: 51625 - RNA, 20 nt, Artificial Sequence
  LRRK2 RNA guide
uaauucuuacaaggcaggaa

SEQ ID NO: 51626 - RNA, 20 nt, Artificial Sequence
  LRRK2 RNA guide
uacaaggcaggaacuuugac

SEQ ID NO: 51627 - RNA, 20 nt, Artificial Sequence
  LRRK2 RNA guide
uacuuuaauucuuacaaggc

SEQ ID NO: 51628 - RNA, 20 nt, Artificial Sequence
  LRRK2 RNA guide
ucaaaguuccugccuuguaa

SEQ ID NO: 51629 - RNA, 20 nt, Artificial Sequence
  LRRK2 RNA guide
uccugccuuguaagaauuaa

SEQ ID NO: 51630 - RNA, 20 nt, Artificial Sequence
  LRRK2 RNA guide
ucuuacaaggcaggaacuuu

SEQ ID NO: 51631 - RNA, 20 nt, Artificial Sequence
  LRRK2 RNA guide
ugccuuguaagaauuaaagu

SEQ ID NO: 51632 - RNA, 20 nt, Artificial Sequence
  LRRK2 RNA guide
uggucaaaguuccugccuug

SEQ ID NO: 51633 - RNA, 20 nt, Artificial Sequence
  LRRK2 RNA guide
uuaauucuuacaaggcagga

SEQ ID NO: 51634 - RNA, 20 nt, Artificial Sequence
  LRRK2 RNA guide
uuacaaggcaggaacuuuga

SEQ ID NO: 51635 - RNA, 20 nt, Artificial Sequence
  LRRK2 RNA guide
uuccugccuuguaagaauua

SEQ ID NO: 51636 - RNA, 20 nt, Artificial Sequence
  LRRK2 RNA guide
uucuuacaaggcaggaacuu

SEQ ID NO: 51637 - RNA, 20 nt, Artificial Sequence
  LRRK2 RNA guide
uuggucaaaguuccugccuu

SEQ ID NO: 51638 - RNA, 20 nt, Artificial Sequence
  LRRK2 RNA guide
uuuaauucuuacaaggcagg

SEQ ID NO: 51639 - RNA, 20 nt, Artificial Sequence
  LRRK2 RNA guide
uuuggucaaaguuccugccu

SEQ ID NO: 51640 - RNA, 20 nt, Artificial Sequence
  LRRK2 RNA guide
uuuuggucaaaguuccugcc

SEQ ID NO: 51641 - RNA, 20 nt, Artificial Sequence
  LRRK2 RNA guide
uuuuuggucaaaguuccugc

SEQ ID NO: 51642 - RNA, 21 nt, Artificial Sequence
  LRRK2 RNA guide
aaaguuccugccuuguaagaa

SEQ ID NO: 51643 - RNA, 21 nt, Artificial Sequence
  LRRK2 RNA guide
aaggcaggaacuuugaccaaa

SEQ ID NO: 51644 - RNA, 21 nt, Artificial Sequence
  LRRK2 RNA guide
aaguuccugccuuguaagaau

SEQ ID NO: 51645 - RNA, 21 nt, Artificial Sequence
  LRRK2 RNA guide
aauucuuacaaggcaggaacu

SEQ ID NO: 51646 - RNA, 21 nt, Artificial Sequence
  LRRK2 RNA guide
acaaggcaggaacuuugacca

SEQ ID NO: 51647 - RNA, 21 nt, Artificial Sequence
  LRRK2 RNA guide
acuuuaauucuuacaaggcag

SEQ ID NO: 51648 - RNA, 21 nt, Artificial Sequence
  LRRK2 RNA guide
aggcaggaacuuugaccaaaa

SEQ ID NO: 51649 - RNA, 21 nt, Artificial Sequence
  LRRK2 RNA guide
aguuccugccuuguaagaauu

SEQ ID NO: 51650 - RNA, 21 nt, Artificial Sequence
  LRRK2 RNA guide
auucuuacaaggcaggaacuu

SEQ ID NO: 51651 - RNA, 21 nt, Artificial Sequence
  LRRK2 RNA guide
caaaguuccugccuuguaaga

SEQ ID NO: 51652 - RNA, 21 nt, Artificial Sequence
  LRRK2 RNA guide
caaggcaggaacuuugaccaa

SEQ ID NO: 51653 - RNA, 21 nt, Artificial Sequence
  LRRK2 RNA guide
ccugccuuguaagaauuaaag

SEQ ID NO: 51654 - RNA, 21 nt, Artificial Sequence
  LRRK2 RNA guide
cugccuuguaagaauuaaagu

SEQ ID NO: 51655 - RNA, 21 nt, Artificial Sequence
  LRRK2 RNA guide
cuuacaaggcaggaacuuuga

SEQ ID NO: 51656 - RNA, 21 nt, Artificial Sequence
  LRRK2 RNA guide
cuuuaauucuuacaaggcagg

SEQ ID NO: 51657 - RNA, 21 nt, Artificial Sequence
  LRRK2 RNA guide
cuuuuuggucaaaguuccugc

SEQ ID NO: 51658 - RNA, 21 nt, Artificial Sequence
  LRRK2 RNA guide
ggcaggaacuuugaccaaaaa

SEQ ID NO: 51659 - RNA, 21 nt, Artificial Sequence
  LRRK2 RNA guide
ggucaaaguuccugccuugua

SEQ ID NO: 51660 - RNA, 21 nt, Artificial Sequence
  LRRK2 RNA guide
gucaaaguuccugccuuguaa

SEQ ID NO: 51661 - RNA, 21 nt, Artificial Sequence
  LRRK2 RNA guide
guuccugccuuguaagaauua

SEQ ID NO: 51662 - RNA, 21 nt, Artificial Sequence
  LRRK2 RNA guide
uaauucuuacaaggcaggaac

SEQ ID NO: 51663 - RNA, 21 nt, Artificial Sequence
  LRRK2 RNA guide
uacaaggcaggaacuuugacc

SEQ ID NO: 51664 - RNA, 21 nt, Artificial Sequence
  LRRK2 RNA guide
ucaaaguuccugccuuguaag

SEQ ID NO: 51665 - RNA, 21 nt, Artificial Sequence
  LRRK2 RNA guide
uccugccuuguaagaauuaaa

SEQ ID NO: 51666 - RNA, 21 nt, Artificial Sequence
  LRRK2 RNA guide
ucuuacaaggcaggaacuuug

SEQ ID NO: 51667 - RNA, 21 nt, Artificial Sequence
  LRRK2 RNA guide
uggucaaaguuccugccuugu

SEQ ID NO: 51668 - RNA, 21 nt, Artificial Sequence
  LRRK2 RNA guide
uuaauucuuacaaggcaggaa

SEQ ID NO: 51669 - RNA, 21 nt, Artificial Sequence
  LRRK2 RNA guide
uuacaaggcaggaacuuugac

SEQ ID NO: 51670 - RNA, 21 nt, Artificial Sequence
  LRRK2 RNA guide
uuccugccuuguaagaauuaa

SEQ ID NO: 51671 - RNA, 21 nt, Artificial Sequence
  LRRK2 RNA guide
uucuuacaaggcaggaacuuu

SEQ ID NO: 51672 - RNA, 21 nt, Artificial Sequence
  LRRK2 RNA guide
uuggucaaaguuccugccuug

SEQ ID NO: 51673 - RNA, 21 nt, Artificial Sequence
  LRRK2 RNA guide
uuuaauucuuacaaggcagga

SEQ ID NO: 51674 - RNA, 21 nt, Artificial Sequence
  LRRK2 RNA guide
uuuggucaaaguuccugccuu

SEQ ID NO: 51675 - RNA, 21 nt, Artificial Sequence
  LRRK2 RNA guide
uuuuggucaaaguuccugccu

SEQ ID NO: 51676 - RNA, 21 nt, Artificial Sequence
  LRRK2 RNA guide
uuuuuggucaaaguuccugcc

SEQ ID NO: 51677 - RNA, 22 nt, Artificial Sequence
  LRRK2 RNA guide
aaaguuccugccuuguaagaau

SEQ ID NO: 51678 - RNA, 22 nt, Artificial Sequence
  LRRK2 RNA guide
aaggcaggaacuuugaccaaaa

SEQ ID NO: 51679 - RNA, 22 nt, Artificial Sequence
  LRRK2 RNA guide
aaguuccugccuuguaagaauu

SEQ ID NO: 51680 - RNA, 22 nt, Artificial Sequence
  LRRK2 RNA guide
aauucuuacaaggcaggaacuu

SEQ ID NO: 51681 - RNA, 22 nt, Artificial Sequence
  LRRK2 RNA guide
acaaggcaggaacuuugaccaa

SEQ ID NO: 51682 - RNA, 22 nt, Artificial Sequence
  LRRK2 RNA guide
acuuuaauucuuacaaggcagg

SEQ ID NO: 51683 - RNA, 22 nt, Artificial Sequence
  LRRK2 RNA guide
aggcaggaacuuugaccaaaaa

SEQ ID NO: 51684 - RNA, 22 nt, Artificial Sequence
  LRRK2 RNA guide
aguuccugccuuguaagaauua

SEQ ID NO: 51685 - RNA, 22 nt, Artificial Sequence
  LRRK2 RNA guide
auucuuacaaggcaggaacuuu

SEQ ID NO: 51686 - RNA, 22 nt, Artificial Sequence
  LRRK2 RNA guide
caaaguuccugccuuguaagaa

SEQ ID NO: 51687 - RNA, 22 nt, Artificial Sequence
  LRRK2 RNA guide
caaggcaggaacuuugaccaaa

SEQ ID NO: 51688 - RNA, 22 nt, Artificial Sequence
  LRRK2 RNA guide
ccugccuuguaagaauuaaagu

SEQ ID NO: 51689 - RNA, 22 nt, Artificial Sequence
  LRRK2 RNA guide
cugccuuguaagaauuaaagua

SEQ ID NO: 51690 - RNA, 22 nt, Artificial Sequence
  LRRK2 RNA guide
cuuacaaggcaggaacuuugac

SEQ ID NO: 51691 - RNA, 22 nt, Artificial Sequence
  LRRK2 RNA guide
cuuuaauucuuacaaggcagga

SEQ ID NO: 51692 - RNA, 22 nt, Artificial Sequence
  LRRK2 RNA guide
cuuuuuggucaaaguuccugcc

SEQ ID NO: 51693 - RNA, 22 nt, Artificial Sequence
  LRRK2 RNA guide
ggcaggaacuuugaccaaaaag

SEQ ID NO: 51694 - RNA, 22 nt, Artificial Sequence
  LRRK2 RNA guide
ggucaaaguuccugccuuguaa

SEQ ID NO: 51695 - RNA, 22 nt, Artificial Sequence
  LRRK2 RNA guide
gucaaaguuccugccuuguaag

SEQ ID NO: 51696 - RNA, 22 nt, Artificial Sequence
  LRRK2 RNA guide
guuccugccuuguaagaauuaa

SEQ ID NO: 51697 - RNA, 22 nt, Artificial Sequence
  LRRK2 RNA guide
uaauucuuacaaggcaggaacu

SEQ ID NO: 51698 - RNA, 22 nt, Artificial Sequence
  LRRK2 RNA guide
uacaaggcaggaacuuugacca

SEQ ID NO: 51699 - RNA, 22 nt, Artificial Sequence
  LRRK2 RNA guide
uacuuuaauucuuacaaggcag

SEQ ID NO: 51700 - RNA, 22 nt, Artificial Sequence
  LRRK2 RNA guide
ucaaaguuccugccuuguaaga

SEQ ID NO: 51701 - RNA, 22 nt, Artificial Sequence
  LRRK2 RNA guide
uccugccuuguaagaauuaaag

SEQ ID NO: 51702 - RNA, 22 nt, Artificial Sequence
  LRRK2 RNA guide
ucuuacaaggcaggaacuuuga

SEQ ID NO: 51703 - RNA, 22 nt, Artificial Sequence
  LRRK2 RNA guide
ucuuuuuggucaaaguuccugc

SEQ ID NO: 51704 - RNA, 22 nt, Artificial Sequence
  LRRK2 RNA guide
uggucaaaguuccugccuugua

SEQ ID NO: 51705 - RNA, 22 nt, Artificial Sequence
  LRRK2 RNA guide
uuaauucuuacaaggcaggaac

SEQ ID NO: 51706 - RNA, 22 nt, Artificial Sequence
  LRRK2 RNA guide
uuacaaggcaggaacuuugacc

SEQ ID NO: 51707 - RNA, 22 nt, Artificial Sequence
  LRRK2 RNA guide
uuccugccuuguaagaauuaaa

SEQ ID NO: 51708 - RNA, 22 nt, Artificial Sequence
  LRRK2 RNA guide
uucuuacaaggcaggaacuuug

SEQ ID NO: 51709 - RNA, 22 nt, Artificial Sequence
  LRRK2 RNA guide
uuggucaaaguuccugccuugu

SEQ ID NO: 51710 - RNA, 22 nt, Artificial Sequence
  LRRK2 RNA guide
uuuaauucuuacaaggcaggaa

SEQ ID NO: 51711 - RNA, 22 nt, Artificial Sequence
  LRRK2 RNA guide
uuuggucaaaguuccugccuug

SEQ ID NO: 51712 - RNA, 22 nt, Artificial Sequence
  LRRK2 RNA guide
uuuuggucaaaguuccugccuu

SEQ ID NO: 51713 - RNA, 22 nt, Artificial Sequence
  LRRK2 RNA guide
uuuuuggucaaaguuccugccu

SEQ ID NO: 51714 - RNA, 20 nt, Artificial Sequence
  LRRK2 RNA guide
accauuuguauguacuacag

SEQ ID NO: 51715 - RNA, 20 nt, Artificial Sequence
  LRRK2 RNA guide
acuauuuugaucuguaguac

SEQ ID NO: 51716 - RNA, 20 nt, Artificial Sequence
  LRRK2 RNA guide
acuuugcucaccauuuguau

SEQ ID NO: 51717 - RNA, 20 nt, Artificial Sequence
  LRRK2 RNA guide
aguacauacaaauggugagc

SEQ ID NO: 51718 - RNA, 20 nt, Artificial Sequence
  LRRK2 RNA guide
aucuguaguacauacaaaug

SEQ ID NO: 51719 - RNA, 20 nt, Artificial Sequence
  LRRK2 RNA guide
auuuguauguacuacagauc

SEQ ID NO: 51720 - RNA, 20 nt, Artificial Sequence
  LRRK2 RNA guide
caccauuuguauguacuaca

SEQ ID NO: 51721 - RNA, 20 nt, Artificial Sequence
  LRRK2 RNA guide
cauuuguauguacuacagau

SEQ ID NO: 51722 - RNA, 20 nt, Artificial Sequence
  LRRK2 RNA guide
ccauuuguauguacuacaga

SEQ ID NO: 51723 - RNA, 20 nt, Artificial Sequence
  LRRK2 RNA guide
cuauuuugaucuguaguaca

SEQ ID NO: 51724 - RNA, 20 nt, Artificial Sequence
  LRRK2 RNA guide
cucaccauuuguauguacua

SEQ ID NO: 51725 - RNA, 20 nt, Artificial Sequence
  LRRK2 RNA guide
cuguaguacauacaaauggu

SEQ ID NO: 51726 - RNA, 20 nt, Artificial Sequence
  LRRK2 RNA guide
cuuugcucaccauuuguaug

SEQ ID NO: 51727 - RNA, 20 nt, Artificial Sequence
  LRRK2 RNA guide
gacuuugcucaccauuugua

SEQ ID NO: 51728 - RNA, 20 nt, Artificial Sequence
  LRRK2 RNA guide
gaucuguaguacauacaaau

SEQ ID NO: 51729 - RNA, 20 nt, Artificial Sequence
  LRRK2 RNA guide
gcucaccauuuguauguacu

SEQ ID NO: 51730 - RNA, 20 nt, Artificial Sequence
  LRRK2 RNA guide
guacauacaaauggugagca

SEQ ID NO: 51731 - RNA, 20 nt, Artificial Sequence
  LRRK2 RNA guide
guacuacagaucaaaauagu

SEQ ID NO: 51732 - RNA, 20 nt, Artificial Sequence
  LRRK2 RNA guide
guaguacauacaaaugguga

SEQ ID NO: 51733 - RNA, 20 nt, Artificial Sequence
  LRRK2 RNA guide
guauguacuacagaucaaaa

SEQ ID NO: 51734 - RNA, 20 nt, Artificial Sequence
  LRRK2 RNA guide
uaguacauacaaauggugag

SEQ ID NO: 51735 - RNA, 20 nt, Artificial Sequence
  LRRK2 RNA guide
ucaccauuuguauguacuac

SEQ ID NO: 51736 - RNA, 20 nt, Artificial Sequence
  LRRK2 RNA guide
ucuguaguacauacaaaugg

SEQ ID NO: 51737 - RNA, 20 nt, Artificial Sequence
  LRRK2 RNA guide
ugacuuugcucaccauuugu

SEQ ID NO: 51738 - RNA, 20 nt, Artificial Sequence
  LRRK2 RNA guide
ugaucuguaguacauacaaa

SEQ ID NO: 51739 - RNA, 20 nt, Artificial Sequence
  LRRK2 RNA guide
ugcucaccauuuguauguac

SEQ ID NO: 51740 - RNA, 20 nt, Artificial Sequence
  LRRK2 RNA guide
uguacuacagaucaaaauag

SEQ ID NO: 51741 - RNA, 20 nt, Artificial Sequence
  LRRK2 RNA guide
uguaguacauacaaauggug

SEQ ID NO: 51742 - RNA, 20 nt, Artificial Sequence
  LRRK2 RNA guide
uguauguacuacagaucaaa

SEQ ID NO: 51743 - RNA, 20 nt, Artificial Sequence
  LRRK2 RNA guide
uugaucuguaguacauacaa

SEQ ID NO: 51744 - RNA, 20 nt, Artificial Sequence
  LRRK2 RNA guide
uugcucaccauuuguaugua

SEQ ID NO: 51745 - RNA, 20 nt, Artificial Sequence
  LRRK2 RNA guide
uuguauguacuacagaucaa

SEQ ID NO: 51746 - RNA, 20 nt, Artificial Sequence
  LRRK2 RNA guide
uuugaucuguaguacauaca

SEQ ID NO: 51747 - RNA, 20 nt, Artificial Sequence
  LRRK2 RNA guide
uuugcucaccauuuguaugu

SEQ ID NO: 51748 - RNA, 20 nt, Artificial Sequence
  LRRK2 RNA guide
uuuguauguacuacagauca

SEQ ID NO: 51749 - RNA, 20 nt, Artificial Sequence
  LRRK2 RNA guide
uuuugaucuguaguacauac

SEQ ID NO: 51750 - RNA, 21 nt, Artificial Sequence
  LRRK2 RNA guide
accauuuguauguacuacaga

SEQ ID NO: 51751 - RNA, 21 nt, Artificial Sequence
  LRRK2 RNA guide
acuuugcucaccauuuguaug

SEQ ID NO: 51752 - RNA, 21 nt, Artificial Sequence
  LRRK2 RNA guide
aguacauacaaauggugagca

SEQ ID NO: 51753 - RNA, 21 nt, Artificial Sequence
  LRRK2 RNA guide
aucuguaguacauacaaaugg

SEQ ID NO: 51754 - RNA, 21 nt, Artificial Sequence
  LRRK2 RNA guide
caccauuuguauguacuacag

SEQ ID NO: 51755 - RNA, 21 nt, Artificial Sequence
  LRRK2 RNA guide
cauuuguauguacuacagauc

SEQ ID NO: 51756 - RNA, 21 nt, Artificial Sequence
  LRRK2 RNA guide
ccauuuguauguacuacagau

SEQ ID NO: 51757 - RNA, 21 nt, Artificial Sequence
  LRRK2 RNA guide
cucaccauuuguauguacuac

SEQ ID NO: 51758 - RNA, 21 nt, Artificial Sequence
  LRRK2 RNA guide
cuguaguacauacaaauggug

SEQ ID NO: 51759 - RNA, 21 nt, Artificial Sequence
  LRRK2 RNA guide
cuuugcucaccauuuguaugu

SEQ ID NO: 51760 - RNA, 21 nt, Artificial Sequence
  LRRK2 RNA guide
gacuuugcucaccauuuguau

SEQ ID NO: 51761 - RNA, 21 nt, Artificial Sequence
  LRRK2 RNA guide
gaucuguaguacauacaaaug

SEQ ID NO: 51762 - RNA, 21 nt, Artificial Sequence
  LRRK2 RNA guide
gcucaccauuuguauguacua

SEQ ID NO: 51763 - RNA, 21 nt, Artificial Sequence
  LRRK2 RNA guide
guacauacaaauggugagcaa

SEQ ID NO: 51764 - RNA, 21 nt, Artificial Sequence
  LRRK2 RNA guide
guaguacauacaaauggugag

SEQ ID NO: 51765 - RNA, 21 nt, Artificial Sequence
  LRRK2 RNA guide
uaguacauacaaauggugagc

SEQ ID NO: 51766 - RNA, 21 nt, Artificial Sequence
  LRRK2 RNA guide
ucaccauuuguauguacuaca

SEQ ID NO: 51767 - RNA, 21 nt, Artificial Sequence
  LRRK2 RNA guide
ucuguaguacauacaaauggu

SEQ ID NO: 51768 - RNA, 21 nt, Artificial Sequence
  LRRK2 RNA guide
ugacuuugcucaccauuugua

SEQ ID NO: 51769 - RNA, 21 nt, Artificial Sequence
  LRRK2 RNA guide
ugcucaccauuuguauguacu

SEQ ID NO: 51770 - RNA, 21 nt, Artificial Sequence
  LRRK2 RNA guide
uguaguacauacaaaugguga

SEQ ID NO: 51771 - RNA, 21 nt, Artificial Sequence
  LRRK2 RNA guide
uugacuuugcucaccauuugu

SEQ ID NO: 51772 - RNA, 21 nt, Artificial Sequence
  LRRK2 RNA guide
uugcucaccauuuguauguac

SEQ ID NO: 51773 - RNA, 21 nt, Artificial Sequence
  LRRK2 RNA guide
uuugcucaccauuuguaugua

SEQ ID NO: 51774 - RNA, 22 nt, Artificial Sequence
  LRRK2 RNA guide
accauuuguauguacuacagau

SEQ ID NO: 51775 - RNA, 22 nt, Artificial Sequence
  LRRK2 RNA guide
acuuugcucaccauuuguaugu

SEQ ID NO: 51776 - RNA, 22 nt, Artificial Sequence
  LRRK2 RNA guide
aguacauacaaauggugagcaa

SEQ ID NO: 51777 - RNA, 22 nt, Artificial Sequence
  LRRK2 RNA guide
aucuguaguacauacaaauggu

SEQ ID NO: 51778 - RNA, 22 nt, Artificial Sequence
  LRRK2 RNA guide
auugacuuugcucaccauuugu

SEQ ID NO: 51779 - RNA, 22 nt, Artificial Sequence
  LRRK2 RNA guide
caccauuuguauguacuacaga

SEQ ID NO: 51780 - RNA, 22 nt, Artificial Sequence
  LRRK2 RNA guide
cauuuguauguacuacagauca

SEQ ID NO: 51781 - RNA, 22 nt, Artificial Sequence
  LRRK2 RNA guide
ccauuuguauguacuacagauc

SEQ ID NO: 51782 - RNA, 22 nt, Artificial Sequence
  LRRK2 RNA guide
cucaccauuuguauguacuaca

SEQ ID NO: 51783 - RNA, 22 nt, Artificial Sequence
  LRRK2 RNA guide
cuguaguacauacaaaugguga

SEQ ID NO: 51784 - RNA, 22 nt, Artificial Sequence
  LRRK2 RNA guide
cuuugcucaccauuuguaugua

SEQ ID NO: 51785 - RNA, 22 nt, Artificial Sequence
  LRRK2 RNA guide
gacuuugcucaccauuuguaug

SEQ ID NO: 51786 - RNA, 22 nt, Artificial Sequence
  LRRK2 RNA guide
gaucuguaguacauacaaaugg

SEQ ID NO: 51787 - RNA, 22 nt, Artificial Sequence
  LRRK2 RNA guide
gcucaccauuuguauguacuac

SEQ ID NO: 51788 - RNA, 22 nt, Artificial Sequence
  LRRK2 RNA guide
guacauacaaauggugagcaaa

SEQ ID NO: 51789 - RNA, 22 nt, Artificial Sequence
  LRRK2 RNA guide
guaguacauacaaauggugagc

SEQ ID NO: 51790 - RNA, 22 nt, Artificial Sequence
  LRRK2 RNA guide
uaguacauacaaauggugagca

SEQ ID NO: 51791 - RNA, 22 nt, Artificial Sequence
  LRRK2 RNA guide
ucaccauuuguauguacuacag

SEQ ID NO: 51792 - RNA, 22 nt, Artificial Sequence
  LRRK2 RNA guide
ucuguaguacauacaaauggug

SEQ ID NO: 51793 - RNA, 22 nt, Artificial Sequence
  LRRK2 RNA guide
ugacuuugcucaccauuuguau

SEQ ID NO: 51794 - RNA, 22 nt, Artificial Sequence
  LRRK2 RNA guide
ugaucuguaguacauacaaaug

SEQ ID NO: 51795 - RNA, 22 nt, Artificial Sequence
  LRRK2 RNA guide
ugcucaccauuuguauguacua

SEQ ID NO: 51796 - RNA, 22 nt, Artificial Sequence
  LRRK2 RNA guide
uguaguacauacaaauggugag

SEQ ID NO: 51797 - RNA, 22 nt, Artificial Sequence
  LRRK2 RNA guide
uugacuuugcucaccauuugua

SEQ ID NO: 51798 - RNA, 22 nt, Artificial Sequence
  LRRK2 RNA guide
uugcucaccauuuguauguacu

SEQ ID NO: 51799 - RNA, 22 nt, Artificial Sequence
  LRRK2 RNA guide
uuugcucaccauuuguauguac

SEQ ID NO: 51800 - RNA, 20 nt, Artificial Sequence
  LRRK2 RNA guide
aaacuauuuugaucuguagc

SEQ ID NO: 51801 - RNA, 20 nt, Artificial Sequence
  LRRK2 RNA guide
aacuauuuugaucuguagca

SEQ ID NO: 51802 - RNA, 20 nt, Artificial Sequence
  LRRK2 RNA guide
accauuuguaugugcuacag

SEQ ID NO: 51803 - RNA, 20 nt, Artificial Sequence
  LRRK2 RNA guide
acuauuuugaucuguagcac

SEQ ID NO: 51804 - RNA, 20 nt, Artificial Sequence
  LRRK2 RNA guide
agcacauacaaauggugagc

SEQ ID NO: 51805 - RNA, 20 nt, Artificial Sequence
  LRRK2 RNA guide
aucuguagcacauacaaaug

SEQ ID NO: 51806 - RNA, 20 nt, Artificial Sequence
  LRRK2 RNA guide
augugcuacagaucaaaaua

SEQ ID NO: 51807 - RNA, 20 nt, Artificial Sequence
  LRRK2 RNA guide
auuuguaugugcuacagauc

SEQ ID NO: 51808 - RNA, 20 nt, Artificial Sequence
  LRRK2 RNA guide
auuuugaucuguagcacaua

SEQ ID NO: 51809 - RNA, 20 nt, Artificial Sequence
  LRRK2 RNA guide
caccauuuguaugugcuaca

SEQ ID NO: 51810 - RNA, 20 nt, Artificial Sequence
  LRRK2 RNA guide
cauuuguaugugcuacagau

SEQ ID NO: 51811 - RNA, 20 nt, Artificial Sequence
  LRRK2 RNA guide
ccauuuguaugugcuacaga

SEQ ID NO: 51812 - RNA, 20 nt, Artificial Sequence
  LRRK2 RNA guide
cuauuuugaucuguagcaca

SEQ ID NO: 51813 - RNA, 20 nt, Artificial Sequence
  LRRK2 RNA guide
cucaccauuuguaugugcua

SEQ ID NO: 51814 - RNA, 20 nt, Artificial Sequence
  LRRK2 RNA guide
cuguagcacauacaaauggu

SEQ ID NO: 51815 - RNA, 20 nt, Artificial Sequence
  LRRK2 RNA guide
gaucuguagcacauacaaau

SEQ ID NO: 51816 - RNA, 20 nt, Artificial Sequence
  LRRK2 RNA guide
gcacauacaaauggugagca

SEQ ID NO: 51817 - RNA, 20 nt, Artificial Sequence
  LRRK2 RNA guide
gcucaccauuuguaugugcu

SEQ ID NO: 51818 - RNA, 20 nt, Artificial Sequence
  LRRK2 RNA guide
guagcacauacaaaugguga

SEQ ID NO: 51819 - RNA, 20 nt, Artificial Sequence
  LRRK2 RNA guide
guaugugcuacagaucaaaa

SEQ ID NO: 51820 - RNA, 20 nt, Artificial Sequence
  LRRK2 RNA guide
gugcuacagaucaaaauagu

SEQ ID NO: 51821 - RNA, 20 nt, Artificial Sequence
  LRRK2 RNA guide
uagcacauacaaauggugag

SEQ ID NO: 51822 - RNA, 20 nt, Artificial Sequence
  LRRK2 RNA guide
uaugugcuacagaucaaaau

SEQ ID NO: 51823 - RNA, 20 nt, Artificial Sequence
  LRRK2 RNA guide
uauuuugaucuguagcacau

SEQ ID NO: 51824 - RNA, 20 nt, Artificial Sequence
  LRRK2 RNA guide
ucaccauuuguaugugcuac

SEQ ID NO: 51825 - RNA, 20 nt, Artificial Sequence
  LRRK2 RNA guide
ucuguagcacauacaaaugg

SEQ ID NO: 51826 - RNA, 20 nt, Artificial Sequence
  LRRK2 RNA guide
ugaucuguagcacauacaaa

SEQ ID NO: 51827 - RNA, 20 nt, Artificial Sequence
  LRRK2 RNA guide
ugcuacagaucaaaauaguu

SEQ ID NO: 51828 - RNA, 20 nt, Artificial Sequence
  LRRK2 RNA guide
ugcucaccauuuguaugugc

SEQ ID NO: 51829 - RNA, 20 nt, Artificial Sequence
  LRRK2 RNA guide
uguagcacauacaaauggug

SEQ ID NO: 51830 - RNA, 20 nt, Artificial Sequence
  LRRK2 RNA guide
uguaugugcuacagaucaaa

SEQ ID NO: 51831 - RNA, 20 nt, Artificial Sequence
  LRRK2 RNA guide
ugugcuacagaucaaaauag

SEQ ID NO: 51832 - RNA, 20 nt, Artificial Sequence
  LRRK2 RNA guide
uugaucuguagcacauacaa

SEQ ID NO: 51833 - RNA, 20 nt, Artificial Sequence
  LRRK2 RNA guide
uugcucaccauuuguaugug

SEQ ID NO: 51834 - RNA, 20 nt, Artificial Sequence
  LRRK2 RNA guide
uuguaugugcuacagaucaa

SEQ ID NO: 51835 - RNA, 20 nt, Artificial Sequence
  LRRK2 RNA guide
uuugaucuguagcacauaca

SEQ ID NO: 51836 - RNA, 20 nt, Artificial Sequence
  LRRK2 RNA guide
uuuguaugugcuacagauca

SEQ ID NO: 51837 - RNA, 20 nt, Artificial Sequence
  LRRK2 RNA guide
uuuugaucuguagcacauac

SEQ ID NO: 51838 - RNA, 21 nt, Artificial Sequence
  LRRK2 RNA guide
aacuauuuugaucuguagcac

SEQ ID NO: 51839 - RNA, 21 nt, Artificial Sequence
  LRRK2 RNA guide
accauuuguaugugcuacaga

SEQ ID NO: 51840 - RNA, 21 nt, Artificial Sequence
  LRRK2 RNA guide
acuauuuugaucuguagcaca

SEQ ID NO: 51841 - RNA, 21 nt, Artificial Sequence
  LRRK2 RNA guide
agcacauacaaauggugagca

SEQ ID NO: 51842 - RNA, 21 nt, Artificial Sequence
  LRRK2 RNA guide
aucuguagcacauacaaaugg

SEQ ID NO: 51843 - RNA, 21 nt, Artificial Sequence
  LRRK2 RNA guide
augugcuacagaucaaaauag

SEQ ID NO: 51844 - RNA, 21 nt, Artificial Sequence
  LRRK2 RNA guide
auuuguaugugcuacagauca

SEQ ID NO: 51845 - RNA, 21 nt, Artificial Sequence
  LRRK2 RNA guide
auuuugaucuguagcacauac

SEQ ID NO: 51846 - RNA, 21 nt, Artificial Sequence
  LRRK2 RNA guide
caccauuuguaugugcuacag

SEQ ID NO: 51847 - RNA, 21 nt, Artificial Sequence
  LRRK2 RNA guide
cauuuguaugugcuacagauc

SEQ ID NO: 51848 - RNA, 21 nt, Artificial Sequence
  LRRK2 RNA guide
ccauuuguaugugcuacagau

SEQ ID NO: 51849 - RNA, 21 nt, Artificial Sequence
  LRRK2 RNA guide
cuauuuugaucuguagcacau

SEQ ID NO: 51850 - RNA, 21 nt, Artificial Sequence
  LRRK2 RNA guide
cucaccauuuguaugugcuac

SEQ ID NO: 51851 - RNA, 21 nt, Artificial Sequence
  LRRK2 RNA guide
cuguagcacauacaaauggug

SEQ ID NO: 51852 - RNA, 21 nt, Artificial Sequence
  LRRK2 RNA guide
gaucuguagcacauacaaaug

SEQ ID NO: 51853 - RNA, 21 nt, Artificial Sequence
  LRRK2 RNA guide
gcacauacaaauggugagcaa

SEQ ID NO: 51854 - RNA, 21 nt, Artificial Sequence
  LRRK2 RNA guide
gcucaccauuuguaugugcua

SEQ ID NO: 51855 - RNA, 21 nt, Artificial Sequence
  LRRK2 RNA guide
guagcacauacaaauggugag

SEQ ID NO: 51856 - RNA, 21 nt, Artificial Sequence
  LRRK2 RNA guide
guaugugcuacagaucaaaau

SEQ ID NO: 51857 - RNA, 21 nt, Artificial Sequence
  LRRK2 RNA guide
gugcuacagaucaaaauaguu

SEQ ID NO: 51858 - RNA, 21 nt, Artificial Sequence
  LRRK2 RNA guide
uagcacauacaaauggugagc

SEQ ID NO: 51859 - RNA, 21 nt, Artificial Sequence
  LRRK2 RNA guide
ucaccauuuguaugugcuaca

SEQ ID NO: 51860 - RNA, 21 nt, Artificial Sequence
  LRRK2 RNA guide
ucuguagcacauacaaauggu

SEQ ID NO: 51861 - RNA, 21 nt, Artificial Sequence
  LRRK2 RNA guide
ugaucuguagcacauacaaau

SEQ ID NO: 51862 - RNA, 21 nt, Artificial Sequence
  LRRK2 RNA guide
ugcucaccauuuguaugugcu

SEQ ID NO: 51863 - RNA, 21 nt, Artificial Sequence
  LRRK2 RNA guide
uguagcacauacaaaugguga

SEQ ID NO: 51864 - RNA, 21 nt, Artificial Sequence
  LRRK2 RNA guide
uguaugugcuacagaucaaaa

SEQ ID NO: 51865 - RNA, 21 nt, Artificial Sequence
  LRRK2 RNA guide
ugugcuacagaucaaaauagu

SEQ ID NO: 51866 - RNA, 21 nt, Artificial Sequence
  LRRK2 RNA guide
uugaucuguagcacauacaaa

SEQ ID NO: 51867 - RNA, 21 nt, Artificial Sequence
  LRRK2 RNA guide
uugcucaccauuuguaugugc

SEQ ID NO: 51868 - RNA, 21 nt, Artificial Sequence
  LRRK2 RNA guide
uuguaugugcuacagaucaaa

SEQ ID NO: 51869 - RNA, 21 nt, Artificial Sequence
  LRRK2 RNA guide
uuugaucuguagcacauacaa

SEQ ID NO: 51870 - RNA, 21 nt, Artificial Sequence
  LRRK2 RNA guide
uuugcucaccauuuguaugug

SEQ ID NO: 51871 - RNA, 21 nt, Artificial Sequence
  LRRK2 RNA guide
uuuguaugugcuacagaucaa

SEQ ID NO: 51872 - RNA, 21 nt, Artificial Sequence
  LRRK2 RNA guide
uuuugaucuguagcacauaca

SEQ ID NO: 51873 - RNA, 22 nt, Artificial Sequence
  LRRK2 RNA guide
aaacuauuuugaucuguagcac

SEQ ID NO: 51874 - RNA, 22 nt, Artificial Sequence
  LRRK2 RNA guide
aacuauuuugaucuguagcaca

SEQ ID NO: 51875 - RNA, 22 nt, Artificial Sequence
  LRRK2 RNA guide
accauuuguaugugcuacagau

SEQ ID NO: 51876 - RNA, 22 nt, Artificial Sequence
  LRRK2 RNA guide
acuauuuugaucuguagcacau

SEQ ID NO: 51877 - RNA, 22 nt, Artificial Sequence
  LRRK2 RNA guide
agcacauacaaauggugagcaa

SEQ ID NO: 51878 - RNA, 22 nt, Artificial Sequence
  LRRK2 RNA guide
aucuguagcacauacaaauggu

SEQ ID NO: 51879 - RNA, 22 nt, Artificial Sequence
  LRRK2 RNA guide
augugcuacagaucaaaauagu

SEQ ID NO: 51880 - RNA, 22 nt, Artificial Sequence
  LRRK2 RNA guide
auuuguaugugcuacagaucaa

SEQ ID NO: 51881 - RNA, 22 nt, Artificial Sequence
  LRRK2 RNA guide
auuuugaucuguagcacauaca

SEQ ID NO: 51882 - RNA, 22 nt, Artificial Sequence
  LRRK2 RNA guide
caaaacuauuuugaucuguagc

SEQ ID NO: 51883 - RNA, 22 nt, Artificial Sequence
  LRRK2 RNA guide
caccauuuguaugugcuacaga

SEQ ID NO: 51884 - RNA, 22 nt, Artificial Sequence
  LRRK2 RNA guide
cauuuguaugugcuacagauca

SEQ ID NO: 51885 - RNA, 22 nt, Artificial Sequence
  LRRK2 RNA guide
ccauuuguaugugcuacagauc

SEQ ID NO: 51886 - RNA, 22 nt, Artificial Sequence
  LRRK2 RNA guide
cuauuuugaucuguagcacaua

SEQ ID NO: 51887 - RNA, 22 nt, Artificial Sequence
  LRRK2 RNA guide
cucaccauuuguaugugcuaca

SEQ ID NO: 51888 - RNA, 22 nt, Artificial Sequence
  LRRK2 RNA guide
cuguagcacauacaaaugguga

SEQ ID NO: 51889 - RNA, 22 nt, Artificial Sequence
  LRRK2 RNA guide
cuuugcucaccauuuguaugug

SEQ ID NO: 51890 - RNA, 22 nt, Artificial Sequence
  LRRK2 RNA guide
gaucuguagcacauacaaaugg

SEQ ID NO: 51891 - RNA, 22 nt, Artificial Sequence
  LRRK2 RNA guide
gcacauacaaauggugagcaaa

SEQ ID NO: 51892 - RNA, 22 nt, Artificial Sequence
  LRRK2 RNA guide
gcucaccauuuguaugugcuac

SEQ ID NO: 51893 - RNA, 22 nt, Artificial Sequence
  LRRK2 RNA guide
guagcacauacaaauggugagc

SEQ ID NO: 51894 - RNA, 22 nt, Artificial Sequence
  LRRK2 RNA guide
guaugugcuacagaucaaaaua

SEQ ID NO: 51895 - RNA, 22 nt, Artificial Sequence
  LRRK2 RNA guide
gugcuacagaucaaaauaguuu

SEQ ID NO: 51896 - RNA, 22 nt, Artificial Sequence
  LRRK2 RNA guide
uagcacauacaaauggugagca

SEQ ID NO: 51897 - RNA, 22 nt, Artificial Sequence
  LRRK2 RNA guide
uaugugcuacagaucaaaauag

SEQ ID NO: 51898 - RNA, 22 nt, Artificial Sequence
  LRRK2 RNA guide
uauuuugaucuguagcacauac

SEQ ID NO: 51899 - RNA, 22 nt, Artificial Sequence
  LRRK2 RNA guide
ucaccauuuguaugugcuacag

SEQ ID NO: 51900 - RNA, 22 nt, Artificial Sequence
  LRRK2 RNA guide
ucuguagcacauacaaauggug

SEQ ID NO: 51901 - RNA, 22 nt, Artificial Sequence
  LRRK2 RNA guide
ugaucuguagcacauacaaaug

SEQ ID NO: 51902 - RNA, 22 nt, Artificial Sequence
  LRRK2 RNA guide
ugcucaccauuuguaugugcua

SEQ ID NO: 51903 - RNA, 22 nt, Artificial Sequence
  LRRK2 RNA guide
uguagcacauacaaauggugag

SEQ ID NO: 51904 - RNA, 22 nt, Artificial Sequence
  LRRK2 RNA guide
uguaugugcuacagaucaaaau

SEQ ID NO: 51905 - RNA, 22 nt, Artificial Sequence
  LRRK2 RNA guide
ugugcuacagaucaaaauaguu

SEQ ID NO: 51906 - RNA, 22 nt, Artificial Sequence
  LRRK2 RNA guide
uugaucuguagcacauacaaau

SEQ ID NO: 51907 - RNA, 22 nt, Artificial Sequence
  LRRK2 RNA guide
uugcucaccauuuguaugugcu

SEQ ID NO: 51908 - RNA, 22 nt, Artificial Sequence
  LRRK2 RNA guide
uuguaugugcuacagaucaaaa

SEQ ID NO: 51909 - RNA, 22 nt, Artificial Sequence
  LRRK2 RNA guide
uuugaucuguagcacauacaaa

SEQ ID NO: 51910 - RNA, 22 nt, Artificial Sequence
  LRRK2 RNA guide
uuugcucaccauuuguaugugc

SEQ ID NO: 51911 - RNA, 22 nt, Artificial Sequence
  LRRK2 RNA guide
uuuguaugugcuacagaucaaa

SEQ ID NO: 51912 - RNA, 22 nt, Artificial Sequence
  LRRK2 RNA guide
uuuugaucuguagcacauacaa

SEQ ID NO: 51913 - RNA, 20 nt, Artificial Sequence
  LRRK2 RNA guide
aacugucacuucaucacucu

SEQ ID NO: 51914 - RNA, 20 nt, Artificial Sequence
  LRRK2 RNA guide
aagcagagagugaugaagug

SEQ ID NO: 51915 - RNA, 20 nt, Artificial Sequence
  LRRK2 RNA guide
aagccacccagggcucaauu

SEQ ID NO: 51916 - RNA, 20 nt, Artificial Sequence
  LRRK2 RNA guide
aagugacaguuaaauugagc

SEQ ID NO: 51917 - RNA, 20 nt, Artificial Sequence
  LRRK2 RNA guide
aauuuaacugucacuucauc

SEQ ID NO: 51918 - RNA, 20 nt, Artificial Sequence
  LRRK2 RNA guide
acaguuaaauugagcccugg

SEQ ID NO: 51919 - RNA, 20 nt, Artificial Sequence
  LRRK2 RNA guide
acccagggcucaauuuaacu

SEQ ID NO: 51920 - RNA, 20 nt, Artificial Sequence
  LRRK2 RNA guide
acugucacuucaucacucuc

SEQ ID NO: 51921 - RNA, 20 nt, Artificial Sequence
  LRRK2 RNA guide
agagagugaugaagugacag

SEQ ID NO: 51922 - RNA, 20 nt, Artificial Sequence
  LRRK2 RNA guide
agagugaugaagugacaguu

SEQ ID NO: 51923 - RNA, 20 nt, Artificial Sequence
  LRRK2 RNA guide
agcagagagugaugaaguga

SEQ ID NO: 51924 - RNA, 20 nt, Artificial Sequence
  LRRK2 RNA guide
agccacccagggcucaauuu

SEQ ID NO: 51925 - RNA, 20 nt, Artificial Sequence
  LRRK2 RNA guide
agggcucaauuuaacuguca

SEQ ID NO: 51926 - RNA, 20 nt, Artificial Sequence
  LRRK2 RNA guide
agugacaguuaaauugagcc

SEQ ID NO: 51927 - RNA, 20 nt, Artificial Sequence
  LRRK2 RNA guide
agugaugaagugacaguuaa

SEQ ID NO: 51928 - RNA, 20 nt, Artificial Sequence
  LRRK2 RNA guide
aguuaaauugagcccugggu

SEQ ID NO: 51929 - RNA, 20 nt, Artificial Sequence
  LRRK2 RNA guide
augaagugacaguuaaauug

SEQ ID NO: 51930 - RNA, 20 nt, Artificial Sequence
  LRRK2 RNA guide
auuuaacugucacuucauca

SEQ ID NO: 51931 - RNA, 20 nt, Artificial Sequence
  LRRK2 RNA guide
caagccacccagggcucaau

SEQ ID NO: 51932 - RNA, 20 nt, Artificial Sequence
  LRRK2 RNA guide
caauuuaacugucacuucau

SEQ ID NO: 51933 - RNA, 20 nt, Artificial Sequence
  LRRK2 RNA guide
cacccagggcucaauuuaac

SEQ ID NO: 51934 - RNA, 20 nt, Artificial Sequence
  LRRK2 RNA guide
cagagagugaugaagugaca

SEQ ID NO: 51935 - RNA, 20 nt, Artificial Sequence
  LRRK2 RNA guide
cagggcucaauuuaacuguc

SEQ ID NO: 51936 - RNA, 20 nt, Artificial Sequence
  LRRK2 RNA guide
caguuaaauugagcccuggg

SEQ ID NO: 51937 - RNA, 20 nt, Artificial Sequence
  LRRK2 RNA guide
ccacccagggcucaauuuaa

SEQ ID NO: 51938 - RNA, 20 nt, Artificial Sequence
  LRRK2 RNA guide
ccagggcucaauuuaacugu

SEQ ID NO: 51939 - RNA, 20 nt, Artificial Sequence
  LRRK2 RNA guide
cccagggcucaauuuaacug

SEQ ID NO: 51940 - RNA, 20 nt, Artificial Sequence
  LRRK2 RNA guide
cucaauuuaacugucacuuc

SEQ ID NO: 51941 - RNA, 20 nt, Artificial Sequence
  LRRK2 RNA guide
gaagcagagagugaugaagu

SEQ ID NO: 51942 - RNA, 20 nt, Artificial Sequence
  LRRK2 RNA guide
gaagugacaguuaaauugag

SEQ ID NO: 51943 - RNA, 20 nt, Artificial Sequence
  LRRK2 RNA guide
gacaguuaaauugagcccug

SEQ ID NO: 51944 - RNA, 20 nt, Artificial Sequence
  LRRK2 RNA guide
gagagugaugaagugacagu

SEQ ID NO: 51945 - RNA, 20 nt, Artificial Sequence
  LRRK2 RNA guide
gagugaugaagugacaguua

SEQ ID NO: 51946 - RNA, 20 nt, Artificial Sequence
  LRRK2 RNA guide
gaugaagugacaguuaaauu

SEQ ID NO: 51947 - RNA, 20 nt, Artificial Sequence
  LRRK2 RNA guide
gcagagagugaugaagugac

SEQ ID NO: 51948 - RNA, 20 nt, Artificial Sequence
  LRRK2 RNA guide
gccacccagggcucaauuua

SEQ ID NO: 51949 - RNA, 20 nt, Artificial Sequence
  LRRK2 RNA guide
gcucaauuuaacugucacuu

SEQ ID NO: 51950 - RNA, 20 nt, Artificial Sequence
  LRRK2 RNA guide
ggcucaauuuaacugucacu

SEQ ID NO: 51951 - RNA, 20 nt, Artificial Sequence
  LRRK2 RNA guide
gggcucaauuuaacugucac

SEQ ID NO: 51952 - RNA, 20 nt, Artificial Sequence
  LRRK2 RNA guide
gugacaguuaaauugagccc

SEQ ID NO: 51953 - RNA, 20 nt, Artificial Sequence
  LRRK2 RNA guide
gugaugaagugacaguuaaa

SEQ ID NO: 51954 - RNA, 20 nt, Artificial Sequence
  LRRK2 RNA guide
uaacugucacuucaucacuc

SEQ ID NO: 51955 - RNA, 20 nt, Artificial Sequence
  LRRK2 RNA guide
ucaauuuaacugucacuuca

SEQ ID NO: 51956 - RNA, 20 nt, Artificial Sequence
  LRRK2 RNA guide
ugaagugacaguuaaauuga

SEQ ID NO: 51957 - RNA, 20 nt, Artificial Sequence
  LRRK2 RNA guide
ugacaguuaaauugagcccu

SEQ ID NO: 51958 - RNA, 20 nt, Artificial Sequence
  LRRK2 RNA guide
uuaacugucacuucaucacu

SEQ ID NO: 51959 - RNA, 20 nt, Artificial Sequence
  LRRK2 RNA guide
uuuaacugucacuucaucac

SEQ ID NO: 51960 - RNA, 21 nt, Artificial Sequence
  LRRK2 RNA guide
aacugucacuucaucacucuc

SEQ ID NO: 51961 - RNA, 21 nt, Artificial Sequence
  LRRK2 RNA guide
aagcagagagugaugaaguga

SEQ ID NO: 51962 - RNA, 21 nt, Artificial Sequence
  LRRK2 RNA guide
aagccacccagggcucaauuu

SEQ ID NO: 51963 - RNA, 21 nt, Artificial Sequence
  LRRK2 RNA guide
aagugacaguuaaauugagcc

SEQ ID NO: 51964 - RNA, 21 nt, Artificial Sequence
  LRRK2 RNA guide
acaguuaaauugagcccuggg

SEQ ID NO: 51965 - RNA, 21 nt, Artificial Sequence
  LRRK2 RNA guide
acccagggcucaauuuaacug

SEQ ID NO: 51966 - RNA, 21 nt, Artificial Sequence
  LRRK2 RNA guide
acugucacuucaucacucucu

SEQ ID NO: 51967 - RNA, 21 nt, Artificial Sequence
  LRRK2 RNA guide
agaagcagagagugaugaagu

SEQ ID NO: 51968 - RNA, 21 nt, Artificial Sequence
  LRRK2 RNA guide
agagagugaugaagugacagu

SEQ ID NO: 51969 - RNA, 21 nt, Artificial Sequence
  LRRK2 RNA guide
agagugaugaagugacaguua

SEQ ID NO: 51970 - RNA, 21 nt, Artificial Sequence
  LRRK2 RNA guide
agcagagagugaugaagugac

SEQ ID NO: 51971 - RNA, 21 nt, Artificial Sequence
  LRRK2 RNA guide
agccacccagggcucaauuua

SEQ ID NO: 51972 - RNA, 21 nt, Artificial Sequence
  LRRK2 RNA guide
agggcucaauuuaacugucac

SEQ ID NO: 51973 - RNA, 21 nt, Artificial Sequence
  LRRK2 RNA guide
agugacaguuaaauugagccc

SEQ ID NO: 51974 - RNA, 21 nt, Artificial Sequence
  LRRK2 RNA guide
agugaugaagugacaguuaaa

SEQ ID NO: 51975 - RNA, 21 nt, Artificial Sequence
  LRRK2 RNA guide
aguuaaauugagcccugggug

SEQ ID NO: 51976 - RNA, 21 nt, Artificial Sequence
  LRRK2 RNA guide
auuuaacugucacuucaucac

SEQ ID NO: 51977 - RNA, 21 nt, Artificial Sequence
  LRRK2 RNA guide
caagccacccagggcucaauu

SEQ ID NO: 51978 - RNA, 21 nt, Artificial Sequence
  LRRK2 RNA guide
caauuuaacugucacuucauc

SEQ ID NO: 51979 - RNA, 21 nt, Artificial Sequence
  LRRK2 RNA guide
cacccagggcucaauuuaacu

SEQ ID NO: 51980 - RNA, 21 nt, Artificial Sequence
  LRRK2 RNA guide
cagagagugaugaagugacag

SEQ ID NO: 51981 - RNA, 21 nt, Artificial Sequence
  LRRK2 RNA guide
cagggcucaauuuaacuguca

SEQ ID NO: 51982 - RNA, 21 nt, Artificial Sequence
  LRRK2 RNA guide
caguuaaauugagcccugggu

SEQ ID NO: 51983 - RNA, 21 nt, Artificial Sequence
  LRRK2 RNA guide
ccacccagggcucaauuuaac

SEQ ID NO: 51984 - RNA, 21 nt, Artificial Sequence
  LRRK2 RNA guide
ccagggcucaauuuaacuguc

SEQ ID NO: 51985 - RNA, 21 nt, Artificial Sequence
  LRRK2 RNA guide
cccagggcucaauuuaacugu

SEQ ID NO: 51986 - RNA, 21 nt, Artificial Sequence
  LRRK2 RNA guide
cucaauuuaacugucacuuca

SEQ ID NO: 51987 - RNA, 21 nt, Artificial Sequence
  LRRK2 RNA guide
gaagcagagagugaugaagug

SEQ ID NO: 51988 - RNA, 21 nt, Artificial Sequence
  LRRK2 RNA guide
gaagugacaguuaaauugagc

SEQ ID NO: 51989 - RNA, 21 nt, Artificial Sequence
  LRRK2 RNA guide
gacaguuaaauugagcccugg

SEQ ID NO: 51990 - RNA, 21 nt, Artificial Sequence
  LRRK2 RNA guide
gagagugaugaagugacaguu

SEQ ID NO: 51991 - RNA, 21 nt, Artificial Sequence
  LRRK2 RNA guide
gagugaugaagugacaguuaa

SEQ ID NO: 51992 - RNA, 21 nt, Artificial Sequence
  LRRK2 RNA guide
gaugaagugacaguuaaauug

SEQ ID NO: 51993 - RNA, 21 nt, Artificial Sequence
  LRRK2 RNA guide
gcagagagugaugaagugaca

SEQ ID NO: 51994 - RNA, 21 nt, Artificial Sequence
  LRRK2 RNA guide
gccacccagggcucaauuuaa

SEQ ID NO: 51995 - RNA, 21 nt, Artificial Sequence
  LRRK2 RNA guide
gcucaauuuaacugucacuuc

SEQ ID NO: 51996 - RNA, 21 nt, Artificial Sequence
  LRRK2 RNA guide
ggcucaauuuaacugucacuu

SEQ ID NO: 51997 - RNA, 21 nt, Artificial Sequence
  LRRK2 RNA guide
gggcucaauuuaacugucacu

SEQ ID NO: 51998 - RNA, 21 nt, Artificial Sequence
  LRRK2 RNA guide
gugacaguuaaauugagcccu

SEQ ID NO: 51999 - RNA, 21 nt, Artificial Sequence
  LRRK2 RNA guide
gugaugaagugacaguuaaau

SEQ ID NO: 52000 - RNA, 21 nt, Artificial Sequence
  LRRK2 RNA guide
uaacugucacuucaucacucu

SEQ ID NO: 52001 - RNA, 21 nt, Artificial Sequence
  LRRK2 RNA guide
ucaagccacccagggcucaau

SEQ ID NO: 52002 - RNA, 21 nt, Artificial Sequence
  LRRK2 RNA guide
ugaagugacaguuaaauugag

SEQ ID NO: 52003 - RNA, 21 nt, Artificial Sequence
  LRRK2 RNA guide
ugacaguuaaauugagcccug

SEQ ID NO: 52004 - RNA, 21 nt, Artificial Sequence
  LRRK2 RNA guide
uuaacugucacuucaucacuc

SEQ ID NO: 52005 - RNA, 21 nt, Artificial Sequence
  LRRK2 RNA guide
uuuaacugucacuucaucacu

SEQ ID NO: 52006 - RNA, 22 nt, Artificial Sequence
  LRRK2 RNA guide
aacugucacuucaucacucucu

SEQ ID NO: 52007 - RNA, 22 nt, Artificial Sequence
  LRRK2 RNA guide
aagcagagagugaugaagugac

SEQ ID NO: 52008 - RNA, 22 nt, Artificial Sequence
  LRRK2 RNA guide
aagccacccagggcucaauuua

SEQ ID NO: 52009 - RNA, 22 nt, Artificial Sequence
  LRRK2 RNA guide
aagugacaguuaaauugagccc

SEQ ID NO: 52010 - RNA, 22 nt, Artificial Sequence
  LRRK2 RNA guide
aauuuaacugucacuucaucac

SEQ ID NO: 52011 - RNA, 22 nt, Artificial Sequence
  LRRK2 RNA guide
acaguuaaauugagcccugggu

SEQ ID NO: 52012 - RNA, 22 nt, Artificial Sequence
  LRRK2 RNA guide
acccagggcucaauuuaacugu

SEQ ID NO: 52013 - RNA, 22 nt, Artificial Sequence
  LRRK2 RNA guide
acugucacuucaucacucucug

SEQ ID NO: 52014 - RNA, 22 nt, Artificial Sequence
  LRRK2 RNA guide
agaagcagagagugaugaagug

SEQ ID NO: 52015 - RNA, 22 nt, Artificial Sequence
  LRRK2 RNA guide
agagagugaugaagugacaguu

SEQ ID NO: 52016 - RNA, 22 nt, Artificial Sequence
  LRRK2 RNA guide
agagugaugaagugacaguuaa

SEQ ID NO: 52017 - RNA, 22 nt, Artificial Sequence
  LRRK2 RNA guide
agcagagagugaugaagugaca

SEQ ID NO: 52018 - RNA, 22 nt, Artificial Sequence
  LRRK2 RNA guide
agccacccagggcucaauuuaa

SEQ ID NO: 52019 - RNA, 22 nt, Artificial Sequence
  LRRK2 RNA guide
agggcucaauuuaacugucacu

SEQ ID NO: 52020 - RNA, 22 nt, Artificial Sequence
  LRRK2 RNA guide
agugacaguuaaauugagcccu

SEQ ID NO: 52021 - RNA, 22 nt, Artificial Sequence
  LRRK2 RNA guide
agugaugaagugacaguuaaau

SEQ ID NO: 52022 - RNA, 22 nt, Artificial Sequence
  LRRK2 RNA guide
aguuaaauugagcccugggugg

SEQ ID NO: 52023 - RNA, 22 nt, Artificial Sequence
  LRRK2 RNA guide
augaagugacaguuaaauugag

SEQ ID NO: 52024 - RNA, 22 nt, Artificial Sequence
  LRRK2 RNA guide
auuuaacugucacuucaucacu

SEQ ID NO: 52025 - RNA, 22 nt, Artificial Sequence
  LRRK2 RNA guide
caagccacccagggcucaauuu

SEQ ID NO: 52026 - RNA, 22 nt, Artificial Sequence
  LRRK2 RNA guide
caauuuaacugucacuucauca

SEQ ID NO: 52027 - RNA, 22 nt, Artificial Sequence
  LRRK2 RNA guide
cacccagggcucaauuuaacug

SEQ ID NO: 52028 - RNA, 22 nt, Artificial Sequence
  LRRK2 RNA guide
cagagagugaugaagugacagu

SEQ ID NO: 52029 - RNA, 22 nt, Artificial Sequence
  LRRK2 RNA guide
cagggcucaauuuaacugucac

SEQ ID NO: 52030 - RNA, 22 nt, Artificial Sequence
  LRRK2 RNA guide
caguuaaauugagcccugggug

SEQ ID NO: 52031 - RNA, 22 nt, Artificial Sequence
  LRRK2 RNA guide
ccacccagggcucaauuuaacu

SEQ ID NO: 52032 - RNA, 22 nt, Artificial Sequence
  LRRK2 RNA guide
ccagggcucaauuuaacuguca

SEQ ID NO: 52033 - RNA, 22 nt, Artificial Sequence
  LRRK2 RNA guide
cccagggcucaauuuaacuguc

SEQ ID NO: 52034 - RNA, 22 nt, Artificial Sequence
  LRRK2 RNA guide
cucaauuuaacugucacuucau

SEQ ID NO: 52035 - RNA, 22 nt, Artificial Sequence
  LRRK2 RNA guide
gaagcagagagugaugaaguga

SEQ ID NO: 52036 - RNA, 22 nt, Artificial Sequence
  LRRK2 RNA guide
gaagugacaguuaaauugagcc

SEQ ID NO: 52037 - RNA, 22 nt, Artificial Sequence
  LRRK2 RNA guide
gacaguuaaauugagcccuggg

SEQ ID NO: 52038 - RNA, 22 nt, Artificial Sequence
  LRRK2 RNA guide
gagaagcagagagugaugaagu

SEQ ID NO: 52039 - RNA, 22 nt, Artificial Sequence
  LRRK2 RNA guide
gagagugaugaagugacaguua

SEQ ID NO: 52040 - RNA, 22 nt, Artificial Sequence
  LRRK2 RNA guide
gagugaugaagugacaguuaaa

SEQ ID NO: 52041 - RNA, 22 nt, Artificial Sequence
  LRRK2 RNA guide
gaugaagugacaguuaaauuga

SEQ ID NO: 52042 - RNA, 22 nt, Artificial Sequence
  LRRK2 RNA guide
gcagagagugaugaagugacag

SEQ ID NO: 52043 - RNA, 22 nt, Artificial Sequence
  LRRK2 RNA guide
gccacccagggcucaauuuaac

SEQ ID NO: 52044 - RNA, 22 nt, Artificial Sequence
  LRRK2 RNA guide
gcucaauuuaacugucacuuca

SEQ ID NO: 52045 - RNA, 22 nt, Artificial Sequence
  LRRK2 RNA guide
ggcucaauuuaacugucacuuc

SEQ ID NO: 52046 - RNA, 22 nt, Artificial Sequence
  LRRK2 RNA guide
gggcucaauuuaacugucacuu

SEQ ID NO: 52047 - RNA, 22 nt, Artificial Sequence
  LRRK2 RNA guide
gugacaguuaaauugagcccug

SEQ ID NO: 52048 - RNA, 22 nt, Artificial Sequence
  LRRK2 RNA guide
gugaugaagugacaguuaaauu

SEQ ID NO: 52049 - RNA, 22 nt, Artificial Sequence
  LRRK2 RNA guide
uaacugucacuucaucacucuc

SEQ ID NO: 52050 - RNA, 22 nt, Artificial Sequence
  LRRK2 RNA guide
ucaagccacccagggcucaauu

SEQ ID NO: 52051 - RNA, 22 nt, Artificial Sequence
  LRRK2 RNA guide
ucaauuuaacugucacuucauc

SEQ ID NO: 52052 - RNA, 22 nt, Artificial Sequence
  LRRK2 RNA guide
ugaagugacaguuaaauugagc

SEQ ID NO: 52053 - RNA, 22 nt, Artificial Sequence
  LRRK2 RNA guide
ugacaguuaaauugagcccugg

SEQ ID NO: 52054 - RNA, 22 nt, Artificial Sequence
  LRRK2 RNA guide
ugaugaagugacaguuaaauug

SEQ ID NO: 52055 - RNA, 22 nt, Artificial Sequence
  LRRK2 RNA guide
uuaacugucacuucaucacucu

SEQ ID NO: 52056 - RNA, 22 nt, Artificial Sequence
  LRRK2 RNA guide
uucaagccacccagggcucaau

SEQ ID NO: 52057 - RNA, 22 nt, Artificial Sequence
  LRRK2 RNA guide
uuuaacugucacuucaucacuc

SEQ ID NO: 52058 - RNA, 20 nt, Artificial Sequence
  LRRK2 RNA guide
aaaugucacuucaucacucu

SEQ ID NO: 52059 - RNA, 20 nt, Artificial Sequence
  LRRK2 RNA guide
aagugacauuuaaauugagc

SEQ ID NO: 52060 - RNA, 20 nt, Artificial Sequence
  LRRK2 RNA guide
aaugucacuucaucacucuc

SEQ ID NO: 52061 - RNA, 20 nt, Artificial Sequence
  LRRK2 RNA guide
acauuuaaauugagcccugg

SEQ ID NO: 52062 - RNA, 20 nt, Artificial Sequence
  LRRK2 RNA guide
acccagggcucaauuuaaau

SEQ ID NO: 52063 - RNA, 20 nt, Artificial Sequence
  LRRK2 RNA guide
agagagugaugaagugacau

SEQ ID NO: 52064 - RNA, 20 nt, Artificial Sequence
  LRRK2 RNA guide
agagugaugaagugacauuu

SEQ ID NO: 52065 - RNA, 20 nt, Artificial Sequence
  LRRK2 RNA guide
agggcucaauuuaaauguca

SEQ ID NO: 52066 - RNA, 20 nt, Artificial Sequence
  LRRK2 RNA guide
agugacauuuaaauugagcc

SEQ ID NO: 52067 - RNA, 20 nt, Artificial Sequence
  LRRK2 RNA guide
agugaugaagugacauuuaa

SEQ ID NO: 52068 - RNA, 20 nt, Artificial Sequence
  LRRK2 RNA guide
auuuaaauugagcccugggu

SEQ ID NO: 52069 - RNA, 20 nt, Artificial Sequence
  LRRK2 RNA guide
cacccagggcucaauuuaaa

SEQ ID NO: 52070 - RNA, 20 nt, Artificial Sequence
  LRRK2 RNA guide
cagggcucaauuuaaauguc

SEQ ID NO: 52071 - RNA, 20 nt, Artificial Sequence
  LRRK2 RNA guide
cauuuaaauugagcccuggg

SEQ ID NO: 52072 - RNA, 20 nt, Artificial Sequence
  LRRK2 RNA guide
ccagggcucaauuuaaaugu

SEQ ID NO: 52073 - RNA, 20 nt, Artificial Sequence
  LRRK2 RNA guide
cccagggcucaauuuaaaug

SEQ ID NO: 52074 - RNA, 20 nt, Artificial Sequence
  LRRK2 RNA guide
cucaauuuaaaugucacuuc

SEQ ID NO: 52075 - RNA, 20 nt, Artificial Sequence
  LRRK2 RNA guide
gaagugacauuuaaauugag

SEQ ID NO: 52076 - RNA, 20 nt, Artificial Sequence
  LRRK2 RNA guide
gacauuuaaauugagcccug

SEQ ID NO: 52077 - RNA, 20 nt, Artificial Sequence
  LRRK2 RNA guide
gagagugaugaagugacauu

SEQ ID NO: 52078 - RNA, 20 nt, Artificial Sequence
  LRRK2 RNA guide
gagugaugaagugacauuua

SEQ ID NO: 52079 - RNA, 20 nt, Artificial Sequence
  LRRK2 RNA guide
gcucaauuuaaaugucacuu

SEQ ID NO: 52080 - RNA, 20 nt, Artificial Sequence
  LRRK2 RNA guide
ggcucaauuuaaaugucacu

SEQ ID NO: 52081 - RNA, 20 nt, Artificial Sequence
  LRRK2 RNA guide
gggcucaauuuaaaugucac

SEQ ID NO: 52082 - RNA, 20 nt, Artificial Sequence
  LRRK2 RNA guide
gugacauuuaaauugagccc

SEQ ID NO: 52083 - RNA, 20 nt, Artificial Sequence
  LRRK2 RNA guide
gugaugaagugacauuuaaa

SEQ ID NO: 52084 - RNA, 20 nt, Artificial Sequence
  LRRK2 RNA guide
uaaaugucacuucaucacuc

SEQ ID NO: 52085 - RNA, 20 nt, Artificial Sequence
  LRRK2 RNA guide
ugacauuuaaauugagcccu

SEQ ID NO: 52086 - RNA, 20 nt, Artificial Sequence
  LRRK2 RNA guide
uuaaaugucacuucaucacu

SEQ ID NO: 52087 - RNA, 20 nt, Artificial Sequence
  LRRK2 RNA guide
uuuaaaugucacuucaucac

SEQ ID NO: 52088 - RNA, 21 nt, Artificial Sequence
  LRRK2 RNA guide
aaaugucacuucaucacucuc

SEQ ID NO: 52089 - RNA, 21 nt, Artificial Sequence
  LRRK2 RNA guide
aagugacauuuaaauugagcc

SEQ ID NO: 52090 - RNA, 21 nt, Artificial Sequence
  LRRK2 RNA guide
aaugucacuucaucacucucu

SEQ ID NO: 52091 - RNA, 21 nt, Artificial Sequence
  LRRK2 RNA guide
acauuuaaauugagcccuggg

SEQ ID NO: 52092 - RNA, 21 nt, Artificial Sequence
  LRRK2 RNA guide
acccagggcucaauuuaaaug

SEQ ID NO: 52093 - RNA, 21 nt, Artificial Sequence
  LRRK2 RNA guide
agagagugaugaagugacauu

SEQ ID NO: 52094 - RNA, 21 nt, Artificial Sequence
  LRRK2 RNA guide
agagugaugaagugacauuua

SEQ ID NO: 52095 - RNA, 21 nt, Artificial Sequence
  LRRK2 RNA guide
agggcucaauuuaaaugucac

SEQ ID NO: 52096 - RNA, 21 nt, Artificial Sequence
  LRRK2 RNA guide
agugacauuuaaauugagccc

SEQ ID NO: 52097 - RNA, 21 nt, Artificial Sequence
  LRRK2 RNA guide
auuuaaauugagcccugggug

SEQ ID NO: 52098 - RNA, 21 nt, Artificial Sequence
  LRRK2 RNA guide
cacccagggcucaauuuaaau

SEQ ID NO: 52099 - RNA, 21 nt, Artificial Sequence
  LRRK2 RNA guide
cagagagugaugaagugacau

SEQ ID NO: 52100 - RNA, 21 nt, Artificial Sequence
  LRRK2 RNA guide
cagggcucaauuuaaauguca

SEQ ID NO: 52101 - RNA, 21 nt, Artificial Sequence
  LRRK2 RNA guide
cauuuaaauugagcccugggu

SEQ ID NO: 52102 - RNA, 21 nt, Artificial Sequence
  LRRK2 RNA guide
ccacccagggcucaauuuaaa

SEQ ID NO: 52103 - RNA, 21 nt, Artificial Sequence
  LRRK2 RNA guide
ccagggcucaauuuaaauguc

SEQ ID NO: 52104 - RNA, 21 nt, Artificial Sequence
  LRRK2 RNA guide
cccagggcucaauuuaaaugu

SEQ ID NO: 52105 - RNA, 21 nt, Artificial Sequence
  LRRK2 RNA guide
gaagugacauuuaaauugagc

SEQ ID NO: 52106 - RNA, 21 nt, Artificial Sequence
  LRRK2 RNA guide
gacauuuaaauugagcccugg

SEQ ID NO: 52107 - RNA, 21 nt, Artificial Sequence
  LRRK2 RNA guide
gagagugaugaagugacauuu

SEQ ID NO: 52108 - RNA, 21 nt, Artificial Sequence
  LRRK2 RNA guide
gagugaugaagugacauuuaa

SEQ ID NO: 52109 - RNA, 21 nt, Artificial Sequence
  LRRK2 RNA guide
gcucaauuuaaaugucacuuc

SEQ ID NO: 52110 - RNA, 21 nt, Artificial Sequence
  LRRK2 RNA guide
ggcucaauuuaaaugucacuu

SEQ ID NO: 52111 - RNA, 21 nt, Artificial Sequence
  LRRK2 RNA guide
gggcucaauuuaaaugucacu

SEQ ID NO: 52112 - RNA, 21 nt, Artificial Sequence
  LRRK2 RNA guide
gugacauuuaaauugagcccu

SEQ ID NO: 52113 - RNA, 21 nt, Artificial Sequence
  LRRK2 RNA guide
uaaaugucacuucaucacucu

SEQ ID NO: 52114 - RNA, 21 nt, Artificial Sequence
  LRRK2 RNA guide
ugacauuuaaauugagcccug

SEQ ID NO: 52115 - RNA, 21 nt, Artificial Sequence
  LRRK2 RNA guide
uuaaaugucacuucaucacuc

SEQ ID NO: 52116 - RNA, 22 nt, Artificial Sequence
  LRRK2 RNA guide
aaaugucacuucaucacucucu

SEQ ID NO: 52117 - RNA, 22 nt, Artificial Sequence
  LRRK2 RNA guide
aagugacauuuaaauugagccc

SEQ ID NO: 52118 - RNA, 22 nt, Artificial Sequence
  LRRK2 RNA guide
aaugucacuucaucacucucug

SEQ ID NO: 52119 - RNA, 22 nt, Artificial Sequence
  LRRK2 RNA guide
acauuuaaauugagcccugggu

SEQ ID NO: 52120 - RNA, 22 nt, Artificial Sequence
  LRRK2 RNA guide
acccagggcucaauuuaaaugu

SEQ ID NO: 52121 - RNA, 22 nt, Artificial Sequence
  LRRK2 RNA guide
agagagugaugaagugacauuu

SEQ ID NO: 52122 - RNA, 22 nt, Artificial Sequence
  LRRK2 RNA guide
agagugaugaagugacauuuaa

SEQ ID NO: 52123 - RNA, 22 nt, Artificial Sequence
  LRRK2 RNA guide
agggcucaauuuaaaugucacu

SEQ ID NO: 52124 - RNA, 22 nt, Artificial Sequence
  LRRK2 RNA guide
agugacauuuaaauugagcccu

SEQ ID NO: 52125 - RNA, 22 nt, Artificial Sequence
  LRRK2 RNA guide
auuuaaauugagcccugggugg

SEQ ID NO: 52126 - RNA, 22 nt, Artificial Sequence
  LRRK2 RNA guide
cacccagggcucaauuuaaaug

SEQ ID NO: 52127 - RNA, 22 nt, Artificial Sequence
  LRRK2 RNA guide
cagagagugaugaagugacauu

SEQ ID NO: 52128 - RNA, 22 nt, Artificial Sequence
  LRRK2 RNA guide
cagggcucaauuuaaaugucac

SEQ ID NO: 52129 - RNA, 22 nt, Artificial Sequence
  LRRK2 RNA guide
cauuuaaauugagcccugggug

SEQ ID NO: 52130 - RNA, 22 nt, Artificial Sequence
  LRRK2 RNA guide
ccacccagggcucaauuuaaau

SEQ ID NO: 52131 - RNA, 22 nt, Artificial Sequence
  LRRK2 RNA guide
ccagggcucaauuuaaauguca

SEQ ID NO: 52132 - RNA, 22 nt, Artificial Sequence
  LRRK2 RNA guide
cccagggcucaauuuaaauguc

SEQ ID NO: 52133 - RNA, 22 nt, Artificial Sequence
  LRRK2 RNA guide
gaagugacauuuaaauugagcc

SEQ ID NO: 52134 - RNA, 22 nt, Artificial Sequence
  LRRK2 RNA guide
gacauuuaaauugagcccuggg

SEQ ID NO: 52135 - RNA, 22 nt, Artificial Sequence
  LRRK2 RNA guide
gagagugaugaagugacauuua

SEQ ID NO: 52136 - RNA, 22 nt, Artificial Sequence
  LRRK2 RNA guide
gagugaugaagugacauuuaaa

SEQ ID NO: 52137 - RNA, 22 nt, Artificial Sequence
  LRRK2 RNA guide
gcagagagugaugaagugacau

SEQ ID NO: 52138 - RNA, 22 nt, Artificial Sequence
  LRRK2 RNA guide
gccacccagggcucaauuuaaa

SEQ ID NO: 52139 - RNA, 22 nt, Artificial Sequence
  LRRK2 RNA guide
gcucaauuuaaaugucacuuca

SEQ ID NO: 52140 - RNA, 22 nt, Artificial Sequence
  LRRK2 RNA guide
ggcucaauuuaaaugucacuuc

SEQ ID NO: 52141 - RNA, 22 nt, Artificial Sequence
  LRRK2 RNA guide
gggcucaauuuaaaugucacuu

SEQ ID NO: 52142 - RNA, 22 nt, Artificial Sequence
  LRRK2 RNA guide
gugacauuuaaauugagcccug

SEQ ID NO: 52143 - RNA, 22 nt, Artificial Sequence
  LRRK2 RNA guide
uaaaugucacuucaucacucuc

SEQ ID NO: 52144 - RNA, 22 nt, Artificial Sequence
  LRRK2 RNA guide
ugaagugacauuuaaauugagc

SEQ ID NO: 52145 - RNA, 22 nt, Artificial Sequence
  LRRK2 RNA guide
ugacauuuaaauugagcccugg

SEQ ID NO: 52146 - RNA, 22 nt, Artificial Sequence
  LRRK2 RNA guide
uuaaaugucacuucaucacucu

SEQ ID NO: 52147 - RNA, 22 nt, Artificial Sequence
  LRRK2 RNA guide
uuuaaaugucacuucaucacuc

SEQ ID NO: 52148 - RNA, 20 nt, Artificial Sequence
  LRRK2 RNA guide
aaacaaguccuguccucaaa

SEQ ID NO: 52149 - RNA, 20 nt, Artificial Sequence
  LRRK2 RNA guide
aaagaguucacagucuagug

SEQ ID NO: 52150 - RNA, 20 nt, Artificial Sequence
  LRRK2 RNA guide
aacucuuugaggacaggacu

SEQ ID NO: 52151 - RNA, 20 nt, Artificial Sequence
  LRRK2 RNA guide
aagaguucacagucuagugg

SEQ ID NO: 52152 - RNA, 20 nt, Artificial Sequence
  LRRK2 RNA guide
acaaguccuguccucaaaga

SEQ ID NO: 52153 - RNA, 20 nt, Artificial Sequence
  LRRK2 RNA guide
acuagacugugaacucuuug

SEQ ID NO: 52154 - RNA, 20 nt, Artificial Sequence
  LRRK2 RNA guide
acucuuugaggacaggacuu

SEQ ID NO: 52155 - RNA, 20 nt, Artificial Sequence
  LRRK2 RNA guide
acugugaacucuuugaggac

SEQ ID NO: 52156 - RNA, 20 nt, Artificial Sequence
  LRRK2 RNA guide
agacugugaacucuuugagg

SEQ ID NO: 52157 - RNA, 20 nt, Artificial Sequence
  LRRK2 RNA guide
agaguucacagucuaguggg

SEQ ID NO: 52158 - RNA, 20 nt, Artificial Sequence
  LRRK2 RNA guide
aguccuguccucaaagaguu

SEQ ID NO: 52159 - RNA, 20 nt, Artificial Sequence
  LRRK2 RNA guide
caaagaguucacagucuagu

SEQ ID NO: 52160 - RNA, 20 nt, Artificial Sequence
  LRRK2 RNA guide
caaguccuguccucaaagag

SEQ ID NO: 52161 - RNA, 20 nt, Artificial Sequence
  LRRK2 RNA guide
cacuagacugugaacucuuu

SEQ ID NO: 52162 - RNA, 20 nt, Artificial Sequence
  LRRK2 RNA guide
ccacuagacugugaacucuu

SEQ ID NO: 52163 - RNA, 20 nt, Artificial Sequence
  LRRK2 RNA guide
cccacuagacugugaacucu

SEQ ID NO: 52164 - RNA, 20 nt, Artificial Sequence
  LRRK2 RNA guide
ccccacuagacugugaacuc

SEQ ID NO: 52165 - RNA, 20 nt, Artificial Sequence
  LRRK2 RNA guide
cccccacuagacugugaacu

SEQ ID NO: 52166 - RNA, 20 nt, Artificial Sequence
  LRRK2 RNA guide
ccucaaagaguucacagucu

SEQ ID NO: 52167 - RNA, 20 nt, Artificial Sequence
  LRRK2 RNA guide
ccugaaacaaguccuguccu

SEQ ID NO: 52168 - RNA, 20 nt, Artificial Sequence
  LRRK2 RNA guide
ccuguccucaaagaguucac

SEQ ID NO: 52169 - RNA, 20 nt, Artificial Sequence
  LRRK2 RNA guide
cuagacugugaacucuuuga

SEQ ID NO: 52170 - RNA, 20 nt, Artificial Sequence
  LRRK2 RNA guide
cucaaagaguucacagucua

SEQ ID NO: 52171 - RNA, 20 nt, Artificial Sequence
  LRRK2 RNA guide
cucuuugaggacaggacuug

SEQ ID NO: 52172 - RNA, 20 nt, Artificial Sequence
  LRRK2 RNA guide
cugaaacaaguccuguccuc

SEQ ID NO: 52173 - RNA, 20 nt, Artificial Sequence
  LRRK2 RNA guide
cuguccucaaagaguucaca

SEQ ID NO: 52174 - RNA, 20 nt, Artificial Sequence
  LRRK2 RNA guide
cugugaacucuuugaggaca

SEQ ID NO: 52175 - RNA, 20 nt, Artificial Sequence
  LRRK2 RNA guide
gaaacaaguccuguccucaa

SEQ ID NO: 52176 - RNA, 20 nt, Artificial Sequence
  LRRK2 RNA guide
gaacucuuugaggacaggac

SEQ ID NO: 52177 - RNA, 20 nt, Artificial Sequence
  LRRK2 RNA guide
gacugugaacucuuugagga

SEQ ID NO: 52178 - RNA, 20 nt, Artificial Sequence
  LRRK2 RNA guide
gcccccacuagacugugaac

SEQ ID NO: 52179 - RNA, 20 nt, Artificial Sequence
  LRRK2 RNA guide
guccucaaagaguucacagu

SEQ ID NO: 52180 - RNA, 20 nt, Artificial Sequence
  LRRK2 RNA guide
guccuguccucaaagaguuc

SEQ ID NO: 52181 - RNA, 20 nt, Artificial Sequence
  LRRK2 RNA guide
gugaacucuuugaggacagg

SEQ ID NO: 52182 - RNA, 20 nt, Artificial Sequence
  LRRK2 RNA guide
uagacugugaacucuuugag

SEQ ID NO: 52183 - RNA, 20 nt, Artificial Sequence
  LRRK2 RNA guide
ucaaagaguucacagucuag

SEQ ID NO: 52184 - RNA, 20 nt, Artificial Sequence
  LRRK2 RNA guide
uccucaaagaguucacaguc

SEQ ID NO: 52185 - RNA, 20 nt, Artificial Sequence
  LRRK2 RNA guide
uccuguccucaaagaguuca

SEQ ID NO: 52186 - RNA, 20 nt, Artificial Sequence
  LRRK2 RNA guide
ucuuugaggacaggacuugu

SEQ ID NO: 52187 - RNA, 20 nt, Artificial Sequence
  LRRK2 RNA guide
ugaaacaaguccuguccuca

SEQ ID NO: 52188 - RNA, 20 nt, Artificial Sequence
  LRRK2 RNA guide
ugaacucuuugaggacagga

SEQ ID NO: 52189 - RNA, 20 nt, Artificial Sequence
  LRRK2 RNA guide
ugcccccacuagacugugaa

SEQ ID NO: 52190 - RNA, 20 nt, Artificial Sequence
  LRRK2 RNA guide
uguccucaaagaguucacag

SEQ ID NO: 52191 - RNA, 20 nt, Artificial Sequence
  LRRK2 RNA guide
ugugaacucuuugaggacag

SEQ ID NO: 52192 - RNA, 20 nt, Artificial Sequence
  LRRK2 RNA guide
uugcccccacuagacuguga

SEQ ID NO: 52193 - RNA, 20 nt, Artificial Sequence
  LRRK2 RNA guide
uuugcccccacuagacugug

SEQ ID NO: 52194 - RNA, 21 nt, Artificial Sequence
  LRRK2 RNA guide
aaacaaguccuguccucaaag

SEQ ID NO: 52195 - RNA, 21 nt, Artificial Sequence
  LRRK2 RNA guide
aaagaguucacagucuagugg

SEQ ID NO: 52196 - RNA, 21 nt, Artificial Sequence
  LRRK2 RNA guide
aacaaguccuguccucaaaga

SEQ ID NO: 52197 - RNA, 21 nt, Artificial Sequence
  LRRK2 RNA guide
aacucuuugaggacaggacuu

SEQ ID NO: 52198 - RNA, 21 nt, Artificial Sequence
  LRRK2 RNA guide
aagaguucacagucuaguggg

SEQ ID NO: 52199 - RNA, 21 nt, Artificial Sequence
  LRRK2 RNA guide
aaguccuguccucaaagaguu

SEQ ID NO: 52200 - RNA, 21 nt, Artificial Sequence
  LRRK2 RNA guide
acaaguccuguccucaaagag

SEQ ID NO: 52201 - RNA, 21 nt, Artificial Sequence
  LRRK2 RNA guide
acuagacugugaacucuuuga

SEQ ID NO: 52202 - RNA, 21 nt, Artificial Sequence
  LRRK2 RNA guide
acucuuugaggacaggacuug

SEQ ID NO: 52203 - RNA, 21 nt, Artificial Sequence
  LRRK2 RNA guide
acugugaacucuuugaggaca

SEQ ID NO: 52204 - RNA, 21 nt, Artificial Sequence
  LRRK2 RNA guide
agacugugaacucuuugagga

SEQ ID NO: 52205 - RNA, 21 nt, Artificial Sequence
  LRRK2 RNA guide
agaguucacagucuagugggg

SEQ ID NO: 52206 - RNA, 21 nt, Artificial Sequence
  LRRK2 RNA guide
aguccuguccucaaagaguuc

SEQ ID NO: 52207 - RNA, 21 nt, Artificial Sequence
  LRRK2 RNA guide
caaagaguucacagucuagug

SEQ ID NO: 52208 - RNA, 21 nt, Artificial Sequence
  LRRK2 RNA guide
caaguccuguccucaaagagu

SEQ ID NO: 52209 - RNA, 21 nt, Artificial Sequence
  LRRK2 RNA guide
cacuagacugugaacucuuug

SEQ ID NO: 52210 - RNA, 21 nt, Artificial Sequence
  LRRK2 RNA guide
ccacuagacugugaacucuuu

SEQ ID NO: 52211 - RNA, 21 nt, Artificial Sequence
  LRRK2 RNA guide
cccacuagacugugaacucuu

SEQ ID NO: 52212 - RNA, 21 nt, Artificial Sequence
  LRRK2 RNA guide
ccccacuagacugugaacucu

SEQ ID NO: 52213 - RNA, 21 nt, Artificial Sequence
  LRRK2 RNA guide
cccccacuagacugugaacuc

SEQ ID NO: 52214 - RNA, 21 nt, Artificial Sequence
  LRRK2 RNA guide
ccucaaagaguucacagucua

SEQ ID NO: 52215 - RNA, 21 nt, Artificial Sequence
  LRRK2 RNA guide
ccugaaacaaguccuguccuc

SEQ ID NO: 52216 - RNA, 21 nt, Artificial Sequence
  LRRK2 RNA guide
ccuguccucaaagaguucaca

SEQ ID NO: 52217 - RNA, 21 nt, Artificial Sequence
  LRRK2 RNA guide
cuagacugugaacucuuugag

SEQ ID NO: 52218 - RNA, 21 nt, Artificial Sequence
  LRRK2 RNA guide
cucaaagaguucacagucuag

SEQ ID NO: 52219 - RNA, 21 nt, Artificial Sequence
  LRRK2 RNA guide
cucuuugaggacaggacuugu

SEQ ID NO: 52220 - RNA, 21 nt, Artificial Sequence
  LRRK2 RNA guide
cugaaacaaguccuguccuca

SEQ ID NO: 52221 - RNA, 21 nt, Artificial Sequence
  LRRK2 RNA guide
cuguccucaaagaguucacag

SEQ ID NO: 52222 - RNA, 21 nt, Artificial Sequence
  LRRK2 RNA guide
cugugaacucuuugaggacag

SEQ ID NO: 52223 - RNA, 21 nt, Artificial Sequence
  LRRK2 RNA guide
cuuugcccccacuagacugug

SEQ ID NO: 52224 - RNA, 21 nt, Artificial Sequence
  LRRK2 RNA guide
gaaacaaguccuguccucaaa

SEQ ID NO: 52225 - RNA, 21 nt, Artificial Sequence
  LRRK2 RNA guide
gaacucuuugaggacaggacu

SEQ ID NO: 52226 - RNA, 21 nt, Artificial Sequence
  LRRK2 RNA guide
gacugugaacucuuugaggac

SEQ ID NO: 52227 - RNA, 21 nt, Artificial Sequence
  LRRK2 RNA guide
gcccccacuagacugugaacu

SEQ ID NO: 52228 - RNA, 21 nt, Artificial Sequence
  LRRK2 RNA guide
gccugaaacaaguccuguccu

SEQ ID NO: 52229 - RNA, 21 nt, Artificial Sequence
  LRRK2 RNA guide
guccucaaagaguucacaguc

SEQ ID NO: 52230 - RNA, 21 nt, Artificial Sequence
  LRRK2 RNA guide
guccuguccucaaagaguuca

SEQ ID NO: 52231 - RNA, 21 nt, Artificial Sequence
  LRRK2 RNA guide
gugaacucuuugaggacagga

SEQ ID NO: 52232 - RNA, 21 nt, Artificial Sequence
  LRRK2 RNA guide
uagacugugaacucuuugagg

SEQ ID NO: 52233 - RNA, 21 nt, Artificial Sequence
  LRRK2 RNA guide
ucaaagaguucacagucuagu

SEQ ID NO: 52234 - RNA, 21 nt, Artificial Sequence
  LRRK2 RNA guide
uccucaaagaguucacagucu

SEQ ID NO: 52235 - RNA, 21 nt, Artificial Sequence
  LRRK2 RNA guide
uccuguccucaaagaguucac

SEQ ID NO: 52236 - RNA, 21 nt, Artificial Sequence
  LRRK2 RNA guide
ucuuugaggacaggacuuguu

SEQ ID NO: 52237 - RNA, 21 nt, Artificial Sequence
  LRRK2 RNA guide
ugaaacaaguccuguccucaa

SEQ ID NO: 52238 - RNA, 21 nt, Artificial Sequence
  LRRK2 RNA guide
ugaacucuuugaggacaggac

SEQ ID NO: 52239 - RNA, 21 nt, Artificial Sequence
  LRRK2 RNA guide
ugcccccacuagacugugaac

SEQ ID NO: 52240 - RNA, 21 nt, Artificial Sequence
  LRRK2 RNA guide
uguccucaaagaguucacagu

SEQ ID NO: 52241 - RNA, 21 nt, Artificial Sequence
  LRRK2 RNA guide
ugugaacucuuugaggacagg

SEQ ID NO: 52242 - RNA, 21 nt, Artificial Sequence
  LRRK2 RNA guide
uugcccccacuagacugugaa

SEQ ID NO: 52243 - RNA, 21 nt, Artificial Sequence
  LRRK2 RNA guide
uuugcccccacuagacuguga

SEQ ID NO: 52244 - RNA, 22 nt, Artificial Sequence
  LRRK2 RNA guide
aaacaaguccuguccucaaaga

SEQ ID NO: 52245 - RNA, 22 nt, Artificial Sequence
  LRRK2 RNA guide
aaagaguucacagucuaguggg

SEQ ID NO: 52246 - RNA, 22 nt, Artificial Sequence
  LRRK2 RNA guide
aacaaguccuguccucaaagag

SEQ ID NO: 52247 - RNA, 22 nt, Artificial Sequence
  LRRK2 RNA guide
aacucuuugaggacaggacuug

SEQ ID NO: 52248 - RNA, 22 nt, Artificial Sequence
  LRRK2 RNA guide
aagaguucacagucuagugggg

SEQ ID NO: 52249 - RNA, 22 nt, Artificial Sequence
  LRRK2 RNA guide
aaguccuguccucaaagaguuc

SEQ ID NO: 52250 - RNA, 22 nt, Artificial Sequence
  LRRK2 RNA guide
acaaguccuguccucaaagagu

SEQ ID NO: 52251 - RNA, 22 nt, Artificial Sequence
  LRRK2 RNA guide
acuagacugugaacucuuugag

SEQ ID NO: 52252 - RNA, 22 nt, Artificial Sequence
  LRRK2 RNA guide
acucuuugaggacaggacuugu

SEQ ID NO: 52253 - RNA, 22 nt, Artificial Sequence
  LRRK2 RNA guide
acugugaacucuuugaggacag

SEQ ID NO: 52254 - RNA, 22 nt, Artificial Sequence
  LRRK2 RNA guide
agacugugaacucuuugaggac

SEQ ID NO: 52255 - RNA, 22 nt, Artificial Sequence
  LRRK2 RNA guide
agaguucacagucuaguggggg

SEQ ID NO: 52256 - RNA, 22 nt, Artificial Sequence
  LRRK2 RNA guide
agccugaaacaaguccuguccu

SEQ ID NO: 52257 - RNA, 22 nt, Artificial Sequence
  LRRK2 RNA guide
aguccuguccucaaagaguuca

SEQ ID NO: 52258 - RNA, 22 nt, Artificial Sequence
  LRRK2 RNA guide
caaagaguucacagucuagugg

SEQ ID NO: 52259 - RNA, 22 nt, Artificial Sequence
  LRRK2 RNA guide
caaguccuguccucaaagaguu

SEQ ID NO: 52260 - RNA, 22 nt, Artificial Sequence
  LRRK2 RNA guide
cacuagacugugaacucuuuga

SEQ ID NO: 52261 - RNA, 22 nt, Artificial Sequence
  LRRK2 RNA guide
ccacuagacugugaacucuuug

SEQ ID NO: 52262 - RNA, 22 nt, Artificial Sequence
  LRRK2 RNA guide
cccacuagacugugaacucuuu

SEQ ID NO: 52263 - RNA, 22 nt, Artificial Sequence
  LRRK2 RNA guide
ccccacuagacugugaacucuu

SEQ ID NO: 52264 - RNA, 22 nt, Artificial Sequence
  LRRK2 RNA guide
cccccacuagacugugaacucu

SEQ ID NO: 52265 - RNA, 22 nt, Artificial Sequence
  LRRK2 RNA guide
ccucaaagaguucacagucuag

SEQ ID NO: 52266 - RNA, 22 nt, Artificial Sequence
  LRRK2 RNA guide
ccugaaacaaguccuguccuca

SEQ ID NO: 52267 - RNA, 22 nt, Artificial Sequence
  LRRK2 RNA guide
ccuguccucaaagaguucacag

SEQ ID NO: 52268 - RNA, 22 nt, Artificial Sequence
  LRRK2 RNA guide
ccuuugcccccacuagacugug

SEQ ID NO: 52269 - RNA, 22 nt, Artificial Sequence
  LRRK2 RNA guide
cuagacugugaacucuuugagg

SEQ ID NO: 52270 - RNA, 22 nt, Artificial Sequence
  LRRK2 RNA guide
cucaaagaguucacagucuagu

SEQ ID NO: 52271 - RNA, 22 nt, Artificial Sequence
  LRRK2 RNA guide
cucuuugaggacaggacuuguu

SEQ ID NO: 52272 - RNA, 22 nt, Artificial Sequence
  LRRK2 RNA guide
cugaaacaaguccuguccucaa

SEQ ID NO: 52273 - RNA, 22 nt, Artificial Sequence
  LRRK2 RNA guide
cuguccucaaagaguucacagu

SEQ ID NO: 52274 - RNA, 22 nt, Artificial Sequence
  LRRK2 RNA guide
cugugaacucuuugaggacagg

SEQ ID NO: 52275 - RNA, 22 nt, Artificial Sequence
  LRRK2 RNA guide
cuuugcccccacuagacuguga

SEQ ID NO: 52276 - RNA, 22 nt, Artificial Sequence
  LRRK2 RNA guide
gaaacaaguccuguccucaaag

SEQ ID NO: 52277 - RNA, 22 nt, Artificial Sequence
  LRRK2 RNA guide
gaacucuuugaggacaggacuu

SEQ ID NO: 52278 - RNA, 22 nt, Artificial Sequence
  LRRK2 RNA guide
gacugugaacucuuugaggaca

SEQ ID NO: 52279 - RNA, 22 nt, Artificial Sequence
  LRRK2 RNA guide
gcccccacuagacugugaacuc

SEQ ID NO: 52280 - RNA, 22 nt, Artificial Sequence
  LRRK2 RNA guide
gccugaaacaaguccuguccuc

SEQ ID NO: 52281 - RNA, 22 nt, Artificial Sequence
  LRRK2 RNA guide
guccucaaagaguucacagucu

SEQ ID NO: 52282 - RNA, 22 nt, Artificial Sequence
  LRRK2 RNA guide
guccuguccucaaagaguucac

SEQ ID NO: 52283 - RNA, 22 nt, Artificial Sequence
  LRRK2 RNA guide
gugaacucuuugaggacaggac

SEQ ID NO: 52284 - RNA, 22 nt, Artificial Sequence
  LRRK2 RNA guide
uagacugugaacucuuugagga

SEQ ID NO: 52285 - RNA, 22 nt, Artificial Sequence
  LRRK2 RNA guide
ucaaagaguucacagucuagug

SEQ ID NO: 52286 - RNA, 22 nt, Artificial Sequence
  LRRK2 RNA guide
uccucaaagaguucacagucua

SEQ ID NO: 52287 - RNA, 22 nt, Artificial Sequence
  LRRK2 RNA guide
uccuguccucaaagaguucaca

SEQ ID NO: 52288 - RNA, 22 nt, Artificial Sequence
  LRRK2 RNA guide
ucuuugaggacaggacuuguuu

SEQ ID NO: 52289 - RNA, 22 nt, Artificial Sequence
  LRRK2 RNA guide
ugaaacaaguccuguccucaaa

SEQ ID NO: 52290 - RNA, 22 nt, Artificial Sequence
  LRRK2 RNA guide
ugaacucuuugaggacaggacu

SEQ ID NO: 52291 - RNA, 22 nt, Artificial Sequence
  LRRK2 RNA guide
ugcccccacuagacugugaacu

SEQ ID NO: 52292 - RNA, 22 nt, Artificial Sequence
  LRRK2 RNA guide
uguccucaaagaguucacaguc

SEQ ID NO: 52293 - RNA, 22 nt, Artificial Sequence
  LRRK2 RNA guide
ugugaacucuuugaggacagga

SEQ ID NO: 52294 - RNA, 22 nt, Artificial Sequence
  LRRK2 RNA guide
uugcccccacuagacugugaac

SEQ ID NO: 52295 - RNA, 22 nt, Artificial Sequence
  LRRK2 RNA guide
uuugcccccacuagacugugaa

SEQ ID NO: 52296 - RNA, 20 nt, Artificial Sequence
  LRRK2 RNA guide
aaacaaguccuguccucaga

SEQ ID NO: 52297 - RNA, 20 nt, Artificial Sequence
  LRRK2 RNA guide
aacaaguccuguccucagag

SEQ ID NO: 52298 - RNA, 20 nt, Artificial Sequence
  LRRK2 RNA guide
aacucugaggacaggacuug

SEQ ID NO: 52299 - RNA, 20 nt, Artificial Sequence
  LRRK2 RNA guide
aaguccuguccucagaguuc

SEQ ID NO: 52300 - RNA, 20 nt, Artificial Sequence
  LRRK2 RNA guide
acaaguccuguccucagagu

SEQ ID NO: 52301 - RNA, 20 nt, Artificial Sequence
  LRRK2 RNA guide
acuagacugugaacucugag

SEQ ID NO: 52302 - RNA, 20 nt, Artificial Sequence
  LRRK2 RNA guide
acucugaggacaggacuugu

SEQ ID NO: 52303 - RNA, 20 nt, Artificial Sequence
  LRRK2 RNA guide
acugugaacucugaggacag

SEQ ID NO: 52304 - RNA, 20 nt, Artificial Sequence
  LRRK2 RNA guide
agacugugaacucugaggac

SEQ ID NO: 52305 - RNA, 20 nt, Artificial Sequence
  LRRK2 RNA guide
agccugaaacaaguccuguc

SEQ ID NO: 52306 - RNA, 20 nt, Artificial Sequence
  LRRK2 RNA guide
aguccuguccucagaguuca

SEQ ID NO: 52307 - RNA, 20 nt, Artificial Sequence
  LRRK2 RNA guide
caaguccuguccucagaguu

SEQ ID NO: 52308 - RNA, 20 nt, Artificial Sequence
  LRRK2 RNA guide
cacuagacugugaacucuga

SEQ ID NO: 52309 - RNA, 20 nt, Artificial Sequence
  LRRK2 RNA guide
cagaguucacagucuagugg

SEQ ID NO: 52310 - RNA, 20 nt, Artificial Sequence
  LRRK2 RNA guide
ccacuagacugugaacucug

SEQ ID NO: 52311 - RNA, 20 nt, Artificial Sequence
  LRRK2 RNA guide
ccucagaguucacagucuag

SEQ ID NO: 52312 - RNA, 20 nt, Artificial Sequence
  LRRK2 RNA guide
ccuguccucagaguucacag

SEQ ID NO: 52313 - RNA, 20 nt, Artificial Sequence
  LRRK2 RNA guide
cuagacugugaacucugagg

SEQ ID NO: 52314 - RNA, 20 nt, Artificial Sequence
  LRRK2 RNA guide
cucagaguucacagucuagu

SEQ ID NO: 52315 - RNA, 20 nt, Artificial Sequence
  LRRK2 RNA guide
cucugaggacaggacuuguu

SEQ ID NO: 52316 - RNA, 20 nt, Artificial Sequence
  LRRK2 RNA guide
cuguccucagaguucacagu

SEQ ID NO: 52317 - RNA, 20 nt, Artificial Sequence
  LRRK2 RNA guide
cugugaacucugaggacagg

SEQ ID NO: 52318 - RNA, 20 nt, Artificial Sequence
  LRRK2 RNA guide
gaaacaaguccuguccucag

SEQ ID NO: 52319 - RNA, 20 nt, Artificial Sequence
  LRRK2 RNA guide
gaacucugaggacaggacuu

SEQ ID NO: 52320 - RNA, 20 nt, Artificial Sequence
  LRRK2 RNA guide
gacugugaacucugaggaca

SEQ ID NO: 52321 - RNA, 20 nt, Artificial Sequence
  LRRK2 RNA guide
gccugaaacaaguccugucc

SEQ ID NO: 52322 - RNA, 20 nt, Artificial Sequence
  LRRK2 RNA guide
guccucagaguucacagucu

SEQ ID NO: 52323 - RNA, 20 nt, Artificial Sequence
  LRRK2 RNA guide
guccuguccucagaguucac

SEQ ID NO: 52324 - RNA, 20 nt, Artificial Sequence
  LRRK2 RNA guide
gugaacucugaggacaggac

SEQ ID NO: 52325 - RNA, 20 nt, Artificial Sequence
  LRRK2 RNA guide
uagacugugaacucugagga

SEQ ID NO: 52326 - RNA, 20 nt, Artificial Sequence
  LRRK2 RNA guide
ucagaguucacagucuagug

SEQ ID NO: 52327 - RNA, 20 nt, Artificial Sequence
  LRRK2 RNA guide
uccucagaguucacagucua

SEQ ID NO: 52328 - RNA, 20 nt, Artificial Sequence
  LRRK2 RNA guide
uccuguccucagaguucaca

SEQ ID NO: 52329 - RNA, 20 nt, Artificial Sequence
  LRRK2 RNA guide
ucugaggacaggacuuguuu

SEQ ID NO: 52330 - RNA, 20 nt, Artificial Sequence
  LRRK2 RNA guide
ugaacucugaggacaggacu

SEQ ID NO: 52331 - RNA, 20 nt, Artificial Sequence
  LRRK2 RNA guide
uguccucagaguucacaguc

SEQ ID NO: 52332 - RNA, 20 nt, Artificial Sequence
  LRRK2 RNA guide
ugugaacucugaggacagga

SEQ ID NO: 52333 - RNA, 21 nt, Artificial Sequence
  LRRK2 RNA guide
aaacaaguccuguccucagag

SEQ ID NO: 52334 - RNA, 21 nt, Artificial Sequence
  LRRK2 RNA guide
aacaaguccuguccucagagu

SEQ ID NO: 52335 - RNA, 21 nt, Artificial Sequence
  LRRK2 RNA guide
aacucugaggacaggacuugu

SEQ ID NO: 52336 - RNA, 21 nt, Artificial Sequence
  LRRK2 RNA guide
aagccugaaacaaguccuguc

SEQ ID NO: 52337 - RNA, 21 nt, Artificial Sequence
  LRRK2 RNA guide
aaguccuguccucagaguuca

SEQ ID NO: 52338 - RNA, 21 nt, Artificial Sequence
  LRRK2 RNA guide
acaaguccuguccucagaguu

SEQ ID NO: 52339 - RNA, 21 nt, Artificial Sequence
  LRRK2 RNA guide
acuagacugugaacucugagg

SEQ ID NO: 52340 - RNA, 21 nt, Artificial Sequence
  LRRK2 RNA guide
acucugaggacaggacuuguu

SEQ ID NO: 52341 - RNA, 21 nt, Artificial Sequence
  LRRK2 RNA guide
acugugaacucugaggacagg

SEQ ID NO: 52342 - RNA, 21 nt, Artificial Sequence
  LRRK2 RNA guide
agacugugaacucugaggaca

SEQ ID NO: 52343 - RNA, 21 nt, Artificial Sequence
  LRRK2 RNA guide
agccugaaacaaguccugucc

SEQ ID NO: 52344 - RNA, 21 nt, Artificial Sequence
  LRRK2 RNA guide
aguccuguccucagaguucac

SEQ ID NO: 52345 - RNA, 21 nt, Artificial Sequence
  LRRK2 RNA guide
caaguccuguccucagaguuc

SEQ ID NO: 52346 - RNA, 21 nt, Artificial Sequence
  LRRK2 RNA guide
cacuagacugugaacucugag

SEQ ID NO: 52347 - RNA, 21 nt, Artificial Sequence
  LRRK2 RNA guide
cagaguucacagucuaguggg

SEQ ID NO: 52348 - RNA, 21 nt, Artificial Sequence
  LRRK2 RNA guide
ccacuagacugugaacucuga

SEQ ID NO: 52349 - RNA, 21 nt, Artificial Sequence
  LRRK2 RNA guide
cccacuagacugugaacucug

SEQ ID NO: 52350 - RNA, 21 nt, Artificial Sequence
  LRRK2 RNA guide
ccucagaguucacagucuagu

SEQ ID NO: 52351 - RNA, 21 nt, Artificial Sequence
  LRRK2 RNA guide
ccuguccucagaguucacagu

SEQ ID NO: 52352 - RNA, 21 nt, Artificial Sequence
  LRRK2 RNA guide
cuagacugugaacucugagga

SEQ ID NO: 52353 - RNA, 21 nt, Artificial Sequence
  LRRK2 RNA guide
cucagaguucacagucuagug

SEQ ID NO: 52354 - RNA, 21 nt, Artificial Sequence
  LRRK2 RNA guide
cucugaggacaggacuuguuu

SEQ ID NO: 52355 - RNA, 21 nt, Artificial Sequence
  LRRK2 RNA guide
cuguccucagaguucacaguc

SEQ ID NO: 52356 - RNA, 21 nt, Artificial Sequence
  LRRK2 RNA guide
cugugaacucugaggacagga

SEQ ID NO: 52357 - RNA, 21 nt, Artificial Sequence
  LRRK2 RNA guide
gaaacaaguccuguccucaga

SEQ ID NO: 52358 - RNA, 21 nt, Artificial Sequence
  LRRK2 RNA guide
gaacucugaggacaggacuug

SEQ ID NO: 52359 - RNA, 21 nt, Artificial Sequence
  LRRK2 RNA guide
gacugugaacucugaggacag

SEQ ID NO: 52360 - RNA, 21 nt, Artificial Sequence
  LRRK2 RNA guide
guccucagaguucacagucua

SEQ ID NO: 52361 - RNA, 21 nt, Artificial Sequence
  LRRK2 RNA guide
guccuguccucagaguucaca

SEQ ID NO: 52362 - RNA, 21 nt, Artificial Sequence
  LRRK2 RNA guide
gugaacucugaggacaggacu

SEQ ID NO: 52363 - RNA, 21 nt, Artificial Sequence
  LRRK2 RNA guide
uagacugugaacucugaggac

SEQ ID NO: 52364 - RNA, 21 nt, Artificial Sequence
  LRRK2 RNA guide
ucagaguucacagucuagugg

SEQ ID NO: 52365 - RNA, 21 nt, Artificial Sequence
  LRRK2 RNA guide
uccucagaguucacagucuag

SEQ ID NO: 52366 - RNA, 21 nt, Artificial Sequence
  LRRK2 RNA guide
uccuguccucagaguucacag

SEQ ID NO: 52367 - RNA, 21 nt, Artificial Sequence
  LRRK2 RNA guide
ucugaggacaggacuuguuuc

SEQ ID NO: 52368 - RNA, 21 nt, Artificial Sequence
  LRRK2 RNA guide
ugaaacaaguccuguccucag

SEQ ID NO: 52369 - RNA, 21 nt, Artificial Sequence
  LRRK2 RNA guide
ugaacucugaggacaggacuu

SEQ ID NO: 52370 - RNA, 21 nt, Artificial Sequence
  LRRK2 RNA guide
uguccucagaguucacagucu

SEQ ID NO: 52371 - RNA, 21 nt, Artificial Sequence
  LRRK2 RNA guide
ugugaacucugaggacaggac

SEQ ID NO: 52372 - RNA, 22 nt, Artificial Sequence
  LRRK2 RNA guide
aaacaaguccuguccucagagu

SEQ ID NO: 52373 - RNA, 22 nt, Artificial Sequence
  LRRK2 RNA guide
aacaaguccuguccucagaguu

SEQ ID NO: 52374 - RNA, 22 nt, Artificial Sequence
  LRRK2 RNA guide
aacucugaggacaggacuuguu

SEQ ID NO: 52375 - RNA, 22 nt, Artificial Sequence
  LRRK2 RNA guide
aagccugaaacaaguccugucc

SEQ ID NO: 52376 - RNA, 22 nt, Artificial Sequence
  LRRK2 RNA guide
aaguccuguccucagaguucac

SEQ ID NO: 52377 - RNA, 22 nt, Artificial Sequence
  LRRK2 RNA guide
acaaguccuguccucagaguuc

SEQ ID NO: 52378 - RNA, 22 nt, Artificial Sequence
  LRRK2 RNA guide
acuagacugugaacucugagga

SEQ ID NO: 52379 - RNA, 22 nt, Artificial Sequence
  LRRK2 RNA guide
acucugaggacaggacuuguuu

SEQ ID NO: 52380 - RNA, 22 nt, Artificial Sequence
  LRRK2 RNA guide
acugugaacucugaggacagga

SEQ ID NO: 52381 - RNA, 22 nt, Artificial Sequence
  LRRK2 RNA guide
agacugugaacucugaggacag

SEQ ID NO: 52382 - RNA, 22 nt, Artificial Sequence
  LRRK2 RNA guide
aguccuguccucagaguucaca

SEQ ID NO: 52383 - RNA, 22 nt, Artificial Sequence
  LRRK2 RNA guide
caagccugaaacaaguccuguc

SEQ ID NO: 52384 - RNA, 22 nt, Artificial Sequence
  LRRK2 RNA guide
caaguccuguccucagaguuca

SEQ ID NO: 52385 - RNA, 22 nt, Artificial Sequence
  LRRK2 RNA guide
cacuagacugugaacucugagg

SEQ ID NO: 52386 - RNA, 22 nt, Artificial Sequence
  LRRK2 RNA guide
cagaguucacagucuagugggg

SEQ ID NO: 52387 - RNA, 22 nt, Artificial Sequence
  LRRK2 RNA guide
ccacuagacugugaacucugag

SEQ ID NO: 52388 - RNA, 22 nt, Artificial Sequence
  LRRK2 RNA guide
cccacuagacugugaacucuga

SEQ ID NO: 52389 - RNA, 22 nt, Artificial Sequence
  LRRK2 RNA guide
ccccacuagacugugaacucug

SEQ ID NO: 52390 - RNA, 22 nt, Artificial Sequence
  LRRK2 RNA guide
ccucagaguucacagucuagug

SEQ ID NO: 52391 - RNA, 22 nt, Artificial Sequence
  LRRK2 RNA guide
ccuguccucagaguucacaguc

SEQ ID NO: 52392 - RNA, 22 nt, Artificial Sequence
  LRRK2 RNA guide
cuagacugugaacucugaggac

SEQ ID NO: 52393 - RNA, 22 nt, Artificial Sequence
  LRRK2 RNA guide
cucagaguucacagucuagugg

SEQ ID NO: 52394 - RNA, 22 nt, Artificial Sequence
  LRRK2 RNA guide
cucugaggacaggacuuguuuc

SEQ ID NO: 52395 - RNA, 22 nt, Artificial Sequence
  LRRK2 RNA guide
cugaaacaaguccuguccucag

SEQ ID NO: 52396 - RNA, 22 nt, Artificial Sequence
  LRRK2 RNA guide
cuguccucagaguucacagucu

SEQ ID NO: 52397 - RNA, 22 nt, Artificial Sequence
  LRRK2 RNA guide
cugugaacucugaggacaggac

SEQ ID NO: 52398 - RNA, 22 nt, Artificial Sequence
  LRRK2 RNA guide
gaaacaaguccuguccucagag

SEQ ID NO: 52399 - RNA, 22 nt, Artificial Sequence
  LRRK2 RNA guide
gaacucugaggacaggacuugu

SEQ ID NO: 52400 - RNA, 22 nt, Artificial Sequence
  LRRK2 RNA guide
gacugugaacucugaggacagg

SEQ ID NO: 52401 - RNA, 22 nt, Artificial Sequence
  LRRK2 RNA guide
guccucagaguucacagucuag

SEQ ID NO: 52402 - RNA, 22 nt, Artificial Sequence
  LRRK2 RNA guide
guccuguccucagaguucacag

SEQ ID NO: 52403 - RNA, 22 nt, Artificial Sequence
  LRRK2 RNA guide
gugaacucugaggacaggacuu

SEQ ID NO: 52404 - RNA, 22 nt, Artificial Sequence
  LRRK2 RNA guide
uagacugugaacucugaggaca

SEQ ID NO: 52405 - RNA, 22 nt, Artificial Sequence
  LRRK2 RNA guide
ucagaguucacagucuaguggg

SEQ ID NO: 52406 - RNA, 22 nt, Artificial Sequence
  LRRK2 RNA guide
uccucagaguucacagucuagu

SEQ ID NO: 52407 - RNA, 22 nt, Artificial Sequence
  LRRK2 RNA guide
uccuguccucagaguucacagu

SEQ ID NO: 52408 - RNA, 22 nt, Artificial Sequence
  LRRK2 RNA guide
ucugaggacaggacuuguuuca

SEQ ID NO: 52409 - RNA, 22 nt, Artificial Sequence
  LRRK2 RNA guide
ugaaacaaguccuguccucaga

SEQ ID NO: 52410 - RNA, 22 nt, Artificial Sequence
  LRRK2 RNA guide
ugaacucugaggacaggacuug

SEQ ID NO: 52411 - RNA, 22 nt, Artificial Sequence
  LRRK2 RNA guide
uguccucagaguucacagucua

SEQ ID NO: 52412 - RNA, 22 nt, Artificial Sequence
  LRRK2 RNA guide
ugugaacucugaggacaggacu

SEQ ID NO: 52413 - RNA, 20 nt, Artificial Sequence
  LRRK2 RNA guide
aaacuucuaccauaugucag

SEQ ID NO: 52414 - RNA, 20 nt, Artificial Sequence
  LRRK2 RNA guide
aacuucuaccauaugucaga

SEQ ID NO: 52415 - RNA, 20 nt, Artificial Sequence
  LRRK2 RNA guide
aaguacuaaacuucuaccau

SEQ ID NO: 52416 - RNA, 20 nt, Artificial Sequence
  LRRK2 RNA guide
acauaugguagaaguuuagu

SEQ ID NO: 52417 - RNA, 20 nt, Artificial Sequence
  LRRK2 RNA guide
acuaaacuucuaccauaugu

SEQ ID NO: 52418 - RNA, 20 nt, Artificial Sequence
  LRRK2 RNA guide
acuucuaccauaugucagau

SEQ ID NO: 52419 - RNA, 20 nt, Artificial Sequence
  LRRK2 RNA guide
agaaguuuaguacuuacuga

SEQ ID NO: 52420 - RNA, 20 nt, Artificial Sequence
  LRRK2 RNA guide
agaucugacauaugguagaa

SEQ ID NO: 52421 - RNA, 20 nt, Artificial Sequence
  LRRK2 RNA guide
aguaaguacuaaacuucuac

SEQ ID NO: 52422 - RNA, 20 nt, Artificial Sequence
  LRRK2 RNA guide
aguacuaaacuucuaccaua

SEQ ID NO: 52423 - RNA, 20 nt, Artificial Sequence
  LRRK2 RNA guide
agugagaucugacauauggu

SEQ ID NO: 52424 - RNA, 20 nt, Artificial Sequence
  LRRK2 RNA guide
auaugguagaaguuuaguac

SEQ ID NO: 52425 - RNA, 20 nt, Artificial Sequence
  LRRK2 RNA guide
aucugacauaugguagaagu

SEQ ID NO: 52426 - RNA, 20 nt, Artificial Sequence
  LRRK2 RNA guide
augguagaaguuuaguacuu

SEQ ID NO: 52427 - RNA, 20 nt, Artificial Sequence
  LRRK2 RNA guide
caaaucaauucaguaaguac

SEQ ID NO: 52428 - RNA, 20 nt, Artificial Sequence
  LRRK2 RNA guide
caauucaguaaguacuaaac

SEQ ID NO: 52429 - RNA, 20 nt, Artificial Sequence
  LRRK2 RNA guide
caguaaguacuaaacuucua

SEQ ID NO: 52430 - RNA, 20 nt, Artificial Sequence
  LRRK2 RNA guide
cauaugguagaaguuuagua

SEQ ID NO: 52431 - RNA, 20 nt, Artificial Sequence
  LRRK2 RNA guide
cuaaacuucuaccauauguc

SEQ ID NO: 52432 - RNA, 20 nt, Artificial Sequence
  LRRK2 RNA guide
cugacauaugguagaaguuu

SEQ ID NO: 52433 - RNA, 20 nt, Artificial Sequence
  LRRK2 RNA guide
gaaguuuaguacuuacugaa

SEQ ID NO: 52434 - RNA, 20 nt, Artificial Sequence
  LRRK2 RNA guide
gacauaugguagaaguuuag

SEQ ID NO: 52435 - RNA, 20 nt, Artificial Sequence
  LRRK2 RNA guide
gagaucugacauaugguaga

SEQ ID NO: 52436 - RNA, 20 nt, Artificial Sequence
  LRRK2 RNA guide
gaucugacauaugguagaag

SEQ ID NO: 52437 - RNA, 20 nt, Artificial Sequence
  LRRK2 RNA guide
gguagaaguuuaguacuuac

SEQ ID NO: 52438 - RNA, 20 nt, Artificial Sequence
  LRRK2 RNA guide
guaaguacuaaacuucuacc

SEQ ID NO: 52439 - RNA, 20 nt, Artificial Sequence
  LRRK2 RNA guide
guacuaaacuucuaccauau

SEQ ID NO: 52440 - RNA, 20 nt, Artificial Sequence
  LRRK2 RNA guide
guagaaguuuaguacuuacu

SEQ ID NO: 52441 - RNA, 20 nt, Artificial Sequence
  LRRK2 RNA guide
gugagaucugacauauggua

SEQ ID NO: 52442 - RNA, 20 nt, Artificial Sequence
  LRRK2 RNA guide
uaaacuucuaccauauguca

SEQ ID NO: 52443 - RNA, 20 nt, Artificial Sequence
  LRRK2 RNA guide
uaaguacuaaacuucuacca

SEQ ID NO: 52444 - RNA, 20 nt, Artificial Sequence
  LRRK2 RNA guide
uacuaaacuucuaccauaug

SEQ ID NO: 52445 - RNA, 20 nt, Artificial Sequence
  LRRK2 RNA guide
uagaaguuuaguacuuacug

SEQ ID NO: 52446 - RNA, 20 nt, Artificial Sequence
  LRRK2 RNA guide
uaugguagaaguuuaguacu

SEQ ID NO: 52447 - RNA, 20 nt, Artificial Sequence
  LRRK2 RNA guide
ucaguaaguacuaaacuucu

SEQ ID NO: 52448 - RNA, 20 nt, Artificial Sequence
  LRRK2 RNA guide
ucugacauaugguagaaguu

SEQ ID NO: 52449 - RNA, 20 nt, Artificial Sequence
  LRRK2 RNA guide
ugacauaugguagaaguuua

SEQ ID NO: 52450 - RNA, 20 nt, Artificial Sequence
  LRRK2 RNA guide
ugagaucugacauaugguag

SEQ ID NO: 52451 - RNA, 20 nt, Artificial Sequence
  LRRK2 RNA guide
ugguagaaguuuaguacuua

SEQ ID NO: 52452 - RNA, 20 nt, Artificial Sequence
  LRRK2 RNA guide
uucaguaaguacuaaacuuc

SEQ ID NO: 52453 - RNA, 21 nt, Artificial Sequence
  LRRK2 RNA guide
aaacuucuaccauaugucaga

SEQ ID NO: 52454 - RNA, 21 nt, Artificial Sequence
  LRRK2 RNA guide
aacuucuaccauaugucagau

SEQ ID NO: 52455 - RNA, 21 nt, Artificial Sequence
  LRRK2 RNA guide
acuaaacuucuaccauauguc

SEQ ID NO: 52456 - RNA, 21 nt, Artificial Sequence
  LRRK2 RNA guide
acuucuaccauaugucagauc

SEQ ID NO: 52457 - RNA, 21 nt, Artificial Sequence
  LRRK2 RNA guide
agaucugacauaugguagaag

SEQ ID NO: 52458 - RNA, 21 nt, Artificial Sequence
  LRRK2 RNA guide
aguaaguacuaaacuucuacc

SEQ ID NO: 52459 - RNA, 21 nt, Artificial Sequence
  LRRK2 RNA guide
agugagaucugacauauggua

SEQ ID NO: 52460 - RNA, 21 nt, Artificial Sequence
  LRRK2 RNA guide
aucugacauaugguagaaguu

SEQ ID NO: 52461 - RNA, 21 nt, Artificial Sequence
  LRRK2 RNA guide
caguaaguacuaaacuucuac

SEQ ID NO: 52462 - RNA, 21 nt, Artificial Sequence
  LRRK2 RNA guide
cauaugguagaaguuuaguac

SEQ ID NO: 52463 - RNA, 21 nt, Artificial Sequence
  LRRK2 RNA guide
cuaaacuucuaccauauguca

SEQ ID NO: 52464 - RNA, 21 nt, Artificial Sequence
  LRRK2 RNA guide
cugacauaugguagaaguuua

SEQ ID NO: 52465 - RNA, 21 nt, Artificial Sequence
  LRRK2 RNA guide
gacauaugguagaaguuuagu

SEQ ID NO: 52466 - RNA, 21 nt, Artificial Sequence
  LRRK2 RNA guide
gagaucugacauaugguagaa

SEQ ID NO: 52467 - RNA, 21 nt, Artificial Sequence
  LRRK2 RNA guide
gaucugacauaugguagaagu

SEQ ID NO: 52468 - RNA, 21 nt, Artificial Sequence
  LRRK2 RNA guide
gguagaaguuuaguacuuacu

SEQ ID NO: 52469 - RNA, 21 nt, Artificial Sequence
  LRRK2 RNA guide
guaaguacuaaacuucuacca

SEQ ID NO: 52470 - RNA, 21 nt, Artificial Sequence
  LRRK2 RNA guide
guacuaaacuucuaccauaug

SEQ ID NO: 52471 - RNA, 21 nt, Artificial Sequence
  LRRK2 RNA guide
guagaaguuuaguacuuacug

SEQ ID NO: 52472 - RNA, 21 nt, Artificial Sequence
  LRRK2 RNA guide
gugagaucugacauaugguag

SEQ ID NO: 52473 - RNA, 21 nt, Artificial Sequence
  LRRK2 RNA guide
uaaacuucuaccauaugucag

SEQ ID NO: 52474 - RNA, 21 nt, Artificial Sequence
  LRRK2 RNA guide
uagugagaucugacauauggu

SEQ ID NO: 52475 - RNA, 21 nt, Artificial Sequence
  LRRK2 RNA guide
ucugacauaugguagaaguuu

SEQ ID NO: 52476 - RNA, 21 nt, Artificial Sequence
  LRRK2 RNA guide
ugacauaugguagaaguuuag

SEQ ID NO: 52477 - RNA, 21 nt, Artificial Sequence
  LRRK2 RNA guide
ugagaucugacauaugguaga

SEQ ID NO: 52478 - RNA, 21 nt, Artificial Sequence
  LRRK2 RNA guide
ugguagaaguuuaguacuuac

SEQ ID NO: 52479 - RNA, 22 nt, Artificial Sequence
  LRRK2 RNA guide
aaacuucuaccauaugucagau

SEQ ID NO: 52480 - RNA, 22 nt, Artificial Sequence
  LRRK2 RNA guide
aacuucuaccauaugucagauc

SEQ ID NO: 52481 - RNA, 22 nt, Artificial Sequence
  LRRK2 RNA guide
acauaugguagaaguuuaguac

SEQ ID NO: 52482 - RNA, 22 nt, Artificial Sequence
  LRRK2 RNA guide
acuaaacuucuaccauauguca

SEQ ID NO: 52483 - RNA, 22 nt, Artificial Sequence
  LRRK2 RNA guide
acuucuaccauaugucagaucu

SEQ ID NO: 52484 - RNA, 22 nt, Artificial Sequence
  LRRK2 RNA guide
agaucugacauaugguagaagu

SEQ ID NO: 52485 - RNA, 22 nt, Artificial Sequence
  LRRK2 RNA guide
aguaaguacuaaacuucuacca

SEQ ID NO: 52486 - RNA, 22 nt, Artificial Sequence
  LRRK2 RNA guide
aguacuaaacuucuaccauaug

SEQ ID NO: 52487 - RNA, 22 nt, Artificial Sequence
  LRRK2 RNA guide
agugagaucugacauaugguag

SEQ ID NO: 52488 - RNA, 22 nt, Artificial Sequence
  LRRK2 RNA guide
aucugacauaugguagaaguuu

SEQ ID NO: 52489 - RNA, 22 nt, Artificial Sequence
  LRRK2 RNA guide
augguagaaguuuaguacuuac

SEQ ID NO: 52490 - RNA, 22 nt, Artificial Sequence
  LRRK2 RNA guide
cacaaaucaauucaguaaguac

SEQ ID NO: 52491 - RNA, 22 nt, Artificial Sequence
  LRRK2 RNA guide
caguaaguacuaaacuucuacc

SEQ ID NO: 52492 - RNA, 22 nt, Artificial Sequence
  LRRK2 RNA guide
cauaugguagaaguuuaguacu

SEQ ID NO: 52493 - RNA, 22 nt, Artificial Sequence
  LRRK2 RNA guide
cuaaacuucuaccauaugucag

SEQ ID NO: 52494 - RNA, 22 nt, Artificial Sequence
  LRRK2 RNA guide
cuagugagaucugacauauggu

SEQ ID NO: 52495 - RNA, 22 nt, Artificial Sequence
  LRRK2 RNA guide
cugacauaugguagaaguuuag

SEQ ID NO: 52496 - RNA, 22 nt, Artificial Sequence
  LRRK2 RNA guide
gacauaugguagaaguuuagua

SEQ ID NO: 52497 - RNA, 22 nt, Artificial Sequence
  LRRK2 RNA guide
gagaucugacauaugguagaag

SEQ ID NO: 52498 - RNA, 22 nt, Artificial Sequence
  LRRK2 RNA guide
gaucugacauaugguagaaguu

SEQ ID NO: 52499 - RNA, 22 nt, Artificial Sequence
  LRRK2 RNA guide
gguagaaguuuaguacuuacug

SEQ ID NO: 52500 - RNA, 22 nt, Artificial Sequence
  LRRK2 RNA guide
guaaguacuaaacuucuaccau

SEQ ID NO: 52501 - RNA, 22 nt, Artificial Sequence
  LRRK2 RNA guide
guacuaaacuucuaccauaugu

SEQ ID NO: 52502 - RNA, 22 nt, Artificial Sequence
  LRRK2 RNA guide
guagaaguuuaguacuuacuga

SEQ ID NO: 52503 - RNA, 22 nt, Artificial Sequence
  LRRK2 RNA guide
gugagaucugacauaugguaga

SEQ ID NO: 52504 - RNA, 22 nt, Artificial Sequence
  LRRK2 RNA guide
uaaacuucuaccauaugucaga

SEQ ID NO: 52505 - RNA, 22 nt, Artificial Sequence
  LRRK2 RNA guide
uacuaaacuucuaccauauguc

SEQ ID NO: 52506 - RNA, 22 nt, Artificial Sequence
  LRRK2 RNA guide
uagugagaucugacauauggua

SEQ ID NO: 52507 - RNA, 22 nt, Artificial Sequence
  LRRK2 RNA guide
ucaguaaguacuaaacuucuac

SEQ ID NO: 52508 - RNA, 22 nt, Artificial Sequence
  LRRK2 RNA guide
ucugacauaugguagaaguuua

SEQ ID NO: 52509 - RNA, 22 nt, Artificial Sequence
  LRRK2 RNA guide
ugacauaugguagaaguuuagu

SEQ ID NO: 52510 - RNA, 22 nt, Artificial Sequence
  LRRK2 RNA guide
ugagaucugacauaugguagaa

SEQ ID NO: 52511 - RNA, 22 nt, Artificial Sequence
  LRRK2 RNA guide
ugguagaaguuuaguacuuacu

SEQ ID NO: 52512 - RNA, 20 nt, Artificial Sequence
  LRRK2 RNA guide
aaauuucuaccauaugucag

SEQ ID NO: 52513 - RNA, 20 nt, Artificial Sequence
  LRRK2 RNA guide
aauuucuaccauaugucaga

SEQ ID NO: 52514 - RNA, 20 nt, Artificial Sequence
  LRRK2 RNA guide
aucugacauaugguagaaau

SEQ ID NO: 52515 - RNA, 20 nt, Artificial Sequence
  LRRK2 RNA guide
auuucuaccauaugucagau

SEQ ID NO: 52516 - RNA, 20 nt, Artificial Sequence
  LRRK2 RNA guide
cuaaauuucuaccauauguc

SEQ ID NO: 52517 - RNA, 20 nt, Artificial Sequence
  LRRK2 RNA guide
cugacauaugguagaaauuu

SEQ ID NO: 52518 - RNA, 20 nt, Artificial Sequence
  LRRK2 RNA guide
gacauaugguagaaauuuag

SEQ ID NO: 52519 - RNA, 20 nt, Artificial Sequence
  LRRK2 RNA guide
gaucugacauaugguagaaa

SEQ ID NO: 52520 - RNA, 20 nt, Artificial Sequence
  LRRK2 RNA guide
gguagaaauuuaguacuuac

SEQ ID NO: 52521 - RNA, 20 nt, Artificial Sequence
  LRRK2 RNA guide
guaaguacuaaauuucuacc

SEQ ID NO: 52522 - RNA, 20 nt, Artificial Sequence
  LRRK2 RNA guide
ucugacauaugguagaaauu

SEQ ID NO: 52523 - RNA, 21 nt, Artificial Sequence
  LRRK2 RNA guide
agaucugacauaugguagaaa

SEQ ID NO: 52524 - RNA, 21 nt, Artificial Sequence
  LRRK2 RNA guide
auuucuaccauaugucagauc

SEQ ID NO: 52525 - RNA, 21 nt, Artificial Sequence
  LRRK2 RNA guide
gaucugacauaugguagaaau

SEQ ID NO: 52526 - RNA, 22 nt, Artificial Sequence
  LRRK2 RNA guide
aauuucuaccauaugucagauc

SEQ ID NO: 52527 - RNA, 22 nt, Artificial Sequence
  LRRK2 RNA guide
agaucugacauaugguagaaau

SEQ ID NO: 52528 - RNA, 22 nt, Artificial Sequence
  LRRK2 RNA guide
auuucuaccauaugucagaucu

SEQ ID NO: 52529 - RNA, 22 nt, Artificial Sequence
  LRRK2 RNA guide
caguaaguacuaaauuucuacc

SEQ ID NO: 52530 - RNA, 22 nt, Artificial Sequence
  LRRK2 RNA guide
cuaaauuucuaccauaugucag

SEQ ID NO: 52531 - RNA, 22 nt, Artificial Sequence
  LRRK2 RNA guide
cugacauaugguagaaauuuag

SEQ ID NO: 52532 - RNA, 22 nt, Artificial Sequence
  LRRK2 RNA guide
gagaucugacauaugguagaaa

SEQ ID NO: 52533 - RNA, 22 nt, Artificial Sequence
  LRRK2 RNA guide
gaucugacauaugguagaaauu

SEQ ID NO: 52534 - RNA, 22 nt, Artificial Sequence
  LRRK2 RNA guide
gguagaaauuuaguacuuacug

SEQ ID NO: 52535 - RNA, 20 nt, Artificial Sequence
  LRRK2 RNA guide
agucucgccucugucaccca

SEQ ID NO: 52536 - RNA, 20 nt, Artificial Sequence
  LRRK2 RNA guide
cgccucugucacccaggcua

SEQ ID NO: 52537 - RNA, 20 nt, Artificial Sequence
  LRRK2 RNA guide
cuagccugggugacagaggc

SEQ ID NO: 52538 - RNA, 20 nt, Artificial Sequence
  LRRK2 RNA guide
cucgccucugucacccaggc

SEQ ID NO: 52539 - RNA, 20 nt, Artificial Sequence
  LRRK2 RNA guide
gucucgccucugucacccag

SEQ ID NO: 52540 - RNA, 20 nt, Artificial Sequence
  LRRK2 RNA guide
ucgccucugucacccaggcu

SEQ ID NO: 52541 - RNA, 20 nt, Artificial Sequence
  LRRK2 RNA guide
ucucgccucugucacccagg

SEQ ID NO: 52542 - RNA, 21 nt, Artificial Sequence
  LRRK2 RNA guide
acucuagccugggugacagag

SEQ ID NO: 52543 - RNA, 21 nt, Artificial Sequence
  LRRK2 RNA guide
agucucgccucugucacccag

SEQ ID NO: 52544 - RNA, 21 nt, Artificial Sequence
  LRRK2 RNA guide
cgccucugucacccaggcuag

SEQ ID NO: 52545 - RNA, 21 nt, Artificial Sequence
  LRRK2 RNA guide
cuagccugggugacagaggcg

SEQ ID NO: 52546 - RNA, 21 nt, Artificial Sequence
  LRRK2 RNA guide
cucgccucugucacccaggcu

SEQ ID NO: 52547 - RNA, 21 nt, Artificial Sequence
  LRRK2 RNA guide
cucuagccugggugacagagg

SEQ ID NO: 52548 - RNA, 21 nt, Artificial Sequence
  LRRK2 RNA guide
gagucucgccucugucaccca

SEQ ID NO: 52549 - RNA, 21 nt, Artificial Sequence
  LRRK2 RNA guide
gcacucuagccugggugacag

SEQ ID NO: 52550 - RNA, 21 nt, Artificial Sequence
  LRRK2 RNA guide
gucucgccucugucacccagg

SEQ ID NO: 52551 - RNA, 21 nt, Artificial Sequence
  LRRK2 RNA guide
ucgccucugucacccaggcua

SEQ ID NO: 52552 - RNA, 21 nt, Artificial Sequence
  LRRK2 RNA guide
ucuagccugggugacagaggc

SEQ ID NO: 52553 - RNA, 21 nt, Artificial Sequence
  LRRK2 RNA guide
ucucgccucugucacccaggc

SEQ ID NO: 52554 - RNA, 22 nt, Artificial Sequence
  LRRK2 RNA guide
acucuagccugggugacagagg

SEQ ID NO: 52555 - RNA, 22 nt, Artificial Sequence
  LRRK2 RNA guide
agagucucgccucugucaccca

SEQ ID NO: 52556 - RNA, 22 nt, Artificial Sequence
  LRRK2 RNA guide
agucucgccucugucacccagg

SEQ ID NO: 52557 - RNA, 22 nt, Artificial Sequence
  LRRK2 RNA guide
cgccucugucacccaggcuaga

SEQ ID NO: 52558 - RNA, 22 nt, Artificial Sequence
  LRRK2 RNA guide
cuagccugggugacagaggcga

SEQ ID NO: 52559 - RNA, 22 nt, Artificial Sequence
  LRRK2 RNA guide
cucgccucugucacccaggcua

SEQ ID NO: 52560 - RNA, 22 nt, Artificial Sequence
  LRRK2 RNA guide
cucuagccugggugacagaggc

SEQ ID NO: 52561 - RNA, 22 nt, Artificial Sequence
  LRRK2 RNA guide
gagucucgccucugucacccag

SEQ ID NO: 52562 - RNA, 22 nt, Artificial Sequence
  LRRK2 RNA guide
gccucugucacccaggcuagag

SEQ ID NO: 52563 - RNA, 22 nt, Artificial Sequence
  LRRK2 RNA guide
gucucgccucugucacccaggc

SEQ ID NO: 52564 - RNA, 22 nt, Artificial Sequence
  LRRK2 RNA guide
ucgccucugucacccaggcuag

SEQ ID NO: 52565 - RNA, 22 nt, Artificial Sequence
  LRRK2 RNA guide
ucuagccugggugacagaggcg

SEQ ID NO: 52566 - RNA, 22 nt, Artificial Sequence
  LRRK2 RNA guide
ucucgccucugucacccaggcu

SEQ ID NO: 52567 - RNA, 20 nt, Artificial Sequence
  LRRK2 RNA guide
cuuucaugucuuuucauagu

SEQ ID NO: 52568 - RNA, 20 nt, Artificial Sequence
  LRRK2 RNA guide
ggcaauaaaacaaaaugcua

SEQ ID NO: 52569 - RNA, 20 nt, Artificial Sequence
  LRRK2 RNA guide
guuggcaauaaaacaaaaug

SEQ ID NO: 52570 - RNA, 20 nt, Artificial Sequence
  LRRK2 RNA guide
ucuuucaugucuuuucauag

SEQ ID NO: 52571 - RNA, 20 nt, Artificial Sequence
  LRRK2 RNA guide
uggcaauaaaacaaaaugcu

SEQ ID NO: 52572 - RNA, 20 nt, Artificial Sequence
  LRRK2 RNA guide
uuggcaauaaaacaaaaugc

SEQ ID NO: 52573 - RNA, 21 nt, Artificial Sequence
  LRRK2 RNA guide
gguuggcaauaaaacaaaaug

SEQ ID NO: 52574 - RNA, 21 nt, Artificial Sequence
  LRRK2 RNA guide
guuggcaauaaaacaaaaugc

SEQ ID NO: 52575 - RNA, 22 nt, Artificial Sequence
  LRRK2 RNA guide
agguuggcaauaaaacaaaaug

SEQ ID NO: 52576 - RNA, 22 nt, Artificial Sequence
  LRRK2 RNA guide
gguuggcaauaaaacaaaaugc

SEQ ID NO: 52577 - RNA, 22 nt, Artificial Sequence
  LRRK2 RNA guide
guuggcaauaaaacaaaaugcu

SEQ ID NO: 52578 - RNA, 20 nt, Artificial Sequence
  LRRK2 RNA guide
caaaaugcuaucaaacuaug

SEQ ID NO: 52579 - RNA, 20 nt, Artificial Sequence
  LRRK2 RNA guide
cauaguuugauagcauuuug

SEQ ID NO: 52580 - RNA, 20 nt, Artificial Sequence
  LRRK2 RNA guide
caugucuuuucauaguuuga

SEQ ID NO: 52581 - RNA, 20 nt, Artificial Sequence
  LRRK2 RNA guide
cuaucaaacuaugaaaagac

SEQ ID NO: 52582 - RNA, 20 nt, Artificial Sequence
  LRRK2 RNA guide
cuuuucauaguuugauagca

SEQ ID NO: 52583 - RNA, 20 nt, Artificial Sequence
  LRRK2 RNA guide
gcuaucaaacuaugaaaaga

SEQ ID NO: 52584 - RNA, 20 nt, Artificial Sequence
  LRRK2 RNA guide
gucuuuucauaguuugauag

SEQ ID NO: 52585 - RNA, 20 nt, Artificial Sequence
  LRRK2 RNA guide
ucaaacuaugaaaagacaug

SEQ ID NO: 52586 - RNA, 20 nt, Artificial Sequence
  LRRK2 RNA guide
ucaugucuuuucauaguuug

SEQ ID NO: 52587 - RNA, 20 nt, Artificial Sequence
  LRRK2 RNA guide
ucuuuucauaguuugauagc

SEQ ID NO: 52588 - RNA, 20 nt, Artificial Sequence
  LRRK2 RNA guide
ugcuaucaaacuaugaaaag

SEQ ID NO: 52589 - RNA, 21 nt, Artificial Sequence
  LRRK2 RNA guide
gcuaucaaacuaugaaaagac

SEQ ID NO: 52590 - RNA, 21 nt, Artificial Sequence
  LRRK2 RNA guide
gucuuuucauaguuugauagc

SEQ ID NO: 52591 - RNA, 22 nt, Artificial Sequence
  LRRK2 RNA guide
gcuaucaaacuaugaaaagaca

SEQ ID NO: 52592 - RNA, 22 nt, Artificial Sequence
  LRRK2 RNA guide
ggcaauaaaacaaaaugcuauc

SEQ ID NO: 52593 - RNA, 22 nt, Artificial Sequence
  LRRK2 RNA guide
gucuuuucauaguuugauagca

SEQ ID NO: 52594 - RNA, 22 nt, Artificial Sequence
  LRRK2 RNA guide
ugcuaucaaacuaugaaaagac

SEQ ID NO: 52595 - RNA, 22 nt, Artificial Sequence
  LRRK2 RNA guide
ugucuuuucauaguuugauagc

SEQ ID NO: 52596 - RNA, 20 nt, Artificial Sequence
  LRRK2 RNA guide
aaagggaaccacaggguacu

SEQ ID NO: 52597 - RNA, 20 nt, Artificial Sequence
  LRRK2 RNA guide
aaccacaggguacuacacag

SEQ ID NO: 52598 - RNA, 20 nt, Artificial Sequence
  LRRK2 RNA guide
aagacuaaagggaaccacag

SEQ ID NO: 52599 - RNA, 20 nt, Artificial Sequence
  LRRK2 RNA guide
aagggaaccacaggguacua

SEQ ID NO: 52600 - RNA, 20 nt, Artificial Sequence
  LRRK2 RNA guide
acaggguacuacacaguagg

SEQ ID NO: 52601 - RNA, 20 nt, Artificial Sequence
  LRRK2 RNA guide
accacaggguacuacacagu

SEQ ID NO: 52602 - RNA, 20 nt, Artificial Sequence
  LRRK2 RNA guide
acccugugguucccuuuagu

SEQ ID NO: 52603 - RNA, 20 nt, Artificial Sequence
  LRRK2 RNA guide
acuaaagggaaccacagggu

SEQ ID NO: 52604 - RNA, 20 nt, Artificial Sequence
  LRRK2 RNA guide
acuguguaguacccuguggu

SEQ ID NO: 52605 - RNA, 20 nt, Artificial Sequence
  LRRK2 RNA guide
acuuggccuacuguguagua

SEQ ID NO: 52606 - RNA, 20 nt, Artificial Sequence
  LRRK2 RNA guide
agacuaaagggaaccacagg

SEQ ID NO: 52607 - RNA, 20 nt, Artificial Sequence
  LRRK2 RNA guide
agggaaccacaggguacuac

SEQ ID NO: 52608 - RNA, 20 nt, Artificial Sequence
  LRRK2 RNA guide
aggguacuacacaguaggcc

SEQ ID NO: 52609 - RNA, 20 nt, Artificial Sequence
  LRRK2 RNA guide
aguacccugugguucccuuu

SEQ ID NO: 52610 - RNA, 20 nt, Artificial Sequence
  LRRK2 RNA guide
aguuuaagacuaaagggaac

SEQ ID NO: 52611 - RNA, 20 nt, Artificial Sequence
  LRRK2 RNA guide
cacaggguacuacacaguag

SEQ ID NO: 52612 - RNA, 20 nt, Artificial Sequence
  LRRK2 RNA guide
caggguacuacacaguaggc

SEQ ID NO: 52613 - RNA, 20 nt, Artificial Sequence
  LRRK2 RNA guide
ccacaggguacuacacagua

SEQ ID NO: 52614 - RNA, 20 nt, Artificial Sequence
  LRRK2 RNA guide
cccugugguucccuuuaguc

SEQ ID NO: 52615 - RNA, 20 nt, Artificial Sequence
  LRRK2 RNA guide
ccuacuguguaguacccugu

SEQ ID NO: 52616 - RNA, 20 nt, Artificial Sequence
  LRRK2 RNA guide
ccugugguucccuuuagucu

SEQ ID NO: 52617 - RNA, 20 nt, Artificial Sequence
  LRRK2 RNA guide
cuaaagggaaccacagggua

SEQ ID NO: 52618 - RNA, 20 nt, Artificial Sequence
  LRRK2 RNA guide
cuacuguguaguacccugug

SEQ ID NO: 52619 - RNA, 20 nt, Artificial Sequence
  LRRK2 RNA guide
cuguguaguacccugugguu

SEQ ID NO: 52620 - RNA, 20 nt, Artificial Sequence
  LRRK2 RNA guide
cuuggccuacuguguaguac

SEQ ID NO: 52621 - RNA, 20 nt, Artificial Sequence
  LRRK2 RNA guide
gaaccacaggguacuacaca

SEQ ID NO: 52622 - RNA, 20 nt, Artificial Sequence
  LRRK2 RNA guide
gacuaaagggaaccacaggg

SEQ ID NO: 52623 - RNA, 20 nt, Artificial Sequence
  LRRK2 RNA guide
gccuacuguguaguacccug

SEQ ID NO: 52624 - RNA, 20 nt, Artificial Sequence
  LRRK2 RNA guide
ggaaccacaggguacuacac

SEQ ID NO: 52625 - RNA, 20 nt, Artificial Sequence
  LRRK2 RNA guide
ggccuacuguguaguacccu

SEQ ID NO: 52626 - RNA, 20 nt, Artificial Sequence
  LRRK2 RNA guide
gggaaccacaggguacuaca

SEQ ID NO: 52627 - RNA, 20 nt, Artificial Sequence
  LRRK2 RNA guide
guacccugugguucccuuua

SEQ ID NO: 52628 - RNA, 20 nt, Artificial Sequence
  LRRK2 RNA guide
guaguacccugugguucccu

SEQ ID NO: 52629 - RNA, 20 nt, Artificial Sequence
  LRRK2 RNA guide
guguaguacccugugguucc

SEQ ID NO: 52630 - RNA, 20 nt, Artificial Sequence
  LRRK2 RNA guide
guuuaagacuaaagggaacc

SEQ ID NO: 52631 - RNA, 20 nt, Artificial Sequence
  LRRK2 RNA guide
uaaagggaaccacaggguac

SEQ ID NO: 52632 - RNA, 20 nt, Artificial Sequence
  LRRK2 RNA guide
uaagacuaaagggaaccaca

SEQ ID NO: 52633 - RNA, 20 nt, Artificial Sequence
  LRRK2 RNA guide
uacccugugguucccuuuag

SEQ ID NO: 52634 - RNA, 20 nt, Artificial Sequence
  LRRK2 RNA guide
uacuguguaguacccugugg

SEQ ID NO: 52635 - RNA, 20 nt, Artificial Sequence
  LRRK2 RNA guide
uacuuggccuacuguguagu

SEQ ID NO: 52636 - RNA, 20 nt, Artificial Sequence
  LRRK2 RNA guide
uaguacccugugguucccuu

SEQ ID NO: 52637 - RNA, 20 nt, Artificial Sequence
  LRRK2 RNA guide
uggccuacuguguaguaccc

SEQ ID NO: 52638 - RNA, 20 nt, Artificial Sequence
  LRRK2 RNA guide
uguaguacccugugguuccc

SEQ ID NO: 52639 - RNA, 20 nt, Artificial Sequence
  LRRK2 RNA guide
uguguaguacccugugguuc

SEQ ID NO: 52640 - RNA, 20 nt, Artificial Sequence
  LRRK2 RNA guide
uuaagacuaaagggaaccac

SEQ ID NO: 52641 - RNA, 20 nt, Artificial Sequence
  LRRK2 RNA guide
uuacuuggccuacuguguag

SEQ ID NO: 52642 - RNA, 20 nt, Artificial Sequence
  LRRK2 RNA guide
uuggccuacuguguaguacc

SEQ ID NO: 52643 - RNA, 20 nt, Artificial Sequence
  LRRK2 RNA guide
uuuaagacuaaagggaacca

SEQ ID NO: 52644 - RNA, 21 nt, Artificial Sequence
  LRRK2 RNA guide
aaagggaaccacaggguacua

SEQ ID NO: 52645 - RNA, 21 nt, Artificial Sequence
  LRRK2 RNA guide
aaccacaggguacuacacagu

SEQ ID NO: 52646 - RNA, 21 nt, Artificial Sequence
  LRRK2 RNA guide
aagacuaaagggaaccacagg

SEQ ID NO: 52647 - RNA, 21 nt, Artificial Sequence
  LRRK2 RNA guide
aagggaaccacaggguacuac

SEQ ID NO: 52648 - RNA, 21 nt, Artificial Sequence
  LRRK2 RNA guide
acaggguacuacacaguaggc

SEQ ID NO: 52649 - RNA, 21 nt, Artificial Sequence
  LRRK2 RNA guide
accacaggguacuacacagua

SEQ ID NO: 52650 - RNA, 21 nt, Artificial Sequence
  LRRK2 RNA guide
acccugugguucccuuuaguc

SEQ ID NO: 52651 - RNA, 21 nt, Artificial Sequence
  LRRK2 RNA guide
acuaaagggaaccacagggua

SEQ ID NO: 52652 - RNA, 21 nt, Artificial Sequence
  LRRK2 RNA guide
acuguguaguacccugugguu

SEQ ID NO: 52653 - RNA, 21 nt, Artificial Sequence
  LRRK2 RNA guide
acuuggccuacuguguaguac

SEQ ID NO: 52654 - RNA, 21 nt, Artificial Sequence
  LRRK2 RNA guide
agacuaaagggaaccacaggg

SEQ ID NO: 52655 - RNA, 21 nt, Artificial Sequence
  LRRK2 RNA guide
agggaaccacaggguacuaca

SEQ ID NO: 52656 - RNA, 21 nt, Artificial Sequence
  LRRK2 RNA guide
aggguacuacacaguaggcca

SEQ ID NO: 52657 - RNA, 21 nt, Artificial Sequence
  LRRK2 RNA guide
aguacccugugguucccuuua

SEQ ID NO: 52658 - RNA, 21 nt, Artificial Sequence
  LRRK2 RNA guide
aguuuaagacuaaagggaacc

SEQ ID NO: 52659 - RNA, 21 nt, Artificial Sequence
  LRRK2 RNA guide
cacaggguacuacacaguagg

SEQ ID NO: 52660 - RNA, 21 nt, Artificial Sequence
  LRRK2 RNA guide
caggguacuacacaguaggcc

SEQ ID NO: 52661 - RNA, 21 nt, Artificial Sequence
  LRRK2 RNA guide
ccacaggguacuacacaguag

SEQ ID NO: 52662 - RNA, 21 nt, Artificial Sequence
  LRRK2 RNA guide
cccugugguucccuuuagucu

SEQ ID NO: 52663 - RNA, 21 nt, Artificial Sequence
  LRRK2 RNA guide
ccuacuguguaguacccugug

SEQ ID NO: 52664 - RNA, 21 nt, Artificial Sequence
  LRRK2 RNA guide
ccugugguucccuuuagucuu

SEQ ID NO: 52665 - RNA, 21 nt, Artificial Sequence
  LRRK2 RNA guide
cuaaagggaaccacaggguac

SEQ ID NO: 52666 - RNA, 21 nt, Artificial Sequence
  LRRK2 RNA guide
cuacuguguaguacccugugg

SEQ ID NO: 52667 - RNA, 21 nt, Artificial Sequence
  LRRK2 RNA guide
cuguguaguacccugugguuc

SEQ ID NO: 52668 - RNA, 21 nt, Artificial Sequence
  LRRK2 RNA guide
cuuggccuacuguguaguacc

SEQ ID NO: 52669 - RNA, 21 nt, Artificial Sequence
  LRRK2 RNA guide
gaaccacaggguacuacacag

SEQ ID NO: 52670 - RNA, 21 nt, Artificial Sequence
  LRRK2 RNA guide
gacuaaagggaaccacagggu

SEQ ID NO: 52671 - RNA, 21 nt, Artificial Sequence
  LRRK2 RNA guide
gccuacuguguaguacccugu

SEQ ID NO: 52672 - RNA, 21 nt, Artificial Sequence
  LRRK2 RNA guide
ggaaccacaggguacuacaca

SEQ ID NO: 52673 - RNA, 21 nt, Artificial Sequence
  LRRK2 RNA guide
ggccuacuguguaguacccug

SEQ ID NO: 52674 - RNA, 21 nt, Artificial Sequence
  LRRK2 RNA guide
gggaaccacaggguacuacac

SEQ ID NO: 52675 - RNA, 21 nt, Artificial Sequence
  LRRK2 RNA guide
guacccugugguucccuuuag

SEQ ID NO: 52676 - RNA, 21 nt, Artificial Sequence
  LRRK2 RNA guide
guaguacccugugguucccuu

SEQ ID NO: 52677 - RNA, 21 nt, Artificial Sequence
  LRRK2 RNA guide
guguaguacccugugguuccc

SEQ ID NO: 52678 - RNA, 21 nt, Artificial Sequence
  LRRK2 RNA guide
guuacuuggccuacuguguag

SEQ ID NO: 52679 - RNA, 21 nt, Artificial Sequence
  LRRK2 RNA guide
guuuaagacuaaagggaacca

SEQ ID NO: 52680 - RNA, 21 nt, Artificial Sequence
  LRRK2 RNA guide
uaaagggaaccacaggguacu

SEQ ID NO: 52681 - RNA, 21 nt, Artificial Sequence
  LRRK2 RNA guide
uaagacuaaagggaaccacag

SEQ ID NO: 52682 - RNA, 21 nt, Artificial Sequence
  LRRK2 RNA guide
uacccugugguucccuuuagu

SEQ ID NO: 52683 - RNA, 21 nt, Artificial Sequence
  LRRK2 RNA guide
uacuguguaguacccuguggu

SEQ ID NO: 52684 - RNA, 21 nt, Artificial Sequence
  LRRK2 RNA guide
uacuuggccuacuguguagua

SEQ ID NO: 52685 - RNA, 21 nt, Artificial Sequence
  LRRK2 RNA guide
uaguacccugugguucccuuu

SEQ ID NO: 52686 - RNA, 21 nt, Artificial Sequence
  LRRK2 RNA guide
uaguuuaagacuaaagggaac

SEQ ID NO: 52687 - RNA, 21 nt, Artificial Sequence
  LRRK2 RNA guide
uggccuacuguguaguacccu

SEQ ID NO: 52688 - RNA, 21 nt, Artificial Sequence
  LRRK2 RNA guide
uguaguacccugugguucccu

SEQ ID NO: 52689 - RNA, 21 nt, Artificial Sequence
  LRRK2 RNA guide
uguguaguacccugugguucc

SEQ ID NO: 52690 - RNA, 21 nt, Artificial Sequence
  LRRK2 RNA guide
uuaagacuaaagggaaccaca

SEQ ID NO: 52691 - RNA, 21 nt, Artificial Sequence
  LRRK2 RNA guide
uuacuuggccuacuguguagu

SEQ ID NO: 52692 - RNA, 21 nt, Artificial Sequence
  LRRK2 RNA guide
uuggccuacuguguaguaccc

SEQ ID NO: 52693 - RNA, 21 nt, Artificial Sequence
  LRRK2 RNA guide
uuuaagacuaaagggaaccac

SEQ ID NO: 52694 - RNA, 22 nt, Artificial Sequence
  LRRK2 RNA guide
aaagggaaccacaggguacuac

SEQ ID NO: 52695 - RNA, 22 nt, Artificial Sequence
  LRRK2 RNA guide
aaccacaggguacuacacagua

SEQ ID NO: 52696 - RNA, 22 nt, Artificial Sequence
  LRRK2 RNA guide
aagacuaaagggaaccacaggg

SEQ ID NO: 52697 - RNA, 22 nt, Artificial Sequence
  LRRK2 RNA guide
aagggaaccacaggguacuaca

SEQ ID NO: 52698 - RNA, 22 nt, Artificial Sequence
  LRRK2 RNA guide
acaggguacuacacaguaggcc

SEQ ID NO: 52699 - RNA, 22 nt, Artificial Sequence
  LRRK2 RNA guide
accacaggguacuacacaguag

SEQ ID NO: 52700 - RNA, 22 nt, Artificial Sequence
  LRRK2 RNA guide
acccugugguucccuuuagucu

SEQ ID NO: 52701 - RNA, 22 nt, Artificial Sequence
  LRRK2 RNA guide
acuaaagggaaccacaggguac

SEQ ID NO: 52702 - RNA, 22 nt, Artificial Sequence
  LRRK2 RNA guide
acuguguaguacccugugguuc

SEQ ID NO: 52703 - RNA, 22 nt, Artificial Sequence
  LRRK2 RNA guide
acuuggccuacuguguaguacc

SEQ ID NO: 52704 - RNA, 22 nt, Artificial Sequence
  LRRK2 RNA guide
agacuaaagggaaccacagggu

SEQ ID NO: 52705 - RNA, 22 nt, Artificial Sequence
  LRRK2 RNA guide
agggaaccacaggguacuacac

SEQ ID NO: 52706 - RNA, 22 nt, Artificial Sequence
  LRRK2 RNA guide
aggguacuacacaguaggccaa

SEQ ID NO: 52707 - RNA, 22 nt, Artificial Sequence
  LRRK2 RNA guide
aguacccugugguucccuuuag

SEQ ID NO: 52708 - RNA, 22 nt, Artificial Sequence
  LRRK2 RNA guide
aguuacuuggccuacuguguag

SEQ ID NO: 52709 - RNA, 22 nt, Artificial Sequence
  LRRK2 RNA guide
aguuuaagacuaaagggaacca

SEQ ID NO: 52710 - RNA, 22 nt, Artificial Sequence
  LRRK2 RNA guide
cacaggguacuacacaguaggc

SEQ ID NO: 52711 - RNA, 22 nt, Artificial Sequence
  LRRK2 RNA guide
caggguacuacacaguaggcca

SEQ ID NO: 52712 - RNA, 22 nt, Artificial Sequence
  LRRK2 RNA guide
ccacaggguacuacacaguagg

SEQ ID NO: 52713 - RNA, 22 nt, Artificial Sequence
  LRRK2 RNA guide
cccugugguucccuuuagucuu

SEQ ID NO: 52714 - RNA, 22 nt, Artificial Sequence
  LRRK2 RNA guide
ccuacuguguaguacccugugg

SEQ ID NO: 52715 - RNA, 22 nt, Artificial Sequence
  LRRK2 RNA guide
ccugugguucccuuuagucuua

SEQ ID NO: 52716 - RNA, 22 nt, Artificial Sequence
  LRRK2 RNA guide
cuaaagggaaccacaggguacu

SEQ ID NO: 52717 - RNA, 22 nt, Artificial Sequence
  LRRK2 RNA guide
cuacuguguaguacccuguggu

SEQ ID NO: 52718 - RNA, 22 nt, Artificial Sequence
  LRRK2 RNA guide
cuguguaguacccugugguucc

SEQ ID NO: 52719 - RNA, 22 nt, Artificial Sequence
  LRRK2 RNA guide
cuuggccuacuguguaguaccc

SEQ ID NO: 52720 - RNA, 22 nt, Artificial Sequence
  LRRK2 RNA guide
gaaccacaggguacuacacagu

SEQ ID NO: 52721 - RNA, 22 nt, Artificial Sequence
  LRRK2 RNA guide
gacuaaagggaaccacagggua

SEQ ID NO: 52722 - RNA, 22 nt, Artificial Sequence
  LRRK2 RNA guide
gccuacuguguaguacccugug

SEQ ID NO: 52723 - RNA, 22 nt, Artificial Sequence
  LRRK2 RNA guide
ggaaccacaggguacuacacag

SEQ ID NO: 52724 - RNA, 22 nt, Artificial Sequence
  LRRK2 RNA guide
ggccuacuguguaguacccugu

SEQ ID NO: 52725 - RNA, 22 nt, Artificial Sequence
  LRRK2 RNA guide
gggaaccacaggguacuacaca

SEQ ID NO: 52726 - RNA, 22 nt, Artificial Sequence
  LRRK2 RNA guide
guacccugugguucccuuuagu

SEQ ID NO: 52727 - RNA, 22 nt, Artificial Sequence
  LRRK2 RNA guide
guaguacccugugguucccuuu

SEQ ID NO: 52728 - RNA, 22 nt, Artificial Sequence
  LRRK2 RNA guide
guguaguacccugugguucccu

SEQ ID NO: 52729 - RNA, 22 nt, Artificial Sequence
  LRRK2 RNA guide
guuacuuggccuacuguguagu

SEQ ID NO: 52730 - RNA, 22 nt, Artificial Sequence
  LRRK2 RNA guide
guuuaagacuaaagggaaccac

SEQ ID NO: 52731 - RNA, 22 nt, Artificial Sequence
  LRRK2 RNA guide
uaaagggaaccacaggguacua

SEQ ID NO: 52732 - RNA, 22 nt, Artificial Sequence
  LRRK2 RNA guide
uaagacuaaagggaaccacagg

SEQ ID NO: 52733 - RNA, 22 nt, Artificial Sequence
  LRRK2 RNA guide
uacccugugguucccuuuaguc

SEQ ID NO: 52734 - RNA, 22 nt, Artificial Sequence
  LRRK2 RNA guide
uacuguguaguacccugugguu

SEQ ID NO: 52735 - RNA, 22 nt, Artificial Sequence
  LRRK2 RNA guide
uacuuggccuacuguguaguac

SEQ ID NO: 52736 - RNA, 22 nt, Artificial Sequence
  LRRK2 RNA guide
uaguacccugugguucccuuua

SEQ ID NO: 52737 - RNA, 22 nt, Artificial Sequence
  LRRK2 RNA guide
uaguuuaagacuaaagggaacc

SEQ ID NO: 52738 - RNA, 22 nt, Artificial Sequence
  LRRK2 RNA guide
uggccuacuguguaguacccug

SEQ ID NO: 52739 - RNA, 22 nt, Artificial Sequence
  LRRK2 RNA guide
uguaguacccugugguucccuu

SEQ ID NO: 52740 - RNA, 22 nt, Artificial Sequence
  LRRK2 RNA guide
uguguaguacccugugguuccc

SEQ ID NO: 52741 - RNA, 22 nt, Artificial Sequence
  LRRK2 RNA guide
uuaagacuaaagggaaccacag

SEQ ID NO: 52742 - RNA, 22 nt, Artificial Sequence
  LRRK2 RNA guide
uuacuuggccuacuguguagua

SEQ ID NO: 52743 - RNA, 22 nt, Artificial Sequence
  LRRK2 RNA guide
uuaguuuaagacuaaagggaac

SEQ ID NO: 52744 - RNA, 22 nt, Artificial Sequence
  LRRK2 RNA guide
uuggccuacuguguaguacccu

SEQ ID NO: 52745 - RNA, 22 nt, Artificial Sequence
  LRRK2 RNA guide
uuuaagacuaaagggaaccaca

SEQ ID NO: 52746 - RNA, 20 nt, Artificial Sequence
  LRRK2 RNA guide
aaagggaaccacacgguacu

SEQ ID NO: 52747 - RNA, 20 nt, Artificial Sequence
  LRRK2 RNA guide
aaccacacgguacuacacag

SEQ ID NO: 52748 - RNA, 20 nt, Artificial Sequence
  LRRK2 RNA guide
aagacuaaagggaaccacac

SEQ ID NO: 52749 - RNA, 20 nt, Artificial Sequence
  LRRK2 RNA guide
aagggaaccacacgguacua

SEQ ID NO: 52750 - RNA, 20 nt, Artificial Sequence
  LRRK2 RNA guide
acacgguacuacacaguagg

SEQ ID NO: 52751 - RNA, 20 nt, Artificial Sequence
  LRRK2 RNA guide
accacacgguacuacacagu

SEQ ID NO: 52752 - RNA, 20 nt, Artificial Sequence
  LRRK2 RNA guide
accgugugguucccuuuagu

SEQ ID NO: 52753 - RNA, 20 nt, Artificial Sequence
  LRRK2 RNA guide
acgguacuacacaguaggcc

SEQ ID NO: 52754 - RNA, 20 nt, Artificial Sequence
  LRRK2 RNA guide
acuaaagggaaccacacggu

SEQ ID NO: 52755 - RNA, 20 nt, Artificial Sequence
  LRRK2 RNA guide
acuguguaguaccguguggu

SEQ ID NO: 52756 - RNA, 20 nt, Artificial Sequence
  LRRK2 RNA guide
agacuaaagggaaccacacg

SEQ ID NO: 52757 - RNA, 20 nt, Artificial Sequence
  LRRK2 RNA guide
agggaaccacacgguacuac

SEQ ID NO: 52758 - RNA, 20 nt, Artificial Sequence
  LRRK2 RNA guide
aguaccgugugguucccuuu

SEQ ID NO: 52759 - RNA, 20 nt, Artificial Sequence
  LRRK2 RNA guide
cacacgguacuacacaguag

SEQ ID NO: 52760 - RNA, 20 nt, Artificial Sequence
  LRRK2 RNA guide
cacgguacuacacaguaggc

SEQ ID NO: 52761 - RNA, 20 nt, Artificial Sequence
  LRRK2 RNA guide
ccacacgguacuacacagua

SEQ ID NO: 52762 - RNA, 20 nt, Artificial Sequence
  LRRK2 RNA guide
ccgugugguucccuuuaguc

SEQ ID NO: 52763 - RNA, 20 nt, Artificial Sequence
  LRRK2 RNA guide
ccuacuguguaguaccgugu

SEQ ID NO: 52764 - RNA, 20 nt, Artificial Sequence
  LRRK2 RNA guide
cgugugguucccuuuagucu

SEQ ID NO: 52765 - RNA, 20 nt, Artificial Sequence
  LRRK2 RNA guide
cuaaagggaaccacacggua

SEQ ID NO: 52766 - RNA, 20 nt, Artificial Sequence
  LRRK2 RNA guide
cuacuguguaguaccgugug

SEQ ID NO: 52767 - RNA, 20 nt, Artificial Sequence
  LRRK2 RNA guide
cuguguaguaccgugugguu

SEQ ID NO: 52768 - RNA, 20 nt, Artificial Sequence
  LRRK2 RNA guide
gaaccacacgguacuacaca

SEQ ID NO: 52769 - RNA, 20 nt, Artificial Sequence
  LRRK2 RNA guide
gacuaaagggaaccacacgg

SEQ ID NO: 52770 - RNA, 20 nt, Artificial Sequence
  LRRK2 RNA guide
gccuacuguguaguaccgug

SEQ ID NO: 52771 - RNA, 20 nt, Artificial Sequence
  LRRK2 RNA guide
ggaaccacacgguacuacac

SEQ ID NO: 52772 - RNA, 20 nt, Artificial Sequence
  LRRK2 RNA guide
ggccuacuguguaguaccgu

SEQ ID NO: 52773 - RNA, 20 nt, Artificial Sequence
  LRRK2 RNA guide
gggaaccacacgguacuaca

SEQ ID NO: 52774 - RNA, 20 nt, Artificial Sequence
  LRRK2 RNA guide
guaccgugugguucccuuua

SEQ ID NO: 52775 - RNA, 20 nt, Artificial Sequence
  LRRK2 RNA guide
guaguaccgugugguucccu

SEQ ID NO: 52776 - RNA, 20 nt, Artificial Sequence
  LRRK2 RNA guide
guguaguaccgugugguucc

SEQ ID NO: 52777 - RNA, 20 nt, Artificial Sequence
  LRRK2 RNA guide
uaaagggaaccacacgguac

SEQ ID NO: 52778 - RNA, 20 nt, Artificial Sequence
  LRRK2 RNA guide
uaccgugugguucccuuuag

SEQ ID NO: 52779 - RNA, 20 nt, Artificial Sequence
  LRRK2 RNA guide
uacuguguaguaccgugugg

SEQ ID NO: 52780 - RNA, 20 nt, Artificial Sequence
  LRRK2 RNA guide
uaguaccgugugguucccuu

SEQ ID NO: 52781 - RNA, 20 nt, Artificial Sequence
  LRRK2 RNA guide
uggccuacuguguaguaccg

SEQ ID NO: 52782 - RNA, 20 nt, Artificial Sequence
  LRRK2 RNA guide
uguaguaccgugugguuccc

SEQ ID NO: 52783 - RNA, 20 nt, Artificial Sequence
  LRRK2 RNA guide
uguguaguaccgugugguuc

SEQ ID NO: 52784 - RNA, 21 nt, Artificial Sequence
  LRRK2 RNA guide
aaagggaaccacacgguacua

SEQ ID NO: 52785 - RNA, 21 nt, Artificial Sequence
  LRRK2 RNA guide
aaccacacgguacuacacagu

SEQ ID NO: 52786 - RNA, 21 nt, Artificial Sequence
  LRRK2 RNA guide
aagacuaaagggaaccacacg

SEQ ID NO: 52787 - RNA, 21 nt, Artificial Sequence
  LRRK2 RNA guide
aagggaaccacacgguacuac

SEQ ID NO: 52788 - RNA, 21 nt, Artificial Sequence
  LRRK2 RNA guide
acacgguacuacacaguaggc

SEQ ID NO: 52789 - RNA, 21 nt, Artificial Sequence
  LRRK2 RNA guide
accacacgguacuacacagua

SEQ ID NO: 52790 - RNA, 21 nt, Artificial Sequence
  LRRK2 RNA guide
accgugugguucccuuuaguc

SEQ ID NO: 52791 - RNA, 21 nt, Artificial Sequence
  LRRK2 RNA guide
acgguacuacacaguaggcca

SEQ ID NO: 52792 - RNA, 21 nt, Artificial Sequence
  LRRK2 RNA guide
acuaaagggaaccacacggua

SEQ ID NO: 52793 - RNA, 21 nt, Artificial Sequence
  LRRK2 RNA guide
acuguguaguaccgugugguu

SEQ ID NO: 52794 - RNA, 21 nt, Artificial Sequence
  LRRK2 RNA guide
agacuaaagggaaccacacgg

SEQ ID NO: 52795 - RNA, 21 nt, Artificial Sequence
  LRRK2 RNA guide
agggaaccacacgguacuaca

SEQ ID NO: 52796 - RNA, 21 nt, Artificial Sequence
  LRRK2 RNA guide
aguaccgugugguucccuuua

SEQ ID NO: 52797 - RNA, 21 nt, Artificial Sequence
  LRRK2 RNA guide
cacacgguacuacacaguagg

SEQ ID NO: 52798 - RNA, 21 nt, Artificial Sequence
  LRRK2 RNA guide
cacgguacuacacaguaggcc

SEQ ID NO: 52799 - RNA, 21 nt, Artificial Sequence
  LRRK2 RNA guide
ccacacgguacuacacaguag

SEQ ID NO: 52800 - RNA, 21 nt, Artificial Sequence
  LRRK2 RNA guide
ccgugugguucccuuuagucu

SEQ ID NO: 52801 - RNA, 21 nt, Artificial Sequence
  LRRK2 RNA guide
ccuacuguguaguaccgugug

SEQ ID NO: 52802 - RNA, 21 nt, Artificial Sequence
  LRRK2 RNA guide
cgugugguucccuuuagucuu

SEQ ID NO: 52803 - RNA, 21 nt, Artificial Sequence
  LRRK2 RNA guide
cuaaagggaaccacacgguac

SEQ ID NO: 52804 - RNA, 21 nt, Artificial Sequence
  LRRK2 RNA guide
cuacuguguaguaccgugugg

SEQ ID NO: 52805 - RNA, 21 nt, Artificial Sequence
  LRRK2 RNA guide
cuguguaguaccgugugguuc

SEQ ID NO: 52806 - RNA, 21 nt, Artificial Sequence
  LRRK2 RNA guide
gaaccacacgguacuacacag

SEQ ID NO: 52807 - RNA, 21 nt, Artificial Sequence
  LRRK2 RNA guide
gacuaaagggaaccacacggu

SEQ ID NO: 52808 - RNA, 21 nt, Artificial Sequence
  LRRK2 RNA guide
gccuacuguguaguaccgugu

SEQ ID NO: 52809 - RNA, 21 nt, Artificial Sequence
  LRRK2 RNA guide
ggaaccacacgguacuacaca

SEQ ID NO: 52810 - RNA, 21 nt, Artificial Sequence
  LRRK2 RNA guide
ggccuacuguguaguaccgug

SEQ ID NO: 52811 - RNA, 21 nt, Artificial Sequence
  LRRK2 RNA guide
gggaaccacacgguacuacac

SEQ ID NO: 52812 - RNA, 21 nt, Artificial Sequence
  LRRK2 RNA guide
guaccgugugguucccuuuag

SEQ ID NO: 52813 - RNA, 21 nt, Artificial Sequence
  LRRK2 RNA guide
guaguaccgugugguucccuu

SEQ ID NO: 52814 - RNA, 21 nt, Artificial Sequence
  LRRK2 RNA guide
guguaguaccgugugguuccc

SEQ ID NO: 52815 - RNA, 21 nt, Artificial Sequence
  LRRK2 RNA guide
uaaagggaaccacacgguacu

SEQ ID NO: 52816 - RNA, 21 nt, Artificial Sequence
  LRRK2 RNA guide
uaagacuaaagggaaccacac

SEQ ID NO: 52817 - RNA, 21 nt, Artificial Sequence
  LRRK2 RNA guide
uaccgugugguucccuuuagu

SEQ ID NO: 52818 - RNA, 21 nt, Artificial Sequence
  LRRK2 RNA guide
uacuguguaguaccguguggu

SEQ ID NO: 52819 - RNA, 21 nt, Artificial Sequence
  LRRK2 RNA guide
uaguaccgugugguucccuuu

SEQ ID NO: 52820 - RNA, 21 nt, Artificial Sequence
  LRRK2 RNA guide
uggccuacuguguaguaccgu

SEQ ID NO: 52821 - RNA, 21 nt, Artificial Sequence
  LRRK2 RNA guide
uguaguaccgugugguucccu

SEQ ID NO: 52822 - RNA, 21 nt, Artificial Sequence
  LRRK2 RNA guide
uguguaguaccgugugguucc

SEQ ID NO: 52823 - RNA, 21 nt, Artificial Sequence
  LRRK2 RNA guide
uuggccuacuguguaguaccg

SEQ ID NO: 52824 - RNA, 22 nt, Artificial Sequence
  LRRK2 RNA guide
aaagggaaccacacgguacuac

SEQ ID NO: 52825 - RNA, 22 nt, Artificial Sequence
  LRRK2 RNA guide
aaccacacgguacuacacagua

SEQ ID NO: 52826 - RNA, 22 nt, Artificial Sequence
  LRRK2 RNA guide
aagacuaaagggaaccacacgg

SEQ ID NO: 52827 - RNA, 22 nt, Artificial Sequence
  LRRK2 RNA guide
aagggaaccacacgguacuaca

SEQ ID NO: 52828 - RNA, 22 nt, Artificial Sequence
  LRRK2 RNA guide
acacgguacuacacaguaggcc

SEQ ID NO: 52829 - RNA, 22 nt, Artificial Sequence
  LRRK2 RNA guide
accacacgguacuacacaguag

SEQ ID NO: 52830 - RNA, 22 nt, Artificial Sequence
  LRRK2 RNA guide
accgugugguucccuuuagucu

SEQ ID NO: 52831 - RNA, 22 nt, Artificial Sequence
  LRRK2 RNA guide
acgguacuacacaguaggccaa

SEQ ID NO: 52832 - RNA, 22 nt, Artificial Sequence
  LRRK2 RNA guide
acuaaagggaaccacacgguac

SEQ ID NO: 52833 - RNA, 22 nt, Artificial Sequence
  LRRK2 RNA guide
acuguguaguaccgugugguuc

SEQ ID NO: 52834 - RNA, 22 nt, Artificial Sequence
  LRRK2 RNA guide
agacuaaagggaaccacacggu

SEQ ID NO: 52835 - RNA, 22 nt, Artificial Sequence
  LRRK2 RNA guide
agggaaccacacgguacuacac

SEQ ID NO: 52836 - RNA, 22 nt, Artificial Sequence
  LRRK2 RNA guide
aguaccgugugguucccuuuag

SEQ ID NO: 52837 - RNA, 22 nt, Artificial Sequence
  LRRK2 RNA guide
cacacgguacuacacaguaggc

SEQ ID NO: 52838 - RNA, 22 nt, Artificial Sequence
  LRRK2 RNA guide
cacgguacuacacaguaggcca

SEQ ID NO: 52839 - RNA, 22 nt, Artificial Sequence
  LRRK2 RNA guide
ccacacgguacuacacaguagg

SEQ ID NO: 52840 - RNA, 22 nt, Artificial Sequence
  LRRK2 RNA guide
ccgugugguucccuuuagucuu

SEQ ID NO: 52841 - RNA, 22 nt, Artificial Sequence
  LRRK2 RNA guide
ccuacuguguaguaccgugugg

SEQ ID NO: 52842 - RNA, 22 nt, Artificial Sequence
  LRRK2 RNA guide
cgugugguucccuuuagucuua

SEQ ID NO: 52843 - RNA, 22 nt, Artificial Sequence
  LRRK2 RNA guide
cuaaagggaaccacacgguacu

SEQ ID NO: 52844 - RNA, 22 nt, Artificial Sequence
  LRRK2 RNA guide
cuacuguguaguaccguguggu

SEQ ID NO: 52845 - RNA, 22 nt, Artificial Sequence
  LRRK2 RNA guide
cuguguaguaccgugugguucc

SEQ ID NO: 52846 - RNA, 22 nt, Artificial Sequence
  LRRK2 RNA guide
cuuggccuacuguguaguaccg

SEQ ID NO: 52847 - RNA, 22 nt, Artificial Sequence
  LRRK2 RNA guide
gaaccacacgguacuacacagu

SEQ ID NO: 52848 - RNA, 22 nt, Artificial Sequence
  LRRK2 RNA guide
gacuaaagggaaccacacggua

SEQ ID NO: 52849 - RNA, 22 nt, Artificial Sequence
  LRRK2 RNA guide
gccuacuguguaguaccgugug

SEQ ID NO: 52850 - RNA, 22 nt, Artificial Sequence
  LRRK2 RNA guide
ggaaccacacgguacuacacag

SEQ ID NO: 52851 - RNA, 22 nt, Artificial Sequence
  LRRK2 RNA guide
ggccuacuguguaguaccgugu

SEQ ID NO: 52852 - RNA, 22 nt, Artificial Sequence
  LRRK2 RNA guide
gggaaccacacgguacuacaca

SEQ ID NO: 52853 - RNA, 22 nt, Artificial Sequence
  LRRK2 RNA guide
guaccgugugguucccuuuagu

SEQ ID NO: 52854 - RNA, 22 nt, Artificial Sequence
  LRRK2 RNA guide
guaguaccgugugguucccuuu

SEQ ID NO: 52855 - RNA, 22 nt, Artificial Sequence
  LRRK2 RNA guide
guguaguaccgugugguucccu

SEQ ID NO: 52856 - RNA, 22 nt, Artificial Sequence
  LRRK2 RNA guide
uaaagggaaccacacgguacua

SEQ ID NO: 52857 - RNA, 22 nt, Artificial Sequence
  LRRK2 RNA guide
uaagacuaaagggaaccacacg

SEQ ID NO: 52858 - RNA, 22 nt, Artificial Sequence
  LRRK2 RNA guide
uaccgugugguucccuuuaguc

SEQ ID NO: 52859 - RNA, 22 nt, Artificial Sequence
  LRRK2 RNA guide
uacuguguaguaccgugugguu

SEQ ID NO: 52860 - RNA, 22 nt, Artificial Sequence
  LRRK2 RNA guide
uaguaccgugugguucccuuua

SEQ ID NO: 52861 - RNA, 22 nt, Artificial Sequence
  LRRK2 RNA guide
uggccuacuguguaguaccgug

SEQ ID NO: 52862 - RNA, 22 nt, Artificial Sequence
  LRRK2 RNA guide
uguaguaccgugugguucccuu

SEQ ID NO: 52863 - RNA, 22 nt, Artificial Sequence
  LRRK2 RNA guide
uguguaguaccgugugguuccc

SEQ ID NO: 52864 - RNA, 22 nt, Artificial Sequence
  LRRK2 RNA guide
uuaagacuaaagggaaccacac

SEQ ID NO: 52865 - RNA, 22 nt, Artificial Sequence
  LRRK2 RNA guide
uuggccuacuguguaguaccgu

SEQ ID NO: 52866 - RNA, 20 nt, Artificial Sequence
  LRRK2 RNA guide
cugugguucccuuuagucuu

SEQ ID NO: 52867 - RNA, 20 nt, Artificial Sequence
  LRRK2 RNA guide
gguucccuuuagucuuaaac

SEQ ID NO: 52868 - RNA, 20 nt, Artificial Sequence
  LRRK2 RNA guide
gugguucccuuuagucuuaa

SEQ ID NO: 52869 - RNA, 20 nt, Artificial Sequence
  LRRK2 RNA guide
guuuaguuuaagacuaaagg

SEQ ID NO: 52870 - RNA, 20 nt, Artificial Sequence
  LRRK2 RNA guide
uaguuuaagacuaaagggaa

SEQ ID NO: 52871 - RNA, 20 nt, Artificial Sequence
  LRRK2 RNA guide
ugguucccuuuagucuuaaa

SEQ ID NO: 52872 - RNA, 20 nt, Artificial Sequence
  LRRK2 RNA guide
ugugguucccuuuagucuua

SEQ ID NO: 52873 - RNA, 20 nt, Artificial Sequence
  LRRK2 RNA guide
uuaguuuaagacuaaaggga

SEQ ID NO: 52874 - RNA, 20 nt, Artificial Sequence
  LRRK2 RNA guide
uuuaguuuaagacuaaaggg

SEQ ID NO: 52875 - RNA, 21 nt, Artificial Sequence
  LRRK2 RNA guide
cugugguucccuuuagucuua

SEQ ID NO: 52876 - RNA, 21 nt, Artificial Sequence
  LRRK2 RNA guide
gguucccuuuagucuuaaacu

SEQ ID NO: 52877 - RNA, 21 nt, Artificial Sequence
  LRRK2 RNA guide
gugguucccuuuagucuuaaa

SEQ ID NO: 52878 - RNA, 21 nt, Artificial Sequence
  LRRK2 RNA guide
guuuaguuuaagacuaaaggg

SEQ ID NO: 52879 - RNA, 21 nt, Artificial Sequence
  LRRK2 RNA guide
ugguucccuuuagucuuaaac

SEQ ID NO: 52880 - RNA, 21 nt, Artificial Sequence
  LRRK2 RNA guide
ugugguucccuuuagucuuaa

SEQ ID NO: 52881 - RNA, 22 nt, Artificial Sequence
  LRRK2 RNA guide
cugugguucccuuuagucuuaa

SEQ ID NO: 52882 - RNA, 22 nt, Artificial Sequence
  LRRK2 RNA guide
gguucccuuuagucuuaaacua

SEQ ID NO: 52883 - RNA, 22 nt, Artificial Sequence
  LRRK2 RNA guide
gugguucccuuuagucuuaaac

SEQ ID NO: 52884 - RNA, 22 nt, Artificial Sequence
  LRRK2 RNA guide
guuuaguuuaagacuaaaggga

SEQ ID NO: 52885 - RNA, 22 nt, Artificial Sequence
  LRRK2 RNA guide
ugguucccuuuagucuuaaacu

SEQ ID NO: 52886 - RNA, 22 nt, Artificial Sequence
  LRRK2 RNA guide
ugugguucccuuuagucuuaaa

SEQ ID NO: 52887 - RNA, 22 nt, Artificial Sequence
  LRRK2 RNA guide
uguuuaguuuaagacuaaaggg

SEQ ID NO: 52888 - RNA, 20 nt, Artificial Sequence
  LRRK2 RNA guide
aaacacaggguacuacacag

SEQ ID NO: 52889 - RNA, 20 nt, Artificial Sequence
  LRRK2 RNA guide
aaagggaaacacaggguacu

SEQ ID NO: 52890 - RNA, 20 nt, Artificial Sequence
  LRRK2 RNA guide
aacacaggguacuacacagu

SEQ ID NO: 52891 - RNA, 20 nt, Artificial Sequence
  LRRK2 RNA guide
aagacuaaagggaaacacag

SEQ ID NO: 52892 - RNA, 20 nt, Artificial Sequence
  LRRK2 RNA guide
aagggaaacacaggguacua

SEQ ID NO: 52893 - RNA, 20 nt, Artificial Sequence
  LRRK2 RNA guide
acccuguguuucccuuuagu

SEQ ID NO: 52894 - RNA, 20 nt, Artificial Sequence
  LRRK2 RNA guide
acuaaagggaaacacagggu

SEQ ID NO: 52895 - RNA, 20 nt, Artificial Sequence
  LRRK2 RNA guide
acuguguaguacccuguguu

SEQ ID NO: 52896 - RNA, 20 nt, Artificial Sequence
  LRRK2 RNA guide
agacuaaagggaaacacagg

SEQ ID NO: 52897 - RNA, 20 nt, Artificial Sequence
  LRRK2 RNA guide
agggaaacacaggguacuac

SEQ ID NO: 52898 - RNA, 20 nt, Artificial Sequence
  LRRK2 RNA guide
aguacccuguguuucccuuu

SEQ ID NO: 52899 - RNA, 20 nt, Artificial Sequence
  LRRK2 RNA guide
aguuuaagacuaaagggaaa

SEQ ID NO: 52900 - RNA, 20 nt, Artificial Sequence
  LRRK2 RNA guide
cccuguguuucccuuuaguc

SEQ ID NO: 52901 - RNA, 20 nt, Artificial Sequence
  LRRK2 RNA guide
ccuguguuucccuuuagucu

SEQ ID NO: 52902 - RNA, 20 nt, Artificial Sequence
  LRRK2 RNA guide
cuaaagggaaacacagggua

SEQ ID NO: 52903 - RNA, 20 nt, Artificial Sequence
  LRRK2 RNA guide
cuguguaguacccuguguuu

SEQ ID NO: 52904 - RNA, 20 nt, Artificial Sequence
  LRRK2 RNA guide
cuguguuucccuuuagucuu

SEQ ID NO: 52905 - RNA, 20 nt, Artificial Sequence
  LRRK2 RNA guide
gaaacacaggguacuacaca

SEQ ID NO: 52906 - RNA, 20 nt, Artificial Sequence
  LRRK2 RNA guide
gacuaaagggaaacacaggg

SEQ ID NO: 52907 - RNA, 20 nt, Artificial Sequence
  LRRK2 RNA guide
ggaaacacaggguacuacac

SEQ ID NO: 52908 - RNA, 20 nt, Artificial Sequence
  LRRK2 RNA guide
gggaaacacaggguacuaca

SEQ ID NO: 52909 - RNA, 20 nt, Artificial Sequence
  LRRK2 RNA guide
guacccuguguuucccuuua

SEQ ID NO: 52910 - RNA, 20 nt, Artificial Sequence
  LRRK2 RNA guide
guaguacccuguguuucccu

SEQ ID NO: 52911 - RNA, 20 nt, Artificial Sequence
  LRRK2 RNA guide
guguaguacccuguguuucc

SEQ ID NO: 52912 - RNA, 20 nt, Artificial Sequence
  LRRK2 RNA guide
guguuucccuuuagucuuaa

SEQ ID NO: 52913 - RNA, 20 nt, Artificial Sequence
  LRRK2 RNA guide
guuuaagacuaaagggaaac

SEQ ID NO: 52914 - RNA, 20 nt, Artificial Sequence
  LRRK2 RNA guide
guuucccuuuagucuuaaac

SEQ ID NO: 52915 - RNA, 20 nt, Artificial Sequence
  LRRK2 RNA guide
uaaagggaaacacaggguac

SEQ ID NO: 52916 - RNA, 20 nt, Artificial Sequence
  LRRK2 RNA guide
uaagacuaaagggaaacaca

SEQ ID NO: 52917 - RNA, 20 nt, Artificial Sequence
  LRRK2 RNA guide
uacccuguguuucccuuuag

SEQ ID NO: 52918 - RNA, 20 nt, Artificial Sequence
  LRRK2 RNA guide
uacuguguaguacccugugu

SEQ ID NO: 52919 - RNA, 20 nt, Artificial Sequence
  LRRK2 RNA guide
uaguacccuguguuucccuu

SEQ ID NO: 52920 - RNA, 20 nt, Artificial Sequence
  LRRK2 RNA guide
uguaguacccuguguuuccc

SEQ ID NO: 52921 - RNA, 20 nt, Artificial Sequence
  LRRK2 RNA guide
uguguaguacccuguguuuc

SEQ ID NO: 52922 - RNA, 20 nt, Artificial Sequence
  LRRK2 RNA guide
uguguuucccuuuagucuua

SEQ ID NO: 52923 - RNA, 20 nt, Artificial Sequence
  LRRK2 RNA guide
uguuucccuuuagucuuaaa

SEQ ID NO: 52924 - RNA, 20 nt, Artificial Sequence
  LRRK2 RNA guide
uuaagacuaaagggaaacac

SEQ ID NO: 52925 - RNA, 20 nt, Artificial Sequence
  LRRK2 RNA guide
uuuaagacuaaagggaaaca

SEQ ID NO: 52926 - RNA, 21 nt, Artificial Sequence
  LRRK2 RNA guide
aaacacaggguacuacacagu

SEQ ID NO: 52927 - RNA, 21 nt, Artificial Sequence
  LRRK2 RNA guide
aaagggaaacacaggguacua

SEQ ID NO: 52928 - RNA, 21 nt, Artificial Sequence
  LRRK2 RNA guide
aacacaggguacuacacagua

SEQ ID NO: 52929 - RNA, 21 nt, Artificial Sequence
  LRRK2 RNA guide
aagacuaaagggaaacacagg

SEQ ID NO: 52930 - RNA, 21 nt, Artificial Sequence
  LRRK2 RNA guide
aagggaaacacaggguacuac

SEQ ID NO: 52931 - RNA, 21 nt, Artificial Sequence
  LRRK2 RNA guide
acccuguguuucccuuuaguc

SEQ ID NO: 52932 - RNA, 21 nt, Artificial Sequence
  LRRK2 RNA guide
acuaaagggaaacacagggua

SEQ ID NO: 52933 - RNA, 21 nt, Artificial Sequence
  LRRK2 RNA guide
acuguguaguacccuguguuu

SEQ ID NO: 52934 - RNA, 21 nt, Artificial Sequence
  LRRK2 RNA guide
agacuaaagggaaacacaggg

SEQ ID NO: 52935 - RNA, 21 nt, Artificial Sequence
  LRRK2 RNA guide
agggaaacacaggguacuaca

SEQ ID NO: 52936 - RNA, 21 nt, Artificial Sequence
  LRRK2 RNA guide
aguacccuguguuucccuuua

SEQ ID NO: 52937 - RNA, 21 nt, Artificial Sequence
  LRRK2 RNA guide
aguuuaagacuaaagggaaac

SEQ ID NO: 52938 - RNA, 21 nt, Artificial Sequence
  LRRK2 RNA guide
cccuguguuucccuuuagucu

SEQ ID NO: 52939 - RNA, 21 nt, Artificial Sequence
  LRRK2 RNA guide
ccuguguuucccuuuagucuu

SEQ ID NO: 52940 - RNA, 21 nt, Artificial Sequence
  LRRK2 RNA guide
cuaaagggaaacacaggguac

SEQ ID NO: 52941 - RNA, 21 nt, Artificial Sequence
  LRRK2 RNA guide
cuacuguguaguacccugugu

SEQ ID NO: 52942 - RNA, 21 nt, Artificial Sequence
  LRRK2 RNA guide
cuguguaguacccuguguuuc

SEQ ID NO: 52943 - RNA, 21 nt, Artificial Sequence
  LRRK2 RNA guide
cuguguuucccuuuagucuua

SEQ ID NO: 52944 - RNA, 21 nt, Artificial Sequence
  LRRK2 RNA guide
gaaacacaggguacuacacag

SEQ ID NO: 52945 - RNA, 21 nt, Artificial Sequence
  LRRK2 RNA guide
gacuaaagggaaacacagggu

SEQ ID NO: 52946 - RNA, 21 nt, Artificial Sequence
  LRRK2 RNA guide
ggaaacacaggguacuacaca

SEQ ID NO: 52947 - RNA, 21 nt, Artificial Sequence
  LRRK2 RNA guide
gggaaacacaggguacuacac

SEQ ID NO: 52948 - RNA, 21 nt, Artificial Sequence
  LRRK2 RNA guide
guacccuguguuucccuuuag

SEQ ID NO: 52949 - RNA, 21 nt, Artificial Sequence
  LRRK2 RNA guide
guaguacccuguguuucccuu

SEQ ID NO: 52950 - RNA, 21 nt, Artificial Sequence
  LRRK2 RNA guide
guguaguacccuguguuuccc

SEQ ID NO: 52951 - RNA, 21 nt, Artificial Sequence
  LRRK2 RNA guide
guguuucccuuuagucuuaaa

SEQ ID NO: 52952 - RNA, 21 nt, Artificial Sequence
  LRRK2 RNA guide
guuuaagacuaaagggaaaca

SEQ ID NO: 52953 - RNA, 21 nt, Artificial Sequence
  LRRK2 RNA guide
guuucccuuuagucuuaaacu

SEQ ID NO: 52954 - RNA, 21 nt, Artificial Sequence
  LRRK2 RNA guide
uaaagggaaacacaggguacu

SEQ ID NO: 52955 - RNA, 21 nt, Artificial Sequence
  LRRK2 RNA guide
uaagacuaaagggaaacacag

SEQ ID NO: 52956 - RNA, 21 nt, Artificial Sequence
  LRRK2 RNA guide
uacccuguguuucccuuuagu

SEQ ID NO: 52957 - RNA, 21 nt, Artificial Sequence
  LRRK2 RNA guide
uacuguguaguacccuguguu

SEQ ID NO: 52958 - RNA, 21 nt, Artificial Sequence
  LRRK2 RNA guide
uaguacccuguguuucccuuu

SEQ ID NO: 52959 - RNA, 21 nt, Artificial Sequence
  LRRK2 RNA guide
uguaguacccuguguuucccu

SEQ ID NO: 52960 - RNA, 21 nt, Artificial Sequence
  LRRK2 RNA guide
uguguaguacccuguguuucc

SEQ ID NO: 52961 - RNA, 21 nt, Artificial Sequence
  LRRK2 RNA guide
uguguuucccuuuagucuuaa

SEQ ID NO: 52962 - RNA, 21 nt, Artificial Sequence
  LRRK2 RNA guide
uguuucccuuuagucuuaaac

SEQ ID NO: 52963 - RNA, 21 nt, Artificial Sequence
  LRRK2 RNA guide
uuaagacuaaagggaaacaca

SEQ ID NO: 52964 - RNA, 21 nt, Artificial Sequence
  LRRK2 RNA guide
uuuaagacuaaagggaaacac

SEQ ID NO: 52965 - RNA, 22 nt, Artificial Sequence
  LRRK2 RNA guide
aaacacaggguacuacacagua

SEQ ID NO: 52966 - RNA, 22 nt, Artificial Sequence
  LRRK2 RNA guide
aaagggaaacacaggguacuac

SEQ ID NO: 52967 - RNA, 22 nt, Artificial Sequence
  LRRK2 RNA guide
aacacaggguacuacacaguag

SEQ ID NO: 52968 - RNA, 22 nt, Artificial Sequence
  LRRK2 RNA guide
aagacuaaagggaaacacaggg

SEQ ID NO: 52969 - RNA, 22 nt, Artificial Sequence
  LRRK2 RNA guide
aagggaaacacaggguacuaca

SEQ ID NO: 52970 - RNA, 22 nt, Artificial Sequence
  LRRK2 RNA guide
acccuguguuucccuuuagucu

SEQ ID NO: 52971 - RNA, 22 nt, Artificial Sequence
  LRRK2 RNA guide
acuaaagggaaacacaggguac

SEQ ID NO: 52972 - RNA, 22 nt, Artificial Sequence
  LRRK2 RNA guide
acuguguaguacccuguguuuc

SEQ ID NO: 52973 - RNA, 22 nt, Artificial Sequence
  LRRK2 RNA guide
agacuaaagggaaacacagggu

SEQ ID NO: 52974 - RNA, 22 nt, Artificial Sequence
  LRRK2 RNA guide
agggaaacacaggguacuacac

SEQ ID NO: 52975 - RNA, 22 nt, Artificial Sequence
  LRRK2 RNA guide
aguacccuguguuucccuuuag

SEQ ID NO: 52976 - RNA, 22 nt, Artificial Sequence
  LRRK2 RNA guide
aguuuaagacuaaagggaaaca

SEQ ID NO: 52977 - RNA, 22 nt, Artificial Sequence
  LRRK2 RNA guide
cccuguguuucccuuuagucuu

SEQ ID NO: 52978 - RNA, 22 nt, Artificial Sequence
  LRRK2 RNA guide
ccuacuguguaguacccugugu

SEQ ID NO: 52979 - RNA, 22 nt, Artificial Sequence
  LRRK2 RNA guide
ccuguguuucccuuuagucuua

SEQ ID NO: 52980 - RNA, 22 nt, Artificial Sequence
  LRRK2 RNA guide
cuaaagggaaacacaggguacu

SEQ ID NO: 52981 - RNA, 22 nt, Artificial Sequence
  LRRK2 RNA guide
cuacuguguaguacccuguguu

SEQ ID NO: 52982 - RNA, 22 nt, Artificial Sequence
  LRRK2 RNA guide
cuguguaguacccuguguuucc

SEQ ID NO: 52983 - RNA, 22 nt, Artificial Sequence
  LRRK2 RNA guide
cuguguuucccuuuagucuuaa

SEQ ID NO: 52984 - RNA, 22 nt, Artificial Sequence
  LRRK2 RNA guide
gaaacacaggguacuacacagu

SEQ ID NO: 52985 - RNA, 22 nt, Artificial Sequence
  LRRK2 RNA guide
gacuaaagggaaacacagggua

SEQ ID NO: 52986 - RNA, 22 nt, Artificial Sequence
  LRRK2 RNA guide
ggaaacacaggguacuacacag

SEQ ID NO: 52987 - RNA, 22 nt, Artificial Sequence
  LRRK2 RNA guide
gggaaacacaggguacuacaca

SEQ ID NO: 52988 - RNA, 22 nt, Artificial Sequence
  LRRK2 RNA guide
guacccuguguuucccuuuagu

SEQ ID NO: 52989 - RNA, 22 nt, Artificial Sequence
  LRRK2 RNA guide
guaguacccuguguuucccuuu

SEQ ID NO: 52990 - RNA, 22 nt, Artificial Sequence
  LRRK2 RNA guide
guguaguacccuguguuucccu

SEQ ID NO: 52991 - RNA, 22 nt, Artificial Sequence
  LRRK2 RNA guide
guguuucccuuuagucuuaaac

SEQ ID NO: 52992 - RNA, 22 nt, Artificial Sequence
  LRRK2 RNA guide
guuuaagacuaaagggaaacac

SEQ ID NO: 52993 - RNA, 22 nt, Artificial Sequence
  LRRK2 RNA guide
guuucccuuuagucuuaaacua

SEQ ID NO: 52994 - RNA, 22 nt, Artificial Sequence
  LRRK2 RNA guide
uaaagggaaacacaggguacua

SEQ ID NO: 52995 - RNA, 22 nt, Artificial Sequence
  LRRK2 RNA guide
uaagacuaaagggaaacacagg

SEQ ID NO: 52996 - RNA, 22 nt, Artificial Sequence
  LRRK2 RNA guide
uacccuguguuucccuuuaguc

SEQ ID NO: 52997 - RNA, 22 nt, Artificial Sequence
  LRRK2 RNA guide
uacuguguaguacccuguguuu

SEQ ID NO: 52998 - RNA, 22 nt, Artificial Sequence
  LRRK2 RNA guide
uaguacccuguguuucccuuua

SEQ ID NO: 52999 - RNA, 22 nt, Artificial Sequence
  LRRK2 RNA guide
uaguuuaagacuaaagggaaac

SEQ ID NO: 53000 - RNA, 22 nt, Artificial Sequence
  LRRK2 RNA guide
uguaguacccuguguuucccuu

SEQ ID NO: 53001 - RNA, 22 nt, Artificial Sequence
  LRRK2 RNA guide
uguguaguacccuguguuuccc

SEQ ID NO: 53002 - RNA, 22 nt, Artificial Sequence
  LRRK2 RNA guide
uguguuucccuuuagucuuaaa

SEQ ID NO: 53003 - RNA, 22 nt, Artificial Sequence
  LRRK2 RNA guide
uguuucccuuuagucuuaaacu

SEQ ID NO: 53004 - RNA, 22 nt, Artificial Sequence
  LRRK2 RNA guide
uuaagacuaaagggaaacacag

SEQ ID NO: 53005 - RNA, 22 nt, Artificial Sequence
  LRRK2 RNA guide
uuuaagacuaaagggaaacaca

SEQ ID NO: 53006 - RNA, 20 nt, Artificial Sequence
  LRRK2 RNA guide
aaugucuugcaaagcacaag

SEQ ID NO: 53007 - RNA, 20 nt, Artificial Sequence
  LRRK2 RNA guide
agcucuugugcuuugcaaga

SEQ ID NO: 53008 - RNA, 20 nt, Artificial Sequence
  LRRK2 RNA guide
auaaugucuugcaaagcaca

SEQ ID NO: 53009 - RNA, 20 nt, Artificial Sequence
  LRRK2 RNA guide
auauucauucagcucuugug

SEQ ID NO: 53010 - RNA, 20 nt, Artificial Sequence
  LRRK2 RNA guide
augucuugcaaagcacaaga

SEQ ID NO: 53011 - RNA, 20 nt, Artificial Sequence
  LRRK2 RNA guide
auuauaaugucuugcaaagc

SEQ ID NO: 53012 - RNA, 20 nt, Artificial Sequence
  LRRK2 RNA guide
auucagcucuugugcuuugc

SEQ ID NO: 53013 - RNA, 20 nt, Artificial Sequence
  LRRK2 RNA guide
auucauucagcucuugugcu

SEQ ID NO: 53014 - RNA, 20 nt, Artificial Sequence
  LRRK2 RNA guide
caaagcacaagagcugaaug

SEQ ID NO: 53015 - RNA, 20 nt, Artificial Sequence
  LRRK2 RNA guide
cagcucuugugcuuugcaag

SEQ ID NO: 53016 - RNA, 20 nt, Artificial Sequence
  LRRK2 RNA guide
cauucagcucuugugcuuug

SEQ ID NO: 53017 - RNA, 20 nt, Artificial Sequence
  LRRK2 RNA guide
cucuugugcuuugcaagaca

SEQ ID NO: 53018 - RNA, 20 nt, Artificial Sequence
  LRRK2 RNA guide
cuugcaaagcacaagagcug

SEQ ID NO: 53019 - RNA, 20 nt, Artificial Sequence
  LRRK2 RNA guide
cuugugcuuugcaagacauu

SEQ ID NO: 53020 - RNA, 20 nt, Artificial Sequence
  LRRK2 RNA guide
gcaaagcacaagagcugaau

SEQ ID NO: 53021 - RNA, 20 nt, Artificial Sequence
  LRRK2 RNA guide
gcauuauuauaaugucuugc

SEQ ID NO: 53022 - RNA, 20 nt, Artificial Sequence
  LRRK2 RNA guide
gcucuugugcuuugcaagac

SEQ ID NO: 53023 - RNA, 20 nt, Artificial Sequence
  LRRK2 RNA guide
gcuuugcaagacauuauaau

SEQ ID NO: 53024 - RNA, 20 nt, Artificial Sequence
  LRRK2 RNA guide
gucuugcaaagcacaagagc

SEQ ID NO: 53025 - RNA, 20 nt, Artificial Sequence
  LRRK2 RNA guide
gugcuuugcaagacauuaua

SEQ ID NO: 53026 - RNA, 20 nt, Artificial Sequence
  LRRK2 RNA guide
uaaugucuugcaaagcacaa

SEQ ID NO: 53027 - RNA, 20 nt, Artificial Sequence
  LRRK2 RNA guide
uauaaugucuugcaaagcac

SEQ ID NO: 53028 - RNA, 20 nt, Artificial Sequence
  LRRK2 RNA guide
uauauucauucagcucuugu

SEQ ID NO: 53029 - RNA, 20 nt, Artificial Sequence
  LRRK2 RNA guide
uauucauucagcucuugugc

SEQ ID NO: 53030 - RNA, 20 nt, Artificial Sequence
  LRRK2 RNA guide
ucagcucuugugcuuugcaa

SEQ ID NO: 53031 - RNA, 20 nt, Artificial Sequence
  LRRK2 RNA guide
ucauucagcucuugugcuuu

SEQ ID NO: 53032 - RNA, 20 nt, Artificial Sequence
  LRRK2 RNA guide
ucuugcaaagcacaagagcu

SEQ ID NO: 53033 - RNA, 20 nt, Artificial Sequence
  LRRK2 RNA guide
ucuugugcuuugcaagacau

SEQ ID NO: 53034 - RNA, 20 nt, Artificial Sequence
  LRRK2 RNA guide
ugcaaagcacaagagcugaa

SEQ ID NO: 53035 - RNA, 20 nt, Artificial Sequence
  LRRK2 RNA guide
ugcuuugcaagacauuauaa

SEQ ID NO: 53036 - RNA, 20 nt, Artificial Sequence
  LRRK2 RNA guide
ugucuugcaaagcacaagag

SEQ ID NO: 53037 - RNA, 20 nt, Artificial Sequence
  LRRK2 RNA guide
ugugcuuugcaagacauuau

SEQ ID NO: 53038 - RNA, 20 nt, Artificial Sequence
  LRRK2 RNA guide
uuauaaugucuugcaaagca

SEQ ID NO: 53039 - RNA, 20 nt, Artificial Sequence
  LRRK2 RNA guide
uucagcucuugugcuuugca

SEQ ID NO: 53040 - RNA, 20 nt, Artificial Sequence
  LRRK2 RNA guide
uucauucagcucuugugcuu

SEQ ID NO: 53041 - RNA, 20 nt, Artificial Sequence
  LRRK2 RNA guide
uugcaaagcacaagagcuga

SEQ ID NO: 53042 - RNA, 20 nt, Artificial Sequence
  LRRK2 RNA guide
uugugcuuugcaagacauua

SEQ ID NO: 53043 - RNA, 21 nt, Artificial Sequence
  LRRK2 RNA guide
aaugucuugcaaagcacaaga

SEQ ID NO: 53044 - RNA, 21 nt, Artificial Sequence
  LRRK2 RNA guide
agcucuugugcuuugcaagac

SEQ ID NO: 53045 - RNA, 21 nt, Artificial Sequence
  LRRK2 RNA guide
auaaugucuugcaaagcacaa

SEQ ID NO: 53046 - RNA, 21 nt, Artificial Sequence
  LRRK2 RNA guide
auauucauucagcucuugugc

SEQ ID NO: 53047 - RNA, 21 nt, Artificial Sequence
  LRRK2 RNA guide
augucuugcaaagcacaagag

SEQ ID NO: 53048 - RNA, 21 nt, Artificial Sequence
  LRRK2 RNA guide
auucagcucuugugcuuugca

SEQ ID NO: 53049 - RNA, 21 nt, Artificial Sequence
  LRRK2 RNA guide
auucauucagcucuugugcuu

SEQ ID NO: 53050 - RNA, 21 nt, Artificial Sequence
  LRRK2 RNA guide
caaagcacaagagcugaauga

SEQ ID NO: 53051 - RNA, 21 nt, Artificial Sequence
  LRRK2 RNA guide
cagcucuugugcuuugcaaga

SEQ ID NO: 53052 - RNA, 21 nt, Artificial Sequence
  LRRK2 RNA guide
cauucagcucuugugcuuugc

SEQ ID NO: 53053 - RNA, 21 nt, Artificial Sequence
  LRRK2 RNA guide
cucuugugcuuugcaagacau

SEQ ID NO: 53054 - RNA, 21 nt, Artificial Sequence
  LRRK2 RNA guide
cuugcaaagcacaagagcuga

SEQ ID NO: 53055 - RNA, 21 nt, Artificial Sequence
  LRRK2 RNA guide
cuugugcuuugcaagacauua

SEQ ID NO: 53056 - RNA, 21 nt, Artificial Sequence
  LRRK2 RNA guide
gcaaagcacaagagcugaaug

SEQ ID NO: 53057 - RNA, 21 nt, Artificial Sequence
  LRRK2 RNA guide
gcucuugugcuuugcaagaca

SEQ ID NO: 53058 - RNA, 21 nt, Artificial Sequence
  LRRK2 RNA guide
guauauucauucagcucuugu

SEQ ID NO: 53059 - RNA, 21 nt, Artificial Sequence
  LRRK2 RNA guide
gucuugcaaagcacaagagcu

SEQ ID NO: 53060 - RNA, 21 nt, Artificial Sequence
  LRRK2 RNA guide
gugcuuugcaagacauuauaa

SEQ ID NO: 53061 - RNA, 21 nt, Artificial Sequence
  LRRK2 RNA guide
uaaugucuugcaaagcacaag

SEQ ID NO: 53062 - RNA, 21 nt, Artificial Sequence
  LRRK2 RNA guide
uauaaugucuugcaaagcaca

SEQ ID NO: 53063 - RNA, 21 nt, Artificial Sequence
  LRRK2 RNA guide
uauauucauucagcucuugug

SEQ ID NO: 53064 - RNA, 21 nt, Artificial Sequence
  LRRK2 RNA guide
uauucauucagcucuugugcu

SEQ ID NO: 53065 - RNA, 21 nt, Artificial Sequence
  LRRK2 RNA guide
ucagcucuugugcuuugcaag

SEQ ID NO: 53066 - RNA, 21 nt, Artificial Sequence
  LRRK2 RNA guide
ucauucagcucuugugcuuug

SEQ ID NO: 53067 - RNA, 21 nt, Artificial Sequence
  LRRK2 RNA guide
ucuugcaaagcacaagagcug

SEQ ID NO: 53068 - RNA, 21 nt, Artificial Sequence
  LRRK2 RNA guide
ucuugugcuuugcaagacauu

SEQ ID NO: 53069 - RNA, 21 nt, Artificial Sequence
  LRRK2 RNA guide
ugcaaagcacaagagcugaau

SEQ ID NO: 53070 - RNA, 21 nt, Artificial Sequence
  LRRK2 RNA guide
ugucuugcaaagcacaagagc

SEQ ID NO: 53071 - RNA, 21 nt, Artificial Sequence
  LRRK2 RNA guide
ugugcuuugcaagacauuaua

SEQ ID NO: 53072 - RNA, 21 nt, Artificial Sequence
  LRRK2 RNA guide
uuauaaugucuugcaaagcac

SEQ ID NO: 53073 - RNA, 21 nt, Artificial Sequence
  LRRK2 RNA guide
uucagcucuugugcuuugcaa

SEQ ID NO: 53074 - RNA, 21 nt, Artificial Sequence
  LRRK2 RNA guide
uucauucagcucuugugcuuu

SEQ ID NO: 53075 - RNA, 21 nt, Artificial Sequence
  LRRK2 RNA guide
uugcaaagcacaagagcugaa

SEQ ID NO: 53076 - RNA, 21 nt, Artificial Sequence
  LRRK2 RNA guide
uugugcuuugcaagacauuau

SEQ ID NO: 53077 - RNA, 22 nt, Artificial Sequence
  LRRK2 RNA guide
aaugucuugcaaagcacaagag

SEQ ID NO: 53078 - RNA, 22 nt, Artificial Sequence
  LRRK2 RNA guide
agcucuugugcuuugcaagaca

SEQ ID NO: 53079 - RNA, 22 nt, Artificial Sequence
  LRRK2 RNA guide
auaaugucuugcaaagcacaag

SEQ ID NO: 53080 - RNA, 22 nt, Artificial Sequence
  LRRK2 RNA guide
auauucauucagcucuugugcu

SEQ ID NO: 53081 - RNA, 22 nt, Artificial Sequence
  LRRK2 RNA guide
augucuugcaaagcacaagagc

SEQ ID NO: 53082 - RNA, 22 nt, Artificial Sequence
  LRRK2 RNA guide
auuauaaugucuugcaaagcac

SEQ ID NO: 53083 - RNA, 22 nt, Artificial Sequence
  LRRK2 RNA guide
auucagcucuugugcuuugcaa

SEQ ID NO: 53084 - RNA, 22 nt, Artificial Sequence
  LRRK2 RNA guide
auucauucagcucuugugcuuu

SEQ ID NO: 53085 - RNA, 22 nt, Artificial Sequence
  LRRK2 RNA guide
caaagcacaagagcugaaugaa

SEQ ID NO: 53086 - RNA, 22 nt, Artificial Sequence
  LRRK2 RNA guide
cagcucuugugcuuugcaagac

SEQ ID NO: 53087 - RNA, 22 nt, Artificial Sequence
  LRRK2 RNA guide
cauucagcucuugugcuuugca

SEQ ID NO: 53088 - RNA, 22 nt, Artificial Sequence
  LRRK2 RNA guide
cucuugugcuuugcaagacauu

SEQ ID NO: 53089 - RNA, 22 nt, Artificial Sequence
  LRRK2 RNA guide
cuugcaaagcacaagagcugaa

SEQ ID NO: 53090 - RNA, 22 nt, Artificial Sequence
  LRRK2 RNA guide
cuugugcuuugcaagacauuau

SEQ ID NO: 53091 - RNA, 22 nt, Artificial Sequence
  LRRK2 RNA guide
gcaaagcacaagagcugaauga

SEQ ID NO: 53092 - RNA, 22 nt, Artificial Sequence
  LRRK2 RNA guide
gcucuugugcuuugcaagacau

SEQ ID NO: 53093 - RNA, 22 nt, Artificial Sequence
  LRRK2 RNA guide
guauauucauucagcucuugug

SEQ ID NO: 53094 - RNA, 22 nt, Artificial Sequence
  LRRK2 RNA guide
gucuugcaaagcacaagagcug

SEQ ID NO: 53095 - RNA, 22 nt, Artificial Sequence
  LRRK2 RNA guide
gugcuuugcaagacauuauaau

SEQ ID NO: 53096 - RNA, 22 nt, Artificial Sequence
  LRRK2 RNA guide
uaaugucuugcaaagcacaaga

SEQ ID NO: 53097 - RNA, 22 nt, Artificial Sequence
  LRRK2 RNA guide
uauaaugucuugcaaagcacaa

SEQ ID NO: 53098 - RNA, 22 nt, Artificial Sequence
  LRRK2 RNA guide
uauauucauucagcucuugugc

SEQ ID NO: 53099 - RNA, 22 nt, Artificial Sequence
  LRRK2 RNA guide
uauucauucagcucuugugcuu

SEQ ID NO: 53100 - RNA, 22 nt, Artificial Sequence
  LRRK2 RNA guide
ucagcucuugugcuuugcaaga

SEQ ID NO: 53101 - RNA, 22 nt, Artificial Sequence
  LRRK2 RNA guide
ucauucagcucuugugcuuugc

SEQ ID NO: 53102 - RNA, 22 nt, Artificial Sequence
  LRRK2 RNA guide
ucuugcaaagcacaagagcuga

SEQ ID NO: 53103 - RNA, 22 nt, Artificial Sequence
  LRRK2 RNA guide
ucuugugcuuugcaagacauua

SEQ ID NO: 53104 - RNA, 22 nt, Artificial Sequence
  LRRK2 RNA guide
ugcaaagcacaagagcugaaug

SEQ ID NO: 53105 - RNA, 22 nt, Artificial Sequence
  LRRK2 RNA guide
uguauauucauucagcucuugu

SEQ ID NO: 53106 - RNA, 22 nt, Artificial Sequence
  LRRK2 RNA guide
ugucuugcaaagcacaagagcu

SEQ ID NO: 53107 - RNA, 22 nt, Artificial Sequence
  LRRK2 RNA guide
ugugcuuugcaagacauuauaa

SEQ ID NO: 53108 - RNA, 22 nt, Artificial Sequence
  LRRK2 RNA guide
uuauaaugucuugcaaagcaca

SEQ ID NO: 53109 - RNA, 22 nt, Artificial Sequence
  LRRK2 RNA guide
uucagcucuugugcuuugcaag

SEQ ID NO: 53110 - RNA, 22 nt, Artificial Sequence
  LRRK2 RNA guide
uucauucagcucuugugcuuug

SEQ ID NO: 53111 - RNA, 22 nt, Artificial Sequence
  LRRK2 RNA guide
uugcaaagcacaagagcugaau

SEQ ID NO: 53112 - RNA, 22 nt, Artificial Sequence
  LRRK2 RNA guide
uugugcuuugcaagacauuaua

SEQ ID NO: 53113 - RNA, 20 nt, Artificial Sequence
  LRRK2 RNA guide
aaugucuugcgaagcacaag

SEQ ID NO: 53114 - RNA, 20 nt, Artificial Sequence
  LRRK2 RNA guide
agcucuugugcuucgcaaga

SEQ ID NO: 53115 - RNA, 20 nt, Artificial Sequence
  LRRK2 RNA guide
auaaugucuugcgaagcaca

SEQ ID NO: 53116 - RNA, 20 nt, Artificial Sequence
  LRRK2 RNA guide
augucuugcgaagcacaaga

SEQ ID NO: 53117 - RNA, 20 nt, Artificial Sequence
  LRRK2 RNA guide
auuauaaugucuugcgaagc

SEQ ID NO: 53118 - RNA, 20 nt, Artificial Sequence
  LRRK2 RNA guide
auucagcucuugugcuucgc

SEQ ID NO: 53119 - RNA, 20 nt, Artificial Sequence
  LRRK2 RNA guide
cagcucuugugcuucgcaag

SEQ ID NO: 53120 - RNA, 20 nt, Artificial Sequence
  LRRK2 RNA guide
cauuauuauaaugucuugcg

SEQ ID NO: 53121 - RNA, 20 nt, Artificial Sequence
  LRRK2 RNA guide
cauucagcucuugugcuucg

SEQ ID NO: 53122 - RNA, 20 nt, Artificial Sequence
  LRRK2 RNA guide
cgaagcacaagagcugaaug

SEQ ID NO: 53123 - RNA, 20 nt, Artificial Sequence
  LRRK2 RNA guide
cucuugugcuucgcaagaca

SEQ ID NO: 53124 - RNA, 20 nt, Artificial Sequence
  LRRK2 RNA guide
cuucgcaagacauuauaaua

SEQ ID NO: 53125 - RNA, 20 nt, Artificial Sequence
  LRRK2 RNA guide
cuugcgaagcacaagagcug

SEQ ID NO: 53126 - RNA, 20 nt, Artificial Sequence
  LRRK2 RNA guide
cuugugcuucgcaagacauu

SEQ ID NO: 53127 - RNA, 20 nt, Artificial Sequence
  LRRK2 RNA guide
gcgaagcacaagagcugaau

SEQ ID NO: 53128 - RNA, 20 nt, Artificial Sequence
  LRRK2 RNA guide
gcucuugugcuucgcaagac

SEQ ID NO: 53129 - RNA, 20 nt, Artificial Sequence
  LRRK2 RNA guide
gcuucgcaagacauuauaau

SEQ ID NO: 53130 - RNA, 20 nt, Artificial Sequence
  LRRK2 RNA guide
gucuugcgaagcacaagagc

SEQ ID NO: 53131 - RNA, 20 nt, Artificial Sequence
  LRRK2 RNA guide
gugcuucgcaagacauuaua

SEQ ID NO: 53132 - RNA, 20 nt, Artificial Sequence
  LRRK2 RNA guide
uaaugucuugcgaagcacaa

SEQ ID NO: 53133 - RNA, 20 nt, Artificial Sequence
  LRRK2 RNA guide
uauaaugucuugcgaagcac

SEQ ID NO: 53134 - RNA, 20 nt, Artificial Sequence
  LRRK2 RNA guide
uauuauaaugucuugcgaag

SEQ ID NO: 53135 - RNA, 20 nt, Artificial Sequence
  LRRK2 RNA guide
ucagcucuugugcuucgcaa

SEQ ID NO: 53136 - RNA, 20 nt, Artificial Sequence
  LRRK2 RNA guide
ucauucagcucuugugcuuc

SEQ ID NO: 53137 - RNA, 20 nt, Artificial Sequence
  LRRK2 RNA guide
ucuugcgaagcacaagagcu

SEQ ID NO: 53138 - RNA, 20 nt, Artificial Sequence
  LRRK2 RNA guide
ucuugugcuucgcaagacau

SEQ ID NO: 53139 - RNA, 20 nt, Artificial Sequence
  LRRK2 RNA guide
ugcgaagcacaagagcugaa

SEQ ID NO: 53140 - RNA, 20 nt, Artificial Sequence
  LRRK2 RNA guide
ugcuucgcaagacauuauaa

SEQ ID NO: 53141 - RNA, 20 nt, Artificial Sequence
  LRRK2 RNA guide
ugucuugcgaagcacaagag

SEQ ID NO: 53142 - RNA, 20 nt, Artificial Sequence
  LRRK2 RNA guide
ugugcuucgcaagacauuau

SEQ ID NO: 53143 - RNA, 20 nt, Artificial Sequence
  LRRK2 RNA guide
uuauaaugucuugcgaagca

SEQ ID NO: 53144 - RNA, 20 nt, Artificial Sequence
  LRRK2 RNA guide
uucagcucuugugcuucgca

SEQ ID NO: 53145 - RNA, 20 nt, Artificial Sequence
  LRRK2 RNA guide
uugcgaagcacaagagcuga

SEQ ID NO: 53146 - RNA, 20 nt, Artificial Sequence
  LRRK2 RNA guide
uugugcuucgcaagacauua

SEQ ID NO: 53147 - RNA, 21 nt, Artificial Sequence
  LRRK2 RNA guide
aaugucuugcgaagcacaaga

SEQ ID NO: 53148 - RNA, 21 nt, Artificial Sequence
  LRRK2 RNA guide
agcucuugugcuucgcaagac

SEQ ID NO: 53149 - RNA, 21 nt, Artificial Sequence
  LRRK2 RNA guide
auaaugucuugcgaagcacaa

SEQ ID NO: 53150 - RNA, 21 nt, Artificial Sequence
  LRRK2 RNA guide
augucuugcgaagcacaagag

SEQ ID NO: 53151 - RNA, 21 nt, Artificial Sequence
  LRRK2 RNA guide
auuauaaugucuugcgaagca

SEQ ID NO: 53152 - RNA, 21 nt, Artificial Sequence
  LRRK2 RNA guide
auucagcucuugugcuucgca

SEQ ID NO: 53153 - RNA, 21 nt, Artificial Sequence
  LRRK2 RNA guide
cagcucuugugcuucgcaaga

SEQ ID NO: 53154 - RNA, 21 nt, Artificial Sequence
  LRRK2 RNA guide
cauucagcucuugugcuucgc

SEQ ID NO: 53155 - RNA, 21 nt, Artificial Sequence
  LRRK2 RNA guide
cgaagcacaagagcugaauga

SEQ ID NO: 53156 - RNA, 21 nt, Artificial Sequence
  LRRK2 RNA guide
cucuugugcuucgcaagacau

SEQ ID NO: 53157 - RNA, 21 nt, Artificial Sequence
  LRRK2 RNA guide
cuugcgaagcacaagagcuga

SEQ ID NO: 53158 - RNA, 21 nt, Artificial Sequence
  LRRK2 RNA guide
cuugugcuucgcaagacauua

SEQ ID NO: 53159 - RNA, 21 nt, Artificial Sequence
  LRRK2 RNA guide
gcauuauuauaaugucuugcg

SEQ ID NO: 53160 - RNA, 21 nt, Artificial Sequence
  LRRK2 RNA guide
gcgaagcacaagagcugaaug

SEQ ID NO: 53161 - RNA, 21 nt, Artificial Sequence
  LRRK2 RNA guide
gcucuugugcuucgcaagaca

SEQ ID NO: 53162 - RNA, 21 nt, Artificial Sequence
  LRRK2 RNA guide
gcuucgcaagacauuauaaua

SEQ ID NO: 53163 - RNA, 21 nt, Artificial Sequence
  LRRK2 RNA guide
gucuugcgaagcacaagagcu

SEQ ID NO: 53164 - RNA, 21 nt, Artificial Sequence
  LRRK2 RNA guide
gugcuucgcaagacauuauaa

SEQ ID NO: 53165 - RNA, 21 nt, Artificial Sequence
  LRRK2 RNA guide
uaaugucuugcgaagcacaag

SEQ ID NO: 53166 - RNA, 21 nt, Artificial Sequence
  LRRK2 RNA guide
uauaaugucuugcgaagcaca

SEQ ID NO: 53167 - RNA, 21 nt, Artificial Sequence
  LRRK2 RNA guide
uauuauaaugucuugcgaagc

SEQ ID NO: 53168 - RNA, 21 nt, Artificial Sequence
  LRRK2 RNA guide
ucagcucuugugcuucgcaag

SEQ ID NO: 53169 - RNA, 21 nt, Artificial Sequence
  LRRK2 RNA guide
ucauucagcucuugugcuucg

SEQ ID NO: 53170 - RNA, 21 nt, Artificial Sequence
  LRRK2 RNA guide
ucuugcgaagcacaagagcug

SEQ ID NO: 53171 - RNA, 21 nt, Artificial Sequence
  LRRK2 RNA guide
ucuugugcuucgcaagacauu

SEQ ID NO: 53172 - RNA, 21 nt, Artificial Sequence
  LRRK2 RNA guide
ugcgaagcacaagagcugaau

SEQ ID NO: 53173 - RNA, 21 nt, Artificial Sequence
  LRRK2 RNA guide
ugcuucgcaagacauuauaau

SEQ ID NO: 53174 - RNA, 21 nt, Artificial Sequence
  LRRK2 RNA guide
ugucuugcgaagcacaagagc

SEQ ID NO: 53175 - RNA, 21 nt, Artificial Sequence
  LRRK2 RNA guide
ugugcuucgcaagacauuaua

SEQ ID NO: 53176 - RNA, 21 nt, Artificial Sequence
  LRRK2 RNA guide
uuauaaugucuugcgaagcac

SEQ ID NO: 53177 - RNA, 21 nt, Artificial Sequence
  LRRK2 RNA guide
uucagcucuugugcuucgcaa

SEQ ID NO: 53178 - RNA, 21 nt, Artificial Sequence
  LRRK2 RNA guide
uucauucagcucuugugcuuc

SEQ ID NO: 53179 - RNA, 21 nt, Artificial Sequence
  LRRK2 RNA guide
uugcgaagcacaagagcugaa

SEQ ID NO: 53180 - RNA, 21 nt, Artificial Sequence
  LRRK2 RNA guide
uugugcuucgcaagacauuau

SEQ ID NO: 53181 - RNA, 22 nt, Artificial Sequence
  LRRK2 RNA guide
aaugucuugcgaagcacaagag

SEQ ID NO: 53182 - RNA, 22 nt, Artificial Sequence
  LRRK2 RNA guide
agcucuugugcuucgcaagaca

SEQ ID NO: 53183 - RNA, 22 nt, Artificial Sequence
  LRRK2 RNA guide
auaaugucuugcgaagcacaag

SEQ ID NO: 53184 - RNA, 22 nt, Artificial Sequence
  LRRK2 RNA guide
augucuugcgaagcacaagagc

SEQ ID NO: 53185 - RNA, 22 nt, Artificial Sequence
  LRRK2 RNA guide
auuauaaugucuugcgaagcac

SEQ ID NO: 53186 - RNA, 22 nt, Artificial Sequence
  LRRK2 RNA guide
auucagcucuugugcuucgcaa

SEQ ID NO: 53187 - RNA, 22 nt, Artificial Sequence
  LRRK2 RNA guide
auucauucagcucuugugcuuc

SEQ ID NO: 53188 - RNA, 22 nt, Artificial Sequence
  LRRK2 RNA guide
cagcucuugugcuucgcaagac

SEQ ID NO: 53189 - RNA, 22 nt, Artificial Sequence
  LRRK2 RNA guide
cauucagcucuugugcuucgca

SEQ ID NO: 53190 - RNA, 22 nt, Artificial Sequence
  LRRK2 RNA guide
cgaagcacaagagcugaaugaa

SEQ ID NO: 53191 - RNA, 22 nt, Artificial Sequence
  LRRK2 RNA guide
cucuugugcuucgcaagacauu

SEQ ID NO: 53192 - RNA, 22 nt, Artificial Sequence
  LRRK2 RNA guide
cuugcgaagcacaagagcugaa

SEQ ID NO: 53193 - RNA, 22 nt, Artificial Sequence
  LRRK2 RNA guide
cuugugcuucgcaagacauuau

SEQ ID NO: 53194 - RNA, 22 nt, Artificial Sequence
  LRRK2 RNA guide
gcauuauuauaaugucuugcga

SEQ ID NO: 53195 - RNA, 22 nt, Artificial Sequence
  LRRK2 RNA guide
gcgaagcacaagagcugaauga

SEQ ID NO: 53196 - RNA, 22 nt, Artificial Sequence
  LRRK2 RNA guide
gcucuugugcuucgcaagacau

SEQ ID NO: 53197 - RNA, 22 nt, Artificial Sequence
  LRRK2 RNA guide
gcuucgcaagacauuauaauaa

SEQ ID NO: 53198 - RNA, 22 nt, Artificial Sequence
  LRRK2 RNA guide
gucuugcgaagcacaagagcug

SEQ ID NO: 53199 - RNA, 22 nt, Artificial Sequence
  LRRK2 RNA guide
gugcuucgcaagacauuauaau

SEQ ID NO: 53200 - RNA, 22 nt, Artificial Sequence
  LRRK2 RNA guide
uaaugucuugcgaagcacaaga

SEQ ID NO: 53201 - RNA, 22 nt, Artificial Sequence
  LRRK2 RNA guide
uauaaugucuugcgaagcacaa

SEQ ID NO: 53202 - RNA, 22 nt, Artificial Sequence
  LRRK2 RNA guide
uauuauaaugucuugcgaagca

SEQ ID NO: 53203 - RNA, 22 nt, Artificial Sequence
  LRRK2 RNA guide
ucagcucuugugcuucgcaaga

SEQ ID NO: 53204 - RNA, 22 nt, Artificial Sequence
  LRRK2 RNA guide
ucauucagcucuugugcuucgc

SEQ ID NO: 53205 - RNA, 22 nt, Artificial Sequence
  LRRK2 RNA guide
ucgcaagacauuauaauaaugc

SEQ ID NO: 53206 - RNA, 22 nt, Artificial Sequence
  LRRK2 RNA guide
ucuugcgaagcacaagagcuga

SEQ ID NO: 53207 - RNA, 22 nt, Artificial Sequence
  LRRK2 RNA guide
ucuugugcuucgcaagacauua

SEQ ID NO: 53208 - RNA, 22 nt, Artificial Sequence
  LRRK2 RNA guide
ugcauuauuauaaugucuugcg

SEQ ID NO: 53209 - RNA, 22 nt, Artificial Sequence
  LRRK2 RNA guide
ugcgaagcacaagagcugaaug

SEQ ID NO: 53210 - RNA, 22 nt, Artificial Sequence
  LRRK2 RNA guide
ugcuucgcaagacauuauaaua

SEQ ID NO: 53211 - RNA, 22 nt, Artificial Sequence
  LRRK2 RNA guide
ugucuugcgaagcacaagagcu

SEQ ID NO: 53212 - RNA, 22 nt, Artificial Sequence
  LRRK2 RNA guide
ugugcuucgcaagacauuauaa

SEQ ID NO: 53213 - RNA, 22 nt, Artificial Sequence
  LRRK2 RNA guide
uuauaaugucuugcgaagcaca

SEQ ID NO: 53214 - RNA, 22 nt, Artificial Sequence
  LRRK2 RNA guide
uuauuauaaugucuugcgaagc

SEQ ID NO: 53215 - RNA, 22 nt, Artificial Sequence
  LRRK2 RNA guide
uucagcucuugugcuucgcaag

SEQ ID NO: 53216 - RNA, 22 nt, Artificial Sequence
  LRRK2 RNA guide
uucauucagcucuugugcuucg

SEQ ID NO: 53217 - RNA, 22 nt, Artificial Sequence
  LRRK2 RNA guide
uugcgaagcacaagagcugaau

SEQ ID NO: 53218 - RNA, 22 nt, Artificial Sequence
  LRRK2 RNA guide
uugugcuucgcaagacauuaua

SEQ ID NO: 53219 - RNA, 20 nt, Artificial Sequence
  LRRK2 RNA guide
aagggagggcgcggaaaagg

SEQ ID NO: 53220 - RNA, 20 nt, Artificial Sequence
  LRRK2 RNA guide
aggaagggagggcgcggaaa

SEQ ID NO: 53221 - RNA, 20 nt, Artificial Sequence
  LRRK2 RNA guide
aggaggaagggagggcgcgg

SEQ ID NO: 53222 - RNA, 20 nt, Artificial Sequence
  LRRK2 RNA guide
agggagggcgcggaaaagga

SEQ ID NO: 53223 - RNA, 20 nt, Artificial Sequence
  LRRK2 RNA guide
agggcgcggaaaaggaggaa

SEQ ID NO: 53224 - RNA, 20 nt, Artificial Sequence
  LRRK2 RNA guide
aggguaggaggaagggaggg

SEQ ID NO: 53225 - RNA, 20 nt, Artificial Sequence
  LRRK2 RNA guide
aguauuuuccuccuuuuccg

SEQ ID NO: 53226 - RNA, 20 nt, Artificial Sequence
  LRRK2 RNA guide
auaguauuuuccuccuuuuc

SEQ ID NO: 53227 - RNA, 20 nt, Artificial Sequence
  LRRK2 RNA guide
auuuuccuccuuuuccgcgc

SEQ ID NO: 53228 - RNA, 20 nt, Artificial Sequence
  LRRK2 RNA guide
ccgcgcccucccuuccuccu

SEQ ID NO: 53229 - RNA, 20 nt, Artificial Sequence
  LRRK2 RNA guide
ccuccuuuuccgcgcccucc

SEQ ID NO: 53230 - RNA, 20 nt, Artificial Sequence
  LRRK2 RNA guide
ccuuuuccgcgcccucccuu

SEQ ID NO: 53231 - RNA, 20 nt, Artificial Sequence
  LRRK2 RNA guide
cgcgcccucccuuccuccua

SEQ ID NO: 53232 - RNA, 20 nt, Artificial Sequence
  LRRK2 RNA guide
cgcggaaaaggaggaaaaua

SEQ ID NO: 53233 - RNA, 20 nt, Artificial Sequence
  LRRK2 RNA guide
cuccuuuuccgcgcccuccc

SEQ ID NO: 53234 - RNA, 20 nt, Artificial Sequence
  LRRK2 RNA guide
cuuuuccgcgcccucccuuc

SEQ ID NO: 53235 - RNA, 20 nt, Artificial Sequence
  LRRK2 RNA guide
gaagggagggcgcggaaaag

SEQ ID NO: 53236 - RNA, 20 nt, Artificial Sequence
  LRRK2 RNA guide
gaggaagggagggcgcggaa

SEQ ID NO: 53237 - RNA, 20 nt, Artificial Sequence
  LRRK2 RNA guide
gagggcgcggaaaaggagga

SEQ ID NO: 53238 - RNA, 20 nt, Artificial Sequence
  LRRK2 RNA guide
gaggguaggaggaagggagg

SEQ ID NO: 53239 - RNA, 20 nt, Artificial Sequence
  LRRK2 RNA guide
gauaguauuuuccuccuuuu

SEQ ID NO: 53240 - RNA, 20 nt, Artificial Sequence
  LRRK2 RNA guide
gcgcggaaaaggaggaaaau

SEQ ID NO: 53241 - RNA, 20 nt, Artificial Sequence
  LRRK2 RNA guide
gcggaaaaggaggaaaauac

SEQ ID NO: 53242 - RNA, 20 nt, Artificial Sequence
  LRRK2 RNA guide
ggaagggagggcgcggaaaa

SEQ ID NO: 53243 - RNA, 20 nt, Artificial Sequence
  LRRK2 RNA guide
ggaggaagggagggcgcgga

SEQ ID NO: 53244 - RNA, 20 nt, Artificial Sequence
  LRRK2 RNA guide
ggagggcgcggaaaaggagg

SEQ ID NO: 53245 - RNA, 20 nt, Artificial Sequence
  LRRK2 RNA guide
ggaggguaggaggaagggag

SEQ ID NO: 53246 - RNA, 20 nt, Artificial Sequence
  LRRK2 RNA guide
ggauaguauuuuccuccuuu

SEQ ID NO: 53247 - RNA, 20 nt, Artificial Sequence
  LRRK2 RNA guide
ggcgcggaaaaggaggaaaa

SEQ ID NO: 53248 - RNA, 20 nt, Artificial Sequence
  LRRK2 RNA guide
gggagggcgcggaaaaggag

SEQ ID NO: 53249 - RNA, 20 nt, Artificial Sequence
  LRRK2 RNA guide
gggcgcggaaaaggaggaaa

SEQ ID NO: 53250 - RNA, 20 nt, Artificial Sequence
  LRRK2 RNA guide
ggguaggaggaagggagggc

SEQ ID NO: 53251 - RNA, 20 nt, Artificial Sequence
  LRRK2 RNA guide
gguaggaggaagggagggcg

SEQ ID NO: 53252 - RNA, 20 nt, Artificial Sequence
  LRRK2 RNA guide
guaggaggaagggagggcgc

SEQ ID NO: 53253 - RNA, 20 nt, Artificial Sequence
  LRRK2 RNA guide
guauuuuccuccuuuuccgc

SEQ ID NO: 53254 - RNA, 20 nt, Artificial Sequence
  LRRK2 RNA guide
uaggaggaagggagggcgcg

SEQ ID NO: 53255 - RNA, 20 nt, Artificial Sequence
  LRRK2 RNA guide
uaguauuuuccuccuuuucc

SEQ ID NO: 53256 - RNA, 20 nt, Artificial Sequence
  LRRK2 RNA guide
uauuuuccuccuuuuccgcg

SEQ ID NO: 53257 - RNA, 20 nt, Artificial Sequence
  LRRK2 RNA guide
uccgcgcccucccuuccucc

SEQ ID NO: 53258 - RNA, 20 nt, Artificial Sequence
  LRRK2 RNA guide
uccuccuuuuccgcgcccuc

SEQ ID NO: 53259 - RNA, 20 nt, Artificial Sequence
  LRRK2 RNA guide
uccuuuuccgcgcccucccu

SEQ ID NO: 53260 - RNA, 20 nt, Artificial Sequence
  LRRK2 RNA guide
uggauaguauuuuccuccuu

SEQ ID NO: 53261 - RNA, 20 nt, Artificial Sequence
  LRRK2 RNA guide
uuccgcgcccucccuuccuc

SEQ ID NO: 53262 - RNA, 20 nt, Artificial Sequence
  LRRK2 RNA guide
uuccuccuuuuccgcgcccu

SEQ ID NO: 53263 - RNA, 20 nt, Artificial Sequence
  LRRK2 RNA guide
uuuccgcgcccucccuuccu

SEQ ID NO: 53264 - RNA, 20 nt, Artificial Sequence
  LRRK2 RNA guide
uuuccuccuuuuccgcgccc

SEQ ID NO: 53265 - RNA, 20 nt, Artificial Sequence
  LRRK2 RNA guide
uuuuccgcgcccucccuucc

SEQ ID NO: 53266 - RNA, 20 nt, Artificial Sequence
  LRRK2 RNA guide
uuuuccuccuuuuccgcgcc

SEQ ID NO: 53267 - RNA, 21 nt, Artificial Sequence
  LRRK2 RNA guide
aagggagggcgcggaaaagga

SEQ ID NO: 53268 - RNA, 21 nt, Artificial Sequence
  LRRK2 RNA guide
aggaagggagggcgcggaaaa

SEQ ID NO: 53269 - RNA, 21 nt, Artificial Sequence
  LRRK2 RNA guide
aggaggaagggagggcgcgga

SEQ ID NO: 53270 - RNA, 21 nt, Artificial Sequence
  LRRK2 RNA guide
aggaggguaggaggaagggag

SEQ ID NO: 53271 - RNA, 21 nt, Artificial Sequence
  LRRK2 RNA guide
agggagggcgcggaaaaggag

SEQ ID NO: 53272 - RNA, 21 nt, Artificial Sequence
  LRRK2 RNA guide
agggcgcggaaaaggaggaaa

SEQ ID NO: 53273 - RNA, 21 nt, Artificial Sequence
  LRRK2 RNA guide
aggguaggaggaagggagggc

SEQ ID NO: 53274 - RNA, 21 nt, Artificial Sequence
  LRRK2 RNA guide
aguauuuuccuccuuuuccgc

SEQ ID NO: 53275 - RNA, 21 nt, Artificial Sequence
  LRRK2 RNA guide
auaguauuuuccuccuuuucc

SEQ ID NO: 53276 - RNA, 21 nt, Artificial Sequence
  LRRK2 RNA guide
auuuuccuccuuuuccgcgcc

SEQ ID NO: 53277 - RNA, 21 nt, Artificial Sequence
  LRRK2 RNA guide
ccgcgcccucccuuccuccua

SEQ ID NO: 53278 - RNA, 21 nt, Artificial Sequence
  LRRK2 RNA guide
ccuccuuuuccgcgcccuccc

SEQ ID NO: 53279 - RNA, 21 nt, Artificial Sequence
  LRRK2 RNA guide
ccuuuuccgcgcccucccuuc

SEQ ID NO: 53280 - RNA, 21 nt, Artificial Sequence
  LRRK2 RNA guide
cgcgcccucccuuccuccuac

SEQ ID NO: 53281 - RNA, 21 nt, Artificial Sequence
  LRRK2 RNA guide
cgcggaaaaggaggaaaauac

SEQ ID NO: 53282 - RNA, 21 nt, Artificial Sequence
  LRRK2 RNA guide
cuccuuuuccgcgcccucccu

SEQ ID NO: 53283 - RNA, 21 nt, Artificial Sequence
  LRRK2 RNA guide
cuuuuccgcgcccucccuucc

SEQ ID NO: 53284 - RNA, 21 nt, Artificial Sequence
  LRRK2 RNA guide
gaagggagggcgcggaaaagg

SEQ ID NO: 53285 - RNA, 21 nt, Artificial Sequence
  LRRK2 RNA guide
gaggaagggagggcgcggaaa

SEQ ID NO: 53286 - RNA, 21 nt, Artificial Sequence
  LRRK2 RNA guide
gagggcgcggaaaaggaggaa

SEQ ID NO: 53287 - RNA, 21 nt, Artificial Sequence
  LRRK2 RNA guide
gaggguaggaggaagggaggg

SEQ ID NO: 53288 - RNA, 21 nt, Artificial Sequence
  LRRK2 RNA guide
gauaguauuuuccuccuuuuc

SEQ ID NO: 53289 - RNA, 21 nt, Artificial Sequence
  LRRK2 RNA guide
gcgcggaaaaggaggaaaaua

SEQ ID NO: 53290 - RNA, 21 nt, Artificial Sequence
  LRRK2 RNA guide
gcggaaaaggaggaaaauacu

SEQ ID NO: 53291 - RNA, 21 nt, Artificial Sequence
  LRRK2 RNA guide
ggaagggagggcgcggaaaag

SEQ ID NO: 53292 - RNA, 21 nt, Artificial Sequence
  LRRK2 RNA guide
ggaggaagggagggcgcggaa

SEQ ID NO: 53293 - RNA, 21 nt, Artificial Sequence
  LRRK2 RNA guide
ggagggcgcggaaaaggagga

SEQ ID NO: 53294 - RNA, 21 nt, Artificial Sequence
  LRRK2 RNA guide
ggaggguaggaggaagggagg

SEQ ID NO: 53295 - RNA, 21 nt, Artificial Sequence
  LRRK2 RNA guide
ggauaguauuuuccuccuuuu

SEQ ID NO: 53296 - RNA, 21 nt, Artificial Sequence
  LRRK2 RNA guide
ggcgcggaaaaggaggaaaau

SEQ ID NO: 53297 - RNA, 21 nt, Artificial Sequence
  LRRK2 RNA guide
gggagggcgcggaaaaggagg

SEQ ID NO: 53298 - RNA, 21 nt, Artificial Sequence
  LRRK2 RNA guide
gggcgcggaaaaggaggaaaa

SEQ ID NO: 53299 - RNA, 21 nt, Artificial Sequence
  LRRK2 RNA guide
ggguaggaggaagggagggcg

SEQ ID NO: 53300 - RNA, 21 nt, Artificial Sequence
  LRRK2 RNA guide
gguaggaggaagggagggcgc

SEQ ID NO: 53301 - RNA, 21 nt, Artificial Sequence
  LRRK2 RNA guide
guaggaggaagggagggcgcg

SEQ ID NO: 53302 - RNA, 21 nt, Artificial Sequence
  LRRK2 RNA guide
guauuuuccuccuuuuccgcg

SEQ ID NO: 53303 - RNA, 21 nt, Artificial Sequence
  LRRK2 RNA guide
uaggaggaagggagggcgcgg

SEQ ID NO: 53304 - RNA, 21 nt, Artificial Sequence
  LRRK2 RNA guide
uaguauuuuccuccuuuuccg

SEQ ID NO: 53305 - RNA, 21 nt, Artificial Sequence
  LRRK2 RNA guide
uauuuuccuccuuuuccgcgc

SEQ ID NO: 53306 - RNA, 21 nt, Artificial Sequence
  LRRK2 RNA guide
uccgcgcccucccuuccuccu

SEQ ID NO: 53307 - RNA, 21 nt, Artificial Sequence
  LRRK2 RNA guide
uccuccuuuuccgcgcccucc

SEQ ID NO: 53308 - RNA, 21 nt, Artificial Sequence
  LRRK2 RNA guide
uccuuuuccgcgcccucccuu

SEQ ID NO: 53309 - RNA, 21 nt, Artificial Sequence
  LRRK2 RNA guide
uggauaguauuuuccuccuuu

SEQ ID NO: 53310 - RNA, 21 nt, Artificial Sequence
  LRRK2 RNA guide
uuccgcgcccucccuuccucc

SEQ ID NO: 53311 - RNA, 21 nt, Artificial Sequence
  LRRK2 RNA guide
uuccuccuuuuccgcgcccuc

SEQ ID NO: 53312 - RNA, 21 nt, Artificial Sequence
  LRRK2 RNA guide
uuggauaguauuuuccuccuu

SEQ ID NO: 53313 - RNA, 21 nt, Artificial Sequence
  LRRK2 RNA guide
uuuccgcgcccucccuuccuc

SEQ ID NO: 53314 - RNA, 21 nt, Artificial Sequence
  LRRK2 RNA guide
uuuccuccuuuuccgcgcccu

SEQ ID NO: 53315 - RNA, 21 nt, Artificial Sequence
  LRRK2 RNA guide
uuuuccgcgcccucccuuccu

SEQ ID NO: 53316 - RNA, 21 nt, Artificial Sequence
  LRRK2 RNA guide
uuuuccuccuuuuccgcgccc

SEQ ID NO: 53317 - RNA, 22 nt, Artificial Sequence
  LRRK2 RNA guide
aagggagggcgcggaaaaggag

SEQ ID NO: 53318 - RNA, 22 nt, Artificial Sequence
  LRRK2 RNA guide
aggaagggagggcgcggaaaag

SEQ ID NO: 53319 - RNA, 22 nt, Artificial Sequence
  LRRK2 RNA guide
aggaggaagggagggcgcggaa

SEQ ID NO: 53320 - RNA, 22 nt, Artificial Sequence
  LRRK2 RNA guide
aggaggguaggaggaagggagg

SEQ ID NO: 53321 - RNA, 22 nt, Artificial Sequence
  LRRK2 RNA guide
agggagggcgcggaaaaggagg

SEQ ID NO: 53322 - RNA, 22 nt, Artificial Sequence
  LRRK2 RNA guide
agggcgcggaaaaggaggaaaa

SEQ ID NO: 53323 - RNA, 22 nt, Artificial Sequence
  LRRK2 RNA guide
aggguaggaggaagggagggcg

SEQ ID NO: 53324 - RNA, 22 nt, Artificial Sequence
  LRRK2 RNA guide
aguauuuuccuccuuuuccgcg

SEQ ID NO: 53325 - RNA, 22 nt, Artificial Sequence
  LRRK2 RNA guide
auaguauuuuccuccuuuuccg

SEQ ID NO: 53326 - RNA, 22 nt, Artificial Sequence
  LRRK2 RNA guide
auuuuccuccuuuuccgcgccc

SEQ ID NO: 53327 - RNA, 22 nt, Artificial Sequence
  LRRK2 RNA guide
caggaggguaggaggaagggag

SEQ ID NO: 53328 - RNA, 22 nt, Artificial Sequence
  LRRK2 RNA guide
ccgcgcccucccuuccuccuac

SEQ ID NO: 53329 - RNA, 22 nt, Artificial Sequence
  LRRK2 RNA guide
ccuccuuuuccgcgcccucccu

SEQ ID NO: 53330 - RNA, 22 nt, Artificial Sequence
  LRRK2 RNA guide
ccuuuuccgcgcccucccuucc

SEQ ID NO: 53331 - RNA, 22 nt, Artificial Sequence
  LRRK2 RNA guide
cgcgcccucccuuccuccuacc

SEQ ID NO: 53332 - RNA, 22 nt, Artificial Sequence
  LRRK2 RNA guide
cgcggaaaaggaggaaaauacu

SEQ ID NO: 53333 - RNA, 22 nt, Artificial Sequence
  LRRK2 RNA guide
cuccuuuuccgcgcccucccuu

SEQ ID NO: 53334 - RNA, 22 nt, Artificial Sequence
  LRRK2 RNA guide
cuuuuccgcgcccucccuuccu

SEQ ID NO: 53335 - RNA, 22 nt, Artificial Sequence
  LRRK2 RNA guide
gaagggagggcgcggaaaagga

SEQ ID NO: 53336 - RNA, 22 nt, Artificial Sequence
  LRRK2 RNA guide
gaggaagggagggcgcggaaaa

SEQ ID NO: 53337 - RNA, 22 nt, Artificial Sequence
  LRRK2 RNA guide
gagggcgcggaaaaggaggaaa

SEQ ID NO: 53338 - RNA, 22 nt, Artificial Sequence
  LRRK2 RNA guide
gaggguaggaggaagggagggc

SEQ ID NO: 53339 - RNA, 22 nt, Artificial Sequence
  LRRK2 RNA guide
gauaguauuuuccuccuuuucc

SEQ ID NO: 53340 - RNA, 22 nt, Artificial Sequence
  LRRK2 RNA guide
gcgcggaaaaggaggaaaauac

SEQ ID NO: 53341 - RNA, 22 nt, Artificial Sequence
  LRRK2 RNA guide
gcggaaaaggaggaaaauacua

SEQ ID NO: 53342 - RNA, 22 nt, Artificial Sequence
  LRRK2 RNA guide
ggaagggagggcgcggaaaagg

SEQ ID NO: 53343 - RNA, 22 nt, Artificial Sequence
  LRRK2 RNA guide
ggaggaagggagggcgcggaaa

SEQ ID NO: 53344 - RNA, 22 nt, Artificial Sequence
  LRRK2 RNA guide
ggagggcgcggaaaaggaggaa

SEQ ID NO: 53345 - RNA, 22 nt, Artificial Sequence
  LRRK2 RNA guide
ggaggguaggaggaagggaggg

SEQ ID NO: 53346 - RNA, 22 nt, Artificial Sequence
  LRRK2 RNA guide
ggauaguauuuuccuccuuuuc

SEQ ID NO: 53347 - RNA, 22 nt, Artificial Sequence
  LRRK2 RNA guide
ggcgcggaaaaggaggaaaaua

SEQ ID NO: 53348 - RNA, 22 nt, Artificial Sequence
  LRRK2 RNA guide
gggagggcgcggaaaaggagga

SEQ ID NO: 53349 - RNA, 22 nt, Artificial Sequence
  LRRK2 RNA guide
gggcgcggaaaaggaggaaaau

SEQ ID NO: 53350 - RNA, 22 nt, Artificial Sequence
  LRRK2 RNA guide
ggguaggaggaagggagggcgc

SEQ ID NO: 53351 - RNA, 22 nt, Artificial Sequence
  LRRK2 RNA guide
gguaggaggaagggagggcgcg

SEQ ID NO: 53352 - RNA, 22 nt, Artificial Sequence
  LRRK2 RNA guide
guaggaggaagggagggcgcgg

SEQ ID NO: 53353 - RNA, 22 nt, Artificial Sequence
  LRRK2 RNA guide
guauuuuccuccuuuuccgcgc

SEQ ID NO: 53354 - RNA, 22 nt, Artificial Sequence
  LRRK2 RNA guide
uaggaggaagggagggcgcgga

SEQ ID NO: 53355 - RNA, 22 nt, Artificial Sequence
  LRRK2 RNA guide
uaguauuuuccuccuuuuccgc

SEQ ID NO: 53356 - RNA, 22 nt, Artificial Sequence
  LRRK2 RNA guide
uauuuuccuccuuuuccgcgcc

SEQ ID NO: 53357 - RNA, 22 nt, Artificial Sequence
  LRRK2 RNA guide
uccgcgcccucccuuccuccua

SEQ ID NO: 53358 - RNA, 22 nt, Artificial Sequence
  LRRK2 RNA guide
uccuccuuuuccgcgcccuccc

SEQ ID NO: 53359 - RNA, 22 nt, Artificial Sequence
  LRRK2 RNA guide
uccuuuuccgcgcccucccuuc

SEQ ID NO: 53360 - RNA, 22 nt, Artificial Sequence
  LRRK2 RNA guide
uggauaguauuuuccuccuuuu

SEQ ID NO: 53361 - RNA, 22 nt, Artificial Sequence
  LRRK2 RNA guide
uuccgcgcccucccuuccuccu

SEQ ID NO: 53362 - RNA, 22 nt, Artificial Sequence
  LRRK2 RNA guide
uuccuccuuuuccgcgcccucc

SEQ ID NO: 53363 - RNA, 22 nt, Artificial Sequence
  LRRK2 RNA guide
uuggauaguauuuuccuccuuu

SEQ ID NO: 53364 - RNA, 22 nt, Artificial Sequence
  LRRK2 RNA guide
uuuccgcgcccucccuuccucc

SEQ ID NO: 53365 - RNA, 22 nt, Artificial Sequence
  LRRK2 RNA guide
uuuccuccuuuuccgcgcccuc

SEQ ID NO: 53366 - RNA, 22 nt, Artificial Sequence
  LRRK2 RNA guide
uuuggauaguauuuuccuccuu

SEQ ID NO: 53367 - RNA, 22 nt, Artificial Sequence
  LRRK2 RNA guide
uuuuccgcgcccucccuuccuc

SEQ ID NO: 53368 - RNA, 22 nt, Artificial Sequence
  LRRK2 RNA guide
uuuuccuccuuuuccgcgcccu

SEQ ID NO: 53369 - RNA, 20 nt, Artificial Sequence
  LRRK2 RNA guide
aagggagggcguggaaaagg

SEQ ID NO: 53370 - RNA, 20 nt, Artificial Sequence
  LRRK2 RNA guide
aggaagggagggcguggaaa

SEQ ID NO: 53371 - RNA, 20 nt, Artificial Sequence
  LRRK2 RNA guide
aggaggaagggagggcgugg

SEQ ID NO: 53372 - RNA, 20 nt, Artificial Sequence
  LRRK2 RNA guide
agggagggcguggaaaagga

SEQ ID NO: 53373 - RNA, 20 nt, Artificial Sequence
  LRRK2 RNA guide
agggcguggaaaaggaggaa

SEQ ID NO: 53374 - RNA, 20 nt, Artificial Sequence
  LRRK2 RNA guide
aguauuuuccuccuuuucca

SEQ ID NO: 53375 - RNA, 20 nt, Artificial Sequence
  LRRK2 RNA guide
auuuuccuccuuuuccacgc

SEQ ID NO: 53376 - RNA, 20 nt, Artificial Sequence
  LRRK2 RNA guide
cacgcccucccuuccuccua

SEQ ID NO: 53377 - RNA, 20 nt, Artificial Sequence
  LRRK2 RNA guide
ccacgcccucccuuccuccu

SEQ ID NO: 53378 - RNA, 20 nt, Artificial Sequence
  LRRK2 RNA guide
ccuccuuuuccacgcccucc

SEQ ID NO: 53379 - RNA, 20 nt, Artificial Sequence
  LRRK2 RNA guide
ccuuuuccacgcccucccuu

SEQ ID NO: 53380 - RNA, 20 nt, Artificial Sequence
  LRRK2 RNA guide
cguggaaaaggaggaaaaua

SEQ ID NO: 53381 - RNA, 20 nt, Artificial Sequence
  LRRK2 RNA guide
cuccuuuuccacgcccuccc

SEQ ID NO: 53382 - RNA, 20 nt, Artificial Sequence
  LRRK2 RNA guide
cuuuuccacgcccucccuuc

SEQ ID NO: 53383 - RNA, 20 nt, Artificial Sequence
  LRRK2 RNA guide
gaagggagggcguggaaaag

SEQ ID NO: 53384 - RNA, 20 nt, Artificial Sequence
  LRRK2 RNA guide
gaggaagggagggcguggaa

SEQ ID NO: 53385 - RNA, 20 nt, Artificial Sequence
  LRRK2 RNA guide
gagggcguggaaaaggagga

SEQ ID NO: 53386 - RNA, 20 nt, Artificial Sequence
  LRRK2 RNA guide
gcguggaaaaggaggaaaau

SEQ ID NO: 53387 - RNA, 20 nt, Artificial Sequence
  LRRK2 RNA guide
ggaagggagggcguggaaaa

SEQ ID NO: 53388 - RNA, 20 nt, Artificial Sequence
  LRRK2 RNA guide
ggaggaagggagggcgugga

SEQ ID NO: 53389 - RNA, 20 nt, Artificial Sequence
  LRRK2 RNA guide
ggagggcguggaaaaggagg

SEQ ID NO: 53390 - RNA, 20 nt, Artificial Sequence
  LRRK2 RNA guide
ggcguggaaaaggaggaaaa

SEQ ID NO: 53391 - RNA, 20 nt, Artificial Sequence
  LRRK2 RNA guide
gggagggcguggaaaaggag

SEQ ID NO: 53392 - RNA, 20 nt, Artificial Sequence
  LRRK2 RNA guide
gggcguggaaaaggaggaaa

SEQ ID NO: 53393 - RNA, 20 nt, Artificial Sequence
  LRRK2 RNA guide
guaggaggaagggagggcgu

SEQ ID NO: 53394 - RNA, 20 nt, Artificial Sequence
  LRRK2 RNA guide
guauuuuccuccuuuuccac

SEQ ID NO: 53395 - RNA, 20 nt, Artificial Sequence
  LRRK2 RNA guide
guggaaaaggaggaaaauac

SEQ ID NO: 53396 - RNA, 20 nt, Artificial Sequence
  LRRK2 RNA guide
uaggaggaagggagggcgug

SEQ ID NO: 53397 - RNA, 20 nt, Artificial Sequence
  LRRK2 RNA guide
uauuuuccuccuuuuccacg

SEQ ID NO: 53398 - RNA, 20 nt, Artificial Sequence
  LRRK2 RNA guide
uccacgcccucccuuccucc

SEQ ID NO: 53399 - RNA, 20 nt, Artificial Sequence
  LRRK2 RNA guide
uccuccuuuuccacgcccuc

SEQ ID NO: 53400 - RNA, 20 nt, Artificial Sequence
  LRRK2 RNA guide
uccuuuuccacgcccucccu

SEQ ID NO: 53401 - RNA, 20 nt, Artificial Sequence
  LRRK2 RNA guide
uuccacgcccucccuuccuc

SEQ ID NO: 53402 - RNA, 20 nt, Artificial Sequence
  LRRK2 RNA guide
uuccuccuuuuccacgcccu

SEQ ID NO: 53403 - RNA, 20 nt, Artificial Sequence
  LRRK2 RNA guide
uuuccacgcccucccuuccu

SEQ ID NO: 53404 - RNA, 20 nt, Artificial Sequence
  LRRK2 RNA guide
uuuccuccuuuuccacgccc

SEQ ID NO: 53405 - RNA, 20 nt, Artificial Sequence
  LRRK2 RNA guide
uuuuccacgcccucccuucc

SEQ ID NO: 53406 - RNA, 20 nt, Artificial Sequence
  LRRK2 RNA guide
uuuuccuccuuuuccacgcc

SEQ ID NO: 53407 - RNA, 21 nt, Artificial Sequence
  LRRK2 RNA guide
aagggagggcguggaaaagga

SEQ ID NO: 53408 - RNA, 21 nt, Artificial Sequence
  LRRK2 RNA guide
aggaagggagggcguggaaaa

SEQ ID NO: 53409 - RNA, 21 nt, Artificial Sequence
  LRRK2 RNA guide
aggaggaagggagggcgugga

SEQ ID NO: 53410 - RNA, 21 nt, Artificial Sequence
  LRRK2 RNA guide
agggagggcguggaaaaggag

SEQ ID NO: 53411 - RNA, 21 nt, Artificial Sequence
  LRRK2 RNA guide
agggcguggaaaaggaggaaa

SEQ ID NO: 53412 - RNA, 21 nt, Artificial Sequence
  LRRK2 RNA guide
aguauuuuccuccuuuuccac

SEQ ID NO: 53413 - RNA, 21 nt, Artificial Sequence
  LRRK2 RNA guide
auuuuccuccuuuuccacgcc

SEQ ID NO: 53414 - RNA, 21 nt, Artificial Sequence
  LRRK2 RNA guide
cacgcccucccuuccuccuac

SEQ ID NO: 53415 - RNA, 21 nt, Artificial Sequence
  LRRK2 RNA guide
ccacgcccucccuuccuccua

SEQ ID NO: 53416 - RNA, 21 nt, Artificial Sequence
  LRRK2 RNA guide
ccuccuuuuccacgcccuccc

SEQ ID NO: 53417 - RNA, 21 nt, Artificial Sequence
  LRRK2 RNA guide
ccuuuuccacgcccucccuuc

SEQ ID NO: 53418 - RNA, 21 nt, Artificial Sequence
  LRRK2 RNA guide
cguggaaaaggaggaaaauac

SEQ ID NO: 53419 - RNA, 21 nt, Artificial Sequence
  LRRK2 RNA guide
cuccuuuuccacgcccucccu

SEQ ID NO: 53420 - RNA, 21 nt, Artificial Sequence
  LRRK2 RNA guide
cuuuuccacgcccucccuucc

SEQ ID NO: 53421 - RNA, 21 nt, Artificial Sequence
  LRRK2 RNA guide
gaagggagggcguggaaaagg

SEQ ID NO: 53422 - RNA, 21 nt, Artificial Sequence
  LRRK2 RNA guide
gaggaagggagggcguggaaa

SEQ ID NO: 53423 - RNA, 21 nt, Artificial Sequence
  LRRK2 RNA guide
gagggcguggaaaaggaggaa

SEQ ID NO: 53424 - RNA, 21 nt, Artificial Sequence
  LRRK2 RNA guide
gcguggaaaaggaggaaaaua

SEQ ID NO: 53425 - RNA, 21 nt, Artificial Sequence
  LRRK2 RNA guide
ggaagggagggcguggaaaag

SEQ ID NO: 53426 - RNA, 21 nt, Artificial Sequence
  LRRK2 RNA guide
ggaggaagggagggcguggaa

SEQ ID NO: 53427 - RNA, 21 nt, Artificial Sequence
  LRRK2 RNA guide
ggagggcguggaaaaggagga

SEQ ID NO: 53428 - RNA, 21 nt, Artificial Sequence
  LRRK2 RNA guide
ggcguggaaaaggaggaaaau

SEQ ID NO: 53429 - RNA, 21 nt, Artificial Sequence
  LRRK2 RNA guide
gggagggcguggaaaaggagg

SEQ ID NO: 53430 - RNA, 21 nt, Artificial Sequence
  LRRK2 RNA guide
gggcguggaaaaggaggaaaa

SEQ ID NO: 53431 - RNA, 21 nt, Artificial Sequence
  LRRK2 RNA guide
gguaggaggaagggagggcgu

SEQ ID NO: 53432 - RNA, 21 nt, Artificial Sequence
  LRRK2 RNA guide
guaggaggaagggagggcgug

SEQ ID NO: 53433 - RNA, 21 nt, Artificial Sequence
  LRRK2 RNA guide
guauuuuccuccuuuuccacg

SEQ ID NO: 53434 - RNA, 21 nt, Artificial Sequence
  LRRK2 RNA guide
guggaaaaggaggaaaauacu

SEQ ID NO: 53435 - RNA, 21 nt, Artificial Sequence
  LRRK2 RNA guide
uaggaggaagggagggcgugg

SEQ ID NO: 53436 - RNA, 21 nt, Artificial Sequence
  LRRK2 RNA guide
uaguauuuuccuccuuuucca

SEQ ID NO: 53437 - RNA, 21 nt, Artificial Sequence
  LRRK2 RNA guide
uauuuuccuccuuuuccacgc

SEQ ID NO: 53438 - RNA, 21 nt, Artificial Sequence
  LRRK2 RNA guide
uccacgcccucccuuccuccu

SEQ ID NO: 53439 - RNA, 21 nt, Artificial Sequence
  LRRK2 RNA guide
uccuccuuuuccacgcccucc

SEQ ID NO: 53440 - RNA, 21 nt, Artificial Sequence
  LRRK2 RNA guide
uccuuuuccacgcccucccuu

SEQ ID NO: 53441 - RNA, 21 nt, Artificial Sequence
  LRRK2 RNA guide
uuccacgcccucccuuccucc

SEQ ID NO: 53442 - RNA, 21 nt, Artificial Sequence
  LRRK2 RNA guide
uuccuccuuuuccacgcccuc

SEQ ID NO: 53443 - RNA, 21 nt, Artificial Sequence
  LRRK2 RNA guide
uuuccacgcccucccuuccuc

SEQ ID NO: 53444 - RNA, 21 nt, Artificial Sequence
  LRRK2 RNA guide
uuuccuccuuuuccacgcccu

SEQ ID NO: 53445 - RNA, 21 nt, Artificial Sequence
  LRRK2 RNA guide
uuuuccacgcccucccuuccu

SEQ ID NO: 53446 - RNA, 21 nt, Artificial Sequence
  LRRK2 RNA guide
uuuuccuccuuuuccacgccc

SEQ ID NO: 53447 - RNA, 22 nt, Artificial Sequence
  LRRK2 RNA guide
aagggagggcguggaaaaggag

SEQ ID NO: 53448 - RNA, 22 nt, Artificial Sequence
  LRRK2 RNA guide
aggaagggagggcguggaaaag

SEQ ID NO: 53449 - RNA, 22 nt, Artificial Sequence
  LRRK2 RNA guide
aggaggaagggagggcguggaa

SEQ ID NO: 53450 - RNA, 22 nt, Artificial Sequence
  LRRK2 RNA guide
agggagggcguggaaaaggagg

SEQ ID NO: 53451 - RNA, 22 nt, Artificial Sequence
  LRRK2 RNA guide
agggcguggaaaaggaggaaaa

SEQ ID NO: 53452 - RNA, 22 nt, Artificial Sequence
  LRRK2 RNA guide
aguauuuuccuccuuuuccacg

SEQ ID NO: 53453 - RNA, 22 nt, Artificial Sequence
  LRRK2 RNA guide
auaguauuuuccuccuuuucca

SEQ ID NO: 53454 - RNA, 22 nt, Artificial Sequence
  LRRK2 RNA guide
auuuuccuccuuuuccacgccc

SEQ ID NO: 53455 - RNA, 22 nt, Artificial Sequence
  LRRK2 RNA guide
cacgcccucccuuccuccuacc

SEQ ID NO: 53456 - RNA, 22 nt, Artificial Sequence
  LRRK2 RNA guide
ccacgcccucccuuccuccuac

SEQ ID NO: 53457 - RNA, 22 nt, Artificial Sequence
  LRRK2 RNA guide
ccuccuuuuccacgcccucccu

SEQ ID NO: 53458 - RNA, 22 nt, Artificial Sequence
  LRRK2 RNA guide
ccuuuuccacgcccucccuucc

SEQ ID NO: 53459 - RNA, 22 nt, Artificial Sequence
  LRRK2 RNA guide
cguggaaaaggaggaaaauacu

SEQ ID NO: 53460 - RNA, 22 nt, Artificial Sequence
  LRRK2 RNA guide
cuccuuuuccacgcccucccuu

SEQ ID NO: 53461 - RNA, 22 nt, Artificial Sequence
  LRRK2 RNA guide
cuuuuccacgcccucccuuccu

SEQ ID NO: 53462 - RNA, 22 nt, Artificial Sequence
  LRRK2 RNA guide
gaagggagggcguggaaaagga

SEQ ID NO: 53463 - RNA, 22 nt, Artificial Sequence
  LRRK2 RNA guide
gaggaagggagggcguggaaaa

SEQ ID NO: 53464 - RNA, 22 nt, Artificial Sequence
  LRRK2 RNA guide
gagggcguggaaaaggaggaaa

SEQ ID NO: 53465 - RNA, 22 nt, Artificial Sequence
  LRRK2 RNA guide
gcguggaaaaggaggaaaauac

SEQ ID NO: 53466 - RNA, 22 nt, Artificial Sequence
  LRRK2 RNA guide
ggaagggagggcguggaaaagg

SEQ ID NO: 53467 - RNA, 22 nt, Artificial Sequence
  LRRK2 RNA guide
ggaggaagggagggcguggaaa

SEQ ID NO: 53468 - RNA, 22 nt, Artificial Sequence
  LRRK2 RNA guide
ggagggcguggaaaaggaggaa

SEQ ID NO: 53469 - RNA, 22 nt, Artificial Sequence
  LRRK2 RNA guide
ggcguggaaaaggaggaaaaua

SEQ ID NO: 53470 - RNA, 22 nt, Artificial Sequence
  LRRK2 RNA guide
gggagggcguggaaaaggagga

SEQ ID NO: 53471 - RNA, 22 nt, Artificial Sequence
  LRRK2 RNA guide
gggcguggaaaaggaggaaaau

SEQ ID NO: 53472 - RNA, 22 nt, Artificial Sequence
  LRRK2 RNA guide
ggguaggaggaagggagggcgu

SEQ ID NO: 53473 - RNA, 22 nt, Artificial Sequence
  LRRK2 RNA guide
gguaggaggaagggagggcgug

SEQ ID NO: 53474 - RNA, 22 nt, Artificial Sequence
  LRRK2 RNA guide
guaggaggaagggagggcgugg

SEQ ID NO: 53475 - RNA, 22 nt, Artificial Sequence
  LRRK2 RNA guide
guauuuuccuccuuuuccacgc

SEQ ID NO: 53476 - RNA, 22 nt, Artificial Sequence
  LRRK2 RNA guide
guggaaaaggaggaaaauacua

SEQ ID NO: 53477 - RNA, 22 nt, Artificial Sequence
  LRRK2 RNA guide
uaggaggaagggagggcgugga

SEQ ID NO: 53478 - RNA, 22 nt, Artificial Sequence
  LRRK2 RNA guide
uaguauuuuccuccuuuuccac

SEQ ID NO: 53479 - RNA, 22 nt, Artificial Sequence
  LRRK2 RNA guide
uauuuuccuccuuuuccacgcc

SEQ ID NO: 53480 - RNA, 22 nt, Artificial Sequence
  LRRK2 RNA guide
uccacgcccucccuuccuccua

SEQ ID NO: 53481 - RNA, 22 nt, Artificial Sequence
  LRRK2 RNA guide
uccuccuuuuccacgcccuccc

SEQ ID NO: 53482 - RNA, 22 nt, Artificial Sequence
  LRRK2 RNA guide
uccuuuuccacgcccucccuuc

SEQ ID NO: 53483 - RNA, 22 nt, Artificial Sequence
  LRRK2 RNA guide
uuccacgcccucccuuccuccu

SEQ ID NO: 53484 - RNA, 22 nt, Artificial Sequence
  LRRK2 RNA guide
uuccuccuuuuccacgcccucc

SEQ ID NO: 53485 - RNA, 22 nt, Artificial Sequence
  LRRK2 RNA guide
uuuccacgcccucccuuccucc

SEQ ID NO: 53486 - RNA, 22 nt, Artificial Sequence
  LRRK2 RNA guide
uuuccuccuuuuccacgcccuc

SEQ ID NO: 53487 - RNA, 22 nt, Artificial Sequence
  LRRK2 RNA guide
uuuuccacgcccucccuuccuc

SEQ ID NO: 53488 - RNA, 22 nt, Artificial Sequence
  LRRK2 RNA guide
uuuuccuccuuuuccacgcccu

SEQ ID NO: 53489 - RNA, 20 nt, Artificial Sequence
  LRRK2 RNA guide
cgaguagcugggauuauagu

SEQ ID NO: 53490 - RNA, 21 nt, Artificial Sequence
  LRRK2 RNA guide
caugugacuauaaucccagcu

SEQ ID NO: 53491 - RNA, 21 nt, Artificial Sequence
  LRRK2 RNA guide
ccgaguagcugggauuauagu

SEQ ID NO: 53492 - RNA, 21 nt, Artificial Sequence
  LRRK2 RNA guide
cgaguagcugggauuauaguc

SEQ ID NO: 53493 - RNA, 22 nt, Artificial Sequence
  LRRK2 RNA guide
caugugacuauaaucccagcua

SEQ ID NO: 53494 - RNA, 22 nt, Artificial Sequence
  LRRK2 RNA guide
cccgaguagcugggauuauagu

SEQ ID NO: 53495 - RNA, 22 nt, Artificial Sequence
  LRRK2 RNA guide
ccgaguagcugggauuauaguc

SEQ ID NO: 53496 - RNA, 22 nt, Artificial Sequence
  LRRK2 RNA guide
cgaguagcugggauuauaguca

SEQ ID NO: 53497 - RNA, 22 nt, Artificial Sequence
  LRRK2 RNA guide
gcaugugacuauaaucccagcu

SEQ ID NO: 53498 - RNA, 22 nt, Artificial Sequence
  LRRK2 RNA guide
gcugggauuauagucacaugcc

SEQ ID NO: 53499 - RNA, 22 nt, Artificial Sequence
  LRRK2 RNA guide
gugguggcaugugacuauaauc

SEQ ID NO: 53500 - RNA, 20 nt, Artificial Sequence
  LRRK2 RNA guide
aaacacauucuaaagcuaga

SEQ ID NO: 53501 - RNA, 20 nt, Artificial Sequence
  LRRK2 RNA guide
aaagcuagacguaauuuagc

SEQ ID NO: 53502 - RNA, 20 nt, Artificial Sequence
  LRRK2 RNA guide
aaauuacgucuagcuuuaga

SEQ ID NO: 53503 - RNA, 20 nt, Artificial Sequence
  LRRK2 RNA guide
aacacauucuaaagcuagac

SEQ ID NO: 53504 - RNA, 20 nt, Artificial Sequence
  LRRK2 RNA guide
aagcuagacguaauuuagcu

SEQ ID NO: 53505 - RNA, 20 nt, Artificial Sequence
  LRRK2 RNA guide
aauagcuaaauuacgucuag

SEQ ID NO: 53506 - RNA, 20 nt, Artificial Sequence
  LRRK2 RNA guide
aauuacgucuagcuuuagaa

SEQ ID NO: 53507 - RNA, 20 nt, Artificial Sequence
  LRRK2 RNA guide
acacauucuaaagcuagacg

SEQ ID NO: 53508 - RNA, 20 nt, Artificial Sequence
  LRRK2 RNA guide
acauucuaaagcuagacgua

SEQ ID NO: 53509 - RNA, 20 nt, Artificial Sequence
  LRRK2 RNA guide
acgucuagcuuuagaaugug

SEQ ID NO: 53510 - RNA, 20 nt, Artificial Sequence
  LRRK2 RNA guide
agcuaaauuacgucuagcuu

SEQ ID NO: 53511 - RNA, 20 nt, Artificial Sequence
  LRRK2 RNA guide
agcuagacguaauuuagcua

SEQ ID NO: 53512 - RNA, 20 nt, Artificial Sequence
  LRRK2 RNA guide
aguuaaacacauucuaaagc

SEQ ID NO: 53513 - RNA, 20 nt, Artificial Sequence
  LRRK2 RNA guide
auagcuaaauuacgucuagc

SEQ ID NO: 53514 - RNA, 20 nt, Artificial Sequence
  LRRK2 RNA guide
auuacgucuagcuuuagaau

SEQ ID NO: 53515 - RNA, 20 nt, Artificial Sequence
  LRRK2 RNA guide
auucuaaagcuagacguaau

SEQ ID NO: 53516 - RNA, 20 nt, Artificial Sequence
  LRRK2 RNA guide
cacauucuaaagcuagacgu

SEQ ID NO: 53517 - RNA, 20 nt, Artificial Sequence
  LRRK2 RNA guide
cauucuaaagcuagacguaa

SEQ ID NO: 53518 - RNA, 20 nt, Artificial Sequence
  LRRK2 RNA guide
ccuauaauagcuaaauuacg

SEQ ID NO: 53519 - RNA, 20 nt, Artificial Sequence
  LRRK2 RNA guide
cgucuagcuuuagaaugugu

SEQ ID NO: 53520 - RNA, 20 nt, Artificial Sequence
  LRRK2 RNA guide
cuaaagcuagacguaauuua

SEQ ID NO: 53521 - RNA, 20 nt, Artificial Sequence
  LRRK2 RNA guide
cuaaauuacgucuagcuuua

SEQ ID NO: 53522 - RNA, 20 nt, Artificial Sequence
  LRRK2 RNA guide
cuagacguaauuuagcuauu

SEQ ID NO: 53523 - RNA, 20 nt, Artificial Sequence
  LRRK2 RNA guide
gcuaaauuacgucuagcuuu

SEQ ID NO: 53524 - RNA, 20 nt, Artificial Sequence
  LRRK2 RNA guide
gcuagacguaauuuagcuau

SEQ ID NO: 53525 - RNA, 20 nt, Artificial Sequence
  LRRK2 RNA guide
guuaaacacauucuaaagcu

SEQ ID NO: 53526 - RNA, 20 nt, Artificial Sequence
  LRRK2 RNA guide
uaaacacauucuaaagcuag

SEQ ID NO: 53527 - RNA, 20 nt, Artificial Sequence
  LRRK2 RNA guide
uaaagcuagacguaauuuag

SEQ ID NO: 53528 - RNA, 20 nt, Artificial Sequence
  LRRK2 RNA guide
uaaauuacgucuagcuuuag

SEQ ID NO: 53529 - RNA, 20 nt, Artificial Sequence
  LRRK2 RNA guide
uacgucuagcuuuagaaugu

SEQ ID NO: 53530 - RNA, 20 nt, Artificial Sequence
  LRRK2 RNA guide
uagcuaaauuacgucuagcu

SEQ ID NO: 53531 - RNA, 20 nt, Artificial Sequence
  LRRK2 RNA guide
ucuaaagcuagacguaauuu

SEQ ID NO: 53532 - RNA, 20 nt, Artificial Sequence
  LRRK2 RNA guide
uuacgucuagcuuuagaaug

SEQ ID NO: 53533 - RNA, 20 nt, Artificial Sequence
  LRRK2 RNA guide
uucuaaagcuagacguaauu

SEQ ID NO: 53534 - RNA, 21 nt, Artificial Sequence
  LRRK2 RNA guide
aaacacauucuaaagcuagac

SEQ ID NO: 53535 - RNA, 21 nt, Artificial Sequence
  LRRK2 RNA guide
aaagcuagacguaauuuagcu

SEQ ID NO: 53536 - RNA, 21 nt, Artificial Sequence
  LRRK2 RNA guide
aacacauucuaaagcuagacg

SEQ ID NO: 53537 - RNA, 21 nt, Artificial Sequence
  LRRK2 RNA guide
aagcuagacguaauuuagcua

SEQ ID NO: 53538 - RNA, 21 nt, Artificial Sequence
  LRRK2 RNA guide
aauagcuaaauuacgucuagc

SEQ ID NO: 53539 - RNA, 21 nt, Artificial Sequence
  LRRK2 RNA guide
acacauucuaaagcuagacgu

SEQ ID NO: 53540 - RNA, 21 nt, Artificial Sequence
  LRRK2 RNA guide
acauucuaaagcuagacguaa

SEQ ID NO: 53541 - RNA, 21 nt, Artificial Sequence
  LRRK2 RNA guide
acgucuagcuuuagaaugugu

SEQ ID NO: 53542 - RNA, 21 nt, Artificial Sequence
  LRRK2 RNA guide
agcuaaauuacgucuagcuuu

SEQ ID NO: 53543 - RNA, 21 nt, Artificial Sequence
  LRRK2 RNA guide
agcuagacguaauuuagcuau

SEQ ID NO: 53544 - RNA, 21 nt, Artificial Sequence
  LRRK2 RNA guide
auagcuaaauuacgucuagcu

SEQ ID NO: 53545 - RNA, 21 nt, Artificial Sequence
  LRRK2 RNA guide
auuacgucuagcuuuagaaug

SEQ ID NO: 53546 - RNA, 21 nt, Artificial Sequence
  LRRK2 RNA guide
cacauucuaaagcuagacgua

SEQ ID NO: 53547 - RNA, 21 nt, Artificial Sequence
  LRRK2 RNA guide
caguuaaacacauucuaaagc

SEQ ID NO: 53548 - RNA, 21 nt, Artificial Sequence
  LRRK2 RNA guide
cauucuaaagcuagacguaau

SEQ ID NO: 53549 - RNA, 21 nt, Artificial Sequence
  LRRK2 RNA guide
cgucuagcuuuagaauguguu

SEQ ID NO: 53550 - RNA, 21 nt, Artificial Sequence
  LRRK2 RNA guide
cuaaagcuagacguaauuuag

SEQ ID NO: 53551 - RNA, 21 nt, Artificial Sequence
  LRRK2 RNA guide
cuaaauuacgucuagcuuuag

SEQ ID NO: 53552 - RNA, 21 nt, Artificial Sequence
  LRRK2 RNA guide
gcuaaauuacgucuagcuuua

SEQ ID NO: 53553 - RNA, 21 nt, Artificial Sequence
  LRRK2 RNA guide
gcuagacguaauuuagcuauu

SEQ ID NO: 53554 - RNA, 21 nt, Artificial Sequence
  LRRK2 RNA guide
uaaagcuagacguaauuuagc

SEQ ID NO: 53555 - RNA, 21 nt, Artificial Sequence
  LRRK2 RNA guide
uacgucuagcuuuagaaugug

SEQ ID NO: 53556 - RNA, 21 nt, Artificial Sequence
  LRRK2 RNA guide
uagcuaaauuacgucuagcuu

SEQ ID NO: 53557 - RNA, 21 nt, Artificial Sequence
  LRRK2 RNA guide
uuacgucuagcuuuagaaugu

SEQ ID NO: 53558 - RNA, 22 nt, Artificial Sequence
  LRRK2 RNA guide
aaacacauucuaaagcuagacg

SEQ ID NO: 53559 - RNA, 22 nt, Artificial Sequence
  LRRK2 RNA guide
aaagcuagacguaauuuagcua

SEQ ID NO: 53560 - RNA, 22 nt, Artificial Sequence
  LRRK2 RNA guide
aacacauucuaaagcuagacgu

SEQ ID NO: 53561 - RNA, 22 nt, Artificial Sequence
  LRRK2 RNA guide
aagcuagacguaauuuagcuau

SEQ ID NO: 53562 - RNA, 22 nt, Artificial Sequence
  LRRK2 RNA guide
aauagcuaaauuacgucuagcu

SEQ ID NO: 53563 - RNA, 22 nt, Artificial Sequence
  LRRK2 RNA guide
aauuacgucuagcuuuagaaug

SEQ ID NO: 53564 - RNA, 22 nt, Artificial Sequence
  LRRK2 RNA guide
acacauucuaaagcuagacgua

SEQ ID NO: 53565 - RNA, 22 nt, Artificial Sequence
  LRRK2 RNA guide
acaguuaaacacauucuaaagc

SEQ ID NO: 53566 - RNA, 22 nt, Artificial Sequence
  LRRK2 RNA guide
acauucuaaagcuagacguaau

SEQ ID NO: 53567 - RNA, 22 nt, Artificial Sequence
  LRRK2 RNA guide
acgucuagcuuuagaauguguu

SEQ ID NO: 53568 - RNA, 22 nt, Artificial Sequence
  LRRK2 RNA guide
agcuaaauuacgucuagcuuua

SEQ ID NO: 53569 - RNA, 22 nt, Artificial Sequence
  LRRK2 RNA guide
agcuagacguaauuuagcuauu

SEQ ID NO: 53570 - RNA, 22 nt, Artificial Sequence
  LRRK2 RNA guide
auagcuaaauuacgucuagcuu

SEQ ID NO: 53571 - RNA, 22 nt, Artificial Sequence
  LRRK2 RNA guide
auuacgucuagcuuuagaaugu

SEQ ID NO: 53572 - RNA, 22 nt, Artificial Sequence
  LRRK2 RNA guide
cacauucuaaagcuagacguaa

SEQ ID NO: 53573 - RNA, 22 nt, Artificial Sequence
  LRRK2 RNA guide
caguuaaacacauucuaaagcu

SEQ ID NO: 53574 - RNA, 22 nt, Artificial Sequence
  LRRK2 RNA guide
cauucuaaagcuagacguaauu

SEQ ID NO: 53575 - RNA, 22 nt, Artificial Sequence
  LRRK2 RNA guide
ccuauaauagcuaaauuacguc

SEQ ID NO: 53576 - RNA, 22 nt, Artificial Sequence
  LRRK2 RNA guide
cgucuagcuuuagaauguguuu

SEQ ID NO: 53577 - RNA, 22 nt, Artificial Sequence
  LRRK2 RNA guide
cuaaagcuagacguaauuuagc

SEQ ID NO: 53578 - RNA, 22 nt, Artificial Sequence
  LRRK2 RNA guide
cuaaauuacgucuagcuuuaga

SEQ ID NO: 53579 - RNA, 22 nt, Artificial Sequence
  LRRK2 RNA guide
gacguaauuuagcuauuauagg

SEQ ID NO: 53580 - RNA, 22 nt, Artificial Sequence
  LRRK2 RNA guide
gcuaaauuacgucuagcuuuag

SEQ ID NO: 53581 - RNA, 22 nt, Artificial Sequence
  LRRK2 RNA guide
gcuagacguaauuuagcuauua

SEQ ID NO: 53582 - RNA, 22 nt, Artificial Sequence
  LRRK2 RNA guide
guuaaacacauucuaaagcuag

SEQ ID NO: 53583 - RNA, 22 nt, Artificial Sequence
  LRRK2 RNA guide
uaaacacauucuaaagcuagac

SEQ ID NO: 53584 - RNA, 22 nt, Artificial Sequence
  LRRK2 RNA guide
uaaagcuagacguaauuuagcu

SEQ ID NO: 53585 - RNA, 22 nt, Artificial Sequence
  LRRK2 RNA guide
uaauagcuaaauuacgucuagc

SEQ ID NO: 53586 - RNA, 22 nt, Artificial Sequence
  LRRK2 RNA guide
uacgucuagcuuuagaaugugu

SEQ ID NO: 53587 - RNA, 22 nt, Artificial Sequence
  LRRK2 RNA guide
uagcuaaauuacgucuagcuuu

SEQ ID NO: 53588 - RNA, 22 nt, Artificial Sequence
  LRRK2 RNA guide
ucuaaagcuagacguaauuuag

SEQ ID NO: 53589 - RNA, 22 nt, Artificial Sequence
  LRRK2 RNA guide
uuacgucuagcuuuagaaugug

SEQ ID NO: 53590 - RNA, 20 nt, Artificial Sequence
  LRRK2 RNA guide
aaagcuagauguaauuuagc

SEQ ID NO: 53591 - RNA, 20 nt, Artificial Sequence
  LRRK2 RNA guide
aacacauucuaaagcuagau

SEQ ID NO: 53592 - RNA, 20 nt, Artificial Sequence
  LRRK2 RNA guide
aagcuagauguaauuuagcu

SEQ ID NO: 53593 - RNA, 20 nt, Artificial Sequence
  LRRK2 RNA guide
acacauucuaaagcuagaug

SEQ ID NO: 53594 - RNA, 20 nt, Artificial Sequence
  LRRK2 RNA guide
acaucuagcuuuagaaugug

SEQ ID NO: 53595 - RNA, 20 nt, Artificial Sequence
  LRRK2 RNA guide
acauucuaaagcuagaugua

SEQ ID NO: 53596 - RNA, 20 nt, Artificial Sequence
  LRRK2 RNA guide
agcuaaauuacaucuagcuu

SEQ ID NO: 53597 - RNA, 20 nt, Artificial Sequence
  LRRK2 RNA guide
agcuagauguaauuuagcua

SEQ ID NO: 53598 - RNA, 20 nt, Artificial Sequence
  LRRK2 RNA guide
auagcuaaauuacaucuagc

SEQ ID NO: 53599 - RNA, 20 nt, Artificial Sequence
  LRRK2 RNA guide
cacauucuaaagcuagaugu

SEQ ID NO: 53600 - RNA, 20 nt, Artificial Sequence
  LRRK2 RNA guide
caucuagcuuuagaaugugu

SEQ ID NO: 53601 - RNA, 20 nt, Artificial Sequence
  LRRK2 RNA guide
cauucuaaagcuagauguaa

SEQ ID NO: 53602 - RNA, 20 nt, Artificial Sequence
  LRRK2 RNA guide
gcuaaauuacaucuagcuuu

SEQ ID NO: 53603 - RNA, 20 nt, Artificial Sequence
  LRRK2 RNA guide
gcuagauguaauuuagcuau

SEQ ID NO: 53604 - RNA, 20 nt, Artificial Sequence
  LRRK2 RNA guide
uacaucuagcuuuagaaugu

SEQ ID NO: 53605 - RNA, 20 nt, Artificial Sequence
  LRRK2 RNA guide
uagcuaaauuacaucuagcu

SEQ ID NO: 53606 - RNA, 20 nt, Artificial Sequence
  LRRK2 RNA guide
uuacaucuagcuuuagaaug

SEQ ID NO: 53607 - RNA, 21 nt, Artificial Sequence
  LRRK2 RNA guide
aacacauucuaaagcuagaug

SEQ ID NO: 53608 - RNA, 21 nt, Artificial Sequence
  LRRK2 RNA guide
acacauucuaaagcuagaugu

SEQ ID NO: 53609 - RNA, 21 nt, Artificial Sequence
  LRRK2 RNA guide
acaucuagcuuuagaaugugu

SEQ ID NO: 53610 - RNA, 21 nt, Artificial Sequence
  LRRK2 RNA guide
cacauucuaaagcuagaugua

SEQ ID NO: 53611 - RNA, 21 nt, Artificial Sequence
  LRRK2 RNA guide
caucuagcuuuagaauguguu

SEQ ID NO: 53612 - RNA, 21 nt, Artificial Sequence
  LRRK2 RNA guide
uacaucuagcuuuagaaugug

SEQ ID NO: 53613 - RNA, 22 nt, Artificial Sequence
  LRRK2 RNA guide
aaacacauucuaaagcuagaug

SEQ ID NO: 53614 - RNA, 22 nt, Artificial Sequence
  LRRK2 RNA guide
aacacauucuaaagcuagaugu

SEQ ID NO: 53615 - RNA, 22 nt, Artificial Sequence
  LRRK2 RNA guide
acacauucuaaagcuagaugua

SEQ ID NO: 53616 - RNA, 22 nt, Artificial Sequence
  LRRK2 RNA guide
acaucuagcuuuagaauguguu

SEQ ID NO: 53617 - RNA, 22 nt, Artificial Sequence
  LRRK2 RNA guide
cacauucuaaagcuagauguaa

SEQ ID NO: 53618 - RNA, 22 nt, Artificial Sequence
  LRRK2 RNA guide
caucuagcuuuagaauguguuu

SEQ ID NO: 53619 - RNA, 22 nt, Artificial Sequence
  LRRK2 RNA guide
cuaaagcuagauguaauuuagc

SEQ ID NO: 53620 - RNA, 22 nt, Artificial Sequence
  LRRK2 RNA guide
gcuaaauuacaucuagcuuuag

SEQ ID NO: 53621 - RNA, 22 nt, Artificial Sequence
  LRRK2 RNA guide
uacaucuagcuuuagaaugugu

SEQ ID NO: 53622 - RNA, 22 nt, Artificial Sequence
  LRRK2 RNA guide
uuacaucuagcuuuagaaugug

SEQ ID NO: 53623 - RNA, 20 nt, Artificial Sequence
  LRRK2 RNA guide
aaagagaugaaccgcuguag

SEQ ID NO: 53624 - RNA, 20 nt, Artificial Sequence
  LRRK2 RNA guide
aaccgcuguagaguaguuag

SEQ ID NO: 53625 - RNA, 20 nt, Artificial Sequence
  LRRK2 RNA guide
aacuacucuacagcgguuca

SEQ ID NO: 53626 - RNA, 20 nt, Artificial Sequence
  LRRK2 RNA guide
aacuguucuaacuacucuac

SEQ ID NO: 53627 - RNA, 20 nt, Artificial Sequence
  LRRK2 RNA guide
aagagaugaaccgcuguaga

SEQ ID NO: 53628 - RNA, 20 nt, Artificial Sequence
  LRRK2 RNA guide
aagauuaaagagaugaaccg

SEQ ID NO: 53629 - RNA, 20 nt, Artificial Sequence
  LRRK2 RNA guide
acagcgguucaucucuuuaa

SEQ ID NO: 53630 - RNA, 20 nt, Artificial Sequence
  LRRK2 RNA guide
accgcuguagaguaguuaga

SEQ ID NO: 53631 - RNA, 20 nt, Artificial Sequence
  LRRK2 RNA guide
acuacucuacagcgguucau

SEQ ID NO: 53632 - RNA, 20 nt, Artificial Sequence
  LRRK2 RNA guide
acucuacagcgguucaucuc

SEQ ID NO: 53633 - RNA, 20 nt, Artificial Sequence
  LRRK2 RNA guide
acuguucuaacuacucuaca

SEQ ID NO: 53634 - RNA, 20 nt, Artificial Sequence
  LRRK2 RNA guide
agagaugaaccgcuguagag

SEQ ID NO: 53635 - RNA, 20 nt, Artificial Sequence
  LRRK2 RNA guide
agaugaaccgcuguagagua

SEQ ID NO: 53636 - RNA, 20 nt, Artificial Sequence
  LRRK2 RNA guide
agauuaaagagaugaaccgc

SEQ ID NO: 53637 - RNA, 20 nt, Artificial Sequence
  LRRK2 RNA guide
agcgguucaucucuuuaauc

SEQ ID NO: 53638 - RNA, 20 nt, Artificial Sequence
  LRRK2 RNA guide
aggaagauuaaagagaugaa

SEQ ID NO: 53639 - RNA, 20 nt, Artificial Sequence
  LRRK2 RNA guide
augaaccgcuguagaguagu

SEQ ID NO: 53640 - RNA, 20 nt, Artificial Sequence
  LRRK2 RNA guide
auuaaagagaugaaccgcug

SEQ ID NO: 53641 - RNA, 20 nt, Artificial Sequence
  LRRK2 RNA guide
cagcgguucaucucuuuaau

SEQ ID NO: 53642 - RNA, 20 nt, Artificial Sequence
  LRRK2 RNA guide
ccgcuguagaguaguuagaa

SEQ ID NO: 53643 - RNA, 20 nt, Artificial Sequence
  LRRK2 RNA guide
cgcuguagaguaguuagaac

SEQ ID NO: 53644 - RNA, 20 nt, Artificial Sequence
  LRRK2 RNA guide
cuaacuacucuacagcgguu

SEQ ID NO: 53645 - RNA, 20 nt, Artificial Sequence
  LRRK2 RNA guide
cuacagcgguucaucucuuu

SEQ ID NO: 53646 - RNA, 20 nt, Artificial Sequence
  LRRK2 RNA guide
cuacucuacagcgguucauc

SEQ ID NO: 53647 - RNA, 20 nt, Artificial Sequence
  LRRK2 RNA guide
cucuacagcgguucaucucu

SEQ ID NO: 53648 - RNA, 20 nt, Artificial Sequence
  LRRK2 RNA guide
cuguucuaacuacucuacag

SEQ ID NO: 53649 - RNA, 20 nt, Artificial Sequence
  LRRK2 RNA guide
gaaccgcuguagaguaguua

SEQ ID NO: 53650 - RNA, 20 nt, Artificial Sequence
  LRRK2 RNA guide
gaagauuaaagagaugaacc

SEQ ID NO: 53651 - RNA, 20 nt, Artificial Sequence
  LRRK2 RNA guide
gagaugaaccgcuguagagu

SEQ ID NO: 53652 - RNA, 20 nt, Artificial Sequence
  LRRK2 RNA guide
gaugaaccgcuguagaguag

SEQ ID NO: 53653 - RNA, 20 nt, Artificial Sequence
  LRRK2 RNA guide
gauuaaagagaugaaccgcu

SEQ ID NO: 53654 - RNA, 20 nt, Artificial Sequence
  LRRK2 RNA guide
gcgguucaucucuuuaaucu

SEQ ID NO: 53655 - RNA, 20 nt, Artificial Sequence
  LRRK2 RNA guide
ggaagauuaaagagaugaac

SEQ ID NO: 53656 - RNA, 20 nt, Artificial Sequence
  LRRK2 RNA guide
guucuaacuacucuacagcg

SEQ ID NO: 53657 - RNA, 20 nt, Artificial Sequence
  LRRK2 RNA guide
uaaagagaugaaccgcugua

SEQ ID NO: 53658 - RNA, 20 nt, Artificial Sequence
  LRRK2 RNA guide
uaacuacucuacagcgguuc

SEQ ID NO: 53659 - RNA, 20 nt, Artificial Sequence
  LRRK2 RNA guide
uaacuguucuaacuacucua

SEQ ID NO: 53660 - RNA, 20 nt, Artificial Sequence
  LRRK2 RNA guide
uacagcgguucaucucuuua

SEQ ID NO: 53661 - RNA, 20 nt, Artificial Sequence
  LRRK2 RNA guide
uacucuacagcgguucaucu

SEQ ID NO: 53662 - RNA, 20 nt, Artificial Sequence
  LRRK2 RNA guide
uaggaagauuaaagagauga

SEQ ID NO: 53663 - RNA, 20 nt, Artificial Sequence
  LRRK2 RNA guide
ucuaacuacucuacagcggu

SEQ ID NO: 53664 - RNA, 20 nt, Artificial Sequence
  LRRK2 RNA guide
ucuacagcgguucaucucuu

SEQ ID NO: 53665 - RNA, 20 nt, Artificial Sequence
  LRRK2 RNA guide
ugaaccgcuguagaguaguu

SEQ ID NO: 53666 - RNA, 20 nt, Artificial Sequence
  LRRK2 RNA guide
uguucuaacuacucuacagc

SEQ ID NO: 53667 - RNA, 20 nt, Artificial Sequence
  LRRK2 RNA guide
uuaaagagaugaaccgcugu

SEQ ID NO: 53668 - RNA, 20 nt, Artificial Sequence
  LRRK2 RNA guide
uuaacuguucuaacuacucu

SEQ ID NO: 53669 - RNA, 20 nt, Artificial Sequence
  LRRK2 RNA guide
uuaggaagauuaaagagaug

SEQ ID NO: 53670 - RNA, 20 nt, Artificial Sequence
  LRRK2 RNA guide
uucuaacuacucuacagcgg

SEQ ID NO: 53671 - RNA, 21 nt, Artificial Sequence
  LRRK2 RNA guide
aaagagaugaaccgcuguaga

SEQ ID NO: 53672 - RNA, 21 nt, Artificial Sequence
  LRRK2 RNA guide
aaccgcuguagaguaguuaga

SEQ ID NO: 53673 - RNA, 21 nt, Artificial Sequence
  LRRK2 RNA guide
aacuacucuacagcgguucau

SEQ ID NO: 53674 - RNA, 21 nt, Artificial Sequence
  LRRK2 RNA guide
aacuguucuaacuacucuaca

SEQ ID NO: 53675 - RNA, 21 nt, Artificial Sequence
  LRRK2 RNA guide
aagagaugaaccgcuguagag

SEQ ID NO: 53676 - RNA, 21 nt, Artificial Sequence
  LRRK2 RNA guide
aagauuaaagagaugaaccgc

SEQ ID NO: 53677 - RNA, 21 nt, Artificial Sequence
  LRRK2 RNA guide
acagcgguucaucucuuuaau

SEQ ID NO: 53678 - RNA, 21 nt, Artificial Sequence
  LRRK2 RNA guide
accgcuguagaguaguuagaa

SEQ ID NO: 53679 - RNA, 21 nt, Artificial Sequence
  LRRK2 RNA guide
acuacucuacagcgguucauc

SEQ ID NO: 53680 - RNA, 21 nt, Artificial Sequence
  LRRK2 RNA guide
acucuacagcgguucaucucu

SEQ ID NO: 53681 - RNA, 21 nt, Artificial Sequence
  LRRK2 RNA guide
acuguucuaacuacucuacag

SEQ ID NO: 53682 - RNA, 21 nt, Artificial Sequence
  LRRK2 RNA guide
agagaugaaccgcuguagagu

SEQ ID NO: 53683 - RNA, 21 nt, Artificial Sequence
  LRRK2 RNA guide
agaugaaccgcuguagaguag

SEQ ID NO: 53684 - RNA, 21 nt, Artificial Sequence
  LRRK2 RNA guide
agauuaaagagaugaaccgcu

SEQ ID NO: 53685 - RNA, 21 nt, Artificial Sequence
  LRRK2 RNA guide
agcgguucaucucuuuaaucu

SEQ ID NO: 53686 - RNA, 21 nt, Artificial Sequence
  LRRK2 RNA guide
aggaagauuaaagagaugaac

SEQ ID NO: 53687 - RNA, 21 nt, Artificial Sequence
  LRRK2 RNA guide
augaaccgcuguagaguaguu

SEQ ID NO: 53688 - RNA, 21 nt, Artificial Sequence
  LRRK2 RNA guide
auuaaagagaugaaccgcugu

SEQ ID NO: 53689 - RNA, 21 nt, Artificial Sequence
  LRRK2 RNA guide
cagcgguucaucucuuuaauc

SEQ ID NO: 53690 - RNA, 21 nt, Artificial Sequence
  LRRK2 RNA guide
ccgcuguagaguaguuagaac

SEQ ID NO: 53691 - RNA, 21 nt, Artificial Sequence
  LRRK2 RNA guide
cgcuguagaguaguuagaaca

SEQ ID NO: 53692 - RNA, 21 nt, Artificial Sequence
  LRRK2 RNA guide
cuaacuacucuacagcgguuc

SEQ ID NO: 53693 - RNA, 21 nt, Artificial Sequence
  LRRK2 RNA guide
cuacagcgguucaucucuuua

SEQ ID NO: 53694 - RNA, 21 nt, Artificial Sequence
  LRRK2 RNA guide
cuacucuacagcgguucaucu

SEQ ID NO: 53695 - RNA, 21 nt, Artificial Sequence
  LRRK2 RNA guide
cucuacagcgguucaucucuu

SEQ ID NO: 53696 - RNA, 21 nt, Artificial Sequence
  LRRK2 RNA guide
cuguucuaacuacucuacagc

SEQ ID NO: 53697 - RNA, 21 nt, Artificial Sequence
  LRRK2 RNA guide
gaaccgcuguagaguaguuag

SEQ ID NO: 53698 - RNA, 21 nt, Artificial Sequence
  LRRK2 RNA guide
gaagauuaaagagaugaaccg

SEQ ID NO: 53699 - RNA, 21 nt, Artificial Sequence
  LRRK2 RNA guide
gagaugaaccgcuguagagua

SEQ ID NO: 53700 - RNA, 21 nt, Artificial Sequence
  LRRK2 RNA guide
gaugaaccgcuguagaguagu

SEQ ID NO: 53701 - RNA, 21 nt, Artificial Sequence
  LRRK2 RNA guide
gauuaaagagaugaaccgcug

SEQ ID NO: 53702 - RNA, 21 nt, Artificial Sequence
  LRRK2 RNA guide
gcgguucaucucuuuaaucuu

SEQ ID NO: 53703 - RNA, 21 nt, Artificial Sequence
  LRRK2 RNA guide
ggaagauuaaagagaugaacc

SEQ ID NO: 53704 - RNA, 21 nt, Artificial Sequence
  LRRK2 RNA guide
guucuaacuacucuacagcgg

SEQ ID NO: 53705 - RNA, 21 nt, Artificial Sequence
  LRRK2 RNA guide
uaaagagaugaaccgcuguag

SEQ ID NO: 53706 - RNA, 21 nt, Artificial Sequence
  LRRK2 RNA guide
uaacuacucuacagcgguuca

SEQ ID NO: 53707 - RNA, 21 nt, Artificial Sequence
  LRRK2 RNA guide
uaacuguucuaacuacucuac

SEQ ID NO: 53708 - RNA, 21 nt, Artificial Sequence
  LRRK2 RNA guide
uacagcgguucaucucuuuaa

SEQ ID NO: 53709 - RNA, 21 nt, Artificial Sequence
  LRRK2 RNA guide
uacucuacagcgguucaucuc

SEQ ID NO: 53710 - RNA, 21 nt, Artificial Sequence
  LRRK2 RNA guide
ucuaacuacucuacagcgguu

SEQ ID NO: 53711 - RNA, 21 nt, Artificial Sequence
  LRRK2 RNA guide
ucuacagcgguucaucucuuu

SEQ ID NO: 53712 - RNA, 21 nt, Artificial Sequence
  LRRK2 RNA guide
ugaaccgcuguagaguaguua

SEQ ID NO: 53713 - RNA, 21 nt, Artificial Sequence
  LRRK2 RNA guide
uguucuaacuacucuacagcg

SEQ ID NO: 53714 - RNA, 21 nt, Artificial Sequence
  LRRK2 RNA guide
uuaaagagaugaaccgcugua

SEQ ID NO: 53715 - RNA, 21 nt, Artificial Sequence
  LRRK2 RNA guide
uucuaacuacucuacagcggu

SEQ ID NO: 53716 - RNA, 22 nt, Artificial Sequence
  LRRK2 RNA guide
aaagagaugaaccgcuguagag

SEQ ID NO: 53717 - RNA, 22 nt, Artificial Sequence
  LRRK2 RNA guide
aaccgcuguagaguaguuagaa

SEQ ID NO: 53718 - RNA, 22 nt, Artificial Sequence
  LRRK2 RNA guide
aacuacucuacagcgguucauc

SEQ ID NO: 53719 - RNA, 22 nt, Artificial Sequence
  LRRK2 RNA guide
aacuguucuaacuacucuacag

SEQ ID NO: 53720 - RNA, 22 nt, Artificial Sequence
  LRRK2 RNA guide
aagagaugaaccgcuguagagu

SEQ ID NO: 53721 - RNA, 22 nt, Artificial Sequence
  LRRK2 RNA guide
aagauuaaagagaugaaccgcu

SEQ ID NO: 53722 - RNA, 22 nt, Artificial Sequence
  LRRK2 RNA guide
acagcgguucaucucuuuaauc

SEQ ID NO: 53723 - RNA, 22 nt, Artificial Sequence
  LRRK2 RNA guide
accgcuguagaguaguuagaac

SEQ ID NO: 53724 - RNA, 22 nt, Artificial Sequence
  LRRK2 RNA guide
acuacucuacagcgguucaucu

SEQ ID NO: 53725 - RNA, 22 nt, Artificial Sequence
  LRRK2 RNA guide
acucuacagcgguucaucucuu

SEQ ID NO: 53726 - RNA, 22 nt, Artificial Sequence
  LRRK2 RNA guide
acuguucuaacuacucuacagc

SEQ ID NO: 53727 - RNA, 22 nt, Artificial Sequence
  LRRK2 RNA guide
agagaugaaccgcuguagagua

SEQ ID NO: 53728 - RNA, 22 nt, Artificial Sequence
  LRRK2 RNA guide
agaugaaccgcuguagaguagu

SEQ ID NO: 53729 - RNA, 22 nt, Artificial Sequence
  LRRK2 RNA guide
agauuaaagagaugaaccgcug

SEQ ID NO: 53730 - RNA, 22 nt, Artificial Sequence
  LRRK2 RNA guide
agcgguucaucucuuuaaucuu

SEQ ID NO: 53731 - RNA, 22 nt, Artificial Sequence
  LRRK2 RNA guide
aggaagauuaaagagaugaacc

SEQ ID NO: 53732 - RNA, 22 nt, Artificial Sequence
  LRRK2 RNA guide
augaaccgcuguagaguaguua

SEQ ID NO: 53733 - RNA, 22 nt, Artificial Sequence
  LRRK2 RNA guide
auuaaagagaugaaccgcugua

SEQ ID NO: 53734 - RNA, 22 nt, Artificial Sequence
  LRRK2 RNA guide
cagcgguucaucucuuuaaucu

SEQ ID NO: 53735 - RNA, 22 nt, Artificial Sequence
  LRRK2 RNA guide
ccgcuguagaguaguuagaaca

SEQ ID NO: 53736 - RNA, 22 nt, Artificial Sequence
  LRRK2 RNA guide
cgcuguagaguaguuagaacag

SEQ ID NO: 53737 - RNA, 22 nt, Artificial Sequence
  LRRK2 RNA guide
cuaacuacucuacagcgguuca

SEQ ID NO: 53738 - RNA, 22 nt, Artificial Sequence
  LRRK2 RNA guide
cuacagcgguucaucucuuuaa

SEQ ID NO: 53739 - RNA, 22 nt, Artificial Sequence
  LRRK2 RNA guide
cuacucuacagcgguucaucuc

SEQ ID NO: 53740 - RNA, 22 nt, Artificial Sequence
  LRRK2 RNA guide
cucuacagcgguucaucucuuu

SEQ ID NO: 53741 - RNA, 22 nt, Artificial Sequence
  LRRK2 RNA guide
cuguucuaacuacucuacagcg

SEQ ID NO: 53742 - RNA, 22 nt, Artificial Sequence
  LRRK2 RNA guide
gaaccgcuguagaguaguuaga

SEQ ID NO: 53743 - RNA, 22 nt, Artificial Sequence
  LRRK2 RNA guide
gaagauuaaagagaugaaccgc

SEQ ID NO: 53744 - RNA, 22 nt, Artificial Sequence
  LRRK2 RNA guide
gagaugaaccgcuguagaguag

SEQ ID NO: 53745 - RNA, 22 nt, Artificial Sequence
  LRRK2 RNA guide
gaugaaccgcuguagaguaguu

SEQ ID NO: 53746 - RNA, 22 nt, Artificial Sequence
  LRRK2 RNA guide
gauuaaagagaugaaccgcugu

SEQ ID NO: 53747 - RNA, 22 nt, Artificial Sequence
  LRRK2 RNA guide
gcgguucaucucuuuaaucuuc

SEQ ID NO: 53748 - RNA, 22 nt, Artificial Sequence
  LRRK2 RNA guide
ggaagauuaaagagaugaaccg

SEQ ID NO: 53749 - RNA, 22 nt, Artificial Sequence
  LRRK2 RNA guide
guucuaacuacucuacagcggu

SEQ ID NO: 53750 - RNA, 22 nt, Artificial Sequence
  LRRK2 RNA guide
guuuaacuguucuaacuacucu

SEQ ID NO: 53751 - RNA, 22 nt, Artificial Sequence
  LRRK2 RNA guide
uaaagagaugaaccgcuguaga

SEQ ID NO: 53752 - RNA, 22 nt, Artificial Sequence
  LRRK2 RNA guide
uaacuacucuacagcgguucau

SEQ ID NO: 53753 - RNA, 22 nt, Artificial Sequence
  LRRK2 RNA guide
uaacuguucuaacuacucuaca

SEQ ID NO: 53754 - RNA, 22 nt, Artificial Sequence
  LRRK2 RNA guide
uacagcgguucaucucuuuaau

SEQ ID NO: 53755 - RNA, 22 nt, Artificial Sequence
  LRRK2 RNA guide
uacucuacagcgguucaucucu

SEQ ID NO: 53756 - RNA, 22 nt, Artificial Sequence
  LRRK2 RNA guide
uaggaagauuaaagagaugaac

SEQ ID NO: 53757 - RNA, 22 nt, Artificial Sequence
  LRRK2 RNA guide
ucuaacuacucuacagcgguuc

SEQ ID NO: 53758 - RNA, 22 nt, Artificial Sequence
  LRRK2 RNA guide
ucuacagcgguucaucucuuua

SEQ ID NO: 53759 - RNA, 22 nt, Artificial Sequence
  LRRK2 RNA guide
ugaaccgcuguagaguaguuag

SEQ ID NO: 53760 - RNA, 22 nt, Artificial Sequence
  LRRK2 RNA guide
uguucuaacuacucuacagcgg

SEQ ID NO: 53761 - RNA, 22 nt, Artificial Sequence
  LRRK2 RNA guide
uuaaagagaugaaccgcuguag

SEQ ID NO: 53762 - RNA, 22 nt, Artificial Sequence
  LRRK2 RNA guide
uuaacuguucuaacuacucuac

SEQ ID NO: 53763 - RNA, 22 nt, Artificial Sequence
  LRRK2 RNA guide
uucuaacuacucuacagcgguu

SEQ ID NO: 53764 - RNA, 20 nt, Artificial Sequence
  LRRK2 RNA guide
aaagagaugaaccacuguag

SEQ ID NO: 53765 - RNA, 20 nt, Artificial Sequence
  LRRK2 RNA guide
aaccacuguagaguaguuag

SEQ ID NO: 53766 - RNA, 20 nt, Artificial Sequence
  LRRK2 RNA guide
aacuacucuacagugguuca

SEQ ID NO: 53767 - RNA, 20 nt, Artificial Sequence
  LRRK2 RNA guide
aagagaugaaccacuguaga

SEQ ID NO: 53768 - RNA, 20 nt, Artificial Sequence
  LRRK2 RNA guide
aagauuaaagagaugaacca

SEQ ID NO: 53769 - RNA, 20 nt, Artificial Sequence
  LRRK2 RNA guide
acagugguucaucucuuuaa

SEQ ID NO: 53770 - RNA, 20 nt, Artificial Sequence
  LRRK2 RNA guide
accacuguagaguaguuaga

SEQ ID NO: 53771 - RNA, 20 nt, Artificial Sequence
  LRRK2 RNA guide
acuacucuacagugguucau

SEQ ID NO: 53772 - RNA, 20 nt, Artificial Sequence
  LRRK2 RNA guide
acucuacagugguucaucuc

SEQ ID NO: 53773 - RNA, 20 nt, Artificial Sequence
  LRRK2 RNA guide
agagaugaaccacuguagag

SEQ ID NO: 53774 - RNA, 20 nt, Artificial Sequence
  LRRK2 RNA guide
agaugaaccacuguagagua

SEQ ID NO: 53775 - RNA, 20 nt, Artificial Sequence
  LRRK2 RNA guide
agauuaaagagaugaaccac

SEQ ID NO: 53776 - RNA, 20 nt, Artificial Sequence
  LRRK2 RNA guide
agugguucaucucuuuaauc

SEQ ID NO: 53777 - RNA, 20 nt, Artificial Sequence
  LRRK2 RNA guide
augaaccacuguagaguagu

SEQ ID NO: 53778 - RNA, 20 nt, Artificial Sequence
  LRRK2 RNA guide
auuaaagagaugaaccacug

SEQ ID NO: 53779 - RNA, 20 nt, Artificial Sequence
  LRRK2 RNA guide
cacuguagaguaguuagaac

SEQ ID NO: 53780 - RNA, 20 nt, Artificial Sequence
  LRRK2 RNA guide
cagugguucaucucuuuaau

SEQ ID NO: 53781 - RNA, 20 nt, Artificial Sequence
  LRRK2 RNA guide
ccacuguagaguaguuagaa

SEQ ID NO: 53782 - RNA, 20 nt, Artificial Sequence
  LRRK2 RNA guide
cuaacuacucuacagugguu

SEQ ID NO: 53783 - RNA, 20 nt, Artificial Sequence
  LRRK2 RNA guide
cuacagugguucaucucuuu

SEQ ID NO: 53784 - RNA, 20 nt, Artificial Sequence
  LRRK2 RNA guide
cuacucuacagugguucauc

SEQ ID NO: 53785 - RNA, 20 nt, Artificial Sequence
  LRRK2 RNA guide
cucuacagugguucaucucu

SEQ ID NO: 53786 - RNA, 20 nt, Artificial Sequence
  LRRK2 RNA guide
gaaccacuguagaguaguua

SEQ ID NO: 53787 - RNA, 20 nt, Artificial Sequence
  LRRK2 RNA guide
gagaugaaccacuguagagu

SEQ ID NO: 53788 - RNA, 20 nt, Artificial Sequence
  LRRK2 RNA guide
gaugaaccacuguagaguag

SEQ ID NO: 53789 - RNA, 20 nt, Artificial Sequence
  LRRK2 RNA guide
gauuaaagagaugaaccacu

SEQ ID NO: 53790 - RNA, 20 nt, Artificial Sequence
  LRRK2 RNA guide
gugguucaucucuuuaaucu

SEQ ID NO: 53791 - RNA, 20 nt, Artificial Sequence
  LRRK2 RNA guide
guucuaacuacucuacagug

SEQ ID NO: 53792 - RNA, 20 nt, Artificial Sequence
  LRRK2 RNA guide
uaaagagaugaaccacugua

SEQ ID NO: 53793 - RNA, 20 nt, Artificial Sequence
  LRRK2 RNA guide
uaacuacucuacagugguuc

SEQ ID NO: 53794 - RNA, 20 nt, Artificial Sequence
  LRRK2 RNA guide
uacagugguucaucucuuua

SEQ ID NO: 53795 - RNA, 20 nt, Artificial Sequence
  LRRK2 RNA guide
uacucuacagugguucaucu

SEQ ID NO: 53796 - RNA, 20 nt, Artificial Sequence
  LRRK2 RNA guide
ucuaacuacucuacaguggu

SEQ ID NO: 53797 - RNA, 20 nt, Artificial Sequence
  LRRK2 RNA guide
ucuacagugguucaucucuu

SEQ ID NO: 53798 - RNA, 20 nt, Artificial Sequence
  LRRK2 RNA guide
ugaaccacuguagaguaguu

SEQ ID NO: 53799 - RNA, 20 nt, Artificial Sequence
  LRRK2 RNA guide
uguucuaacuacucuacagu

SEQ ID NO: 53800 - RNA, 20 nt, Artificial Sequence
  LRRK2 RNA guide
uuaaagagaugaaccacugu

SEQ ID NO: 53801 - RNA, 20 nt, Artificial Sequence
  LRRK2 RNA guide
uucuaacuacucuacagugg

SEQ ID NO: 53802 - RNA, 21 nt, Artificial Sequence
  LRRK2 RNA guide
aaagagaugaaccacuguaga

SEQ ID NO: 53803 - RNA, 21 nt, Artificial Sequence
  LRRK2 RNA guide
aaccacuguagaguaguuaga

SEQ ID NO: 53804 - RNA, 21 nt, Artificial Sequence
  LRRK2 RNA guide
aacuacucuacagugguucau

SEQ ID NO: 53805 - RNA, 21 nt, Artificial Sequence
  LRRK2 RNA guide
aagagaugaaccacuguagag

SEQ ID NO: 53806 - RNA, 21 nt, Artificial Sequence
  LRRK2 RNA guide
aagauuaaagagaugaaccac

SEQ ID NO: 53807 - RNA, 21 nt, Artificial Sequence
  LRRK2 RNA guide
acagugguucaucucuuuaau

SEQ ID NO: 53808 - RNA, 21 nt, Artificial Sequence
  LRRK2 RNA guide
accacuguagaguaguuagaa

SEQ ID NO: 53809 - RNA, 21 nt, Artificial Sequence
  LRRK2 RNA guide
acuacucuacagugguucauc

SEQ ID NO: 53810 - RNA, 21 nt, Artificial Sequence
  LRRK2 RNA guide
acucuacagugguucaucucu

SEQ ID NO: 53811 - RNA, 21 nt, Artificial Sequence
  LRRK2 RNA guide
agagaugaaccacuguagagu

SEQ ID NO: 53812 - RNA, 21 nt, Artificial Sequence
  LRRK2 RNA guide
agaugaaccacuguagaguag

SEQ ID NO: 53813 - RNA, 21 nt, Artificial Sequence
  LRRK2 RNA guide
agauuaaagagaugaaccacu

SEQ ID NO: 53814 - RNA, 21 nt, Artificial Sequence
  LRRK2 RNA guide
agugguucaucucuuuaaucu

SEQ ID NO: 53815 - RNA, 21 nt, Artificial Sequence
  LRRK2 RNA guide
augaaccacuguagaguaguu

SEQ ID NO: 53816 - RNA, 21 nt, Artificial Sequence
  LRRK2 RNA guide
auuaaagagaugaaccacugu

SEQ ID NO: 53817 - RNA, 21 nt, Artificial Sequence
  LRRK2 RNA guide
cacuguagaguaguuagaaca

SEQ ID NO: 53818 - RNA, 21 nt, Artificial Sequence
  LRRK2 RNA guide
cagugguucaucucuuuaauc

SEQ ID NO: 53819 - RNA, 21 nt, Artificial Sequence
  LRRK2 RNA guide
ccacuguagaguaguuagaac

SEQ ID NO: 53820 - RNA, 21 nt, Artificial Sequence
  LRRK2 RNA guide
cuaacuacucuacagugguuc

SEQ ID NO: 53821 - RNA, 21 nt, Artificial Sequence
  LRRK2 RNA guide
cuacagugguucaucucuuua

SEQ ID NO: 53822 - RNA, 21 nt, Artificial Sequence
  LRRK2 RNA guide
cuacucuacagugguucaucu

SEQ ID NO: 53823 - RNA, 21 nt, Artificial Sequence
  LRRK2 RNA guide
cucuacagugguucaucucuu

SEQ ID NO: 53824 - RNA, 21 nt, Artificial Sequence
  LRRK2 RNA guide
cuguucuaacuacucuacagu

SEQ ID NO: 53825 - RNA, 21 nt, Artificial Sequence
  LRRK2 RNA guide
gaaccacuguagaguaguuag

SEQ ID NO: 53826 - RNA, 21 nt, Artificial Sequence
  LRRK2 RNA guide
gaagauuaaagagaugaacca

SEQ ID NO: 53827 - RNA, 21 nt, Artificial Sequence
  LRRK2 RNA guide
gagaugaaccacuguagagua

SEQ ID NO: 53828 - RNA, 21 nt, Artificial Sequence
  LRRK2 RNA guide
gaugaaccacuguagaguagu

SEQ ID NO: 53829 - RNA, 21 nt, Artificial Sequence
  LRRK2 RNA guide
gauuaaagagaugaaccacug

SEQ ID NO: 53830 - RNA, 21 nt, Artificial Sequence
  LRRK2 RNA guide
gugguucaucucuuuaaucuu

SEQ ID NO: 53831 - RNA, 21 nt, Artificial Sequence
  LRRK2 RNA guide
guucuaacuacucuacagugg

SEQ ID NO: 53832 - RNA, 21 nt, Artificial Sequence
  LRRK2 RNA guide
uaaagagaugaaccacuguag

SEQ ID NO: 53833 - RNA, 21 nt, Artificial Sequence
  LRRK2 RNA guide
uaacuacucuacagugguuca

SEQ ID NO: 53834 - RNA, 21 nt, Artificial Sequence
  LRRK2 RNA guide
uacagugguucaucucuuuaa

SEQ ID NO: 53835 - RNA, 21 nt, Artificial Sequence
  LRRK2 RNA guide
uacucuacagugguucaucuc

SEQ ID NO: 53836 - RNA, 21 nt, Artificial Sequence
  LRRK2 RNA guide
ucuaacuacucuacagugguu

SEQ ID NO: 53837 - RNA, 21 nt, Artificial Sequence
  LRRK2 RNA guide
ucuacagugguucaucucuuu

SEQ ID NO: 53838 - RNA, 21 nt, Artificial Sequence
  LRRK2 RNA guide
ugaaccacuguagaguaguua

SEQ ID NO: 53839 - RNA, 21 nt, Artificial Sequence
  LRRK2 RNA guide
uguucuaacuacucuacagug

SEQ ID NO: 53840 - RNA, 21 nt, Artificial Sequence
  LRRK2 RNA guide
uuaaagagaugaaccacugua

SEQ ID NO: 53841 - RNA, 21 nt, Artificial Sequence
  LRRK2 RNA guide
uucuaacuacucuacaguggu

SEQ ID NO: 53842 - RNA, 22 nt, Artificial Sequence
  LRRK2 RNA guide
aaagagaugaaccacuguagag

SEQ ID NO: 53843 - RNA, 22 nt, Artificial Sequence
  LRRK2 RNA guide
aaccacuguagaguaguuagaa

SEQ ID NO: 53844 - RNA, 22 nt, Artificial Sequence
  LRRK2 RNA guide
aacuacucuacagugguucauc

SEQ ID NO: 53845 - RNA, 22 nt, Artificial Sequence
  LRRK2 RNA guide
aagagaugaaccacuguagagu

SEQ ID NO: 53846 - RNA, 22 nt, Artificial Sequence
  LRRK2 RNA guide
aagauuaaagagaugaaccacu

SEQ ID NO: 53847 - RNA, 22 nt, Artificial Sequence
  LRRK2 RNA guide
acagugguucaucucuuuaauc

SEQ ID NO: 53848 - RNA, 22 nt, Artificial Sequence
  LRRK2 RNA guide
accacuguagaguaguuagaac

SEQ ID NO: 53849 - RNA, 22 nt, Artificial Sequence
  LRRK2 RNA guide
acuacucuacagugguucaucu

SEQ ID NO: 53850 - RNA, 22 nt, Artificial Sequence
  LRRK2 RNA guide
acucuacagugguucaucucuu

SEQ ID NO: 53851 - RNA, 22 nt, Artificial Sequence
  LRRK2 RNA guide
acuguucuaacuacucuacagu

SEQ ID NO: 53852 - RNA, 22 nt, Artificial Sequence
  LRRK2 RNA guide
agagaugaaccacuguagagua

SEQ ID NO: 53853 - RNA, 22 nt, Artificial Sequence
  LRRK2 RNA guide
agaugaaccacuguagaguagu

SEQ ID NO: 53854 - RNA, 22 nt, Artificial Sequence
  LRRK2 RNA guide
agauuaaagagaugaaccacug

SEQ ID NO: 53855 - RNA, 22 nt, Artificial Sequence
  LRRK2 RNA guide
agugguucaucucuuuaaucuu

SEQ ID NO: 53856 - RNA, 22 nt, Artificial Sequence
  LRRK2 RNA guide
augaaccacuguagaguaguua

SEQ ID NO: 53857 - RNA, 22 nt, Artificial Sequence
  LRRK2 RNA guide
auuaaagagaugaaccacugua

SEQ ID NO: 53858 - RNA, 22 nt, Artificial Sequence
  LRRK2 RNA guide
cacuguagaguaguuagaacag

SEQ ID NO: 53859 - RNA, 22 nt, Artificial Sequence
  LRRK2 RNA guide
cagugguucaucucuuuaaucu

SEQ ID NO: 53860 - RNA, 22 nt, Artificial Sequence
  LRRK2 RNA guide
ccacuguagaguaguuagaaca

SEQ ID NO: 53861 - RNA, 22 nt, Artificial Sequence
  LRRK2 RNA guide
cuaacuacucuacagugguuca

SEQ ID NO: 53862 - RNA, 22 nt, Artificial Sequence
  LRRK2 RNA guide
cuacagugguucaucucuuuaa

SEQ ID NO: 53863 - RNA, 22 nt, Artificial Sequence
  LRRK2 RNA guide
cuacucuacagugguucaucuc

SEQ ID NO: 53864 - RNA, 22 nt, Artificial Sequence
  LRRK2 RNA guide
cucuacagugguucaucucuuu

SEQ ID NO: 53865 - RNA, 22 nt, Artificial Sequence
  LRRK2 RNA guide
cuguucuaacuacucuacagug

SEQ ID NO: 53866 - RNA, 22 nt, Artificial Sequence
  LRRK2 RNA guide
gaaccacuguagaguaguuaga

SEQ ID NO: 53867 - RNA, 22 nt, Artificial Sequence
  LRRK2 RNA guide
gaagauuaaagagaugaaccac

SEQ ID NO: 53868 - RNA, 22 nt, Artificial Sequence
  LRRK2 RNA guide
gagaugaaccacuguagaguag

SEQ ID NO: 53869 - RNA, 22 nt, Artificial Sequence
  LRRK2 RNA guide
gaugaaccacuguagaguaguu

SEQ ID NO: 53870 - RNA, 22 nt, Artificial Sequence
  LRRK2 RNA guide
gauuaaagagaugaaccacugu

SEQ ID NO: 53871 - RNA, 22 nt, Artificial Sequence
  LRRK2 RNA guide
ggaagauuaaagagaugaacca

SEQ ID NO: 53872 - RNA, 22 nt, Artificial Sequence
  LRRK2 RNA guide
gugguucaucucuuuaaucuuc

SEQ ID NO: 53873 - RNA, 22 nt, Artificial Sequence
  LRRK2 RNA guide
guucuaacuacucuacaguggu

SEQ ID NO: 53874 - RNA, 22 nt, Artificial Sequence
  LRRK2 RNA guide
uaaagagaugaaccacuguaga

SEQ ID NO: 53875 - RNA, 22 nt, Artificial Sequence
  LRRK2 RNA guide
uaacuacucuacagugguucau

SEQ ID NO: 53876 - RNA, 22 nt, Artificial Sequence
  LRRK2 RNA guide
uacagugguucaucucuuuaau

SEQ ID NO: 53877 - RNA, 22 nt, Artificial Sequence
  LRRK2 RNA guide
uacucuacagugguucaucucu

SEQ ID NO: 53878 - RNA, 22 nt, Artificial Sequence
  LRRK2 RNA guide
ucuaacuacucuacagugguuc

SEQ ID NO: 53879 - RNA, 22 nt, Artificial Sequence
  LRRK2 RNA guide
ucuacagugguucaucucuuua

SEQ ID NO: 53880 - RNA, 22 nt, Artificial Sequence
  LRRK2 RNA guide
ugaaccacuguagaguaguuag

SEQ ID NO: 53881 - RNA, 22 nt, Artificial Sequence
  LRRK2 RNA guide
uguucuaacuacucuacagugg

SEQ ID NO: 53882 - RNA, 22 nt, Artificial Sequence
  LRRK2 RNA guide
uuaaagagaugaaccacuguag

SEQ ID NO: 53883 - RNA, 22 nt, Artificial Sequence
  LRRK2 RNA guide
uucuaacuacucuacagugguu

SEQ ID NO: 53884 - RNA, 20 nt, Artificial Sequence
  LRRK2 RNA guide
aaagaguguucuauggaaua

SEQ ID NO: 53885 - RNA, 20 nt, Artificial Sequence
  LRRK2 RNA guide
aagaguguucuauggaauag

SEQ ID NO: 53886 - RNA, 20 nt, Artificial Sequence
  LRRK2 RNA guide
aaugacauccacuacuauuc

SEQ ID NO: 53887 - RNA, 20 nt, Artificial Sequence
  LRRK2 RNA guide
acauccacuacuauuccaua

SEQ ID NO: 53888 - RNA, 20 nt, Artificial Sequence
  LRRK2 RNA guide
acuacuauuccauagaacac

SEQ ID NO: 53889 - RNA, 20 nt, Artificial Sequence
  LRRK2 RNA guide
acuauuccauagaacacucu

SEQ ID NO: 53890 - RNA, 20 nt, Artificial Sequence
  LRRK2 RNA guide
agaacacucuuuaugagcua

SEQ ID NO: 53891 - RNA, 20 nt, Artificial Sequence
  LRRK2 RNA guide
agaguguucuauggaauagu

SEQ ID NO: 53892 - RNA, 20 nt, Artificial Sequence
  LRRK2 RNA guide
aguacuagcucauaaagagu

SEQ ID NO: 53893 - RNA, 20 nt, Artificial Sequence
  LRRK2 RNA guide
aguguucuauggaauaguag

SEQ ID NO: 53894 - RNA, 20 nt, Artificial Sequence
  LRRK2 RNA guide
auaaagaguguucuauggaa

SEQ ID NO: 53895 - RNA, 20 nt, Artificial Sequence
  LRRK2 RNA guide
auccacuacuauuccauaga

SEQ ID NO: 53896 - RNA, 20 nt, Artificial Sequence
  LRRK2 RNA guide
augacauccacuacuauucc

SEQ ID NO: 53897 - RNA, 20 nt, Artificial Sequence
  LRRK2 RNA guide
cacuacuauuccauagaaca

SEQ ID NO: 53898 - RNA, 20 nt, Artificial Sequence
  LRRK2 RNA guide
cauaaagaguguucuaugga

SEQ ID NO: 53899 - RNA, 20 nt, Artificial Sequence
  LRRK2 RNA guide
cauccacuacuauuccauag

SEQ ID NO: 53900 - RNA, 20 nt, Artificial Sequence
  LRRK2 RNA guide
ccacuacuauuccauagaac

SEQ ID NO: 53901 - RNA, 20 nt, Artificial Sequence
  LRRK2 RNA guide
cuacuauuccauagaacacu

SEQ ID NO: 53902 - RNA, 20 nt, Artificial Sequence
  LRRK2 RNA guide
cuauuccauagaacacucuu

SEQ ID NO: 53903 - RNA, 20 nt, Artificial Sequence
  LRRK2 RNA guide
gacauccacuacuauuccau

SEQ ID NO: 53904 - RNA, 20 nt, Artificial Sequence
  LRRK2 RNA guide
gaguguucuauggaauagua

SEQ ID NO: 53905 - RNA, 20 nt, Artificial Sequence
  LRRK2 RNA guide
guguucuauggaauaguagu

SEQ ID NO: 53906 - RNA, 20 nt, Artificial Sequence
  LRRK2 RNA guide
guucuauggaauaguagugg

SEQ ID NO: 53907 - RNA, 20 nt, Artificial Sequence
  LRRK2 RNA guide
uaaagaguguucuauggaau

SEQ ID NO: 53908 - RNA, 20 nt, Artificial Sequence
  LRRK2 RNA guide
uacuauuccauagaacacuc

SEQ ID NO: 53909 - RNA, 20 nt, Artificial Sequence
  LRRK2 RNA guide
uaguacuagcucauaaagag

SEQ ID NO: 53910 - RNA, 20 nt, Artificial Sequence
  LRRK2 RNA guide
ucauaaagaguguucuaugg

SEQ ID NO: 53911 - RNA, 20 nt, Artificial Sequence
  LRRK2 RNA guide
uccacuacuauuccauagaa

SEQ ID NO: 53912 - RNA, 20 nt, Artificial Sequence
  LRRK2 RNA guide
ucuauggaauaguaguggau

SEQ ID NO: 53913 - RNA, 20 nt, Artificial Sequence
  LRRK2 RNA guide
ugacauccacuacuauucca

SEQ ID NO: 53914 - RNA, 20 nt, Artificial Sequence
  LRRK2 RNA guide
uguucuauggaauaguagug

SEQ ID NO: 53915 - RNA, 20 nt, Artificial Sequence
  LRRK2 RNA guide
uucuauggaauaguagugga

SEQ ID NO: 53916 - RNA, 21 nt, Artificial Sequence
  LRRK2 RNA guide
aaagaguguucuauggaauag

SEQ ID NO: 53917 - RNA, 21 nt, Artificial Sequence
  LRRK2 RNA guide
aaaugacauccacuacuauuc

SEQ ID NO: 53918 - RNA, 21 nt, Artificial Sequence
  LRRK2 RNA guide
aagaguguucuauggaauagu

SEQ ID NO: 53919 - RNA, 21 nt, Artificial Sequence
  LRRK2 RNA guide
aaugacauccacuacuauucc

SEQ ID NO: 53920 - RNA, 21 nt, Artificial Sequence
  LRRK2 RNA guide
acauccacuacuauuccauag

SEQ ID NO: 53921 - RNA, 21 nt, Artificial Sequence
  LRRK2 RNA guide
acuacuauuccauagaacacu

SEQ ID NO: 53922 - RNA, 21 nt, Artificial Sequence
  LRRK2 RNA guide
acuauuccauagaacacucuu

SEQ ID NO: 53923 - RNA, 21 nt, Artificial Sequence
  LRRK2 RNA guide
agaacacucuuuaugagcuag

SEQ ID NO: 53924 - RNA, 21 nt, Artificial Sequence
  LRRK2 RNA guide
agaguguucuauggaauagua

SEQ ID NO: 53925 - RNA, 21 nt, Artificial Sequence
  LRRK2 RNA guide
aguacuagcucauaaagagug

SEQ ID NO: 53926 - RNA, 21 nt, Artificial Sequence
  LRRK2 RNA guide
aguguucuauggaauaguagu

SEQ ID NO: 53927 - RNA, 21 nt, Artificial Sequence
  LRRK2 RNA guide
auaguacuagcucauaaagag

SEQ ID NO: 53928 - RNA, 21 nt, Artificial Sequence
  LRRK2 RNA guide
auccacuacuauuccauagaa

SEQ ID NO: 53929 - RNA, 21 nt, Artificial Sequence
  LRRK2 RNA guide
augacauccacuacuauucca

SEQ ID NO: 53930 - RNA, 21 nt, Artificial Sequence
  LRRK2 RNA guide
cacuacuauuccauagaacac

SEQ ID NO: 53931 - RNA, 21 nt, Artificial Sequence
  LRRK2 RNA guide
cauaaagaguguucuauggaa

SEQ ID NO: 53932 - RNA, 21 nt, Artificial Sequence
  LRRK2 RNA guide
cauccacuacuauuccauaga

SEQ ID NO: 53933 - RNA, 21 nt, Artificial Sequence
  LRRK2 RNA guide
ccacuacuauuccauagaaca

SEQ ID NO: 53934 - RNA, 21 nt, Artificial Sequence
  LRRK2 RNA guide
cuacuauuccauagaacacuc

SEQ ID NO: 53935 - RNA, 21 nt, Artificial Sequence
  LRRK2 RNA guide
cuauuccauagaacacucuuu

SEQ ID NO: 53936 - RNA, 21 nt, Artificial Sequence
  LRRK2 RNA guide
cucauaaagaguguucuaugg

SEQ ID NO: 53937 - RNA, 21 nt, Artificial Sequence
  LRRK2 RNA guide
gacauccacuacuauuccaua

SEQ ID NO: 53938 - RNA, 21 nt, Artificial Sequence
  LRRK2 RNA guide
gaguguucuauggaauaguag

SEQ ID NO: 53939 - RNA, 21 nt, Artificial Sequence
  LRRK2 RNA guide
guguucuauggaauaguagug

SEQ ID NO: 53940 - RNA, 21 nt, Artificial Sequence
  LRRK2 RNA guide
guucuauggaauaguagugga

SEQ ID NO: 53941 - RNA, 21 nt, Artificial Sequence
  LRRK2 RNA guide
uacuauuccauagaacacucu

SEQ ID NO: 53942 - RNA, 21 nt, Artificial Sequence
  LRRK2 RNA guide
uagaacacucuuuaugagcua

SEQ ID NO: 53943 - RNA, 21 nt, Artificial Sequence
  LRRK2 RNA guide
uaguacuagcucauaaagagu

SEQ ID NO: 53944 - RNA, 21 nt, Artificial Sequence
  LRRK2 RNA guide
ucauaaagaguguucuaugga

SEQ ID NO: 53945 - RNA, 21 nt, Artificial Sequence
  LRRK2 RNA guide
uccacuacuauuccauagaac

SEQ ID NO: 53946 - RNA, 21 nt, Artificial Sequence
  LRRK2 RNA guide
ucuauggaauaguaguggaug

SEQ ID NO: 53947 - RNA, 21 nt, Artificial Sequence
  LRRK2 RNA guide
ugacauccacuacuauuccau

SEQ ID NO: 53948 - RNA, 21 nt, Artificial Sequence
  LRRK2 RNA guide
uguucuauggaauaguagugg

SEQ ID NO: 53949 - RNA, 21 nt, Artificial Sequence
  LRRK2 RNA guide
uucuauggaauaguaguggau

SEQ ID NO: 53950 - RNA, 22 nt, Artificial Sequence
  LRRK2 RNA guide
aaagaguguucuauggaauagu

SEQ ID NO: 53951 - RNA, 22 nt, Artificial Sequence
  LRRK2 RNA guide
aaaugacauccacuacuauucc

SEQ ID NO: 53952 - RNA, 22 nt, Artificial Sequence
  LRRK2 RNA guide
aagaguguucuauggaauagua

SEQ ID NO: 53953 - RNA, 22 nt, Artificial Sequence
  LRRK2 RNA guide
aaugacauccacuacuauucca

SEQ ID NO: 53954 - RNA, 22 nt, Artificial Sequence
  LRRK2 RNA guide
acauccacuacuauuccauaga

SEQ ID NO: 53955 - RNA, 22 nt, Artificial Sequence
  LRRK2 RNA guide
acuacuauuccauagaacacuc

SEQ ID NO: 53956 - RNA, 22 nt, Artificial Sequence
  LRRK2 RNA guide
acuauuccauagaacacucuuu

SEQ ID NO: 53957 - RNA, 22 nt, Artificial Sequence
  LRRK2 RNA guide
agaacacucuuuaugagcuagu

SEQ ID NO: 53958 - RNA, 22 nt, Artificial Sequence
  LRRK2 RNA guide
agaguguucuauggaauaguag

SEQ ID NO: 53959 - RNA, 22 nt, Artificial Sequence
  LRRK2 RNA guide
aguacuagcucauaaagagugu

SEQ ID NO: 53960 - RNA, 22 nt, Artificial Sequence
  LRRK2 RNA guide
aguguucuauggaauaguagug

SEQ ID NO: 53961 - RNA, 22 nt, Artificial Sequence
  LRRK2 RNA guide
auagaacacucuuuaugagcua

SEQ ID NO: 53962 - RNA, 22 nt, Artificial Sequence
  LRRK2 RNA guide
auaguacuagcucauaaagagu

SEQ ID NO: 53963 - RNA, 22 nt, Artificial Sequence
  LRRK2 RNA guide
auccacuacuauuccauagaac

SEQ ID NO: 53964 - RNA, 22 nt, Artificial Sequence
  LRRK2 RNA guide
augacauccacuacuauuccau

SEQ ID NO: 53965 - RNA, 22 nt, Artificial Sequence
  LRRK2 RNA guide
cacuacuauuccauagaacacu

SEQ ID NO: 53966 - RNA, 22 nt, Artificial Sequence
  LRRK2 RNA guide
cauaaagaguguucuauggaau

SEQ ID NO: 53967 - RNA, 22 nt, Artificial Sequence
  LRRK2 RNA guide
cauccacuacuauuccauagaa

SEQ ID NO: 53968 - RNA, 22 nt, Artificial Sequence
  LRRK2 RNA guide
ccacuacuauuccauagaacac

SEQ ID NO: 53969 - RNA, 22 nt, Artificial Sequence
  LRRK2 RNA guide
cuacuauuccauagaacacucu

SEQ ID NO: 53970 - RNA, 22 nt, Artificial Sequence
  LRRK2 RNA guide
cuauuccauagaacacucuuua

SEQ ID NO: 53971 - RNA, 22 nt, Artificial Sequence
  LRRK2 RNA guide
cucauaaagaguguucuaugga

SEQ ID NO: 53972 - RNA, 22 nt, Artificial Sequence
  LRRK2 RNA guide
gacauccacuacuauuccauag

SEQ ID NO: 53973 - RNA, 22 nt, Artificial Sequence
  LRRK2 RNA guide
gaguguucuauggaauaguagu

SEQ ID NO: 53974 - RNA, 22 nt, Artificial Sequence
  LRRK2 RNA guide
gcucauaaagaguguucuaugg

SEQ ID NO: 53975 - RNA, 22 nt, Artificial Sequence
  LRRK2 RNA guide
guguucuauggaauaguagugg

SEQ ID NO: 53976 - RNA, 22 nt, Artificial Sequence
  LRRK2 RNA guide
guucuauggaauaguaguggau

SEQ ID NO: 53977 - RNA, 22 nt, Artificial Sequence
  LRRK2 RNA guide
uaaagaguguucuauggaauag

SEQ ID NO: 53978 - RNA, 22 nt, Artificial Sequence
  LRRK2 RNA guide
uaaaugacauccacuacuauuc

SEQ ID NO: 53979 - RNA, 22 nt, Artificial Sequence
  LRRK2 RNA guide
uacuauuccauagaacacucuu

SEQ ID NO: 53980 - RNA, 22 nt, Artificial Sequence
  LRRK2 RNA guide
uagaacacucuuuaugagcuag

SEQ ID NO: 53981 - RNA, 22 nt, Artificial Sequence
  LRRK2 RNA guide
uaguacuagcucauaaagagug

SEQ ID NO: 53982 - RNA, 22 nt, Artificial Sequence
  LRRK2 RNA guide
uauaguacuagcucauaaagag

SEQ ID NO: 53983 - RNA, 22 nt, Artificial Sequence
  LRRK2 RNA guide
ucauaaagaguguucuauggaa

SEQ ID NO: 53984 - RNA, 22 nt, Artificial Sequence
  LRRK2 RNA guide
uccacuacuauuccauagaaca

SEQ ID NO: 53985 - RNA, 22 nt, Artificial Sequence
  LRRK2 RNA guide
ucuauggaauaguaguggaugu

SEQ ID NO: 53986 - RNA, 22 nt, Artificial Sequence
  LRRK2 RNA guide
ugacauccacuacuauuccaua

SEQ ID NO: 53987 - RNA, 22 nt, Artificial Sequence
  LRRK2 RNA guide
uguucuauggaauaguagugga

SEQ ID NO: 53988 - RNA, 22 nt, Artificial Sequence
  LRRK2 RNA guide
uucuauggaauaguaguggaug

SEQ ID NO: 53989 - RNA, 20 nt, Artificial Sequence
  LRRK2 RNA guide
aaaacacucuuuaugagcua

SEQ ID NO: 53990 - RNA, 20 nt, Artificial Sequence
  LRRK2 RNA guide
aagaguguuuuauggaauag

SEQ ID NO: 53991 - RNA, 20 nt, Artificial Sequence
  LRRK2 RNA guide
acuacuauuccauaaaacac

SEQ ID NO: 53992 - RNA, 20 nt, Artificial Sequence
  LRRK2 RNA guide
acuagcucauaaagaguguu

SEQ ID NO: 53993 - RNA, 20 nt, Artificial Sequence
  LRRK2 RNA guide
acuauuccauaaaacacucu

SEQ ID NO: 53994 - RNA, 20 nt, Artificial Sequence
  LRRK2 RNA guide
agaguguuuuauggaauagu

SEQ ID NO: 53995 - RNA, 20 nt, Artificial Sequence
  LRRK2 RNA guide
agcucauaaagaguguuuua

SEQ ID NO: 53996 - RNA, 20 nt, Artificial Sequence
  LRRK2 RNA guide
aguguuuuauggaauaguag

SEQ ID NO: 53997 - RNA, 20 nt, Artificial Sequence
  LRRK2 RNA guide
auaaaacacucuuuaugagc

SEQ ID NO: 53998 - RNA, 20 nt, Artificial Sequence
  LRRK2 RNA guide
auccacuacuauuccauaaa

SEQ ID NO: 53999 - RNA, 20 nt, Artificial Sequence
  LRRK2 RNA guide
cacuacuauuccauaaaaca

SEQ ID NO: 54000 - RNA, 20 nt, Artificial Sequence
  LRRK2 RNA guide
cauaaaacacucuuuaugag

SEQ ID NO: 54001 - RNA, 20 nt, Artificial Sequence
  LRRK2 RNA guide
cauaaagaguguuuuaugga

SEQ ID NO: 54002 - RNA, 20 nt, Artificial Sequence
  LRRK2 RNA guide
cauccacuacuauuccauaa

SEQ ID NO: 54003 - RNA, 20 nt, Artificial Sequence
  LRRK2 RNA guide
ccacuacuauuccauaaaac

SEQ ID NO: 54004 - RNA, 20 nt, Artificial Sequence
  LRRK2 RNA guide
ccauaaaacacucuuuauga

SEQ ID NO: 54005 - RNA, 20 nt, Artificial Sequence
  LRRK2 RNA guide
cuacuauuccauaaaacacu

SEQ ID NO: 54006 - RNA, 20 nt, Artificial Sequence
  LRRK2 RNA guide
cuagcucauaaagaguguuu

SEQ ID NO: 54007 - RNA, 20 nt, Artificial Sequence
  LRRK2 RNA guide
cuauuccauaaaacacucuu

SEQ ID NO: 54008 - RNA, 20 nt, Artificial Sequence
  LRRK2 RNA guide
cucauaaagaguguuuuaug

SEQ ID NO: 54009 - RNA, 20 nt, Artificial Sequence
  LRRK2 RNA guide
gaguguuuuauggaauagua

SEQ ID NO: 54010 - RNA, 20 nt, Artificial Sequence
  LRRK2 RNA guide
gcucauaaagaguguuuuau

SEQ ID NO: 54011 - RNA, 20 nt, Artificial Sequence
  LRRK2 RNA guide
guacuagcucauaaagagug

SEQ ID NO: 54012 - RNA, 20 nt, Artificial Sequence
  LRRK2 RNA guide
guguuuuauggaauaguagu

SEQ ID NO: 54013 - RNA, 20 nt, Artificial Sequence
  LRRK2 RNA guide
guuuuauggaauaguagugg

SEQ ID NO: 54014 - RNA, 20 nt, Artificial Sequence
  LRRK2 RNA guide
uaaaacacucuuuaugagcu

SEQ ID NO: 54015 - RNA, 20 nt, Artificial Sequence
  LRRK2 RNA guide
uacuagcucauaaagagugu

SEQ ID NO: 54016 - RNA, 20 nt, Artificial Sequence
  LRRK2 RNA guide
uacuauuccauaaaacacuc

SEQ ID NO: 54017 - RNA, 20 nt, Artificial Sequence
  LRRK2 RNA guide
uagcucauaaagaguguuuu

SEQ ID NO: 54018 - RNA, 20 nt, Artificial Sequence
  LRRK2 RNA guide
ucauaaagaguguuuuaugg

SEQ ID NO: 54019 - RNA, 20 nt, Artificial Sequence
  LRRK2 RNA guide
uccacuacuauuccauaaaa

SEQ ID NO: 54020 - RNA, 20 nt, Artificial Sequence
  LRRK2 RNA guide
uccauaaaacacucuuuaug

SEQ ID NO: 54021 - RNA, 20 nt, Artificial Sequence
  LRRK2 RNA guide
uguuuuauggaauaguagug

SEQ ID NO: 54022 - RNA, 20 nt, Artificial Sequence
  LRRK2 RNA guide
uuuauggaauaguaguggau

SEQ ID NO: 54023 - RNA, 20 nt, Artificial Sequence
  LRRK2 RNA guide
uuuuauggaauaguagugga

SEQ ID NO: 54024 - RNA, 21 nt, Artificial Sequence
  LRRK2 RNA guide
aaaacacucuuuaugagcuag

SEQ ID NO: 54025 - RNA, 21 nt, Artificial Sequence
  LRRK2 RNA guide
acauccacuacuauuccauaa

SEQ ID NO: 54026 - RNA, 21 nt, Artificial Sequence
  LRRK2 RNA guide
acuagcucauaaagaguguuu

SEQ ID NO: 54027 - RNA, 21 nt, Artificial Sequence
  LRRK2 RNA guide
cacuacuauuccauaaaacac

SEQ ID NO: 54028 - RNA, 21 nt, Artificial Sequence
  LRRK2 RNA guide
cauaaaacacucuuuaugagc

SEQ ID NO: 54029 - RNA, 21 nt, Artificial Sequence
  LRRK2 RNA guide
cauccacuacuauuccauaaa

SEQ ID NO: 54030 - RNA, 21 nt, Artificial Sequence
  LRRK2 RNA guide
ccacuacuauuccauaaaaca

SEQ ID NO: 54031 - RNA, 21 nt, Artificial Sequence
  LRRK2 RNA guide
ccauaaaacacucuuuaugag

SEQ ID NO: 54032 - RNA, 21 nt, Artificial Sequence
  LRRK2 RNA guide
cuacuauuccauaaaacacuc

SEQ ID NO: 54033 - RNA, 21 nt, Artificial Sequence
  LRRK2 RNA guide
cuagcucauaaagaguguuuu

SEQ ID NO: 54034 - RNA, 21 nt, Artificial Sequence
  LRRK2 RNA guide
cucauaaagaguguuuuaugg

SEQ ID NO: 54035 - RNA, 21 nt, Artificial Sequence
  LRRK2 RNA guide
gaguguuuuauggaauaguag

SEQ ID NO: 54036 - RNA, 21 nt, Artificial Sequence
  LRRK2 RNA guide
gcucauaaagaguguuuuaug

SEQ ID NO: 54037 - RNA, 21 nt, Artificial Sequence
  LRRK2 RNA guide
guacuagcucauaaagagugu

SEQ ID NO: 54038 - RNA, 21 nt, Artificial Sequence
  LRRK2 RNA guide
guguuuuauggaauaguagug

SEQ ID NO: 54039 - RNA, 21 nt, Artificial Sequence
  LRRK2 RNA guide
guuuuauggaauaguagugga

SEQ ID NO: 54040 - RNA, 21 nt, Artificial Sequence
  LRRK2 RNA guide
uacuagcucauaaagaguguu

SEQ ID NO: 54041 - RNA, 21 nt, Artificial Sequence
  LRRK2 RNA guide
uccacuacuauuccauaaaac

SEQ ID NO: 54042 - RNA, 21 nt, Artificial Sequence
  LRRK2 RNA guide
uguuuuauggaauaguagugg

SEQ ID NO: 54043 - RNA, 21 nt, Artificial Sequence
  LRRK2 RNA guide
uuuauggaauaguaguggaug

SEQ ID NO: 54044 - RNA, 22 nt, Artificial Sequence
  LRRK2 RNA guide
aaaacacucuuuaugagcuagu

SEQ ID NO: 54045 - RNA, 22 nt, Artificial Sequence
  LRRK2 RNA guide
acauccacuacuauuccauaaa

SEQ ID NO: 54046 - RNA, 22 nt, Artificial Sequence
  LRRK2 RNA guide
acuacuauuccauaaaacacuc

SEQ ID NO: 54047 - RNA, 22 nt, Artificial Sequence
  LRRK2 RNA guide
acuagcucauaaagaguguuuu

SEQ ID NO: 54048 - RNA, 22 nt, Artificial Sequence
  LRRK2 RNA guide
agaguguuuuauggaauaguag

SEQ ID NO: 54049 - RNA, 22 nt, Artificial Sequence
  LRRK2 RNA guide
agcucauaaagaguguuuuaug

SEQ ID NO: 54050 - RNA, 22 nt, Artificial Sequence
  LRRK2 RNA guide
aguguuuuauggaauaguagug

SEQ ID NO: 54051 - RNA, 22 nt, Artificial Sequence
  LRRK2 RNA guide
auccacuacuauuccauaaaac

SEQ ID NO: 54052 - RNA, 22 nt, Artificial Sequence
  LRRK2 RNA guide
cacuacuauuccauaaaacacu

SEQ ID NO: 54053 - RNA, 22 nt, Artificial Sequence
  LRRK2 RNA guide
cauaaaacacucuuuaugagcu

SEQ ID NO: 54054 - RNA, 22 nt, Artificial Sequence
  LRRK2 RNA guide
cauccacuacuauuccauaaaa

SEQ ID NO: 54055 - RNA, 22 nt, Artificial Sequence
  LRRK2 RNA guide
ccacuacuauuccauaaaacac

SEQ ID NO: 54056 - RNA, 22 nt, Artificial Sequence
  LRRK2 RNA guide
ccauaaaacacucuuuaugagc

SEQ ID NO: 54057 - RNA, 22 nt, Artificial Sequence
  LRRK2 RNA guide
cuacuauuccauaaaacacucu

SEQ ID NO: 54058 - RNA, 22 nt, Artificial Sequence
  LRRK2 RNA guide
cuagcucauaaagaguguuuua

SEQ ID NO: 54059 - RNA, 22 nt, Artificial Sequence
  LRRK2 RNA guide
cucauaaagaguguuuuaugga

SEQ ID NO: 54060 - RNA, 22 nt, Artificial Sequence
  LRRK2 RNA guide
gacauccacuacuauuccauaa

SEQ ID NO: 54061 - RNA, 22 nt, Artificial Sequence
  LRRK2 RNA guide
gaguguuuuauggaauaguagu

SEQ ID NO: 54062 - RNA, 22 nt, Artificial Sequence
  LRRK2 RNA guide
gcucauaaagaguguuuuaugg

SEQ ID NO: 54063 - RNA, 22 nt, Artificial Sequence
  LRRK2 RNA guide
guacuagcucauaaagaguguu

SEQ ID NO: 54064 - RNA, 22 nt, Artificial Sequence
  LRRK2 RNA guide
guguuuuauggaauaguagugg

SEQ ID NO: 54065 - RNA, 22 nt, Artificial Sequence
  LRRK2 RNA guide
guuuuauggaauaguaguggau

SEQ ID NO: 54066 - RNA, 22 nt, Artificial Sequence
  LRRK2 RNA guide
uaaaacacucuuuaugagcuag

SEQ ID NO: 54067 - RNA, 22 nt, Artificial Sequence
  LRRK2 RNA guide
uacuagcucauaaagaguguuu

SEQ ID NO: 54068 - RNA, 22 nt, Artificial Sequence
  LRRK2 RNA guide
uccacuacuauuccauaaaaca

SEQ ID NO: 54069 - RNA, 22 nt, Artificial Sequence
  LRRK2 RNA guide
uccauaaaacacucuuuaugag

SEQ ID NO: 54070 - RNA, 22 nt, Artificial Sequence
  LRRK2 RNA guide
uguuuuauggaauaguagugga

SEQ ID NO: 54071 - RNA, 22 nt, Artificial Sequence
  LRRK2 RNA guide
uuuauggaauaguaguggaugu

SEQ ID NO: 54072 - RNA, 22 nt, Artificial Sequence
  LRRK2 RNA guide
uuuuauggaauaguaguggaug

SEQ ID NO: 54073 - RNA, 20 nt, Artificial Sequence
  LRRK2 RNA guide
gcaucacauucaucuauaau

SEQ ID NO: 54074 - RNA, 22 nt, Artificial Sequence
  LRRK2 RNA guide
cagcaucacauucaucuauaau

SEQ ID NO: 54075 - RNA, 20 nt, Artificial Sequence
  LRRK2 RNA guide
aaauacagugugagaaguua

SEQ ID NO: 54076 - RNA, 20 nt, Artificial Sequence
  LRRK2 RNA guide
aacuucucacacuguauuuc

SEQ ID NO: 54077 - RNA, 20 nt, Artificial Sequence
  LRRK2 RNA guide
aagaaauacagcacaguaua

SEQ ID NO: 54078 - RNA, 20 nt, Artificial Sequence
  LRRK2 RNA guide
aaguuauuauacugugcugu

SEQ ID NO: 54079 - RNA, 20 nt, Artificial Sequence
  LRRK2 RNA guide
aauaacuucucacacuguau

SEQ ID NO: 54080 - RNA, 20 nt, Artificial Sequence
  LRRK2 RNA guide
aauacagugugagaaguuau

SEQ ID NO: 54081 - RNA, 20 nt, Artificial Sequence
  LRRK2 RNA guide
acagcacaguauaauaacuu

SEQ ID NO: 54082 - RNA, 20 nt, Artificial Sequence
  LRRK2 RNA guide
acaguauaauaacuucucac

SEQ ID NO: 54083 - RNA, 20 nt, Artificial Sequence
  LRRK2 RNA guide
acagugugagaaguuauuau

SEQ ID NO: 54084 - RNA, 20 nt, Artificial Sequence
  LRRK2 RNA guide
acuucucacacuguauuuca

SEQ ID NO: 54085 - RNA, 20 nt, Artificial Sequence
  LRRK2 RNA guide
agaaauacagcacaguauaa

SEQ ID NO: 54086 - RNA, 20 nt, Artificial Sequence
  LRRK2 RNA guide
agaaguuauuauacugugcu

SEQ ID NO: 54087 - RNA, 20 nt, Artificial Sequence
  LRRK2 RNA guide
agcacaguauaauaacuucu

SEQ ID NO: 54088 - RNA, 20 nt, Artificial Sequence
  LRRK2 RNA guide
aguauaauaacuucucacac

SEQ ID NO: 54089 - RNA, 20 nt, Artificial Sequence
  LRRK2 RNA guide
agugugagaaguuauuauac

SEQ ID NO: 54090 - RNA, 20 nt, Artificial Sequence
  LRRK2 RNA guide
aguuauuauacugugcugua

SEQ ID NO: 54091 - RNA, 20 nt, Artificial Sequence
  LRRK2 RNA guide
auaacuucucacacuguauu

SEQ ID NO: 54092 - RNA, 20 nt, Artificial Sequence
  LRRK2 RNA guide
auaauaacuucucacacugu

SEQ ID NO: 54093 - RNA, 20 nt, Artificial Sequence
  LRRK2 RNA guide
auacagcacaguauaauaac

SEQ ID NO: 54094 - RNA, 20 nt, Artificial Sequence
  LRRK2 RNA guide
auacagugugagaaguuauu

SEQ ID NO: 54095 - RNA, 20 nt, Artificial Sequence
  LRRK2 RNA guide
auaugaaauacagugugaga

SEQ ID NO: 54096 - RNA, 20 nt, Artificial Sequence
  LRRK2 RNA guide
augaaauacagugugagaag

SEQ ID NO: 54097 - RNA, 20 nt, Artificial Sequence
  LRRK2 RNA guide
cacaguauaauaacuucuca

SEQ ID NO: 54098 - RNA, 20 nt, Artificial Sequence
  LRRK2 RNA guide
cagcacaguauaauaacuuc

SEQ ID NO: 54099 - RNA, 20 nt, Artificial Sequence
  LRRK2 RNA guide
caguauaauaacuucucaca

SEQ ID NO: 54100 - RNA, 20 nt, Artificial Sequence
  LRRK2 RNA guide
cagugugagaaguuauuaua

SEQ ID NO: 54101 - RNA, 20 nt, Artificial Sequence
  LRRK2 RNA guide
cuauaugaaauacaguguga

SEQ ID NO: 54102 - RNA, 20 nt, Artificial Sequence
  LRRK2 RNA guide
gaaauacagcacaguauaau

SEQ ID NO: 54103 - RNA, 20 nt, Artificial Sequence
  LRRK2 RNA guide
gaaauacagugugagaaguu

SEQ ID NO: 54104 - RNA, 20 nt, Artificial Sequence
  LRRK2 RNA guide
gaaguuauuauacugugcug

SEQ ID NO: 54105 - RNA, 20 nt, Artificial Sequence
  LRRK2 RNA guide
gagaaguuauuauacugugc

SEQ ID NO: 54106 - RNA, 20 nt, Artificial Sequence
  LRRK2 RNA guide
gcacaguauaauaacuucuc

SEQ ID NO: 54107 - RNA, 20 nt, Artificial Sequence
  LRRK2 RNA guide
gcuauaugaaauacagugug

SEQ ID NO: 54108 - RNA, 20 nt, Artificial Sequence
  LRRK2 RNA guide
guauaauaacuucucacacu

SEQ ID NO: 54109 - RNA, 20 nt, Artificial Sequence
  LRRK2 RNA guide
gugagaaguuauuauacugu

SEQ ID NO: 54110 - RNA, 20 nt, Artificial Sequence
  LRRK2 RNA guide
gugugagaaguuauuauacu

SEQ ID NO: 54111 - RNA, 20 nt, Artificial Sequence
  LRRK2 RNA guide
uaacuucucacacuguauuu

SEQ ID NO: 54112 - RNA, 20 nt, Artificial Sequence
  LRRK2 RNA guide
uaauaacuucucacacugua

SEQ ID NO: 54113 - RNA, 20 nt, Artificial Sequence
  LRRK2 RNA guide
uacagcacaguauaauaacu

SEQ ID NO: 54114 - RNA, 20 nt, Artificial Sequence
  LRRK2 RNA guide
uacagugugagaaguuauua

SEQ ID NO: 54115 - RNA, 20 nt, Artificial Sequence
  LRRK2 RNA guide
uauaauaacuucucacacug

SEQ ID NO: 54116 - RNA, 20 nt, Artificial Sequence
  LRRK2 RNA guide
uauaugaaauacagugugag

SEQ ID NO: 54117 - RNA, 20 nt, Artificial Sequence
  LRRK2 RNA guide
uaugaaauacagugugagaa

SEQ ID NO: 54118 - RNA, 20 nt, Artificial Sequence
  LRRK2 RNA guide
ugaaauacagugugagaagu

SEQ ID NO: 54119 - RNA, 20 nt, Artificial Sequence
  LRRK2 RNA guide
ugagaaguuauuauacugug

SEQ ID NO: 54120 - RNA, 20 nt, Artificial Sequence
  LRRK2 RNA guide
ugugagaaguuauuauacug

SEQ ID NO: 54121 - RNA, 21 nt, Artificial Sequence
  LRRK2 RNA guide
aacuucucacacuguauuuca

SEQ ID NO: 54122 - RNA, 21 nt, Artificial Sequence
  LRRK2 RNA guide
acagcacaguauaauaacuuc

SEQ ID NO: 54123 - RNA, 21 nt, Artificial Sequence
  LRRK2 RNA guide
acuucucacacuguauuucau

SEQ ID NO: 54124 - RNA, 21 nt, Artificial Sequence
  LRRK2 RNA guide
agaaguuauuauacugugcug

SEQ ID NO: 54125 - RNA, 21 nt, Artificial Sequence
  LRRK2 RNA guide
agcacaguauaauaacuucuc

SEQ ID NO: 54126 - RNA, 21 nt, Artificial Sequence
  LRRK2 RNA guide
augaaauacagugugagaagu

SEQ ID NO: 54127 - RNA, 21 nt, Artificial Sequence
  LRRK2 RNA guide
cacaguauaauaacuucucac

SEQ ID NO: 54128 - RNA, 21 nt, Artificial Sequence
  LRRK2 RNA guide
cagcacaguauaauaacuucu

SEQ ID NO: 54129 - RNA, 21 nt, Artificial Sequence
  LRRK2 RNA guide
caguauaauaacuucucacac

SEQ ID NO: 54130 - RNA, 21 nt, Artificial Sequence
  LRRK2 RNA guide
cagugugagaaguuauuauac

SEQ ID NO: 54131 - RNA, 21 nt, Artificial Sequence
  LRRK2 RNA guide
cuauaugaaauacagugugag

SEQ ID NO: 54132 - RNA, 21 nt, Artificial Sequence
  LRRK2 RNA guide
gaaauacagugugagaaguua

SEQ ID NO: 54133 - RNA, 21 nt, Artificial Sequence
  LRRK2 RNA guide
gaaguuauuauacugugcugu

SEQ ID NO: 54134 - RNA, 21 nt, Artificial Sequence
  LRRK2 RNA guide
gagaaguuauuauacugugcu

SEQ ID NO: 54135 - RNA, 21 nt, Artificial Sequence
  LRRK2 RNA guide
gcacaguauaauaacuucuca

SEQ ID NO: 54136 - RNA, 21 nt, Artificial Sequence
  LRRK2 RNA guide
gcuauaugaaauacaguguga

SEQ ID NO: 54137 - RNA, 21 nt, Artificial Sequence
  LRRK2 RNA guide
guauaauaacuucucacacug

SEQ ID NO: 54138 - RNA, 21 nt, Artificial Sequence
  LRRK2 RNA guide
gugagaaguuauuauacugug

SEQ ID NO: 54139 - RNA, 21 nt, Artificial Sequence
  LRRK2 RNA guide
gugugagaaguuauuauacug

SEQ ID NO: 54140 - RNA, 21 nt, Artificial Sequence
  LRRK2 RNA guide
uaacuucucacacuguauuuc

SEQ ID NO: 54141 - RNA, 21 nt, Artificial Sequence
  LRRK2 RNA guide
uaugaaauacagugugagaag

SEQ ID NO: 54142 - RNA, 21 nt, Artificial Sequence
  LRRK2 RNA guide
ugaaauacagugugagaaguu

SEQ ID NO: 54143 - RNA, 21 nt, Artificial Sequence
  LRRK2 RNA guide
ugagaaguuauuauacugugc

SEQ ID NO: 54144 - RNA, 21 nt, Artificial Sequence
  LRRK2 RNA guide
ugcuauaugaaauacagugug

SEQ ID NO: 54145 - RNA, 22 nt, Artificial Sequence
  LRRK2 RNA guide
aacuucucacacuguauuucau

SEQ ID NO: 54146 - RNA, 22 nt, Artificial Sequence
  LRRK2 RNA guide
acagcacaguauaauaacuucu

SEQ ID NO: 54147 - RNA, 22 nt, Artificial Sequence
  LRRK2 RNA guide
acaguauaauaacuucucacac

SEQ ID NO: 54148 - RNA, 22 nt, Artificial Sequence
  LRRK2 RNA guide
acagugugagaaguuauuauac

SEQ ID NO: 54149 - RNA, 22 nt, Artificial Sequence
  LRRK2 RNA guide
acuucucacacuguauuucaua

SEQ ID NO: 54150 - RNA, 22 nt, Artificial Sequence
  LRRK2 RNA guide
agaaguuauuauacugugcugu

SEQ ID NO: 54151 - RNA, 22 nt, Artificial Sequence
  LRRK2 RNA guide
agcacaguauaauaacuucuca

SEQ ID NO: 54152 - RNA, 22 nt, Artificial Sequence
  LRRK2 RNA guide
aguauaauaacuucucacacug

SEQ ID NO: 54153 - RNA, 22 nt, Artificial Sequence
  LRRK2 RNA guide
agugugagaaguuauuauacug

SEQ ID NO: 54154 - RNA, 22 nt, Artificial Sequence
  LRRK2 RNA guide
auaacuucucacacuguauuuc

SEQ ID NO: 54155 - RNA, 22 nt, Artificial Sequence
  LRRK2 RNA guide
auaugaaauacagugugagaag

SEQ ID NO: 54156 - RNA, 22 nt, Artificial Sequence
  LRRK2 RNA guide
augaaauacagugugagaaguu

SEQ ID NO: 54157 - RNA, 22 nt, Artificial Sequence
  LRRK2 RNA guide
cacaguauaauaacuucucaca

SEQ ID NO: 54158 - RNA, 22 nt, Artificial Sequence
  LRRK2 RNA guide
cagcacaguauaauaacuucuc

SEQ ID NO: 54159 - RNA, 22 nt, Artificial Sequence
  LRRK2 RNA guide
caguauaauaacuucucacacu

SEQ ID NO: 54160 - RNA, 22 nt, Artificial Sequence
  LRRK2 RNA guide
cagugugagaaguuauuauacu

SEQ ID NO: 54161 - RNA, 22 nt, Artificial Sequence
  LRRK2 RNA guide
cuauaugaaauacagugugaga

SEQ ID NO: 54162 - RNA, 22 nt, Artificial Sequence
  LRRK2 RNA guide
gaaauacagugugagaaguuau

SEQ ID NO: 54163 - RNA, 22 nt, Artificial Sequence
  LRRK2 RNA guide
gaaguuauuauacugugcugua

SEQ ID NO: 54164 - RNA, 22 nt, Artificial Sequence
  LRRK2 RNA guide
gagaaguuauuauacugugcug

SEQ ID NO: 54165 - RNA, 22 nt, Artificial Sequence
  LRRK2 RNA guide
gcacaguauaauaacuucucac

SEQ ID NO: 54166 - RNA, 22 nt, Artificial Sequence
  LRRK2 RNA guide
gcuauaugaaauacagugugag

SEQ ID NO: 54167 - RNA, 22 nt, Artificial Sequence
  LRRK2 RNA guide
guauaauaacuucucacacugu

SEQ ID NO: 54168 - RNA, 22 nt, Artificial Sequence
  LRRK2 RNA guide
gugagaaguuauuauacugugc

SEQ ID NO: 54169 - RNA, 22 nt, Artificial Sequence
  LRRK2 RNA guide
gugugagaaguuauuauacugu

SEQ ID NO: 54170 - RNA, 22 nt, Artificial Sequence
  LRRK2 RNA guide
uaacuucucacacuguauuuca

SEQ ID NO: 54171 - RNA, 22 nt, Artificial Sequence
  LRRK2 RNA guide
uacagcacaguauaauaacuuc

SEQ ID NO: 54172 - RNA, 22 nt, Artificial Sequence
  LRRK2 RNA guide
uaugaaauacagugugagaagu

SEQ ID NO: 54173 - RNA, 22 nt, Artificial Sequence
  LRRK2 RNA guide
ugaaauacagugugagaaguua

SEQ ID NO: 54174 - RNA, 22 nt, Artificial Sequence
  LRRK2 RNA guide
ugagaaguuauuauacugugcu

SEQ ID NO: 54175 - RNA, 22 nt, Artificial Sequence
  LRRK2 RNA guide
ugcuauaugaaauacaguguga

SEQ ID NO: 54176 - RNA, 22 nt, Artificial Sequence
  LRRK2 RNA guide
ugugagaaguuauuauacugug

SEQ ID NO: 54177 - RNA, 22 nt, Artificial Sequence
  LRRK2 RNA guide
uugcuauaugaaauacagugug

SEQ ID NO: 54178 - RNA, 20 nt, Artificial Sequence
  LRRK2 RNA guide
aaauacagugugagguuauu

SEQ ID NO: 54179 - RNA, 20 nt, Artificial Sequence
  LRRK2 RNA guide
aaccucacacuguauuucau

SEQ ID NO: 54180 - RNA, 20 nt, Artificial Sequence
  LRRK2 RNA guide
aauaaccucacacuguauuu

SEQ ID NO: 54181 - RNA, 20 nt, Artificial Sequence
  LRRK2 RNA guide
aauacagugugagguuauua

SEQ ID NO: 54182 - RNA, 20 nt, Artificial Sequence
  LRRK2 RNA guide
acagcacaguauaauaaccu

SEQ ID NO: 54183 - RNA, 20 nt, Artificial Sequence
  LRRK2 RNA guide
acaguauaauaaccucacac

SEQ ID NO: 54184 - RNA, 20 nt, Artificial Sequence
  LRRK2 RNA guide
acagugugagguuauuauac

SEQ ID NO: 54185 - RNA, 20 nt, Artificial Sequence
  LRRK2 RNA guide
accucacacuguauuucaua

SEQ ID NO: 54186 - RNA, 20 nt, Artificial Sequence
  LRRK2 RNA guide
agcacaguauaauaaccuca

SEQ ID NO: 54187 - RNA, 20 nt, Artificial Sequence
  LRRK2 RNA guide
agguuauuauacugugcugu

SEQ ID NO: 54188 - RNA, 20 nt, Artificial Sequence
  LRRK2 RNA guide
aguauaauaaccucacacug

SEQ ID NO: 54189 - RNA, 20 nt, Artificial Sequence
  LRRK2 RNA guide
agugugagguuauuauacug

SEQ ID NO: 54190 - RNA, 20 nt, Artificial Sequence
  LRRK2 RNA guide
auaaccucacacuguauuuc

SEQ ID NO: 54191 - RNA, 20 nt, Artificial Sequence
  LRRK2 RNA guide
auaauaaccucacacuguau

SEQ ID NO: 54192 - RNA, 20 nt, Artificial Sequence
  LRRK2 RNA guide
auacagugugagguuauuau

SEQ ID NO: 54193 - RNA, 20 nt, Artificial Sequence
  LRRK2 RNA guide
auaugaaauacagugugagg

SEQ ID NO: 54194 - RNA, 20 nt, Artificial Sequence
  LRRK2 RNA guide
augaaauacagugugagguu

SEQ ID NO: 54195 - RNA, 20 nt, Artificial Sequence
  LRRK2 RNA guide
cacaguauaauaaccucaca

SEQ ID NO: 54196 - RNA, 20 nt, Artificial Sequence
  LRRK2 RNA guide
cagcacaguauaauaaccuc

SEQ ID NO: 54197 - RNA, 20 nt, Artificial Sequence
  LRRK2 RNA guide
caguauaauaaccucacacu

SEQ ID NO: 54198 - RNA, 20 nt, Artificial Sequence
  LRRK2 RNA guide
cagugugagguuauuauacu

SEQ ID NO: 54199 - RNA, 20 nt, Artificial Sequence
  LRRK2 RNA guide
gaaauacagugugagguuau

SEQ ID NO: 54200 - RNA, 20 nt, Artificial Sequence
  LRRK2 RNA guide
gagguuauuauacugugcug

SEQ ID NO: 54201 - RNA, 20 nt, Artificial Sequence
  LRRK2 RNA guide
gcacaguauaauaaccucac

SEQ ID NO: 54202 - RNA, 20 nt, Artificial Sequence
  LRRK2 RNA guide
gguuauuauacugugcugua

SEQ ID NO: 54203 - RNA, 20 nt, Artificial Sequence
  LRRK2 RNA guide
guauaauaaccucacacugu

SEQ ID NO: 54204 - RNA, 20 nt, Artificial Sequence
  LRRK2 RNA guide
gugagguuauuauacugugc

SEQ ID NO: 54205 - RNA, 20 nt, Artificial Sequence
  LRRK2 RNA guide
gugugagguuauuauacugu

SEQ ID NO: 54206 - RNA, 20 nt, Artificial Sequence
  LRRK2 RNA guide
uaaccucacacuguauuuca

SEQ ID NO: 54207 - RNA, 20 nt, Artificial Sequence
  LRRK2 RNA guide
uaauaaccucacacuguauu

SEQ ID NO: 54208 - RNA, 20 nt, Artificial Sequence
  LRRK2 RNA guide
uacagcacaguauaauaacc

SEQ ID NO: 54209 - RNA, 20 nt, Artificial Sequence
  LRRK2 RNA guide
uacagugugagguuauuaua

SEQ ID NO: 54210 - RNA, 20 nt, Artificial Sequence
  LRRK2 RNA guide
uauaauaaccucacacugua

SEQ ID NO: 54211 - RNA, 20 nt, Artificial Sequence
  LRRK2 RNA guide
uaugaaauacagugugaggu

SEQ ID NO: 54212 - RNA, 20 nt, Artificial Sequence
  LRRK2 RNA guide
ugaaauacagugugagguua

SEQ ID NO: 54213 - RNA, 20 nt, Artificial Sequence
  LRRK2 RNA guide
ugagguuauuauacugugcu

SEQ ID NO: 54214 - RNA, 20 nt, Artificial Sequence
  LRRK2 RNA guide
ugugagguuauuauacugug

SEQ ID NO: 54215 - RNA, 20 nt, Artificial Sequence
  LRRK2 RNA guide
uugcuauaugaaauacagug

SEQ ID NO: 54216 - RNA, 21 nt, Artificial Sequence
  LRRK2 RNA guide
aaccucacacuguauuucaua

SEQ ID NO: 54217 - RNA, 21 nt, Artificial Sequence
  LRRK2 RNA guide
aauaaccucacacuguauuuc

SEQ ID NO: 54218 - RNA, 21 nt, Artificial Sequence
  LRRK2 RNA guide
acagcacaguauaauaaccuc

SEQ ID NO: 54219 - RNA, 21 nt, Artificial Sequence
  LRRK2 RNA guide
acaguauaauaaccucacacu

SEQ ID NO: 54220 - RNA, 21 nt, Artificial Sequence
  LRRK2 RNA guide
acagugugagguuauuauacu

SEQ ID NO: 54221 - RNA, 21 nt, Artificial Sequence
  LRRK2 RNA guide
accucacacuguauuucauau

SEQ ID NO: 54222 - RNA, 21 nt, Artificial Sequence
  LRRK2 RNA guide
agcacaguauaauaaccucac

SEQ ID NO: 54223 - RNA, 21 nt, Artificial Sequence
  LRRK2 RNA guide
agguuauuauacugugcugua

SEQ ID NO: 54224 - RNA, 21 nt, Artificial Sequence
  LRRK2 RNA guide
aguauaauaaccucacacugu

SEQ ID NO: 54225 - RNA, 21 nt, Artificial Sequence
  LRRK2 RNA guide
agugugagguuauuauacugu

SEQ ID NO: 54226 - RNA, 21 nt, Artificial Sequence
  LRRK2 RNA guide
auaaccucacacuguauuuca

SEQ ID NO: 54227 - RNA, 21 nt, Artificial Sequence
  LRRK2 RNA guide
auacagcacaguauaauaacc

SEQ ID NO: 54228 - RNA, 21 nt, Artificial Sequence
  LRRK2 RNA guide
auaugaaauacagugugaggu

SEQ ID NO: 54229 - RNA, 21 nt, Artificial Sequence
  LRRK2 RNA guide
augaaauacagugugagguua

SEQ ID NO: 54230 - RNA, 21 nt, Artificial Sequence
  LRRK2 RNA guide
cacaguauaauaaccucacac

SEQ ID NO: 54231 - RNA, 21 nt, Artificial Sequence
  LRRK2 RNA guide
cagcacaguauaauaaccuca

SEQ ID NO: 54232 - RNA, 21 nt, Artificial Sequence
  LRRK2 RNA guide
caguauaauaaccucacacug

SEQ ID NO: 54233 - RNA, 21 nt, Artificial Sequence
  LRRK2 RNA guide
cagugugagguuauuauacug

SEQ ID NO: 54234 - RNA, 21 nt, Artificial Sequence
  LRRK2 RNA guide
gaaauacagugugagguuauu

SEQ ID NO: 54235 - RNA, 21 nt, Artificial Sequence
  LRRK2 RNA guide
gagguuauuauacugugcugu

SEQ ID NO: 54236 - RNA, 21 nt, Artificial Sequence
  LRRK2 RNA guide
gcacaguauaauaaccucaca

SEQ ID NO: 54237 - RNA, 21 nt, Artificial Sequence
  LRRK2 RNA guide
gguuauuauacugugcuguau

SEQ ID NO: 54238 - RNA, 21 nt, Artificial Sequence
  LRRK2 RNA guide
guauaauaaccucacacugua

SEQ ID NO: 54239 - RNA, 21 nt, Artificial Sequence
  LRRK2 RNA guide
gugagguuauuauacugugcu

SEQ ID NO: 54240 - RNA, 21 nt, Artificial Sequence
  LRRK2 RNA guide
gugugagguuauuauacugug

SEQ ID NO: 54241 - RNA, 21 nt, Artificial Sequence
  LRRK2 RNA guide
guugcuauaugaaauacagug

SEQ ID NO: 54242 - RNA, 21 nt, Artificial Sequence
  LRRK2 RNA guide
uaaccucacacuguauuucau

SEQ ID NO: 54243 - RNA, 21 nt, Artificial Sequence
  LRRK2 RNA guide
uacagcacaguauaauaaccu

SEQ ID NO: 54244 - RNA, 21 nt, Artificial Sequence
  LRRK2 RNA guide
uacagugugagguuauuauac

SEQ ID NO: 54245 - RNA, 21 nt, Artificial Sequence
  LRRK2 RNA guide
uauaugaaauacagugugagg

SEQ ID NO: 54246 - RNA, 21 nt, Artificial Sequence
  LRRK2 RNA guide
uaugaaauacagugugagguu

SEQ ID NO: 54247 - RNA, 21 nt, Artificial Sequence
  LRRK2 RNA guide
ugaaauacagugugagguuau

SEQ ID NO: 54248 - RNA, 21 nt, Artificial Sequence
  LRRK2 RNA guide
ugagguuauuauacugugcug

SEQ ID NO: 54249 - RNA, 21 nt, Artificial Sequence
  LRRK2 RNA guide
ugugagguuauuauacugugc

SEQ ID NO: 54250 - RNA, 22 nt, Artificial Sequence
  LRRK2 RNA guide
aaccucacacuguauuucauau

SEQ ID NO: 54251 - RNA, 22 nt, Artificial Sequence
  LRRK2 RNA guide
aauaaccucacacuguauuuca

SEQ ID NO: 54252 - RNA, 22 nt, Artificial Sequence
  LRRK2 RNA guide
aauacagcacaguauaauaacc

SEQ ID NO: 54253 - RNA, 22 nt, Artificial Sequence
  LRRK2 RNA guide
acagcacaguauaauaaccuca

SEQ ID NO: 54254 - RNA, 22 nt, Artificial Sequence
  LRRK2 RNA guide
acaguauaauaaccucacacug

SEQ ID NO: 54255 - RNA, 22 nt, Artificial Sequence
  LRRK2 RNA guide
acagugugagguuauuauacug

SEQ ID NO: 54256 - RNA, 22 nt, Artificial Sequence
  LRRK2 RNA guide
accucacacuguauuucauaua

SEQ ID NO: 54257 - RNA, 22 nt, Artificial Sequence
  LRRK2 RNA guide
agcacaguauaauaaccucaca

SEQ ID NO: 54258 - RNA, 22 nt, Artificial Sequence
  LRRK2 RNA guide
agguuauuauacugugcuguau

SEQ ID NO: 54259 - RNA, 22 nt, Artificial Sequence
  LRRK2 RNA guide
aguauaauaaccucacacugua

SEQ ID NO: 54260 - RNA, 22 nt, Artificial Sequence
  LRRK2 RNA guide
agugugagguuauuauacugug

SEQ ID NO: 54261 - RNA, 22 nt, Artificial Sequence
  LRRK2 RNA guide
aguugcuauaugaaauacagug

SEQ ID NO: 54262 - RNA, 22 nt, Artificial Sequence
  LRRK2 RNA guide
auaaccucacacuguauuucau

SEQ ID NO: 54263 - RNA, 22 nt, Artificial Sequence
  LRRK2 RNA guide
auacagcacaguauaauaaccu

SEQ ID NO: 54264 - RNA, 22 nt, Artificial Sequence
  LRRK2 RNA guide
auacagugugagguuauuauac

SEQ ID NO: 54265 - RNA, 22 nt, Artificial Sequence
  LRRK2 RNA guide
auaugaaauacagugugagguu

SEQ ID NO: 54266 - RNA, 22 nt, Artificial Sequence
  LRRK2 RNA guide
augaaauacagugugagguuau

SEQ ID NO: 54267 - RNA, 22 nt, Artificial Sequence
  LRRK2 RNA guide
cacaguauaauaaccucacacu

SEQ ID NO: 54268 - RNA, 22 nt, Artificial Sequence
  LRRK2 RNA guide
cagcacaguauaauaaccucac

SEQ ID NO: 54269 - RNA, 22 nt, Artificial Sequence
  LRRK2 RNA guide
caguauaauaaccucacacugu

SEQ ID NO: 54270 - RNA, 22 nt, Artificial Sequence
  LRRK2 RNA guide
cagugugagguuauuauacugu

SEQ ID NO: 54271 - RNA, 22 nt, Artificial Sequence
  LRRK2 RNA guide
cuauaugaaauacagugugagg

SEQ ID NO: 54272 - RNA, 22 nt, Artificial Sequence
  LRRK2 RNA guide
gaaauacagugugagguuauua

SEQ ID NO: 54273 - RNA, 22 nt, Artificial Sequence
  LRRK2 RNA guide
gagguuauuauacugugcugua

SEQ ID NO: 54274 - RNA, 22 nt, Artificial Sequence
  LRRK2 RNA guide
gcacaguauaauaaccucacac

SEQ ID NO: 54275 - RNA, 22 nt, Artificial Sequence
  LRRK2 RNA guide
gguuauuauacugugcuguauu

SEQ ID NO: 54276 - RNA, 22 nt, Artificial Sequence
  LRRK2 RNA guide
guauaauaaccucacacuguau

SEQ ID NO: 54277 - RNA, 22 nt, Artificial Sequence
  LRRK2 RNA guide
gugagguuauuauacugugcug

SEQ ID NO: 54278 - RNA, 22 nt, Artificial Sequence
  LRRK2 RNA guide
gugugagguuauuauacugugc

SEQ ID NO: 54279 - RNA, 22 nt, Artificial Sequence
  LRRK2 RNA guide
guugcuauaugaaauacagugu

SEQ ID NO: 54280 - RNA, 22 nt, Artificial Sequence
  LRRK2 RNA guide
uaaccucacacuguauuucaua

SEQ ID NO: 54281 - RNA, 22 nt, Artificial Sequence
  LRRK2 RNA guide
uaauaaccucacacuguauuuc

SEQ ID NO: 54282 - RNA, 22 nt, Artificial Sequence
  LRRK2 RNA guide
uacagcacaguauaauaaccuc

SEQ ID NO: 54283 - RNA, 22 nt, Artificial Sequence
  LRRK2 RNA guide
uacagugugagguuauuauacu

SEQ ID NO: 54284 - RNA, 22 nt, Artificial Sequence
  LRRK2 RNA guide
uauaugaaauacagugugaggu

SEQ ID NO: 54285 - RNA, 22 nt, Artificial Sequence
  LRRK2 RNA guide
uaugaaauacagugugagguua

SEQ ID NO: 54286 - RNA, 22 nt, Artificial Sequence
  LRRK2 RNA guide
ugaaauacagugugagguuauu

SEQ ID NO: 54287 - RNA, 22 nt, Artificial Sequence
  LRRK2 RNA guide
ugagguuauuauacugugcugu

SEQ ID NO: 54288 - RNA, 22 nt, Artificial Sequence
  LRRK2 RNA guide
ugugagguuauuauacugugcu

SEQ ID NO: 54289 - RNA, 20 nt, Artificial Sequence
  LRRK2 RNA guide
aagagauuuuaggcagaaga

SEQ ID NO: 54290 - RNA, 20 nt, Artificial Sequence
  LRRK2 RNA guide
acucauucucuucugccuaa

SEQ ID NO: 54291 - RNA, 20 nt, Artificial Sequence
  LRRK2 RNA guide
acuuacucauucucuucugc

SEQ ID NO: 54292 - RNA, 20 nt, Artificial Sequence
  LRRK2 RNA guide
agaagagaaugaguaaguau

SEQ ID NO: 54293 - RNA, 20 nt, Artificial Sequence
  LRRK2 RNA guide
agauuuuaggcagaagagaa

SEQ ID NO: 54294 - RNA, 20 nt, Artificial Sequence
  LRRK2 RNA guide
aggcagaagagaaugaguaa

SEQ ID NO: 54295 - RNA, 20 nt, Artificial Sequence
  LRRK2 RNA guide
auacuuacucauucucuucu

SEQ ID NO: 54296 - RNA, 20 nt, Artificial Sequence
  LRRK2 RNA guide
auucucuucugccuaaaauc

SEQ ID NO: 54297 - RNA, 20 nt, Artificial Sequence
  LRRK2 RNA guide
auuuaagagauuuuaggcag

SEQ ID NO: 54298 - RNA, 20 nt, Artificial Sequence
  LRRK2 RNA guide
auuuuaggcagaagagaaug

SEQ ID NO: 54299 - RNA, 20 nt, Artificial Sequence
  LRRK2 RNA guide
cagaagagaaugaguaagua

SEQ ID NO: 54300 - RNA, 20 nt, Artificial Sequence
  LRRK2 RNA guide
cauucucuucugccuaaaau

SEQ ID NO: 54301 - RNA, 20 nt, Artificial Sequence
  LRRK2 RNA guide
cucauucucuucugccuaaa

SEQ ID NO: 54302 - RNA, 20 nt, Artificial Sequence
  LRRK2 RNA guide
cucuucugccuaaaaucucu

SEQ ID NO: 54303 - RNA, 20 nt, Artificial Sequence
  LRRK2 RNA guide
cuuacucauucucuucugcc

SEQ ID NO: 54304 - RNA, 20 nt, Artificial Sequence
  LRRK2 RNA guide
cuucugccuaaaaucucuua

SEQ ID NO: 54305 - RNA, 20 nt, Artificial Sequence
  LRRK2 RNA guide
gagauuuuaggcagaagaga

SEQ ID NO: 54306 - RNA, 20 nt, Artificial Sequence
  LRRK2 RNA guide
gauuuuaggcagaagagaau

SEQ ID NO: 54307 - RNA, 20 nt, Artificial Sequence
  LRRK2 RNA guide
gcagaagagaaugaguaagu

SEQ ID NO: 54308 - RNA, 20 nt, Artificial Sequence
  LRRK2 RNA guide
ggcagaagagaaugaguaag

SEQ ID NO: 54309 - RNA, 20 nt, Artificial Sequence
  LRRK2 RNA guide
uaagagauuuuaggcagaag

SEQ ID NO: 54310 - RNA, 20 nt, Artificial Sequence
  LRRK2 RNA guide
uacucauucucuucugccua

SEQ ID NO: 54311 - RNA, 20 nt, Artificial Sequence
  LRRK2 RNA guide
uacuuacucauucucuucug

SEQ ID NO: 54312 - RNA, 20 nt, Artificial Sequence
  LRRK2 RNA guide
uaggcagaagagaaugagua

SEQ ID NO: 54313 - RNA, 20 nt, Artificial Sequence
  LRRK2 RNA guide
uauacuuacucauucucuuc

SEQ ID NO: 54314 - RNA, 20 nt, Artificial Sequence
  LRRK2 RNA guide
ucauucucuucugccuaaaa

SEQ ID NO: 54315 - RNA, 20 nt, Artificial Sequence
  LRRK2 RNA guide
ucucuucugccuaaaaucuc

SEQ ID NO: 54316 - RNA, 20 nt, Artificial Sequence
  LRRK2 RNA guide
ucugccuaaaaucucuuaaa

SEQ ID NO: 54317 - RNA, 20 nt, Artificial Sequence
  LRRK2 RNA guide
ucuucugccuaaaaucucuu

SEQ ID NO: 54318 - RNA, 20 nt, Artificial Sequence
  LRRK2 RNA guide
uuaagagauuuuaggcagaa

SEQ ID NO: 54319 - RNA, 20 nt, Artificial Sequence
  LRRK2 RNA guide
uuacucauucucuucugccu

SEQ ID NO: 54320 - RNA, 20 nt, Artificial Sequence
  LRRK2 RNA guide
uuaggcagaagagaaugagu

SEQ ID NO: 54321 - RNA, 20 nt, Artificial Sequence
  LRRK2 RNA guide
uucucuucugccuaaaaucu

SEQ ID NO: 54322 - RNA, 20 nt, Artificial Sequence
  LRRK2 RNA guide
uucugccuaaaaucucuuaa

SEQ ID NO: 54323 - RNA, 20 nt, Artificial Sequence
  LRRK2 RNA guide
uuuaagagauuuuaggcaga

SEQ ID NO: 54324 - RNA, 20 nt, Artificial Sequence
  LRRK2 RNA guide
uuuaggcagaagagaaugag

SEQ ID NO: 54325 - RNA, 20 nt, Artificial Sequence
  LRRK2 RNA guide
uuuuaggcagaagagaauga

SEQ ID NO: 54326 - RNA, 21 nt, Artificial Sequence
  LRRK2 RNA guide
aagagauuuuaggcagaagag

SEQ ID NO: 54327 - RNA, 21 nt, Artificial Sequence
  LRRK2 RNA guide
acucauucucuucugccuaaa

SEQ ID NO: 54328 - RNA, 21 nt, Artificial Sequence
  LRRK2 RNA guide
acuuacucauucucuucugcc

SEQ ID NO: 54329 - RNA, 21 nt, Artificial Sequence
  LRRK2 RNA guide
agagauuuuaggcagaagaga

SEQ ID NO: 54330 - RNA, 21 nt, Artificial Sequence
  LRRK2 RNA guide
agauuuuaggcagaagagaau

SEQ ID NO: 54331 - RNA, 21 nt, Artificial Sequence
  LRRK2 RNA guide
aggcagaagagaaugaguaag

SEQ ID NO: 54332 - RNA, 21 nt, Artificial Sequence
  LRRK2 RNA guide
auacuuacucauucucuucug

SEQ ID NO: 54333 - RNA, 21 nt, Artificial Sequence
  LRRK2 RNA guide
auucucuucugccuaaaaucu

SEQ ID NO: 54334 - RNA, 21 nt, Artificial Sequence
  LRRK2 RNA guide
auuuuaggcagaagagaauga

SEQ ID NO: 54335 - RNA, 21 nt, Artificial Sequence
  LRRK2 RNA guide
cagaagagaaugaguaaguau

SEQ ID NO: 54336 - RNA, 21 nt, Artificial Sequence
  LRRK2 RNA guide
cauucucuucugccuaaaauc

SEQ ID NO: 54337 - RNA, 21 nt, Artificial Sequence
  LRRK2 RNA guide
cucauucucuucugccuaaaa

SEQ ID NO: 54338 - RNA, 21 nt, Artificial Sequence
  LRRK2 RNA guide
cucuucugccuaaaaucucuu

SEQ ID NO: 54339 - RNA, 21 nt, Artificial Sequence
  LRRK2 RNA guide
cuuacucauucucuucugccu

SEQ ID NO: 54340 - RNA, 21 nt, Artificial Sequence
  LRRK2 RNA guide
cuucugccuaaaaucucuuaa

SEQ ID NO: 54341 - RNA, 21 nt, Artificial Sequence
  LRRK2 RNA guide
gagauuuuaggcagaagagaa

SEQ ID NO: 54342 - RNA, 21 nt, Artificial Sequence
  LRRK2 RNA guide
gauuuuaggcagaagagaaug

SEQ ID NO: 54343 - RNA, 21 nt, Artificial Sequence
  LRRK2 RNA guide
gcagaagagaaugaguaagua

SEQ ID NO: 54344 - RNA, 21 nt, Artificial Sequence
  LRRK2 RNA guide
ggcagaagagaaugaguaagu

SEQ ID NO: 54345 - RNA, 21 nt, Artificial Sequence
  LRRK2 RNA guide
uaagagauuuuaggcagaaga

SEQ ID NO: 54346 - RNA, 21 nt, Artificial Sequence
  LRRK2 RNA guide
uacucauucucuucugccuaa

SEQ ID NO: 54347 - RNA, 21 nt, Artificial Sequence
  LRRK2 RNA guide
uacuuacucauucucuucugc

SEQ ID NO: 54348 - RNA, 21 nt, Artificial Sequence
  LRRK2 RNA guide
uaggcagaagagaaugaguaa

SEQ ID NO: 54349 - RNA, 21 nt, Artificial Sequence
  LRRK2 RNA guide
ucauucucuucugccuaaaau

SEQ ID NO: 54350 - RNA, 21 nt, Artificial Sequence
  LRRK2 RNA guide
ucucuucugccuaaaaucucu

SEQ ID NO: 54351 - RNA, 21 nt, Artificial Sequence
  LRRK2 RNA guide
ucuucugccuaaaaucucuua

SEQ ID NO: 54352 - RNA, 21 nt, Artificial Sequence
  LRRK2 RNA guide
uuaagagauuuuaggcagaag

SEQ ID NO: 54353 - RNA, 21 nt, Artificial Sequence
  LRRK2 RNA guide
uuacucauucucuucugccua

SEQ ID NO: 54354 - RNA, 21 nt, Artificial Sequence
  LRRK2 RNA guide
uuaggcagaagagaaugagua

SEQ ID NO: 54355 - RNA, 21 nt, Artificial Sequence
  LRRK2 RNA guide
uucucuucugccuaaaaucuc

SEQ ID NO: 54356 - RNA, 21 nt, Artificial Sequence
  LRRK2 RNA guide
uuuaggcagaagagaaugagu

SEQ ID NO: 54357 - RNA, 21 nt, Artificial Sequence
  LRRK2 RNA guide
uuuuaggcagaagagaaugag

SEQ ID NO: 54358 - RNA, 22 nt, Artificial Sequence
  LRRK2 RNA guide
aagagauuuuaggcagaagaga

SEQ ID NO: 54359 - RNA, 22 nt, Artificial Sequence
  LRRK2 RNA guide
acucauucucuucugccuaaaa

SEQ ID NO: 54360 - RNA, 22 nt, Artificial Sequence
  LRRK2 RNA guide
acuuacucauucucuucugccu

SEQ ID NO: 54361 - RNA, 22 nt, Artificial Sequence
  LRRK2 RNA guide
agagauuuuaggcagaagagaa

SEQ ID NO: 54362 - RNA, 22 nt, Artificial Sequence
  LRRK2 RNA guide
agauuuuaggcagaagagaaug

SEQ ID NO: 54363 - RNA, 22 nt, Artificial Sequence
  LRRK2 RNA guide
aggcagaagagaaugaguaagu

SEQ ID NO: 54364 - RNA, 22 nt, Artificial Sequence
  LRRK2 RNA guide
auacuuacucauucucuucugc

SEQ ID NO: 54365 - RNA, 22 nt, Artificial Sequence
  LRRK2 RNA guide
auucucuucugccuaaaaucuc

SEQ ID NO: 54366 - RNA, 22 nt, Artificial Sequence
  LRRK2 RNA guide
auuuuaggcagaagagaaugag

SEQ ID NO: 54367 - RNA, 22 nt, Artificial Sequence
  LRRK2 RNA guide
cagaagagaaugaguaaguaua

SEQ ID NO: 54368 - RNA, 22 nt, Artificial Sequence
  LRRK2 RNA guide
cauucucuucugccuaaaaucu

SEQ ID NO: 54369 - RNA, 22 nt, Artificial Sequence
  LRRK2 RNA guide
cucauucucuucugccuaaaau

SEQ ID NO: 54370 - RNA, 22 nt, Artificial Sequence
  LRRK2 RNA guide
cucuucugccuaaaaucucuua

SEQ ID NO: 54371 - RNA, 22 nt, Artificial Sequence
  LRRK2 RNA guide
cuuacucauucucuucugccua

SEQ ID NO: 54372 - RNA, 22 nt, Artificial Sequence
  LRRK2 RNA guide
cuucugccuaaaaucucuuaaa

SEQ ID NO: 54373 - RNA, 22 nt, Artificial Sequence
  LRRK2 RNA guide
gagauuuuaggcagaagagaau

SEQ ID NO: 54374 - RNA, 22 nt, Artificial Sequence
  LRRK2 RNA guide
gauuuuaggcagaagagaauga

SEQ ID NO: 54375 - RNA, 22 nt, Artificial Sequence
  LRRK2 RNA guide
gcagaagagaaugaguaaguau

SEQ ID NO: 54376 - RNA, 22 nt, Artificial Sequence
  LRRK2 RNA guide
ggcagaagagaaugaguaagua

SEQ ID NO: 54377 - RNA, 22 nt, Artificial Sequence
  LRRK2 RNA guide
uaagagauuuuaggcagaagag

SEQ ID NO: 54378 - RNA, 22 nt, Artificial Sequence
  LRRK2 RNA guide
uacucauucucuucugccuaaa

SEQ ID NO: 54379 - RNA, 22 nt, Artificial Sequence
  LRRK2 RNA guide
uacuuacucauucucuucugcc

SEQ ID NO: 54380 - RNA, 22 nt, Artificial Sequence
  LRRK2 RNA guide
uaggcagaagagaaugaguaag

SEQ ID NO: 54381 - RNA, 22 nt, Artificial Sequence
  LRRK2 RNA guide
uauacuuacucauucucuucug

SEQ ID NO: 54382 - RNA, 22 nt, Artificial Sequence
  LRRK2 RNA guide
ucauucucuucugccuaaaauc

SEQ ID NO: 54383 - RNA, 22 nt, Artificial Sequence
  LRRK2 RNA guide
ucucuucugccuaaaaucucuu

SEQ ID NO: 54384 - RNA, 22 nt, Artificial Sequence
  LRRK2 RNA guide
ucuucugccuaaaaucucuuaa

SEQ ID NO: 54385 - RNA, 22 nt, Artificial Sequence
  LRRK2 RNA guide
uuaagagauuuuaggcagaaga

SEQ ID NO: 54386 - RNA, 22 nt, Artificial Sequence
  LRRK2 RNA guide
uuacucauucucuucugccuaa

SEQ ID NO: 54387 - RNA, 22 nt, Artificial Sequence
  LRRK2 RNA guide
uuaggcagaagagaaugaguaa

SEQ ID NO: 54388 - RNA, 22 nt, Artificial Sequence
  LRRK2 RNA guide
uucucuucugccuaaaaucucu

SEQ ID NO: 54389 - RNA, 22 nt, Artificial Sequence
  LRRK2 RNA guide
uuuaagagauuuuaggcagaag

SEQ ID NO: 54390 - RNA, 22 nt, Artificial Sequence
  LRRK2 RNA guide
uuuaggcagaagagaaugagua

SEQ ID NO: 54391 - RNA, 22 nt, Artificial Sequence
  LRRK2 RNA guide
uuuuaggcagaagagaaugagu

SEQ ID NO: 54392 - RNA, 20 nt, Artificial Sequence
  LRRK2 RNA guide
aagagauuuuaggcaaaaga

SEQ ID NO: 54393 - RNA, 20 nt, Artificial Sequence
  LRRK2 RNA guide
acucauucucuuuugccuaa

SEQ ID NO: 54394 - RNA, 20 nt, Artificial Sequence
  LRRK2 RNA guide
acuuacucauucucuuuugc

SEQ ID NO: 54395 - RNA, 20 nt, Artificial Sequence
  LRRK2 RNA guide
agagauuuuaggcaaaagag

SEQ ID NO: 54396 - RNA, 20 nt, Artificial Sequence
  LRRK2 RNA guide
agauuuuaggcaaaagagaa

SEQ ID NO: 54397 - RNA, 20 nt, Artificial Sequence
  LRRK2 RNA guide
aggcaaaagagaaugaguaa

SEQ ID NO: 54398 - RNA, 20 nt, Artificial Sequence
  LRRK2 RNA guide
auucucuuuugccuaaaauc

SEQ ID NO: 54399 - RNA, 20 nt, Artificial Sequence
  LRRK2 RNA guide
auuuuaggcaaaagagaaug

SEQ ID NO: 54400 - RNA, 20 nt, Artificial Sequence
  LRRK2 RNA guide
caaaagagaaugaguaagua

SEQ ID NO: 54401 - RNA, 20 nt, Artificial Sequence
  LRRK2 RNA guide
cauucucuuuugccuaaaau

SEQ ID NO: 54402 - RNA, 20 nt, Artificial Sequence
  LRRK2 RNA guide
cucauucucuuuugccuaaa

SEQ ID NO: 54403 - RNA, 20 nt, Artificial Sequence
  LRRK2 RNA guide
cucuuuugccuaaaaucucu

SEQ ID NO: 54404 - RNA, 20 nt, Artificial Sequence
  LRRK2 RNA guide
cuuacucauucucuuuugcc

SEQ ID NO: 54405 - RNA, 20 nt, Artificial Sequence
  LRRK2 RNA guide
cuuuugccuaaaaucucuua

SEQ ID NO: 54406 - RNA, 20 nt, Artificial Sequence
  LRRK2 RNA guide
gagauuuuaggcaaaagaga

SEQ ID NO: 54407 - RNA, 20 nt, Artificial Sequence
  LRRK2 RNA guide
gauuuuaggcaaaagagaau

SEQ ID NO: 54408 - RNA, 20 nt, Artificial Sequence
  LRRK2 RNA guide
gcaaaagagaaugaguaagu

SEQ ID NO: 54409 - RNA, 20 nt, Artificial Sequence
  LRRK2 RNA guide
ggcaaaagagaaugaguaag

SEQ ID NO: 54410 - RNA, 20 nt, Artificial Sequence
  LRRK2 RNA guide
uaagagauuuuaggcaaaag

SEQ ID NO: 54411 - RNA, 20 nt, Artificial Sequence
  LRRK2 RNA guide
uacucauucucuuuugccua

SEQ ID NO: 54412 - RNA, 20 nt, Artificial Sequence
  LRRK2 RNA guide
uacuuacucauucucuuuug

SEQ ID NO: 54413 - RNA, 20 nt, Artificial Sequence
  LRRK2 RNA guide
uaggcaaaagagaaugagua

SEQ ID NO: 54414 - RNA, 20 nt, Artificial Sequence
  LRRK2 RNA guide
ucauucucuuuugccuaaaa

SEQ ID NO: 54415 - RNA, 20 nt, Artificial Sequence
  LRRK2 RNA guide
ucucuuuugccuaaaaucuc

SEQ ID NO: 54416 - RNA, 20 nt, Artificial Sequence
  LRRK2 RNA guide
ucuuuugccuaaaaucucuu

SEQ ID NO: 54417 - RNA, 20 nt, Artificial Sequence
  LRRK2 RNA guide
uuacucauucucuuuugccu

SEQ ID NO: 54418 - RNA, 20 nt, Artificial Sequence
  LRRK2 RNA guide
uuaggcaaaagagaaugagu

SEQ ID NO: 54419 - RNA, 20 nt, Artificial Sequence
  LRRK2 RNA guide
uucucuuuugccuaaaaucu

SEQ ID NO: 54420 - RNA, 20 nt, Artificial Sequence
  LRRK2 RNA guide
uuuaggcaaaagagaaugag

SEQ ID NO: 54421 - RNA, 20 nt, Artificial Sequence
  LRRK2 RNA guide
uuuuaggcaaaagagaauga

SEQ ID NO: 54422 - RNA, 21 nt, Artificial Sequence
  LRRK2 RNA guide
aagagauuuuaggcaaaagag

SEQ ID NO: 54423 - RNA, 21 nt, Artificial Sequence
  LRRK2 RNA guide
acucauucucuuuugccuaaa

SEQ ID NO: 54424 - RNA, 21 nt, Artificial Sequence
  LRRK2 RNA guide
acuuacucauucucuuuugcc

SEQ ID NO: 54425 - RNA, 21 nt, Artificial Sequence
  LRRK2 RNA guide
agagauuuuaggcaaaagaga

SEQ ID NO: 54426 - RNA, 21 nt, Artificial Sequence
  LRRK2 RNA guide
aggcaaaagagaaugaguaag

SEQ ID NO: 54427 - RNA, 21 nt, Artificial Sequence
  LRRK2 RNA guide
cauucucuuuugccuaaaauc

SEQ ID NO: 54428 - RNA, 21 nt, Artificial Sequence
  LRRK2 RNA guide
cucauucucuuuugccuaaaa

SEQ ID NO: 54429 - RNA, 21 nt, Artificial Sequence
  LRRK2 RNA guide
cucuuuugccuaaaaucucuu

SEQ ID NO: 54430 - RNA, 21 nt, Artificial Sequence
  LRRK2 RNA guide
cuuacucauucucuuuugccu

SEQ ID NO: 54431 - RNA, 21 nt, Artificial Sequence
  LRRK2 RNA guide
gagauuuuaggcaaaagagaa

SEQ ID NO: 54432 - RNA, 21 nt, Artificial Sequence
  LRRK2 RNA guide
gauuuuaggcaaaagagaaug

SEQ ID NO: 54433 - RNA, 21 nt, Artificial Sequence
  LRRK2 RNA guide
gcaaaagagaaugaguaagua

SEQ ID NO: 54434 - RNA, 21 nt, Artificial Sequence
  LRRK2 RNA guide
ggcaaaagagaaugaguaagu

SEQ ID NO: 54435 - RNA, 21 nt, Artificial Sequence
  LRRK2 RNA guide
uacucauucucuuuugccuaa

SEQ ID NO: 54436 - RNA, 21 nt, Artificial Sequence
  LRRK2 RNA guide
uacuuacucauucucuuuugc

SEQ ID NO: 54437 - RNA, 21 nt, Artificial Sequence
  LRRK2 RNA guide
uaggcaaaagagaaugaguaa

SEQ ID NO: 54438 - RNA, 21 nt, Artificial Sequence
  LRRK2 RNA guide
ucucuuuugccuaaaaucucu

SEQ ID NO: 54439 - RNA, 21 nt, Artificial Sequence
  LRRK2 RNA guide
uuacucauucucuuuugccua

SEQ ID NO: 54440 - RNA, 21 nt, Artificial Sequence
  LRRK2 RNA guide
uuaggcaaaagagaaugagua

SEQ ID NO: 54441 - RNA, 21 nt, Artificial Sequence
  LRRK2 RNA guide
uucucuuuugccuaaaaucuc

SEQ ID NO: 54442 - RNA, 21 nt, Artificial Sequence
  LRRK2 RNA guide
uuuaggcaaaagagaaugagu

SEQ ID NO: 54443 - RNA, 21 nt, Artificial Sequence
  LRRK2 RNA guide
uuuuaggcaaaagagaaugag

SEQ ID NO: 54444 - RNA, 22 nt, Artificial Sequence
  LRRK2 RNA guide
aagagauuuuaggcaaaagaga

SEQ ID NO: 54445 - RNA, 22 nt, Artificial Sequence
  LRRK2 RNA guide
acucauucucuuuugccuaaaa

SEQ ID NO: 54446 - RNA, 22 nt, Artificial Sequence
  LRRK2 RNA guide
acuuacucauucucuuuugccu

SEQ ID NO: 54447 - RNA, 22 nt, Artificial Sequence
  LRRK2 RNA guide
agagauuuuaggcaaaagagaa

SEQ ID NO: 54448 - RNA, 22 nt, Artificial Sequence
  LRRK2 RNA guide
agauuuuaggcaaaagagaaug

SEQ ID NO: 54449 - RNA, 22 nt, Artificial Sequence
  LRRK2 RNA guide
aggcaaaagagaaugaguaagu

SEQ ID NO: 54450 - RNA, 22 nt, Artificial Sequence
  LRRK2 RNA guide
auacuuacucauucucuuuugc

SEQ ID NO: 54451 - RNA, 22 nt, Artificial Sequence
  LRRK2 RNA guide
auucucuuuugccuaaaaucuc

SEQ ID NO: 54452 - RNA, 22 nt, Artificial Sequence
  LRRK2 RNA guide
auuuuaggcaaaagagaaugag

SEQ ID NO: 54453 - RNA, 22 nt, Artificial Sequence
  LRRK2 RNA guide
cauucucuuuugccuaaaaucu

SEQ ID NO: 54454 - RNA, 22 nt, Artificial Sequence
  LRRK2 RNA guide
cucauucucuuuugccuaaaau

SEQ ID NO: 54455 - RNA, 22 nt, Artificial Sequence
  LRRK2 RNA guide
cucuuuugccuaaaaucucuua

SEQ ID NO: 54456 - RNA, 22 nt, Artificial Sequence
  LRRK2 RNA guide
cuuacucauucucuuuugccua

SEQ ID NO: 54457 - RNA, 22 nt, Artificial Sequence
  LRRK2 RNA guide
gagauuuuaggcaaaagagaau

SEQ ID NO: 54458 - RNA, 22 nt, Artificial Sequence
  LRRK2 RNA guide
gauuuuaggcaaaagagaauga

SEQ ID NO: 54459 - RNA, 22 nt, Artificial Sequence
  LRRK2 RNA guide
gcaaaagagaaugaguaaguau

SEQ ID NO: 54460 - RNA, 22 nt, Artificial Sequence
  LRRK2 RNA guide
ggcaaaagagaaugaguaagua

SEQ ID NO: 54461 - RNA, 22 nt, Artificial Sequence
  LRRK2 RNA guide
uaagagauuuuaggcaaaagag

SEQ ID NO: 54462 - RNA, 22 nt, Artificial Sequence
  LRRK2 RNA guide
uacucauucucuuuugccuaaa

SEQ ID NO: 54463 - RNA, 22 nt, Artificial Sequence
  LRRK2 RNA guide
uacuuacucauucucuuuugcc

SEQ ID NO: 54464 - RNA, 22 nt, Artificial Sequence
  LRRK2 RNA guide
uaggcaaaagagaaugaguaag

SEQ ID NO: 54465 - RNA, 22 nt, Artificial Sequence
  LRRK2 RNA guide
ucauucucuuuugccuaaaauc

SEQ ID NO: 54466 - RNA, 22 nt, Artificial Sequence
  LRRK2 RNA guide
ucucuuuugccuaaaaucucuu

SEQ ID NO: 54467 - RNA, 22 nt, Artificial Sequence
  LRRK2 RNA guide
uuacucauucucuuuugccuaa

SEQ ID NO: 54468 - RNA, 22 nt, Artificial Sequence
  LRRK2 RNA guide
uuaggcaaaagagaaugaguaa

SEQ ID NO: 54469 - RNA, 22 nt, Artificial Sequence
  LRRK2 RNA guide
uucucuuuugccuaaaaucucu

SEQ ID NO: 54470 - RNA, 22 nt, Artificial Sequence
  LRRK2 RNA guide
uuuaggcaaaagagaaugagua

SEQ ID NO: 54471 - RNA, 22 nt, Artificial Sequence
  LRRK2 RNA guide
uuuuaggcaaaagagaaugagu

SEQ ID NO: 54472 - RNA, 20 nt, Artificial Sequence
  LRRK2 RNA guide
aaaccugaaugaaauagaag

SEQ ID NO: 54473 - RNA, 20 nt, Artificial Sequence
  LRRK2 RNA guide
aacacuucuauuucauucag

SEQ ID NO: 54474 - RNA, 20 nt, Artificial Sequence
  LRRK2 RNA guide
aaccugaaugaaauagaagu

SEQ ID NO: 54475 - RNA, 20 nt, Artificial Sequence
  LRRK2 RNA guide
acacuucuauuucauucagg

SEQ ID NO: 54476 - RNA, 20 nt, Artificial Sequence
  LRRK2 RNA guide
accugaaugaaauagaagug

SEQ ID NO: 54477 - RNA, 20 nt, Artificial Sequence
  LRRK2 RNA guide
acuucuauuucauucagguu

SEQ ID NO: 54478 - RNA, 20 nt, Artificial Sequence
  LRRK2 RNA guide
cacuucuauuucauucaggu

SEQ ID NO: 54479 - RNA, 20 nt, Artificial Sequence
  LRRK2 RNA guide
cagguuuuacauuaagauca

SEQ ID NO: 54480 - RNA, 20 nt, Artificial Sequence
  LRRK2 RNA guide
cauucagguuuuacauuaag

SEQ ID NO: 54481 - RNA, 20 nt, Artificial Sequence
  LRRK2 RNA guide
ccuaaacacuucuauuucau

SEQ ID NO: 54482 - RNA, 20 nt, Artificial Sequence
  LRRK2 RNA guide
cuauuucauucagguuuuac

SEQ ID NO: 54483 - RNA, 20 nt, Artificial Sequence
  LRRK2 RNA guide
cuuaauguaaaaccugaaug

SEQ ID NO: 54484 - RNA, 20 nt, Artificial Sequence
  LRRK2 RNA guide
cuucuauuucauucagguuu

SEQ ID NO: 54485 - RNA, 20 nt, Artificial Sequence
  LRRK2 RNA guide
gaucuuaauguaaaaccuga

SEQ ID NO: 54486 - RNA, 20 nt, Artificial Sequence
  LRRK2 RNA guide
guaaaaccugaaugaaauag

SEQ ID NO: 54487 - RNA, 20 nt, Artificial Sequence
  LRRK2 RNA guide
ucagguuuuacauuaagauc

SEQ ID NO: 54488 - RNA, 20 nt, Artificial Sequence
  LRRK2 RNA guide
ugaucuuaauguaaaaccug

SEQ ID NO: 54489 - RNA, 21 nt, Artificial Sequence
  LRRK2 RNA guide
aacacuucuauuucauucagg

SEQ ID NO: 54490 - RNA, 21 nt, Artificial Sequence
  LRRK2 RNA guide
aaccugaaugaaauagaagug

SEQ ID NO: 54491 - RNA, 21 nt, Artificial Sequence
  LRRK2 RNA guide
acacuucuauuucauucaggu

SEQ ID NO: 54492 - RNA, 21 nt, Artificial Sequence
  LRRK2 RNA guide
accugaaugaaauagaagugu

SEQ ID NO: 54493 - RNA, 21 nt, Artificial Sequence
  LRRK2 RNA guide
cacuucuauuucauucagguu

SEQ ID NO: 54494 - RNA, 22 nt, Artificial Sequence
  LRRK2 RNA guide
aaacacuucuauuucauucagg

SEQ ID NO: 54495 - RNA, 22 nt, Artificial Sequence
  LRRK2 RNA guide
aaaccugaaugaaauagaagug

SEQ ID NO: 54496 - RNA, 22 nt, Artificial Sequence
  LRRK2 RNA guide
aacacuucuauuucauucaggu

SEQ ID NO: 54497 - RNA, 22 nt, Artificial Sequence
  LRRK2 RNA guide
aaccugaaugaaauagaagugu

SEQ ID NO: 54498 - RNA, 22 nt, Artificial Sequence
  LRRK2 RNA guide
acacuucuauuucauucagguu

SEQ ID NO: 54499 - RNA, 22 nt, Artificial Sequence
  LRRK2 RNA guide
accugaaugaaauagaaguguu

SEQ ID NO: 54500 - RNA, 22 nt, Artificial Sequence
  LRRK2 RNA guide
cacuucuauuucauucagguuu

SEQ ID NO: 54501 - RNA, 22 nt, Artificial Sequence
  LRRK2 RNA guide
ccuaaacacuucuauuucauuc

SEQ ID NO: 54502 - RNA, 20 nt, Artificial Sequence
  LRRK2 RNA guide
aacugaaugaaauagaagug

SEQ ID NO: 54503 - RNA, 20 nt, Artificial Sequence
  LRRK2 RNA guide
acacuucuauuucauucagu

SEQ ID NO: 54504 - RNA, 20 nt, Artificial Sequence
  LRRK2 RNA guide
cacuucuauuucauucaguu

SEQ ID NO: 54505 - RNA, 20 nt, Artificial Sequence
  LRRK2 RNA guide
augcauaugugauauacaug

SEQ ID NO: 54506 - RNA, 20 nt, Artificial Sequence
  LRRK2 RNA guide
cauguauaucacauaugcau

SEQ ID NO: 54507 - RNA, 20 nt, Artificial Sequence
  LRRK2 RNA guide
gcauaugugauauacaugaa

SEQ ID NO: 54508 - RNA, 20 nt, Artificial Sequence
  LRRK2 RNA guide
ucauguauaucacauaugca

SEQ ID NO: 54509 - RNA, 20 nt, Artificial Sequence
  LRRK2 RNA guide
ugcauaugugauauacauga

SEQ ID NO: 54510 - RNA, 20 nt, Artificial Sequence
  LRRK2 RNA guide
uucauguauaucacauaugc

SEQ ID NO: 54511 - RNA, 20 nt, Artificial Sequence
  LRRK2 RNA guide
aaaguagccgggaacagugg

SEQ ID NO: 54512 - RNA, 20 nt, Artificial Sequence
  LRRK2 RNA guide
aacaguggcaggugccugua

SEQ ID NO: 54513 - RNA, 20 nt, Artificial Sequence
  LRRK2 RNA guide
aaguagccgggaacaguggc

SEQ ID NO: 54514 - RNA, 20 nt, Artificial Sequence
  LRRK2 RNA guide
aauuacaggcaccugccacu

SEQ ID NO: 54515 - RNA, 20 nt, Artificial Sequence
  LRRK2 RNA guide
acaggcaccugccacuguuc

SEQ ID NO: 54516 - RNA, 20 nt, Artificial Sequence
  LRRK2 RNA guide
agccgggaacaguggcaggu

SEQ ID NO: 54517 - RNA, 20 nt, Artificial Sequence
  LRRK2 RNA guide
aggcaccugccacuguuccc

SEQ ID NO: 54518 - RNA, 20 nt, Artificial Sequence
  LRRK2 RNA guide
aguagccgggaacaguggca

SEQ ID NO: 54519 - RNA, 20 nt, Artificial Sequence
  LRRK2 RNA guide
auuacaggcaccugccacug

SEQ ID NO: 54520 - RNA, 20 nt, Artificial Sequence
  LRRK2 RNA guide
caccugccacuguucccggc

SEQ ID NO: 54521 - RNA, 20 nt, Artificial Sequence
  LRRK2 RNA guide
caggcaccugccacuguucc

SEQ ID NO: 54522 - RNA, 20 nt, Artificial Sequence
  LRRK2 RNA guide
ccgggaacaguggcaggugc

SEQ ID NO: 54523 - RNA, 20 nt, Artificial Sequence
  LRRK2 RNA guide
cgggaacaguggcaggugcc

SEQ ID NO: 54524 - RNA, 20 nt, Artificial Sequence
  LRRK2 RNA guide
gaacaguggcaggugccugu

SEQ ID NO: 54525 - RNA, 20 nt, Artificial Sequence
  LRRK2 RNA guide
gaauuacaggcaccugccac

SEQ ID NO: 54526 - RNA, 20 nt, Artificial Sequence
  LRRK2 RNA guide
gcaccugccacuguucccgg

SEQ ID NO: 54527 - RNA, 20 nt, Artificial Sequence
  LRRK2 RNA guide
gccgggaacaguggcaggug

SEQ ID NO: 54528 - RNA, 20 nt, Artificial Sequence
  LRRK2 RNA guide
ggaacaguggcaggugccug

SEQ ID NO: 54529 - RNA, 20 nt, Artificial Sequence
  LRRK2 RNA guide
ggaauuacaggcaccugcca

SEQ ID NO: 54530 - RNA, 20 nt, Artificial Sequence
  LRRK2 RNA guide
ggcaccugccacuguucccg

SEQ ID NO: 54531 - RNA, 20 nt, Artificial Sequence
  LRRK2 RNA guide
gggaacaguggcaggugccu

SEQ ID NO: 54532 - RNA, 20 nt, Artificial Sequence
  LRRK2 RNA guide
guagccgggaacaguggcag

SEQ ID NO: 54533 - RNA, 20 nt, Artificial Sequence
  LRRK2 RNA guide
uacaggcaccugccacuguu

SEQ ID NO: 54534 - RNA, 20 nt, Artificial Sequence
  LRRK2 RNA guide
uagccgggaacaguggcagg

SEQ ID NO: 54535 - RNA, 20 nt, Artificial Sequence
  LRRK2 RNA guide
uuacaggcaccugccacugu

SEQ ID NO: 54536 - RNA, 21 nt, Artificial Sequence
  LRRK2 RNA guide
aaaaguagccgggaacagugg

SEQ ID NO: 54537 - RNA, 21 nt, Artificial Sequence
  LRRK2 RNA guide
aaaguagccgggaacaguggc

SEQ ID NO: 54538 - RNA, 21 nt, Artificial Sequence
  LRRK2 RNA guide
aacaguggcaggugccuguaa

SEQ ID NO: 54539 - RNA, 21 nt, Artificial Sequence
  LRRK2 RNA guide
aaguagccgggaacaguggca

SEQ ID NO: 54540 - RNA, 21 nt, Artificial Sequence
  LRRK2 RNA guide
aauuacaggcaccugccacug

SEQ ID NO: 54541 - RNA, 21 nt, Artificial Sequence
  LRRK2 RNA guide
acaggcaccugccacuguucc

SEQ ID NO: 54542 - RNA, 21 nt, Artificial Sequence
  LRRK2 RNA guide
agccgggaacaguggcaggug

SEQ ID NO: 54543 - RNA, 21 nt, Artificial Sequence
  LRRK2 RNA guide
aggcaccugccacuguucccg

SEQ ID NO: 54544 - RNA, 21 nt, Artificial Sequence
  LRRK2 RNA guide
aguagccgggaacaguggcag

SEQ ID NO: 54545 - RNA, 21 nt, Artificial Sequence
  LRRK2 RNA guide
auuacaggcaccugccacugu

SEQ ID NO: 54546 - RNA, 21 nt, Artificial Sequence
  LRRK2 RNA guide
caccugccacuguucccggcu

SEQ ID NO: 54547 - RNA, 21 nt, Artificial Sequence
  LRRK2 RNA guide
caggcaccugccacuguuccc

SEQ ID NO: 54548 - RNA, 21 nt, Artificial Sequence
  LRRK2 RNA guide
ccgggaacaguggcaggugcc

SEQ ID NO: 54549 - RNA, 21 nt, Artificial Sequence
  LRRK2 RNA guide
cgggaacaguggcaggugccu

SEQ ID NO: 54550 - RNA, 21 nt, Artificial Sequence
  LRRK2 RNA guide
gaacaguggcaggugccugua

SEQ ID NO: 54551 - RNA, 21 nt, Artificial Sequence
  LRRK2 RNA guide
gaauuacaggcaccugccacu

SEQ ID NO: 54552 - RNA, 21 nt, Artificial Sequence
  LRRK2 RNA guide
gcaccugccacuguucccggc

SEQ ID NO: 54553 - RNA, 21 nt, Artificial Sequence
  LRRK2 RNA guide
gccgggaacaguggcaggugc

SEQ ID NO: 54554 - RNA, 21 nt, Artificial Sequence
  LRRK2 RNA guide
ggaacaguggcaggugccugu

SEQ ID NO: 54555 - RNA, 21 nt, Artificial Sequence
  LRRK2 RNA guide
ggaauuacaggcaccugccac

SEQ ID NO: 54556 - RNA, 21 nt, Artificial Sequence
  LRRK2 RNA guide
ggcaccugccacuguucccgg

SEQ ID NO: 54557 - RNA, 21 nt, Artificial Sequence
  LRRK2 RNA guide
gggaacaguggcaggugccug

SEQ ID NO: 54558 - RNA, 21 nt, Artificial Sequence
  LRRK2 RNA guide
guagccgggaacaguggcagg

SEQ ID NO: 54559 - RNA, 21 nt, Artificial Sequence
  LRRK2 RNA guide
uacaggcaccugccacuguuc

SEQ ID NO: 54560 - RNA, 21 nt, Artificial Sequence
  LRRK2 RNA guide
uagccgggaacaguggcaggu

SEQ ID NO: 54561 - RNA, 21 nt, Artificial Sequence
  LRRK2 RNA guide
uggaauuacaggcaccugcca

SEQ ID NO: 54562 - RNA, 21 nt, Artificial Sequence
  LRRK2 RNA guide
uuacaggcaccugccacuguu

SEQ ID NO: 54563 - RNA, 22 nt, Artificial Sequence
  LRRK2 RNA guide
aaaaaguagccgggaacagugg

SEQ ID NO: 54564 - RNA, 22 nt, Artificial Sequence
  LRRK2 RNA guide
aaaaguagccgggaacaguggc

SEQ ID NO: 54565 - RNA, 22 nt, Artificial Sequence
  LRRK2 RNA guide
aaaguagccgggaacaguggca

SEQ ID NO: 54566 - RNA, 22 nt, Artificial Sequence
  LRRK2 RNA guide
aacaguggcaggugccuguaau

SEQ ID NO: 54567 - RNA, 22 nt, Artificial Sequence
  LRRK2 RNA guide
aaguagccgggaacaguggcag

SEQ ID NO: 54568 - RNA, 22 nt, Artificial Sequence
  LRRK2 RNA guide
aauuacaggcaccugccacugu

SEQ ID NO: 54569 - RNA, 22 nt, Artificial Sequence
  LRRK2 RNA guide
acaggcaccugccacuguuccc

SEQ ID NO: 54570 - RNA, 22 nt, Artificial Sequence
  LRRK2 RNA guide
agccgggaacaguggcaggugc

SEQ ID NO: 54571 - RNA, 22 nt, Artificial Sequence
  LRRK2 RNA guide
aggcaccugccacuguucccgg

SEQ ID NO: 54572 - RNA, 22 nt, Artificial Sequence
  LRRK2 RNA guide
aguagccgggaacaguggcagg

SEQ ID NO: 54573 - RNA, 22 nt, Artificial Sequence
  LRRK2 RNA guide
auuacaggcaccugccacuguu

SEQ ID NO: 54574 - RNA, 22 nt, Artificial Sequence
  LRRK2 RNA guide
caccugccacuguucccggcua

SEQ ID NO: 54575 - RNA, 22 nt, Artificial Sequence
  LRRK2 RNA guide
caggcaccugccacuguucccg

SEQ ID NO: 54576 - RNA, 22 nt, Artificial Sequence
  LRRK2 RNA guide
ccgggaacaguggcaggugccu

SEQ ID NO: 54577 - RNA, 22 nt, Artificial Sequence
  LRRK2 RNA guide
cgggaacaguggcaggugccug

SEQ ID NO: 54578 - RNA, 22 nt, Artificial Sequence
  LRRK2 RNA guide
cuggaauuacaggcaccugcca

SEQ ID NO: 54579 - RNA, 22 nt, Artificial Sequence
  LRRK2 RNA guide
gaacaguggcaggugccuguaa

SEQ ID NO: 54580 - RNA, 22 nt, Artificial Sequence
  LRRK2 RNA guide
gaauuacaggcaccugccacug

SEQ ID NO: 54581 - RNA, 22 nt, Artificial Sequence
  LRRK2 RNA guide
gcaccugccacuguucccggcu

SEQ ID NO: 54582 - RNA, 22 nt, Artificial Sequence
  LRRK2 RNA guide
gccgggaacaguggcaggugcc

SEQ ID NO: 54583 - RNA, 22 nt, Artificial Sequence
  LRRK2 RNA guide
ggaacaguggcaggugccugua

SEQ ID NO: 54584 - RNA, 22 nt, Artificial Sequence
  LRRK2 RNA guide
ggaauuacaggcaccugccacu

SEQ ID NO: 54585 - RNA, 22 nt, Artificial Sequence
  LRRK2 RNA guide
ggcaccugccacuguucccggc

SEQ ID NO: 54586 - RNA, 22 nt, Artificial Sequence
  LRRK2 RNA guide
gggaacaguggcaggugccugu

SEQ ID NO: 54587 - RNA, 22 nt, Artificial Sequence
  LRRK2 RNA guide
guagccgggaacaguggcaggu

SEQ ID NO: 54588 - RNA, 22 nt, Artificial Sequence
  LRRK2 RNA guide
uacaggcaccugccacuguucc

SEQ ID NO: 54589 - RNA, 22 nt, Artificial Sequence
  LRRK2 RNA guide
uagccgggaacaguggcaggug

SEQ ID NO: 54590 - RNA, 22 nt, Artificial Sequence
  LRRK2 RNA guide
uggaauuacaggcaccugccac

SEQ ID NO: 54591 - RNA, 22 nt, Artificial Sequence
  LRRK2 RNA guide
uuacaggcaccugccacuguuc

SEQ ID NO: 54592 - RNA, 20 nt, Artificial Sequence
  LRRK2 RNA guide
aacaguggcaggcgccugua

SEQ ID NO: 54593 - RNA, 20 nt, Artificial Sequence
  LRRK2 RNA guide
aauuacaggcgccugccacu

SEQ ID NO: 54594 - RNA, 20 nt, Artificial Sequence
  LRRK2 RNA guide
acaggcgccugccacuguuc

SEQ ID NO: 54595 - RNA, 20 nt, Artificial Sequence
  LRRK2 RNA guide
agccgggaacaguggcaggc

SEQ ID NO: 54596 - RNA, 20 nt, Artificial Sequence
  LRRK2 RNA guide
aggcgccugccacuguuccc

SEQ ID NO: 54597 - RNA, 20 nt, Artificial Sequence
  LRRK2 RNA guide
auuacaggcgccugccacug

SEQ ID NO: 54598 - RNA, 20 nt, Artificial Sequence
  LRRK2 RNA guide
caggcgccugccacuguucc

SEQ ID NO: 54599 - RNA, 20 nt, Artificial Sequence
  LRRK2 RNA guide
ccgggaacaguggcaggcgc

SEQ ID NO: 54600 - RNA, 20 nt, Artificial Sequence
  LRRK2 RNA guide
cgccugccacuguucccggc

SEQ ID NO: 54601 - RNA, 20 nt, Artificial Sequence
  LRRK2 RNA guide
cgggaacaguggcaggcgcc

SEQ ID NO: 54602 - RNA, 20 nt, Artificial Sequence
  LRRK2 RNA guide
gaacaguggcaggcgccugu

SEQ ID NO: 54603 - RNA, 20 nt, Artificial Sequence
  LRRK2 RNA guide
gaauuacaggcgccugccac

SEQ ID NO: 54604 - RNA, 20 nt, Artificial Sequence
  LRRK2 RNA guide
gccgggaacaguggcaggcg

SEQ ID NO: 54605 - RNA, 20 nt, Artificial Sequence
  LRRK2 RNA guide
gcgccugccacuguucccgg

SEQ ID NO: 54606 - RNA, 20 nt, Artificial Sequence
  LRRK2 RNA guide
ggaacaguggcaggcgccug

SEQ ID NO: 54607 - RNA, 20 nt, Artificial Sequence
  LRRK2 RNA guide
ggaauuacaggcgccugcca

SEQ ID NO: 54608 - RNA, 20 nt, Artificial Sequence
  LRRK2 RNA guide
ggcgccugccacuguucccg

SEQ ID NO: 54609 - RNA, 20 nt, Artificial Sequence
  LRRK2 RNA guide
gggaacaguggcaggcgccu

SEQ ID NO: 54610 - RNA, 20 nt, Artificial Sequence
  LRRK2 RNA guide
uacaggcgccugccacuguu

SEQ ID NO: 54611 - RNA, 20 nt, Artificial Sequence
  LRRK2 RNA guide
uuacaggcgccugccacugu

SEQ ID NO: 54612 - RNA, 21 nt, Artificial Sequence
  LRRK2 RNA guide
aacaguggcaggcgccuguaa

SEQ ID NO: 54613 - RNA, 21 nt, Artificial Sequence
  LRRK2 RNA guide
aauuacaggcgccugccacug

SEQ ID NO: 54614 - RNA, 21 nt, Artificial Sequence
  LRRK2 RNA guide
acaggcgccugccacuguucc

SEQ ID NO: 54615 - RNA, 21 nt, Artificial Sequence
  LRRK2 RNA guide
agccgggaacaguggcaggcg

SEQ ID NO: 54616 - RNA, 21 nt, Artificial Sequence
  LRRK2 RNA guide
aggcgccugccacuguucccg

SEQ ID NO: 54617 - RNA, 21 nt, Artificial Sequence
  LRRK2 RNA guide
auuacaggcgccugccacugu

SEQ ID NO: 54618 - RNA, 21 nt, Artificial Sequence
  LRRK2 RNA guide
caggcgccugccacuguuccc

SEQ ID NO: 54619 - RNA, 21 nt, Artificial Sequence
  LRRK2 RNA guide
ccgggaacaguggcaggcgcc

SEQ ID NO: 54620 - RNA, 21 nt, Artificial Sequence
  LRRK2 RNA guide
cgccugccacuguucccggcu

SEQ ID NO: 54621 - RNA, 21 nt, Artificial Sequence
  LRRK2 RNA guide
cgggaacaguggcaggcgccu

SEQ ID NO: 54622 - RNA, 21 nt, Artificial Sequence
  LRRK2 RNA guide
gaacaguggcaggcgccugua

SEQ ID NO: 54623 - RNA, 21 nt, Artificial Sequence
  LRRK2 RNA guide
gaauuacaggcgccugccacu

SEQ ID NO: 54624 - RNA, 21 nt, Artificial Sequence
  LRRK2 RNA guide
gccgggaacaguggcaggcgc

SEQ ID NO: 54625 - RNA, 21 nt, Artificial Sequence
  LRRK2 RNA guide
gcgccugccacuguucccggc

SEQ ID NO: 54626 - RNA, 21 nt, Artificial Sequence
  LRRK2 RNA guide
ggaacaguggcaggcgccugu

SEQ ID NO: 54627 - RNA, 21 nt, Artificial Sequence
  LRRK2 RNA guide
ggaauuacaggcgccugccac

SEQ ID NO: 54628 - RNA, 21 nt, Artificial Sequence
  LRRK2 RNA guide
ggcgccugccacuguucccgg

SEQ ID NO: 54629 - RNA, 21 nt, Artificial Sequence
  LRRK2 RNA guide
gggaacaguggcaggcgccug

SEQ ID NO: 54630 - RNA, 21 nt, Artificial Sequence
  LRRK2 RNA guide
uacaggcgccugccacuguuc

SEQ ID NO: 54631 - RNA, 21 nt, Artificial Sequence
  LRRK2 RNA guide
uagccgggaacaguggcaggc

SEQ ID NO: 54632 - RNA, 21 nt, Artificial Sequence
  LRRK2 RNA guide
uggaauuacaggcgccugcca

SEQ ID NO: 54633 - RNA, 21 nt, Artificial Sequence
  LRRK2 RNA guide
uuacaggcgccugccacuguu

SEQ ID NO: 54634 - RNA, 22 nt, Artificial Sequence
  LRRK2 RNA guide
aacaguggcaggcgccuguaau

SEQ ID NO: 54635 - RNA, 22 nt, Artificial Sequence
  LRRK2 RNA guide
aauuacaggcgccugccacugu

SEQ ID NO: 54636 - RNA, 22 nt, Artificial Sequence
  LRRK2 RNA guide
acaggcgccugccacuguuccc

SEQ ID NO: 54637 - RNA, 22 nt, Artificial Sequence
  LRRK2 RNA guide
agccgggaacaguggcaggcgc

SEQ ID NO: 54638 - RNA, 22 nt, Artificial Sequence
  LRRK2 RNA guide
aggcgccugccacuguucccgg

SEQ ID NO: 54639 - RNA, 22 nt, Artificial Sequence
  LRRK2 RNA guide
auuacaggcgccugccacuguu

SEQ ID NO: 54640 - RNA, 22 nt, Artificial Sequence
  LRRK2 RNA guide
caggcgccugccacuguucccg

SEQ ID NO: 54641 - RNA, 22 nt, Artificial Sequence
  LRRK2 RNA guide
ccgggaacaguggcaggcgccu

SEQ ID NO: 54642 - RNA, 22 nt, Artificial Sequence
  LRRK2 RNA guide
cgccugccacuguucccggcua

SEQ ID NO: 54643 - RNA, 22 nt, Artificial Sequence
  LRRK2 RNA guide
cgggaacaguggcaggcgccug

SEQ ID NO: 54644 - RNA, 22 nt, Artificial Sequence
  LRRK2 RNA guide
cuggaauuacaggcgccugcca

SEQ ID NO: 54645 - RNA, 22 nt, Artificial Sequence
  LRRK2 RNA guide
gaacaguggcaggcgccuguaa

SEQ ID NO: 54646 - RNA, 22 nt, Artificial Sequence
  LRRK2 RNA guide
gaauuacaggcgccugccacug

SEQ ID NO: 54647 - RNA, 22 nt, Artificial Sequence
  LRRK2 RNA guide
gccgggaacaguggcaggcgcc

SEQ ID NO: 54648 - RNA, 22 nt, Artificial Sequence
  LRRK2 RNA guide
gcgccugccacuguucccggcu

SEQ ID NO: 54649 - RNA, 22 nt, Artificial Sequence
  LRRK2 RNA guide
ggaacaguggcaggcgccugua

SEQ ID NO: 54650 - RNA, 22 nt, Artificial Sequence
  LRRK2 RNA guide
ggaauuacaggcgccugccacu

SEQ ID NO: 54651 - RNA, 22 nt, Artificial Sequence
  LRRK2 RNA guide
ggcgccugccacuguucccggc

SEQ ID NO: 54652 - RNA, 22 nt, Artificial Sequence
  LRRK2 RNA guide
gggaacaguggcaggcgccugu

SEQ ID NO: 54653 - RNA, 22 nt, Artificial Sequence
  LRRK2 RNA guide
guagccgggaacaguggcaggc

SEQ ID NO: 54654 - RNA, 22 nt, Artificial Sequence
  LRRK2 RNA guide
uacaggcgccugccacuguucc

SEQ ID NO: 54655 - RNA, 22 nt, Artificial Sequence
  LRRK2 RNA guide
uagccgggaacaguggcaggcg

SEQ ID NO: 54656 - RNA, 22 nt, Artificial Sequence
  LRRK2 RNA guide
uggaauuacaggcgccugccac

SEQ ID NO: 54657 - RNA, 22 nt, Artificial Sequence
  LRRK2 RNA guide
uuacaggcgccugccacuguuc

SEQ ID NO: 54658 - RNA, 21 nt, Artificial Sequence
  LRRK2 RNA guide
cgcccacuucggccucccaaa

SEQ ID NO: 54659 - RNA, 21 nt, Artificial Sequence
  LRRK2 RNA guide
ugcauuuugggaggccgaagu

SEQ ID NO: 54660 - RNA, 22 nt, Artificial Sequence
  LRRK2 RNA guide
ccgcccacuucggccucccaaa

SEQ ID NO: 54661 - RNA, 22 nt, Artificial Sequence
  LRRK2 RNA guide
cgcccacuucggccucccaaaa

SEQ ID NO: 54662 - RNA, 22 nt, Artificial Sequence
  LRRK2 RNA guide
cugcauuuugggaggccgaagu

SEQ ID NO: 54663 - RNA, 22 nt, Artificial Sequence
  LRRK2 RNA guide
ugcauuuugggaggccgaagug

SEQ ID NO: 54664 - RNA, 20 nt, Artificial Sequence
  LRRK2 RNA guide
aaauauaguauccagaagag

SEQ ID NO: 54665 - RNA, 20 nt, Artificial Sequence
  LRRK2 RNA guide
aauauaguauccagaagagu

SEQ ID NO: 54666 - RNA, 20 nt, Artificial Sequence
  LRRK2 RNA guide
acucuucuggauacuauauu

SEQ ID NO: 54667 - RNA, 20 nt, Artificial Sequence
  LRRK2 RNA guide
agaagagugcauaucucaua

SEQ ID NO: 54668 - RNA, 20 nt, Artificial Sequence
  LRRK2 RNA guide
agauaugcacucuucuggau

SEQ ID NO: 54669 - RNA, 20 nt, Artificial Sequence
  LRRK2 RNA guide
aguauccagaagagugcaua

SEQ ID NO: 54670 - RNA, 20 nt, Artificial Sequence
  LRRK2 RNA guide
aguuauaugagauaugcacu

SEQ ID NO: 54671 - RNA, 20 nt, Artificial Sequence
  LRRK2 RNA guide
auaguauccagaagagugca

SEQ ID NO: 54672 - RNA, 20 nt, Artificial Sequence
  LRRK2 RNA guide
auauaguauccagaagagug

SEQ ID NO: 54673 - RNA, 20 nt, Artificial Sequence
  LRRK2 RNA guide
auaugagauaugcacucuuc

SEQ ID NO: 54674 - RNA, 20 nt, Artificial Sequence
  LRRK2 RNA guide
auaugcacucuucuggauac

SEQ ID NO: 54675 - RNA, 20 nt, Artificial Sequence
  LRRK2 RNA guide
auccagaagagugcauaucu

SEQ ID NO: 54676 - RNA, 20 nt, Artificial Sequence
  LRRK2 RNA guide
augagauaugcacucuucug

SEQ ID NO: 54677 - RNA, 20 nt, Artificial Sequence
  LRRK2 RNA guide
augcacucuucuggauacua

SEQ ID NO: 54678 - RNA, 20 nt, Artificial Sequence
  LRRK2 RNA guide
cacucuucuggauacuauau

SEQ ID NO: 54679 - RNA, 20 nt, Artificial Sequence
  LRRK2 RNA guide
cagaagagugcauaucucau

SEQ ID NO: 54680 - RNA, 20 nt, Artificial Sequence
  LRRK2 RNA guide
ccagaagagugcauaucuca

SEQ ID NO: 54681 - RNA, 20 nt, Artificial Sequence
  LRRK2 RNA guide
cucuucuggauacuauauuu

SEQ ID NO: 54682 - RNA, 20 nt, Artificial Sequence
  LRRK2 RNA guide
gagauaugcacucuucugga

SEQ ID NO: 54683 - RNA, 20 nt, Artificial Sequence
  LRRK2 RNA guide
gauaugcacucuucuggaua

SEQ ID NO: 54684 - RNA, 20 nt, Artificial Sequence
  LRRK2 RNA guide
gcacucuucuggauacuaua

SEQ ID NO: 54685 - RNA, 20 nt, Artificial Sequence
  LRRK2 RNA guide
guauccagaagagugcauau

SEQ ID NO: 54686 - RNA, 20 nt, Artificial Sequence
  LRRK2 RNA guide
guuauaugagauaugcacuc

SEQ ID NO: 54687 - RNA, 20 nt, Artificial Sequence
  LRRK2 RNA guide
uaguauccagaagagugcau

SEQ ID NO: 54688 - RNA, 20 nt, Artificial Sequence
  LRRK2 RNA guide
uaguuauaugagauaugcac

SEQ ID NO: 54689 - RNA, 20 nt, Artificial Sequence
  LRRK2 RNA guide
uauaguauccagaagagugc

SEQ ID NO: 54690 - RNA, 20 nt, Artificial Sequence
  LRRK2 RNA guide
uauaugagauaugcacucuu

SEQ ID NO: 54691 - RNA, 20 nt, Artificial Sequence
  LRRK2 RNA guide
uauccagaagagugcauauc

SEQ ID NO: 54692 - RNA, 20 nt, Artificial Sequence
  LRRK2 RNA guide
uaugagauaugcacucuucu

SEQ ID NO: 54693 - RNA, 20 nt, Artificial Sequence
  LRRK2 RNA guide
uaugcacucuucuggauacu

SEQ ID NO: 54694 - RNA, 20 nt, Artificial Sequence
  LRRK2 RNA guide
uccagaagagugcauaucuc

SEQ ID NO: 54695 - RNA, 20 nt, Artificial Sequence
  LRRK2 RNA guide
ugagauaugcacucuucugg

SEQ ID NO: 54696 - RNA, 20 nt, Artificial Sequence
  LRRK2 RNA guide
ugcacucuucuggauacuau

SEQ ID NO: 54697 - RNA, 20 nt, Artificial Sequence
  LRRK2 RNA guide
uuauaugagauaugcacucu

SEQ ID NO: 54698 - RNA, 21 nt, Artificial Sequence
  LRRK2 RNA guide
aauauaguauccagaagagug

SEQ ID NO: 54699 - RNA, 21 nt, Artificial Sequence
  LRRK2 RNA guide
agaagagugcauaucucauau

SEQ ID NO: 54700 - RNA, 21 nt, Artificial Sequence
  LRRK2 RNA guide
agauaugcacucuucuggaua

SEQ ID NO: 54701 - RNA, 21 nt, Artificial Sequence
  LRRK2 RNA guide
aguauccagaagagugcauau

SEQ ID NO: 54702 - RNA, 21 nt, Artificial Sequence
  LRRK2 RNA guide
aguuauaugagauaugcacuc

SEQ ID NO: 54703 - RNA, 21 nt, Artificial Sequence
  LRRK2 RNA guide
auaguauccagaagagugcau

SEQ ID NO: 54704 - RNA, 21 nt, Artificial Sequence
  LRRK2 RNA guide
auauaguauccagaagagugc

SEQ ID NO: 54705 - RNA, 21 nt, Artificial Sequence
  LRRK2 RNA guide
auaugagauaugcacucuucu

SEQ ID NO: 54706 - RNA, 21 nt, Artificial Sequence
  LRRK2 RNA guide
auaugcacucuucuggauacu

SEQ ID NO: 54707 - RNA, 21 nt, Artificial Sequence
  LRRK2 RNA guide
auccagaagagugcauaucuc

SEQ ID NO: 54708 - RNA, 21 nt, Artificial Sequence
  LRRK2 RNA guide
augagauaugcacucuucugg

SEQ ID NO: 54709 - RNA, 21 nt, Artificial Sequence
  LRRK2 RNA guide
augcacucuucuggauacuau

SEQ ID NO: 54710 - RNA, 21 nt, Artificial Sequence
  LRRK2 RNA guide
cacucuucuggauacuauauu

SEQ ID NO: 54711 - RNA, 21 nt, Artificial Sequence
  LRRK2 RNA guide
cagaagagugcauaucucaua

SEQ ID NO: 54712 - RNA, 21 nt, Artificial Sequence
  LRRK2 RNA guide
ccagaagagugcauaucucau

SEQ ID NO: 54713 - RNA, 21 nt, Artificial Sequence
  LRRK2 RNA guide
gagauaugcacucuucuggau

SEQ ID NO: 54714 - RNA, 21 nt, Artificial Sequence
  LRRK2 RNA guide
gauaugcacucuucuggauac

SEQ ID NO: 54715 - RNA, 21 nt, Artificial Sequence
  LRRK2 RNA guide
gcacucuucuggauacuauau

SEQ ID NO: 54716 - RNA, 21 nt, Artificial Sequence
  LRRK2 RNA guide
guauccagaagagugcauauc

SEQ ID NO: 54717 - RNA, 21 nt, Artificial Sequence
  LRRK2 RNA guide
guuauaugagauaugcacucu

SEQ ID NO: 54718 - RNA, 21 nt, Artificial Sequence
  LRRK2 RNA guide
uaguauccagaagagugcaua

SEQ ID NO: 54719 - RNA, 21 nt, Artificial Sequence
  LRRK2 RNA guide
uauaguauccagaagagugca

SEQ ID NO: 54720 - RNA, 21 nt, Artificial Sequence
  LRRK2 RNA guide
uauaugagauaugcacucuuc

SEQ ID NO: 54721 - RNA, 21 nt, Artificial Sequence
  LRRK2 RNA guide
uauccagaagagugcauaucu

SEQ ID NO: 54722 - RNA, 21 nt, Artificial Sequence
  LRRK2 RNA guide
uaugagauaugcacucuucug

SEQ ID NO: 54723 - RNA, 21 nt, Artificial Sequence
  LRRK2 RNA guide
uaugcacucuucuggauacua

SEQ ID NO: 54724 - RNA, 21 nt, Artificial Sequence
  LRRK2 RNA guide
uccagaagagugcauaucuca

SEQ ID NO: 54725 - RNA, 21 nt, Artificial Sequence
  LRRK2 RNA guide
ugagauaugcacucuucugga

SEQ ID NO: 54726 - RNA, 21 nt, Artificial Sequence
  LRRK2 RNA guide
ugcacucuucuggauacuaua

SEQ ID NO: 54727 - RNA, 22 nt, Artificial Sequence
  LRRK2 RNA guide
aaauauaguauccagaagagug

SEQ ID NO: 54728 - RNA, 22 nt, Artificial Sequence
  LRRK2 RNA guide
aauauaguauccagaagagugc

SEQ ID NO: 54729 - RNA, 22 nt, Artificial Sequence
  LRRK2 RNA guide
agaagagugcauaucucauaua

SEQ ID NO: 54730 - RNA, 22 nt, Artificial Sequence
  LRRK2 RNA guide
agauaugcacucuucuggauac

SEQ ID NO: 54731 - RNA, 22 nt, Artificial Sequence
  LRRK2 RNA guide
aguauccagaagagugcauauc

SEQ ID NO: 54732 - RNA, 22 nt, Artificial Sequence
  LRRK2 RNA guide
aguuauaugagauaugcacucu

SEQ ID NO: 54733 - RNA, 22 nt, Artificial Sequence
  LRRK2 RNA guide
auaguauccagaagagugcaua

SEQ ID NO: 54734 - RNA, 22 nt, Artificial Sequence
  LRRK2 RNA guide
auauaguauccagaagagugca

SEQ ID NO: 54735 - RNA, 22 nt, Artificial Sequence
  LRRK2 RNA guide
auaugagauaugcacucuucug

SEQ ID NO: 54736 - RNA, 22 nt, Artificial Sequence
  LRRK2 RNA guide
auaugcacucuucuggauacua

SEQ ID NO: 54737 - RNA, 22 nt, Artificial Sequence
  LRRK2 RNA guide
auccagaagagugcauaucuca

SEQ ID NO: 54738 - RNA, 22 nt, Artificial Sequence
  LRRK2 RNA guide
augagauaugcacucuucugga

SEQ ID NO: 54739 - RNA, 22 nt, Artificial Sequence
  LRRK2 RNA guide
augcacucuucuggauacuaua

SEQ ID NO: 54740 - RNA, 22 nt, Artificial Sequence
  LRRK2 RNA guide
cacucuucuggauacuauauuu

SEQ ID NO: 54741 - RNA, 22 nt, Artificial Sequence
  LRRK2 RNA guide
cagaagagugcauaucucauau

SEQ ID NO: 54742 - RNA, 22 nt, Artificial Sequence
  LRRK2 RNA guide
ccagaagagugcauaucucaua

SEQ ID NO: 54743 - RNA, 22 nt, Artificial Sequence
  LRRK2 RNA guide
gagauaugcacucuucuggaua

SEQ ID NO: 54744 - RNA, 22 nt, Artificial Sequence
  LRRK2 RNA guide
gauaugcacucuucuggauacu

SEQ ID NO: 54745 - RNA, 22 nt, Artificial Sequence
  LRRK2 RNA guide
gcacucuucuggauacuauauu

SEQ ID NO: 54746 - RNA, 22 nt, Artificial Sequence
  LRRK2 RNA guide
guauccagaagagugcauaucu

SEQ ID NO: 54747 - RNA, 22 nt, Artificial Sequence
  LRRK2 RNA guide
guuauaugagauaugcacucuu

SEQ ID NO: 54748 - RNA, 22 nt, Artificial Sequence
  LRRK2 RNA guide
uaguauccagaagagugcauau

SEQ ID NO: 54749 - RNA, 22 nt, Artificial Sequence
  LRRK2 RNA guide
uaguuauaugagauaugcacuc

SEQ ID NO: 54750 - RNA, 22 nt, Artificial Sequence
  LRRK2 RNA guide
uauaguauccagaagagugcau

SEQ ID NO: 54751 - RNA, 22 nt, Artificial Sequence
  LRRK2 RNA guide
uauaugagauaugcacucuucu

SEQ ID NO: 54752 - RNA, 22 nt, Artificial Sequence
  LRRK2 RNA guide
uauccagaagagugcauaucuc

SEQ ID NO: 54753 - RNA, 22 nt, Artificial Sequence
  LRRK2 RNA guide
uaugagauaugcacucuucugg

SEQ ID NO: 54754 - RNA, 22 nt, Artificial Sequence
  LRRK2 RNA guide
uaugcacucuucuggauacuau

SEQ ID NO: 54755 - RNA, 22 nt, Artificial Sequence
  LRRK2 RNA guide
uccagaagagugcauaucucau

SEQ ID NO: 54756 - RNA, 22 nt, Artificial Sequence
  LRRK2 RNA guide
ugagauaugcacucuucuggau

SEQ ID NO: 54757 - RNA, 22 nt, Artificial Sequence
  LRRK2 RNA guide
ugcacucuucuggauacuauau

SEQ ID NO: 54758 - RNA, 22 nt, Artificial Sequence
  LRRK2 RNA guide
uuauaugagauaugcacucuuc

SEQ ID NO: 54759 - RNA, 20 nt, Artificial Sequence
  LRRK2 RNA guide
aaaagagugcauaucucaua

SEQ ID NO: 54760 - RNA, 20 nt, Artificial Sequence
  LRRK2 RNA guide
agauaugcacucuuuuggau

SEQ ID NO: 54761 - RNA, 20 nt, Artificial Sequence
  LRRK2 RNA guide
aguauccaaaagagugcaua

SEQ ID NO: 54762 - RNA, 20 nt, Artificial Sequence
  LRRK2 RNA guide
auaguauccaaaagagugca

SEQ ID NO: 54763 - RNA, 20 nt, Artificial Sequence
  LRRK2 RNA guide
auauaguauccaaaagagug

SEQ ID NO: 54764 - RNA, 20 nt, Artificial Sequence
  LRRK2 RNA guide
auaugagauaugcacucuuu

SEQ ID NO: 54765 - RNA, 20 nt, Artificial Sequence
  LRRK2 RNA guide
auaugcacucuuuuggauac

SEQ ID NO: 54766 - RNA, 20 nt, Artificial Sequence
  LRRK2 RNA guide
auccaaaagagugcauaucu

SEQ ID NO: 54767 - RNA, 20 nt, Artificial Sequence
  LRRK2 RNA guide
augagauaugcacucuuuug

SEQ ID NO: 54768 - RNA, 20 nt, Artificial Sequence
  LRRK2 RNA guide
augcacucuuuuggauacua

SEQ ID NO: 54769 - RNA, 20 nt, Artificial Sequence
  LRRK2 RNA guide
caaaagagugcauaucucau

SEQ ID NO: 54770 - RNA, 20 nt, Artificial Sequence
  LRRK2 RNA guide
cacucuuuuggauacuauau

SEQ ID NO: 54771 - RNA, 20 nt, Artificial Sequence
  LRRK2 RNA guide
ccaaaagagugcauaucuca

SEQ ID NO: 54772 - RNA, 20 nt, Artificial Sequence
  LRRK2 RNA guide
gagauaugcacucuuuugga

SEQ ID NO: 54773 - RNA, 20 nt, Artificial Sequence
  LRRK2 RNA guide
gauaugcacucuuuuggaua

SEQ ID NO: 54774 - RNA, 20 nt, Artificial Sequence
  LRRK2 RNA guide
gcacucuuuuggauacuaua

SEQ ID NO: 54775 - RNA, 20 nt, Artificial Sequence
  LRRK2 RNA guide
guauccaaaagagugcauau

SEQ ID NO: 54776 - RNA, 20 nt, Artificial Sequence
  LRRK2 RNA guide
uaguauccaaaagagugcau

SEQ ID NO: 54777 - RNA, 20 nt, Artificial Sequence
  LRRK2 RNA guide
uauaguauccaaaagagugc

SEQ ID NO: 54778 - RNA, 20 nt, Artificial Sequence
  LRRK2 RNA guide
uauccaaaagagugcauauc

SEQ ID NO: 54779 - RNA, 20 nt, Artificial Sequence
  LRRK2 RNA guide
uaugagauaugcacucuuuu

SEQ ID NO: 54780 - RNA, 20 nt, Artificial Sequence
  LRRK2 RNA guide
uaugcacucuuuuggauacu

SEQ ID NO: 54781 - RNA, 20 nt, Artificial Sequence
  LRRK2 RNA guide
uccaaaagagugcauaucuc

SEQ ID NO: 54782 - RNA, 20 nt, Artificial Sequence
  LRRK2 RNA guide
ugagauaugcacucuuuugg

SEQ ID NO: 54783 - RNA, 20 nt, Artificial Sequence
  LRRK2 RNA guide
ugcacucuuuuggauacuau

SEQ ID NO: 54784 - RNA, 21 nt, Artificial Sequence
  LRRK2 RNA guide
agauaugcacucuuuuggaua

SEQ ID NO: 54785 - RNA, 21 nt, Artificial Sequence
  LRRK2 RNA guide
aguauccaaaagagugcauau

SEQ ID NO: 54786 - RNA, 21 nt, Artificial Sequence
  LRRK2 RNA guide
auaguauccaaaagagugcau

SEQ ID NO: 54787 - RNA, 21 nt, Artificial Sequence
  LRRK2 RNA guide
auauaguauccaaaagagugc

SEQ ID NO: 54788 - RNA, 21 nt, Artificial Sequence
  LRRK2 RNA guide
auaugcacucuuuuggauacu

SEQ ID NO: 54789 - RNA, 21 nt, Artificial Sequence
  LRRK2 RNA guide
auccaaaagagugcauaucuc

SEQ ID NO: 54790 - RNA, 21 nt, Artificial Sequence
  LRRK2 RNA guide
augagauaugcacucuuuugg

SEQ ID NO: 54791 - RNA, 21 nt, Artificial Sequence
  LRRK2 RNA guide
augcacucuuuuggauacuau

SEQ ID NO: 54792 - RNA, 21 nt, Artificial Sequence
  LRRK2 RNA guide
caaaagagugcauaucucaua

SEQ ID NO: 54793 - RNA, 21 nt, Artificial Sequence
  LRRK2 RNA guide
ccaaaagagugcauaucucau

SEQ ID NO: 54794 - RNA, 21 nt, Artificial Sequence
  LRRK2 RNA guide
gagauaugcacucuuuuggau

SEQ ID NO: 54795 - RNA, 21 nt, Artificial Sequence
  LRRK2 RNA guide
gauaugcacucuuuuggauac

SEQ ID NO: 54796 - RNA, 21 nt, Artificial Sequence
  LRRK2 RNA guide
gcacucuuuuggauacuauau

SEQ ID NO: 54797 - RNA, 21 nt, Artificial Sequence
  LRRK2 RNA guide
guauccaaaagagugcauauc

SEQ ID NO: 54798 - RNA, 21 nt, Artificial Sequence
  LRRK2 RNA guide
uaguauccaaaagagugcaua

SEQ ID NO: 54799 - RNA, 21 nt, Artificial Sequence
  LRRK2 RNA guide
uauaguauccaaaagagugca

SEQ ID NO: 54800 - RNA, 21 nt, Artificial Sequence
  LRRK2 RNA guide
uauccaaaagagugcauaucu

SEQ ID NO: 54801 - RNA, 21 nt, Artificial Sequence
  LRRK2 RNA guide
uaugagauaugcacucuuuug

SEQ ID NO: 54802 - RNA, 21 nt, Artificial Sequence
  LRRK2 RNA guide
uaugcacucuuuuggauacua

SEQ ID NO: 54803 - RNA, 21 nt, Artificial Sequence
  LRRK2 RNA guide
uccaaaagagugcauaucuca

SEQ ID NO: 54804 - RNA, 21 nt, Artificial Sequence
  LRRK2 RNA guide
ugagauaugcacucuuuugga

SEQ ID NO: 54805 - RNA, 21 nt, Artificial Sequence
  LRRK2 RNA guide
ugcacucuuuuggauacuaua

SEQ ID NO: 54806 - RNA, 22 nt, Artificial Sequence
  LRRK2 RNA guide
aauauaguauccaaaagagugc

SEQ ID NO: 54807 - RNA, 22 nt, Artificial Sequence
  LRRK2 RNA guide
agauaugcacucuuuuggauac

SEQ ID NO: 54808 - RNA, 22 nt, Artificial Sequence
  LRRK2 RNA guide
aguauccaaaagagugcauauc

SEQ ID NO: 54809 - RNA, 22 nt, Artificial Sequence
  LRRK2 RNA guide
auaguauccaaaagagugcaua

SEQ ID NO: 54810 - RNA, 22 nt, Artificial Sequence
  LRRK2 RNA guide
auauaguauccaaaagagugca

SEQ ID NO: 54811 - RNA, 22 nt, Artificial Sequence
  LRRK2 RNA guide
auaugagauaugcacucuuuug

SEQ ID NO: 54812 - RNA, 22 nt, Artificial Sequence
  LRRK2 RNA guide
auaugcacucuuuuggauacua

SEQ ID NO: 54813 - RNA, 22 nt, Artificial Sequence
  LRRK2 RNA guide
auccaaaagagugcauaucuca

SEQ ID NO: 54814 - RNA, 22 nt, Artificial Sequence
  LRRK2 RNA guide
augagauaugcacucuuuugga

SEQ ID NO: 54815 - RNA, 22 nt, Artificial Sequence
  LRRK2 RNA guide
augcacucuuuuggauacuaua

SEQ ID NO: 54816 - RNA, 22 nt, Artificial Sequence
  LRRK2 RNA guide
caaaagagugcauaucucauau

SEQ ID NO: 54817 - RNA, 22 nt, Artificial Sequence
  LRRK2 RNA guide
ccaaaagagugcauaucucaua

SEQ ID NO: 54818 - RNA, 22 nt, Artificial Sequence
  LRRK2 RNA guide
gagauaugcacucuuuuggaua

SEQ ID NO: 54819 - RNA, 22 nt, Artificial Sequence
  LRRK2 RNA guide
gauaugcacucuuuuggauacu

SEQ ID NO: 54820 - RNA, 22 nt, Artificial Sequence
  LRRK2 RNA guide
gcacucuuuuggauacuauauu

SEQ ID NO: 54821 - RNA, 22 nt, Artificial Sequence
  LRRK2 RNA guide
guauccaaaagagugcauaucu

SEQ ID NO: 54822 - RNA, 22 nt, Artificial Sequence
  LRRK2 RNA guide
uaguauccaaaagagugcauau

SEQ ID NO: 54823 - RNA, 22 nt, Artificial Sequence
  LRRK2 RNA guide
uauaguauccaaaagagugcau

SEQ ID NO: 54824 - RNA, 22 nt, Artificial Sequence
  LRRK2 RNA guide
uauccaaaagagugcauaucuc

SEQ ID NO: 54825 - RNA, 22 nt, Artificial Sequence
  LRRK2 RNA guide
uaugagauaugcacucuuuugg

SEQ ID NO: 54826 - RNA, 22 nt, Artificial Sequence
  LRRK2 RNA guide
uaugcacucuuuuggauacuau

SEQ ID NO: 54827 - RNA, 22 nt, Artificial Sequence
  LRRK2 RNA guide
uccaaaagagugcauaucucau

SEQ ID NO: 54828 - RNA, 22 nt, Artificial Sequence
  LRRK2 RNA guide
ugagauaugcacucuuuuggau

SEQ ID NO: 54829 - RNA, 22 nt, Artificial Sequence
  LRRK2 RNA guide
ugcacucuuuuggauacuauau

SEQ ID NO: 54830 - RNA, 20 nt, Artificial Sequence
  LRRK2 RNA guide
aaaaacaacagaccauguuu

SEQ ID NO: 54831 - RNA, 20 nt, Artificial Sequence
  LRRK2 RNA guide
aaaaacccagaauaguucuc

SEQ ID NO: 54832 - RNA, 20 nt, Artificial Sequence
  LRRK2 RNA guide
aaaacaacagaccauguuua

SEQ ID NO: 54833 - RNA, 20 nt, Artificial Sequence
  LRRK2 RNA guide
aaaacccagaauaguucucu

SEQ ID NO: 54834 - RNA, 20 nt, Artificial Sequence
  LRRK2 RNA guide
aaacaacagaccauguuuag

SEQ ID NO: 54835 - RNA, 20 nt, Artificial Sequence
  LRRK2 RNA guide
aaacccagaauaguucucua

SEQ ID NO: 54836 - RNA, 20 nt, Artificial Sequence
  LRRK2 RNA guide
aacaacagaccauguuuaga

SEQ ID NO: 54837 - RNA, 20 nt, Artificial Sequence
  LRRK2 RNA guide
aacagaccauguuuagagaa

SEQ ID NO: 54838 - RNA, 20 nt, Artificial Sequence
  LRRK2 RNA guide
aacccagaauaguucucuaa

SEQ ID NO: 54839 - RNA, 20 nt, Artificial Sequence
  LRRK2 RNA guide
aauaguucucuaaacauggu

SEQ ID NO: 54840 - RNA, 20 nt, Artificial Sequence
  LRRK2 RNA guide
acaacagaccauguuuagag

SEQ ID NO: 54841 - RNA, 20 nt, Artificial Sequence
  LRRK2 RNA guide
acagaccauguuuagagaac

SEQ ID NO: 54842 - RNA, 20 nt, Artificial Sequence
  LRRK2 RNA guide
accauguuuagagaacuauu

SEQ ID NO: 54843 - RNA, 20 nt, Artificial Sequence
  LRRK2 RNA guide
acccagaauaguucucuaaa

SEQ ID NO: 54844 - RNA, 20 nt, Artificial Sequence
  LRRK2 RNA guide
agaaaaacaacagaccaugu

SEQ ID NO: 54845 - RNA, 20 nt, Artificial Sequence
  LRRK2 RNA guide
agaauaguucucuaaacaug

SEQ ID NO: 54846 - RNA, 20 nt, Artificial Sequence
  LRRK2 RNA guide
agaccauguuuagagaacua

SEQ ID NO: 54847 - RNA, 20 nt, Artificial Sequence
  LRRK2 RNA guide
agagaacuauucuggguuuu

SEQ ID NO: 54848 - RNA, 20 nt, Artificial Sequence
  LRRK2 RNA guide
aguaaaaacccagaauaguu

SEQ ID NO: 54849 - RNA, 20 nt, Artificial Sequence
  LRRK2 RNA guide
aguucucuaaacauggucug

SEQ ID NO: 54850 - RNA, 20 nt, Artificial Sequence
  LRRK2 RNA guide
auaguucucuaaacaugguc

SEQ ID NO: 54851 - RNA, 20 nt, Artificial Sequence
  LRRK2 RNA guide
auguuuagagaacuauucug

SEQ ID NO: 54852 - RNA, 20 nt, Artificial Sequence
  LRRK2 RNA guide
caacagaccauguuuagaga

SEQ ID NO: 54853 - RNA, 20 nt, Artificial Sequence
  LRRK2 RNA guide
cagaauaguucucuaaacau

SEQ ID NO: 54854 - RNA, 20 nt, Artificial Sequence
  LRRK2 RNA guide
cagaccauguuuagagaacu

SEQ ID NO: 54855 - RNA, 20 nt, Artificial Sequence
  LRRK2 RNA guide
cauguuuagagaacuauucu

SEQ ID NO: 54856 - RNA, 20 nt, Artificial Sequence
  LRRK2 RNA guide
ccagaauaguucucuaaaca

SEQ ID NO: 54857 - RNA, 20 nt, Artificial Sequence
  LRRK2 RNA guide
ccauguuuagagaacuauuc

SEQ ID NO: 54858 - RNA, 20 nt, Artificial Sequence
  LRRK2 RNA guide
cccagaauaguucucuaaac

SEQ ID NO: 54859 - RNA, 20 nt, Artificial Sequence
  LRRK2 RNA guide
cuaguaaaaacccagaauag

SEQ ID NO: 54860 - RNA, 20 nt, Artificial Sequence
  LRRK2 RNA guide
cucuaaacauggucuguugu

SEQ ID NO: 54861 - RNA, 20 nt, Artificial Sequence
  LRRK2 RNA guide
gaaaaacaacagaccauguu

SEQ ID NO: 54862 - RNA, 20 nt, Artificial Sequence
  LRRK2 RNA guide
gaauaguucucuaaacaugg

SEQ ID NO: 54863 - RNA, 20 nt, Artificial Sequence
  LRRK2 RNA guide
gagaaaaacaacagaccaug

SEQ ID NO: 54864 - RNA, 20 nt, Artificial Sequence
  LRRK2 RNA guide
guaaaaacccagaauaguuc

SEQ ID NO: 54865 - RNA, 20 nt, Artificial Sequence
  LRRK2 RNA guide
guucucuaaacauggucugu

SEQ ID NO: 54866 - RNA, 20 nt, Artificial Sequence
  LRRK2 RNA guide
guuuagagaacuauucuggg

SEQ ID NO: 54867 - RNA, 20 nt, Artificial Sequence
  LRRK2 RNA guide
uaaaaacccagaauaguucu

SEQ ID NO: 54868 - RNA, 20 nt, Artificial Sequence
  LRRK2 RNA guide
uagagaacuauucuggguuu

SEQ ID NO: 54869 - RNA, 20 nt, Artificial Sequence
  LRRK2 RNA guide
uaguaaaaacccagaauagu

SEQ ID NO: 54870 - RNA, 20 nt, Artificial Sequence
  LRRK2 RNA guide
uaguucucuaaacauggucu

SEQ ID NO: 54871 - RNA, 20 nt, Artificial Sequence
  LRRK2 RNA guide
ucuaaacauggucuguuguu

SEQ ID NO: 54872 - RNA, 20 nt, Artificial Sequence
  LRRK2 RNA guide
ucucuaaacauggucuguug

SEQ ID NO: 54873 - RNA, 20 nt, Artificial Sequence
  LRRK2 RNA guide
uguuuagagaacuauucugg

SEQ ID NO: 54874 - RNA, 20 nt, Artificial Sequence
  LRRK2 RNA guide
uuagagaacuauucuggguu

SEQ ID NO: 54875 - RNA, 20 nt, Artificial Sequence
  LRRK2 RNA guide
uucucuaaacauggucuguu

SEQ ID NO: 54876 - RNA, 20 nt, Artificial Sequence
  LRRK2 RNA guide
uuuagagaacuauucugggu

SEQ ID NO: 54877 - RNA, 21 nt, Artificial Sequence
  LRRK2 RNA guide
aaaaacccagaauaguucucu

SEQ ID NO: 54878 - RNA, 21 nt, Artificial Sequence
  LRRK2 RNA guide
aaaacaacagaccauguuuag

SEQ ID NO: 54879 - RNA, 21 nt, Artificial Sequence
  LRRK2 RNA guide
aaaacccagaauaguucucua

SEQ ID NO: 54880 - RNA, 21 nt, Artificial Sequence
  LRRK2 RNA guide
aaacaacagaccauguuuaga

SEQ ID NO: 54881 - RNA, 21 nt, Artificial Sequence
  LRRK2 RNA guide
aaacccagaauaguucucuaa

SEQ ID NO: 54882 - RNA, 21 nt, Artificial Sequence
  LRRK2 RNA guide
aacaacagaccauguuuagag

SEQ ID NO: 54883 - RNA, 21 nt, Artificial Sequence
  LRRK2 RNA guide
aacagaccauguuuagagaac

SEQ ID NO: 54884 - RNA, 21 nt, Artificial Sequence
  LRRK2 RNA guide
aacccagaauaguucucuaaa

SEQ ID NO: 54885 - RNA, 21 nt, Artificial Sequence
  LRRK2 RNA guide
aauaguucucuaaacaugguc

SEQ ID NO: 54886 - RNA, 21 nt, Artificial Sequence
  LRRK2 RNA guide
acaacagaccauguuuagaga

SEQ ID NO: 54887 - RNA, 21 nt, Artificial Sequence
  LRRK2 RNA guide
acagaccauguuuagagaacu

SEQ ID NO: 54888 - RNA, 21 nt, Artificial Sequence
  LRRK2 RNA guide
accauguuuagagaacuauuc

SEQ ID NO: 54889 - RNA, 21 nt, Artificial Sequence
  LRRK2 RNA guide
acccagaauaguucucuaaac

SEQ ID NO: 54890 - RNA, 21 nt, Artificial Sequence
  LRRK2 RNA guide
agaaaaacaacagaccauguu

SEQ ID NO: 54891 - RNA, 21 nt, Artificial Sequence
  LRRK2 RNA guide
agaauaguucucuaaacaugg

SEQ ID NO: 54892 - RNA, 21 nt, Artificial Sequence
  LRRK2 RNA guide
agaccauguuuagagaacuau

SEQ ID NO: 54893 - RNA, 21 nt, Artificial Sequence
  LRRK2 RNA guide
agagaaaaacaacagaccaug

SEQ ID NO: 54894 - RNA, 21 nt, Artificial Sequence
  LRRK2 RNA guide
agagaacuauucuggguuuuu

SEQ ID NO: 54895 - RNA, 21 nt, Artificial Sequence
  LRRK2 RNA guide
aguaaaaacccagaauaguuc

SEQ ID NO: 54896 - RNA, 21 nt, Artificial Sequence
  LRRK2 RNA guide
aguucucuaaacauggucugu

SEQ ID NO: 54897 - RNA, 21 nt, Artificial Sequence
  LRRK2 RNA guide
auaguucucuaaacauggucu

SEQ ID NO: 54898 - RNA, 21 nt, Artificial Sequence
  LRRK2 RNA guide
auguuuagagaacuauucugg

SEQ ID NO: 54899 - RNA, 21 nt, Artificial Sequence
  LRRK2 RNA guide
caacagaccauguuuagagaa

SEQ ID NO: 54900 - RNA, 21 nt, Artificial Sequence
  LRRK2 RNA guide
cagaauaguucucuaaacaug

SEQ ID NO: 54901 - RNA, 21 nt, Artificial Sequence
  LRRK2 RNA guide
cagaccauguuuagagaacua

SEQ ID NO: 54902 - RNA, 21 nt, Artificial Sequence
  LRRK2 RNA guide
cauguuuagagaacuauucug

SEQ ID NO: 54903 - RNA, 21 nt, Artificial Sequence
  LRRK2 RNA guide
ccagaauaguucucuaaacau

SEQ ID NO: 54904 - RNA, 21 nt, Artificial Sequence
  LRRK2 RNA guide
ccauguuuagagaacuauucu

SEQ ID NO: 54905 - RNA, 21 nt, Artificial Sequence
  LRRK2 RNA guide
cccagaauaguucucuaaaca

SEQ ID NO: 54906 - RNA, 21 nt, Artificial Sequence
  LRRK2 RNA guide
ccuaguaaaaacccagaauag

SEQ ID NO: 54907 - RNA, 21 nt, Artificial Sequence
  LRRK2 RNA guide
cuaguaaaaacccagaauagu

SEQ ID NO: 54908 - RNA, 21 nt, Artificial Sequence
  LRRK2 RNA guide
cucuaaacauggucuguuguu

SEQ ID NO: 54909 - RNA, 21 nt, Artificial Sequence
  LRRK2 RNA guide
gaaaaacaacagaccauguuu

SEQ ID NO: 54910 - RNA, 21 nt, Artificial Sequence
  LRRK2 RNA guide
gaauaguucucuaaacauggu

SEQ ID NO: 54911 - RNA, 21 nt, Artificial Sequence
  LRRK2 RNA guide
gaccauguuuagagaacuauu

SEQ ID NO: 54912 - RNA, 21 nt, Artificial Sequence
  LRRK2 RNA guide
gagaaaaacaacagaccaugu

SEQ ID NO: 54913 - RNA, 21 nt, Artificial Sequence
  LRRK2 RNA guide
guaaaaacccagaauaguucu

SEQ ID NO: 54914 - RNA, 21 nt, Artificial Sequence
  LRRK2 RNA guide
guucucuaaacauggucuguu

SEQ ID NO: 54915 - RNA, 21 nt, Artificial Sequence
  LRRK2 RNA guide
guuuagagaacuauucugggu

SEQ ID NO: 54916 - RNA, 21 nt, Artificial Sequence
  LRRK2 RNA guide
uaaaaacccagaauaguucuc

SEQ ID NO: 54917 - RNA, 21 nt, Artificial Sequence
  LRRK2 RNA guide
uagagaacuauucuggguuuu

SEQ ID NO: 54918 - RNA, 21 nt, Artificial Sequence
  LRRK2 RNA guide
uaguucucuaaacauggucug

SEQ ID NO: 54919 - RNA, 21 nt, Artificial Sequence
  LRRK2 RNA guide
ucuaaacauggucuguuguuu

SEQ ID NO: 54920 - RNA, 21 nt, Artificial Sequence
  LRRK2 RNA guide
ucucuaaacauggucuguugu

SEQ ID NO: 54921 - RNA, 21 nt, Artificial Sequence
  LRRK2 RNA guide
uguuuagagaacuauucuggg

SEQ ID NO: 54922 - RNA, 21 nt, Artificial Sequence
  LRRK2 RNA guide
uuagagaacuauucuggguuu

SEQ ID NO: 54923 - RNA, 21 nt, Artificial Sequence
  LRRK2 RNA guide
uucucuaaacauggucuguug

SEQ ID NO: 54924 - RNA, 21 nt, Artificial Sequence
  LRRK2 RNA guide
uuuagagaacuauucuggguu

SEQ ID NO: 54925 - RNA, 22 nt, Artificial Sequence
  LRRK2 RNA guide
aaaaacaacagaccauguuuag

SEQ ID NO: 54926 - RNA, 22 nt, Artificial Sequence
  LRRK2 RNA guide
aaaaacccagaauaguucucua

SEQ ID NO: 54927 - RNA, 22 nt, Artificial Sequence
  LRRK2 RNA guide
aaaacaacagaccauguuuaga

SEQ ID NO: 54928 - RNA, 22 nt, Artificial Sequence
  LRRK2 RNA guide
aaaacccagaauaguucucuaa

SEQ ID NO: 54929 - RNA, 22 nt, Artificial Sequence
  LRRK2 RNA guide
aaacaacagaccauguuuagag

SEQ ID NO: 54930 - RNA, 22 nt, Artificial Sequence
  LRRK2 RNA guide
aaacccagaauaguucucuaaa

SEQ ID NO: 54931 - RNA, 22 nt, Artificial Sequence
  LRRK2 RNA guide
aacaacagaccauguuuagaga

SEQ ID NO: 54932 - RNA, 22 nt, Artificial Sequence
  LRRK2 RNA guide
aacagaccauguuuagagaacu

SEQ ID NO: 54933 - RNA, 22 nt, Artificial Sequence
  LRRK2 RNA guide
aacccagaauaguucucuaaac

SEQ ID NO: 54934 - RNA, 22 nt, Artificial Sequence
  LRRK2 RNA guide
aagagaaaaacaacagaccaug

SEQ ID NO: 54935 - RNA, 22 nt, Artificial Sequence
  LRRK2 RNA guide
aauaguucucuaaacauggucu

SEQ ID NO: 54936 - RNA, 22 nt, Artificial Sequence
  LRRK2 RNA guide
acaacagaccauguuuagagaa

SEQ ID NO: 54937 - RNA, 22 nt, Artificial Sequence
  LRRK2 RNA guide
acagaccauguuuagagaacua

SEQ ID NO: 54938 - RNA, 22 nt, Artificial Sequence
  LRRK2 RNA guide
accauguuuagagaacuauucu

SEQ ID NO: 54939 - RNA, 22 nt, Artificial Sequence
  LRRK2 RNA guide
acccagaauaguucucuaaaca

SEQ ID NO: 54940 - RNA, 22 nt, Artificial Sequence
  LRRK2 RNA guide
agaaaaacaacagaccauguuu

SEQ ID NO: 54941 - RNA, 22 nt, Artificial Sequence
  LRRK2 RNA guide
agaauaguucucuaaacauggu

SEQ ID NO: 54942 - RNA, 22 nt, Artificial Sequence
  LRRK2 RNA guide
agaccauguuuagagaacuauu

SEQ ID NO: 54943 - RNA, 22 nt, Artificial Sequence
  LRRK2 RNA guide
agagaaaaacaacagaccaugu

SEQ ID NO: 54944 - RNA, 22 nt, Artificial Sequence
  LRRK2 RNA guide
agagaacuauucuggguuuuua

SEQ ID NO: 54945 - RNA, 22 nt, Artificial Sequence
  LRRK2 RNA guide
aguaaaaacccagaauaguucu

SEQ ID NO: 54946 - RNA, 22 nt, Artificial Sequence
  LRRK2 RNA guide
aguucucuaaacauggucuguu

SEQ ID NO: 54947 - RNA, 22 nt, Artificial Sequence
  LRRK2 RNA guide
auaguucucuaaacauggucug

SEQ ID NO: 54948 - RNA, 22 nt, Artificial Sequence
  LRRK2 RNA guide
auguuuagagaacuauucuggg

SEQ ID NO: 54949 - RNA, 22 nt, Artificial Sequence
  LRRK2 RNA guide
caacagaccauguuuagagaac

SEQ ID NO: 54950 - RNA, 22 nt, Artificial Sequence
  LRRK2 RNA guide
cagaauaguucucuaaacaugg

SEQ ID NO: 54951 - RNA, 22 nt, Artificial Sequence
  LRRK2 RNA guide
cagaccauguuuagagaacuau

SEQ ID NO: 54952 - RNA, 22 nt, Artificial Sequence
  LRRK2 RNA guide
cauguuuagagaacuauucugg

SEQ ID NO: 54953 - RNA, 22 nt, Artificial Sequence
  LRRK2 RNA guide
ccagaauaguucucuaaacaug

SEQ ID NO: 54954 - RNA, 22 nt, Artificial Sequence
  LRRK2 RNA guide
ccauguuuagagaacuauucug

SEQ ID NO: 54955 - RNA, 22 nt, Artificial Sequence
  LRRK2 RNA guide
cccagaauaguucucuaaacau

SEQ ID NO: 54956 - RNA, 22 nt, Artificial Sequence
  LRRK2 RNA guide
ccuaguaaaaacccagaauagu

SEQ ID NO: 54957 - RNA, 22 nt, Artificial Sequence
  LRRK2 RNA guide
cuaguaaaaacccagaauaguu

SEQ ID NO: 54958 - RNA, 22 nt, Artificial Sequence
  LRRK2 RNA guide
cucuaaacauggucuguuguuu

SEQ ID NO: 54959 - RNA, 22 nt, Artificial Sequence
  LRRK2 RNA guide
gaaaaacaacagaccauguuua

SEQ ID NO: 54960 - RNA, 22 nt, Artificial Sequence
  LRRK2 RNA guide
gaauaguucucuaaacaugguc

SEQ ID NO: 54961 - RNA, 22 nt, Artificial Sequence
  LRRK2 RNA guide
gaccauguuuagagaacuauuc

SEQ ID NO: 54962 - RNA, 22 nt, Artificial Sequence
  LRRK2 RNA guide
gagaaaaacaacagaccauguu

SEQ ID NO: 54963 - RNA, 22 nt, Artificial Sequence
  LRRK2 RNA guide
guaaaaacccagaauaguucuc

SEQ ID NO: 54964 - RNA, 22 nt, Artificial Sequence
  LRRK2 RNA guide
guucucuaaacauggucuguug

SEQ ID NO: 54965 - RNA, 22 nt, Artificial Sequence
  LRRK2 RNA guide
guuuagagaacuauucuggguu

SEQ ID NO: 54966 - RNA, 22 nt, Artificial Sequence
  LRRK2 RNA guide
uaaaaacccagaauaguucucu

SEQ ID NO: 54967 - RNA, 22 nt, Artificial Sequence
  LRRK2 RNA guide
uagagaacuauucuggguuuuu

SEQ ID NO: 54968 - RNA, 22 nt, Artificial Sequence
  LRRK2 RNA guide
uaguaaaaacccagaauaguuc

SEQ ID NO: 54969 - RNA, 22 nt, Artificial Sequence
  LRRK2 RNA guide
uaguucucuaaacauggucugu

SEQ ID NO: 54970 - RNA, 22 nt, Artificial Sequence
  LRRK2 RNA guide
uccuaguaaaaacccagaauag

SEQ ID NO: 54971 - RNA, 22 nt, Artificial Sequence
  LRRK2 RNA guide
ucuaaacauggucuguuguuuu

SEQ ID NO: 54972 - RNA, 22 nt, Artificial Sequence
  LRRK2 RNA guide
ucucuaaacauggucuguuguu

SEQ ID NO: 54973 - RNA, 22 nt, Artificial Sequence
  LRRK2 RNA guide
uguuuagagaacuauucugggu

SEQ ID NO: 54974 - RNA, 22 nt, Artificial Sequence
  LRRK2 RNA guide
uuagagaacuauucuggguuuu

SEQ ID NO: 54975 - RNA, 22 nt, Artificial Sequence
  LRRK2 RNA guide
uucucuaaacauggucuguugu

SEQ ID NO: 54976 - RNA, 22 nt, Artificial Sequence
  LRRK2 RNA guide
uuuagagaacuauucuggguuu

SEQ ID NO: 54977 - RNA, 20 nt, Artificial Sequence
  LRRK2 RNA guide
aaaaacccagaauaguucuu

SEQ ID NO: 54978 - RNA, 20 nt, Artificial Sequence
  LRRK2 RNA guide
aaaacccagaauaguucuuu

SEQ ID NO: 54979 - RNA, 20 nt, Artificial Sequence
  LRRK2 RNA guide
aaacaacagaccauguuuaa

SEQ ID NO: 54980 - RNA, 20 nt, Artificial Sequence
  LRRK2 RNA guide
aaacccagaauaguucuuua

SEQ ID NO: 54981 - RNA, 20 nt, Artificial Sequence
  LRRK2 RNA guide
aaagaacuauucuggguuuu

SEQ ID NO: 54982 - RNA, 20 nt, Artificial Sequence
  LRRK2 RNA guide
aacaacagaccauguuuaaa

SEQ ID NO: 54983 - RNA, 20 nt, Artificial Sequence
  LRRK2 RNA guide
aacagaccauguuuaaagaa

SEQ ID NO: 54984 - RNA, 20 nt, Artificial Sequence
  LRRK2 RNA guide
aacccagaauaguucuuuaa

SEQ ID NO: 54985 - RNA, 20 nt, Artificial Sequence
  LRRK2 RNA guide
acaacagaccauguuuaaag

SEQ ID NO: 54986 - RNA, 20 nt, Artificial Sequence
  LRRK2 RNA guide
acagaccauguuuaaagaac

SEQ ID NO: 54987 - RNA, 20 nt, Artificial Sequence
  LRRK2 RNA guide
acccagaauaguucuuuaaa

SEQ ID NO: 54988 - RNA, 20 nt, Artificial Sequence
  LRRK2 RNA guide
agaccauguuuaaagaacua

SEQ ID NO: 54989 - RNA, 20 nt, Artificial Sequence
  LRRK2 RNA guide
aguucuuuaaacauggucug

SEQ ID NO: 54990 - RNA, 20 nt, Artificial Sequence
  LRRK2 RNA guide
auaguucuuuaaacaugguc

SEQ ID NO: 54991 - RNA, 20 nt, Artificial Sequence
  LRRK2 RNA guide
caacagaccauguuuaaaga

SEQ ID NO: 54992 - RNA, 20 nt, Artificial Sequence
  LRRK2 RNA guide
cagaccauguuuaaagaacu

SEQ ID NO: 54993 - RNA, 20 nt, Artificial Sequence
  LRRK2 RNA guide
ccagaauaguucuuuaaaca

SEQ ID NO: 54994 - RNA, 20 nt, Artificial Sequence
  LRRK2 RNA guide
ccauguuuaaagaacuauuc

SEQ ID NO: 54995 - RNA, 20 nt, Artificial Sequence
  LRRK2 RNA guide
cccagaauaguucuuuaaac

SEQ ID NO: 54996 - RNA, 20 nt, Artificial Sequence
  LRRK2 RNA guide
cuuuaaacauggucuguugu

SEQ ID NO: 54997 - RNA, 20 nt, Artificial Sequence
  LRRK2 RNA guide
gaauaguucuuuaaacaugg

SEQ ID NO: 54998 - RNA, 20 nt, Artificial Sequence
  LRRK2 RNA guide
gaccauguuuaaagaacuau

SEQ ID NO: 54999 - RNA, 20 nt, Artificial Sequence
  LRRK2 RNA guide
guucuuuaaacauggucugu

SEQ ID NO: 55000 - RNA, 20 nt, Artificial Sequence
  LRRK2 RNA guide
guuuaaagaacuauucuggg

SEQ ID NO: 55001 - RNA, 20 nt, Artificial Sequence
  LRRK2 RNA guide
uaaagaacuauucuggguuu

SEQ ID NO: 55002 - RNA, 20 nt, Artificial Sequence
  LRRK2 RNA guide
uaguucuuuaaacauggucu

SEQ ID NO: 55003 - RNA, 20 nt, Artificial Sequence
  LRRK2 RNA guide
ucuuuaaacauggucuguug

SEQ ID NO: 55004 - RNA, 20 nt, Artificial Sequence
  LRRK2 RNA guide
uguuuaaagaacuauucugg

SEQ ID NO: 55005 - RNA, 20 nt, Artificial Sequence
  LRRK2 RNA guide
uuaaagaacuauucuggguu

SEQ ID NO: 55006 - RNA, 20 nt, Artificial Sequence
  LRRK2 RNA guide
uucuuuaaacauggucuguu

SEQ ID NO: 55007 - RNA, 20 nt, Artificial Sequence
  LRRK2 RNA guide
uuuaaacauggucuguuguu

SEQ ID NO: 55008 - RNA, 20 nt, Artificial Sequence
  LRRK2 RNA guide
uuuaaagaacuauucugggu

SEQ ID NO: 55009 - RNA, 21 nt, Artificial Sequence
  LRRK2 RNA guide
aacaacagaccauguuuaaag

SEQ ID NO: 55010 - RNA, 21 nt, Artificial Sequence
  LRRK2 RNA guide
aacagaccauguuuaaagaac

SEQ ID NO: 55011 - RNA, 21 nt, Artificial Sequence
  LRRK2 RNA guide
acaacagaccauguuuaaaga

SEQ ID NO: 55012 - RNA, 21 nt, Artificial Sequence
  LRRK2 RNA guide
acagaccauguuuaaagaacu

SEQ ID NO: 55013 - RNA, 21 nt, Artificial Sequence
  LRRK2 RNA guide
acccagaauaguucuuuaaac

SEQ ID NO: 55014 - RNA, 21 nt, Artificial Sequence
  LRRK2 RNA guide
aguucuuuaaacauggucugu

SEQ ID NO: 55015 - RNA, 21 nt, Artificial Sequence
  LRRK2 RNA guide
caacagaccauguuuaaagaa

SEQ ID NO: 55016 - RNA, 21 nt, Artificial Sequence
  LRRK2 RNA guide
cagaccauguuuaaagaacua

SEQ ID NO: 55017 - RNA, 21 nt, Artificial Sequence
  LRRK2 RNA guide
cccagaauaguucuuuaaaca

SEQ ID NO: 55018 - RNA, 21 nt, Artificial Sequence
  LRRK2 RNA guide
cuuuaaacauggucuguuguu

SEQ ID NO: 55019 - RNA, 21 nt, Artificial Sequence
  LRRK2 RNA guide
guucuuuaaacauggucuguu

SEQ ID NO: 55020 - RNA, 21 nt, Artificial Sequence
  LRRK2 RNA guide
guuuaaagaacuauucugggu

SEQ ID NO: 55021 - RNA, 21 nt, Artificial Sequence
  LRRK2 RNA guide
uaguucuuuaaacauggucug

SEQ ID NO: 55022 - RNA, 21 nt, Artificial Sequence
  LRRK2 RNA guide
ucuuuaaacauggucuguugu

SEQ ID NO: 55023 - RNA, 21 nt, Artificial Sequence
  LRRK2 RNA guide
uguuuaaagaacuauucuggg

SEQ ID NO: 55024 - RNA, 21 nt, Artificial Sequence
  LRRK2 RNA guide
uucuuuaaacauggucuguug

SEQ ID NO: 55025 - RNA, 22 nt, Artificial Sequence
  LRRK2 RNA guide
aaacaacagaccauguuuaaag

SEQ ID NO: 55026 - RNA, 22 nt, Artificial Sequence
  LRRK2 RNA guide
aacaacagaccauguuuaaaga

SEQ ID NO: 55027 - RNA, 22 nt, Artificial Sequence
  LRRK2 RNA guide
aacagaccauguuuaaagaacu

SEQ ID NO: 55028 - RNA, 22 nt, Artificial Sequence
  LRRK2 RNA guide
aacccagaauaguucuuuaaac

SEQ ID NO: 55029 - RNA, 22 nt, Artificial Sequence
  LRRK2 RNA guide
acaacagaccauguuuaaagaa

SEQ ID NO: 55030 - RNA, 22 nt, Artificial Sequence
  LRRK2 RNA guide
acagaccauguuuaaagaacua

SEQ ID NO: 55031 - RNA, 22 nt, Artificial Sequence
  LRRK2 RNA guide
acccagaauaguucuuuaaaca

SEQ ID NO: 55032 - RNA, 22 nt, Artificial Sequence
  LRRK2 RNA guide
aguucuuuaaacauggucuguu

SEQ ID NO: 55033 - RNA, 22 nt, Artificial Sequence
  LRRK2 RNA guide
auaguucuuuaaacauggucug

SEQ ID NO: 55034 - RNA, 22 nt, Artificial Sequence
  LRRK2 RNA guide
auguuuaaagaacuauucuggg

SEQ ID NO: 55035 - RNA, 22 nt, Artificial Sequence
  LRRK2 RNA guide
caacagaccauguuuaaagaac

SEQ ID NO: 55036 - RNA, 22 nt, Artificial Sequence
  LRRK2 RNA guide
cagaauaguucuuuaaacaugg

SEQ ID NO: 55037 - RNA, 22 nt, Artificial Sequence
  LRRK2 RNA guide
cagaccauguuuaaagaacuau

SEQ ID NO: 55038 - RNA, 22 nt, Artificial Sequence
  LRRK2 RNA guide
cauguuuaaagaacuauucugg

SEQ ID NO: 55039 - RNA, 22 nt, Artificial Sequence
  LRRK2 RNA guide
ccagaauaguucuuuaaacaug

SEQ ID NO: 55040 - RNA, 22 nt, Artificial Sequence
  LRRK2 RNA guide
ccauguuuaaagaacuauucug

SEQ ID NO: 55041 - RNA, 22 nt, Artificial Sequence
  LRRK2 RNA guide
cccagaauaguucuuuaaacau

SEQ ID NO: 55042 - RNA, 22 nt, Artificial Sequence
  LRRK2 RNA guide
cuuuaaacauggucuguuguuu

SEQ ID NO: 55043 - RNA, 22 nt, Artificial Sequence
  LRRK2 RNA guide
gaauaguucuuuaaacaugguc

SEQ ID NO: 55044 - RNA, 22 nt, Artificial Sequence
  LRRK2 RNA guide
gaccauguuuaaagaacuauuc

SEQ ID NO: 55045 - RNA, 22 nt, Artificial Sequence
  LRRK2 RNA guide
guaaaaacccagaauaguucuu

SEQ ID NO: 55046 - RNA, 22 nt, Artificial Sequence
  LRRK2 RNA guide
guucuuuaaacauggucuguug

SEQ ID NO: 55047 - RNA, 22 nt, Artificial Sequence
  LRRK2 RNA guide
guuuaaagaacuauucuggguu

SEQ ID NO: 55048 - RNA, 22 nt, Artificial Sequence
  LRRK2 RNA guide
uaguucuuuaaacauggucugu

SEQ ID NO: 55049 - RNA, 22 nt, Artificial Sequence
  LRRK2 RNA guide
ucuuuaaacauggucuguuguu

SEQ ID NO: 55050 - RNA, 22 nt, Artificial Sequence
  LRRK2 RNA guide
uguuuaaagaacuauucugggu

SEQ ID NO: 55051 - RNA, 22 nt, Artificial Sequence
  LRRK2 RNA guide
uucuuuaaacauggucuguugu

SEQ ID NO: 55052 - RNA, 20 nt, Artificial Sequence
  LRRK2 RNA guide
aaacgacaggcaagaauccu

SEQ ID NO: 55053 - RNA, 20 nt, Artificial Sequence
  LRRK2 RNA guide
aacgacaggcaagaauccuu

SEQ ID NO: 55054 - RNA, 20 nt, Artificial Sequence
  LRRK2 RNA guide
acaggcaagaauccuuuuuu

SEQ ID NO: 55055 - RNA, 20 nt, Artificial Sequence
  LRRK2 RNA guide
acgacaggcaagaauccuuu

SEQ ID NO: 55056 - RNA, 20 nt, Artificial Sequence
  LRRK2 RNA guide
aggcaagaauccuuuuuuaa

SEQ ID NO: 55057 - RNA, 20 nt, Artificial Sequence
  LRRK2 RNA guide
caggcaagaauccuuuuuua

SEQ ID NO: 55058 - RNA, 20 nt, Artificial Sequence
  LRRK2 RNA guide
cgacaggcaagaauccuuuu

SEQ ID NO: 55059 - RNA, 20 nt, Artificial Sequence
  LRRK2 RNA guide
gacaggcaagaauccuuuuu

SEQ ID NO: 55060 - RNA, 20 nt, Artificial Sequence
  LRRK2 RNA guide
ggcaagaauccuuuuuuaaa

SEQ ID NO: 55061 - RNA, 20 nt, Artificial Sequence
  LRRK2 RNA guide
uaaaaaaggauucuugccug

SEQ ID NO: 55062 - RNA, 20 nt, Artificial Sequence
  LRRK2 RNA guide
uuaaaaaaggauucuugccu

SEQ ID NO: 55063 - RNA, 20 nt, Artificial Sequence
  LRRK2 RNA guide
uuuaaaaaaggauucuugcc

SEQ ID NO: 55064 - RNA, 21 nt, Artificial Sequence
  LRRK2 RNA guide
aaacgacaggcaagaauccuu

SEQ ID NO: 55065 - RNA, 21 nt, Artificial Sequence
  LRRK2 RNA guide
aacgacaggcaagaauccuuu

SEQ ID NO: 55066 - RNA, 21 nt, Artificial Sequence
  LRRK2 RNA guide
acaggcaagaauccuuuuuua

SEQ ID NO: 55067 - RNA, 21 nt, Artificial Sequence
  LRRK2 RNA guide
acgacaggcaagaauccuuuu

SEQ ID NO: 55068 - RNA, 21 nt, Artificial Sequence
  LRRK2 RNA guide
caaacgacaggcaagaauccu

SEQ ID NO: 55069 - RNA, 21 nt, Artificial Sequence
  LRRK2 RNA guide
caggcaagaauccuuuuuuaa

SEQ ID NO: 55070 - RNA, 21 nt, Artificial Sequence
  LRRK2 RNA guide
cgacaggcaagaauccuuuuu

SEQ ID NO: 55071 - RNA, 21 nt, Artificial Sequence
  LRRK2 RNA guide
gacaggcaagaauccuuuuuu

SEQ ID NO: 55072 - RNA, 21 nt, Artificial Sequence
  LRRK2 RNA guide
uaaaaaaggauucuugccugu

SEQ ID NO: 55073 - RNA, 21 nt, Artificial Sequence
  LRRK2 RNA guide
uuaaaaaaggauucuugccug

SEQ ID NO: 55074 - RNA, 22 nt, Artificial Sequence
  LRRK2 RNA guide
aaacgacaggcaagaauccuuu

SEQ ID NO: 55075 - RNA, 22 nt, Artificial Sequence
  LRRK2 RNA guide
aacgacaggcaagaauccuuuu

SEQ ID NO: 55076 - RNA, 22 nt, Artificial Sequence
  LRRK2 RNA guide
acaggcaagaauccuuuuuuaa

SEQ ID NO: 55077 - RNA, 22 nt, Artificial Sequence
  LRRK2 RNA guide
acgacaggcaagaauccuuuuu

SEQ ID NO: 55078 - RNA, 22 nt, Artificial Sequence
  LRRK2 RNA guide
caaacgacaggcaagaauccuu

SEQ ID NO: 55079 - RNA, 22 nt, Artificial Sequence
  LRRK2 RNA guide
caggcaagaauccuuuuuuaaa

SEQ ID NO: 55080 - RNA, 22 nt, Artificial Sequence
  LRRK2 RNA guide
cgacaggcaagaauccuuuuuu

SEQ ID NO: 55081 - RNA, 22 nt, Artificial Sequence
  LRRK2 RNA guide
gacaggcaagaauccuuuuuua

SEQ ID NO: 55082 - RNA, 22 nt, Artificial Sequence
  LRRK2 RNA guide
uaaaaaaggauucuugccuguc

SEQ ID NO: 55083 - RNA, 22 nt, Artificial Sequence
  LRRK2 RNA guide
ucaaacgacaggcaagaauccu

SEQ ID NO: 55084 - RNA, 22 nt, Artificial Sequence
  LRRK2 RNA guide
uuaaaaaaggauucuugccugu

SEQ ID NO: 55085 - RNA, 22 nt, Artificial Sequence
  LRRK2 RNA guide
uuuaaaaaaggauucuugccug

SEQ ID NO: 55086 - RNA, 20 nt, Artificial Sequence
  LRRK2 RNA guide
acaggcaagaauccuuuuua

SEQ ID NO: 55087 - RNA, 20 nt, Artificial Sequence
  LRRK2 RNA guide
aggcaagaauccuuuuuaaa

SEQ ID NO: 55088 - RNA, 20 nt, Artificial Sequence
  LRRK2 RNA guide
caggcaagaauccuuuuuaa

SEQ ID NO: 55089 - RNA, 20 nt, Artificial Sequence
  LRRK2 RNA guide
ggcaagaauccuuuuuaaaa

SEQ ID NO: 55090 - RNA, 20 nt, Artificial Sequence
  LRRK2 RNA guide
uuaaaaaggauucuugccug

SEQ ID NO: 55091 - RNA, 20 nt, Artificial Sequence
  LRRK2 RNA guide
uuuaaaaaggauucuugccu

SEQ ID NO: 55092 - RNA, 20 nt, Artificial Sequence
  LRRK2 RNA guide
uuuuaaaaaggauucuugcc

SEQ ID NO: 55093 - RNA, 21 nt, Artificial Sequence
  LRRK2 RNA guide
acaggcaagaauccuuuuuaa

SEQ ID NO: 55094 - RNA, 21 nt, Artificial Sequence
  LRRK2 RNA guide
caggcaagaauccuuuuuaaa

SEQ ID NO: 55095 - RNA, 21 nt, Artificial Sequence
  LRRK2 RNA guide
gacaggcaagaauccuuuuua

SEQ ID NO: 55096 - RNA, 21 nt, Artificial Sequence
  LRRK2 RNA guide
uuaaaaaggauucuugccugu

SEQ ID NO: 55097 - RNA, 21 nt, Artificial Sequence
  LRRK2 RNA guide
uuuaaaaaggauucuugccug

SEQ ID NO: 55098 - RNA, 22 nt, Artificial Sequence
  LRRK2 RNA guide
acaggcaagaauccuuuuuaaa

SEQ ID NO: 55099 - RNA, 22 nt, Artificial Sequence
  LRRK2 RNA guide
caggcaagaauccuuuuuaaaa

SEQ ID NO: 55100 - RNA, 22 nt, Artificial Sequence
  LRRK2 RNA guide
cgacaggcaagaauccuuuuua

SEQ ID NO: 55101 - RNA, 22 nt, Artificial Sequence
  LRRK2 RNA guide
gacaggcaagaauccuuuuuaa

SEQ ID NO: 55102 - RNA, 22 nt, Artificial Sequence
  LRRK2 RNA guide
uuaaaaaggauucuugccuguc

SEQ ID NO: 55103 - RNA, 22 nt, Artificial Sequence
  LRRK2 RNA guide
uuuaaaaaggauucuugccugu

SEQ ID NO: 55104 - RNA, 22 nt, Artificial Sequence
  LRRK2 RNA guide
uuuuaaaaaggauucuugccug

SEQ ID NO: 55105 - RNA, 20 nt, Artificial Sequence
  LRRK2 RNA guide
aaucuuuauuuaggucguga

SEQ ID NO: 55106 - RNA, 20 nt, Artificial Sequence
  LRRK2 RNA guide
aauuccucacgaccuaaaua

SEQ ID NO: 55107 - RNA, 20 nt, Artificial Sequence
  LRRK2 RNA guide
acgaccuaaauaaagauuag

SEQ ID NO: 55108 - RNA, 20 nt, Artificial Sequence
  LRRK2 RNA guide
agaauuccucacgaccuaaa

SEQ ID NO: 55109 - RNA, 20 nt, Artificial Sequence
  LRRK2 RNA guide
aggucgugaggaauucuaua

SEQ ID NO: 55110 - RNA, 20 nt, Artificial Sequence
  LRRK2 RNA guide
auagaauuccucacgaccua

SEQ ID NO: 55111 - RNA, 20 nt, Artificial Sequence
  LRRK2 RNA guide
aucuuuauuuaggucgugag

SEQ ID NO: 55112 - RNA, 20 nt, Artificial Sequence
  LRRK2 RNA guide
auuccucacgaccuaaauaa

SEQ ID NO: 55113 - RNA, 20 nt, Artificial Sequence
  LRRK2 RNA guide
auuuaggucgugaggaauuc

SEQ ID NO: 55114 - RNA, 20 nt, Artificial Sequence
  LRRK2 RNA guide
cacgaccuaaauaaagauua

SEQ ID NO: 55115 - RNA, 20 nt, Artificial Sequence
  LRRK2 RNA guide
ccucacgaccuaaauaaaga

SEQ ID NO: 55116 - RNA, 20 nt, Artificial Sequence
  LRRK2 RNA guide
cgugaggaauucuauaguac

SEQ ID NO: 55117 - RNA, 20 nt, Artificial Sequence
  LRRK2 RNA guide
cuaaucuuuauuuaggucgu

SEQ ID NO: 55118 - RNA, 20 nt, Artificial Sequence
  LRRK2 RNA guide
cuauagaauuccucacgacc

SEQ ID NO: 55119 - RNA, 20 nt, Artificial Sequence
  LRRK2 RNA guide
cucacgaccuaaauaaagau

SEQ ID NO: 55120 - RNA, 20 nt, Artificial Sequence
  LRRK2 RNA guide
cucuaaucuuuauuuagguc

SEQ ID NO: 55121 - RNA, 20 nt, Artificial Sequence
  LRRK2 RNA guide
cuuuauuuaggucgugagga

SEQ ID NO: 55122 - RNA, 20 nt, Artificial Sequence
  LRRK2 RNA guide
gaauuccucacgaccuaaau

SEQ ID NO: 55123 - RNA, 20 nt, Artificial Sequence
  LRRK2 RNA guide
gaugaguacuauagaauucc

SEQ ID NO: 55124 - RNA, 20 nt, Artificial Sequence
  LRRK2 RNA guide
ggucgugaggaauucuauag

SEQ ID NO: 55125 - RNA, 20 nt, Artificial Sequence
  LRRK2 RNA guide
gucgugaggaauucuauagu

SEQ ID NO: 55126 - RNA, 20 nt, Artificial Sequence
  LRRK2 RNA guide
gucucuaaucuuuauuuagg

SEQ ID NO: 55127 - RNA, 20 nt, Artificial Sequence
  LRRK2 RNA guide
uaaucuuuauuuaggucgug

SEQ ID NO: 55128 - RNA, 20 nt, Artificial Sequence
  LRRK2 RNA guide
uagaauuccucacgaccuaa

SEQ ID NO: 55129 - RNA, 20 nt, Artificial Sequence
  LRRK2 RNA guide
uaggucgugaggaauucuau

SEQ ID NO: 55130 - RNA, 20 nt, Artificial Sequence
  LRRK2 RNA guide
uauuuaggucgugaggaauu

SEQ ID NO: 55131 - RNA, 20 nt, Artificial Sequence
  LRRK2 RNA guide
ucacgaccuaaauaaagauu

SEQ ID NO: 55132 - RNA, 20 nt, Artificial Sequence
  LRRK2 RNA guide
uccucacgaccuaaauaaag

SEQ ID NO: 55133 - RNA, 20 nt, Artificial Sequence
  LRRK2 RNA guide
ucgugaggaauucuauagua

SEQ ID NO: 55134 - RNA, 20 nt, Artificial Sequence
  LRRK2 RNA guide
ucuaaucuuuauuuaggucg

SEQ ID NO: 55135 - RNA, 20 nt, Artificial Sequence
  LRRK2 RNA guide
ucuuuauuuaggucgugagg

SEQ ID NO: 55136 - RNA, 20 nt, Artificial Sequence
  LRRK2 RNA guide
uuaggucgugaggaauucua

SEQ ID NO: 55137 - RNA, 20 nt, Artificial Sequence
  LRRK2 RNA guide
uuauuuaggucgugaggaau

SEQ ID NO: 55138 - RNA, 20 nt, Artificial Sequence
  LRRK2 RNA guide
uuccucacgaccuaaauaaa

SEQ ID NO: 55139 - RNA, 20 nt, Artificial Sequence
  LRRK2 RNA guide
uuuaggucgugaggaauucu

SEQ ID NO: 55140 - RNA, 20 nt, Artificial Sequence
  LRRK2 RNA guide
uuuauuuaggucgugaggaa

SEQ ID NO: 55141 - RNA, 21 nt, Artificial Sequence
  LRRK2 RNA guide
aaucuuuauuuaggucgugag

SEQ ID NO: 55142 - RNA, 21 nt, Artificial Sequence
  LRRK2 RNA guide
aauuccucacgaccuaaauaa

SEQ ID NO: 55143 - RNA, 21 nt, Artificial Sequence
  LRRK2 RNA guide
acuauagaauuccucacgacc

SEQ ID NO: 55144 - RNA, 21 nt, Artificial Sequence
  LRRK2 RNA guide
agaauuccucacgaccuaaau

SEQ ID NO: 55145 - RNA, 21 nt, Artificial Sequence
  LRRK2 RNA guide
aggucgugaggaauucuauag

SEQ ID NO: 55146 - RNA, 21 nt, Artificial Sequence
  LRRK2 RNA guide
aguacuauagaauuccucacg

SEQ ID NO: 55147 - RNA, 21 nt, Artificial Sequence
  LRRK2 RNA guide
auagaauuccucacgaccuaa

SEQ ID NO: 55148 - RNA, 21 nt, Artificial Sequence
  LRRK2 RNA guide
aucuuuauuuaggucgugagg

SEQ ID NO: 55149 - RNA, 21 nt, Artificial Sequence
  LRRK2 RNA guide
augaguacuauagaauuccuc

SEQ ID NO: 55150 - RNA, 21 nt, Artificial Sequence
  LRRK2 RNA guide
auuccucacgaccuaaauaaa

SEQ ID NO: 55151 - RNA, 21 nt, Artificial Sequence
  LRRK2 RNA guide
auuuaggucgugaggaauucu

SEQ ID NO: 55152 - RNA, 21 nt, Artificial Sequence
  LRRK2 RNA guide
cacgaccuaaauaaagauuag

SEQ ID NO: 55153 - RNA, 21 nt, Artificial Sequence
  LRRK2 RNA guide
ccucacgaccuaaauaaagau

SEQ ID NO: 55154 - RNA, 21 nt, Artificial Sequence
  LRRK2 RNA guide
cgugaggaauucuauaguacu

SEQ ID NO: 55155 - RNA, 21 nt, Artificial Sequence
  LRRK2 RNA guide
cuaaucuuuauuuaggucgug

SEQ ID NO: 55156 - RNA, 21 nt, Artificial Sequence
  LRRK2 RNA guide
cuauagaauuccucacgaccu

SEQ ID NO: 55157 - RNA, 21 nt, Artificial Sequence
  LRRK2 RNA guide
cucacgaccuaaauaaagauu

SEQ ID NO: 55158 - RNA, 21 nt, Artificial Sequence
  LRRK2 RNA guide
cucuaaucuuuauuuaggucg

SEQ ID NO: 55159 - RNA, 21 nt, Artificial Sequence
  LRRK2 RNA guide
cuuuauuuaggucgugaggaa

SEQ ID NO: 55160 - RNA, 21 nt, Artificial Sequence
  LRRK2 RNA guide
gaauuccucacgaccuaaaua

SEQ ID NO: 55161 - RNA, 21 nt, Artificial Sequence
  LRRK2 RNA guide
gaguacuauagaauuccucac

SEQ ID NO: 55162 - RNA, 21 nt, Artificial Sequence
  LRRK2 RNA guide
gaugaguacuauagaauuccu

SEQ ID NO: 55163 - RNA, 21 nt, Artificial Sequence
  LRRK2 RNA guide
ggaugaguacuauagaauucc

SEQ ID NO: 55164 - RNA, 21 nt, Artificial Sequence
  LRRK2 RNA guide
gggaugaguacuauagaauuc

SEQ ID NO: 55165 - RNA, 21 nt, Artificial Sequence
  LRRK2 RNA guide
ggucgugaggaauucuauagu

SEQ ID NO: 55166 - RNA, 21 nt, Artificial Sequence
  LRRK2 RNA guide
guacuauagaauuccucacga

SEQ ID NO: 55167 - RNA, 21 nt, Artificial Sequence
  LRRK2 RNA guide
gucgugaggaauucuauagua

SEQ ID NO: 55168 - RNA, 21 nt, Artificial Sequence
  LRRK2 RNA guide
uacuauagaauuccucacgac

SEQ ID NO: 55169 - RNA, 21 nt, Artificial Sequence
  LRRK2 RNA guide
uagaauuccucacgaccuaaa

SEQ ID NO: 55170 - RNA, 21 nt, Artificial Sequence
  LRRK2 RNA guide
uaggucgugaggaauucuaua

SEQ ID NO: 55171 - RNA, 21 nt, Artificial Sequence
  LRRK2 RNA guide
uauagaauuccucacgaccua

SEQ ID NO: 55172 - RNA, 21 nt, Artificial Sequence
  LRRK2 RNA guide
uauuuaggucgugaggaauuc

SEQ ID NO: 55173 - RNA, 21 nt, Artificial Sequence
  LRRK2 RNA guide
uccucacgaccuaaauaaaga

SEQ ID NO: 55174 - RNA, 21 nt, Artificial Sequence
  LRRK2 RNA guide
ucgugaggaauucuauaguac

SEQ ID NO: 55175 - RNA, 21 nt, Artificial Sequence
  LRRK2 RNA guide
ucuuuauuuaggucgugagga

SEQ ID NO: 55176 - RNA, 21 nt, Artificial Sequence
  LRRK2 RNA guide
ugaguacuauagaauuccuca

SEQ ID NO: 55177 - RNA, 21 nt, Artificial Sequence
  LRRK2 RNA guide
uuaggucgugaggaauucuau

SEQ ID NO: 55178 - RNA, 21 nt, Artificial Sequence
  LRRK2 RNA guide
uuauuuaggucgugaggaauu

SEQ ID NO: 55179 - RNA, 21 nt, Artificial Sequence
  LRRK2 RNA guide
uuccucacgaccuaaauaaag

SEQ ID NO: 55180 - RNA, 21 nt, Artificial Sequence
  LRRK2 RNA guide
uuuaggucgugaggaauucua

SEQ ID NO: 55181 - RNA, 21 nt, Artificial Sequence
  LRRK2 RNA guide
uuuauuuaggucgugaggaau

SEQ ID NO: 55182 - RNA, 22 nt, Artificial Sequence
  LRRK2 RNA guide
aaucuuuauuuaggucgugagg

SEQ ID NO: 55183 - RNA, 22 nt, Artificial Sequence
  LRRK2 RNA guide
aauuccucacgaccuaaauaaa

SEQ ID NO: 55184 - RNA, 22 nt, Artificial Sequence
  LRRK2 RNA guide
acgaccuaaauaaagauuagag

SEQ ID NO: 55185 - RNA, 22 nt, Artificial Sequence
  LRRK2 RNA guide
acuauagaauuccucacgaccu

SEQ ID NO: 55186 - RNA, 22 nt, Artificial Sequence
  LRRK2 RNA guide
agaauuccucacgaccuaaaua

SEQ ID NO: 55187 - RNA, 22 nt, Artificial Sequence
  LRRK2 RNA guide
aggucgugaggaauucuauagu

SEQ ID NO: 55188 - RNA, 22 nt, Artificial Sequence
  LRRK2 RNA guide
aguacuauagaauuccucacga

SEQ ID NO: 55189 - RNA, 22 nt, Artificial Sequence
  LRRK2 RNA guide
auagaauuccucacgaccuaaa

SEQ ID NO: 55190 - RNA, 22 nt, Artificial Sequence
  LRRK2 RNA guide
aucuuuauuuaggucgugagga

SEQ ID NO: 55191 - RNA, 22 nt, Artificial Sequence
  LRRK2 RNA guide
augaguacuauagaauuccuca

SEQ ID NO: 55192 - RNA, 22 nt, Artificial Sequence
  LRRK2 RNA guide
auuccucacgaccuaaauaaag

SEQ ID NO: 55193 - RNA, 22 nt, Artificial Sequence
  LRRK2 RNA guide
auuuaggucgugaggaauucua

SEQ ID NO: 55194 - RNA, 22 nt, Artificial Sequence
  LRRK2 RNA guide
cacgaccuaaauaaagauuaga

SEQ ID NO: 55195 - RNA, 22 nt, Artificial Sequence
  LRRK2 RNA guide
ccucacgaccuaaauaaagauu

SEQ ID NO: 55196 - RNA, 22 nt, Artificial Sequence
  LRRK2 RNA guide
cgugaggaauucuauaguacuc

SEQ ID NO: 55197 - RNA, 22 nt, Artificial Sequence
  LRRK2 RNA guide
cuaaucuuuauuuaggucguga

SEQ ID NO: 55198 - RNA, 22 nt, Artificial Sequence
  LRRK2 RNA guide
cuauagaauuccucacgaccua

SEQ ID NO: 55199 - RNA, 22 nt, Artificial Sequence
  LRRK2 RNA guide
cucacgaccuaaauaaagauua

SEQ ID NO: 55200 - RNA, 22 nt, Artificial Sequence
  LRRK2 RNA guide
cucuaaucuuuauuuaggucgu

SEQ ID NO: 55201 - RNA, 22 nt, Artificial Sequence
  LRRK2 RNA guide
cuuuauuuaggucgugaggaau

SEQ ID NO: 55202 - RNA, 22 nt, Artificial Sequence
  LRRK2 RNA guide
gaauuccucacgaccuaaauaa

SEQ ID NO: 55203 - RNA, 22 nt, Artificial Sequence
  LRRK2 RNA guide
gaguacuauagaauuccucacg

SEQ ID NO: 55204 - RNA, 22 nt, Artificial Sequence
  LRRK2 RNA guide
gaugaguacuauagaauuccuc

SEQ ID NO: 55205 - RNA, 22 nt, Artificial Sequence
  LRRK2 RNA guide
ggaugaguacuauagaauuccu

SEQ ID NO: 55206 - RNA, 22 nt, Artificial Sequence
  LRRK2 RNA guide
gggaugaguacuauagaauucc

SEQ ID NO: 55207 - RNA, 22 nt, Artificial Sequence
  LRRK2 RNA guide
ggggaugaguacuauagaauuc

SEQ ID NO: 55208 - RNA, 22 nt, Artificial Sequence
  LRRK2 RNA guide
ggucgugaggaauucuauagua

SEQ ID NO: 55209 - RNA, 22 nt, Artificial Sequence
  LRRK2 RNA guide
guacuauagaauuccucacgac

SEQ ID NO: 55210 - RNA, 22 nt, Artificial Sequence
  LRRK2 RNA guide
gucgugaggaauucuauaguac

SEQ ID NO: 55211 - RNA, 22 nt, Artificial Sequence
  LRRK2 RNA guide
gucucuaaucuuuauuuagguc

SEQ ID NO: 55212 - RNA, 22 nt, Artificial Sequence
  LRRK2 RNA guide
uaaucuuuauuuaggucgugag

SEQ ID NO: 55213 - RNA, 22 nt, Artificial Sequence
  LRRK2 RNA guide
uacuauagaauuccucacgacc

SEQ ID NO: 55214 - RNA, 22 nt, Artificial Sequence
  LRRK2 RNA guide
uagaauuccucacgaccuaaau

SEQ ID NO: 55215 - RNA, 22 nt, Artificial Sequence
  LRRK2 RNA guide
uaggucgugaggaauucuauag

SEQ ID NO: 55216 - RNA, 22 nt, Artificial Sequence
  LRRK2 RNA guide
uauagaauuccucacgaccuaa

SEQ ID NO: 55217 - RNA, 22 nt, Artificial Sequence
  LRRK2 RNA guide
uauuuaggucgugaggaauucu

SEQ ID NO: 55218 - RNA, 22 nt, Artificial Sequence
  LRRK2 RNA guide
ucacgaccuaaauaaagauuag

SEQ ID NO: 55219 - RNA, 22 nt, Artificial Sequence
  LRRK2 RNA guide
uccucacgaccuaaauaaagau

SEQ ID NO: 55220 - RNA, 22 nt, Artificial Sequence
  LRRK2 RNA guide
ucgugaggaauucuauaguacu

SEQ ID NO: 55221 - RNA, 22 nt, Artificial Sequence
  LRRK2 RNA guide
ucuaaucuuuauuuaggucgug

SEQ ID NO: 55222 - RNA, 22 nt, Artificial Sequence
  LRRK2 RNA guide
ucucuaaucuuuauuuaggucg

SEQ ID NO: 55223 - RNA, 22 nt, Artificial Sequence
  LRRK2 RNA guide
ucuuuauuuaggucgugaggaa

SEQ ID NO: 55224 - RNA, 22 nt, Artificial Sequence
  LRRK2 RNA guide
ugaguacuauagaauuccucac

SEQ ID NO: 55225 - RNA, 22 nt, Artificial Sequence
  LRRK2 RNA guide
uuaggucgugaggaauucuaua

SEQ ID NO: 55226 - RNA, 22 nt, Artificial Sequence
  LRRK2 RNA guide
uuauuuaggucgugaggaauuc

SEQ ID NO: 55227 - RNA, 22 nt, Artificial Sequence
  LRRK2 RNA guide
uuccucacgaccuaaauaaaga

SEQ ID NO: 55228 - RNA, 22 nt, Artificial Sequence
  LRRK2 RNA guide
uuuaggucgugaggaauucuau

SEQ ID NO: 55229 - RNA, 22 nt, Artificial Sequence
  LRRK2 RNA guide
uuuauuuaggucgugaggaauu

SEQ ID NO: 55230 - RNA, 20 nt, Artificial Sequence
  LRRK2 RNA guide
aauuccucaugaccuaaaua

SEQ ID NO: 55231 - RNA, 20 nt, Artificial Sequence
  LRRK2 RNA guide
acuauagaauuccucaugac

SEQ ID NO: 55232 - RNA, 20 nt, Artificial Sequence
  LRRK2 RNA guide
agaauuccucaugaccuaaa

SEQ ID NO: 55233 - RNA, 20 nt, Artificial Sequence
  LRRK2 RNA guide
aggucaugaggaauucuaua

SEQ ID NO: 55234 - RNA, 20 nt, Artificial Sequence
  LRRK2 RNA guide
aguacuauagaauuccucau

SEQ ID NO: 55235 - RNA, 20 nt, Artificial Sequence
  LRRK2 RNA guide
auagaauuccucaugaccua

SEQ ID NO: 55236 - RNA, 20 nt, Artificial Sequence
  LRRK2 RNA guide
aucuuuauuuaggucaugag

SEQ ID NO: 55237 - RNA, 20 nt, Artificial Sequence
  LRRK2 RNA guide
auuccucaugaccuaaauaa

SEQ ID NO: 55238 - RNA, 20 nt, Artificial Sequence
  LRRK2 RNA guide
auuuaggucaugaggaauuc

SEQ ID NO: 55239 - RNA, 20 nt, Artificial Sequence
  LRRK2 RNA guide
caugaggaauucuauaguac

SEQ ID NO: 55240 - RNA, 20 nt, Artificial Sequence
  LRRK2 RNA guide
ccucaugaccuaaauaaaga

SEQ ID NO: 55241 - RNA, 20 nt, Artificial Sequence
  LRRK2 RNA guide
cuauagaauuccucaugacc

SEQ ID NO: 55242 - RNA, 20 nt, Artificial Sequence
  LRRK2 RNA guide
cucaugaccuaaauaaagau

SEQ ID NO: 55243 - RNA, 20 nt, Artificial Sequence
  LRRK2 RNA guide
cuuuauuuaggucaugagga

SEQ ID NO: 55244 - RNA, 20 nt, Artificial Sequence
  LRRK2 RNA guide
gaauuccucaugaccuaaau

SEQ ID NO: 55245 - RNA, 20 nt, Artificial Sequence
  LRRK2 RNA guide
ggucaugaggaauucuauag

SEQ ID NO: 55246 - RNA, 20 nt, Artificial Sequence
  LRRK2 RNA guide
guacuauagaauuccucaug

SEQ ID NO: 55247 - RNA, 20 nt, Artificial Sequence
  LRRK2 RNA guide
gucaugaggaauucuauagu

SEQ ID NO: 55248 - RNA, 20 nt, Artificial Sequence
  LRRK2 RNA guide
uacuauagaauuccucauga

SEQ ID NO: 55249 - RNA, 20 nt, Artificial Sequence
  LRRK2 RNA guide
uagaauuccucaugaccuaa

SEQ ID NO: 55250 - RNA, 20 nt, Artificial Sequence
  LRRK2 RNA guide
uaggucaugaggaauucuau

SEQ ID NO: 55251 - RNA, 20 nt, Artificial Sequence
  LRRK2 RNA guide
uauagaauuccucaugaccu

SEQ ID NO: 55252 - RNA, 20 nt, Artificial Sequence
  LRRK2 RNA guide
uauuuaggucaugaggaauu

SEQ ID NO: 55253 - RNA, 20 nt, Artificial Sequence
  LRRK2 RNA guide
ucaugaggaauucuauagua

SEQ ID NO: 55254 - RNA, 20 nt, Artificial Sequence
  LRRK2 RNA guide
uccucaugaccuaaauaaag

SEQ ID NO: 55255 - RNA, 20 nt, Artificial Sequence
  LRRK2 RNA guide
ucuuuauuuaggucaugagg

SEQ ID NO: 55256 - RNA, 20 nt, Artificial Sequence
  LRRK2 RNA guide
uuaggucaugaggaauucua

SEQ ID NO: 55257 - RNA, 20 nt, Artificial Sequence
  LRRK2 RNA guide
uuauuuaggucaugaggaau

SEQ ID NO: 55258 - RNA, 20 nt, Artificial Sequence
  LRRK2 RNA guide
uuccucaugaccuaaauaaa

SEQ ID NO: 55259 - RNA, 20 nt, Artificial Sequence
  LRRK2 RNA guide
uuuaggucaugaggaauucu

SEQ ID NO: 55260 - RNA, 20 nt, Artificial Sequence
  LRRK2 RNA guide
uuuauuuaggucaugaggaa

SEQ ID NO: 55261 - RNA, 21 nt, Artificial Sequence
  LRRK2 RNA guide
acuauagaauuccucaugacc

SEQ ID NO: 55262 - RNA, 21 nt, Artificial Sequence
  LRRK2 RNA guide
agaauuccucaugaccuaaau

SEQ ID NO: 55263 - RNA, 21 nt, Artificial Sequence
  LRRK2 RNA guide
aggucaugaggaauucuauag

SEQ ID NO: 55264 - RNA, 21 nt, Artificial Sequence
  LRRK2 RNA guide
aguacuauagaauuccucaug

SEQ ID NO: 55265 - RNA, 21 nt, Artificial Sequence
  LRRK2 RNA guide
auagaauuccucaugaccuaa

SEQ ID NO: 55266 - RNA, 21 nt, Artificial Sequence
  LRRK2 RNA guide
aucuuuauuuaggucaugagg

SEQ ID NO: 55267 - RNA, 21 nt, Artificial Sequence
  LRRK2 RNA guide
auuuaggucaugaggaauucu

SEQ ID NO: 55268 - RNA, 21 nt, Artificial Sequence
  LRRK2 RNA guide
caugaggaauucuauaguacu

SEQ ID NO: 55269 - RNA, 21 nt, Artificial Sequence
  LRRK2 RNA guide
ccucaugaccuaaauaaagau

SEQ ID NO: 55270 - RNA, 21 nt, Artificial Sequence
  LRRK2 RNA guide
cuauagaauuccucaugaccu

SEQ ID NO: 55271 - RNA, 21 nt, Artificial Sequence
  LRRK2 RNA guide
cuuuauuuaggucaugaggaa

SEQ ID NO: 55272 - RNA, 21 nt, Artificial Sequence
  LRRK2 RNA guide
gaauuccucaugaccuaaaua

SEQ ID NO: 55273 - RNA, 21 nt, Artificial Sequence
  LRRK2 RNA guide
gaguacuauagaauuccucau

SEQ ID NO: 55274 - RNA, 21 nt, Artificial Sequence
  LRRK2 RNA guide
ggucaugaggaauucuauagu

SEQ ID NO: 55275 - RNA, 21 nt, Artificial Sequence
  LRRK2 RNA guide
guacuauagaauuccucauga

SEQ ID NO: 55276 - RNA, 21 nt, Artificial Sequence
  LRRK2 RNA guide
gucaugaggaauucuauagua

SEQ ID NO: 55277 - RNA, 21 nt, Artificial Sequence
  LRRK2 RNA guide
uacuauagaauuccucaugac

SEQ ID NO: 55278 - RNA, 21 nt, Artificial Sequence
  LRRK2 RNA guide
uagaauuccucaugaccuaaa

SEQ ID NO: 55279 - RNA, 21 nt, Artificial Sequence
  LRRK2 RNA guide
uaggucaugaggaauucuaua

SEQ ID NO: 55280 - RNA, 21 nt, Artificial Sequence
  LRRK2 RNA guide
uauagaauuccucaugaccua

SEQ ID NO: 55281 - RNA, 21 nt, Artificial Sequence
  LRRK2 RNA guide
uauuuaggucaugaggaauuc

SEQ ID NO: 55282 - RNA, 21 nt, Artificial Sequence
  LRRK2 RNA guide
ucaugaggaauucuauaguac

SEQ ID NO: 55283 - RNA, 21 nt, Artificial Sequence
  LRRK2 RNA guide
uccucaugaccuaaauaaaga

SEQ ID NO: 55284 - RNA, 21 nt, Artificial Sequence
  LRRK2 RNA guide
ucuuuauuuaggucaugagga

SEQ ID NO: 55285 - RNA, 21 nt, Artificial Sequence
  LRRK2 RNA guide
uuaggucaugaggaauucuau

SEQ ID NO: 55286 - RNA, 21 nt, Artificial Sequence
  LRRK2 RNA guide
uuccucaugaccuaaauaaag

SEQ ID NO: 55287 - RNA, 21 nt, Artificial Sequence
  LRRK2 RNA guide
uuuaggucaugaggaauucua

SEQ ID NO: 55288 - RNA, 22 nt, Artificial Sequence
  LRRK2 RNA guide
aaucuuuauuuaggucaugagg

SEQ ID NO: 55289 - RNA, 22 nt, Artificial Sequence
  LRRK2 RNA guide
acuauagaauuccucaugaccu

SEQ ID NO: 55290 - RNA, 22 nt, Artificial Sequence
  LRRK2 RNA guide
agaauuccucaugaccuaaaua

SEQ ID NO: 55291 - RNA, 22 nt, Artificial Sequence
  LRRK2 RNA guide
aggucaugaggaauucuauagu

SEQ ID NO: 55292 - RNA, 22 nt, Artificial Sequence
  LRRK2 RNA guide
aguacuauagaauuccucauga

SEQ ID NO: 55293 - RNA, 22 nt, Artificial Sequence
  LRRK2 RNA guide
auagaauuccucaugaccuaaa

SEQ ID NO: 55294 - RNA, 22 nt, Artificial Sequence
  LRRK2 RNA guide
aucuuuauuuaggucaugagga

SEQ ID NO: 55295 - RNA, 22 nt, Artificial Sequence
  LRRK2 RNA guide
auuccucaugaccuaaauaaag

SEQ ID NO: 55296 - RNA, 22 nt, Artificial Sequence
  LRRK2 RNA guide
auuuaggucaugaggaauucua

SEQ ID NO: 55297 - RNA, 22 nt, Artificial Sequence
  LRRK2 RNA guide
caugaggaauucuauaguacuc

SEQ ID NO: 55298 - RNA, 22 nt, Artificial Sequence
  LRRK2 RNA guide
ccucaugaccuaaauaaagauu

SEQ ID NO: 55299 - RNA, 22 nt, Artificial Sequence
  LRRK2 RNA guide
cuauagaauuccucaugaccua

SEQ ID NO: 55300 - RNA, 22 nt, Artificial Sequence
  LRRK2 RNA guide
cuuuauuuaggucaugaggaau

SEQ ID NO: 55301 - RNA, 22 nt, Artificial Sequence
  LRRK2 RNA guide
gaauuccucaugaccuaaauaa

SEQ ID NO: 55302 - RNA, 22 nt, Artificial Sequence
  LRRK2 RNA guide
gaguacuauagaauuccucaug

SEQ ID NO: 55303 - RNA, 22 nt, Artificial Sequence
  LRRK2 RNA guide
ggucaugaggaauucuauagua

SEQ ID NO: 55304 - RNA, 22 nt, Artificial Sequence
  LRRK2 RNA guide
guacuauagaauuccucaugac

SEQ ID NO: 55305 - RNA, 22 nt, Artificial Sequence
  LRRK2 RNA guide
gucaugaggaauucuauaguac

SEQ ID NO: 55306 - RNA, 22 nt, Artificial Sequence
  LRRK2 RNA guide
uacuauagaauuccucaugacc

SEQ ID NO: 55307 - RNA, 22 nt, Artificial Sequence
  LRRK2 RNA guide
uagaauuccucaugaccuaaau

SEQ ID NO: 55308 - RNA, 22 nt, Artificial Sequence
  LRRK2 RNA guide
uaggucaugaggaauucuauag

SEQ ID NO: 55309 - RNA, 22 nt, Artificial Sequence
  LRRK2 RNA guide
uauagaauuccucaugaccuaa

SEQ ID NO: 55310 - RNA, 22 nt, Artificial Sequence
  LRRK2 RNA guide
uauuuaggucaugaggaauucu

SEQ ID NO: 55311 - RNA, 22 nt, Artificial Sequence
  LRRK2 RNA guide
ucaugaggaauucuauaguacu

SEQ ID NO: 55312 - RNA, 22 nt, Artificial Sequence
  LRRK2 RNA guide
uccucaugaccuaaauaaagau

SEQ ID NO: 55313 - RNA, 22 nt, Artificial Sequence
  LRRK2 RNA guide
ucuuuauuuaggucaugaggaa

SEQ ID NO: 55314 - RNA, 22 nt, Artificial Sequence
  LRRK2 RNA guide
ugaguacuauagaauuccucau

SEQ ID NO: 55315 - RNA, 22 nt, Artificial Sequence
  LRRK2 RNA guide
uuaggucaugaggaauucuaua

SEQ ID NO: 55316 - RNA, 22 nt, Artificial Sequence
  LRRK2 RNA guide
uuauuuaggucaugaggaauuc

SEQ ID NO: 55317 - RNA, 22 nt, Artificial Sequence
  LRRK2 RNA guide
uuccucaugaccuaaauaaaga

SEQ ID NO: 55318 - RNA, 22 nt, Artificial Sequence
  LRRK2 RNA guide
uuuaggucaugaggaauucuau

SEQ ID NO: 55319 - RNA, 20 nt, Artificial Sequence
  LRRK2 RNA guide
aacuucagccugucccuugc

SEQ ID NO: 55320 - RNA, 20 nt, Artificial Sequence
  LRRK2 RNA guide
accucagcaagggacaggcu

SEQ ID NO: 55321 - RNA, 20 nt, Artificial Sequence
  LRRK2 RNA guide
acuucagccugucccuugcu

SEQ ID NO: 55322 - RNA, 20 nt, Artificial Sequence
  LRRK2 RNA guide
agcaagggacaggcugaagu

SEQ ID NO: 55323 - RNA, 20 nt, Artificial Sequence
  LRRK2 RNA guide
aucaacuucagccugucccu

SEQ ID NO: 55324 - RNA, 20 nt, Artificial Sequence
  LRRK2 RNA guide
augaccucagcaagggacag

SEQ ID NO: 55325 - RNA, 20 nt, Artificial Sequence
  LRRK2 RNA guide
caacuucagccugucccuug

SEQ ID NO: 55326 - RNA, 20 nt, Artificial Sequence
  LRRK2 RNA guide
cagcaagggacaggcugaag

SEQ ID NO: 55327 - RNA, 20 nt, Artificial Sequence
  LRRK2 RNA guide
caucaacuucagccuguccc

SEQ ID NO: 55328 - RNA, 20 nt, Artificial Sequence
  LRRK2 RNA guide
cccuugcugaggucauagac

SEQ ID NO: 55329 - RNA, 20 nt, Artificial Sequence
  LRRK2 RNA guide
ccucagcaagggacaggcug

SEQ ID NO: 55330 - RNA, 20 nt, Artificial Sequence
  LRRK2 RNA guide
ccugucccuugcugagguca

SEQ ID NO: 55331 - RNA, 20 nt, Artificial Sequence
  LRRK2 RNA guide
ccuugcugaggucauagaca

SEQ ID NO: 55332 - RNA, 20 nt, Artificial Sequence
  LRRK2 RNA guide
ccuugcugucuaugaccuca

SEQ ID NO: 55333 - RNA, 20 nt, Artificial Sequence
  LRRK2 RNA guide
cuaugaccucagcaagggac

SEQ ID NO: 55334 - RNA, 20 nt, Artificial Sequence
  LRRK2 RNA guide
cucagcaagggacaggcuga

SEQ ID NO: 55335 - RNA, 20 nt, Artificial Sequence
  LRRK2 RNA guide
cugucuaugaccucagcaag

SEQ ID NO: 55336 - RNA, 20 nt, Artificial Sequence
  LRRK2 RNA guide
cuugcugucuaugaccucag

SEQ ID NO: 55337 - RNA, 20 nt, Artificial Sequence
  LRRK2 RNA guide
gaccucagcaagggacaggc

SEQ ID NO: 55338 - RNA, 20 nt, Artificial Sequence
  LRRK2 RNA guide
gcaagggacaggcugaaguu

SEQ ID NO: 55339 - RNA, 20 nt, Artificial Sequence
  LRRK2 RNA guide
gcaucaacuucagccugucc

SEQ ID NO: 55340 - RNA, 20 nt, Artificial Sequence
  LRRK2 RNA guide
gccugucccuugcugagguc

SEQ ID NO: 55341 - RNA, 20 nt, Artificial Sequence
  LRRK2 RNA guide
gcugucuaugaccucagcaa

SEQ ID NO: 55342 - RNA, 20 nt, Artificial Sequence
  LRRK2 RNA guide
ggcaucaacuucagccuguc

SEQ ID NO: 55343 - RNA, 20 nt, Artificial Sequence
  LRRK2 RNA guide
gucccuugcugaggucauag

SEQ ID NO: 55344 - RNA, 20 nt, Artificial Sequence
  LRRK2 RNA guide
gucuaugaccucagcaaggg

SEQ ID NO: 55345 - RNA, 20 nt, Artificial Sequence
  LRRK2 RNA guide
uaugaccucagcaagggaca

SEQ ID NO: 55346 - RNA, 20 nt, Artificial Sequence
  LRRK2 RNA guide
ucagcaagggacaggcugaa

SEQ ID NO: 55347 - RNA, 20 nt, Artificial Sequence
  LRRK2 RNA guide
ucccuugcugaggucauaga

SEQ ID NO: 55348 - RNA, 20 nt, Artificial Sequence
  LRRK2 RNA guide
ucuaugaccucagcaaggga

SEQ ID NO: 55349 - RNA, 20 nt, Artificial Sequence
  LRRK2 RNA guide
ugaccucagcaagggacagg

SEQ ID NO: 55350 - RNA, 20 nt, Artificial Sequence
  LRRK2 RNA guide
ugcugucuaugaccucagca

SEQ ID NO: 55351 - RNA, 20 nt, Artificial Sequence
  LRRK2 RNA guide
uggcaucaacuucagccugu

SEQ ID NO: 55352 - RNA, 20 nt, Artificial Sequence
  LRRK2 RNA guide
ugucccuugcugaggucaua

SEQ ID NO: 55353 - RNA, 20 nt, Artificial Sequence
  LRRK2 RNA guide
ugucuaugaccucagcaagg

SEQ ID NO: 55354 - RNA, 20 nt, Artificial Sequence
  LRRK2 RNA guide
uugcugucuaugaccucagc

SEQ ID NO: 55355 - RNA, 21 nt, Artificial Sequence
  LRRK2 RNA guide
aacuucagccugucccuugcu

SEQ ID NO: 55356 - RNA, 21 nt, Artificial Sequence
  LRRK2 RNA guide
accucagcaagggacaggcug

SEQ ID NO: 55357 - RNA, 21 nt, Artificial Sequence
  LRRK2 RNA guide
accuugcugucuaugaccuca

SEQ ID NO: 55358 - RNA, 21 nt, Artificial Sequence
  LRRK2 RNA guide
agcaagggacaggcugaaguu

SEQ ID NO: 55359 - RNA, 21 nt, Artificial Sequence
  LRRK2 RNA guide
agccugucccuugcugagguc

SEQ ID NO: 55360 - RNA, 21 nt, Artificial Sequence
  LRRK2 RNA guide
aucaacuucagccugucccuu

SEQ ID NO: 55361 - RNA, 21 nt, Artificial Sequence
  LRRK2 RNA guide
augaccucagcaagggacagg

SEQ ID NO: 55362 - RNA, 21 nt, Artificial Sequence
  LRRK2 RNA guide
auggcaucaacuucagccugu

SEQ ID NO: 55363 - RNA, 21 nt, Artificial Sequence
  LRRK2 RNA guide
caacuucagccugucccuugc

SEQ ID NO: 55364 - RNA, 21 nt, Artificial Sequence
  LRRK2 RNA guide
cagcaagggacaggcugaagu

SEQ ID NO: 55365 - RNA, 21 nt, Artificial Sequence
  LRRK2 RNA guide
caucaacuucagccugucccu

SEQ ID NO: 55366 - RNA, 21 nt, Artificial Sequence
  LRRK2 RNA guide
cauggcaucaacuucagccug

SEQ ID NO: 55367 - RNA, 21 nt, Artificial Sequence
  LRRK2 RNA guide
cccuugcugaggucauagaca

SEQ ID NO: 55368 - RNA, 21 nt, Artificial Sequence
  LRRK2 RNA guide
ccucagcaagggacaggcuga

SEQ ID NO: 55369 - RNA, 21 nt, Artificial Sequence
  LRRK2 RNA guide
ccugucccuugcugaggucau

SEQ ID NO: 55370 - RNA, 21 nt, Artificial Sequence
  LRRK2 RNA guide
ccuugcugaggucauagacag

SEQ ID NO: 55371 - RNA, 21 nt, Artificial Sequence
  LRRK2 RNA guide
ccuugcugucuaugaccucag

SEQ ID NO: 55372 - RNA, 21 nt, Artificial Sequence
  LRRK2 RNA guide
cuaugaccucagcaagggaca

SEQ ID NO: 55373 - RNA, 21 nt, Artificial Sequence
  LRRK2 RNA guide
cucagcaagggacaggcugaa

SEQ ID NO: 55374 - RNA, 21 nt, Artificial Sequence
  LRRK2 RNA guide
cugucccuugcugaggucaua

SEQ ID NO: 55375 - RNA, 21 nt, Artificial Sequence
  LRRK2 RNA guide
cugucuaugaccucagcaagg

SEQ ID NO: 55376 - RNA, 21 nt, Artificial Sequence
  LRRK2 RNA guide
cuugcugucuaugaccucagc

SEQ ID NO: 55377 - RNA, 21 nt, Artificial Sequence
  LRRK2 RNA guide
gaccucagcaagggacaggcu

SEQ ID NO: 55378 - RNA, 21 nt, Artificial Sequence
  LRRK2 RNA guide
gcaucaacuucagccuguccc

SEQ ID NO: 55379 - RNA, 21 nt, Artificial Sequence
  LRRK2 RNA guide
gccugucccuugcugagguca

SEQ ID NO: 55380 - RNA, 21 nt, Artificial Sequence
  LRRK2 RNA guide
gcugucuaugaccucagcaag

SEQ ID NO: 55381 - RNA, 21 nt, Artificial Sequence
  LRRK2 RNA guide
ggcaucaacuucagccugucc

SEQ ID NO: 55382 - RNA, 21 nt, Artificial Sequence
  LRRK2 RNA guide
gucccuugcugaggucauaga

SEQ ID NO: 55383 - RNA, 21 nt, Artificial Sequence
  LRRK2 RNA guide
gucuaugaccucagcaaggga

SEQ ID NO: 55384 - RNA, 21 nt, Artificial Sequence
  LRRK2 RNA guide
uaugaccucagcaagggacag

SEQ ID NO: 55385 - RNA, 21 nt, Artificial Sequence
  LRRK2 RNA guide
ucaacuucagccugucccuug

SEQ ID NO: 55386 - RNA, 21 nt, Artificial Sequence
  LRRK2 RNA guide
ucagcaagggacaggcugaag

SEQ ID NO: 55387 - RNA, 21 nt, Artificial Sequence
  LRRK2 RNA guide
ucauggcaucaacuucagccu

SEQ ID NO: 55388 - RNA, 21 nt, Artificial Sequence
  LRRK2 RNA guide
ucccuugcugaggucauagac

SEQ ID NO: 55389 - RNA, 21 nt, Artificial Sequence
  LRRK2 RNA guide
ucuaugaccucagcaagggac

SEQ ID NO: 55390 - RNA, 21 nt, Artificial Sequence
  LRRK2 RNA guide
ugaccucagcaagggacaggc

SEQ ID NO: 55391 - RNA, 21 nt, Artificial Sequence
  LRRK2 RNA guide
ugcugucuaugaccucagcaa

SEQ ID NO: 55392 - RNA, 21 nt, Artificial Sequence
  LRRK2 RNA guide
uggcaucaacuucagccuguc

SEQ ID NO: 55393 - RNA, 21 nt, Artificial Sequence
  LRRK2 RNA guide
ugucccuugcugaggucauag

SEQ ID NO: 55394 - RNA, 21 nt, Artificial Sequence
  LRRK2 RNA guide
ugucuaugaccucagcaaggg

SEQ ID NO: 55395 - RNA, 21 nt, Artificial Sequence
  LRRK2 RNA guide
uugcugucuaugaccucagca

SEQ ID NO: 55396 - RNA, 22 nt, Artificial Sequence
  LRRK2 RNA guide
accucagcaagggacaggcuga

SEQ ID NO: 55397 - RNA, 22 nt, Artificial Sequence
  LRRK2 RNA guide
accuugcugucuaugaccucag

SEQ ID NO: 55398 - RNA, 22 nt, Artificial Sequence
  LRRK2 RNA guide
agccugucccuugcugagguca

SEQ ID NO: 55399 - RNA, 22 nt, Artificial Sequence
  LRRK2 RNA guide
aucaacuucagccugucccuug

SEQ ID NO: 55400 - RNA, 22 nt, Artificial Sequence
  LRRK2 RNA guide
augaccucagcaagggacaggc

SEQ ID NO: 55401 - RNA, 22 nt, Artificial Sequence
  LRRK2 RNA guide
auggcaucaacuucagccuguc

SEQ ID NO: 55402 - RNA, 22 nt, Artificial Sequence
  LRRK2 RNA guide
caacuucagccugucccuugcu

SEQ ID NO: 55403 - RNA, 22 nt, Artificial Sequence
  LRRK2 RNA guide
cagcaagggacaggcugaaguu

SEQ ID NO: 55404 - RNA, 22 nt, Artificial Sequence
  LRRK2 RNA guide
cagccugucccuugcugagguc

SEQ ID NO: 55405 - RNA, 22 nt, Artificial Sequence
  LRRK2 RNA guide
caucaacuucagccugucccuu

SEQ ID NO: 55406 - RNA, 22 nt, Artificial Sequence
  LRRK2 RNA guide
cauggcaucaacuucagccugu

SEQ ID NO: 55407 - RNA, 22 nt, Artificial Sequence
  LRRK2 RNA guide
cccuugcugaggucauagacag

SEQ ID NO: 55408 - RNA, 22 nt, Artificial Sequence
  LRRK2 RNA guide
ccucagcaagggacaggcugaa

SEQ ID NO: 55409 - RNA, 22 nt, Artificial Sequence
  LRRK2 RNA guide
ccugucccuugcugaggucaua

SEQ ID NO: 55410 - RNA, 22 nt, Artificial Sequence
  LRRK2 RNA guide
ccuugcugaggucauagacagc

SEQ ID NO: 55411 - RNA, 22 nt, Artificial Sequence
  LRRK2 RNA guide
ccuugcugucuaugaccucagc

SEQ ID NO: 55412 - RNA, 22 nt, Artificial Sequence
  LRRK2 RNA guide
cuaugaccucagcaagggacag

SEQ ID NO: 55413 - RNA, 22 nt, Artificial Sequence
  LRRK2 RNA guide
cucagcaagggacaggcugaag

SEQ ID NO: 55414 - RNA, 22 nt, Artificial Sequence
  LRRK2 RNA guide
cugucccuugcugaggucauag

SEQ ID NO: 55415 - RNA, 22 nt, Artificial Sequence
  LRRK2 RNA guide
cugucuaugaccucagcaaggg

SEQ ID NO: 55416 - RNA, 22 nt, Artificial Sequence
  LRRK2 RNA guide
cuugcugucuaugaccucagca

SEQ ID NO: 55417 - RNA, 22 nt, Artificial Sequence
  LRRK2 RNA guide
gaccucagcaagggacaggcug

SEQ ID NO: 55418 - RNA, 22 nt, Artificial Sequence
  LRRK2 RNA guide
gcaucaacuucagccugucccu

SEQ ID NO: 55419 - RNA, 22 nt, Artificial Sequence
  LRRK2 RNA guide
gccugucccuugcugaggucau

SEQ ID NO: 55420 - RNA, 22 nt, Artificial Sequence
  LRRK2 RNA guide
gcugucuaugaccucagcaagg

SEQ ID NO: 55421 - RNA, 22 nt, Artificial Sequence
  LRRK2 RNA guide
ggcaucaacuucagccuguccc

SEQ ID NO: 55422 - RNA, 22 nt, Artificial Sequence
  LRRK2 RNA guide
gucccuugcugaggucauagac

SEQ ID NO: 55423 - RNA, 22 nt, Artificial Sequence
  LRRK2 RNA guide
gucuaugaccucagcaagggac

SEQ ID NO: 55424 - RNA, 22 nt, Artificial Sequence
  LRRK2 RNA guide
uaccuugcugucuaugaccuca

SEQ ID NO: 55425 - RNA, 22 nt, Artificial Sequence
  LRRK2 RNA guide
uaugaccucagcaagggacagg

SEQ ID NO: 55426 - RNA, 22 nt, Artificial Sequence
  LRRK2 RNA guide
ucaacuucagccugucccuugc

SEQ ID NO: 55427 - RNA, 22 nt, Artificial Sequence
  LRRK2 RNA guide
ucagcaagggacaggcugaagu

SEQ ID NO: 55428 - RNA, 22 nt, Artificial Sequence
  LRRK2 RNA guide
ucauggcaucaacuucagccug

SEQ ID NO: 55429 - RNA, 22 nt, Artificial Sequence
  LRRK2 RNA guide
ucccuugcugaggucauagaca

SEQ ID NO: 55430 - RNA, 22 nt, Artificial Sequence
  LRRK2 RNA guide
ucuaugaccucagcaagggaca

SEQ ID NO: 55431 - RNA, 22 nt, Artificial Sequence
  LRRK2 RNA guide
ugaccucagcaagggacaggcu

SEQ ID NO: 55432 - RNA, 22 nt, Artificial Sequence
  LRRK2 RNA guide
ugcugucuaugaccucagcaag

SEQ ID NO: 55433 - RNA, 22 nt, Artificial Sequence
  LRRK2 RNA guide
uggcaucaacuucagccugucc

SEQ ID NO: 55434 - RNA, 22 nt, Artificial Sequence
  LRRK2 RNA guide
ugucccuugcugaggucauaga

SEQ ID NO: 55435 - RNA, 22 nt, Artificial Sequence
  LRRK2 RNA guide
ugucuaugaccucagcaaggga

SEQ ID NO: 55436 - RNA, 22 nt, Artificial Sequence
  LRRK2 RNA guide
uucauggcaucaacuucagccu

SEQ ID NO: 55437 - RNA, 22 nt, Artificial Sequence
  LRRK2 RNA guide
uugcugucuaugaccucagcaa

SEQ ID NO: 55438 - RNA, 20 nt, Artificial Sequence
  LRRK2 RNA guide
aaaggacaggcugaaguuga

SEQ ID NO: 55439 - RNA, 20 nt, Artificial Sequence
  LRRK2 RNA guide
aacuucagccuguccuuugc

SEQ ID NO: 55440 - RNA, 20 nt, Artificial Sequence
  LRRK2 RNA guide
aaggacaggcugaaguugau

SEQ ID NO: 55441 - RNA, 20 nt, Artificial Sequence
  LRRK2 RNA guide
accucagcaaaggacaggcu

SEQ ID NO: 55442 - RNA, 20 nt, Artificial Sequence
  LRRK2 RNA guide
acuucagccuguccuuugcu

SEQ ID NO: 55443 - RNA, 20 nt, Artificial Sequence
  LRRK2 RNA guide
agcaaaggacaggcugaagu

SEQ ID NO: 55444 - RNA, 20 nt, Artificial Sequence
  LRRK2 RNA guide
agccuguccuuugcugaggu

SEQ ID NO: 55445 - RNA, 20 nt, Artificial Sequence
  LRRK2 RNA guide
aucaacuucagccuguccuu

SEQ ID NO: 55446 - RNA, 20 nt, Artificial Sequence
  LRRK2 RNA guide
augaccucagcaaaggacag

SEQ ID NO: 55447 - RNA, 20 nt, Artificial Sequence
  LRRK2 RNA guide
caaaggacaggcugaaguug

SEQ ID NO: 55448 - RNA, 20 nt, Artificial Sequence
  LRRK2 RNA guide
caacuucagccuguccuuug

SEQ ID NO: 55449 - RNA, 20 nt, Artificial Sequence
  LRRK2 RNA guide
cagcaaaggacaggcugaag

SEQ ID NO: 55450 - RNA, 20 nt, Artificial Sequence
  LRRK2 RNA guide
cagccuguccuuugcugagg

SEQ ID NO: 55451 - RNA, 20 nt, Artificial Sequence
  LRRK2 RNA guide
caucaacuucagccuguccu

SEQ ID NO: 55452 - RNA, 20 nt, Artificial Sequence
  LRRK2 RNA guide
ccucagcaaaggacaggcug

SEQ ID NO: 55453 - RNA, 20 nt, Artificial Sequence
  LRRK2 RNA guide
ccuguccuuugcugagguca

SEQ ID NO: 55454 - RNA, 20 nt, Artificial Sequence
  LRRK2 RNA guide
ccuuugcugaggucauagac

SEQ ID NO: 55455 - RNA, 20 nt, Artificial Sequence
  LRRK2 RNA guide
cuaugaccucagcaaaggac

SEQ ID NO: 55456 - RNA, 20 nt, Artificial Sequence
  LRRK2 RNA guide
cucagcaaaggacaggcuga

SEQ ID NO: 55457 - RNA, 20 nt, Artificial Sequence
  LRRK2 RNA guide
cuguccuuugcugaggucau

SEQ ID NO: 55458 - RNA, 20 nt, Artificial Sequence
  LRRK2 RNA guide
cugucuaugaccucagcaaa

SEQ ID NO: 55459 - RNA, 20 nt, Artificial Sequence
  LRRK2 RNA guide
cuucagccuguccuuugcug

SEQ ID NO: 55460 - RNA, 20 nt, Artificial Sequence
  LRRK2 RNA guide
cuuugcugaggucauagaca

SEQ ID NO: 55461 - RNA, 20 nt, Artificial Sequence
  LRRK2 RNA guide
gaccucagcaaaggacaggc

SEQ ID NO: 55462 - RNA, 20 nt, Artificial Sequence
  LRRK2 RNA guide
gcaaaggacaggcugaaguu

SEQ ID NO: 55463 - RNA, 20 nt, Artificial Sequence
  LRRK2 RNA guide
gccuguccuuugcugagguc

SEQ ID NO: 55464 - RNA, 20 nt, Artificial Sequence
  LRRK2 RNA guide
guccuuugcugaggucauag

SEQ ID NO: 55465 - RNA, 20 nt, Artificial Sequence
  LRRK2 RNA guide
gucuaugaccucagcaaagg

SEQ ID NO: 55466 - RNA, 20 nt, Artificial Sequence
  LRRK2 RNA guide
uaugaccucagcaaaggaca

SEQ ID NO: 55467 - RNA, 20 nt, Artificial Sequence
  LRRK2 RNA guide
ucaacuucagccuguccuuu

SEQ ID NO: 55468 - RNA, 20 nt, Artificial Sequence
  LRRK2 RNA guide
ucagcaaaggacaggcugaa

SEQ ID NO: 55469 - RNA, 20 nt, Artificial Sequence
  LRRK2 RNA guide
ucagccuguccuuugcugag

SEQ ID NO: 55470 - RNA, 20 nt, Artificial Sequence
  LRRK2 RNA guide
uccuuugcugaggucauaga

SEQ ID NO: 55471 - RNA, 20 nt, Artificial Sequence
  LRRK2 RNA guide
ucuaugaccucagcaaagga

SEQ ID NO: 55472 - RNA, 20 nt, Artificial Sequence
  LRRK2 RNA guide
ugaccucagcaaaggacagg

SEQ ID NO: 55473 - RNA, 20 nt, Artificial Sequence
  LRRK2 RNA guide
uguccuuugcugaggucaua

SEQ ID NO: 55474 - RNA, 20 nt, Artificial Sequence
  LRRK2 RNA guide
ugucuaugaccucagcaaag

SEQ ID NO: 55475 - RNA, 20 nt, Artificial Sequence
  LRRK2 RNA guide
uucagccuguccuuugcuga

SEQ ID NO: 55476 - RNA, 21 nt, Artificial Sequence
  LRRK2 RNA guide
aaaggacaggcugaaguugau

SEQ ID NO: 55477 - RNA, 21 nt, Artificial Sequence
  LRRK2 RNA guide
aacuucagccuguccuuugcu

SEQ ID NO: 55478 - RNA, 21 nt, Artificial Sequence
  LRRK2 RNA guide
aaggacaggcugaaguugaug

SEQ ID NO: 55479 - RNA, 21 nt, Artificial Sequence
  LRRK2 RNA guide
accucagcaaaggacaggcug

SEQ ID NO: 55480 - RNA, 21 nt, Artificial Sequence
  LRRK2 RNA guide
acuucagccuguccuuugcug

SEQ ID NO: 55481 - RNA, 21 nt, Artificial Sequence
  LRRK2 RNA guide
agcaaaggacaggcugaaguu

SEQ ID NO: 55482 - RNA, 21 nt, Artificial Sequence
  LRRK2 RNA guide
agccuguccuuugcugagguc

SEQ ID NO: 55483 - RNA, 21 nt, Artificial Sequence
  LRRK2 RNA guide
aucaacuucagccuguccuuu

SEQ ID NO: 55484 - RNA, 21 nt, Artificial Sequence
  LRRK2 RNA guide
augaccucagcaaaggacagg

SEQ ID NO: 55485 - RNA, 21 nt, Artificial Sequence
  LRRK2 RNA guide
caaaggacaggcugaaguuga

SEQ ID NO: 55486 - RNA, 21 nt, Artificial Sequence
  LRRK2 RNA guide
caacuucagccuguccuuugc

SEQ ID NO: 55487 - RNA, 21 nt, Artificial Sequence
  LRRK2 RNA guide
cagcaaaggacaggcugaagu

SEQ ID NO: 55488 - RNA, 21 nt, Artificial Sequence
  LRRK2 RNA guide
cagccuguccuuugcugaggu

SEQ ID NO: 55489 - RNA, 21 nt, Artificial Sequence
  LRRK2 RNA guide
caucaacuucagccuguccuu

SEQ ID NO: 55490 - RNA, 21 nt, Artificial Sequence
  LRRK2 RNA guide
ccucagcaaaggacaggcuga

SEQ ID NO: 55491 - RNA, 21 nt, Artificial Sequence
  LRRK2 RNA guide
ccuguccuuugcugaggucau

SEQ ID NO: 55492 - RNA, 21 nt, Artificial Sequence
  LRRK2 RNA guide
ccuuugcugaggucauagaca

SEQ ID NO: 55493 - RNA, 21 nt, Artificial Sequence
  LRRK2 RNA guide
cuaugaccucagcaaaggaca

SEQ ID NO: 55494 - RNA, 21 nt, Artificial Sequence
  LRRK2 RNA guide
cucagcaaaggacaggcugaa

SEQ ID NO: 55495 - RNA, 21 nt, Artificial Sequence
  LRRK2 RNA guide
cuguccuuugcugaggucaua

SEQ ID NO: 55496 - RNA, 21 nt, Artificial Sequence
  LRRK2 RNA guide
cugucuaugaccucagcaaag

SEQ ID NO: 55497 - RNA, 21 nt, Artificial Sequence
  LRRK2 RNA guide
cuucagccuguccuuugcuga

SEQ ID NO: 55498 - RNA, 21 nt, Artificial Sequence
  LRRK2 RNA guide
cuuugcugaggucauagacag

SEQ ID NO: 55499 - RNA, 21 nt, Artificial Sequence
  LRRK2 RNA guide
gaccucagcaaaggacaggcu

SEQ ID NO: 55500 - RNA, 21 nt, Artificial Sequence
  LRRK2 RNA guide
gcaaaggacaggcugaaguug

SEQ ID NO: 55501 - RNA, 21 nt, Artificial Sequence
  LRRK2 RNA guide
gcaucaacuucagccuguccu

SEQ ID NO: 55502 - RNA, 21 nt, Artificial Sequence
  LRRK2 RNA guide
gccuguccuuugcugagguca

SEQ ID NO: 55503 - RNA, 21 nt, Artificial Sequence
  LRRK2 RNA guide
gcugucuaugaccucagcaaa

SEQ ID NO: 55504 - RNA, 21 nt, Artificial Sequence
  LRRK2 RNA guide
guccuuugcugaggucauaga

SEQ ID NO: 55505 - RNA, 21 nt, Artificial Sequence
  LRRK2 RNA guide
gucuaugaccucagcaaagga

SEQ ID NO: 55506 - RNA, 21 nt, Artificial Sequence
  LRRK2 RNA guide
uaugaccucagcaaaggacag

SEQ ID NO: 55507 - RNA, 21 nt, Artificial Sequence
  LRRK2 RNA guide
ucaacuucagccuguccuuug

SEQ ID NO: 55508 - RNA, 21 nt, Artificial Sequence
  LRRK2 RNA guide
ucagcaaaggacaggcugaag

SEQ ID NO: 55509 - RNA, 21 nt, Artificial Sequence
  LRRK2 RNA guide
ucagccuguccuuugcugagg

SEQ ID NO: 55510 - RNA, 21 nt, Artificial Sequence
  LRRK2 RNA guide
uccuuugcugaggucauagac

SEQ ID NO: 55511 - RNA, 21 nt, Artificial Sequence
  LRRK2 RNA guide
ucuaugaccucagcaaaggac

SEQ ID NO: 55512 - RNA, 21 nt, Artificial Sequence
  LRRK2 RNA guide
ugaccucagcaaaggacaggc

SEQ ID NO: 55513 - RNA, 21 nt, Artificial Sequence
  LRRK2 RNA guide
uguccuuugcugaggucauag

SEQ ID NO: 55514 - RNA, 21 nt, Artificial Sequence
  LRRK2 RNA guide
ugucuaugaccucagcaaagg

SEQ ID NO: 55515 - RNA, 21 nt, Artificial Sequence
  LRRK2 RNA guide
uucagccuguccuuugcugag

SEQ ID NO: 55516 - RNA, 22 nt, Artificial Sequence
  LRRK2 RNA guide
aaaggacaggcugaaguugaug

SEQ ID NO: 55517 - RNA, 22 nt, Artificial Sequence
  LRRK2 RNA guide
aacuucagccuguccuuugcug

SEQ ID NO: 55518 - RNA, 22 nt, Artificial Sequence
  LRRK2 RNA guide
aaggacaggcugaaguugaugc

SEQ ID NO: 55519 - RNA, 22 nt, Artificial Sequence
  LRRK2 RNA guide
accucagcaaaggacaggcuga

SEQ ID NO: 55520 - RNA, 22 nt, Artificial Sequence
  LRRK2 RNA guide
acuucagccuguccuuugcuga

SEQ ID NO: 55521 - RNA, 22 nt, Artificial Sequence
  LRRK2 RNA guide
agcaaaggacaggcugaaguug

SEQ ID NO: 55522 - RNA, 22 nt, Artificial Sequence
  LRRK2 RNA guide
agccuguccuuugcugagguca

SEQ ID NO: 55523 - RNA, 22 nt, Artificial Sequence
  LRRK2 RNA guide
aucaacuucagccuguccuuug

SEQ ID NO: 55524 - RNA, 22 nt, Artificial Sequence
  LRRK2 RNA guide
augaccucagcaaaggacaggc

SEQ ID NO: 55525 - RNA, 22 nt, Artificial Sequence
  LRRK2 RNA guide
caaaggacaggcugaaguugau

SEQ ID NO: 55526 - RNA, 22 nt, Artificial Sequence
  LRRK2 RNA guide
caacuucagccuguccuuugcu

SEQ ID NO: 55527 - RNA, 22 nt, Artificial Sequence
  LRRK2 RNA guide
cagcaaaggacaggcugaaguu

SEQ ID NO: 55528 - RNA, 22 nt, Artificial Sequence
  LRRK2 RNA guide
cagccuguccuuugcugagguc

SEQ ID NO: 55529 - RNA, 22 nt, Artificial Sequence
  LRRK2 RNA guide
caucaacuucagccuguccuuu

SEQ ID NO: 55530 - RNA, 22 nt, Artificial Sequence
  LRRK2 RNA guide
ccucagcaaaggacaggcugaa

SEQ ID NO: 55531 - RNA, 22 nt, Artificial Sequence
  LRRK2 RNA guide
ccuguccuuugcugaggucaua

SEQ ID NO: 55532 - RNA, 22 nt, Artificial Sequence
  LRRK2 RNA guide
ccuuugcugaggucauagacag

SEQ ID NO: 55533 - RNA, 22 nt, Artificial Sequence
  LRRK2 RNA guide
cuaugaccucagcaaaggacag

SEQ ID NO: 55534 - RNA, 22 nt, Artificial Sequence
  LRRK2 RNA guide
cucagcaaaggacaggcugaag

SEQ ID NO: 55535 - RNA, 22 nt, Artificial Sequence
  LRRK2 RNA guide
cuguccuuugcugaggucauag

SEQ ID NO: 55536 - RNA, 22 nt, Artificial Sequence
  LRRK2 RNA guide
cugucuaugaccucagcaaagg

SEQ ID NO: 55537 - RNA, 22 nt, Artificial Sequence
  LRRK2 RNA guide
cuucagccuguccuuugcugag

SEQ ID NO: 55538 - RNA, 22 nt, Artificial Sequence
  LRRK2 RNA guide
cuuugcugaggucauagacagc

SEQ ID NO: 55539 - RNA, 22 nt, Artificial Sequence
  LRRK2 RNA guide
gaccucagcaaaggacaggcug

SEQ ID NO: 55540 - RNA, 22 nt, Artificial Sequence
  LRRK2 RNA guide
gcaaaggacaggcugaaguuga

SEQ ID NO: 55541 - RNA, 22 nt, Artificial Sequence
  LRRK2 RNA guide
gcaucaacuucagccuguccuu

SEQ ID NO: 55542 - RNA, 22 nt, Artificial Sequence
  LRRK2 RNA guide
gccuguccuuugcugaggucau

SEQ ID NO: 55543 - RNA, 22 nt, Artificial Sequence
  LRRK2 RNA guide
gcugucuaugaccucagcaaag

SEQ ID NO: 55544 - RNA, 22 nt, Artificial Sequence
  LRRK2 RNA guide
ggcaucaacuucagccuguccu

SEQ ID NO: 55545 - RNA, 22 nt, Artificial Sequence
  LRRK2 RNA guide
guccuuugcugaggucauagac

SEQ ID NO: 55546 - RNA, 22 nt, Artificial Sequence
  LRRK2 RNA guide
gucuaugaccucagcaaaggac

SEQ ID NO: 55547 - RNA, 22 nt, Artificial Sequence
  LRRK2 RNA guide
uaugaccucagcaaaggacagg

SEQ ID NO: 55548 - RNA, 22 nt, Artificial Sequence
  LRRK2 RNA guide
ucaacuucagccuguccuuugc

SEQ ID NO: 55549 - RNA, 22 nt, Artificial Sequence
  LRRK2 RNA guide
ucagcaaaggacaggcugaagu

SEQ ID NO: 55550 - RNA, 22 nt, Artificial Sequence
  LRRK2 RNA guide
ucagccuguccuuugcugaggu

SEQ ID NO: 55551 - RNA, 22 nt, Artificial Sequence
  LRRK2 RNA guide
uccuuugcugaggucauagaca

SEQ ID NO: 55552 - RNA, 22 nt, Artificial Sequence
  LRRK2 RNA guide
ucuaugaccucagcaaaggaca

SEQ ID NO: 55553 - RNA, 22 nt, Artificial Sequence
  LRRK2 RNA guide
ugaccucagcaaaggacaggcu

SEQ ID NO: 55554 - RNA, 22 nt, Artificial Sequence
  LRRK2 RNA guide
ugcugucuaugaccucagcaaa

SEQ ID NO: 55555 - RNA, 22 nt, Artificial Sequence
  LRRK2 RNA guide
uguccuuugcugaggucauaga

SEQ ID NO: 55556 - RNA, 22 nt, Artificial Sequence
  LRRK2 RNA guide
ugucuaugaccucagcaaagga

SEQ ID NO: 55557 - RNA, 22 nt, Artificial Sequence
  LRRK2 RNA guide
uucagccuguccuuugcugagg

SEQ ID NO: 55558 - RNA, 20 nt, Artificial Sequence
  LRRK2 RNA guide
aaauaauucaugugucugug

SEQ ID NO: 55559 - RNA, 20 nt, Artificial Sequence
  LRRK2 RNA guide
aauaauucaugugucugugu

SEQ ID NO: 55560 - RNA, 20 nt, Artificial Sequence
  LRRK2 RNA guide
aauucaugugucugugugcg

SEQ ID NO: 55561 - RNA, 20 nt, Artificial Sequence
  LRRK2 RNA guide
acacacacacgcacacagac

SEQ ID NO: 55562 - RNA, 20 nt, Artificial Sequence
  LRRK2 RNA guide
acacacacgcacacagacac

SEQ ID NO: 55563 - RNA, 20 nt, Artificial Sequence
  LRRK2 RNA guide
acacacgcacacagacacau

SEQ ID NO: 55564 - RNA, 20 nt, Artificial Sequence
  LRRK2 RNA guide
acacgcacacagacacauga

SEQ ID NO: 55565 - RNA, 20 nt, Artificial Sequence
  LRRK2 RNA guide
acgcacacagacacaugaau

SEQ ID NO: 55566 - RNA, 20 nt, Artificial Sequence
  LRRK2 RNA guide
auaauucaugugucugugug

SEQ ID NO: 55567 - RNA, 20 nt, Artificial Sequence
  LRRK2 RNA guide
auucaugugucugugugcgu

SEQ ID NO: 55568 - RNA, 20 nt, Artificial Sequence
  LRRK2 RNA guide
cacacacacgcacacagaca

SEQ ID NO: 55569 - RNA, 20 nt, Artificial Sequence
  LRRK2 RNA guide
cacacacgcacacagacaca

SEQ ID NO: 55570 - RNA, 20 nt, Artificial Sequence
  LRRK2 RNA guide
cacacgcacacagacacaug

SEQ ID NO: 55571 - RNA, 20 nt, Artificial Sequence
  LRRK2 RNA guide
cacgcacacagacacaugaa

SEQ ID NO: 55572 - RNA, 20 nt, Artificial Sequence
  LRRK2 RNA guide
caugugucugugugcgugug

SEQ ID NO: 55573 - RNA, 20 nt, Artificial Sequence
  LRRK2 RNA guide
cgcacacagacacaugaauu

SEQ ID NO: 55574 - RNA, 20 nt, Artificial Sequence
  LRRK2 RNA guide
gaaaauaauucaugugucug

SEQ ID NO: 55575 - RNA, 20 nt, Artificial Sequence
  LRRK2 RNA guide
uaauucaugugucugugugc

SEQ ID NO: 55576 - RNA, 20 nt, Artificial Sequence
  LRRK2 RNA guide
ucaugugucugugugcgugu

SEQ ID NO: 55577 - RNA, 20 nt, Artificial Sequence
  LRRK2 RNA guide
uucaugugucugugugcgug

SEQ ID NO: 55578 - RNA, 21 nt, Artificial Sequence
  LRRK2 RNA guide
aauaauucaugugucugugug

SEQ ID NO: 55579 - RNA, 21 nt, Artificial Sequence
  LRRK2 RNA guide
aauucaugugucugugugcgu

SEQ ID NO: 55580 - RNA, 21 nt, Artificial Sequence
  LRRK2 RNA guide
acacacacacgcacacagaca

SEQ ID NO: 55581 - RNA, 21 nt, Artificial Sequence
  LRRK2 RNA guide
acacacacgcacacagacaca

SEQ ID NO: 55582 - RNA, 21 nt, Artificial Sequence
  LRRK2 RNA guide
acacacgcacacagacacaug

SEQ ID NO: 55583 - RNA, 21 nt, Artificial Sequence
  LRRK2 RNA guide
acacgcacacagacacaugaa

SEQ ID NO: 55584 - RNA, 21 nt, Artificial Sequence
  LRRK2 RNA guide
acgcacacagacacaugaauu

SEQ ID NO: 55585 - RNA, 21 nt, Artificial Sequence
  LRRK2 RNA guide
auaauucaugugucugugugc

SEQ ID NO: 55586 - RNA, 21 nt, Artificial Sequence
  LRRK2 RNA guide
auucaugugucugugugcgug

SEQ ID NO: 55587 - RNA, 21 nt, Artificial Sequence
  LRRK2 RNA guide
cacacacacacgcacacagac

SEQ ID NO: 55588 - RNA, 21 nt, Artificial Sequence
  LRRK2 RNA guide
cacacacacgcacacagacac

SEQ ID NO: 55589 - RNA, 21 nt, Artificial Sequence
  LRRK2 RNA guide
cacacacgcacacagacacau

SEQ ID NO: 55590 - RNA, 21 nt, Artificial Sequence
  LRRK2 RNA guide
cacacgcacacagacacauga

SEQ ID NO: 55591 - RNA, 21 nt, Artificial Sequence
  LRRK2 RNA guide
cacgcacacagacacaugaau

SEQ ID NO: 55592 - RNA, 21 nt, Artificial Sequence
  LRRK2 RNA guide
caugugucugugugcgugugu

SEQ ID NO: 55593 - RNA, 21 nt, Artificial Sequence
  LRRK2 RNA guide
cgcacacagacacaugaauua

SEQ ID NO: 55594 - RNA, 21 nt, Artificial Sequence
  LRRK2 RNA guide
uaauucaugugucugugugcg

SEQ ID NO: 55595 - RNA, 21 nt, Artificial Sequence
  LRRK2 RNA guide
ucaugugucugugugcgugug

SEQ ID NO: 55596 - RNA, 21 nt, Artificial Sequence
  LRRK2 RNA guide
uucaugugucugugugcgugu

SEQ ID NO: 55597 - RNA, 22 nt, Artificial Sequence
  LRRK2 RNA guide
aaauaauucaugugucugugug

SEQ ID NO: 55598 - RNA, 22 nt, Artificial Sequence
  LRRK2 RNA guide
aauaauucaugugucugugugc

SEQ ID NO: 55599 - RNA, 22 nt, Artificial Sequence
  LRRK2 RNA guide
aauucaugugucugugugcgug

SEQ ID NO: 55600 - RNA, 22 nt, Artificial Sequence
  LRRK2 RNA guide
acacacacacgcacacagacac

SEQ ID NO: 55601 - RNA, 22 nt, Artificial Sequence
  LRRK2 RNA guide
acacacacgcacacagacacau

SEQ ID NO: 55602 - RNA, 22 nt, Artificial Sequence
  LRRK2 RNA guide
acacacgcacacagacacauga

SEQ ID NO: 55603 - RNA, 22 nt, Artificial Sequence
  LRRK2 RNA guide
acacgcacacagacacaugaau

SEQ ID NO: 55604 - RNA, 22 nt, Artificial Sequence
  LRRK2 RNA guide
acgcacacagacacaugaauua

SEQ ID NO: 55605 - RNA, 22 nt, Artificial Sequence
  LRRK2 RNA guide
auaauucaugugucugugugcg

SEQ ID NO: 55606 - RNA, 22 nt, Artificial Sequence
  LRRK2 RNA guide
auucaugugucugugugcgugu

SEQ ID NO: 55607 - RNA, 22 nt, Artificial Sequence
  LRRK2 RNA guide
cacacacacacgcacacagaca

SEQ ID NO: 55608 - RNA, 22 nt, Artificial Sequence
  LRRK2 RNA guide
cacacacacgcacacagacaca

SEQ ID NO: 55609 - RNA, 22 nt, Artificial Sequence
  LRRK2 RNA guide
cacacacgcacacagacacaug

SEQ ID NO: 55610 - RNA, 22 nt, Artificial Sequence
  LRRK2 RNA guide
cacacgcacacagacacaugaa

SEQ ID NO: 55611 - RNA, 22 nt, Artificial Sequence
  LRRK2 RNA guide
cacgcacacagacacaugaauu

SEQ ID NO: 55612 - RNA, 22 nt, Artificial Sequence
  LRRK2 RNA guide
caugugucugugugcgugugug

SEQ ID NO: 55613 - RNA, 22 nt, Artificial Sequence
  LRRK2 RNA guide
cgcacacagacacaugaauuau

SEQ ID NO: 55614 - RNA, 22 nt, Artificial Sequence
  LRRK2 RNA guide
gaaaauaauucaugugucugug

SEQ ID NO: 55615 - RNA, 22 nt, Artificial Sequence
  LRRK2 RNA guide
uaauucaugugucugugugcgu

SEQ ID NO: 55616 - RNA, 22 nt, Artificial Sequence
  LRRK2 RNA guide
ucaugugucugugugcgugugu

SEQ ID NO: 55617 - RNA, 22 nt, Artificial Sequence
  LRRK2 RNA guide
uucaugugucugugugcgugug

SEQ ID NO: 55618 - RNA, 20 nt, Artificial Sequence
  LRRK2 RNA guide
aauugcuucagucucuuuaa

SEQ ID NO: 55619 - RNA, 20 nt, Artificial Sequence
  LRRK2 RNA guide
acuuucuuaaaagaagcacu

SEQ ID NO: 55620 - RNA, 20 nt, Artificial Sequence
  LRRK2 RNA guide
aguauuuaaagagacugaag

SEQ ID NO: 55621 - RNA, 20 nt, Artificial Sequence
  LRRK2 RNA guide
agugcuucuuuuaagaaagu

SEQ ID NO: 55622 - RNA, 20 nt, Artificial Sequence
  LRRK2 RNA guide
auugcuucagucucuuuaaa

SEQ ID NO: 55623 - RNA, 20 nt, Artificial Sequence
  LRRK2 RNA guide
caauugcuucagucucuuua

SEQ ID NO: 55624 - RNA, 20 nt, Artificial Sequence
  LRRK2 RNA guide
cagucucuuuaaauacuuuc

SEQ ID NO: 55625 - RNA, 20 nt, Artificial Sequence
  LRRK2 RNA guide
cuucagucucuuuaaauacu

SEQ ID NO: 55626 - RNA, 20 nt, Artificial Sequence
  LRRK2 RNA guide
gaaaguauuuaaagagacug

SEQ ID NO: 55627 - RNA, 20 nt, Artificial Sequence
  LRRK2 RNA guide
gcuucagucucuuuaaauac

SEQ ID NO: 55628 - RNA, 20 nt, Artificial Sequence
  LRRK2 RNA guide
gugcuucuuuuaagaaagua

SEQ ID NO: 55629 - RNA, 20 nt, Artificial Sequence
  LRRK2 RNA guide
uacuuucuuaaaagaagcac

SEQ ID NO: 55630 - RNA, 20 nt, Artificial Sequence
  LRRK2 RNA guide
uagugcuucuuuuaagaaag

SEQ ID NO: 55631 - RNA, 20 nt, Artificial Sequence
  LRRK2 RNA guide
ugcuucagucucuuuaaaua

SEQ ID NO: 55632 - RNA, 20 nt, Artificial Sequence
  LRRK2 RNA guide
uugcuucagucucuuuaaau

SEQ ID NO: 55633 - RNA, 21 nt, Artificial Sequence
  LRRK2 RNA guide
acaauugcuucagucucuuua

SEQ ID NO: 55634 - RNA, 21 nt, Artificial Sequence
  LRRK2 RNA guide
aguauuuaaagagacugaagc

SEQ ID NO: 55635 - RNA, 21 nt, Artificial Sequence
  LRRK2 RNA guide
caauugcuucagucucuuuaa

SEQ ID NO: 55636 - RNA, 21 nt, Artificial Sequence
  LRRK2 RNA guide
gcuucagucucuuuaaauacu

SEQ ID NO: 55637 - RNA, 21 nt, Artificial Sequence
  LRRK2 RNA guide
ugcuucagucucuuuaaauac

SEQ ID NO: 55638 - RNA, 22 nt, Artificial Sequence
  LRRK2 RNA guide
aacaauugcuucagucucuuua

SEQ ID NO: 55639 - RNA, 22 nt, Artificial Sequence
  LRRK2 RNA guide
aaguauuuaaagagacugaagc

SEQ ID NO: 55640 - RNA, 22 nt, Artificial Sequence
  LRRK2 RNA guide
acaauugcuucagucucuuuaa

SEQ ID NO: 55641 - RNA, 22 nt, Artificial Sequence
  LRRK2 RNA guide
aguauuuaaagagacugaagca

SEQ ID NO: 55642 - RNA, 22 nt, Artificial Sequence
  LRRK2 RNA guide
caauugcuucagucucuuuaaa

SEQ ID NO: 55643 - RNA, 22 nt, Artificial Sequence
  LRRK2 RNA guide
gcuucagucucuuuaaauacuu

SEQ ID NO: 55644 - RNA, 22 nt, Artificial Sequence
  LRRK2 RNA guide
ugcuucagucucuuuaaauacu

SEQ ID NO: 55645 - RNA, 22 nt, Artificial Sequence
  LRRK2 RNA guide
uugcuucagucucuuuaaauac

SEQ ID NO: 55646 - RNA, 20 nt, Artificial Sequence
  LRRK2 RNA guide
gcuucagucucuuuaaauaa

SEQ ID NO: 55647 - RNA, 20 nt, Artificial Sequence
  LRRK2 RNA guide
acagauaaggaagagaaaau

SEQ ID NO: 55648 - RNA, 20 nt, Artificial Sequence
  LRRK2 RNA guide
auucacagauaaggaagaga

SEQ ID NO: 55649 - RNA, 20 nt, Artificial Sequence
  LRRK2 RNA guide
cacagauaaggaagagaaaa

SEQ ID NO: 55650 - RNA, 20 nt, Artificial Sequence
  LRRK2 RNA guide
cagauaaggaagagaaaaua

SEQ ID NO: 55651 - RNA, 20 nt, Artificial Sequence
  LRRK2 RNA guide
ucacagauaaggaagagaaa

SEQ ID NO: 55652 - RNA, 20 nt, Artificial Sequence
  LRRK2 RNA guide
uucacagauaaggaagagaa

SEQ ID NO: 55653 - RNA, 21 nt, Artificial Sequence
  LRRK2 RNA guide
aauucacagauaaggaagaga

SEQ ID NO: 55654 - RNA, 21 nt, Artificial Sequence
  LRRK2 RNA guide
auucacagauaaggaagagaa

SEQ ID NO: 55655 - RNA, 21 nt, Artificial Sequence
  LRRK2 RNA guide
cacagauaaggaagagaaaau

SEQ ID NO: 55656 - RNA, 21 nt, Artificial Sequence
  LRRK2 RNA guide
ucacagauaaggaagagaaaa

SEQ ID NO: 55657 - RNA, 21 nt, Artificial Sequence
  LRRK2 RNA guide
uucacagauaaggaagagaaa

SEQ ID NO: 55658 - RNA, 22 nt, Artificial Sequence
  LRRK2 RNA guide
aaauucacagauaaggaagaga

SEQ ID NO: 55659 - RNA, 22 nt, Artificial Sequence
  LRRK2 RNA guide
aauucacagauaaggaagagaa

SEQ ID NO: 55660 - RNA, 22 nt, Artificial Sequence
  LRRK2 RNA guide
auucacagauaaggaagagaaa

SEQ ID NO: 55661 - RNA, 22 nt, Artificial Sequence
  LRRK2 RNA guide
cacagauaaggaagagaaaaua

SEQ ID NO: 55662 - RNA, 22 nt, Artificial Sequence
  LRRK2 RNA guide
ucacagauaaggaagagaaaau

SEQ ID NO: 55663 - RNA, 22 nt, Artificial Sequence
  LRRK2 RNA guide
uucacagauaaggaagagaaaa

SEQ ID NO: 55664 - RNA, 20 nt, Artificial Sequence
  LRRK2 RNA guide
aaggaagagaaaauguaaac

SEQ ID NO: 55665 - RNA, 20 nt, Artificial Sequence
  LRRK2 RNA guide
acauuuucucuuccuuaucu

SEQ ID NO: 55666 - RNA, 20 nt, Artificial Sequence
  LRRK2 RNA guide
agauaaggaagagaaaaugu

SEQ ID NO: 55667 - RNA, 20 nt, Artificial Sequence
  LRRK2 RNA guide
aggaagagaaaauguaaacu

SEQ ID NO: 55668 - RNA, 20 nt, Artificial Sequence
  LRRK2 RNA guide
aguuuacauuuucucuuccu

SEQ ID NO: 55669 - RNA, 20 nt, Artificial Sequence
  LRRK2 RNA guide
cagauaaggaagagaaaaug

SEQ ID NO: 55670 - RNA, 20 nt, Artificial Sequence
  LRRK2 RNA guide
gauaaggaagagaaaaugua

SEQ ID NO: 55671 - RNA, 20 nt, Artificial Sequence
  LRRK2 RNA guide
ggaagagaaaauguaaacua

SEQ ID NO: 55672 - RNA, 20 nt, Artificial Sequence
  LRRK2 RNA guide
guuuacauuuucucuuccuu

SEQ ID NO: 55673 - RNA, 20 nt, Artificial Sequence
  LRRK2 RNA guide
uacauuuucucuuccuuauc

SEQ ID NO: 55674 - RNA, 20 nt, Artificial Sequence
  LRRK2 RNA guide
uaguuuacauuuucucuucc

SEQ ID NO: 55675 - RNA, 21 nt, Artificial Sequence
  LRRK2 RNA guide
acagauaaggaagagaaaaug

SEQ ID NO: 55676 - RNA, 21 nt, Artificial Sequence
  LRRK2 RNA guide
acauuuucucuuccuuaucug

SEQ ID NO: 55677 - RNA, 21 nt, Artificial Sequence
  LRRK2 RNA guide
cagauaaggaagagaaaaugu

SEQ ID NO: 55678 - RNA, 22 nt, Artificial Sequence
  LRRK2 RNA guide
acagauaaggaagagaaaaugu

SEQ ID NO: 55679 - RNA, 22 nt, Artificial Sequence
  LRRK2 RNA guide
acauuuucucuuccuuaucugu

SEQ ID NO: 55680 - RNA, 22 nt, Artificial Sequence
  LRRK2 RNA guide
cacagauaaggaagagaaaaug

SEQ ID NO: 55681 - RNA, 22 nt, Artificial Sequence
  LRRK2 RNA guide
cagauaaggaagagaaaaugua

SEQ ID NO: 55682 - RNA, 22 nt, Artificial Sequence
  LRRK2 RNA guide
uacauuuucucuuccuuaucug

SEQ ID NO: 55683 - RNA, 20 nt, Artificial Sequence
  LRRK2 RNA guide
aaaauuguggguuuucuuuc

SEQ ID NO: 55684 - RNA, 20 nt, Artificial Sequence
  LRRK2 RNA guide
aaauuguggguuuucuuucc

SEQ ID NO: 55685 - RNA, 20 nt, Artificial Sequence
  LRRK2 RNA guide
aacaaggaaagaaaacccac

SEQ ID NO: 55686 - RNA, 20 nt, Artificial Sequence
  LRRK2 RNA guide
aacagcaacaaggaaagaaa

SEQ ID NO: 55687 - RNA, 20 nt, Artificial Sequence
  LRRK2 RNA guide
aaggaaagaaaacccacaau

SEQ ID NO: 55688 - RNA, 20 nt, Artificial Sequence
  LRRK2 RNA guide
aauaaugcuaacagcaacaa

SEQ ID NO: 55689 - RNA, 20 nt, Artificial Sequence
  LRRK2 RNA guide
aaugcuaacagcaacaagga

SEQ ID NO: 55690 - RNA, 20 nt, Artificial Sequence
  LRRK2 RNA guide
aauuguggguuuucuuuccu

SEQ ID NO: 55691 - RNA, 20 nt, Artificial Sequence
  LRRK2 RNA guide
acaaggaaagaaaacccaca

SEQ ID NO: 55692 - RNA, 20 nt, Artificial Sequence
  LRRK2 RNA guide
acagcaacaaggaaagaaaa

SEQ ID NO: 55693 - RNA, 20 nt, Artificial Sequence
  LRRK2 RNA guide
acucacuuaaaauugugggu

SEQ ID NO: 55694 - RNA, 20 nt, Artificial Sequence
  LRRK2 RNA guide
acuuaaaauuguggguuuuc

SEQ ID NO: 55695 - RNA, 20 nt, Artificial Sequence
  LRRK2 RNA guide
agcaacaaggaaagaaaacc

SEQ ID NO: 55696 - RNA, 20 nt, Artificial Sequence
  LRRK2 RNA guide
aggaaagaaaacccacaauu

SEQ ID NO: 55697 - RNA, 20 nt, Artificial Sequence
  LRRK2 RNA guide
auaaugcuaacagcaacaag

SEQ ID NO: 55698 - RNA, 20 nt, Artificial Sequence
  LRRK2 RNA guide
augcuaacagcaacaaggaa

SEQ ID NO: 55699 - RNA, 20 nt, Artificial Sequence
  LRRK2 RNA guide
auuguggguuuucuuuccuu

SEQ ID NO: 55700 - RNA, 20 nt, Artificial Sequence
  LRRK2 RNA guide
caacaaggaaagaaaaccca

SEQ ID NO: 55701 - RNA, 20 nt, Artificial Sequence
  LRRK2 RNA guide
caaggaaagaaaacccacaa

SEQ ID NO: 55702 - RNA, 20 nt, Artificial Sequence
  LRRK2 RNA guide
cacuuaaaauuguggguuuu

SEQ ID NO: 55703 - RNA, 20 nt, Artificial Sequence
  LRRK2 RNA guide
cagcaacaaggaaagaaaac

SEQ ID NO: 55704 - RNA, 20 nt, Artificial Sequence
  LRRK2 RNA guide
cuaacagcaacaaggaaaga

SEQ ID NO: 55705 - RNA, 20 nt, Artificial Sequence
  LRRK2 RNA guide
cucacuuaaaauuguggguu

SEQ ID NO: 55706 - RNA, 20 nt, Artificial Sequence
  LRRK2 RNA guide
cuuaaaauuguggguuuucu

SEQ ID NO: 55707 - RNA, 20 nt, Artificial Sequence
  LRRK2 RNA guide
cuuuccuuguugcuguuagc

SEQ ID NO: 55708 - RNA, 20 nt, Artificial Sequence
  LRRK2 RNA guide
gaaagaaaacccacaauuuu

SEQ ID NO: 55709 - RNA, 20 nt, Artificial Sequence
  LRRK2 RNA guide
gcaacaaggaaagaaaaccc

SEQ ID NO: 55710 - RNA, 20 nt, Artificial Sequence
  LRRK2 RNA guide
gcuaacagcaacaaggaaag

SEQ ID NO: 55711 - RNA, 20 nt, Artificial Sequence
  LRRK2 RNA guide
ggaaagaaaacccacaauuu

SEQ ID NO: 55712 - RNA, 20 nt, Artificial Sequence
  LRRK2 RNA guide
ggguuuucuuuccuuguugc

SEQ ID NO: 55713 - RNA, 20 nt, Artificial Sequence
  LRRK2 RNA guide
gguuuucuuuccuuguugcu

SEQ ID NO: 55714 - RNA, 20 nt, Artificial Sequence
  LRRK2 RNA guide
guggguuuucuuuccuuguu

SEQ ID NO: 55715 - RNA, 20 nt, Artificial Sequence
  LRRK2 RNA guide
guuuucuuuccuuguugcug

SEQ ID NO: 55716 - RNA, 20 nt, Artificial Sequence
  LRRK2 RNA guide
uaacagcaacaaggaaagaa

SEQ ID NO: 55717 - RNA, 20 nt, Artificial Sequence
  LRRK2 RNA guide
ucacuuaaaauuguggguuu

SEQ ID NO: 55718 - RNA, 20 nt, Artificial Sequence
  LRRK2 RNA guide
ucuuuccuuguugcuguuag

SEQ ID NO: 55719 - RNA, 20 nt, Artificial Sequence
  LRRK2 RNA guide
ugcuaacagcaacaaggaaa

SEQ ID NO: 55720 - RNA, 20 nt, Artificial Sequence
  LRRK2 RNA guide
uggguuuucuuuccuuguug

SEQ ID NO: 55721 - RNA, 20 nt, Artificial Sequence
  LRRK2 RNA guide
uguggguuuucuuuccuugu

SEQ ID NO: 55722 - RNA, 20 nt, Artificial Sequence
  LRRK2 RNA guide
uucuuuccuuguugcuguua

SEQ ID NO: 55723 - RNA, 20 nt, Artificial Sequence
  LRRK2 RNA guide
uuguggguuuucuuuccuug

SEQ ID NO: 55724 - RNA, 20 nt, Artificial Sequence
  LRRK2 RNA guide
uuucuuuccuuguugcuguu

SEQ ID NO: 55725 - RNA, 20 nt, Artificial Sequence
  LRRK2 RNA guide
uuuucuuuccuuguugcugu

SEQ ID NO: 55726 - RNA, 21 nt, Artificial Sequence
  LRRK2 RNA guide
aaaauuguggguuuucuuucc

SEQ ID NO: 55727 - RNA, 21 nt, Artificial Sequence
  LRRK2 RNA guide
aaauuguggguuuucuuuccu

SEQ ID NO: 55728 - RNA, 21 nt, Artificial Sequence
  LRRK2 RNA guide
aacaaggaaagaaaacccaca

SEQ ID NO: 55729 - RNA, 21 nt, Artificial Sequence
  LRRK2 RNA guide
aacagcaacaaggaaagaaaa

SEQ ID NO: 55730 - RNA, 21 nt, Artificial Sequence
  LRRK2 RNA guide
aacucacuuaaaauugugggu

SEQ ID NO: 55731 - RNA, 21 nt, Artificial Sequence
  LRRK2 RNA guide
aaggaaagaaaacccacaauu

SEQ ID NO: 55732 - RNA, 21 nt, Artificial Sequence
  LRRK2 RNA guide
aauaaugcuaacagcaacaag

SEQ ID NO: 55733 - RNA, 21 nt, Artificial Sequence
  LRRK2 RNA guide
aaugcuaacagcaacaaggaa

SEQ ID NO: 55734 - RNA, 21 nt, Artificial Sequence
  LRRK2 RNA guide
aauuguggguuuucuuuccuu

SEQ ID NO: 55735 - RNA, 21 nt, Artificial Sequence
  LRRK2 RNA guide
acaaggaaagaaaacccacaa

SEQ ID NO: 55736 - RNA, 21 nt, Artificial Sequence
  LRRK2 RNA guide
acagcaacaaggaaagaaaac

SEQ ID NO: 55737 - RNA, 21 nt, Artificial Sequence
  LRRK2 RNA guide
acucacuuaaaauuguggguu

SEQ ID NO: 55738 - RNA, 21 nt, Artificial Sequence
  LRRK2 RNA guide
agcaacaaggaaagaaaaccc

SEQ ID NO: 55739 - RNA, 21 nt, Artificial Sequence
  LRRK2 RNA guide
aggaaagaaaacccacaauuu

SEQ ID NO: 55740 - RNA, 21 nt, Artificial Sequence
  LRRK2 RNA guide
auaaugcuaacagcaacaagg

SEQ ID NO: 55741 - RNA, 21 nt, Artificial Sequence
  LRRK2 RNA guide
augcuaacagcaacaaggaaa

SEQ ID NO: 55742 - RNA, 21 nt, Artificial Sequence
  LRRK2 RNA guide
auuguggguuuucuuuccuug

SEQ ID NO: 55743 - RNA, 21 nt, Artificial Sequence
  LRRK2 RNA guide
caacaaggaaagaaaacccac

SEQ ID NO: 55744 - RNA, 21 nt, Artificial Sequence
  LRRK2 RNA guide
caaggaaagaaaacccacaau

SEQ ID NO: 55745 - RNA, 21 nt, Artificial Sequence
  LRRK2 RNA guide
cacuuaaaauuguggguuuuc

SEQ ID NO: 55746 - RNA, 21 nt, Artificial Sequence
  LRRK2 RNA guide
cagcaacaaggaaagaaaacc

SEQ ID NO: 55747 - RNA, 21 nt, Artificial Sequence
  LRRK2 RNA guide
cuaacagcaacaaggaaagaa

SEQ ID NO: 55748 - RNA, 21 nt, Artificial Sequence
  LRRK2 RNA guide
cucacuuaaaauuguggguuu

SEQ ID NO: 55749 - RNA, 21 nt, Artificial Sequence
  LRRK2 RNA guide
cuuuccuuguugcuguuagca

SEQ ID NO: 55750 - RNA, 21 nt, Artificial Sequence
  LRRK2 RNA guide
gcaacaaggaaagaaaaccca

SEQ ID NO: 55751 - RNA, 21 nt, Artificial Sequence
  LRRK2 RNA guide
gcuaacagcaacaaggaaaga

SEQ ID NO: 55752 - RNA, 21 nt, Artificial Sequence
  LRRK2 RNA guide
ggaaagaaaacccacaauuuu

SEQ ID NO: 55753 - RNA, 21 nt, Artificial Sequence
  LRRK2 RNA guide
ggguuuucuuuccuuguugcu

SEQ ID NO: 55754 - RNA, 21 nt, Artificial Sequence
  LRRK2 RNA guide
gguuuucuuuccuuguugcug

SEQ ID NO: 55755 - RNA, 21 nt, Artificial Sequence
  LRRK2 RNA guide
guggguuuucuuuccuuguug

SEQ ID NO: 55756 - RNA, 21 nt, Artificial Sequence
  LRRK2 RNA guide
guuuucuuuccuuguugcugu

SEQ ID NO: 55757 - RNA, 21 nt, Artificial Sequence
  LRRK2 RNA guide
uaacagcaacaaggaaagaaa

SEQ ID NO: 55758 - RNA, 21 nt, Artificial Sequence
  LRRK2 RNA guide
uaaugcuaacagcaacaagga

SEQ ID NO: 55759 - RNA, 21 nt, Artificial Sequence
  LRRK2 RNA guide
ucuuuccuuguugcuguuagc

SEQ ID NO: 55760 - RNA, 21 nt, Artificial Sequence
  LRRK2 RNA guide
ugcuaacagcaacaaggaaag

SEQ ID NO: 55761 - RNA, 21 nt, Artificial Sequence
  LRRK2 RNA guide
uggguuuucuuuccuuguugc

SEQ ID NO: 55762 - RNA, 21 nt, Artificial Sequence
  LRRK2 RNA guide
uguggguuuucuuuccuuguu

SEQ ID NO: 55763 - RNA, 21 nt, Artificial Sequence
  LRRK2 RNA guide
uucuuuccuuguugcuguuag

SEQ ID NO: 55764 - RNA, 21 nt, Artificial Sequence
  LRRK2 RNA guide
uuguggguuuucuuuccuugu

SEQ ID NO: 55765 - RNA, 21 nt, Artificial Sequence
  LRRK2 RNA guide
uuucuuuccuuguugcuguua

SEQ ID NO: 55766 - RNA, 21 nt, Artificial Sequence
  LRRK2 RNA guide
uuuucuuuccuuguugcuguu

SEQ ID NO: 55767 - RNA, 22 nt, Artificial Sequence
  LRRK2 RNA guide
aaaauuguggguuuucuuuccu

SEQ ID NO: 55768 - RNA, 22 nt, Artificial Sequence
  LRRK2 RNA guide
aaauuguggguuuucuuuccuu

SEQ ID NO: 55769 - RNA, 22 nt, Artificial Sequence
  LRRK2 RNA guide
aacaaggaaagaaaacccacaa

SEQ ID NO: 55770 - RNA, 22 nt, Artificial Sequence
  LRRK2 RNA guide
aacagcaacaaggaaagaaaac

SEQ ID NO: 55771 - RNA, 22 nt, Artificial Sequence
  LRRK2 RNA guide
aacucacuuaaaauuguggguu

SEQ ID NO: 55772 - RNA, 22 nt, Artificial Sequence
  LRRK2 RNA guide
aaggaaagaaaacccacaauuu

SEQ ID NO: 55773 - RNA, 22 nt, Artificial Sequence
  LRRK2 RNA guide
aauaaugcuaacagcaacaagg

SEQ ID NO: 55774 - RNA, 22 nt, Artificial Sequence
  LRRK2 RNA guide
aaugcuaacagcaacaaggaaa

SEQ ID NO: 55775 - RNA, 22 nt, Artificial Sequence
  LRRK2 RNA guide
aauuguggguuuucuuuccuug

SEQ ID NO: 55776 - RNA, 22 nt, Artificial Sequence
  LRRK2 RNA guide
acaaggaaagaaaacccacaau

SEQ ID NO: 55777 - RNA, 22 nt, Artificial Sequence
  LRRK2 RNA guide
acagcaacaaggaaagaaaacc

SEQ ID NO: 55778 - RNA, 22 nt, Artificial Sequence
  LRRK2 RNA guide
acucacuuaaaauuguggguuu

SEQ ID NO: 55779 - RNA, 22 nt, Artificial Sequence
  LRRK2 RNA guide
agcaacaaggaaagaaaaccca

SEQ ID NO: 55780 - RNA, 22 nt, Artificial Sequence
  LRRK2 RNA guide
aggaaagaaaacccacaauuuu

SEQ ID NO: 55781 - RNA, 22 nt, Artificial Sequence
  LRRK2 RNA guide
auaaugcuaacagcaacaagga

SEQ ID NO: 55782 - RNA, 22 nt, Artificial Sequence
  LRRK2 RNA guide
augcuaacagcaacaaggaaag

SEQ ID NO: 55783 - RNA, 22 nt, Artificial Sequence
  LRRK2 RNA guide
auuguggguuuucuuuccuugu

SEQ ID NO: 55784 - RNA, 22 nt, Artificial Sequence
  LRRK2 RNA guide
caacaaggaaagaaaacccaca

SEQ ID NO: 55785 - RNA, 22 nt, Artificial Sequence
  LRRK2 RNA guide
caacucacuuaaaauugugggu

SEQ ID NO: 55786 - RNA, 22 nt, Artificial Sequence
  LRRK2 RNA guide
caaggaaagaaaacccacaauu

SEQ ID NO: 55787 - RNA, 22 nt, Artificial Sequence
  LRRK2 RNA guide
cacuuaaaauuguggguuuucu

SEQ ID NO: 55788 - RNA, 22 nt, Artificial Sequence
  LRRK2 RNA guide
cagcaacaaggaaagaaaaccc

SEQ ID NO: 55789 - RNA, 22 nt, Artificial Sequence
  LRRK2 RNA guide
cuaacagcaacaaggaaagaaa

SEQ ID NO: 55790 - RNA, 22 nt, Artificial Sequence
  LRRK2 RNA guide
cucacuuaaaauuguggguuuu

SEQ ID NO: 55791 - RNA, 22 nt, Artificial Sequence
  LRRK2 RNA guide
cuuuccuuguugcuguuagcau

SEQ ID NO: 55792 - RNA, 22 nt, Artificial Sequence
  LRRK2 RNA guide
gcaacaaggaaagaaaacccac

SEQ ID NO: 55793 - RNA, 22 nt, Artificial Sequence
  LRRK2 RNA guide
gcuaacagcaacaaggaaagaa

SEQ ID NO: 55794 - RNA, 22 nt, Artificial Sequence
  LRRK2 RNA guide
ggaaagaaaacccacaauuuua

SEQ ID NO: 55795 - RNA, 22 nt, Artificial Sequence
  LRRK2 RNA guide
ggguuuucuuuccuuguugcug

SEQ ID NO: 55796 - RNA, 22 nt, Artificial Sequence
  LRRK2 RNA guide
gguuuucuuuccuuguugcugu

SEQ ID NO: 55797 - RNA, 22 nt, Artificial Sequence
  LRRK2 RNA guide
guggguuuucuuuccuuguugc

SEQ ID NO: 55798 - RNA, 22 nt, Artificial Sequence
  LRRK2 RNA guide
guuuucuuuccuuguugcuguu

SEQ ID NO: 55799 - RNA, 22 nt, Artificial Sequence
  LRRK2 RNA guide
uaaaauuguggguuuucuuucc

SEQ ID NO: 55800 - RNA, 22 nt, Artificial Sequence
  LRRK2 RNA guide
uaacagcaacaaggaaagaaaa

SEQ ID NO: 55801 - RNA, 22 nt, Artificial Sequence
  LRRK2 RNA guide
uaauaaugcuaacagcaacaag

SEQ ID NO: 55802 - RNA, 22 nt, Artificial Sequence
  LRRK2 RNA guide
uaaugcuaacagcaacaaggaa

SEQ ID NO: 55803 - RNA, 22 nt, Artificial Sequence
  LRRK2 RNA guide
ucacuuaaaauuguggguuuuc

SEQ ID NO: 55804 - RNA, 22 nt, Artificial Sequence
  LRRK2 RNA guide
ucuuuccuuguugcuguuagca

SEQ ID NO: 55805 - RNA, 22 nt, Artificial Sequence
  LRRK2 RNA guide
ugcuaacagcaacaaggaaaga

SEQ ID NO: 55806 - RNA, 22 nt, Artificial Sequence
  LRRK2 RNA guide
uggguuuucuuuccuuguugcu

SEQ ID NO: 55807 - RNA, 22 nt, Artificial Sequence
  LRRK2 RNA guide
uguggguuuucuuuccuuguug

SEQ ID NO: 55808 - RNA, 22 nt, Artificial Sequence
  LRRK2 RNA guide
uucuuuccuuguugcuguuagc

SEQ ID NO: 55809 - RNA, 22 nt, Artificial Sequence
  LRRK2 RNA guide
uuguggguuuucuuuccuuguu

SEQ ID NO: 55810 - RNA, 22 nt, Artificial Sequence
  LRRK2 RNA guide
uuucuuuccuuguugcuguuag

SEQ ID NO: 55811 - RNA, 22 nt, Artificial Sequence
  LRRK2 RNA guide
uuuucuuuccuuguugcuguua

SEQ ID NO: 55812 - RNA, 20 nt, Artificial Sequence
  LRRK2 RNA guide
aaaauuguggguuuuccuuc

SEQ ID NO: 55813 - RNA, 20 nt, Artificial Sequence
  LRRK2 RNA guide
aaauuguggguuuuccuucc

SEQ ID NO: 55814 - RNA, 20 nt, Artificial Sequence
  LRRK2 RNA guide
aacaaggaaggaaaacccac

SEQ ID NO: 55815 - RNA, 20 nt, Artificial Sequence
  LRRK2 RNA guide
aacagcaacaaggaaggaaa

SEQ ID NO: 55816 - RNA, 20 nt, Artificial Sequence
  LRRK2 RNA guide
aaggaaaacccacaauuuua

SEQ ID NO: 55817 - RNA, 20 nt, Artificial Sequence
  LRRK2 RNA guide
aaggaaggaaaacccacaau

SEQ ID NO: 55818 - RNA, 20 nt, Artificial Sequence
  LRRK2 RNA guide
aauuguggguuuuccuuccu

SEQ ID NO: 55819 - RNA, 20 nt, Artificial Sequence
  LRRK2 RNA guide
acaaggaaggaaaacccaca

SEQ ID NO: 55820 - RNA, 20 nt, Artificial Sequence
  LRRK2 RNA guide
acagcaacaaggaaggaaaa

SEQ ID NO: 55821 - RNA, 20 nt, Artificial Sequence
  LRRK2 RNA guide
agcaacaaggaaggaaaacc

SEQ ID NO: 55822 - RNA, 20 nt, Artificial Sequence
  LRRK2 RNA guide
aggaaaacccacaauuuuaa

SEQ ID NO: 55823 - RNA, 20 nt, Artificial Sequence
  LRRK2 RNA guide
aggaaggaaaacccacaauu

SEQ ID NO: 55824 - RNA, 20 nt, Artificial Sequence
  LRRK2 RNA guide
auuguggguuuuccuuccuu

SEQ ID NO: 55825 - RNA, 20 nt, Artificial Sequence
  LRRK2 RNA guide
caacaaggaaggaaaaccca

SEQ ID NO: 55826 - RNA, 20 nt, Artificial Sequence
  LRRK2 RNA guide
caaggaaggaaaacccacaa

SEQ ID NO: 55827 - RNA, 20 nt, Artificial Sequence
  LRRK2 RNA guide
cagcaacaaggaaggaaaac

SEQ ID NO: 55828 - RNA, 20 nt, Artificial Sequence
  LRRK2 RNA guide
ccuuccuuguugcuguuagc

SEQ ID NO: 55829 - RNA, 20 nt, Artificial Sequence
  LRRK2 RNA guide
cuaacagcaacaaggaagga

SEQ ID NO: 55830 - RNA, 20 nt, Artificial Sequence
  LRRK2 RNA guide
cuuaaaauuguggguuuucc

SEQ ID NO: 55831 - RNA, 20 nt, Artificial Sequence
  LRRK2 RNA guide
gaaggaaaacccacaauuuu

SEQ ID NO: 55832 - RNA, 20 nt, Artificial Sequence
  LRRK2 RNA guide
gcaacaaggaaggaaaaccc

SEQ ID NO: 55833 - RNA, 20 nt, Artificial Sequence
  LRRK2 RNA guide
gcuaacagcaacaaggaagg

SEQ ID NO: 55834 - RNA, 20 nt, Artificial Sequence
  LRRK2 RNA guide
ggaaggaaaacccacaauuu

SEQ ID NO: 55835 - RNA, 20 nt, Artificial Sequence
  LRRK2 RNA guide
ggguuuuccuuccuuguugc

SEQ ID NO: 55836 - RNA, 20 nt, Artificial Sequence
  LRRK2 RNA guide
gguuuuccuuccuuguugcu

SEQ ID NO: 55837 - RNA, 20 nt, Artificial Sequence
  LRRK2 RNA guide
guggguuuuccuuccuuguu

SEQ ID NO: 55838 - RNA, 20 nt, Artificial Sequence
  LRRK2 RNA guide
guuuuccuuccuuguugcug

SEQ ID NO: 55839 - RNA, 20 nt, Artificial Sequence
  LRRK2 RNA guide
uaaaauuguggguuuuccuu

SEQ ID NO: 55840 - RNA, 20 nt, Artificial Sequence
  LRRK2 RNA guide
uaacagcaacaaggaaggaa

SEQ ID NO: 55841 - RNA, 20 nt, Artificial Sequence
  LRRK2 RNA guide
uccuuccuuguugcuguuag

SEQ ID NO: 55842 - RNA, 20 nt, Artificial Sequence
  LRRK2 RNA guide
ugcuaacagcaacaaggaag

SEQ ID NO: 55843 - RNA, 20 nt, Artificial Sequence
  LRRK2 RNA guide
uggguuuuccuuccuuguug

SEQ ID NO: 55844 - RNA, 20 nt, Artificial Sequence
  LRRK2 RNA guide
uguggguuuuccuuccuugu

SEQ ID NO: 55845 - RNA, 20 nt, Artificial Sequence
  LRRK2 RNA guide
uuaaaauuguggguuuuccu

SEQ ID NO: 55846 - RNA, 20 nt, Artificial Sequence
  LRRK2 RNA guide
uuccuuccuuguugcuguua

SEQ ID NO: 55847 - RNA, 20 nt, Artificial Sequence
  LRRK2 RNA guide
uuguggguuuuccuuccuug

SEQ ID NO: 55848 - RNA, 20 nt, Artificial Sequence
  LRRK2 RNA guide
uuuccuuccuuguugcuguu

SEQ ID NO: 55849 - RNA, 20 nt, Artificial Sequence
  LRRK2 RNA guide
uuuuccuuccuuguugcugu

SEQ ID NO: 55850 - RNA, 21 nt, Artificial Sequence
  LRRK2 RNA guide
aaaauuguggguuuuccuucc

SEQ ID NO: 55851 - RNA, 21 nt, Artificial Sequence
  LRRK2 RNA guide
aaauuguggguuuuccuuccu

SEQ ID NO: 55852 - RNA, 21 nt, Artificial Sequence
  LRRK2 RNA guide
aacaaggaaggaaaacccaca

SEQ ID NO: 55853 - RNA, 21 nt, Artificial Sequence
  LRRK2 RNA guide
aacagcaacaaggaaggaaaa

SEQ ID NO: 55854 - RNA, 21 nt, Artificial Sequence
  LRRK2 RNA guide
aaggaaggaaaacccacaauu

SEQ ID NO: 55855 - RNA, 21 nt, Artificial Sequence
  LRRK2 RNA guide
aauuguggguuuuccuuccuu

SEQ ID NO: 55856 - RNA, 21 nt, Artificial Sequence
  LRRK2 RNA guide
acaaggaaggaaaacccacaa

SEQ ID NO: 55857 - RNA, 21 nt, Artificial Sequence
  LRRK2 RNA guide
acagcaacaaggaaggaaaac

SEQ ID NO: 55858 - RNA, 21 nt, Artificial Sequence
  LRRK2 RNA guide
acuuaaaauuguggguuuucc

SEQ ID NO: 55859 - RNA, 21 nt, Artificial Sequence
  LRRK2 RNA guide
agcaacaaggaaggaaaaccc

SEQ ID NO: 55860 - RNA, 21 nt, Artificial Sequence
  LRRK2 RNA guide
aggaaaacccacaauuuuaag

SEQ ID NO: 55861 - RNA, 21 nt, Artificial Sequence
  LRRK2 RNA guide
aggaaggaaaacccacaauuu

SEQ ID NO: 55862 - RNA, 21 nt, Artificial Sequence
  LRRK2 RNA guide
augcuaacagcaacaaggaag

SEQ ID NO: 55863 - RNA, 21 nt, Artificial Sequence
  LRRK2 RNA guide
auuguggguuuuccuuccuug

SEQ ID NO: 55864 - RNA, 21 nt, Artificial Sequence
  LRRK2 RNA guide
caacaaggaaggaaaacccac

SEQ ID NO: 55865 - RNA, 21 nt, Artificial Sequence
  LRRK2 RNA guide
caaggaaggaaaacccacaau

SEQ ID NO: 55866 - RNA, 21 nt, Artificial Sequence
  LRRK2 RNA guide
cagcaacaaggaaggaaaacc

SEQ ID NO: 55867 - RNA, 21 nt, Artificial Sequence
  LRRK2 RNA guide
ccuuccuuguugcuguuagca

SEQ ID NO: 55868 - RNA, 21 nt, Artificial Sequence
  LRRK2 RNA guide
cuaacagcaacaaggaaggaa

SEQ ID NO: 55869 - RNA, 21 nt, Artificial Sequence
  LRRK2 RNA guide
cuuaaaauuguggguuuuccu

SEQ ID NO: 55870 - RNA, 21 nt, Artificial Sequence
  LRRK2 RNA guide
gaaggaaaacccacaauuuua

SEQ ID NO: 55871 - RNA, 21 nt, Artificial Sequence
  LRRK2 RNA guide
gcaacaaggaaggaaaaccca

SEQ ID NO: 55872 - RNA, 21 nt, Artificial Sequence
  LRRK2 RNA guide
gcuaacagcaacaaggaagga

SEQ ID NO: 55873 - RNA, 21 nt, Artificial Sequence
  LRRK2 RNA guide
ggaaggaaaacccacaauuuu

SEQ ID NO: 55874 - RNA, 21 nt, Artificial Sequence
  LRRK2 RNA guide
ggguuuuccuuccuuguugcu

SEQ ID NO: 55875 - RNA, 21 nt, Artificial Sequence
  LRRK2 RNA guide
gguuuuccuuccuuguugcug

SEQ ID NO: 55876 - RNA, 21 nt, Artificial Sequence
  LRRK2 RNA guide
guggguuuuccuuccuuguug

SEQ ID NO: 55877 - RNA, 21 nt, Artificial Sequence
  LRRK2 RNA guide
guuuuccuuccuuguugcugu

SEQ ID NO: 55878 - RNA, 21 nt, Artificial Sequence
  LRRK2 RNA guide
uaaaauuguggguuuuccuuc

SEQ ID NO: 55879 - RNA, 21 nt, Artificial Sequence
  LRRK2 RNA guide
uaacagcaacaaggaaggaaa

SEQ ID NO: 55880 - RNA, 21 nt, Artificial Sequence
  LRRK2 RNA guide
uccuuccuuguugcuguuagc

SEQ ID NO: 55881 - RNA, 21 nt, Artificial Sequence
  LRRK2 RNA guide
ugcuaacagcaacaaggaagg

SEQ ID NO: 55882 - RNA, 21 nt, Artificial Sequence
  LRRK2 RNA guide
uggguuuuccuuccuuguugc

SEQ ID NO: 55883 - RNA, 21 nt, Artificial Sequence
  LRRK2 RNA guide
uguggguuuuccuuccuuguu

SEQ ID NO: 55884 - RNA, 21 nt, Artificial Sequence
  LRRK2 RNA guide
uuccuuccuuguugcuguuag

SEQ ID NO: 55885 - RNA, 21 nt, Artificial Sequence
  LRRK2 RNA guide
uuguggguuuuccuuccuugu

SEQ ID NO: 55886 - RNA, 21 nt, Artificial Sequence
  LRRK2 RNA guide
uuuccuuccuuguugcuguua

SEQ ID NO: 55887 - RNA, 21 nt, Artificial Sequence
  LRRK2 RNA guide
uuuuccuuccuuguugcuguu

SEQ ID NO: 55888 - RNA, 22 nt, Artificial Sequence
  LRRK2 RNA guide
aaaauuguggguuuuccuuccu

SEQ ID NO: 55889 - RNA, 22 nt, Artificial Sequence
  LRRK2 RNA guide
aaauuguggguuuuccuuccuu

SEQ ID NO: 55890 - RNA, 22 nt, Artificial Sequence
  LRRK2 RNA guide
aacaaggaaggaaaacccacaa

SEQ ID NO: 55891 - RNA, 22 nt, Artificial Sequence
  LRRK2 RNA guide
aacagcaacaaggaaggaaaac

SEQ ID NO: 55892 - RNA, 22 nt, Artificial Sequence
  LRRK2 RNA guide
aaggaaaacccacaauuuuaag

SEQ ID NO: 55893 - RNA, 22 nt, Artificial Sequence
  LRRK2 RNA guide
aaggaaggaaaacccacaauuu

SEQ ID NO: 55894 - RNA, 22 nt, Artificial Sequence
  LRRK2 RNA guide
aaugcuaacagcaacaaggaag

SEQ ID NO: 55895 - RNA, 22 nt, Artificial Sequence
  LRRK2 RNA guide
aauuguggguuuuccuuccuug

SEQ ID NO: 55896 - RNA, 22 nt, Artificial Sequence
  LRRK2 RNA guide
acaaggaaggaaaacccacaau

SEQ ID NO: 55897 - RNA, 22 nt, Artificial Sequence
  LRRK2 RNA guide
acagcaacaaggaaggaaaacc

SEQ ID NO: 55898 - RNA, 22 nt, Artificial Sequence
  LRRK2 RNA guide
acuuaaaauuguggguuuuccu

SEQ ID NO: 55899 - RNA, 22 nt, Artificial Sequence
  LRRK2 RNA guide
agcaacaaggaaggaaaaccca

SEQ ID NO: 55900 - RNA, 22 nt, Artificial Sequence
  LRRK2 RNA guide
aggaaaacccacaauuuuaagu

SEQ ID NO: 55901 - RNA, 22 nt, Artificial Sequence
  LRRK2 RNA guide
aggaaggaaaacccacaauuuu

SEQ ID NO: 55902 - RNA, 22 nt, Artificial Sequence
  LRRK2 RNA guide
augcuaacagcaacaaggaagg

SEQ ID NO: 55903 - RNA, 22 nt, Artificial Sequence
  LRRK2 RNA guide
auuguggguuuuccuuccuugu

SEQ ID NO: 55904 - RNA, 22 nt, Artificial Sequence
  LRRK2 RNA guide
caacaaggaaggaaaacccaca

SEQ ID NO: 55905 - RNA, 22 nt, Artificial Sequence
  LRRK2 RNA guide
caaggaaggaaaacccacaauu

SEQ ID NO: 55906 - RNA, 22 nt, Artificial Sequence
  LRRK2 RNA guide
cacuuaaaauuguggguuuucc

SEQ ID NO: 55907 - RNA, 22 nt, Artificial Sequence
  LRRK2 RNA guide
cagcaacaaggaaggaaaaccc

SEQ ID NO: 55908 - RNA, 22 nt, Artificial Sequence
  LRRK2 RNA guide
ccuuccuuguugcuguuagcau

SEQ ID NO: 55909 - RNA, 22 nt, Artificial Sequence
  LRRK2 RNA guide
cuaacagcaacaaggaaggaaa

SEQ ID NO: 55910 - RNA, 22 nt, Artificial Sequence
  LRRK2 RNA guide
cuuaaaauuguggguuuuccuu

SEQ ID NO: 55911 - RNA, 22 nt, Artificial Sequence
  LRRK2 RNA guide
gaaggaaaacccacaauuuuaa

SEQ ID NO: 55912 - RNA, 22 nt, Artificial Sequence
  LRRK2 RNA guide
gcaacaaggaaggaaaacccac

SEQ ID NO: 55913 - RNA, 22 nt, Artificial Sequence
  LRRK2 RNA guide
gcuaacagcaacaaggaaggaa

SEQ ID NO: 55914 - RNA, 22 nt, Artificial Sequence
  LRRK2 RNA guide
ggaaggaaaacccacaauuuua

SEQ ID NO: 55915 - RNA, 22 nt, Artificial Sequence
  LRRK2 RNA guide
ggguuuuccuuccuuguugcug

SEQ ID NO: 55916 - RNA, 22 nt, Artificial Sequence
  LRRK2 RNA guide
gguuuuccuuccuuguugcugu

SEQ ID NO: 55917 - RNA, 22 nt, Artificial Sequence
  LRRK2 RNA guide
guggguuuuccuuccuuguugc

SEQ ID NO: 55918 - RNA, 22 nt, Artificial Sequence
  LRRK2 RNA guide
guuuuccuuccuuguugcuguu

SEQ ID NO: 55919 - RNA, 22 nt, Artificial Sequence
  LRRK2 RNA guide
uaaaauuguggguuuuccuucc

SEQ ID NO: 55920 - RNA, 22 nt, Artificial Sequence
  LRRK2 RNA guide
uaacagcaacaaggaaggaaaa

SEQ ID NO: 55921 - RNA, 22 nt, Artificial Sequence
  LRRK2 RNA guide
uccuuccuuguugcuguuagca

SEQ ID NO: 55922 - RNA, 22 nt, Artificial Sequence
  LRRK2 RNA guide
ugcuaacagcaacaaggaagga

SEQ ID NO: 55923 - RNA, 22 nt, Artificial Sequence
  LRRK2 RNA guide
uggguuuuccuuccuuguugcu

SEQ ID NO: 55924 - RNA, 22 nt, Artificial Sequence
  LRRK2 RNA guide
uguggguuuuccuuccuuguug

SEQ ID NO: 55925 - RNA, 22 nt, Artificial Sequence
  LRRK2 RNA guide
uuaaaauuguggguuuuccuuc

SEQ ID NO: 55926 - RNA, 22 nt, Artificial Sequence
  LRRK2 RNA guide
uuccuuccuuguugcuguuagc

SEQ ID NO: 55927 - RNA, 22 nt, Artificial Sequence
  LRRK2 RNA guide
uuguggguuuuccuuccuuguu

SEQ ID NO: 55928 - RNA, 22 nt, Artificial Sequence
  LRRK2 RNA guide
uuuccuuccuuguugcuguuag

SEQ ID NO: 55929 - RNA, 22 nt, Artificial Sequence
  LRRK2 RNA guide
uuuuccuuccuuguugcuguua

SEQ ID NO: 55930 - RNA, 20 nt, Artificial Sequence
  LRRK2 RNA guide
aaaaaaguguucucucugau

SEQ ID NO: 55931 - RNA, 20 nt, Artificial Sequence
  LRRK2 RNA guide
aaaaaguguucucucugaua

SEQ ID NO: 55932 - RNA, 20 nt, Artificial Sequence
  LRRK2 RNA guide
aaaaguguucucucugauaa

SEQ ID NO: 55933 - RNA, 20 nt, Artificial Sequence
  LRRK2 RNA guide
aaaguguucucucugauaac

SEQ ID NO: 55934 - RNA, 20 nt, Artificial Sequence
  LRRK2 RNA guide
aaaucaguuaucagagagaa

SEQ ID NO: 55935 - RNA, 20 nt, Artificial Sequence
  LRRK2 RNA guide
aaguguucucucugauaacu

SEQ ID NO: 55936 - RNA, 20 nt, Artificial Sequence
  LRRK2 RNA guide
aaucaguuaucagagagaac

SEQ ID NO: 55937 - RNA, 20 nt, Artificial Sequence
  LRRK2 RNA guide
aguguucucucugauaacug

SEQ ID NO: 55938 - RNA, 20 nt, Artificial Sequence
  LRRK2 RNA guide
aguuaucagagagaacacuu

SEQ ID NO: 55939 - RNA, 20 nt, Artificial Sequence
  LRRK2 RNA guide
auaaaucaguuaucagagag

SEQ ID NO: 55940 - RNA, 20 nt, Artificial Sequence
  LRRK2 RNA guide
aucagagagaacacuuuuuu

SEQ ID NO: 55941 - RNA, 20 nt, Artificial Sequence
  LRRK2 RNA guide
aucaguuaucagagagaaca

SEQ ID NO: 55942 - RNA, 20 nt, Artificial Sequence
  LRRK2 RNA guide
caguuaucagagagaacacu

SEQ ID NO: 55943 - RNA, 20 nt, Artificial Sequence
  LRRK2 RNA guide
guuaucagagagaacacuuu

SEQ ID NO: 55944 - RNA, 20 nt, Artificial Sequence
  LRRK2 RNA guide
uaaaucaguuaucagagaga

SEQ ID NO: 55945 - RNA, 20 nt, Artificial Sequence
  LRRK2 RNA guide
uaucagagagaacacuuuuu

SEQ ID NO: 55946 - RNA, 20 nt, Artificial Sequence
  LRRK2 RNA guide
ucaguuaucagagagaacac

SEQ ID NO: 55947 - RNA, 20 nt, Artificial Sequence
  LRRK2 RNA guide
uuaucagagagaacacuuuu

SEQ ID NO: 55948 - RNA, 21 nt, Artificial Sequence
  LRRK2 RNA guide
aaaaguguucucucugauaac

SEQ ID NO: 55949 - RNA, 21 nt, Artificial Sequence
  LRRK2 RNA guide
aaaguguucucucugauaacu

SEQ ID NO: 55950 - RNA, 21 nt, Artificial Sequence
  LRRK2 RNA guide
aaaucaguuaucagagagaac

SEQ ID NO: 55951 - RNA, 21 nt, Artificial Sequence
  LRRK2 RNA guide
aaguguucucucugauaacug

SEQ ID NO: 55952 - RNA, 21 nt, Artificial Sequence
  LRRK2 RNA guide
aaucaguuaucagagagaaca

SEQ ID NO: 55953 - RNA, 21 nt, Artificial Sequence
  LRRK2 RNA guide
aguguucucucugauaacuga

SEQ ID NO: 55954 - RNA, 21 nt, Artificial Sequence
  LRRK2 RNA guide
aguuaucagagagaacacuuu

SEQ ID NO: 55955 - RNA, 21 nt, Artificial Sequence
  LRRK2 RNA guide
aucaguuaucagagagaacac

SEQ ID NO: 55956 - RNA, 21 nt, Artificial Sequence
  LRRK2 RNA guide
caguuaucagagagaacacuu

SEQ ID NO: 55957 - RNA, 21 nt, Artificial Sequence
  LRRK2 RNA guide
guuaucagagagaacacuuuu

SEQ ID NO: 55958 - RNA, 21 nt, Artificial Sequence
  LRRK2 RNA guide
ucaguuaucagagagaacacu

SEQ ID NO: 55959 - RNA, 22 nt, Artificial Sequence
  LRRK2 RNA guide
aaaaaguguucucucugauaac

SEQ ID NO: 55960 - RNA, 22 nt, Artificial Sequence
  LRRK2 RNA guide
aaaaguguucucucugauaacu

SEQ ID NO: 55961 - RNA, 22 nt, Artificial Sequence
  LRRK2 RNA guide
aaaguguucucucugauaacug

SEQ ID NO: 55962 - RNA, 22 nt, Artificial Sequence
  LRRK2 RNA guide
aaaucaguuaucagagagaaca

SEQ ID NO: 55963 - RNA, 22 nt, Artificial Sequence
  LRRK2 RNA guide
aaguguucucucugauaacuga

SEQ ID NO: 55964 - RNA, 22 nt, Artificial Sequence
  LRRK2 RNA guide
aaucaguuaucagagagaacac

SEQ ID NO: 55965 - RNA, 22 nt, Artificial Sequence
  LRRK2 RNA guide
aguguucucucugauaacugau

SEQ ID NO: 55966 - RNA, 22 nt, Artificial Sequence
  LRRK2 RNA guide
aguuaucagagagaacacuuuu

SEQ ID NO: 55967 - RNA, 22 nt, Artificial Sequence
  LRRK2 RNA guide
aucaguuaucagagagaacacu

SEQ ID NO: 55968 - RNA, 22 nt, Artificial Sequence
  LRRK2 RNA guide
caguuaucagagagaacacuuu

SEQ ID NO: 55969 - RNA, 22 nt, Artificial Sequence
  LRRK2 RNA guide
guuaucagagagaacacuuuuu

SEQ ID NO: 55970 - RNA, 22 nt, Artificial Sequence
  LRRK2 RNA guide
uaaaucaguuaucagagagaac

SEQ ID NO: 55971 - RNA, 22 nt, Artificial Sequence
  LRRK2 RNA guide
ucaguuaucagagagaacacuu

SEQ ID NO: 55972 - RNA, 20 nt, Artificial Sequence
  LRRK2 RNA guide
auuucuuuuuucugccaagu

SEQ ID NO: 55973 - RNA, 20 nt, Artificial Sequence
  LRRK2 RNA guide
cuuuuuucugccaaguauuu

SEQ ID NO: 55974 - RNA, 20 nt, Artificial Sequence
  LRRK2 RNA guide
ucuuuuuucugccaaguauu

SEQ ID NO: 55975 - RNA, 20 nt, Artificial Sequence
  LRRK2 RNA guide
uucuuuuuucugccaaguau

SEQ ID NO: 55976 - RNA, 20 nt, Artificial Sequence
  LRRK2 RNA guide
uuucuuuuuucugccaagua

SEQ ID NO: 55977 - RNA, 21 nt, Artificial Sequence
  LRRK2 RNA guide
gauuucuuuuuucugccaagu

SEQ ID NO: 55978 - RNA, 22 nt, Artificial Sequence
  LRRK2 RNA guide
agauuucuuuuuucugccaagu

SEQ ID NO: 55979 - RNA, 22 nt, Artificial Sequence
  LRRK2 RNA guide
gauuucuuuuuucugccaagua

SEQ ID NO: 55980 - RNA, 20 nt, Artificial Sequence
  LRRK2 RNA guide
aguuucuaauuacaugucca

SEQ ID NO: 55981 - RNA, 20 nt, Artificial Sequence
  LRRK2 RNA guide
cuuguuggacauguaauuag

SEQ ID NO: 55982 - RNA, 20 nt, Artificial Sequence
  LRRK2 RNA guide
ggacauguaauuagaaacua

SEQ ID NO: 55983 - RNA, 20 nt, Artificial Sequence
  LRRK2 RNA guide
guuggacauguaauuagaaa

SEQ ID NO: 55984 - RNA, 20 nt, Artificial Sequence
  LRRK2 RNA guide
uaguuucuaauuacaugucc

SEQ ID NO: 55985 - RNA, 20 nt, Artificial Sequence
  LRRK2 RNA guide
ucuuguuggacauguaauua

SEQ ID NO: 55986 - RNA, 20 nt, Artificial Sequence
  LRRK2 RNA guide
uggacauguaauuagaaacu

SEQ ID NO: 55987 - RNA, 20 nt, Artificial Sequence
  LRRK2 RNA guide
uguuggacauguaauuagaa

SEQ ID NO: 55988 - RNA, 20 nt, Artificial Sequence
  LRRK2 RNA guide
uuggacauguaauuagaaac

SEQ ID NO: 55989 - RNA, 20 nt, Artificial Sequence
  LRRK2 RNA guide
uuguuggacauguaauuaga

SEQ ID NO: 55990 - RNA, 21 nt, Artificial Sequence
  LRRK2 RNA guide
cucuuguuggacauguaauua

SEQ ID NO: 55991 - RNA, 21 nt, Artificial Sequence
  LRRK2 RNA guide
cuuguuggacauguaauuaga

SEQ ID NO: 55992 - RNA, 21 nt, Artificial Sequence
  LRRK2 RNA guide
guuggacauguaauuagaaac

SEQ ID NO: 55993 - RNA, 21 nt, Artificial Sequence
  LRRK2 RNA guide
ucuuguuggacauguaauuag

SEQ ID NO: 55994 - RNA, 22 nt, Artificial Sequence
  LRRK2 RNA guide
aguuucuaauuacauguccaac

SEQ ID NO: 55995 - RNA, 22 nt, Artificial Sequence
  LRRK2 RNA guide
cucuuguuggacauguaauuag

SEQ ID NO: 55996 - RNA, 22 nt, Artificial Sequence
  LRRK2 RNA guide
cuuguuggacauguaauuagaa

SEQ ID NO: 55997 - RNA, 22 nt, Artificial Sequence
  LRRK2 RNA guide
guuggacauguaauuagaaacu

SEQ ID NO: 55998 - RNA, 22 nt, Artificial Sequence
  LRRK2 RNA guide
ucucuuguuggacauguaauua

SEQ ID NO: 55999 - RNA, 22 nt, Artificial Sequence
  LRRK2 RNA guide
ucuuguuggacauguaauuaga

SEQ ID NO: 56000 - RNA, 22 nt, Artificial Sequence
  LRRK2 RNA guide
uguuggacauguaauuagaaac

SEQ ID NO: 56001 - RNA, 20 nt, Artificial Sequence
  LRRK2 RNA guide
acuuucuaauuacaugucca

SEQ ID NO: 56002 - RNA, 20 nt, Artificial Sequence
  LRRK2 RNA guide
ggacauguaauuagaaagua

SEQ ID NO: 56003 - RNA, 20 nt, Artificial Sequence
  LRRK2 RNA guide
uacuuucuaauuacaugucc

SEQ ID NO: 56004 - RNA, 20 nt, Artificial Sequence
  LRRK2 RNA guide
uggacauguaauuagaaagu

SEQ ID NO: 56005 - RNA, 20 nt, Artificial Sequence
  LRRK2 RNA guide
uuggacauguaauuagaaag

SEQ ID NO: 56006 - RNA, 21 nt, Artificial Sequence
  LRRK2 RNA guide
guuggacauguaauuagaaag

SEQ ID NO: 56007 - RNA, 22 nt, Artificial Sequence
  LRRK2 RNA guide
acuuucuaauuacauguccaac

SEQ ID NO: 56008 - RNA, 22 nt, Artificial Sequence
  LRRK2 RNA guide
guuggacauguaauuagaaagu

SEQ ID NO: 56009 - RNA, 22 nt, Artificial Sequence
  LRRK2 RNA guide
uguuggacauguaauuagaaag

SEQ ID NO: 56010 - RNA, 20 nt, Artificial Sequence
  LRRK2 RNA guide
aaaaaacaccuggauuaaga

SEQ ID NO: 56011 - RNA, 20 nt, Artificial Sequence
  LRRK2 RNA guide
aaaaacaccuggauuaagag

SEQ ID NO: 56012 - RNA, 20 nt, Artificial Sequence
  LRRK2 RNA guide
aaaacaccuggauuaagaga

SEQ ID NO: 56013 - RNA, 20 nt, Artificial Sequence
  LRRK2 RNA guide
aaacaccuggauuaagagau

SEQ ID NO: 56014 - RNA, 20 nt, Artificial Sequence
  LRRK2 RNA guide
aacaccuggauuaagagauu

SEQ ID NO: 56015 - RNA, 20 nt, Artificial Sequence
  LRRK2 RNA guide
aaucucuuaauccagguguu

SEQ ID NO: 56016 - RNA, 20 nt, Artificial Sequence
  LRRK2 RNA guide
aauuaaucucuuaauccagg

SEQ ID NO: 56017 - RNA, 20 nt, Artificial Sequence
  LRRK2 RNA guide
acaccuggauuaagagauua

SEQ ID NO: 56018 - RNA, 20 nt, Artificial Sequence
  LRRK2 RNA guide
aucucuuaauccagguguuu

SEQ ID NO: 56019 - RNA, 20 nt, Artificial Sequence
  LRRK2 RNA guide
auuaaucucuuaauccaggu

SEQ ID NO: 56020 - RNA, 20 nt, Artificial Sequence
  LRRK2 RNA guide
caauuaaucucuuaauccag

SEQ ID NO: 56021 - RNA, 20 nt, Artificial Sequence
  LRRK2 RNA guide
ccaauuaaucucuuaaucca

SEQ ID NO: 56022 - RNA, 20 nt, Artificial Sequence
  LRRK2 RNA guide
cucuuaauccagguguuuuu

SEQ ID NO: 56023 - RNA, 20 nt, Artificial Sequence
  LRRK2 RNA guide
ggguauagucucagaaaaaa

SEQ ID NO: 56024 - RNA, 20 nt, Artificial Sequence
  LRRK2 RNA guide
uaaucucuuaauccaggugu

SEQ ID NO: 56025 - RNA, 20 nt, Artificial Sequence
  LRRK2 RNA guide
uccaauuaaucucuuaaucc

SEQ ID NO: 56026 - RNA, 20 nt, Artificial Sequence
  LRRK2 RNA guide
ucucuuaauccagguguuuu

SEQ ID NO: 56027 - RNA, 20 nt, Artificial Sequence
  LRRK2 RNA guide
ucuuaauccagguguuuuuu

SEQ ID NO: 56028 - RNA, 20 nt, Artificial Sequence
  LRRK2 RNA guide
uuaaucucuuaauccaggug

SEQ ID NO: 56029 - RNA, 21 nt, Artificial Sequence
  LRRK2 RNA guide
aaaaaacaccuggauuaagag

SEQ ID NO: 56030 - RNA, 21 nt, Artificial Sequence
  LRRK2 RNA guide
aaaaacaccuggauuaagaga

SEQ ID NO: 56031 - RNA, 21 nt, Artificial Sequence
  LRRK2 RNA guide
aaaacaccuggauuaagagau

SEQ ID NO: 56032 - RNA, 21 nt, Artificial Sequence
  LRRK2 RNA guide
aaacaccuggauuaagagauu

SEQ ID NO: 56033 - RNA, 21 nt, Artificial Sequence
  LRRK2 RNA guide
aacaccuggauuaagagauua

SEQ ID NO: 56034 - RNA, 21 nt, Artificial Sequence
  LRRK2 RNA guide
aaucucuuaauccagguguuu

SEQ ID NO: 56035 - RNA, 21 nt, Artificial Sequence
  LRRK2 RNA guide
acaccuggauuaagagauuaa

SEQ ID NO: 56036 - RNA, 21 nt, Artificial Sequence
  LRRK2 RNA guide
aucucuuaauccagguguuuu

SEQ ID NO: 56037 - RNA, 21 nt, Artificial Sequence
  LRRK2 RNA guide
auuaaucucuuaauccaggug

SEQ ID NO: 56038 - RNA, 21 nt, Artificial Sequence
  LRRK2 RNA guide
caauuaaucucuuaauccagg

SEQ ID NO: 56039 - RNA, 21 nt, Artificial Sequence
  LRRK2 RNA guide
ccaauuaaucucuuaauccag

SEQ ID NO: 56040 - RNA, 21 nt, Artificial Sequence
  LRRK2 RNA guide
cucuuaauccagguguuuuuu

SEQ ID NO: 56041 - RNA, 21 nt, Artificial Sequence
  LRRK2 RNA guide
uaaucucuuaauccagguguu

SEQ ID NO: 56042 - RNA, 21 nt, Artificial Sequence
  LRRK2 RNA guide
ucucuuaauccagguguuuuu

SEQ ID NO: 56043 - RNA, 21 nt, Artificial Sequence
  LRRK2 RNA guide
uggguauagucucagaaaaaa

SEQ ID NO: 56044 - RNA, 21 nt, Artificial Sequence
  LRRK2 RNA guide
uuaaucucuuaauccaggugu

SEQ ID NO: 56045 - RNA, 22 nt, Artificial Sequence
  LRRK2 RNA guide
aaaaaacaccuggauuaagaga

SEQ ID NO: 56046 - RNA, 22 nt, Artificial Sequence
  LRRK2 RNA guide
aaaaacaccuggauuaagagau

SEQ ID NO: 56047 - RNA, 22 nt, Artificial Sequence
  LRRK2 RNA guide
aaaacaccuggauuaagagauu

SEQ ID NO: 56048 - RNA, 22 nt, Artificial Sequence
  LRRK2 RNA guide
aaacaccuggauuaagagauua

SEQ ID NO: 56049 - RNA, 22 nt, Artificial Sequence
  LRRK2 RNA guide
aacaccuggauuaagagauuaa

SEQ ID NO: 56050 - RNA, 22 nt, Artificial Sequence
  LRRK2 RNA guide
aaucucuuaauccagguguuuu

SEQ ID NO: 56051 - RNA, 22 nt, Artificial Sequence
  LRRK2 RNA guide
aauuaaucucuuaauccaggug

SEQ ID NO: 56052 - RNA, 22 nt, Artificial Sequence
  LRRK2 RNA guide
acaccuggauuaagagauuaau

SEQ ID NO: 56053 - RNA, 22 nt, Artificial Sequence
  LRRK2 RNA guide
aucucuuaauccagguguuuuu

SEQ ID NO: 56054 - RNA, 22 nt, Artificial Sequence
  LRRK2 RNA guide
auggguauagucucagaaaaaa

SEQ ID NO: 56055 - RNA, 22 nt, Artificial Sequence
  LRRK2 RNA guide
auuaaucucuuaauccaggugu

SEQ ID NO: 56056 - RNA, 22 nt, Artificial Sequence
  LRRK2 RNA guide
caauuaaucucuuaauccaggu

SEQ ID NO: 56057 - RNA, 22 nt, Artificial Sequence
  LRRK2 RNA guide
cauccaauuaaucucuuaaucc

SEQ ID NO: 56058 - RNA, 22 nt, Artificial Sequence
  LRRK2 RNA guide
ccaauuaaucucuuaauccagg

SEQ ID NO: 56059 - RNA, 22 nt, Artificial Sequence
  LRRK2 RNA guide
uaaucucuuaauccagguguuu

SEQ ID NO: 56060 - RNA, 22 nt, Artificial Sequence
  LRRK2 RNA guide
uccaauuaaucucuuaauccag

SEQ ID NO: 56061 - RNA, 22 nt, Artificial Sequence
  LRRK2 RNA guide
ucucuuaauccagguguuuuuu

SEQ ID NO: 56062 - RNA, 22 nt, Artificial Sequence
  LRRK2 RNA guide
uuaaucucuuaauccagguguu

SEQ ID NO: 56063 - RNA, 20 nt, Artificial Sequence
  LRRK2 RNA guide
aacaaugacaaaaagggaaa

SEQ ID NO: 56064 - RNA, 20 nt, Artificial Sequence
  LRRK2 RNA guide
aagggaaacucaaaauauuc

SEQ ID NO: 56065 - RNA, 20 nt, Artificial Sequence
  LRRK2 RNA guide
aaugacaaaaagggaaacuc

SEQ ID NO: 56066 - RNA, 20 nt, Artificial Sequence
  LRRK2 RNA guide
acaaaaagggaaacucaaaa

SEQ ID NO: 56067 - RNA, 20 nt, Artificial Sequence
  LRRK2 RNA guide
acaacaaugacaaaaaggga

SEQ ID NO: 56068 - RNA, 20 nt, Artificial Sequence
  LRRK2 RNA guide
acaaugacaaaaagggaaac

SEQ ID NO: 56069 - RNA, 20 nt, Artificial Sequence
  LRRK2 RNA guide
agaauauuuugaguuucccu

SEQ ID NO: 56070 - RNA, 20 nt, Artificial Sequence
  LRRK2 RNA guide
agggaaacucaaaauauucu

SEQ ID NO: 56071 - RNA, 20 nt, Artificial Sequence
  LRRK2 RNA guide
aguuucccuuuuugucauug

SEQ ID NO: 56072 - RNA, 20 nt, Artificial Sequence
  LRRK2 RNA guide
augacaaaaagggaaacuca

SEQ ID NO: 56073 - RNA, 20 nt, Artificial Sequence
  LRRK2 RNA guide
auucucugacaacaaugaca

SEQ ID NO: 56074 - RNA, 20 nt, Artificial Sequence
  LRRK2 RNA guide
auuuugaguuucccuuuuug

SEQ ID NO: 56075 - RNA, 20 nt, Artificial Sequence
  LRRK2 RNA guide
caaaaagggaaacucaaaau

SEQ ID NO: 56076 - RNA, 20 nt, Artificial Sequence
  LRRK2 RNA guide
caacaaugacaaaaagggaa

SEQ ID NO: 56077 - RNA, 20 nt, Artificial Sequence
  LRRK2 RNA guide
caaugacaaaaagggaaacu

SEQ ID NO: 56078 - RNA, 20 nt, Artificial Sequence
  LRRK2 RNA guide
cccuuuuugucauuguuguc

SEQ ID NO: 56079 - RNA, 20 nt, Artificial Sequence
  LRRK2 RNA guide
ccuuuuugucauuguuguca

SEQ ID NO: 56080 - RNA, 20 nt, Artificial Sequence
  LRRK2 RNA guide
cucugacaacaaugacaaaa

SEQ ID NO: 56081 - RNA, 20 nt, Artificial Sequence
  LRRK2 RNA guide
cugacaacaaugacaaaaag

SEQ ID NO: 56082 - RNA, 20 nt, Artificial Sequence
  LRRK2 RNA guide
cugagaauauuuugaguuuc

SEQ ID NO: 56083 - RNA, 20 nt, Artificial Sequence
  LRRK2 RNA guide
gaauauuuugaguuucccuu

SEQ ID NO: 56084 - RNA, 20 nt, Artificial Sequence
  LRRK2 RNA guide
gacaaaaagggaaacucaaa

SEQ ID NO: 56085 - RNA, 20 nt, Artificial Sequence
  LRRK2 RNA guide
gacaacaaugacaaaaaggg

SEQ ID NO: 56086 - RNA, 20 nt, Artificial Sequence
  LRRK2 RNA guide
gagaauauuuugaguuuccc

SEQ ID NO: 56087 - RNA, 20 nt, Artificial Sequence
  LRRK2 RNA guide
gaguuucccuuuuugucauu

SEQ ID NO: 56088 - RNA, 20 nt, Artificial Sequence
  LRRK2 RNA guide
guuucccuuuuugucauugu

SEQ ID NO: 56089 - RNA, 20 nt, Artificial Sequence
  LRRK2 RNA guide
ucccuuuuugucauuguugu

SEQ ID NO: 56090 - RNA, 20 nt, Artificial Sequence
  LRRK2 RNA guide
ucucugacaacaaugacaaa

SEQ ID NO: 56091 - RNA, 20 nt, Artificial Sequence
  LRRK2 RNA guide
ucugacaacaaugacaaaaa

SEQ ID NO: 56092 - RNA, 20 nt, Artificial Sequence
  LRRK2 RNA guide
ugacaaaaagggaaacucaa

SEQ ID NO: 56093 - RNA, 20 nt, Artificial Sequence
  LRRK2 RNA guide
ugacaacaaugacaaaaagg

SEQ ID NO: 56094 - RNA, 20 nt, Artificial Sequence
  LRRK2 RNA guide
ugagaauauuuugaguuucc

SEQ ID NO: 56095 - RNA, 20 nt, Artificial Sequence
  LRRK2 RNA guide
ugaguuucccuuuuugucau

SEQ ID NO: 56096 - RNA, 20 nt, Artificial Sequence
  LRRK2 RNA guide
uucccuuuuugucauuguug

SEQ ID NO: 56097 - RNA, 20 nt, Artificial Sequence
  LRRK2 RNA guide
uugaguuucccuuuuuguca

SEQ ID NO: 56098 - RNA, 20 nt, Artificial Sequence
  LRRK2 RNA guide
uuucccuuuuugucauuguu

SEQ ID NO: 56099 - RNA, 20 nt, Artificial Sequence
  LRRK2 RNA guide
uuugaguuucccuuuuuguc

SEQ ID NO: 56100 - RNA, 20 nt, Artificial Sequence
  LRRK2 RNA guide
uuuugaguuucccuuuuugu

SEQ ID NO: 56101 - RNA, 21 nt, Artificial Sequence
  LRRK2 RNA guide
aacaaugacaaaaagggaaac

SEQ ID NO: 56102 - RNA, 21 nt, Artificial Sequence
  LRRK2 RNA guide
aaugacaaaaagggaaacuca

SEQ ID NO: 56103 - RNA, 21 nt, Artificial Sequence
  LRRK2 RNA guide
acaacaaugacaaaaagggaa

SEQ ID NO: 56104 - RNA, 21 nt, Artificial Sequence
  LRRK2 RNA guide
acaaugacaaaaagggaaacu

SEQ ID NO: 56105 - RNA, 21 nt, Artificial Sequence
  LRRK2 RNA guide
agggaaacucaaaauauucuc

SEQ ID NO: 56106 - RNA, 21 nt, Artificial Sequence
  LRRK2 RNA guide
aguuucccuuuuugucauugu

SEQ ID NO: 56107 - RNA, 21 nt, Artificial Sequence
  LRRK2 RNA guide
augacaaaaagggaaacucaa

SEQ ID NO: 56108 - RNA, 21 nt, Artificial Sequence
  LRRK2 RNA guide
auucucugacaacaaugacaa

SEQ ID NO: 56109 - RNA, 21 nt, Artificial Sequence
  LRRK2 RNA guide
caacaaugacaaaaagggaaa

SEQ ID NO: 56110 - RNA, 21 nt, Artificial Sequence
  LRRK2 RNA guide
caaugacaaaaagggaaacuc

SEQ ID NO: 56111 - RNA, 21 nt, Artificial Sequence
  LRRK2 RNA guide
cauucucugacaacaaugaca

SEQ ID NO: 56112 - RNA, 21 nt, Artificial Sequence
  LRRK2 RNA guide
cccuuuuugucauuguuguca

SEQ ID NO: 56113 - RNA, 21 nt, Artificial Sequence
  LRRK2 RNA guide
ccuuuuugucauuguugucag

SEQ ID NO: 56114 - RNA, 21 nt, Artificial Sequence
  LRRK2 RNA guide
cucugacaacaaugacaaaaa

SEQ ID NO: 56115 - RNA, 21 nt, Artificial Sequence
  LRRK2 RNA guide
cugacaacaaugacaaaaagg

SEQ ID NO: 56116 - RNA, 21 nt, Artificial Sequence
  LRRK2 RNA guide
cugagaauauuuugaguuucc

SEQ ID NO: 56117 - RNA, 21 nt, Artificial Sequence
  LRRK2 RNA guide
gacaaaaagggaaacucaaaa

SEQ ID NO: 56118 - RNA, 21 nt, Artificial Sequence
  LRRK2 RNA guide
gacaacaaugacaaaaaggga

SEQ ID NO: 56119 - RNA, 21 nt, Artificial Sequence
  LRRK2 RNA guide
gagaauauuuugaguuucccu

SEQ ID NO: 56120 - RNA, 21 nt, Artificial Sequence
  LRRK2 RNA guide
gaguuucccuuuuugucauug

SEQ ID NO: 56121 - RNA, 21 nt, Artificial Sequence
  LRRK2 RNA guide
guuucccuuuuugucauuguu

SEQ ID NO: 56122 - RNA, 21 nt, Artificial Sequence
  LRRK2 RNA guide
ucccuuuuugucauuguuguc

SEQ ID NO: 56123 - RNA, 21 nt, Artificial Sequence
  LRRK2 RNA guide
ucucugacaacaaugacaaaa

SEQ ID NO: 56124 - RNA, 21 nt, Artificial Sequence
  LRRK2 RNA guide
ucugacaacaaugacaaaaag

SEQ ID NO: 56125 - RNA, 21 nt, Artificial Sequence
  LRRK2 RNA guide
ugacaaaaagggaaacucaaa

SEQ ID NO: 56126 - RNA, 21 nt, Artificial Sequence
  LRRK2 RNA guide
ugacaacaaugacaaaaaggg

SEQ ID NO: 56127 - RNA, 21 nt, Artificial Sequence
  LRRK2 RNA guide
ugagaauauuuugaguuuccc

SEQ ID NO: 56128 - RNA, 21 nt, Artificial Sequence
  LRRK2 RNA guide
ugaguuucccuuuuugucauu

SEQ ID NO: 56129 - RNA, 21 nt, Artificial Sequence
  LRRK2 RNA guide
uucccuuuuugucauuguugu

SEQ ID NO: 56130 - RNA, 21 nt, Artificial Sequence
  LRRK2 RNA guide
uucucugacaacaaugacaaa

SEQ ID NO: 56131 - RNA, 21 nt, Artificial Sequence
  LRRK2 RNA guide
uugaguuucccuuuuugucau

SEQ ID NO: 56132 - RNA, 21 nt, Artificial Sequence
  LRRK2 RNA guide
uuucccuuuuugucauuguug

SEQ ID NO: 56133 - RNA, 21 nt, Artificial Sequence
  LRRK2 RNA guide
uuugaguuucccuuuuuguca

SEQ ID NO: 56134 - RNA, 21 nt, Artificial Sequence
  LRRK2 RNA guide
uuuugaguuucccuuuuuguc

SEQ ID NO: 56135 - RNA, 22 nt, Artificial Sequence
  LRRK2 RNA guide
aacaaugacaaaaagggaaacu

SEQ ID NO: 56136 - RNA, 22 nt, Artificial Sequence
  LRRK2 RNA guide
aagggaaacucaaaauauucuc

SEQ ID NO: 56137 - RNA, 22 nt, Artificial Sequence
  LRRK2 RNA guide
aaugacaaaaagggaaacucaa

SEQ ID NO: 56138 - RNA, 22 nt, Artificial Sequence
  LRRK2 RNA guide
acaacaaugacaaaaagggaaa

SEQ ID NO: 56139 - RNA, 22 nt, Artificial Sequence
  LRRK2 RNA guide
acaaugacaaaaagggaaacuc

SEQ ID NO: 56140 - RNA, 22 nt, Artificial Sequence
  LRRK2 RNA guide
acauucucugacaacaaugaca

SEQ ID NO: 56141 - RNA, 22 nt, Artificial Sequence
  LRRK2 RNA guide
acugagaauauuuugaguuucc

SEQ ID NO: 56142 - RNA, 22 nt, Artificial Sequence
  LRRK2 RNA guide
agggaaacucaaaauauucuca

SEQ ID NO: 56143 - RNA, 22 nt, Artificial Sequence
  LRRK2 RNA guide
aguuucccuuuuugucauuguu

SEQ ID NO: 56144 - RNA, 22 nt, Artificial Sequence
  LRRK2 RNA guide
augacaaaaagggaaacucaaa

SEQ ID NO: 56145 - RNA, 22 nt, Artificial Sequence
  LRRK2 RNA guide
auucucugacaacaaugacaaa

SEQ ID NO: 56146 - RNA, 22 nt, Artificial Sequence
  LRRK2 RNA guide
auuuugaguuucccuuuuuguc

SEQ ID NO: 56147 - RNA, 22 nt, Artificial Sequence
  LRRK2 RNA guide
caacaaugacaaaaagggaaac

SEQ ID NO: 56148 - RNA, 22 nt, Artificial Sequence
  LRRK2 RNA guide
caaugacaaaaagggaaacuca

SEQ ID NO: 56149 - RNA, 22 nt, Artificial Sequence
  LRRK2 RNA guide
cauucucugacaacaaugacaa

SEQ ID NO: 56150 - RNA, 22 nt, Artificial Sequence
  LRRK2 RNA guide
cccuuuuugucauuguugucag

SEQ ID NO: 56151 - RNA, 22 nt, Artificial Sequence
  LRRK2 RNA guide
ccuuuuugucauuguugucaga

SEQ ID NO: 56152 - RNA, 22 nt, Artificial Sequence
  LRRK2 RNA guide
cucugacaacaaugacaaaaag

SEQ ID NO: 56153 - RNA, 22 nt, Artificial Sequence
  LRRK2 RNA guide
cugacaacaaugacaaaaaggg

SEQ ID NO: 56154 - RNA, 22 nt, Artificial Sequence
  LRRK2 RNA guide
cugagaauauuuugaguuuccc

SEQ ID NO: 56155 - RNA, 22 nt, Artificial Sequence
  LRRK2 RNA guide
gacaaaaagggaaacucaaaau

SEQ ID NO: 56156 - RNA, 22 nt, Artificial Sequence
  LRRK2 RNA guide
gacaacaaugacaaaaagggaa

SEQ ID NO: 56157 - RNA, 22 nt, Artificial Sequence
  LRRK2 RNA guide
gagaauauuuugaguuucccuu

SEQ ID NO: 56158 - RNA, 22 nt, Artificial Sequence
  LRRK2 RNA guide
gaguuucccuuuuugucauugu

SEQ ID NO: 56159 - RNA, 22 nt, Artificial Sequence
  LRRK2 RNA guide
guuucccuuuuugucauuguug

SEQ ID NO: 56160 - RNA, 22 nt, Artificial Sequence
  LRRK2 RNA guide
ucccuuuuugucauuguuguca

SEQ ID NO: 56161 - RNA, 22 nt, Artificial Sequence
  LRRK2 RNA guide
ucucugacaacaaugacaaaaa

SEQ ID NO: 56162 - RNA, 22 nt, Artificial Sequence
  LRRK2 RNA guide
ucugacaacaaugacaaaaagg

SEQ ID NO: 56163 - RNA, 22 nt, Artificial Sequence
  LRRK2 RNA guide
ugacaaaaagggaaacucaaaa

SEQ ID NO: 56164 - RNA, 22 nt, Artificial Sequence
  LRRK2 RNA guide
ugacaacaaugacaaaaaggga

SEQ ID NO: 56165 - RNA, 22 nt, Artificial Sequence
  LRRK2 RNA guide
ugagaauauuuugaguuucccu

SEQ ID NO: 56166 - RNA, 22 nt, Artificial Sequence
  LRRK2 RNA guide
ugaguuucccuuuuugucauug

SEQ ID NO: 56167 - RNA, 22 nt, Artificial Sequence
  LRRK2 RNA guide
uucccuuuuugucauuguuguc

SEQ ID NO: 56168 - RNA, 22 nt, Artificial Sequence
  LRRK2 RNA guide
uucucugacaacaaugacaaaa

SEQ ID NO: 56169 - RNA, 22 nt, Artificial Sequence
  LRRK2 RNA guide
uugaguuucccuuuuugucauu

SEQ ID NO: 56170 - RNA, 22 nt, Artificial Sequence
  LRRK2 RNA guide
uuucccuuuuugucauuguugu

SEQ ID NO: 56171 - RNA, 22 nt, Artificial Sequence
  LRRK2 RNA guide
uuugaguuucccuuuuugucau

SEQ ID NO: 56172 - RNA, 22 nt, Artificial Sequence
  LRRK2 RNA guide
uuuugaguuucccuuuuuguca

SEQ ID NO: 56173 - RNA, 20 nt, Artificial Sequence
  LRRK2 RNA guide
aaugacaaaaaaggaaacuc

SEQ ID NO: 56174 - RNA, 20 nt, Artificial Sequence
  LRRK2 RNA guide
acaacaaugacaaaaaagga

SEQ ID NO: 56175 - RNA, 20 nt, Artificial Sequence
  LRRK2 RNA guide
acaaugacaaaaaaggaaac

SEQ ID NO: 56176 - RNA, 20 nt, Artificial Sequence
  LRRK2 RNA guide
aguuuccuuuuuugucauug

SEQ ID NO: 56177 - RNA, 20 nt, Artificial Sequence
  LRRK2 RNA guide
augacaaaaaaggaaacuca

SEQ ID NO: 56178 - RNA, 20 nt, Artificial Sequence
  LRRK2 RNA guide
caacaaugacaaaaaaggaa

SEQ ID NO: 56179 - RNA, 20 nt, Artificial Sequence
  LRRK2 RNA guide
caaugacaaaaaaggaaacu

SEQ ID NO: 56180 - RNA, 20 nt, Artificial Sequence
  LRRK2 RNA guide
ccuuuuuugucauuguuguc

SEQ ID NO: 56181 - RNA, 20 nt, Artificial Sequence
  LRRK2 RNA guide
cugacaacaaugacaaaaaa

SEQ ID NO: 56182 - RNA, 20 nt, Artificial Sequence
  LRRK2 RNA guide
cuuuuuugucauuguuguca

SEQ ID NO: 56183 - RNA, 20 nt, Artificial Sequence
  LRRK2 RNA guide
gacaaaaaaggaaacucaaa

SEQ ID NO: 56184 - RNA, 20 nt, Artificial Sequence
  LRRK2 RNA guide
gacaacaaugacaaaaaagg

SEQ ID NO: 56185 - RNA, 20 nt, Artificial Sequence
  LRRK2 RNA guide
gagaauauuuugaguuuccu

SEQ ID NO: 56186 - RNA, 20 nt, Artificial Sequence
  LRRK2 RNA guide
gaguuuccuuuuuugucauu

SEQ ID NO: 56187 - RNA, 20 nt, Artificial Sequence
  LRRK2 RNA guide
guuuccuuuuuugucauugu

SEQ ID NO: 56188 - RNA, 20 nt, Artificial Sequence
  LRRK2 RNA guide
uccuuuuuugucauuguugu

SEQ ID NO: 56189 - RNA, 20 nt, Artificial Sequence
  LRRK2 RNA guide
ugacaaaaaaggaaacucaa

SEQ ID NO: 56190 - RNA, 20 nt, Artificial Sequence
  LRRK2 RNA guide
ugacaacaaugacaaaaaag

SEQ ID NO: 56191 - RNA, 20 nt, Artificial Sequence
  LRRK2 RNA guide
ugaguuuccuuuuuugucau

SEQ ID NO: 56192 - RNA, 20 nt, Artificial Sequence
  LRRK2 RNA guide
uuccuuuuuugucauuguug

SEQ ID NO: 56193 - RNA, 20 nt, Artificial Sequence
  LRRK2 RNA guide
uugaguuuccuuuuuuguca

SEQ ID NO: 56194 - RNA, 20 nt, Artificial Sequence
  LRRK2 RNA guide
uuugaguuuccuuuuuuguc

SEQ ID NO: 56195 - RNA, 21 nt, Artificial Sequence
  LRRK2 RNA guide
caaugacaaaaaaggaaacuc

SEQ ID NO: 56196 - RNA, 21 nt, Artificial Sequence
  LRRK2 RNA guide
ccuuuuuugucauuguuguca

SEQ ID NO: 56197 - RNA, 21 nt, Artificial Sequence
  LRRK2 RNA guide
cugacaacaaugacaaaaaag

SEQ ID NO: 56198 - RNA, 21 nt, Artificial Sequence
  LRRK2 RNA guide
cuuuuuugucauuguugucag

SEQ ID NO: 56199 - RNA, 21 nt, Artificial Sequence
  LRRK2 RNA guide
gacaacaaugacaaaaaagga

SEQ ID NO: 56200 - RNA, 21 nt, Artificial Sequence
  LRRK2 RNA guide
gaguuuccuuuuuugucauug

SEQ ID NO: 56201 - RNA, 21 nt, Artificial Sequence
  LRRK2 RNA guide
uccuuuuuugucauuguuguc

SEQ ID NO: 56202 - RNA, 21 nt, Artificial Sequence
  LRRK2 RNA guide
ugacaacaaugacaaaaaagg

SEQ ID NO: 56203 - RNA, 22 nt, Artificial Sequence
  LRRK2 RNA guide
acaaugacaaaaaaggaaacuc

SEQ ID NO: 56204 - RNA, 22 nt, Artificial Sequence
  LRRK2 RNA guide
caacaaugacaaaaaaggaaac

SEQ ID NO: 56205 - RNA, 22 nt, Artificial Sequence
  LRRK2 RNA guide
caaugacaaaaaaggaaacuca

SEQ ID NO: 56206 - RNA, 22 nt, Artificial Sequence
  LRRK2 RNA guide
ccuuuuuugucauuguugucag

SEQ ID NO: 56207 - RNA, 22 nt, Artificial Sequence
  LRRK2 RNA guide
cucugacaacaaugacaaaaaa

SEQ ID NO: 56208 - RNA, 22 nt, Artificial Sequence
  LRRK2 RNA guide
cugacaacaaugacaaaaaagg

SEQ ID NO: 56209 - RNA, 22 nt, Artificial Sequence
  LRRK2 RNA guide
cugagaauauuuugaguuuccu

SEQ ID NO: 56210 - RNA, 22 nt, Artificial Sequence
  LRRK2 RNA guide
cuuuuuugucauuguugucaga

SEQ ID NO: 56211 - RNA, 22 nt, Artificial Sequence
  LRRK2 RNA guide
gacaacaaugacaaaaaaggaa

SEQ ID NO: 56212 - RNA, 22 nt, Artificial Sequence
  LRRK2 RNA guide
gaguuuccuuuuuugucauugu

SEQ ID NO: 56213 - RNA, 22 nt, Artificial Sequence
  LRRK2 RNA guide
guuuccuuuuuugucauuguug

SEQ ID NO: 56214 - RNA, 22 nt, Artificial Sequence
  LRRK2 RNA guide
uccuuuuuugucauuguuguca

SEQ ID NO: 56215 - RNA, 22 nt, Artificial Sequence
  LRRK2 RNA guide
ucugacaacaaugacaaaaaag

SEQ ID NO: 56216 - RNA, 22 nt, Artificial Sequence
  LRRK2 RNA guide
ugacaacaaugacaaaaaagga

SEQ ID NO: 56217 - RNA, 22 nt, Artificial Sequence
  LRRK2 RNA guide
ugaguuuccuuuuuugucauug

SEQ ID NO: 56218 - RNA, 22 nt, Artificial Sequence
  LRRK2 RNA guide
uuccuuuuuugucauuguuguc

SEQ ID NO: 56219 - RNA, 20 nt, Artificial Sequence
  LRRK2 RNA guide
aaaagugucugcacagacac

SEQ ID NO: 56220 - RNA, 20 nt, Artificial Sequence
  LRRK2 RNA guide
aaagugucugcacagacacc

SEQ ID NO: 56221 - RNA, 20 nt, Artificial Sequence
  LRRK2 RNA guide
aacaggugucugugcagaca

SEQ ID NO: 56222 - RNA, 20 nt, Artificial Sequence
  LRRK2 RNA guide
aaccuuauuaacaggugucu

SEQ ID NO: 56223 - RNA, 20 nt, Artificial Sequence
  LRRK2 RNA guide
aagugucugcacagacaccu

SEQ ID NO: 56224 - RNA, 20 nt, Artificial Sequence
  LRRK2 RNA guide
acaccuguuaauaagguuga

SEQ ID NO: 56225 - RNA, 20 nt, Artificial Sequence
  LRRK2 RNA guide
acagacaccuguuaauaagg

SEQ ID NO: 56226 - RNA, 20 nt, Artificial Sequence
  LRRK2 RNA guide
acaggugucugugcagacac

SEQ ID NO: 56227 - RNA, 20 nt, Artificial Sequence
  LRRK2 RNA guide
accuguuaauaagguugaga

SEQ ID NO: 56228 - RNA, 20 nt, Artificial Sequence
  LRRK2 RNA guide
accuuauuaacaggugucug

SEQ ID NO: 56229 - RNA, 20 nt, Artificial Sequence
  LRRK2 RNA guide
acuuaaaagugucugcacag

SEQ ID NO: 56230 - RNA, 20 nt, Artificial Sequence
  LRRK2 RNA guide
agacaccuguuaauaagguu

SEQ ID NO: 56231 - RNA, 20 nt, Artificial Sequence
  LRRK2 RNA guide
aggugucugugcagacacuu

SEQ ID NO: 56232 - RNA, 20 nt, Artificial Sequence
  LRRK2 RNA guide
agugucugcacagacaccug

SEQ ID NO: 56233 - RNA, 20 nt, Artificial Sequence
  LRRK2 RNA guide
auuaacaggugucugugcag

SEQ ID NO: 56234 - RNA, 20 nt, Artificial Sequence
  LRRK2 RNA guide
caaccuuauuaacagguguc

SEQ ID NO: 56235 - RNA, 20 nt, Artificial Sequence
  LRRK2 RNA guide
cacagacaccuguuaauaag

SEQ ID NO: 56236 - RNA, 20 nt, Artificial Sequence
  LRRK2 RNA guide
caccuguuaauaagguugag

SEQ ID NO: 56237 - RNA, 20 nt, Artificial Sequence
  LRRK2 RNA guide
cagacaccuguuaauaaggu

SEQ ID NO: 56238 - RNA, 20 nt, Artificial Sequence
  LRRK2 RNA guide
caggugucugugcagacacu

SEQ ID NO: 56239 - RNA, 20 nt, Artificial Sequence
  LRRK2 RNA guide
ccuguuaauaagguugagac

SEQ ID NO: 56240 - RNA, 20 nt, Artificial Sequence
  LRRK2 RNA guide
ccuuauuaacaggugucugu

SEQ ID NO: 56241 - RNA, 20 nt, Artificial Sequence
  LRRK2 RNA guide
cucaaccuuauuaacaggug

SEQ ID NO: 56242 - RNA, 20 nt, Artificial Sequence
  LRRK2 RNA guide
cugcacagacaccuguuaau

SEQ ID NO: 56243 - RNA, 20 nt, Artificial Sequence
  LRRK2 RNA guide
cugucucaaccuuauuaaca

SEQ ID NO: 56244 - RNA, 20 nt, Artificial Sequence
  LRRK2 RNA guide
cuuaaaagugucugcacaga

SEQ ID NO: 56245 - RNA, 20 nt, Artificial Sequence
  LRRK2 RNA guide
cuuauuaacaggugucugug

SEQ ID NO: 56246 - RNA, 20 nt, Artificial Sequence
  LRRK2 RNA guide
gacaccuguuaauaagguug

SEQ ID NO: 56247 - RNA, 20 nt, Artificial Sequence
  LRRK2 RNA guide
gcacagacaccuguuaauaa

SEQ ID NO: 56248 - RNA, 20 nt, Artificial Sequence
  LRRK2 RNA guide
gucucaaccuuauuaacagg

SEQ ID NO: 56249 - RNA, 20 nt, Artificial Sequence
  LRRK2 RNA guide
gucugcacagacaccuguua

SEQ ID NO: 56250 - RNA, 20 nt, Artificial Sequence
  LRRK2 RNA guide
gugucugcacagacaccugu

SEQ ID NO: 56251 - RNA, 20 nt, Artificial Sequence
  LRRK2 RNA guide
uaaaagugucugcacagaca

SEQ ID NO: 56252 - RNA, 20 nt, Artificial Sequence
  LRRK2 RNA guide
uaacaggugucugugcagac

SEQ ID NO: 56253 - RNA, 20 nt, Artificial Sequence
  LRRK2 RNA guide
uauuaacaggugucugugca

SEQ ID NO: 56254 - RNA, 20 nt, Artificial Sequence
  LRRK2 RNA guide
ucaaccuuauuaacaggugu

SEQ ID NO: 56255 - RNA, 20 nt, Artificial Sequence
  LRRK2 RNA guide
ucucaaccuuauuaacaggu

SEQ ID NO: 56256 - RNA, 20 nt, Artificial Sequence
  LRRK2 RNA guide
ucugcacagacaccuguuaa

SEQ ID NO: 56257 - RNA, 20 nt, Artificial Sequence
  LRRK2 RNA guide
ucugucucaaccuuauuaac

SEQ ID NO: 56258 - RNA, 20 nt, Artificial Sequence
  LRRK2 RNA guide
ugcacagacaccuguuaaua

SEQ ID NO: 56259 - RNA, 20 nt, Artificial Sequence
  LRRK2 RNA guide
ugucucaaccuuauuaacag

SEQ ID NO: 56260 - RNA, 20 nt, Artificial Sequence
  LRRK2 RNA guide
uuaaaagugucugcacagac

SEQ ID NO: 56261 - RNA, 20 nt, Artificial Sequence
  LRRK2 RNA guide
uuaacaggugucugugcaga

SEQ ID NO: 56262 - RNA, 20 nt, Artificial Sequence
  LRRK2 RNA guide
uuauuaacaggugucugugc

SEQ ID NO: 56263 - RNA, 20 nt, Artificial Sequence
  LRRK2 RNA guide
uucugucucaaccuuauuaa

SEQ ID NO: 56264 - RNA, 20 nt, Artificial Sequence
  LRRK2 RNA guide
uuucugucucaaccuuauua

SEQ ID NO: 56265 - RNA, 20 nt, Artificial Sequence
  LRRK2 RNA guide
uuuucugucucaaccuuauu

SEQ ID NO: 56266 - RNA, 21 nt, Artificial Sequence
  LRRK2 RNA guide
aaaagugucugcacagacacc

SEQ ID NO: 56267 - RNA, 21 nt, Artificial Sequence
  LRRK2 RNA guide
aaagugucugcacagacaccu

SEQ ID NO: 56268 - RNA, 21 nt, Artificial Sequence
  LRRK2 RNA guide
aacaggugucugugcagacac

SEQ ID NO: 56269 - RNA, 21 nt, Artificial Sequence
  LRRK2 RNA guide
aaccuuauuaacaggugucug

SEQ ID NO: 56270 - RNA, 21 nt, Artificial Sequence
  LRRK2 RNA guide
aacuuaaaagugucugcacag

SEQ ID NO: 56271 - RNA, 21 nt, Artificial Sequence
  LRRK2 RNA guide
aagugucugcacagacaccug

SEQ ID NO: 56272 - RNA, 21 nt, Artificial Sequence
  LRRK2 RNA guide
acaccuguuaauaagguugag

SEQ ID NO: 56273 - RNA, 21 nt, Artificial Sequence
  LRRK2 RNA guide
acagacaccuguuaauaaggu

SEQ ID NO: 56274 - RNA, 21 nt, Artificial Sequence
  LRRK2 RNA guide
acaggugucugugcagacacu

SEQ ID NO: 56275 - RNA, 21 nt, Artificial Sequence
  LRRK2 RNA guide
accuguuaauaagguugagac

SEQ ID NO: 56276 - RNA, 21 nt, Artificial Sequence
  LRRK2 RNA guide
accuuauuaacaggugucugu

SEQ ID NO: 56277 - RNA, 21 nt, Artificial Sequence
  LRRK2 RNA guide
acuuaaaagugucugcacaga

SEQ ID NO: 56278 - RNA, 21 nt, Artificial Sequence
  LRRK2 RNA guide
agacaccuguuaauaagguug

SEQ ID NO: 56279 - RNA, 21 nt, Artificial Sequence
  LRRK2 RNA guide
aggugucugugcagacacuuu

SEQ ID NO: 56280 - RNA, 21 nt, Artificial Sequence
  LRRK2 RNA guide
agugucugcacagacaccugu

SEQ ID NO: 56281 - RNA, 21 nt, Artificial Sequence
  LRRK2 RNA guide
auuaacaggugucugugcaga

SEQ ID NO: 56282 - RNA, 21 nt, Artificial Sequence
  LRRK2 RNA guide
caaccuuauuaacaggugucu

SEQ ID NO: 56283 - RNA, 21 nt, Artificial Sequence
  LRRK2 RNA guide
cacagacaccuguuaauaagg

SEQ ID NO: 56284 - RNA, 21 nt, Artificial Sequence
  LRRK2 RNA guide
caccuguuaauaagguugaga

SEQ ID NO: 56285 - RNA, 21 nt, Artificial Sequence
  LRRK2 RNA guide
cagacaccuguuaauaagguu

SEQ ID NO: 56286 - RNA, 21 nt, Artificial Sequence
  LRRK2 RNA guide
caggugucugugcagacacuu

SEQ ID NO: 56287 - RNA, 21 nt, Artificial Sequence
  LRRK2 RNA guide
ccuguuaauaagguugagaca

SEQ ID NO: 56288 - RNA, 21 nt, Artificial Sequence
  LRRK2 RNA guide
ccuuauuaacaggugucugug

SEQ ID NO: 56289 - RNA, 21 nt, Artificial Sequence
  LRRK2 RNA guide
cucaaccuuauuaacaggugu

SEQ ID NO: 56290 - RNA, 21 nt, Artificial Sequence
  LRRK2 RNA guide
cugcacagacaccuguuaaua

SEQ ID NO: 56291 - RNA, 21 nt, Artificial Sequence
  LRRK2 RNA guide
cugucucaaccuuauuaacag

SEQ ID NO: 56292 - RNA, 21 nt, Artificial Sequence
  LRRK2 RNA guide
cuuaaaagugucugcacagac

SEQ ID NO: 56293 - RNA, 21 nt, Artificial Sequence
  LRRK2 RNA guide
cuuauuaacaggugucugugc

SEQ ID NO: 56294 - RNA, 21 nt, Artificial Sequence
  LRRK2 RNA guide
gacaccuguuaauaagguuga

SEQ ID NO: 56295 - RNA, 21 nt, Artificial Sequence
  LRRK2 RNA guide
gcacagacaccuguuaauaag

SEQ ID NO: 56296 - RNA, 21 nt, Artificial Sequence
  LRRK2 RNA guide
gucucaaccuuauuaacaggu

SEQ ID NO: 56297 - RNA, 21 nt, Artificial Sequence
  LRRK2 RNA guide
gucugcacagacaccuguuaa

SEQ ID NO: 56298 - RNA, 21 nt, Artificial Sequence
  LRRK2 RNA guide
gugucugcacagacaccuguu

SEQ ID NO: 56299 - RNA, 21 nt, Artificial Sequence
  LRRK2 RNA guide
uaaaagugucugcacagacac

SEQ ID NO: 56300 - RNA, 21 nt, Artificial Sequence
  LRRK2 RNA guide
uaacaggugucugugcagaca

SEQ ID NO: 56301 - RNA, 21 nt, Artificial Sequence
  LRRK2 RNA guide
uauuaacaggugucugugcag

SEQ ID NO: 56302 - RNA, 21 nt, Artificial Sequence
  LRRK2 RNA guide
ucaaccuuauuaacagguguc

SEQ ID NO: 56303 - RNA, 21 nt, Artificial Sequence
  LRRK2 RNA guide
ucucaaccuuauuaacaggug

SEQ ID NO: 56304 - RNA, 21 nt, Artificial Sequence
  LRRK2 RNA guide
ucugcacagacaccuguuaau

SEQ ID NO: 56305 - RNA, 21 nt, Artificial Sequence
  LRRK2 RNA guide
ucugucucaaccuuauuaaca

SEQ ID NO: 56306 - RNA, 21 nt, Artificial Sequence
  LRRK2 RNA guide
ugcacagacaccuguuaauaa

SEQ ID NO: 56307 - RNA, 21 nt, Artificial Sequence
  LRRK2 RNA guide
ugucucaaccuuauuaacagg

SEQ ID NO: 56308 - RNA, 21 nt, Artificial Sequence
  LRRK2 RNA guide
ugucugcacagacaccuguua

SEQ ID NO: 56309 - RNA, 21 nt, Artificial Sequence
  LRRK2 RNA guide
uuaaaagugucugcacagaca

SEQ ID NO: 56310 - RNA, 21 nt, Artificial Sequence
  LRRK2 RNA guide
uuaacaggugucugugcagac

SEQ ID NO: 56311 - RNA, 21 nt, Artificial Sequence
  LRRK2 RNA guide
uuauuaacaggugucugugca

SEQ ID NO: 56312 - RNA, 21 nt, Artificial Sequence
  LRRK2 RNA guide
uucugucucaaccuuauuaac

SEQ ID NO: 56313 - RNA, 22 nt, Artificial Sequence
  LRRK2 RNA guide
aaaagugucugcacagacaccu

SEQ ID NO: 56314 - RNA, 22 nt, Artificial Sequence
  LRRK2 RNA guide
aaacuuaaaagugucugcacag

SEQ ID NO: 56315 - RNA, 22 nt, Artificial Sequence
  LRRK2 RNA guide
aaagugucugcacagacaccug

SEQ ID NO: 56316 - RNA, 22 nt, Artificial Sequence
  LRRK2 RNA guide
aacaggugucugugcagacacu

SEQ ID NO: 56317 - RNA, 22 nt, Artificial Sequence
  LRRK2 RNA guide
aaccuuauuaacaggugucugu

SEQ ID NO: 56318 - RNA, 22 nt, Artificial Sequence
  LRRK2 RNA guide
aacuuaaaagugucugcacaga

SEQ ID NO: 56319 - RNA, 22 nt, Artificial Sequence
  LRRK2 RNA guide
aagugucugcacagacaccugu

SEQ ID NO: 56320 - RNA, 22 nt, Artificial Sequence
  LRRK2 RNA guide
acaccuguuaauaagguugaga

SEQ ID NO: 56321 - RNA, 22 nt, Artificial Sequence
  LRRK2 RNA guide
acagacaccuguuaauaagguu

SEQ ID NO: 56322 - RNA, 22 nt, Artificial Sequence
  LRRK2 RNA guide
acaggugucugugcagacacuu

SEQ ID NO: 56323 - RNA, 22 nt, Artificial Sequence
  LRRK2 RNA guide
accuguuaauaagguugagaca

SEQ ID NO: 56324 - RNA, 22 nt, Artificial Sequence
  LRRK2 RNA guide
accuuauuaacaggugucugug

SEQ ID NO: 56325 - RNA, 22 nt, Artificial Sequence
  LRRK2 RNA guide
acuuaaaagugucugcacagac

SEQ ID NO: 56326 - RNA, 22 nt, Artificial Sequence
  LRRK2 RNA guide
agacaccuguuaauaagguuga

SEQ ID NO: 56327 - RNA, 22 nt, Artificial Sequence
  LRRK2 RNA guide
aggugucugugcagacacuuuu

SEQ ID NO: 56328 - RNA, 22 nt, Artificial Sequence
  LRRK2 RNA guide
agugucugcacagacaccuguu

SEQ ID NO: 56329 - RNA, 22 nt, Artificial Sequence
  LRRK2 RNA guide
auuaacaggugucugugcagac

SEQ ID NO: 56330 - RNA, 22 nt, Artificial Sequence
  LRRK2 RNA guide
caaccuuauuaacaggugucug

SEQ ID NO: 56331 - RNA, 22 nt, Artificial Sequence
  LRRK2 RNA guide
cacagacaccuguuaauaaggu

SEQ ID NO: 56332 - RNA, 22 nt, Artificial Sequence
  LRRK2 RNA guide
caccuguuaauaagguugagac

SEQ ID NO: 56333 - RNA, 22 nt, Artificial Sequence
  LRRK2 RNA guide
cagacaccuguuaauaagguug

SEQ ID NO: 56334 - RNA, 22 nt, Artificial Sequence
  LRRK2 RNA guide
caggugucugugcagacacuuu

SEQ ID NO: 56335 - RNA, 22 nt, Artificial Sequence
  LRRK2 RNA guide
ccuguuaauaagguugagacag

SEQ ID NO: 56336 - RNA, 22 nt, Artificial Sequence
  LRRK2 RNA guide
ccuuauuaacaggugucugugc

SEQ ID NO: 56337 - RNA, 22 nt, Artificial Sequence
  LRRK2 RNA guide
cucaaccuuauuaacagguguc

SEQ ID NO: 56338 - RNA, 22 nt, Artificial Sequence
  LRRK2 RNA guide
cugcacagacaccuguuaauaa

SEQ ID NO: 56339 - RNA, 22 nt, Artificial Sequence
  LRRK2 RNA guide
cugucucaaccuuauuaacagg

SEQ ID NO: 56340 - RNA, 22 nt, Artificial Sequence
  LRRK2 RNA guide
cuuaaaagugucugcacagaca

SEQ ID NO: 56341 - RNA, 22 nt, Artificial Sequence
  LRRK2 RNA guide
cuuauuaacaggugucugugca

SEQ ID NO: 56342 - RNA, 22 nt, Artificial Sequence
  LRRK2 RNA guide
cuuuuucugucucaaccuuauu

SEQ ID NO: 56343 - RNA, 22 nt, Artificial Sequence
  LRRK2 RNA guide
gacaccuguuaauaagguugag

SEQ ID NO: 56344 - RNA, 22 nt, Artificial Sequence
  LRRK2 RNA guide
gcacagacaccuguuaauaagg

SEQ ID NO: 56345 - RNA, 22 nt, Artificial Sequence
  LRRK2 RNA guide
gucucaaccuuauuaacaggug

SEQ ID NO: 56346 - RNA, 22 nt, Artificial Sequence
  LRRK2 RNA guide
gucugcacagacaccuguuaau

SEQ ID NO: 56347 - RNA, 22 nt, Artificial Sequence
  LRRK2 RNA guide
gugucugcacagacaccuguua

SEQ ID NO: 56348 - RNA, 22 nt, Artificial Sequence
  LRRK2 RNA guide
uaaaagugucugcacagacacc

SEQ ID NO: 56349 - RNA, 22 nt, Artificial Sequence
  LRRK2 RNA guide
uaacaggugucugugcagacac

SEQ ID NO: 56350 - RNA, 22 nt, Artificial Sequence
  LRRK2 RNA guide
uauuaacaggugucugugcaga

SEQ ID NO: 56351 - RNA, 22 nt, Artificial Sequence
  LRRK2 RNA guide
ucaaccuuauuaacaggugucu

SEQ ID NO: 56352 - RNA, 22 nt, Artificial Sequence
  LRRK2 RNA guide
ucucaaccuuauuaacaggugu

SEQ ID NO: 56353 - RNA, 22 nt, Artificial Sequence
  LRRK2 RNA guide
ucugcacagacaccuguuaaua

SEQ ID NO: 56354 - RNA, 22 nt, Artificial Sequence
  LRRK2 RNA guide
ucugucucaaccuuauuaacag

SEQ ID NO: 56355 - RNA, 22 nt, Artificial Sequence
  LRRK2 RNA guide
ugcacagacaccuguuaauaag

SEQ ID NO: 56356 - RNA, 22 nt, Artificial Sequence
  LRRK2 RNA guide
ugucucaaccuuauuaacaggu

SEQ ID NO: 56357 - RNA, 22 nt, Artificial Sequence
  LRRK2 RNA guide
ugucugcacagacaccuguuaa

SEQ ID NO: 56358 - RNA, 22 nt, Artificial Sequence
  LRRK2 RNA guide
uuaaaagugucugcacagacac

SEQ ID NO: 56359 - RNA, 22 nt, Artificial Sequence
  LRRK2 RNA guide
uuaacaggugucugugcagaca

SEQ ID NO: 56360 - RNA, 22 nt, Artificial Sequence
  LRRK2 RNA guide
uuauuaacaggugucugugcag

SEQ ID NO: 56361 - RNA, 22 nt, Artificial Sequence
  LRRK2 RNA guide
uucugucucaaccuuauuaaca

SEQ ID NO: 56362 - RNA, 22 nt, Artificial Sequence
  LRRK2 RNA guide
uuucugucucaaccuuauuaac

SEQ ID NO: 56363 - RNA, 20 nt, Artificial Sequence
  LRRK2 RNA guide
aaagugucugcacagacaca

SEQ ID NO: 56364 - RNA, 20 nt, Artificial Sequence
  LRRK2 RNA guide
aacaugugucugugcagaca

SEQ ID NO: 56365 - RNA, 20 nt, Artificial Sequence
  LRRK2 RNA guide
aaccuuauuaacaugugucu

SEQ ID NO: 56366 - RNA, 20 nt, Artificial Sequence
  LRRK2 RNA guide
aagugucugcacagacacau

SEQ ID NO: 56367 - RNA, 20 nt, Artificial Sequence
  LRRK2 RNA guide
acacauguuaauaagguuga

SEQ ID NO: 56368 - RNA, 20 nt, Artificial Sequence
  LRRK2 RNA guide
acagacacauguuaauaagg

SEQ ID NO: 56369 - RNA, 20 nt, Artificial Sequence
  LRRK2 RNA guide
acaugugucugugcagacac

SEQ ID NO: 56370 - RNA, 20 nt, Artificial Sequence
  LRRK2 RNA guide
acauguuaauaagguugaga

SEQ ID NO: 56371 - RNA, 20 nt, Artificial Sequence
  LRRK2 RNA guide
accuuauuaacaugugucug

SEQ ID NO: 56372 - RNA, 20 nt, Artificial Sequence
  LRRK2 RNA guide
agacacauguuaauaagguu

SEQ ID NO: 56373 - RNA, 20 nt, Artificial Sequence
  LRRK2 RNA guide
agugucugcacagacacaug

SEQ ID NO: 56374 - RNA, 20 nt, Artificial Sequence
  LRRK2 RNA guide
augugucugugcagacacuu

SEQ ID NO: 56375 - RNA, 20 nt, Artificial Sequence
  LRRK2 RNA guide
auuaacaugugucugugcag

SEQ ID NO: 56376 - RNA, 20 nt, Artificial Sequence
  LRRK2 RNA guide
caaccuuauuaacauguguc

SEQ ID NO: 56377 - RNA, 20 nt, Artificial Sequence
  LRRK2 RNA guide
cacagacacauguuaauaag

SEQ ID NO: 56378 - RNA, 20 nt, Artificial Sequence
  LRRK2 RNA guide
cacauguuaauaagguugag

SEQ ID NO: 56379 - RNA, 20 nt, Artificial Sequence
  LRRK2 RNA guide
cagacacauguuaauaaggu

SEQ ID NO: 56380 - RNA, 20 nt, Artificial Sequence
  LRRK2 RNA guide
caugugucugugcagacacu

SEQ ID NO: 56381 - RNA, 20 nt, Artificial Sequence
  LRRK2 RNA guide
cauguuaauaagguugagac

SEQ ID NO: 56382 - RNA, 20 nt, Artificial Sequence
  LRRK2 RNA guide
ccuuauuaacaugugucugu

SEQ ID NO: 56383 - RNA, 20 nt, Artificial Sequence
  LRRK2 RNA guide
cucaaccuuauuaacaugug

SEQ ID NO: 56384 - RNA, 20 nt, Artificial Sequence
  LRRK2 RNA guide
cugcacagacacauguuaau

SEQ ID NO: 56385 - RNA, 20 nt, Artificial Sequence
  LRRK2 RNA guide
cuuauuaacaugugucugug

SEQ ID NO: 56386 - RNA, 20 nt, Artificial Sequence
  LRRK2 RNA guide
gacacauguuaauaagguug

SEQ ID NO: 56387 - RNA, 20 nt, Artificial Sequence
  LRRK2 RNA guide
gcacagacacauguuaauaa

SEQ ID NO: 56388 - RNA, 20 nt, Artificial Sequence
  LRRK2 RNA guide
gucucaaccuuauuaacaug

SEQ ID NO: 56389 - RNA, 20 nt, Artificial Sequence
  LRRK2 RNA guide
gucugcacagacacauguua

SEQ ID NO: 56390 - RNA, 20 nt, Artificial Sequence
  LRRK2 RNA guide
gugucugcacagacacaugu

SEQ ID NO: 56391 - RNA, 20 nt, Artificial Sequence
  LRRK2 RNA guide
uaacaugugucugugcagac

SEQ ID NO: 56392 - RNA, 20 nt, Artificial Sequence
  LRRK2 RNA guide
uauuaacaugugucugugca

SEQ ID NO: 56393 - RNA, 20 nt, Artificial Sequence
  LRRK2 RNA guide
ucaaccuuauuaacaugugu

SEQ ID NO: 56394 - RNA, 20 nt, Artificial Sequence
  LRRK2 RNA guide
ucucaaccuuauuaacaugu

SEQ ID NO: 56395 - RNA, 20 nt, Artificial Sequence
  LRRK2 RNA guide
ucugcacagacacauguuaa

SEQ ID NO: 56396 - RNA, 20 nt, Artificial Sequence
  LRRK2 RNA guide
ugcacagacacauguuaaua

SEQ ID NO: 56397 - RNA, 20 nt, Artificial Sequence
  LRRK2 RNA guide
ugucucaaccuuauuaacau

SEQ ID NO: 56398 - RNA, 20 nt, Artificial Sequence
  LRRK2 RNA guide
ugucugcacagacacauguu

SEQ ID NO: 56399 - RNA, 20 nt, Artificial Sequence
  LRRK2 RNA guide
uuaacaugugucugugcaga

SEQ ID NO: 56400 - RNA, 20 nt, Artificial Sequence
  LRRK2 RNA guide
uuauuaacaugugucugugc

SEQ ID NO: 56401 - RNA, 21 nt, Artificial Sequence
  LRRK2 RNA guide
aaaagugucugcacagacaca

SEQ ID NO: 56402 - RNA, 21 nt, Artificial Sequence
  LRRK2 RNA guide
aaagugucugcacagacacau

SEQ ID NO: 56403 - RNA, 21 nt, Artificial Sequence
  LRRK2 RNA guide
aacaugugucugugcagacac

SEQ ID NO: 56404 - RNA, 21 nt, Artificial Sequence
  LRRK2 RNA guide
aaccuuauuaacaugugucug

SEQ ID NO: 56405 - RNA, 21 nt, Artificial Sequence
  LRRK2 RNA guide
aagugucugcacagacacaug

SEQ ID NO: 56406 - RNA, 21 nt, Artificial Sequence
  LRRK2 RNA guide
acacauguuaauaagguugag

SEQ ID NO: 56407 - RNA, 21 nt, Artificial Sequence
  LRRK2 RNA guide
acagacacauguuaauaaggu

SEQ ID NO: 56408 - RNA, 21 nt, Artificial Sequence
  LRRK2 RNA guide
acaugugucugugcagacacu

SEQ ID NO: 56409 - RNA, 21 nt, Artificial Sequence
  LRRK2 RNA guide
acauguuaauaagguugagac

SEQ ID NO: 56410 - RNA, 21 nt, Artificial Sequence
  LRRK2 RNA guide
accuuauuaacaugugucugu

SEQ ID NO: 56411 - RNA, 21 nt, Artificial Sequence
  LRRK2 RNA guide
agacacauguuaauaagguug

SEQ ID NO: 56412 - RNA, 21 nt, Artificial Sequence
  LRRK2 RNA guide
agugucugcacagacacaugu

SEQ ID NO: 56413 - RNA, 21 nt, Artificial Sequence
  LRRK2 RNA guide
augugucugugcagacacuuu

SEQ ID NO: 56414 - RNA, 21 nt, Artificial Sequence
  LRRK2 RNA guide
auuaacaugugucugugcaga

SEQ ID NO: 56415 - RNA, 21 nt, Artificial Sequence
  LRRK2 RNA guide
caaccuuauuaacaugugucu

SEQ ID NO: 56416 - RNA, 21 nt, Artificial Sequence
  LRRK2 RNA guide
cacagacacauguuaauaagg

SEQ ID NO: 56417 - RNA, 21 nt, Artificial Sequence
  LRRK2 RNA guide
cacauguuaauaagguugaga

SEQ ID NO: 56418 - RNA, 21 nt, Artificial Sequence
  LRRK2 RNA guide
cagacacauguuaauaagguu

SEQ ID NO: 56419 - RNA, 21 nt, Artificial Sequence
  LRRK2 RNA guide
caugugucugugcagacacuu

SEQ ID NO: 56420 - RNA, 21 nt, Artificial Sequence
  LRRK2 RNA guide
cauguuaauaagguugagaca

SEQ ID NO: 56421 - RNA, 21 nt, Artificial Sequence
  LRRK2 RNA guide
ccuuauuaacaugugucugug

SEQ ID NO: 56422 - RNA, 21 nt, Artificial Sequence
  LRRK2 RNA guide
cucaaccuuauuaacaugugu

SEQ ID NO: 56423 - RNA, 21 nt, Artificial Sequence
  LRRK2 RNA guide
cugcacagacacauguuaaua

SEQ ID NO: 56424 - RNA, 21 nt, Artificial Sequence
  LRRK2 RNA guide
cugucucaaccuuauuaacau

SEQ ID NO: 56425 - RNA, 21 nt, Artificial Sequence
  LRRK2 RNA guide
cuuauuaacaugugucugugc

SEQ ID NO: 56426 - RNA, 21 nt, Artificial Sequence
  LRRK2 RNA guide
gacacauguuaauaagguuga

SEQ ID NO: 56427 - RNA, 21 nt, Artificial Sequence
  LRRK2 RNA guide
gcacagacacauguuaauaag

SEQ ID NO: 56428 - RNA, 21 nt, Artificial Sequence
  LRRK2 RNA guide
gucucaaccuuauuaacaugu

SEQ ID NO: 56429 - RNA, 21 nt, Artificial Sequence
  LRRK2 RNA guide
gucugcacagacacauguuaa

SEQ ID NO: 56430 - RNA, 21 nt, Artificial Sequence
  LRRK2 RNA guide
gugucugcacagacacauguu

SEQ ID NO: 56431 - RNA, 21 nt, Artificial Sequence
  LRRK2 RNA guide
uaacaugugucugugcagaca

SEQ ID NO: 56432 - RNA, 21 nt, Artificial Sequence
  LRRK2 RNA guide
uauuaacaugugucugugcag

SEQ ID NO: 56433 - RNA, 21 nt, Artificial Sequence
  LRRK2 RNA guide
ucaaccuuauuaacauguguc

SEQ ID NO: 56434 - RNA, 21 nt, Artificial Sequence
  LRRK2 RNA guide
ucucaaccuuauuaacaugug

SEQ ID NO: 56435 - RNA, 21 nt, Artificial Sequence
  LRRK2 RNA guide
ucugcacagacacauguuaau

SEQ ID NO: 56436 - RNA, 21 nt, Artificial Sequence
  LRRK2 RNA guide
ugcacagacacauguuaauaa

SEQ ID NO: 56437 - RNA, 21 nt, Artificial Sequence
  LRRK2 RNA guide
ugucucaaccuuauuaacaug

SEQ ID NO: 56438 - RNA, 21 nt, Artificial Sequence
  LRRK2 RNA guide
ugucugcacagacacauguua

SEQ ID NO: 56439 - RNA, 21 nt, Artificial Sequence
  LRRK2 RNA guide
uuaacaugugucugugcagac

SEQ ID NO: 56440 - RNA, 21 nt, Artificial Sequence
  LRRK2 RNA guide
uuauuaacaugugucugugca

SEQ ID NO: 56441 - RNA, 22 nt, Artificial Sequence
  LRRK2 RNA guide
aaaagugucugcacagacacau

SEQ ID NO: 56442 - RNA, 22 nt, Artificial Sequence
  LRRK2 RNA guide
aaagugucugcacagacacaug

SEQ ID NO: 56443 - RNA, 22 nt, Artificial Sequence
  LRRK2 RNA guide
aacaugugucugugcagacacu

SEQ ID NO: 56444 - RNA, 22 nt, Artificial Sequence
  LRRK2 RNA guide
aaccuuauuaacaugugucugu

SEQ ID NO: 56445 - RNA, 22 nt, Artificial Sequence
  LRRK2 RNA guide
aagugucugcacagacacaugu

SEQ ID NO: 56446 - RNA, 22 nt, Artificial Sequence
  LRRK2 RNA guide
acacauguuaauaagguugaga

SEQ ID NO: 56447 - RNA, 22 nt, Artificial Sequence
  LRRK2 RNA guide
acagacacauguuaauaagguu

SEQ ID NO: 56448 - RNA, 22 nt, Artificial Sequence
  LRRK2 RNA guide
acaugugucugugcagacacuu

SEQ ID NO: 56449 - RNA, 22 nt, Artificial Sequence
  LRRK2 RNA guide
acauguuaauaagguugagaca

SEQ ID NO: 56450 - RNA, 22 nt, Artificial Sequence
  LRRK2 RNA guide
accuuauuaacaugugucugug

SEQ ID NO: 56451 - RNA, 22 nt, Artificial Sequence
  LRRK2 RNA guide
agacacauguuaauaagguuga

SEQ ID NO: 56452 - RNA, 22 nt, Artificial Sequence
  LRRK2 RNA guide
agugucugcacagacacauguu

SEQ ID NO: 56453 - RNA, 22 nt, Artificial Sequence
  LRRK2 RNA guide
augugucugugcagacacuuuu

SEQ ID NO: 56454 - RNA, 22 nt, Artificial Sequence
  LRRK2 RNA guide
auuaacaugugucugugcagac

SEQ ID NO: 56455 - RNA, 22 nt, Artificial Sequence
  LRRK2 RNA guide
caaccuuauuaacaugugucug

SEQ ID NO: 56456 - RNA, 22 nt, Artificial Sequence
  LRRK2 RNA guide
cacagacacauguuaauaaggu

SEQ ID NO: 56457 - RNA, 22 nt, Artificial Sequence
  LRRK2 RNA guide
cacauguuaauaagguugagac

SEQ ID NO: 56458 - RNA, 22 nt, Artificial Sequence
  LRRK2 RNA guide
cagacacauguuaauaagguug

SEQ ID NO: 56459 - RNA, 22 nt, Artificial Sequence
  LRRK2 RNA guide
caugugucugugcagacacuuu

SEQ ID NO: 56460 - RNA, 22 nt, Artificial Sequence
  LRRK2 RNA guide
cauguuaauaagguugagacag

SEQ ID NO: 56461 - RNA, 22 nt, Artificial Sequence
  LRRK2 RNA guide
ccuuauuaacaugugucugugc

SEQ ID NO: 56462 - RNA, 22 nt, Artificial Sequence
  LRRK2 RNA guide
cucaaccuuauuaacauguguc

SEQ ID NO: 56463 - RNA, 22 nt, Artificial Sequence
  LRRK2 RNA guide
cugcacagacacauguuaauaa

SEQ ID NO: 56464 - RNA, 22 nt, Artificial Sequence
  LRRK2 RNA guide
cugucucaaccuuauuaacaug

SEQ ID NO: 56465 - RNA, 22 nt, Artificial Sequence
  LRRK2 RNA guide
cuuauuaacaugugucugugca

SEQ ID NO: 56466 - RNA, 22 nt, Artificial Sequence
  LRRK2 RNA guide
gacacauguuaauaagguugag

SEQ ID NO: 56467 - RNA, 22 nt, Artificial Sequence
  LRRK2 RNA guide
gcacagacacauguuaauaagg

SEQ ID NO: 56468 - RNA, 22 nt, Artificial Sequence
  LRRK2 RNA guide
gucucaaccuuauuaacaugug

SEQ ID NO: 56469 - RNA, 22 nt, Artificial Sequence
  LRRK2 RNA guide
gucugcacagacacauguuaau

SEQ ID NO: 56470 - RNA, 22 nt, Artificial Sequence
  LRRK2 RNA guide
gugucugcacagacacauguua

SEQ ID NO: 56471 - RNA, 22 nt, Artificial Sequence
  LRRK2 RNA guide
uaaaagugucugcacagacaca

SEQ ID NO: 56472 - RNA, 22 nt, Artificial Sequence
  LRRK2 RNA guide
uaacaugugucugugcagacac

SEQ ID NO: 56473 - RNA, 22 nt, Artificial Sequence
  LRRK2 RNA guide
uauuaacaugugucugugcaga

SEQ ID NO: 56474 - RNA, 22 nt, Artificial Sequence
  LRRK2 RNA guide
ucaaccuuauuaacaugugucu

SEQ ID NO: 56475 - RNA, 22 nt, Artificial Sequence
  LRRK2 RNA guide
ucucaaccuuauuaacaugugu

SEQ ID NO: 56476 - RNA, 22 nt, Artificial Sequence
  LRRK2 RNA guide
ucugcacagacacauguuaaua

SEQ ID NO: 56477 - RNA, 22 nt, Artificial Sequence
  LRRK2 RNA guide
ucugucucaaccuuauuaacau

SEQ ID NO: 56478 - RNA, 22 nt, Artificial Sequence
  LRRK2 RNA guide
ugcacagacacauguuaauaag

SEQ ID NO: 56479 - RNA, 22 nt, Artificial Sequence
  LRRK2 RNA guide
ugucucaaccuuauuaacaugu

SEQ ID NO: 56480 - RNA, 22 nt, Artificial Sequence
  LRRK2 RNA guide
ugucugcacagacacauguuaa

SEQ ID NO: 56481 - RNA, 22 nt, Artificial Sequence
  LRRK2 RNA guide
uuaacaugugucugugcagaca

SEQ ID NO: 56482 - RNA, 22 nt, Artificial Sequence
  LRRK2 RNA guide
uuauuaacaugugucugugcag

SEQ ID NO: 56483 - RNA, 20 nt, Artificial Sequence
  LRRK2 RNA guide
aaggcccacagagaugccug

SEQ ID NO: 56484 - RNA, 20 nt, Artificial Sequence
  LRRK2 RNA guide
acgggacuacgucucaaggc

SEQ ID NO: 56485 - RNA, 20 nt, Artificial Sequence
  LRRK2 RNA guide
acgucucaaggcccacagag

SEQ ID NO: 56486 - RNA, 20 nt, Artificial Sequence
  LRRK2 RNA guide
acuacgucucaaggcccaca

SEQ ID NO: 56487 - RNA, 20 nt, Artificial Sequence
  LRRK2 RNA guide
agagcaggcaucucuguggg

SEQ ID NO: 56488 - RNA, 20 nt, Artificial Sequence
  LRRK2 RNA guide
agcagagcaggcaucucugu

SEQ ID NO: 56489 - RNA, 20 nt, Artificial Sequence
  LRRK2 RNA guide
agcaggcaucucugugggcc

SEQ ID NO: 56490 - RNA, 20 nt, Artificial Sequence
  LRRK2 RNA guide
aggcaucucugugggccuug

SEQ ID NO: 56491 - RNA, 20 nt, Artificial Sequence
  LRRK2 RNA guide
aggcccacagagaugccugc

SEQ ID NO: 56492 - RNA, 20 nt, Artificial Sequence
  LRRK2 RNA guide
aucucugugggccuugagac

SEQ ID NO: 56493 - RNA, 20 nt, Artificial Sequence
  LRRK2 RNA guide
auuagcagagcaggcaucuc

SEQ ID NO: 56494 - RNA, 20 nt, Artificial Sequence
  LRRK2 RNA guide
caaggcccacagagaugccu

SEQ ID NO: 56495 - RNA, 20 nt, Artificial Sequence
  LRRK2 RNA guide
cagagcaggcaucucugugg

SEQ ID NO: 56496 - RNA, 20 nt, Artificial Sequence
  LRRK2 RNA guide
caggcaucucugugggccuu

SEQ ID NO: 56497 - RNA, 20 nt, Artificial Sequence
  LRRK2 RNA guide
caucucugugggccuugaga

SEQ ID NO: 56498 - RNA, 20 nt, Artificial Sequence
  LRRK2 RNA guide
cauuagcagagcaggcaucu

SEQ ID NO: 56499 - RNA, 20 nt, Artificial Sequence
  LRRK2 RNA guide
ccacagagaugccugcucug

SEQ ID NO: 56500 - RNA, 20 nt, Artificial Sequence
  LRRK2 RNA guide
cccacagagaugccugcucu

SEQ ID NO: 56501 - RNA, 20 nt, Artificial Sequence
  LRRK2 RNA guide
cgggacuacgucucaaggcc

SEQ ID NO: 56502 - RNA, 20 nt, Artificial Sequence
  LRRK2 RNA guide
cgucucaaggcccacagaga

SEQ ID NO: 56503 - RNA, 20 nt, Artificial Sequence
  LRRK2 RNA guide
cuacgucucaaggcccacag

SEQ ID NO: 56504 - RNA, 20 nt, Artificial Sequence
  LRRK2 RNA guide
cucaaggcccacagagaugc

SEQ ID NO: 56505 - RNA, 20 nt, Artificial Sequence
  LRRK2 RNA guide
cucugugggccuugagacgu

SEQ ID NO: 56506 - RNA, 20 nt, Artificial Sequence
  LRRK2 RNA guide
cugugggccuugagacguag

SEQ ID NO: 56507 - RNA, 20 nt, Artificial Sequence
  LRRK2 RNA guide
gacuacgucucaaggcccac

SEQ ID NO: 56508 - RNA, 20 nt, Artificial Sequence
  LRRK2 RNA guide
gagcaggcaucucugugggc

SEQ ID NO: 56509 - RNA, 20 nt, Artificial Sequence
  LRRK2 RNA guide
gcagagcaggcaucucugug

SEQ ID NO: 56510 - RNA, 20 nt, Artificial Sequence
  LRRK2 RNA guide
gcaggcaucucugugggccu

SEQ ID NO: 56511 - RNA, 20 nt, Artificial Sequence
  LRRK2 RNA guide
gcaucucugugggccuugag

SEQ ID NO: 56512 - RNA, 20 nt, Artificial Sequence
  LRRK2 RNA guide
gcccacagagaugccugcuc

SEQ ID NO: 56513 - RNA, 20 nt, Artificial Sequence
  LRRK2 RNA guide
ggacuacgucucaaggccca

SEQ ID NO: 56514 - RNA, 20 nt, Artificial Sequence
  LRRK2 RNA guide
ggcaucucugugggccuuga

SEQ ID NO: 56515 - RNA, 20 nt, Artificial Sequence
  LRRK2 RNA guide
ggcccacagagaugccugcu

SEQ ID NO: 56516 - RNA, 20 nt, Artificial Sequence
  LRRK2 RNA guide
gggacuacgucucaaggccc

SEQ ID NO: 56517 - RNA, 20 nt, Artificial Sequence
  LRRK2 RNA guide
gucucaaggcccacagagau

SEQ ID NO: 56518 - RNA, 20 nt, Artificial Sequence
  LRRK2 RNA guide
gugggccuugagacguaguc

SEQ ID NO: 56519 - RNA, 20 nt, Artificial Sequence
  LRRK2 RNA guide
uacgggacuacgucucaagg

SEQ ID NO: 56520 - RNA, 20 nt, Artificial Sequence
  LRRK2 RNA guide
uacgucucaaggcccacaga

SEQ ID NO: 56521 - RNA, 20 nt, Artificial Sequence
  LRRK2 RNA guide
uagcagagcaggcaucucug

SEQ ID NO: 56522 - RNA, 20 nt, Artificial Sequence
  LRRK2 RNA guide
ucaaggcccacagagaugcc

SEQ ID NO: 56523 - RNA, 20 nt, Artificial Sequence
  LRRK2 RNA guide
ucucaaggcccacagagaug

SEQ ID NO: 56524 - RNA, 20 nt, Artificial Sequence
  LRRK2 RNA guide
ucucugugggccuugagacg

SEQ ID NO: 56525 - RNA, 20 nt, Artificial Sequence
  LRRK2 RNA guide
ucugugggccuugagacgua

SEQ ID NO: 56526 - RNA, 20 nt, Artificial Sequence
  LRRK2 RNA guide
ugggccuugagacguagucc

SEQ ID NO: 56527 - RNA, 20 nt, Artificial Sequence
  LRRK2 RNA guide
ugugggccuugagacguagu

SEQ ID NO: 56528 - RNA, 20 nt, Artificial Sequence
  LRRK2 RNA guide
uuacgggacuacgucucaag

SEQ ID NO: 56529 - RNA, 20 nt, Artificial Sequence
  LRRK2 RNA guide
uuagcagagcaggcaucucu

SEQ ID NO: 56530 - RNA, 20 nt, Artificial Sequence
  LRRK2 RNA guide
uuuacgggacuacgucucaa

SEQ ID NO: 56531 - RNA, 21 nt, Artificial Sequence
  LRRK2 RNA guide
aaggcccacagagaugccugc

SEQ ID NO: 56532 - RNA, 21 nt, Artificial Sequence
  LRRK2 RNA guide
acgggacuacgucucaaggcc

SEQ ID NO: 56533 - RNA, 21 nt, Artificial Sequence
  LRRK2 RNA guide
acgucucaaggcccacagaga

SEQ ID NO: 56534 - RNA, 21 nt, Artificial Sequence
  LRRK2 RNA guide
acuacgucucaaggcccacag

SEQ ID NO: 56535 - RNA, 21 nt, Artificial Sequence
  LRRK2 RNA guide
agagcaggcaucucugugggc

SEQ ID NO: 56536 - RNA, 21 nt, Artificial Sequence
  LRRK2 RNA guide
agcagagcaggcaucucugug

SEQ ID NO: 56537 - RNA, 21 nt, Artificial Sequence
  LRRK2 RNA guide
agcaggcaucucugugggccu

SEQ ID NO: 56538 - RNA, 21 nt, Artificial Sequence
  LRRK2 RNA guide
aggcaucucugugggccuuga

SEQ ID NO: 56539 - RNA, 21 nt, Artificial Sequence
  LRRK2 RNA guide
aggcccacagagaugccugcu

SEQ ID NO: 56540 - RNA, 21 nt, Artificial Sequence
  LRRK2 RNA guide
aucucugugggccuugagacg

SEQ ID NO: 56541 - RNA, 21 nt, Artificial Sequence
  LRRK2 RNA guide
auuagcagagcaggcaucucu

SEQ ID NO: 56542 - RNA, 21 nt, Artificial Sequence
  LRRK2 RNA guide
caaggcccacagagaugccug

SEQ ID NO: 56543 - RNA, 21 nt, Artificial Sequence
  LRRK2 RNA guide
cagagcaggcaucucuguggg

SEQ ID NO: 56544 - RNA, 21 nt, Artificial Sequence
  LRRK2 RNA guide
caggcaucucugugggccuug

SEQ ID NO: 56545 - RNA, 21 nt, Artificial Sequence
  LRRK2 RNA guide
caucucugugggccuugagac

SEQ ID NO: 56546 - RNA, 21 nt, Artificial Sequence
  LRRK2 RNA guide
cauuagcagagcaggcaucuc

SEQ ID NO: 56547 - RNA, 21 nt, Artificial Sequence
  LRRK2 RNA guide
ccacagagaugccugcucugc

SEQ ID NO: 56548 - RNA, 21 nt, Artificial Sequence
  LRRK2 RNA guide
ccauuagcagagcaggcaucu

SEQ ID NO: 56549 - RNA, 21 nt, Artificial Sequence
  LRRK2 RNA guide
cccacagagaugccugcucug

SEQ ID NO: 56550 - RNA, 21 nt, Artificial Sequence
  LRRK2 RNA guide
cgggacuacgucucaaggccc

SEQ ID NO: 56551 - RNA, 21 nt, Artificial Sequence
  LRRK2 RNA guide
cgucucaaggcccacagagau

SEQ ID NO: 56552 - RNA, 21 nt, Artificial Sequence
  LRRK2 RNA guide
cuacgucucaaggcccacaga

SEQ ID NO: 56553 - RNA, 21 nt, Artificial Sequence
  LRRK2 RNA guide
cucaaggcccacagagaugcc

SEQ ID NO: 56554 - RNA, 21 nt, Artificial Sequence
  LRRK2 RNA guide
cucugugggccuugagacgua

SEQ ID NO: 56555 - RNA, 21 nt, Artificial Sequence
  LRRK2 RNA guide
cugugggccuugagacguagu

SEQ ID NO: 56556 - RNA, 21 nt, Artificial Sequence
  LRRK2 RNA guide
gacuacgucucaaggcccaca

SEQ ID NO: 56557 - RNA, 21 nt, Artificial Sequence
  LRRK2 RNA guide
gagcaggcaucucugugggcc

SEQ ID NO: 56558 - RNA, 21 nt, Artificial Sequence
  LRRK2 RNA guide
gcagagcaggcaucucugugg

SEQ ID NO: 56559 - RNA, 21 nt, Artificial Sequence
  LRRK2 RNA guide
gcaggcaucucugugggccuu

SEQ ID NO: 56560 - RNA, 21 nt, Artificial Sequence
  LRRK2 RNA guide
gcaucucugugggccuugaga

SEQ ID NO: 56561 - RNA, 21 nt, Artificial Sequence
  LRRK2 RNA guide
gcccacagagaugccugcucu

SEQ ID NO: 56562 - RNA, 21 nt, Artificial Sequence
  LRRK2 RNA guide
ggacuacgucucaaggcccac

SEQ ID NO: 56563 - RNA, 21 nt, Artificial Sequence
  LRRK2 RNA guide
ggcaucucugugggccuugag

SEQ ID NO: 56564 - RNA, 21 nt, Artificial Sequence
  LRRK2 RNA guide
ggcccacagagaugccugcuc

SEQ ID NO: 56565 - RNA, 21 nt, Artificial Sequence
  LRRK2 RNA guide
gggacuacgucucaaggccca

SEQ ID NO: 56566 - RNA, 21 nt, Artificial Sequence
  LRRK2 RNA guide
gucucaaggcccacagagaug

SEQ ID NO: 56567 - RNA, 21 nt, Artificial Sequence
  LRRK2 RNA guide
gugggccuugagacguagucc

SEQ ID NO: 56568 - RNA, 21 nt, Artificial Sequence
  LRRK2 RNA guide
uacgggacuacgucucaaggc

SEQ ID NO: 56569 - RNA, 21 nt, Artificial Sequence
  LRRK2 RNA guide
uacgucucaaggcccacagag

SEQ ID NO: 56570 - RNA, 21 nt, Artificial Sequence
  LRRK2 RNA guide
uagcagagcaggcaucucugu

SEQ ID NO: 56571 - RNA, 21 nt, Artificial Sequence
  LRRK2 RNA guide
ucaaggcccacagagaugccu

SEQ ID NO: 56572 - RNA, 21 nt, Artificial Sequence
  LRRK2 RNA guide
ucucaaggcccacagagaugc

SEQ ID NO: 56573 - RNA, 21 nt, Artificial Sequence
  LRRK2 RNA guide
ucucugugggccuugagacgu

SEQ ID NO: 56574 - RNA, 21 nt, Artificial Sequence
  LRRK2 RNA guide
ucugugggccuugagacguag

SEQ ID NO: 56575 - RNA, 21 nt, Artificial Sequence
  LRRK2 RNA guide
ugggccuugagacguaguccc

SEQ ID NO: 56576 - RNA, 21 nt, Artificial Sequence
  LRRK2 RNA guide
ugugggccuugagacguaguc

SEQ ID NO: 56577 - RNA, 21 nt, Artificial Sequence
  LRRK2 RNA guide
uuacgggacuacgucucaagg

SEQ ID NO: 56578 - RNA, 21 nt, Artificial Sequence
  LRRK2 RNA guide
uuagcagagcaggcaucucug

SEQ ID NO: 56579 - RNA, 21 nt, Artificial Sequence
  LRRK2 RNA guide
uuuacgggacuacgucucaag

SEQ ID NO: 56580 - RNA, 21 nt, Artificial Sequence
  LRRK2 RNA guide
uuuuacgggacuacgucucaa

SEQ ID NO: 56581 - RNA, 22 nt, Artificial Sequence
  LRRK2 RNA guide
aaggcccacagagaugccugcu

SEQ ID NO: 56582 - RNA, 22 nt, Artificial Sequence
  LRRK2 RNA guide
acgggacuacgucucaaggccc

SEQ ID NO: 56583 - RNA, 22 nt, Artificial Sequence
  LRRK2 RNA guide
acgucucaaggcccacagagau

SEQ ID NO: 56584 - RNA, 22 nt, Artificial Sequence
  LRRK2 RNA guide
acuacgucucaaggcccacaga

SEQ ID NO: 56585 - RNA, 22 nt, Artificial Sequence
  LRRK2 RNA guide
agagcaggcaucucugugggcc

SEQ ID NO: 56586 - RNA, 22 nt, Artificial Sequence
  LRRK2 RNA guide
agcagagcaggcaucucugugg

SEQ ID NO: 56587 - RNA, 22 nt, Artificial Sequence
  LRRK2 RNA guide
agcaggcaucucugugggccuu

SEQ ID NO: 56588 - RNA, 22 nt, Artificial Sequence
  LRRK2 RNA guide
aggcaucucugugggccuugag

SEQ ID NO: 56589 - RNA, 22 nt, Artificial Sequence
  LRRK2 RNA guide
aggcccacagagaugccugcuc

SEQ ID NO: 56590 - RNA, 22 nt, Artificial Sequence
  LRRK2 RNA guide
aucucugugggccuugagacgu

SEQ ID NO: 56591 - RNA, 22 nt, Artificial Sequence
  LRRK2 RNA guide
auuagcagagcaggcaucucug

SEQ ID NO: 56592 - RNA, 22 nt, Artificial Sequence
  LRRK2 RNA guide
caaggcccacagagaugccugc

SEQ ID NO: 56593 - RNA, 22 nt, Artificial Sequence
  LRRK2 RNA guide
cagagcaggcaucucugugggc

SEQ ID NO: 56594 - RNA, 22 nt, Artificial Sequence
  LRRK2 RNA guide
caggcaucucugugggccuuga

SEQ ID NO: 56595 - RNA, 22 nt, Artificial Sequence
  LRRK2 RNA guide
caucucugugggccuugagacg

SEQ ID NO: 56596 - RNA, 22 nt, Artificial Sequence
  LRRK2 RNA guide
cauuagcagagcaggcaucucu

SEQ ID NO: 56597 - RNA, 22 nt, Artificial Sequence
  LRRK2 RNA guide
ccacagagaugccugcucugcu

SEQ ID NO: 56598 - RNA, 22 nt, Artificial Sequence
  LRRK2 RNA guide
ccauuagcagagcaggcaucuc

SEQ ID NO: 56599 - RNA, 22 nt, Artificial Sequence
  LRRK2 RNA guide
cccacagagaugccugcucugc

SEQ ID NO: 56600 - RNA, 22 nt, Artificial Sequence
  LRRK2 RNA guide
cccauuagcagagcaggcaucu

SEQ ID NO: 56601 - RNA, 22 nt, Artificial Sequence
  LRRK2 RNA guide
cgggacuacgucucaaggccca

SEQ ID NO: 56602 - RNA, 22 nt, Artificial Sequence
  LRRK2 RNA guide
cgucucaaggcccacagagaug

SEQ ID NO: 56603 - RNA, 22 nt, Artificial Sequence
  LRRK2 RNA guide
cuacgucucaaggcccacagag

SEQ ID NO: 56604 - RNA, 22 nt, Artificial Sequence
  LRRK2 RNA guide
cucaaggcccacagagaugccu

SEQ ID NO: 56605 - RNA, 22 nt, Artificial Sequence
  LRRK2 RNA guide
cucugugggccuugagacguag

SEQ ID NO: 56606 - RNA, 22 nt, Artificial Sequence
  LRRK2 RNA guide
cugugggccuugagacguaguc

SEQ ID NO: 56607 - RNA, 22 nt, Artificial Sequence
  LRRK2 RNA guide
gacuacgucucaaggcccacag

SEQ ID NO: 56608 - RNA, 22 nt, Artificial Sequence
  LRRK2 RNA guide
gagcaggcaucucugugggccu

SEQ ID NO: 56609 - RNA, 22 nt, Artificial Sequence
  LRRK2 RNA guide
gcagagcaggcaucucuguggg

SEQ ID NO: 56610 - RNA, 22 nt, Artificial Sequence
  LRRK2 RNA guide
gcaggcaucucugugggccuug

SEQ ID NO: 56611 - RNA, 22 nt, Artificial Sequence
  LRRK2 RNA guide
gcaucucugugggccuugagac

SEQ ID NO: 56612 - RNA, 22 nt, Artificial Sequence
  LRRK2 RNA guide
gcccacagagaugccugcucug

SEQ ID NO: 56613 - RNA, 22 nt, Artificial Sequence
  LRRK2 RNA guide
ggacuacgucucaaggcccaca

SEQ ID NO: 56614 - RNA, 22 nt, Artificial Sequence
  LRRK2 RNA guide
ggcaucucugugggccuugaga

SEQ ID NO: 56615 - RNA, 22 nt, Artificial Sequence
  LRRK2 RNA guide
ggcccacagagaugccugcucu

SEQ ID NO: 56616 - RNA, 22 nt, Artificial Sequence
  LRRK2 RNA guide
gggacuacgucucaaggcccac

SEQ ID NO: 56617 - RNA, 22 nt, Artificial Sequence
  LRRK2 RNA guide
gucucaaggcccacagagaugc

SEQ ID NO: 56618 - RNA, 22 nt, Artificial Sequence
  LRRK2 RNA guide
gugggccuugagacguaguccc

SEQ ID NO: 56619 - RNA, 22 nt, Artificial Sequence
  LRRK2 RNA guide
guuuuacgggacuacgucucaa

SEQ ID NO: 56620 - RNA, 22 nt, Artificial Sequence
  LRRK2 RNA guide
uacgggacuacgucucaaggcc

SEQ ID NO: 56621 - RNA, 22 nt, Artificial Sequence
  LRRK2 RNA guide
uacgucucaaggcccacagaga

SEQ ID NO: 56622 - RNA, 22 nt, Artificial Sequence
  LRRK2 RNA guide
uagcagagcaggcaucucugug

SEQ ID NO: 56623 - RNA, 22 nt, Artificial Sequence
  LRRK2 RNA guide
ucaaggcccacagagaugccug

SEQ ID NO: 56624 - RNA, 22 nt, Artificial Sequence
  LRRK2 RNA guide
ucucaaggcccacagagaugcc

SEQ ID NO: 56625 - RNA, 22 nt, Artificial Sequence
  LRRK2 RNA guide
ucucugugggccuugagacgua

SEQ ID NO: 56626 - RNA, 22 nt, Artificial Sequence
  LRRK2 RNA guide
ucugugggccuugagacguagu

SEQ ID NO: 56627 - RNA, 22 nt, Artificial Sequence
  LRRK2 RNA guide
ugggccuugagacguagucccg

SEQ ID NO: 56628 - RNA, 22 nt, Artificial Sequence
  LRRK2 RNA guide
ugugggccuugagacguagucc

SEQ ID NO: 56629 - RNA, 22 nt, Artificial Sequence
  LRRK2 RNA guide
uuacgggacuacgucucaaggc

SEQ ID NO: 56630 - RNA, 22 nt, Artificial Sequence
  LRRK2 RNA guide
uuagcagagcaggcaucucugu

SEQ ID NO: 56631 - RNA, 22 nt, Artificial Sequence
  LRRK2 RNA guide
uuuacgggacuacgucucaagg

SEQ ID NO: 56632 - RNA, 22 nt, Artificial Sequence
  LRRK2 RNA guide
uuuuacgggacuacgucucaag

SEQ ID NO: 56633 - RNA, 20 nt, Artificial Sequence
  LRRK2 RNA guide
aaggccuacagagaugccug

SEQ ID NO: 56634 - RNA, 20 nt, Artificial Sequence
  LRRK2 RNA guide
acgucucaaggccuacagag

SEQ ID NO: 56635 - RNA, 20 nt, Artificial Sequence
  LRRK2 RNA guide
acuacgucucaaggccuaca

SEQ ID NO: 56636 - RNA, 20 nt, Artificial Sequence
  LRRK2 RNA guide
agagcaggcaucucuguagg

SEQ ID NO: 56637 - RNA, 20 nt, Artificial Sequence
  LRRK2 RNA guide
agcaggcaucucuguaggcc

SEQ ID NO: 56638 - RNA, 20 nt, Artificial Sequence
  LRRK2 RNA guide
aggcaucucuguaggccuug

SEQ ID NO: 56639 - RNA, 20 nt, Artificial Sequence
  LRRK2 RNA guide
aggccuacagagaugccugc

SEQ ID NO: 56640 - RNA, 20 nt, Artificial Sequence
  LRRK2 RNA guide
aucucuguaggccuugagac

SEQ ID NO: 56641 - RNA, 20 nt, Artificial Sequence
  LRRK2 RNA guide
caaggccuacagagaugccu

SEQ ID NO: 56642 - RNA, 20 nt, Artificial Sequence
  LRRK2 RNA guide
cagagcaggcaucucuguag

SEQ ID NO: 56643 - RNA, 20 nt, Artificial Sequence
  LRRK2 RNA guide
caggcaucucuguaggccuu

SEQ ID NO: 56644 - RNA, 20 nt, Artificial Sequence
  LRRK2 RNA guide
caucucuguaggccuugaga

SEQ ID NO: 56645 - RNA, 20 nt, Artificial Sequence
  LRRK2 RNA guide
ccuacagagaugccugcucu

SEQ ID NO: 56646 - RNA, 20 nt, Artificial Sequence
  LRRK2 RNA guide
cgucucaaggccuacagaga

SEQ ID NO: 56647 - RNA, 20 nt, Artificial Sequence
  LRRK2 RNA guide
cuacagagaugccugcucug

SEQ ID NO: 56648 - RNA, 20 nt, Artificial Sequence
  LRRK2 RNA guide
cuacgucucaaggccuacag

SEQ ID NO: 56649 - RNA, 20 nt, Artificial Sequence
  LRRK2 RNA guide
cucaaggccuacagagaugc

SEQ ID NO: 56650 - RNA, 20 nt, Artificial Sequence
  LRRK2 RNA guide
cucuguaggccuugagacgu

SEQ ID NO: 56651 - RNA, 20 nt, Artificial Sequence
  LRRK2 RNA guide
cuguaggccuugagacguag

SEQ ID NO: 56652 - RNA, 20 nt, Artificial Sequence
  LRRK2 RNA guide
gacuacgucucaaggccuac

SEQ ID NO: 56653 - RNA, 20 nt, Artificial Sequence
  LRRK2 RNA guide
gagcaggcaucucuguaggc

SEQ ID NO: 56654 - RNA, 20 nt, Artificial Sequence
  LRRK2 RNA guide
gcagagcaggcaucucugua

SEQ ID NO: 56655 - RNA, 20 nt, Artificial Sequence
  LRRK2 RNA guide
gcaggcaucucuguaggccu

SEQ ID NO: 56656 - RNA, 20 nt, Artificial Sequence
  LRRK2 RNA guide
gcaucucuguaggccuugag

SEQ ID NO: 56657 - RNA, 20 nt, Artificial Sequence
  LRRK2 RNA guide
gccuacagagaugccugcuc

SEQ ID NO: 56658 - RNA, 20 nt, Artificial Sequence
  LRRK2 RNA guide
ggacuacgucucaaggccua

SEQ ID NO: 56659 - RNA, 20 nt, Artificial Sequence
  LRRK2 RNA guide
ggcaucucuguaggccuuga

SEQ ID NO: 56660 - RNA, 20 nt, Artificial Sequence
  LRRK2 RNA guide
ggccuacagagaugccugcu

SEQ ID NO: 56661 - RNA, 20 nt, Artificial Sequence
  LRRK2 RNA guide
gggacuacgucucaaggccu

SEQ ID NO: 56662 - RNA, 20 nt, Artificial Sequence
  LRRK2 RNA guide
guaggccuugagacguaguc

SEQ ID NO: 56663 - RNA, 20 nt, Artificial Sequence
  LRRK2 RNA guide
gucucaaggccuacagagau

SEQ ID NO: 56664 - RNA, 20 nt, Artificial Sequence
  LRRK2 RNA guide
uacgucucaaggccuacaga

SEQ ID NO: 56665 - RNA, 20 nt, Artificial Sequence
  LRRK2 RNA guide
uaggccuugagacguagucc

SEQ ID NO: 56666 - RNA, 20 nt, Artificial Sequence
  LRRK2 RNA guide
ucaaggccuacagagaugcc

SEQ ID NO: 56667 - RNA, 20 nt, Artificial Sequence
  LRRK2 RNA guide
ucucaaggccuacagagaug

SEQ ID NO: 56668 - RNA, 20 nt, Artificial Sequence
  LRRK2 RNA guide
ucucuguaggccuugagacg

SEQ ID NO: 56669 - RNA, 20 nt, Artificial Sequence
  LRRK2 RNA guide
ucuguaggccuugagacgua

SEQ ID NO: 56670 - RNA, 20 nt, Artificial Sequence
  LRRK2 RNA guide
uguaggccuugagacguagu

SEQ ID NO: 56671 - RNA, 21 nt, Artificial Sequence
  LRRK2 RNA guide
aaggccuacagagaugccugc

SEQ ID NO: 56672 - RNA, 21 nt, Artificial Sequence
  LRRK2 RNA guide
acgucucaaggccuacagaga

SEQ ID NO: 56673 - RNA, 21 nt, Artificial Sequence
  LRRK2 RNA guide
acuacgucucaaggccuacag

SEQ ID NO: 56674 - RNA, 21 nt, Artificial Sequence
  LRRK2 RNA guide
agagcaggcaucucuguaggc

SEQ ID NO: 56675 - RNA, 21 nt, Artificial Sequence
  LRRK2 RNA guide
agcagagcaggcaucucugua

SEQ ID NO: 56676 - RNA, 21 nt, Artificial Sequence
  LRRK2 RNA guide
agcaggcaucucuguaggccu

SEQ ID NO: 56677 - RNA, 21 nt, Artificial Sequence
  LRRK2 RNA guide
aggcaucucuguaggccuuga

SEQ ID NO: 56678 - RNA, 21 nt, Artificial Sequence
  LRRK2 RNA guide
aggccuacagagaugccugcu

SEQ ID NO: 56679 - RNA, 21 nt, Artificial Sequence
  LRRK2 RNA guide
aucucuguaggccuugagacg

SEQ ID NO: 56680 - RNA, 21 nt, Artificial Sequence
  LRRK2 RNA guide
caaggccuacagagaugccug

SEQ ID NO: 56681 - RNA, 21 nt, Artificial Sequence
  LRRK2 RNA guide
cagagcaggcaucucuguagg

SEQ ID NO: 56682 - RNA, 21 nt, Artificial Sequence
  LRRK2 RNA guide
caggcaucucuguaggccuug

SEQ ID NO: 56683 - RNA, 21 nt, Artificial Sequence
  LRRK2 RNA guide
caucucuguaggccuugagac

SEQ ID NO: 56684 - RNA, 21 nt, Artificial Sequence
  LRRK2 RNA guide
ccuacagagaugccugcucug

SEQ ID NO: 56685 - RNA, 21 nt, Artificial Sequence
  LRRK2 RNA guide
cgggacuacgucucaaggccu

SEQ ID NO: 56686 - RNA, 21 nt, Artificial Sequence
  LRRK2 RNA guide
cgucucaaggccuacagagau

SEQ ID NO: 56687 - RNA, 21 nt, Artificial Sequence
  LRRK2 RNA guide
cuacagagaugccugcucugc

SEQ ID NO: 56688 - RNA, 21 nt, Artificial Sequence
  LRRK2 RNA guide
cuacgucucaaggccuacaga

SEQ ID NO: 56689 - RNA, 21 nt, Artificial Sequence
  LRRK2 RNA guide
cucaaggccuacagagaugcc

SEQ ID NO: 56690 - RNA, 21 nt, Artificial Sequence
  LRRK2 RNA guide
cucuguaggccuugagacgua

SEQ ID NO: 56691 - RNA, 21 nt, Artificial Sequence
  LRRK2 RNA guide
cuguaggccuugagacguagu

SEQ ID NO: 56692 - RNA, 21 nt, Artificial Sequence
  LRRK2 RNA guide
gacuacgucucaaggccuaca

SEQ ID NO: 56693 - RNA, 21 nt, Artificial Sequence
  LRRK2 RNA guide
gagcaggcaucucuguaggcc

SEQ ID NO: 56694 - RNA, 21 nt, Artificial Sequence
  LRRK2 RNA guide
gcagagcaggcaucucuguag

SEQ ID NO: 56695 - RNA, 21 nt, Artificial Sequence
  LRRK2 RNA guide
gcaggcaucucuguaggccuu

SEQ ID NO: 56696 - RNA, 21 nt, Artificial Sequence
  LRRK2 RNA guide
gcaucucuguaggccuugaga

SEQ ID NO: 56697 - RNA, 21 nt, Artificial Sequence
  LRRK2 RNA guide
gccuacagagaugccugcucu

SEQ ID NO: 56698 - RNA, 21 nt, Artificial Sequence
  LRRK2 RNA guide
ggacuacgucucaaggccuac

SEQ ID NO: 56699 - RNA, 21 nt, Artificial Sequence
  LRRK2 RNA guide
ggcaucucuguaggccuugag

SEQ ID NO: 56700 - RNA, 21 nt, Artificial Sequence
  LRRK2 RNA guide
ggccuacagagaugccugcuc

SEQ ID NO: 56701 - RNA, 21 nt, Artificial Sequence
  LRRK2 RNA guide
gggacuacgucucaaggccua

SEQ ID NO: 56702 - RNA, 21 nt, Artificial Sequence
  LRRK2 RNA guide
guaggccuugagacguagucc

SEQ ID NO: 56703 - RNA, 21 nt, Artificial Sequence
  LRRK2 RNA guide
gucucaaggccuacagagaug

SEQ ID NO: 56704 - RNA, 21 nt, Artificial Sequence
  LRRK2 RNA guide
uacgucucaaggccuacagag

SEQ ID NO: 56705 - RNA, 21 nt, Artificial Sequence
  LRRK2 RNA guide
uaggccuugagacguaguccc

SEQ ID NO: 56706 - RNA, 21 nt, Artificial Sequence
  LRRK2 RNA guide
ucaaggccuacagagaugccu

SEQ ID NO: 56707 - RNA, 21 nt, Artificial Sequence
  LRRK2 RNA guide
ucucaaggccuacagagaugc

SEQ ID NO: 56708 - RNA, 21 nt, Artificial Sequence
  LRRK2 RNA guide
ucucuguaggccuugagacgu

SEQ ID NO: 56709 - RNA, 21 nt, Artificial Sequence
  LRRK2 RNA guide
ucuguaggccuugagacguag

SEQ ID NO: 56710 - RNA, 21 nt, Artificial Sequence
  LRRK2 RNA guide
uguaggccuugagacguaguc

SEQ ID NO: 56711 - RNA, 22 nt, Artificial Sequence
  LRRK2 RNA guide
aaggccuacagagaugccugcu

SEQ ID NO: 56712 - RNA, 22 nt, Artificial Sequence
  LRRK2 RNA guide
acgggacuacgucucaaggccu

SEQ ID NO: 56713 - RNA, 22 nt, Artificial Sequence
  LRRK2 RNA guide
acgucucaaggccuacagagau

SEQ ID NO: 56714 - RNA, 22 nt, Artificial Sequence
  LRRK2 RNA guide
acuacgucucaaggccuacaga

SEQ ID NO: 56715 - RNA, 22 nt, Artificial Sequence
  LRRK2 RNA guide
agagcaggcaucucuguaggcc

SEQ ID NO: 56716 - RNA, 22 nt, Artificial Sequence
  LRRK2 RNA guide
agcagagcaggcaucucuguag

SEQ ID NO: 56717 - RNA, 22 nt, Artificial Sequence
  LRRK2 RNA guide
agcaggcaucucuguaggccuu

SEQ ID NO: 56718 - RNA, 22 nt, Artificial Sequence
  LRRK2 RNA guide
aggcaucucuguaggccuugag

SEQ ID NO: 56719 - RNA, 22 nt, Artificial Sequence
  LRRK2 RNA guide
aggccuacagagaugccugcuc

SEQ ID NO: 56720 - RNA, 22 nt, Artificial Sequence
  LRRK2 RNA guide
aucucuguaggccuugagacgu

SEQ ID NO: 56721 - RNA, 22 nt, Artificial Sequence
  LRRK2 RNA guide
caaggccuacagagaugccugc

SEQ ID NO: 56722 - RNA, 22 nt, Artificial Sequence
  LRRK2 RNA guide
cagagcaggcaucucuguaggc

SEQ ID NO: 56723 - RNA, 22 nt, Artificial Sequence
  LRRK2 RNA guide
caggcaucucuguaggccuuga

SEQ ID NO: 56724 - RNA, 22 nt, Artificial Sequence
  LRRK2 RNA guide
caucucuguaggccuugagacg

SEQ ID NO: 56725 - RNA, 22 nt, Artificial Sequence
  LRRK2 RNA guide
ccuacagagaugccugcucugc

SEQ ID NO: 56726 - RNA, 22 nt, Artificial Sequence
  LRRK2 RNA guide
cgggacuacgucucaaggccua

SEQ ID NO: 56727 - RNA, 22 nt, Artificial Sequence
  LRRK2 RNA guide
cgucucaaggccuacagagaug

SEQ ID NO: 56728 - RNA, 22 nt, Artificial Sequence
  LRRK2 RNA guide
cuacagagaugccugcucugcu

SEQ ID NO: 56729 - RNA, 22 nt, Artificial Sequence
  LRRK2 RNA guide
cuacgucucaaggccuacagag

SEQ ID NO: 56730 - RNA, 22 nt, Artificial Sequence
  LRRK2 RNA guide
cucaaggccuacagagaugccu

SEQ ID NO: 56731 - RNA, 22 nt, Artificial Sequence
  LRRK2 RNA guide
cucuguaggccuugagacguag

SEQ ID NO: 56732 - RNA, 22 nt, Artificial Sequence
  LRRK2 RNA guide
cuguaggccuugagacguaguc

SEQ ID NO: 56733 - RNA, 22 nt, Artificial Sequence
  LRRK2 RNA guide
gacuacgucucaaggccuacag

SEQ ID NO: 56734 - RNA, 22 nt, Artificial Sequence
  LRRK2 RNA guide
gagcaggcaucucuguaggccu

SEQ ID NO: 56735 - RNA, 22 nt, Artificial Sequence
  LRRK2 RNA guide
gcagagcaggcaucucuguagg

SEQ ID NO: 56736 - RNA, 22 nt, Artificial Sequence
  LRRK2 RNA guide
gcaggcaucucuguaggccuug

SEQ ID NO: 56737 - RNA, 22 nt, Artificial Sequence
  LRRK2 RNA guide
gcaucucuguaggccuugagac

SEQ ID NO: 56738 - RNA, 22 nt, Artificial Sequence
  LRRK2 RNA guide
gccuacagagaugccugcucug

SEQ ID NO: 56739 - RNA, 22 nt, Artificial Sequence
  LRRK2 RNA guide
ggacuacgucucaaggccuaca

SEQ ID NO: 56740 - RNA, 22 nt, Artificial Sequence
  LRRK2 RNA guide
ggcaucucuguaggccuugaga

SEQ ID NO: 56741 - RNA, 22 nt, Artificial Sequence
  LRRK2 RNA guide
ggccuacagagaugccugcucu

SEQ ID NO: 56742 - RNA, 22 nt, Artificial Sequence
  LRRK2 RNA guide
gggacuacgucucaaggccuac

SEQ ID NO: 56743 - RNA, 22 nt, Artificial Sequence
  LRRK2 RNA guide
guaggccuugagacguaguccc

SEQ ID NO: 56744 - RNA, 22 nt, Artificial Sequence
  LRRK2 RNA guide
gucucaaggccuacagagaugc

SEQ ID NO: 56745 - RNA, 22 nt, Artificial Sequence
  LRRK2 RNA guide
uacgucucaaggccuacagaga

SEQ ID NO: 56746 - RNA, 22 nt, Artificial Sequence
  LRRK2 RNA guide
uagcagagcaggcaucucugua

SEQ ID NO: 56747 - RNA, 22 nt, Artificial Sequence
  LRRK2 RNA guide
uaggccuugagacguagucccg

SEQ ID NO: 56748 - RNA, 22 nt, Artificial Sequence
  LRRK2 RNA guide
ucaaggccuacagagaugccug

SEQ ID NO: 56749 - RNA, 22 nt, Artificial Sequence
  LRRK2 RNA guide
ucucaaggccuacagagaugcc

SEQ ID NO: 56750 - RNA, 22 nt, Artificial Sequence
  LRRK2 RNA guide
ucucuguaggccuugagacgua

SEQ ID NO: 56751 - RNA, 22 nt, Artificial Sequence
  LRRK2 RNA guide
ucuguaggccuugagacguagu

SEQ ID NO: 56752 - RNA, 22 nt, Artificial Sequence
  LRRK2 RNA guide
uguaggccuugagacguagucc

SEQ ID NO: 56753 - RNA, 20 nt, Artificial Sequence
  LRRK2 RNA guide
aaggcaggaaaccuccauau

SEQ ID NO: 56754 - RNA, 20 nt, Artificial Sequence
  LRRK2 RNA guide
aggaaaccuccauauaaaaa

SEQ ID NO: 56755 - RNA, 20 nt, Artificial Sequence
  LRRK2 RNA guide
aggcaggaaaccuccauaua

SEQ ID NO: 56756 - RNA, 20 nt, Artificial Sequence
  LRRK2 RNA guide
auuuuuauauggagguuucc

SEQ ID NO: 56757 - RNA, 20 nt, Artificial Sequence
  LRRK2 RNA guide
caggaaaccuccauauaaaa

SEQ ID NO: 56758 - RNA, 20 nt, Artificial Sequence
  LRRK2 RNA guide
cuuucuuugagaacucuugu

SEQ ID NO: 56759 - RNA, 20 nt, Artificial Sequence
  LRRK2 RNA guide
cuuugagaacucuuguuuau

SEQ ID NO: 56760 - RNA, 20 nt, Artificial Sequence
  LRRK2 RNA guide
gcaggaaaccuccauauaaa

SEQ ID NO: 56761 - RNA, 20 nt, Artificial Sequence
  LRRK2 RNA guide
gcuuucuuugagaacucuug

SEQ ID NO: 56762 - RNA, 20 nt, Artificial Sequence
  LRRK2 RNA guide
ggaaaccuccauauaaaaau

SEQ ID NO: 56763 - RNA, 20 nt, Artificial Sequence
  LRRK2 RNA guide
ggcaggaaaccuccauauaa

SEQ ID NO: 56764 - RNA, 20 nt, Artificial Sequence
  LRRK2 RNA guide
ucuuugagaacucuuguuua

SEQ ID NO: 56765 - RNA, 20 nt, Artificial Sequence
  LRRK2 RNA guide
uucuuugagaacucuuguuu

SEQ ID NO: 56766 - RNA, 20 nt, Artificial Sequence
  LRRK2 RNA guide
uuucuuugagaacucuuguu

SEQ ID NO: 56767 - RNA, 21 nt, Artificial Sequence
  LRRK2 RNA guide
aaggcaggaaaccuccauaua

SEQ ID NO: 56768 - RNA, 21 nt, Artificial Sequence
  LRRK2 RNA guide
aggcaggaaaccuccauauaa

SEQ ID NO: 56769 - RNA, 21 nt, Artificial Sequence
  LRRK2 RNA guide
caaggcaggaaaccuccauau

SEQ ID NO: 56770 - RNA, 21 nt, Artificial Sequence
  LRRK2 RNA guide
caggaaaccuccauauaaaaa

SEQ ID NO: 56771 - RNA, 21 nt, Artificial Sequence
  LRRK2 RNA guide
cuuucuuugagaacucuuguu

SEQ ID NO: 56772 - RNA, 21 nt, Artificial Sequence
  LRRK2 RNA guide
gcaggaaaccuccauauaaaa

SEQ ID NO: 56773 - RNA, 21 nt, Artificial Sequence
  LRRK2 RNA guide
gcuuucuuugagaacucuugu

SEQ ID NO: 56774 - RNA, 21 nt, Artificial Sequence
  LRRK2 RNA guide
ggcaggaaaccuccauauaaa

SEQ ID NO: 56775 - RNA, 21 nt, Artificial Sequence
  LRRK2 RNA guide
ugcuuucuuugagaacucuug

SEQ ID NO: 56776 - RNA, 22 nt, Artificial Sequence
  LRRK2 RNA guide
aaggcaggaaaccuccauauaa

SEQ ID NO: 56777 - RNA, 22 nt, Artificial Sequence
  LRRK2 RNA guide
aggcaggaaaccuccauauaaa

SEQ ID NO: 56778 - RNA, 22 nt, Artificial Sequence
  LRRK2 RNA guide
auuuuuauauggagguuuccug

SEQ ID NO: 56779 - RNA, 22 nt, Artificial Sequence
  LRRK2 RNA guide
caaggcaggaaaccuccauaua

SEQ ID NO: 56780 - RNA, 22 nt, Artificial Sequence
  LRRK2 RNA guide
caggaaaccuccauauaaaaau

SEQ ID NO: 56781 - RNA, 22 nt, Artificial Sequence
  LRRK2 RNA guide
ccaaggcaggaaaccuccauau

SEQ ID NO: 56782 - RNA, 22 nt, Artificial Sequence
  LRRK2 RNA guide
cuuucuuugagaacucuuguuu

SEQ ID NO: 56783 - RNA, 22 nt, Artificial Sequence
  LRRK2 RNA guide
gcaggaaaccuccauauaaaaa

SEQ ID NO: 56784 - RNA, 22 nt, Artificial Sequence
  LRRK2 RNA guide
gcuuucuuugagaacucuuguu

SEQ ID NO: 56785 - RNA, 22 nt, Artificial Sequence
  LRRK2 RNA guide
ggcaggaaaccuccauauaaaa

SEQ ID NO: 56786 - RNA, 22 nt, Artificial Sequence
  LRRK2 RNA guide
ugcuuucuuugagaacucuugu

SEQ ID NO: 56787 - RNA, 22 nt, Artificial Sequence
  LRRK2 RNA guide
uugcuuucuuugagaacucuug

SEQ ID NO: 56788 - RNA, 20 nt, Artificial Sequence
  LRRK2 RNA guide
aaaaguaaacaagaguucuc

SEQ ID NO: 56789 - RNA, 20 nt, Artificial Sequence
  LRRK2 RNA guide
aaaguaaacaagaguucuca

SEQ ID NO: 56790 - RNA, 20 nt, Artificial Sequence
  LRRK2 RNA guide
aaguaaacaagaguucucaa

SEQ ID NO: 56791 - RNA, 20 nt, Artificial Sequence
  LRRK2 RNA guide
accuccauauaaaaguaaac

SEQ ID NO: 56792 - RNA, 20 nt, Artificial Sequence
  LRRK2 RNA guide
acuuuuauauggagguuucc

SEQ ID NO: 56793 - RNA, 20 nt, Artificial Sequence
  LRRK2 RNA guide
aggaaaccuccauauaaaag

SEQ ID NO: 56794 - RNA, 20 nt, Artificial Sequence
  LRRK2 RNA guide
aguaaacaagaguucucaaa

SEQ ID NO: 56795 - RNA, 20 nt, Artificial Sequence
  LRRK2 RNA guide
ccuccauauaaaaguaaaca

SEQ ID NO: 56796 - RNA, 20 nt, Artificial Sequence
  LRRK2 RNA guide
cuuugagaacucuuguuuac

SEQ ID NO: 56797 - RNA, 20 nt, Artificial Sequence
  LRRK2 RNA guide
gaaaccuccauauaaaagua

SEQ ID NO: 56798 - RNA, 20 nt, Artificial Sequence
  LRRK2 RNA guide
gagaacucuuguuuacuuuu

SEQ ID NO: 56799 - RNA, 20 nt, Artificial Sequence
  LRRK2 RNA guide
ggaaaccuccauauaaaagu

SEQ ID NO: 56800 - RNA, 20 nt, Artificial Sequence
  LRRK2 RNA guide
guuuacuuuuauauggaggu

SEQ ID NO: 56801 - RNA, 20 nt, Artificial Sequence
  LRRK2 RNA guide
uacuuuuauauggagguuuc

SEQ ID NO: 56802 - RNA, 20 nt, Artificial Sequence
  LRRK2 RNA guide
ugagaacucuuguuuacuuu

SEQ ID NO: 56803 - RNA, 20 nt, Artificial Sequence
  LRRK2 RNA guide
uguuuacuuuuauauggagg

SEQ ID NO: 56804 - RNA, 20 nt, Artificial Sequence
  LRRK2 RNA guide
uugagaacucuuguuuacuu

SEQ ID NO: 56805 - RNA, 20 nt, Artificial Sequence
  LRRK2 RNA guide
uuugagaacucuuguuuacu

SEQ ID NO: 56806 - RNA, 21 nt, Artificial Sequence
  LRRK2 RNA guide
acuuuuauauggagguuuccu

SEQ ID NO: 56807 - RNA, 21 nt, Artificial Sequence
  LRRK2 RNA guide
aggaaaccuccauauaaaagu

SEQ ID NO: 56808 - RNA, 21 nt, Artificial Sequence
  LRRK2 RNA guide
aguaaacaagaguucucaaag

SEQ ID NO: 56809 - RNA, 21 nt, Artificial Sequence
  LRRK2 RNA guide
caggaaaccuccauauaaaag

SEQ ID NO: 56810 - RNA, 21 nt, Artificial Sequence
  LRRK2 RNA guide
cuuugagaacucuuguuuacu

SEQ ID NO: 56811 - RNA, 21 nt, Artificial Sequence
  LRRK2 RNA guide
ggaaaccuccauauaaaagua

SEQ ID NO: 56812 - RNA, 21 nt, Artificial Sequence
  LRRK2 RNA guide
uacuuuuauauggagguuucc

SEQ ID NO: 56813 - RNA, 21 nt, Artificial Sequence
  LRRK2 RNA guide
ucuuugagaacucuuguuuac

SEQ ID NO: 56814 - RNA, 22 nt, Artificial Sequence
  LRRK2 RNA guide
aaguaaacaagaguucucaaag

SEQ ID NO: 56815 - RNA, 22 nt, Artificial Sequence
  LRRK2 RNA guide
acuuuuauauggagguuuccug

SEQ ID NO: 56816 - RNA, 22 nt, Artificial Sequence
  LRRK2 RNA guide
aggaaaccuccauauaaaagua

SEQ ID NO: 56817 - RNA, 22 nt, Artificial Sequence
  LRRK2 RNA guide
aguaaacaagaguucucaaaga

SEQ ID NO: 56818 - RNA, 22 nt, Artificial Sequence
  LRRK2 RNA guide
caggaaaccuccauauaaaagu

SEQ ID NO: 56819 - RNA, 22 nt, Artificial Sequence
  LRRK2 RNA guide
ccuccauauaaaaguaaacaag

SEQ ID NO: 56820 - RNA, 22 nt, Artificial Sequence
  LRRK2 RNA guide
cuuguuuacuuuuauauggagg

SEQ ID NO: 56821 - RNA, 22 nt, Artificial Sequence
  LRRK2 RNA guide
cuuugagaacucuuguuuacuu

SEQ ID NO: 56822 - RNA, 22 nt, Artificial Sequence
  LRRK2 RNA guide
gcaggaaaccuccauauaaaag

SEQ ID NO: 56823 - RNA, 22 nt, Artificial Sequence
  LRRK2 RNA guide
ggaaaccuccauauaaaaguaa

SEQ ID NO: 56824 - RNA, 22 nt, Artificial Sequence
  LRRK2 RNA guide
uacuuuuauauggagguuuccu

SEQ ID NO: 56825 - RNA, 22 nt, Artificial Sequence
  LRRK2 RNA guide
ucuuugagaacucuuguuuacu

SEQ ID NO: 56826 - RNA, 22 nt, Artificial Sequence
  LRRK2 RNA guide
uuacuuuuauauggagguuucc

SEQ ID NO: 56827 - RNA, 22 nt, Artificial Sequence
  LRRK2 RNA guide
uucuuugagaacucuuguuuac

SEQ ID NO: 56828 - RNA, 20 nt, Artificial Sequence
  LRRK2 RNA guide
aacccagagaauuagagaua

SEQ ID NO: 56829 - RNA, 20 nt, Artificial Sequence
  LRRK2 RNA guide
aauuaucucuaauucucugg

SEQ ID NO: 56830 - RNA, 20 nt, Artificial Sequence
  LRRK2 RNA guide
aauucucuggguuaagagau

SEQ ID NO: 56831 - RNA, 20 nt, Artificial Sequence
  LRRK2 RNA guide
acuguuuucauguaucucuu

SEQ ID NO: 56832 - RNA, 20 nt, Artificial Sequence
  LRRK2 RNA guide
agacuguuuucauguaucuc

SEQ ID NO: 56833 - RNA, 20 nt, Artificial Sequence
  LRRK2 RNA guide
aucucuaauucucuggguua

SEQ ID NO: 56834 - RNA, 20 nt, Artificial Sequence
  LRRK2 RNA guide
auuaucucuaauucucuggg

SEQ ID NO: 56835 - RNA, 20 nt, Artificial Sequence
  LRRK2 RNA guide
auucucuggguuaagagaua

SEQ ID NO: 56836 - RNA, 20 nt, Artificial Sequence
  LRRK2 RNA guide
cuaauucucuggguuaagag

SEQ ID NO: 56837 - RNA, 20 nt, Artificial Sequence
  LRRK2 RNA guide
cucuaauucucuggguuaag

SEQ ID NO: 56838 - RNA, 20 nt, Artificial Sequence
  LRRK2 RNA guide
cucuggguuaagagauacau

SEQ ID NO: 56839 - RNA, 20 nt, Artificial Sequence
  LRRK2 RNA guide
cuggguuaagagauacauga

SEQ ID NO: 56840 - RNA, 20 nt, Artificial Sequence
  LRRK2 RNA guide
cuuaacccagagaauuagag

SEQ ID NO: 56841 - RNA, 20 nt, Artificial Sequence
  LRRK2 RNA guide
gacuguuuucauguaucucu

SEQ ID NO: 56842 - RNA, 20 nt, Artificial Sequence
  LRRK2 RNA guide
gagacuguuuucauguaucu

SEQ ID NO: 56843 - RNA, 20 nt, Artificial Sequence
  LRRK2 RNA guide
ggguuaagagauacaugaaa

SEQ ID NO: 56844 - RNA, 20 nt, Artificial Sequence
  LRRK2 RNA guide
gguuaagagauacaugaaaa

SEQ ID NO: 56845 - RNA, 20 nt, Artificial Sequence
  LRRK2 RNA guide
guuaagagauacaugaaaac

SEQ ID NO: 56846 - RNA, 20 nt, Artificial Sequence
  LRRK2 RNA guide
uaacccagagaauuagagau

SEQ ID NO: 56847 - RNA, 20 nt, Artificial Sequence
  LRRK2 RNA guide
uaauucucuggguuaagaga

SEQ ID NO: 56848 - RNA, 20 nt, Artificial Sequence
  LRRK2 RNA guide
uaucucuaauucucuggguu

SEQ ID NO: 56849 - RNA, 20 nt, Artificial Sequence
  LRRK2 RNA guide
ucuaauucucuggguuaaga

SEQ ID NO: 56850 - RNA, 20 nt, Artificial Sequence
  LRRK2 RNA guide
ucucuaauucucuggguuaa

SEQ ID NO: 56851 - RNA, 20 nt, Artificial Sequence
  LRRK2 RNA guide
ucucuggguuaagagauaca

SEQ ID NO: 56852 - RNA, 20 nt, Artificial Sequence
  LRRK2 RNA guide
ucucuuaacccagagaauua

SEQ ID NO: 56853 - RNA, 20 nt, Artificial Sequence
  LRRK2 RNA guide
ucuggguuaagagauacaug

SEQ ID NO: 56854 - RNA, 20 nt, Artificial Sequence
  LRRK2 RNA guide
ucuuaacccagagaauuaga

SEQ ID NO: 56855 - RNA, 20 nt, Artificial Sequence
  LRRK2 RNA guide
uggguuaagagauacaugaa

SEQ ID NO: 56856 - RNA, 20 nt, Artificial Sequence
  LRRK2 RNA guide
uuaacccagagaauuagaga

SEQ ID NO: 56857 - RNA, 20 nt, Artificial Sequence
  LRRK2 RNA guide
uuaucucuaauucucugggu

SEQ ID NO: 56858 - RNA, 20 nt, Artificial Sequence
  LRRK2 RNA guide
uucucuggguuaagagauac

SEQ ID NO: 56859 - RNA, 21 nt, Artificial Sequence
  LRRK2 RNA guide
aacccagagaauuagagauaa

SEQ ID NO: 56860 - RNA, 21 nt, Artificial Sequence
  LRRK2 RNA guide
aauuaucucuaauucucuggg

SEQ ID NO: 56861 - RNA, 21 nt, Artificial Sequence
  LRRK2 RNA guide
aauucucuggguuaagagaua

SEQ ID NO: 56862 - RNA, 21 nt, Artificial Sequence
  LRRK2 RNA guide
agacuguuuucauguaucucu

SEQ ID NO: 56863 - RNA, 21 nt, Artificial Sequence
  LRRK2 RNA guide
agagacuguuuucauguaucu

SEQ ID NO: 56864 - RNA, 21 nt, Artificial Sequence
  LRRK2 RNA guide
aucucuaauucucuggguuaa

SEQ ID NO: 56865 - RNA, 21 nt, Artificial Sequence
  LRRK2 RNA guide
aucucuuaacccagagaauua

SEQ ID NO: 56866 - RNA, 21 nt, Artificial Sequence
  LRRK2 RNA guide
auguaucucuuaacccagaga

SEQ ID NO: 56867 - RNA, 21 nt, Artificial Sequence
  LRRK2 RNA guide
auuaucucuaauucucugggu

SEQ ID NO: 56868 - RNA, 21 nt, Artificial Sequence
  LRRK2 RNA guide
auucucuggguuaagagauac

SEQ ID NO: 56869 - RNA, 21 nt, Artificial Sequence
  LRRK2 RNA guide
cauguaucucuuaacccagag

SEQ ID NO: 56870 - RNA, 21 nt, Artificial Sequence
  LRRK2 RNA guide
cuaauucucuggguuaagaga

SEQ ID NO: 56871 - RNA, 21 nt, Artificial Sequence
  LRRK2 RNA guide
cucuaauucucuggguuaaga

SEQ ID NO: 56872 - RNA, 21 nt, Artificial Sequence
  LRRK2 RNA guide
cucuggguuaagagauacaug

SEQ ID NO: 56873 - RNA, 21 nt, Artificial Sequence
  LRRK2 RNA guide
cucuuaacccagagaauuaga

SEQ ID NO: 56874 - RNA, 21 nt, Artificial Sequence
  LRRK2 RNA guide
cuggguuaagagauacaugaa

SEQ ID NO: 56875 - RNA, 21 nt, Artificial Sequence
  LRRK2 RNA guide
cuuaacccagagaauuagaga

SEQ ID NO: 56876 - RNA, 21 nt, Artificial Sequence
  LRRK2 RNA guide
gacuguuuucauguaucucuu

SEQ ID NO: 56877 - RNA, 21 nt, Artificial Sequence
  LRRK2 RNA guide
gagacuguuuucauguaucuc

SEQ ID NO: 56878 - RNA, 21 nt, Artificial Sequence
  LRRK2 RNA guide
ggguuaagagauacaugaaaa

SEQ ID NO: 56879 - RNA, 21 nt, Artificial Sequence
  LRRK2 RNA guide
gguuaagagauacaugaaaac

SEQ ID NO: 56880 - RNA, 21 nt, Artificial Sequence
  LRRK2 RNA guide
guaucucuuaacccagagaau

SEQ ID NO: 56881 - RNA, 21 nt, Artificial Sequence
  LRRK2 RNA guide
guuuucauguaucucuuaacc

SEQ ID NO: 56882 - RNA, 21 nt, Artificial Sequence
  LRRK2 RNA guide
uaacccagagaauuagagaua

SEQ ID NO: 56883 - RNA, 21 nt, Artificial Sequence
  LRRK2 RNA guide
uaauucucuggguuaagagau

SEQ ID NO: 56884 - RNA, 21 nt, Artificial Sequence
  LRRK2 RNA guide
uaucucuaauucucuggguua

SEQ ID NO: 56885 - RNA, 21 nt, Artificial Sequence
  LRRK2 RNA guide
uaucucuuaacccagagaauu

SEQ ID NO: 56886 - RNA, 21 nt, Artificial Sequence
  LRRK2 RNA guide
ucauguaucucuuaacccaga

SEQ ID NO: 56887 - RNA, 21 nt, Artificial Sequence
  LRRK2 RNA guide
ucuaauucucuggguuaagag

SEQ ID NO: 56888 - RNA, 21 nt, Artificial Sequence
  LRRK2 RNA guide
ucucuaauucucuggguuaag

SEQ ID NO: 56889 - RNA, 21 nt, Artificial Sequence
  LRRK2 RNA guide
ucucuggguuaagagauacau

SEQ ID NO: 56890 - RNA, 21 nt, Artificial Sequence
  LRRK2 RNA guide
ucucuuaacccagagaauuag

SEQ ID NO: 56891 - RNA, 21 nt, Artificial Sequence
  LRRK2 RNA guide
ucuggguuaagagauacauga

SEQ ID NO: 56892 - RNA, 21 nt, Artificial Sequence
  LRRK2 RNA guide
ucuuaacccagagaauuagag

SEQ ID NO: 56893 - RNA, 21 nt, Artificial Sequence
  LRRK2 RNA guide
uggguuaagagauacaugaaa

SEQ ID NO: 56894 - RNA, 21 nt, Artificial Sequence
  LRRK2 RNA guide
uguaucucuuaacccagagaa

SEQ ID NO: 56895 - RNA, 21 nt, Artificial Sequence
  LRRK2 RNA guide
uuaacccagagaauuagagau

SEQ ID NO: 56896 - RNA, 21 nt, Artificial Sequence
  LRRK2 RNA guide
uuaucucuaauucucuggguu

SEQ ID NO: 56897 - RNA, 21 nt, Artificial Sequence
  LRRK2 RNA guide
uucauguaucucuuaacccag

SEQ ID NO: 56898 - RNA, 21 nt, Artificial Sequence
  LRRK2 RNA guide
uucucuggguuaagagauaca

SEQ ID NO: 56899 - RNA, 21 nt, Artificial Sequence
  LRRK2 RNA guide
uuucauguaucucuuaaccca

SEQ ID NO: 56900 - RNA, 21 nt, Artificial Sequence
  LRRK2 RNA guide
uuuucauguaucucuuaaccc

SEQ ID NO: 56901 - RNA, 22 nt, Artificial Sequence
  LRRK2 RNA guide
aaauuaucucuaauucucuggg

SEQ ID NO: 56902 - RNA, 22 nt, Artificial Sequence
  LRRK2 RNA guide
aacccagagaauuagagauaau

SEQ ID NO: 56903 - RNA, 22 nt, Artificial Sequence
  LRRK2 RNA guide
aagagacuguuuucauguaucu

SEQ ID NO: 56904 - RNA, 22 nt, Artificial Sequence
  LRRK2 RNA guide
aauuaucucuaauucucugggu

SEQ ID NO: 56905 - RNA, 22 nt, Artificial Sequence
  LRRK2 RNA guide
aauucucuggguuaagagauac

SEQ ID NO: 56906 - RNA, 22 nt, Artificial Sequence
  LRRK2 RNA guide
agacuguuuucauguaucucuu

SEQ ID NO: 56907 - RNA, 22 nt, Artificial Sequence
  LRRK2 RNA guide
agagacuguuuucauguaucuc

SEQ ID NO: 56908 - RNA, 22 nt, Artificial Sequence
  LRRK2 RNA guide
aucucuaauucucuggguuaag

SEQ ID NO: 56909 - RNA, 22 nt, Artificial Sequence
  LRRK2 RNA guide
aucucuuaacccagagaauuag

SEQ ID NO: 56910 - RNA, 22 nt, Artificial Sequence
  LRRK2 RNA guide
auguaucucuuaacccagagaa

SEQ ID NO: 56911 - RNA, 22 nt, Artificial Sequence
  LRRK2 RNA guide
auuaucucuaauucucuggguu

SEQ ID NO: 56912 - RNA, 22 nt, Artificial Sequence
  LRRK2 RNA guide
auucucuggguuaagagauaca

SEQ ID NO: 56913 - RNA, 22 nt, Artificial Sequence
  LRRK2 RNA guide
cauguaucucuuaacccagaga

SEQ ID NO: 56914 - RNA, 22 nt, Artificial Sequence
  LRRK2 RNA guide
cuaauucucuggguuaagagau

SEQ ID NO: 56915 - RNA, 22 nt, Artificial Sequence
  LRRK2 RNA guide
cucuaauucucuggguuaagag

SEQ ID NO: 56916 - RNA, 22 nt, Artificial Sequence
  LRRK2 RNA guide
cucuggguuaagagauacauga

SEQ ID NO: 56917 - RNA, 22 nt, Artificial Sequence
  LRRK2 RNA guide
cucuuaacccagagaauuagag

SEQ ID NO: 56918 - RNA, 22 nt, Artificial Sequence
  LRRK2 RNA guide
cuggguuaagagauacaugaaa

SEQ ID NO: 56919 - RNA, 22 nt, Artificial Sequence
  LRRK2 RNA guide
cuguuuucauguaucucuuaac

SEQ ID NO: 56920 - RNA, 22 nt, Artificial Sequence
  LRRK2 RNA guide
cuuaacccagagaauuagagau

SEQ ID NO: 56921 - RNA, 22 nt, Artificial Sequence
  LRRK2 RNA guide
gaaauuaucucuaauucucugg

SEQ ID NO: 56922 - RNA, 22 nt, Artificial Sequence
  LRRK2 RNA guide
gacuguuuucauguaucucuua

SEQ ID NO: 56923 - RNA, 22 nt, Artificial Sequence
  LRRK2 RNA guide
gagacuguuuucauguaucucu

SEQ ID NO: 56924 - RNA, 22 nt, Artificial Sequence
  LRRK2 RNA guide
ggguuaagagauacaugaaaac

SEQ ID NO: 56925 - RNA, 22 nt, Artificial Sequence
  LRRK2 RNA guide
gguuaagagauacaugaaaaca

SEQ ID NO: 56926 - RNA, 22 nt, Artificial Sequence
  LRRK2 RNA guide
guaucucuuaacccagagaauu

SEQ ID NO: 56927 - RNA, 22 nt, Artificial Sequence
  LRRK2 RNA guide
guuaagagauacaugaaaacag

SEQ ID NO: 56928 - RNA, 22 nt, Artificial Sequence
  LRRK2 RNA guide
guuuucauguaucucuuaaccc

SEQ ID NO: 56929 - RNA, 22 nt, Artificial Sequence
  LRRK2 RNA guide
uaacccagagaauuagagauaa

SEQ ID NO: 56930 - RNA, 22 nt, Artificial Sequence
  LRRK2 RNA guide
uaauucucuggguuaagagaua

SEQ ID NO: 56931 - RNA, 22 nt, Artificial Sequence
  LRRK2 RNA guide
uaucucuaauucucuggguuaa

SEQ ID NO: 56932 - RNA, 22 nt, Artificial Sequence
  LRRK2 RNA guide
uaucucuuaacccagagaauua

SEQ ID NO: 56933 - RNA, 22 nt, Artificial Sequence
  LRRK2 RNA guide
ucauguaucucuuaacccagag

SEQ ID NO: 56934 - RNA, 22 nt, Artificial Sequence
  LRRK2 RNA guide
ucuaauucucuggguuaagaga

SEQ ID NO: 56935 - RNA, 22 nt, Artificial Sequence
  LRRK2 RNA guide
ucucuaauucucuggguuaaga

SEQ ID NO: 56936 - RNA, 22 nt, Artificial Sequence
  LRRK2 RNA guide
ucucuggguuaagagauacaug

SEQ ID NO: 56937 - RNA, 22 nt, Artificial Sequence
  LRRK2 RNA guide
ucucuuaacccagagaauuaga

SEQ ID NO: 56938 - RNA, 22 nt, Artificial Sequence
  LRRK2 RNA guide
ucuggguuaagagauacaugaa

SEQ ID NO: 56939 - RNA, 22 nt, Artificial Sequence
  LRRK2 RNA guide
ucuuaacccagagaauuagaga

SEQ ID NO: 56940 - RNA, 22 nt, Artificial Sequence
  LRRK2 RNA guide
uggguuaagagauacaugaaaa

SEQ ID NO: 56941 - RNA, 22 nt, Artificial Sequence
  LRRK2 RNA guide
uguaucucuuaacccagagaau

SEQ ID NO: 56942 - RNA, 22 nt, Artificial Sequence
  LRRK2 RNA guide
uguuuucauguaucucuuaacc

SEQ ID NO: 56943 - RNA, 22 nt, Artificial Sequence
  LRRK2 RNA guide
uuaacccagagaauuagagaua

SEQ ID NO: 56944 - RNA, 22 nt, Artificial Sequence
  LRRK2 RNA guide
uuaucucuaauucucuggguua

SEQ ID NO: 56945 - RNA, 22 nt, Artificial Sequence
  LRRK2 RNA guide
uucauguaucucuuaacccaga

SEQ ID NO: 56946 - RNA, 22 nt, Artificial Sequence
  LRRK2 RNA guide
uucucuggguuaagagauacau

SEQ ID NO: 56947 - RNA, 22 nt, Artificial Sequence
  LRRK2 RNA guide
uuucauguaucucuuaacccag

SEQ ID NO: 56948 - RNA, 22 nt, Artificial Sequence
  LRRK2 RNA guide
uuuucauguaucucuuaaccca

SEQ ID NO: 56949 - RNA, 20 nt, Artificial Sequence
  LRRK2 RNA guide
aagagacuguuuucauguaa

SEQ ID NO: 56950 - RNA, 20 nt, Artificial Sequence
  LRRK2 RNA guide
aauucucuggguuacaugaa

SEQ ID NO: 56951 - RNA, 20 nt, Artificial Sequence
  LRRK2 RNA guide
acucaagagacuguuuucau

SEQ ID NO: 56952 - RNA, 20 nt, Artificial Sequence
  LRRK2 RNA guide
acuguuuucauguaacccag

SEQ ID NO: 56953 - RNA, 20 nt, Artificial Sequence
  LRRK2 RNA guide
agacuguuuucauguaaccc

SEQ ID NO: 56954 - RNA, 20 nt, Artificial Sequence
  LRRK2 RNA guide
agagacuguuuucauguaac

SEQ ID NO: 56955 - RNA, 20 nt, Artificial Sequence
  LRRK2 RNA guide
auguaacccagagaauuaga

SEQ ID NO: 56956 - RNA, 20 nt, Artificial Sequence
  LRRK2 RNA guide
auucucuggguuacaugaaa

SEQ ID NO: 56957 - RNA, 20 nt, Artificial Sequence
  LRRK2 RNA guide
caagagacuguuuucaugua

SEQ ID NO: 56958 - RNA, 20 nt, Artificial Sequence
  LRRK2 RNA guide
cauguaacccagagaauuag

SEQ ID NO: 56959 - RNA, 20 nt, Artificial Sequence
  LRRK2 RNA guide
cuaauucucuggguuacaug

SEQ ID NO: 56960 - RNA, 20 nt, Artificial Sequence
  LRRK2 RNA guide
cucaagagacuguuuucaug

SEQ ID NO: 56961 - RNA, 20 nt, Artificial Sequence
  LRRK2 RNA guide
cucuaauucucuggguuaca

SEQ ID NO: 56962 - RNA, 20 nt, Artificial Sequence
  LRRK2 RNA guide
cucuggguuacaugaaaaca

SEQ ID NO: 56963 - RNA, 20 nt, Artificial Sequence
  LRRK2 RNA guide
cuggguuacaugaaaacagu

SEQ ID NO: 56964 - RNA, 20 nt, Artificial Sequence
  LRRK2 RNA guide
cuguuuucauguaacccaga

SEQ ID NO: 56965 - RNA, 20 nt, Artificial Sequence
  LRRK2 RNA guide
gacuguuuucauguaaccca

SEQ ID NO: 56966 - RNA, 20 nt, Artificial Sequence
  LRRK2 RNA guide
gagacuguuuucauguaacc

SEQ ID NO: 56967 - RNA, 20 nt, Artificial Sequence
  LRRK2 RNA guide
ggguuacaugaaaacagucu

SEQ ID NO: 56968 - RNA, 20 nt, Artificial Sequence
  LRRK2 RNA guide
gguuacaugaaaacagucuc

SEQ ID NO: 56969 - RNA, 20 nt, Artificial Sequence
  LRRK2 RNA guide
guaacccagagaauuagaga

SEQ ID NO: 56970 - RNA, 20 nt, Artificial Sequence
  LRRK2 RNA guide
guuacaugaaaacagucucu

SEQ ID NO: 56971 - RNA, 20 nt, Artificial Sequence
  LRRK2 RNA guide
guuuucauguaacccagaga

SEQ ID NO: 56972 - RNA, 20 nt, Artificial Sequence
  LRRK2 RNA guide
uaauucucuggguuacauga

SEQ ID NO: 56973 - RNA, 20 nt, Artificial Sequence
  LRRK2 RNA guide
uacucaagagacuguuuuca

SEQ ID NO: 56974 - RNA, 20 nt, Artificial Sequence
  LRRK2 RNA guide
ucaagagacuguuuucaugu

SEQ ID NO: 56975 - RNA, 20 nt, Artificial Sequence
  LRRK2 RNA guide
ucauguaacccagagaauua

SEQ ID NO: 56976 - RNA, 20 nt, Artificial Sequence
  LRRK2 RNA guide
ucuaauucucuggguuacau

SEQ ID NO: 56977 - RNA, 20 nt, Artificial Sequence
  LRRK2 RNA guide
ucucuaauucucuggguuac

SEQ ID NO: 56978 - RNA, 20 nt, Artificial Sequence
  LRRK2 RNA guide
ucucuggguuacaugaaaac

SEQ ID NO: 56979 - RNA, 20 nt, Artificial Sequence
  LRRK2 RNA guide
ucuggguuacaugaaaacag

SEQ ID NO: 56980 - RNA, 20 nt, Artificial Sequence
  LRRK2 RNA guide
uggguuacaugaaaacaguc

SEQ ID NO: 56981 - RNA, 20 nt, Artificial Sequence
  LRRK2 RNA guide
uguaacccagagaauuagag

SEQ ID NO: 56982 - RNA, 20 nt, Artificial Sequence
  LRRK2 RNA guide
uguuuucauguaacccagag

SEQ ID NO: 56983 - RNA, 20 nt, Artificial Sequence
  LRRK2 RNA guide
uucauguaacccagagaauu

SEQ ID NO: 56984 - RNA, 20 nt, Artificial Sequence
  LRRK2 RNA guide
uucucuggguuacaugaaaa

SEQ ID NO: 56985 - RNA, 20 nt, Artificial Sequence
  LRRK2 RNA guide
uuucauguaacccagagaau

SEQ ID NO: 56986 - RNA, 20 nt, Artificial Sequence
  LRRK2 RNA guide
uuuucauguaacccagagaa

SEQ ID NO: 56987 - RNA, 21 nt, Artificial Sequence
  LRRK2 RNA guide
aagagacuguuuucauguaac

SEQ ID NO: 56988 - RNA, 21 nt, Artificial Sequence
  LRRK2 RNA guide
aauucucuggguuacaugaaa

SEQ ID NO: 56989 - RNA, 21 nt, Artificial Sequence
  LRRK2 RNA guide
acucaagagacuguuuucaug

SEQ ID NO: 56990 - RNA, 21 nt, Artificial Sequence
  LRRK2 RNA guide
acuguuuucauguaacccaga

SEQ ID NO: 56991 - RNA, 21 nt, Artificial Sequence
  LRRK2 RNA guide
agacuguuuucauguaaccca

SEQ ID NO: 56992 - RNA, 21 nt, Artificial Sequence
  LRRK2 RNA guide
agagacuguuuucauguaacc

SEQ ID NO: 56993 - RNA, 21 nt, Artificial Sequence
  LRRK2 RNA guide
aucucuaauucucuggguuac

SEQ ID NO: 56994 - RNA, 21 nt, Artificial Sequence
  LRRK2 RNA guide
auguaacccagagaauuagag

SEQ ID NO: 56995 - RNA, 21 nt, Artificial Sequence
  LRRK2 RNA guide
auucucuggguuacaugaaaa

SEQ ID NO: 56996 - RNA, 21 nt, Artificial Sequence
  LRRK2 RNA guide
caagagacuguuuucauguaa

SEQ ID NO: 56997 - RNA, 21 nt, Artificial Sequence
  LRRK2 RNA guide
cauguaacccagagaauuaga

SEQ ID NO: 56998 - RNA, 21 nt, Artificial Sequence
  LRRK2 RNA guide
cuaauucucuggguuacauga

SEQ ID NO: 56999 - RNA, 21 nt, Artificial Sequence
  LRRK2 RNA guide
cucaagagacuguuuucaugu

SEQ ID NO: 57000 - RNA, 21 nt, Artificial Sequence
  LRRK2 RNA guide
cucuaauucucuggguuacau

SEQ ID NO: 57001 - RNA, 21 nt, Artificial Sequence
  LRRK2 RNA guide
cucuggguuacaugaaaacag

SEQ ID NO: 57002 - RNA, 21 nt, Artificial Sequence
  LRRK2 RNA guide
cuggguuacaugaaaacaguc

SEQ ID NO: 57003 - RNA, 21 nt, Artificial Sequence
  LRRK2 RNA guide
cuguuuucauguaacccagag

SEQ ID NO: 57004 - RNA, 21 nt, Artificial Sequence
  LRRK2 RNA guide
gacuguuuucauguaacccag

SEQ ID NO: 57005 - RNA, 21 nt, Artificial Sequence
  LRRK2 RNA guide
gagacuguuuucauguaaccc

SEQ ID NO: 57006 - RNA, 21 nt, Artificial Sequence
  LRRK2 RNA guide
ggguuacaugaaaacagucuc

SEQ ID NO: 57007 - RNA, 21 nt, Artificial Sequence
  LRRK2 RNA guide
gguuacaugaaaacagucucu

SEQ ID NO: 57008 - RNA, 21 nt, Artificial Sequence
  LRRK2 RNA guide
guaacccagagaauuagagau

SEQ ID NO: 57009 - RNA, 21 nt, Artificial Sequence
  LRRK2 RNA guide
guuacaugaaaacagucucuu

SEQ ID NO: 57010 - RNA, 21 nt, Artificial Sequence
  LRRK2 RNA guide
guuuucauguaacccagagaa

SEQ ID NO: 57011 - RNA, 21 nt, Artificial Sequence
  LRRK2 RNA guide
uaauucucuggguuacaugaa

SEQ ID NO: 57012 - RNA, 21 nt, Artificial Sequence
  LRRK2 RNA guide
uacucaagagacuguuuucau

SEQ ID NO: 57013 - RNA, 21 nt, Artificial Sequence
  LRRK2 RNA guide
ucaagagacuguuuucaugua

SEQ ID NO: 57014 - RNA, 21 nt, Artificial Sequence
  LRRK2 RNA guide
ucauguaacccagagaauuag

SEQ ID NO: 57015 - RNA, 21 nt, Artificial Sequence
  LRRK2 RNA guide
ucuaauucucuggguuacaug

SEQ ID NO: 57016 - RNA, 21 nt, Artificial Sequence
  LRRK2 RNA guide
ucucuaauucucuggguuaca

SEQ ID NO: 57017 - RNA, 21 nt, Artificial Sequence
  LRRK2 RNA guide
ucucuggguuacaugaaaaca

SEQ ID NO: 57018 - RNA, 21 nt, Artificial Sequence
  LRRK2 RNA guide
ucuggguuacaugaaaacagu

SEQ ID NO: 57019 - RNA, 21 nt, Artificial Sequence
  LRRK2 RNA guide
uggguuacaugaaaacagucu

SEQ ID NO: 57020 - RNA, 21 nt, Artificial Sequence
  LRRK2 RNA guide
uguaacccagagaauuagaga

SEQ ID NO: 57021 - RNA, 21 nt, Artificial Sequence
  LRRK2 RNA guide
uguuuucauguaacccagaga

SEQ ID NO: 57022 - RNA, 21 nt, Artificial Sequence
  LRRK2 RNA guide
uuacucaagagacuguuuuca

SEQ ID NO: 57023 - RNA, 21 nt, Artificial Sequence
  LRRK2 RNA guide
uucauguaacccagagaauua

SEQ ID NO: 57024 - RNA, 21 nt, Artificial Sequence
  LRRK2 RNA guide
uucucuggguuacaugaaaac

SEQ ID NO: 57025 - RNA, 21 nt, Artificial Sequence
  LRRK2 RNA guide
uuucauguaacccagagaauu

SEQ ID NO: 57026 - RNA, 21 nt, Artificial Sequence
  LRRK2 RNA guide
uuuucauguaacccagagaau

SEQ ID NO: 57027 - RNA, 22 nt, Artificial Sequence
  LRRK2 RNA guide
aagagacuguuuucauguaacc

SEQ ID NO: 57028 - RNA, 22 nt, Artificial Sequence
  LRRK2 RNA guide
aauucucuggguuacaugaaaa

SEQ ID NO: 57029 - RNA, 22 nt, Artificial Sequence
  LRRK2 RNA guide
acucaagagacuguuuucaugu

SEQ ID NO: 57030 - RNA, 22 nt, Artificial Sequence
  LRRK2 RNA guide
acuguuuucauguaacccagag

SEQ ID NO: 57031 - RNA, 22 nt, Artificial Sequence
  LRRK2 RNA guide
agacuguuuucauguaacccag

SEQ ID NO: 57032 - RNA, 22 nt, Artificial Sequence
  LRRK2 RNA guide
agagacuguuuucauguaaccc

SEQ ID NO: 57033 - RNA, 22 nt, Artificial Sequence
  LRRK2 RNA guide
aucucuaauucucuggguuaca

SEQ ID NO: 57034 - RNA, 22 nt, Artificial Sequence
  LRRK2 RNA guide
auguaacccagagaauuagaga

SEQ ID NO: 57035 - RNA, 22 nt, Artificial Sequence
  LRRK2 RNA guide
auucucuggguuacaugaaaac

SEQ ID NO: 57036 - RNA, 22 nt, Artificial Sequence
  LRRK2 RNA guide
caagagacuguuuucauguaac

SEQ ID NO: 57037 - RNA, 22 nt, Artificial Sequence
  LRRK2 RNA guide
cauguaacccagagaauuagag

SEQ ID NO: 57038 - RNA, 22 nt, Artificial Sequence
  LRRK2 RNA guide
cuaauucucuggguuacaugaa

SEQ ID NO: 57039 - RNA, 22 nt, Artificial Sequence
  LRRK2 RNA guide
cucaagagacuguuuucaugua

SEQ ID NO: 57040 - RNA, 22 nt, Artificial Sequence
  LRRK2 RNA guide
cucuaauucucuggguuacaug

SEQ ID NO: 57041 - RNA, 22 nt, Artificial Sequence
  LRRK2 RNA guide
cucuggguuacaugaaaacagu

SEQ ID NO: 57042 - RNA, 22 nt, Artificial Sequence
  LRRK2 RNA guide
cuggguuacaugaaaacagucu

SEQ ID NO: 57043 - RNA, 22 nt, Artificial Sequence
  LRRK2 RNA guide
cuguuuucauguaacccagaga

SEQ ID NO: 57044 - RNA, 22 nt, Artificial Sequence
  LRRK2 RNA guide
gacuguuuucauguaacccaga

SEQ ID NO: 57045 - RNA, 22 nt, Artificial Sequence
  LRRK2 RNA guide
gagacuguuuucauguaaccca

SEQ ID NO: 57046 - RNA, 22 nt, Artificial Sequence
  LRRK2 RNA guide
ggguuacaugaaaacagucucu

SEQ ID NO: 57047 - RNA, 22 nt, Artificial Sequence
  LRRK2 RNA guide
gguuacaugaaaacagucucuu

SEQ ID NO: 57048 - RNA, 22 nt, Artificial Sequence
  LRRK2 RNA guide
guaacccagagaauuagagaua

SEQ ID NO: 57049 - RNA, 22 nt, Artificial Sequence
  LRRK2 RNA guide
guuacaugaaaacagucucuug

SEQ ID NO: 57050 - RNA, 22 nt, Artificial Sequence
  LRRK2 RNA guide
guuacucaagagacuguuuuca

SEQ ID NO: 57051 - RNA, 22 nt, Artificial Sequence
  LRRK2 RNA guide
guuuucauguaacccagagaau

SEQ ID NO: 57052 - RNA, 22 nt, Artificial Sequence
  LRRK2 RNA guide
uaauucucuggguuacaugaaa

SEQ ID NO: 57053 - RNA, 22 nt, Artificial Sequence
  LRRK2 RNA guide
uacucaagagacuguuuucaug

SEQ ID NO: 57054 - RNA, 22 nt, Artificial Sequence
  LRRK2 RNA guide
uaucucuaauucucuggguuac

SEQ ID NO: 57055 - RNA, 22 nt, Artificial Sequence
  LRRK2 RNA guide
ucaagagacuguuuucauguaa

SEQ ID NO: 57056 - RNA, 22 nt, Artificial Sequence
  LRRK2 RNA guide
ucauguaacccagagaauuaga

SEQ ID NO: 57057 - RNA, 22 nt, Artificial Sequence
  LRRK2 RNA guide
ucuaauucucuggguuacauga

SEQ ID NO: 57058 - RNA, 22 nt, Artificial Sequence
  LRRK2 RNA guide
ucucuaauucucuggguuacau

SEQ ID NO: 57059 - RNA, 22 nt, Artificial Sequence
  LRRK2 RNA guide
ucucuggguuacaugaaaacag

SEQ ID NO: 57060 - RNA, 22 nt, Artificial Sequence
  LRRK2 RNA guide
ucuggguuacaugaaaacaguc

SEQ ID NO: 57061 - RNA, 22 nt, Artificial Sequence
  LRRK2 RNA guide
uggguuacaugaaaacagucuc

SEQ ID NO: 57062 - RNA, 22 nt, Artificial Sequence
  LRRK2 RNA guide
uguaacccagagaauuagagau

SEQ ID NO: 57063 - RNA, 22 nt, Artificial Sequence
  LRRK2 RNA guide
uguuuucauguaacccagagaa

SEQ ID NO: 57064 - RNA, 22 nt, Artificial Sequence
  LRRK2 RNA guide
uuacucaagagacuguuuucau

SEQ ID NO: 57065 - RNA, 22 nt, Artificial Sequence
  LRRK2 RNA guide
uucauguaacccagagaauuag

SEQ ID NO: 57066 - RNA, 22 nt, Artificial Sequence
  LRRK2 RNA guide
uucucuggguuacaugaaaaca

SEQ ID NO: 57067 - RNA, 22 nt, Artificial Sequence
  LRRK2 RNA guide
uuucauguaacccagagaauua

SEQ ID NO: 57068 - RNA, 22 nt, Artificial Sequence
  LRRK2 RNA guide
uuuucauguaacccagagaauu

SEQ ID NO: 57069 - RNA, 20 nt, Artificial Sequence
  LRRK2 RNA guide
aaccauaaccauuacuucca

SEQ ID NO: 57070 - RNA, 20 nt, Artificial Sequence
  LRRK2 RNA guide
aaccauuugcagguaaauau

SEQ ID NO: 57071 - RNA, 20 nt, Artificial Sequence
  LRRK2 RNA guide
aagagacaaccauaaccauu

SEQ ID NO: 57072 - RNA, 20 nt, Artificial Sequence
  LRRK2 RNA guide
acaaccauaaccauuacuuc

SEQ ID NO: 57073 - RNA, 20 nt, Artificial Sequence
  LRRK2 RNA guide
accauaaccauuacuuccau

SEQ ID NO: 57074 - RNA, 20 nt, Artificial Sequence
  LRRK2 RNA guide
accauuacuuccauauuuac

SEQ ID NO: 57075 - RNA, 20 nt, Artificial Sequence
  LRRK2 RNA guide
accauuugcagguaaauaug

SEQ ID NO: 57076 - RNA, 20 nt, Artificial Sequence
  LRRK2 RNA guide
agacaaccauaaccauuacu

SEQ ID NO: 57077 - RNA, 20 nt, Artificial Sequence
  LRRK2 RNA guide
agagacaaccauaaccauua

SEQ ID NO: 57078 - RNA, 20 nt, Artificial Sequence
  LRRK2 RNA guide
agguaaauauggaaguaaug

SEQ ID NO: 57079 - RNA, 20 nt, Artificial Sequence
  LRRK2 RNA guide
aguaaccauuugcagguaaa

SEQ ID NO: 57080 - RNA, 20 nt, Artificial Sequence
  LRRK2 RNA guide
auauggaaguaaugguuaug

SEQ ID NO: 57081 - RNA, 20 nt, Artificial Sequence
  LRRK2 RNA guide
auggaaguaaugguuauggu

SEQ ID NO: 57082 - RNA, 20 nt, Artificial Sequence
  LRRK2 RNA guide
auuacuuccauauuuaccug

SEQ ID NO: 57083 - RNA, 20 nt, Artificial Sequence
  LRRK2 RNA guide
auuugcagguaaauauggaa

SEQ ID NO: 57084 - RNA, 20 nt, Artificial Sequence
  LRRK2 RNA guide
caaccauaaccauuacuucc

SEQ ID NO: 57085 - RNA, 20 nt, Artificial Sequence
  LRRK2 RNA guide
cagguaaauauggaaguaau

SEQ ID NO: 57086 - RNA, 20 nt, Artificial Sequence
  LRRK2 RNA guide
cauaaccauuacuuccauau

SEQ ID NO: 57087 - RNA, 20 nt, Artificial Sequence
  LRRK2 RNA guide
cauuacuuccauauuuaccu

SEQ ID NO: 57088 - RNA, 20 nt, Artificial Sequence
  LRRK2 RNA guide
cauuugcagguaaauaugga

SEQ ID NO: 57089 - RNA, 20 nt, Artificial Sequence
  LRRK2 RNA guide
ccauaaccauuacuuccaua

SEQ ID NO: 57090 - RNA, 20 nt, Artificial Sequence
  LRRK2 RNA guide
ccauuacuuccauauuuacc

SEQ ID NO: 57091 - RNA, 20 nt, Artificial Sequence
  LRRK2 RNA guide
ccauuugcagguaaauaugg

SEQ ID NO: 57092 - RNA, 20 nt, Artificial Sequence
  LRRK2 RNA guide
cuuccauauuuaccugcaaa

SEQ ID NO: 57093 - RNA, 20 nt, Artificial Sequence
  LRRK2 RNA guide
gacaaccauaaccauuacuu

SEQ ID NO: 57094 - RNA, 20 nt, Artificial Sequence
  LRRK2 RNA guide
gagacaaccauaaccauuac

SEQ ID NO: 57095 - RNA, 20 nt, Artificial Sequence
  LRRK2 RNA guide
gcagguaaauauggaaguaa

SEQ ID NO: 57096 - RNA, 20 nt, Artificial Sequence
  LRRK2 RNA guide
ggaaguaaugguuaugguug

SEQ ID NO: 57097 - RNA, 20 nt, Artificial Sequence
  LRRK2 RNA guide
gguaaauauggaaguaaugg

SEQ ID NO: 57098 - RNA, 20 nt, Artificial Sequence
  LRRK2 RNA guide
guaaauauggaaguaauggu

SEQ ID NO: 57099 - RNA, 20 nt, Artificial Sequence
  LRRK2 RNA guide
guaaccauuugcagguaaau

SEQ ID NO: 57100 - RNA, 20 nt, Artificial Sequence
  LRRK2 RNA guide
uaaccauuugcagguaaaua

SEQ ID NO: 57101 - RNA, 20 nt, Artificial Sequence
  LRRK2 RNA guide
uacuuccauauuuaccugca

SEQ ID NO: 57102 - RNA, 20 nt, Artificial Sequence
  LRRK2 RNA guide
uauggaaguaaugguuaugg

SEQ ID NO: 57103 - RNA, 20 nt, Artificial Sequence
  LRRK2 RNA guide
uccauauuuaccugcaaaug

SEQ ID NO: 57104 - RNA, 20 nt, Artificial Sequence
  LRRK2 RNA guide
ugcagguaaauauggaagua

SEQ ID NO: 57105 - RNA, 20 nt, Artificial Sequence
  LRRK2 RNA guide
uggaaguaaugguuaugguu

SEQ ID NO: 57106 - RNA, 20 nt, Artificial Sequence
  LRRK2 RNA guide
uuacuuccauauuuaccugc

SEQ ID NO: 57107 - RNA, 20 nt, Artificial Sequence
  LRRK2 RNA guide
uuccauauuuaccugcaaau

SEQ ID NO: 57108 - RNA, 20 nt, Artificial Sequence
  LRRK2 RNA guide
uugcagguaaauauggaagu

SEQ ID NO: 57109 - RNA, 20 nt, Artificial Sequence
  LRRK2 RNA guide
uuugcagguaaauauggaag

SEQ ID NO: 57110 - RNA, 21 nt, Artificial Sequence
  LRRK2 RNA guide
aaagagacaaccauaaccauu

SEQ ID NO: 57111 - RNA, 21 nt, Artificial Sequence
  LRRK2 RNA guide
aaccauaaccauuacuuccau

SEQ ID NO: 57112 - RNA, 21 nt, Artificial Sequence
  LRRK2 RNA guide
aaccauuugcagguaaauaug

SEQ ID NO: 57113 - RNA, 21 nt, Artificial Sequence
  LRRK2 RNA guide
aagagacaaccauaaccauua

SEQ ID NO: 57114 - RNA, 21 nt, Artificial Sequence
  LRRK2 RNA guide
acaaccauaaccauuacuucc

SEQ ID NO: 57115 - RNA, 21 nt, Artificial Sequence
  LRRK2 RNA guide
accauaaccauuacuuccaua

SEQ ID NO: 57116 - RNA, 21 nt, Artificial Sequence
  LRRK2 RNA guide
accauuacuuccauauuuacc

SEQ ID NO: 57117 - RNA, 21 nt, Artificial Sequence
  LRRK2 RNA guide
accauuugcagguaaauaugg

SEQ ID NO: 57118 - RNA, 21 nt, Artificial Sequence
  LRRK2 RNA guide
acuuccauauuuaccugcaaa

SEQ ID NO: 57119 - RNA, 21 nt, Artificial Sequence
  LRRK2 RNA guide
agacaaccauaaccauuacuu

SEQ ID NO: 57120 - RNA, 21 nt, Artificial Sequence
  LRRK2 RNA guide
agagacaaccauaaccauuac

SEQ ID NO: 57121 - RNA, 21 nt, Artificial Sequence
  LRRK2 RNA guide
agguaaauauggaaguaaugg

SEQ ID NO: 57122 - RNA, 21 nt, Artificial Sequence
  LRRK2 RNA guide
aguaaccauuugcagguaaau

SEQ ID NO: 57123 - RNA, 21 nt, Artificial Sequence
  LRRK2 RNA guide
auauggaaguaaugguuaugg

SEQ ID NO: 57124 - RNA, 21 nt, Artificial Sequence
  LRRK2 RNA guide
auggaaguaaugguuaugguu

SEQ ID NO: 57125 - RNA, 21 nt, Artificial Sequence
  LRRK2 RNA guide
auuacuuccauauuuaccugc

SEQ ID NO: 57126 - RNA, 21 nt, Artificial Sequence
  LRRK2 RNA guide
auuugcagguaaauauggaag

SEQ ID NO: 57127 - RNA, 21 nt, Artificial Sequence
  LRRK2 RNA guide
caaccauaaccauuacuucca

SEQ ID NO: 57128 - RNA, 21 nt, Artificial Sequence
  LRRK2 RNA guide
cagguaaauauggaaguaaug

SEQ ID NO: 57129 - RNA, 21 nt, Artificial Sequence
  LRRK2 RNA guide
cauuacuuccauauuuaccug

SEQ ID NO: 57130 - RNA, 21 nt, Artificial Sequence
  LRRK2 RNA guide
cauuugcagguaaauauggaa

SEQ ID NO: 57131 - RNA, 21 nt, Artificial Sequence
  LRRK2 RNA guide
ccauaaccauuacuuccauau

SEQ ID NO: 57132 - RNA, 21 nt, Artificial Sequence
  LRRK2 RNA guide
ccauuacuuccauauuuaccu

SEQ ID NO: 57133 - RNA, 21 nt, Artificial Sequence
  LRRK2 RNA guide
ccauuugcagguaaauaugga

SEQ ID NO: 57134 - RNA, 21 nt, Artificial Sequence
  LRRK2 RNA guide
cuuccauauuuaccugcaaau

SEQ ID NO: 57135 - RNA, 21 nt, Artificial Sequence
  LRRK2 RNA guide
gacaaccauaaccauuacuuc

SEQ ID NO: 57136 - RNA, 21 nt, Artificial Sequence
  LRRK2 RNA guide
gagacaaccauaaccauuacu

SEQ ID NO: 57137 - RNA, 21 nt, Artificial Sequence
  LRRK2 RNA guide
gaguaaccauuugcagguaaa

SEQ ID NO: 57138 - RNA, 21 nt, Artificial Sequence
  LRRK2 RNA guide
gcagguaaauauggaaguaau

SEQ ID NO: 57139 - RNA, 21 nt, Artificial Sequence
  LRRK2 RNA guide
ggaaguaaugguuaugguugu

SEQ ID NO: 57140 - RNA, 21 nt, Artificial Sequence
  LRRK2 RNA guide
gguaaauauggaaguaauggu

SEQ ID NO: 57141 - RNA, 21 nt, Artificial Sequence
  LRRK2 RNA guide
guaaccauuugcagguaaaua

SEQ ID NO: 57142 - RNA, 21 nt, Artificial Sequence
  LRRK2 RNA guide
uacuuccauauuuaccugcaa

SEQ ID NO: 57143 - RNA, 21 nt, Artificial Sequence
  LRRK2 RNA guide
uauggaaguaaugguuauggu

SEQ ID NO: 57144 - RNA, 21 nt, Artificial Sequence
  LRRK2 RNA guide
uccauauuuaccugcaaaugg

SEQ ID NO: 57145 - RNA, 21 nt, Artificial Sequence
  LRRK2 RNA guide
ugcagguaaauauggaaguaa

SEQ ID NO: 57146 - RNA, 21 nt, Artificial Sequence
  LRRK2 RNA guide
uggaaguaaugguuaugguug

SEQ ID NO: 57147 - RNA, 21 nt, Artificial Sequence
  LRRK2 RNA guide
uuacuuccauauuuaccugca

SEQ ID NO: 57148 - RNA, 21 nt, Artificial Sequence
  LRRK2 RNA guide
uuccauauuuaccugcaaaug

SEQ ID NO: 57149 - RNA, 21 nt, Artificial Sequence
  LRRK2 RNA guide
uugcagguaaauauggaagua

SEQ ID NO: 57150 - RNA, 21 nt, Artificial Sequence
  LRRK2 RNA guide
uuugcagguaaauauggaagu

SEQ ID NO: 57151 - RNA, 22 nt, Artificial Sequence
  LRRK2 RNA guide
aaagagacaaccauaaccauua

SEQ ID NO: 57152 - RNA, 22 nt, Artificial Sequence
  LRRK2 RNA guide
aaccauaaccauuacuuccaua

SEQ ID NO: 57153 - RNA, 22 nt, Artificial Sequence
  LRRK2 RNA guide
aaccauuacuuccauauuuacc

SEQ ID NO: 57154 - RNA, 22 nt, Artificial Sequence
  LRRK2 RNA guide
aaccauuugcagguaaauaugg

SEQ ID NO: 57155 - RNA, 22 nt, Artificial Sequence
  LRRK2 RNA guide
aagagacaaccauaaccauuac

SEQ ID NO: 57156 - RNA, 22 nt, Artificial Sequence
  LRRK2 RNA guide
aauauggaaguaaugguuaugg

SEQ ID NO: 57157 - RNA, 22 nt, Artificial Sequence
  LRRK2 RNA guide
acaaccauaaccauuacuucca

SEQ ID NO: 57158 - RNA, 22 nt, Artificial Sequence
  LRRK2 RNA guide
accauaaccauuacuuccauau

SEQ ID NO: 57159 - RNA, 22 nt, Artificial Sequence
  LRRK2 RNA guide
accauuacuuccauauuuaccu

SEQ ID NO: 57160 - RNA, 22 nt, Artificial Sequence
  LRRK2 RNA guide
accauuugcagguaaauaugga

SEQ ID NO: 57161 - RNA, 22 nt, Artificial Sequence
  LRRK2 RNA guide
acuuccauauuuaccugcaaau

SEQ ID NO: 57162 - RNA, 22 nt, Artificial Sequence
  LRRK2 RNA guide
agacaaccauaaccauuacuuc

SEQ ID NO: 57163 - RNA, 22 nt, Artificial Sequence
  LRRK2 RNA guide
agagacaaccauaaccauuacu

SEQ ID NO: 57164 - RNA, 22 nt, Artificial Sequence
  LRRK2 RNA guide
agguaaauauggaaguaauggu

SEQ ID NO: 57165 - RNA, 22 nt, Artificial Sequence
  LRRK2 RNA guide
aguaaccauuugcagguaaaua

SEQ ID NO: 57166 - RNA, 22 nt, Artificial Sequence
  LRRK2 RNA guide
auauggaaguaaugguuauggu

SEQ ID NO: 57167 - RNA, 22 nt, Artificial Sequence
  LRRK2 RNA guide
auggaaguaaugguuaugguug

SEQ ID NO: 57168 - RNA, 22 nt, Artificial Sequence
  LRRK2 RNA guide
auuacuuccauauuuaccugca

SEQ ID NO: 57169 - RNA, 22 nt, Artificial Sequence
  LRRK2 RNA guide
auuugcagguaaauauggaagu

SEQ ID NO: 57170 - RNA, 22 nt, Artificial Sequence
  LRRK2 RNA guide
caaccauaaccauuacuuccau

SEQ ID NO: 57171 - RNA, 22 nt, Artificial Sequence
  LRRK2 RNA guide
cagguaaauauggaaguaaugg

SEQ ID NO: 57172 - RNA, 22 nt, Artificial Sequence
  LRRK2 RNA guide
cauuacuuccauauuuaccugc

SEQ ID NO: 57173 - RNA, 22 nt, Artificial Sequence
  LRRK2 RNA guide
cauuugcagguaaauauggaag

SEQ ID NO: 57174 - RNA, 22 nt, Artificial Sequence
  LRRK2 RNA guide
ccauaaccauuacuuccauauu

SEQ ID NO: 57175 - RNA, 22 nt, Artificial Sequence
  LRRK2 RNA guide
ccauuacuuccauauuuaccug

SEQ ID NO: 57176 - RNA, 22 nt, Artificial Sequence
  LRRK2 RNA guide
ccauuugcagguaaauauggaa

SEQ ID NO: 57177 - RNA, 22 nt, Artificial Sequence
  LRRK2 RNA guide
cuuccauauuuaccugcaaaug

SEQ ID NO: 57178 - RNA, 22 nt, Artificial Sequence
  LRRK2 RNA guide
gacaaccauaaccauuacuucc

SEQ ID NO: 57179 - RNA, 22 nt, Artificial Sequence
  LRRK2 RNA guide
gagacaaccauaaccauuacuu

SEQ ID NO: 57180 - RNA, 22 nt, Artificial Sequence
  LRRK2 RNA guide
gaguaaccauuugcagguaaau

SEQ ID NO: 57181 - RNA, 22 nt, Artificial Sequence
  LRRK2 RNA guide
gcagguaaauauggaaguaaug

SEQ ID NO: 57182 - RNA, 22 nt, Artificial Sequence
  LRRK2 RNA guide
ggaaguaaugguuaugguuguc

SEQ ID NO: 57183 - RNA, 22 nt, Artificial Sequence
  LRRK2 RNA guide
gguaaauauggaaguaaugguu

SEQ ID NO: 57184 - RNA, 22 nt, Artificial Sequence
  LRRK2 RNA guide
guaaccauuugcagguaaauau

SEQ ID NO: 57185 - RNA, 22 nt, Artificial Sequence
  LRRK2 RNA guide
uaaagagacaaccauaaccauu

SEQ ID NO: 57186 - RNA, 22 nt, Artificial Sequence
  LRRK2 RNA guide
uaaccauuugcagguaaauaug

SEQ ID NO: 57187 - RNA, 22 nt, Artificial Sequence
  LRRK2 RNA guide
uacuuccauauuuaccugcaaa

SEQ ID NO: 57188 - RNA, 22 nt, Artificial Sequence
  LRRK2 RNA guide
uauggaaguaaugguuaugguu

SEQ ID NO: 57189 - RNA, 22 nt, Artificial Sequence
  LRRK2 RNA guide
uccauauuuaccugcaaauggu

SEQ ID NO: 57190 - RNA, 22 nt, Artificial Sequence
  LRRK2 RNA guide
ugaguaaccauuugcagguaaa

SEQ ID NO: 57191 - RNA, 22 nt, Artificial Sequence
  LRRK2 RNA guide
ugcagguaaauauggaaguaau

SEQ ID NO: 57192 - RNA, 22 nt, Artificial Sequence
  LRRK2 RNA guide
uggaaguaaugguuaugguugu

SEQ ID NO: 57193 - RNA, 22 nt, Artificial Sequence
  LRRK2 RNA guide
uuacuuccauauuuaccugcaa

SEQ ID NO: 57194 - RNA, 22 nt, Artificial Sequence
  LRRK2 RNA guide
uuccauauuuaccugcaaaugg

SEQ ID NO: 57195 - RNA, 22 nt, Artificial Sequence
  LRRK2 RNA guide
uugcagguaaauauggaaguaa

SEQ ID NO: 57196 - RNA, 22 nt, Artificial Sequence
  LRRK2 RNA guide
uuugcagguaaauauggaagua

SEQ ID NO: 57197 - RNA, 20 nt, Artificial Sequence
  LRRK2 RNA guide
aaagagacaaccauaaccau

SEQ ID NO: 57198 - RNA, 20 nt, Artificial Sequence
  LRRK2 RNA guide
aaccauaaccauuacuccau

SEQ ID NO: 57199 - RNA, 20 nt, Artificial Sequence
  LRRK2 RNA guide
aaccauuacuccauauuuac

SEQ ID NO: 57200 - RNA, 20 nt, Artificial Sequence
  LRRK2 RNA guide
aauauggaguaaugguuaug

SEQ ID NO: 57201 - RNA, 20 nt, Artificial Sequence
  LRRK2 RNA guide
acaaccauaaccauuacucc

SEQ ID NO: 57202 - RNA, 20 nt, Artificial Sequence
  LRRK2 RNA guide
accauaaccauuacuccaua

SEQ ID NO: 57203 - RNA, 20 nt, Artificial Sequence
  LRRK2 RNA guide
accauuacuccauauuuacc

SEQ ID NO: 57204 - RNA, 20 nt, Artificial Sequence
  LRRK2 RNA guide
acuccauauuuaccugcaaa

SEQ ID NO: 57205 - RNA, 20 nt, Artificial Sequence
  LRRK2 RNA guide
agguaaauauggaguaaugg

SEQ ID NO: 57206 - RNA, 20 nt, Artificial Sequence
  LRRK2 RNA guide
auauggaguaaugguuaugg

SEQ ID NO: 57207 - RNA, 20 nt, Artificial Sequence
  LRRK2 RNA guide
auggaguaaugguuaugguu

SEQ ID NO: 57208 - RNA, 20 nt, Artificial Sequence
  LRRK2 RNA guide
auuacuccauauuuaccugc

SEQ ID NO: 57209 - RNA, 20 nt, Artificial Sequence
  LRRK2 RNA guide
auuugcagguaaauauggag

SEQ ID NO: 57210 - RNA, 20 nt, Artificial Sequence
  LRRK2 RNA guide
caaccauaaccauuacucca

SEQ ID NO: 57211 - RNA, 20 nt, Artificial Sequence
  LRRK2 RNA guide
cagguaaauauggaguaaug

SEQ ID NO: 57212 - RNA, 20 nt, Artificial Sequence
  LRRK2 RNA guide
cauaaccauuacuccauauu

SEQ ID NO: 57213 - RNA, 20 nt, Artificial Sequence
  LRRK2 RNA guide
cauuacuccauauuuaccug

SEQ ID NO: 57214 - RNA, 20 nt, Artificial Sequence
  LRRK2 RNA guide
ccauaaccauuacuccauau

SEQ ID NO: 57215 - RNA, 20 nt, Artificial Sequence
  LRRK2 RNA guide
ccauuacuccauauuuaccu

SEQ ID NO: 57216 - RNA, 20 nt, Artificial Sequence
  LRRK2 RNA guide
cuccauauuuaccugcaaau

SEQ ID NO: 57217 - RNA, 20 nt, Artificial Sequence
  LRRK2 RNA guide
gacaaccauaaccauuacuc

SEQ ID NO: 57218 - RNA, 20 nt, Artificial Sequence
  LRRK2 RNA guide
gcagguaaauauggaguaau

SEQ ID NO: 57219 - RNA, 20 nt, Artificial Sequence
  LRRK2 RNA guide
ggaguaaugguuaugguugu

SEQ ID NO: 57220 - RNA, 20 nt, Artificial Sequence
  LRRK2 RNA guide
gguaaauauggaguaauggu

SEQ ID NO: 57221 - RNA, 20 nt, Artificial Sequence
  LRRK2 RNA guide
guaaauauggaguaaugguu

SEQ ID NO: 57222 - RNA, 20 nt, Artificial Sequence
  LRRK2 RNA guide
uacuccauauuuaccugcaa

SEQ ID NO: 57223 - RNA, 20 nt, Artificial Sequence
  LRRK2 RNA guide
uauggaguaaugguuauggu

SEQ ID NO: 57224 - RNA, 20 nt, Artificial Sequence
  LRRK2 RNA guide
ugcagguaaauauggaguaa

SEQ ID NO: 57225 - RNA, 20 nt, Artificial Sequence
  LRRK2 RNA guide
uggaguaaugguuaugguug

SEQ ID NO: 57226 - RNA, 20 nt, Artificial Sequence
  LRRK2 RNA guide
uuacuccauauuuaccugca

SEQ ID NO: 57227 - RNA, 20 nt, Artificial Sequence
  LRRK2 RNA guide
uugcagguaaauauggagua

SEQ ID NO: 57228 - RNA, 20 nt, Artificial Sequence
  LRRK2 RNA guide
uuugcagguaaauauggagu

SEQ ID NO: 57229 - RNA, 21 nt, Artificial Sequence
  LRRK2 RNA guide
aaccauaaccauuacuccaua

SEQ ID NO: 57230 - RNA, 21 nt, Artificial Sequence
  LRRK2 RNA guide
aaccauuacuccauauuuacc

SEQ ID NO: 57231 - RNA, 21 nt, Artificial Sequence
  LRRK2 RNA guide
aauauggaguaaugguuaugg

SEQ ID NO: 57232 - RNA, 21 nt, Artificial Sequence
  LRRK2 RNA guide
acaaccauaaccauuacucca

SEQ ID NO: 57233 - RNA, 21 nt, Artificial Sequence
  LRRK2 RNA guide
accauaaccauuacuccauau

SEQ ID NO: 57234 - RNA, 21 nt, Artificial Sequence
  LRRK2 RNA guide
accauuacuccauauuuaccu

SEQ ID NO: 57235 - RNA, 21 nt, Artificial Sequence
  LRRK2 RNA guide
acuccauauuuaccugcaaau

SEQ ID NO: 57236 - RNA, 21 nt, Artificial Sequence
  LRRK2 RNA guide
agacaaccauaaccauuacuc

SEQ ID NO: 57237 - RNA, 21 nt, Artificial Sequence
  LRRK2 RNA guide
agguaaauauggaguaauggu

SEQ ID NO: 57238 - RNA, 21 nt, Artificial Sequence
  LRRK2 RNA guide
auauggaguaaugguuauggu

SEQ ID NO: 57239 - RNA, 21 nt, Artificial Sequence
  LRRK2 RNA guide
auggaguaaugguuaugguug

SEQ ID NO: 57240 - RNA, 21 nt, Artificial Sequence
  LRRK2 RNA guide
auuacuccauauuuaccugca

SEQ ID NO: 57241 - RNA, 21 nt, Artificial Sequence
  LRRK2 RNA guide
auuugcagguaaauauggagu

SEQ ID NO: 57242 - RNA, 21 nt, Artificial Sequence
  LRRK2 RNA guide
caaccauaaccauuacuccau

SEQ ID NO: 57243 - RNA, 21 nt, Artificial Sequence
  LRRK2 RNA guide
cagguaaauauggaguaaugg

SEQ ID NO: 57244 - RNA, 21 nt, Artificial Sequence
  LRRK2 RNA guide
cauuacuccauauuuaccugc

SEQ ID NO: 57245 - RNA, 21 nt, Artificial Sequence
  LRRK2 RNA guide
cauuugcagguaaauauggag

SEQ ID NO: 57246 - RNA, 21 nt, Artificial Sequence
  LRRK2 RNA guide
ccauaaccauuacuccauauu

SEQ ID NO: 57247 - RNA, 21 nt, Artificial Sequence
  LRRK2 RNA guide
ccauuacuccauauuuaccug

SEQ ID NO: 57248 - RNA, 21 nt, Artificial Sequence
  LRRK2 RNA guide
cuccauauuuaccugcaaaug

SEQ ID NO: 57249 - RNA, 21 nt, Artificial Sequence
  LRRK2 RNA guide
gacaaccauaaccauuacucc

SEQ ID NO: 57250 - RNA, 21 nt, Artificial Sequence
  LRRK2 RNA guide
gcagguaaauauggaguaaug

SEQ ID NO: 57251 - RNA, 21 nt, Artificial Sequence
  LRRK2 RNA guide
ggaguaaugguuaugguuguc

SEQ ID NO: 57252 - RNA, 21 nt, Artificial Sequence
  LRRK2 RNA guide
gguaaauauggaguaaugguu

SEQ ID NO: 57253 - RNA, 21 nt, Artificial Sequence
  LRRK2 RNA guide
uaaagagacaaccauaaccau

SEQ ID NO: 57254 - RNA, 21 nt, Artificial Sequence
  LRRK2 RNA guide
uacuccauauuuaccugcaaa

SEQ ID NO: 57255 - RNA, 21 nt, Artificial Sequence
  LRRK2 RNA guide
uauggaguaaugguuaugguu

SEQ ID NO: 57256 - RNA, 21 nt, Artificial Sequence
  LRRK2 RNA guide
ugcagguaaauauggaguaau

SEQ ID NO: 57257 - RNA, 21 nt, Artificial Sequence
  LRRK2 RNA guide
uggaguaaugguuaugguugu

SEQ ID NO: 57258 - RNA, 21 nt, Artificial Sequence
  LRRK2 RNA guide
uuacuccauauuuaccugcaa

SEQ ID NO: 57259 - RNA, 21 nt, Artificial Sequence
  LRRK2 RNA guide
uugcagguaaauauggaguaa

SEQ ID NO: 57260 - RNA, 21 nt, Artificial Sequence
  LRRK2 RNA guide
uuugcagguaaauauggagua

SEQ ID NO: 57261 - RNA, 22 nt, Artificial Sequence
  LRRK2 RNA guide
aaauauggaguaaugguuaugg

SEQ ID NO: 57262 - RNA, 22 nt, Artificial Sequence
  LRRK2 RNA guide
aaccauaaccauuacuccauau

SEQ ID NO: 57263 - RNA, 22 nt, Artificial Sequence
  LRRK2 RNA guide
aaccauuacuccauauuuaccu

SEQ ID NO: 57264 - RNA, 22 nt, Artificial Sequence
  LRRK2 RNA guide
aauauggaguaaugguuauggu

SEQ ID NO: 57265 - RNA, 22 nt, Artificial Sequence
  LRRK2 RNA guide
acaaccauaaccauuacuccau

SEQ ID NO: 57266 - RNA, 22 nt, Artificial Sequence
  LRRK2 RNA guide
accauaaccauuacuccauauu

SEQ ID NO: 57267 - RNA, 22 nt, Artificial Sequence
  LRRK2 RNA guide
accauuacuccauauuuaccug

SEQ ID NO: 57268 - RNA, 22 nt, Artificial Sequence
  LRRK2 RNA guide
acuccauauuuaccugcaaaug

SEQ ID NO: 57269 - RNA, 22 nt, Artificial Sequence
  LRRK2 RNA guide
agacaaccauaaccauuacucc

SEQ ID NO: 57270 - RNA, 22 nt, Artificial Sequence
  LRRK2 RNA guide
agguaaauauggaguaaugguu

SEQ ID NO: 57271 - RNA, 22 nt, Artificial Sequence
  LRRK2 RNA guide
auauggaguaaugguuaugguu

SEQ ID NO: 57272 - RNA, 22 nt, Artificial Sequence
  LRRK2 RNA guide
auggaguaaugguuaugguugu

SEQ ID NO: 57273 - RNA, 22 nt, Artificial Sequence
  LRRK2 RNA guide
auuacuccauauuuaccugcaa

SEQ ID NO: 57274 - RNA, 22 nt, Artificial Sequence
  LRRK2 RNA guide
auuugcagguaaauauggagua

SEQ ID NO: 57275 - RNA, 22 nt, Artificial Sequence
  LRRK2 RNA guide
caaccauaaccauuacuccaua

SEQ ID NO: 57276 - RNA, 22 nt, Artificial Sequence
  LRRK2 RNA guide
cagguaaauauggaguaauggu

SEQ ID NO: 57277 - RNA, 22 nt, Artificial Sequence
  LRRK2 RNA guide
cauuacuccauauuuaccugca

SEQ ID NO: 57278 - RNA, 22 nt, Artificial Sequence
  LRRK2 RNA guide
cauuugcagguaaauauggagu

SEQ ID NO: 57279 - RNA, 22 nt, Artificial Sequence
  LRRK2 RNA guide
ccauaaccauuacuccauauuu

SEQ ID NO: 57280 - RNA, 22 nt, Artificial Sequence
  LRRK2 RNA guide
ccauuacuccauauuuaccugc

SEQ ID NO: 57281 - RNA, 22 nt, Artificial Sequence
  LRRK2 RNA guide
ccauuugcagguaaauauggag

SEQ ID NO: 57282 - RNA, 22 nt, Artificial Sequence
  LRRK2 RNA guide
cuccauauuuaccugcaaaugg

SEQ ID NO: 57283 - RNA, 22 nt, Artificial Sequence
  LRRK2 RNA guide
gacaaccauaaccauuacucca

SEQ ID NO: 57284 - RNA, 22 nt, Artificial Sequence
  LRRK2 RNA guide
gagacaaccauaaccauuacuc

SEQ ID NO: 57285 - RNA, 22 nt, Artificial Sequence
  LRRK2 RNA guide
gcagguaaauauggaguaaugg

SEQ ID NO: 57286 - RNA, 22 nt, Artificial Sequence
  LRRK2 RNA guide
ggaguaaugguuaugguugucu

SEQ ID NO: 57287 - RNA, 22 nt, Artificial Sequence
  LRRK2 RNA guide
gguaaauauggaguaaugguua

SEQ ID NO: 57288 - RNA, 22 nt, Artificial Sequence
  LRRK2 RNA guide
uaaccauuacuccauauuuacc

SEQ ID NO: 57289 - RNA, 22 nt, Artificial Sequence
  LRRK2 RNA guide
uacuccauauuuaccugcaaau

SEQ ID NO: 57290 - RNA, 22 nt, Artificial Sequence
  LRRK2 RNA guide
uauggaguaaugguuaugguug

SEQ ID NO: 57291 - RNA, 22 nt, Artificial Sequence
  LRRK2 RNA guide
ugcagguaaauauggaguaaug

SEQ ID NO: 57292 - RNA, 22 nt, Artificial Sequence
  LRRK2 RNA guide
uggaguaaugguuaugguuguc

SEQ ID NO: 57293 - RNA, 22 nt, Artificial Sequence
  LRRK2 RNA guide
uuaaagagacaaccauaaccau

SEQ ID NO: 57294 - RNA, 22 nt, Artificial Sequence
  LRRK2 RNA guide
uuacuccauauuuaccugcaaa

SEQ ID NO: 57295 - RNA, 22 nt, Artificial Sequence
  LRRK2 RNA guide
uugcagguaaauauggaguaau

SEQ ID NO: 57296 - RNA, 22 nt, Artificial Sequence
  LRRK2 RNA guide
uuugcagguaaauauggaguaa

SEQ ID NO: 57297 - RNA, 20 nt, Artificial Sequence
  LRRK2 RNA guide
aaacaucagugauucugaua

SEQ ID NO: 57298 - RNA, 20 nt, Artificial Sequence
  LRRK2 RNA guide
aaaucaucuaaacaucagug

SEQ ID NO: 57299 - RNA, 20 nt, Artificial Sequence
  LRRK2 RNA guide
aaucacugauguuuagauga

SEQ ID NO: 57300 - RNA, 20 nt, Artificial Sequence
  LRRK2 RNA guide
aaucaucuaaacaucaguga

SEQ ID NO: 57301 - RNA, 20 nt, Artificial Sequence
  LRRK2 RNA guide
acaucagugauucugauagg

SEQ ID NO: 57302 - RNA, 20 nt, Artificial Sequence
  LRRK2 RNA guide
acugauguuuagaugauuuc

SEQ ID NO: 57303 - RNA, 20 nt, Artificial Sequence
  LRRK2 RNA guide
agaaaucaucuaaacaucag

SEQ ID NO: 57304 - RNA, 20 nt, Artificial Sequence
  LRRK2 RNA guide
agaaucacugauguuuagau

SEQ ID NO: 57305 - RNA, 20 nt, Artificial Sequence
  LRRK2 RNA guide
aucacugauguuuagaugau

SEQ ID NO: 57306 - RNA, 20 nt, Artificial Sequence
  LRRK2 RNA guide
aucagaaucacugauguuua

SEQ ID NO: 57307 - RNA, 20 nt, Artificial Sequence
  LRRK2 RNA guide
aucagugauucugauaggag

SEQ ID NO: 57308 - RNA, 20 nt, Artificial Sequence
  LRRK2 RNA guide
aucaucuaaacaucagugau

SEQ ID NO: 57309 - RNA, 20 nt, Artificial Sequence
  LRRK2 RNA guide
auccucuccuaucagaauca

SEQ ID NO: 57310 - RNA, 20 nt, Artificial Sequence
  LRRK2 RNA guide
aucuaaacaucagugauucu

SEQ ID NO: 57311 - RNA, 20 nt, Artificial Sequence
  LRRK2 RNA guide
cacugauguuuagaugauuu

SEQ ID NO: 57312 - RNA, 20 nt, Artificial Sequence
  LRRK2 RNA guide
cagaaucacugauguuuaga

SEQ ID NO: 57313 - RNA, 20 nt, Artificial Sequence
  LRRK2 RNA guide
caucagugauucugauagga

SEQ ID NO: 57314 - RNA, 20 nt, Artificial Sequence
  LRRK2 RNA guide
cauccucuccuaucagaauc

SEQ ID NO: 57315 - RNA, 20 nt, Artificial Sequence
  LRRK2 RNA guide
caucuaaacaucagugauuc

SEQ ID NO: 57316 - RNA, 20 nt, Artificial Sequence
  LRRK2 RNA guide
ccuaucagaaucacugaugu

SEQ ID NO: 57317 - RNA, 20 nt, Artificial Sequence
  LRRK2 RNA guide
ccucuccuaucagaaucacu

SEQ ID NO: 57318 - RNA, 20 nt, Artificial Sequence
  LRRK2 RNA guide
cuaaacaucagugauucuga

SEQ ID NO: 57319 - RNA, 20 nt, Artificial Sequence
  LRRK2 RNA guide
cuaucagaaucacugauguu

SEQ ID NO: 57320 - RNA, 20 nt, Artificial Sequence
  LRRK2 RNA guide
cuccuaucagaaucacugau

SEQ ID NO: 57321 - RNA, 20 nt, Artificial Sequence
  LRRK2 RNA guide
cucuccuaucagaaucacug

SEQ ID NO: 57322 - RNA, 20 nt, Artificial Sequence
  LRRK2 RNA guide
cugauguuuagaugauuucu

SEQ ID NO: 57323 - RNA, 20 nt, Artificial Sequence
  LRRK2 RNA guide
gaaaucaucuaaacaucagu

SEQ ID NO: 57324 - RNA, 20 nt, Artificial Sequence
  LRRK2 RNA guide
gaaucacugauguuuagaug

SEQ ID NO: 57325 - RNA, 20 nt, Artificial Sequence
  LRRK2 RNA guide
gagaaaucaucuaaacauca

SEQ ID NO: 57326 - RNA, 20 nt, Artificial Sequence
  LRRK2 RNA guide
gauguuuagaugauuucuca

SEQ ID NO: 57327 - RNA, 20 nt, Artificial Sequence
  LRRK2 RNA guide
ggaaaaugagaaaucaucua

SEQ ID NO: 57328 - RNA, 20 nt, Artificial Sequence
  LRRK2 RNA guide
uaaacaucagugauucugau

SEQ ID NO: 57329 - RNA, 20 nt, Artificial Sequence
  LRRK2 RNA guide
uaucagaaucacugauguuu

SEQ ID NO: 57330 - RNA, 20 nt, Artificial Sequence
  LRRK2 RNA guide
ucacugauguuuagaugauu

SEQ ID NO: 57331 - RNA, 20 nt, Artificial Sequence
  LRRK2 RNA guide
ucagaaucacugauguuuag

SEQ ID NO: 57332 - RNA, 20 nt, Artificial Sequence
  LRRK2 RNA guide
ucaucuaaacaucagugauu

SEQ ID NO: 57333 - RNA, 20 nt, Artificial Sequence
  LRRK2 RNA guide
uccuaucagaaucacugaug

SEQ ID NO: 57334 - RNA, 20 nt, Artificial Sequence
  LRRK2 RNA guide
uccucuccuaucagaaucac

SEQ ID NO: 57335 - RNA, 20 nt, Artificial Sequence
  LRRK2 RNA guide
ucuaaacaucagugauucug

SEQ ID NO: 57336 - RNA, 20 nt, Artificial Sequence
  LRRK2 RNA guide
ucuccuaucagaaucacuga

SEQ ID NO: 57337 - RNA, 20 nt, Artificial Sequence
  LRRK2 RNA guide
ugagaaaucaucuaaacauc

SEQ ID NO: 57338 - RNA, 20 nt, Artificial Sequence
  LRRK2 RNA guide
ugauguuuagaugauuucuc

SEQ ID NO: 57339 - RNA, 21 nt, Artificial Sequence
  LRRK2 RNA guide
aaacaucagugauucugauag

SEQ ID NO: 57340 - RNA, 21 nt, Artificial Sequence
  LRRK2 RNA guide
aacaucagugauucugauagg

SEQ ID NO: 57341 - RNA, 21 nt, Artificial Sequence
  LRRK2 RNA guide
acaucagugauucugauagga

SEQ ID NO: 57342 - RNA, 21 nt, Artificial Sequence
  LRRK2 RNA guide
agaaucacugauguuuagaug

SEQ ID NO: 57343 - RNA, 21 nt, Artificial Sequence
  LRRK2 RNA guide
aucagaaucacugauguuuag

SEQ ID NO: 57344 - RNA, 21 nt, Artificial Sequence
  LRRK2 RNA guide
aucagugauucugauaggaga

SEQ ID NO: 57345 - RNA, 21 nt, Artificial Sequence
  LRRK2 RNA guide
auccucuccuaucagaaucac

SEQ ID NO: 57346 - RNA, 21 nt, Artificial Sequence
  LRRK2 RNA guide
aucuaaacaucagugauucug

SEQ ID NO: 57347 - RNA, 21 nt, Artificial Sequence
  LRRK2 RNA guide
cacugauguuuagaugauuuc

SEQ ID NO: 57348 - RNA, 21 nt, Artificial Sequence
  LRRK2 RNA guide
cagaaucacugauguuuagau

SEQ ID NO: 57349 - RNA, 21 nt, Artificial Sequence
  LRRK2 RNA guide
caucagugauucugauaggag

SEQ ID NO: 57350 - RNA, 21 nt, Artificial Sequence
  LRRK2 RNA guide
cauccucuccuaucagaauca

SEQ ID NO: 57351 - RNA, 21 nt, Artificial Sequence
  LRRK2 RNA guide
caucuaaacaucagugauucu

SEQ ID NO: 57352 - RNA, 21 nt, Artificial Sequence
  LRRK2 RNA guide
ccuaucagaaucacugauguu

SEQ ID NO: 57353 - RNA, 21 nt, Artificial Sequence
  LRRK2 RNA guide
ccucuccuaucagaaucacug

SEQ ID NO: 57354 - RNA, 21 nt, Artificial Sequence
  LRRK2 RNA guide
cuaaacaucagugauucugau

SEQ ID NO: 57355 - RNA, 21 nt, Artificial Sequence
  LRRK2 RNA guide
cuaucagaaucacugauguuu

SEQ ID NO: 57356 - RNA, 21 nt, Artificial Sequence
  LRRK2 RNA guide
cuccuaucagaaucacugaug

SEQ ID NO: 57357 - RNA, 21 nt, Artificial Sequence
  LRRK2 RNA guide
cucuccuaucagaaucacuga

SEQ ID NO: 57358 - RNA, 21 nt, Artificial Sequence
  LRRK2 RNA guide
cugauguuuagaugauuucuc

SEQ ID NO: 57359 - RNA, 21 nt, Artificial Sequence
  LRRK2 RNA guide
gaaaucaucuaaacaucagug

SEQ ID NO: 57360 - RNA, 21 nt, Artificial Sequence
  LRRK2 RNA guide
gaaucacugauguuuagauga

SEQ ID NO: 57361 - RNA, 21 nt, Artificial Sequence
  LRRK2 RNA guide
gagaaaucaucuaaacaucag

SEQ ID NO: 57362 - RNA, 21 nt, Artificial Sequence
  LRRK2 RNA guide
gggaaaaugagaaaucaucua

SEQ ID NO: 57363 - RNA, 21 nt, Artificial Sequence
  LRRK2 RNA guide
ucagaaucacugauguuuaga

SEQ ID NO: 57364 - RNA, 21 nt, Artificial Sequence
  LRRK2 RNA guide
ucauccucuccuaucagaauc

SEQ ID NO: 57365 - RNA, 21 nt, Artificial Sequence
  LRRK2 RNA guide
ucaucuaaacaucagugauuc

SEQ ID NO: 57366 - RNA, 21 nt, Artificial Sequence
  LRRK2 RNA guide
uccuaucagaaucacugaugu

SEQ ID NO: 57367 - RNA, 21 nt, Artificial Sequence
  LRRK2 RNA guide
uccucuccuaucagaaucacu

SEQ ID NO: 57368 - RNA, 21 nt, Artificial Sequence
  LRRK2 RNA guide
ucuaaacaucagugauucuga

SEQ ID NO: 57369 - RNA, 21 nt, Artificial Sequence
  LRRK2 RNA guide
ucuccuaucagaaucacugau

SEQ ID NO: 57370 - RNA, 22 nt, Artificial Sequence
  LRRK2 RNA guide
aaacaucagugauucugauagg

SEQ ID NO: 57371 - RNA, 22 nt, Artificial Sequence
  LRRK2 RNA guide
aacaucagugauucugauagga

SEQ ID NO: 57372 - RNA, 22 nt, Artificial Sequence
  LRRK2 RNA guide
acaucagugauucugauaggag

SEQ ID NO: 57373 - RNA, 22 nt, Artificial Sequence
  LRRK2 RNA guide
acugauguuuagaugauuucuc

SEQ ID NO: 57374 - RNA, 22 nt, Artificial Sequence
  LRRK2 RNA guide
agaaaucaucuaaacaucagug

SEQ ID NO: 57375 - RNA, 22 nt, Artificial Sequence
  LRRK2 RNA guide
agaaucacugauguuuagauga

SEQ ID NO: 57376 - RNA, 22 nt, Artificial Sequence
  LRRK2 RNA guide
aucagaaucacugauguuuaga

SEQ ID NO: 57377 - RNA, 22 nt, Artificial Sequence
  LRRK2 RNA guide
aucagugauucugauaggagag

SEQ ID NO: 57378 - RNA, 22 nt, Artificial Sequence
  LRRK2 RNA guide
aucauccucuccuaucagaauc

SEQ ID NO: 57379 - RNA, 22 nt, Artificial Sequence
  LRRK2 RNA guide
aucaucuaaacaucagugauuc

SEQ ID NO: 57380 - RNA, 22 nt, Artificial Sequence
  LRRK2 RNA guide
auccucuccuaucagaaucacu

SEQ ID NO: 57381 - RNA, 22 nt, Artificial Sequence
  LRRK2 RNA guide
aucuaaacaucagugauucuga

SEQ ID NO: 57382 - RNA, 22 nt, Artificial Sequence
  LRRK2 RNA guide
cacugauguuuagaugauuucu

SEQ ID NO: 57383 - RNA, 22 nt, Artificial Sequence
  LRRK2 RNA guide
cagaaucacugauguuuagaug

SEQ ID NO: 57384 - RNA, 22 nt, Artificial Sequence
  LRRK2 RNA guide
caucagugauucugauaggaga

SEQ ID NO: 57385 - RNA, 22 nt, Artificial Sequence
  LRRK2 RNA guide
cauccucuccuaucagaaucac

SEQ ID NO: 57386 - RNA, 22 nt, Artificial Sequence
  LRRK2 RNA guide
caucuaaacaucagugauucug

SEQ ID NO: 57387 - RNA, 22 nt, Artificial Sequence
  LRRK2 RNA guide
ccuaucagaaucacugauguuu

SEQ ID NO: 57388 - RNA, 22 nt, Artificial Sequence
  LRRK2 RNA guide
ccucuccuaucagaaucacuga

SEQ ID NO: 57389 - RNA, 22 nt, Artificial Sequence
  LRRK2 RNA guide
cuaaacaucagugauucugaua

SEQ ID NO: 57390 - RNA, 22 nt, Artificial Sequence
  LRRK2 RNA guide
cuaucagaaucacugauguuua

SEQ ID NO: 57391 - RNA, 22 nt, Artificial Sequence
  LRRK2 RNA guide
cuccuaucagaaucacugaugu

SEQ ID NO: 57392 - RNA, 22 nt, Artificial Sequence
  LRRK2 RNA guide
cucuccuaucagaaucacugau

SEQ ID NO: 57393 - RNA, 22 nt, Artificial Sequence
  LRRK2 RNA guide
cugauguuuagaugauuucuca

SEQ ID NO: 57394 - RNA, 22 nt, Artificial Sequence
  LRRK2 RNA guide
gaaaucaucuaaacaucaguga

SEQ ID NO: 57395 - RNA, 22 nt, Artificial Sequence
  LRRK2 RNA guide
gaaucacugauguuuagaugau

SEQ ID NO: 57396 - RNA, 22 nt, Artificial Sequence
  LRRK2 RNA guide
gagaaaucaucuaaacaucagu

SEQ ID NO: 57397 - RNA, 22 nt, Artificial Sequence
  LRRK2 RNA guide
gggaaaaugagaaaucaucuaa

SEQ ID NO: 57398 - RNA, 22 nt, Artificial Sequence
  LRRK2 RNA guide
uaaacaucagugauucugauag

SEQ ID NO: 57399 - RNA, 22 nt, Artificial Sequence
  LRRK2 RNA guide
uaucagaaucacugauguuuag

SEQ ID NO: 57400 - RNA, 22 nt, Artificial Sequence
  LRRK2 RNA guide
ucacugauguuuagaugauuuc

SEQ ID NO: 57401 - RNA, 22 nt, Artificial Sequence
  LRRK2 RNA guide
ucagaaucacugauguuuagau

SEQ ID NO: 57402 - RNA, 22 nt, Artificial Sequence
  LRRK2 RNA guide
ucauccucuccuaucagaauca

SEQ ID NO: 57403 - RNA, 22 nt, Artificial Sequence
  LRRK2 RNA guide
ucaucuaaacaucagugauucu

SEQ ID NO: 57404 - RNA, 22 nt, Artificial Sequence
  LRRK2 RNA guide
uccuaucagaaucacugauguu

SEQ ID NO: 57405 - RNA, 22 nt, Artificial Sequence
  LRRK2 RNA guide
uccucuccuaucagaaucacug

SEQ ID NO: 57406 - RNA, 22 nt, Artificial Sequence
  LRRK2 RNA guide
ucuaaacaucagugauucugau

SEQ ID NO: 57407 - RNA, 22 nt, Artificial Sequence
  LRRK2 RNA guide
ucuccuaucagaaucacugaug

SEQ ID NO: 57408 - RNA, 22 nt, Artificial Sequence
  LRRK2 RNA guide
ugagaaaucaucuaaacaucag

SEQ ID NO: 57409 - RNA, 22 nt, Artificial Sequence
  LRRK2 RNA guide
ugggaaaaugagaaaucaucua

SEQ ID NO: 57410 - RNA, 20 nt, Artificial Sequence
  LRRK2 RNA guide
aaacaccagugauucugaua

SEQ ID NO: 57411 - RNA, 20 nt, Artificial Sequence
  LRRK2 RNA guide
aaaucaucuaaacaccagug

SEQ ID NO: 57412 - RNA, 20 nt, Artificial Sequence
  LRRK2 RNA guide
aacaccagugauucugauag

SEQ ID NO: 57413 - RNA, 20 nt, Artificial Sequence
  LRRK2 RNA guide
aaucacugguguuuagauga

SEQ ID NO: 57414 - RNA, 20 nt, Artificial Sequence
  LRRK2 RNA guide
aaucaucuaaacaccaguga

SEQ ID NO: 57415 - RNA, 20 nt, Artificial Sequence
  LRRK2 RNA guide
acaccagugauucugauagg

SEQ ID NO: 57416 - RNA, 20 nt, Artificial Sequence
  LRRK2 RNA guide
accagugauucugauaggag

SEQ ID NO: 57417 - RNA, 20 nt, Artificial Sequence
  LRRK2 RNA guide
acugguguuuagaugauuuc

SEQ ID NO: 57418 - RNA, 20 nt, Artificial Sequence
  LRRK2 RNA guide
agaaaucaucuaaacaccag

SEQ ID NO: 57419 - RNA, 20 nt, Artificial Sequence
  LRRK2 RNA guide
agaaucacugguguuuagau

SEQ ID NO: 57420 - RNA, 20 nt, Artificial Sequence
  LRRK2 RNA guide
aucacugguguuuagaugau

SEQ ID NO: 57421 - RNA, 20 nt, Artificial Sequence
  LRRK2 RNA guide
aucagaaucacugguguuua

SEQ ID NO: 57422 - RNA, 20 nt, Artificial Sequence
  LRRK2 RNA guide
aucaucuaaacaccagugau

SEQ ID NO: 57423 - RNA, 20 nt, Artificial Sequence
  LRRK2 RNA guide
aucuaaacaccagugauucu

SEQ ID NO: 57424 - RNA, 20 nt, Artificial Sequence
  LRRK2 RNA guide
augagaaaucaucuaaacac

SEQ ID NO: 57425 - RNA, 20 nt, Artificial Sequence
  LRRK2 RNA guide
caccagugauucugauagga

SEQ ID NO: 57426 - RNA, 20 nt, Artificial Sequence
  LRRK2 RNA guide
cacugguguuuagaugauuu

SEQ ID NO: 57427 - RNA, 20 nt, Artificial Sequence
  LRRK2 RNA guide
cagaaucacugguguuuaga

SEQ ID NO: 57428 - RNA, 20 nt, Artificial Sequence
  LRRK2 RNA guide
caucuaaacaccagugauuc

SEQ ID NO: 57429 - RNA, 20 nt, Artificial Sequence
  LRRK2 RNA guide
ccuaucagaaucacuggugu

SEQ ID NO: 57430 - RNA, 20 nt, Artificial Sequence
  LRRK2 RNA guide
cuaaacaccagugauucuga

SEQ ID NO: 57431 - RNA, 20 nt, Artificial Sequence
  LRRK2 RNA guide
cuaucagaaucacugguguu

SEQ ID NO: 57432 - RNA, 20 nt, Artificial Sequence
  LRRK2 RNA guide
cuccuaucagaaucacuggu

SEQ ID NO: 57433 - RNA, 20 nt, Artificial Sequence
  LRRK2 RNA guide
cugguguuuagaugauuucu

SEQ ID NO: 57434 - RNA, 20 nt, Artificial Sequence
  LRRK2 RNA guide
gaaaucaucuaaacaccagu

SEQ ID NO: 57435 - RNA, 20 nt, Artificial Sequence
  LRRK2 RNA guide
gaaucacugguguuuagaug

SEQ ID NO: 57436 - RNA, 20 nt, Artificial Sequence
  LRRK2 RNA guide
gagaaaucaucuaaacacca

SEQ ID NO: 57437 - RNA, 20 nt, Artificial Sequence
  LRRK2 RNA guide
gguguuuagaugauuucuca

SEQ ID NO: 57438 - RNA, 20 nt, Artificial Sequence
  LRRK2 RNA guide
uaaacaccagugauucugau

SEQ ID NO: 57439 - RNA, 20 nt, Artificial Sequence
  LRRK2 RNA guide
uaucagaaucacugguguuu

SEQ ID NO: 57440 - RNA, 20 nt, Artificial Sequence
  LRRK2 RNA guide
ucacugguguuuagaugauu

SEQ ID NO: 57441 - RNA, 20 nt, Artificial Sequence
  LRRK2 RNA guide
ucagaaucacugguguuuag

SEQ ID NO: 57442 - RNA, 20 nt, Artificial Sequence
  LRRK2 RNA guide
ucaucuaaacaccagugauu

SEQ ID NO: 57443 - RNA, 20 nt, Artificial Sequence
  LRRK2 RNA guide
uccuaucagaaucacuggug

SEQ ID NO: 57444 - RNA, 20 nt, Artificial Sequence
  LRRK2 RNA guide
ucuaaacaccagugauucug

SEQ ID NO: 57445 - RNA, 20 nt, Artificial Sequence
  LRRK2 RNA guide
ucuccuaucagaaucacugg

SEQ ID NO: 57446 - RNA, 20 nt, Artificial Sequence
  LRRK2 RNA guide
ugagaaaucaucuaaacacc

SEQ ID NO: 57447 - RNA, 20 nt, Artificial Sequence
  LRRK2 RNA guide
ugguguuuagaugauuucuc

SEQ ID NO: 57448 - RNA, 21 nt, Artificial Sequence
  LRRK2 RNA guide
aaacaccagugauucugauag

SEQ ID NO: 57449 - RNA, 21 nt, Artificial Sequence
  LRRK2 RNA guide
aaaucaucuaaacaccaguga

SEQ ID NO: 57450 - RNA, 21 nt, Artificial Sequence
  LRRK2 RNA guide
aacaccagugauucugauagg

SEQ ID NO: 57451 - RNA, 21 nt, Artificial Sequence
  LRRK2 RNA guide
aaucacugguguuuagaugau

SEQ ID NO: 57452 - RNA, 21 nt, Artificial Sequence
  LRRK2 RNA guide
aaucaucuaaacaccagugau

SEQ ID NO: 57453 - RNA, 21 nt, Artificial Sequence
  LRRK2 RNA guide
acaccagugauucugauagga

SEQ ID NO: 57454 - RNA, 21 nt, Artificial Sequence
  LRRK2 RNA guide
accagugauucugauaggaga

SEQ ID NO: 57455 - RNA, 21 nt, Artificial Sequence
  LRRK2 RNA guide
acugguguuuagaugauuucu

SEQ ID NO: 57456 - RNA, 21 nt, Artificial Sequence
  LRRK2 RNA guide
agaaaucaucuaaacaccagu

SEQ ID NO: 57457 - RNA, 21 nt, Artificial Sequence
  LRRK2 RNA guide
agaaucacugguguuuagaug

SEQ ID NO: 57458 - RNA, 21 nt, Artificial Sequence
  LRRK2 RNA guide
aucacugguguuuagaugauu

SEQ ID NO: 57459 - RNA, 21 nt, Artificial Sequence
  LRRK2 RNA guide
aucagaaucacugguguuuag

SEQ ID NO: 57460 - RNA, 21 nt, Artificial Sequence
  LRRK2 RNA guide
aucaucuaaacaccagugauu

SEQ ID NO: 57461 - RNA, 21 nt, Artificial Sequence
  LRRK2 RNA guide
aucuaaacaccagugauucug

SEQ ID NO: 57462 - RNA, 21 nt, Artificial Sequence
  LRRK2 RNA guide
augagaaaucaucuaaacacc

SEQ ID NO: 57463 - RNA, 21 nt, Artificial Sequence
  LRRK2 RNA guide
caccagugauucugauaggag

SEQ ID NO: 57464 - RNA, 21 nt, Artificial Sequence
  LRRK2 RNA guide
cacugguguuuagaugauuuc

SEQ ID NO: 57465 - RNA, 21 nt, Artificial Sequence
  LRRK2 RNA guide
cagaaucacugguguuuagau

SEQ ID NO: 57466 - RNA, 21 nt, Artificial Sequence
  LRRK2 RNA guide
caucuaaacaccagugauucu

SEQ ID NO: 57467 - RNA, 21 nt, Artificial Sequence
  LRRK2 RNA guide
ccuaucagaaucacugguguu

SEQ ID NO: 57468 - RNA, 21 nt, Artificial Sequence
  LRRK2 RNA guide
cuaaacaccagugauucugau

SEQ ID NO: 57469 - RNA, 21 nt, Artificial Sequence
  LRRK2 RNA guide
cuaucagaaucacugguguuu

SEQ ID NO: 57470 - RNA, 21 nt, Artificial Sequence
  LRRK2 RNA guide
cuccuaucagaaucacuggug

SEQ ID NO: 57471 - RNA, 21 nt, Artificial Sequence
  LRRK2 RNA guide
cucuccuaucagaaucacugg

SEQ ID NO: 57472 - RNA, 21 nt, Artificial Sequence
  LRRK2 RNA guide
cugguguuuagaugauuucuc

SEQ ID NO: 57473 - RNA, 21 nt, Artificial Sequence
  LRRK2 RNA guide
gaaaucaucuaaacaccagug

SEQ ID NO: 57474 - RNA, 21 nt, Artificial Sequence
  LRRK2 RNA guide
gaaucacugguguuuagauga

SEQ ID NO: 57475 - RNA, 21 nt, Artificial Sequence
  LRRK2 RNA guide
gagaaaucaucuaaacaccag

SEQ ID NO: 57476 - RNA, 21 nt, Artificial Sequence
  LRRK2 RNA guide
gguguuuagaugauuucucau

SEQ ID NO: 57477 - RNA, 21 nt, Artificial Sequence
  LRRK2 RNA guide
uaaacaccagugauucugaua

SEQ ID NO: 57478 - RNA, 21 nt, Artificial Sequence
  LRRK2 RNA guide
uaucagaaucacugguguuua

SEQ ID NO: 57479 - RNA, 21 nt, Artificial Sequence
  LRRK2 RNA guide
ucacugguguuuagaugauuu

SEQ ID NO: 57480 - RNA, 21 nt, Artificial Sequence
  LRRK2 RNA guide
ucagaaucacugguguuuaga

SEQ ID NO: 57481 - RNA, 21 nt, Artificial Sequence
  LRRK2 RNA guide
ucaucuaaacaccagugauuc

SEQ ID NO: 57482 - RNA, 21 nt, Artificial Sequence
  LRRK2 RNA guide
uccuaucagaaucacuggugu

SEQ ID NO: 57483 - RNA, 21 nt, Artificial Sequence
  LRRK2 RNA guide
ucuaaacaccagugauucuga

SEQ ID NO: 57484 - RNA, 21 nt, Artificial Sequence
  LRRK2 RNA guide
ucuccuaucagaaucacuggu

SEQ ID NO: 57485 - RNA, 21 nt, Artificial Sequence
  LRRK2 RNA guide
ugagaaaucaucuaaacacca

SEQ ID NO: 57486 - RNA, 21 nt, Artificial Sequence
  LRRK2 RNA guide
ugguguuuagaugauuucuca

SEQ ID NO: 57487 - RNA, 22 nt, Artificial Sequence
  LRRK2 RNA guide
aaacaccagugauucugauagg

SEQ ID NO: 57488 - RNA, 22 nt, Artificial Sequence
  LRRK2 RNA guide
aaaucaucuaaacaccagugau

SEQ ID NO: 57489 - RNA, 22 nt, Artificial Sequence
  LRRK2 RNA guide
aacaccagugauucugauagga

SEQ ID NO: 57490 - RNA, 22 nt, Artificial Sequence
  LRRK2 RNA guide
aaucacugguguuuagaugauu

SEQ ID NO: 57491 - RNA, 22 nt, Artificial Sequence
  LRRK2 RNA guide
aaucaucuaaacaccagugauu

SEQ ID NO: 57492 - RNA, 22 nt, Artificial Sequence
  LRRK2 RNA guide
aaugagaaaucaucuaaacacc

SEQ ID NO: 57493 - RNA, 22 nt, Artificial Sequence
  LRRK2 RNA guide
acaccagugauucugauaggag

SEQ ID NO: 57494 - RNA, 22 nt, Artificial Sequence
  LRRK2 RNA guide
accagugauucugauaggagag

SEQ ID NO: 57495 - RNA, 22 nt, Artificial Sequence
  LRRK2 RNA guide
acugguguuuagaugauuucuc

SEQ ID NO: 57496 - RNA, 22 nt, Artificial Sequence
  LRRK2 RNA guide
agaaaucaucuaaacaccagug

SEQ ID NO: 57497 - RNA, 22 nt, Artificial Sequence
  LRRK2 RNA guide
agaaucacugguguuuagauga

SEQ ID NO: 57498 - RNA, 22 nt, Artificial Sequence
  LRRK2 RNA guide
aucacugguguuuagaugauuu

SEQ ID NO: 57499 - RNA, 22 nt, Artificial Sequence
  LRRK2 RNA guide
aucagaaucacugguguuuaga

SEQ ID NO: 57500 - RNA, 22 nt, Artificial Sequence
  LRRK2 RNA guide
aucaucuaaacaccagugauuc

SEQ ID NO: 57501 - RNA, 22 nt, Artificial Sequence
  LRRK2 RNA guide
aucuaaacaccagugauucuga

SEQ ID NO: 57502 - RNA, 22 nt, Artificial Sequence
  LRRK2 RNA guide
augagaaaucaucuaaacacca

SEQ ID NO: 57503 - RNA, 22 nt, Artificial Sequence
  LRRK2 RNA guide
caccagugauucugauaggaga

SEQ ID NO: 57504 - RNA, 22 nt, Artificial Sequence
  LRRK2 RNA guide
cacugguguuuagaugauuucu

SEQ ID NO: 57505 - RNA, 22 nt, Artificial Sequence
  LRRK2 RNA guide
cagaaucacugguguuuagaug

SEQ ID NO: 57506 - RNA, 22 nt, Artificial Sequence
  LRRK2 RNA guide
caucuaaacaccagugauucug

SEQ ID NO: 57507 - RNA, 22 nt, Artificial Sequence
  LRRK2 RNA guide
ccuaucagaaucacugguguuu

SEQ ID NO: 57508 - RNA, 22 nt, Artificial Sequence
  LRRK2 RNA guide
ccucuccuaucagaaucacugg

SEQ ID NO: 57509 - RNA, 22 nt, Artificial Sequence
  LRRK2 RNA guide
cuaaacaccagugauucugaua

SEQ ID NO: 57510 - RNA, 22 nt, Artificial Sequence
  LRRK2 RNA guide
cuaucagaaucacugguguuua

SEQ ID NO: 57511 - RNA, 22 nt, Artificial Sequence
  LRRK2 RNA guide
cuccuaucagaaucacuggugu

SEQ ID NO: 57512 - RNA, 22 nt, Artificial Sequence
  LRRK2 RNA guide
cucuccuaucagaaucacuggu

SEQ ID NO: 57513 - RNA, 22 nt, Artificial Sequence
  LRRK2 RNA guide
cugguguuuagaugauuucuca

SEQ ID NO: 57514 - RNA, 22 nt, Artificial Sequence
  LRRK2 RNA guide
gaaaucaucuaaacaccaguga

SEQ ID NO: 57515 - RNA, 22 nt, Artificial Sequence
  LRRK2 RNA guide
gaaucacugguguuuagaugau

SEQ ID NO: 57516 - RNA, 22 nt, Artificial Sequence
  LRRK2 RNA guide
gagaaaucaucuaaacaccagu

SEQ ID NO: 57517 - RNA, 22 nt, Artificial Sequence
  LRRK2 RNA guide
gguguuuagaugauuucucauu

SEQ ID NO: 57518 - RNA, 22 nt, Artificial Sequence
  LRRK2 RNA guide
uaaacaccagugauucugauag

SEQ ID NO: 57519 - RNA, 22 nt, Artificial Sequence
  LRRK2 RNA guide
uaucagaaucacugguguuuag

SEQ ID NO: 57520 - RNA, 22 nt, Artificial Sequence
  LRRK2 RNA guide
ucacugguguuuagaugauuuc

SEQ ID NO: 57521 - RNA, 22 nt, Artificial Sequence
  LRRK2 RNA guide
ucagaaucacugguguuuagau

SEQ ID NO: 57522 - RNA, 22 nt, Artificial Sequence
  LRRK2 RNA guide
ucaucuaaacaccagugauucu

SEQ ID NO: 57523 - RNA, 22 nt, Artificial Sequence
  LRRK2 RNA guide
uccuaucagaaucacugguguu

SEQ ID NO: 57524 - RNA, 22 nt, Artificial Sequence
  LRRK2 RNA guide
ucuaaacaccagugauucugau

SEQ ID NO: 57525 - RNA, 22 nt, Artificial Sequence
  LRRK2 RNA guide
ucuccuaucagaaucacuggug

SEQ ID NO: 57526 - RNA, 22 nt, Artificial Sequence
  LRRK2 RNA guide
ugagaaaucaucuaaacaccag

SEQ ID NO: 57527 - RNA, 22 nt, Artificial Sequence
  LRRK2 RNA guide
ugguguuuagaugauuucucau

SEQ ID NO: 57528 - RNA, 20 nt, Artificial Sequence
  LRRK2 RNA guide
aaacgcagagacauaaaauc

SEQ ID NO: 57529 - RNA, 20 nt, Artificial Sequence
  LRRK2 RNA guide
aacagugaaacgcagagaca

SEQ ID NO: 57530 - RNA, 20 nt, Artificial Sequence
  LRRK2 RNA guide
aacgcagagacauaaaaucc

SEQ ID NO: 57531 - RNA, 20 nt, Artificial Sequence
  LRRK2 RNA guide
acagugaaacgcagagacau

SEQ ID NO: 57532 - RNA, 20 nt, Artificial Sequence
  LRRK2 RNA guide
acgcagagacauaaaauccc

SEQ ID NO: 57533 - RNA, 20 nt, Artificial Sequence
  LRRK2 RNA guide
agugaaacgcagagacauaa

SEQ ID NO: 57534 - RNA, 20 nt, Artificial Sequence
  LRRK2 RNA guide
agugggauuuuaugucucug

SEQ ID NO: 57535 - RNA, 20 nt, Artificial Sequence
  LRRK2 RNA guide
auauaucaacagugaaacgc

SEQ ID NO: 57536 - RNA, 20 nt, Artificial Sequence
  LRRK2 RNA guide
auaucaacagugaaacgcag

SEQ ID NO: 57537 - RNA, 20 nt, Artificial Sequence
  LRRK2 RNA guide
aucaacagugaaacgcagag

SEQ ID NO: 57538 - RNA, 20 nt, Artificial Sequence
  LRRK2 RNA guide
augucucugcguuucacugu

SEQ ID NO: 57539 - RNA, 20 nt, Artificial Sequence
  LRRK2 RNA guide
auuuuaugucucugcguuuc

SEQ ID NO: 57540 - RNA, 20 nt, Artificial Sequence
  LRRK2 RNA guide
caacagugaaacgcagagac

SEQ ID NO: 57541 - RNA, 20 nt, Artificial Sequence
  LRRK2 RNA guide
cagugaaacgcagagacaua

SEQ ID NO: 57542 - RNA, 20 nt, Artificial Sequence
  LRRK2 RNA guide
cgcagagacauaaaauccca

SEQ ID NO: 57543 - RNA, 20 nt, Artificial Sequence
  LRRK2 RNA guide
cucugcguuucacuguugau

SEQ ID NO: 57544 - RNA, 20 nt, Artificial Sequence
  LRRK2 RNA guide
cugcguuucacuguugauau

SEQ ID NO: 57545 - RNA, 20 nt, Artificial Sequence
  LRRK2 RNA guide
cuugagugggauuuuauguc

SEQ ID NO: 57546 - RNA, 20 nt, Artificial Sequence
  LRRK2 RNA guide
gaaacgcagagacauaaaau

SEQ ID NO: 57547 - RNA, 20 nt, Artificial Sequence
  LRRK2 RNA guide
gacauauauaucaacaguga

SEQ ID NO: 57548 - RNA, 20 nt, Artificial Sequence
  LRRK2 RNA guide
gagugggauuuuaugucucu

SEQ ID NO: 57549 - RNA, 20 nt, Artificial Sequence
  LRRK2 RNA guide
gauuuuaugucucugcguuu

SEQ ID NO: 57550 - RNA, 20 nt, Artificial Sequence
  LRRK2 RNA guide
gcguuucacuguugauauau

SEQ ID NO: 57551 - RNA, 20 nt, Artificial Sequence
  LRRK2 RNA guide
ggacauauauaucaacagug

SEQ ID NO: 57552 - RNA, 20 nt, Artificial Sequence
  LRRK2 RNA guide
ggauuuuaugucucugcguu

SEQ ID NO: 57553 - RNA, 20 nt, Artificial Sequence
  LRRK2 RNA guide
gggauuuuaugucucugcgu

SEQ ID NO: 57554 - RNA, 20 nt, Artificial Sequence
  LRRK2 RNA guide
gucucugcguuucacuguug

SEQ ID NO: 57555 - RNA, 20 nt, Artificial Sequence
  LRRK2 RNA guide
gugaaacgcagagacauaaa

SEQ ID NO: 57556 - RNA, 20 nt, Artificial Sequence
  LRRK2 RNA guide
gugggauuuuaugucucugc

SEQ ID NO: 57557 - RNA, 20 nt, Artificial Sequence
  LRRK2 RNA guide
uauauaucaacagugaaacg

SEQ ID NO: 57558 - RNA, 20 nt, Artificial Sequence
  LRRK2 RNA guide
uauaucaacagugaaacgca

SEQ ID NO: 57559 - RNA, 20 nt, Artificial Sequence
  LRRK2 RNA guide
uaucaacagugaaacgcaga

SEQ ID NO: 57560 - RNA, 20 nt, Artificial Sequence
  LRRK2 RNA guide
uaugucucugcguuucacug

SEQ ID NO: 57561 - RNA, 20 nt, Artificial Sequence
  LRRK2 RNA guide
ucaacagugaaacgcagaga

SEQ ID NO: 57562 - RNA, 20 nt, Artificial Sequence
  LRRK2 RNA guide
ucucugcguuucacuguuga

SEQ ID NO: 57563 - RNA, 20 nt, Artificial Sequence
  LRRK2 RNA guide
ucugcguuucacuguugaua

SEQ ID NO: 57564 - RNA, 20 nt, Artificial Sequence
  LRRK2 RNA guide
ugaaacgcagagacauaaaa

SEQ ID NO: 57565 - RNA, 20 nt, Artificial Sequence
  LRRK2 RNA guide
ugagugggauuuuaugucuc

SEQ ID NO: 57566 - RNA, 20 nt, Artificial Sequence
  LRRK2 RNA guide
ugcguuucacuguugauaua

SEQ ID NO: 57567 - RNA, 20 nt, Artificial Sequence
  LRRK2 RNA guide
ugggauuuuaugucucugcg

SEQ ID NO: 57568 - RNA, 20 nt, Artificial Sequence
  LRRK2 RNA guide
ugucucugcguuucacuguu

SEQ ID NO: 57569 - RNA, 20 nt, Artificial Sequence
  LRRK2 RNA guide
uuaugucucugcguuucacu

SEQ ID NO: 57570 - RNA, 20 nt, Artificial Sequence
  LRRK2 RNA guide
uugagugggauuuuaugucu

SEQ ID NO: 57571 - RNA, 20 nt, Artificial Sequence
  LRRK2 RNA guide
uuuaugucucugcguuucac

SEQ ID NO: 57572 - RNA, 20 nt, Artificial Sequence
  LRRK2 RNA guide
uuuuaugucucugcguuuca

SEQ ID NO: 57573 - RNA, 21 nt, Artificial Sequence
  LRRK2 RNA guide
aaacgcagagacauaaaaucc

SEQ ID NO: 57574 - RNA, 21 nt, Artificial Sequence
  LRRK2 RNA guide
aacagugaaacgcagagacau

SEQ ID NO: 57575 - RNA, 21 nt, Artificial Sequence
  LRRK2 RNA guide
aacgcagagacauaaaauccc

SEQ ID NO: 57576 - RNA, 21 nt, Artificial Sequence
  LRRK2 RNA guide
acagugaaacgcagagacaua

SEQ ID NO: 57577 - RNA, 21 nt, Artificial Sequence
  LRRK2 RNA guide
acgcagagacauaaaauccca

SEQ ID NO: 57578 - RNA, 21 nt, Artificial Sequence
  LRRK2 RNA guide
aggacauauauaucaacagug

SEQ ID NO: 57579 - RNA, 21 nt, Artificial Sequence
  LRRK2 RNA guide
agugaaacgcagagacauaaa

SEQ ID NO: 57580 - RNA, 21 nt, Artificial Sequence
  LRRK2 RNA guide
agugggauuuuaugucucugc

SEQ ID NO: 57581 - RNA, 21 nt, Artificial Sequence
  LRRK2 RNA guide
auauaucaacagugaaacgca

SEQ ID NO: 57582 - RNA, 21 nt, Artificial Sequence
  LRRK2 RNA guide
auaucaacagugaaacgcaga

SEQ ID NO: 57583 - RNA, 21 nt, Artificial Sequence
  LRRK2 RNA guide
aucaacagugaaacgcagaga

SEQ ID NO: 57584 - RNA, 21 nt, Artificial Sequence
  LRRK2 RNA guide
augucucugcguuucacuguu

SEQ ID NO: 57585 - RNA, 21 nt, Artificial Sequence
  LRRK2 RNA guide
auuuuaugucucugcguuuca

SEQ ID NO: 57586 - RNA, 21 nt, Artificial Sequence
  LRRK2 RNA guide
caacagugaaacgcagagaca

SEQ ID NO: 57587 - RNA, 21 nt, Artificial Sequence
  LRRK2 RNA guide
cagugaaacgcagagacauaa

SEQ ID NO: 57588 - RNA, 21 nt, Artificial Sequence
  LRRK2 RNA guide
cgcagagacauaaaaucccac

SEQ ID NO: 57589 - RNA, 21 nt, Artificial Sequence
  LRRK2 RNA guide
cucugcguuucacuguugaua

SEQ ID NO: 57590 - RNA, 21 nt, Artificial Sequence
  LRRK2 RNA guide
cugcguuucacuguugauaua

SEQ ID NO: 57591 - RNA, 21 nt, Artificial Sequence
  LRRK2 RNA guide
cuugagugggauuuuaugucu

SEQ ID NO: 57592 - RNA, 21 nt, Artificial Sequence
  LRRK2 RNA guide
gaaacgcagagacauaaaauc

SEQ ID NO: 57593 - RNA, 21 nt, Artificial Sequence
  LRRK2 RNA guide
gagugggauuuuaugucucug

SEQ ID NO: 57594 - RNA, 21 nt, Artificial Sequence
  LRRK2 RNA guide
gauuuuaugucucugcguuuc

SEQ ID NO: 57595 - RNA, 21 nt, Artificial Sequence
  LRRK2 RNA guide
gcguuucacuguugauauaua

SEQ ID NO: 57596 - RNA, 21 nt, Artificial Sequence
  LRRK2 RNA guide
gcuugagugggauuuuauguc

SEQ ID NO: 57597 - RNA, 21 nt, Artificial Sequence
  LRRK2 RNA guide
ggacauauauaucaacaguga

SEQ ID NO: 57598 - RNA, 21 nt, Artificial Sequence
  LRRK2 RNA guide
ggauuuuaugucucugcguuu

SEQ ID NO: 57599 - RNA, 21 nt, Artificial Sequence
  LRRK2 RNA guide
gggauuuuaugucucugcguu

SEQ ID NO: 57600 - RNA, 21 nt, Artificial Sequence
  LRRK2 RNA guide
gucucugcguuucacuguuga

SEQ ID NO: 57601 - RNA, 21 nt, Artificial Sequence
  LRRK2 RNA guide
gugaaacgcagagacauaaaa

SEQ ID NO: 57602 - RNA, 21 nt, Artificial Sequence
  LRRK2 RNA guide
gugggauuuuaugucucugcg

SEQ ID NO: 57603 - RNA, 21 nt, Artificial Sequence
  LRRK2 RNA guide
uauauaucaacagugaaacgc

SEQ ID NO: 57604 - RNA, 21 nt, Artificial Sequence
  LRRK2 RNA guide
uauaucaacagugaaacgcag

SEQ ID NO: 57605 - RNA, 21 nt, Artificial Sequence
  LRRK2 RNA guide
uaucaacagugaaacgcagag

SEQ ID NO: 57606 - RNA, 21 nt, Artificial Sequence
  LRRK2 RNA guide
uaugucucugcguuucacugu

SEQ ID NO: 57607 - RNA, 21 nt, Artificial Sequence
  LRRK2 RNA guide
ucaacagugaaacgcagagac

SEQ ID NO: 57608 - RNA, 21 nt, Artificial Sequence
  LRRK2 RNA guide
ucucugcguuucacuguugau

SEQ ID NO: 57609 - RNA, 21 nt, Artificial Sequence
  LRRK2 RNA guide
ucugcguuucacuguugauau

SEQ ID NO: 57610 - RNA, 21 nt, Artificial Sequence
  LRRK2 RNA guide
ugaaacgcagagacauaaaau

SEQ ID NO: 57611 - RNA, 21 nt, Artificial Sequence
  LRRK2 RNA guide
ugagugggauuuuaugucucu

SEQ ID NO: 57612 - RNA, 21 nt, Artificial Sequence
  LRRK2 RNA guide
ugcguuucacuguugauauau

SEQ ID NO: 57613 - RNA, 21 nt, Artificial Sequence
  LRRK2 RNA guide
ugggauuuuaugucucugcgu

SEQ ID NO: 57614 - RNA, 21 nt, Artificial Sequence
  LRRK2 RNA guide
ugucucugcguuucacuguug

SEQ ID NO: 57615 - RNA, 21 nt, Artificial Sequence
  LRRK2 RNA guide
uuaugucucugcguuucacug

SEQ ID NO: 57616 - RNA, 21 nt, Artificial Sequence
  LRRK2 RNA guide
uugagugggauuuuaugucuc

SEQ ID NO: 57617 - RNA, 21 nt, Artificial Sequence
  LRRK2 RNA guide
uuuaugucucugcguuucacu

SEQ ID NO: 57618 - RNA, 21 nt, Artificial Sequence
  LRRK2 RNA guide
uuuuaugucucugcguuucac

SEQ ID NO: 57619 - RNA, 22 nt, Artificial Sequence
  LRRK2 RNA guide
aaacgcagagacauaaaauccc

SEQ ID NO: 57620 - RNA, 22 nt, Artificial Sequence
  LRRK2 RNA guide
aacagugaaacgcagagacaua

SEQ ID NO: 57621 - RNA, 22 nt, Artificial Sequence
  LRRK2 RNA guide
aacgcagagacauaaaauccca

SEQ ID NO: 57622 - RNA, 22 nt, Artificial Sequence
  LRRK2 RNA guide
acagugaaacgcagagacauaa

SEQ ID NO: 57623 - RNA, 22 nt, Artificial Sequence
  LRRK2 RNA guide
acgcagagacauaaaaucccac

SEQ ID NO: 57624 - RNA, 22 nt, Artificial Sequence
  LRRK2 RNA guide
agcuugagugggauuuuauguc

SEQ ID NO: 57625 - RNA, 22 nt, Artificial Sequence
  LRRK2 RNA guide
aggacauauauaucaacaguga

SEQ ID NO: 57626 - RNA, 22 nt, Artificial Sequence
  LRRK2 RNA guide
agugaaacgcagagacauaaaa

SEQ ID NO: 57627 - RNA, 22 nt, Artificial Sequence
  LRRK2 RNA guide
agugggauuuuaugucucugcg

SEQ ID NO: 57628 - RNA, 22 nt, Artificial Sequence
  LRRK2 RNA guide
auauauaucaacagugaaacgc

SEQ ID NO: 57629 - RNA, 22 nt, Artificial Sequence
  LRRK2 RNA guide
auauaucaacagugaaacgcag

SEQ ID NO: 57630 - RNA, 22 nt, Artificial Sequence
  LRRK2 RNA guide
auaucaacagugaaacgcagag

SEQ ID NO: 57631 - RNA, 22 nt, Artificial Sequence
  LRRK2 RNA guide
aucaacagugaaacgcagagac

SEQ ID NO: 57632 - RNA, 22 nt, Artificial Sequence
  LRRK2 RNA guide
augucucugcguuucacuguug

SEQ ID NO: 57633 - RNA, 22 nt, Artificial Sequence
  LRRK2 RNA guide
auuuuaugucucugcguuucac

SEQ ID NO: 57634 - RNA, 22 nt, Artificial Sequence
  LRRK2 RNA guide
caacagugaaacgcagagacau

SEQ ID NO: 57635 - RNA, 22 nt, Artificial Sequence
  LRRK2 RNA guide
cagugaaacgcagagacauaaa

SEQ ID NO: 57636 - RNA, 22 nt, Artificial Sequence
  LRRK2 RNA guide
cauauauaucaacagugaaacg

SEQ ID NO: 57637 - RNA, 22 nt, Artificial Sequence
  LRRK2 RNA guide
cgcagagacauaaaaucccacu

SEQ ID NO: 57638 - RNA, 22 nt, Artificial Sequence
  LRRK2 RNA guide
cucugcguuucacuguugauau

SEQ ID NO: 57639 - RNA, 22 nt, Artificial Sequence
  LRRK2 RNA guide
cugcguuucacuguugauauau

SEQ ID NO: 57640 - RNA, 22 nt, Artificial Sequence
  LRRK2 RNA guide
cuugagugggauuuuaugucuc

SEQ ID NO: 57641 - RNA, 22 nt, Artificial Sequence
  LRRK2 RNA guide
gaaacgcagagacauaaaaucc

SEQ ID NO: 57642 - RNA, 22 nt, Artificial Sequence
  LRRK2 RNA guide
gaggacauauauaucaacagug

SEQ ID NO: 57643 - RNA, 22 nt, Artificial Sequence
  LRRK2 RNA guide
gagugggauuuuaugucucugc

SEQ ID NO: 57644 - RNA, 22 nt, Artificial Sequence
  LRRK2 RNA guide
gauuuuaugucucugcguuuca

SEQ ID NO: 57645 - RNA, 22 nt, Artificial Sequence
  LRRK2 RNA guide
gcguuucacuguugauauauau

SEQ ID NO: 57646 - RNA, 22 nt, Artificial Sequence
  LRRK2 RNA guide
gcuugagugggauuuuaugucu

SEQ ID NO: 57647 - RNA, 22 nt, Artificial Sequence
  LRRK2 RNA guide
ggacauauauaucaacagugaa

SEQ ID NO: 57648 - RNA, 22 nt, Artificial Sequence
  LRRK2 RNA guide
ggauuuuaugucucugcguuuc

SEQ ID NO: 57649 - RNA, 22 nt, Artificial Sequence
  LRRK2 RNA guide
gggauuuuaugucucugcguuu

SEQ ID NO: 57650 - RNA, 22 nt, Artificial Sequence
  LRRK2 RNA guide
gucucugcguuucacuguugau

SEQ ID NO: 57651 - RNA, 22 nt, Artificial Sequence
  LRRK2 RNA guide
gugaaacgcagagacauaaaau

SEQ ID NO: 57652 - RNA, 22 nt, Artificial Sequence
  LRRK2 RNA guide
gugggauuuuaugucucugcgu

SEQ ID NO: 57653 - RNA, 22 nt, Artificial Sequence
  LRRK2 RNA guide
uauauaucaacagugaaacgca

SEQ ID NO: 57654 - RNA, 22 nt, Artificial Sequence
  LRRK2 RNA guide
uauaucaacagugaaacgcaga

SEQ ID NO: 57655 - RNA, 22 nt, Artificial Sequence
  LRRK2 RNA guide
uaucaacagugaaacgcagaga

SEQ ID NO: 57656 - RNA, 22 nt, Artificial Sequence
  LRRK2 RNA guide
uaugucucugcguuucacuguu

SEQ ID NO: 57657 - RNA, 22 nt, Artificial Sequence
  LRRK2 RNA guide
ucaacagugaaacgcagagaca

SEQ ID NO: 57658 - RNA, 22 nt, Artificial Sequence
  LRRK2 RNA guide
ucucugcguuucacuguugaua

SEQ ID NO: 57659 - RNA, 22 nt, Artificial Sequence
  LRRK2 RNA guide
ucugcguuucacuguugauaua

SEQ ID NO: 57660 - RNA, 22 nt, Artificial Sequence
  LRRK2 RNA guide
ugaaacgcagagacauaaaauc

SEQ ID NO: 57661 - RNA, 22 nt, Artificial Sequence
  LRRK2 RNA guide
ugagugggauuuuaugucucug

SEQ ID NO: 57662 - RNA, 22 nt, Artificial Sequence
  LRRK2 RNA guide
ugcguuucacuguugauauaua

SEQ ID NO: 57663 - RNA, 22 nt, Artificial Sequence
  LRRK2 RNA guide
ugggauuuuaugucucugcguu

SEQ ID NO: 57664 - RNA, 22 nt, Artificial Sequence
  LRRK2 RNA guide
ugucucugcguuucacuguuga

SEQ ID NO: 57665 - RNA, 22 nt, Artificial Sequence
  LRRK2 RNA guide
uuaugucucugcguuucacugu

SEQ ID NO: 57666 - RNA, 22 nt, Artificial Sequence
  LRRK2 RNA guide
uugagugggauuuuaugucucu

SEQ ID NO: 57667 - RNA, 22 nt, Artificial Sequence
  LRRK2 RNA guide
uuuaugucucugcguuucacug

SEQ ID NO: 57668 - RNA, 22 nt, Artificial Sequence
  LRRK2 RNA guide
uuuuaugucucugcguuucacu

SEQ ID NO: 57669 - RNA, 20 nt, Artificial Sequence
  LRRK2 RNA guide
aaacacagagacauaaaauc

SEQ ID NO: 57670 - RNA, 20 nt, Artificial Sequence
  LRRK2 RNA guide
aacacagagacauaaaaucc

SEQ ID NO: 57671 - RNA, 20 nt, Artificial Sequence
  LRRK2 RNA guide
aacagugaaacacagagaca

SEQ ID NO: 57672 - RNA, 20 nt, Artificial Sequence
  LRRK2 RNA guide
acacagagacauaaaauccc

SEQ ID NO: 57673 - RNA, 20 nt, Artificial Sequence
  LRRK2 RNA guide
acagugaaacacagagacau

SEQ ID NO: 57674 - RNA, 20 nt, Artificial Sequence
  LRRK2 RNA guide
agugaaacacagagacauaa

SEQ ID NO: 57675 - RNA, 20 nt, Artificial Sequence
  LRRK2 RNA guide
auauaucaacagugaaacac

SEQ ID NO: 57676 - RNA, 20 nt, Artificial Sequence
  LRRK2 RNA guide
auaucaacagugaaacacag

SEQ ID NO: 57677 - RNA, 20 nt, Artificial Sequence
  LRRK2 RNA guide
aucaacagugaaacacagag

SEQ ID NO: 57678 - RNA, 20 nt, Artificial Sequence
  LRRK2 RNA guide
augucucuguguuucacugu

SEQ ID NO: 57679 - RNA, 20 nt, Artificial Sequence
  LRRK2 RNA guide
auuuuaugucucuguguuuc

SEQ ID NO: 57680 - RNA, 20 nt, Artificial Sequence
  LRRK2 RNA guide
caacagugaaacacagagac

SEQ ID NO: 57681 - RNA, 20 nt, Artificial Sequence
  LRRK2 RNA guide
cacagagacauaaaauccca

SEQ ID NO: 57682 - RNA, 20 nt, Artificial Sequence
  LRRK2 RNA guide
cagugaaacacagagacaua

SEQ ID NO: 57683 - RNA, 20 nt, Artificial Sequence
  LRRK2 RNA guide
cucuguguuucacuguugau

SEQ ID NO: 57684 - RNA, 20 nt, Artificial Sequence
  LRRK2 RNA guide
cuguguuucacuguugauau

SEQ ID NO: 57685 - RNA, 20 nt, Artificial Sequence
  LRRK2 RNA guide
gaaacacagagacauaaaau

SEQ ID NO: 57686 - RNA, 20 nt, Artificial Sequence
  LRRK2 RNA guide
gauuuuaugucucuguguuu

SEQ ID NO: 57687 - RNA, 20 nt, Artificial Sequence
  LRRK2 RNA guide
ggauuuuaugucucuguguu

SEQ ID NO: 57688 - RNA, 20 nt, Artificial Sequence
  LRRK2 RNA guide
gggauuuuaugucucugugu

SEQ ID NO: 57689 - RNA, 20 nt, Artificial Sequence
  LRRK2 RNA guide
gucucuguguuucacuguug

SEQ ID NO: 57690 - RNA, 20 nt, Artificial Sequence
  LRRK2 RNA guide
gugaaacacagagacauaaa

SEQ ID NO: 57691 - RNA, 20 nt, Artificial Sequence
  LRRK2 RNA guide
gugggauuuuaugucucugu

SEQ ID NO: 57692 - RNA, 20 nt, Artificial Sequence
  LRRK2 RNA guide
guguuucacuguugauauau

SEQ ID NO: 57693 - RNA, 20 nt, Artificial Sequence
  LRRK2 RNA guide
uauaucaacagugaaacaca

SEQ ID NO: 57694 - RNA, 20 nt, Artificial Sequence
  LRRK2 RNA guide
uaucaacagugaaacacaga

SEQ ID NO: 57695 - RNA, 20 nt, Artificial Sequence
  LRRK2 RNA guide
uaugucucuguguuucacug

SEQ ID NO: 57696 - RNA, 20 nt, Artificial Sequence
  LRRK2 RNA guide
ucaacagugaaacacagaga

SEQ ID NO: 57697 - RNA, 20 nt, Artificial Sequence
  LRRK2 RNA guide
ucucuguguuucacuguuga

SEQ ID NO: 57698 - RNA, 20 nt, Artificial Sequence
  LRRK2 RNA guide
ucuguguuucacuguugaua

SEQ ID NO: 57699 - RNA, 20 nt, Artificial Sequence
  LRRK2 RNA guide
ugaaacacagagacauaaaa

SEQ ID NO: 57700 - RNA, 20 nt, Artificial Sequence
  LRRK2 RNA guide
ugggauuuuaugucucugug

SEQ ID NO: 57701 - RNA, 20 nt, Artificial Sequence
  LRRK2 RNA guide
ugucucuguguuucacuguu

SEQ ID NO: 57702 - RNA, 20 nt, Artificial Sequence
  LRRK2 RNA guide
uguguuucacuguugauaua

SEQ ID NO: 57703 - RNA, 20 nt, Artificial Sequence
  LRRK2 RNA guide
uuaugucucuguguuucacu

SEQ ID NO: 57704 - RNA, 20 nt, Artificial Sequence
  LRRK2 RNA guide
uuuaugucucuguguuucac

SEQ ID NO: 57705 - RNA, 20 nt, Artificial Sequence
  LRRK2 RNA guide
uuuuaugucucuguguuuca

SEQ ID NO: 57706 - RNA, 21 nt, Artificial Sequence
  LRRK2 RNA guide
aaacacagagacauaaaaucc

SEQ ID NO: 57707 - RNA, 21 nt, Artificial Sequence
  LRRK2 RNA guide
aacacagagacauaaaauccc

SEQ ID NO: 57708 - RNA, 21 nt, Artificial Sequence
  LRRK2 RNA guide
aacagugaaacacagagacau

SEQ ID NO: 57709 - RNA, 21 nt, Artificial Sequence
  LRRK2 RNA guide
acacagagacauaaaauccca

SEQ ID NO: 57710 - RNA, 21 nt, Artificial Sequence
  LRRK2 RNA guide
acagugaaacacagagacaua

SEQ ID NO: 57711 - RNA, 21 nt, Artificial Sequence
  LRRK2 RNA guide
agugaaacacagagacauaaa

SEQ ID NO: 57712 - RNA, 21 nt, Artificial Sequence
  LRRK2 RNA guide
agugggauuuuaugucucugu

SEQ ID NO: 57713 - RNA, 21 nt, Artificial Sequence
  LRRK2 RNA guide
auaucaacagugaaacacaga

SEQ ID NO: 57714 - RNA, 21 nt, Artificial Sequence
  LRRK2 RNA guide
aucaacagugaaacacagaga

SEQ ID NO: 57715 - RNA, 21 nt, Artificial Sequence
  LRRK2 RNA guide
augucucuguguuucacuguu

SEQ ID NO: 57716 - RNA, 21 nt, Artificial Sequence
  LRRK2 RNA guide
caacagugaaacacagagaca

SEQ ID NO: 57717 - RNA, 21 nt, Artificial Sequence
  LRRK2 RNA guide
cacagagacauaaaaucccac

SEQ ID NO: 57718 - RNA, 21 nt, Artificial Sequence
  LRRK2 RNA guide
cagugaaacacagagacauaa

SEQ ID NO: 57719 - RNA, 21 nt, Artificial Sequence
  LRRK2 RNA guide
cucuguguuucacuguugaua

SEQ ID NO: 57720 - RNA, 21 nt, Artificial Sequence
  LRRK2 RNA guide
cuguguuucacuguugauaua

SEQ ID NO: 57721 - RNA, 21 nt, Artificial Sequence
  LRRK2 RNA guide
gaaacacagagacauaaaauc

SEQ ID NO: 57722 - RNA, 21 nt, Artificial Sequence
  LRRK2 RNA guide
gauuuuaugucucuguguuuc

SEQ ID NO: 57723 - RNA, 21 nt, Artificial Sequence
  LRRK2 RNA guide
ggauuuuaugucucuguguuu

SEQ ID NO: 57724 - RNA, 21 nt, Artificial Sequence
  LRRK2 RNA guide
gggauuuuaugucucuguguu

SEQ ID NO: 57725 - RNA, 21 nt, Artificial Sequence
  LRRK2 RNA guide
gucucuguguuucacuguuga

SEQ ID NO: 57726 - RNA, 21 nt, Artificial Sequence
  LRRK2 RNA guide
gugaaacacagagacauaaaa

SEQ ID NO: 57727 - RNA, 21 nt, Artificial Sequence
  LRRK2 RNA guide
gugggauuuuaugucucugug

SEQ ID NO: 57728 - RNA, 21 nt, Artificial Sequence
  LRRK2 RNA guide
uauaucaacagugaaacacag

SEQ ID NO: 57729 - RNA, 21 nt, Artificial Sequence
  LRRK2 RNA guide
uaucaacagugaaacacagag

SEQ ID NO: 57730 - RNA, 21 nt, Artificial Sequence
  LRRK2 RNA guide
uaugucucuguguuucacugu

SEQ ID NO: 57731 - RNA, 21 nt, Artificial Sequence
  LRRK2 RNA guide
ucaacagugaaacacagagac

SEQ ID NO: 57732 - RNA, 21 nt, Artificial Sequence
  LRRK2 RNA guide
ucucuguguuucacuguugau

SEQ ID NO: 57733 - RNA, 21 nt, Artificial Sequence
  LRRK2 RNA guide
ucuguguuucacuguugauau

SEQ ID NO: 57734 - RNA, 21 nt, Artificial Sequence
  LRRK2 RNA guide
ugggauuuuaugucucugugu

SEQ ID NO: 57735 - RNA, 21 nt, Artificial Sequence
  LRRK2 RNA guide
ugucucuguguuucacuguug

SEQ ID NO: 57736 - RNA, 21 nt, Artificial Sequence
  LRRK2 RNA guide
uuaugucucuguguuucacug

SEQ ID NO: 57737 - RNA, 21 nt, Artificial Sequence
  LRRK2 RNA guide
uuuaugucucuguguuucacu

SEQ ID NO: 57738 - RNA, 21 nt, Artificial Sequence
  LRRK2 RNA guide
uuuuaugucucuguguuucac

SEQ ID NO: 57739 - RNA, 22 nt, Artificial Sequence
  LRRK2 RNA guide
aaacacagagacauaaaauccc

SEQ ID NO: 57740 - RNA, 22 nt, Artificial Sequence
  LRRK2 RNA guide
aacacagagacauaaaauccca

SEQ ID NO: 57741 - RNA, 22 nt, Artificial Sequence
  LRRK2 RNA guide
aacagugaaacacagagacaua

SEQ ID NO: 57742 - RNA, 22 nt, Artificial Sequence
  LRRK2 RNA guide
acacagagacauaaaaucccac

SEQ ID NO: 57743 - RNA, 22 nt, Artificial Sequence
  LRRK2 RNA guide
acagugaaacacagagacauaa

SEQ ID NO: 57744 - RNA, 22 nt, Artificial Sequence
  LRRK2 RNA guide
agugaaacacagagacauaaaa

SEQ ID NO: 57745 - RNA, 22 nt, Artificial Sequence
  LRRK2 RNA guide
agugggauuuuaugucucugug

SEQ ID NO: 57746 - RNA, 22 nt, Artificial Sequence
  LRRK2 RNA guide
auauaucaacagugaaacacag

SEQ ID NO: 57747 - RNA, 22 nt, Artificial Sequence
  LRRK2 RNA guide
auaucaacagugaaacacagag

SEQ ID NO: 57748 - RNA, 22 nt, Artificial Sequence
  LRRK2 RNA guide
aucaacagugaaacacagagac

SEQ ID NO: 57749 - RNA, 22 nt, Artificial Sequence
  LRRK2 RNA guide
augucucuguguuucacuguug

SEQ ID NO: 57750 - RNA, 22 nt, Artificial Sequence
  LRRK2 RNA guide
auuuuaugucucuguguuucac

SEQ ID NO: 57751 - RNA, 22 nt, Artificial Sequence
  LRRK2 RNA guide
caacagugaaacacagagacau

SEQ ID NO: 57752 - RNA, 22 nt, Artificial Sequence
  LRRK2 RNA guide
cacagagacauaaaaucccacu

SEQ ID NO: 57753 - RNA, 22 nt, Artificial Sequence
  LRRK2 RNA guide
cagugaaacacagagacauaaa

SEQ ID NO: 57754 - RNA, 22 nt, Artificial Sequence
  LRRK2 RNA guide
cucuguguuucacuguugauau

SEQ ID NO: 57755 - RNA, 22 nt, Artificial Sequence
  LRRK2 RNA guide
cuguguuucacuguugauauau

SEQ ID NO: 57756 - RNA, 22 nt, Artificial Sequence
  LRRK2 RNA guide
gaaacacagagacauaaaaucc

SEQ ID NO: 57757 - RNA, 22 nt, Artificial Sequence
  LRRK2 RNA guide
gagugggauuuuaugucucugu

SEQ ID NO: 57758 - RNA, 22 nt, Artificial Sequence
  LRRK2 RNA guide
gauuuuaugucucuguguuuca

SEQ ID NO: 57759 - RNA, 22 nt, Artificial Sequence
  LRRK2 RNA guide
ggauuuuaugucucuguguuuc

SEQ ID NO: 57760 - RNA, 22 nt, Artificial Sequence
  LRRK2 RNA guide
gggauuuuaugucucuguguuu

SEQ ID NO: 57761 - RNA, 22 nt, Artificial Sequence
  LRRK2 RNA guide
gucucuguguuucacuguugau

SEQ ID NO: 57762 - RNA, 22 nt, Artificial Sequence
  LRRK2 RNA guide
gugaaacacagagacauaaaau

SEQ ID NO: 57763 - RNA, 22 nt, Artificial Sequence
  LRRK2 RNA guide
gugggauuuuaugucucugugu

SEQ ID NO: 57764 - RNA, 22 nt, Artificial Sequence
  LRRK2 RNA guide
uauaucaacagugaaacacaga

SEQ ID NO: 57765 - RNA, 22 nt, Artificial Sequence
  LRRK2 RNA guide
uaucaacagugaaacacagaga

SEQ ID NO: 57766 - RNA, 22 nt, Artificial Sequence
  LRRK2 RNA guide
uaugucucuguguuucacuguu

SEQ ID NO: 57767 - RNA, 22 nt, Artificial Sequence
  LRRK2 RNA guide
ucaacagugaaacacagagaca

SEQ ID NO: 57768 - RNA, 22 nt, Artificial Sequence
  LRRK2 RNA guide
ucucuguguuucacuguugaua

SEQ ID NO: 57769 - RNA, 22 nt, Artificial Sequence
  LRRK2 RNA guide
ucuguguuucacuguugauaua

SEQ ID NO: 57770 - RNA, 22 nt, Artificial Sequence
  LRRK2 RNA guide
ugaaacacagagacauaaaauc

SEQ ID NO: 57771 - RNA, 22 nt, Artificial Sequence
  LRRK2 RNA guide
ugggauuuuaugucucuguguu

SEQ ID NO: 57772 - RNA, 22 nt, Artificial Sequence
  LRRK2 RNA guide
ugucucuguguuucacuguuga

SEQ ID NO: 57773 - RNA, 22 nt, Artificial Sequence
  LRRK2 RNA guide
uuaugucucuguguuucacugu

SEQ ID NO: 57774 - RNA, 22 nt, Artificial Sequence
  LRRK2 RNA guide
uuuaugucucuguguuucacug

SEQ ID NO: 57775 - RNA, 22 nt, Artificial Sequence
  LRRK2 RNA guide
uuuuaugucucuguguuucacu

SEQ ID NO: 57776 - RNA, 20 nt, Artificial Sequence
  LRRK2 RNA guide
aaagcucuuguaauuuguac

SEQ ID NO: 57777 - RNA, 20 nt, Artificial Sequence
  LRRK2 RNA guide
aaauuacaagagcuuuugga

SEQ ID NO: 57778 - RNA, 20 nt, Artificial Sequence
  LRRK2 RNA guide
aagcucuuguaauuuguacu

SEQ ID NO: 57779 - RNA, 20 nt, Artificial Sequence
  LRRK2 RNA guide
aauauccaaaagcucuugua

SEQ ID NO: 57780 - RNA, 20 nt, Artificial Sequence
  LRRK2 RNA guide
acaaauuacaagagcuuuug

SEQ ID NO: 57781 - RNA, 20 nt, Artificial Sequence
  LRRK2 RNA guide
acgcuaguauaagauaucag

SEQ ID NO: 57782 - RNA, 20 nt, Artificial Sequence
  LRRK2 RNA guide
agcucuuguaauuuguacug

SEQ ID NO: 57783 - RNA, 20 nt, Artificial Sequence
  LRRK2 RNA guide
aguacaaauuacaagagcuu

SEQ ID NO: 57784 - RNA, 20 nt, Artificial Sequence
  LRRK2 RNA guide
auaauauccaaaagcucuug

SEQ ID NO: 57785 - RNA, 20 nt, Artificial Sequence
  LRRK2 RNA guide
auauccaaaagcucuuguaa

SEQ ID NO: 57786 - RNA, 20 nt, Artificial Sequence
  LRRK2 RNA guide
aucaguacaaauuacaagag

SEQ ID NO: 57787 - RNA, 20 nt, Artificial Sequence
  LRRK2 RNA guide
auccaaaagcucuuguaauu

SEQ ID NO: 57788 - RNA, 20 nt, Artificial Sequence
  LRRK2 RNA guide
caaaagcucuuguaauuugu

SEQ ID NO: 57789 - RNA, 20 nt, Artificial Sequence
  LRRK2 RNA guide
caaauuacaagagcuuuugg

SEQ ID NO: 57790 - RNA, 20 nt, Artificial Sequence
  LRRK2 RNA guide
caguacaaauuacaagagcu

SEQ ID NO: 57791 - RNA, 20 nt, Artificial Sequence
  LRRK2 RNA guide
ccaaaagcucuuguaauuug

SEQ ID NO: 57792 - RNA, 20 nt, Artificial Sequence
  LRRK2 RNA guide
cgcuaguauaagauaucagu

SEQ ID NO: 57793 - RNA, 20 nt, Artificial Sequence
  LRRK2 RNA guide
cuaguauaagauaucaguac

SEQ ID NO: 57794 - RNA, 20 nt, Artificial Sequence
  LRRK2 RNA guide
cucuuguaauuuguacugau

SEQ ID NO: 57795 - RNA, 20 nt, Artificial Sequence
  LRRK2 RNA guide
gcuaguauaagauaucagua

SEQ ID NO: 57796 - RNA, 20 nt, Artificial Sequence
  LRRK2 RNA guide
gcucuuguaauuuguacuga

SEQ ID NO: 57797 - RNA, 20 nt, Artificial Sequence
  LRRK2 RNA guide
guacaaauuacaagagcuuu

SEQ ID NO: 57798 - RNA, 20 nt, Artificial Sequence
  LRRK2 RNA guide
uaauauccaaaagcucuugu

SEQ ID NO: 57799 - RNA, 20 nt, Artificial Sequence
  LRRK2 RNA guide
uauccaaaagcucuuguaau

SEQ ID NO: 57800 - RNA, 20 nt, Artificial Sequence
  LRRK2 RNA guide
ucaguacaaauuacaagagc

SEQ ID NO: 57801 - RNA, 20 nt, Artificial Sequence
  LRRK2 RNA guide
uccaaaagcucuuguaauuu

SEQ ID NO: 57802 - RNA, 21 nt, Artificial Sequence
  LRRK2 RNA guide
aagcucuuguaauuuguacug

SEQ ID NO: 57803 - RNA, 21 nt, Artificial Sequence
  LRRK2 RNA guide
acaaauuacaagagcuuuugg

SEQ ID NO: 57804 - RNA, 21 nt, Artificial Sequence
  LRRK2 RNA guide
acgcuaguauaagauaucagu

SEQ ID NO: 57805 - RNA, 21 nt, Artificial Sequence
  LRRK2 RNA guide
agcucuuguaauuuguacuga

SEQ ID NO: 57806 - RNA, 21 nt, Artificial Sequence
  LRRK2 RNA guide
aucaguacaaauuacaagagc

SEQ ID NO: 57807 - RNA, 21 nt, Artificial Sequence
  LRRK2 RNA guide
caaauuacaagagcuuuugga

SEQ ID NO: 57808 - RNA, 21 nt, Artificial Sequence
  LRRK2 RNA guide
cacgcuaguauaagauaucag

SEQ ID NO: 57809 - RNA, 21 nt, Artificial Sequence
  LRRK2 RNA guide
caguacaaauuacaagagcuu

SEQ ID NO: 57810 - RNA, 21 nt, Artificial Sequence
  LRRK2 RNA guide
ccaaaagcucuuguaauuugu

SEQ ID NO: 57811 - RNA, 21 nt, Artificial Sequence
  LRRK2 RNA guide
cgcuaguauaagauaucagua

SEQ ID NO: 57812 - RNA, 21 nt, Artificial Sequence
  LRRK2 RNA guide
gcuaguauaagauaucaguac

SEQ ID NO: 57813 - RNA, 21 nt, Artificial Sequence
  LRRK2 RNA guide
gcucuuguaauuuguacugau

SEQ ID NO: 57814 - RNA, 21 nt, Artificial Sequence
  LRRK2 RNA guide
ucaguacaaauuacaagagcu

SEQ ID NO: 57815 - RNA, 21 nt, Artificial Sequence
  LRRK2 RNA guide
uccaaaagcucuuguaauuug

SEQ ID NO: 57816 - RNA, 22 nt, Artificial Sequence
  LRRK2 RNA guide
aaagcucuuguaauuuguacug

SEQ ID NO: 57817 - RNA, 22 nt, Artificial Sequence
  LRRK2 RNA guide
aagcucuuguaauuuguacuga

SEQ ID NO: 57818 - RNA, 22 nt, Artificial Sequence
  LRRK2 RNA guide
acaaauuacaagagcuuuugga

SEQ ID NO: 57819 - RNA, 22 nt, Artificial Sequence
  LRRK2 RNA guide
acacgcuaguauaagauaucag

SEQ ID NO: 57820 - RNA, 22 nt, Artificial Sequence
  LRRK2 RNA guide
acgcuaguauaagauaucagua

SEQ ID NO: 57821 - RNA, 22 nt, Artificial Sequence
  LRRK2 RNA guide
agcucuuguaauuuguacugau

SEQ ID NO: 57822 - RNA, 22 nt, Artificial Sequence
  LRRK2 RNA guide
aucaguacaaauuacaagagcu

SEQ ID NO: 57823 - RNA, 22 nt, Artificial Sequence
  LRRK2 RNA guide
auccaaaagcucuuguaauuug

SEQ ID NO: 57824 - RNA, 22 nt, Artificial Sequence
  LRRK2 RNA guide
caaaagcucuuguaauuuguac

SEQ ID NO: 57825 - RNA, 22 nt, Artificial Sequence
  LRRK2 RNA guide
caaauuacaagagcuuuuggau

SEQ ID NO: 57826 - RNA, 22 nt, Artificial Sequence
  LRRK2 RNA guide
cacgcuaguauaagauaucagu

SEQ ID NO: 57827 - RNA, 22 nt, Artificial Sequence
  LRRK2 RNA guide
caguacaaauuacaagagcuuu

SEQ ID NO: 57828 - RNA, 22 nt, Artificial Sequence
  LRRK2 RNA guide
ccaaaagcucuuguaauuugua

SEQ ID NO: 57829 - RNA, 22 nt, Artificial Sequence
  LRRK2 RNA guide
cgcuaguauaagauaucaguac

SEQ ID NO: 57830 - RNA, 22 nt, Artificial Sequence
  LRRK2 RNA guide
gcuaguauaagauaucaguaca

SEQ ID NO: 57831 - RNA, 22 nt, Artificial Sequence
  LRRK2 RNA guide
gcucuuguaauuuguacugaua

SEQ ID NO: 57832 - RNA, 22 nt, Artificial Sequence
  LRRK2 RNA guide
guacaaauuacaagagcuuuug

SEQ ID NO: 57833 - RNA, 22 nt, Artificial Sequence
  LRRK2 RNA guide
uacaaauuacaagagcuuuugg

SEQ ID NO: 57834 - RNA, 22 nt, Artificial Sequence
  LRRK2 RNA guide
uaucaguacaaauuacaagagc

SEQ ID NO: 57835 - RNA, 22 nt, Artificial Sequence
  LRRK2 RNA guide
ucaguacaaauuacaagagcuu

SEQ ID NO: 57836 - RNA, 22 nt, Artificial Sequence
  LRRK2 RNA guide
uccaaaagcucuuguaauuugu

SEQ ID NO: 57837 - RNA, 20 nt, Artificial Sequence
  LRRK2 RNA guide
aaaagcucuuguaaugugua

SEQ ID NO: 57838 - RNA, 20 nt, Artificial Sequence
  LRRK2 RNA guide
aaagcucuuguaauguguac

SEQ ID NO: 57839 - RNA, 20 nt, Artificial Sequence
  LRRK2 RNA guide
aagauaucaguacacauuac

SEQ ID NO: 57840 - RNA, 20 nt, Artificial Sequence
  LRRK2 RNA guide
aagcucuuguaauguguacu

SEQ ID NO: 57841 - RNA, 20 nt, Artificial Sequence
  LRRK2 RNA guide
acacauuacaagagcuuuug

SEQ ID NO: 57842 - RNA, 20 nt, Artificial Sequence
  LRRK2 RNA guide
acauuacaagagcuuuugga

SEQ ID NO: 57843 - RNA, 20 nt, Artificial Sequence
  LRRK2 RNA guide
agauaucaguacacauuaca

SEQ ID NO: 57844 - RNA, 20 nt, Artificial Sequence
  LRRK2 RNA guide
agcucuuguaauguguacug

SEQ ID NO: 57845 - RNA, 20 nt, Artificial Sequence
  LRRK2 RNA guide
aguacacauuacaagagcuu

SEQ ID NO: 57846 - RNA, 20 nt, Artificial Sequence
  LRRK2 RNA guide
aguauaagauaucaguacac

SEQ ID NO: 57847 - RNA, 20 nt, Artificial Sequence
  LRRK2 RNA guide
auaucaguacacauuacaag

SEQ ID NO: 57848 - RNA, 20 nt, Artificial Sequence
  LRRK2 RNA guide
aucaguacacauuacaagag

SEQ ID NO: 57849 - RNA, 20 nt, Artificial Sequence
  LRRK2 RNA guide
auccaaaagcucuuguaaug

SEQ ID NO: 57850 - RNA, 20 nt, Artificial Sequence
  LRRK2 RNA guide
caaaagcucuuguaaugugu

SEQ ID NO: 57851 - RNA, 20 nt, Artificial Sequence
  LRRK2 RNA guide
cacauuacaagagcuuuugg

SEQ ID NO: 57852 - RNA, 20 nt, Artificial Sequence
  LRRK2 RNA guide
caguacacauuacaagagcu

SEQ ID NO: 57853 - RNA, 20 nt, Artificial Sequence
  LRRK2 RNA guide
ccaaaagcucuuguaaugug

SEQ ID NO: 57854 - RNA, 20 nt, Artificial Sequence
  LRRK2 RNA guide
cucuuguaauguguacugau

SEQ ID NO: 57855 - RNA, 20 nt, Artificial Sequence
  LRRK2 RNA guide
cuuguaauguguacugauau

SEQ ID NO: 57856 - RNA, 20 nt, Artificial Sequence
  LRRK2 RNA guide
gauaucaguacacauuacaa

SEQ ID NO: 57857 - RNA, 20 nt, Artificial Sequence
  LRRK2 RNA guide
gcucuuguaauguguacuga

SEQ ID NO: 57858 - RNA, 20 nt, Artificial Sequence
  LRRK2 RNA guide
guaauguguacugauaucuu

SEQ ID NO: 57859 - RNA, 20 nt, Artificial Sequence
  LRRK2 RNA guide
guacacauuacaagagcuuu

SEQ ID NO: 57860 - RNA, 20 nt, Artificial Sequence
  LRRK2 RNA guide
guauaagauaucaguacaca

SEQ ID NO: 57861 - RNA, 20 nt, Artificial Sequence
  LRRK2 RNA guide
uacacauuacaagagcuuuu

SEQ ID NO: 57862 - RNA, 20 nt, Artificial Sequence
  LRRK2 RNA guide
uaucaguacacauuacaaga

SEQ ID NO: 57863 - RNA, 20 nt, Artificial Sequence
  LRRK2 RNA guide
ucaguacacauuacaagagc

SEQ ID NO: 57864 - RNA, 20 nt, Artificial Sequence
  LRRK2 RNA guide
uccaaaagcucuuguaaugu

SEQ ID NO: 57865 - RNA, 20 nt, Artificial Sequence
  LRRK2 RNA guide
ucuuguaauguguacugaua

SEQ ID NO: 57866 - RNA, 20 nt, Artificial Sequence
  LRRK2 RNA guide
uguaauguguacugauaucu

SEQ ID NO: 57867 - RNA, 20 nt, Artificial Sequence
  LRRK2 RNA guide
uguguacugauaucuuauac

SEQ ID NO: 57868 - RNA, 20 nt, Artificial Sequence
  LRRK2 RNA guide
uuguaauguguacugauauc

SEQ ID NO: 57869 - RNA, 21 nt, Artificial Sequence
  LRRK2 RNA guide
aaaagcucuuguaauguguac

SEQ ID NO: 57870 - RNA, 21 nt, Artificial Sequence
  LRRK2 RNA guide
aaagcucuuguaauguguacu

SEQ ID NO: 57871 - RNA, 21 nt, Artificial Sequence
  LRRK2 RNA guide
aagcucuuguaauguguacug

SEQ ID NO: 57872 - RNA, 21 nt, Artificial Sequence
  LRRK2 RNA guide
acacauuacaagagcuuuugg

SEQ ID NO: 57873 - RNA, 21 nt, Artificial Sequence
  LRRK2 RNA guide
acauuacaagagcuuuuggau

SEQ ID NO: 57874 - RNA, 21 nt, Artificial Sequence
  LRRK2 RNA guide
agcucuuguaauguguacuga

SEQ ID NO: 57875 - RNA, 21 nt, Artificial Sequence
  LRRK2 RNA guide
aguacacauuacaagagcuuu

SEQ ID NO: 57876 - RNA, 21 nt, Artificial Sequence
  LRRK2 RNA guide
aucaguacacauuacaagagc

SEQ ID NO: 57877 - RNA, 21 nt, Artificial Sequence
  LRRK2 RNA guide
auccaaaagcucuuguaaugu

SEQ ID NO: 57878 - RNA, 21 nt, Artificial Sequence
  LRRK2 RNA guide
caaaagcucuuguaaugugua

SEQ ID NO: 57879 - RNA, 21 nt, Artificial Sequence
  LRRK2 RNA guide
cacauuacaagagcuuuugga

SEQ ID NO: 57880 - RNA, 21 nt, Artificial Sequence
  LRRK2 RNA guide
caguacacauuacaagagcuu

SEQ ID NO: 57881 - RNA, 21 nt, Artificial Sequence
  LRRK2 RNA guide
ccaaaagcucuuguaaugugu

SEQ ID NO: 57882 - RNA, 21 nt, Artificial Sequence
  LRRK2 RNA guide
cucuuguaauguguacugaua

SEQ ID NO: 57883 - RNA, 21 nt, Artificial Sequence
  LRRK2 RNA guide
cuuguaauguguacugauauc

SEQ ID NO: 57884 - RNA, 21 nt, Artificial Sequence
  LRRK2 RNA guide
gauaucaguacacauuacaag

SEQ ID NO: 57885 - RNA, 21 nt, Artificial Sequence
  LRRK2 RNA guide
gcucuuguaauguguacugau

SEQ ID NO: 57886 - RNA, 21 nt, Artificial Sequence
  LRRK2 RNA guide
guacacauuacaagagcuuuu

SEQ ID NO: 57887 - RNA, 21 nt, Artificial Sequence
  LRRK2 RNA guide
uacacauuacaagagcuuuug

SEQ ID NO: 57888 - RNA, 21 nt, Artificial Sequence
  LRRK2 RNA guide
uaucaguacacauuacaagag

SEQ ID NO: 57889 - RNA, 21 nt, Artificial Sequence
  LRRK2 RNA guide
uauccaaaagcucuuguaaug

SEQ ID NO: 57890 - RNA, 21 nt, Artificial Sequence
  LRRK2 RNA guide
ucaguacacauuacaagagcu

SEQ ID NO: 57891 - RNA, 21 nt, Artificial Sequence
  LRRK2 RNA guide
uccaaaagcucuuguaaugug

SEQ ID NO: 57892 - RNA, 22 nt, Artificial Sequence
  LRRK2 RNA guide
aaaagcucuuguaauguguacu

SEQ ID NO: 57893 - RNA, 22 nt, Artificial Sequence
  LRRK2 RNA guide
aaagcucuuguaauguguacug

SEQ ID NO: 57894 - RNA, 22 nt, Artificial Sequence
  LRRK2 RNA guide
aagcucuuguaauguguacuga

SEQ ID NO: 57895 - RNA, 22 nt, Artificial Sequence
  LRRK2 RNA guide
acacauuacaagagcuuuugga

SEQ ID NO: 57896 - RNA, 22 nt, Artificial Sequence
  LRRK2 RNA guide
acauuacaagagcuuuuggaua

SEQ ID NO: 57897 - RNA, 22 nt, Artificial Sequence
  LRRK2 RNA guide
agauaucaguacacauuacaag

SEQ ID NO: 57898 - RNA, 22 nt, Artificial Sequence
  LRRK2 RNA guide
agcucuuguaauguguacugau

SEQ ID NO: 57899 - RNA, 22 nt, Artificial Sequence
  LRRK2 RNA guide
aguacacauuacaagagcuuuu

SEQ ID NO: 57900 - RNA, 22 nt, Artificial Sequence
  LRRK2 RNA guide
auaucaguacacauuacaagag

SEQ ID NO: 57901 - RNA, 22 nt, Artificial Sequence
  LRRK2 RNA guide
auauccaaaagcucuuguaaug

SEQ ID NO: 57902 - RNA, 22 nt, Artificial Sequence
  LRRK2 RNA guide
aucaguacacauuacaagagcu

SEQ ID NO: 57903 - RNA, 22 nt, Artificial Sequence
  LRRK2 RNA guide
auccaaaagcucuuguaaugug

SEQ ID NO: 57904 - RNA, 22 nt, Artificial Sequence
  LRRK2 RNA guide
caaaagcucuuguaauguguac

SEQ ID NO: 57905 - RNA, 22 nt, Artificial Sequence
  LRRK2 RNA guide
cacauuacaagagcuuuuggau

SEQ ID NO: 57906 - RNA, 22 nt, Artificial Sequence
  LRRK2 RNA guide
caguacacauuacaagagcuuu

SEQ ID NO: 57907 - RNA, 22 nt, Artificial Sequence
  LRRK2 RNA guide
ccaaaagcucuuguaaugugua

SEQ ID NO: 57908 - RNA, 22 nt, Artificial Sequence
  LRRK2 RNA guide
cuaguauaagauaucaguacac

SEQ ID NO: 57909 - RNA, 22 nt, Artificial Sequence
  LRRK2 RNA guide
cucuuguaauguguacugauau

SEQ ID NO: 57910 - RNA, 22 nt, Artificial Sequence
  LRRK2 RNA guide
cuuguaauguguacugauaucu

SEQ ID NO: 57911 - RNA, 22 nt, Artificial Sequence
  LRRK2 RNA guide
gauaucaguacacauuacaaga

SEQ ID NO: 57912 - RNA, 22 nt, Artificial Sequence
  LRRK2 RNA guide
gcucuuguaauguguacugaua

SEQ ID NO: 57913 - RNA, 22 nt, Artificial Sequence
  LRRK2 RNA guide
guacacauuacaagagcuuuug

SEQ ID NO: 57914 - RNA, 22 nt, Artificial Sequence
  LRRK2 RNA guide
uacacauuacaagagcuuuugg

SEQ ID NO: 57915 - RNA, 22 nt, Artificial Sequence
  LRRK2 RNA guide
uaucaguacacauuacaagagc

SEQ ID NO: 57916 - RNA, 22 nt, Artificial Sequence
  LRRK2 RNA guide
uauccaaaagcucuuguaaugu

SEQ ID NO: 57917 - RNA, 22 nt, Artificial Sequence
  LRRK2 RNA guide
ucaguacacauuacaagagcuu

SEQ ID NO: 57918 - RNA, 22 nt, Artificial Sequence
  LRRK2 RNA guide
uccaaaagcucuuguaaugugu

SEQ ID NO: 57919 - RNA, 22 nt, Artificial Sequence
  LRRK2 RNA guide
ucuuguaauguguacugauauc

SEQ ID NO: 57920 - RNA, 20 nt, Artificial Sequence
  LRRK2 RNA guide
aacaagauaaaucacuaacc

SEQ ID NO: 57921 - RNA, 20 nt, Artificial Sequence
  LRRK2 RNA guide
acaagauaaaucacuaacca

SEQ ID NO: 57922 - RNA, 20 nt, Artificial Sequence
  LRRK2 RNA guide
augguuagugauuuaucuug

SEQ ID NO: 57923 - RNA, 20 nt, Artificial Sequence
  LRRK2 RNA guide
cagaaauuccauggaaaaaa

SEQ ID NO: 57924 - RNA, 20 nt, Artificial Sequence
  LRRK2 RNA guide
ccagaaauuccauggaaaaa

SEQ ID NO: 57925 - RNA, 20 nt, Artificial Sequence
  LRRK2 RNA guide
gguuagugauuuaucuuguu

SEQ ID NO: 57926 - RNA, 20 nt, Artificial Sequence
  LRRK2 RNA guide
ugguuagugauuuaucuugu

SEQ ID NO: 57927 - RNA, 21 nt, Artificial Sequence
  LRRK2 RNA guide
ccagaaauuccauggaaaaaa

SEQ ID NO: 57928 - RNA, 21 nt, Artificial Sequence
  LRRK2 RNA guide
uccagaaauuccauggaaaaa

SEQ ID NO: 57929 - RNA, 22 nt, Artificial Sequence
  LRRK2 RNA guide
auccagaaauuccauggaaaaa

SEQ ID NO: 57930 - RNA, 22 nt, Artificial Sequence
  LRRK2 RNA guide
uccagaaauuccauggaaaaaa

SEQ ID NO: 57931 - RNA, 20 nt, Artificial Sequence
  LRRK2 RNA guide
aauauuggaacuuuagacca

SEQ ID NO: 57932 - RNA, 20 nt, Artificial Sequence
  LRRK2 RNA guide
auauuggaacuuuagaccau

SEQ ID NO: 57933 - RNA, 20 nt, Artificial Sequence
  LRRK2 RNA guide
auccuauggucuaaaguucc

SEQ ID NO: 57934 - RNA, 20 nt, Artificial Sequence
  LRRK2 RNA guide
auggucuaaaguuccaauau

SEQ ID NO: 57935 - RNA, 20 nt, Artificial Sequence
  LRRK2 RNA guide
cauccuauggucuaaaguuc

SEQ ID NO: 57936 - RNA, 20 nt, Artificial Sequence
  LRRK2 RNA guide
ccuauggucuaaaguuccaa

SEQ ID NO: 57937 - RNA, 20 nt, Artificial Sequence
  LRRK2 RNA guide
cuauggucuaaaguuccaau

SEQ ID NO: 57938 - RNA, 20 nt, Artificial Sequence
  LRRK2 RNA guide
cuccauuauaauauuggaac

SEQ ID NO: 57939 - RNA, 20 nt, Artificial Sequence
  LRRK2 RNA guide
gcauccuauggucuaaaguu

SEQ ID NO: 57940 - RNA, 20 nt, Artificial Sequence
  LRRK2 RNA guide
ggucuaaaguuccaauauua

SEQ ID NO: 57941 - RNA, 20 nt, Artificial Sequence
  LRRK2 RNA guide
guuccaauauuauaauggag

SEQ ID NO: 57942 - RNA, 20 nt, Artificial Sequence
  LRRK2 RNA guide
uaauauuggaacuuuagacc

SEQ ID NO: 57943 - RNA, 20 nt, Artificial Sequence
  LRRK2 RNA guide
uauggucuaaaguuccaaua

SEQ ID NO: 57944 - RNA, 20 nt, Artificial Sequence
  LRRK2 RNA guide
uauuggaacuuuagaccaua

SEQ ID NO: 57945 - RNA, 20 nt, Artificial Sequence
  LRRK2 RNA guide
uccuauggucuaaaguucca

SEQ ID NO: 57946 - RNA, 20 nt, Artificial Sequence
  LRRK2 RNA guide
uggucuaaaguuccaauauu

SEQ ID NO: 57947 - RNA, 21 nt, Artificial Sequence
  LRRK2 RNA guide
auccuauggucuaaaguucca

SEQ ID NO: 57948 - RNA, 21 nt, Artificial Sequence
  LRRK2 RNA guide
cauccuauggucuaaaguucc

SEQ ID NO: 57949 - RNA, 21 nt, Artificial Sequence
  LRRK2 RNA guide
ccuauggucuaaaguuccaau

SEQ ID NO: 57950 - RNA, 21 nt, Artificial Sequence
  LRRK2 RNA guide
cuauggucuaaaguuccaaua

SEQ ID NO: 57951 - RNA, 21 nt, Artificial Sequence
  LRRK2 RNA guide
gcauccuauggucuaaaguuc

SEQ ID NO: 57952 - RNA, 21 nt, Artificial Sequence
  LRRK2 RNA guide
uauuggaacuuuagaccauag

SEQ ID NO: 57953 - RNA, 21 nt, Artificial Sequence
  LRRK2 RNA guide
uccuauggucuaaaguuccaa

SEQ ID NO: 57954 - RNA, 21 nt, Artificial Sequence
  LRRK2 RNA guide
ugcauccuauggucuaaaguu

SEQ ID NO: 57955 - RNA, 22 nt, Artificial Sequence
  LRRK2 RNA guide
auauuggaacuuuagaccauag

SEQ ID NO: 57956 - RNA, 22 nt, Artificial Sequence
  LRRK2 RNA guide
auccuauggucuaaaguuccaa

SEQ ID NO: 57957 - RNA, 22 nt, Artificial Sequence
  LRRK2 RNA guide
cauccuauggucuaaaguucca

SEQ ID NO: 57958 - RNA, 22 nt, Artificial Sequence
  LRRK2 RNA guide
ccuauggucuaaaguuccaaua

SEQ ID NO: 57959 - RNA, 22 nt, Artificial Sequence
  LRRK2 RNA guide
cuauggucuaaaguuccaauau

SEQ ID NO: 57960 - RNA, 22 nt, Artificial Sequence
  LRRK2 RNA guide
gcauccuauggucuaaaguucc

SEQ ID NO: 57961 - RNA, 22 nt, Artificial Sequence
  LRRK2 RNA guide
gugcauccuauggucuaaaguu

SEQ ID NO: 57962 - RNA, 22 nt, Artificial Sequence
  LRRK2 RNA guide
uauuggaacuuuagaccauagg

SEQ ID NO: 57963 - RNA, 22 nt, Artificial Sequence
  LRRK2 RNA guide
uccuauggucuaaaguuccaau

SEQ ID NO: 57964 - RNA, 22 nt, Artificial Sequence
  LRRK2 RNA guide
ugcauccuauggucuaaaguuc

SEQ ID NO: 57965 - RNA, 20 nt, Artificial Sequence
  LRRK2 RNA guide
aauuuuggaacuuuagacca

SEQ ID NO: 57966 - RNA, 20 nt, Artificial Sequence
  LRRK2 RNA guide
auggucuaaaguuccaaaau

SEQ ID NO: 57967 - RNA, 20 nt, Artificial Sequence
  LRRK2 RNA guide
auuuuggaacuuuagaccau

SEQ ID NO: 57968 - RNA, 20 nt, Artificial Sequence
  LRRK2 RNA guide
cuauggucuaaaguuccaaa

SEQ ID NO: 57969 - RNA, 20 nt, Artificial Sequence
  LRRK2 RNA guide
cuccauuauaauuuuggaac

SEQ ID NO: 57970 - RNA, 20 nt, Artificial Sequence
  LRRK2 RNA guide
ggucuaaaguuccaaaauua

SEQ ID NO: 57971 - RNA, 20 nt, Artificial Sequence
  LRRK2 RNA guide
guuccaaaauuauaauggag

SEQ ID NO: 57972 - RNA, 20 nt, Artificial Sequence
  LRRK2 RNA guide
uaauuuuggaacuuuagacc

SEQ ID NO: 57973 - RNA, 20 nt, Artificial Sequence
  LRRK2 RNA guide
uauggucuaaaguuccaaaa

SEQ ID NO: 57974 - RNA, 20 nt, Artificial Sequence
  LRRK2 RNA guide
uggucuaaaguuccaaaauu

SEQ ID NO: 57975 - RNA, 20 nt, Artificial Sequence
  LRRK2 RNA guide
uuuuggaacuuuagaccaua

SEQ ID NO: 57976 - RNA, 21 nt, Artificial Sequence
  LRRK2 RNA guide
ccuauggucuaaaguuccaaa

SEQ ID NO: 57977 - RNA, 21 nt, Artificial Sequence
  LRRK2 RNA guide
cuauggucuaaaguuccaaaa

SEQ ID NO: 57978 - RNA, 21 nt, Artificial Sequence
  LRRK2 RNA guide
uuuuggaacuuuagaccauag

SEQ ID NO: 57979 - RNA, 22 nt, Artificial Sequence
  LRRK2 RNA guide
auuuuggaacuuuagaccauag

SEQ ID NO: 57980 - RNA, 22 nt, Artificial Sequence
  LRRK2 RNA guide
ccuauggucuaaaguuccaaaa

SEQ ID NO: 57981 - RNA, 22 nt, Artificial Sequence
  LRRK2 RNA guide
cuauggucuaaaguuccaaaau

SEQ ID NO: 57982 - RNA, 22 nt, Artificial Sequence
  LRRK2 RNA guide
uccuauggucuaaaguuccaaa

SEQ ID NO: 57983 - RNA, 22 nt, Artificial Sequence
  LRRK2 RNA guide
uuuuggaacuuuagaccauagg

SEQ ID NO: 57984 - RNA, 20 nt, Artificial Sequence
  LRRK2 RNA guide
aaauuucagcauagcuagug

SEQ ID NO: 57985 - RNA, 20 nt, Artificial Sequence
  LRRK2 RNA guide
aagaaauuucagcauagcua

SEQ ID NO: 57986 - RNA, 20 nt, Artificial Sequence
  LRRK2 RNA guide
aauuucagcauagcuaguga

SEQ ID NO: 57987 - RNA, 20 nt, Artificial Sequence
  LRRK2 RNA guide
acagcuucuagucccagcuc

SEQ ID NO: 57988 - RNA, 20 nt, Artificial Sequence
  LRRK2 RNA guide
agaaauuucagcauagcuag

SEQ ID NO: 57989 - RNA, 20 nt, Artificial Sequence
  LRRK2 RNA guide
agcauagcuagugacagagc

SEQ ID NO: 57990 - RNA, 20 nt, Artificial Sequence
  LRRK2 RNA guide
agcuagugacagagcuggga

SEQ ID NO: 57991 - RNA, 20 nt, Artificial Sequence
  LRRK2 RNA guide
agcucugucacuagcuaugc

SEQ ID NO: 57992 - RNA, 20 nt, Artificial Sequence
  LRRK2 RNA guide
agcuucuagucccagcucug

SEQ ID NO: 57993 - RNA, 20 nt, Artificial Sequence
  LRRK2 RNA guide
agucccagcucugucacuag

SEQ ID NO: 57994 - RNA, 20 nt, Artificial Sequence
  LRRK2 RNA guide
agugacagagcugggacuag

SEQ ID NO: 57995 - RNA, 20 nt, Artificial Sequence
  LRRK2 RNA guide
auagcuagugacagagcugg

SEQ ID NO: 57996 - RNA, 20 nt, Artificial Sequence
  LRRK2 RNA guide
cacagcuucuagucccagcu

SEQ ID NO: 57997 - RNA, 20 nt, Artificial Sequence
  LRRK2 RNA guide
cagcauagcuagugacagag

SEQ ID NO: 57998 - RNA, 20 nt, Artificial Sequence
  LRRK2 RNA guide
cagcucugucacuagcuaug

SEQ ID NO: 57999 - RNA, 20 nt, Artificial Sequence
  LRRK2 RNA guide
cagcuucuagucccagcucu

SEQ ID NO: 58000 - RNA, 20 nt, Artificial Sequence
  LRRK2 RNA guide
cauagcuagugacagagcug

SEQ ID NO: 58001 - RNA, 20 nt, Artificial Sequence
  LRRK2 RNA guide
ccagcucugucacuagcuau

SEQ ID NO: 58002 - RNA, 20 nt, Artificial Sequence
  LRRK2 RNA guide
cccagcucugucacuagcua

SEQ ID NO: 58003 - RNA, 20 nt, Artificial Sequence
  LRRK2 RNA guide
cuagucccagcucugucacu

SEQ ID NO: 58004 - RNA, 20 nt, Artificial Sequence
  LRRK2 RNA guide
cuagugacagagcugggacu

SEQ ID NO: 58005 - RNA, 20 nt, Artificial Sequence
  LRRK2 RNA guide
cucugucacuagcuaugcug

SEQ ID NO: 58006 - RNA, 20 nt, Artificial Sequence
  LRRK2 RNA guide
cugucacuagcuaugcugaa

SEQ ID NO: 58007 - RNA, 20 nt, Artificial Sequence
  LRRK2 RNA guide
cuucuagucccagcucuguc

SEQ ID NO: 58008 - RNA, 20 nt, Artificial Sequence
  LRRK2 RNA guide
gaaauuucagcauagcuagu

SEQ ID NO: 58009 - RNA, 20 nt, Artificial Sequence
  LRRK2 RNA guide
gaagaaauuucagcauagcu

SEQ ID NO: 58010 - RNA, 20 nt, Artificial Sequence
  LRRK2 RNA guide
gacagagcugggacuagaag

SEQ ID NO: 58011 - RNA, 20 nt, Artificial Sequence
  LRRK2 RNA guide
gcacagcuucuagucccagc

SEQ ID NO: 58012 - RNA, 20 nt, Artificial Sequence
  LRRK2 RNA guide
gcauagcuagugacagagcu

SEQ ID NO: 58013 - RNA, 20 nt, Artificial Sequence
  LRRK2 RNA guide
gcuagugacagagcugggac

SEQ ID NO: 58014 - RNA, 20 nt, Artificial Sequence
  LRRK2 RNA guide
gcucugucacuagcuaugcu

SEQ ID NO: 58015 - RNA, 20 nt, Artificial Sequence
  LRRK2 RNA guide
gcuucuagucccagcucugu

SEQ ID NO: 58016 - RNA, 20 nt, Artificial Sequence
  LRRK2 RNA guide
gucacuagcuaugcugaaau

SEQ ID NO: 58017 - RNA, 20 nt, Artificial Sequence
  LRRK2 RNA guide
gucccagcucugucacuagc

SEQ ID NO: 58018 - RNA, 20 nt, Artificial Sequence
  LRRK2 RNA guide
gugacagagcugggacuaga

SEQ ID NO: 58019 - RNA, 20 nt, Artificial Sequence
  LRRK2 RNA guide
uagcuagugacagagcuggg

SEQ ID NO: 58020 - RNA, 20 nt, Artificial Sequence
  LRRK2 RNA guide
uagucccagcucugucacua

SEQ ID NO: 58021 - RNA, 20 nt, Artificial Sequence
  LRRK2 RNA guide
uagugacagagcugggacua

SEQ ID NO: 58022 - RNA, 20 nt, Artificial Sequence
  LRRK2 RNA guide
ucagcauagcuagugacaga

SEQ ID NO: 58023 - RNA, 20 nt, Artificial Sequence
  LRRK2 RNA guide
ucccagcucugucacuagcu

SEQ ID NO: 58024 - RNA, 20 nt, Artificial Sequence
  LRRK2 RNA guide
ucuagucccagcucugucac

SEQ ID NO: 58025 - RNA, 20 nt, Artificial Sequence
  LRRK2 RNA guide
ucugucacuagcuaugcuga

SEQ ID NO: 58026 - RNA, 20 nt, Artificial Sequence
  LRRK2 RNA guide
ugacagagcugggacuagaa

SEQ ID NO: 58027 - RNA, 20 nt, Artificial Sequence
  LRRK2 RNA guide
ugucacuagcuaugcugaaa

SEQ ID NO: 58028 - RNA, 20 nt, Artificial Sequence
  LRRK2 RNA guide
uucagcauagcuagugacag

SEQ ID NO: 58029 - RNA, 20 nt, Artificial Sequence
  LRRK2 RNA guide
uucuagucccagcucuguca

SEQ ID NO: 58030 - RNA, 20 nt, Artificial Sequence
  LRRK2 RNA guide
uuucagcauagcuagugaca

SEQ ID NO: 58031 - RNA, 21 nt, Artificial Sequence
  LRRK2 RNA guide
aaauuucagcauagcuaguga

SEQ ID NO: 58032 - RNA, 21 nt, Artificial Sequence
  LRRK2 RNA guide
aagaaauuucagcauagcuag

SEQ ID NO: 58033 - RNA, 21 nt, Artificial Sequence
  LRRK2 RNA guide
aauuucagcauagcuagugac

SEQ ID NO: 58034 - RNA, 21 nt, Artificial Sequence
  LRRK2 RNA guide
acagcuucuagucccagcucu

SEQ ID NO: 58035 - RNA, 21 nt, Artificial Sequence
  LRRK2 RNA guide
agaaauuucagcauagcuagu

SEQ ID NO: 58036 - RNA, 21 nt, Artificial Sequence
  LRRK2 RNA guide
agcauagcuagugacagagcu

SEQ ID NO: 58037 - RNA, 21 nt, Artificial Sequence
  LRRK2 RNA guide
agcuagugacagagcugggac

SEQ ID NO: 58038 - RNA, 21 nt, Artificial Sequence
  LRRK2 RNA guide
agcucugucacuagcuaugcu

SEQ ID NO: 58039 - RNA, 21 nt, Artificial Sequence
  LRRK2 RNA guide
agcuucuagucccagcucugu

SEQ ID NO: 58040 - RNA, 21 nt, Artificial Sequence
  LRRK2 RNA guide
agucccagcucugucacuagc

SEQ ID NO: 58041 - RNA, 21 nt, Artificial Sequence
  LRRK2 RNA guide
agugacagagcugggacuaga

SEQ ID NO: 58042 - RNA, 21 nt, Artificial Sequence
  LRRK2 RNA guide
auagcuagugacagagcuggg

SEQ ID NO: 58043 - RNA, 21 nt, Artificial Sequence
  LRRK2 RNA guide
auuucagcauagcuagugaca

SEQ ID NO: 58044 - RNA, 21 nt, Artificial Sequence
  LRRK2 RNA guide
cacagcuucuagucccagcuc

SEQ ID NO: 58045 - RNA, 21 nt, Artificial Sequence
  LRRK2 RNA guide
cagcauagcuagugacagagc

SEQ ID NO: 58046 - RNA, 21 nt, Artificial Sequence
  LRRK2 RNA guide
cagcucugucacuagcuaugc

SEQ ID NO: 58047 - RNA, 21 nt, Artificial Sequence
  LRRK2 RNA guide
cagcuucuagucccagcucug

SEQ ID NO: 58048 - RNA, 21 nt, Artificial Sequence
  LRRK2 RNA guide
cauagcuagugacagagcugg

SEQ ID NO: 58049 - RNA, 21 nt, Artificial Sequence
  LRRK2 RNA guide
ccagcucugucacuagcuaug

SEQ ID NO: 58050 - RNA, 21 nt, Artificial Sequence
  LRRK2 RNA guide
cccagcucugucacuagcuau

SEQ ID NO: 58051 - RNA, 21 nt, Artificial Sequence
  LRRK2 RNA guide
cuagucccagcucugucacua

SEQ ID NO: 58052 - RNA, 21 nt, Artificial Sequence
  LRRK2 RNA guide
cuagugacagagcugggacua

SEQ ID NO: 58053 - RNA, 21 nt, Artificial Sequence
  LRRK2 RNA guide
cucugucacuagcuaugcuga

SEQ ID NO: 58054 - RNA, 21 nt, Artificial Sequence
  LRRK2 RNA guide
cugucacuagcuaugcugaaa

SEQ ID NO: 58055 - RNA, 21 nt, Artificial Sequence
  LRRK2 RNA guide
cuucuagucccagcucuguca

SEQ ID NO: 58056 - RNA, 21 nt, Artificial Sequence
  LRRK2 RNA guide
gaaauuucagcauagcuagug

SEQ ID NO: 58057 - RNA, 21 nt, Artificial Sequence
  LRRK2 RNA guide
gaagaaauuucagcauagcua

SEQ ID NO: 58058 - RNA, 21 nt, Artificial Sequence
  LRRK2 RNA guide
gacagagcugggacuagaagc

SEQ ID NO: 58059 - RNA, 21 nt, Artificial Sequence
  LRRK2 RNA guide
gcacagcuucuagucccagcu

SEQ ID NO: 58060 - RNA, 21 nt, Artificial Sequence
  LRRK2 RNA guide
gcauagcuagugacagagcug

SEQ ID NO: 58061 - RNA, 21 nt, Artificial Sequence
  LRRK2 RNA guide
gcuagugacagagcugggacu

SEQ ID NO: 58062 - RNA, 21 nt, Artificial Sequence
  LRRK2 RNA guide
gcucugucacuagcuaugcug

SEQ ID NO: 58063 - RNA, 21 nt, Artificial Sequence
  LRRK2 RNA guide
gcuucuagucccagcucuguc

SEQ ID NO: 58064 - RNA, 21 nt, Artificial Sequence
  LRRK2 RNA guide
gucacuagcuaugcugaaauu

SEQ ID NO: 58065 - RNA, 21 nt, Artificial Sequence
  LRRK2 RNA guide
gucccagcucugucacuagcu

SEQ ID NO: 58066 - RNA, 21 nt, Artificial Sequence
  LRRK2 RNA guide
gugacagagcugggacuagaa

SEQ ID NO: 58067 - RNA, 21 nt, Artificial Sequence
  LRRK2 RNA guide
uagcuagugacagagcuggga

SEQ ID NO: 58068 - RNA, 21 nt, Artificial Sequence
  LRRK2 RNA guide
uagucccagcucugucacuag

SEQ ID NO: 58069 - RNA, 21 nt, Artificial Sequence
  LRRK2 RNA guide
uagugacagagcugggacuag

SEQ ID NO: 58070 - RNA, 21 nt, Artificial Sequence
  LRRK2 RNA guide
ucagcauagcuagugacagag

SEQ ID NO: 58071 - RNA, 21 nt, Artificial Sequence
  LRRK2 RNA guide
ucccagcucugucacuagcua

SEQ ID NO: 58072 - RNA, 21 nt, Artificial Sequence
  LRRK2 RNA guide
ucuagucccagcucugucacu

SEQ ID NO: 58073 - RNA, 21 nt, Artificial Sequence
  LRRK2 RNA guide
ucugucacuagcuaugcugaa

SEQ ID NO: 58074 - RNA, 21 nt, Artificial Sequence
  LRRK2 RNA guide
ugaagaaauuucagcauagcu

SEQ ID NO: 58075 - RNA, 21 nt, Artificial Sequence
  LRRK2 RNA guide
ugacagagcugggacuagaag

SEQ ID NO: 58076 - RNA, 21 nt, Artificial Sequence
  LRRK2 RNA guide
ugcacagcuucuagucccagc

SEQ ID NO: 58077 - RNA, 21 nt, Artificial Sequence
  LRRK2 RNA guide
ugucacuagcuaugcugaaau

SEQ ID NO: 58078 - RNA, 21 nt, Artificial Sequence
  LRRK2 RNA guide
uucagcauagcuagugacaga

SEQ ID NO: 58079 - RNA, 21 nt, Artificial Sequence
  LRRK2 RNA guide
uucuagucccagcucugucac

SEQ ID NO: 58080 - RNA, 21 nt, Artificial Sequence
  LRRK2 RNA guide
uuucagcauagcuagugacag

SEQ ID NO: 58081 - RNA, 22 nt, Artificial Sequence
  LRRK2 RNA guide
aaauuucagcauagcuagugac

SEQ ID NO: 58082 - RNA, 22 nt, Artificial Sequence
  LRRK2 RNA guide
aagaaauuucagcauagcuagu

SEQ ID NO: 58083 - RNA, 22 nt, Artificial Sequence
  LRRK2 RNA guide
aauuucagcauagcuagugaca

SEQ ID NO: 58084 - RNA, 22 nt, Artificial Sequence
  LRRK2 RNA guide
acagcuucuagucccagcucug

SEQ ID NO: 58085 - RNA, 22 nt, Artificial Sequence
  LRRK2 RNA guide
agaaauuucagcauagcuagug

SEQ ID NO: 58086 - RNA, 22 nt, Artificial Sequence
  LRRK2 RNA guide
agcauagcuagugacagagcug

SEQ ID NO: 58087 - RNA, 22 nt, Artificial Sequence
  LRRK2 RNA guide
agcuagugacagagcugggacu

SEQ ID NO: 58088 - RNA, 22 nt, Artificial Sequence
  LRRK2 RNA guide
agcucugucacuagcuaugcug

SEQ ID NO: 58089 - RNA, 22 nt, Artificial Sequence
  LRRK2 RNA guide
agcuucuagucccagcucuguc

SEQ ID NO: 58090 - RNA, 22 nt, Artificial Sequence
  LRRK2 RNA guide
agucccagcucugucacuagcu

SEQ ID NO: 58091 - RNA, 22 nt, Artificial Sequence
  LRRK2 RNA guide
agugacagagcugggacuagaa

SEQ ID NO: 58092 - RNA, 22 nt, Artificial Sequence
  LRRK2 RNA guide
auagcuagugacagagcuggga

SEQ ID NO: 58093 - RNA, 22 nt, Artificial Sequence
  LRRK2 RNA guide
augcacagcuucuagucccagc

SEQ ID NO: 58094 - RNA, 22 nt, Artificial Sequence
  LRRK2 RNA guide
auuucagcauagcuagugacag

SEQ ID NO: 58095 - RNA, 22 nt, Artificial Sequence
  LRRK2 RNA guide
cacagcuucuagucccagcucu

SEQ ID NO: 58096 - RNA, 22 nt, Artificial Sequence
  LRRK2 RNA guide
cagcauagcuagugacagagcu

SEQ ID NO: 58097 - RNA, 22 nt, Artificial Sequence
  LRRK2 RNA guide
cagcucugucacuagcuaugcu

SEQ ID NO: 58098 - RNA, 22 nt, Artificial Sequence
  LRRK2 RNA guide
cagcuucuagucccagcucugu

SEQ ID NO: 58099 - RNA, 22 nt, Artificial Sequence
  LRRK2 RNA guide
cauagcuagugacagagcuggg

SEQ ID NO: 58100 - RNA, 22 nt, Artificial Sequence
  LRRK2 RNA guide
ccagcucugucacuagcuaugc

SEQ ID NO: 58101 - RNA, 22 nt, Artificial Sequence
  LRRK2 RNA guide
cccagcucugucacuagcuaug

SEQ ID NO: 58102 - RNA, 22 nt, Artificial Sequence
  LRRK2 RNA guide
cuagucccagcucugucacuag

SEQ ID NO: 58103 - RNA, 22 nt, Artificial Sequence
  LRRK2 RNA guide
cuagugacagagcugggacuag

SEQ ID NO: 58104 - RNA, 22 nt, Artificial Sequence
  LRRK2 RNA guide
cucugucacuagcuaugcugaa

SEQ ID NO: 58105 - RNA, 22 nt, Artificial Sequence
  LRRK2 RNA guide
cugucacuagcuaugcugaaau

SEQ ID NO: 58106 - RNA, 22 nt, Artificial Sequence
  LRRK2 RNA guide
cuucuagucccagcucugucac

SEQ ID NO: 58107 - RNA, 22 nt, Artificial Sequence
  LRRK2 RNA guide
gaaauuucagcauagcuaguga

SEQ ID NO: 58108 - RNA, 22 nt, Artificial Sequence
  LRRK2 RNA guide
gaagaaauuucagcauagcuag

SEQ ID NO: 58109 - RNA, 22 nt, Artificial Sequence
  LRRK2 RNA guide
gacagagcugggacuagaagcu

SEQ ID NO: 58110 - RNA, 22 nt, Artificial Sequence
  LRRK2 RNA guide
gcacagcuucuagucccagcuc

SEQ ID NO: 58111 - RNA, 22 nt, Artificial Sequence
  LRRK2 RNA guide
gcauagcuagugacagagcugg

SEQ ID NO: 58112 - RNA, 22 nt, Artificial Sequence
  LRRK2 RNA guide
gcuagugacagagcugggacua

SEQ ID NO: 58113 - RNA, 22 nt, Artificial Sequence
  LRRK2 RNA guide
gcucugucacuagcuaugcuga

SEQ ID NO: 58114 - RNA, 22 nt, Artificial Sequence
  LRRK2 RNA guide
gcuucuagucccagcucuguca

SEQ ID NO: 58115 - RNA, 22 nt, Artificial Sequence
  LRRK2 RNA guide
gucacuagcuaugcugaaauuu

SEQ ID NO: 58116 - RNA, 22 nt, Artificial Sequence
  LRRK2 RNA guide
gucccagcucugucacuagcua

SEQ ID NO: 58117 - RNA, 22 nt, Artificial Sequence
  LRRK2 RNA guide
gugaagaaauuucagcauagcu

SEQ ID NO: 58118 - RNA, 22 nt, Artificial Sequence
  LRRK2 RNA guide
gugacagagcugggacuagaag

SEQ ID NO: 58119 - RNA, 22 nt, Artificial Sequence
  LRRK2 RNA guide
uagcuagugacagagcugggac

SEQ ID NO: 58120 - RNA, 22 nt, Artificial Sequence
  LRRK2 RNA guide
uagucccagcucugucacuagc

SEQ ID NO: 58121 - RNA, 22 nt, Artificial Sequence
  LRRK2 RNA guide
uagugacagagcugggacuaga

SEQ ID NO: 58122 - RNA, 22 nt, Artificial Sequence
  LRRK2 RNA guide
ucagcauagcuagugacagagc

SEQ ID NO: 58123 - RNA, 22 nt, Artificial Sequence
  LRRK2 RNA guide
ucccagcucugucacuagcuau

SEQ ID NO: 58124 - RNA, 22 nt, Artificial Sequence
  LRRK2 RNA guide
ucuagucccagcucugucacua

SEQ ID NO: 58125 - RNA, 22 nt, Artificial Sequence
  LRRK2 RNA guide
ucugucacuagcuaugcugaaa

SEQ ID NO: 58126 - RNA, 22 nt, Artificial Sequence
  LRRK2 RNA guide
ugaagaaauuucagcauagcua

SEQ ID NO: 58127 - RNA, 22 nt, Artificial Sequence
  LRRK2 RNA guide
ugacagagcugggacuagaagc

SEQ ID NO: 58128 - RNA, 22 nt, Artificial Sequence
  LRRK2 RNA guide
ugcacagcuucuagucccagcu

SEQ ID NO: 58129 - RNA, 22 nt, Artificial Sequence
  LRRK2 RNA guide
ugucacuagcuaugcugaaauu

SEQ ID NO: 58130 - RNA, 22 nt, Artificial Sequence
  LRRK2 RNA guide
uucagcauagcuagugacagag

SEQ ID NO: 58131 - RNA, 22 nt, Artificial Sequence
  LRRK2 RNA guide
uucuagucccagcucugucacu

SEQ ID NO: 58132 - RNA, 22 nt, Artificial Sequence
  LRRK2 RNA guide
uuucagcauagcuagugacaga

SEQ ID NO: 58133 - RNA, 20 nt, Artificial Sequence
  LRRK2 RNA guide
aauuucagcauagcuagugg

SEQ ID NO: 58134 - RNA, 20 nt, Artificial Sequence
  LRRK2 RNA guide
agcauagcuaguggcagagc

SEQ ID NO: 58135 - RNA, 20 nt, Artificial Sequence
  LRRK2 RNA guide
agcuaguggcagagcuggga

SEQ ID NO: 58136 - RNA, 20 nt, Artificial Sequence
  LRRK2 RNA guide
agcucugccacuagcuaugc

SEQ ID NO: 58137 - RNA, 20 nt, Artificial Sequence
  LRRK2 RNA guide
agucccagcucugccacuag

SEQ ID NO: 58138 - RNA, 20 nt, Artificial Sequence
  LRRK2 RNA guide
aguggcagagcugggacuag

SEQ ID NO: 58139 - RNA, 20 nt, Artificial Sequence
  LRRK2 RNA guide
auagcuaguggcagagcugg

SEQ ID NO: 58140 - RNA, 20 nt, Artificial Sequence
  LRRK2 RNA guide
auuucagcauagcuaguggc

SEQ ID NO: 58141 - RNA, 20 nt, Artificial Sequence
  LRRK2 RNA guide
cagcauagcuaguggcagag

SEQ ID NO: 58142 - RNA, 20 nt, Artificial Sequence
  LRRK2 RNA guide
cagcucugccacuagcuaug

SEQ ID NO: 58143 - RNA, 20 nt, Artificial Sequence
  LRRK2 RNA guide
cauagcuaguggcagagcug

SEQ ID NO: 58144 - RNA, 20 nt, Artificial Sequence
  LRRK2 RNA guide
ccagcucugccacuagcuau

SEQ ID NO: 58145 - RNA, 20 nt, Artificial Sequence
  LRRK2 RNA guide
cccagcucugccacuagcua

SEQ ID NO: 58146 - RNA, 20 nt, Artificial Sequence
  LRRK2 RNA guide
cuagucccagcucugccacu

SEQ ID NO: 58147 - RNA, 20 nt, Artificial Sequence
  LRRK2 RNA guide
cuaguggcagagcugggacu

SEQ ID NO: 58148 - RNA, 20 nt, Artificial Sequence
  LRRK2 RNA guide
cucugccacuagcuaugcug

SEQ ID NO: 58149 - RNA, 20 nt, Artificial Sequence
  LRRK2 RNA guide
cugccacuagcuaugcugaa

SEQ ID NO: 58150 - RNA, 20 nt, Artificial Sequence
  LRRK2 RNA guide
cuucuagucccagcucugcc

SEQ ID NO: 58151 - RNA, 20 nt, Artificial Sequence
  LRRK2 RNA guide
gcauagcuaguggcagagcu

SEQ ID NO: 58152 - RNA, 20 nt, Artificial Sequence
  LRRK2 RNA guide
gccacuagcuaugcugaaau

SEQ ID NO: 58153 - RNA, 20 nt, Artificial Sequence
  LRRK2 RNA guide
gcucugccacuagcuaugcu

SEQ ID NO: 58154 - RNA, 20 nt, Artificial Sequence
  LRRK2 RNA guide
gcuucuagucccagcucugc

SEQ ID NO: 58155 - RNA, 20 nt, Artificial Sequence
  LRRK2 RNA guide
ggcagagcugggacuagaag

SEQ ID NO: 58156 - RNA, 20 nt, Artificial Sequence
  LRRK2 RNA guide
gucccagcucugccacuagc

SEQ ID NO: 58157 - RNA, 20 nt, Artificial Sequence
  LRRK2 RNA guide
guggcagagcugggacuaga

SEQ ID NO: 58158 - RNA, 20 nt, Artificial Sequence
  LRRK2 RNA guide
uagcuaguggcagagcuggg

SEQ ID NO: 58159 - RNA, 20 nt, Artificial Sequence
  LRRK2 RNA guide
uagucccagcucugccacua

SEQ ID NO: 58160 - RNA, 20 nt, Artificial Sequence
  LRRK2 RNA guide
uaguggcagagcugggacua

SEQ ID NO: 58161 - RNA, 20 nt, Artificial Sequence
  LRRK2 RNA guide
ucagcauagcuaguggcaga

SEQ ID NO: 58162 - RNA, 20 nt, Artificial Sequence
  LRRK2 RNA guide
ucccagcucugccacuagcu

SEQ ID NO: 58163 - RNA, 20 nt, Artificial Sequence
  LRRK2 RNA guide
ucuagucccagcucugccac

SEQ ID NO: 58164 - RNA, 20 nt, Artificial Sequence
  LRRK2 RNA guide
ucugccacuagcuaugcuga

SEQ ID NO: 58165 - RNA, 20 nt, Artificial Sequence
  LRRK2 RNA guide
ugccacuagcuaugcugaaa

SEQ ID NO: 58166 - RNA, 20 nt, Artificial Sequence
  LRRK2 RNA guide
uggcagagcugggacuagaa

SEQ ID NO: 58167 - RNA, 20 nt, Artificial Sequence
  LRRK2 RNA guide
uucagcauagcuaguggcag

SEQ ID NO: 58168 - RNA, 20 nt, Artificial Sequence
  LRRK2 RNA guide
uuucagcauagcuaguggca

SEQ ID NO: 58169 - RNA, 21 nt, Artificial Sequence
  LRRK2 RNA guide
aaauuucagcauagcuagugg

SEQ ID NO: 58170 - RNA, 21 nt, Artificial Sequence
  LRRK2 RNA guide
aauuucagcauagcuaguggc

SEQ ID NO: 58171 - RNA, 21 nt, Artificial Sequence
  LRRK2 RNA guide
agcauagcuaguggcagagcu

SEQ ID NO: 58172 - RNA, 21 nt, Artificial Sequence
  LRRK2 RNA guide
agcuaguggcagagcugggac

SEQ ID NO: 58173 - RNA, 21 nt, Artificial Sequence
  LRRK2 RNA guide
agcucugccacuagcuaugcu

SEQ ID NO: 58174 - RNA, 21 nt, Artificial Sequence
  LRRK2 RNA guide
agcuucuagucccagcucugc

SEQ ID NO: 58175 - RNA, 21 nt, Artificial Sequence
  LRRK2 RNA guide
agucccagcucugccacuagc

SEQ ID NO: 58176 - RNA, 21 nt, Artificial Sequence
  LRRK2 RNA guide
aguggcagagcugggacuaga

SEQ ID NO: 58177 - RNA, 21 nt, Artificial Sequence
  LRRK2 RNA guide
auagcuaguggcagagcuggg

SEQ ID NO: 58178 - RNA, 21 nt, Artificial Sequence
  LRRK2 RNA guide
auuucagcauagcuaguggca

SEQ ID NO: 58179 - RNA, 21 nt, Artificial Sequence
  LRRK2 RNA guide
cagcauagcuaguggcagagc

SEQ ID NO: 58180 - RNA, 21 nt, Artificial Sequence
  LRRK2 RNA guide
cagcucugccacuagcuaugc

SEQ ID NO: 58181 - RNA, 21 nt, Artificial Sequence
  LRRK2 RNA guide
cauagcuaguggcagagcugg

SEQ ID NO: 58182 - RNA, 21 nt, Artificial Sequence
  LRRK2 RNA guide
ccagcucugccacuagcuaug

SEQ ID NO: 58183 - RNA, 21 nt, Artificial Sequence
  LRRK2 RNA guide
cccagcucugccacuagcuau

SEQ ID NO: 58184 - RNA, 21 nt, Artificial Sequence
  LRRK2 RNA guide
cuagucccagcucugccacua

SEQ ID NO: 58185 - RNA, 21 nt, Artificial Sequence
  LRRK2 RNA guide
cuaguggcagagcugggacua

SEQ ID NO: 58186 - RNA, 21 nt, Artificial Sequence
  LRRK2 RNA guide
cucugccacuagcuaugcuga

SEQ ID NO: 58187 - RNA, 21 nt, Artificial Sequence
  LRRK2 RNA guide
cugccacuagcuaugcugaaa

SEQ ID NO: 58188 - RNA, 21 nt, Artificial Sequence
  LRRK2 RNA guide
cuucuagucccagcucugcca

SEQ ID NO: 58189 - RNA, 21 nt, Artificial Sequence
  LRRK2 RNA guide
gcauagcuaguggcagagcug

SEQ ID NO: 58190 - RNA, 21 nt, Artificial Sequence
  LRRK2 RNA guide
gccacuagcuaugcugaaauu

SEQ ID NO: 58191 - RNA, 21 nt, Artificial Sequence
  LRRK2 RNA guide
gcuaguggcagagcugggacu

SEQ ID NO: 58192 - RNA, 21 nt, Artificial Sequence
  LRRK2 RNA guide
gcucugccacuagcuaugcug

SEQ ID NO: 58193 - RNA, 21 nt, Artificial Sequence
  LRRK2 RNA guide
gcuucuagucccagcucugcc

SEQ ID NO: 58194 - RNA, 21 nt, Artificial Sequence
  LRRK2 RNA guide
ggcagagcugggacuagaagc

SEQ ID NO: 58195 - RNA, 21 nt, Artificial Sequence
  LRRK2 RNA guide
gucccagcucugccacuagcu

SEQ ID NO: 58196 - RNA, 21 nt, Artificial Sequence
  LRRK2 RNA guide
guggcagagcugggacuagaa

SEQ ID NO: 58197 - RNA, 21 nt, Artificial Sequence
  LRRK2 RNA guide
uagcuaguggcagagcuggga

SEQ ID NO: 58198 - RNA, 21 nt, Artificial Sequence
  LRRK2 RNA guide
uagucccagcucugccacuag

SEQ ID NO: 58199 - RNA, 21 nt, Artificial Sequence
  LRRK2 RNA guide
uaguggcagagcugggacuag

SEQ ID NO: 58200 - RNA, 21 nt, Artificial Sequence
  LRRK2 RNA guide
ucagcauagcuaguggcagag

SEQ ID NO: 58201 - RNA, 21 nt, Artificial Sequence
  LRRK2 RNA guide
ucccagcucugccacuagcua

SEQ ID NO: 58202 - RNA, 21 nt, Artificial Sequence
  LRRK2 RNA guide
ucuagucccagcucugccacu

SEQ ID NO: 58203 - RNA, 21 nt, Artificial Sequence
  LRRK2 RNA guide
ucugccacuagcuaugcugaa

SEQ ID NO: 58204 - RNA, 21 nt, Artificial Sequence
  LRRK2 RNA guide
ugccacuagcuaugcugaaau

SEQ ID NO: 58205 - RNA, 21 nt, Artificial Sequence
  LRRK2 RNA guide
uggcagagcugggacuagaag

SEQ ID NO: 58206 - RNA, 21 nt, Artificial Sequence
  LRRK2 RNA guide
uucagcauagcuaguggcaga

SEQ ID NO: 58207 - RNA, 21 nt, Artificial Sequence
  LRRK2 RNA guide
uucuagucccagcucugccac

SEQ ID NO: 58208 - RNA, 21 nt, Artificial Sequence
  LRRK2 RNA guide
uuucagcauagcuaguggcag

SEQ ID NO: 58209 - RNA, 22 nt, Artificial Sequence
  LRRK2 RNA guide
aaauuucagcauagcuaguggc

SEQ ID NO: 58210 - RNA, 22 nt, Artificial Sequence
  LRRK2 RNA guide
aauuucagcauagcuaguggca

SEQ ID NO: 58211 - RNA, 22 nt, Artificial Sequence
  LRRK2 RNA guide
agcauagcuaguggcagagcug

SEQ ID NO: 58212 - RNA, 22 nt, Artificial Sequence
  LRRK2 RNA guide
agcuaguggcagagcugggacu

SEQ ID NO: 58213 - RNA, 22 nt, Artificial Sequence
  LRRK2 RNA guide
agcucugccacuagcuaugcug

SEQ ID NO: 58214 - RNA, 22 nt, Artificial Sequence
  LRRK2 RNA guide
agcuucuagucccagcucugcc

SEQ ID NO: 58215 - RNA, 22 nt, Artificial Sequence
  LRRK2 RNA guide
agucccagcucugccacuagcu

SEQ ID NO: 58216 - RNA, 22 nt, Artificial Sequence
  LRRK2 RNA guide
aguggcagagcugggacuagaa

SEQ ID NO: 58217 - RNA, 22 nt, Artificial Sequence
  LRRK2 RNA guide
auagcuaguggcagagcuggga

SEQ ID NO: 58218 - RNA, 22 nt, Artificial Sequence
  LRRK2 RNA guide
auuucagcauagcuaguggcag

SEQ ID NO: 58219 - RNA, 22 nt, Artificial Sequence
  LRRK2 RNA guide
cagcauagcuaguggcagagcu

SEQ ID NO: 58220 - RNA, 22 nt, Artificial Sequence
  LRRK2 RNA guide
cagcucugccacuagcuaugcu

SEQ ID NO: 58221 - RNA, 22 nt, Artificial Sequence
  LRRK2 RNA guide
cagcuucuagucccagcucugc

SEQ ID NO: 58222 - RNA, 22 nt, Artificial Sequence
  LRRK2 RNA guide
cauagcuaguggcagagcuggg

SEQ ID NO: 58223 - RNA, 22 nt, Artificial Sequence
  LRRK2 RNA guide
ccagcucugccacuagcuaugc

SEQ ID NO: 58224 - RNA, 22 nt, Artificial Sequence
  LRRK2 RNA guide
cccagcucugccacuagcuaug

SEQ ID NO: 58225 - RNA, 22 nt, Artificial Sequence
  LRRK2 RNA guide
cuagucccagcucugccacuag

SEQ ID NO: 58226 - RNA, 22 nt, Artificial Sequence
  LRRK2 RNA guide
cuaguggcagagcugggacuag

SEQ ID NO: 58227 - RNA, 22 nt, Artificial Sequence
  LRRK2 RNA guide
cucugccacuagcuaugcugaa

SEQ ID NO: 58228 - RNA, 22 nt, Artificial Sequence
  LRRK2 RNA guide
cugccacuagcuaugcugaaau

SEQ ID NO: 58229 - RNA, 22 nt, Artificial Sequence
  LRRK2 RNA guide
cuucuagucccagcucugccac

SEQ ID NO: 58230 - RNA, 22 nt, Artificial Sequence
  LRRK2 RNA guide
gaaauuucagcauagcuagugg

SEQ ID NO: 58231 - RNA, 22 nt, Artificial Sequence
  LRRK2 RNA guide
gcauagcuaguggcagagcugg

SEQ ID NO: 58232 - RNA, 22 nt, Artificial Sequence
  LRRK2 RNA guide
gccacuagcuaugcugaaauuu

SEQ ID NO: 58233 - RNA, 22 nt, Artificial Sequence
  LRRK2 RNA guide
gcuaguggcagagcugggacua

SEQ ID NO: 58234 - RNA, 22 nt, Artificial Sequence
  LRRK2 RNA guide
gcucugccacuagcuaugcuga

SEQ ID NO: 58235 - RNA, 22 nt, Artificial Sequence
  LRRK2 RNA guide
gcuucuagucccagcucugcca

SEQ ID NO: 58236 - RNA, 22 nt, Artificial Sequence
  LRRK2 RNA guide
ggcagagcugggacuagaagcu

SEQ ID NO: 58237 - RNA, 22 nt, Artificial Sequence
  LRRK2 RNA guide
gucccagcucugccacuagcua

SEQ ID NO: 58238 - RNA, 22 nt, Artificial Sequence
  LRRK2 RNA guide
guggcagagcugggacuagaag

SEQ ID NO: 58239 - RNA, 22 nt, Artificial Sequence
  LRRK2 RNA guide
uagcuaguggcagagcugggac

SEQ ID NO: 58240 - RNA, 22 nt, Artificial Sequence
  LRRK2 RNA guide
uagucccagcucugccacuagc

SEQ ID NO: 58241 - RNA, 22 nt, Artificial Sequence
  LRRK2 RNA guide
uaguggcagagcugggacuaga

SEQ ID NO: 58242 - RNA, 22 nt, Artificial Sequence
  LRRK2 RNA guide
ucagcauagcuaguggcagagc

SEQ ID NO: 58243 - RNA, 22 nt, Artificial Sequence
  LRRK2 RNA guide
ucccagcucugccacuagcuau

SEQ ID NO: 58244 - RNA, 22 nt, Artificial Sequence
  LRRK2 RNA guide
ucuagucccagcucugccacua

SEQ ID NO: 58245 - RNA, 22 nt, Artificial Sequence
  LRRK2 RNA guide
ucugccacuagcuaugcugaaa

SEQ ID NO: 58246 - RNA, 22 nt, Artificial Sequence
  LRRK2 RNA guide
ugccacuagcuaugcugaaauu

SEQ ID NO: 58247 - RNA, 22 nt, Artificial Sequence
  LRRK2 RNA guide
uggcagagcugggacuagaagc

SEQ ID NO: 58248 - RNA, 22 nt, Artificial Sequence
  LRRK2 RNA guide
uucagcauagcuaguggcagag

SEQ ID NO: 58249 - RNA, 22 nt, Artificial Sequence
  LRRK2 RNA guide
uucuagucccagcucugccacu

SEQ ID NO: 58250 - RNA, 22 nt, Artificial Sequence
  LRRK2 RNA guide
uuucagcauagcuaguggcaga

SEQ ID NO: 58251 - RNA, 20 nt, Artificial Sequence
  LRRK2 RNA guide
aaauuucuucaccugcaaaa

SEQ ID NO: 58252 - RNA, 20 nt, Artificial Sequence
  LRRK2 RNA guide
aacuuccucauuuugcaggu

SEQ ID NO: 58253 - RNA, 20 nt, Artificial Sequence
  LRRK2 RNA guide
aaucuaguccaacuuccuca

SEQ ID NO: 58254 - RNA, 20 nt, Artificial Sequence
  LRRK2 RNA guide
accugcaaaaugaggaaguu

SEQ ID NO: 58255 - RNA, 20 nt, Artificial Sequence
  LRRK2 RNA guide
acuuccucauuuugcaggug

SEQ ID NO: 58256 - RNA, 20 nt, Artificial Sequence
  LRRK2 RNA guide
aguccaacuuccucauuuug

SEQ ID NO: 58257 - RNA, 20 nt, Artificial Sequence
  LRRK2 RNA guide
aucuaguccaacuuccucau

SEQ ID NO: 58258 - RNA, 20 nt, Artificial Sequence
  LRRK2 RNA guide
augcugaaauuucuucaccu

SEQ ID NO: 58259 - RNA, 20 nt, Artificial Sequence
  LRRK2 RNA guide
auuucuucaccugcaaaaug

SEQ ID NO: 58260 - RNA, 20 nt, Artificial Sequence
  LRRK2 RNA guide
auuuugcaggugaagaaauu

SEQ ID NO: 58261 - RNA, 20 nt, Artificial Sequence
  LRRK2 RNA guide
caacuuccucauuuugcagg

SEQ ID NO: 58262 - RNA, 20 nt, Artificial Sequence
  LRRK2 RNA guide
caccugcaaaaugaggaagu

SEQ ID NO: 58263 - RNA, 20 nt, Artificial Sequence
  LRRK2 RNA guide
cauuuugcaggugaagaaau

SEQ ID NO: 58264 - RNA, 20 nt, Artificial Sequence
  LRRK2 RNA guide
ccaacuuccucauuuugcag

SEQ ID NO: 58265 - RNA, 20 nt, Artificial Sequence
  LRRK2 RNA guide
ccucauuuugcaggugaaga

SEQ ID NO: 58266 - RNA, 20 nt, Artificial Sequence
  LRRK2 RNA guide
ccugcaaaaugaggaaguug

SEQ ID NO: 58267 - RNA, 20 nt, Artificial Sequence
  LRRK2 RNA guide
cuaguccaacuuccucauuu

SEQ ID NO: 58268 - RNA, 20 nt, Artificial Sequence
  LRRK2 RNA guide
cuaugcugaaauuucuucac

SEQ ID NO: 58269 - RNA, 20 nt, Artificial Sequence
  LRRK2 RNA guide
cucauuuugcaggugaagaa

SEQ ID NO: 58270 - RNA, 20 nt, Artificial Sequence
  LRRK2 RNA guide
cugaaauuucuucaccugca

SEQ ID NO: 58271 - RNA, 20 nt, Artificial Sequence
  LRRK2 RNA guide
cugcaaaaugaggaaguugg

SEQ ID NO: 58272 - RNA, 20 nt, Artificial Sequence
  LRRK2 RNA guide
cuucaccugcaaaaugagga

SEQ ID NO: 58273 - RNA, 20 nt, Artificial Sequence
  LRRK2 RNA guide
cuuccucauuuugcagguga

SEQ ID NO: 58274 - RNA, 20 nt, Artificial Sequence
  LRRK2 RNA guide
gaaauuucuucaccugcaaa

SEQ ID NO: 58275 - RNA, 20 nt, Artificial Sequence
  LRRK2 RNA guide
gcaaaaugaggaaguuggac

SEQ ID NO: 58276 - RNA, 20 nt, Artificial Sequence
  LRRK2 RNA guide
gcuaugcugaaauuucuuca

SEQ ID NO: 58277 - RNA, 20 nt, Artificial Sequence
  LRRK2 RNA guide
gcugaaauuucuucaccugc

SEQ ID NO: 58278 - RNA, 20 nt, Artificial Sequence
  LRRK2 RNA guide
guccaacuuccucauuuugc

SEQ ID NO: 58279 - RNA, 20 nt, Artificial Sequence
  LRRK2 RNA guide
uaguccaacuuccucauuuu

SEQ ID NO: 58280 - RNA, 20 nt, Artificial Sequence
  LRRK2 RNA guide
uaugcugaaauuucuucacc

SEQ ID NO: 58281 - RNA, 20 nt, Artificial Sequence
  LRRK2 RNA guide
ucaccugcaaaaugaggaag

SEQ ID NO: 58282 - RNA, 20 nt, Artificial Sequence
  LRRK2 RNA guide
ucauuuugcaggugaagaaa

SEQ ID NO: 58283 - RNA, 20 nt, Artificial Sequence
  LRRK2 RNA guide
uccaacuuccucauuuugca

SEQ ID NO: 58284 - RNA, 20 nt, Artificial Sequence
  LRRK2 RNA guide
ucuaguccaacuuccucauu

SEQ ID NO: 58285 - RNA, 20 nt, Artificial Sequence
  LRRK2 RNA guide
ucuucaccugcaaaaugagg

SEQ ID NO: 58286 - RNA, 20 nt, Artificial Sequence
  LRRK2 RNA guide
ugaaauuucuucaccugcaa

SEQ ID NO: 58287 - RNA, 20 nt, Artificial Sequence
  LRRK2 RNA guide
ugcaaaaugaggaaguugga

SEQ ID NO: 58288 - RNA, 20 nt, Artificial Sequence
  LRRK2 RNA guide
ugcaggugaagaaauuucag

SEQ ID NO: 58289 - RNA, 20 nt, Artificial Sequence
  LRRK2 RNA guide
ugcugaaauuucuucaccug

SEQ ID NO: 58290 - RNA, 20 nt, Artificial Sequence
  LRRK2 RNA guide
uucaccugcaaaaugaggaa

SEQ ID NO: 58291 - RNA, 20 nt, Artificial Sequence
  LRRK2 RNA guide
uuccucauuuugcaggugaa

SEQ ID NO: 58292 - RNA, 20 nt, Artificial Sequence
  LRRK2 RNA guide
uucuucaccugcaaaaugag

SEQ ID NO: 58293 - RNA, 20 nt, Artificial Sequence
  LRRK2 RNA guide
uugcaggugaagaaauuuca

SEQ ID NO: 58294 - RNA, 20 nt, Artificial Sequence
  LRRK2 RNA guide
uuucuucaccugcaaaauga

SEQ ID NO: 58295 - RNA, 20 nt, Artificial Sequence
  LRRK2 RNA guide
uuugcaggugaagaaauuuc

SEQ ID NO: 58296 - RNA, 20 nt, Artificial Sequence
  LRRK2 RNA guide
uuuugcaggugaagaaauuu

SEQ ID NO: 58297 - RNA, 21 nt, Artificial Sequence
  LRRK2 RNA guide
aaaucuaguccaacuuccuca

SEQ ID NO: 58298 - RNA, 21 nt, Artificial Sequence
  LRRK2 RNA guide
aacuuccucauuuugcaggug

SEQ ID NO: 58299 - RNA, 21 nt, Artificial Sequence
  LRRK2 RNA guide
aaucuaguccaacuuccucau

SEQ ID NO: 58300 - RNA, 21 nt, Artificial Sequence
  LRRK2 RNA guide
aauuucuucaccugcaaaaug

SEQ ID NO: 58301 - RNA, 21 nt, Artificial Sequence
  LRRK2 RNA guide
accugcaaaaugaggaaguug

SEQ ID NO: 58302 - RNA, 21 nt, Artificial Sequence
  LRRK2 RNA guide
acuuccucauuuugcagguga

SEQ ID NO: 58303 - RNA, 21 nt, Artificial Sequence
  LRRK2 RNA guide
agcuaugcugaaauuucuuca

SEQ ID NO: 58304 - RNA, 21 nt, Artificial Sequence
  LRRK2 RNA guide
aguccaacuuccucauuuugc

SEQ ID NO: 58305 - RNA, 21 nt, Artificial Sequence
  LRRK2 RNA guide
aucuaguccaacuuccucauu

SEQ ID NO: 58306 - RNA, 21 nt, Artificial Sequence
  LRRK2 RNA guide
augcugaaauuucuucaccug

SEQ ID NO: 58307 - RNA, 21 nt, Artificial Sequence
  LRRK2 RNA guide
auuucuucaccugcaaaauga

SEQ ID NO: 58308 - RNA, 21 nt, Artificial Sequence
  LRRK2 RNA guide
caacuuccucauuuugcaggu

SEQ ID NO: 58309 - RNA, 21 nt, Artificial Sequence
  LRRK2 RNA guide
caccugcaaaaugaggaaguu

SEQ ID NO: 58310 - RNA, 21 nt, Artificial Sequence
  LRRK2 RNA guide
cauuuugcaggugaagaaauu

SEQ ID NO: 58311 - RNA, 21 nt, Artificial Sequence
  LRRK2 RNA guide
ccaacuuccucauuuugcagg

SEQ ID NO: 58312 - RNA, 21 nt, Artificial Sequence
  LRRK2 RNA guide
ccucauuuugcaggugaagaa

SEQ ID NO: 58313 - RNA, 21 nt, Artificial Sequence
  LRRK2 RNA guide
ccugcaaaaugaggaaguugg

SEQ ID NO: 58314 - RNA, 21 nt, Artificial Sequence
  LRRK2 RNA guide
cuaguccaacuuccucauuuu

SEQ ID NO: 58315 - RNA, 21 nt, Artificial Sequence
  LRRK2 RNA guide
cuaugcugaaauuucuucacc

SEQ ID NO: 58316 - RNA, 21 nt, Artificial Sequence
  LRRK2 RNA guide
cucauuuugcaggugaagaaa

SEQ ID NO: 58317 - RNA, 21 nt, Artificial Sequence
  LRRK2 RNA guide
cugaaauuucuucaccugcaa

SEQ ID NO: 58318 - RNA, 21 nt, Artificial Sequence
  LRRK2 RNA guide
cugcaaaaugaggaaguugga

SEQ ID NO: 58319 - RNA, 21 nt, Artificial Sequence
  LRRK2 RNA guide
cuucaccugcaaaaugaggaa

SEQ ID NO: 58320 - RNA, 21 nt, Artificial Sequence
  LRRK2 RNA guide
cuuccucauuuugcaggugaa

SEQ ID NO: 58321 - RNA, 21 nt, Artificial Sequence
  LRRK2 RNA guide
gaaauuucuucaccugcaaaa

SEQ ID NO: 58322 - RNA, 21 nt, Artificial Sequence
  LRRK2 RNA guide
gcaaaaugaggaaguuggacu

SEQ ID NO: 58323 - RNA, 21 nt, Artificial Sequence
  LRRK2 RNA guide
gcuaugcugaaauuucuucac

SEQ ID NO: 58324 - RNA, 21 nt, Artificial Sequence
  LRRK2 RNA guide
gcugaaauuucuucaccugca

SEQ ID NO: 58325 - RNA, 21 nt, Artificial Sequence
  LRRK2 RNA guide
guccaacuuccucauuuugca

SEQ ID NO: 58326 - RNA, 21 nt, Artificial Sequence
  LRRK2 RNA guide
uaguccaacuuccucauuuug

SEQ ID NO: 58327 - RNA, 21 nt, Artificial Sequence
  LRRK2 RNA guide
uaugcugaaauuucuucaccu

SEQ ID NO: 58328 - RNA, 21 nt, Artificial Sequence
  LRRK2 RNA guide
ucaccugcaaaaugaggaagu

SEQ ID NO: 58329 - RNA, 21 nt, Artificial Sequence
  LRRK2 RNA guide
ucauuuugcaggugaagaaau

SEQ ID NO: 58330 - RNA, 21 nt, Artificial Sequence
  LRRK2 RNA guide
uccaacuuccucauuuugcag

SEQ ID NO: 58331 - RNA, 21 nt, Artificial Sequence
  LRRK2 RNA guide
uccucauuuugcaggugaaga

SEQ ID NO: 58332 - RNA, 21 nt, Artificial Sequence
  LRRK2 RNA guide
ucuaguccaacuuccucauuu

SEQ ID NO: 58333 - RNA, 21 nt, Artificial Sequence
  LRRK2 RNA guide
ucuucaccugcaaaaugagga

SEQ ID NO: 58334 - RNA, 21 nt, Artificial Sequence
  LRRK2 RNA guide
ugaaauuucuucaccugcaaa

SEQ ID NO: 58335 - RNA, 21 nt, Artificial Sequence
  LRRK2 RNA guide
ugcaaaaugaggaaguuggac

SEQ ID NO: 58336 - RNA, 21 nt, Artificial Sequence
  LRRK2 RNA guide
ugcaggugaagaaauuucagc

SEQ ID NO: 58337 - RNA, 21 nt, Artificial Sequence
  LRRK2 RNA guide
ugcugaaauuucuucaccugc

SEQ ID NO: 58338 - RNA, 21 nt, Artificial Sequence
  LRRK2 RNA guide
uucaccugcaaaaugaggaag

SEQ ID NO: 58339 - RNA, 21 nt, Artificial Sequence
  LRRK2 RNA guide
uuccucauuuugcaggugaag

SEQ ID NO: 58340 - RNA, 21 nt, Artificial Sequence
  LRRK2 RNA guide
uucuucaccugcaaaaugagg

SEQ ID NO: 58341 - RNA, 21 nt, Artificial Sequence
  LRRK2 RNA guide
uugcaggugaagaaauuucag

SEQ ID NO: 58342 - RNA, 21 nt, Artificial Sequence
  LRRK2 RNA guide
uuucuucaccugcaaaaugag

SEQ ID NO: 58343 - RNA, 21 nt, Artificial Sequence
  LRRK2 RNA guide
uuugcaggugaagaaauuuca

SEQ ID NO: 58344 - RNA, 21 nt, Artificial Sequence
  LRRK2 RNA guide
uuuugcaggugaagaaauuuc

SEQ ID NO: 58345 - RNA, 22 nt, Artificial Sequence
  LRRK2 RNA guide
aaaaucuaguccaacuuccuca

SEQ ID NO: 58346 - RNA, 22 nt, Artificial Sequence
  LRRK2 RNA guide
aaaucuaguccaacuuccucau

SEQ ID NO: 58347 - RNA, 22 nt, Artificial Sequence
  LRRK2 RNA guide
aaauuucuucaccugcaaaaug

SEQ ID NO: 58348 - RNA, 22 nt, Artificial Sequence
  LRRK2 RNA guide
aacuuccucauuuugcagguga

SEQ ID NO: 58349 - RNA, 22 nt, Artificial Sequence
  LRRK2 RNA guide
aaucuaguccaacuuccucauu

SEQ ID NO: 58350 - RNA, 22 nt, Artificial Sequence
  LRRK2 RNA guide
aauuucuucaccugcaaaauga

SEQ ID NO: 58351 - RNA, 22 nt, Artificial Sequence
  LRRK2 RNA guide
accugcaaaaugaggaaguugg

SEQ ID NO: 58352 - RNA, 22 nt, Artificial Sequence
  LRRK2 RNA guide
acuuccucauuuugcaggugaa

SEQ ID NO: 58353 - RNA, 22 nt, Artificial Sequence
  LRRK2 RNA guide
agcuaugcugaaauuucuucac

SEQ ID NO: 58354 - RNA, 22 nt, Artificial Sequence
  LRRK2 RNA guide
aguccaacuuccucauuuugca

SEQ ID NO: 58355 - RNA, 22 nt, Artificial Sequence
  LRRK2 RNA guide
aucuaguccaacuuccucauuu

SEQ ID NO: 58356 - RNA, 22 nt, Artificial Sequence
  LRRK2 RNA guide
augcugaaauuucuucaccugc

SEQ ID NO: 58357 - RNA, 22 nt, Artificial Sequence
  LRRK2 RNA guide
auuucuucaccugcaaaaugag

SEQ ID NO: 58358 - RNA, 22 nt, Artificial Sequence
  LRRK2 RNA guide
auuuugcaggugaagaaauuuc

SEQ ID NO: 58359 - RNA, 22 nt, Artificial Sequence
  LRRK2 RNA guide
caacuuccucauuuugcaggug

SEQ ID NO: 58360 - RNA, 22 nt, Artificial Sequence
  LRRK2 RNA guide
caccugcaaaaugaggaaguug

SEQ ID NO: 58361 - RNA, 22 nt, Artificial Sequence
  LRRK2 RNA guide
cauuuugcaggugaagaaauuu

SEQ ID NO: 58362 - RNA, 22 nt, Artificial Sequence
  LRRK2 RNA guide
ccaacuuccucauuuugcaggu

SEQ ID NO: 58363 - RNA, 22 nt, Artificial Sequence
  LRRK2 RNA guide
ccucauuuugcaggugaagaaa

SEQ ID NO: 58364 - RNA, 22 nt, Artificial Sequence
  LRRK2 RNA guide
ccugcaaaaugaggaaguugga

SEQ ID NO: 58365 - RNA, 22 nt, Artificial Sequence
  LRRK2 RNA guide
cuaguccaacuuccucauuuug

SEQ ID NO: 58366 - RNA, 22 nt, Artificial Sequence
  LRRK2 RNA guide
cuaugcugaaauuucuucaccu

SEQ ID NO: 58367 - RNA, 22 nt, Artificial Sequence
  LRRK2 RNA guide
cucauuuugcaggugaagaaau

SEQ ID NO: 58368 - RNA, 22 nt, Artificial Sequence
  LRRK2 RNA guide
cugaaauuucuucaccugcaaa

SEQ ID NO: 58369 - RNA, 22 nt, Artificial Sequence
  LRRK2 RNA guide
cugcaaaaugaggaaguuggac

SEQ ID NO: 58370 - RNA, 22 nt, Artificial Sequence
  LRRK2 RNA guide
cuucaccugcaaaaugaggaag

SEQ ID NO: 58371 - RNA, 22 nt, Artificial Sequence
  LRRK2 RNA guide
cuuccucauuuugcaggugaag

SEQ ID NO: 58372 - RNA, 22 nt, Artificial Sequence
  LRRK2 RNA guide
gaaauuucuucaccugcaaaau

SEQ ID NO: 58373 - RNA, 22 nt, Artificial Sequence
  LRRK2 RNA guide
gcaaaaugaggaaguuggacua

SEQ ID NO: 58374 - RNA, 22 nt, Artificial Sequence
  LRRK2 RNA guide
gcuaugcugaaauuucuucacc

SEQ ID NO: 58375 - RNA, 22 nt, Artificial Sequence
  LRRK2 RNA guide
gcugaaauuucuucaccugcaa

SEQ ID NO: 58376 - RNA, 22 nt, Artificial Sequence
  LRRK2 RNA guide
guccaacuuccucauuuugcag

SEQ ID NO: 58377 - RNA, 22 nt, Artificial Sequence
  LRRK2 RNA guide
uagcuaugcugaaauuucuuca

SEQ ID NO: 58378 - RNA, 22 nt, Artificial Sequence
  LRRK2 RNA guide
uaguccaacuuccucauuuugc

SEQ ID NO: 58379 - RNA, 22 nt, Artificial Sequence
  LRRK2 RNA guide
uaugcugaaauuucuucaccug

SEQ ID NO: 58380 - RNA, 22 nt, Artificial Sequence
  LRRK2 RNA guide
ucaccugcaaaaugaggaaguu

SEQ ID NO: 58381 - RNA, 22 nt, Artificial Sequence
  LRRK2 RNA guide
ucauuuugcaggugaagaaauu

SEQ ID NO: 58382 - RNA, 22 nt, Artificial Sequence
  LRRK2 RNA guide
uccaacuuccucauuuugcagg

SEQ ID NO: 58383 - RNA, 22 nt, Artificial Sequence
  LRRK2 RNA guide
uccucauuuugcaggugaagaa

SEQ ID NO: 58384 - RNA, 22 nt, Artificial Sequence
  LRRK2 RNA guide
ucuaguccaacuuccucauuuu

SEQ ID NO: 58385 - RNA, 22 nt, Artificial Sequence
  LRRK2 RNA guide
ucuucaccugcaaaaugaggaa

SEQ ID NO: 58386 - RNA, 22 nt, Artificial Sequence
  LRRK2 RNA guide
ugaaauuucuucaccugcaaaa

SEQ ID NO: 58387 - RNA, 22 nt, Artificial Sequence
  LRRK2 RNA guide
ugcaaaaugaggaaguuggacu

SEQ ID NO: 58388 - RNA, 22 nt, Artificial Sequence
  LRRK2 RNA guide
ugcaggugaagaaauuucagca

SEQ ID NO: 58389 - RNA, 22 nt, Artificial Sequence
  LRRK2 RNA guide
ugcugaaauuucuucaccugca

SEQ ID NO: 58390 - RNA, 22 nt, Artificial Sequence
  LRRK2 RNA guide
uucaccugcaaaaugaggaagu

SEQ ID NO: 58391 - RNA, 22 nt, Artificial Sequence
  LRRK2 RNA guide
uuccucauuuugcaggugaaga

SEQ ID NO: 58392 - RNA, 22 nt, Artificial Sequence
  LRRK2 RNA guide
uucuucaccugcaaaaugagga

SEQ ID NO: 58393 - RNA, 22 nt, Artificial Sequence
  LRRK2 RNA guide
uugcaggugaagaaauuucagc

SEQ ID NO: 58394 - RNA, 22 nt, Artificial Sequence
  LRRK2 RNA guide
uuucuucaccugcaaaaugagg

SEQ ID NO: 58395 - RNA, 22 nt, Artificial Sequence
  LRRK2 RNA guide
uuugcaggugaagaaauuucag

SEQ ID NO: 58396 - RNA, 22 nt, Artificial Sequence
  LRRK2 RNA guide
uuuugcaggugaagaaauuuca

SEQ ID NO: 58397 - RNA, 20 nt, Artificial Sequence
  LRRK2 RNA guide
aacuuccucauuuuacaggu

SEQ ID NO: 58398 - RNA, 20 nt, Artificial Sequence
  LRRK2 RNA guide
accuguaaaaugaggaaguu

SEQ ID NO: 58399 - RNA, 20 nt, Artificial Sequence
  LRRK2 RNA guide
acuuccucauuuuacaggug

SEQ ID NO: 58400 - RNA, 20 nt, Artificial Sequence
  LRRK2 RNA guide
aguccaacuuccucauuuua

SEQ ID NO: 58401 - RNA, 20 nt, Artificial Sequence
  LRRK2 RNA guide
auuucuucaccuguaaaaug

SEQ ID NO: 58402 - RNA, 20 nt, Artificial Sequence
  LRRK2 RNA guide
caacuuccucauuuuacagg

SEQ ID NO: 58403 - RNA, 20 nt, Artificial Sequence
  LRRK2 RNA guide
cauuuuacaggugaagaaau

SEQ ID NO: 58404 - RNA, 20 nt, Artificial Sequence
  LRRK2 RNA guide
ccaacuuccucauuuuacag

SEQ ID NO: 58405 - RNA, 20 nt, Artificial Sequence
  LRRK2 RNA guide
ccucauuuuacaggugaaga

SEQ ID NO: 58406 - RNA, 20 nt, Artificial Sequence
  LRRK2 RNA guide
ccuguaaaaugaggaaguug

SEQ ID NO: 58407 - RNA, 20 nt, Artificial Sequence
  LRRK2 RNA guide
cucauuuuacaggugaagaa

SEQ ID NO: 58408 - RNA, 20 nt, Artificial Sequence
  LRRK2 RNA guide
cugaaauuucuucaccugua

SEQ ID NO: 58409 - RNA, 20 nt, Artificial Sequence
  LRRK2 RNA guide
cuguaaaaugaggaaguugg

SEQ ID NO: 58410 - RNA, 20 nt, Artificial Sequence
  LRRK2 RNA guide
cuucaccuguaaaaugagga

SEQ ID NO: 58411 - RNA, 20 nt, Artificial Sequence
  LRRK2 RNA guide
cuuccucauuuuacagguga

SEQ ID NO: 58412 - RNA, 20 nt, Artificial Sequence
  LRRK2 RNA guide
gaaauuucuucaccuguaaa

SEQ ID NO: 58413 - RNA, 20 nt, Artificial Sequence
  LRRK2 RNA guide
gcugaaauuucuucaccugu

SEQ ID NO: 58414 - RNA, 20 nt, Artificial Sequence
  LRRK2 RNA guide
guaaaaugaggaaguuggac

SEQ ID NO: 58415 - RNA, 20 nt, Artificial Sequence
  LRRK2 RNA guide
uacaggugaagaaauuucag

SEQ ID NO: 58416 - RNA, 20 nt, Artificial Sequence
  LRRK2 RNA guide
ucauuuuacaggugaagaaa

SEQ ID NO: 58417 - RNA, 20 nt, Artificial Sequence
  LRRK2 RNA guide
ucuucaccuguaaaaugagg

SEQ ID NO: 58418 - RNA, 20 nt, Artificial Sequence
  LRRK2 RNA guide
ugaaauuucuucaccuguaa

SEQ ID NO: 58419 - RNA, 20 nt, Artificial Sequence
  LRRK2 RNA guide
uguaaaaugaggaaguugga

SEQ ID NO: 58420 - RNA, 20 nt, Artificial Sequence
  LRRK2 RNA guide
uuacaggugaagaaauuuca

SEQ ID NO: 58421 - RNA, 20 nt, Artificial Sequence
  LRRK2 RNA guide
uucaccuguaaaaugaggaa

SEQ ID NO: 58422 - RNA, 20 nt, Artificial Sequence
  LRRK2 RNA guide
uuccucauuuuacaggugaa

SEQ ID NO: 58423 - RNA, 20 nt, Artificial Sequence
  LRRK2 RNA guide
uucuucaccuguaaaaugag

SEQ ID NO: 58424 - RNA, 20 nt, Artificial Sequence
  LRRK2 RNA guide
uuuacaggugaagaaauuuc

SEQ ID NO: 58425 - RNA, 20 nt, Artificial Sequence
  LRRK2 RNA guide
uuucuucaccuguaaaauga

SEQ ID NO: 58426 - RNA, 21 nt, Artificial Sequence
  LRRK2 RNA guide
aacuuccucauuuuacaggug

SEQ ID NO: 58427 - RNA, 21 nt, Artificial Sequence
  LRRK2 RNA guide
accuguaaaaugaggaaguug

SEQ ID NO: 58428 - RNA, 21 nt, Artificial Sequence
  LRRK2 RNA guide
acuuccucauuuuacagguga

SEQ ID NO: 58429 - RNA, 21 nt, Artificial Sequence
  LRRK2 RNA guide
aguccaacuuccucauuuuac

SEQ ID NO: 58430 - RNA, 21 nt, Artificial Sequence
  LRRK2 RNA guide
caacuuccucauuuuacaggu

SEQ ID NO: 58431 - RNA, 21 nt, Artificial Sequence
  LRRK2 RNA guide
caccuguaaaaugaggaaguu

SEQ ID NO: 58432 - RNA, 21 nt, Artificial Sequence
  LRRK2 RNA guide
ccaacuuccucauuuuacagg

SEQ ID NO: 58433 - RNA, 21 nt, Artificial Sequence
  LRRK2 RNA guide
ccucauuuuacaggugaagaa

SEQ ID NO: 58434 - RNA, 21 nt, Artificial Sequence
  LRRK2 RNA guide
ccuguaaaaugaggaaguugg

SEQ ID NO: 58435 - RNA, 21 nt, Artificial Sequence
  LRRK2 RNA guide
cucauuuuacaggugaagaaa

SEQ ID NO: 58436 - RNA, 21 nt, Artificial Sequence
  LRRK2 RNA guide
cugaaauuucuucaccuguaa

SEQ ID NO: 58437 - RNA, 21 nt, Artificial Sequence
  LRRK2 RNA guide
cuguaaaaugaggaaguugga

SEQ ID NO: 58438 - RNA, 21 nt, Artificial Sequence
  LRRK2 RNA guide
cuucaccuguaaaaugaggaa

SEQ ID NO: 58439 - RNA, 21 nt, Artificial Sequence
  LRRK2 RNA guide
cuuccucauuuuacaggugaa

SEQ ID NO: 58440 - RNA, 21 nt, Artificial Sequence
  LRRK2 RNA guide
gcugaaauuucuucaccugua

SEQ ID NO: 58441 - RNA, 21 nt, Artificial Sequence
  LRRK2 RNA guide
guaaaaugaggaaguuggacu

SEQ ID NO: 58442 - RNA, 21 nt, Artificial Sequence
  LRRK2 RNA guide
uacaggugaagaaauuucagc

SEQ ID NO: 58443 - RNA, 21 nt, Artificial Sequence
  LRRK2 RNA guide
uaguccaacuuccucauuuua

SEQ ID NO: 58444 - RNA, 21 nt, Artificial Sequence
  LRRK2 RNA guide
uccaacuuccucauuuuacag

SEQ ID NO: 58445 - RNA, 21 nt, Artificial Sequence
  LRRK2 RNA guide
uccucauuuuacaggugaaga

SEQ ID NO: 58446 - RNA, 21 nt, Artificial Sequence
  LRRK2 RNA guide
ucuucaccuguaaaaugagga

SEQ ID NO: 58447 - RNA, 21 nt, Artificial Sequence
  LRRK2 RNA guide
ugcugaaauuucuucaccugu

SEQ ID NO: 58448 - RNA, 21 nt, Artificial Sequence
  LRRK2 RNA guide
uguaaaaugaggaaguuggac

SEQ ID NO: 58449 - RNA, 21 nt, Artificial Sequence
  LRRK2 RNA guide
uuacaggugaagaaauuucag

SEQ ID NO: 58450 - RNA, 21 nt, Artificial Sequence
  LRRK2 RNA guide
uucaccuguaaaaugaggaag

SEQ ID NO: 58451 - RNA, 21 nt, Artificial Sequence
  LRRK2 RNA guide
uuccucauuuuacaggugaag

SEQ ID NO: 58452 - RNA, 21 nt, Artificial Sequence
  LRRK2 RNA guide
uucuucaccuguaaaaugagg

SEQ ID NO: 58453 - RNA, 21 nt, Artificial Sequence
  LRRK2 RNA guide
uuucuucaccuguaaaaugag

SEQ ID NO: 58454 - RNA, 22 nt, Artificial Sequence
  LRRK2 RNA guide
aacuuccucauuuuacagguga

SEQ ID NO: 58455 - RNA, 22 nt, Artificial Sequence
  LRRK2 RNA guide
accuguaaaaugaggaaguugg

SEQ ID NO: 58456 - RNA, 22 nt, Artificial Sequence
  LRRK2 RNA guide
acuuccucauuuuacaggugaa

SEQ ID NO: 58457 - RNA, 22 nt, Artificial Sequence
  LRRK2 RNA guide
aguccaacuuccucauuuuaca

SEQ ID NO: 58458 - RNA, 22 nt, Artificial Sequence
  LRRK2 RNA guide
augcugaaauuucuucaccugu

SEQ ID NO: 58459 - RNA, 22 nt, Artificial Sequence
  LRRK2 RNA guide
auuucuucaccuguaaaaugag

SEQ ID NO: 58460 - RNA, 22 nt, Artificial Sequence
  LRRK2 RNA guide
caacuuccucauuuuacaggug

SEQ ID NO: 58461 - RNA, 22 nt, Artificial Sequence
  LRRK2 RNA guide
caccuguaaaaugaggaaguug

SEQ ID NO: 58462 - RNA, 22 nt, Artificial Sequence
  LRRK2 RNA guide
ccaacuuccucauuuuacaggu

SEQ ID NO: 58463 - RNA, 22 nt, Artificial Sequence
  LRRK2 RNA guide
ccucauuuuacaggugaagaaa

SEQ ID NO: 58464 - RNA, 22 nt, Artificial Sequence
  LRRK2 RNA guide
ccuguaaaaugaggaaguugga

SEQ ID NO: 58465 - RNA, 22 nt, Artificial Sequence
  LRRK2 RNA guide
cuaguccaacuuccucauuuua

SEQ ID NO: 58466 - RNA, 22 nt, Artificial Sequence
  LRRK2 RNA guide
cucauuuuacaggugaagaaau

SEQ ID NO: 58467 - RNA, 22 nt, Artificial Sequence
  LRRK2 RNA guide
cugaaauuucuucaccuguaaa

SEQ ID NO: 58468 - RNA, 22 nt, Artificial Sequence
  LRRK2 RNA guide
cuguaaaaugaggaaguuggac

SEQ ID NO: 58469 - RNA, 22 nt, Artificial Sequence
  LRRK2 RNA guide
cuucaccuguaaaaugaggaag

SEQ ID NO: 58470 - RNA, 22 nt, Artificial Sequence
  LRRK2 RNA guide
cuuccucauuuuacaggugaag

SEQ ID NO: 58471 - RNA, 22 nt, Artificial Sequence
  LRRK2 RNA guide
gcugaaauuucuucaccuguaa

SEQ ID NO: 58472 - RNA, 22 nt, Artificial Sequence
  LRRK2 RNA guide
guaaaaugaggaaguuggacua

SEQ ID NO: 58473 - RNA, 22 nt, Artificial Sequence
  LRRK2 RNA guide
guccaacuuccucauuuuacag

SEQ ID NO: 58474 - RNA, 22 nt, Artificial Sequence
  LRRK2 RNA guide
uacaggugaagaaauuucagca

SEQ ID NO: 58475 - RNA, 22 nt, Artificial Sequence
  LRRK2 RNA guide
uaguccaacuuccucauuuuac

SEQ ID NO: 58476 - RNA, 22 nt, Artificial Sequence
  LRRK2 RNA guide
ucaccuguaaaaugaggaaguu

SEQ ID NO: 58477 - RNA, 22 nt, Artificial Sequence
  LRRK2 RNA guide
uccaacuuccucauuuuacagg

SEQ ID NO: 58478 - RNA, 22 nt, Artificial Sequence
  LRRK2 RNA guide
uccucauuuuacaggugaagaa

SEQ ID NO: 58479 - RNA, 22 nt, Artificial Sequence
  LRRK2 RNA guide
ucuucaccuguaaaaugaggaa

SEQ ID NO: 58480 - RNA, 22 nt, Artificial Sequence
  LRRK2 RNA guide
ugcugaaauuucuucaccugua

SEQ ID NO: 58481 - RNA, 22 nt, Artificial Sequence
  LRRK2 RNA guide
uguaaaaugaggaaguuggacu

SEQ ID NO: 58482 - RNA, 22 nt, Artificial Sequence
  LRRK2 RNA guide
uuacaggugaagaaauuucagc

SEQ ID NO: 58483 - RNA, 22 nt, Artificial Sequence
  LRRK2 RNA guide
uucaccuguaaaaugaggaagu

SEQ ID NO: 58484 - RNA, 22 nt, Artificial Sequence
  LRRK2 RNA guide
uuccucauuuuacaggugaaga

SEQ ID NO: 58485 - RNA, 22 nt, Artificial Sequence
  LRRK2 RNA guide
uucuucaccuguaaaaugagga

SEQ ID NO: 58486 - RNA, 22 nt, Artificial Sequence
  LRRK2 RNA guide
uuuacaggugaagaaauuucag

SEQ ID NO: 58487 - RNA, 22 nt, Artificial Sequence
  LRRK2 RNA guide
uuucuucaccuguaaaaugagg

SEQ ID NO: 58488 - RNA, 20 nt, Artificial Sequence
  LRRK2 RNA guide
aaacccaaauucuaaaaugc

SEQ ID NO: 58489 - RNA, 20 nt, Artificial Sequence
  LRRK2 RNA guide
aacccaaauucuaaaaugcu

SEQ ID NO: 58490 - RNA, 20 nt, Artificial Sequence
  LRRK2 RNA guide
aauucuaaaaugcucaaugc

SEQ ID NO: 58491 - RNA, 20 nt, Artificial Sequence
  LRRK2 RNA guide
aauuuggguuuaguuaaggc

SEQ ID NO: 58492 - RNA, 20 nt, Artificial Sequence
  LRRK2 RNA guide
acccaaauucuaaaaugcuc

SEQ ID NO: 58493 - RNA, 20 nt, Artificial Sequence
  LRRK2 RNA guide
agaauuuggguuuaguuaag

SEQ ID NO: 58494 - RNA, 20 nt, Artificial Sequence
  LRRK2 RNA guide
agagcauugagcauuuuaga

SEQ ID NO: 58495 - RNA, 20 nt, Artificial Sequence
  LRRK2 RNA guide
agcauugagcauuuuagaau

SEQ ID NO: 58496 - RNA, 20 nt, Artificial Sequence
  LRRK2 RNA guide
agcauuuuagaauuuggguu

SEQ ID NO: 58497 - RNA, 20 nt, Artificial Sequence
  LRRK2 RNA guide
auucuaaaaugcucaaugcu

SEQ ID NO: 58498 - RNA, 20 nt, Artificial Sequence
  LRRK2 RNA guide
cagagcauugagcauuuuag

SEQ ID NO: 58499 - RNA, 20 nt, Artificial Sequence
  LRRK2 RNA guide
ccaaauucuaaaaugcucaa

SEQ ID NO: 58500 - RNA, 20 nt, Artificial Sequence
  LRRK2 RNA guide
ccagagcauugagcauuuua

SEQ ID NO: 58501 - RNA, 20 nt, Artificial Sequence
  LRRK2 RNA guide
cccaaauucuaaaaugcuca

SEQ ID NO: 58502 - RNA, 20 nt, Artificial Sequence
  LRRK2 RNA guide
cccagagcauugagcauuuu

SEQ ID NO: 58503 - RNA, 20 nt, Artificial Sequence
  LRRK2 RNA guide
ccuuaacuaaacccaaauuc

SEQ ID NO: 58504 - RNA, 20 nt, Artificial Sequence
  LRRK2 RNA guide
cugccuuaacuaaacccaaa

SEQ ID NO: 58505 - RNA, 20 nt, Artificial Sequence
  LRRK2 RNA guide
gaauuuggguuuaguuaagg

SEQ ID NO: 58506 - RNA, 20 nt, Artificial Sequence
  LRRK2 RNA guide
gagcauugagcauuuuagaa

SEQ ID NO: 58507 - RNA, 20 nt, Artificial Sequence
  LRRK2 RNA guide
gagcauuuuagaauuugggu

SEQ ID NO: 58508 - RNA, 20 nt, Artificial Sequence
  LRRK2 RNA guide
gcauugagcauuuuagaauu

SEQ ID NO: 58509 - RNA, 20 nt, Artificial Sequence
  LRRK2 RNA guide
gcauuuuagaauuuggguuu

SEQ ID NO: 58510 - RNA, 20 nt, Artificial Sequence
  LRRK2 RNA guide
gcccagagcauugagcauuu

SEQ ID NO: 58511 - RNA, 20 nt, Artificial Sequence
  LRRK2 RNA guide
gccuuaacuaaacccaaauu

SEQ ID NO: 58512 - RNA, 20 nt, Artificial Sequence
  LRRK2 RNA guide
guuucugccuuaacuaaacc

SEQ ID NO: 58513 - RNA, 20 nt, Artificial Sequence
  LRRK2 RNA guide
ucugccuuaacuaaacccaa

SEQ ID NO: 58514 - RNA, 20 nt, Artificial Sequence
  LRRK2 RNA guide
ugagcauuuuagaauuuggg

SEQ ID NO: 58515 - RNA, 20 nt, Artificial Sequence
  LRRK2 RNA guide
ugccuuaacuaaacccaaau

SEQ ID NO: 58516 - RNA, 20 nt, Artificial Sequence
  LRRK2 RNA guide
uucugccuuaacuaaaccca

SEQ ID NO: 58517 - RNA, 20 nt, Artificial Sequence
  LRRK2 RNA guide
uugagcauuuuagaauuugg

SEQ ID NO: 58518 - RNA, 20 nt, Artificial Sequence
  LRRK2 RNA guide
uuucugccuuaacuaaaccc

SEQ ID NO: 58519 - RNA, 21 nt, Artificial Sequence
  LRRK2 RNA guide
aacccaaauucuaaaaugcuc

SEQ ID NO: 58520 - RNA, 21 nt, Artificial Sequence
  LRRK2 RNA guide
aauuuggguuuaguuaaggca

SEQ ID NO: 58521 - RNA, 21 nt, Artificial Sequence
  LRRK2 RNA guide
acccaaauucuaaaaugcuca

SEQ ID NO: 58522 - RNA, 21 nt, Artificial Sequence
  LRRK2 RNA guide
agaauuuggguuuaguuaagg

SEQ ID NO: 58523 - RNA, 21 nt, Artificial Sequence
  LRRK2 RNA guide
agagcauugagcauuuuagaa

SEQ ID NO: 58524 - RNA, 21 nt, Artificial Sequence
  LRRK2 RNA guide
aguuucugccuuaacuaaacc

SEQ ID NO: 58525 - RNA, 21 nt, Artificial Sequence
  LRRK2 RNA guide
auucuaaaaugcucaaugcuc

SEQ ID NO: 58526 - RNA, 21 nt, Artificial Sequence
  LRRK2 RNA guide
cagagcauugagcauuuuaga

SEQ ID NO: 58527 - RNA, 21 nt, Artificial Sequence
  LRRK2 RNA guide
ccagagcauugagcauuuuag

SEQ ID NO: 58528 - RNA, 21 nt, Artificial Sequence
  LRRK2 RNA guide
cccaaauucuaaaaugcucaa

SEQ ID NO: 58529 - RNA, 21 nt, Artificial Sequence
  LRRK2 RNA guide
cccagagcauugagcauuuua

SEQ ID NO: 58530 - RNA, 21 nt, Artificial Sequence
  LRRK2 RNA guide
ccuuaacuaaacccaaauucu

SEQ ID NO: 58531 - RNA, 21 nt, Artificial Sequence
  LRRK2 RNA guide
cgcccagagcauugagcauuu

SEQ ID NO: 58532 - RNA, 21 nt, Artificial Sequence
  LRRK2 RNA guide
cugccuuaacuaaacccaaau

SEQ ID NO: 58533 - RNA, 21 nt, Artificial Sequence
  LRRK2 RNA guide
gaauuuggguuuaguuaaggc

SEQ ID NO: 58534 - RNA, 21 nt, Artificial Sequence
  LRRK2 RNA guide
gagcauugagcauuuuagaau

SEQ ID NO: 58535 - RNA, 21 nt, Artificial Sequence
  LRRK2 RNA guide
gagcauuuuagaauuuggguu

SEQ ID NO: 58536 - RNA, 21 nt, Artificial Sequence
  LRRK2 RNA guide
gcccagagcauugagcauuuu

SEQ ID NO: 58537 - RNA, 21 nt, Artificial Sequence
  LRRK2 RNA guide
gccuuaacuaaacccaaauuc

SEQ ID NO: 58538 - RNA, 21 nt, Artificial Sequence
  LRRK2 RNA guide
guuucugccuuaacuaaaccc

SEQ ID NO: 58539 - RNA, 21 nt, Artificial Sequence
  LRRK2 RNA guide
ucugccuuaacuaaacccaaa

SEQ ID NO: 58540 - RNA, 21 nt, Artificial Sequence
  LRRK2 RNA guide
ugagcauuuuagaauuugggu

SEQ ID NO: 58541 - RNA, 21 nt, Artificial Sequence
  LRRK2 RNA guide
ugccuuaacuaaacccaaauu

SEQ ID NO: 58542 - RNA, 21 nt, Artificial Sequence
  LRRK2 RNA guide
uucugccuuaacuaaacccaa

SEQ ID NO: 58543 - RNA, 21 nt, Artificial Sequence
  LRRK2 RNA guide
uugagcauuuuagaauuuggg

SEQ ID NO: 58544 - RNA, 21 nt, Artificial Sequence
  LRRK2 RNA guide
uuucugccuuaacuaaaccca

SEQ ID NO: 58545 - RNA, 22 nt, Artificial Sequence
  LRRK2 RNA guide
aaacccaaauucuaaaaugcuc

SEQ ID NO: 58546 - RNA, 22 nt, Artificial Sequence
  LRRK2 RNA guide
aacccaaauucuaaaaugcuca

SEQ ID NO: 58547 - RNA, 22 nt, Artificial Sequence
  LRRK2 RNA guide
aaguuucugccuuaacuaaacc

SEQ ID NO: 58548 - RNA, 22 nt, Artificial Sequence
  LRRK2 RNA guide
aauucuaaaaugcucaaugcuc

SEQ ID NO: 58549 - RNA, 22 nt, Artificial Sequence
  LRRK2 RNA guide
aauuuggguuuaguuaaggcag

SEQ ID NO: 58550 - RNA, 22 nt, Artificial Sequence
  LRRK2 RNA guide
acccaaauucuaaaaugcucaa

SEQ ID NO: 58551 - RNA, 22 nt, Artificial Sequence
  LRRK2 RNA guide
agaauuuggguuuaguuaaggc

SEQ ID NO: 58552 - RNA, 22 nt, Artificial Sequence
  LRRK2 RNA guide
agagcauugagcauuuuagaau

SEQ ID NO: 58553 - RNA, 22 nt, Artificial Sequence
  LRRK2 RNA guide
aguuucugccuuaacuaaaccc

SEQ ID NO: 58554 - RNA, 22 nt, Artificial Sequence
  LRRK2 RNA guide
auucuaaaaugcucaaugcucu

SEQ ID NO: 58555 - RNA, 22 nt, Artificial Sequence
  LRRK2 RNA guide
auugagcauuuuagaauuuggg

SEQ ID NO: 58556 - RNA, 22 nt, Artificial Sequence
  LRRK2 RNA guide
caaauucuaaaaugcucaaugc

SEQ ID NO: 58557 - RNA, 22 nt, Artificial Sequence
  LRRK2 RNA guide
cagagcauugagcauuuuagaa

SEQ ID NO: 58558 - RNA, 22 nt, Artificial Sequence
  LRRK2 RNA guide
cauugagcauuuuagaauuugg

SEQ ID NO: 58559 - RNA, 22 nt, Artificial Sequence
  LRRK2 RNA guide
ccaaauucuaaaaugcucaaug

SEQ ID NO: 58560 - RNA, 22 nt, Artificial Sequence
  LRRK2 RNA guide
ccagagcauugagcauuuuaga

SEQ ID NO: 58561 - RNA, 22 nt, Artificial Sequence
  LRRK2 RNA guide
cccaaauucuaaaaugcucaau

SEQ ID NO: 58562 - RNA, 22 nt, Artificial Sequence
  LRRK2 RNA guide
cccagagcauugagcauuuuag

SEQ ID NO: 58563 - RNA, 22 nt, Artificial Sequence
  LRRK2 RNA guide
ccuuaacuaaacccaaauucua

SEQ ID NO: 58564 - RNA, 22 nt, Artificial Sequence
  LRRK2 RNA guide
cgcccagagcauugagcauuuu

SEQ ID NO: 58565 - RNA, 22 nt, Artificial Sequence
  LRRK2 RNA guide
cuaaacccaaauucuaaaaugc

SEQ ID NO: 58566 - RNA, 22 nt, Artificial Sequence
  LRRK2 RNA guide
cugccuuaacuaaacccaaauu

SEQ ID NO: 58567 - RNA, 22 nt, Artificial Sequence
  LRRK2 RNA guide
gaauuuggguuuaguuaaggca

SEQ ID NO: 58568 - RNA, 22 nt, Artificial Sequence
  LRRK2 RNA guide
gagcauugagcauuuuagaauu

SEQ ID NO: 58569 - RNA, 22 nt, Artificial Sequence
  LRRK2 RNA guide
gagcauuuuagaauuuggguuu

SEQ ID NO: 58570 - RNA, 22 nt, Artificial Sequence
  LRRK2 RNA guide
gcauugagcauuuuagaauuug

SEQ ID NO: 58571 - RNA, 22 nt, Artificial Sequence
  LRRK2 RNA guide
gcauuuuagaauuuggguuuag

SEQ ID NO: 58572 - RNA, 22 nt, Artificial Sequence
  LRRK2 RNA guide
gcccagagcauugagcauuuua

SEQ ID NO: 58573 - RNA, 22 nt, Artificial Sequence
  LRRK2 RNA guide
gccuuaacuaaacccaaauucu

SEQ ID NO: 58574 - RNA, 22 nt, Artificial Sequence
  LRRK2 RNA guide
gcgcccagagcauugagcauuu

SEQ ID NO: 58575 - RNA, 22 nt, Artificial Sequence
  LRRK2 RNA guide
guuucugccuuaacuaaaccca

SEQ ID NO: 58576 - RNA, 22 nt, Artificial Sequence
  LRRK2 RNA guide
uagaauuuggguuuaguuaagg

SEQ ID NO: 58577 - RNA, 22 nt, Artificial Sequence
  LRRK2 RNA guide
ucugccuuaacuaaacccaaau

SEQ ID NO: 58578 - RNA, 22 nt, Artificial Sequence
  LRRK2 RNA guide
ugagcauuuuagaauuuggguu

SEQ ID NO: 58579 - RNA, 22 nt, Artificial Sequence
  LRRK2 RNA guide
ugccuuaacuaaacccaaauuc

SEQ ID NO: 58580 - RNA, 22 nt, Artificial Sequence
  LRRK2 RNA guide
uucugccuuaacuaaacccaaa

SEQ ID NO: 58581 - RNA, 22 nt, Artificial Sequence
  LRRK2 RNA guide
uugagcauuuuagaauuugggu

SEQ ID NO: 58582 - RNA, 22 nt, Artificial Sequence
  LRRK2 RNA guide
uuucugccuuaacuaaacccaa

SEQ ID NO: 58583 - RNA, 20 nt, Artificial Sequence
  LRRK2 RNA guide
aaacccaaacucuaaaaugc

SEQ ID NO: 58584 - RNA, 20 nt, Artificial Sequence
  LRRK2 RNA guide
aaacucuaaaaugcucaaug

SEQ ID NO: 58585 - RNA, 20 nt, Artificial Sequence
  LRRK2 RNA guide
aacccaaacucuaaaaugcu

SEQ ID NO: 58586 - RNA, 20 nt, Artificial Sequence
  LRRK2 RNA guide
aacuaaacccaaacucuaaa

SEQ ID NO: 58587 - RNA, 20 nt, Artificial Sequence
  LRRK2 RNA guide
aacucuaaaaugcucaaugc

SEQ ID NO: 58588 - RNA, 20 nt, Artificial Sequence
  LRRK2 RNA guide
acccaaacucuaaaaugcuc

SEQ ID NO: 58589 - RNA, 20 nt, Artificial Sequence
  LRRK2 RNA guide
acuaaacccaaacucuaaaa

SEQ ID NO: 58590 - RNA, 20 nt, Artificial Sequence
  LRRK2 RNA guide
acucuaaaaugcucaaugcu

SEQ ID NO: 58591 - RNA, 20 nt, Artificial Sequence
  LRRK2 RNA guide
agaguuuggguuuaguuaag

SEQ ID NO: 58592 - RNA, 20 nt, Artificial Sequence
  LRRK2 RNA guide
agcauugagcauuuuagagu

SEQ ID NO: 58593 - RNA, 20 nt, Artificial Sequence
  LRRK2 RNA guide
agcauuuuagaguuuggguu

SEQ ID NO: 58594 - RNA, 20 nt, Artificial Sequence
  LRRK2 RNA guide
aguuuggguuuaguuaaggc

SEQ ID NO: 58595 - RNA, 20 nt, Artificial Sequence
  LRRK2 RNA guide
auugagcauuuuagaguuug

SEQ ID NO: 58596 - RNA, 20 nt, Artificial Sequence
  LRRK2 RNA guide
auuuuagaguuuggguuuag

SEQ ID NO: 58597 - RNA, 20 nt, Artificial Sequence
  LRRK2 RNA guide
caaacucuaaaaugcucaau

SEQ ID NO: 58598 - RNA, 20 nt, Artificial Sequence
  LRRK2 RNA guide
cauugagcauuuuagaguuu

SEQ ID NO: 58599 - RNA, 20 nt, Artificial Sequence
  LRRK2 RNA guide
cauuuuagaguuuggguuua

SEQ ID NO: 58600 - RNA, 20 nt, Artificial Sequence
  LRRK2 RNA guide
ccaaacucuaaaaugcucaa

SEQ ID NO: 58601 - RNA, 20 nt, Artificial Sequence
  LRRK2 RNA guide
cccaaacucuaaaaugcuca

SEQ ID NO: 58602 - RNA, 20 nt, Artificial Sequence
  LRRK2 RNA guide
ccuuaacuaaacccaaacuc

SEQ ID NO: 58603 - RNA, 20 nt, Artificial Sequence
  LRRK2 RNA guide
cuaaacccaaacucuaaaau

SEQ ID NO: 58604 - RNA, 20 nt, Artificial Sequence
  LRRK2 RNA guide
cuuaacuaaacccaaacucu

SEQ ID NO: 58605 - RNA, 20 nt, Artificial Sequence
  LRRK2 RNA guide
gagcauugagcauuuuagag

SEQ ID NO: 58606 - RNA, 20 nt, Artificial Sequence
  LRRK2 RNA guide
gagcauuuuagaguuugggu

SEQ ID NO: 58607 - RNA, 20 nt, Artificial Sequence
  LRRK2 RNA guide
gaguuuggguuuaguuaagg

SEQ ID NO: 58608 - RNA, 20 nt, Artificial Sequence
  LRRK2 RNA guide
gcauugagcauuuuagaguu

SEQ ID NO: 58609 - RNA, 20 nt, Artificial Sequence
  LRRK2 RNA guide
gcauuuuagaguuuggguuu

SEQ ID NO: 58610 - RNA, 20 nt, Artificial Sequence
  LRRK2 RNA guide
gccuuaacuaaacccaaacu

SEQ ID NO: 58611 - RNA, 20 nt, Artificial Sequence
  LRRK2 RNA guide
uaaacccaaacucuaaaaug

SEQ ID NO: 58612 - RNA, 20 nt, Artificial Sequence
  LRRK2 RNA guide
uaacuaaacccaaacucuaa

SEQ ID NO: 58613 - RNA, 20 nt, Artificial Sequence
  LRRK2 RNA guide
uagaguuuggguuuaguuaa

SEQ ID NO: 58614 - RNA, 20 nt, Artificial Sequence
  LRRK2 RNA guide
ugagcauuuuagaguuuggg

SEQ ID NO: 58615 - RNA, 20 nt, Artificial Sequence
  LRRK2 RNA guide
ugccuuaacuaaacccaaac

SEQ ID NO: 58616 - RNA, 20 nt, Artificial Sequence
  LRRK2 RNA guide
uuaacuaaacccaaacucua

SEQ ID NO: 58617 - RNA, 20 nt, Artificial Sequence
  LRRK2 RNA guide
uuagaguuuggguuuaguua

SEQ ID NO: 58618 - RNA, 20 nt, Artificial Sequence
  LRRK2 RNA guide
uugagcauuuuagaguuugg

SEQ ID NO: 58619 - RNA, 20 nt, Artificial Sequence
  LRRK2 RNA guide
uuuagaguuuggguuuaguu

SEQ ID NO: 58620 - RNA, 20 nt, Artificial Sequence
  LRRK2 RNA guide
uuuuagaguuuggguuuagu

SEQ ID NO: 58621 - RNA, 21 nt, Artificial Sequence
  LRRK2 RNA guide
aaacccaaacucuaaaaugcu

SEQ ID NO: 58622 - RNA, 21 nt, Artificial Sequence
  LRRK2 RNA guide
aaacucuaaaaugcucaaugc

SEQ ID NO: 58623 - RNA, 21 nt, Artificial Sequence
  LRRK2 RNA guide
aacccaaacucuaaaaugcuc

SEQ ID NO: 58624 - RNA, 21 nt, Artificial Sequence
  LRRK2 RNA guide
aacucuaaaaugcucaaugcu

SEQ ID NO: 58625 - RNA, 21 nt, Artificial Sequence
  LRRK2 RNA guide
acccaaacucuaaaaugcuca

SEQ ID NO: 58626 - RNA, 21 nt, Artificial Sequence
  LRRK2 RNA guide
acucuaaaaugcucaaugcuc

SEQ ID NO: 58627 - RNA, 21 nt, Artificial Sequence
  LRRK2 RNA guide
agagcauugagcauuuuagag

SEQ ID NO: 58628 - RNA, 21 nt, Artificial Sequence
  LRRK2 RNA guide
agaguuuggguuuaguuaagg

SEQ ID NO: 58629 - RNA, 21 nt, Artificial Sequence
  LRRK2 RNA guide
agcauugagcauuuuagaguu

SEQ ID NO: 58630 - RNA, 21 nt, Artificial Sequence
  LRRK2 RNA guide
agcauuuuagaguuuggguuu

SEQ ID NO: 58631 - RNA, 21 nt, Artificial Sequence
  LRRK2 RNA guide
aguuuggguuuaguuaaggca

SEQ ID NO: 58632 - RNA, 21 nt, Artificial Sequence
  LRRK2 RNA guide
auugagcauuuuagaguuugg

SEQ ID NO: 58633 - RNA, 21 nt, Artificial Sequence
  LRRK2 RNA guide
caaacucuaaaaugcucaaug

SEQ ID NO: 58634 - RNA, 21 nt, Artificial Sequence
  LRRK2 RNA guide
cauugagcauuuuagaguuug

SEQ ID NO: 58635 - RNA, 21 nt, Artificial Sequence
  LRRK2 RNA guide
cauuuuagaguuuggguuuag

SEQ ID NO: 58636 - RNA, 21 nt, Artificial Sequence
  LRRK2 RNA guide
ccaaacucuaaaaugcucaau

SEQ ID NO: 58637 - RNA, 21 nt, Artificial Sequence
  LRRK2 RNA guide
cccaaacucuaaaaugcucaa

SEQ ID NO: 58638 - RNA, 21 nt, Artificial Sequence
  LRRK2 RNA guide
ccuuaacuaaacccaaacucu

SEQ ID NO: 58639 - RNA, 21 nt, Artificial Sequence
  LRRK2 RNA guide
cuaaacccaaacucuaaaaug

SEQ ID NO: 58640 - RNA, 21 nt, Artificial Sequence
  LRRK2 RNA guide
cugccuuaacuaaacccaaac

SEQ ID NO: 58641 - RNA, 21 nt, Artificial Sequence
  LRRK2 RNA guide
cuuaacuaaacccaaacucua

SEQ ID NO: 58642 - RNA, 21 nt, Artificial Sequence
  LRRK2 RNA guide
gagcauugagcauuuuagagu

SEQ ID NO: 58643 - RNA, 21 nt, Artificial Sequence
  LRRK2 RNA guide
gagcauuuuagaguuuggguu

SEQ ID NO: 58644 - RNA, 21 nt, Artificial Sequence
  LRRK2 RNA guide
gaguuuggguuuaguuaaggc

SEQ ID NO: 58645 - RNA, 21 nt, Artificial Sequence
  LRRK2 RNA guide
gcauugagcauuuuagaguuu

SEQ ID NO: 58646 - RNA, 21 nt, Artificial Sequence
  LRRK2 RNA guide
gcauuuuagaguuuggguuua

SEQ ID NO: 58647 - RNA, 21 nt, Artificial Sequence
  LRRK2 RNA guide
gccuuaacuaaacccaaacuc

SEQ ID NO: 58648 - RNA, 21 nt, Artificial Sequence
  LRRK2 RNA guide
uaaacccaaacucuaaaaugc

SEQ ID NO: 58649 - RNA, 21 nt, Artificial Sequence
  LRRK2 RNA guide
uagaguuuggguuuaguuaag

SEQ ID NO: 58650 - RNA, 21 nt, Artificial Sequence
  LRRK2 RNA guide
ugagcauuuuagaguuugggu

SEQ ID NO: 58651 - RNA, 21 nt, Artificial Sequence
  LRRK2 RNA guide
ugccuuaacuaaacccaaacu

SEQ ID NO: 58652 - RNA, 21 nt, Artificial Sequence
  LRRK2 RNA guide
uugagcauuuuagaguuuggg

SEQ ID NO: 58653 - RNA, 22 nt, Artificial Sequence
  LRRK2 RNA guide
aaacccaaacucuaaaaugcuc

SEQ ID NO: 58654 - RNA, 22 nt, Artificial Sequence
  LRRK2 RNA guide
aaacucuaaaaugcucaaugcu

SEQ ID NO: 58655 - RNA, 22 nt, Artificial Sequence
  LRRK2 RNA guide
aacccaaacucuaaaaugcuca

SEQ ID NO: 58656 - RNA, 22 nt, Artificial Sequence
  LRRK2 RNA guide
aacucuaaaaugcucaaugcuc

SEQ ID NO: 58657 - RNA, 22 nt, Artificial Sequence
  LRRK2 RNA guide
acccaaacucuaaaaugcucaa

SEQ ID NO: 58658 - RNA, 22 nt, Artificial Sequence
  LRRK2 RNA guide
acuaaacccaaacucuaaaaug

SEQ ID NO: 58659 - RNA, 22 nt, Artificial Sequence
  LRRK2 RNA guide
acucuaaaaugcucaaugcucu

SEQ ID NO: 58660 - RNA, 22 nt, Artificial Sequence
  LRRK2 RNA guide
agagcauugagcauuuuagagu

SEQ ID NO: 58661 - RNA, 22 nt, Artificial Sequence
  LRRK2 RNA guide
agaguuuggguuuaguuaaggc

SEQ ID NO: 58662 - RNA, 22 nt, Artificial Sequence
  LRRK2 RNA guide
agcauugagcauuuuagaguuu

SEQ ID NO: 58663 - RNA, 22 nt, Artificial Sequence
  LRRK2 RNA guide
agcauuuuagaguuuggguuua

SEQ ID NO: 58664 - RNA, 22 nt, Artificial Sequence
  LRRK2 RNA guide
aguuuggguuuaguuaaggcag

SEQ ID NO: 58665 - RNA, 22 nt, Artificial Sequence
  LRRK2 RNA guide
auugagcauuuuagaguuuggg

SEQ ID NO: 58666 - RNA, 22 nt, Artificial Sequence
  LRRK2 RNA guide
caaacucuaaaaugcucaaugc

SEQ ID NO: 58667 - RNA, 22 nt, Artificial Sequence
  LRRK2 RNA guide
cagagcauugagcauuuuagag

SEQ ID NO: 58668 - RNA, 22 nt, Artificial Sequence
  LRRK2 RNA guide
cauugagcauuuuagaguuugg

SEQ ID NO: 58669 - RNA, 22 nt, Artificial Sequence
  LRRK2 RNA guide
cauuuuagaguuuggguuuagu

SEQ ID NO: 58670 - RNA, 22 nt, Artificial Sequence
  LRRK2 RNA guide
ccaaacucuaaaaugcucaaug

SEQ ID NO: 58671 - RNA, 22 nt, Artificial Sequence
  LRRK2 RNA guide
cccaaacucuaaaaugcucaau

SEQ ID NO: 58672 - RNA, 22 nt, Artificial Sequence
  LRRK2 RNA guide
ccuuaacuaaacccaaacucua

SEQ ID NO: 58673 - RNA, 22 nt, Artificial Sequence
  LRRK2 RNA guide
cuaaacccaaacucuaaaaugc

SEQ ID NO: 58674 - RNA, 22 nt, Artificial Sequence
  LRRK2 RNA guide
cugccuuaacuaaacccaaacu

SEQ ID NO: 58675 - RNA, 22 nt, Artificial Sequence
  LRRK2 RNA guide
cuuaacuaaacccaaacucuaa

SEQ ID NO: 58676 - RNA, 22 nt, Artificial Sequence
  LRRK2 RNA guide
gagcauugagcauuuuagaguu

SEQ ID NO: 58677 - RNA, 22 nt, Artificial Sequence
  LRRK2 RNA guide
gagcauuuuagaguuuggguuu

SEQ ID NO: 58678 - RNA, 22 nt, Artificial Sequence
  LRRK2 RNA guide
gaguuuggguuuaguuaaggca

SEQ ID NO: 58679 - RNA, 22 nt, Artificial Sequence
  LRRK2 RNA guide
gcauugagcauuuuagaguuug

SEQ ID NO: 58680 - RNA, 22 nt, Artificial Sequence
  LRRK2 RNA guide
gcauuuuagaguuuggguuuag

SEQ ID NO: 58681 - RNA, 22 nt, Artificial Sequence
  LRRK2 RNA guide
gccuuaacuaaacccaaacucu

SEQ ID NO: 58682 - RNA, 22 nt, Artificial Sequence
  LRRK2 RNA guide
uaaacccaaacucuaaaaugcu

SEQ ID NO: 58683 - RNA, 22 nt, Artificial Sequence
  LRRK2 RNA guide
uagaguuuggguuuaguuaagg

SEQ ID NO: 58684 - RNA, 22 nt, Artificial Sequence
  LRRK2 RNA guide
ucugccuuaacuaaacccaaac

SEQ ID NO: 58685 - RNA, 22 nt, Artificial Sequence
  LRRK2 RNA guide
ugagcauuuuagaguuuggguu

SEQ ID NO: 58686 - RNA, 22 nt, Artificial Sequence
  LRRK2 RNA guide
ugccuuaacuaaacccaaacuc

SEQ ID NO: 58687 - RNA, 22 nt, Artificial Sequence
  LRRK2 RNA guide
uuagaguuuggguuuaguuaag

SEQ ID NO: 58688 - RNA, 22 nt, Artificial Sequence
  LRRK2 RNA guide
uugagcauuuuagaguuugggu

SEQ ID NO: 58689 - RNA, 20 nt, Artificial Sequence
  LRRK2 RNA guide
aaacaucuguauguggcuug

SEQ ID NO: 58690 - RNA, 20 nt, Artificial Sequence
  LRRK2 RNA guide
aacaucuguauguggcuuga

SEQ ID NO: 58691 - RNA, 20 nt, Artificial Sequence
  LRRK2 RNA guide
aagccacauacagauguuug

SEQ ID NO: 58692 - RNA, 20 nt, Artificial Sequence
  LRRK2 RNA guide
acaaacaucuguauguggcu

SEQ ID NO: 58693 - RNA, 20 nt, Artificial Sequence
  LRRK2 RNA guide
acaucuguauguggcuugaa

SEQ ID NO: 58694 - RNA, 20 nt, Artificial Sequence
  LRRK2 RNA guide
acuuccaugacuugguuuuc

SEQ ID NO: 58695 - RNA, 20 nt, Artificial Sequence
  LRRK2 RNA guide
acuugguuuucaagccacau

SEQ ID NO: 58696 - RNA, 20 nt, Artificial Sequence
  LRRK2 RNA guide
agccacauacagauguuugu

SEQ ID NO: 58697 - RNA, 20 nt, Artificial Sequence
  LRRK2 RNA guide
agugauacaaacaucuguau

SEQ ID NO: 58698 - RNA, 20 nt, Artificial Sequence
  LRRK2 RNA guide
auacaaacaucuguaugugg

SEQ ID NO: 58699 - RNA, 20 nt, Artificial Sequence
  LRRK2 RNA guide
aucuguauguggcuugaaaa

SEQ ID NO: 58700 - RNA, 20 nt, Artificial Sequence
  LRRK2 RNA guide
augacuugguuuucaagcca

SEQ ID NO: 58701 - RNA, 20 nt, Artificial Sequence
  LRRK2 RNA guide
auguggcuugaaaaccaagu

SEQ ID NO: 58702 - RNA, 20 nt, Artificial Sequence
  LRRK2 RNA guide
caaacaucuguauguggcuu

SEQ ID NO: 58703 - RNA, 20 nt, Artificial Sequence
  LRRK2 RNA guide
caagccacauacagauguuu

SEQ ID NO: 58704 - RNA, 20 nt, Artificial Sequence
  LRRK2 RNA guide
cacuuccaugacuugguuuu

SEQ ID NO: 58705 - RNA, 20 nt, Artificial Sequence
  LRRK2 RNA guide
caucuguauguggcuugaaa

SEQ ID NO: 58706 - RNA, 20 nt, Artificial Sequence
  LRRK2 RNA guide
caugacuugguuuucaagcc

SEQ ID NO: 58707 - RNA, 20 nt, Artificial Sequence
  LRRK2 RNA guide
ccaugacuugguuuucaagc

SEQ ID NO: 58708 - RNA, 20 nt, Artificial Sequence
  LRRK2 RNA guide
cuguauguggcuugaaaacc

SEQ ID NO: 58709 - RNA, 20 nt, Artificial Sequence
  LRRK2 RNA guide
cuuccaugacuugguuuuca

SEQ ID NO: 58710 - RNA, 20 nt, Artificial Sequence
  LRRK2 RNA guide
cuugguuuucaagccacaua

SEQ ID NO: 58711 - RNA, 20 nt, Artificial Sequence
  LRRK2 RNA guide
gacuugguuuucaagccaca

SEQ ID NO: 58712 - RNA, 20 nt, Artificial Sequence
  LRRK2 RNA guide
gauacaaacaucuguaugug

SEQ ID NO: 58713 - RNA, 20 nt, Artificial Sequence
  LRRK2 RNA guide
gcuugaaaaccaagucaugg

SEQ ID NO: 58714 - RNA, 20 nt, Artificial Sequence
  LRRK2 RNA guide
ggcuugaaaaccaagucaug

SEQ ID NO: 58715 - RNA, 20 nt, Artificial Sequence
  LRRK2 RNA guide
gguuuucaagccacauacag

SEQ ID NO: 58716 - RNA, 20 nt, Artificial Sequence
  LRRK2 RNA guide
guauguggcuugaaaaccaa

SEQ ID NO: 58717 - RNA, 20 nt, Artificial Sequence
  LRRK2 RNA guide
gugauacaaacaucuguaug

SEQ ID NO: 58718 - RNA, 20 nt, Artificial Sequence
  LRRK2 RNA guide
guggcuugaaaaccaaguca

SEQ ID NO: 58719 - RNA, 20 nt, Artificial Sequence
  LRRK2 RNA guide
guuuucaagccacauacaga

SEQ ID NO: 58720 - RNA, 20 nt, Artificial Sequence
  LRRK2 RNA guide
uacaaacaucuguauguggc

SEQ ID NO: 58721 - RNA, 20 nt, Artificial Sequence
  LRRK2 RNA guide
uauguggcuugaaaaccaag

SEQ ID NO: 58722 - RNA, 20 nt, Artificial Sequence
  LRRK2 RNA guide
ucaagccacauacagauguu

SEQ ID NO: 58723 - RNA, 20 nt, Artificial Sequence
  LRRK2 RNA guide
ucacuuccaugacuugguuu

SEQ ID NO: 58724 - RNA, 20 nt, Artificial Sequence
  LRRK2 RNA guide
uccaugacuugguuuucaag

SEQ ID NO: 58725 - RNA, 20 nt, Artificial Sequence
  LRRK2 RNA guide
ucuguauguggcuugaaaac

SEQ ID NO: 58726 - RNA, 20 nt, Artificial Sequence
  LRRK2 RNA guide
ugacuugguuuucaagccac

SEQ ID NO: 58727 - RNA, 20 nt, Artificial Sequence
  LRRK2 RNA guide
ugauacaaacaucuguaugu

SEQ ID NO: 58728 - RNA, 20 nt, Artificial Sequence
  LRRK2 RNA guide
ugguuuucaagccacauaca

SEQ ID NO: 58729 - RNA, 20 nt, Artificial Sequence
  LRRK2 RNA guide
uguauguggcuugaaaacca

SEQ ID NO: 58730 - RNA, 20 nt, Artificial Sequence
  LRRK2 RNA guide
uguggcuugaaaaccaaguc

SEQ ID NO: 58731 - RNA, 20 nt, Artificial Sequence
  LRRK2 RNA guide
uucaagccacauacagaugu

SEQ ID NO: 58732 - RNA, 20 nt, Artificial Sequence
  LRRK2 RNA guide
uuccaugacuugguuuucaa

SEQ ID NO: 58733 - RNA, 20 nt, Artificial Sequence
  LRRK2 RNA guide
uugguuuucaagccacauac

SEQ ID NO: 58734 - RNA, 20 nt, Artificial Sequence
  LRRK2 RNA guide
uuucaagccacauacagaug

SEQ ID NO: 58735 - RNA, 20 nt, Artificial Sequence
  LRRK2 RNA guide
uuuucaagccacauacagau

SEQ ID NO: 58736 - RNA, 21 nt, Artificial Sequence
  LRRK2 RNA guide
aaacaucuguauguggcuuga

SEQ ID NO: 58737 - RNA, 21 nt, Artificial Sequence
  LRRK2 RNA guide
aacaucuguauguggcuugaa

SEQ ID NO: 58738 - RNA, 21 nt, Artificial Sequence
  LRRK2 RNA guide
aagccacauacagauguuugu

SEQ ID NO: 58739 - RNA, 21 nt, Artificial Sequence
  LRRK2 RNA guide
acaaacaucuguauguggcuu

SEQ ID NO: 58740 - RNA, 21 nt, Artificial Sequence
  LRRK2 RNA guide
acaucuguauguggcuugaaa

SEQ ID NO: 58741 - RNA, 21 nt, Artificial Sequence
  LRRK2 RNA guide
acuuccaugacuugguuuuca

SEQ ID NO: 58742 - RNA, 21 nt, Artificial Sequence
  LRRK2 RNA guide
acuugguuuucaagccacaua

SEQ ID NO: 58743 - RNA, 21 nt, Artificial Sequence
  LRRK2 RNA guide
agccacauacagauguuugua

SEQ ID NO: 58744 - RNA, 21 nt, Artificial Sequence
  LRRK2 RNA guide
agugauacaaacaucuguaug

SEQ ID NO: 58745 - RNA, 21 nt, Artificial Sequence
  LRRK2 RNA guide
auacaaacaucuguauguggc

SEQ ID NO: 58746 - RNA, 21 nt, Artificial Sequence
  LRRK2 RNA guide
aucuguauguggcuugaaaac

SEQ ID NO: 58747 - RNA, 21 nt, Artificial Sequence
  LRRK2 RNA guide
augacuugguuuucaagccac

SEQ ID NO: 58748 - RNA, 21 nt, Artificial Sequence
  LRRK2 RNA guide
auguggcuugaaaaccaaguc

SEQ ID NO: 58749 - RNA, 21 nt, Artificial Sequence
  LRRK2 RNA guide
caaacaucuguauguggcuug

SEQ ID NO: 58750 - RNA, 21 nt, Artificial Sequence
  LRRK2 RNA guide
caagccacauacagauguuug

SEQ ID NO: 58751 - RNA, 21 nt, Artificial Sequence
  LRRK2 RNA guide
cacuuccaugacuugguuuuc

SEQ ID NO: 58752 - RNA, 21 nt, Artificial Sequence
  LRRK2 RNA guide
caucuguauguggcuugaaaa

SEQ ID NO: 58753 - RNA, 21 nt, Artificial Sequence
  LRRK2 RNA guide
caugacuugguuuucaagcca

SEQ ID NO: 58754 - RNA, 21 nt, Artificial Sequence
  LRRK2 RNA guide
ccaugacuugguuuucaagcc

SEQ ID NO: 58755 - RNA, 21 nt, Artificial Sequence
  LRRK2 RNA guide
cuguauguggcuugaaaacca

SEQ ID NO: 58756 - RNA, 21 nt, Artificial Sequence
  LRRK2 RNA guide
cuuccaugacuugguuuucaa

SEQ ID NO: 58757 - RNA, 21 nt, Artificial Sequence
  LRRK2 RNA guide
cuugguuuucaagccacauac

SEQ ID NO: 58758 - RNA, 21 nt, Artificial Sequence
  LRRK2 RNA guide
gacuugguuuucaagccacau

SEQ ID NO: 58759 - RNA, 21 nt, Artificial Sequence
  LRRK2 RNA guide
gagugauacaaacaucuguau

SEQ ID NO: 58760 - RNA, 21 nt, Artificial Sequence
  LRRK2 RNA guide
gauacaaacaucuguaugugg

SEQ ID NO: 58761 - RNA, 21 nt, Artificial Sequence
  LRRK2 RNA guide
gcuugaaaaccaagucaugga

SEQ ID NO: 58762 - RNA, 21 nt, Artificial Sequence
  LRRK2 RNA guide
ggcuugaaaaccaagucaugg

SEQ ID NO: 58763 - RNA, 21 nt, Artificial Sequence
  LRRK2 RNA guide
gguuuucaagccacauacaga

SEQ ID NO: 58764 - RNA, 21 nt, Artificial Sequence
  LRRK2 RNA guide
guauguggcuugaaaaccaag

SEQ ID NO: 58765 - RNA, 21 nt, Artificial Sequence
  LRRK2 RNA guide
gugauacaaacaucuguaugu

SEQ ID NO: 58766 - RNA, 21 nt, Artificial Sequence
  LRRK2 RNA guide
guggcuugaaaaccaagucau

SEQ ID NO: 58767 - RNA, 21 nt, Artificial Sequence
  LRRK2 RNA guide
guuuucaagccacauacagau

SEQ ID NO: 58768 - RNA, 21 nt, Artificial Sequence
  LRRK2 RNA guide
uacaaacaucuguauguggcu

SEQ ID NO: 58769 - RNA, 21 nt, Artificial Sequence
  LRRK2 RNA guide
uauguggcuugaaaaccaagu

SEQ ID NO: 58770 - RNA, 21 nt, Artificial Sequence
  LRRK2 RNA guide
ucaagccacauacagauguuu

SEQ ID NO: 58771 - RNA, 21 nt, Artificial Sequence
  LRRK2 RNA guide
ucacuuccaugacuugguuuu

SEQ ID NO: 58772 - RNA, 21 nt, Artificial Sequence
  LRRK2 RNA guide
uccaugacuugguuuucaagc

SEQ ID NO: 58773 - RNA, 21 nt, Artificial Sequence
  LRRK2 RNA guide
ucuguauguggcuugaaaacc

SEQ ID NO: 58774 - RNA, 21 nt, Artificial Sequence
  LRRK2 RNA guide
ugacuugguuuucaagccaca

SEQ ID NO: 58775 - RNA, 21 nt, Artificial Sequence
  LRRK2 RNA guide
ugauacaaacaucuguaugug

SEQ ID NO: 58776 - RNA, 21 nt, Artificial Sequence
  LRRK2 RNA guide
uggcuugaaaaccaagucaug

SEQ ID NO: 58777 - RNA, 21 nt, Artificial Sequence
  LRRK2 RNA guide
ugguuuucaagccacauacag

SEQ ID NO: 58778 - RNA, 21 nt, Artificial Sequence
  LRRK2 RNA guide
uguauguggcuugaaaaccaa

SEQ ID NO: 58779 - RNA, 21 nt, Artificial Sequence
  LRRK2 RNA guide
uguggcuugaaaaccaaguca

SEQ ID NO: 58780 - RNA, 21 nt, Artificial Sequence
  LRRK2 RNA guide
uucaagccacauacagauguu

SEQ ID NO: 58781 - RNA, 21 nt, Artificial Sequence
  LRRK2 RNA guide
uucacuuccaugacuugguuu

SEQ ID NO: 58782 - RNA, 21 nt, Artificial Sequence
  LRRK2 RNA guide
uuccaugacuugguuuucaag

SEQ ID NO: 58783 - RNA, 21 nt, Artificial Sequence
  LRRK2 RNA guide
uugguuuucaagccacauaca

SEQ ID NO: 58784 - RNA, 21 nt, Artificial Sequence
  LRRK2 RNA guide
uuucaagccacauacagaugu

SEQ ID NO: 58785 - RNA, 21 nt, Artificial Sequence
  LRRK2 RNA guide
uuuucaagccacauacagaug

SEQ ID NO: 58786 - RNA, 22 nt, Artificial Sequence
  LRRK2 RNA guide
aaacaucuguauguggcuugaa

SEQ ID NO: 58787 - RNA, 22 nt, Artificial Sequence
  LRRK2 RNA guide
aacaucuguauguggcuugaaa

SEQ ID NO: 58788 - RNA, 22 nt, Artificial Sequence
  LRRK2 RNA guide
aagccacauacagauguuugua

SEQ ID NO: 58789 - RNA, 22 nt, Artificial Sequence
  LRRK2 RNA guide
acaaacaucuguauguggcuug

SEQ ID NO: 58790 - RNA, 22 nt, Artificial Sequence
  LRRK2 RNA guide
acaucuguauguggcuugaaaa

SEQ ID NO: 58791 - RNA, 22 nt, Artificial Sequence
  LRRK2 RNA guide
acuuccaugacuugguuuucaa

SEQ ID NO: 58792 - RNA, 22 nt, Artificial Sequence
  LRRK2 RNA guide
acuugguuuucaagccacauac

SEQ ID NO: 58793 - RNA, 22 nt, Artificial Sequence
  LRRK2 RNA guide
agagugauacaaacaucuguau

SEQ ID NO: 58794 - RNA, 22 nt, Artificial Sequence
  LRRK2 RNA guide
agccacauacagauguuuguau

SEQ ID NO: 58795 - RNA, 22 nt, Artificial Sequence
  LRRK2 RNA guide
agugauacaaacaucuguaugu

SEQ ID NO: 58796 - RNA, 22 nt, Artificial Sequence
  LRRK2 RNA guide
auacaaacaucuguauguggcu

SEQ ID NO: 58797 - RNA, 22 nt, Artificial Sequence
  LRRK2 RNA guide
aucuguauguggcuugaaaacc

SEQ ID NO: 58798 - RNA, 22 nt, Artificial Sequence
  LRRK2 RNA guide
augacuugguuuucaagccaca

SEQ ID NO: 58799 - RNA, 22 nt, Artificial Sequence
  LRRK2 RNA guide
auguggcuugaaaaccaaguca

SEQ ID NO: 58800 - RNA, 22 nt, Artificial Sequence
  LRRK2 RNA guide
caaacaucuguauguggcuuga

SEQ ID NO: 58801 - RNA, 22 nt, Artificial Sequence
  LRRK2 RNA guide
caagccacauacagauguuugu

SEQ ID NO: 58802 - RNA, 22 nt, Artificial Sequence
  LRRK2 RNA guide
cacuuccaugacuugguuuuca

SEQ ID NO: 58803 - RNA, 22 nt, Artificial Sequence
  LRRK2 RNA guide
caucuguauguggcuugaaaac

SEQ ID NO: 58804 - RNA, 22 nt, Artificial Sequence
  LRRK2 RNA guide
caugacuugguuuucaagccac

SEQ ID NO: 58805 - RNA, 22 nt, Artificial Sequence
  LRRK2 RNA guide
ccaugacuugguuuucaagcca

SEQ ID NO: 58806 - RNA, 22 nt, Artificial Sequence
  LRRK2 RNA guide
cuguauguggcuugaaaaccaa

SEQ ID NO: 58807 - RNA, 22 nt, Artificial Sequence
  LRRK2 RNA guide
cuuccaugacuugguuuucaag

SEQ ID NO: 58808 - RNA, 22 nt, Artificial Sequence
  LRRK2 RNA guide
cuugguuuucaagccacauaca

SEQ ID NO: 58809 - RNA, 22 nt, Artificial Sequence
  LRRK2 RNA guide
gacuugguuuucaagccacaua

SEQ ID NO: 58810 - RNA, 22 nt, Artificial Sequence
  LRRK2 RNA guide
gagugauacaaacaucuguaug

SEQ ID NO: 58811 - RNA, 22 nt, Artificial Sequence
  LRRK2 RNA guide
gauacaaacaucuguauguggc

SEQ ID NO: 58812 - RNA, 22 nt, Artificial Sequence
  LRRK2 RNA guide
gcuugaaaaccaagucauggaa

SEQ ID NO: 58813 - RNA, 22 nt, Artificial Sequence
  LRRK2 RNA guide
ggcuugaaaaccaagucaugga

SEQ ID NO: 58814 - RNA, 22 nt, Artificial Sequence
  LRRK2 RNA guide
gguuuucaagccacauacagau

SEQ ID NO: 58815 - RNA, 22 nt, Artificial Sequence
  LRRK2 RNA guide
guauguggcuugaaaaccaagu

SEQ ID NO: 58816 - RNA, 22 nt, Artificial Sequence
  LRRK2 RNA guide
gugauacaaacaucuguaugug

SEQ ID NO: 58817 - RNA, 22 nt, Artificial Sequence
  LRRK2 RNA guide
guggcuugaaaaccaagucaug

SEQ ID NO: 58818 - RNA, 22 nt, Artificial Sequence
  LRRK2 RNA guide
guucacuuccaugacuugguuu

SEQ ID NO: 58819 - RNA, 22 nt, Artificial Sequence
  LRRK2 RNA guide
guuuucaagccacauacagaug

SEQ ID NO: 58820 - RNA, 22 nt, Artificial Sequence
  LRRK2 RNA guide
uacaaacaucuguauguggcuu

SEQ ID NO: 58821 - RNA, 22 nt, Artificial Sequence
  LRRK2 RNA guide
uauguggcuugaaaaccaaguc

SEQ ID NO: 58822 - RNA, 22 nt, Artificial Sequence
  LRRK2 RNA guide
ucaagccacauacagauguuug

SEQ ID NO: 58823 - RNA, 22 nt, Artificial Sequence
  LRRK2 RNA guide
ucacuuccaugacuugguuuuc

SEQ ID NO: 58824 - RNA, 22 nt, Artificial Sequence
  LRRK2 RNA guide
uccaugacuugguuuucaagcc

SEQ ID NO: 58825 - RNA, 22 nt, Artificial Sequence
  LRRK2 RNA guide
ucuguauguggcuugaaaacca

SEQ ID NO: 58826 - RNA, 22 nt, Artificial Sequence
  LRRK2 RNA guide
ugacuugguuuucaagccacau

SEQ ID NO: 58827 - RNA, 22 nt, Artificial Sequence
  LRRK2 RNA guide
ugauacaaacaucuguaugugg

SEQ ID NO: 58828 - RNA, 22 nt, Artificial Sequence
  LRRK2 RNA guide
uggcuugaaaaccaagucaugg

SEQ ID NO: 58829 - RNA, 22 nt, Artificial Sequence
  LRRK2 RNA guide
ugguuuucaagccacauacaga

SEQ ID NO: 58830 - RNA, 22 nt, Artificial Sequence
  LRRK2 RNA guide
uguauguggcuugaaaaccaag

SEQ ID NO: 58831 - RNA, 22 nt, Artificial Sequence
  LRRK2 RNA guide
uguggcuugaaaaccaagucau

SEQ ID NO: 58832 - RNA, 22 nt, Artificial Sequence
  LRRK2 RNA guide
uucaagccacauacagauguuu

SEQ ID NO: 58833 - RNA, 22 nt, Artificial Sequence
  LRRK2 RNA guide
uucacuuccaugacuugguuuu

SEQ ID NO: 58834 - RNA, 22 nt, Artificial Sequence
  LRRK2 RNA guide
uuccaugacuugguuuucaagc

SEQ ID NO: 58835 - RNA, 22 nt, Artificial Sequence
  LRRK2 RNA guide
uugguuuucaagccacauacag

SEQ ID NO: 58836 - RNA, 22 nt, Artificial Sequence
  LRRK2 RNA guide
uuucaagccacauacagauguu

SEQ ID NO: 58837 - RNA, 22 nt, Artificial Sequence
  LRRK2 RNA guide
uuuucaagccacauacagaugu

SEQ ID NO: 58838 - RNA, 20 nt, Artificial Sequence
  LRRK2 RNA guide
aaacaucuguaugugguuug

SEQ ID NO: 58839 - RNA, 20 nt, Artificial Sequence
  LRRK2 RNA guide
aaaccacauacagauguuug

SEQ ID NO: 58840 - RNA, 20 nt, Artificial Sequence
  LRRK2 RNA guide
aacaucuguaugugguuuga

SEQ ID NO: 58841 - RNA, 20 nt, Artificial Sequence
  LRRK2 RNA guide
aaccacauacagauguuugu

SEQ ID NO: 58842 - RNA, 20 nt, Artificial Sequence
  LRRK2 RNA guide
acaaacaucuguaugugguu

SEQ ID NO: 58843 - RNA, 20 nt, Artificial Sequence
  LRRK2 RNA guide
acaucuguaugugguuugaa

SEQ ID NO: 58844 - RNA, 20 nt, Artificial Sequence
  LRRK2 RNA guide
acuugguuuucaaaccacau

SEQ ID NO: 58845 - RNA, 20 nt, Artificial Sequence
  LRRK2 RNA guide
aucuguaugugguuugaaaa

SEQ ID NO: 58846 - RNA, 20 nt, Artificial Sequence
  LRRK2 RNA guide
augacuugguuuucaaacca

SEQ ID NO: 58847 - RNA, 20 nt, Artificial Sequence
  LRRK2 RNA guide
augugguuugaaaaccaagu

SEQ ID NO: 58848 - RNA, 20 nt, Artificial Sequence
  LRRK2 RNA guide
caaacaucuguaugugguuu

SEQ ID NO: 58849 - RNA, 20 nt, Artificial Sequence
  LRRK2 RNA guide
caaaccacauacagauguuu

SEQ ID NO: 58850 - RNA, 20 nt, Artificial Sequence
  LRRK2 RNA guide
caucuguaugugguuugaaa

SEQ ID NO: 58851 - RNA, 20 nt, Artificial Sequence
  LRRK2 RNA guide
caugacuugguuuucaaacc

SEQ ID NO: 58852 - RNA, 20 nt, Artificial Sequence
  LRRK2 RNA guide
ccaugacuugguuuucaaac

SEQ ID NO: 58853 - RNA, 20 nt, Artificial Sequence
  LRRK2 RNA guide
cuguaugugguuugaaaacc

SEQ ID NO: 58854 - RNA, 20 nt, Artificial Sequence
  LRRK2 RNA guide
cuugguuuucaaaccacaua

SEQ ID NO: 58855 - RNA, 20 nt, Artificial Sequence
  LRRK2 RNA guide
gacuugguuuucaaaccaca

SEQ ID NO: 58856 - RNA, 20 nt, Artificial Sequence
  LRRK2 RNA guide
gguuugaaaaccaagucaug

SEQ ID NO: 58857 - RNA, 20 nt, Artificial Sequence
  LRRK2 RNA guide
gguuuucaaaccacauacag

SEQ ID NO: 58858 - RNA, 20 nt, Artificial Sequence
  LRRK2 RNA guide
guaugugguuugaaaaccaa

SEQ ID NO: 58859 - RNA, 20 nt, Artificial Sequence
  LRRK2 RNA guide
gugguuugaaaaccaaguca

SEQ ID NO: 58860 - RNA, 20 nt, Artificial Sequence
  LRRK2 RNA guide
guuugaaaaccaagucaugg

SEQ ID NO: 58861 - RNA, 20 nt, Artificial Sequence
  LRRK2 RNA guide
guuuucaaaccacauacaga

SEQ ID NO: 58862 - RNA, 20 nt, Artificial Sequence
  LRRK2 RNA guide
uacaaacaucuguauguggu

SEQ ID NO: 58863 - RNA, 20 nt, Artificial Sequence
  LRRK2 RNA guide
uaugugguuugaaaaccaag

SEQ ID NO: 58864 - RNA, 20 nt, Artificial Sequence
  LRRK2 RNA guide
ucaaaccacauacagauguu

SEQ ID NO: 58865 - RNA, 20 nt, Artificial Sequence
  LRRK2 RNA guide
uccaugacuugguuuucaaa

SEQ ID NO: 58866 - RNA, 20 nt, Artificial Sequence
  LRRK2 RNA guide
ucuguaugugguuugaaaac

SEQ ID NO: 58867 - RNA, 20 nt, Artificial Sequence
  LRRK2 RNA guide
ugacuugguuuucaaaccac

SEQ ID NO: 58868 - RNA, 20 nt, Artificial Sequence
  LRRK2 RNA guide
ugguuugaaaaccaagucau

SEQ ID NO: 58869 - RNA, 20 nt, Artificial Sequence
  LRRK2 RNA guide
ugguuuucaaaccacauaca

SEQ ID NO: 58870 - RNA, 20 nt, Artificial Sequence
  LRRK2 RNA guide
uguaugugguuugaaaacca

SEQ ID NO: 58871 - RNA, 20 nt, Artificial Sequence
  LRRK2 RNA guide
ugugguuugaaaaccaaguc

SEQ ID NO: 58872 - RNA, 20 nt, Artificial Sequence
  LRRK2 RNA guide
uucaaaccacauacagaugu

SEQ ID NO: 58873 - RNA, 20 nt, Artificial Sequence
  LRRK2 RNA guide
uugguuuucaaaccacauac

SEQ ID NO: 58874 - RNA, 20 nt, Artificial Sequence
  LRRK2 RNA guide
uuucaaaccacauacagaug

SEQ ID NO: 58875 - RNA, 20 nt, Artificial Sequence
  LRRK2 RNA guide
uuuucaaaccacauacagau

SEQ ID NO: 58876 - RNA, 21 nt, Artificial Sequence
  LRRK2 RNA guide
aaacaucuguaugugguuuga

SEQ ID NO: 58877 - RNA, 21 nt, Artificial Sequence
  LRRK2 RNA guide
aaaccacauacagauguuugu

SEQ ID NO: 58878 - RNA, 21 nt, Artificial Sequence
  LRRK2 RNA guide
aacaucuguaugugguuugaa

SEQ ID NO: 58879 - RNA, 21 nt, Artificial Sequence
  LRRK2 RNA guide
aaccacauacagauguuugua

SEQ ID NO: 58880 - RNA, 21 nt, Artificial Sequence
  LRRK2 RNA guide
acaaacaucuguaugugguuu

SEQ ID NO: 58881 - RNA, 21 nt, Artificial Sequence
  LRRK2 RNA guide
acaucuguaugugguuugaaa

SEQ ID NO: 58882 - RNA, 21 nt, Artificial Sequence
  LRRK2 RNA guide
acuugguuuucaaaccacaua

SEQ ID NO: 58883 - RNA, 21 nt, Artificial Sequence
  LRRK2 RNA guide
auacaaacaucuguauguggu

SEQ ID NO: 58884 - RNA, 21 nt, Artificial Sequence
  LRRK2 RNA guide
aucuguaugugguuugaaaac

SEQ ID NO: 58885 - RNA, 21 nt, Artificial Sequence
  LRRK2 RNA guide
augacuugguuuucaaaccac

SEQ ID NO: 58886 - RNA, 21 nt, Artificial Sequence
  LRRK2 RNA guide
augugguuugaaaaccaaguc

SEQ ID NO: 58887 - RNA, 21 nt, Artificial Sequence
  LRRK2 RNA guide
caaacaucuguaugugguuug

SEQ ID NO: 58888 - RNA, 21 nt, Artificial Sequence
  LRRK2 RNA guide
caaaccacauacagauguuug

SEQ ID NO: 58889 - RNA, 21 nt, Artificial Sequence
  LRRK2 RNA guide
caucuguaugugguuugaaaa

SEQ ID NO: 58890 - RNA, 21 nt, Artificial Sequence
  LRRK2 RNA guide
caugacuugguuuucaaacca

SEQ ID NO: 58891 - RNA, 21 nt, Artificial Sequence
  LRRK2 RNA guide
ccaugacuugguuuucaaacc

SEQ ID NO: 58892 - RNA, 21 nt, Artificial Sequence
  LRRK2 RNA guide
cuguaugugguuugaaaacca

SEQ ID NO: 58893 - RNA, 21 nt, Artificial Sequence
  LRRK2 RNA guide
cuugguuuucaaaccacauac

SEQ ID NO: 58894 - RNA, 21 nt, Artificial Sequence
  LRRK2 RNA guide
gacuugguuuucaaaccacau

SEQ ID NO: 58895 - RNA, 21 nt, Artificial Sequence
  LRRK2 RNA guide
gguuugaaaaccaagucaugg

SEQ ID NO: 58896 - RNA, 21 nt, Artificial Sequence
  LRRK2 RNA guide
gguuuucaaaccacauacaga

SEQ ID NO: 58897 - RNA, 21 nt, Artificial Sequence
  LRRK2 RNA guide
guaugugguuugaaaaccaag

SEQ ID NO: 58898 - RNA, 21 nt, Artificial Sequence
  LRRK2 RNA guide
gugguuugaaaaccaagucau

SEQ ID NO: 58899 - RNA, 21 nt, Artificial Sequence
  LRRK2 RNA guide
guuugaaaaccaagucaugga

SEQ ID NO: 58900 - RNA, 21 nt, Artificial Sequence
  LRRK2 RNA guide
guuuucaaaccacauacagau

SEQ ID NO: 58901 - RNA, 21 nt, Artificial Sequence
  LRRK2 RNA guide
uacaaacaucuguaugugguu

SEQ ID NO: 58902 - RNA, 21 nt, Artificial Sequence
  LRRK2 RNA guide
uaugugguuugaaaaccaagu

SEQ ID NO: 58903 - RNA, 21 nt, Artificial Sequence
  LRRK2 RNA guide
ucaaaccacauacagauguuu

SEQ ID NO: 58904 - RNA, 21 nt, Artificial Sequence
  LRRK2 RNA guide
uccaugacuugguuuucaaac

SEQ ID NO: 58905 - RNA, 21 nt, Artificial Sequence
  LRRK2 RNA guide
ucuguaugugguuugaaaacc

SEQ ID NO: 58906 - RNA, 21 nt, Artificial Sequence
  LRRK2 RNA guide
ugacuugguuuucaaaccaca

SEQ ID NO: 58907 - RNA, 21 nt, Artificial Sequence
  LRRK2 RNA guide
ugguuugaaaaccaagucaug

SEQ ID NO: 58908 - RNA, 21 nt, Artificial Sequence
  LRRK2 RNA guide
ugguuuucaaaccacauacag

SEQ ID NO: 58909 - RNA, 21 nt, Artificial Sequence
  LRRK2 RNA guide
uguaugugguuugaaaaccaa

SEQ ID NO: 58910 - RNA, 21 nt, Artificial Sequence
  LRRK2 RNA guide
ugugguuugaaaaccaaguca

SEQ ID NO: 58911 - RNA, 21 nt, Artificial Sequence
  LRRK2 RNA guide
uucaaaccacauacagauguu

SEQ ID NO: 58912 - RNA, 21 nt, Artificial Sequence
  LRRK2 RNA guide
uuccaugacuugguuuucaaa

SEQ ID NO: 58913 - RNA, 21 nt, Artificial Sequence
  LRRK2 RNA guide
uugguuuucaaaccacauaca

SEQ ID NO: 58914 - RNA, 21 nt, Artificial Sequence
  LRRK2 RNA guide
uuucaaaccacauacagaugu

SEQ ID NO: 58915 - RNA, 21 nt, Artificial Sequence
  LRRK2 RNA guide
uuuucaaaccacauacagaug

SEQ ID NO: 58916 - RNA, 22 nt, Artificial Sequence
  LRRK2 RNA guide
aaacaucuguaugugguuugaa

SEQ ID NO: 58917 - RNA, 22 nt, Artificial Sequence
  LRRK2 RNA guide
aaaccacauacagauguuugua

SEQ ID NO: 58918 - RNA, 22 nt, Artificial Sequence
  LRRK2 RNA guide
aacaucuguaugugguuugaaa

SEQ ID NO: 58919 - RNA, 22 nt, Artificial Sequence
  LRRK2 RNA guide
aaccacauacagauguuuguau

SEQ ID NO: 58920 - RNA, 22 nt, Artificial Sequence
  LRRK2 RNA guide
acaaacaucuguaugugguuug

SEQ ID NO: 58921 - RNA, 22 nt, Artificial Sequence
  LRRK2 RNA guide
acaucuguaugugguuugaaaa

SEQ ID NO: 58922 - RNA, 22 nt, Artificial Sequence
  LRRK2 RNA guide
acuugguuuucaaaccacauac

SEQ ID NO: 58923 - RNA, 22 nt, Artificial Sequence
  LRRK2 RNA guide
auacaaacaucuguaugugguu

SEQ ID NO: 58924 - RNA, 22 nt, Artificial Sequence
  LRRK2 RNA guide
aucuguaugugguuugaaaacc

SEQ ID NO: 58925 - RNA, 22 nt, Artificial Sequence
  LRRK2 RNA guide
augacuugguuuucaaaccaca

SEQ ID NO: 58926 - RNA, 22 nt, Artificial Sequence
  LRRK2 RNA guide
augugguuugaaaaccaaguca

SEQ ID NO: 58927 - RNA, 22 nt, Artificial Sequence
  LRRK2 RNA guide
caaacaucuguaugugguuuga

SEQ ID NO: 58928 - RNA, 22 nt, Artificial Sequence
  LRRK2 RNA guide
caaaccacauacagauguuugu

SEQ ID NO: 58929 - RNA, 22 nt, Artificial Sequence
  LRRK2 RNA guide
caucuguaugugguuugaaaac

SEQ ID NO: 58930 - RNA, 22 nt, Artificial Sequence
  LRRK2 RNA guide
caugacuugguuuucaaaccac

SEQ ID NO: 58931 - RNA, 22 nt, Artificial Sequence
  LRRK2 RNA guide
ccaugacuugguuuucaaacca

SEQ ID NO: 58932 - RNA, 22 nt, Artificial Sequence
  LRRK2 RNA guide
cuguaugugguuugaaaaccaa

SEQ ID NO: 58933 - RNA, 22 nt, Artificial Sequence
  LRRK2 RNA guide
cuuccaugacuugguuuucaaa

SEQ ID NO: 58934 - RNA, 22 nt, Artificial Sequence
  LRRK2 RNA guide
cuugguuuucaaaccacauaca

SEQ ID NO: 58935 - RNA, 22 nt, Artificial Sequence
  LRRK2 RNA guide
gacuugguuuucaaaccacaua

SEQ ID NO: 58936 - RNA, 22 nt, Artificial Sequence
  LRRK2 RNA guide
gauacaaacaucuguauguggu

SEQ ID NO: 58937 - RNA, 22 nt, Artificial Sequence
  LRRK2 RNA guide
gguuugaaaaccaagucaugga

SEQ ID NO: 58938 - RNA, 22 nt, Artificial Sequence
  LRRK2 RNA guide
gguuuucaaaccacauacagau

SEQ ID NO: 58939 - RNA, 22 nt, Artificial Sequence
  LRRK2 RNA guide
guaugugguuugaaaaccaagu

SEQ ID NO: 58940 - RNA, 22 nt, Artificial Sequence
  LRRK2 RNA guide
gugguuugaaaaccaagucaug

SEQ ID NO: 58941 - RNA, 22 nt, Artificial Sequence
  LRRK2 RNA guide
guuugaaaaccaagucauggaa

SEQ ID NO: 58942 - RNA, 22 nt, Artificial Sequence
  LRRK2 RNA guide
guuuucaaaccacauacagaug

SEQ ID NO: 58943 - RNA, 22 nt, Artificial Sequence
  LRRK2 RNA guide
uacaaacaucuguaugugguuu

SEQ ID NO: 58944 - RNA, 22 nt, Artificial Sequence
  LRRK2 RNA guide
uaugugguuugaaaaccaaguc

SEQ ID NO: 58945 - RNA, 22 nt, Artificial Sequence
  LRRK2 RNA guide
ucaaaccacauacagauguuug

SEQ ID NO: 58946 - RNA, 22 nt, Artificial Sequence
  LRRK2 RNA guide
uccaugacuugguuuucaaacc

SEQ ID NO: 58947 - RNA, 22 nt, Artificial Sequence
  LRRK2 RNA guide
ucuguaugugguuugaaaacca

SEQ ID NO: 58948 - RNA, 22 nt, Artificial Sequence
  LRRK2 RNA guide
ugacuugguuuucaaaccacau

SEQ ID NO: 58949 - RNA, 22 nt, Artificial Sequence
  LRRK2 RNA guide
ugguuugaaaaccaagucaugg

SEQ ID NO: 58950 - RNA, 22 nt, Artificial Sequence
  LRRK2 RNA guide
ugguuuucaaaccacauacaga

SEQ ID NO: 58951 - RNA, 22 nt, Artificial Sequence
  LRRK2 RNA guide
uguaugugguuugaaaaccaag

SEQ ID NO: 58952 - RNA, 22 nt, Artificial Sequence
  LRRK2 RNA guide
ugugguuugaaaaccaagucau

SEQ ID NO: 58953 - RNA, 22 nt, Artificial Sequence
  LRRK2 RNA guide
uucaaaccacauacagauguuu

SEQ ID NO: 58954 - RNA, 22 nt, Artificial Sequence
  LRRK2 RNA guide
uuccaugacuugguuuucaaac

SEQ ID NO: 58955 - RNA, 22 nt, Artificial Sequence
  LRRK2 RNA guide
uugguuuucaaaccacauacag

SEQ ID NO: 58956 - RNA, 22 nt, Artificial Sequence
  LRRK2 RNA guide
uuucaaaccacauacagauguu

SEQ ID NO: 58957 - RNA, 22 nt, Artificial Sequence
  LRRK2 RNA guide
uuuucaaaccacauacagaugu

SEQ ID NO: 58958 - RNA, 20 nt, Artificial Sequence
  LRRK2 RNA guide
acagauguuuguaucacucu

SEQ ID NO: 58959 - RNA, 20 nt, Artificial Sequence
  LRRK2 RNA guide
acauacagauguuuguauca

SEQ ID NO: 58960 - RNA, 20 nt, Artificial Sequence
  LRRK2 RNA guide
agagugauacaaacaucugu

SEQ ID NO: 58961 - RNA, 20 nt, Artificial Sequence
  LRRK2 RNA guide
agauguuuguaucacucugc

SEQ ID NO: 58962 - RNA, 20 nt, Artificial Sequence
  LRRK2 RNA guide
auacagauguuuguaucacu

SEQ ID NO: 58963 - RNA, 20 nt, Artificial Sequence
  LRRK2 RNA guide
auggggcagagugauacaaa

SEQ ID NO: 58964 - RNA, 20 nt, Artificial Sequence
  LRRK2 RNA guide
cacauacagauguuuguauc

SEQ ID NO: 58965 - RNA, 20 nt, Artificial Sequence
  LRRK2 RNA guide
cagagugauacaaacaucug

SEQ ID NO: 58966 - RNA, 20 nt, Artificial Sequence
  LRRK2 RNA guide
cagauguuuguaucacucug

SEQ ID NO: 58967 - RNA, 20 nt, Artificial Sequence
  LRRK2 RNA guide
cauacagauguuuguaucac

SEQ ID NO: 58968 - RNA, 20 nt, Artificial Sequence
  LRRK2 RNA guide
cauggggcagagugauacaa

SEQ ID NO: 58969 - RNA, 20 nt, Artificial Sequence
  LRRK2 RNA guide
ccacauacagauguuuguau

SEQ ID NO: 58970 - RNA, 20 nt, Artificial Sequence
  LRRK2 RNA guide
gagugauacaaacaucugua

SEQ ID NO: 58971 - RNA, 20 nt, Artificial Sequence
  LRRK2 RNA guide
gcagagugauacaaacaucu

SEQ ID NO: 58972 - RNA, 20 nt, Artificial Sequence
  LRRK2 RNA guide
gccacauacagauguuugua

SEQ ID NO: 58973 - RNA, 20 nt, Artificial Sequence
  LRRK2 RNA guide
ggcagagugauacaaacauc

SEQ ID NO: 58974 - RNA, 20 nt, Artificial Sequence
  LRRK2 RNA guide
gggcagagugauacaaacau

SEQ ID NO: 58975 - RNA, 20 nt, Artificial Sequence
  LRRK2 RNA guide
ggggcagagugauacaaaca

SEQ ID NO: 58976 - RNA, 20 nt, Artificial Sequence
  LRRK2 RNA guide
uacagauguuuguaucacuc

SEQ ID NO: 58977 - RNA, 20 nt, Artificial Sequence
  LRRK2 RNA guide
uggggcagagugauacaaac

SEQ ID NO: 58978 - RNA, 21 nt, Artificial Sequence
  LRRK2 RNA guide
acagauguuuguaucacucug

SEQ ID NO: 58979 - RNA, 21 nt, Artificial Sequence
  LRRK2 RNA guide
acauacagauguuuguaucac

SEQ ID NO: 58980 - RNA, 21 nt, Artificial Sequence
  LRRK2 RNA guide
agagugauacaaacaucugua

SEQ ID NO: 58981 - RNA, 21 nt, Artificial Sequence
  LRRK2 RNA guide
agauguuuguaucacucugcc

SEQ ID NO: 58982 - RNA, 21 nt, Artificial Sequence
  LRRK2 RNA guide
auacagauguuuguaucacuc

SEQ ID NO: 58983 - RNA, 21 nt, Artificial Sequence
  LRRK2 RNA guide
auggggcagagugauacaaac

SEQ ID NO: 58984 - RNA, 21 nt, Artificial Sequence
  LRRK2 RNA guide
cacauacagauguuuguauca

SEQ ID NO: 58985 - RNA, 21 nt, Artificial Sequence
  LRRK2 RNA guide
cagagugauacaaacaucugu

SEQ ID NO: 58986 - RNA, 21 nt, Artificial Sequence
  LRRK2 RNA guide
cagauguuuguaucacucugc

SEQ ID NO: 58987 - RNA, 21 nt, Artificial Sequence
  LRRK2 RNA guide
cauacagauguuuguaucacu

SEQ ID NO: 58988 - RNA, 21 nt, Artificial Sequence
  LRRK2 RNA guide
cauggggcagagugauacaaa

SEQ ID NO: 58989 - RNA, 21 nt, Artificial Sequence
  LRRK2 RNA guide
ccacauacagauguuuguauc

SEQ ID NO: 58990 - RNA, 21 nt, Artificial Sequence
  LRRK2 RNA guide
gcagagugauacaaacaucug

SEQ ID NO: 58991 - RNA, 21 nt, Artificial Sequence
  LRRK2 RNA guide
gcauggggcagagugauacaa

SEQ ID NO: 58992 - RNA, 21 nt, Artificial Sequence
  LRRK2 RNA guide
gccacauacagauguuuguau

SEQ ID NO: 58993 - RNA, 21 nt, Artificial Sequence
  LRRK2 RNA guide
ggcagagugauacaaacaucu

SEQ ID NO: 58994 - RNA, 21 nt, Artificial Sequence
  LRRK2 RNA guide
gggcagagugauacaaacauc

SEQ ID NO: 58995 - RNA, 21 nt, Artificial Sequence
  LRRK2 RNA guide
ggggcagagugauacaaacau

SEQ ID NO: 58996 - RNA, 21 nt, Artificial Sequence
  LRRK2 RNA guide
uacagauguuuguaucacucu

SEQ ID NO: 58997 - RNA, 21 nt, Artificial Sequence
  LRRK2 RNA guide
uggggcagagugauacaaaca

SEQ ID NO: 58998 - RNA, 22 nt, Artificial Sequence
  LRRK2 RNA guide
acagauguuuguaucacucugc

SEQ ID NO: 58999 - RNA, 22 nt, Artificial Sequence
  LRRK2 RNA guide
acauacagauguuuguaucacu

SEQ ID NO: 59000 - RNA, 22 nt, Artificial Sequence
  LRRK2 RNA guide
agauguuuguaucacucugccc

SEQ ID NO: 59001 - RNA, 22 nt, Artificial Sequence
  LRRK2 RNA guide
agcauggggcagagugauacaa

SEQ ID NO: 59002 - RNA, 22 nt, Artificial Sequence
  LRRK2 RNA guide
auacagauguuuguaucacucu

SEQ ID NO: 59003 - RNA, 22 nt, Artificial Sequence
  LRRK2 RNA guide
auggggcagagugauacaaaca

SEQ ID NO: 59004 - RNA, 22 nt, Artificial Sequence
  LRRK2 RNA guide
cacauacagauguuuguaucac

SEQ ID NO: 59005 - RNA, 22 nt, Artificial Sequence
  LRRK2 RNA guide
cagagugauacaaacaucugua

SEQ ID NO: 59006 - RNA, 22 nt, Artificial Sequence
  LRRK2 RNA guide
cagauguuuguaucacucugcc

SEQ ID NO: 59007 - RNA, 22 nt, Artificial Sequence
  LRRK2 RNA guide
cauacagauguuuguaucacuc

SEQ ID NO: 59008 - RNA, 22 nt, Artificial Sequence
  LRRK2 RNA guide
cauggggcagagugauacaaac

SEQ ID NO: 59009 - RNA, 22 nt, Artificial Sequence
  LRRK2 RNA guide
ccacauacagauguuuguauca

SEQ ID NO: 59010 - RNA, 22 nt, Artificial Sequence
  LRRK2 RNA guide
gcagagugauacaaacaucugu

SEQ ID NO: 59011 - RNA, 22 nt, Artificial Sequence
  LRRK2 RNA guide
gcauggggcagagugauacaaa

SEQ ID NO: 59012 - RNA, 22 nt, Artificial Sequence
  LRRK2 RNA guide
gccacauacagauguuuguauc

SEQ ID NO: 59013 - RNA, 22 nt, Artificial Sequence
  LRRK2 RNA guide
ggcagagugauacaaacaucug

SEQ ID NO: 59014 - RNA, 22 nt, Artificial Sequence
  LRRK2 RNA guide
gggcagagugauacaaacaucu

SEQ ID NO: 59015 - RNA, 22 nt, Artificial Sequence
  LRRK2 RNA guide
ggggcagagugauacaaacauc

SEQ ID NO: 59016 - RNA, 22 nt, Artificial Sequence
  LRRK2 RNA guide
uacagauguuuguaucacucug

SEQ ID NO: 59017 - RNA, 22 nt, Artificial Sequence
  LRRK2 RNA guide
uggggcagagugauacaaacau

SEQ ID NO: 59018 - RNA, 20 nt, Artificial Sequence
  LRRK2 RNA guide
aaacauuuguauguggcuug

SEQ ID NO: 59019 - RNA, 20 nt, Artificial Sequence
  LRRK2 RNA guide
aaauguuuguaucacucugc

SEQ ID NO: 59020 - RNA, 20 nt, Artificial Sequence
  LRRK2 RNA guide
aacauuuguauguggcuuga

SEQ ID NO: 59021 - RNA, 20 nt, Artificial Sequence
  LRRK2 RNA guide
aagccacauacaaauguuug

SEQ ID NO: 59022 - RNA, 20 nt, Artificial Sequence
  LRRK2 RNA guide
acaaacauuuguauguggcu

SEQ ID NO: 59023 - RNA, 20 nt, Artificial Sequence
  LRRK2 RNA guide
acaaauguuuguaucacucu

SEQ ID NO: 59024 - RNA, 20 nt, Artificial Sequence
  LRRK2 RNA guide
acauuuguauguggcuugaa

SEQ ID NO: 59025 - RNA, 20 nt, Artificial Sequence
  LRRK2 RNA guide
agagugauacaaacauuugu

SEQ ID NO: 59026 - RNA, 20 nt, Artificial Sequence
  LRRK2 RNA guide
agccacauacaaauguuugu

SEQ ID NO: 59027 - RNA, 20 nt, Artificial Sequence
  LRRK2 RNA guide
auacaaacauuuguaugugg

SEQ ID NO: 59028 - RNA, 20 nt, Artificial Sequence
  LRRK2 RNA guide
auuuguauguggcuugaaaa

SEQ ID NO: 59029 - RNA, 20 nt, Artificial Sequence
  LRRK2 RNA guide
caaacauuuguauguggcuu

SEQ ID NO: 59030 - RNA, 20 nt, Artificial Sequence
  LRRK2 RNA guide
caaauguuuguaucacucug

SEQ ID NO: 59031 - RNA, 20 nt, Artificial Sequence
  LRRK2 RNA guide
caagccacauacaaauguuu

SEQ ID NO: 59032 - RNA, 20 nt, Artificial Sequence
  LRRK2 RNA guide
cacauacaaauguuuguauc

SEQ ID NO: 59033 - RNA, 20 nt, Artificial Sequence
  LRRK2 RNA guide
cagagugauacaaacauuug

SEQ ID NO: 59034 - RNA, 20 nt, Artificial Sequence
  LRRK2 RNA guide
cauacaaauguuuguaucac

SEQ ID NO: 59035 - RNA, 20 nt, Artificial Sequence
  LRRK2 RNA guide
cauuuguauguggcuugaaa

SEQ ID NO: 59036 - RNA, 20 nt, Artificial Sequence
  LRRK2 RNA guide
ccacauacaaauguuuguau

SEQ ID NO: 59037 - RNA, 20 nt, Artificial Sequence
  LRRK2 RNA guide
gagugauacaaacauuugua

SEQ ID NO: 59038 - RNA, 20 nt, Artificial Sequence
  LRRK2 RNA guide
gauacaaacauuuguaugug

SEQ ID NO: 59039 - RNA, 20 nt, Artificial Sequence
  LRRK2 RNA guide
gcagagugauacaaacauuu

SEQ ID NO: 59040 - RNA, 20 nt, Artificial Sequence
  LRRK2 RNA guide
gccacauacaaauguuugua

SEQ ID NO: 59041 - RNA, 20 nt, Artificial Sequence
  LRRK2 RNA guide
ggcagagugauacaaacauu

SEQ ID NO: 59042 - RNA, 20 nt, Artificial Sequence
  LRRK2 RNA guide
gguuuucaagccacauacaa

SEQ ID NO: 59043 - RNA, 20 nt, Artificial Sequence
  LRRK2 RNA guide
gugauacaaacauuuguaug

SEQ ID NO: 59044 - RNA, 20 nt, Artificial Sequence
  LRRK2 RNA guide
guuuucaagccacauacaaa

SEQ ID NO: 59045 - RNA, 20 nt, Artificial Sequence
  LRRK2 RNA guide
uacaaacauuuguauguggc

SEQ ID NO: 59046 - RNA, 20 nt, Artificial Sequence
  LRRK2 RNA guide
uacaaauguuuguaucacuc

SEQ ID NO: 59047 - RNA, 20 nt, Artificial Sequence
  LRRK2 RNA guide
ucaagccacauacaaauguu

SEQ ID NO: 59048 - RNA, 20 nt, Artificial Sequence
  LRRK2 RNA guide
uucaagccacauacaaaugu

SEQ ID NO: 59049 - RNA, 20 nt, Artificial Sequence
  LRRK2 RNA guide
uuucaagccacauacaaaug

SEQ ID NO: 59050 - RNA, 20 nt, Artificial Sequence
  LRRK2 RNA guide
uuuguauguggcuugaaaac

SEQ ID NO: 59051 - RNA, 20 nt, Artificial Sequence
  LRRK2 RNA guide
uuuucaagccacauacaaau

SEQ ID NO: 59052 - RNA, 21 nt, Artificial Sequence
  LRRK2 RNA guide
aaacauuuguauguggcuuga

SEQ ID NO: 59053 - RNA, 21 nt, Artificial Sequence
  LRRK2 RNA guide
aaauguuuguaucacucugcc

SEQ ID NO: 59054 - RNA, 21 nt, Artificial Sequence
  LRRK2 RNA guide
aacauuuguauguggcuugaa

SEQ ID NO: 59055 - RNA, 21 nt, Artificial Sequence
  LRRK2 RNA guide
aagccacauacaaauguuugu

SEQ ID NO: 59056 - RNA, 21 nt, Artificial Sequence
  LRRK2 RNA guide
acaaacauuuguauguggcuu

SEQ ID NO: 59057 - RNA, 21 nt, Artificial Sequence
  LRRK2 RNA guide
acaaauguuuguaucacucug

SEQ ID NO: 59058 - RNA, 21 nt, Artificial Sequence
  LRRK2 RNA guide
acauuuguauguggcuugaaa

SEQ ID NO: 59059 - RNA, 21 nt, Artificial Sequence
  LRRK2 RNA guide
agccacauacaaauguuugua

SEQ ID NO: 59060 - RNA, 21 nt, Artificial Sequence
  LRRK2 RNA guide
auacaaacauuuguauguggc

SEQ ID NO: 59061 - RNA, 21 nt, Artificial Sequence
  LRRK2 RNA guide
auuuguauguggcuugaaaac

SEQ ID NO: 59062 - RNA, 21 nt, Artificial Sequence
  LRRK2 RNA guide
caaacauuuguauguggcuug

SEQ ID NO: 59063 - RNA, 21 nt, Artificial Sequence
  LRRK2 RNA guide
caaauguuuguaucacucugc

SEQ ID NO: 59064 - RNA, 21 nt, Artificial Sequence
  LRRK2 RNA guide
caagccacauacaaauguuug

SEQ ID NO: 59065 - RNA, 21 nt, Artificial Sequence
  LRRK2 RNA guide
cagagugauacaaacauuugu

SEQ ID NO: 59066 - RNA, 21 nt, Artificial Sequence
  LRRK2 RNA guide
cauuuguauguggcuugaaaa

SEQ ID NO: 59067 - RNA, 21 nt, Artificial Sequence
  LRRK2 RNA guide
ccacauacaaauguuuguauc

SEQ ID NO: 59068 - RNA, 21 nt, Artificial Sequence
  LRRK2 RNA guide
gauacaaacauuuguaugugg

SEQ ID NO: 59069 - RNA, 21 nt, Artificial Sequence
  LRRK2 RNA guide
gcagagugauacaaacauuug

SEQ ID NO: 59070 - RNA, 21 nt, Artificial Sequence
  LRRK2 RNA guide
gccacauacaaauguuuguau

SEQ ID NO: 59071 - RNA, 21 nt, Artificial Sequence
  LRRK2 RNA guide
ggcagagugauacaaacauuu

SEQ ID NO: 59072 - RNA, 21 nt, Artificial Sequence
  LRRK2 RNA guide
gggcagagugauacaaacauu

SEQ ID NO: 59073 - RNA, 21 nt, Artificial Sequence
  LRRK2 RNA guide
gguuuucaagccacauacaaa

SEQ ID NO: 59074 - RNA, 21 nt, Artificial Sequence
  LRRK2 RNA guide
guuuucaagccacauacaaau

SEQ ID NO: 59075 - RNA, 21 nt, Artificial Sequence
  LRRK2 RNA guide
uacaaacauuuguauguggcu

SEQ ID NO: 59076 - RNA, 21 nt, Artificial Sequence
  LRRK2 RNA guide
ucaagccacauacaaauguuu

SEQ ID NO: 59077 - RNA, 21 nt, Artificial Sequence
  LRRK2 RNA guide
ugguuuucaagccacauacaa

SEQ ID NO: 59078 - RNA, 21 nt, Artificial Sequence
  LRRK2 RNA guide
uucaagccacauacaaauguu

SEQ ID NO: 59079 - RNA, 21 nt, Artificial Sequence
  LRRK2 RNA guide
uuucaagccacauacaaaugu

SEQ ID NO: 59080 - RNA, 21 nt, Artificial Sequence
  LRRK2 RNA guide
uuuguauguggcuugaaaacc

SEQ ID NO: 59081 - RNA, 21 nt, Artificial Sequence
  LRRK2 RNA guide
uuuucaagccacauacaaaug

SEQ ID NO: 59082 - RNA, 22 nt, Artificial Sequence
  LRRK2 RNA guide
aaacauuuguauguggcuugaa

SEQ ID NO: 59083 - RNA, 22 nt, Artificial Sequence
  LRRK2 RNA guide
aaauguuuguaucacucugccc

SEQ ID NO: 59084 - RNA, 22 nt, Artificial Sequence
  LRRK2 RNA guide
aacauuuguauguggcuugaaa

SEQ ID NO: 59085 - RNA, 22 nt, Artificial Sequence
  LRRK2 RNA guide
aagccacauacaaauguuugua

SEQ ID NO: 59086 - RNA, 22 nt, Artificial Sequence
  LRRK2 RNA guide
acaaacauuuguauguggcuug

SEQ ID NO: 59087 - RNA, 22 nt, Artificial Sequence
  LRRK2 RNA guide
acaaauguuuguaucacucugc

SEQ ID NO: 59088 - RNA, 22 nt, Artificial Sequence
  LRRK2 RNA guide
acauuuguauguggcuugaaaa

SEQ ID NO: 59089 - RNA, 22 nt, Artificial Sequence
  LRRK2 RNA guide
agccacauacaaauguuuguau

SEQ ID NO: 59090 - RNA, 22 nt, Artificial Sequence
  LRRK2 RNA guide
auacaaacauuuguauguggcu

SEQ ID NO: 59091 - RNA, 22 nt, Artificial Sequence
  LRRK2 RNA guide
auuuguauguggcuugaaaacc

SEQ ID NO: 59092 - RNA, 22 nt, Artificial Sequence
  LRRK2 RNA guide
caaacauuuguauguggcuuga

SEQ ID NO: 59093 - RNA, 22 nt, Artificial Sequence
  LRRK2 RNA guide
caaauguuuguaucacucugcc

SEQ ID NO: 59094 - RNA, 22 nt, Artificial Sequence
  LRRK2 RNA guide
caagccacauacaaauguuugu

SEQ ID NO: 59095 - RNA, 22 nt, Artificial Sequence
  LRRK2 RNA guide
cacauacaaauguuuguaucac

SEQ ID NO: 59096 - RNA, 22 nt, Artificial Sequence
  LRRK2 RNA guide
cagagugauacaaacauuugua

SEQ ID NO: 59097 - RNA, 22 nt, Artificial Sequence
  LRRK2 RNA guide
cauacaaauguuuguaucacuc

SEQ ID NO: 59098 - RNA, 22 nt, Artificial Sequence
  LRRK2 RNA guide
cauuuguauguggcuugaaaac

SEQ ID NO: 59099 - RNA, 22 nt, Artificial Sequence
  LRRK2 RNA guide
ccacauacaaauguuuguauca

SEQ ID NO: 59100 - RNA, 22 nt, Artificial Sequence
  LRRK2 RNA guide
gagugauacaaacauuuguaug

SEQ ID NO: 59101 - RNA, 22 nt, Artificial Sequence
  LRRK2 RNA guide
gauacaaacauuuguauguggc

SEQ ID NO: 59102 - RNA, 22 nt, Artificial Sequence
  LRRK2 RNA guide
gcagagugauacaaacauuugu

SEQ ID NO: 59103 - RNA, 22 nt, Artificial Sequence
  LRRK2 RNA guide
gccacauacaaauguuuguauc

SEQ ID NO: 59104 - RNA, 22 nt, Artificial Sequence
  LRRK2 RNA guide
ggcagagugauacaaacauuug

SEQ ID NO: 59105 - RNA, 22 nt, Artificial Sequence
  LRRK2 RNA guide
gggcagagugauacaaacauuu

SEQ ID NO: 59106 - RNA, 22 nt, Artificial Sequence
  LRRK2 RNA guide
ggggcagagugauacaaacauu

SEQ ID NO: 59107 - RNA, 22 nt, Artificial Sequence
  LRRK2 RNA guide
gguuuucaagccacauacaaau

SEQ ID NO: 59108 - RNA, 22 nt, Artificial Sequence
  LRRK2 RNA guide
gugauacaaacauuuguaugug

SEQ ID NO: 59109 - RNA, 22 nt, Artificial Sequence
  LRRK2 RNA guide
guuuucaagccacauacaaaug

SEQ ID NO: 59110 - RNA, 22 nt, Artificial Sequence
  LRRK2 RNA guide
uacaaacauuuguauguggcuu

SEQ ID NO: 59111 - RNA, 22 nt, Artificial Sequence
  LRRK2 RNA guide
uacaaauguuuguaucacucug

SEQ ID NO: 59112 - RNA, 22 nt, Artificial Sequence
  LRRK2 RNA guide
ucaagccacauacaaauguuug

SEQ ID NO: 59113 - RNA, 22 nt, Artificial Sequence
  LRRK2 RNA guide
ugauacaaacauuuguaugugg

SEQ ID NO: 59114 - RNA, 22 nt, Artificial Sequence
  LRRK2 RNA guide
ugguuuucaagccacauacaaa

SEQ ID NO: 59115 - RNA, 22 nt, Artificial Sequence
  LRRK2 RNA guide
uucaagccacauacaaauguuu

SEQ ID NO: 59116 - RNA, 22 nt, Artificial Sequence
  LRRK2 RNA guide
uugguuuucaagccacauacaa

SEQ ID NO: 59117 - RNA, 22 nt, Artificial Sequence
  LRRK2 RNA guide
uuucaagccacauacaaauguu

SEQ ID NO: 59118 - RNA, 22 nt, Artificial Sequence
  LRRK2 RNA guide
uuuguauguggcuugaaaacca

SEQ ID NO: 59119 - RNA, 22 nt, Artificial Sequence
  LRRK2 RNA guide
uuuucaagccacauacaaaugu

SEQ ID NO: 59120 - RNA, 20 nt, Artificial Sequence
  LRRK2 RNA guide
aaagccaucauucaauugac

SEQ ID NO: 59121 - RNA, 20 nt, Artificial Sequence
  LRRK2 RNA guide
aagccaucauucaauugacu

SEQ ID NO: 59122 - RNA, 20 nt, Artificial Sequence
  LRRK2 RNA guide
aaggauuuccacaaagccau

SEQ ID NO: 59123 - RNA, 20 nt, Artificial Sequence
  LRRK2 RNA guide
aaugauggcuuuguggaaau

SEQ ID NO: 59124 - RNA, 20 nt, Artificial Sequence
  LRRK2 RNA guide
aauugaaugauggcuuugug

SEQ ID NO: 59125 - RNA, 20 nt, Artificial Sequence
  LRRK2 RNA guide
acaaagccaucauucaauug

SEQ ID NO: 59126 - RNA, 20 nt, Artificial Sequence
  LRRK2 RNA guide
accccaaggauuuccacaaa

SEQ ID NO: 59127 - RNA, 20 nt, Artificial Sequence
  LRRK2 RNA guide
agccaucauucaauugacua

SEQ ID NO: 59128 - RNA, 20 nt, Artificial Sequence
  LRRK2 RNA guide
aggauuuccacaaagccauc

SEQ ID NO: 59129 - RNA, 20 nt, Artificial Sequence
  LRRK2 RNA guide
agucaauugaaugauggcuu

SEQ ID NO: 59130 - RNA, 20 nt, Artificial Sequence
  LRRK2 RNA guide
augauggcuuuguggaaauc

SEQ ID NO: 59131 - RNA, 20 nt, Artificial Sequence
  LRRK2 RNA guide
auggcuuuguggaaauccuu

SEQ ID NO: 59132 - RNA, 20 nt, Artificial Sequence
  LRRK2 RNA guide
auuagucaauugaaugaugg

SEQ ID NO: 59133 - RNA, 20 nt, Artificial Sequence
  LRRK2 RNA guide
auugaaugauggcuuugugg

SEQ ID NO: 59134 - RNA, 20 nt, Artificial Sequence
  LRRK2 RNA guide
auuuccacaaagccaucauu

SEQ ID NO: 59135 - RNA, 20 nt, Artificial Sequence
  LRRK2 RNA guide
caaagccaucauucaauuga

SEQ ID NO: 59136 - RNA, 20 nt, Artificial Sequence
  LRRK2 RNA guide
caaggauuuccacaaagcca

SEQ ID NO: 59137 - RNA, 20 nt, Artificial Sequence
  LRRK2 RNA guide
caauugaaugauggcuuugu

SEQ ID NO: 59138 - RNA, 20 nt, Artificial Sequence
  LRRK2 RNA guide
cacaaagccaucauucaauu

SEQ ID NO: 59139 - RNA, 20 nt, Artificial Sequence
  LRRK2 RNA guide
ccaaggauuuccacaaagcc

SEQ ID NO: 59140 - RNA, 20 nt, Artificial Sequence
  LRRK2 RNA guide
ccacaaagccaucauucaau

SEQ ID NO: 59141 - RNA, 20 nt, Artificial Sequence
  LRRK2 RNA guide
ccaucauucaauugacuaau

SEQ ID NO: 59142 - RNA, 20 nt, Artificial Sequence
  LRRK2 RNA guide
cccaaggauuuccacaaagc

SEQ ID NO: 59143 - RNA, 20 nt, Artificial Sequence
  LRRK2 RNA guide
ccccaaggauuuccacaaag

SEQ ID NO: 59144 - RNA, 20 nt, Artificial Sequence
  LRRK2 RNA guide
cugaauuagucaauugaaug

SEQ ID NO: 59145 - RNA, 20 nt, Artificial Sequence
  LRRK2 RNA guide
gaaugauggcuuuguggaaa

SEQ ID NO: 59146 - RNA, 20 nt, Artificial Sequence
  LRRK2 RNA guide
gauggcuuuguggaaauccu

SEQ ID NO: 59147 - RNA, 20 nt, Artificial Sequence
  LRRK2 RNA guide
gauuuccacaaagccaucau

SEQ ID NO: 59148 - RNA, 20 nt, Artificial Sequence
  LRRK2 RNA guide
gccaucauucaauugacuaa

SEQ ID NO: 59149 - RNA, 20 nt, Artificial Sequence
  LRRK2 RNA guide
ggauuuccacaaagccauca

SEQ ID NO: 59150 - RNA, 20 nt, Artificial Sequence
  LRRK2 RNA guide
gucaauugaaugauggcuuu

SEQ ID NO: 59151 - RNA, 20 nt, Artificial Sequence
  LRRK2 RNA guide
uaccccaaggauuuccacaa

SEQ ID NO: 59152 - RNA, 20 nt, Artificial Sequence
  LRRK2 RNA guide
uagucaauugaaugauggcu

SEQ ID NO: 59153 - RNA, 20 nt, Artificial Sequence
  LRRK2 RNA guide
ucaauugaaugauggcuuug

SEQ ID NO: 59154 - RNA, 20 nt, Artificial Sequence
  LRRK2 RNA guide
uccacaaagccaucauucaa

SEQ ID NO: 59155 - RNA, 20 nt, Artificial Sequence
  LRRK2 RNA guide
ugaaugauggcuuuguggaa

SEQ ID NO: 59156 - RNA, 20 nt, Artificial Sequence
  LRRK2 RNA guide
ugauggcuuuguggaaaucc

SEQ ID NO: 59157 - RNA, 20 nt, Artificial Sequence
  LRRK2 RNA guide
uuagucaauugaaugauggc

SEQ ID NO: 59158 - RNA, 20 nt, Artificial Sequence
  LRRK2 RNA guide
uuccacaaagccaucauuca

SEQ ID NO: 59159 - RNA, 20 nt, Artificial Sequence
  LRRK2 RNA guide
uugaaugauggcuuugugga

SEQ ID NO: 59160 - RNA, 20 nt, Artificial Sequence
  LRRK2 RNA guide
uuuccacaaagccaucauuc

SEQ ID NO: 59161 - RNA, 21 nt, Artificial Sequence
  LRRK2 RNA guide
aaagccaucauucaauugacu

SEQ ID NO: 59162 - RNA, 21 nt, Artificial Sequence
  LRRK2 RNA guide
aagccaucauucaauugacua

SEQ ID NO: 59163 - RNA, 21 nt, Artificial Sequence
  LRRK2 RNA guide
aaggauuuccacaaagccauc

SEQ ID NO: 59164 - RNA, 21 nt, Artificial Sequence
  LRRK2 RNA guide
aaugauggcuuuguggaaauc

SEQ ID NO: 59165 - RNA, 21 nt, Artificial Sequence
  LRRK2 RNA guide
aauugaaugauggcuuugugg

SEQ ID NO: 59166 - RNA, 21 nt, Artificial Sequence
  LRRK2 RNA guide
acaaagccaucauucaauuga

SEQ ID NO: 59167 - RNA, 21 nt, Artificial Sequence
  LRRK2 RNA guide
accccaaggauuuccacaaag

SEQ ID NO: 59168 - RNA, 21 nt, Artificial Sequence
  LRRK2 RNA guide
agccaucauucaauugacuaa

SEQ ID NO: 59169 - RNA, 21 nt, Artificial Sequence
  LRRK2 RNA guide
aggauuuccacaaagccauca

SEQ ID NO: 59170 - RNA, 21 nt, Artificial Sequence
  LRRK2 RNA guide
agucaauugaaugauggcuuu

SEQ ID NO: 59171 - RNA, 21 nt, Artificial Sequence
  LRRK2 RNA guide
augauggcuuuguggaaaucc

SEQ ID NO: 59172 - RNA, 21 nt, Artificial Sequence
  LRRK2 RNA guide
auggcuuuguggaaauccuug

SEQ ID NO: 59173 - RNA, 21 nt, Artificial Sequence
  LRRK2 RNA guide
auuagucaauugaaugauggc

SEQ ID NO: 59174 - RNA, 21 nt, Artificial Sequence
  LRRK2 RNA guide
auugaaugauggcuuugugga

SEQ ID NO: 59175 - RNA, 21 nt, Artificial Sequence
  LRRK2 RNA guide
auuuccacaaagccaucauuc

SEQ ID NO: 59176 - RNA, 21 nt, Artificial Sequence
  LRRK2 RNA guide
caaagccaucauucaauugac

SEQ ID NO: 59177 - RNA, 21 nt, Artificial Sequence
  LRRK2 RNA guide
caaggauuuccacaaagccau

SEQ ID NO: 59178 - RNA, 21 nt, Artificial Sequence
  LRRK2 RNA guide
caauugaaugauggcuuugug

SEQ ID NO: 59179 - RNA, 21 nt, Artificial Sequence
  LRRK2 RNA guide
cacaaagccaucauucaauug

SEQ ID NO: 59180 - RNA, 21 nt, Artificial Sequence
  LRRK2 RNA guide
ccaaggauuuccacaaagcca

SEQ ID NO: 59181 - RNA, 21 nt, Artificial Sequence
  LRRK2 RNA guide
ccacaaagccaucauucaauu

SEQ ID NO: 59182 - RNA, 21 nt, Artificial Sequence
  LRRK2 RNA guide
cccaaggauuuccacaaagcc

SEQ ID NO: 59183 - RNA, 21 nt, Artificial Sequence
  LRRK2 RNA guide
ccccaaggauuuccacaaagc

SEQ ID NO: 59184 - RNA, 21 nt, Artificial Sequence
  LRRK2 RNA guide
gaaugauggcuuuguggaaau

SEQ ID NO: 59185 - RNA, 21 nt, Artificial Sequence
  LRRK2 RNA guide
gauggcuuuguggaaauccuu

SEQ ID NO: 59186 - RNA, 21 nt, Artificial Sequence
  LRRK2 RNA guide
gauuuccacaaagccaucauu

SEQ ID NO: 59187 - RNA, 21 nt, Artificial Sequence
  LRRK2 RNA guide
gccaucauucaauugacuaau

SEQ ID NO: 59188 - RNA, 21 nt, Artificial Sequence
  LRRK2 RNA guide
ggauuuccacaaagccaucau

SEQ ID NO: 59189 - RNA, 21 nt, Artificial Sequence
  LRRK2 RNA guide
gucaauugaaugauggcuuug

SEQ ID NO: 59190 - RNA, 21 nt, Artificial Sequence
  LRRK2 RNA guide
uaccccaaggauuuccacaaa

SEQ ID NO: 59191 - RNA, 21 nt, Artificial Sequence
  LRRK2 RNA guide
uagucaauugaaugauggcuu

SEQ ID NO: 59192 - RNA, 21 nt, Artificial Sequence
  LRRK2 RNA guide
ucaauugaaugauggcuuugu

SEQ ID NO: 59193 - RNA, 21 nt, Artificial Sequence
  LRRK2 RNA guide
uccacaaagccaucauucaau

SEQ ID NO: 59194 - RNA, 21 nt, Artificial Sequence
  LRRK2 RNA guide
ugaaugauggcuuuguggaaa

SEQ ID NO: 59195 - RNA, 21 nt, Artificial Sequence
  LRRK2 RNA guide
ugauggcuuuguggaaauccu

SEQ ID NO: 59196 - RNA, 21 nt, Artificial Sequence
  LRRK2 RNA guide
uuaccccaaggauuuccacaa

SEQ ID NO: 59197 - RNA, 21 nt, Artificial Sequence
  LRRK2 RNA guide
uuagucaauugaaugauggcu

SEQ ID NO: 59198 - RNA, 21 nt, Artificial Sequence
  LRRK2 RNA guide
uuccacaaagccaucauucaa

SEQ ID NO: 59199 - RNA, 21 nt, Artificial Sequence
  LRRK2 RNA guide
uugaaugauggcuuuguggaa

SEQ ID NO: 59200 - RNA, 21 nt, Artificial Sequence
  LRRK2 RNA guide
uuuccacaaagccaucauuca

SEQ ID NO: 59201 - RNA, 22 nt, Artificial Sequence
  LRRK2 RNA guide
aaagccaucauucaauugacua

SEQ ID NO: 59202 - RNA, 22 nt, Artificial Sequence
  LRRK2 RNA guide
aagccaucauucaauugacuaa

SEQ ID NO: 59203 - RNA, 22 nt, Artificial Sequence
  LRRK2 RNA guide
aaggauuuccacaaagccauca

SEQ ID NO: 59204 - RNA, 22 nt, Artificial Sequence
  LRRK2 RNA guide
aaugauggcuuuguggaaaucc

SEQ ID NO: 59205 - RNA, 22 nt, Artificial Sequence
  LRRK2 RNA guide
aauuagucaauugaaugauggc

SEQ ID NO: 59206 - RNA, 22 nt, Artificial Sequence
  LRRK2 RNA guide
aauugaaugauggcuuugugga

SEQ ID NO: 59207 - RNA, 22 nt, Artificial Sequence
  LRRK2 RNA guide
acaaagccaucauucaauugac

SEQ ID NO: 59208 - RNA, 22 nt, Artificial Sequence
  LRRK2 RNA guide
accccaaggauuuccacaaagc

SEQ ID NO: 59209 - RNA, 22 nt, Artificial Sequence
  LRRK2 RNA guide
agccaucauucaauugacuaau

SEQ ID NO: 59210 - RNA, 22 nt, Artificial Sequence
  LRRK2 RNA guide
aggauuuccacaaagccaucau

SEQ ID NO: 59211 - RNA, 22 nt, Artificial Sequence
  LRRK2 RNA guide
agucaauugaaugauggcuuug

SEQ ID NO: 59212 - RNA, 22 nt, Artificial Sequence
  LRRK2 RNA guide
augauggcuuuguggaaauccu

SEQ ID NO: 59213 - RNA, 22 nt, Artificial Sequence
  LRRK2 RNA guide
auggcuuuguggaaauccuugg

SEQ ID NO: 59214 - RNA, 22 nt, Artificial Sequence
  LRRK2 RNA guide
auuagucaauugaaugauggcu

SEQ ID NO: 59215 - RNA, 22 nt, Artificial Sequence
  LRRK2 RNA guide
auugaaugauggcuuuguggaa

SEQ ID NO: 59216 - RNA, 22 nt, Artificial Sequence
  LRRK2 RNA guide
auuuccacaaagccaucauuca

SEQ ID NO: 59217 - RNA, 22 nt, Artificial Sequence
  LRRK2 RNA guide
caaagccaucauucaauugacu

SEQ ID NO: 59218 - RNA, 22 nt, Artificial Sequence
  LRRK2 RNA guide
caaggauuuccacaaagccauc

SEQ ID NO: 59219 - RNA, 22 nt, Artificial Sequence
  LRRK2 RNA guide
caauugaaugauggcuuugugg

SEQ ID NO: 59220 - RNA, 22 nt, Artificial Sequence
  LRRK2 RNA guide
cacaaagccaucauucaauuga

SEQ ID NO: 59221 - RNA, 22 nt, Artificial Sequence
  LRRK2 RNA guide
ccaaggauuuccacaaagccau

SEQ ID NO: 59222 - RNA, 22 nt, Artificial Sequence
  LRRK2 RNA guide
ccacaaagccaucauucaauug

SEQ ID NO: 59223 - RNA, 22 nt, Artificial Sequence
  LRRK2 RNA guide
ccaucauucaauugacuaauuc

SEQ ID NO: 59224 - RNA, 22 nt, Artificial Sequence
  LRRK2 RNA guide
cccaaggauuuccacaaagcca

SEQ ID NO: 59225 - RNA, 22 nt, Artificial Sequence
  LRRK2 RNA guide
ccccaaggauuuccacaaagcc

SEQ ID NO: 59226 - RNA, 22 nt, Artificial Sequence
  LRRK2 RNA guide
gaaugauggcuuuguggaaauc

SEQ ID NO: 59227 - RNA, 22 nt, Artificial Sequence
  LRRK2 RNA guide
gaauuagucaauugaaugaugg

SEQ ID NO: 59228 - RNA, 22 nt, Artificial Sequence
  LRRK2 RNA guide
gauggcuuuguggaaauccuug

SEQ ID NO: 59229 - RNA, 22 nt, Artificial Sequence
  LRRK2 RNA guide
gauuuccacaaagccaucauuc

SEQ ID NO: 59230 - RNA, 22 nt, Artificial Sequence
  LRRK2 RNA guide
gccaucauucaauugacuaauu

SEQ ID NO: 59231 - RNA, 22 nt, Artificial Sequence
  LRRK2 RNA guide
ggauuuccacaaagccaucauu

SEQ ID NO: 59232 - RNA, 22 nt, Artificial Sequence
  LRRK2 RNA guide
gguuacugaauuagucaauuga

SEQ ID NO: 59233 - RNA, 22 nt, Artificial Sequence
  LRRK2 RNA guide
gucaauugaaugauggcuuugu

SEQ ID NO: 59234 - RNA, 22 nt, Artificial Sequence
  LRRK2 RNA guide
uaccccaaggauuuccacaaag

SEQ ID NO: 59235 - RNA, 22 nt, Artificial Sequence
  LRRK2 RNA guide
uagucaauugaaugauggcuuu

SEQ ID NO: 59236 - RNA, 22 nt, Artificial Sequence
  LRRK2 RNA guide
ucaauugaaugauggcuuugug

SEQ ID NO: 59237 - RNA, 22 nt, Artificial Sequence
  LRRK2 RNA guide
uccacaaagccaucauucaauu

SEQ ID NO: 59238 - RNA, 22 nt, Artificial Sequence
  LRRK2 RNA guide
ugaaugauggcuuuguggaaau

SEQ ID NO: 59239 - RNA, 22 nt, Artificial Sequence
  LRRK2 RNA guide
ugauggcuuuguggaaauccuu

SEQ ID NO: 59240 - RNA, 22 nt, Artificial Sequence
  LRRK2 RNA guide
uuaccccaaggauuuccacaaa

SEQ ID NO: 59241 - RNA, 22 nt, Artificial Sequence
  LRRK2 RNA guide
uuagucaauugaaugauggcuu

SEQ ID NO: 59242 - RNA, 22 nt, Artificial Sequence
  LRRK2 RNA guide
uuccacaaagccaucauucaau

SEQ ID NO: 59243 - RNA, 22 nt, Artificial Sequence
  LRRK2 RNA guide
uugaaugauggcuuuguggaaa

SEQ ID NO: 59244 - RNA, 22 nt, Artificial Sequence
  LRRK2 RNA guide
uuuaccccaaggauuuccacaa

SEQ ID NO: 59245 - RNA, 22 nt, Artificial Sequence
  LRRK2 RNA guide
uuuccacaaagccaucauucaa

SEQ ID NO: 59246 - RNA, 20 nt, Artificial Sequence
  LRRK2 RNA guide
aaagccuucauucaauugac

SEQ ID NO: 59247 - RNA, 20 nt, Artificial Sequence
  LRRK2 RNA guide
aagccuucauucaauugacu

SEQ ID NO: 59248 - RNA, 20 nt, Artificial Sequence
  LRRK2 RNA guide
aaggauuuccacaaagccuu

SEQ ID NO: 59249 - RNA, 20 nt, Artificial Sequence
  LRRK2 RNA guide
aaggcuuuguggaaauccuu

SEQ ID NO: 59250 - RNA, 20 nt, Artificial Sequence
  LRRK2 RNA guide
aaugaaggcuuuguggaaau

SEQ ID NO: 59251 - RNA, 20 nt, Artificial Sequence
  LRRK2 RNA guide
aauugaaugaaggcuuugug

SEQ ID NO: 59252 - RNA, 20 nt, Artificial Sequence
  LRRK2 RNA guide
acaaagccuucauucaauug

SEQ ID NO: 59253 - RNA, 20 nt, Artificial Sequence
  LRRK2 RNA guide
agccuucauucaauugacua

SEQ ID NO: 59254 - RNA, 20 nt, Artificial Sequence
  LRRK2 RNA guide
aggauuuccacaaagccuuc

SEQ ID NO: 59255 - RNA, 20 nt, Artificial Sequence
  LRRK2 RNA guide
agucaauugaaugaaggcuu

SEQ ID NO: 59256 - RNA, 20 nt, Artificial Sequence
  LRRK2 RNA guide
augaaggcuuuguggaaauc

SEQ ID NO: 59257 - RNA, 20 nt, Artificial Sequence
  LRRK2 RNA guide
auuagucaauugaaugaagg

SEQ ID NO: 59258 - RNA, 20 nt, Artificial Sequence
  LRRK2 RNA guide
auugaaugaaggcuuugugg

SEQ ID NO: 59259 - RNA, 20 nt, Artificial Sequence
  LRRK2 RNA guide
auuuccacaaagccuucauu

SEQ ID NO: 59260 - RNA, 20 nt, Artificial Sequence
  LRRK2 RNA guide
caaagccuucauucaauuga

SEQ ID NO: 59261 - RNA, 20 nt, Artificial Sequence
  LRRK2 RNA guide
caaggauuuccacaaagccu

SEQ ID NO: 59262 - RNA, 20 nt, Artificial Sequence
  LRRK2 RNA guide
caauugaaugaaggcuuugu

SEQ ID NO: 59263 - RNA, 20 nt, Artificial Sequence
  LRRK2 RNA guide
cacaaagccuucauucaauu

SEQ ID NO: 59264 - RNA, 20 nt, Artificial Sequence
  LRRK2 RNA guide
ccacaaagccuucauucaau

SEQ ID NO: 59265 - RNA, 20 nt, Artificial Sequence
  LRRK2 RNA guide
ccuucauucaauugacuaau

SEQ ID NO: 59266 - RNA, 20 nt, Artificial Sequence
  LRRK2 RNA guide
gaaggcuuuguggaaauccu

SEQ ID NO: 59267 - RNA, 20 nt, Artificial Sequence
  LRRK2 RNA guide
gaaugaaggcuuuguggaaa

SEQ ID NO: 59268 - RNA, 20 nt, Artificial Sequence
  LRRK2 RNA guide
gauuuccacaaagccuucau

SEQ ID NO: 59269 - RNA, 20 nt, Artificial Sequence
  LRRK2 RNA guide
gccuucauucaauugacuaa

SEQ ID NO: 59270 - RNA, 20 nt, Artificial Sequence
  LRRK2 RNA guide
ggauuuccacaaagccuuca

SEQ ID NO: 59271 - RNA, 20 nt, Artificial Sequence
  LRRK2 RNA guide
gucaauugaaugaaggcuuu

SEQ ID NO: 59272 - RNA, 20 nt, Artificial Sequence
  LRRK2 RNA guide
uagucaauugaaugaaggcu

SEQ ID NO: 59273 - RNA, 20 nt, Artificial Sequence
  LRRK2 RNA guide
ucaauugaaugaaggcuuug

SEQ ID NO: 59274 - RNA, 20 nt, Artificial Sequence
  LRRK2 RNA guide
uccacaaagccuucauucaa

SEQ ID NO: 59275 - RNA, 20 nt, Artificial Sequence
  LRRK2 RNA guide
ugaaggcuuuguggaaaucc

SEQ ID NO: 59276 - RNA, 20 nt, Artificial Sequence
  LRRK2 RNA guide
ugaaugaaggcuuuguggaa

SEQ ID NO: 59277 - RNA, 20 nt, Artificial Sequence
  LRRK2 RNA guide
uuagucaauugaaugaaggc

SEQ ID NO: 59278 - RNA, 20 nt, Artificial Sequence
  LRRK2 RNA guide
uuccacaaagccuucauuca

SEQ ID NO: 59279 - RNA, 20 nt, Artificial Sequence
  LRRK2 RNA guide
uugaaugaaggcuuugugga

SEQ ID NO: 59280 - RNA, 20 nt, Artificial Sequence
  LRRK2 RNA guide
uuuccacaaagccuucauuc

SEQ ID NO: 59281 - RNA, 21 nt, Artificial Sequence
  LRRK2 RNA guide
aaagccuucauucaauugacu

SEQ ID NO: 59282 - RNA, 21 nt, Artificial Sequence
  LRRK2 RNA guide
aagccuucauucaauugacua

SEQ ID NO: 59283 - RNA, 21 nt, Artificial Sequence
  LRRK2 RNA guide
aaggauuuccacaaagccuuc

SEQ ID NO: 59284 - RNA, 21 nt, Artificial Sequence
  LRRK2 RNA guide
aaggcuuuguggaaauccuug

SEQ ID NO: 59285 - RNA, 21 nt, Artificial Sequence
  LRRK2 RNA guide
aaugaaggcuuuguggaaauc

SEQ ID NO: 59286 - RNA, 21 nt, Artificial Sequence
  LRRK2 RNA guide
aauugaaugaaggcuuugugg

SEQ ID NO: 59287 - RNA, 21 nt, Artificial Sequence
  LRRK2 RNA guide
acaaagccuucauucaauuga

SEQ ID NO: 59288 - RNA, 21 nt, Artificial Sequence
  LRRK2 RNA guide
agccuucauucaauugacuaa

SEQ ID NO: 59289 - RNA, 21 nt, Artificial Sequence
  LRRK2 RNA guide
aggauuuccacaaagccuuca

SEQ ID NO: 59290 - RNA, 21 nt, Artificial Sequence
  LRRK2 RNA guide
agucaauugaaugaaggcuuu

SEQ ID NO: 59291 - RNA, 21 nt, Artificial Sequence
  LRRK2 RNA guide
augaaggcuuuguggaaaucc

SEQ ID NO: 59292 - RNA, 21 nt, Artificial Sequence
  LRRK2 RNA guide
auuagucaauugaaugaaggc

SEQ ID NO: 59293 - RNA, 21 nt, Artificial Sequence
  LRRK2 RNA guide
auugaaugaaggcuuugugga

SEQ ID NO: 59294 - RNA, 21 nt, Artificial Sequence
  LRRK2 RNA guide
auuuccacaaagccuucauuc

SEQ ID NO: 59295 - RNA, 21 nt, Artificial Sequence
  LRRK2 RNA guide
caaagccuucauucaauugac

SEQ ID NO: 59296 - RNA, 21 nt, Artificial Sequence
  LRRK2 RNA guide
caaggauuuccacaaagccuu

SEQ ID NO: 59297 - RNA, 21 nt, Artificial Sequence
  LRRK2 RNA guide
caauugaaugaaggcuuugug

SEQ ID NO: 59298 - RNA, 21 nt, Artificial Sequence
  LRRK2 RNA guide
cacaaagccuucauucaauug

SEQ ID NO: 59299 - RNA, 21 nt, Artificial Sequence
  LRRK2 RNA guide
ccaaggauuuccacaaagccu

SEQ ID NO: 59300 - RNA, 21 nt, Artificial Sequence
  LRRK2 RNA guide
ccacaaagccuucauucaauu

SEQ ID NO: 59301 - RNA, 21 nt, Artificial Sequence
  LRRK2 RNA guide
gaaggcuuuguggaaauccuu

SEQ ID NO: 59302 - RNA, 21 nt, Artificial Sequence
  LRRK2 RNA guide
gaaugaaggcuuuguggaaau

SEQ ID NO: 59303 - RNA, 21 nt, Artificial Sequence
  LRRK2 RNA guide
gauuuccacaaagccuucauu

SEQ ID NO: 59304 - RNA, 21 nt, Artificial Sequence
  LRRK2 RNA guide
gccuucauucaauugacuaau

SEQ ID NO: 59305 - RNA, 21 nt, Artificial Sequence
  LRRK2 RNA guide
ggauuuccacaaagccuucau

SEQ ID NO: 59306 - RNA, 21 nt, Artificial Sequence
  LRRK2 RNA guide
gucaauugaaugaaggcuuug

SEQ ID NO: 59307 - RNA, 21 nt, Artificial Sequence
  LRRK2 RNA guide
uagucaauugaaugaaggcuu

SEQ ID NO: 59308 - RNA, 21 nt, Artificial Sequence
  LRRK2 RNA guide
ucaauugaaugaaggcuuugu

SEQ ID NO: 59309 - RNA, 21 nt, Artificial Sequence
  LRRK2 RNA guide
uccacaaagccuucauucaau

SEQ ID NO: 59310 - RNA, 21 nt, Artificial Sequence
  LRRK2 RNA guide
ugaaggcuuuguggaaauccu

SEQ ID NO: 59311 - RNA, 21 nt, Artificial Sequence
  LRRK2 RNA guide
ugaaugaaggcuuuguggaaa

SEQ ID NO: 59312 - RNA, 21 nt, Artificial Sequence
  LRRK2 RNA guide
uuagucaauugaaugaaggcu

SEQ ID NO: 59313 - RNA, 21 nt, Artificial Sequence
  LRRK2 RNA guide
uuccacaaagccuucauucaa

SEQ ID NO: 59314 - RNA, 21 nt, Artificial Sequence
  LRRK2 RNA guide
uugaaugaaggcuuuguggaa

SEQ ID NO: 59315 - RNA, 21 nt, Artificial Sequence
  LRRK2 RNA guide
uuuccacaaagccuucauuca

SEQ ID NO: 59316 - RNA, 22 nt, Artificial Sequence
  LRRK2 RNA guide
aaagccuucauucaauugacua

SEQ ID NO: 59317 - RNA, 22 nt, Artificial Sequence
  LRRK2 RNA guide
aagccuucauucaauugacuaa

SEQ ID NO: 59318 - RNA, 22 nt, Artificial Sequence
  LRRK2 RNA guide
aaggauuuccacaaagccuuca

SEQ ID NO: 59319 - RNA, 22 nt, Artificial Sequence
  LRRK2 RNA guide
aaggcuuuguggaaauccuugg

SEQ ID NO: 59320 - RNA, 22 nt, Artificial Sequence
  LRRK2 RNA guide
aaugaaggcuuuguggaaaucc

SEQ ID NO: 59321 - RNA, 22 nt, Artificial Sequence
  LRRK2 RNA guide
aauuagucaauugaaugaaggc

SEQ ID NO: 59322 - RNA, 22 nt, Artificial Sequence
  LRRK2 RNA guide
aauugaaugaaggcuuugugga

SEQ ID NO: 59323 - RNA, 22 nt, Artificial Sequence
  LRRK2 RNA guide
acaaagccuucauucaauugac

SEQ ID NO: 59324 - RNA, 22 nt, Artificial Sequence
  LRRK2 RNA guide
agccuucauucaauugacuaau

SEQ ID NO: 59325 - RNA, 22 nt, Artificial Sequence
  LRRK2 RNA guide
aggauuuccacaaagccuucau

SEQ ID NO: 59326 - RNA, 22 nt, Artificial Sequence
  LRRK2 RNA guide
agucaauugaaugaaggcuuug

SEQ ID NO: 59327 - RNA, 22 nt, Artificial Sequence
  LRRK2 RNA guide
augaaggcuuuguggaaauccu

SEQ ID NO: 59328 - RNA, 22 nt, Artificial Sequence
  LRRK2 RNA guide
auuagucaauugaaugaaggcu

SEQ ID NO: 59329 - RNA, 22 nt, Artificial Sequence
  LRRK2 RNA guide
auugaaugaaggcuuuguggaa

SEQ ID NO: 59330 - RNA, 22 nt, Artificial Sequence
  LRRK2 RNA guide
auuuccacaaagccuucauuca

SEQ ID NO: 59331 - RNA, 22 nt, Artificial Sequence
  LRRK2 RNA guide
caaagccuucauucaauugacu

SEQ ID NO: 59332 - RNA, 22 nt, Artificial Sequence
  LRRK2 RNA guide
caaggauuuccacaaagccuuc

SEQ ID NO: 59333 - RNA, 22 nt, Artificial Sequence
  LRRK2 RNA guide
caauugaaugaaggcuuugugg

SEQ ID NO: 59334 - RNA, 22 nt, Artificial Sequence
  LRRK2 RNA guide
cacaaagccuucauucaauuga

SEQ ID NO: 59335 - RNA, 22 nt, Artificial Sequence
  LRRK2 RNA guide
ccaaggauuuccacaaagccuu

SEQ ID NO: 59336 - RNA, 22 nt, Artificial Sequence
  LRRK2 RNA guide
ccacaaagccuucauucaauug

SEQ ID NO: 59337 - RNA, 22 nt, Artificial Sequence
  LRRK2 RNA guide
cccaaggauuuccacaaagccu

SEQ ID NO: 59338 - RNA, 22 nt, Artificial Sequence
  LRRK2 RNA guide
ccuucauucaauugacuaauuc

SEQ ID NO: 59339 - RNA, 22 nt, Artificial Sequence
  LRRK2 RNA guide
gaaggcuuuguggaaauccuug

SEQ ID NO: 59340 - RNA, 22 nt, Artificial Sequence
  LRRK2 RNA guide
gaaugaaggcuuuguggaaauc

SEQ ID NO: 59341 - RNA, 22 nt, Artificial Sequence
  LRRK2 RNA guide
gaauuagucaauugaaugaagg

SEQ ID NO: 59342 - RNA, 22 nt, Artificial Sequence
  LRRK2 RNA guide
gauuuccacaaagccuucauuc

SEQ ID NO: 59343 - RNA, 22 nt, Artificial Sequence
  LRRK2 RNA guide
gccuucauucaauugacuaauu

SEQ ID NO: 59344 - RNA, 22 nt, Artificial Sequence
  LRRK2 RNA guide
ggauuuccacaaagccuucauu

SEQ ID NO: 59345 - RNA, 22 nt, Artificial Sequence
  LRRK2 RNA guide
gucaauugaaugaaggcuuugu

SEQ ID NO: 59346 - RNA, 22 nt, Artificial Sequence
  LRRK2 RNA guide
uagucaauugaaugaaggcuuu

SEQ ID NO: 59347 - RNA, 22 nt, Artificial Sequence
  LRRK2 RNA guide
ucaauugaaugaaggcuuugug

SEQ ID NO: 59348 - RNA, 22 nt, Artificial Sequence
  LRRK2 RNA guide
uccacaaagccuucauucaauu

SEQ ID NO: 59349 - RNA, 22 nt, Artificial Sequence
  LRRK2 RNA guide
ugaaggcuuuguggaaauccuu

SEQ ID NO: 59350 - RNA, 22 nt, Artificial Sequence
  LRRK2 RNA guide
ugaaugaaggcuuuguggaaau

SEQ ID NO: 59351 - RNA, 22 nt, Artificial Sequence
  LRRK2 RNA guide
uuagucaauugaaugaaggcuu

SEQ ID NO: 59352 - RNA, 22 nt, Artificial Sequence
  LRRK2 RNA guide
uuccacaaagccuucauucaau

SEQ ID NO: 59353 - RNA, 22 nt, Artificial Sequence
  LRRK2 RNA guide
uugaaugaaggcuuuguggaaa

SEQ ID NO: 59354 - RNA, 22 nt, Artificial Sequence
  LRRK2 RNA guide
uuuccacaaagccuucauucaa

SEQ ID NO: 59355 - RNA, 20 nt, Artificial Sequence
  LRRK2 RNA guide
aaaacucaccuccauguuau

SEQ ID NO: 59356 - RNA, 20 nt, Artificial Sequence
  LRRK2 RNA guide
aaacucaccuccauguuauc

SEQ ID NO: 59357 - RNA, 20 nt, Artificial Sequence
  LRRK2 RNA guide
aacauggaggugaguuuuga

SEQ ID NO: 59358 - RNA, 20 nt, Artificial Sequence
  LRRK2 RNA guide
aacucaccuccauguuaucu

SEQ ID NO: 59359 - RNA, 20 nt, Artificial Sequence
  LRRK2 RNA guide
aagucaaaacucaccuccau

SEQ ID NO: 59360 - RNA, 20 nt, Artificial Sequence
  LRRK2 RNA guide
acauggaggugaguuuugac

SEQ ID NO: 59361 - RNA, 20 nt, Artificial Sequence
  LRRK2 RNA guide
accucuaucuagauaacaug

SEQ ID NO: 59362 - RNA, 20 nt, Artificial Sequence
  LRRK2 RNA guide
acucaccuccauguuaucua

SEQ ID NO: 59363 - RNA, 20 nt, Artificial Sequence
  LRRK2 RNA guide
acuuaagucaaaacucaccu

SEQ ID NO: 59364 - RNA, 20 nt, Artificial Sequence
  LRRK2 RNA guide
agauaacauggaggugaguu

SEQ ID NO: 59365 - RNA, 20 nt, Artificial Sequence
  LRRK2 RNA guide
aggugaguuuugacuuaagu

SEQ ID NO: 59366 - RNA, 20 nt, Artificial Sequence
  LRRK2 RNA guide
agucaaaacucaccuccaug

SEQ ID NO: 59367 - RNA, 20 nt, Artificial Sequence
  LRRK2 RNA guide
auaacauggaggugaguuuu

SEQ ID NO: 59368 - RNA, 20 nt, Artificial Sequence
  LRRK2 RNA guide
aucuagauaacauggaggug

SEQ ID NO: 59369 - RNA, 20 nt, Artificial Sequence
  LRRK2 RNA guide
auggaggugaguuuugacuu

SEQ ID NO: 59370 - RNA, 20 nt, Artificial Sequence
  LRRK2 RNA guide
caaaacucaccuccauguua

SEQ ID NO: 59371 - RNA, 20 nt, Artificial Sequence
  LRRK2 RNA guide
caccuccauguuaucuagau

SEQ ID NO: 59372 - RNA, 20 nt, Artificial Sequence
  LRRK2 RNA guide
cacuuaagucaaaacucacc

SEQ ID NO: 59373 - RNA, 20 nt, Artificial Sequence
  LRRK2 RNA guide
cauggaggugaguuuugacu

SEQ ID NO: 59374 - RNA, 20 nt, Artificial Sequence
  LRRK2 RNA guide
cauuucacuuaagucaaaac

SEQ ID NO: 59375 - RNA, 20 nt, Artificial Sequence
  LRRK2 RNA guide
ccucuaucuagauaacaugg

SEQ ID NO: 59376 - RNA, 20 nt, Artificial Sequence
  LRRK2 RNA guide
cuagauaacauggaggugag

SEQ ID NO: 59377 - RNA, 20 nt, Artificial Sequence
  LRRK2 RNA guide
cuaucuagauaacauggagg

SEQ ID NO: 59378 - RNA, 20 nt, Artificial Sequence
  LRRK2 RNA guide
cucaccuccauguuaucuag

SEQ ID NO: 59379 - RNA, 20 nt, Artificial Sequence
  LRRK2 RNA guide
cucuaucuagauaacaugga

SEQ ID NO: 59380 - RNA, 20 nt, Artificial Sequence
  LRRK2 RNA guide
cuuaagucaaaacucaccuc

SEQ ID NO: 59381 - RNA, 20 nt, Artificial Sequence
  LRRK2 RNA guide
gaggugaguuuugacuuaag

SEQ ID NO: 59382 - RNA, 20 nt, Artificial Sequence
  LRRK2 RNA guide
gauaacauggaggugaguuu

SEQ ID NO: 59383 - RNA, 20 nt, Artificial Sequence
  LRRK2 RNA guide
ggaggugaguuuugacuuaa

SEQ ID NO: 59384 - RNA, 20 nt, Artificial Sequence
  LRRK2 RNA guide
ggugaguuuugacuuaagug

SEQ ID NO: 59385 - RNA, 20 nt, Artificial Sequence
  LRRK2 RNA guide
gucaaaacucaccuccaugu

SEQ ID NO: 59386 - RNA, 20 nt, Artificial Sequence
  LRRK2 RNA guide
gugaguuuugacuuaaguga

SEQ ID NO: 59387 - RNA, 20 nt, Artificial Sequence
  LRRK2 RNA guide
uaacauggaggugaguuuug

SEQ ID NO: 59388 - RNA, 20 nt, Artificial Sequence
  LRRK2 RNA guide
uaagucaaaacucaccucca

SEQ ID NO: 59389 - RNA, 20 nt, Artificial Sequence
  LRRK2 RNA guide
uagauaacauggaggugagu

SEQ ID NO: 59390 - RNA, 20 nt, Artificial Sequence
  LRRK2 RNA guide
uaucuagauaacauggaggu

SEQ ID NO: 59391 - RNA, 20 nt, Artificial Sequence
  LRRK2 RNA guide
ucaaaacucaccuccauguu

SEQ ID NO: 59392 - RNA, 20 nt, Artificial Sequence
  LRRK2 RNA guide
ucaccuccauguuaucuaga

SEQ ID NO: 59393 - RNA, 20 nt, Artificial Sequence
  LRRK2 RNA guide
ucacuuaagucaaaacucac

SEQ ID NO: 59394 - RNA, 20 nt, Artificial Sequence
  LRRK2 RNA guide
ucuagauaacauggagguga

SEQ ID NO: 59395 - RNA, 20 nt, Artificial Sequence
  LRRK2 RNA guide
ucuaucuagauaacauggag

SEQ ID NO: 59396 - RNA, 20 nt, Artificial Sequence
  LRRK2 RNA guide
uggaggugaguuuugacuua

SEQ ID NO: 59397 - RNA, 20 nt, Artificial Sequence
  LRRK2 RNA guide
uuaagucaaaacucaccucc

SEQ ID NO: 59398 - RNA, 20 nt, Artificial Sequence
  LRRK2 RNA guide
uucacuuaagucaaaacuca

SEQ ID NO: 59399 - RNA, 20 nt, Artificial Sequence
  LRRK2 RNA guide
uuucacuuaagucaaaacuc

SEQ ID NO: 59400 - RNA, 21 nt, Artificial Sequence
  LRRK2 RNA guide
aaaacucaccuccauguuauc

SEQ ID NO: 59401 - RNA, 21 nt, Artificial Sequence
  LRRK2 RNA guide
aaacucaccuccauguuaucu

SEQ ID NO: 59402 - RNA, 21 nt, Artificial Sequence
  LRRK2 RNA guide
aacauggaggugaguuuugac

SEQ ID NO: 59403 - RNA, 21 nt, Artificial Sequence
  LRRK2 RNA guide
aaccucuaucuagauaacaug

SEQ ID NO: 59404 - RNA, 21 nt, Artificial Sequence
  LRRK2 RNA guide
aacucaccuccauguuaucua

SEQ ID NO: 59405 - RNA, 21 nt, Artificial Sequence
  LRRK2 RNA guide
aagucaaaacucaccuccaug

SEQ ID NO: 59406 - RNA, 21 nt, Artificial Sequence
  LRRK2 RNA guide
acauggaggugaguuuugacu

SEQ ID NO: 59407 - RNA, 21 nt, Artificial Sequence
  LRRK2 RNA guide
accucuaucuagauaacaugg

SEQ ID NO: 59408 - RNA, 21 nt, Artificial Sequence
  LRRK2 RNA guide
acucaccuccauguuaucuag

SEQ ID NO: 59409 - RNA, 21 nt, Artificial Sequence
  LRRK2 RNA guide
acuuaagucaaaacucaccuc

SEQ ID NO: 59410 - RNA, 21 nt, Artificial Sequence
  LRRK2 RNA guide
agauaacauggaggugaguuu

SEQ ID NO: 59411 - RNA, 21 nt, Artificial Sequence
  LRRK2 RNA guide
aggugaguuuugacuuaagug

SEQ ID NO: 59412 - RNA, 21 nt, Artificial Sequence
  LRRK2 RNA guide
agucaaaacucaccuccaugu

SEQ ID NO: 59413 - RNA, 21 nt, Artificial Sequence
  LRRK2 RNA guide
auaacauggaggugaguuuug

SEQ ID NO: 59414 - RNA, 21 nt, Artificial Sequence
  LRRK2 RNA guide
aucuagauaacauggagguga

SEQ ID NO: 59415 - RNA, 21 nt, Artificial Sequence
  LRRK2 RNA guide
auggaggugaguuuugacuua

SEQ ID NO: 59416 - RNA, 21 nt, Artificial Sequence
  LRRK2 RNA guide
caaaacucaccuccauguuau

SEQ ID NO: 59417 - RNA, 21 nt, Artificial Sequence
  LRRK2 RNA guide
caccuccauguuaucuagaua

SEQ ID NO: 59418 - RNA, 21 nt, Artificial Sequence
  LRRK2 RNA guide
cacuuaagucaaaacucaccu

SEQ ID NO: 59419 - RNA, 21 nt, Artificial Sequence
  LRRK2 RNA guide
cauggaggugaguuuugacuu

SEQ ID NO: 59420 - RNA, 21 nt, Artificial Sequence
  LRRK2 RNA guide
ccucuaucuagauaacaugga

SEQ ID NO: 59421 - RNA, 21 nt, Artificial Sequence
  LRRK2 RNA guide
cuagauaacauggaggugagu

SEQ ID NO: 59422 - RNA, 21 nt, Artificial Sequence
  LRRK2 RNA guide
cuaucuagauaacauggaggu

SEQ ID NO: 59423 - RNA, 21 nt, Artificial Sequence
  LRRK2 RNA guide
cucaccuccauguuaucuaga

SEQ ID NO: 59424 - RNA, 21 nt, Artificial Sequence
  LRRK2 RNA guide
cucuaucuagauaacauggag

SEQ ID NO: 59425 - RNA, 21 nt, Artificial Sequence
  LRRK2 RNA guide
cuuaagucaaaacucaccucc

SEQ ID NO: 59426 - RNA, 21 nt, Artificial Sequence
  LRRK2 RNA guide
gaggugaguuuugacuuaagu

SEQ ID NO: 59427 - RNA, 21 nt, Artificial Sequence
  LRRK2 RNA guide
gauaacauggaggugaguuuu

SEQ ID NO: 59428 - RNA, 21 nt, Artificial Sequence
  LRRK2 RNA guide
ggaggugaguuuugacuuaag

SEQ ID NO: 59429 - RNA, 21 nt, Artificial Sequence
  LRRK2 RNA guide
ggugaguuuugacuuaaguga

SEQ ID NO: 59430 - RNA, 21 nt, Artificial Sequence
  LRRK2 RNA guide
gucaaaacucaccuccauguu

SEQ ID NO: 59431 - RNA, 21 nt, Artificial Sequence
  LRRK2 RNA guide
gugaguuuugacuuaagugaa

SEQ ID NO: 59432 - RNA, 21 nt, Artificial Sequence
  LRRK2 RNA guide
uaacauggaggugaguuuuga

SEQ ID NO: 59433 - RNA, 21 nt, Artificial Sequence
  LRRK2 RNA guide
uaagucaaaacucaccuccau

SEQ ID NO: 59434 - RNA, 21 nt, Artificial Sequence
  LRRK2 RNA guide
uagauaacauggaggugaguu

SEQ ID NO: 59435 - RNA, 21 nt, Artificial Sequence
  LRRK2 RNA guide
uaucuagauaacauggaggug

SEQ ID NO: 59436 - RNA, 21 nt, Artificial Sequence
  LRRK2 RNA guide
ucaaaacucaccuccauguua

SEQ ID NO: 59437 - RNA, 21 nt, Artificial Sequence
  LRRK2 RNA guide
ucaccuccauguuaucuagau

SEQ ID NO: 59438 - RNA, 21 nt, Artificial Sequence
  LRRK2 RNA guide
ucacuuaagucaaaacucacc

SEQ ID NO: 59439 - RNA, 21 nt, Artificial Sequence
  LRRK2 RNA guide
ucuagauaacauggaggugag

SEQ ID NO: 59440 - RNA, 21 nt, Artificial Sequence
  LRRK2 RNA guide
ucuaucuagauaacauggagg

SEQ ID NO: 59441 - RNA, 21 nt, Artificial Sequence
  LRRK2 RNA guide
uggaggugaguuuugacuuaa

SEQ ID NO: 59442 - RNA, 21 nt, Artificial Sequence
  LRRK2 RNA guide
uuaagucaaaacucaccucca

SEQ ID NO: 59443 - RNA, 21 nt, Artificial Sequence
  LRRK2 RNA guide
uucacuuaagucaaaacucac

SEQ ID NO: 59444 - RNA, 22 nt, Artificial Sequence
  LRRK2 RNA guide
aaaacucaccuccauguuaucu

SEQ ID NO: 59445 - RNA, 22 nt, Artificial Sequence
  LRRK2 RNA guide
aaaccucuaucuagauaacaug

SEQ ID NO: 59446 - RNA, 22 nt, Artificial Sequence
  LRRK2 RNA guide
aaacucaccuccauguuaucua

SEQ ID NO: 59447 - RNA, 22 nt, Artificial Sequence
  LRRK2 RNA guide
aacauggaggugaguuuugacu

SEQ ID NO: 59448 - RNA, 22 nt, Artificial Sequence
  LRRK2 RNA guide
aaccucuaucuagauaacaugg

SEQ ID NO: 59449 - RNA, 22 nt, Artificial Sequence
  LRRK2 RNA guide
aacucaccuccauguuaucuag

SEQ ID NO: 59450 - RNA, 22 nt, Artificial Sequence
  LRRK2 RNA guide
aagucaaaacucaccuccaugu

SEQ ID NO: 59451 - RNA, 22 nt, Artificial Sequence
  LRRK2 RNA guide
acauggaggugaguuuugacuu

SEQ ID NO: 59452 - RNA, 22 nt, Artificial Sequence
  LRRK2 RNA guide
accucuaucuagauaacaugga

SEQ ID NO: 59453 - RNA, 22 nt, Artificial Sequence
  LRRK2 RNA guide
acucaccuccauguuaucuaga

SEQ ID NO: 59454 - RNA, 22 nt, Artificial Sequence
  LRRK2 RNA guide
acuuaagucaaaacucaccucc

SEQ ID NO: 59455 - RNA, 22 nt, Artificial Sequence
  LRRK2 RNA guide
agauaacauggaggugaguuuu

SEQ ID NO: 59456 - RNA, 22 nt, Artificial Sequence
  LRRK2 RNA guide
aggugaguuuugacuuaaguga

SEQ ID NO: 59457 - RNA, 22 nt, Artificial Sequence
  LRRK2 RNA guide
agucaaaacucaccuccauguu

SEQ ID NO: 59458 - RNA, 22 nt, Artificial Sequence
  LRRK2 RNA guide
auaacauggaggugaguuuuga

SEQ ID NO: 59459 - RNA, 22 nt, Artificial Sequence
  LRRK2 RNA guide
aucuagauaacauggaggugag

SEQ ID NO: 59460 - RNA, 22 nt, Artificial Sequence
  LRRK2 RNA guide
auggaggugaguuuugacuuaa

SEQ ID NO: 59461 - RNA, 22 nt, Artificial Sequence
  LRRK2 RNA guide
caaaacucaccuccauguuauc

SEQ ID NO: 59462 - RNA, 22 nt, Artificial Sequence
  LRRK2 RNA guide
caccuccauguuaucuagauag

SEQ ID NO: 59463 - RNA, 22 nt, Artificial Sequence
  LRRK2 RNA guide
cacuuaagucaaaacucaccuc

SEQ ID NO: 59464 - RNA, 22 nt, Artificial Sequence
  LRRK2 RNA guide
cauggaggugaguuuugacuua

SEQ ID NO: 59465 - RNA, 22 nt, Artificial Sequence
  LRRK2 RNA guide
cauuucacuuaagucaaaacuc

SEQ ID NO: 59466 - RNA, 22 nt, Artificial Sequence
  LRRK2 RNA guide
ccucuaucuagauaacauggag

SEQ ID NO: 59467 - RNA, 22 nt, Artificial Sequence
  LRRK2 RNA guide
cuagauaacauggaggugaguu

SEQ ID NO: 59468 - RNA, 22 nt, Artificial Sequence
  LRRK2 RNA guide
cuaucuagauaacauggaggug

SEQ ID NO: 59469 - RNA, 22 nt, Artificial Sequence
  LRRK2 RNA guide
cucaccuccauguuaucuagau

SEQ ID NO: 59470 - RNA, 22 nt, Artificial Sequence
  LRRK2 RNA guide
cucuaucuagauaacauggagg

SEQ ID NO: 59471 - RNA, 22 nt, Artificial Sequence
  LRRK2 RNA guide
cuuaagucaaaacucaccucca

SEQ ID NO: 59472 - RNA, 22 nt, Artificial Sequence
  LRRK2 RNA guide
gaggugaguuuugacuuaagug

SEQ ID NO: 59473 - RNA, 22 nt, Artificial Sequence
  LRRK2 RNA guide
gauaacauggaggugaguuuug

SEQ ID NO: 59474 - RNA, 22 nt, Artificial Sequence
  LRRK2 RNA guide
ggaggugaguuuugacuuaagu

SEQ ID NO: 59475 - RNA, 22 nt, Artificial Sequence
  LRRK2 RNA guide
ggugaguuuugacuuaagugaa

SEQ ID NO: 59476 - RNA, 22 nt, Artificial Sequence
  LRRK2 RNA guide
gucaaaacucaccuccauguua

SEQ ID NO: 59477 - RNA, 22 nt, Artificial Sequence
  LRRK2 RNA guide
gugaguuuugacuuaagugaaa

SEQ ID NO: 59478 - RNA, 22 nt, Artificial Sequence
  LRRK2 RNA guide
uaacauggaggugaguuuugac

SEQ ID NO: 59479 - RNA, 22 nt, Artificial Sequence
  LRRK2 RNA guide
uaagucaaaacucaccuccaug

SEQ ID NO: 59480 - RNA, 22 nt, Artificial Sequence
  LRRK2 RNA guide
uagauaacauggaggugaguuu

SEQ ID NO: 59481 - RNA, 22 nt, Artificial Sequence
  LRRK2 RNA guide
uaucuagauaacauggagguga

SEQ ID NO: 59482 - RNA, 22 nt, Artificial Sequence
  LRRK2 RNA guide
ucaaaacucaccuccauguuau

SEQ ID NO: 59483 - RNA, 22 nt, Artificial Sequence
  LRRK2 RNA guide
ucaccuccauguuaucuagaua

SEQ ID NO: 59484 - RNA, 22 nt, Artificial Sequence
  LRRK2 RNA guide
ucacuuaagucaaaacucaccu

SEQ ID NO: 59485 - RNA, 22 nt, Artificial Sequence
  LRRK2 RNA guide
ucuagauaacauggaggugagu

SEQ ID NO: 59486 - RNA, 22 nt, Artificial Sequence
  LRRK2 RNA guide
ucuaucuagauaacauggaggu

SEQ ID NO: 59487 - RNA, 22 nt, Artificial Sequence
  LRRK2 RNA guide
uggaggugaguuuugacuuaag

SEQ ID NO: 59488 - RNA, 22 nt, Artificial Sequence
  LRRK2 RNA guide
uuaagucaaaacucaccuccau

SEQ ID NO: 59489 - RNA, 22 nt, Artificial Sequence
  LRRK2 RNA guide
uucacuuaagucaaaacucacc

SEQ ID NO: 59490 - RNA, 22 nt, Artificial Sequence
  LRRK2 RNA guide
uuucacuuaagucaaaacucac

SEQ ID NO: 59491 - RNA, 20 nt, Artificial Sequence
  LRRK2 RNA guide
aaaacuccccuccauguuau

SEQ ID NO: 59492 - RNA, 20 nt, Artificial Sequence
  LRRK2 RNA guide
aaacuccccuccauguuauc

SEQ ID NO: 59493 - RNA, 20 nt, Artificial Sequence
  LRRK2 RNA guide
aacauggaggggaguuuuga

SEQ ID NO: 59494 - RNA, 20 nt, Artificial Sequence
  LRRK2 RNA guide
aacuccccuccauguuaucu

SEQ ID NO: 59495 - RNA, 20 nt, Artificial Sequence
  LRRK2 RNA guide
aagucaaaacuccccuccau

SEQ ID NO: 59496 - RNA, 20 nt, Artificial Sequence
  LRRK2 RNA guide
acauggaggggaguuuugac

SEQ ID NO: 59497 - RNA, 20 nt, Artificial Sequence
  LRRK2 RNA guide
acuccccuccauguuaucua

SEQ ID NO: 59498 - RNA, 20 nt, Artificial Sequence
  LRRK2 RNA guide
acuuaagucaaaacuccccu

SEQ ID NO: 59499 - RNA, 20 nt, Artificial Sequence
  LRRK2 RNA guide
agauaacauggaggggaguu

SEQ ID NO: 59500 - RNA, 20 nt, Artificial Sequence
  LRRK2 RNA guide
aggggaguuuugacuuaagu

SEQ ID NO: 59501 - RNA, 20 nt, Artificial Sequence
  LRRK2 RNA guide
agucaaaacuccccuccaug

SEQ ID NO: 59502 - RNA, 20 nt, Artificial Sequence
  LRRK2 RNA guide
auaacauggaggggaguuuu

SEQ ID NO: 59503 - RNA, 20 nt, Artificial Sequence
  LRRK2 RNA guide
aucuagauaacauggagggg

SEQ ID NO: 59504 - RNA, 20 nt, Artificial Sequence
  LRRK2 RNA guide
auggaggggaguuuugacuu

SEQ ID NO: 59505 - RNA, 20 nt, Artificial Sequence
  LRRK2 RNA guide
caaaacuccccuccauguua

SEQ ID NO: 59506 - RNA, 20 nt, Artificial Sequence
  LRRK2 RNA guide
cacuuaagucaaaacucccc

SEQ ID NO: 59507 - RNA, 20 nt, Artificial Sequence
  LRRK2 RNA guide
cauggaggggaguuuugacu

SEQ ID NO: 59508 - RNA, 20 nt, Artificial Sequence
  LRRK2 RNA guide
ccccuccauguuaucuagau

SEQ ID NO: 59509 - RNA, 20 nt, Artificial Sequence
  LRRK2 RNA guide
cuagauaacauggaggggag

SEQ ID NO: 59510 - RNA, 20 nt, Artificial Sequence
  LRRK2 RNA guide
cuccccuccauguuaucuag

SEQ ID NO: 59511 - RNA, 20 nt, Artificial Sequence
  LRRK2 RNA guide
cuuaagucaaaacuccccuc

SEQ ID NO: 59512 - RNA, 20 nt, Artificial Sequence
  LRRK2 RNA guide
gaggggaguuuugacuuaag

SEQ ID NO: 59513 - RNA, 20 nt, Artificial Sequence
  LRRK2 RNA guide
gauaacauggaggggaguuu

SEQ ID NO: 59514 - RNA, 20 nt, Artificial Sequence
  LRRK2 RNA guide
ggaggggaguuuugacuuaa

SEQ ID NO: 59515 - RNA, 20 nt, Artificial Sequence
  LRRK2 RNA guide
gggaguuuugacuuaaguga

SEQ ID NO: 59516 - RNA, 20 nt, Artificial Sequence
  LRRK2 RNA guide
ggggaguuuugacuuaagug

SEQ ID NO: 59517 - RNA, 20 nt, Artificial Sequence
  LRRK2 RNA guide
gucaaaacuccccuccaugu

SEQ ID NO: 59518 - RNA, 20 nt, Artificial Sequence
  LRRK2 RNA guide
uaacauggaggggaguuuug

SEQ ID NO: 59519 - RNA, 20 nt, Artificial Sequence
  LRRK2 RNA guide
uaagucaaaacuccccucca

SEQ ID NO: 59520 - RNA, 20 nt, Artificial Sequence
  LRRK2 RNA guide
uagauaacauggaggggagu

SEQ ID NO: 59521 - RNA, 20 nt, Artificial Sequence
  LRRK2 RNA guide
uaucuagauaacauggaggg

SEQ ID NO: 59522 - RNA, 20 nt, Artificial Sequence
  LRRK2 RNA guide
ucaaaacuccccuccauguu

SEQ ID NO: 59523 - RNA, 20 nt, Artificial Sequence
  LRRK2 RNA guide
ucacuuaagucaaaacuccc

SEQ ID NO: 59524 - RNA, 20 nt, Artificial Sequence
  LRRK2 RNA guide
uccccuccauguuaucuaga

SEQ ID NO: 59525 - RNA, 20 nt, Artificial Sequence
  LRRK2 RNA guide
ucuagauaacauggagggga

SEQ ID NO: 59526 - RNA, 20 nt, Artificial Sequence
  LRRK2 RNA guide
uggaggggaguuuugacuua

SEQ ID NO: 59527 - RNA, 20 nt, Artificial Sequence
  LRRK2 RNA guide
uuaagucaaaacuccccucc

SEQ ID NO: 59528 - RNA, 20 nt, Artificial Sequence
  LRRK2 RNA guide
uucacuuaagucaaaacucc

SEQ ID NO: 59529 - RNA, 21 nt, Artificial Sequence
  LRRK2 RNA guide
aaaacuccccuccauguuauc

SEQ ID NO: 59530 - RNA, 21 nt, Artificial Sequence
  LRRK2 RNA guide
aaacuccccuccauguuaucu

SEQ ID NO: 59531 - RNA, 21 nt, Artificial Sequence
  LRRK2 RNA guide
aacauggaggggaguuuugac

SEQ ID NO: 59532 - RNA, 21 nt, Artificial Sequence
  LRRK2 RNA guide
aacuccccuccauguuaucua

SEQ ID NO: 59533 - RNA, 21 nt, Artificial Sequence
  LRRK2 RNA guide
aagucaaaacuccccuccaug

SEQ ID NO: 59534 - RNA, 21 nt, Artificial Sequence
  LRRK2 RNA guide
acauggaggggaguuuugacu

SEQ ID NO: 59535 - RNA, 21 nt, Artificial Sequence
  LRRK2 RNA guide
acuccccuccauguuaucuag

SEQ ID NO: 59536 - RNA, 21 nt, Artificial Sequence
  LRRK2 RNA guide
acuuaagucaaaacuccccuc

SEQ ID NO: 59537 - RNA, 21 nt, Artificial Sequence
  LRRK2 RNA guide
agauaacauggaggggaguuu

SEQ ID NO: 59538 - RNA, 21 nt, Artificial Sequence
  LRRK2 RNA guide
aggggaguuuugacuuaagug

SEQ ID NO: 59539 - RNA, 21 nt, Artificial Sequence
  LRRK2 RNA guide
agucaaaacuccccuccaugu

SEQ ID NO: 59540 - RNA, 21 nt, Artificial Sequence
  LRRK2 RNA guide
auaacauggaggggaguuuug

SEQ ID NO: 59541 - RNA, 21 nt, Artificial Sequence
  LRRK2 RNA guide
aucuagauaacauggagggga

SEQ ID NO: 59542 - RNA, 21 nt, Artificial Sequence
  LRRK2 RNA guide
auggaggggaguuuugacuua

SEQ ID NO: 59543 - RNA, 21 nt, Artificial Sequence
  LRRK2 RNA guide
caaaacuccccuccauguuau

SEQ ID NO: 59544 - RNA, 21 nt, Artificial Sequence
  LRRK2 RNA guide
cacuuaagucaaaacuccccu

SEQ ID NO: 59545 - RNA, 21 nt, Artificial Sequence
  LRRK2 RNA guide
cauggaggggaguuuugacuu

SEQ ID NO: 59546 - RNA, 21 nt, Artificial Sequence
  LRRK2 RNA guide
ccccuccauguuaucuagaua

SEQ ID NO: 59547 - RNA, 21 nt, Artificial Sequence
  LRRK2 RNA guide
cuagauaacauggaggggagu

SEQ ID NO: 59548 - RNA, 21 nt, Artificial Sequence
  LRRK2 RNA guide
cuaucuagauaacauggaggg

SEQ ID NO: 59549 - RNA, 21 nt, Artificial Sequence
  LRRK2 RNA guide
cuccccuccauguuaucuaga

SEQ ID NO: 59550 - RNA, 21 nt, Artificial Sequence
  LRRK2 RNA guide
cuuaagucaaaacuccccucc

SEQ ID NO: 59551 - RNA, 21 nt, Artificial Sequence
  LRRK2 RNA guide
gaggggaguuuugacuuaagu

SEQ ID NO: 59552 - RNA, 21 nt, Artificial Sequence
  LRRK2 RNA guide
gauaacauggaggggaguuuu

SEQ ID NO: 59553 - RNA, 21 nt, Artificial Sequence
  LRRK2 RNA guide
ggaggggaguuuugacuuaag

SEQ ID NO: 59554 - RNA, 21 nt, Artificial Sequence
  LRRK2 RNA guide
gggaguuuugacuuaagugaa

SEQ ID NO: 59555 - RNA, 21 nt, Artificial Sequence
  LRRK2 RNA guide
ggggaguuuugacuuaaguga

SEQ ID NO: 59556 - RNA, 21 nt, Artificial Sequence
  LRRK2 RNA guide
gucaaaacuccccuccauguu

SEQ ID NO: 59557 - RNA, 21 nt, Artificial Sequence
  LRRK2 RNA guide
uaacauggaggggaguuuuga

SEQ ID NO: 59558 - RNA, 21 nt, Artificial Sequence
  LRRK2 RNA guide
uaagucaaaacuccccuccau

SEQ ID NO: 59559 - RNA, 21 nt, Artificial Sequence
  LRRK2 RNA guide
uagauaacauggaggggaguu

SEQ ID NO: 59560 - RNA, 21 nt, Artificial Sequence
  LRRK2 RNA guide
uaucuagauaacauggagggg

SEQ ID NO: 59561 - RNA, 21 nt, Artificial Sequence
  LRRK2 RNA guide
ucaaaacuccccuccauguua

SEQ ID NO: 59562 - RNA, 21 nt, Artificial Sequence
  LRRK2 RNA guide
ucacuuaagucaaaacucccc

SEQ ID NO: 59563 - RNA, 21 nt, Artificial Sequence
  LRRK2 RNA guide
uccccuccauguuaucuagau

SEQ ID NO: 59564 - RNA, 21 nt, Artificial Sequence
  LRRK2 RNA guide
ucuagauaacauggaggggag

SEQ ID NO: 59565 - RNA, 21 nt, Artificial Sequence
  LRRK2 RNA guide
uggaggggaguuuugacuuaa

SEQ ID NO: 59566 - RNA, 21 nt, Artificial Sequence
  LRRK2 RNA guide
uuaagucaaaacuccccucca

SEQ ID NO: 59567 - RNA, 21 nt, Artificial Sequence
  LRRK2 RNA guide
uucacuuaagucaaaacuccc

SEQ ID NO: 59568 - RNA, 21 nt, Artificial Sequence
  LRRK2 RNA guide
uuucacuuaagucaaaacucc

SEQ ID NO: 59569 - RNA, 22 nt, Artificial Sequence
  LRRK2 RNA guide
aaaacuccccuccauguuaucu

SEQ ID NO: 59570 - RNA, 22 nt, Artificial Sequence
  LRRK2 RNA guide
aaacuccccuccauguuaucua

SEQ ID NO: 59571 - RNA, 22 nt, Artificial Sequence
  LRRK2 RNA guide
aacauggaggggaguuuugacu

SEQ ID NO: 59572 - RNA, 22 nt, Artificial Sequence
  LRRK2 RNA guide
aacuccccuccauguuaucuag

SEQ ID NO: 59573 - RNA, 22 nt, Artificial Sequence
  LRRK2 RNA guide
aagucaaaacuccccuccaugu

SEQ ID NO: 59574 - RNA, 22 nt, Artificial Sequence
  LRRK2 RNA guide
acauggaggggaguuuugacuu

SEQ ID NO: 59575 - RNA, 22 nt, Artificial Sequence
  LRRK2 RNA guide
acuccccuccauguuaucuaga

SEQ ID NO: 59576 - RNA, 22 nt, Artificial Sequence
  LRRK2 RNA guide
acuuaagucaaaacuccccucc

SEQ ID NO: 59577 - RNA, 22 nt, Artificial Sequence
  LRRK2 RNA guide
agauaacauggaggggaguuuu

SEQ ID NO: 59578 - RNA, 22 nt, Artificial Sequence
  LRRK2 RNA guide
aggggaguuuugacuuaaguga

SEQ ID NO: 59579 - RNA, 22 nt, Artificial Sequence
  LRRK2 RNA guide
agucaaaacuccccuccauguu

SEQ ID NO: 59580 - RNA, 22 nt, Artificial Sequence
  LRRK2 RNA guide
auaacauggaggggaguuuuga

SEQ ID NO: 59581 - RNA, 22 nt, Artificial Sequence
  LRRK2 RNA guide
aucuagauaacauggaggggag

SEQ ID NO: 59582 - RNA, 22 nt, Artificial Sequence
  LRRK2 RNA guide
auggaggggaguuuugacuuaa

SEQ ID NO: 59583 - RNA, 22 nt, Artificial Sequence
  LRRK2 RNA guide
auuucacuuaagucaaaacucc

SEQ ID NO: 59584 - RNA, 22 nt, Artificial Sequence
  LRRK2 RNA guide
caaaacuccccuccauguuauc

SEQ ID NO: 59585 - RNA, 22 nt, Artificial Sequence
  LRRK2 RNA guide
cacuuaagucaaaacuccccuc

SEQ ID NO: 59586 - RNA, 22 nt, Artificial Sequence
  LRRK2 RNA guide
cauggaggggaguuuugacuua

SEQ ID NO: 59587 - RNA, 22 nt, Artificial Sequence
  LRRK2 RNA guide
ccccuccauguuaucuagauag

SEQ ID NO: 59588 - RNA, 22 nt, Artificial Sequence
  LRRK2 RNA guide
cuagauaacauggaggggaguu

SEQ ID NO: 59589 - RNA, 22 nt, Artificial Sequence
  LRRK2 RNA guide
cuaucuagauaacauggagggg

SEQ ID NO: 59590 - RNA, 22 nt, Artificial Sequence
  LRRK2 RNA guide
cuccccuccauguuaucuagau

SEQ ID NO: 59591 - RNA, 22 nt, Artificial Sequence
  LRRK2 RNA guide
cuuaagucaaaacuccccucca

SEQ ID NO: 59592 - RNA, 22 nt, Artificial Sequence
  LRRK2 RNA guide
gaggggaguuuugacuuaagug

SEQ ID NO: 59593 - RNA, 22 nt, Artificial Sequence
  LRRK2 RNA guide
gauaacauggaggggaguuuug

SEQ ID NO: 59594 - RNA, 22 nt, Artificial Sequence
  LRRK2 RNA guide
ggaggggaguuuugacuuaagu

SEQ ID NO: 59595 - RNA, 22 nt, Artificial Sequence
  LRRK2 RNA guide
gggaguuuugacuuaagugaaa

SEQ ID NO: 59596 - RNA, 22 nt, Artificial Sequence
  LRRK2 RNA guide
ggggaguuuugacuuaagugaa

SEQ ID NO: 59597 - RNA, 22 nt, Artificial Sequence
  LRRK2 RNA guide
gucaaaacuccccuccauguua

SEQ ID NO: 59598 - RNA, 22 nt, Artificial Sequence
  LRRK2 RNA guide
uaacauggaggggaguuuugac

SEQ ID NO: 59599 - RNA, 22 nt, Artificial Sequence
  LRRK2 RNA guide
uaagucaaaacuccccuccaug

SEQ ID NO: 59600 - RNA, 22 nt, Artificial Sequence
  LRRK2 RNA guide
uagauaacauggaggggaguuu

SEQ ID NO: 59601 - RNA, 22 nt, Artificial Sequence
  LRRK2 RNA guide
uaucuagauaacauggagggga

SEQ ID NO: 59602 - RNA, 22 nt, Artificial Sequence
  LRRK2 RNA guide
ucaaaacuccccuccauguuau

SEQ ID NO: 59603 - RNA, 22 nt, Artificial Sequence
  LRRK2 RNA guide
ucacuuaagucaaaacuccccu

SEQ ID NO: 59604 - RNA, 22 nt, Artificial Sequence
  LRRK2 RNA guide
uccccuccauguuaucuagaua

SEQ ID NO: 59605 - RNA, 22 nt, Artificial Sequence
  LRRK2 RNA guide
ucuagauaacauggaggggagu

SEQ ID NO: 59606 - RNA, 22 nt, Artificial Sequence
  LRRK2 RNA guide
ucuaucuagauaacauggaggg

SEQ ID NO: 59607 - RNA, 22 nt, Artificial Sequence
  LRRK2 RNA guide
uggaggggaguuuugacuuaag

SEQ ID NO: 59608 - RNA, 22 nt, Artificial Sequence
  LRRK2 RNA guide
uuaagucaaaacuccccuccau

SEQ ID NO: 59609 - RNA, 22 nt, Artificial Sequence
  LRRK2 RNA guide
uucacuuaagucaaaacucccc

SEQ ID NO: 59610 - RNA, 22 nt, Artificial Sequence
  LRRK2 RNA guide
uuucacuuaagucaaaacuccc

SEQ ID NO: 59611 - RNA, 20 nt, Artificial Sequence
  LRRK2 RNA guide
ggauuaucauuuggagaaaa

SEQ ID NO: 59612 - RNA, 20 nt, Artificial Sequence
  LRRK2 RNA guide
uggauuaucauuuggagaaa

SEQ ID NO: 59613 - RNA, 20 nt, Artificial Sequence
  LRRK2 RNA guide
auggauuaucauuuggagaa

SEQ ID NO: 59614 - RNA, 20 nt, Artificial Sequence
  LRRK2 RNA guide
ggaaaaugauuuuuucucca

SEQ ID NO: 59615 - RNA, 20 nt, Artificial Sequence
  LRRK2 RNA guide
ggagaaaaaaucauuuucca

SEQ ID NO: 59616 - RNA, 20 nt, Artificial Sequence
  LRRK2 RNA guide
uggaaaaugauuuuuucucc

SEQ ID NO: 59617 - RNA, 20 nt, Artificial Sequence
  LRRK2 RNA guide
uggagaaaaaaucauuuucc

SEQ ID NO: 59618 - RNA, 22 nt, Artificial Sequence
  LRRK2 RNA guide
cauggaaaaugauuuuuucucc

SEQ ID NO: 59619 - RNA, 22 nt, Artificial Sequence
  LRRK2 RNA guide
ggagaaaaaaucauuuuccaug

SEQ ID NO: 59620 - RNA, 20 nt, Artificial Sequence
  LRRK2 RNA guide
aaacucauugguaauggauu

SEQ ID NO: 59621 - RNA, 20 nt, Artificial Sequence
  LRRK2 RNA guide
aacucauugguaauggauua

SEQ ID NO: 59622 - RNA, 20 nt, Artificial Sequence
  LRRK2 RNA guide
aauggauuaucauuuggaga

SEQ ID NO: 59623 - RNA, 20 nt, Artificial Sequence
  LRRK2 RNA guide
augauaauccauuaccaaug

SEQ ID NO: 59624 - RNA, 20 nt, Artificial Sequence
  LRRK2 RNA guide
caaaugauaauccauuacca

SEQ ID NO: 59625 - RNA, 20 nt, Artificial Sequence
  LRRK2 RNA guide
cauugguaauggauuaucau

SEQ ID NO: 59626 - RNA, 20 nt, Artificial Sequence
  LRRK2 RNA guide
ccaaaugauaauccauuacc

SEQ ID NO: 59627 - RNA, 20 nt, Artificial Sequence
  LRRK2 RNA guide
cucauugguaauggauuauc

SEQ ID NO: 59628 - RNA, 20 nt, Artificial Sequence
  LRRK2 RNA guide
cuccaaaugauaauccauua

SEQ ID NO: 59629 - RNA, 20 nt, Artificial Sequence
  LRRK2 RNA guide
gguaauggauuaucauuugg

SEQ ID NO: 59630 - RNA, 20 nt, Artificial Sequence
  LRRK2 RNA guide
guaauggauuaucauuugga

SEQ ID NO: 59631 - RNA, 20 nt, Artificial Sequence
  LRRK2 RNA guide
uaaacucauugguaauggau

SEQ ID NO: 59632 - RNA, 20 nt, Artificial Sequence
  LRRK2 RNA guide
uaauggauuaucauuuggag

SEQ ID NO: 59633 - RNA, 20 nt, Artificial Sequence
  LRRK2 RNA guide
ucauugguaauggauuauca

SEQ ID NO: 59634 - RNA, 20 nt, Artificial Sequence
  LRRK2 RNA guide
uccaaaugauaauccauuac

SEQ ID NO: 59635 - RNA, 20 nt, Artificial Sequence
  LRRK2 RNA guide
ucuccaaaugauaauccauu

SEQ ID NO: 59636 - RNA, 20 nt, Artificial Sequence
  LRRK2 RNA guide
ugauaauccauuaccaauga

SEQ ID NO: 59637 - RNA, 20 nt, Artificial Sequence
  LRRK2 RNA guide
ugguaauggauuaucauuug

SEQ ID NO: 59638 - RNA, 20 nt, Artificial Sequence
  LRRK2 RNA guide
uuaaacucauugguaaugga

SEQ ID NO: 59639 - RNA, 20 nt, Artificial Sequence
  LRRK2 RNA guide
uucuccaaaugauaauccau

SEQ ID NO: 59640 - RNA, 20 nt, Artificial Sequence
  LRRK2 RNA guide
uuucuccaaaugauaaucca

SEQ ID NO: 59641 - RNA, 20 nt, Artificial Sequence
  LRRK2 RNA guide
uuuucuccaaaugauaaucc

SEQ ID NO: 59642 - RNA, 21 nt, Artificial Sequence
  LRRK2 RNA guide
acucauugguaauggauuauc

SEQ ID NO: 59643 - RNA, 21 nt, Artificial Sequence
  LRRK2 RNA guide
ccaaaugauaauccauuacca

SEQ ID NO: 59644 - RNA, 21 nt, Artificial Sequence
  LRRK2 RNA guide
cucauugguaauggauuauca

SEQ ID NO: 59645 - RNA, 21 nt, Artificial Sequence
  LRRK2 RNA guide
cuccaaaugauaauccauuac

SEQ ID NO: 59646 - RNA, 21 nt, Artificial Sequence
  LRRK2 RNA guide
gguaauggauuaucauuugga

SEQ ID NO: 59647 - RNA, 21 nt, Artificial Sequence
  LRRK2 RNA guide
guaauggauuaucauuuggag

SEQ ID NO: 59648 - RNA, 21 nt, Artificial Sequence
  LRRK2 RNA guide
uccaaaugauaauccauuacc

SEQ ID NO: 59649 - RNA, 21 nt, Artificial Sequence
  LRRK2 RNA guide
ugauaauccauuaccaaugag

SEQ ID NO: 59650 - RNA, 21 nt, Artificial Sequence
  LRRK2 RNA guide
ugguaauggauuaucauuugg

SEQ ID NO: 59651 - RNA, 22 nt, Artificial Sequence
  LRRK2 RNA guide
aacucauugguaauggauuauc

SEQ ID NO: 59652 - RNA, 22 nt, Artificial Sequence
  LRRK2 RNA guide
acucauugguaauggauuauca

SEQ ID NO: 59653 - RNA, 22 nt, Artificial Sequence
  LRRK2 RNA guide
augauaauccauuaccaaugag

SEQ ID NO: 59654 - RNA, 22 nt, Artificial Sequence
  LRRK2 RNA guide
ccaaaugauaauccauuaccaa

SEQ ID NO: 59655 - RNA, 22 nt, Artificial Sequence
  LRRK2 RNA guide
cucauugguaauggauuaucau

SEQ ID NO: 59656 - RNA, 22 nt, Artificial Sequence
  LRRK2 RNA guide
cuccaaaugauaauccauuacc

SEQ ID NO: 59657 - RNA, 22 nt, Artificial Sequence
  LRRK2 RNA guide
gguaauggauuaucauuuggag

SEQ ID NO: 59658 - RNA, 22 nt, Artificial Sequence
  LRRK2 RNA guide
guaauggauuaucauuuggaga

SEQ ID NO: 59659 - RNA, 22 nt, Artificial Sequence
  LRRK2 RNA guide
uccaaaugauaauccauuacca

SEQ ID NO: 59660 - RNA, 22 nt, Artificial Sequence
  LRRK2 RNA guide
ucuccaaaugauaauccauuac

SEQ ID NO: 59661 - RNA, 22 nt, Artificial Sequence
  LRRK2 RNA guide
ugauaauccauuaccaaugagu

SEQ ID NO: 59662 - RNA, 22 nt, Artificial Sequence
  LRRK2 RNA guide
ugguaauggauuaucauuugga

SEQ ID NO: 59663 - RNA, 22 nt, Artificial Sequence
  LRRK2 RNA guide
uugguaauggauuaucauuugg

SEQ ID NO: 59664 - RNA, 20 nt, Artificial Sequence
  LRRK2 RNA guide
ccaaauuauaauccauuacc

SEQ ID NO: 59665 - RNA, 20 nt, Artificial Sequence
  LRRK2 RNA guide
cucauugguaauggauuaua

SEQ ID NO: 59666 - RNA, 20 nt, Artificial Sequence
  LRRK2 RNA guide
gguaauggauuauaauuugg

SEQ ID NO: 59667 - RNA, 22 nt, Artificial Sequence
  LRRK2 RNA guide
cuccaaauuauaauccauuacc

SEQ ID NO: 59668 - RNA, 22 nt, Artificial Sequence
  LRRK2 RNA guide
gguaauggauuauaauuuggag

SEQ ID NO: 59669 - RNA, 20 nt, Artificial Sequence
  LRRK2 RNA guide
aacucgggcagccacaugca

SEQ ID NO: 59670 - RNA, 20 nt, Artificial Sequence
  LRRK2 RNA guide
aauuuuaggaacucgggcag

SEQ ID NO: 59671 - RNA, 20 nt, Artificial Sequence
  LRRK2 RNA guide
acucgggcagccacaugcaa

SEQ ID NO: 59672 - RNA, 20 nt, Artificial Sequence
  LRRK2 RNA guide
agccacaugcaaaacuauaa

SEQ ID NO: 59673 - RNA, 20 nt, Artificial Sequence
  LRRK2 RNA guide
aggaacucgggcagccacau

SEQ ID NO: 59674 - RNA, 20 nt, Artificial Sequence
  LRRK2 RNA guide
aguuuugcauguggcugccc

SEQ ID NO: 59675 - RNA, 20 nt, Artificial Sequence
  LRRK2 RNA guide
auaauuuuaggaacucgggc

SEQ ID NO: 59676 - RNA, 20 nt, Artificial Sequence
  LRRK2 RNA guide
auaguuuugcauguggcugc

SEQ ID NO: 59677 - RNA, 20 nt, Artificial Sequence
  LRRK2 RNA guide
auguggcugcccgaguuccu

SEQ ID NO: 59678 - RNA, 20 nt, Artificial Sequence
  LRRK2 RNA guide
auuuauaguuuugcaugugg

SEQ ID NO: 59679 - RNA, 20 nt, Artificial Sequence
  LRRK2 RNA guide
auuuuaggaacucgggcagc

SEQ ID NO: 59680 - RNA, 20 nt, Artificial Sequence
  LRRK2 RNA guide
cagccacaugcaaaacuaua

SEQ ID NO: 59681 - RNA, 20 nt, Artificial Sequence
  LRRK2 RNA guide
cauguggcugcccgaguucc

SEQ ID NO: 59682 - RNA, 20 nt, Artificial Sequence
  LRRK2 RNA guide
cgggcagccacaugcaaaac

SEQ ID NO: 59683 - RNA, 20 nt, Artificial Sequence
  LRRK2 RNA guide
cucgggcagccacaugcaaa

SEQ ID NO: 59684 - RNA, 20 nt, Artificial Sequence
  LRRK2 RNA guide
gaacucgggcagccacaugc

SEQ ID NO: 59685 - RNA, 20 nt, Artificial Sequence
  LRRK2 RNA guide
gcagccacaugcaaaacuau

SEQ ID NO: 59686 - RNA, 20 nt, Artificial Sequence
  LRRK2 RNA guide
gcauguggcugcccgaguuc

SEQ ID NO: 59687 - RNA, 20 nt, Artificial Sequence
  LRRK2 RNA guide
gccacaugcaaaacuauaaa

SEQ ID NO: 59688 - RNA, 20 nt, Artificial Sequence
  LRRK2 RNA guide
ggaacucgggcagccacaug

SEQ ID NO: 59689 - RNA, 20 nt, Artificial Sequence
  LRRK2 RNA guide
ggcagccacaugcaaaacua

SEQ ID NO: 59690 - RNA, 20 nt, Artificial Sequence
  LRRK2 RNA guide
ggcugcccgaguuccuaaaa

SEQ ID NO: 59691 - RNA, 20 nt, Artificial Sequence
  LRRK2 RNA guide
gggcagccacaugcaaaacu

SEQ ID NO: 59692 - RNA, 20 nt, Artificial Sequence
  LRRK2 RNA guide
guggcugcccgaguuccuaa

SEQ ID NO: 59693 - RNA, 20 nt, Artificial Sequence
  LRRK2 RNA guide
guuuugcauguggcugcccg

SEQ ID NO: 59694 - RNA, 20 nt, Artificial Sequence
  LRRK2 RNA guide
uaauaauuuuaggaacucgg

SEQ ID NO: 59695 - RNA, 20 nt, Artificial Sequence
  LRRK2 RNA guide
uaauuuuaggaacucgggca

SEQ ID NO: 59696 - RNA, 20 nt, Artificial Sequence
  LRRK2 RNA guide
uaggaacucgggcagccaca

SEQ ID NO: 59697 - RNA, 20 nt, Artificial Sequence
  LRRK2 RNA guide
uaguuuugcauguggcugcc

SEQ ID NO: 59698 - RNA, 20 nt, Artificial Sequence
  LRRK2 RNA guide
uauaguuuugcauguggcug

SEQ ID NO: 59699 - RNA, 20 nt, Artificial Sequence
  LRRK2 RNA guide
ucgggcagccacaugcaaaa

SEQ ID NO: 59700 - RNA, 20 nt, Artificial Sequence
  LRRK2 RNA guide
ugcauguggcugcccgaguu

SEQ ID NO: 59701 - RNA, 20 nt, Artificial Sequence
  LRRK2 RNA guide
uggcugcccgaguuccuaaa

SEQ ID NO: 59702 - RNA, 20 nt, Artificial Sequence
  LRRK2 RNA guide
uguggcugcccgaguuccua

SEQ ID NO: 59703 - RNA, 20 nt, Artificial Sequence
  LRRK2 RNA guide
uuaggaacucgggcagccac

SEQ ID NO: 59704 - RNA, 20 nt, Artificial Sequence
  LRRK2 RNA guide
uuauaguuuugcauguggcu

SEQ ID NO: 59705 - RNA, 20 nt, Artificial Sequence
  LRRK2 RNA guide
uugcauguggcugcccgagu

SEQ ID NO: 59706 - RNA, 20 nt, Artificial Sequence
  LRRK2 RNA guide
uuuaggaacucgggcagcca

SEQ ID NO: 59707 - RNA, 20 nt, Artificial Sequence
  LRRK2 RNA guide
uuuauaguuuugcauguggc

SEQ ID NO: 59708 - RNA, 20 nt, Artificial Sequence
  LRRK2 RNA guide
uuugcauguggcugcccgag

SEQ ID NO: 59709 - RNA, 20 nt, Artificial Sequence
  LRRK2 RNA guide
uuuuaggaacucgggcagcc

SEQ ID NO: 59710 - RNA, 20 nt, Artificial Sequence
  LRRK2 RNA guide
uuuugcauguggcugcccga

SEQ ID NO: 59711 - RNA, 21 nt, Artificial Sequence
  LRRK2 RNA guide
aacucgggcagccacaugcaa

SEQ ID NO: 59712 - RNA, 21 nt, Artificial Sequence
  LRRK2 RNA guide
aauaauuuuaggaacucgggc

SEQ ID NO: 59713 - RNA, 21 nt, Artificial Sequence
  LRRK2 RNA guide
aauuuuaggaacucgggcagc

SEQ ID NO: 59714 - RNA, 21 nt, Artificial Sequence
  LRRK2 RNA guide
acucgggcagccacaugcaaa

SEQ ID NO: 59715 - RNA, 21 nt, Artificial Sequence
  LRRK2 RNA guide
agccacaugcaaaacuauaaa

SEQ ID NO: 59716 - RNA, 21 nt, Artificial Sequence
  LRRK2 RNA guide
aggaacucgggcagccacaug

SEQ ID NO: 59717 - RNA, 21 nt, Artificial Sequence
  LRRK2 RNA guide
aguuuugcauguggcugcccg

SEQ ID NO: 59718 - RNA, 21 nt, Artificial Sequence
  LRRK2 RNA guide
auaauuuuaggaacucgggca

SEQ ID NO: 59719 - RNA, 21 nt, Artificial Sequence
  LRRK2 RNA guide
auaguuuugcauguggcugcc

SEQ ID NO: 59720 - RNA, 21 nt, Artificial Sequence
  LRRK2 RNA guide
auguggcugcccgaguuccua

SEQ ID NO: 59721 - RNA, 21 nt, Artificial Sequence
  LRRK2 RNA guide
auuuauaguuuugcauguggc

SEQ ID NO: 59722 - RNA, 21 nt, Artificial Sequence
  LRRK2 RNA guide
auuuuaggaacucgggcagcc

SEQ ID NO: 59723 - RNA, 21 nt, Artificial Sequence
  LRRK2 RNA guide
cagccacaugcaaaacuauaa

SEQ ID NO: 59724 - RNA, 21 nt, Artificial Sequence
  LRRK2 RNA guide
cauguggcugcccgaguuccu

SEQ ID NO: 59725 - RNA, 21 nt, Artificial Sequence
  LRRK2 RNA guide
cgggcagccacaugcaaaacu

SEQ ID NO: 59726 - RNA, 21 nt, Artificial Sequence
  LRRK2 RNA guide
cucgggcagccacaugcaaaa

SEQ ID NO: 59727 - RNA, 21 nt, Artificial Sequence
  LRRK2 RNA guide
gaacucgggcagccacaugca

SEQ ID NO: 59728 - RNA, 21 nt, Artificial Sequence
  LRRK2 RNA guide
gcagccacaugcaaaacuaua

SEQ ID NO: 59729 - RNA, 21 nt, Artificial Sequence
  LRRK2 RNA guide
gcauguggcugcccgaguucc

SEQ ID NO: 59730 - RNA, 21 nt, Artificial Sequence
  LRRK2 RNA guide
gccacaugcaaaacuauaaau

SEQ ID NO: 59731 - RNA, 21 nt, Artificial Sequence
  LRRK2 RNA guide
ggaacucgggcagccacaugc

SEQ ID NO: 59732 - RNA, 21 nt, Artificial Sequence
  LRRK2 RNA guide
ggcagccacaugcaaaacuau

SEQ ID NO: 59733 - RNA, 21 nt, Artificial Sequence
  LRRK2 RNA guide
ggcugcccgaguuccuaaaau

SEQ ID NO: 59734 - RNA, 21 nt, Artificial Sequence
  LRRK2 RNA guide
gggcagccacaugcaaaacua

SEQ ID NO: 59735 - RNA, 21 nt, Artificial Sequence
  LRRK2 RNA guide
guggcugcccgaguuccuaaa

SEQ ID NO: 59736 - RNA, 21 nt, Artificial Sequence
  LRRK2 RNA guide
guuuugcauguggcugcccga

SEQ ID NO: 59737 - RNA, 21 nt, Artificial Sequence
  LRRK2 RNA guide
uaauaauuuuaggaacucggg

SEQ ID NO: 59738 - RNA, 21 nt, Artificial Sequence
  LRRK2 RNA guide
uaauuuuaggaacucgggcag

SEQ ID NO: 59739 - RNA, 21 nt, Artificial Sequence
  LRRK2 RNA guide
uaggaacucgggcagccacau

SEQ ID NO: 59740 - RNA, 21 nt, Artificial Sequence
  LRRK2 RNA guide
uaguuuugcauguggcugccc

SEQ ID NO: 59741 - RNA, 21 nt, Artificial Sequence
  LRRK2 RNA guide
uauaguuuugcauguggcugc

SEQ ID NO: 59742 - RNA, 21 nt, Artificial Sequence
  LRRK2 RNA guide
ucgggcagccacaugcaaaac

SEQ ID NO: 59743 - RNA, 21 nt, Artificial Sequence
  LRRK2 RNA guide
ugcauguggcugcccgaguuc

SEQ ID NO: 59744 - RNA, 21 nt, Artificial Sequence
  LRRK2 RNA guide
uggcugcccgaguuccuaaaa

SEQ ID NO: 59745 - RNA, 21 nt, Artificial Sequence
  LRRK2 RNA guide
uguggcugcccgaguuccuaa

SEQ ID NO: 59746 - RNA, 21 nt, Artificial Sequence
  LRRK2 RNA guide
uuaggaacucgggcagccaca

SEQ ID NO: 59747 - RNA, 21 nt, Artificial Sequence
  LRRK2 RNA guide
uuauaguuuugcauguggcug

SEQ ID NO: 59748 - RNA, 21 nt, Artificial Sequence
  LRRK2 RNA guide
uugcauguggcugcccgaguu

SEQ ID NO: 59749 - RNA, 21 nt, Artificial Sequence
  LRRK2 RNA guide
uuuaggaacucgggcagccac

SEQ ID NO: 59750 - RNA, 21 nt, Artificial Sequence
  LRRK2 RNA guide
uuuauaguuuugcauguggcu

SEQ ID NO: 59751 - RNA, 21 nt, Artificial Sequence
  LRRK2 RNA guide
uuugcauguggcugcccgagu

SEQ ID NO: 59752 - RNA, 21 nt, Artificial Sequence
  LRRK2 RNA guide
uuuuaggaacucgggcagcca

SEQ ID NO: 59753 - RNA, 21 nt, Artificial Sequence
  LRRK2 RNA guide
uuuugcauguggcugcccgag

SEQ ID NO: 59754 - RNA, 22 nt, Artificial Sequence
  LRRK2 RNA guide
aacucgggcagccacaugcaaa

SEQ ID NO: 59755 - RNA, 22 nt, Artificial Sequence
  LRRK2 RNA guide
aauaauuuuaggaacucgggca

SEQ ID NO: 59756 - RNA, 22 nt, Artificial Sequence
  LRRK2 RNA guide
aauuuauaguuuugcauguggc

SEQ ID NO: 59757 - RNA, 22 nt, Artificial Sequence
  LRRK2 RNA guide
aauuuuaggaacucgggcagcc

SEQ ID NO: 59758 - RNA, 22 nt, Artificial Sequence
  LRRK2 RNA guide
acucgggcagccacaugcaaaa

SEQ ID NO: 59759 - RNA, 22 nt, Artificial Sequence
  LRRK2 RNA guide
agccacaugcaaaacuauaaau

SEQ ID NO: 59760 - RNA, 22 nt, Artificial Sequence
  LRRK2 RNA guide
aggaacucgggcagccacaugc

SEQ ID NO: 59761 - RNA, 22 nt, Artificial Sequence
  LRRK2 RNA guide
aguuuugcauguggcugcccga

SEQ ID NO: 59762 - RNA, 22 nt, Artificial Sequence
  LRRK2 RNA guide
auaauaauuuuaggaacucggg

SEQ ID NO: 59763 - RNA, 22 nt, Artificial Sequence
  LRRK2 RNA guide
auaauuuuaggaacucgggcag

SEQ ID NO: 59764 - RNA, 22 nt, Artificial Sequence
  LRRK2 RNA guide
auaguuuugcauguggcugccc

SEQ ID NO: 59765 - RNA, 22 nt, Artificial Sequence
  LRRK2 RNA guide
auguggcugcccgaguuccuaa

SEQ ID NO: 59766 - RNA, 22 nt, Artificial Sequence
  LRRK2 RNA guide
auuuauaguuuugcauguggcu

SEQ ID NO: 59767 - RNA, 22 nt, Artificial Sequence
  LRRK2 RNA guide
auuuuaggaacucgggcagcca

SEQ ID NO: 59768 - RNA, 22 nt, Artificial Sequence
  LRRK2 RNA guide
cagccacaugcaaaacuauaaa

SEQ ID NO: 59769 - RNA, 22 nt, Artificial Sequence
  LRRK2 RNA guide
cauguggcugcccgaguuccua

SEQ ID NO: 59770 - RNA, 22 nt, Artificial Sequence
  LRRK2 RNA guide
cgggcagccacaugcaaaacua

SEQ ID NO: 59771 - RNA, 22 nt, Artificial Sequence
  LRRK2 RNA guide
cucgggcagccacaugcaaaac

SEQ ID NO: 59772 - RNA, 22 nt, Artificial Sequence
  LRRK2 RNA guide
gaacucgggcagccacaugcaa

SEQ ID NO: 59773 - RNA, 22 nt, Artificial Sequence
  LRRK2 RNA guide
gcagccacaugcaaaacuauaa

SEQ ID NO: 59774 - RNA, 22 nt, Artificial Sequence
  LRRK2 RNA guide
gcauguggcugcccgaguuccu

SEQ ID NO: 59775 - RNA, 22 nt, Artificial Sequence
  LRRK2 RNA guide
gccacaugcaaaacuauaaauu

SEQ ID NO: 59776 - RNA, 22 nt, Artificial Sequence
  LRRK2 RNA guide
ggaacucgggcagccacaugca

SEQ ID NO: 59777 - RNA, 22 nt, Artificial Sequence
  LRRK2 RNA guide
ggcagccacaugcaaaacuaua

SEQ ID NO: 59778 - RNA, 22 nt, Artificial Sequence
  LRRK2 RNA guide
ggcugcccgaguuccuaaaauu

SEQ ID NO: 59779 - RNA, 22 nt, Artificial Sequence
  LRRK2 RNA guide
gggcagccacaugcaaaacuau

SEQ ID NO: 59780 - RNA, 22 nt, Artificial Sequence
  LRRK2 RNA guide
guggcugcccgaguuccuaaaa

SEQ ID NO: 59781 - RNA, 22 nt, Artificial Sequence
  LRRK2 RNA guide
guuuugcauguggcugcccgag

SEQ ID NO: 59782 - RNA, 22 nt, Artificial Sequence
  LRRK2 RNA guide
uaauaauuuuaggaacucgggc

SEQ ID NO: 59783 - RNA, 22 nt, Artificial Sequence
  LRRK2 RNA guide
uaauuuuaggaacucgggcagc

SEQ ID NO: 59784 - RNA, 22 nt, Artificial Sequence
  LRRK2 RNA guide
uaggaacucgggcagccacaug

SEQ ID NO: 59785 - RNA, 22 nt, Artificial Sequence
  LRRK2 RNA guide
uaguuuugcauguggcugcccg

SEQ ID NO: 59786 - RNA, 22 nt, Artificial Sequence
  LRRK2 RNA guide
uauaguuuugcauguggcugcc

SEQ ID NO: 59787 - RNA, 22 nt, Artificial Sequence
  LRRK2 RNA guide
ucgggcagccacaugcaaaacu

SEQ ID NO: 59788 - RNA, 22 nt, Artificial Sequence
  LRRK2 RNA guide
ugcauguggcugcccgaguucc

SEQ ID NO: 59789 - RNA, 22 nt, Artificial Sequence
  LRRK2 RNA guide
uggcugcccgaguuccuaaaau

SEQ ID NO: 59790 - RNA, 22 nt, Artificial Sequence
  LRRK2 RNA guide
uguggcugcccgaguuccuaaa

SEQ ID NO: 59791 - RNA, 22 nt, Artificial Sequence
  LRRK2 RNA guide
uuaggaacucgggcagccacau

SEQ ID NO: 59792 - RNA, 22 nt, Artificial Sequence
  LRRK2 RNA guide
uuauaguuuugcauguggcugc

SEQ ID NO: 59793 - RNA, 22 nt, Artificial Sequence
  LRRK2 RNA guide
uugcauguggcugcccgaguuc

SEQ ID NO: 59794 - RNA, 22 nt, Artificial Sequence
  LRRK2 RNA guide
uuuaggaacucgggcagccaca

SEQ ID NO: 59795 - RNA, 22 nt, Artificial Sequence
  LRRK2 RNA guide
uuuauaguuuugcauguggcug

SEQ ID NO: 59796 - RNA, 22 nt, Artificial Sequence
  LRRK2 RNA guide
uuugcauguggcugcccgaguu

SEQ ID NO: 59797 - RNA, 22 nt, Artificial Sequence
  LRRK2 RNA guide
uuuuaggaacucgggcagccac

SEQ ID NO: 59798 - RNA, 22 nt, Artificial Sequence
  LRRK2 RNA guide
uuuugcauguggcugcccgagu

SEQ ID NO: 59799 - RNA, 20 nt, Artificial Sequence
  LRRK2 RNA guide
aacucgggcagucacaugca

SEQ ID NO: 59800 - RNA, 20 nt, Artificial Sequence
  LRRK2 RNA guide
acucgggcagucacaugcaa

SEQ ID NO: 59801 - RNA, 20 nt, Artificial Sequence
  LRRK2 RNA guide
aggaacucgggcagucacau

SEQ ID NO: 59802 - RNA, 20 nt, Artificial Sequence
  LRRK2 RNA guide
agucacaugcaaaacuauaa

SEQ ID NO: 59803 - RNA, 20 nt, Artificial Sequence
  LRRK2 RNA guide
aguuuugcaugugacugccc

SEQ ID NO: 59804 - RNA, 20 nt, Artificial Sequence
  LRRK2 RNA guide
auaguuuugcaugugacugc

SEQ ID NO: 59805 - RNA, 20 nt, Artificial Sequence
  LRRK2 RNA guide
augugacugcccgaguuccu

SEQ ID NO: 59806 - RNA, 20 nt, Artificial Sequence
  LRRK2 RNA guide
auuuuaggaacucgggcagu

SEQ ID NO: 59807 - RNA, 20 nt, Artificial Sequence
  LRRK2 RNA guide
cagucacaugcaaaacuaua

SEQ ID NO: 59808 - RNA, 20 nt, Artificial Sequence
  LRRK2 RNA guide
caugugacugcccgaguucc

SEQ ID NO: 59809 - RNA, 20 nt, Artificial Sequence
  LRRK2 RNA guide
cgggcagucacaugcaaaac

SEQ ID NO: 59810 - RNA, 20 nt, Artificial Sequence
  LRRK2 RNA guide
cucgggcagucacaugcaaa

SEQ ID NO: 59811 - RNA, 20 nt, Artificial Sequence
  LRRK2 RNA guide
gaacucgggcagucacaugc

SEQ ID NO: 59812 - RNA, 20 nt, Artificial Sequence
  LRRK2 RNA guide
gacugcccgaguuccuaaaa

SEQ ID NO: 59813 - RNA, 20 nt, Artificial Sequence
  LRRK2 RNA guide
gcagucacaugcaaaacuau

SEQ ID NO: 59814 - RNA, 20 nt, Artificial Sequence
  LRRK2 RNA guide
gcaugugacugcccgaguuc

SEQ ID NO: 59815 - RNA, 20 nt, Artificial Sequence
  LRRK2 RNA guide
ggaacucgggcagucacaug

SEQ ID NO: 59816 - RNA, 20 nt, Artificial Sequence
  LRRK2 RNA guide
ggcagucacaugcaaaacua

SEQ ID NO: 59817 - RNA, 20 nt, Artificial Sequence
  LRRK2 RNA guide
gggcagucacaugcaaaacu

SEQ ID NO: 59818 - RNA, 20 nt, Artificial Sequence
  LRRK2 RNA guide
gucacaugcaaaacuauaaa

SEQ ID NO: 59819 - RNA, 20 nt, Artificial Sequence
  LRRK2 RNA guide
gugacugcccgaguuccuaa

SEQ ID NO: 59820 - RNA, 20 nt, Artificial Sequence
  LRRK2 RNA guide
guuuugcaugugacugcccg

SEQ ID NO: 59821 - RNA, 20 nt, Artificial Sequence
  LRRK2 RNA guide
uaggaacucgggcagucaca

SEQ ID NO: 59822 - RNA, 20 nt, Artificial Sequence
  LRRK2 RNA guide
uaguuuugcaugugacugcc

SEQ ID NO: 59823 - RNA, 20 nt, Artificial Sequence
  LRRK2 RNA guide
uauaguuuugcaugugacug

SEQ ID NO: 59824 - RNA, 20 nt, Artificial Sequence
  LRRK2 RNA guide
ucgggcagucacaugcaaaa

SEQ ID NO: 59825 - RNA, 20 nt, Artificial Sequence
  LRRK2 RNA guide
ugacugcccgaguuccuaaa

SEQ ID NO: 59826 - RNA, 20 nt, Artificial Sequence
  LRRK2 RNA guide
ugcaugugacugcccgaguu

SEQ ID NO: 59827 - RNA, 20 nt, Artificial Sequence
  LRRK2 RNA guide
ugugacugcccgaguuccua

SEQ ID NO: 59828 - RNA, 20 nt, Artificial Sequence
  LRRK2 RNA guide
uuaggaacucgggcagucac

SEQ ID NO: 59829 - RNA, 20 nt, Artificial Sequence
  LRRK2 RNA guide
uuauaguuuugcaugugacu

SEQ ID NO: 59830 - RNA, 20 nt, Artificial Sequence
  LRRK2 RNA guide
uugcaugugacugcccgagu

SEQ ID NO: 59831 - RNA, 20 nt, Artificial Sequence
  LRRK2 RNA guide
uuuaggaacucgggcaguca

SEQ ID NO: 59832 - RNA, 20 nt, Artificial Sequence
  LRRK2 RNA guide
uuuauaguuuugcaugugac

SEQ ID NO: 59833 - RNA, 20 nt, Artificial Sequence
  LRRK2 RNA guide
uuugcaugugacugcccgag

SEQ ID NO: 59834 - RNA, 20 nt, Artificial Sequence
  LRRK2 RNA guide
uuuuaggaacucgggcaguc

SEQ ID NO: 59835 - RNA, 20 nt, Artificial Sequence
  LRRK2 RNA guide
uuuugcaugugacugcccga

SEQ ID NO: 59836 - RNA, 21 nt, Artificial Sequence
  LRRK2 RNA guide
aacucgggcagucacaugcaa

SEQ ID NO: 59837 - RNA, 21 nt, Artificial Sequence
  LRRK2 RNA guide
aauuuuaggaacucgggcagu

SEQ ID NO: 59838 - RNA, 21 nt, Artificial Sequence
  LRRK2 RNA guide
acucgggcagucacaugcaaa

SEQ ID NO: 59839 - RNA, 21 nt, Artificial Sequence
  LRRK2 RNA guide
aggaacucgggcagucacaug

SEQ ID NO: 59840 - RNA, 21 nt, Artificial Sequence
  LRRK2 RNA guide
aguuuugcaugugacugcccg

SEQ ID NO: 59841 - RNA, 21 nt, Artificial Sequence
  LRRK2 RNA guide
auaguuuugcaugugacugcc

SEQ ID NO: 59842 - RNA, 21 nt, Artificial Sequence
  LRRK2 RNA guide
augugacugcccgaguuccua

SEQ ID NO: 59843 - RNA, 21 nt, Artificial Sequence
  LRRK2 RNA guide
auuuuaggaacucgggcaguc

SEQ ID NO: 59844 - RNA, 21 nt, Artificial Sequence
  LRRK2 RNA guide
cagucacaugcaaaacuauaa

SEQ ID NO: 59845 - RNA, 21 nt, Artificial Sequence
  LRRK2 RNA guide
caugugacugcccgaguuccu

SEQ ID NO: 59846 - RNA, 21 nt, Artificial Sequence
  LRRK2 RNA guide
cgggcagucacaugcaaaacu

SEQ ID NO: 59847 - RNA, 21 nt, Artificial Sequence
  LRRK2 RNA guide
cucgggcagucacaugcaaaa

SEQ ID NO: 59848 - RNA, 21 nt, Artificial Sequence
  LRRK2 RNA guide
gaacucgggcagucacaugca

SEQ ID NO: 59849 - RNA, 21 nt, Artificial Sequence
  LRRK2 RNA guide
gacugcccgaguuccuaaaau

SEQ ID NO: 59850 - RNA, 21 nt, Artificial Sequence
  LRRK2 RNA guide
gcagucacaugcaaaacuaua

SEQ ID NO: 59851 - RNA, 21 nt, Artificial Sequence
  LRRK2 RNA guide
gcaugugacugcccgaguucc

SEQ ID NO: 59852 - RNA, 21 nt, Artificial Sequence
  LRRK2 RNA guide
ggaacucgggcagucacaugc

SEQ ID NO: 59853 - RNA, 21 nt, Artificial Sequence
  LRRK2 RNA guide
ggcagucacaugcaaaacuau

SEQ ID NO: 59854 - RNA, 21 nt, Artificial Sequence
  LRRK2 RNA guide
gggcagucacaugcaaaacua

SEQ ID NO: 59855 - RNA, 21 nt, Artificial Sequence
  LRRK2 RNA guide
gugacugcccgaguuccuaaa

SEQ ID NO: 59856 - RNA, 21 nt, Artificial Sequence
  LRRK2 RNA guide
guuuugcaugugacugcccga

SEQ ID NO: 59857 - RNA, 21 nt, Artificial Sequence
  LRRK2 RNA guide
uaggaacucgggcagucacau

SEQ ID NO: 59858 - RNA, 21 nt, Artificial Sequence
  LRRK2 RNA guide
uaguuuugcaugugacugccc

SEQ ID NO: 59859 - RNA, 21 nt, Artificial Sequence
  LRRK2 RNA guide
uauaguuuugcaugugacugc

SEQ ID NO: 59860 - RNA, 21 nt, Artificial Sequence
  LRRK2 RNA guide
ucgggcagucacaugcaaaac

SEQ ID NO: 59861 - RNA, 21 nt, Artificial Sequence
  LRRK2 RNA guide
ugacugcccgaguuccuaaaa

SEQ ID NO: 59862 - RNA, 21 nt, Artificial Sequence
  LRRK2 RNA guide
ugcaugugacugcccgaguuc

SEQ ID NO: 59863 - RNA, 21 nt, Artificial Sequence
  LRRK2 RNA guide
ugugacugcccgaguuccuaa

SEQ ID NO: 59864 - RNA, 21 nt, Artificial Sequence
  LRRK2 RNA guide
uuaggaacucgggcagucaca

SEQ ID NO: 59865 - RNA, 21 nt, Artificial Sequence
  LRRK2 RNA guide
uuauaguuuugcaugugacug

SEQ ID NO: 59866 - RNA, 21 nt, Artificial Sequence
  LRRK2 RNA guide
uugcaugugacugcccgaguu

SEQ ID NO: 59867 - RNA, 21 nt, Artificial Sequence
  LRRK2 RNA guide
uuuaggaacucgggcagucac

SEQ ID NO: 59868 - RNA, 21 nt, Artificial Sequence
  LRRK2 RNA guide
uuugcaugugacugcccgagu

SEQ ID NO: 59869 - RNA, 21 nt, Artificial Sequence
  LRRK2 RNA guide
uuuuaggaacucgggcaguca

SEQ ID NO: 59870 - RNA, 21 nt, Artificial Sequence
  LRRK2 RNA guide
uuuugcaugugacugcccgag

SEQ ID NO: 59871 - RNA, 22 nt, Artificial Sequence
  LRRK2 RNA guide
aacucgggcagucacaugcaaa

SEQ ID NO: 59872 - RNA, 22 nt, Artificial Sequence
  LRRK2 RNA guide
aauuuuaggaacucgggcaguc

SEQ ID NO: 59873 - RNA, 22 nt, Artificial Sequence
  LRRK2 RNA guide
acucgggcagucacaugcaaaa

SEQ ID NO: 59874 - RNA, 22 nt, Artificial Sequence
  LRRK2 RNA guide
aggaacucgggcagucacaugc

SEQ ID NO: 59875 - RNA, 22 nt, Artificial Sequence
  LRRK2 RNA guide
aguuuugcaugugacugcccga

SEQ ID NO: 59876 - RNA, 22 nt, Artificial Sequence
  LRRK2 RNA guide
auaguuuugcaugugacugccc

SEQ ID NO: 59877 - RNA, 22 nt, Artificial Sequence
  LRRK2 RNA guide
augugacugcccgaguuccuaa

SEQ ID NO: 59878 - RNA, 22 nt, Artificial Sequence
  LRRK2 RNA guide
auuuuaggaacucgggcaguca

SEQ ID NO: 59879 - RNA, 22 nt, Artificial Sequence
  LRRK2 RNA guide
cagucacaugcaaaacuauaaa

SEQ ID NO: 59880 - RNA, 22 nt, Artificial Sequence
  LRRK2 RNA guide
caugugacugcccgaguuccua

SEQ ID NO: 59881 - RNA, 22 nt, Artificial Sequence
  LRRK2 RNA guide
cgggcagucacaugcaaaacua

SEQ ID NO: 59882 - RNA, 22 nt, Artificial Sequence
  LRRK2 RNA guide
cucgggcagucacaugcaaaac

SEQ ID NO: 59883 - RNA, 22 nt, Artificial Sequence
  LRRK2 RNA guide
gaacucgggcagucacaugcaa

SEQ ID NO: 59884 - RNA, 22 nt, Artificial Sequence
  LRRK2 RNA guide
gacugcccgaguuccuaaaauu

SEQ ID NO: 59885 - RNA, 22 nt, Artificial Sequence
  LRRK2 RNA guide
gcagucacaugcaaaacuauaa

SEQ ID NO: 59886 - RNA, 22 nt, Artificial Sequence
  LRRK2 RNA guide
gcaugugacugcccgaguuccu

SEQ ID NO: 59887 - RNA, 22 nt, Artificial Sequence
  LRRK2 RNA guide
ggaacucgggcagucacaugca

SEQ ID NO: 59888 - RNA, 22 nt, Artificial Sequence
  LRRK2 RNA guide
ggcagucacaugcaaaacuaua

SEQ ID NO: 59889 - RNA, 22 nt, Artificial Sequence
  LRRK2 RNA guide
gggcagucacaugcaaaacuau

SEQ ID NO: 59890 - RNA, 22 nt, Artificial Sequence
  LRRK2 RNA guide
gugacugcccgaguuccuaaaa

SEQ ID NO: 59891 - RNA, 22 nt, Artificial Sequence
  LRRK2 RNA guide
guuuugcaugugacugcccgag

SEQ ID NO: 59892 - RNA, 22 nt, Artificial Sequence
  LRRK2 RNA guide
uaauuuuaggaacucgggcagu

SEQ ID NO: 59893 - RNA, 22 nt, Artificial Sequence
  LRRK2 RNA guide
uaggaacucgggcagucacaug

SEQ ID NO: 59894 - RNA, 22 nt, Artificial Sequence
  LRRK2 RNA guide
uaguuuugcaugugacugcccg

SEQ ID NO: 59895 - RNA, 22 nt, Artificial Sequence
  LRRK2 RNA guide
uauaguuuugcaugugacugcc

SEQ ID NO: 59896 - RNA, 22 nt, Artificial Sequence
  LRRK2 RNA guide
ucgggcagucacaugcaaaacu

SEQ ID NO: 59897 - RNA, 22 nt, Artificial Sequence
  LRRK2 RNA guide
ugacugcccgaguuccuaaaau

SEQ ID NO: 59898 - RNA, 22 nt, Artificial Sequence
  LRRK2 RNA guide
ugcaugugacugcccgaguucc

SEQ ID NO: 59899 - RNA, 22 nt, Artificial Sequence
  LRRK2 RNA guide
ugugacugcccgaguuccuaaa

SEQ ID NO: 59900 - RNA, 22 nt, Artificial Sequence
  LRRK2 RNA guide
uuaggaacucgggcagucacau

SEQ ID NO: 59901 - RNA, 22 nt, Artificial Sequence
  LRRK2 RNA guide
uuauaguuuugcaugugacugc

SEQ ID NO: 59902 - RNA, 22 nt, Artificial Sequence
  LRRK2 RNA guide
uugcaugugacugcccgaguuc

SEQ ID NO: 59903 - RNA, 22 nt, Artificial Sequence
  LRRK2 RNA guide
uuuaggaacucgggcagucaca

SEQ ID NO: 59904 - RNA, 22 nt, Artificial Sequence
  LRRK2 RNA guide
uuuauaguuuugcaugugacug

SEQ ID NO: 59905 - RNA, 22 nt, Artificial Sequence
  LRRK2 RNA guide
uuugcaugugacugcccgaguu

SEQ ID NO: 59906 - RNA, 22 nt, Artificial Sequence
  LRRK2 RNA guide
uuuuaggaacucgggcagucac

SEQ ID NO: 59907 - RNA, 22 nt, Artificial Sequence
  LRRK2 RNA guide
uuuugcaugugacugcccgagu

SEQ ID NO: 59908 - RNA, 20 nt, Artificial Sequence
  LRRK2 RNA guide
ccgauuaaccuaaaaaagaa

SEQ ID NO: 59909 - RNA, 20 nt, Artificial Sequence
  LRRK2 RNA guide
cuucuuuuuuagguuaaucg

SEQ ID NO: 59910 - RNA, 20 nt, Artificial Sequence
  LRRK2 RNA guide
cuuuuuuagguuaaucggaa

SEQ ID NO: 59911 - RNA, 20 nt, Artificial Sequence
  LRRK2 RNA guide
gcacuucuuuuuuagguuaa

SEQ ID NO: 59912 - RNA, 20 nt, Artificial Sequence
  LRRK2 RNA guide
ggcacuucuuuuuuagguua

SEQ ID NO: 59913 - RNA, 20 nt, Artificial Sequence
  LRRK2 RNA guide
uccgauuaaccuaaaaaaga

SEQ ID NO: 59914 - RNA, 20 nt, Artificial Sequence
  LRRK2 RNA guide
ucuuuuuuagguuaaucgga

SEQ ID NO: 59915 - RNA, 20 nt, Artificial Sequence
  LRRK2 RNA guide
uggcacuucuuuuuuagguu

SEQ ID NO: 59916 - RNA, 20 nt, Artificial Sequence
  LRRK2 RNA guide
uuccgauuaaccuaaaaaag

SEQ ID NO: 59917 - RNA, 20 nt, Artificial Sequence
  LRRK2 RNA guide
uucuuuuuuagguuaaucgg

SEQ ID NO: 59918 - RNA, 21 nt, Artificial Sequence
  LRRK2 RNA guide
auggcacuucuuuuuuagguu

SEQ ID NO: 59919 - RNA, 21 nt, Artificial Sequence
  LRRK2 RNA guide
ccgauuaaccuaaaaaagaag

SEQ ID NO: 59920 - RNA, 21 nt, Artificial Sequence
  LRRK2 RNA guide
cuucuuuuuuagguuaaucgg

SEQ ID NO: 59921 - RNA, 21 nt, Artificial Sequence
  LRRK2 RNA guide
ggcacuucuuuuuuagguuaa

SEQ ID NO: 59922 - RNA, 21 nt, Artificial Sequence
  LRRK2 RNA guide
uggcacuucuuuuuuagguua

SEQ ID NO: 59923 - RNA, 22 nt, Artificial Sequence
  LRRK2 RNA guide
acuucuuuuuuagguuaaucgg

SEQ ID NO: 59924 - RNA, 22 nt, Artificial Sequence
  LRRK2 RNA guide
auggcacuucuuuuuuagguua

SEQ ID NO: 59925 - RNA, 22 nt, Artificial Sequence
  LRRK2 RNA guide
cacuucuuuuuuagguuaaucg

SEQ ID NO: 59926 - RNA, 22 nt, Artificial Sequence
  LRRK2 RNA guide
ccgauuaaccuaaaaaagaagu

SEQ ID NO: 59927 - RNA, 22 nt, Artificial Sequence
  LRRK2 RNA guide
cuucuuuuuuagguuaaucgga

SEQ ID NO: 59928 - RNA, 22 nt, Artificial Sequence
  LRRK2 RNA guide
gauggcacuucuuuuuuagguu

SEQ ID NO: 59929 - RNA, 22 nt, Artificial Sequence
  LRRK2 RNA guide
gcacuucuuuuuuagguuaauc

SEQ ID NO: 59930 - RNA, 22 nt, Artificial Sequence
  LRRK2 RNA guide
ggcacuucuuuuuuagguuaau

SEQ ID NO: 59931 - RNA, 22 nt, Artificial Sequence
  LRRK2 RNA guide
uccgauuaaccuaaaaaagaag

SEQ ID NO: 59932 - RNA, 22 nt, Artificial Sequence
  LRRK2 RNA guide
uggcacuucuuuuuuagguuaa

SEQ ID NO: 59933 - RNA, 20 nt, Artificial Sequence
  LRRK2 RNA guide
aaaaaagaagugccaucauu

SEQ ID NO: 59934 - RNA, 20 nt, Artificial Sequence
  LRRK2 RNA guide
aaaaagaagugccaucauuu

SEQ ID NO: 59935 - RNA, 20 nt, Artificial Sequence
  LRRK2 RNA guide
aaaaaugauggcacuucuuu

SEQ ID NO: 59936 - RNA, 20 nt, Artificial Sequence
  LRRK2 RNA guide
aaaagaagugccaucauuuu

SEQ ID NO: 59937 - RNA, 20 nt, Artificial Sequence
  LRRK2 RNA guide
aaaaugauggcacuucuuuu

SEQ ID NO: 59938 - RNA, 20 nt, Artificial Sequence
  LRRK2 RNA guide
aaagaagugccaucauuuuu

SEQ ID NO: 59939 - RNA, 20 nt, Artificial Sequence
  LRRK2 RNA guide
aaaugauggcacuucuuuuu

SEQ ID NO: 59940 - RNA, 20 nt, Artificial Sequence
  LRRK2 RNA guide
aaccuaaaaaagaagugcca

SEQ ID NO: 59941 - RNA, 20 nt, Artificial Sequence
  LRRK2 RNA guide
aagaagugccaucauuuuua

SEQ ID NO: 59942 - RNA, 20 nt, Artificial Sequence
  LRRK2 RNA guide
aauaaaaaugauggcacuuc

SEQ ID NO: 59943 - RNA, 20 nt, Artificial Sequence
  LRRK2 RNA guide
aaugauggcacuucuuuuuu

SEQ ID NO: 59944 - RNA, 20 nt, Artificial Sequence
  LRRK2 RNA guide
accuaaaaaagaagugccau

SEQ ID NO: 59945 - RNA, 20 nt, Artificial Sequence
  LRRK2 RNA guide
agaagugccaucauuuuuau

SEQ ID NO: 59946 - RNA, 20 nt, Artificial Sequence
  LRRK2 RNA guide
auaaaaaugauggcacuucu

SEQ ID NO: 59947 - RNA, 20 nt, Artificial Sequence
  LRRK2 RNA guide
augauggcacuucuuuuuua

SEQ ID NO: 59948 - RNA, 20 nt, Artificial Sequence
  LRRK2 RNA guide
auggcacuucuuuuuuaggu

SEQ ID NO: 59949 - RNA, 20 nt, Artificial Sequence
  LRRK2 RNA guide
ccuaaaaaagaagugccauc

SEQ ID NO: 59950 - RNA, 20 nt, Artificial Sequence
  LRRK2 RNA guide
cgauuaaccuaaaaaagaag

SEQ ID NO: 59951 - RNA, 20 nt, Artificial Sequence
  LRRK2 RNA guide
cuaaaaaagaagugccauca

SEQ ID NO: 59952 - RNA, 20 nt, Artificial Sequence
  LRRK2 RNA guide
gaagugccaucauuuuuauu

SEQ ID NO: 59953 - RNA, 20 nt, Artificial Sequence
  LRRK2 RNA guide
gauggcacuucuuuuuuagg

SEQ ID NO: 59954 - RNA, 20 nt, Artificial Sequence
  LRRK2 RNA guide
gcauaaauaaaaaugauggc

SEQ ID NO: 59955 - RNA, 20 nt, Artificial Sequence
  LRRK2 RNA guide
ggcauaaauaaaaaugaugg

SEQ ID NO: 59956 - RNA, 20 nt, Artificial Sequence
  LRRK2 RNA guide
uaaaaaagaagugccaucau

SEQ ID NO: 59957 - RNA, 20 nt, Artificial Sequence
  LRRK2 RNA guide
uaaaaaugauggcacuucuu

SEQ ID NO: 59958 - RNA, 20 nt, Artificial Sequence
  LRRK2 RNA guide
uaaccuaaaaaagaagugcc

SEQ ID NO: 59959 - RNA, 20 nt, Artificial Sequence
  LRRK2 RNA guide
ugauggcacuucuuuuuuag

SEQ ID NO: 59960 - RNA, 20 nt, Artificial Sequence
  LRRK2 RNA guide
uuaaccuaaaaaagaagugc

SEQ ID NO: 59961 - RNA, 21 nt, Artificial Sequence
  LRRK2 RNA guide
aaccuaaaaaagaagugccau

SEQ ID NO: 59962 - RNA, 21 nt, Artificial Sequence
  LRRK2 RNA guide
accuaaaaaagaagugccauc

SEQ ID NO: 59963 - RNA, 21 nt, Artificial Sequence
  LRRK2 RNA guide
augauggcacuucuuuuuuag

SEQ ID NO: 59964 - RNA, 21 nt, Artificial Sequence
  LRRK2 RNA guide
ccuaaaaaagaagugccauca

SEQ ID NO: 59965 - RNA, 21 nt, Artificial Sequence
  LRRK2 RNA guide
cuaaaaaagaagugccaucau

SEQ ID NO: 59966 - RNA, 21 nt, Artificial Sequence
  LRRK2 RNA guide
gauggcacuucuuuuuuaggu

SEQ ID NO: 59967 - RNA, 21 nt, Artificial Sequence
  LRRK2 RNA guide
ggcauaaauaaaaaugauggc

SEQ ID NO: 59968 - RNA, 21 nt, Artificial Sequence
  LRRK2 RNA guide
uaaccuaaaaaagaagugcca

SEQ ID NO: 59969 - RNA, 21 nt, Artificial Sequence
  LRRK2 RNA guide
ugauggcacuucuuuuuuagg

SEQ ID NO: 59970 - RNA, 21 nt, Artificial Sequence
  LRRK2 RNA guide
uuaaccuaaaaaagaagugcc

SEQ ID NO: 59971 - RNA, 22 nt, Artificial Sequence
  LRRK2 RNA guide
aaccuaaaaaagaagugccauc

SEQ ID NO: 59972 - RNA, 22 nt, Artificial Sequence
  LRRK2 RNA guide
aaugauggcacuucuuuuuuag

SEQ ID NO: 59973 - RNA, 22 nt, Artificial Sequence
  LRRK2 RNA guide
accuaaaaaagaagugccauca

SEQ ID NO: 59974 - RNA, 22 nt, Artificial Sequence
  LRRK2 RNA guide
augauggcacuucuuuuuuagg

SEQ ID NO: 59975 - RNA, 22 nt, Artificial Sequence
  LRRK2 RNA guide
auuaaccuaaaaaagaagugcc

SEQ ID NO: 59976 - RNA, 22 nt, Artificial Sequence
  LRRK2 RNA guide
ccuaaaaaagaagugccaucau

SEQ ID NO: 59977 - RNA, 22 nt, Artificial Sequence
  LRRK2 RNA guide
cgauuaaccuaaaaaagaagug

SEQ ID NO: 59978 - RNA, 22 nt, Artificial Sequence
  LRRK2 RNA guide
cuaaaaaagaagugccaucauu

SEQ ID NO: 59979 - RNA, 22 nt, Artificial Sequence
  LRRK2 RNA guide
gauuaaccuaaaaaagaagugc

SEQ ID NO: 59980 - RNA, 22 nt, Artificial Sequence
  LRRK2 RNA guide
gcauaaauaaaaaugauggcac

SEQ ID NO: 59981 - RNA, 22 nt, Artificial Sequence
  LRRK2 RNA guide
ggcauaaauaaaaaugauggca

SEQ ID NO: 59982 - RNA, 22 nt, Artificial Sequence
  LRRK2 RNA guide
gugccaucauuuuuauuuaugc

SEQ ID NO: 59983 - RNA, 22 nt, Artificial Sequence
  LRRK2 RNA guide
uaaccuaaaaaagaagugccau

SEQ ID NO: 59984 - RNA, 22 nt, Artificial Sequence
  LRRK2 RNA guide
ugauggcacuucuuuuuuaggu

SEQ ID NO: 59985 - RNA, 22 nt, Artificial Sequence
  LRRK2 RNA guide
ugccaucauuuuuauuuaugcc

SEQ ID NO: 59986 - RNA, 22 nt, Artificial Sequence
  LRRK2 RNA guide
uggcauaaauaaaaaugauggc

SEQ ID NO: 59987 - RNA, 22 nt, Artificial Sequence
  LRRK2 RNA guide
uuaaccuaaaaaagaagugcca

SEQ ID NO: 59988 - RNA, 20 nt, Artificial Sequence
  LRRK2 RNA guide
aaccuaaaaaagaaguacca

SEQ ID NO: 59989 - RNA, 20 nt, Artificial Sequence
  LRRK2 RNA guide
accuaaaaaagaaguaccau

SEQ ID NO: 59990 - RNA, 20 nt, Artificial Sequence
  LRRK2 RNA guide
augguacuucuuuuuuaggu

SEQ ID NO: 59991 - RNA, 20 nt, Artificial Sequence
  LRRK2 RNA guide
ccuaaaaaagaaguaccauc

SEQ ID NO: 59992 - RNA, 20 nt, Artificial Sequence
  LRRK2 RNA guide
cuaaaaaagaaguaccauca

SEQ ID NO: 59993 - RNA, 20 nt, Artificial Sequence
  LRRK2 RNA guide
gaugguacuucuuuuuuagg

SEQ ID NO: 59994 - RNA, 20 nt, Artificial Sequence
  LRRK2 RNA guide
gguacuucuuuuuuagguua

SEQ ID NO: 59995 - RNA, 20 nt, Artificial Sequence
  LRRK2 RNA guide
uaaccuaaaaaagaaguacc

SEQ ID NO: 59996 - RNA, 20 nt, Artificial Sequence
  LRRK2 RNA guide
ugaugguacuucuuuuuuag

SEQ ID NO: 59997 - RNA, 20 nt, Artificial Sequence
  LRRK2 RNA guide
ugguacuucuuuuuuagguu

SEQ ID NO: 59998 - RNA, 21 nt, Artificial Sequence
  LRRK2 RNA guide
accuaaaaaagaaguaccauc

SEQ ID NO: 59999 - RNA, 21 nt, Artificial Sequence
  LRRK2 RNA guide
ccuaaaaaagaaguaccauca

SEQ ID NO: 60000 - RNA, 21 nt, Artificial Sequence
  LRRK2 RNA guide
gaugguacuucuuuuuuaggu

SEQ ID NO: 60001 - RNA, 21 nt, Artificial Sequence
  LRRK2 RNA guide
ugaugguacuucuuuuuuagg

SEQ ID NO: 60002 - RNA, 22 nt, Artificial Sequence
  LRRK2 RNA guide
aaccuaaaaaagaaguaccauc

SEQ ID NO: 60003 - RNA, 22 nt, Artificial Sequence
  LRRK2 RNA guide
accuaaaaaagaaguaccauca

SEQ ID NO: 60004 - RNA, 22 nt, Artificial Sequence
  LRRK2 RNA guide
augaugguacuucuuuuuuagg

SEQ ID NO: 60005 - RNA, 22 nt, Artificial Sequence
  LRRK2 RNA guide
ccuaaaaaagaaguaccaucau

SEQ ID NO: 60006 - RNA, 22 nt, Artificial Sequence
  LRRK2 RNA guide
gaugguacuucuuuuuuagguu

SEQ ID NO: 60007 - RNA, 22 nt, Artificial Sequence
  LRRK2 RNA guide
ugaugguacuucuuuuuuaggu

SEQ ID NO: 60008 - RNA, 20 nt, Artificial Sequence
  LRRK2 RNA guide
ccaucauuuuuauuuaugcc

SEQ ID NO: 60009 - RNA, 20 nt, Artificial Sequence
  LRRK2 RNA guide
gccaucauuuuuauuuaugc

SEQ ID NO: 60010 - RNA, 21 nt, Artificial Sequence
  LRRK2 RNA guide
gccaucauuuuuauuuaugcc

SEQ ID NO: 60011 - RNA, 22 nt, Artificial Sequence
  LRRK2 RNA guide
gccaucauuuuuauuuaugcca

SEQ ID NO: 60012 - RNA, 20 nt, Artificial Sequence
  LRRK2 RNA guide
aaaaaagaagugccuucauu

SEQ ID NO: 60013 - RNA, 20 nt, Artificial Sequence
  LRRK2 RNA guide
aaaaagaagugccuucauuu

SEQ ID NO: 60014 - RNA, 20 nt, Artificial Sequence
  LRRK2 RNA guide
aaaaaugaaggcacuucuuu

SEQ ID NO: 60015 - RNA, 20 nt, Artificial Sequence
  LRRK2 RNA guide
aaaagaagugccuucauuuu

SEQ ID NO: 60016 - RNA, 20 nt, Artificial Sequence
  LRRK2 RNA guide
aaaaugaaggcacuucuuuu

SEQ ID NO: 60017 - RNA, 20 nt, Artificial Sequence
  LRRK2 RNA guide
aaagaagugccuucauuuuu

SEQ ID NO: 60018 - RNA, 20 nt, Artificial Sequence
  LRRK2 RNA guide
aaaugaaggcacuucuuuuu

SEQ ID NO: 60019 - RNA, 20 nt, Artificial Sequence
  LRRK2 RNA guide
aaccuaaaaaagaagugccu

SEQ ID NO: 60020 - RNA, 20 nt, Artificial Sequence
  LRRK2 RNA guide
aagaagugccuucauuuuua

SEQ ID NO: 60021 - RNA, 20 nt, Artificial Sequence
  LRRK2 RNA guide
aaggcacuucuuuuuuaggu

SEQ ID NO: 60022 - RNA, 20 nt, Artificial Sequence
  LRRK2 RNA guide
aauaaaaaugaaggcacuuc

SEQ ID NO: 60023 - RNA, 20 nt, Artificial Sequence
  LRRK2 RNA guide
aaugaaggcacuucuuuuuu

SEQ ID NO: 60024 - RNA, 20 nt, Artificial Sequence
  LRRK2 RNA guide
accuaaaaaagaagugccuu

SEQ ID NO: 60025 - RNA, 20 nt, Artificial Sequence
  LRRK2 RNA guide
agaagugccuucauuuuuau

SEQ ID NO: 60026 - RNA, 20 nt, Artificial Sequence
  LRRK2 RNA guide
auaaaaaugaaggcacuucu

SEQ ID NO: 60027 - RNA, 20 nt, Artificial Sequence
  LRRK2 RNA guide
augaaggcacuucuuuuuua

SEQ ID NO: 60028 - RNA, 20 nt, Artificial Sequence
  LRRK2 RNA guide
ccuaaaaaagaagugccuuc

SEQ ID NO: 60029 - RNA, 20 nt, Artificial Sequence
  LRRK2 RNA guide
ccuucauuuuuauuuaugcc

SEQ ID NO: 60030 - RNA, 20 nt, Artificial Sequence
  LRRK2 RNA guide
cuaaaaaagaagugccuuca

SEQ ID NO: 60031 - RNA, 20 nt, Artificial Sequence
  LRRK2 RNA guide
gaaggcacuucuuuuuuagg

SEQ ID NO: 60032 - RNA, 20 nt, Artificial Sequence
  LRRK2 RNA guide
gaagugccuucauuuuuauu

SEQ ID NO: 60033 - RNA, 20 nt, Artificial Sequence
  LRRK2 RNA guide
gcauaaauaaaaaugaaggc

SEQ ID NO: 60034 - RNA, 20 nt, Artificial Sequence
  LRRK2 RNA guide
gccuucauuuuuauuuaugc

SEQ ID NO: 60035 - RNA, 20 nt, Artificial Sequence
  LRRK2 RNA guide
ggcauaaauaaaaaugaagg

SEQ ID NO: 60036 - RNA, 20 nt, Artificial Sequence
  LRRK2 RNA guide
uaaaaaagaagugccuucau

SEQ ID NO: 60037 - RNA, 20 nt, Artificial Sequence
  LRRK2 RNA guide
uaaaaaugaaggcacuucuu

SEQ ID NO: 60038 - RNA, 20 nt, Artificial Sequence
  LRRK2 RNA guide
ugaaggcacuucuuuuuuag

SEQ ID NO: 60039 - RNA, 21 nt, Artificial Sequence
  LRRK2 RNA guide
aaccuaaaaaagaagugccuu

SEQ ID NO: 60040 - RNA, 21 nt, Artificial Sequence
  LRRK2 RNA guide
aaggcacuucuuuuuuagguu

SEQ ID NO: 60041 - RNA, 21 nt, Artificial Sequence
  LRRK2 RNA guide
accuaaaaaagaagugccuuc

SEQ ID NO: 60042 - RNA, 21 nt, Artificial Sequence
  LRRK2 RNA guide
augaaggcacuucuuuuuuag

SEQ ID NO: 60043 - RNA, 21 nt, Artificial Sequence
  LRRK2 RNA guide
ccuaaaaaagaagugccuuca

SEQ ID NO: 60044 - RNA, 21 nt, Artificial Sequence
  LRRK2 RNA guide
cuaaaaaagaagugccuucau

SEQ ID NO: 60045 - RNA, 21 nt, Artificial Sequence
  LRRK2 RNA guide
gaaggcacuucuuuuuuaggu

SEQ ID NO: 60046 - RNA, 21 nt, Artificial Sequence
  LRRK2 RNA guide
gccuucauuuuuauuuaugcc

SEQ ID NO: 60047 - RNA, 21 nt, Artificial Sequence
  LRRK2 RNA guide
ggcauaaauaaaaaugaaggc

SEQ ID NO: 60048 - RNA, 21 nt, Artificial Sequence
  LRRK2 RNA guide
uaaccuaaaaaagaagugccu

SEQ ID NO: 60049 - RNA, 21 nt, Artificial Sequence
  LRRK2 RNA guide
ugaaggcacuucuuuuuuagg

SEQ ID NO: 60050 - RNA, 22 nt, Artificial Sequence
  LRRK2 RNA guide
aaccuaaaaaagaagugccuuc

SEQ ID NO: 60051 - RNA, 22 nt, Artificial Sequence
  LRRK2 RNA guide
aaggcacuucuuuuuuagguua

SEQ ID NO: 60052 - RNA, 22 nt, Artificial Sequence
  LRRK2 RNA guide
aaugaaggcacuucuuuuuuag

SEQ ID NO: 60053 - RNA, 22 nt, Artificial Sequence
  LRRK2 RNA guide
accuaaaaaagaagugccuuca

SEQ ID NO: 60054 - RNA, 22 nt, Artificial Sequence
  LRRK2 RNA guide
augaaggcacuucuuuuuuagg

SEQ ID NO: 60055 - RNA, 22 nt, Artificial Sequence
  LRRK2 RNA guide
ccuaaaaaagaagugccuucau

SEQ ID NO: 60056 - RNA, 22 nt, Artificial Sequence
  LRRK2 RNA guide
cuaaaaaagaagugccuucauu

SEQ ID NO: 60057 - RNA, 22 nt, Artificial Sequence
  LRRK2 RNA guide
gaaggcacuucuuuuuuagguu

SEQ ID NO: 60058 - RNA, 22 nt, Artificial Sequence
  LRRK2 RNA guide
gcauaaauaaaaaugaaggcac

SEQ ID NO: 60059 - RNA, 22 nt, Artificial Sequence
  LRRK2 RNA guide
gccuucauuuuuauuuaugcca

SEQ ID NO: 60060 - RNA, 22 nt, Artificial Sequence
  LRRK2 RNA guide
ggcauaaauaaaaaugaaggca

SEQ ID NO: 60061 - RNA, 22 nt, Artificial Sequence
  LRRK2 RNA guide
gugccuucauuuuuauuuaugc

SEQ ID NO: 60062 - RNA, 22 nt, Artificial Sequence
  LRRK2 RNA guide
uaaccuaaaaaagaagugccuu

SEQ ID NO: 60063 - RNA, 22 nt, Artificial Sequence
  LRRK2 RNA guide
ugaaggcacuucuuuuuuaggu

SEQ ID NO: 60064 - RNA, 22 nt, Artificial Sequence
  LRRK2 RNA guide
ugccuucauuuuuauuuaugcc

SEQ ID NO: 60065 - RNA, 22 nt, Artificial Sequence
  LRRK2 RNA guide
uggcauaaauaaaaaugaaggc

SEQ ID NO: 60066 - RNA, 22 nt, Artificial Sequence
  LRRK2 RNA guide
uuaaccuaaaaaagaagugccu

SEQ ID NO: 60067 - RNA, 20 nt, Artificial Sequence
  LRRK2 RNA guide
aaccagagcaaccacaaacc

SEQ ID NO: 60068 - RNA, 20 nt, Artificial Sequence
  LRRK2 RNA guide
aauucugcuacauucuagua

SEQ ID NO: 60069 - RNA, 20 nt, Artificial Sequence
  LRRK2 RNA guide
acauucuaguaaccagagca

SEQ ID NO: 60070 - RNA, 20 nt, Artificial Sequence
  LRRK2 RNA guide
accagagcaaccacaaaccu

SEQ ID NO: 60071 - RNA, 20 nt, Artificial Sequence
  LRRK2 RNA guide
agcuagguuugugguugcuc

SEQ ID NO: 60072 - RNA, 20 nt, Artificial Sequence
  LRRK2 RNA guide
agguuugugguugcucuggu

SEQ ID NO: 60073 - RNA, 20 nt, Artificial Sequence
  LRRK2 RNA guide
aguaaccagagcaaccacaa

SEQ ID NO: 60074 - RNA, 20 nt, Artificial Sequence
  LRRK2 RNA guide
auucuaguaaccagagcaac

SEQ ID NO: 60075 - RNA, 20 nt, Artificial Sequence
  LRRK2 RNA guide
auucugcuacauucuaguaa

SEQ ID NO: 60076 - RNA, 20 nt, Artificial Sequence
  LRRK2 RNA guide
cauucuaguaaccagagcaa

SEQ ID NO: 60077 - RNA, 20 nt, Artificial Sequence
  LRRK2 RNA guide
cuacauucuaguaaccagag

SEQ ID NO: 60078 - RNA, 20 nt, Artificial Sequence
  LRRK2 RNA guide
cuagguuugugguugcucug

SEQ ID NO: 60079 - RNA, 20 nt, Artificial Sequence
  LRRK2 RNA guide
cuaguaaccagagcaaccac

SEQ ID NO: 60080 - RNA, 20 nt, Artificial Sequence
  LRRK2 RNA guide
cucugguuacuagaauguag

SEQ ID NO: 60081 - RNA, 20 nt, Artificial Sequence
  LRRK2 RNA guide
cugcuacauucuaguaacca

SEQ ID NO: 60082 - RNA, 20 nt, Artificial Sequence
  LRRK2 RNA guide
cugguuacuagaauguagca

SEQ ID NO: 60083 - RNA, 20 nt, Artificial Sequence
  LRRK2 RNA guide
gagcuagguuugugguugcu

SEQ ID NO: 60084 - RNA, 20 nt, Artificial Sequence
  LRRK2 RNA guide
gcuacauucuaguaaccaga

SEQ ID NO: 60085 - RNA, 20 nt, Artificial Sequence
  LRRK2 RNA guide
gcuagguuugugguugcucu

SEQ ID NO: 60086 - RNA, 20 nt, Artificial Sequence
  LRRK2 RNA guide
gcucugguuacuagaaugua

SEQ ID NO: 60087 - RNA, 20 nt, Artificial Sequence
  LRRK2 RNA guide
gguuacuagaauguagcaga

SEQ ID NO: 60088 - RNA, 20 nt, Artificial Sequence
  LRRK2 RNA guide
gguugcucugguuacuagaa

SEQ ID NO: 60089 - RNA, 20 nt, Artificial Sequence
  LRRK2 RNA guide
gguuugugguugcucugguu

SEQ ID NO: 60090 - RNA, 20 nt, Artificial Sequence
  LRRK2 RNA guide
guaaccagagcaaccacaaa

SEQ ID NO: 60091 - RNA, 20 nt, Artificial Sequence
  LRRK2 RNA guide
gugguugcucugguuacuag

SEQ ID NO: 60092 - RNA, 20 nt, Artificial Sequence
  LRRK2 RNA guide
guugcucugguuacuagaau

SEQ ID NO: 60093 - RNA, 20 nt, Artificial Sequence
  LRRK2 RNA guide
guuugugguugcucugguua

SEQ ID NO: 60094 - RNA, 20 nt, Artificial Sequence
  LRRK2 RNA guide
uaaccagagcaaccacaaac

SEQ ID NO: 60095 - RNA, 20 nt, Artificial Sequence
  LRRK2 RNA guide
uaauucugcuacauucuagu

SEQ ID NO: 60096 - RNA, 20 nt, Artificial Sequence
  LRRK2 RNA guide
uacauucuaguaaccagagc

SEQ ID NO: 60097 - RNA, 20 nt, Artificial Sequence
  LRRK2 RNA guide
uagguuugugguugcucugg

SEQ ID NO: 60098 - RNA, 20 nt, Artificial Sequence
  LRRK2 RNA guide
uaguaaccagagcaaccaca

SEQ ID NO: 60099 - RNA, 20 nt, Artificial Sequence
  LRRK2 RNA guide
ucuaguaaccagagcaacca

SEQ ID NO: 60100 - RNA, 20 nt, Artificial Sequence
  LRRK2 RNA guide
ucugcuacauucuaguaacc

SEQ ID NO: 60101 - RNA, 20 nt, Artificial Sequence
  LRRK2 RNA guide
ugagcuagguuugugguugc

SEQ ID NO: 60102 - RNA, 20 nt, Artificial Sequence
  LRRK2 RNA guide
ugcuacauucuaguaaccag

SEQ ID NO: 60103 - RNA, 20 nt, Artificial Sequence
  LRRK2 RNA guide
ugcucugguuacuagaaugu

SEQ ID NO: 60104 - RNA, 20 nt, Artificial Sequence
  LRRK2 RNA guide
ugguuacuagaauguagcag

SEQ ID NO: 60105 - RNA, 20 nt, Artificial Sequence
  LRRK2 RNA guide
ugguugcucugguuacuaga

SEQ ID NO: 60106 - RNA, 20 nt, Artificial Sequence
  LRRK2 RNA guide
ugugguugcucugguuacua

SEQ ID NO: 60107 - RNA, 20 nt, Artificial Sequence
  LRRK2 RNA guide
uuaauucugcuacauucuag

SEQ ID NO: 60108 - RNA, 20 nt, Artificial Sequence
  LRRK2 RNA guide
uucuaguaaccagagcaacc

SEQ ID NO: 60109 - RNA, 20 nt, Artificial Sequence
  LRRK2 RNA guide
uucugcuacauucuaguaac

SEQ ID NO: 60110 - RNA, 20 nt, Artificial Sequence
  LRRK2 RNA guide
uugcucugguuacuagaaug

SEQ ID NO: 60111 - RNA, 20 nt, Artificial Sequence
  LRRK2 RNA guide
uugugguugcucugguuacu

SEQ ID NO: 60112 - RNA, 20 nt, Artificial Sequence
  LRRK2 RNA guide
uuugugguugcucugguuac

SEQ ID NO: 60113 - RNA, 21 nt, Artificial Sequence
  LRRK2 RNA guide
aaccagagcaaccacaaaccu

SEQ ID NO: 60114 - RNA, 21 nt, Artificial Sequence
  LRRK2 RNA guide
acauucuaguaaccagagcaa

SEQ ID NO: 60115 - RNA, 21 nt, Artificial Sequence
  LRRK2 RNA guide
accagagcaaccacaaaccua

SEQ ID NO: 60116 - RNA, 21 nt, Artificial Sequence
  LRRK2 RNA guide
agcuagguuugugguugcucu

SEQ ID NO: 60117 - RNA, 21 nt, Artificial Sequence
  LRRK2 RNA guide
agguuugugguugcucugguu

SEQ ID NO: 60118 - RNA, 21 nt, Artificial Sequence
  LRRK2 RNA guide
aguaaccagagcaaccacaaa

SEQ ID NO: 60119 - RNA, 21 nt, Artificial Sequence
  LRRK2 RNA guide
auucuaguaaccagagcaacc

SEQ ID NO: 60120 - RNA, 21 nt, Artificial Sequence
  LRRK2 RNA guide
auucugcuacauucuaguaac

SEQ ID NO: 60121 - RNA, 21 nt, Artificial Sequence
  LRRK2 RNA guide
cauucuaguaaccagagcaac

SEQ ID NO: 60122 - RNA, 21 nt, Artificial Sequence
  LRRK2 RNA guide
cuacauucuaguaaccagagc

SEQ ID NO: 60123 - RNA, 21 nt, Artificial Sequence
  LRRK2 RNA guide
cuagguuugugguugcucugg

SEQ ID NO: 60124 - RNA, 21 nt, Artificial Sequence
  LRRK2 RNA guide
cuaguaaccagagcaaccaca

SEQ ID NO: 60125 - RNA, 21 nt, Artificial Sequence
  LRRK2 RNA guide
cucugguuacuagaauguagc

SEQ ID NO: 60126 - RNA, 21 nt, Artificial Sequence
  LRRK2 RNA guide
cugagcuagguuugugguugc

SEQ ID NO: 60127 - RNA, 21 nt, Artificial Sequence
  LRRK2 RNA guide
cugcuacauucuaguaaccag

SEQ ID NO: 60128 - RNA, 21 nt, Artificial Sequence
  LRRK2 RNA guide
cugguuacuagaauguagcag

SEQ ID NO: 60129 - RNA, 21 nt, Artificial Sequence
  LRRK2 RNA guide
gagcuagguuugugguugcuc

SEQ ID NO: 60130 - RNA, 21 nt, Artificial Sequence
  LRRK2 RNA guide
gcuacauucuaguaaccagag

SEQ ID NO: 60131 - RNA, 21 nt, Artificial Sequence
  LRRK2 RNA guide
gcuagguuugugguugcucug

SEQ ID NO: 60132 - RNA, 21 nt, Artificial Sequence
  LRRK2 RNA guide
gcucugguuacuagaauguag

SEQ ID NO: 60133 - RNA, 21 nt, Artificial Sequence
  LRRK2 RNA guide
gguuacuagaauguagcagaa

SEQ ID NO: 60134 - RNA, 21 nt, Artificial Sequence
  LRRK2 RNA guide
gguugcucugguuacuagaau

SEQ ID NO: 60135 - RNA, 21 nt, Artificial Sequence
  LRRK2 RNA guide
gguuugugguugcucugguua

SEQ ID NO: 60136 - RNA, 21 nt, Artificial Sequence
  LRRK2 RNA guide
guaaccagagcaaccacaaac

SEQ ID NO: 60137 - RNA, 21 nt, Artificial Sequence
  LRRK2 RNA guide
gugguugcucugguuacuaga

SEQ ID NO: 60138 - RNA, 21 nt, Artificial Sequence
  LRRK2 RNA guide
guugcucugguuacuagaaug

SEQ ID NO: 60139 - RNA, 21 nt, Artificial Sequence
  LRRK2 RNA guide
guuugugguugcucugguuac

SEQ ID NO: 60140 - RNA, 21 nt, Artificial Sequence
  LRRK2 RNA guide
uaaccagagcaaccacaaacc

SEQ ID NO: 60141 - RNA, 21 nt, Artificial Sequence
  LRRK2 RNA guide
uacauucuaguaaccagagca

SEQ ID NO: 60142 - RNA, 21 nt, Artificial Sequence
  LRRK2 RNA guide
uagguuugugguugcucuggu

SEQ ID NO: 60143 - RNA, 21 nt, Artificial Sequence
  LRRK2 RNA guide
uaguaaccagagcaaccacaa

SEQ ID NO: 60144 - RNA, 21 nt, Artificial Sequence
  LRRK2 RNA guide
ucuaguaaccagagcaaccac

SEQ ID NO: 60145 - RNA, 21 nt, Artificial Sequence
  LRRK2 RNA guide
ucugcuacauucuaguaacca

SEQ ID NO: 60146 - RNA, 21 nt, Artificial Sequence
  LRRK2 RNA guide
ucugguuacuagaauguagca

SEQ ID NO: 60147 - RNA, 21 nt, Artificial Sequence
  LRRK2 RNA guide
ugagcuagguuugugguugcu

SEQ ID NO: 60148 - RNA, 21 nt, Artificial Sequence
  LRRK2 RNA guide
ugcuacauucuaguaaccaga

SEQ ID NO: 60149 - RNA, 21 nt, Artificial Sequence
  LRRK2 RNA guide
ugcucugguuacuagaaugua

SEQ ID NO: 60150 - RNA, 21 nt, Artificial Sequence
  LRRK2 RNA guide
ugguuacuagaauguagcaga

SEQ ID NO: 60151 - RNA, 21 nt, Artificial Sequence
  LRRK2 RNA guide
ugguugcucugguuacuagaa

SEQ ID NO: 60152 - RNA, 21 nt, Artificial Sequence
  LRRK2 RNA guide
ugugguugcucugguuacuag

SEQ ID NO: 60153 - RNA, 21 nt, Artificial Sequence
  LRRK2 RNA guide
uucuaguaaccagagcaacca

SEQ ID NO: 60154 - RNA, 21 nt, Artificial Sequence
  LRRK2 RNA guide
uucugcuacauucuaguaacc

SEQ ID NO: 60155 - RNA, 21 nt, Artificial Sequence
  LRRK2 RNA guide
uugcucugguuacuagaaugu

SEQ ID NO: 60156 - RNA, 21 nt, Artificial Sequence
  LRRK2 RNA guide
uugugguugcucugguuacua

SEQ ID NO: 60157 - RNA, 21 nt, Artificial Sequence
  LRRK2 RNA guide
uuugugguugcucugguuacu

SEQ ID NO: 60158 - RNA, 22 nt, Artificial Sequence
  LRRK2 RNA guide
aaccagagcaaccacaaaccua

SEQ ID NO: 60159 - RNA, 22 nt, Artificial Sequence
  LRRK2 RNA guide
aauucugcuacauucuaguaac

SEQ ID NO: 60160 - RNA, 22 nt, Artificial Sequence
  LRRK2 RNA guide
acauucuaguaaccagagcaac

SEQ ID NO: 60161 - RNA, 22 nt, Artificial Sequence
  LRRK2 RNA guide
accagagcaaccacaaaccuag

SEQ ID NO: 60162 - RNA, 22 nt, Artificial Sequence
  LRRK2 RNA guide
agcuagguuugugguugcucug

SEQ ID NO: 60163 - RNA, 22 nt, Artificial Sequence
  LRRK2 RNA guide
agguuugugguugcucugguua

SEQ ID NO: 60164 - RNA, 22 nt, Artificial Sequence
  LRRK2 RNA guide
aguaaccagagcaaccacaaac

SEQ ID NO: 60165 - RNA, 22 nt, Artificial Sequence
  LRRK2 RNA guide
auucuaguaaccagagcaacca

SEQ ID NO: 60166 - RNA, 22 nt, Artificial Sequence
  LRRK2 RNA guide
auucugcuacauucuaguaacc

SEQ ID NO: 60167 - RNA, 22 nt, Artificial Sequence
  LRRK2 RNA guide
cauucuaguaaccagagcaacc

SEQ ID NO: 60168 - RNA, 22 nt, Artificial Sequence
  LRRK2 RNA guide
cuacauucuaguaaccagagca

SEQ ID NO: 60169 - RNA, 22 nt, Artificial Sequence
  LRRK2 RNA guide
cuagguuugugguugcucuggu

SEQ ID NO: 60170 - RNA, 22 nt, Artificial Sequence
  LRRK2 RNA guide
cuaguaaccagagcaaccacaa

SEQ ID NO: 60171 - RNA, 22 nt, Artificial Sequence
  LRRK2 RNA guide
cucugguuacuagaauguagca

SEQ ID NO: 60172 - RNA, 22 nt, Artificial Sequence
  LRRK2 RNA guide
cugagcuagguuugugguugcu

SEQ ID NO: 60173 - RNA, 22 nt, Artificial Sequence
  LRRK2 RNA guide
cugcuacauucuaguaaccaga

SEQ ID NO: 60174 - RNA, 22 nt, Artificial Sequence
  LRRK2 RNA guide
cugguuacuagaauguagcaga

SEQ ID NO: 60175 - RNA, 22 nt, Artificial Sequence
  LRRK2 RNA guide
gagcuagguuugugguugcucu

SEQ ID NO: 60176 - RNA, 22 nt, Artificial Sequence
  LRRK2 RNA guide
gcuacauucuaguaaccagagc

SEQ ID NO: 60177 - RNA, 22 nt, Artificial Sequence
  LRRK2 RNA guide
gcuagguuugugguugcucugg

SEQ ID NO: 60178 - RNA, 22 nt, Artificial Sequence
  LRRK2 RNA guide
gcucugguuacuagaauguagc

SEQ ID NO: 60179 - RNA, 22 nt, Artificial Sequence
  LRRK2 RNA guide
gguuacuagaauguagcagaau

SEQ ID NO: 60180 - RNA, 22 nt, Artificial Sequence
  LRRK2 RNA guide
gguugcucugguuacuagaaug

SEQ ID NO: 60181 - RNA, 22 nt, Artificial Sequence
  LRRK2 RNA guide
gguuugugguugcucugguuac

SEQ ID NO: 60182 - RNA, 22 nt, Artificial Sequence
  LRRK2 RNA guide
guaaccagagcaaccacaaacc

SEQ ID NO: 60183 - RNA, 22 nt, Artificial Sequence
  LRRK2 RNA guide
gugguugcucugguuacuagaa

SEQ ID NO: 60184 - RNA, 22 nt, Artificial Sequence
  LRRK2 RNA guide
guugcucugguuacuagaaugu

SEQ ID NO: 60185 - RNA, 22 nt, Artificial Sequence
  LRRK2 RNA guide
guuugugguugcucugguuacu

SEQ ID NO: 60186 - RNA, 22 nt, Artificial Sequence
  LRRK2 RNA guide
uaaccagagcaaccacaaaccu

SEQ ID NO: 60187 - RNA, 22 nt, Artificial Sequence
  LRRK2 RNA guide
uacauucuaguaaccagagcaa

SEQ ID NO: 60188 - RNA, 22 nt, Artificial Sequence
  LRRK2 RNA guide
uagguuugugguugcucugguu

SEQ ID NO: 60189 - RNA, 22 nt, Artificial Sequence
  LRRK2 RNA guide
uaguaaccagagcaaccacaaa

SEQ ID NO: 60190 - RNA, 22 nt, Artificial Sequence
  LRRK2 RNA guide
ucuaguaaccagagcaaccaca

SEQ ID NO: 60191 - RNA, 22 nt, Artificial Sequence
  LRRK2 RNA guide
ucugagcuagguuugugguugc

SEQ ID NO: 60192 - RNA, 22 nt, Artificial Sequence
  LRRK2 RNA guide
ucugcuacauucuaguaaccag

SEQ ID NO: 60193 - RNA, 22 nt, Artificial Sequence
  LRRK2 RNA guide
ucugguuacuagaauguagcag

SEQ ID NO: 60194 - RNA, 22 nt, Artificial Sequence
  LRRK2 RNA guide
ugagcuagguuugugguugcuc

SEQ ID NO: 60195 - RNA, 22 nt, Artificial Sequence
  LRRK2 RNA guide
ugcuacauucuaguaaccagag

SEQ ID NO: 60196 - RNA, 22 nt, Artificial Sequence
  LRRK2 RNA guide
ugcucugguuacuagaauguag

SEQ ID NO: 60197 - RNA, 22 nt, Artificial Sequence
  LRRK2 RNA guide
ugguuacuagaauguagcagaa

SEQ ID NO: 60198 - RNA, 22 nt, Artificial Sequence
  LRRK2 RNA guide
ugguugcucugguuacuagaau

SEQ ID NO: 60199 - RNA, 22 nt, Artificial Sequence
  LRRK2 RNA guide
ugugguugcucugguuacuaga

SEQ ID NO: 60200 - RNA, 22 nt, Artificial Sequence
  LRRK2 RNA guide
uucuaguaaccagagcaaccac

SEQ ID NO: 60201 - RNA, 22 nt, Artificial Sequence
  LRRK2 RNA guide
uucugcuacauucuaguaacca

SEQ ID NO: 60202 - RNA, 22 nt, Artificial Sequence
  LRRK2 RNA guide
uugcucugguuacuagaaugua

SEQ ID NO: 60203 - RNA, 22 nt, Artificial Sequence
  LRRK2 RNA guide
uugugguugcucugguuacuag

SEQ ID NO: 60204 - RNA, 22 nt, Artificial Sequence
  LRRK2 RNA guide
uuugugguugcucugguuacua

SEQ ID NO: 60205 - RNA, 20 nt, Artificial Sequence
  LRRK2 RNA guide
aaacagagcaaccacaaacc

SEQ ID NO: 60206 - RNA, 20 nt, Artificial Sequence
  LRRK2 RNA guide
aacagagcaaccacaaaccu

SEQ ID NO: 60207 - RNA, 20 nt, Artificial Sequence
  LRRK2 RNA guide
acauucuaguaaacagagca

SEQ ID NO: 60208 - RNA, 20 nt, Artificial Sequence
  LRRK2 RNA guide
agguuugugguugcucuguu

SEQ ID NO: 60209 - RNA, 20 nt, Artificial Sequence
  LRRK2 RNA guide
aguaaacagagcaaccacaa

SEQ ID NO: 60210 - RNA, 20 nt, Artificial Sequence
  LRRK2 RNA guide
auucuaguaaacagagcaac

SEQ ID NO: 60211 - RNA, 20 nt, Artificial Sequence
  LRRK2 RNA guide
cauucuaguaaacagagcaa

SEQ ID NO: 60212 - RNA, 20 nt, Artificial Sequence
  LRRK2 RNA guide
cuacauucuaguaaacagag

SEQ ID NO: 60213 - RNA, 20 nt, Artificial Sequence
  LRRK2 RNA guide
cuaguaaacagagcaaccac

SEQ ID NO: 60214 - RNA, 20 nt, Artificial Sequence
  LRRK2 RNA guide
cucuguuuacuagaauguag

SEQ ID NO: 60215 - RNA, 20 nt, Artificial Sequence
  LRRK2 RNA guide
cugcuacauucuaguaaaca

SEQ ID NO: 60216 - RNA, 20 nt, Artificial Sequence
  LRRK2 RNA guide
cuguuuacuagaauguagca

SEQ ID NO: 60217 - RNA, 20 nt, Artificial Sequence
  LRRK2 RNA guide
gcuacauucuaguaaacaga

SEQ ID NO: 60218 - RNA, 20 nt, Artificial Sequence
  LRRK2 RNA guide
gcucuguuuacuagaaugua

SEQ ID NO: 60219 - RNA, 20 nt, Artificial Sequence
  LRRK2 RNA guide
gguugcucuguuuacuagaa

SEQ ID NO: 60220 - RNA, 20 nt, Artificial Sequence
  LRRK2 RNA guide
gguuugugguugcucuguuu

SEQ ID NO: 60221 - RNA, 20 nt, Artificial Sequence
  LRRK2 RNA guide
guaaacagagcaaccacaaa

SEQ ID NO: 60222 - RNA, 20 nt, Artificial Sequence
  LRRK2 RNA guide
gugguugcucuguuuacuag

SEQ ID NO: 60223 - RNA, 20 nt, Artificial Sequence
  LRRK2 RNA guide
guugcucuguuuacuagaau

SEQ ID NO: 60224 - RNA, 20 nt, Artificial Sequence
  LRRK2 RNA guide
guuuacuagaauguagcaga

SEQ ID NO: 60225 - RNA, 20 nt, Artificial Sequence
  LRRK2 RNA guide
guuugugguugcucuguuua

SEQ ID NO: 60226 - RNA, 20 nt, Artificial Sequence
  LRRK2 RNA guide
uaaacagagcaaccacaaac

SEQ ID NO: 60227 - RNA, 20 nt, Artificial Sequence
  LRRK2 RNA guide
uacauucuaguaaacagagc

SEQ ID NO: 60228 - RNA, 20 nt, Artificial Sequence
  LRRK2 RNA guide
uagguuugugguugcucugu

SEQ ID NO: 60229 - RNA, 20 nt, Artificial Sequence
  LRRK2 RNA guide
uaguaaacagagcaaccaca

SEQ ID NO: 60230 - RNA, 20 nt, Artificial Sequence
  LRRK2 RNA guide
ucuaguaaacagagcaacca

SEQ ID NO: 60231 - RNA, 20 nt, Artificial Sequence
  LRRK2 RNA guide
ucugcuacauucuaguaaac

SEQ ID NO: 60232 - RNA, 20 nt, Artificial Sequence
  LRRK2 RNA guide
ucuguuuacuagaauguagc

SEQ ID NO: 60233 - RNA, 20 nt, Artificial Sequence
  LRRK2 RNA guide
ugcuacauucuaguaaacag

SEQ ID NO: 60234 - RNA, 20 nt, Artificial Sequence
  LRRK2 RNA guide
ugcucuguuuacuagaaugu

SEQ ID NO: 60235 - RNA, 20 nt, Artificial Sequence
  LRRK2 RNA guide
ugguugcucuguuuacuaga

SEQ ID NO: 60236 - RNA, 20 nt, Artificial Sequence
  LRRK2 RNA guide
ugugguugcucuguuuacua

SEQ ID NO: 60237 - RNA, 20 nt, Artificial Sequence
  LRRK2 RNA guide
uguuuacuagaauguagcag

SEQ ID NO: 60238 - RNA, 20 nt, Artificial Sequence
  LRRK2 RNA guide
uucuaguaaacagagcaacc

SEQ ID NO: 60239 - RNA, 20 nt, Artificial Sequence
  LRRK2 RNA guide
uucugcuacauucuaguaaa

SEQ ID NO: 60240 - RNA, 20 nt, Artificial Sequence
  LRRK2 RNA guide
uugcucuguuuacuagaaug

SEQ ID NO: 60241 - RNA, 20 nt, Artificial Sequence
  LRRK2 RNA guide
uugugguugcucuguuuacu

SEQ ID NO: 60242 - RNA, 20 nt, Artificial Sequence
  LRRK2 RNA guide
uuugugguugcucuguuuac

SEQ ID NO: 60243 - RNA, 21 nt, Artificial Sequence
  LRRK2 RNA guide
aaacagagcaaccacaaaccu

SEQ ID NO: 60244 - RNA, 21 nt, Artificial Sequence
  LRRK2 RNA guide
aacagagcaaccacaaaccua

SEQ ID NO: 60245 - RNA, 21 nt, Artificial Sequence
  LRRK2 RNA guide
acauucuaguaaacagagcaa

SEQ ID NO: 60246 - RNA, 21 nt, Artificial Sequence
  LRRK2 RNA guide
agguuugugguugcucuguuu

SEQ ID NO: 60247 - RNA, 21 nt, Artificial Sequence
  LRRK2 RNA guide
aguaaacagagcaaccacaaa

SEQ ID NO: 60248 - RNA, 21 nt, Artificial Sequence
  LRRK2 RNA guide
auucuaguaaacagagcaacc

SEQ ID NO: 60249 - RNA, 21 nt, Artificial Sequence
  LRRK2 RNA guide
cauucuaguaaacagagcaac

SEQ ID NO: 60250 - RNA, 21 nt, Artificial Sequence
  LRRK2 RNA guide
cuacauucuaguaaacagagc

SEQ ID NO: 60251 - RNA, 21 nt, Artificial Sequence
  LRRK2 RNA guide
cuagguuugugguugcucugu

SEQ ID NO: 60252 - RNA, 21 nt, Artificial Sequence
  LRRK2 RNA guide
cuaguaaacagagcaaccaca

SEQ ID NO: 60253 - RNA, 21 nt, Artificial Sequence
  LRRK2 RNA guide
cucuguuuacuagaauguagc

SEQ ID NO: 60254 - RNA, 21 nt, Artificial Sequence
  LRRK2 RNA guide
cugcuacauucuaguaaacag

SEQ ID NO: 60255 - RNA, 21 nt, Artificial Sequence
  LRRK2 RNA guide
cuguuuacuagaauguagcag

SEQ ID NO: 60256 - RNA, 21 nt, Artificial Sequence
  LRRK2 RNA guide
gcuacauucuaguaaacagag

SEQ ID NO: 60257 - RNA, 21 nt, Artificial Sequence
  LRRK2 RNA guide
gcucuguuuacuagaauguag

SEQ ID NO: 60258 - RNA, 21 nt, Artificial Sequence
  LRRK2 RNA guide
gguugcucuguuuacuagaau

SEQ ID NO: 60259 - RNA, 21 nt, Artificial Sequence
  LRRK2 RNA guide
gguuugugguugcucuguuua

SEQ ID NO: 60260 - RNA, 21 nt, Artificial Sequence
  LRRK2 RNA guide
guaaacagagcaaccacaaac

SEQ ID NO: 60261 - RNA, 21 nt, Artificial Sequence
  LRRK2 RNA guide
gugguugcucuguuuacuaga

SEQ ID NO: 60262 - RNA, 21 nt, Artificial Sequence
  LRRK2 RNA guide
guugcucuguuuacuagaaug

SEQ ID NO: 60263 - RNA, 21 nt, Artificial Sequence
  LRRK2 RNA guide
guuuacuagaauguagcagaa

SEQ ID NO: 60264 - RNA, 21 nt, Artificial Sequence
  LRRK2 RNA guide
guuugugguugcucuguuuac

SEQ ID NO: 60265 - RNA, 21 nt, Artificial Sequence
  LRRK2 RNA guide
uaaacagagcaaccacaaacc

SEQ ID NO: 60266 - RNA, 21 nt, Artificial Sequence
  LRRK2 RNA guide
uacauucuaguaaacagagca

SEQ ID NO: 60267 - RNA, 21 nt, Artificial Sequence
  LRRK2 RNA guide
uagguuugugguugcucuguu

SEQ ID NO: 60268 - RNA, 21 nt, Artificial Sequence
  LRRK2 RNA guide
uaguaaacagagcaaccacaa

SEQ ID NO: 60269 - RNA, 21 nt, Artificial Sequence
  LRRK2 RNA guide
ucuaguaaacagagcaaccac

SEQ ID NO: 60270 - RNA, 21 nt, Artificial Sequence
  LRRK2 RNA guide
ucugcuacauucuaguaaaca

SEQ ID NO: 60271 - RNA, 21 nt, Artificial Sequence
  LRRK2 RNA guide
ucuguuuacuagaauguagca

SEQ ID NO: 60272 - RNA, 21 nt, Artificial Sequence
  LRRK2 RNA guide
ugcuacauucuaguaaacaga

SEQ ID NO: 60273 - RNA, 21 nt, Artificial Sequence
  LRRK2 RNA guide
ugcucuguuuacuagaaugua

SEQ ID NO: 60274 - RNA, 21 nt, Artificial Sequence
  LRRK2 RNA guide
ugguugcucuguuuacuagaa

SEQ ID NO: 60275 - RNA, 21 nt, Artificial Sequence
  LRRK2 RNA guide
ugugguugcucuguuuacuag

SEQ ID NO: 60276 - RNA, 21 nt, Artificial Sequence
  LRRK2 RNA guide
uguuuacuagaauguagcaga

SEQ ID NO: 60277 - RNA, 21 nt, Artificial Sequence
  LRRK2 RNA guide
uucuaguaaacagagcaacca

SEQ ID NO: 60278 - RNA, 21 nt, Artificial Sequence
  LRRK2 RNA guide
uucugcuacauucuaguaaac

SEQ ID NO: 60279 - RNA, 21 nt, Artificial Sequence
  LRRK2 RNA guide
uugcucuguuuacuagaaugu

SEQ ID NO: 60280 - RNA, 21 nt, Artificial Sequence
  LRRK2 RNA guide
uugugguugcucuguuuacua

SEQ ID NO: 60281 - RNA, 21 nt, Artificial Sequence
  LRRK2 RNA guide
uuugugguugcucuguuuacu

SEQ ID NO: 60282 - RNA, 22 nt, Artificial Sequence
  LRRK2 RNA guide
aaacagagcaaccacaaaccua

SEQ ID NO: 60283 - RNA, 22 nt, Artificial Sequence
  LRRK2 RNA guide
aacagagcaaccacaaaccuag

SEQ ID NO: 60284 - RNA, 22 nt, Artificial Sequence
  LRRK2 RNA guide
acauucuaguaaacagagcaac

SEQ ID NO: 60285 - RNA, 22 nt, Artificial Sequence
  LRRK2 RNA guide
agguuugugguugcucuguuua

SEQ ID NO: 60286 - RNA, 22 nt, Artificial Sequence
  LRRK2 RNA guide
aguaaacagagcaaccacaaac

SEQ ID NO: 60287 - RNA, 22 nt, Artificial Sequence
  LRRK2 RNA guide
auucuaguaaacagagcaacca

SEQ ID NO: 60288 - RNA, 22 nt, Artificial Sequence
  LRRK2 RNA guide
auucugcuacauucuaguaaac

SEQ ID NO: 60289 - RNA, 22 nt, Artificial Sequence
  LRRK2 RNA guide
cauucuaguaaacagagcaacc

SEQ ID NO: 60290 - RNA, 22 nt, Artificial Sequence
  LRRK2 RNA guide
cuacauucuaguaaacagagca

SEQ ID NO: 60291 - RNA, 22 nt, Artificial Sequence
  LRRK2 RNA guide
cuagguuugugguugcucuguu

SEQ ID NO: 60292 - RNA, 22 nt, Artificial Sequence
  LRRK2 RNA guide
cuaguaaacagagcaaccacaa

SEQ ID NO: 60293 - RNA, 22 nt, Artificial Sequence
  LRRK2 RNA guide
cucuguuuacuagaauguagca

SEQ ID NO: 60294 - RNA, 22 nt, Artificial Sequence
  LRRK2 RNA guide
cugcuacauucuaguaaacaga

SEQ ID NO: 60295 - RNA, 22 nt, Artificial Sequence
  LRRK2 RNA guide
cuguuuacuagaauguagcaga

SEQ ID NO: 60296 - RNA, 22 nt, Artificial Sequence
  LRRK2 RNA guide
gcuacauucuaguaaacagagc

SEQ ID NO: 60297 - RNA, 22 nt, Artificial Sequence
  LRRK2 RNA guide
gcuagguuugugguugcucugu

SEQ ID NO: 60298 - RNA, 22 nt, Artificial Sequence
  LRRK2 RNA guide
gcucuguuuacuagaauguagc

SEQ ID NO: 60299 - RNA, 22 nt, Artificial Sequence
  LRRK2 RNA guide
gguugcucuguuuacuagaaug

SEQ ID NO: 60300 - RNA, 22 nt, Artificial Sequence
  LRRK2 RNA guide
gguuugugguugcucuguuuac

SEQ ID NO: 60301 - RNA, 22 nt, Artificial Sequence
  LRRK2 RNA guide
guaaacagagcaaccacaaacc

SEQ ID NO: 60302 - RNA, 22 nt, Artificial Sequence
  LRRK2 RNA guide
gugguugcucuguuuacuagaa

SEQ ID NO: 60303 - RNA, 22 nt, Artificial Sequence
  LRRK2 RNA guide
guugcucuguuuacuagaaugu

SEQ ID NO: 60304 - RNA, 22 nt, Artificial Sequence
  LRRK2 RNA guide
guuuacuagaauguagcagaau

SEQ ID NO: 60305 - RNA, 22 nt, Artificial Sequence
  LRRK2 RNA guide
guuugugguugcucuguuuacu

SEQ ID NO: 60306 - RNA, 22 nt, Artificial Sequence
  LRRK2 RNA guide
uaaacagagcaaccacaaaccu

SEQ ID NO: 60307 - RNA, 22 nt, Artificial Sequence
  LRRK2 RNA guide
uacauucuaguaaacagagcaa

SEQ ID NO: 60308 - RNA, 22 nt, Artificial Sequence
  LRRK2 RNA guide
uagguuugugguugcucuguuu

SEQ ID NO: 60309 - RNA, 22 nt, Artificial Sequence
  LRRK2 RNA guide
uaguaaacagagcaaccacaaa

SEQ ID NO: 60310 - RNA, 22 nt, Artificial Sequence
  LRRK2 RNA guide
ucuaguaaacagagcaaccaca

SEQ ID NO: 60311 - RNA, 22 nt, Artificial Sequence
  LRRK2 RNA guide
ucugcuacauucuaguaaacag

SEQ ID NO: 60312 - RNA, 22 nt, Artificial Sequence
  LRRK2 RNA guide
ucuguuuacuagaauguagcag

SEQ ID NO: 60313 - RNA, 22 nt, Artificial Sequence
  LRRK2 RNA guide
ugcuacauucuaguaaacagag

SEQ ID NO: 60314 - RNA, 22 nt, Artificial Sequence
  LRRK2 RNA guide
ugcucuguuuacuagaauguag

SEQ ID NO: 60315 - RNA, 22 nt, Artificial Sequence
  LRRK2 RNA guide
ugguugcucuguuuacuagaau

SEQ ID NO: 60316 - RNA, 22 nt, Artificial Sequence
  LRRK2 RNA guide
ugugguugcucuguuuacuaga

SEQ ID NO: 60317 - RNA, 22 nt, Artificial Sequence
  LRRK2 RNA guide
uguuuacuagaauguagcagaa

SEQ ID NO: 60318 - RNA, 22 nt, Artificial Sequence
  LRRK2 RNA guide
uucuaguaaacagagcaaccac

SEQ ID NO: 60319 - RNA, 22 nt, Artificial Sequence
  LRRK2 RNA guide
uucugcuacauucuaguaaaca

SEQ ID NO: 60320 - RNA, 22 nt, Artificial Sequence
  LRRK2 RNA guide
uugcucuguuuacuagaaugua

SEQ ID NO: 60321 - RNA, 22 nt, Artificial Sequence
  LRRK2 RNA guide
uugugguugcucuguuuacuag

SEQ ID NO: 60322 - RNA, 22 nt, Artificial Sequence
  LRRK2 RNA guide
uuugugguugcucuguuuacua

SEQ ID NO: 60323 - RNA, 20 nt, Artificial Sequence
  LRRK2 RNA guide
aacgguacacauucaggaag

SEQ ID NO: 60324 - RNA, 20 nt, Artificial Sequence
  LRRK2 RNA guide
aauaauuuauccaacgguac

SEQ ID NO: 60325 - RNA, 20 nt, Artificial Sequence
  LRRK2 RNA guide
aauguguaccguuggauaaa

SEQ ID NO: 60326 - RNA, 20 nt, Artificial Sequence
  LRRK2 RNA guide
aauuuauccaacgguacaca

SEQ ID NO: 60327 - RNA, 20 nt, Artificial Sequence
  LRRK2 RNA guide
accguuggauaaauuauuca

SEQ ID NO: 60328 - RNA, 20 nt, Artificial Sequence
  LRRK2 RNA guide
accucuuccugaauguguac

SEQ ID NO: 60329 - RNA, 20 nt, Artificial Sequence
  LRRK2 RNA guide
acgguacacauucaggaaga

SEQ ID NO: 60330 - RNA, 20 nt, Artificial Sequence
  LRRK2 RNA guide
agagguugaauaauuuaucc

SEQ ID NO: 60331 - RNA, 20 nt, Artificial Sequence
  LRRK2 RNA guide
auaauuuauccaacgguaca

SEQ ID NO: 60332 - RNA, 20 nt, Artificial Sequence
  LRRK2 RNA guide
auccaacgguacacauucag

SEQ ID NO: 60333 - RNA, 20 nt, Artificial Sequence
  LRRK2 RNA guide
auguguaccguuggauaaau

SEQ ID NO: 60334 - RNA, 20 nt, Artificial Sequence
  LRRK2 RNA guide
auuuauccaacgguacacau

SEQ ID NO: 60335 - RNA, 20 nt, Artificial Sequence
  LRRK2 RNA guide
caacgguacacauucaggaa

SEQ ID NO: 60336 - RNA, 20 nt, Artificial Sequence
  LRRK2 RNA guide
ccaacgguacacauucagga

SEQ ID NO: 60337 - RNA, 20 nt, Artificial Sequence
  LRRK2 RNA guide
ccguuggauaaauuauucaa

SEQ ID NO: 60338 - RNA, 20 nt, Artificial Sequence
  LRRK2 RNA guide
ccucuuccugaauguguacc

SEQ ID NO: 60339 - RNA, 20 nt, Artificial Sequence
  LRRK2 RNA guide
ccugaauguguaccguugga

SEQ ID NO: 60340 - RNA, 20 nt, Artificial Sequence
  LRRK2 RNA guide
cguuggauaaauuauucaac

SEQ ID NO: 60341 - RNA, 20 nt, Artificial Sequence
  LRRK2 RNA guide
cuaccucuuccugaaugugu

SEQ ID NO: 60342 - RNA, 20 nt, Artificial Sequence
  LRRK2 RNA guide
cucuuccugaauguguaccg

SEQ ID NO: 60343 - RNA, 20 nt, Artificial Sequence
  LRRK2 RNA guide
cugaauguguaccguuggau

SEQ ID NO: 60344 - RNA, 20 nt, Artificial Sequence
  LRRK2 RNA guide
cuuccugaauguguaccguu

SEQ ID NO: 60345 - RNA, 20 nt, Artificial Sequence
  LRRK2 RNA guide
gaauaauuuauccaacggua

SEQ ID NO: 60346 - RNA, 20 nt, Artificial Sequence
  LRRK2 RNA guide
gaauguguaccguuggauaa

SEQ ID NO: 60347 - RNA, 20 nt, Artificial Sequence
  LRRK2 RNA guide
gagagguugaauaauuuauc

SEQ ID NO: 60348 - RNA, 20 nt, Artificial Sequence
  LRRK2 RNA guide
gagguugaauaauuuaucca

SEQ ID NO: 60349 - RNA, 20 nt, Artificial Sequence
  LRRK2 RNA guide
gguugaauaauuuauccaac

SEQ ID NO: 60350 - RNA, 20 nt, Artificial Sequence
  LRRK2 RNA guide
guaccguuggauaaauuauu

SEQ ID NO: 60351 - RNA, 20 nt, Artificial Sequence
  LRRK2 RNA guide
guguaccguuggauaaauua

SEQ ID NO: 60352 - RNA, 20 nt, Artificial Sequence
  LRRK2 RNA guide
guugaauaauuuauccaacg

SEQ ID NO: 60353 - RNA, 20 nt, Artificial Sequence
  LRRK2 RNA guide
uaauuuauccaacgguacac

SEQ ID NO: 60354 - RNA, 20 nt, Artificial Sequence
  LRRK2 RNA guide
uaccguuggauaaauuauuc

SEQ ID NO: 60355 - RNA, 20 nt, Artificial Sequence
  LRRK2 RNA guide
uaccucuuccugaaugugua

SEQ ID NO: 60356 - RNA, 20 nt, Artificial Sequence
  LRRK2 RNA guide
uauccaacgguacacauuca

SEQ ID NO: 60357 - RNA, 20 nt, Artificial Sequence
  LRRK2 RNA guide
uccaacgguacacauucagg

SEQ ID NO: 60358 - RNA, 20 nt, Artificial Sequence
  LRRK2 RNA guide
uccugaauguguaccguugg

SEQ ID NO: 60359 - RNA, 20 nt, Artificial Sequence
  LRRK2 RNA guide
ucuaccucuuccugaaugug

SEQ ID NO: 60360 - RNA, 20 nt, Artificial Sequence
  LRRK2 RNA guide
ucuuccugaauguguaccgu

SEQ ID NO: 60361 - RNA, 20 nt, Artificial Sequence
  LRRK2 RNA guide
ugaauaauuuauccaacggu

SEQ ID NO: 60362 - RNA, 20 nt, Artificial Sequence
  LRRK2 RNA guide
ugaauguguaccguuggaua

SEQ ID NO: 60363 - RNA, 20 nt, Artificial Sequence
  LRRK2 RNA guide
uguaccguuggauaaauuau

SEQ ID NO: 60364 - RNA, 20 nt, Artificial Sequence
  LRRK2 RNA guide
uguguaccguuggauaaauu

SEQ ID NO: 60365 - RNA, 20 nt, Artificial Sequence
  LRRK2 RNA guide
uuauccaacgguacacauuc

SEQ ID NO: 60366 - RNA, 20 nt, Artificial Sequence
  LRRK2 RNA guide
uuccugaauguguaccguug

SEQ ID NO: 60367 - RNA, 20 nt, Artificial Sequence
  LRRK2 RNA guide
uugaauaauuuauccaacgg

SEQ ID NO: 60368 - RNA, 20 nt, Artificial Sequence
  LRRK2 RNA guide
uuuauccaacgguacacauu

SEQ ID NO: 60369 - RNA, 21 nt, Artificial Sequence
  LRRK2 RNA guide
aacgguacacauucaggaaga

SEQ ID NO: 60370 - RNA, 21 nt, Artificial Sequence
  LRRK2 RNA guide
aauguguaccguuggauaaau

SEQ ID NO: 60371 - RNA, 21 nt, Artificial Sequence
  LRRK2 RNA guide
aauuuauccaacgguacacau

SEQ ID NO: 60372 - RNA, 21 nt, Artificial Sequence
  LRRK2 RNA guide
accucuuccugaauguguacc

SEQ ID NO: 60373 - RNA, 21 nt, Artificial Sequence
  LRRK2 RNA guide
acgguacacauucaggaagag

SEQ ID NO: 60374 - RNA, 21 nt, Artificial Sequence
  LRRK2 RNA guide
auaauuuauccaacgguacac

SEQ ID NO: 60375 - RNA, 21 nt, Artificial Sequence
  LRRK2 RNA guide
auccaacgguacacauucagg

SEQ ID NO: 60376 - RNA, 21 nt, Artificial Sequence
  LRRK2 RNA guide
auguguaccguuggauaaauu

SEQ ID NO: 60377 - RNA, 21 nt, Artificial Sequence
  LRRK2 RNA guide
auuuauccaacgguacacauu

SEQ ID NO: 60378 - RNA, 21 nt, Artificial Sequence
  LRRK2 RNA guide
caacgguacacauucaggaag

SEQ ID NO: 60379 - RNA, 21 nt, Artificial Sequence
  LRRK2 RNA guide
ccaacgguacacauucaggaa

SEQ ID NO: 60380 - RNA, 21 nt, Artificial Sequence
  LRRK2 RNA guide
ccguuggauaaauuauucaac

SEQ ID NO: 60381 - RNA, 21 nt, Artificial Sequence
  LRRK2 RNA guide
ccucuuccugaauguguaccg

SEQ ID NO: 60382 - RNA, 21 nt, Artificial Sequence
  LRRK2 RNA guide
ccugaauguguaccguuggau

SEQ ID NO: 60383 - RNA, 21 nt, Artificial Sequence
  LRRK2 RNA guide
cguuggauaaauuauucaacc

SEQ ID NO: 60384 - RNA, 21 nt, Artificial Sequence
  LRRK2 RNA guide
cuaccucuuccugaaugugua

SEQ ID NO: 60385 - RNA, 21 nt, Artificial Sequence
  LRRK2 RNA guide
cucuaccucuuccugaaugug

SEQ ID NO: 60386 - RNA, 21 nt, Artificial Sequence
  LRRK2 RNA guide
cucuuccugaauguguaccgu

SEQ ID NO: 60387 - RNA, 21 nt, Artificial Sequence
  LRRK2 RNA guide
cugaauguguaccguuggaua

SEQ ID NO: 60388 - RNA, 21 nt, Artificial Sequence
  LRRK2 RNA guide
cuuccugaauguguaccguug

SEQ ID NO: 60389 - RNA, 21 nt, Artificial Sequence
  LRRK2 RNA guide
gaauaauuuauccaacgguac

SEQ ID NO: 60390 - RNA, 21 nt, Artificial Sequence
  LRRK2 RNA guide
gaauguguaccguuggauaaa

SEQ ID NO: 60391 - RNA, 21 nt, Artificial Sequence
  LRRK2 RNA guide
gagagguugaauaauuuaucc

SEQ ID NO: 60392 - RNA, 21 nt, Artificial Sequence
  LRRK2 RNA guide
gguugaauaauuuauccaacg

SEQ ID NO: 60393 - RNA, 21 nt, Artificial Sequence
  LRRK2 RNA guide
guaccguuggauaaauuauuc

SEQ ID NO: 60394 - RNA, 21 nt, Artificial Sequence
  LRRK2 RNA guide
guguaccguuggauaaauuau

SEQ ID NO: 60395 - RNA, 21 nt, Artificial Sequence
  LRRK2 RNA guide
guugaauaauuuauccaacgg

SEQ ID NO: 60396 - RNA, 21 nt, Artificial Sequence
  LRRK2 RNA guide
uaauuuauccaacgguacaca

SEQ ID NO: 60397 - RNA, 21 nt, Artificial Sequence
  LRRK2 RNA guide
uaccucuuccugaauguguac

SEQ ID NO: 60398 - RNA, 21 nt, Artificial Sequence
  LRRK2 RNA guide
uauccaacgguacacauucag

SEQ ID NO: 60399 - RNA, 21 nt, Artificial Sequence
  LRRK2 RNA guide
uccaacgguacacauucagga

SEQ ID NO: 60400 - RNA, 21 nt, Artificial Sequence
  LRRK2 RNA guide
uccugaauguguaccguugga

SEQ ID NO: 60401 - RNA, 21 nt, Artificial Sequence
  LRRK2 RNA guide
ucuaccucuuccugaaugugu

SEQ ID NO: 60402 - RNA, 21 nt, Artificial Sequence
  LRRK2 RNA guide
ucuuccugaauguguaccguu

SEQ ID NO: 60403 - RNA, 21 nt, Artificial Sequence
  LRRK2 RNA guide
ugaauguguaccguuggauaa

SEQ ID NO: 60404 - RNA, 21 nt, Artificial Sequence
  LRRK2 RNA guide
uguguaccguuggauaaauua

SEQ ID NO: 60405 - RNA, 21 nt, Artificial Sequence
  LRRK2 RNA guide
uuauccaacgguacacauuca

SEQ ID NO: 60406 - RNA, 21 nt, Artificial Sequence
  LRRK2 RNA guide
uuccugaauguguaccguugg

SEQ ID NO: 60407 - RNA, 21 nt, Artificial Sequence
  LRRK2 RNA guide
uuuauccaacgguacacauuc

SEQ ID NO: 60408 - RNA, 22 nt, Artificial Sequence
  LRRK2 RNA guide
aacgguacacauucaggaagag

SEQ ID NO: 60409 - RNA, 22 nt, Artificial Sequence
  LRRK2 RNA guide
aauaauuuauccaacgguacac

SEQ ID NO: 60410 - RNA, 22 nt, Artificial Sequence
  LRRK2 RNA guide
aauguguaccguuggauaaauu

SEQ ID NO: 60411 - RNA, 22 nt, Artificial Sequence
  LRRK2 RNA guide
aauuuauccaacgguacacauu

SEQ ID NO: 60412 - RNA, 22 nt, Artificial Sequence
  LRRK2 RNA guide
accguuggauaaauuauucaac

SEQ ID NO: 60413 - RNA, 22 nt, Artificial Sequence
  LRRK2 RNA guide
accucuuccugaauguguaccg

SEQ ID NO: 60414 - RNA, 22 nt, Artificial Sequence
  LRRK2 RNA guide
acgguacacauucaggaagagg

SEQ ID NO: 60415 - RNA, 22 nt, Artificial Sequence
  LRRK2 RNA guide
acucuaccucuuccugaaugug

SEQ ID NO: 60416 - RNA, 22 nt, Artificial Sequence
  LRRK2 RNA guide
agagagguugaauaauuuaucc

SEQ ID NO: 60417 - RNA, 22 nt, Artificial Sequence
  LRRK2 RNA guide
agguugaauaauuuauccaacg

SEQ ID NO: 60418 - RNA, 22 nt, Artificial Sequence
  LRRK2 RNA guide
auaauuuauccaacgguacaca

SEQ ID NO: 60419 - RNA, 22 nt, Artificial Sequence
  LRRK2 RNA guide
auccaacgguacacauucagga

SEQ ID NO: 60420 - RNA, 22 nt, Artificial Sequence
  LRRK2 RNA guide
auguguaccguuggauaaauua

SEQ ID NO: 60421 - RNA, 22 nt, Artificial Sequence
  LRRK2 RNA guide
auuuauccaacgguacacauuc

SEQ ID NO: 60422 - RNA, 22 nt, Artificial Sequence
  LRRK2 RNA guide
caacgguacacauucaggaaga

SEQ ID NO: 60423 - RNA, 22 nt, Artificial Sequence
  LRRK2 RNA guide
cagagagguugaauaauuuauc

SEQ ID NO: 60424 - RNA, 22 nt, Artificial Sequence
  LRRK2 RNA guide
ccaacgguacacauucaggaag

SEQ ID NO: 60425 - RNA, 22 nt, Artificial Sequence
  LRRK2 RNA guide
ccguuggauaaauuauucaacc

SEQ ID NO: 60426 - RNA, 22 nt, Artificial Sequence
  LRRK2 RNA guide
ccucuuccugaauguguaccgu

SEQ ID NO: 60427 - RNA, 22 nt, Artificial Sequence
  LRRK2 RNA guide
ccugaauguguaccguuggaua

SEQ ID NO: 60428 - RNA, 22 nt, Artificial Sequence
  LRRK2 RNA guide
cguuggauaaauuauucaaccu

SEQ ID NO: 60429 - RNA, 22 nt, Artificial Sequence
  LRRK2 RNA guide
cuaccucuuccugaauguguac

SEQ ID NO: 60430 - RNA, 22 nt, Artificial Sequence
  LRRK2 RNA guide
cucuaccucuuccugaaugugu

SEQ ID NO: 60431 - RNA, 22 nt, Artificial Sequence
  LRRK2 RNA guide
cucuuccugaauguguaccguu

SEQ ID NO: 60432 - RNA, 22 nt, Artificial Sequence
  LRRK2 RNA guide
cugaauguguaccguuggauaa

SEQ ID NO: 60433 - RNA, 22 nt, Artificial Sequence
  LRRK2 RNA guide
cuuccugaauguguaccguugg

SEQ ID NO: 60434 - RNA, 22 nt, Artificial Sequence
  LRRK2 RNA guide
gaauaauuuauccaacgguaca

SEQ ID NO: 60435 - RNA, 22 nt, Artificial Sequence
  LRRK2 RNA guide
gaauguguaccguuggauaaau

SEQ ID NO: 60436 - RNA, 22 nt, Artificial Sequence
  LRRK2 RNA guide
gagagguugaauaauuuaucca

SEQ ID NO: 60437 - RNA, 22 nt, Artificial Sequence
  LRRK2 RNA guide
gagguugaauaauuuauccaac

SEQ ID NO: 60438 - RNA, 22 nt, Artificial Sequence
  LRRK2 RNA guide
gguugaauaauuuauccaacgg

SEQ ID NO: 60439 - RNA, 22 nt, Artificial Sequence
  LRRK2 RNA guide
guaccguuggauaaauuauuca

SEQ ID NO: 60440 - RNA, 22 nt, Artificial Sequence
  LRRK2 RNA guide
guguaccguuggauaaauuauu

SEQ ID NO: 60441 - RNA, 22 nt, Artificial Sequence
  LRRK2 RNA guide
guugaauaauuuauccaacggu

SEQ ID NO: 60442 - RNA, 22 nt, Artificial Sequence
  LRRK2 RNA guide
uaauuuauccaacgguacacau

SEQ ID NO: 60443 - RNA, 22 nt, Artificial Sequence
  LRRK2 RNA guide
uaccucuuccugaauguguacc

SEQ ID NO: 60444 - RNA, 22 nt, Artificial Sequence
  LRRK2 RNA guide
uauccaacgguacacauucagg

SEQ ID NO: 60445 - RNA, 22 nt, Artificial Sequence
  LRRK2 RNA guide
uccaacgguacacauucaggaa

SEQ ID NO: 60446 - RNA, 22 nt, Artificial Sequence
  LRRK2 RNA guide
uccugaauguguaccguuggau

SEQ ID NO: 60447 - RNA, 22 nt, Artificial Sequence
  LRRK2 RNA guide
ucuaccucuuccugaaugugua

SEQ ID NO: 60448 - RNA, 22 nt, Artificial Sequence
  LRRK2 RNA guide
ucuuccugaauguguaccguug

SEQ ID NO: 60449 - RNA, 22 nt, Artificial Sequence
  LRRK2 RNA guide
ugaauaauuuauccaacgguac

SEQ ID NO: 60450 - RNA, 22 nt, Artificial Sequence
  LRRK2 RNA guide
ugaauguguaccguuggauaaa

SEQ ID NO: 60451 - RNA, 22 nt, Artificial Sequence
  LRRK2 RNA guide
uguaccguuggauaaauuauuc

SEQ ID NO: 60452 - RNA, 22 nt, Artificial Sequence
  LRRK2 RNA guide
uguguaccguuggauaaauuau

SEQ ID NO: 60453 - RNA, 22 nt, Artificial Sequence
  LRRK2 RNA guide
uuauccaacgguacacauucag

SEQ ID NO: 60454 - RNA, 22 nt, Artificial Sequence
  LRRK2 RNA guide
uuccugaauguguaccguugga

SEQ ID NO: 60455 - RNA, 22 nt, Artificial Sequence
  LRRK2 RNA guide
uuuauccaacgguacacauuca

SEQ ID NO: 60456 - RNA, 20 nt, Artificial Sequence
  LRRK2 RNA guide
aaugguacacauucaggaag

SEQ ID NO: 60457 - RNA, 20 nt, Artificial Sequence
  LRRK2 RNA guide
aauguguaccauuggauaaa

SEQ ID NO: 60458 - RNA, 20 nt, Artificial Sequence
  LRRK2 RNA guide
aauuuauccaaugguacaca

SEQ ID NO: 60459 - RNA, 20 nt, Artificial Sequence
  LRRK2 RNA guide
auccaaugguacacauucag

SEQ ID NO: 60460 - RNA, 20 nt, Artificial Sequence
  LRRK2 RNA guide
augguacacauucaggaaga

SEQ ID NO: 60461 - RNA, 20 nt, Artificial Sequence
  LRRK2 RNA guide
auguguaccauuggauaaau

SEQ ID NO: 60462 - RNA, 20 nt, Artificial Sequence
  LRRK2 RNA guide
auuuauccaaugguacacau

SEQ ID NO: 60463 - RNA, 20 nt, Artificial Sequence
  LRRK2 RNA guide
caaugguacacauucaggaa

SEQ ID NO: 60464 - RNA, 20 nt, Artificial Sequence
  LRRK2 RNA guide
ccaaugguacacauucagga

SEQ ID NO: 60465 - RNA, 20 nt, Artificial Sequence
  LRRK2 RNA guide
ccugaauguguaccauugga

SEQ ID NO: 60466 - RNA, 20 nt, Artificial Sequence
  LRRK2 RNA guide
cucuuccugaauguguacca

SEQ ID NO: 60467 - RNA, 20 nt, Artificial Sequence
  LRRK2 RNA guide
cugaauguguaccauuggau

SEQ ID NO: 60468 - RNA, 20 nt, Artificial Sequence
  LRRK2 RNA guide
cuuccugaauguguaccauu

SEQ ID NO: 60469 - RNA, 20 nt, Artificial Sequence
  LRRK2 RNA guide
gaauguguaccauuggauaa

SEQ ID NO: 60470 - RNA, 20 nt, Artificial Sequence
  LRRK2 RNA guide
guguaccauuggauaaauua

SEQ ID NO: 60471 - RNA, 20 nt, Artificial Sequence
  LRRK2 RNA guide
uaauuuauccaaugguacac

SEQ ID NO: 60472 - RNA, 20 nt, Artificial Sequence
  LRRK2 RNA guide
uauccaaugguacacauuca

SEQ ID NO: 60473 - RNA, 20 nt, Artificial Sequence
  LRRK2 RNA guide
uccaaugguacacauucagg

SEQ ID NO: 60474 - RNA, 20 nt, Artificial Sequence
  LRRK2 RNA guide
uccugaauguguaccauugg

SEQ ID NO: 60475 - RNA, 20 nt, Artificial Sequence
  LRRK2 RNA guide
ucuuccugaauguguaccau

SEQ ID NO: 60476 - RNA, 20 nt, Artificial Sequence
  LRRK2 RNA guide
ugaauguguaccauuggaua

SEQ ID NO: 60477 - RNA, 20 nt, Artificial Sequence
  LRRK2 RNA guide
uguguaccauuggauaaauu

SEQ ID NO: 60478 - RNA, 20 nt, Artificial Sequence
  LRRK2 RNA guide
uuauccaaugguacacauuc

SEQ ID NO: 60479 - RNA, 20 nt, Artificial Sequence
  LRRK2 RNA guide
uuccugaauguguaccauug

SEQ ID NO: 60480 - RNA, 20 nt, Artificial Sequence
  LRRK2 RNA guide
uuuauccaaugguacacauu

SEQ ID NO: 60481 - RNA, 21 nt, Artificial Sequence
  LRRK2 RNA guide
aaugguacacauucaggaaga

SEQ ID NO: 60482 - RNA, 21 nt, Artificial Sequence
  LRRK2 RNA guide
auccaaugguacacauucagg

SEQ ID NO: 60483 - RNA, 21 nt, Artificial Sequence
  LRRK2 RNA guide
augguacacauucaggaagag

SEQ ID NO: 60484 - RNA, 21 nt, Artificial Sequence
  LRRK2 RNA guide
caaugguacacauucaggaag

SEQ ID NO: 60485 - RNA, 21 nt, Artificial Sequence
  LRRK2 RNA guide
ccaaugguacacauucaggaa

SEQ ID NO: 60486 - RNA, 21 nt, Artificial Sequence
  LRRK2 RNA guide
ccucuuccugaauguguacca

SEQ ID NO: 60487 - RNA, 21 nt, Artificial Sequence
  LRRK2 RNA guide
ccugaauguguaccauuggau

SEQ ID NO: 60488 - RNA, 21 nt, Artificial Sequence
  LRRK2 RNA guide
cucuuccugaauguguaccau

SEQ ID NO: 60489 - RNA, 21 nt, Artificial Sequence
  LRRK2 RNA guide
cugaauguguaccauuggaua

SEQ ID NO: 60490 - RNA, 21 nt, Artificial Sequence
  LRRK2 RNA guide
cuuccugaauguguaccauug

SEQ ID NO: 60491 - RNA, 21 nt, Artificial Sequence
  LRRK2 RNA guide
gaauguguaccauuggauaaa

SEQ ID NO: 60492 - RNA, 21 nt, Artificial Sequence
  LRRK2 RNA guide
uauccaaugguacacauucag

SEQ ID NO: 60493 - RNA, 21 nt, Artificial Sequence
  LRRK2 RNA guide
uccaaugguacacauucagga

SEQ ID NO: 60494 - RNA, 21 nt, Artificial Sequence
  LRRK2 RNA guide
uccugaauguguaccauugga

SEQ ID NO: 60495 - RNA, 21 nt, Artificial Sequence
  LRRK2 RNA guide
ucuuccugaauguguaccauu

SEQ ID NO: 60496 - RNA, 21 nt, Artificial Sequence
  LRRK2 RNA guide
ugaauguguaccauuggauaa

SEQ ID NO: 60497 - RNA, 21 nt, Artificial Sequence
  LRRK2 RNA guide
uuauccaaugguacacauuca

SEQ ID NO: 60498 - RNA, 21 nt, Artificial Sequence
  LRRK2 RNA guide
uuccugaauguguaccauugg

SEQ ID NO: 60499 - RNA, 21 nt, Artificial Sequence
  LRRK2 RNA guide
uuuauccaaugguacacauuc

SEQ ID NO: 60500 - RNA, 22 nt, Artificial Sequence
  LRRK2 RNA guide
aaugguacacauucaggaagag

SEQ ID NO: 60501 - RNA, 22 nt, Artificial Sequence
  LRRK2 RNA guide
accucuuccugaauguguacca

SEQ ID NO: 60502 - RNA, 22 nt, Artificial Sequence
  LRRK2 RNA guide
auccaaugguacacauucagga

SEQ ID NO: 60503 - RNA, 22 nt, Artificial Sequence
  LRRK2 RNA guide
augguacacauucaggaagagg

SEQ ID NO: 60504 - RNA, 22 nt, Artificial Sequence
  LRRK2 RNA guide
auuuauccaaugguacacauuc

SEQ ID NO: 60505 - RNA, 22 nt, Artificial Sequence
  LRRK2 RNA guide
caaugguacacauucaggaaga

SEQ ID NO: 60506 - RNA, 22 nt, Artificial Sequence
  LRRK2 RNA guide
ccaaugguacacauucaggaag

SEQ ID NO: 60507 - RNA, 22 nt, Artificial Sequence
  LRRK2 RNA guide
ccauuggauaaauuauucaacc

SEQ ID NO: 60508 - RNA, 22 nt, Artificial Sequence
  LRRK2 RNA guide
ccucuuccugaauguguaccau

SEQ ID NO: 60509 - RNA, 22 nt, Artificial Sequence
  LRRK2 RNA guide
ccugaauguguaccauuggaua

SEQ ID NO: 60510 - RNA, 22 nt, Artificial Sequence
  LRRK2 RNA guide
cucuuccugaauguguaccauu

SEQ ID NO: 60511 - RNA, 22 nt, Artificial Sequence
  LRRK2 RNA guide
cugaauguguaccauuggauaa

SEQ ID NO: 60512 - RNA, 22 nt, Artificial Sequence
  LRRK2 RNA guide
cuuccugaauguguaccauugg

SEQ ID NO: 60513 - RNA, 22 nt, Artificial Sequence
  LRRK2 RNA guide
gaauguguaccauuggauaaau

SEQ ID NO: 60514 - RNA, 22 nt, Artificial Sequence
  LRRK2 RNA guide
gguugaauaauuuauccaaugg

SEQ ID NO: 60515 - RNA, 22 nt, Artificial Sequence
  LRRK2 RNA guide
uauccaaugguacacauucagg

SEQ ID NO: 60516 - RNA, 22 nt, Artificial Sequence
  LRRK2 RNA guide
uccaaugguacacauucaggaa

SEQ ID NO: 60517 - RNA, 22 nt, Artificial Sequence
  LRRK2 RNA guide
uccugaauguguaccauuggau

SEQ ID NO: 60518 - RNA, 22 nt, Artificial Sequence
  LRRK2 RNA guide
ucuuccugaauguguaccauug

SEQ ID NO: 60519 - RNA, 22 nt, Artificial Sequence
  LRRK2 RNA guide
ugaauguguaccauuggauaaa

SEQ ID NO: 60520 - RNA, 22 nt, Artificial Sequence
  LRRK2 RNA guide
uuauccaaugguacacauucag

SEQ ID NO: 60521 - RNA, 22 nt, Artificial Sequence
  LRRK2 RNA guide
uuccugaauguguaccauugga

SEQ ID NO: 60522 - RNA, 22 nt, Artificial Sequence
  LRRK2 RNA guide
uuuauccaaugguacacauuca

SEQ ID NO: 60523 - RNA, 20 nt, Artificial Sequence
  LRRK2 RNA guide
aaaacacuaaaacagcaaac

SEQ ID NO: 60524 - RNA, 20 nt, Artificial Sequence
  LRRK2 RNA guide
aaaaggucuuagcacuuaaa

SEQ ID NO: 60525 - RNA, 20 nt, Artificial Sequence
  LRRK2 RNA guide
aaacacuaaaacagcaaaca

SEQ ID NO: 60526 - RNA, 20 nt, Artificial Sequence
  LRRK2 RNA guide
aaagagaauuguuugcuguu

SEQ ID NO: 60527 - RNA, 20 nt, Artificial Sequence
  LRRK2 RNA guide
aaaggucuuagcacuuaaaa

SEQ ID NO: 60528 - RNA, 20 nt, Artificial Sequence
  LRRK2 RNA guide
aacacuaaaacagcaaacaa

SEQ ID NO: 60529 - RNA, 20 nt, Artificial Sequence
  LRRK2 RNA guide
aagagaauuguuugcuguuu

SEQ ID NO: 60530 - RNA, 20 nt, Artificial Sequence
  LRRK2 RNA guide
aaggucuuagcacuuaaaaa

SEQ ID NO: 60531 - RNA, 20 nt, Artificial Sequence
  LRRK2 RNA guide
aauuguuugcuguuuuagug

SEQ ID NO: 60532 - RNA, 20 nt, Artificial Sequence
  LRRK2 RNA guide
acacuaaaacagcaaacaau

SEQ ID NO: 60533 - RNA, 20 nt, Artificial Sequence
  LRRK2 RNA guide
agaauuguuugcuguuuuag

SEQ ID NO: 60534 - RNA, 20 nt, Artificial Sequence
  LRRK2 RNA guide
agagaauuguuugcuguuuu

SEQ ID NO: 60535 - RNA, 20 nt, Artificial Sequence
  LRRK2 RNA guide
aggucuuagcacuuaaaaaa

SEQ ID NO: 60536 - RNA, 20 nt, Artificial Sequence
  LRRK2 RNA guide
aguguuuuuuaagugcuaag

SEQ ID NO: 60537 - RNA, 20 nt, Artificial Sequence
  LRRK2 RNA guide
auuguuugcuguuuuagugu

SEQ ID NO: 60538 - RNA, 20 nt, Artificial Sequence
  LRRK2 RNA guide
cacuaaaacagcaaacaauu

SEQ ID NO: 60539 - RNA, 20 nt, Artificial Sequence
  LRRK2 RNA guide
cuuagcacuuaaaaaacacu

SEQ ID NO: 60540 - RNA, 20 nt, Artificial Sequence
  LRRK2 RNA guide
gaauuguuugcuguuuuagu

SEQ ID NO: 60541 - RNA, 20 nt, Artificial Sequence
  LRRK2 RNA guide
gagaauuguuugcuguuuua

SEQ ID NO: 60542 - RNA, 20 nt, Artificial Sequence
  LRRK2 RNA guide
ggucuuagcacuuaaaaaac

SEQ ID NO: 60543 - RNA, 20 nt, Artificial Sequence
  LRRK2 RNA guide
gucuuagcacuuaaaaaaca

SEQ ID NO: 60544 - RNA, 20 nt, Artificial Sequence
  LRRK2 RNA guide
guguuuuuuaagugcuaaga

SEQ ID NO: 60545 - RNA, 20 nt, Artificial Sequence
  LRRK2 RNA guide
guuugcuguuuuaguguuuu

SEQ ID NO: 60546 - RNA, 20 nt, Artificial Sequence
  LRRK2 RNA guide
ucuuagcacuuaaaaaacac

SEQ ID NO: 60547 - RNA, 20 nt, Artificial Sequence
  LRRK2 RNA guide
uguuugcuguuuuaguguuu

SEQ ID NO: 60548 - RNA, 20 nt, Artificial Sequence
  LRRK2 RNA guide
uuguuugcuguuuuaguguu

SEQ ID NO: 60549 - RNA, 21 nt, Artificial Sequence
  LRRK2 RNA guide
aggucuuagcacuuaaaaaac

SEQ ID NO: 60550 - RNA, 21 nt, Artificial Sequence
  LRRK2 RNA guide
cacuaaaacagcaaacaauuc

SEQ ID NO: 60551 - RNA, 21 nt, Artificial Sequence
  LRRK2 RNA guide
gaauuguuugcuguuuuagug

SEQ ID NO: 60552 - RNA, 21 nt, Artificial Sequence
  LRRK2 RNA guide
gagaauuguuugcuguuuuag

SEQ ID NO: 60553 - RNA, 21 nt, Artificial Sequence
  LRRK2 RNA guide
ggucuuagcacuuaaaaaaca

SEQ ID NO: 60554 - RNA, 21 nt, Artificial Sequence
  LRRK2 RNA guide
gucuuagcacuuaaaaaacac

SEQ ID NO: 60555 - RNA, 21 nt, Artificial Sequence
  LRRK2 RNA guide
guguuuuuuaagugcuaagac

SEQ ID NO: 60556 - RNA, 22 nt, Artificial Sequence
  LRRK2 RNA guide
aaggucuuagcacuuaaaaaac

SEQ ID NO: 60557 - RNA, 22 nt, Artificial Sequence
  LRRK2 RNA guide
acacuaaaacagcaaacaauuc

SEQ ID NO: 60558 - RNA, 22 nt, Artificial Sequence
  LRRK2 RNA guide
agaauuguuugcuguuuuagug

SEQ ID NO: 60559 - RNA, 22 nt, Artificial Sequence
  LRRK2 RNA guide
agagaauuguuugcuguuuuag

SEQ ID NO: 60560 - RNA, 22 nt, Artificial Sequence
  LRRK2 RNA guide
aggucuuagcacuuaaaaaaca

SEQ ID NO: 60561 - RNA, 22 nt, Artificial Sequence
  LRRK2 RNA guide
aguguuuuuuaagugcuaagac

SEQ ID NO: 60562 - RNA, 22 nt, Artificial Sequence
  LRRK2 RNA guide
cacuaaaacagcaaacaauucu

SEQ ID NO: 60563 - RNA, 22 nt, Artificial Sequence
  LRRK2 RNA guide
gaauuguuugcuguuuuagugu

SEQ ID NO: 60564 - RNA, 22 nt, Artificial Sequence
  LRRK2 RNA guide
gagaauuguuugcuguuuuagu

SEQ ID NO: 60565 - RNA, 22 nt, Artificial Sequence
  LRRK2 RNA guide
ggucuuagcacuuaaaaaacac

SEQ ID NO: 60566 - RNA, 22 nt, Artificial Sequence
  LRRK2 RNA guide
guaaagagaauuguuugcuguu

SEQ ID NO: 60567 - RNA, 22 nt, Artificial Sequence
  LRRK2 RNA guide
gucuuagcacuuaaaaaacacu

SEQ ID NO: 60568 - RNA, 22 nt, Artificial Sequence
  LRRK2 RNA guide
guguuuuuuaagugcuaagacc

SEQ ID NO: 60569 - RNA, 20 nt, Artificial Sequence
  LRRK2 RNA guide
aaaaaacccuaaaacagcaa

SEQ ID NO: 60570 - RNA, 20 nt, Artificial Sequence
  LRRK2 RNA guide
aaaaacccuaaaacagcaaa

SEQ ID NO: 60571 - RNA, 20 nt, Artificial Sequence
  LRRK2 RNA guide
aaaacccuaaaacagcaaac

SEQ ID NO: 60572 - RNA, 20 nt, Artificial Sequence
  LRRK2 RNA guide
aaacccuaaaacagcaaaca

SEQ ID NO: 60573 - RNA, 20 nt, Artificial Sequence
  LRRK2 RNA guide
aacccuaaaacagcaaacaa

SEQ ID NO: 60574 - RNA, 20 nt, Artificial Sequence
  LRRK2 RNA guide
aauuguuugcuguuuuaggg

SEQ ID NO: 60575 - RNA, 20 nt, Artificial Sequence
  LRRK2 RNA guide
acccuaaaacagcaaacaau

SEQ ID NO: 60576 - RNA, 20 nt, Artificial Sequence
  LRRK2 RNA guide
agcacuuaaaaaacccuaaa

SEQ ID NO: 60577 - RNA, 20 nt, Artificial Sequence
  LRRK2 RNA guide
aggguuuuuuaagugcuaag

SEQ ID NO: 60578 - RNA, 20 nt, Artificial Sequence
  LRRK2 RNA guide
auuguuugcuguuuuagggu

SEQ ID NO: 60579 - RNA, 20 nt, Artificial Sequence
  LRRK2 RNA guide
cacuuaaaaaacccuaaaac

SEQ ID NO: 60580 - RNA, 20 nt, Artificial Sequence
  LRRK2 RNA guide
cccuaaaacagcaaacaauu

SEQ ID NO: 60581 - RNA, 20 nt, Artificial Sequence
  LRRK2 RNA guide
cuguuuuaggguuuuuuaag

SEQ ID NO: 60582 - RNA, 20 nt, Artificial Sequence
  LRRK2 RNA guide
cuuaaaaaacccuaaaacag

SEQ ID NO: 60583 - RNA, 20 nt, Artificial Sequence
  LRRK2 RNA guide
cuuagcacuuaaaaaacccu

SEQ ID NO: 60584 - RNA, 20 nt, Artificial Sequence
  LRRK2 RNA guide
gaauuguuugcuguuuuagg

SEQ ID NO: 60585 - RNA, 20 nt, Artificial Sequence
  LRRK2 RNA guide
gcacuuaaaaaacccuaaaa

SEQ ID NO: 60586 - RNA, 20 nt, Artificial Sequence
  LRRK2 RNA guide
gcuguuuuaggguuuuuuaa

SEQ ID NO: 60587 - RNA, 20 nt, Artificial Sequence
  LRRK2 RNA guide
ggguuuuuuaagugcuaaga

SEQ ID NO: 60588 - RNA, 20 nt, Artificial Sequence
  LRRK2 RNA guide
gucuuagcacuuaaaaaacc

SEQ ID NO: 60589 - RNA, 20 nt, Artificial Sequence
  LRRK2 RNA guide
guuugcuguuuuaggguuuu

SEQ ID NO: 60590 - RNA, 20 nt, Artificial Sequence
  LRRK2 RNA guide
guuuuaggguuuuuuaagug

SEQ ID NO: 60591 - RNA, 20 nt, Artificial Sequence
  LRRK2 RNA guide
uaaaaaacccuaaaacagca

SEQ ID NO: 60592 - RNA, 20 nt, Artificial Sequence
  LRRK2 RNA guide
uagcacuuaaaaaacccuaa

SEQ ID NO: 60593 - RNA, 20 nt, Artificial Sequence
  LRRK2 RNA guide
uaggguuuuuuaagugcuaa

SEQ ID NO: 60594 - RNA, 20 nt, Artificial Sequence
  LRRK2 RNA guide
ucuuagcacuuaaaaaaccc

SEQ ID NO: 60595 - RNA, 20 nt, Artificial Sequence
  LRRK2 RNA guide
ugcuguuuuaggguuuuuua

SEQ ID NO: 60596 - RNA, 20 nt, Artificial Sequence
  LRRK2 RNA guide
uguuugcuguuuuaggguuu

SEQ ID NO: 60597 - RNA, 20 nt, Artificial Sequence
  LRRK2 RNA guide
uuaaaaaacccuaaaacagc

SEQ ID NO: 60598 - RNA, 20 nt, Artificial Sequence
  LRRK2 RNA guide
uuagcacuuaaaaaacccua

SEQ ID NO: 60599 - RNA, 20 nt, Artificial Sequence
  LRRK2 RNA guide
uuaggguuuuuuaagugcua

SEQ ID NO: 60600 - RNA, 20 nt, Artificial Sequence
  LRRK2 RNA guide
uugcuguuuuaggguuuuuu

SEQ ID NO: 60601 - RNA, 20 nt, Artificial Sequence
  LRRK2 RNA guide
uuguuugcuguuuuaggguu

SEQ ID NO: 60602 - RNA, 20 nt, Artificial Sequence
  LRRK2 RNA guide
uuuaggguuuuuuaagugcu

SEQ ID NO: 60603 - RNA, 20 nt, Artificial Sequence
  LRRK2 RNA guide
uuugcuguuuuaggguuuuu

SEQ ID NO: 60604 - RNA, 20 nt, Artificial Sequence
  LRRK2 RNA guide
uuuuaggguuuuuuaagugc

SEQ ID NO: 60605 - RNA, 21 nt, Artificial Sequence
  LRRK2 RNA guide
aaaaacccuaaaacagcaaac

SEQ ID NO: 60606 - RNA, 21 nt, Artificial Sequence
  LRRK2 RNA guide
aaaacccuaaaacagcaaaca

SEQ ID NO: 60607 - RNA, 21 nt, Artificial Sequence
  LRRK2 RNA guide
aaacccuaaaacagcaaacaa

SEQ ID NO: 60608 - RNA, 21 nt, Artificial Sequence
  LRRK2 RNA guide
aacccuaaaacagcaaacaau

SEQ ID NO: 60609 - RNA, 21 nt, Artificial Sequence
  LRRK2 RNA guide
aauuguuugcuguuuuagggu

SEQ ID NO: 60610 - RNA, 21 nt, Artificial Sequence
  LRRK2 RNA guide
acccuaaaacagcaaacaauu

SEQ ID NO: 60611 - RNA, 21 nt, Artificial Sequence
  LRRK2 RNA guide
agaauuguuugcuguuuuagg

SEQ ID NO: 60612 - RNA, 21 nt, Artificial Sequence
  LRRK2 RNA guide
aggguuuuuuaagugcuaaga

SEQ ID NO: 60613 - RNA, 21 nt, Artificial Sequence
  LRRK2 RNA guide
auuguuugcuguuuuaggguu

SEQ ID NO: 60614 - RNA, 21 nt, Artificial Sequence
  LRRK2 RNA guide
cccuaaaacagcaaacaauuc

SEQ ID NO: 60615 - RNA, 21 nt, Artificial Sequence
  LRRK2 RNA guide
cuuaaaaaacccuaaaacagc

SEQ ID NO: 60616 - RNA, 21 nt, Artificial Sequence
  LRRK2 RNA guide
cuuagcacuuaaaaaacccua

SEQ ID NO: 60617 - RNA, 21 nt, Artificial Sequence
  LRRK2 RNA guide
gaauuguuugcuguuuuaggg

SEQ ID NO: 60618 - RNA, 21 nt, Artificial Sequence
  LRRK2 RNA guide
gcacuuaaaaaacccuaaaac

SEQ ID NO: 60619 - RNA, 21 nt, Artificial Sequence
  LRRK2 RNA guide
gcuguuuuaggguuuuuuaag

SEQ ID NO: 60620 - RNA, 21 nt, Artificial Sequence
  LRRK2 RNA guide
ggguuuuuuaagugcuaagac

SEQ ID NO: 60621 - RNA, 21 nt, Artificial Sequence
  LRRK2 RNA guide
ggucuuagcacuuaaaaaacc

SEQ ID NO: 60622 - RNA, 21 nt, Artificial Sequence
  LRRK2 RNA guide
gucuuagcacuuaaaaaaccc

SEQ ID NO: 60623 - RNA, 21 nt, Artificial Sequence
  LRRK2 RNA guide
guuugcuguuuuaggguuuuu

SEQ ID NO: 60624 - RNA, 21 nt, Artificial Sequence
  LRRK2 RNA guide
guuuuaggguuuuuuaagugc

SEQ ID NO: 60625 - RNA, 21 nt, Artificial Sequence
  LRRK2 RNA guide
uaggguuuuuuaagugcuaag
